United States Patent Application Publication US 2005/0244851 A1 - sequence listing, part 67

SEQ ID NO: 2604954 - DNA, 25 bp, Homo sapien
gaaacattgtcaacttattttccag

SEQ ID NO: 2604955 - DNA, 25 bp, Homo sapien
caacaggtatgatcttttttaggac

SEQ ID NO: 2604956 - DNA, 25 bp, Homo sapien
tattcctaaagtcatagctgcaaac

SEQ ID NO: 2604957 - DNA, 25 bp, Homo sapien
atattcctaaagtcatagctgcaaa

SEQ ID NO: 2604958 - DNA, 25 bp, Homo sapien
tatattcctaaagtcatagctgcaa

SEQ ID NO: 2604959 - DNA, 25 bp, Homo sapien
ttatattcctaaagtcatagctgca

SEQ ID NO: 2604960 - DNA, 25 bp, Homo sapien
ctgagctaggataggagtccaggtt

SEQ ID NO: 2604961 - DNA, 25 bp, Homo sapien
ctagtctgagctaggataggagtcc

SEQ ID NO: 2604962 - DNA, 25 bp, Homo sapien
ttttccacattagggtctgctctaa

SEQ ID NO: 2604963 - DNA, 25 bp, Homo sapien
ataaataggcctggagtagttttag

SEQ ID NO: 2604964 - DNA, 25 bp, Homo sapien
attgatagtttggtggtacaggttt

SEQ ID NO: 2604965 - DNA, 25 bp, Homo sapien
ctattgatagtttggtggtacaggt

SEQ ID NO: 2604966 - DNA, 25 bp, Homo sapien
tgatagtttggtggtacaggtttta

SEQ ID NO: 2604967 - DNA, 25 bp, Homo sapien
tattgatagtttggtggtacaggtt

SEQ ID NO: 2604968 - DNA, 25 bp, Homo sapien
cgtattatcgtttctgttcgggaga

SEQ ID NO: 2604969 - DNA, 25 bp, Homo sapien
gaggcttggaaagcaaatcgtatta

SEQ ID NO: 2604970 - DNA, 25 bp, Homo sapien
gggacatgcaatacacagaactgtg

SEQ ID NO: 2604971 - DNA, 25 bp, Homo sapien
ttggagtggccagtcccagtgaaca

SEQ ID NO: 2604972 - DNA, 25 bp, Homo sapien
caatccataccaagagggtggcaat

SEQ ID NO: 2604973 - DNA, 25 bp, Homo sapien
tacaatccataccaagagggtggca

SEQ ID NO: 2604974 - DNA, 25 bp, Homo sapien
ttacaatccataccaagagggtggc

SEQ ID NO: 2604975 - DNA, 25 bp, Homo sapien
aatccataccaagagggtggcaatg

SEQ ID NO: 2604976 - DNA, 25 bp, Homo sapien
ggaaccagcaatcactgtgctgcca

SEQ ID NO: 2604977 - DNA, 25 bp, Homo sapien
gctccaacatgtgttgcgcagataa

SEQ ID NO: 2604978 - DNA, 25 bp, Homo sapien
agcaatcactgtgctgccaggtttc

SEQ ID NO: 2604979 - DNA, 25 bp, Homo sapien
tgacccgttctggttaatggaacca

SEQ ID NO: 2604980 - DNA, 25 bp, Homo sapien
gaagcgtgccgcaatccaacgttct

SEQ ID NO: 2604981 - DNA, 25 bp, Homo sapien
gctcgatgtaactgcatcactattg

SEQ ID NO: 2604982 - DNA, 25 bp, Homo sapien
cgagaatccttaaatacgctcgatg

SEQ ID NO: 2604983 - DNA, 25 bp, Homo sapien
tatagcgacgatgaagaagcgtgcc

SEQ ID NO: 2604984 - DNA, 25 bp, Homo sapien
cacgttgtacaagttccacatccac

SEQ ID NO: 2604985 - DNA, 25 bp, Homo sapien
tgagggactcatctaccatagaatg

SEQ ID NO: 2604986 - DNA, 25 bp, Homo sapien
ttcaataacacgaccatccactgga

SEQ ID NO: 2604987 - DNA, 25 bp, Homo sapien
ctttaatgatatctccacgttgtac

SEQ ID NO: 2604988 - DNA, 25 bp, Homo sapien
gacaaaatggatagatgaagtatgg

SEQ ID NO: 2604989 - DNA, 25 bp, Homo sapien
aaagacagacaaaatggatagatga

SEQ ID NO: 2604990 - DNA, 25 bp, Homo sapien
gattatgtgaattcatgatagtcct

SEQ ID NO: 2604991 - DNA, 25 bp, Homo sapien
ttttatatctgggagacagattatg

SEQ ID NO: 2604992 - DNA, 25 bp, Homo sapien
gcttctgtagcttgtagtgaaatta

SEQ ID NO: 2604993 - DNA, 25 bp, Homo sapien
tctgtagcttgtagtgaaattaact

SEQ ID NO: 2604994 - DNA, 25 bp, Homo sapien
aatcaagagttacaatagttgcttc

SEQ ID NO: 2604995 - DNA, 25 bp, Homo sapien
tgaggaggatattatcagaatcaag

SEQ ID NO: 2604996 - DNA, 25 bp, Homo sapien
cccctgctggcaaaaactgttacaa

SEQ ID NO: 2604997 - DNA, 25 bp, Homo sapien
tgaaccagagaaatatttatgccct

SEQ ID NO: 2604998 - DNA, 25 bp, Homo sapien
ttacaacttgtaccatgaaccagag

SEQ ID NO: 2604999 - DNA, 25 bp, Homo sapien
catgaacccaataaacacacaggca

SEQ ID NO: 2605000 - DNA, 25 bp, Homo sapien
caatcagtacgtccatatttgctgt

SEQ ID NO: 2605001 - DNA, 25 bp, Homo sapien
tctctcatacattgcaactagaaga

SEQ ID NO: 2605002 - DNA, 25 bp, Homo sapien
tatgttccagccatcggcctagtgc

SEQ ID NO: 2605003 - DNA, 25 bp, Homo sapien
tagggttcactttggctctctcata

SEQ ID NO: 2605004 - DNA, 25 bp, Homo sapien
gcaaagtggtggtccataaccatca

SEQ ID NO: 2605005 - DNA, 25 bp, Homo sapien
cataacagacaatcctggaagaatc

SEQ ID NO: 2605006 - DNA, 25 bp, Homo sapien
gactcacaagaaaagaccgtctcca

SEQ ID NO: 2605007 - DNA, 25 bp, Homo sapien
atcagccccattacaggaatacaga

SEQ ID NO: 2605008 - DNA, 25 bp, Homo sapien
gtcttatttctcgtttatgatctaa

SEQ ID NO: 2605009 - DNA, 25 bp, Homo sapien
tctaagtgacttgctgaccgatcct

SEQ ID NO: 2605010 - DNA, 25 bp, Homo sapien
gctgaccgatccttcttgaccaaag

SEQ ID NO: 2605011 - DNA, 25 bp, Homo sapien
ctcgtttatgatctaagtgacttgc

SEQ ID NO: 2605012 - DNA, 25 bp, Homo sapien
ttaatatgtgctttgttggttgcca

SEQ ID NO: 2605013 - DNA, 25 bp, Homo sapien
tatctctaggaccaataatttctgg

SEQ ID NO: 2605014 - DNA, 25 bp, Homo sapien
tttatgtacgcaggaggcacacgtc

SEQ ID NO: 2605015 - DNA, 25 bp, Homo sapien
gccacggagcagtataggatccctc

SEQ ID NO: 2605016 - DNA, 25 bp, Homo sapien
gattataccttacttctgccttgcc

SEQ ID NO: 2605017 - DNA, 25 bp, Homo sapien
tcggatgaactctgctatcattggg

SEQ ID NO: 2605018 - DNA, 25 bp, Homo sapien
tcagggccacaagtatagaatatat

SEQ ID NO: 2605019 - DNA, 25 bp, Homo sapien
agtggctccaaatccaagttctcgg

SEQ ID NO: 2605020 - DNA, 25 bp, Homo sapien
tagttgaagtcaaaagcggcatttc

SEQ ID NO: 2605021 - DNA, 25 bp, Homo sapien
catgccagtgacctgtatgtaacac

SEQ ID NO: 2605022 - DNA, 25 bp, Homo sapien
cgatgaaggctgagctattactacc

SEQ ID NO: 2605023 - DNA, 25 bp, Homo sapien
tgctacacaggaagcgcaagtcatg

SEQ ID NO: 2605024 - DNA, 25 bp, Homo sapien
gactcctttgctgtgacccttctga

SEQ ID NO: 2605025 - DNA, 25 bp, Homo sapien
gatatgacaccctcaatagactgca

SEQ ID NO: 2605026 - DNA, 25 bp, Homo sapien
gatactaactctatatagccccggt

SEQ ID NO: 2605027 - DNA, 25 bp, Homo sapien
gaggctggctaactacattcaaagg

SEQ ID NO: 2605028 - DNA, 25 bp, Homo sapien
gaagggattattgtcactgctacag

SEQ ID NO: 2605029 - DNA, 25 bp, Homo sapien
tagtacatgaatggcaggtcatccc

SEQ ID NO: 2605030 - DNA, 25 bp, Homo sapien
tcatcaatagcttcctgtagggtct

SEQ ID NO: 2605031 - DNA, 25 bp, Homo sapien
caaagtcagtgacgccgtaacagtc

SEQ ID NO: 2605032 - DNA, 25 bp, Homo sapien
tttgcataaacccacaaagactgca

SEQ ID NO: 2605033 - DNA, 25 bp, Homo sapien
tcctgagagactagataaaataatc

SEQ ID NO: 2605034 - DNA, 25 bp, Homo sapien
gactgcatcttctattcttaggcaa

SEQ ID NO: 2605035 - DNA, 25 bp, Homo sapien
gcaatatgaaagctagaaccttaaa

SEQ ID NO: 2605036 - DNA, 25 bp, Homo sapien
accaataatcatctcattgactttg

SEQ ID NO: 2605037 - DNA, 25 bp, Homo sapien
tatccagtgagaaaccctatgctag

SEQ ID NO: 2605038 - DNA, 25 bp, Homo sapien
tacaagagatacctaacagccaaag

SEQ ID NO: 2605039 - DNA, 25 bp, Homo sapien
tccaaagcactagggttacatgcct

SEQ ID NO: 2605040 - DNA, 25 bp, Homo sapien
tgtgggtgaacagatggcaagaaac

SEQ ID NO: 2605041 - DNA, 25 bp, Homo sapien
caagttatggcctactaccaggcaa

SEQ ID NO: 2605042 - DNA, 25 bp, Homo sapien
ccagtgtgactgagctatatgacaa

SEQ ID NO: 2605043 - DNA, 25 bp, Homo sapien
gcccagcctgtagttcctttattaa

SEQ ID NO: 2605044 - DNA, 25 bp, Homo sapien
taccaggcaaacaatacttaaagca

SEQ ID NO: 2605045 - DNA, 25 bp, Homo sapien
tgcaaagtagttcagctccttcttc

SEQ ID NO: 2605046 - DNA, 25 bp, Homo sapien
tggcagattgactcctaccatggag

SEQ ID NO: 2605047 - DNA, 25 bp, Homo sapien
atcaaaaacccaccagccttctgtg

SEQ ID NO: 2605048 - DNA, 25 bp, Homo sapien
tctccaaggcctttgcaaagtagtt

SEQ ID NO: 2605049 - DNA, 25 bp, Homo sapien
gaggtgtgtaaaccctctcttcata

SEQ ID NO: 2605050 - DNA, 25 bp, Homo sapien
cctaggtcctagaatcatccacttg

SEQ ID NO: 2605051 - DNA, 25 bp, Homo sapien
cattcctgctgggtttcttgcatag

SEQ ID NO: 2605052 - DNA, 25 bp, Homo sapien
tcctatagctgtcatatagctcagg

SEQ ID NO: 2605053 - DNA, 25 bp, Homo sapien
cattatatcccgtacatatacacaa

SEQ ID NO: 2605054 - DNA, 25 bp, Homo sapien
tcagaacatcacattatatcccgta

SEQ ID NO: 2605055 - DNA, 25 bp, Homo sapien
caattattggcagggtacaatggct

SEQ ID NO: 2605056 - DNA, 25 bp, Homo sapien
ttatctatacatagatcagaacatc

SEQ ID NO: 2605057 - DNA, 25 bp, Homo sapien
caagatcacgccagcttggacgaca

SEQ ID NO: 2605058 - DNA, 25 bp, Homo sapien
tacactggacctaggcaaaaccact

SEQ ID NO: 2605059 - DNA, 25 bp, Homo sapien
tgtcagagcagttgggttttacccc

SEQ ID NO: 2605060 - DNA, 25 bp, Homo sapien
gagccccgctattggtataattcag

SEQ ID NO: 2605061 - DNA, 25 bp, Homo sapien
gccttgttctcctcactagcagtag

SEQ ID NO: 2605062 - DNA, 25 bp, Homo sapien
agtcagaaggcctaggttctagtcc

SEQ ID NO: 2605063 - DNA, 25 bp, Homo sapien
tcatattgggaaagatggcaaagct

SEQ ID NO: 2605064 - DNA, 25 bp, Homo sapien
taagaaagtccagtaacagagaaga

SEQ ID NO: 2605065 - DNA, 25 bp, Homo sapien
tgagaatggaagatgtgatgcacac

SEQ ID NO: 2605066 - DNA, 25 bp, Homo sapien
aatataggaatatagccagcatggg

SEQ ID NO: 2605067 - DNA, 25 bp, Homo sapien
cactaatcaactacagaacagcagg

SEQ ID NO: 2605068 - DNA, 25 bp, Homo sapien
tatgatctgagtacgaatataggaa

SEQ ID NO: 2605069 - DNA, 25 bp, Homo sapien
cacatgggtatgctctttatgcaga

SEQ ID NO: 2605070 - DNA, 25 bp, Homo sapien
tagatagataggtacacacatgggt

SEQ ID NO: 2605071 - DNA, 25 bp, Homo sapien
aaattgttcacttacgacatgggaa

SEQ ID NO: 2605072 - DNA, 25 bp, Homo sapien
gatcatgtgtaaacccctgtgctag

SEQ ID NO: 2605073 - DNA, 25 bp, Homo sapien
tcttagagattttgcctcccaggca

SEQ ID NO: 2605074 - DNA, 25 bp, Homo sapien
catcatgtcagggacggaggcacat

SEQ ID NO: 2605075 - DNA, 25 bp, Homo sapien
gaaacagtggcttcgagtctcaaaa

SEQ ID NO: 2605076 - DNA, 25 bp, Homo sapien
cacattggaaaagcatcagccactg

SEQ ID NO: 2605077 - DNA, 25 bp, Homo sapien
acagctagctgtacaccctgcctag

SEQ ID NO: 2605078 - DNA, 25 bp, Homo sapien
gcctagagggcatcaagtacaaatt

SEQ ID NO: 2605079 - DNA, 25 bp, Homo sapien
gactcctgcagggataactctaaca

SEQ ID NO: 2605080 - DNA, 25 bp, Homo sapien
tacaaattggataaaggagcactaa

SEQ ID NO: 2605081 - DNA, 25 bp, Homo sapien
gagacacttatgcttctagaagatt

SEQ ID NO: 2605082 - DNA, 25 bp, Homo sapien
gaaacactgttaatgccaaagacaa

SEQ ID NO: 2605083 - DNA, 25 bp, Homo sapien
gaagatttgggaatgaatcactgat

SEQ ID NO: 2605084 - DNA, 25 bp, Homo sapien
tcactgatgggtatacacagaaaat

SEQ ID NO: 2605085 - DNA, 25 bp, Homo sapien
tgtgacaaaactataccgagagaat

SEQ ID NO: 2605086 - DNA, 25 bp, Homo sapien
gaaatatatgtggaacagagccttc

SEQ ID NO: 2605087 - DNA, 25 bp, Homo sapien
tagcatactacatagctcagctgta

SEQ ID NO: 2605088 - DNA, 25 bp, Homo sapien
cctccatggtatgaaatagatttct

SEQ ID NO: 2605089 - DNA, 25 bp, Homo sapien
taaattatgatcatgtgtaactgat

SEQ ID NO: 2605090 - DNA, 25 bp, Homo sapien
tgtctgccataaagtaggcccttga

SEQ ID NO: 2605091 - DNA, 25 bp, Homo sapien
gttcctcaagattctattctcaccc

SEQ ID NO: 2605092 - DNA, 25 bp, Homo sapien
gcaatatagacatctgatccgttcc

SEQ ID NO: 2605093 - DNA, 25 bp, Homo sapien
tagaatgcacaatggtttagtcact

SEQ ID NO: 2605094 - DNA, 25 bp, Homo sapien
ttaagggttcctggcactgcatctc

SEQ ID NO: 2605095 - DNA, 25 bp, Homo sapien
gaatcttgacatggaaggttttagc

SEQ ID NO: 2605096 - DNA, 25 bp, Homo sapien
tcttggccactagctgaatcttgac

SEQ ID NO: 2605097 - DNA, 25 bp, Homo sapien
ggcaggaaagtactaaatattgctg

SEQ ID NO: 2605098 - DNA, 25 bp, Homo sapien
aaggcaggaaagtactaaatattgc

SEQ ID NO: 2605099 - DNA, 25 bp, Homo sapien
aggaaagtactaaatattgctgaga

SEQ ID NO: 2605100 - DNA, 25 bp, Homo sapien
tactaaatattgctgagagcatcca

SEQ ID NO: 2605101 - DNA, 25 bp, Homo sapien
tctcactgcacagtccacccttatc

SEQ ID NO: 2605102 - DNA, 25 bp, Homo sapien
ctctcactgcacagtccacccttat

SEQ ID NO: 2605103 - DNA, 25 bp, Homo sapien
ctcactgcacagtccacccttatcc

SEQ ID NO: 2605104 - DNA, 25 bp, Homo sapien
caggagctccaaactggcaccaccc

SEQ ID NO: 2605105 - DNA, 25 bp, Homo sapien
ccccagtgctcacatggctgacttt

SEQ ID NO: 2605106 - DNA, 25 bp, Homo sapien
ggctgactttatcctccgtgttcca

SEQ ID NO: 2605107 - DNA, 25 bp, Homo sapien
cgtgttccatttggcacagcaagtg

SEQ ID NO: 2605108 - DNA, 25 bp, Homo sapien
aaactgtaaggcagtgtgctcccca

SEQ ID NO: 2605109 - DNA, 25 bp, Homo sapien
ggtattagctttgtataggaccgct

SEQ ID NO: 2605110 - DNA, 25 bp, Homo sapien
taaagagacatagaagaagttctcc

SEQ ID NO: 2605111 - DNA, 25 bp, Homo sapien
tccccaacccaaaaggtagctgata

SEQ ID NO: 2605112 - DNA, 25 bp, Homo sapien
gcccctagaagtggctttcaccacc

SEQ ID NO: 2605113 - DNA, 25 bp, Homo sapien
tagaagtggctttcaccacctcatc

SEQ ID NO: 2605114 - DNA, 25 bp, Homo sapien
agaagtggctttcaccacctcatcc

SEQ ID NO: 2605115 - DNA, 25 bp, Homo sapien
cctagaagtggctttcaccacctca

SEQ ID NO: 2605116 - DNA, 25 bp, Homo sapien
tccctatctctatagttcttagcca

SEQ ID NO: 2605117 - DNA, 25 bp, Homo sapien
ccctatctctatagttcttagccat

SEQ ID NO: 2605118 - DNA, 25 bp, Homo sapien
atccctatctctatagttcttagcc

SEQ ID NO: 2605119 - DNA, 25 bp, Homo sapien
ggtgttcccacatatgcctgttaca

SEQ ID NO: 2605120 - DNA, 25 bp, Homo sapien
ttcttcagagcacacgtctagccct

SEQ ID NO: 2605121 - DNA, 25 bp, Homo sapien
tacgcatctttccttttgagtagag

SEQ ID NO: 2605122 - DNA, 25 bp, Homo sapien
gtctagccctcagcaagacagttgt

SEQ ID NO: 2605123 - DNA, 25 bp, Homo sapien
cagtgtaacttatacatggcctaaa

SEQ ID NO: 2605124 - DNA, 25 bp, Homo sapien
gctcagttagaaaaggactccctgg

SEQ ID NO: 2605125 - DNA, 25 bp, Homo sapien
ctgcttgagtatggtgttaactacc

SEQ ID NO: 2605126 - DNA, 25 bp, Homo sapien
tcttttaaggtgacccatctgtgat

SEQ ID NO: 2605127 - DNA, 25 bp, Homo sapien
cttgaactcaggagatggaggtttc

SEQ ID NO: 2605128 - DNA, 25 bp, Homo sapien
acttgaactcaggagatggaggttt

SEQ ID NO: 2605129 - DNA, 25 bp, Homo sapien
tttcagtgagccaagatcacaccac

SEQ ID NO: 2605130 - DNA, 25 bp, Homo sapien
gaactcaggagatggaggtttcagt

SEQ ID NO: 2605131 - DNA, 25 bp, Homo sapien
gatttgtacagattgaccacgggaa

SEQ ID NO: 2605132 - DNA, 25 bp, Homo sapien
gagacttgtatgaagatgccctgat

SEQ ID NO: 2605133 - DNA, 25 bp, Homo sapien
aaagatactatgactgccacctgcc

SEQ ID NO: 2605134 - DNA, 25 bp, Homo sapien
taaccctgccatgtggtttgcagaa

SEQ ID NO: 2605135 - DNA, 25 bp, Homo sapien
accaccttgtatttgttctttcatg

SEQ ID NO: 2605136 - DNA, 25 bp, Homo sapien
ctgtattggtacatctccactgaca

SEQ ID NO: 2605137 - DNA, 25 bp, Homo sapien
tgacaccaccttgtatttgttcttt

SEQ ID NO: 2605138 - DNA, 25 bp, Homo sapien
ggtacatctccactgacaccacctt

SEQ ID NO: 2605139 - DNA, 25 bp, Homo sapien
atacagctgaatagagtatgactca

SEQ ID NO: 2605140 - DNA, 25 bp, Homo sapien
aatacagctgaatagagtatgactc

SEQ ID NO: 2605141 - DNA, 25 bp, Homo sapien
tacagctgaatagagtatgactcat

SEQ ID NO: 2605142 - DNA, 25 bp, Homo sapien
ttggcatcaatcaccccaacaaaaa

SEQ ID NO: 2605143 - DNA, 25 bp, Homo sapien
tggcatcaatcaccccaacaaaaaa

SEQ ID NO: 2605144 - DNA, 25 bp, Homo sapien
gcatcaatcaccccaacaaaaaacg

SEQ ID NO: 2605145 - DNA, 25 bp, Homo sapien
catcaatcaccccaacaaaaaacga

SEQ ID NO: 2605146 - DNA, 25 bp, Homo sapien
taagccaataatctaaatatgttta

SEQ ID NO: 2605147 - DNA, 25 bp, Homo sapien
aagccaataatctaaatatgtttac

SEQ ID NO: 2605148 - DNA, 25 bp, Homo sapien
ttaagccaataatctaaatatgttt

SEQ ID NO: 2605149 - DNA, 25 bp, Homo sapien
catagtaaaatgacgctccacctgc

SEQ ID NO: 2605150 - DNA, 25 bp, Homo sapien
caactcgaaaagacagtgactgctt

SEQ ID NO: 2605151 - DNA, 25 bp, Homo sapien
taagtctggctcaaaagtataaagt

SEQ ID NO: 2605152 - DNA, 25 bp, Homo sapien
ctttggcagcatgggagtatccctc

SEQ ID NO: 2605153 - DNA, 25 bp, Homo sapien
tagtttgtccaaagcgataaactct

SEQ ID NO: 2605154 - DNA, 25 bp, Homo sapien
gaacctatatacataaacaggctta

SEQ ID NO: 2605155 - DNA, 25 bp, Homo sapien
caagaagcgtcgaatataattactc

SEQ ID NO: 2605156 - DNA, 25 bp, Homo sapien
tctggatgtcataagatggattcca

SEQ ID NO: 2605157 - DNA, 25 bp, Homo sapien
tagtagaaatgataaataatcgtcc

SEQ ID NO: 2605158 - DNA, 25 bp, Homo sapien
ctttagtagaaatgataaataatcg

SEQ ID NO: 2605159 - DNA, 25 bp, Homo sapien
agtagaaatgataaataatcgtcct

SEQ ID NO: 2605160 - DNA, 25 bp, Homo sapien
ttagtagaaatgataaataatcgtc

SEQ ID NO: 2605161 - DNA, 25 bp, Homo sapien
tcaggatgataatacatatgcccag

SEQ ID NO: 2605162 - DNA, 25 bp, Homo sapien
actatcaagagttcagagaattcat

SEQ ID NO: 2605163 - DNA, 25 bp, Homo sapien
cctgaaagtctatattgtattgggt

SEQ ID NO: 2605164 - DNA, 25 bp, Homo sapien
gagaattcatttcttacttactgaa

SEQ ID NO: 2605165 - DNA, 25 bp, Homo sapien
tgcctgtgcttgtggtaaattacta

SEQ ID NO: 2605166 - DNA, 25 bp, Homo sapien
tatactgggaaaacgaatgaggaaa

SEQ ID NO: 2605167 - DNA, 25 bp, Homo sapien
cacagtattcaagtggcttacaaat

SEQ ID NO: 2605168 - DNA, 25 bp, Homo sapien
gccaggatttacaatatttctacag

SEQ ID NO: 2605169 - DNA, 25 bp, Homo sapien
tgaagaccatgtagggaaacaatac

SEQ ID NO: 2605170 - DNA, 25 bp, Homo sapien
cctagattggttgctgaagaactcc

SEQ ID NO: 2605171 - DNA, 25 bp, Homo sapien
gttataacaaggcactaccagggtg

SEQ ID NO: 2605172 - DNA, 25 bp, Homo sapien
cagacaagtctgatttcacaaggtc

SEQ ID NO: 2605173 - DNA, 25 bp, Homo sapien
gttactggatgtcgggcaactttcc

SEQ ID NO: 2605174 - DNA, 25 bp, Homo sapien
tgtgttactggatgtcgggcaactt

SEQ ID NO: 2605175 - DNA, 25 bp, Homo sapien
tggatgtcgggcaactttccagacc

SEQ ID NO: 2605176 - DNA, 25 bp, Homo sapien
agtgtgttactggatgtcgggcaac

SEQ ID NO: 2605177 - DNA, 25 bp, Homo sapien
aagacttagaacagcgtccggcaca

SEQ ID NO: 2605178 - DNA, 25 bp, Homo sapien
tccatcctagctgttgtcaagtccc

SEQ ID NO: 2605179 - DNA, 25 bp, Homo sapien
tgtagaacaaaactaatcacaggac

SEQ ID NO: 2605180 - DNA, 25 bp, Homo sapien
taacagtaaaaagagggagaggctc

SEQ ID NO: 2605181 - DNA, 25 bp, Homo sapien
tctagcactctatgtaataagcaaa

SEQ ID NO: 2605182 - DNA, 25 bp, Homo sapien
tatgccatgacagcatacttctagc

SEQ ID NO: 2605183 - DNA, 25 bp, Homo sapien
tttacttcaatatcgctcagggttg

SEQ ID NO: 2605184 - DNA, 25 bp, Homo sapien
cagtggtacaatatggttactaaac

SEQ ID NO: 2605185 - DNA, 25 bp, Homo sapien
tagtcttcagacaggctacgagttt

SEQ ID NO: 2605186 - DNA, 25 bp, Homo sapien
gatgaatatgccaaaacagccaagg

SEQ ID NO: 2605187 - DNA, 25 bp, Homo sapien
cactccgcccttgggtctggtgaca

SEQ ID NO: 2605188 - DNA, 25 bp, Homo sapien
tcaaaggtgatctgcaatagttcca

SEQ ID NO: 2605189 - DNA, 25 bp, Homo sapien
tataggccaaacctgattgctgtcc

SEQ ID NO: 2605190 - DNA, 25 bp, Homo sapien
tgtcagttacgtgtttaaaccagag

SEQ ID NO: 2605191 - DNA, 25 bp, Homo sapien
actctctcggagactatttcttgaa

SEQ ID NO: 2605192 - DNA, 25 bp, Homo sapien
tggctactagccacctggaatatga

SEQ ID NO: 2605193 - DNA, 25 bp, Homo sapien
tgtttgtcggtacaggtcaagccca

SEQ ID NO: 2605194 - DNA, 25 bp, Homo sapien
tactacttgtaaagcctggaaatgc

SEQ ID NO: 2605195 - DNA, 25 bp, Homo sapien
ttttggcactgttccctggttgacg

SEQ ID NO: 2605196 - DNA, 25 bp, Homo sapien
aaaggccatgattttccagagggag

SEQ ID NO: 2605197 - DNA, 25 bp, Homo sapien
ctgtgttttgattcattgcaagtcg

SEQ ID NO: 2605198 - DNA, 25 bp, Homo sapien
tctgcaccaatgtattcaacttgct

SEQ ID NO: 2605199 - DNA, 25 bp, Homo sapien
aagtcgtggaggagaacttgtttct

SEQ ID NO: 2605200 - DNA, 25 bp, Homo sapien
gagtgtgcaaggaagtcatgaagct

SEQ ID NO: 2605201 - DNA, 25 bp, Homo sapien
taagcacagtggcttaggcatgaga

SEQ ID NO: 2605202 - DNA, 25 bp, Homo sapien
taaactgtcataggtgtctgtgggc

SEQ ID NO: 2605203 - DNA, 25 bp, Homo sapien
ccaggtcttagtctttgtgaggatc

SEQ ID NO: 2605204 - DNA, 25 bp, Homo sapien
aattcttgtgaaataccttccaggt

SEQ ID NO: 2605205 - DNA, 25 bp, Homo sapien
acttgtaagtaaagcaggtatgaac

SEQ ID NO: 2605206 - DNA, 25 bp, Homo sapien
cacttcagtgagtagtaaacttgta

SEQ ID NO: 2605207 - DNA, 25 bp, Homo sapien
tctgtttgataaggacacatgttag

SEQ ID NO: 2605208 - DNA, 25 bp, Homo sapien
cacatgttaggaggttttcaacact

SEQ ID NO: 2605209 - DNA, 25 bp, Homo sapien
ttatctgagcgtggtagtgcacctg

SEQ ID NO: 2605210 - DNA, 25 bp, Homo sapien
gatgctaaagtctaccagttgggag

SEQ ID NO: 2605211 - DNA, 25 bp, Homo sapien
tgttcagccagacaacaagtgagag

SEQ ID NO: 2605212 - DNA, 25 bp, Homo sapien
cagttgggagttctttataggcacc

SEQ ID NO: 2605213 - DNA, 25 bp, Homo sapien
atctccacagcagggcagcggttac

SEQ ID NO: 2605214 - DNA, 25 bp, Homo sapien
tatctccacagcagggcagcggtta

SEQ ID NO: 2605215 - DNA, 25 bp, Homo sapien
ctatctccacagcagggcagcggtt

SEQ ID NO: 2605216 - DNA, 25 bp, Homo sapien
tatatcacacgtgacaaaaaggata

SEQ ID NO: 2605217 - DNA, 25 bp, Homo sapien
caaatatatcacacgtgacaaaaag

SEQ ID NO: 2605218 - DNA, 25 bp, Homo sapien
aatatatcacacgtgacaaaaagga

SEQ ID NO: 2605219 - DNA, 25 bp, Homo sapien
atatcacacgtgacaaaaaggataa

SEQ ID NO: 2605220 - DNA, 25 bp, Homo sapien
gtcacaatcctgatgcaaatcctgt

SEQ ID NO: 2605221 - DNA, 25 bp, Homo sapien
tgcccaagagtccaacgataccgcg

SEQ ID NO: 2605222 - DNA, 25 bp, Homo sapien
acaatcctgatgcaaatcctgtgcc

SEQ ID NO: 2605223 - DNA, 25 bp, Homo sapien
tatgtcacaatcctgatgcaaatcc

SEQ ID NO: 2605224 - DNA, 25 bp, Homo sapien
gatgtgggccgtttctcatttggct

SEQ ID NO: 2605225 - DNA, 25 bp, Homo sapien
tctactcctgaagttaaatcaacat

SEQ ID NO: 2605226 - DNA, 25 bp, Homo sapien
tgtgagatgtgggccgtttctcatt

SEQ ID NO: 2605227 - DNA, 25 bp, Homo sapien
gggtctactcctgaagttaaatcaa

SEQ ID NO: 2605228 - DNA, 25 bp, Homo sapien
agcttgtccagcgtcagcttgttag

SEQ ID NO: 2605229 - DNA, 25 bp, Homo sapien
ttccctttaacgtccagcttgtcca

SEQ ID NO: 2605230 - DNA, 25 bp, Homo sapien
cttgtccagcgtcagcttgttagaa

SEQ ID NO: 2605231 - DNA, 25 bp, Homo sapien
taacgtccagcttgtccagcgtcag

SEQ ID NO: 2605232 - DNA, 25 bp, Homo sapien
acagcccatcgcggtcggcgcgctg

SEQ ID NO: 2605233 - DNA, 25 bp, Homo sapien
ccttcccggccgctgctctcggcgc

SEQ ID NO: 2605234 - DNA, 25 bp, Homo sapien
tccctggcgctgtccgtctgcgagg

SEQ ID NO: 2605235 - DNA, 25 bp, Homo sapien
tctcggcgcgccctgctgagcagcc

SEQ ID NO: 2605236 - DNA, 25 bp, Homo sapien
gcccacaagggtagcggcgaagatc

SEQ ID NO: 2605237 - DNA, 25 bp, Homo sapien
cgaagatccgggtgacgctgcgaac

SEQ ID NO: 2605238 - DNA, 25 bp, Homo sapien
gtcggcgccgctgcgtttcccggaa

SEQ ID NO: 2605239 - DNA, 25 bp, Homo sapien
tgaagaatgtgcgagacccagggtc

SEQ ID NO: 2605240 - DNA, 25 bp, Homo sapien
catggttaactctatcacttttgct

SEQ ID NO: 2605241 - DNA, 25 bp, Homo sapien
aagtgcatggttaactctatcactt

SEQ ID NO: 2605242 - DNA, 25 bp, Homo sapien
tgcctgggtgcaaaacctatggaaa

SEQ ID NO: 2605243 - DNA, 25 bp, Homo sapien
atccttgcctgggtgcaaaacctat

SEQ ID NO: 2605244 - DNA, 25 bp, Homo sapien
tgaagagagggtcaactctgccact

SEQ ID NO: 2605245 - DNA, 25 bp, Homo sapien
aagggcactggatatgggcctcgaa

SEQ ID NO: 2605246 - DNA, 25 bp, Homo sapien
cacagctgacaagagatgcctgtca

SEQ ID NO: 2605247 - DNA, 25 bp, Homo sapien
gatatgggcctcgaatctgcagctt

SEQ ID NO: 2605248 - DNA, 25 bp, Homo sapien
cctcgggtgatctgctcccctcagc

SEQ ID NO: 2605249 - DNA, 25 bp, Homo sapien
gacctcgggtgatctgctcccctca

SEQ ID NO: 2605250 - DNA, 25 bp, Homo sapien
acctcgggtgatctgctcccctcag

SEQ ID NO: 2605251 - DNA, 25 bp, Homo sapien
gccaaggcctcgaccttctgagatg

SEQ ID NO: 2605252 - DNA, 25 bp, Homo sapien
tcccaatatcacctctgtgagggtt

SEQ ID NO: 2605253 - DNA, 25 bp, Homo sapien
ctagaactggctacaatcaagcatt

SEQ ID NO: 2605254 - DNA, 25 bp, Homo sapien
gctcagacagatctgtggactcaaa

SEQ ID NO: 2605255 - DNA, 25 bp, Homo sapien
tacaggggcagagccattatgcaga

SEQ ID NO: 2605256 - DNA, 25 bp, Homo sapien
actgggacactgcatagtgaagcta

SEQ ID NO: 2605257 - DNA, 25 bp, Homo sapien
agatccactgacaacttccactctg

SEQ ID NO: 2605258 - DNA, 25 bp, Homo sapien
gaaaaatccctattgtccaggcaga

SEQ ID NO: 2605259 - DNA, 25 bp, Homo sapien
tgaggggtgggcccatagctttcat

SEQ ID NO: 2605260 - DNA, 25 bp, Homo sapien
aaaggtctatggctcaaaaacagct

SEQ ID NO: 2605261 - DNA, 25 bp, Homo sapien
aggtctatggctcaaaaacagctta

SEQ ID NO: 2605262 - DNA, 25 bp, Homo sapien
gggtgggcccatagctttcatcata

SEQ ID NO: 2605263 - DNA, 25 bp, Homo sapien
tccagttattcttatgtagcaagcc

SEQ ID NO: 2605264 - DNA, 25 bp, Homo sapien
catggaagacgaagttgatgactgt

SEQ ID NO: 2605265 - DNA, 25 bp, Homo sapien
tgatgactgttcattactggcatca

SEQ ID NO: 2605266 - DNA, 25 bp, Homo sapien
gagatctgggcatcaataatcatgg

SEQ ID NO: 2605267 - DNA, 25 bp, Homo sapien
gcaggtacccaaggtttcagtgtcc

SEQ ID NO: 2605268 - DNA, 25 bp, Homo sapien
cctggcacaacctggaaatctatgc

SEQ ID NO: 2605269 - DNA, 25 bp, Homo sapien
cctggaaatctatgcaggtacccaa

SEQ ID NO: 2605270 - DNA, 25 bp, Homo sapien
tctatgcaggtacccaaggtttcag

SEQ ID NO: 2605271 - DNA, 25 bp, Homo sapien
atttgggttatggctgtttcctaga

SEQ ID NO: 2605272 - DNA, 25 bp, Homo sapien
tatttgggttatggctgtttcctag

SEQ ID NO: 2605273 - DNA, 25 bp, Homo sapien
gctgtttcctagagggtgtttcact

SEQ ID NO: 2605274 - DNA, 25 bp, Homo sapien
ggctgtttcctagagggtgtttcac

SEQ ID NO: 2605275 - DNA, 25 bp, Homo sapien
caagattttatggtgtgatattctg

SEQ ID NO: 2605276 - DNA, 25 bp, Homo sapien
ccaagattttatggtgtgatattct

SEQ ID NO: 2605277 - DNA, 25 bp, Homo sapien
gtcttatcaaataccactaccttta

SEQ ID NO: 2605278 - DNA, 25 bp, Homo sapien
agaacctttacttgattcaccactg

SEQ ID NO: 2605279 - DNA, 25 bp, Homo sapien
accactggggttccgtgagtaatgg

SEQ ID NO: 2605280 - DNA, 25 bp, Homo sapien
tgagtaatggttccagtcttatcaa

SEQ ID NO: 2605281 - DNA, 25 bp, Homo sapien
gctcaagcaacctttcccactgtgg

SEQ ID NO: 2605282 - DNA, 25 bp, Homo sapien
ccaggtagctatgaccacaggctca

SEQ ID NO: 2605283 - DNA, 25 bp, Homo sapien
tcacacattgttatctgttgcagag

SEQ ID NO: 2605284 - DNA, 25 bp, Homo sapien
atgcccagcctgcatgaacttttta

SEQ ID NO: 2605285 - DNA, 25 bp, Homo sapien
tctgtatgattccagttttagtata

SEQ ID NO: 2605286 - DNA, 25 bp, Homo sapien
tatgattccagttttagtatatatg

SEQ ID NO: 2605287 - DNA, 25 bp, Homo sapien
tgtatgattccagttttagtatata

SEQ ID NO: 2605288 - DNA, 25 bp, Homo sapien
atgattccagttttagtatatatgc

SEQ ID NO: 2605289 - DNA, 25 bp, Homo sapien
catgcgtgccttgtactcgtagacg

SEQ ID NO: 2605290 - DNA, 25 bp, Homo sapien
cgtgccttgtactcgtagacgctca

SEQ ID NO: 2605291 - DNA, 25 bp, Homo sapien
tgcagcatgcgtgccttgtactcgt

SEQ ID NO: 2605292 - DNA, 25 bp, Homo sapien
gtcttggagtgcagcatgcgtgcct

SEQ ID NO: 2605293 - DNA, 25 bp, Homo sapien
ccagtcttcgaggaacacgggctgc

SEQ ID NO: 2605294 - DNA, 25 bp, Homo sapien
tccggctcgaagatgtagtactcca

SEQ ID NO: 2605295 - DNA, 25 bp, Homo sapien
gaaatacggcgtggtcagccagaca

SEQ ID NO: 2605296 - DNA, 25 bp, Homo sapien
ttttccagcgcataggcccagtctt

SEQ ID NO: 2605297 - DNA, 25 bp, Homo sapien
gatcctatattggtatgaggaatgg

SEQ ID NO: 2605298 - DNA, 25 bp, Homo sapien
acagttatgctcagatgaacactgg

SEQ ID NO: 2605299 - DNA, 25 bp, Homo sapien
gtacagttatgctcagatgaacact

SEQ ID NO: 2605300 - DNA, 25 bp, Homo sapien
cctcagaggtcaaggagctgatcct

SEQ ID NO: 2605301 - DNA, 25 bp, Homo sapien
gctgcaatcagtacacgtttcccct

SEQ ID NO: 2605302 - DNA, 25 bp, Homo sapien
ggctgcaatcagtacacgtttcccc

SEQ ID NO: 2605303 - DNA, 25 bp, Homo sapien
gcaatagtatccttcggactctcat

SEQ ID NO: 2605304 - DNA, 25 bp, Homo sapien
aatagtatccttcggactctcatag

SEQ ID NO: 2605305 - DNA, 25 bp, Homo sapien
tagtatccttcggactctcatagga

SEQ ID NO: 2605306 - DNA, 25 bp, Homo sapien
tatccttcggactctcataggaggg

SEQ ID NO: 2605307 - DNA, 25 bp, Homo sapien
ttagacccccatagtgccgctcatt

SEQ ID NO: 2605308 - DNA, 25 bp, Homo sapien
ttctgctttattgagaccggttaga

SEQ ID NO: 2605309 - DNA, 25 bp, Homo sapien
cgccaagtcctcaccactggcagcc

SEQ ID NO: 2605310 - DNA, 25 bp, Homo sapien
tgagaccggttagacccccatagtg

SEQ ID NO: 2605311 - DNA, 25 bp, Homo sapien
cccgccgcgcttcgcctcctcgtgg

SEQ ID NO: 2605312 - DNA, 25 bp, Homo sapien
ccgcgcttcgcctcctcgtggcccg

SEQ ID NO: 2605313 - DNA, 25 bp, Homo sapien
gccgcgcttcgcctcctcgtggccc

SEQ ID NO: 2605314 - DNA, 25 bp, Homo sapien
cctgtgtttggaccattgagcagca

SEQ ID NO: 2605315 - DNA, 25 bp, Homo sapien
gtttgtttctttgctggtgaggagc

SEQ ID NO: 2605316 - DNA, 25 bp, Homo sapien
ctgtccaggtttgtttctttgctgg

SEQ ID NO: 2605317 - DNA, 25 bp, Homo sapien
tgttggcctgggtatcaacagtgga

SEQ ID NO: 2605318 - DNA, 25 bp, Homo sapien
attctctgtccaggtttgtttcttt

SEQ ID NO: 2605319 - DNA, 25 bp, Homo sapien
cagcggtgtcgctttgtttccgcgg

SEQ ID NO: 2605320 - DNA, 25 bp, Homo sapien
tgagcctcggcccaacaaaatggcg

SEQ ID NO: 2605321 - DNA, 25 bp, Homo sapien
ttccgtagccaataagactctgtgc

SEQ ID NO: 2605322 - DNA, 25 bp, Homo sapien
agaaagagggaggacgcgccaattc

SEQ ID NO: 2605323 - DNA, 25 bp, Homo sapien
ggtggcagtggtagcggcctttgag

SEQ ID NO: 2605324 - DNA, 25 bp, Homo sapien
ctgcggcggtggcagtggtagcggc

SEQ ID NO: 2605325 - DNA, 25 bp, Homo sapien
gcggtggcagtggtagcggcctttg

SEQ ID NO: 2605326 - DNA, 25 bp, Homo sapien
cggcggtggcagtggtagcggcctt

SEQ ID NO: 2605327 - DNA, 25 bp, Homo sapien
tcatgggccccagcggtctgggccc

SEQ ID NO: 2605328 - DNA, 25 bp, Homo sapien
gggccccagcggtctgggcccaggc

SEQ ID NO: 2605329 - DNA, 25 bp, Homo sapien
gccccagcggtctgggcccaggcac

SEQ ID NO: 2605330 - DNA, 25 bp, Homo sapien
tgggccccagcggtctgggcccagg

SEQ ID NO: 2605331 - DNA, 25 bp, Homo sapien
gtgtgttgcttagccgaaagaggca

SEQ ID NO: 2605332 - DNA, 25 bp, Homo sapien
cgttcgcttggtgggttaggcctgt

SEQ ID NO: 2605333 - DNA, 25 bp, Homo sapien
agaggcatcgttttctctttaggtg

SEQ ID NO: 2605334 - DNA, 25 bp, Homo sapien
tctgagtcgggtgtttgggaaggcg

SEQ ID NO: 2605335 - DNA, 25 bp, Homo sapien
aagtgagtttagaaagatcacagaa

SEQ ID NO: 2605336 - DNA, 25 bp, Homo sapien
aatactcttaaaacttataagtgag

SEQ ID NO: 2605337 - DNA, 25 bp, Homo sapien
caaaaccaacaaactaagatcagta

SEQ ID NO: 2605338 - DNA, 25 bp, Homo sapien
aaaaatcggttgtatgagcaatggg

SEQ ID NO: 2605339 - DNA, 25 bp, Homo sapien
gatacctggtagcaaaggagaacca

SEQ ID NO: 2605340 - DNA, 25 bp, Homo sapien
gcagagtaggttagaagtttagcat

SEQ ID NO: 2605341 - DNA, 25 bp, Homo sapien
caggtatccctggaattgggcttcc

SEQ ID NO: 2605342 - DNA, 25 bp, Homo sapien
cacctggtcccaaaggtatgttgga

SEQ ID NO: 2605343 - DNA, 25 bp, Homo sapien
taagactggtcaagtgcagtaacga

SEQ ID NO: 2605344 - DNA, 25 bp, Homo sapien
gagttcaatctataactgaacaatc

SEQ ID NO: 2605345 - DNA, 25 bp, Homo sapien
agtgcagtaacgagaagggaggaaa

SEQ ID NO: 2605346 - DNA, 25 bp, Homo sapien
tcaatctataactgaacaatcaatt

SEQ ID NO: 2605347 - DNA, 25 bp, Homo sapien
tttctttcaaatggccaatgggcag

SEQ ID NO: 2605348 - DNA, 25 bp, Homo sapien
aagccagaagtctgccagatgtttc

SEQ ID NO: 2605349 - DNA, 25 bp, Homo sapien
acagtttatcttcgcagtggtttga

SEQ ID NO: 2605350 - DNA, 25 bp, Homo sapien
acttgattgtacaaagggagatcct

SEQ ID NO: 2605351 - DNA, 25 bp, Homo sapien
tactaatcctgctgtatcccgggtt

SEQ ID NO: 2605352 - DNA, 25 bp, Homo sapien
gtgaacagccttttagctcaaaatg

SEQ ID NO: 2605353 - DNA, 25 bp, Homo sapien
tataaaggtgttaagcttattttgc

SEQ ID NO: 2605354 - DNA, 25 bp, Homo sapien
atattttgcccagttactaaaatgg

SEQ ID NO: 2605355 - DNA, 25 bp, Homo sapien
gatctctttatagtagccatgggca

SEQ ID NO: 2605356 - DNA, 25 bp, Homo sapien
tgcaaaattaggctagaccagtacc

SEQ ID NO: 2605357 - DNA, 25 bp, Homo sapien
tatcagctgggcaaagacacaaggg

SEQ ID NO: 2605358 - DNA, 25 bp, Homo sapien
gacagcatctttgcacgtgcgtgca

SEQ ID NO: 2605359 - DNA, 25 bp, Homo sapien
ggagagtcgaactgattatcacgtc

SEQ ID NO: 2605360 - DNA, 25 bp, Homo sapien
tcttttgggagagtcgaactgatta

SEQ ID NO: 2605361 - DNA, 25 bp, Homo sapien
gagtcgaactgattatcacgtctgg

SEQ ID NO: 2605362 - DNA, 25 bp, Homo sapien
gaactgattatcacgtctggcaaaa

SEQ ID NO: 2605363 - DNA, 25 bp, Homo sapien
tcgttgtcagaatcttctctctccg

SEQ ID NO: 2605364 - DNA, 25 bp, Homo sapien
gtcgtcgttgtcagaatcttctctc

SEQ ID NO: 2605365 - DNA, 25 bp, Homo sapien
tgtcgtcgtcgttgtcagaatcttc

SEQ ID NO: 2605366 - DNA, 25 bp, Homo sapien
gtgagtgtcgtcgtcgttgtcagaa

SEQ ID NO: 2605367 - DNA, 25 bp, Homo sapien
ggcagaggcggagtcaaatccagca

SEQ ID NO: 2605368 - DNA, 25 bp, Homo sapien
cagcactcagaaaatgggtcgacca

SEQ ID NO: 2605369 - DNA, 25 bp, Homo sapien
gcaattatgccccacgaatctggta

SEQ ID NO: 2605370 - DNA, 25 bp, Homo sapien
cattggcacgtatgggtcatcctca

SEQ ID NO: 2605371 - DNA, 25 bp, Homo sapien
ttgctttgagttaatttgccaaaat

SEQ ID NO: 2605372 - DNA, 25 bp, Homo sapien
cttgctttgagttaatttgccaaaa

SEQ ID NO: 2605373 - DNA, 25 bp, Homo sapien
tgctttgagttaatttgccaaaata

SEQ ID NO: 2605374 - DNA, 25 bp, Homo sapien
ttacgaagcgcctggtgaaaagcat

SEQ ID NO: 2605375 - DNA, 25 bp, Homo sapien
catctttatagaagggtggctccgc

SEQ ID NO: 2605376 - DNA, 25 bp, Homo sapien
aatactgctccgagtgtccacagcg

SEQ ID NO: 2605377 - DNA, 25 bp, Homo sapien
cttcagaagacaggcgagctccatt

SEQ ID NO: 2605378 - DNA, 25 bp, Homo sapien
cacgcgccgcggtggaatgagcggg

SEQ ID NO: 2605379 - DNA, 25 bp, Homo sapien
tggctcacggaaaagcactggtata

SEQ ID NO: 2605380 - DNA, 25 bp, Homo sapien
actggtatagggtgatcacgcgccg

SEQ ID NO: 2605381 - DNA, 25 bp, Homo sapien
cgcggcgcggacactgtgccggaac

SEQ ID NO: 2605382 - DNA, 25 bp, Homo sapien
caggtagccgcgtttgcagacttcc

SEQ ID NO: 2605383 - DNA, 25 bp, Homo sapien
gtttgagcacgaagtagcgcctgtg

SEQ ID NO: 2605384 - DNA, 25 bp, Homo sapien
cgtcagcagtctcgagtttgagcac

SEQ ID NO: 2605385 - DNA, 25 bp, Homo sapien
tttcgtagtattccagccgagctgg

SEQ ID NO: 2605386 - DNA, 25 bp, Homo sapien
cacagtaaatggattggttaggctc

SEQ ID NO: 2605387 - DNA, 25 bp, Homo sapien
tagccttgccgatgaatagtacttg

SEQ ID NO: 2605388 - DNA, 25 bp, Homo sapien
tcactgtgcgcttatagatatagcc

SEQ ID NO: 2605389 - DNA, 25 bp, Homo sapien
catcaatcatgaggataacacagta

SEQ ID NO: 2605390 - DNA, 25 bp, Homo sapien
cttcacagtcatccgtcaggccaat

SEQ ID NO: 2605391 - DNA, 25 bp, Homo sapien
ccattcgttcatttcttcacagtca

SEQ ID NO: 2605392 - DNA, 25 bp, Homo sapien
cagtcatccgtcaggccaatgggta

SEQ ID NO: 2605393 - DNA, 25 bp, Homo sapien
tccattcgttcatttcttcacagtc

SEQ ID NO: 2605394 - DNA, 25 bp, Homo sapien
ttctcctctcggtgagttcttttct

SEQ ID NO: 2605395 - DNA, 25 bp, Homo sapien
tcctctcggtgagttcttttcttca

SEQ ID NO: 2605396 - DNA, 25 bp, Homo sapien
ttccgttctcctctcggtgagttct

SEQ ID NO: 2605397 - DNA, 25 bp, Homo sapien
ccgttctcctctcggtgagttcttt

SEQ ID NO: 2605398 - DNA, 25 bp, Homo sapien
gcagtgggctcaacacagataatca

SEQ ID NO: 2605399 - DNA, 25 bp, Homo sapien
tcttcaggcaccgatgttgtctttg

SEQ ID NO: 2605400 - DNA, 25 bp, Homo sapien
tgtgcggttggtccccactgactgg

SEQ ID NO: 2605401 - DNA, 25 bp, Homo sapien
tgtctttgatctgggactctgcacc

SEQ ID NO: 2605402 - DNA, 25 bp, Homo sapien
gggaccccgtcttggtcctcactgc

SEQ ID NO: 2605403 - DNA, 25 bp, Homo sapien
tgacacgacccaggggtgcaaggca

SEQ ID NO: 2605404 - DNA, 25 bp, Homo sapien
acccaggggtgcaaggcagacagca

SEQ ID NO: 2605405 - DNA, 25 bp, Homo sapien
cacgacccaggggtgcaaggcagac

SEQ ID NO: 2605406 - DNA, 25 bp, Homo sapien
acacgacccaggggtgcaaggcaga

SEQ ID NO: 2605407 - DNA, 25 bp, Homo sapien
tcagatggccgggagaggccttcct

SEQ ID NO: 2605408 - DNA, 25 bp, Homo sapien
gaatccgagtgtcacacgtggccca

SEQ ID NO: 2605409 - DNA, 25 bp, Homo sapien
tataaatggtaacagggccgatggc

SEQ ID NO: 2605410 - DNA, 25 bp, Homo sapien
cgtggcccacctgtgaagttcctgg

SEQ ID NO: 2605411 - DNA, 25 bp, Homo sapien
taacaagcattaccccgaatctcgc

SEQ ID NO: 2605412 - DNA, 25 bp, Homo sapien
cagcctggtgacaaggctatgggac

SEQ ID NO: 2605413 - DNA, 25 bp, Homo sapien
ggacactgccgcgtaacaagcatta

SEQ ID NO: 2605414 - DNA, 25 bp, Homo sapien
aaggctatgggacactgccgcgtaa

SEQ ID NO: 2605415 - DNA, 25 bp, Homo sapien
tctgaccagtcgcttgggtatgtgt

SEQ ID NO: 2605416 - DNA, 25 bp, Homo sapien
gaaagagtaacacttctcggcatcc

SEQ ID NO: 2605417 - DNA, 25 bp, Homo sapien
ggcatccaagccttctatggtgacg

SEQ ID NO: 2605418 - DNA, 25 bp, Homo sapien
cttctatggtgacgttgcaggtatt

SEQ ID NO: 2605419 - DNA, 25 bp, Homo sapien
acgtcaccgtcactgcatcctgatg

SEQ ID NO: 2605420 - DNA, 25 bp, Homo sapien
taggacaggtcagaacacgtcaccg

SEQ ID NO: 2605421 - DNA, 25 bp, Homo sapien
tcctgatgccacgaaaatctcacgt

SEQ ID NO: 2605422 - DNA, 25 bp, Homo sapien
tgaacctcatagaggagatccccgt

SEQ ID NO: 2605423 - DNA, 25 bp, Homo sapien
tcctggagaaggtagttggtgcact

SEQ ID NO: 2605424 - DNA, 25 bp, Homo sapien
catccagcgacttgcggtgaaaacg

SEQ ID NO: 2605425 - DNA, 25 bp, Homo sapien
gaaatagagaatgtcgtctcgctgc

SEQ ID NO: 2605426 - DNA, 25 bp, Homo sapien
gtctaggaggcaccccgaagtgtga

SEQ ID NO: 2605427 - DNA, 25 bp, Homo sapien
tagatgatctgaatctgtactcctt

SEQ ID NO: 2605428 - DNA, 25 bp, Homo sapien
ccatgtcacctgcacggtttctaaa

SEQ ID NO: 2605429 - DNA, 25 bp, Homo sapien
ttctaaattgaagtagatgatctga

SEQ ID NO: 2605430 - DNA, 25 bp, Homo sapien
cacctgcacggtttctaaattgaag

SEQ ID NO: 2605431 - DNA, 25 bp, Homo sapien
agcagaaagacggcagctccccaca

SEQ ID NO: 2605432 - DNA, 25 bp, Homo sapien
ttgaagtccctatggtataagtcca

SEQ ID NO: 2605433 - DNA, 25 bp, Homo sapien
cagttgaagtccctatggtataagt

SEQ ID NO: 2605434 - DNA, 25 bp, Homo sapien
gttgaagtccctatggtataagtcc

SEQ ID NO: 2605435 - DNA, 25 bp, Homo sapien
agttgaagtccctatggtataagtc

SEQ ID NO: 2605436 - DNA, 25 bp, Homo sapien
tgtcctttggtattcatcaaagtta

SEQ ID NO: 2605437 - DNA, 25 bp, Homo sapien
cagcatgggggggtctttatattca

SEQ ID NO: 2605438 - DNA, 25 bp, Homo sapien
ggtattcatcaaagttaccacagca

SEQ ID NO: 2605439 - DNA, 25 bp, Homo sapien
ggtctttatattcaggttttgccca

SEQ ID NO: 2605440 - DNA, 25 bp, Homo sapien
tggcgagacagcttgactccagccc

SEQ ID NO: 2605441 - DNA, 25 bp, Homo sapien
gtctccaagtgctgcgggatacaga

SEQ ID NO: 2605442 - DNA, 25 bp, Homo sapien
gctggcgagacagcttgactccagc

SEQ ID NO: 2605443 - DNA, 25 bp, Homo sapien
tccaagtgctgcgggatacagagag

SEQ ID NO: 2605444 - DNA, 25 bp, Homo sapien
caagacctcatagcaagggaaccag

SEQ ID NO: 2605445 - DNA, 25 bp, Homo sapien
actgcaaagttggtcgtatttccac

SEQ ID NO: 2605446 - DNA, 25 bp, Homo sapien
ttcccatgtacccaaactgcaaagt

SEQ ID NO: 2605447 - DNA, 25 bp, Homo sapien
cagggaacattgctctggacaccaa

SEQ ID NO: 2605448 - DNA, 25 bp, Homo sapien
tcctgcaagggtcatcacatctctg

SEQ ID NO: 2605449 - DNA, 25 bp, Homo sapien
cttcttatggattggtgctaagcac

SEQ ID NO: 2605450 - DNA, 25 bp, Homo sapien
ttcttatggattggtgctaagcacc

SEQ ID NO: 2605451 - DNA, 25 bp, Homo sapien
tcttatggattggtgctaagcacct

SEQ ID NO: 2605452 - DNA, 25 bp, Homo sapien
ttatggattggtgctaagcacctgc

SEQ ID NO: 2605453 - DNA, 25 bp, Homo sapien
aaaagcggacatttgacatttcagt

SEQ ID NO: 2605454 - DNA, 25 bp, Homo sapien
aaaaagcggacatttgacatttcag

SEQ ID NO: 2605455 - DNA, 25 bp, Homo sapien
ggaaaaagcggacatttgacatttc

SEQ ID NO: 2605456 - DNA, 25 bp, Homo sapien
aggggaaaaagcggacatttgacat

SEQ ID NO: 2605457 - DNA, 25 bp, Homo sapien
aaaggtacagaaggagcttctcctt

SEQ ID NO: 2605458 - DNA, 25 bp, Homo sapien
ctgcaggcgtccagcatgagtttgc

SEQ ID NO: 2605459 - DNA, 25 bp, Homo sapien
tgcccggctggagaaacaccagact

SEQ ID NO: 2605460 - DNA, 25 bp, Homo sapien
gggctgcccggctggagaaacacca

SEQ ID NO: 2605461 - DNA, 25 bp, Homo sapien
gcagttctggcatgatagggttaga

SEQ ID NO: 2605462 - DNA, 25 bp, Homo sapien
tagggttagaattcaccttcgcatg

SEQ ID NO: 2605463 - DNA, 25 bp, Homo sapien
cccagcttgcaatttgagcttctgt

SEQ ID NO: 2605464 - DNA, 25 bp, Homo sapien
ttggacattcgcagtctctgtggtc

SEQ ID NO: 2605465 - DNA, 25 bp, Homo sapien
ctctgtgagtctcaagcttctgttg

SEQ ID NO: 2605466 - DNA, 25 bp, Homo sapien
atgaaaatttgactatggcactgac

SEQ ID NO: 2605467 - DNA, 25 bp, Homo sapien
atttgactatggcactgacaagccc

SEQ ID NO: 2605468 - DNA, 25 bp, Homo sapien
tcctctgtgagtctcaagcttctgt

SEQ ID NO: 2605469 - DNA, 25 bp, Homo sapien
cctgtcctgtaaggggcagcaattc

SEQ ID NO: 2605470 - DNA, 25 bp, Homo sapien
ttggtcacaattggagtcctcctgt

SEQ ID NO: 2605471 - DNA, 25 bp, Homo sapien
taaggatcgggttcctaatggccaa

SEQ ID NO: 2605472 - DNA, 25 bp, Homo sapien
aggaaaaggcacattctggtggtga

SEQ ID NO: 2605473 - DNA, 25 bp, Homo sapien
catccgtcactttgaagcgagtcag

SEQ ID NO: 2605474 - DNA, 25 bp, Homo sapien
tctccatatgggtttcatccgtcac

SEQ ID NO: 2605475 - DNA, 25 bp, Homo sapien
tctctcaggtgtaaacactctgtct

SEQ ID NO: 2605476 - DNA, 25 bp, Homo sapien
tctggtagcagcaggtcactgcagg

SEQ ID NO: 2605477 - DNA, 25 bp, Homo sapien
caagggatcttttcccgtgactcaa

SEQ ID NO: 2605478 - DNA, 25 bp, Homo sapien
tcaacatgagcttaggtagggacaa

SEQ ID NO: 2605479 - DNA, 25 bp, Homo sapien
gagtgtcctggattcataacaaccc

SEQ ID NO: 2605480 - DNA, 25 bp, Homo sapien
cctgtgctgcaccaaacctagtgag

SEQ ID NO: 2605481 - DNA, 25 bp, Homo sapien
tgttctttgcacaaccactccaagg

SEQ ID NO: 2605482 - DNA, 25 bp, Homo sapien
tacatgcaatggaggcttgaaaaca

SEQ ID NO: 2605483 - DNA, 25 bp, Homo sapien
caaaggaagccagtcgaatgacagc

SEQ ID NO: 2605484 - DNA, 25 bp, Homo sapien
aacctcgtggagcttggatagttcc

SEQ ID NO: 2605485 - DNA, 25 bp, Homo sapien
tactgaatggtgcaaaaggttcaga

SEQ ID NO: 2605486 - DNA, 25 bp, Homo sapien
ttactgaatggtgcaaaaggttcag

SEQ ID NO: 2605487 - DNA, 25 bp, Homo sapien
gtctcaggatatcgttcttaaaatg

SEQ ID NO: 2605488 - DNA, 25 bp, Homo sapien
tgtgggtcatctaatgatacagtcc

SEQ ID NO: 2605489 - DNA, 25 bp, Homo sapien
tcgctgtgaataggtgtatgatacc

SEQ ID NO: 2605490 - DNA, 25 bp, Homo sapien
tgttctgacatcttactcgctgtga

SEQ ID NO: 2605491 - DNA, 25 bp, Homo sapien
gggatgcagcgcagagtccactggg

SEQ ID NO: 2605492 - DNA, 25 bp, Homo sapien
ttttgactttgagaccttgtaggat

SEQ ID NO: 2605493 - DNA, 25 bp, Homo sapien
cgggaggcgggaaactcgctgtact

SEQ ID NO: 2605494 - DNA, 25 bp, Homo sapien
tatgtgttggatctctaacgggagg

SEQ ID NO: 2605495 - DNA, 25 bp, Homo sapien
ttattttctgtgataattgacttac

SEQ ID NO: 2605496 - DNA, 25 bp, Homo sapien
cttttattttctgtgataattgact

SEQ ID NO: 2605497 - DNA, 25 bp, Homo sapien
tcttttattttctgtgataattgac

SEQ ID NO: 2605498 - DNA, 25 bp, Homo sapien
gttcttttattttctgtgataattg

SEQ ID NO: 2605499 - DNA, 25 bp, Homo sapien
gaagatcatggtagatttcagattc

SEQ ID NO: 2605500 - DNA, 25 bp, Homo sapien
ccattgtgtttggctacatgtgaag

SEQ ID NO: 2605501 - DNA, 25 bp, Homo sapien
aaggatcttcaattctctaaaacag

SEQ ID NO: 2605502 - DNA, 25 bp, Homo sapien
gccttcacagcactcttaaatgact

SEQ ID NO: 2605503 - DNA, 25 bp, Homo sapien
gaactcaaaccgtatgtggtcgcca

SEQ ID NO: 2605504 - DNA, 25 bp, Homo sapien
aagaaagaattcatcgggacgttga

SEQ ID NO: 2605505 - DNA, 25 bp, Homo sapien
gttgacagctagaactcaaaccgta

SEQ ID NO: 2605506 - DNA, 25 bp, Homo sapien
tcatcgggacgttgacagctagaac

SEQ ID NO: 2605507 - DNA, 25 bp, Homo sapien
tggagacgctgtgatagtgagtaac

SEQ ID NO: 2605508 - DNA, 25 bp, Homo sapien
tgttatcacagttgtcatcgacttc

SEQ ID NO: 2605509 - DNA, 25 bp, Homo sapien
cattgggcaatctgttaactaatgg

SEQ ID NO: 2605510 - DNA, 25 bp, Homo sapien
tccactgttcatctcttggagacgc

SEQ ID NO: 2605511 - DNA, 25 bp, Homo sapien
ttgtatctgcagttaaataattctt

SEQ ID NO: 2605512 - DNA, 25 bp, Homo sapien
aaaattgttgaattgcccttaatat

SEQ ID NO: 2605513 - DNA, 25 bp, Homo sapien
tatttcatctattgcaatgccacac

SEQ ID NO: 2605514 - DNA, 25 bp, Homo sapien
gtaacaattgtatctgcagttaaat

SEQ ID NO: 2605515 - DNA, 25 bp, Homo sapien
aacccagcagaattgctgactgctg

SEQ ID NO: 2605516 - DNA, 25 bp, Homo sapien
gagagattaaatgtgtgagacctgg

SEQ ID NO: 2605517 - DNA, 25 bp, Homo sapien
cagtgggatgatcacgactcgactt

SEQ ID NO: 2605518 - DNA, 25 bp, Homo sapien
gacctataggtcttatgagctcaga

SEQ ID NO: 2605519 - DNA, 25 bp, Homo sapien
tcatatcctcagcaaaggcttggtg

SEQ ID NO: 2605520 - DNA, 25 bp, Homo sapien
tccaggaaagacactaaaggagagg

SEQ ID NO: 2605521 - DNA, 25 bp, Homo sapien
cttggtgtgaaatccggaactgggt

SEQ ID NO: 2605522 - DNA, 25 bp, Homo sapien
ttactctcatatcctcagcaaaggc

SEQ ID NO: 2605523 - DNA, 25 bp, Homo sapien
tctgacctggacacctaagagttcc

SEQ ID NO: 2605524 - DNA, 25 bp, Homo sapien
taagagttccctgcagaatggctga

SEQ ID NO: 2605525 - DNA, 25 bp, Homo sapien
tattaacaacgtgcatgagtgtggt

SEQ ID NO: 2605526 - DNA, 25 bp, Homo sapien
ggcagtttgagtagagcctctgacc

SEQ ID NO: 2605527 - DNA, 25 bp, Homo sapien
tgtctccaaggatcaattgcaaaca

SEQ ID NO: 2605528 - DNA, 25 bp, Homo sapien
gcttggaagcttcgcagatgtcgct

SEQ ID NO: 2605529 - DNA, 25 bp, Homo sapien
caaggatcaattgcaaacacaatga

SEQ ID NO: 2605530 - DNA, 25 bp, Homo sapien
ggatgcctttgaaggatacttgtga

SEQ ID NO: 2605531 - DNA, 25 bp, Homo sapien
caaggaatctttggctacactgagc

SEQ ID NO: 2605532 - DNA, 25 bp, Homo sapien
gatggctttcacagatagacatagg

SEQ ID NO: 2605533 - DNA, 25 bp, Homo sapien
tccagccctagagattgcttgcaag

SEQ ID NO: 2605534 - DNA, 25 bp, Homo sapien
tattgagctcgaattctgcggtgga

SEQ ID NO: 2605535 - DNA, 25 bp, Homo sapien
tacactgctggacagctcaatgctc

SEQ ID NO: 2605536 - DNA, 25 bp, Homo sapien
tcagaggagaagtccacttgccttc

SEQ ID NO: 2605537 - DNA, 25 bp, Homo sapien
aaggttgaccttcatgtctcgcagg

SEQ ID NO: 2605538 - DNA, 25 bp, Homo sapien
tcaacaacaggtcgggacacacaga

SEQ ID NO: 2605539 - DNA, 25 bp, Homo sapien
cacgtggctgccctttactgagcac

SEQ ID NO: 2605540 - DNA, 25 bp, Homo sapien
tctgtgaagttgctgccacgtggct

SEQ ID NO: 2605541 - DNA, 25 bp, Homo sapien
aataaggcaacttgtttctgctgag

SEQ ID NO: 2605542 - DNA, 25 bp, Homo sapien
tactgagcaccagtactgttgtgtg

SEQ ID NO: 2605543 - DNA, 25 bp, Homo sapien
aaagagatatctgcctttgcatgtt

SEQ ID NO: 2605544 - DNA, 25 bp, Homo sapien
caaaaactatggacaataatatgga

SEQ ID NO: 2605545 - DNA, 25 bp, Homo sapien
attagtacaaaaactatggacaata

SEQ ID NO: 2605546 - DNA, 25 bp, Homo sapien
aattagtacaaaaactatggacaat

SEQ ID NO: 2605547 - DNA, 25 bp, Homo sapien
gaagcccgtcagaataatagcagat

SEQ ID NO: 2605548 - DNA, 25 bp, Homo sapien
gtcagaataatagcagatctcttgg

SEQ ID NO: 2605549 - DNA, 25 bp, Homo sapien
agattcaccaagttgaaattaagga

SEQ ID NO: 2605550 - DNA, 25 bp, Homo sapien
caagccagaattgagtggggtccaa

SEQ ID NO: 2605551 - DNA, 25 bp, Homo sapien
tcacgtaggtttgactgaagaccag

SEQ ID NO: 2605552 - DNA, 25 bp, Homo sapien
gggagcataattactcacgtaggtt

SEQ ID NO: 2605553 - DNA, 25 bp, Homo sapien
gatgaaggggacatctagctagcca

SEQ ID NO: 2605554 - DNA, 25 bp, Homo sapien
atcagcccaatccaccctggtgaca

SEQ ID NO: 2605555 - DNA, 25 bp, Homo sapien
ctgtgtgatgccttccaggagtatc

SEQ ID NO: 2605556 - DNA, 25 bp, Homo sapien
ccgaggacagaggtacatggtgtta

SEQ ID NO: 2605557 - DNA, 25 bp, Homo sapien
tgacctgagatgcagactggatcta

SEQ ID NO: 2605558 - DNA, 25 bp, Homo sapien
caggagtatctgcaccacgggcagt

SEQ ID NO: 2605559 - DNA, 25 bp, Homo sapien
gacttctggtccatactaacactgg

SEQ ID NO: 2605560 - DNA, 25 bp, Homo sapien
catagcatctcttgcggtgagaccc

SEQ ID NO: 2605561 - DNA, 25 bp, Homo sapien
tatctggtggtcatgatgggccctg

SEQ ID NO: 2605562 - DNA, 25 bp, Homo sapien
tcttccaatgggtacaaaggcggca

SEQ ID NO: 2605563 - DNA, 25 bp, Homo sapien
gaagtctccagaatctgccggcaga

SEQ ID NO: 2605564 - DNA, 25 bp, Homo sapien
tcccttgtcctgagtacattgcacg

SEQ ID NO: 2605565 - DNA, 25 bp, Homo sapien
gtacattgcacgcttgataaatggg

SEQ ID NO: 2605566 - DNA, 25 bp, Homo sapien
aatctgccggcagaatttcccttgt

SEQ ID NO: 2605567 - DNA, 25 bp, Homo sapien
ttactgaagctccgtgcggcgcggg

SEQ ID NO: 2605568 - DNA, 25 bp, Homo sapien
gcagagcgcgggaggattccccaca

SEQ ID NO: 2605569 - DNA, 25 bp, Homo sapien
ccggcagcgtgcgagcgggcaggga

SEQ ID NO: 2605570 - DNA, 25 bp, Homo sapien
agggaggacccgacccaggcagagc

SEQ ID NO: 2605571 - DNA, 25 bp, Homo sapien
aacagcatccacagcgccgccaagc

SEQ ID NO: 2605572 - DNA, 25 bp, Homo sapien
aagccccgccatccgcgcgcgcggg

SEQ ID NO: 2605573 - DNA, 25 bp, Homo sapien
ctgctcggccacctgcgccaacagc

SEQ ID NO: 2605574 - DNA, 25 bp, Homo sapien
ggccacctgcgccaacagcatccac

SEQ ID NO: 2605575 - DNA, 25 bp, Homo sapien
aacagcggcgacatcgcggtgagac

SEQ ID NO: 2605576 - DNA, 25 bp, Homo sapien
ctgcggaaaacagcggcgacatcgc

SEQ ID NO: 2605577 - DNA, 25 bp, Homo sapien
cggtttccgcgctggtgggagcgcc

SEQ ID NO: 2605578 - DNA, 25 bp, Homo sapien
cagctgtccggacccgcggtttccg

SEQ ID NO: 2605579 - DNA, 25 bp, Homo sapien
tgcgggtcccatggcgcacgcaggt

SEQ ID NO: 2605580 - DNA, 25 bp, Homo sapien
gaggacgcgggacgctcgggctccc

SEQ ID NO: 2605581 - DNA, 25 bp, Homo sapien
ccgctccgcgggtggaggaggacgc

SEQ ID NO: 2605582 - DNA, 25 bp, Homo sapien
ggacgcgggacgctcgggctcccag

SEQ ID NO: 2605583 - DNA, 25 bp, Homo sapien
cactgagaataagcaacgatagagg

SEQ ID NO: 2605584 - DNA, 25 bp, Homo sapien
ttggtattgagatgctaagcgcttc

SEQ ID NO: 2605585 - DNA, 25 bp, Homo sapien
gatggtgtcacaatcagctgattag

SEQ ID NO: 2605586 - DNA, 25 bp, Homo sapien
gaagtacgccctgattgttggagca

SEQ ID NO: 2605587 - DNA, 25 bp, Homo sapien
gaattaacttttagtattgtaagca

SEQ ID NO: 2605588 - DNA, 25 bp, Homo sapien
ctgaaatcaaaagagtgagcagagg

SEQ ID NO: 2605589 - DNA, 25 bp, Homo sapien
caaaagagtgagcagaggctgagtc

SEQ ID NO: 2605590 - DNA, 25 bp, Homo sapien
atcaaaagagtgagcagaggctgag

SEQ ID NO: 2605591 - DNA, 25 bp, Homo sapien
aaagagtgagcagaggctgagtcat

SEQ ID NO: 2605592 - DNA, 25 bp, Homo sapien
tgtggtcaacctcgtaggcagagac

SEQ ID NO: 2605593 - DNA, 25 bp, Homo sapien
tcttctccgccgctgatggtgcatg

SEQ ID NO: 2605594 - DNA, 25 bp, Homo sapien
tgggacacgtaatcgcccctgtggt

SEQ ID NO: 2605595 - DNA, 25 bp, Homo sapien
tcagccgaaggtgaagagactcaac

SEQ ID NO: 2605596 - DNA, 25 bp, Homo sapien
caacgtctgcacaataaagccagga

SEQ ID NO: 2605597 - DNA, 25 bp, Homo sapien
aagccttggcaggttgaaagggcca

SEQ ID NO: 2605598 - DNA, 25 bp, Homo sapien
tcctctggcggtaaagtctgcacag

SEQ ID NO: 2605599 - DNA, 25 bp, Homo sapien
tctgtgtgatcgcaaagagccttga

SEQ ID NO: 2605600 - DNA, 25 bp, Homo sapien
ctgtaaattctccacgagcattttt

SEQ ID NO: 2605601 - DNA, 25 bp, Homo sapien
tggcttggccacattaaatggaaat

SEQ ID NO: 2605602 - DNA, 25 bp, Homo sapien
tgctgttggaactattgctgttatg

SEQ ID NO: 2605603 - DNA, 25 bp, Homo sapien
aaattctccacgagcatttttggct

SEQ ID NO: 2605604 - DNA, 25 bp, Homo sapien
attaatgtccacgtagtgaagccct

SEQ ID NO: 2605605 - DNA, 25 bp, Homo sapien
tgtacagtgtgaactgcaggcctgg

SEQ ID NO: 2605606 - DNA, 25 bp, Homo sapien
cctggatgagtccagacatttgtac

SEQ ID NO: 2605607 - DNA, 25 bp, Homo sapien
tccacgtagtgaagccctgcatggg

SEQ ID NO: 2605608 - DNA, 25 bp, Homo sapien
aagtggccttaggaagtaatctgcc

SEQ ID NO: 2605609 - DNA, 25 bp, Homo sapien
tggatctcttgtacagtacgtggga

SEQ ID NO: 2605610 - DNA, 25 bp, Homo sapien
cagtcccaggcgaaggtcgctgctg

SEQ ID NO: 2605611 - DNA, 25 bp, Homo sapien
ggcagctctgccgagtttccatgag

SEQ ID NO: 2605612 - DNA, 25 bp, Homo sapien
ggcccaggagtgtagtactatcacc

SEQ ID NO: 2605613 - DNA, 25 bp, Homo sapien
gctccagtaggaagcagcgctgttg

SEQ ID NO: 2605614 - DNA, 25 bp, Homo sapien
tatcgatgcacagatggcacagggc

SEQ ID NO: 2605615 - DNA, 25 bp, Homo sapien
gtgcataggtgacacgaggccctgc

SEQ ID NO: 2605616 - DNA, 25 bp, Homo sapien
caagacttatactcatctggcaaga

SEQ ID NO: 2605617 - DNA, 25 bp, Homo sapien
gcatcatctttttgtcgaccaccac

SEQ ID NO: 2605618 - DNA, 25 bp, Homo sapien
catgttgagtatcgtgagcacgtag

SEQ ID NO: 2605619 - DNA, 25 bp, Homo sapien
cagaagagagcgcttatgccgtaag

SEQ ID NO: 2605620 - DNA, 25 bp, Homo sapien
ctacaattgcaatgttgatgtttcc

SEQ ID NO: 2605621 - DNA, 25 bp, Homo sapien
tacaattgcaatgttgatgtttcct

SEQ ID NO: 2605622 - DNA, 25 bp, Homo sapien
ttccatctttgaataaagcagatac

SEQ ID NO: 2605623 - DNA, 25 bp, Homo sapien
cctacaattgcaatgttgatgtttc

SEQ ID NO: 2605624 - DNA, 25 bp, Homo sapien
ggaacatatatccagaccagtcagt

SEQ ID NO: 2605625 - DNA, 25 bp, Homo sapien
gggctcattcttccaggaacatata

SEQ ID NO: 2605626 - DNA, 25 bp, Homo sapien
taagatggcgtggtcatgacgagtc

SEQ ID NO: 2605627 - DNA, 25 bp, Homo sapien
cgtggtgacttatcaccagtcctgg

SEQ ID NO: 2605628 - DNA, 25 bp, Homo sapien
tggtgaaggccagtccaagacctgt

SEQ ID NO: 2605629 - DNA, 25 bp, Homo sapien
ttgtgtccagactcatgggcaatgg

SEQ ID NO: 2605630 - DNA, 25 bp, Homo sapien
tgcagctgcgatatttactacacat

SEQ ID NO: 2605631 - DNA, 25 bp, Homo sapien
tatcttcattaatcgtgcagctgcg

SEQ ID NO: 2605632 - DNA, 25 bp, Homo sapien
gcgtcactcattccccgactccatt

SEQ ID NO: 2605633 - DNA, 25 bp, Homo sapien
ctgttgcttgctcacgccctgcgtc

SEQ ID NO: 2605634 - DNA, 25 bp, Homo sapien
tgctgaatattccacatagtctccc

SEQ ID NO: 2605635 - DNA, 25 bp, Homo sapien
cgactccattcatacacatttgctg

SEQ ID NO: 2605636 - DNA, 25 bp, Homo sapien
ggacatgatgttgccctcggacttt

SEQ ID NO: 2605637 - DNA, 25 bp, Homo sapien
ccaatgtaggggacatgatgttgcc

SEQ ID NO: 2605638 - DNA, 25 bp, Homo sapien
tcggactttttgcacatgttccctt

SEQ ID NO: 2605639 - DNA, 25 bp, Homo sapien
cctcggactttttgcacatgttccc

SEQ ID NO: 2605640 - DNA, 25 bp, Homo sapien
aaatttgtgtagatactggcggctg

SEQ ID NO: 2605641 - DNA, 25 bp, Homo sapien
gaaatttgtgtagatactggcggct

SEQ ID NO: 2605642 - DNA, 25 bp, Homo sapien
tagaaatttgtgtagatactggcgg

SEQ ID NO: 2605643 - DNA, 25 bp, Homo sapien
cttagaaatttgtgtagatactggc

SEQ ID NO: 2605644 - DNA, 25 bp, Homo sapien
ggctgatcagcaaggcagatagctt

SEQ ID NO: 2605645 - DNA, 25 bp, Homo sapien
ggctttctctccgaactgccacttg

SEQ ID NO: 2605646 - DNA, 25 bp, Homo sapien
tgtattccttcacaggctttggctg

SEQ ID NO: 2605647 - DNA, 25 bp, Homo sapien
tgccacttgcactgtgtgtttgcat

SEQ ID NO: 2605648 - DNA, 25 bp, Homo sapien
catgttgcattgagcatgtgccaat

SEQ ID NO: 2605649 - DNA, 25 bp, Homo sapien
tgttgcattgagcatgtgccaataa

SEQ ID NO: 2605650 - DNA, 25 bp, Homo sapien
tcatgttgcattgagcatgtgccaa

SEQ ID NO: 2605651 - DNA, 25 bp, Homo sapien
ttgcattgagcatgtgccaataatc

SEQ ID NO: 2605652 - DNA, 25 bp, Homo sapien
tcttgttccagtctgggactcccca

SEQ ID NO: 2605653 - DNA, 25 bp, Homo sapien
agatcttgttccagtctgggactcc

SEQ ID NO: 2605654 - DNA, 25 bp, Homo sapien
cttgttccagtctgggactccccag

SEQ ID NO: 2605655 - DNA, 25 bp, Homo sapien
gatcttgttccagtctgggactccc

SEQ ID NO: 2605656 - DNA, 25 bp, Homo sapien
ctgctgctggcataaatttagtctc

SEQ ID NO: 2605657 - DNA, 25 bp, Homo sapien
tgctgctggcataaatttagtctca

SEQ ID NO: 2605658 - DNA, 25 bp, Homo sapien
tacctatgcaagaggagcaaagatg

SEQ ID NO: 2605659 - DNA, 25 bp, Homo sapien
tgcagcaagcacaatatgggatagt

SEQ ID NO: 2605660 - DNA, 25 bp, Homo sapien
catgggttgaaagactagcatctga

SEQ ID NO: 2605661 - DNA, 25 bp, Homo sapien
tcttctcacagaggcaacaataggt

SEQ ID NO: 2605662 - DNA, 25 bp, Homo sapien
tttcacacactgtcctccccggcac

SEQ ID NO: 2605663 - DNA, 25 bp, Homo sapien
ttcacacactgtcctccccggcacc

SEQ ID NO: 2605664 - DNA, 25 bp, Homo sapien
tcacacactgtcctccccggcacca

SEQ ID NO: 2605665 - DNA, 25 bp, Homo sapien
gaggcgactcctatgagatactccc

SEQ ID NO: 2605666 - DNA, 25 bp, Homo sapien
tggtgcagaggcgactcctatgaga

SEQ ID NO: 2605667 - DNA, 25 bp, Homo sapien
gggaccaagaagaccagtccgacca

SEQ ID NO: 2605668 - DNA, 25 bp, Homo sapien
aagaagaccagtccgaccagtggcc

SEQ ID NO: 2605669 - DNA, 25 bp, Homo sapien
cagctcaccccagagaatttgcatg

SEQ ID NO: 2605670 - DNA, 25 bp, Homo sapien
tgaggtgagctcatgctttaaagat

SEQ ID NO: 2605671 - DNA, 25 bp, Homo sapien
acacactggtaatgcgggcagcgca

SEQ ID NO: 2605672 - DNA, 25 bp, Homo sapien
tggttggcactgacagctcacccca

SEQ ID NO: 2605673 - DNA, 25 bp, Homo sapien
agtcttctggtgacaaggccaggac

SEQ ID NO: 2605674 - DNA, 25 bp, Homo sapien
cagtcttctggtgacaaggccagga

SEQ ID NO: 2605675 - DNA, 25 bp, Homo sapien
tgagcagcacggaagtcaacactgt

SEQ ID NO: 2605676 - DNA, 25 bp, Homo sapien
gaatcgtctgctgttgtgctcggca

SEQ ID NO: 2605677 - DNA, 25 bp, Homo sapien
gtagtgccgccctctgaatcgtctg

SEQ ID NO: 2605678 - DNA, 25 bp, Homo sapien
ttctacttgagtgtaaggcttccac

SEQ ID NO: 2605679 - DNA, 25 bp, Homo sapien
cagtagagtttgcataagtcctgat

SEQ ID NO: 2605680 - DNA, 25 bp, Homo sapien
ctgcgatacagtagagtttgcataa

SEQ ID NO: 2605681 - DNA, 25 bp, Homo sapien
tacagtagagtttgcataagtcctg

SEQ ID NO: 2605682 - DNA, 25 bp, Homo sapien
gatacagtagagtttgcataagtcc

SEQ ID NO: 2605683 - DNA, 25 bp, Homo sapien
tacggctatcctccgagcatggagt

SEQ ID NO: 2605684 - DNA, 25 bp, Homo sapien
tatacaaacattacggctatcctcc

SEQ ID NO: 2605685 - DNA, 25 bp, Homo sapien
tcccatctatacaaacattacggct

SEQ ID NO: 2605686 - DNA, 25 bp, Homo sapien
gcatggagtcccatctttgacttta

SEQ ID NO: 2605687 - DNA, 25 bp, Homo sapien
actgggctgcaacttagagggaaag

SEQ ID NO: 2605688 - DNA, 25 bp, Homo sapien
cctctacaggatgcttgacacaaag

SEQ ID NO: 2605689 - DNA, 25 bp, Homo sapien
gtctcatatgtccagtctttctagc

SEQ ID NO: 2605690 - DNA, 25 bp, Homo sapien
gcaaagcagcatgtcatcaatgtgt

SEQ ID NO: 2605691 - DNA, 25 bp, Homo sapien
caggctgagttattcccgttacaca

SEQ ID NO: 2605692 - DNA, 25 bp, Homo sapien
gacccctgtgaatcgtgcaggctga

SEQ ID NO: 2605693 - DNA, 25 bp, Homo sapien
ccacagacgtcttcaacagcatcag

SEQ ID NO: 2605694 - DNA, 25 bp, Homo sapien
tggtgcttggtgtagagacccctgt

SEQ ID NO: 2605695 - DNA, 25 bp, Homo sapien
cgtctgtagtcgaaagtagtgcccg

SEQ ID NO: 2605696 - DNA, 25 bp, Homo sapien
tactccgggctccagaaggaatggt

SEQ ID NO: 2605697 - DNA, 25 bp, Homo sapien
taagttctcgggctcattataggac

SEQ ID NO: 2605698 - DNA, 25 bp, Homo sapien
aatcagtgtctcgttggttggtcca

SEQ ID NO: 2605699 - DNA, 25 bp, Homo sapien
caagccccaaaatcaagaggctgga

SEQ ID NO: 2605700 - DNA, 25 bp, Homo sapien
gccccaaaatcaagaggctggactt

SEQ ID NO: 2605701 - DNA, 25 bp, Homo sapien
ccaaaatcaagaggctggactttac

SEQ ID NO: 2605702 - DNA, 25 bp, Homo sapien
aaatccaagccccaaaatcaagagg

SEQ ID NO: 2605703 - DNA, 25 bp, Homo sapien
gtggatggggcaacttttgaaccaa

SEQ ID NO: 2605704 - DNA, 25 bp, Homo sapien
ggtggatggggcaacttttgaacca

SEQ ID NO: 2605705 - DNA, 25 bp, Homo sapien
ccaagcgaggcatggagtattccca

SEQ ID NO: 2605706 - DNA, 25 bp, Homo sapien
aggacacggagcactcagagcgcac

SEQ ID NO: 2605707 - DNA, 25 bp, Homo sapien
agagcgcacgatggcccaagtgtag

SEQ ID NO: 2605708 - DNA, 25 bp, Homo sapien
ggctgcttctcggtccccaagcgag

SEQ ID NO: 2605709 - DNA, 25 bp, Homo sapien
gagcatgacgaagcaggaacattga

SEQ ID NO: 2605710 - DNA, 25 bp, Homo sapien
cactgagagtccagttagagcatga

SEQ ID NO: 2605711 - DNA, 25 bp, Homo sapien
tacctggctgtgtgaaaaccttatt

SEQ ID NO: 2605712 - DNA, 25 bp, Homo sapien
gaagaagctgtcaaaagggagataa

SEQ ID NO: 2605713 - DNA, 25 bp, Homo sapien
gacaaggtaaacaaaagtctagtga

SEQ ID NO: 2605714 - DNA, 25 bp, Homo sapien
gataaactggttctgggcaatattc

SEQ ID NO: 2605715 - DNA, 25 bp, Homo sapien
ggtaaacaaaagtctagtgaagtca

SEQ ID NO: 2605716 - DNA, 25 bp, Homo sapien
gaagtcattaccacaccaaaaagtc

SEQ ID NO: 2605717 - DNA, 25 bp, Homo sapien
atgtgggcttccttgttttaccctg

SEQ ID NO: 2605718 - DNA, 25 bp, Homo sapien
tctgagcacacttgatgaaatgggc

SEQ ID NO: 2605719 - DNA, 25 bp, Homo sapien
tgcacagactctgggaatgggaaag

SEQ ID NO: 2605720 - DNA, 25 bp, Homo sapien
caggccatggccacgtagtgggaac

SEQ ID NO: 2605721 - DNA, 25 bp, Homo sapien
gctccaaatttgcagacgttaagac

SEQ ID NO: 2605722 - DNA, 25 bp, Homo sapien
tctggatataggcagtaatcgccca

SEQ ID NO: 2605723 - DNA, 25 bp, Homo sapien
taatcgcccatttttagggctccaa

SEQ ID NO: 2605724 - DNA, 25 bp, Homo sapien
ccttgacttgtcaatggcaaaggga

SEQ ID NO: 2605725 - DNA, 25 bp, Homo sapien
gcctccttggcaattaagctcagat

SEQ ID NO: 2605726 - DNA, 25 bp, Homo sapien
tttgaatgccagaatcacgcaggcc

SEQ ID NO: 2605727 - DNA, 25 bp, Homo sapien
tccgaacatttatggagactcaggt

SEQ ID NO: 2605728 - DNA, 25 bp, Homo sapien
tcacgtgatggaatggagagcctcc

SEQ ID NO: 2605729 - DNA, 25 bp, Homo sapien
tctgtccaccactgctatggcctct

SEQ ID NO: 2605730 - DNA, 25 bp, Homo sapien
cctgactgccccgaggactctgaat

SEQ ID NO: 2605731 - DNA, 25 bp, Homo sapien
gtccaccactgctatggcctcttct

SEQ ID NO: 2605732 - DNA, 25 bp, Homo sapien
ccccgaggactctgaatccaaaggc

SEQ ID NO: 2605733 - DNA, 25 bp, Homo sapien
aggccccgactgctctgaactttct

SEQ ID NO: 2605734 - DNA, 25 bp, Homo sapien
ggaggaggccccgactgctctgaac

SEQ ID NO: 2605735 - DNA, 25 bp, Homo sapien
ccgggcaggcttggctcaaggacac

SEQ ID NO: 2605736 - DNA, 25 bp, Homo sapien
cccgggcaggcttggctcaaggaca

SEQ ID NO: 2605737 - DNA, 25 bp, Homo sapien
cagccctctctcacggtcatctgtc

SEQ ID NO: 2605738 - DNA, 25 bp, Homo sapien
ctgtagcagccctctctcacggtca

SEQ ID NO: 2605739 - DNA, 25 bp, Homo sapien
agcagccctctctcacggtcatctg

SEQ ID NO: 2605740 - DNA, 25 bp, Homo sapien
tgtagcagccctctctcacggtcat

SEQ ID NO: 2605741 - DNA, 25 bp, Homo sapien
tactttgcaaggcaccagccccgtg

SEQ ID NO: 2605742 - DNA, 25 bp, Homo sapien
gattgcagaaggacatatttacttg

SEQ ID NO: 2605743 - DNA, 25 bp, Homo sapien
tgacaggtcgtgtcttgggattgca

SEQ ID NO: 2605744 - DNA, 25 bp, Homo sapien
accagccccgtgacaggtcgtgtct

SEQ ID NO: 2605745 - DNA, 25 bp, Homo sapien
cccaaagacgatcaggtgggcctca

SEQ ID NO: 2605746 - DNA, 25 bp, Homo sapien
tcaccaaggattggtagacacagag

SEQ ID NO: 2605747 - DNA, 25 bp, Homo sapien
acagagcttgaggtgacagagtcct

SEQ ID NO: 2605748 - DNA, 25 bp, Homo sapien
tgatggagctaacacagtgtcatgt

SEQ ID NO: 2605749 - DNA, 25 bp, Homo sapien
caccttttgcctattgagcccagga

SEQ ID NO: 2605750 - DNA, 25 bp, Homo sapien
tgatgaggcatatgaggtataagcc

SEQ ID NO: 2605751 - DNA, 25 bp, Homo sapien
caaaactgggagtcgaatttccttg

SEQ ID NO: 2605752 - DNA, 25 bp, Homo sapien
tcaatggcaactgaatgatgaggca

SEQ ID NO: 2605753 - DNA, 25 bp, Homo sapien
gaaattggtgaaagcagtcaatggc

SEQ ID NO: 2605754 - DNA, 25 bp, Homo sapien
tgcagccgcacagttcctaaggctc

SEQ ID NO: 2605755 - DNA, 25 bp, Homo sapien
ggtctgggccgagcaggactggcca

SEQ ID NO: 2605756 - DNA, 25 bp, Homo sapien
tccaccagtgcgtgggctgtgaggg

SEQ ID NO: 2605757 - DNA, 25 bp, Homo sapien
ccaccagtgcgtgggctgtgagggt

SEQ ID NO: 2605758 - DNA, 25 bp, Homo sapien
cataatgtacctgtgtttcagcaga

SEQ ID NO: 2605759 - DNA, 25 bp, Homo sapien
tgtgtttcagcagatttgcttttgc

SEQ ID NO: 2605760 - DNA, 25 bp, Homo sapien
gtacctgtgtttcagcagatttgct

SEQ ID NO: 2605761 - DNA, 25 bp, Homo sapien
atgtacctgtgtttcagcagatttg

SEQ ID NO: 2605762 - DNA, 25 bp, Homo sapien
gcttccattcccatgagatgcactg

SEQ ID NO: 2605763 - DNA, 25 bp, Homo sapien
gccaaggtgccctccatctctgtgt

SEQ ID NO: 2605764 - DNA, 25 bp, Homo sapien
tgtgtcctccactgggtcccctaga

SEQ ID NO: 2605765 - DNA, 25 bp, Homo sapien
ttcccatgagatgcactgcctgtgc

SEQ ID NO: 2605766 - DNA, 25 bp, Homo sapien
ctgaatctgtcctccaatctgttta

SEQ ID NO: 2605767 - DNA, 25 bp, Homo sapien
gcagctgaatttgttattggagtta

SEQ ID NO: 2605768 - DNA, 25 bp, Homo sapien
tgtcctccaatctgtttatggcagc

SEQ ID NO: 2605769 - DNA, 25 bp, Homo sapien
gaatctgtcctccaatctgtttatg

SEQ ID NO: 2605770 - DNA, 25 bp, Homo sapien
gcacccgtgggtgaggtgccagcct

SEQ ID NO: 2605771 - DNA, 25 bp, Homo sapien
gagcacccgtgggtgaggtgccagc

SEQ ID NO: 2605772 - DNA, 25 bp, Homo sapien
cccgtgggtgaggtgccagccttgc

SEQ ID NO: 2605773 - DNA, 25 bp, Homo sapien
cacccgtgggtgaggtgccagcctt

SEQ ID NO: 2605774 - DNA, 25 bp, Homo sapien
gcagctgtgtctgtgctgagaaccc

SEQ ID NO: 2605775 - DNA, 25 bp, Homo sapien
gctgtgtctgtgctgagaacccagg

SEQ ID NO: 2605776 - DNA, 25 bp, Homo sapien
ctaggggtcgcctgcgaggctctgc

SEQ ID NO: 2605777 - DNA, 25 bp, Homo sapien
taggggtcgcctgcgaggctctgcc

SEQ ID NO: 2605778 - DNA, 25 bp, Homo sapien
ttcatgttaatttccctgtgcaact

SEQ ID NO: 2605779 - DNA, 25 bp, Homo sapien
ccattcatgttaatttccctgtgca

SEQ ID NO: 2605780 - DNA, 25 bp, Homo sapien
cattcatgttaatttccctgtgcaa

SEQ ID NO: 2605781 - DNA, 25 bp, Homo sapien
tcatgttaatttccctgtgcaactc

SEQ ID NO: 2605782 - DNA, 25 bp, Homo sapien
ggcagctctgagagttgcaggcctg

SEQ ID NO: 2605783 - DNA, 25 bp, Homo sapien
ctggccgggactggctccgagtcat

SEQ ID NO: 2605784 - DNA, 25 bp, Homo sapien
gcgctccatgcaggtgggcagctct

SEQ ID NO: 2605785 - DNA, 25 bp, Homo sapien
gagtcatagtgcacccgccgtgtgc

SEQ ID NO: 2605786 - DNA, 25 bp, Homo sapien
aggggttggtgctcttacaggccac

SEQ ID NO: 2605787 - DNA, 25 bp, Homo sapien
gctcttacaggccactgcccgcttc

SEQ ID NO: 2605788 - DNA, 25 bp, Homo sapien
tggtgctcttacaggccactgcccg

SEQ ID NO: 2605789 - DNA, 25 bp, Homo sapien
gggttggtgctcttacaggccactg

SEQ ID NO: 2605790 - DNA, 25 bp, Homo sapien
tgggcttgggctcggaggtgcagac

SEQ ID NO: 2605791 - DNA, 25 bp, Homo sapien
ggtgcagacagcgtcgggcagcagc

SEQ ID NO: 2605792 - DNA, 25 bp, Homo sapien
gcagacaggcttcatgcatcctggg

SEQ ID NO: 2605793 - DNA, 25 bp, Homo sapien
gaagcagacaggcttcatgcatcct

SEQ ID NO: 2605794 - DNA, 25 bp, Homo sapien
gctcccgcgagaccagtgcacctac

SEQ ID NO: 2605795 - DNA, 25 bp, Homo sapien
aacctcgctcccgcgagaccagtgc

SEQ ID NO: 2605796 - DNA, 25 bp, Homo sapien
tcgctcccgcgagaccagtgcacct

SEQ ID NO: 2605797 - DNA, 25 bp, Homo sapien
cctcgctcccgcgagaccagtgcac

SEQ ID NO: 2605798 - DNA, 25 bp, Homo sapien
tttaagaatcttttctgtgttcctc

SEQ ID NO: 2605799 - DNA, 25 bp, Homo sapien
ttcctctttcacatgtcacagagca

SEQ ID NO: 2605800 - DNA, 25 bp, Homo sapien
tgtgttcctctttcacatgtcacag

SEQ ID NO: 2605801 - DNA, 25 bp, Homo sapien
ttcagcacattttaagaatcttttc

SEQ ID NO: 2605802 - DNA, 25 bp, Homo sapien
gccagctctcgatactttccagaaa

SEQ ID NO: 2605803 - DNA, 25 bp, Homo sapien
ctgggcttcggcaaatgtgagcact

SEQ ID NO: 2605804 - DNA, 25 bp, Homo sapien
tctttgaggccagctctcgatactt

SEQ ID NO: 2605805 - DNA, 25 bp, Homo sapien
ggcaaatgtgagcacttctttgagg

SEQ ID NO: 2605806 - DNA, 25 bp, Homo sapien
ggggcatggaagcggggcgcaggca

SEQ ID NO: 2605807 - DNA, 25 bp, Homo sapien
tggggcatggaagcggggcgcaggc

SEQ ID NO: 2605808 - DNA, 25 bp, Homo sapien
ctggggcatggaagcggggcgcagg

SEQ ID NO: 2605809 - DNA, 25 bp, Homo sapien
gggcatggaagcggggcgcaggcac

SEQ ID NO: 2605810 - DNA, 25 bp, Homo sapien
ggtcccgcagcagcaaatggggggt

SEQ ID NO: 2605811 - DNA, 25 bp, Homo sapien
gcaaaccagctgcccctcgagggtc

SEQ ID NO: 2605812 - DNA, 25 bp, Homo sapien
tcccgcagcagcaaatggggggtgc

SEQ ID NO: 2605813 - DNA, 25 bp, Homo sapien
ccagctgcccctcgagggtcccgca

SEQ ID NO: 2605814 - DNA, 25 bp, Homo sapien
tcttgtgagaggccaagcacggact

SEQ ID NO: 2605815 - DNA, 25 bp, Homo sapien
tgtgagaggccaagcacggacttct

SEQ ID NO: 2605816 - DNA, 25 bp, Homo sapien
ggggacccagaacaggttggcctga

SEQ ID NO: 2605817 - DNA, 25 bp, Homo sapien
tacagtgcagggggacccagaacag

SEQ ID NO: 2605818 - DNA, 25 bp, Homo sapien
cccacaatgggatgggaagcgtgtc

SEQ ID NO: 2605819 - DNA, 25 bp, Homo sapien
tccatacttccttttagcacaggcc

SEQ ID NO: 2605820 - DNA, 25 bp, Homo sapien
ccacaatgggatgggaagcgtgtcc

SEQ ID NO: 2605821 - DNA, 25 bp, Homo sapien
gtctgttttctgtccatacttcctt

SEQ ID NO: 2605822 - DNA, 25 bp, Homo sapien
ggcattcagtgagatccagcccctg

SEQ ID NO: 2605823 - DNA, 25 bp, Homo sapien
tctagcttgacacgggaggagtcca

SEQ ID NO: 2605824 - DNA, 25 bp, Homo sapien
aggagtccaattgccagcagaagcc

SEQ ID NO: 2605825 - DNA, 25 bp, Homo sapien
gggctagggctctgcagcatataaa

SEQ ID NO: 2605826 - DNA, 25 bp, Homo sapien
agctcagggactgggaccaaacatt

SEQ ID NO: 2605827 - DNA, 25 bp, Homo sapien
gtggagctggcccacaacacagcaa

SEQ ID NO: 2605828 - DNA, 25 bp, Homo sapien
agctgcatctggtttggaggtaaac

SEQ ID NO: 2605829 - DNA, 25 bp, Homo sapien
taaatgaaaaagctgcatctggttt

SEQ ID NO: 2605830 - DNA, 25 bp, Homo sapien
ataatccccgcatgaccaggagggc

SEQ ID NO: 2605831 - DNA, 25 bp, Homo sapien
caggagggcagtaactgaatcacgg

SEQ ID NO: 2605832 - DNA, 25 bp, Homo sapien
gaatgggctaatacaatcgcccacc

SEQ ID NO: 2605833 - DNA, 25 bp, Homo sapien
taatccctaagtgtcataatcccat

SEQ ID NO: 2605834 - DNA, 25 bp, Homo sapien
gcactgcacggacctcgtctgaacg

SEQ ID NO: 2605835 - DNA, 25 bp, Homo sapien
caggcactgcacggacctcgtctga

SEQ ID NO: 2605836 - DNA, 25 bp, Homo sapien
ggccgaaggcttctggtgcaggagg

SEQ ID NO: 2605837 - DNA, 25 bp, Homo sapien
ggaggccgaaggcttctggtgcagg

SEQ ID NO: 2605838 - DNA, 25 bp, Homo sapien
gggtaccaggtagcaccagtggaag

SEQ ID NO: 2605839 - DNA, 25 bp, Homo sapien
gaacttgtggctgcacatcccgtgc

SEQ ID NO: 2605840 - DNA, 25 bp, Homo sapien
cttgcagcactgcttgccgtagaac

SEQ ID NO: 2605841 - DNA, 25 bp, Homo sapien
aagttggacttagagcaagtcttgc

SEQ ID NO: 2605842 - DNA, 25 bp, Homo sapien
tggccagtgaccctagagatgacgc

SEQ ID NO: 2605843 - DNA, 25 bp, Homo sapien
gggaaatttctgtgccacgcaggca

SEQ ID NO: 2605844 - DNA, 25 bp, Homo sapien
ttctctgctacggagagcggtccca

SEQ ID NO: 2605845 - DNA, 25 bp, Homo sapien
tattccgacgtagattgcacagctc

SEQ ID NO: 2605846 - DNA, 25 bp, Homo sapien
ctttggaatggagccacagcaccgg

SEQ ID NO: 2605847 - DNA, 25 bp, Homo sapien
tcccacctggcattatagaaatggc

SEQ ID NO: 2605848 - DNA, 25 bp, Homo sapien
gctgtgtggctgacgtctgctataa

SEQ ID NO: 2605849 - DNA, 25 bp, Homo sapien
tagaaatggccagactcaccgaaaa

SEQ ID NO: 2605850 - DNA, 25 bp, Homo sapien
gacaggatggcagcggtggtgtggg

SEQ ID NO: 2605851 - DNA, 25 bp, Homo sapien
cacgtgagtttttgtcataggaaag

SEQ ID NO: 2605852 - DNA, 25 bp, Homo sapien
gagctgggagctagaggtgtttcca

SEQ ID NO: 2605853 - DNA, 25 bp, Homo sapien
tttcccaagtctcctgctgactttc

SEQ ID NO: 2605854 - DNA, 25 bp, Homo sapien
ccatgtcctctttagtgtgagcaaa

SEQ ID NO: 2605855 - DNA, 25 bp, Homo sapien
gctcgagataactgagatggcctca

SEQ ID NO: 2605856 - DNA, 25 bp, Homo sapien
ggatggctgccatttactattagag

SEQ ID NO: 2605857 - DNA, 25 bp, Homo sapien
caaaacattgtcgaatgaggtgctg

SEQ ID NO: 2605858 - DNA, 25 bp, Homo sapien
gtgggccaccagaacattcgctcat

SEQ ID NO: 2605859 - DNA, 25 bp, Homo sapien
agtgggccaccagaacattcgctca

SEQ ID NO: 2605860 - DNA, 25 bp, Homo sapien
cacagtgggccaccagaacattcgc

SEQ ID NO: 2605861 - DNA, 25 bp, Homo sapien
accccacagtgggccaccagaacat

SEQ ID NO: 2605862 - DNA, 25 bp, Homo sapien
gggtgttgcaaattgatcgagagcc

SEQ ID NO: 2605863 - DNA, 25 bp, Homo sapien
tctgttcatggcagagatactcagg

SEQ ID NO: 2605864 - DNA, 25 bp, Homo sapien
tgactggctggttaattcataatgt

SEQ ID NO: 2605865 - DNA, 25 bp, Homo sapien
gatttcatattcgatcttcagttct

SEQ ID NO: 2605866 - DNA, 25 bp, Homo sapien
gatgaatggctagcactcctccaaa

SEQ ID NO: 2605867 - DNA, 25 bp, Homo sapien
gtcggccatcagaggtggccttgct

SEQ ID NO: 2605868 - DNA, 25 bp, Homo sapien
ctcgtattcggttcttggctaggta

SEQ ID NO: 2605869 - DNA, 25 bp, Homo sapien
tgcagcctctctcgccattgtcagt

SEQ ID NO: 2605870 - DNA, 25 bp, Homo sapien
tggctaggtatttggatggcttgca

SEQ ID NO: 2605871 - DNA, 25 bp, Homo sapien
ggggtgactcattgggacacaatga

SEQ ID NO: 2605872 - DNA, 25 bp, Homo sapien
gggaaggacggtgactaagccacac

SEQ ID NO: 2605873 - DNA, 25 bp, Homo sapien
cggccagagtgaaagagcccccgtg

SEQ ID NO: 2605874 - DNA, 25 bp, Homo sapien
cgtgggctccagtaaggggtgactc

SEQ ID NO: 2605875 - DNA, 25 bp, Homo sapien
cctcgtgtacttgcaaacaacattt

SEQ ID NO: 2605876 - DNA, 25 bp, Homo sapien
acagttttacttttggatcctcgtg

SEQ ID NO: 2605877 - DNA, 25 bp, Homo sapien
ttggatcctcgtgtacttgcaaaca

SEQ ID NO: 2605878 - DNA, 25 bp, Homo sapien
tacttttggatcctcgtgtacttgc

SEQ ID NO: 2605879 - DNA, 25 bp, Homo sapien
tctacccaaacacacttgccctgca

SEQ ID NO: 2605880 - DNA, 25 bp, Homo sapien
tctctggtccagaatgtgtcctcag

SEQ ID NO: 2605881 - DNA, 25 bp, Homo sapien
tgtgtgccgaatgagcccttctctc

SEQ ID NO: 2605882 - DNA, 25 bp, Homo sapien
catccacctgtttctgggcacgtag

SEQ ID NO: 2605883 - DNA, 25 bp, Homo sapien
aagagagccccggttctcgttgctg

SEQ ID NO: 2605884 - DNA, 25 bp, Homo sapien
tcaaggctctgcagcaaccgaaaga

SEQ ID NO: 2605885 - DNA, 25 bp, Homo sapien
ccggttctcgttgctgccattgttt

SEQ ID NO: 2605886 - DNA, 25 bp, Homo sapien
cagcaaccgaaagagagccccggtt

SEQ ID NO: 2605887 - DNA, 25 bp, Homo sapien
agaaaaggccggcagcctcatgctg

SEQ ID NO: 2605888 - DNA, 25 bp, Homo sapien
gctgttatgaccaccatggcagtga

SEQ ID NO: 2605889 - DNA, 25 bp, Homo sapien
caaatgtctttctataggtcctgta

SEQ ID NO: 2605890 - DNA, 25 bp, Homo sapien
tcccggatgataagcacagtgactg

SEQ ID NO: 2605891 - DNA, 25 bp, Homo sapien
tcctttggacgagagtggtccgtcc

SEQ ID NO: 2605892 - DNA, 25 bp, Homo sapien
gtttggtgcccgtatcttctccatt

SEQ ID NO: 2605893 - DNA, 25 bp, Homo sapien
taatttgtttggtgcccgtatcttc

SEQ ID NO: 2605894 - DNA, 25 bp, Homo sapien
ttcctttggacgagagtggtccgtc

SEQ ID NO: 2605895 - DNA, 25 bp, Homo sapien
acaaggcgcaggtctctgttcacat

SEQ ID NO: 2605896 - DNA, 25 bp, Homo sapien
cacaaggcgcaggtctctgttcaca

SEQ ID NO: 2605897 - DNA, 25 bp, Homo sapien
ggccttttcaggtactggacttctg

SEQ ID NO: 2605898 - DNA, 25 bp, Homo sapien
agtcgctgggcggaccttctcctgt

SEQ ID NO: 2605899 - DNA, 25 bp, Homo sapien
cgctgggcggaccttctcctgtaat

SEQ ID NO: 2605900 - DNA, 25 bp, Homo sapien
tcagtcgctgggcggaccttctcct

SEQ ID NO: 2605901 - DNA, 25 bp, Homo sapien
tcgctgggcggaccttctcctgtaa

SEQ ID NO: 2605902 - DNA, 25 bp, Homo sapien
ttttgcagtaggaggcttgaccggc

SEQ ID NO: 2605903 - DNA, 25 bp, Homo sapien
ctttttgcagtaggaggcttgaccg

SEQ ID NO: 2605904 - DNA, 25 bp, Homo sapien
tcctttttgcagtaggaggcttgac

SEQ ID NO: 2605905 - DNA, 25 bp, Homo sapien
tttgcagtaggaggcttgaccggca

SEQ ID NO: 2605906 - DNA, 25 bp, Homo sapien
caatcccataacctccatgacttct

SEQ ID NO: 2605907 - DNA, 25 bp, Homo sapien
tcccataacctccatgacttcttcg

SEQ ID NO: 2605908 - DNA, 25 bp, Homo sapien
ccataacctccatgacttcttcgat

SEQ ID NO: 2605909 - DNA, 25 bp, Homo sapien
aatcccataacctccatgacttctt

SEQ ID NO: 2605910 - DNA, 25 bp, Homo sapien
tgtataggagagcttgccctgccat

SEQ ID NO: 2605911 - DNA, 25 bp, Homo sapien
tcctcactcgtcttgtaggcatcaa

SEQ ID NO: 2605912 - DNA, 25 bp, Homo sapien
tgccatccccatagtgttccaggat

SEQ ID NO: 2605913 - DNA, 25 bp, Homo sapien
tgtaggcatcaagaccctttgcagc

SEQ ID NO: 2605914 - DNA, 25 bp, Homo sapien
gtgagttagagcctgccgattagat

SEQ ID NO: 2605915 - DNA, 25 bp, Homo sapien
gagttttggatgtgagttagagcct

SEQ ID NO: 2605916 - DNA, 25 bp, Homo sapien
tagagttttggatgtgagttagagc

SEQ ID NO: 2605917 - DNA, 25 bp, Homo sapien
gagcctgccgattagatgcactcac

SEQ ID NO: 2605918 - DNA, 25 bp, Homo sapien
ccatccctggcagccggttctgtcc

SEQ ID NO: 2605919 - DNA, 25 bp, Homo sapien
ccctggcagccggttctgtcctggg

SEQ ID NO: 2605920 - DNA, 25 bp, Homo sapien
tggcagccggttctgtcctgggtcc

SEQ ID NO: 2605921 - DNA, 25 bp, Homo sapien
gcagccggttctgtcctgggtcctg

SEQ ID NO: 2605922 - DNA, 25 bp, Homo sapien
ctgcatactggatacggtgggcatt

SEQ ID NO: 2605923 - DNA, 25 bp, Homo sapien
atactggatacggtgggcatttcag

SEQ ID NO: 2605924 - DNA, 25 bp, Homo sapien
gcatactggatacggtgggcatttc

SEQ ID NO: 2605925 - DNA, 25 bp, Homo sapien
actggatacggtgggcatttcagtg

SEQ ID NO: 2605926 - DNA, 25 bp, Homo sapien
gacaggtgttgaggaggggattctc

SEQ ID NO: 2605927 - DNA, 25 bp, Homo sapien
tggcaagggcatgtcccacctaact

SEQ ID NO: 2605928 - DNA, 25 bp, Homo sapien
ggaggggattctctgtagagcagct

SEQ ID NO: 2605929 - DNA, 25 bp, Homo sapien
cttccgggatcggaggaagaaggcg

SEQ ID NO: 2605930 - DNA, 25 bp, Homo sapien
aacacctggcggctgtaagagttgg

SEQ ID NO: 2605931 - DNA, 25 bp, Homo sapien
gtttgtgaacacctggcggctgtaa

SEQ ID NO: 2605932 - DNA, 25 bp, Homo sapien
gacaagcccactctgccttgcgggt

SEQ ID NO: 2605933 - DNA, 25 bp, Homo sapien
ctgccttgcgggtttgtgaacacct

SEQ ID NO: 2605934 - DNA, 25 bp, Homo sapien
ctggaacacgcttccttctagctct

SEQ ID NO: 2605935 - DNA, 25 bp, Homo sapien
tccttctagctctaggtgtagaaat

SEQ ID NO: 2605936 - DNA, 25 bp, Homo sapien
gaacacgcttccttctagctctagg

SEQ ID NO: 2605937 - DNA, 25 bp, Homo sapien
gcttccttctagctctaggtgtaga

SEQ ID NO: 2605938 - DNA, 25 bp, Homo sapien
cctgccacctccaaatcctgttttt

SEQ ID NO: 2605939 - DNA, 25 bp, Homo sapien
tatcctgccacctccaaatcctgtt

SEQ ID NO: 2605940 - DNA, 25 bp, Homo sapien
gccacctccaaatcctgtttttgac

SEQ ID NO: 2605941 - DNA, 25 bp, Homo sapien
tgccacctccaaatcctgtttttga

SEQ ID NO: 2605942 - DNA, 25 bp, Homo sapien
ccagtgatgcccgagcggcgggttc

SEQ ID NO: 2605943 - DNA, 25 bp, Homo sapien
ggtcgccgcggcagccagtgatgcc

SEQ ID NO: 2605944 - DNA, 25 bp, Homo sapien
ttcgctcctcggtcatgtgtcctcg

SEQ ID NO: 2605945 - DNA, 25 bp, Homo sapien
gagcctggttgaatcgttcgccacc

SEQ ID NO: 2605946 - DNA, 25 bp, Homo sapien
ggcccccgagcgcgacgcagtccag

SEQ ID NO: 2605947 - DNA, 25 bp, Homo sapien
ggcgcggcccccgagcgcgacgcag

SEQ ID NO: 2605948 - DNA, 25 bp, Homo sapien
cgcggcccccgagcgcgacgcagtc

SEQ ID NO: 2605949 - DNA, 25 bp, Homo sapien
cccccgagcgcgacgcagtccagtc

SEQ ID NO: 2605950 - DNA, 25 bp, Homo sapien
atccgtgcacagaggtccccgtggg

SEQ ID NO: 2605951 - DNA, 25 bp, Homo sapien
aggtccgggcgggtccatccgtgca

SEQ ID NO: 2605952 - DNA, 25 bp, Homo sapien
tagcaaaaggctctccgagccagag

SEQ ID NO: 2605953 - DNA, 25 bp, Homo sapien
gggctagcaaaaggctctccgagcc

SEQ ID NO: 2605954 - DNA, 25 bp, Homo sapien
tcggccccgtcctgtctctgctgat

SEQ ID NO: 2605955 - DNA, 25 bp, Homo sapien
gcgcagccctgacatcgcgacaggt

SEQ ID NO: 2605956 - DNA, 25 bp, Homo sapien
gccgaatgggtctcgcccggcatca

SEQ ID NO: 2605957 - DNA, 25 bp, Homo sapien
ggtctcgcccggcatcatggtgccg

SEQ ID NO: 2605958 - DNA, 25 bp, Homo sapien
cagtgtctaaaatacggcaggtgat

SEQ ID NO: 2605959 - DNA, 25 bp, Homo sapien
ggagaactccaatcacgttcctggg

SEQ ID NO: 2605960 - DNA, 25 bp, Homo sapien
caaaccaagtttctcggcatggcct

SEQ ID NO: 2605961 - DNA, 25 bp, Homo sapien
cctagaacggaagctccaagagatc

SEQ ID NO: 2605962 - DNA, 25 bp, Homo sapien
ttgtttcaaggtaattaatgcttca

SEQ ID NO: 2605963 - DNA, 25 bp, Homo sapien
caaggtaattaatgcttcaacatat

SEQ ID NO: 2605964 - DNA, 25 bp, Homo sapien
gtttcaaggtaattaatgcttcaac

SEQ ID NO: 2605965 - DNA, 25 bp, Homo sapien
ttcaaggtaattaatgcttcaacat

SEQ ID NO: 2605966 - DNA, 25 bp, Homo sapien
tcttctgatattctgttaacaaatt

SEQ ID NO: 2605967 - DNA, 25 bp, Homo sapien
cttctgatattctgttaacaaatta

SEQ ID NO: 2605968 - DNA, 25 bp, Homo sapien
ttcttctgatattctgttaacaaat

SEQ ID NO: 2605969 - DNA, 25 bp, Homo sapien
cacagcaagacatggaaggatcaat

SEQ ID NO: 2605970 - DNA, 25 bp, Homo sapien
aatggctaccgaacaagtggtgact

SEQ ID NO: 2605971 - DNA, 25 bp, Homo sapien
caagaattgtcttctgactgcccac

SEQ ID NO: 2605972 - DNA, 25 bp, Homo sapien
cacaaccgagctcattaaatggcta

SEQ ID NO: 2605973 - DNA, 25 bp, Homo sapien
ccaagttgtgattcccaggtgctgg

SEQ ID NO: 2605974 - DNA, 25 bp, Homo sapien
cagcgtgagaatcaactagtacaga

SEQ ID NO: 2605975 - DNA, 25 bp, Homo sapien
tctcttaattttacgattttcacag

SEQ ID NO: 2605976 - DNA, 25 bp, Homo sapien
attagaaatgatgatatggtctggc

SEQ ID NO: 2605977 - DNA, 25 bp, Homo sapien
tccacttggtgatgcagattactat

SEQ ID NO: 2605978 - DNA, 25 bp, Homo sapien
tcttccacttggtgatgcagattac

SEQ ID NO: 2605979 - DNA, 25 bp, Homo sapien
ttggtgatgcagattactattctct

SEQ ID NO: 2605980 - DNA, 25 bp, Homo sapien
tctcttccacttggtgatgcagatt

SEQ ID NO: 2605981 - DNA, 25 bp, Homo sapien
tgatgagtatcctgatacaacttta

SEQ ID NO: 2605982 - DNA, 25 bp, Homo sapien
gatgagtatcctgatacaactttaa

SEQ ID NO: 2605983 - DNA, 25 bp, Homo sapien
tcctttacacgagcatattcctgat

SEQ ID NO: 2605984 - DNA, 25 bp, Homo sapien
attcttcctttacacgagcatattc

SEQ ID NO: 2605985 - DNA, 25 bp, Homo sapien
tcttcaccttagcttctagtttctt

SEQ ID NO: 2605986 - DNA, 25 bp, Homo sapien
cttcttcaccttagcttctagtttc

SEQ ID NO: 2605987 - DNA, 25 bp, Homo sapien
agcttcttcaccttagcttctagtt

SEQ ID NO: 2605988 - DNA, 25 bp, Homo sapien
gcagcttcttcaccttagcttctag

SEQ ID NO: 2605989 - DNA, 25 bp, Homo sapien
aatatcattcttactgccatattgt

SEQ ID NO: 2605990 - DNA, 25 bp, Homo sapien
ggctgaagcagaacccgggagacag

SEQ ID NO: 2605991 - DNA, 25 bp, Homo sapien
gtggtggcacatgacacataggccc

SEQ ID NO: 2605992 - DNA, 25 bp, Homo sapien
gttgcttgaagtcctgagtttgctt

SEQ ID NO: 2605993 - DNA, 25 bp, Homo sapien
cagttgcttgaagtcctgagtttgc

SEQ ID NO: 2605994 - DNA, 25 bp, Homo sapien
gcttgaagtcctgagtttgcttgac

SEQ ID NO: 2605995 - DNA, 25 bp, Homo sapien
tcagttgcttgaagtcctgagtttg

SEQ ID NO: 2605996 - DNA, 25 bp, Homo sapien
ctgtttagaaaattcgtcaagcctt

SEQ ID NO: 2605997 - DNA, 25 bp, Homo sapien
tctgtttagaaaattcgtcaagcct

SEQ ID NO: 2605998 - DNA, 25 bp, Homo sapien
ttctgtttagaaaattcgtcaagcc

SEQ ID NO: 2605999 - DNA, 25 bp, Homo sapien
cttccatatgaatcacttgaaattt

SEQ ID NO: 2606000 - DNA, 25 bp, Homo sapien
ccatatgaatcacttgaaatttgtg

SEQ ID NO: 2606001 - DNA, 25 bp, Homo sapien
aatttgtgttccaatatgtctcaac

SEQ ID NO: 2606002 - DNA, 25 bp, Homo sapien
tgaaatttgtgttccaatatgtctc

SEQ ID NO: 2606003 - DNA, 25 bp, Homo sapien
tacacagagccagagttccttcaga

SEQ ID NO: 2606004 - DNA, 25 bp, Homo sapien
tgtgtttacacagagccagagttcc

SEQ ID NO: 2606005 - DNA, 25 bp, Homo sapien
tgtttacacagagccagagttcctt

SEQ ID NO: 2606006 - DNA, 25 bp, Homo sapien
agagccagagttccttcagaagcag

SEQ ID NO: 2606007 - DNA, 25 bp, Homo sapien
atctccatggacagttttgtgaggc

SEQ ID NO: 2606008 - DNA, 25 bp, Homo sapien
gaggtagcgtaccatcttccccagg

SEQ ID NO: 2606009 - DNA, 25 bp, Homo sapien
tgtctgcacatttgaggtcctgaga

SEQ ID NO: 2606010 - DNA, 25 bp, Homo sapien
tggtcagaactacaatttgttccac

SEQ ID NO: 2606011 - DNA, 25 bp, Homo sapien
gggaagtttgaagaagtcaattgca

SEQ ID NO: 2606012 - DNA, 25 bp, Homo sapien
gaagaagtcaattgcagcttgaaga

SEQ ID NO: 2606013 - DNA, 25 bp, Homo sapien
ttcagtactaccaccgtcacgatga

SEQ ID NO: 2606014 - DNA, 25 bp, Homo sapien
aatgatcatgatcaacaaattcagt

SEQ ID NO: 2606015 - DNA, 25 bp, Homo sapien
gtgcaaatgaagacggtaaggaacc

SEQ ID NO: 2606016 - DNA, 25 bp, Homo sapien
aggtgcaaatgaagacggtaaggaa

SEQ ID NO: 2606017 - DNA, 25 bp, Homo sapien
tgcaaatgaagacggtaaggaaccc

SEQ ID NO: 2606018 - DNA, 25 bp, Homo sapien
ccgggtgaggtgatgacatcggagg

SEQ ID NO: 2606019 - DNA, 25 bp, Homo sapien
tgcatgaatctaccacacacagagc

SEQ ID NO: 2606020 - DNA, 25 bp, Homo sapien
ttattaagccgctaccctgcctgtg

SEQ ID NO: 2606021 - DNA, 25 bp, Homo sapien
gcagcgtgttttccaccactgcagg

SEQ ID NO: 2606022 - DNA, 25 bp, Homo sapien
actgcagggctctacacagcaatga

SEQ ID NO: 2606023 - DNA, 25 bp, Homo sapien
taaactctgatttgggcgatcccat

SEQ ID NO: 2606024 - DNA, 25 bp, Homo sapien
gaaactgtgatacggtctggttcag

SEQ ID NO: 2606025 - DNA, 25 bp, Homo sapien
caccaactaaggagtgtgtggcaga

SEQ ID NO: 2606026 - DNA, 25 bp, Homo sapien
tctctcaatgcatagacctcgagtg

SEQ ID NO: 2606027 - DNA, 25 bp, Homo sapien
tagaacactccggtggctcagactg

SEQ ID NO: 2606028 - DNA, 25 bp, Homo sapien
taaggtaggctcaaccctatgtggc

SEQ ID NO: 2606029 - DNA, 25 bp, Homo sapien
aactggtttcaatgtcaagccctgc

SEQ ID NO: 2606030 - DNA, 25 bp, Homo sapien
tgattaggcaacaccgatgcagtgg

SEQ ID NO: 2606031 - DNA, 25 bp, Homo sapien
gaatcatttgcaacagccagggcct

SEQ ID NO: 2606032 - DNA, 25 bp, Homo sapien
gatgaggagccagtcgtttcccgaa

SEQ ID NO: 2606033 - DNA, 25 bp, Homo sapien
cattctgaggcataccgctgatggg

SEQ ID NO: 2606034 - DNA, 25 bp, Homo sapien
caccaccgggagttgtagatttcaa

SEQ ID NO: 2606035 - DNA, 25 bp, Homo sapien
taaattcttacagtcagcaggcgga

SEQ ID NO: 2606036 - DNA, 25 bp, Homo sapien
tgaaagattattgccacatggagcc

SEQ ID NO: 2606037 - DNA, 25 bp, Homo sapien
ttcacggaagggagaaacctggcca

SEQ ID NO: 2606038 - DNA, 25 bp, Homo sapien
agtgtccaggcgcagtcttttagca

SEQ ID NO: 2606039 - DNA, 25 bp, Homo sapien
ttgttgcaacttcagctggagggag

SEQ ID NO: 2606040 - DNA, 25 bp, Homo sapien
ctgcactgacggctggactagaaca

SEQ ID NO: 2606041 - DNA, 25 bp, Homo sapien
gggcttaaaggcaactgtgaaactg

SEQ ID NO: 2606042 - DNA, 25 bp, Homo sapien
tgacggctggactagaacaacttct

SEQ ID NO: 2606043 - DNA, 25 bp, Homo sapien
tgttgtgctaaattcataaacaact

SEQ ID NO: 2606044 - DNA, 25 bp, Homo sapien
cacatacacatgactacgaatgaca

SEQ ID NO: 2606045 - DNA, 25 bp, Homo sapien
gcaattttcttcagggcattagcta

SEQ ID NO: 2606046 - DNA, 25 bp, Homo sapien
tgacaggtaacagatcaaaagaaaa

SEQ ID NO: 2606047 - DNA, 25 bp, Homo sapien
gtaggctgtagcaaaacaaacgagc

SEQ ID NO: 2606048 - DNA, 25 bp, Homo sapien
cctgcagagggcgtgaatgtaattg

SEQ ID NO: 2606049 - DNA, 25 bp, Homo sapien
tccgagttgccgacaaatacccaca

SEQ ID NO: 2606050 - DNA, 25 bp, Homo sapien
aatacccacatacaccctgcagagg

SEQ ID NO: 2606051 - DNA, 25 bp, Homo sapien
ttgcctggcaactaactgcattgct

SEQ ID NO: 2606052 - DNA, 25 bp, Homo sapien
taatcaccgattgagagagaaatat

SEQ ID NO: 2606053 - DNA, 25 bp, Homo sapien
gcattgctttattaatcaccgattg

SEQ ID NO: 2606054 - DNA, 25 bp, Homo sapien
tcaagcagttcagaacctctccttt

SEQ ID NO: 2606055 - DNA, 25 bp, Homo sapien
tccagaagcaggtaactctccggaa

SEQ ID NO: 2606056 - DNA, 25 bp, Homo sapien
gaggcaggtaaccttccagaagcag

SEQ ID NO: 2606057 - DNA, 25 bp, Homo sapien
gcaggtaactctccggaagctggca

SEQ ID NO: 2606058 - DNA, 25 bp, Homo sapien
caggtaagtctctggaggcaggtaa

SEQ ID NO: 2606059 - DNA, 25 bp, Homo sapien
tctgggaacgggtaactctctggag

SEQ ID NO: 2606060 - DNA, 25 bp, Homo sapien
taatgctcgaggcaggtaactctct

SEQ ID NO: 2606061 - DNA, 25 bp, Homo sapien
gataacattctgaaggcgggtaacc

SEQ ID NO: 2606062 - DNA, 25 bp, Homo sapien
gacacagtaactctctaggaacagg

SEQ ID NO: 2606063 - DNA, 25 bp, Homo sapien
tacacaatggtagctggatgagcca

SEQ ID NO: 2606064 - DNA, 25 bp, Homo sapien
gactataataagcattcgatgacta

SEQ ID NO: 2606065 - DNA, 25 bp, Homo sapien
aaaacagtttgactaaggaaccatg

SEQ ID NO: 2606066 - DNA, 25 bp, Homo sapien
gagcttacctgtaatccagatagga

SEQ ID NO: 2606067 - DNA, 25 bp, Homo sapien
tatgatgttatcatgcgtccagatc

SEQ ID NO: 2606068 - DNA, 25 bp, Homo sapien
gatccatttctgatggcagcagagc

SEQ ID NO: 2606069 - DNA, 25 bp, Homo sapien
gtgttatcacttaggtcttcaccaa

SEQ ID NO: 2606070 - DNA, 25 bp, Homo sapien
tgtttttggacataactgtatggtc

SEQ ID NO: 2606071 - DNA, 25 bp, Homo sapien
tttcttctagatactccctactatc

SEQ ID NO: 2606072 - DNA, 25 bp, Homo sapien
cctactatctatggatgtaaacaac

SEQ ID NO: 2606073 - DNA, 25 bp, Homo sapien
tctagatactccctactatctatgg

SEQ ID NO: 2606074 - DNA, 25 bp, Homo sapien
tcttctagatactccctactatcta

SEQ ID NO: 2606075 - DNA, 25 bp, Homo sapien
tcagtattgaggctataataatatc

SEQ ID NO: 2606076 - DNA, 25 bp, Homo sapien
gagtatacgcaatgtttgcatgtcc

SEQ ID NO: 2606077 - DNA, 25 bp, Homo sapien
tataataatatcaggagtatacgca

SEQ ID NO: 2606078 - DNA, 25 bp, Homo sapien
tcagcctcagtattgaggctataat

SEQ ID NO: 2606079 - DNA, 25 bp, Homo sapien
aacataccaataaccgaactaatat

SEQ ID NO: 2606080 - DNA, 25 bp, Homo sapien
ataaccgaactaatatttttcacag

SEQ ID NO: 2606081 - DNA, 25 bp, Homo sapien
cttcatcgtgagcatgctgtataaa

SEQ ID NO: 2606082 - DNA, 25 bp, Homo sapien
catcgtgagcatgctgtataaacat

SEQ ID NO: 2606083 - DNA, 25 bp, Homo sapien
gacgaggattaccacagcttctagg

SEQ ID NO: 2606084 - DNA, 25 bp, Homo sapien
gactctatgagatatccacgggaag

SEQ ID NO: 2606085 - DNA, 25 bp, Homo sapien
ggagcatcaacatgacccacaaagg

SEQ ID NO: 2606086 - DNA, 25 bp, Homo sapien
caaggtctaatctatagcaggcccc

SEQ ID NO: 2606087 - DNA, 25 bp, Homo sapien
ctggattgctgggactcaagtcaca

SEQ ID NO: 2606088 - DNA, 25 bp, Homo sapien
gctgctaactgtataccccatggta

SEQ ID NO: 2606089 - DNA, 25 bp, Homo sapien
tctccgccaagcttccaggatcttg

SEQ ID NO: 2606090 - DNA, 25 bp, Homo sapien
caatcgcagacggaacgcttttgga

SEQ ID NO: 2606091 - DNA, 25 bp, Homo sapien
gctcctctgtgctcagggcactgac

SEQ ID NO: 2606092 - DNA, 25 bp, Homo sapien
ccaagctcctctgtgctcagggcac

SEQ ID NO: 2606093 - DNA, 25 bp, Homo sapien
tcagccaagctcctctgtgctcagg

SEQ ID NO: 2606094 - DNA, 25 bp, Homo sapien
aagctcctctgtgctcagggcactg

SEQ ID NO: 2606095 - DNA, 25 bp, Homo sapien
ggtccatatgtacacggcacacaga

SEQ ID NO: 2606096 - DNA, 25 bp, Homo sapien
ggaaaaacgactatgcgactgcttg

SEQ ID NO: 2606097 - DNA, 25 bp, Homo sapien
tgtgagacacatcatagcacggtcc

SEQ ID NO: 2606098 - DNA, 25 bp, Homo sapien
acaagtccaacaacaacagctcagg

SEQ ID NO: 2606099 - DNA, 25 bp, Homo sapien
tccagtcctaagaagccaggtgtga

SEQ ID NO: 2606100 - DNA, 25 bp, Homo sapien
gccaaggcattccaaggtactaacg

SEQ ID NO: 2606101 - DNA, 25 bp, Homo sapien
gggaaagccatctagagaccagagc

SEQ ID NO: 2606102 - DNA, 25 bp, Homo sapien
ggccccgcgaaaggtgcagttaaga

SEQ ID NO: 2606103 - DNA, 25 bp, Homo sapien
tagttttaagaatctcgctggtgtt

SEQ ID NO: 2606104 - DNA, 25 bp, Homo sapien
ccagcacagccgccgtggaggatct

SEQ ID NO: 2606105 - DNA, 25 bp, Homo sapien
tctcgctggtgttggcttggactcg

SEQ ID NO: 2606106 - DNA, 25 bp, Homo sapien
cacgtccagcaagtgtggggttcca

SEQ ID NO: 2606107 - DNA, 25 bp, Homo sapien
caaacatttgccaatgtgactgtgg

SEQ ID NO: 2606108 - DNA, 25 bp, Homo sapien
tatagtgagtcttggattatctgcg

SEQ ID NO: 2606109 - DNA, 25 bp, Homo sapien
gacaggttacctcatcgcaaacatg

SEQ ID NO: 2606110 - DNA, 25 bp, Homo sapien
ggtcagattcgggttgtccaaacat

SEQ ID NO: 2606111 - DNA, 25 bp, Homo sapien
ccataggctgtgcacggtgaaatct

SEQ ID NO: 2606112 - DNA, 25 bp, Homo sapien
tctacaggcccaaggtaaccagcat

SEQ ID NO: 2606113 - DNA, 25 bp, Homo sapien
tgtgcctcatgtggtcaattcccgg

SEQ ID NO: 2606114 - DNA, 25 bp, Homo sapien
tgaaatctgcctcgggatggctgct

SEQ ID NO: 2606115 - DNA, 25 bp, Homo sapien
cagacttcaaccatgtgattacttc

SEQ ID NO: 2606116 - DNA, 25 bp, Homo sapien
ttcaaccatgtgattacttctttgc

SEQ ID NO: 2606117 - DNA, 25 bp, Homo sapien
ccacagacttcaaccatgtgattac

SEQ ID NO: 2606118 - DNA, 25 bp, Homo sapien
agacttcaaccatgtgattacttct

SEQ ID NO: 2606119 - DNA, 25 bp, Homo sapien
gtagcttgtcccattctggatgtgg

SEQ ID NO: 2606120 - DNA, 25 bp, Homo sapien
gtcccattctggatgtggttctctt

SEQ ID NO: 2606121 - DNA, 25 bp, Homo sapien
ccattctggatgtggttctcttcat

SEQ ID NO: 2606122 - DNA, 25 bp, Homo sapien
tgtagcttgtcccattctggatgtg

SEQ ID NO: 2606123 - DNA, 25 bp, Homo sapien
agtgtgtagggtcttcacgcagaac

SEQ ID NO: 2606124 - DNA, 25 bp, Homo sapien
ttaggcaaaagcccagtccaggagg

SEQ ID NO: 2606125 - DNA, 25 bp, Homo sapien
gaagtcaatgaaggaagtgtgtagg

SEQ ID NO: 2606126 - DNA, 25 bp, Homo sapien
tagccgaccggaaggagcagaagtc

SEQ ID NO: 2606127 - DNA, 25 bp, Homo sapien
atcaggtgggttccatggccccaac

SEQ ID NO: 2606128 - DNA, 25 bp, Homo sapien
gaggtaagccctcgacatcatagcc

SEQ ID NO: 2606129 - DNA, 25 bp, Homo sapien
caggctggacactggtgcttgccac

SEQ ID NO: 2606130 - DNA, 25 bp, Homo sapien
ccatgcccataggtcacatcaggtg

SEQ ID NO: 2606131 - DNA, 25 bp, Homo sapien
cttgcttcagtgtcatcagaccaca

SEQ ID NO: 2606132 - DNA, 25 bp, Homo sapien
ggaatgctcttgcttgtgctcttgc

SEQ ID NO: 2606133 - DNA, 25 bp, Homo sapien
gatcctggacatgtggagacccaag

SEQ ID NO: 2606134 - DNA, 25 bp, Homo sapien
tctcgcctcatctggaacatccaaa

SEQ ID NO: 2606135 - DNA, 25 bp, Homo sapien
gagctgacttttgcctgtacaccaa

SEQ ID NO: 2606136 - DNA, 25 bp, Homo sapien
ctgtgttgagagctgacttttgcct

SEQ ID NO: 2606137 - DNA, 25 bp, Homo sapien
tgagagctgacttttgcctgtacac

SEQ ID NO: 2606138 - DNA, 25 bp, Homo sapien
ctgacttttgcctgtacaccaacat

SEQ ID NO: 2606139 - DNA, 25 bp, Homo sapien
aagtatacatccacttctggtagtg

SEQ ID NO: 2606140 - DNA, 25 bp, Homo sapien
acagatgaccgcctactccctggaa

SEQ ID NO: 2606141 - DNA, 25 bp, Homo sapien
cagccctggagtcaaaaccgtgtct

SEQ ID NO: 2606142 - DNA, 25 bp, Homo sapien
ttcctcctcgaagtatacatccact

SEQ ID NO: 2606143 - DNA, 25 bp, Homo sapien
acttggtgtgatcatggccaacacc

SEQ ID NO: 2606144 - DNA, 25 bp, Homo sapien
tcagtgagacttggtgtgatcatgg

SEQ ID NO: 2606145 - DNA, 25 bp, Homo sapien
cagtgagacttggtgtgatcatggc

SEQ ID NO: 2606146 - DNA, 25 bp, Homo sapien
tggtgtgatcatggccaacaccaac

SEQ ID NO: 2606147 - DNA, 25 bp, Homo sapien
ccagataaccctcttactcctgtaa

SEQ ID NO: 2606148 - DNA, 25 bp, Homo sapien
ccttgggcgttatctgtccccacat

SEQ ID NO: 2606149 - DNA, 25 bp, Homo sapien
tttccttgggcgttatctgtcccca

SEQ ID NO: 2606150 - DNA, 25 bp, Homo sapien
tccagataaccctcttactcctgta

SEQ ID NO: 2606151 - DNA, 25 bp, Homo sapien
cacacaggggcgtctgaatccgttc

SEQ ID NO: 2606152 - DNA, 25 bp, Homo sapien
tccagtcacacacaggggcgtctga

SEQ ID NO: 2606153 - DNA, 25 bp, Homo sapien
gggcgtctgaatccgttcctctctt

SEQ ID NO: 2606154 - DNA, 25 bp, Homo sapien
tctgaatccgttcctctcttaaagt

SEQ ID NO: 2606155 - DNA, 25 bp, Homo sapien
tccccagtatgccaagaaagtctat

SEQ ID NO: 2606156 - DNA, 25 bp, Homo sapien
gaaccgatcgatatgtggagcagta

SEQ ID NO: 2606157 - DNA, 25 bp, Homo sapien
caggaccaggtgtttctaggaaccg

SEQ ID NO: 2606158 - DNA, 25 bp, Homo sapien
taaagtgtcttggtggcatccccag

SEQ ID NO: 2606159 - DNA, 25 bp, Homo sapien
tccaaggaatgtgaagttgggctgt

SEQ ID NO: 2606160 - DNA, 25 bp, Homo sapien
tgggatgatgttggtttgcacactc

SEQ ID NO: 2606161 - DNA, 25 bp, Homo sapien
ggagccacagagaccggggagagca

SEQ ID NO: 2606162 - DNA, 25 bp, Homo sapien
gatgatgttggtttgcacactcctc

SEQ ID NO: 2606163 - DNA, 25 bp, Homo sapien
gacacagttaagctgcccacagaca

SEQ ID NO: 2606164 - DNA, 25 bp, Homo sapien
caaagaattttcgaggacacagtta

SEQ ID NO: 2606165 - DNA, 25 bp, Homo sapien
tggaacagctctgcaagccttgtgt

SEQ ID NO: 2606166 - DNA, 25 bp, Homo sapien
tcttcagggtcgaaatagctgccac

SEQ ID NO: 2606167 - DNA, 25 bp, Homo sapien
ctgaatccatggacatttagagtca

SEQ ID NO: 2606168 - DNA, 25 bp, Homo sapien
tgaatccatggacatttagagtcat

SEQ ID NO: 2606169 - DNA, 25 bp, Homo sapien
tcccttctgctatggcagcaactcc

SEQ ID NO: 2606170 - DNA, 25 bp, Homo sapien
ggcctgggccaccaatgtcaggttc

SEQ ID NO: 2606171 - DNA, 25 bp, Homo sapien
gaacccccggtgtagaaatgagatg

SEQ ID NO: 2606172 - DNA, 25 bp, Homo sapien
caccaatgtcaggttcacggaaccc

SEQ ID NO: 2606173 - DNA, 25 bp, Homo sapien
gctgctttcacgcatctctccctgt

SEQ ID NO: 2606174 - DNA, 25 bp, Homo sapien
ttgattcccgcttgctgctttcacg

SEQ ID NO: 2606175 - DNA, 25 bp, Homo sapien
gattcccgcttgctgctttcacgca

SEQ ID NO: 2606176 - DNA, 25 bp, Homo sapien
tttcacgcatctctccctgtgccat

SEQ ID NO: 2606177 - DNA, 25 bp, Homo sapien
cctcaagaatgtctctggtgaggcg

SEQ ID NO: 2606178 - DNA, 25 bp, Homo sapien
caagaatgtctctggtgaggcgctg

SEQ ID NO: 2606179 - DNA, 25 bp, Homo sapien
aagaatgtctctggtgaggcgctgg

SEQ ID NO: 2606180 - DNA, 25 bp, Homo sapien
tcaagaatgtctctggtgaggcgct

SEQ ID NO: 2606181 - DNA, 25 bp, Homo sapien
gggacctcagaatcaacactgtaat

SEQ ID NO: 2606182 - DNA, 25 bp, Homo sapien
gtaataaaatgtatcatcgctgtcc

SEQ ID NO: 2606183 - DNA, 25 bp, Homo sapien
tggatgttgaggacaccagaagcct

SEQ ID NO: 2606184 - DNA, 25 bp, Homo sapien
cactgtaataaaatgtatcatcgct

SEQ ID NO: 2606185 - DNA, 25 bp, Homo sapien
tgctccctgccattgtgtaaagatt

SEQ ID NO: 2606186 - DNA, 25 bp, Homo sapien
ctgcgaagagctctgtgttgctttg

SEQ ID NO: 2606187 - DNA, 25 bp, Homo sapien
gctgctccctgccattgtgtaaaga

SEQ ID NO: 2606188 - DNA, 25 bp, Homo sapien
gctccctgccattgtgtaaagattt

SEQ ID NO: 2606189 - DNA, 25 bp, Homo sapien
agctgctcctgtgcataaggtcgga

SEQ ID NO: 2606190 - DNA, 25 bp, Homo sapien
ccctggctcttgtagcgctgtcttg

SEQ ID NO: 2606191 - DNA, 25 bp, Homo sapien
tagcgctgtcttgtgttggagaccc

SEQ ID NO: 2606192 - DNA, 25 bp, Homo sapien
gcaggtggatatcaccagacccctg

SEQ ID NO: 2606193 - DNA, 25 bp, Homo sapien
gggctctatagcaccctccttcaat

SEQ ID NO: 2606194 - DNA, 25 bp, Homo sapien
gaaagtgccggataatgagtccagc

SEQ ID NO: 2606195 - DNA, 25 bp, Homo sapien
tgagtccagctacctgctcaagggc

SEQ ID NO: 2606196 - DNA, 25 bp, Homo sapien
tctggcactgccctaaatgctgtgt

SEQ ID NO: 2606197 - DNA, 25 bp, Homo sapien
caccaggggttttcatggagccctc

SEQ ID NO: 2606198 - DNA, 25 bp, Homo sapien
gcaccaggggttttcatggagccct

SEQ ID NO: 2606199 - DNA, 25 bp, Homo sapien
acagggttcaaacgaagcgaattgg

SEQ ID NO: 2606200 - DNA, 25 bp, Homo sapien
cagggttcaaacgaagcgaattggt

SEQ ID NO: 2606201 - DNA, 25 bp, Homo sapien
ccacagggttcaaacgaagcgaatt

SEQ ID NO: 2606202 - DNA, 25 bp, Homo sapien
cacagggttcaaacgaagcgaattg

SEQ ID NO: 2606203 - DNA, 25 bp, Homo sapien
tgataatgcagtcggatgattttat

SEQ ID NO: 2606204 - DNA, 25 bp, Homo sapien
taatgcagtcggatgattttatttt

SEQ ID NO: 2606205 - DNA, 25 bp, Homo sapien
ataatgcagtcggatgattttattt

SEQ ID NO: 2606206 - DNA, 25 bp, Homo sapien
ctgataatgcagtcggatgatttta

SEQ ID NO: 2606207 - DNA, 25 bp, Homo sapien
tctcctctgacgttcttgaagcttc

SEQ ID NO: 2606208 - DNA, 25 bp, Homo sapien
cttctcctctgacgttcttgaagct

SEQ ID NO: 2606209 - DNA, 25 bp, Homo sapien
cagagctcttctgctcctatcttct

SEQ ID NO: 2606210 - DNA, 25 bp, Homo sapien
ctcctctgacgttcttgaagcttct

SEQ ID NO: 2606211 - DNA, 25 bp, Homo sapien
tgcctgctcagggttttgcttttgc

SEQ ID NO: 2606212 - DNA, 25 bp, Homo sapien
catgttgagcttcagtctttttctt

SEQ ID NO: 2606213 - DNA, 25 bp, Homo sapien
gccactccatgcctgctcagggttt

SEQ ID NO: 2606214 - DNA, 25 bp, Homo sapien
ttcttccttagcttcatgttgagct

SEQ ID NO: 2606215 - DNA, 25 bp, Homo sapien
gaattctgcatccaacaattgtgga

SEQ ID NO: 2606216 - DNA, 25 bp, Homo sapien
ggaatcacattggtctcagaaacac

SEQ ID NO: 2606217 - DNA, 25 bp, Homo sapien
gaatggaagtagacgtgactgcaga

SEQ ID NO: 2606218 - DNA, 25 bp, Homo sapien
gaaagtgaatcattgcatagaccca

SEQ ID NO: 2606219 - DNA, 25 bp, Homo sapien
gggtcattggcattggatggtatca

SEQ ID NO: 2606220 - DNA, 25 bp, Homo sapien
tcattggcattggatggtatcacac

SEQ ID NO: 2606221 - DNA, 25 bp, Homo sapien
gcattggatggtatcacacctgaaa

SEQ ID NO: 2606222 - DNA, 25 bp, Homo sapien
ttggcattggatggtatcacacctg

SEQ ID NO: 2606223 - DNA, 25 bp, Homo sapien
catcatcatagaaggacatcagaag

SEQ ID NO: 2606224 - DNA, 25 bp, Homo sapien
ttacagtgtaatagcacggtcatca

SEQ ID NO: 2606225 - DNA, 25 bp, Homo sapien
cggtcatcatcatagaaggacatca

SEQ ID NO: 2606226 - DNA, 25 bp, Homo sapien
tacagtgtaatagcacggtcatcat

SEQ ID NO: 2606227 - DNA, 25 bp, Homo sapien
cagtgtgcgttggtttcatctgaac

SEQ ID NO: 2606228 - DNA, 25 bp, Homo sapien
catctgaacgttctgagcagggagc

SEQ ID NO: 2606229 - DNA, 25 bp, Homo sapien
cgttggtttcatctgaacgttctga

SEQ ID NO: 2606230 - DNA, 25 bp, Homo sapien
gtggtccagtgtgcgttggtttcat

SEQ ID NO: 2606231 - DNA, 25 bp, Homo sapien
agccctgtgagacactaagtacaca

SEQ ID NO: 2606232 - DNA, 25 bp, Homo sapien
tgtgtcagcatctaactgttttgca

SEQ ID NO: 2606233 - DNA, 25 bp, Homo sapien
cagcatctaactgttttgcaatgta

SEQ ID NO: 2606234 - DNA, 25 bp, Homo sapien
gtgagacactaagtacacagccctg

SEQ ID NO: 2606235 - DNA, 25 bp, Homo sapien
actgactcattatgaagacgaacat

SEQ ID NO: 2606236 - DNA, 25 bp, Homo sapien
cactgactcattatgaagacgaaca

SEQ ID NO: 2606237 - DNA, 25 bp, Homo sapien
gcactgactcattatgaagacgaac

SEQ ID NO: 2606238 - DNA, 25 bp, Homo sapien
ggcttagaatatccctgaagtaaaa

SEQ ID NO: 2606239 - DNA, 25 bp, Homo sapien
gatagtggcttagaatatccctgaa

SEQ ID NO: 2606240 - DNA, 25 bp, Homo sapien
tgaacaggcaacatttgaagagata

SEQ ID NO: 2606241 - DNA, 25 bp, Homo sapien
ttggagttagatggaatggtgaaca

SEQ ID NO: 2606242 - DNA, 25 bp, Homo sapien
aagctgtgcacatgccggtctgagg

SEQ ID NO: 2606243 - DNA, 25 bp, Homo sapien
tatttcccagatgcacggtgtcctc

SEQ ID NO: 2606244 - DNA, 25 bp, Homo sapien
aggaagttacttctcccaggcgcct

SEQ ID NO: 2606245 - DNA, 25 bp, Homo sapien
gcagtgtttaaccttgaccccagga

SEQ ID NO: 2606246 - DNA, 25 bp, Homo sapien
ctgcaggctttccttaagcaactca

SEQ ID NO: 2606247 - DNA, 25 bp, Homo sapien
tgcaggctttccttaagcaactcat

SEQ ID NO: 2606248 - DNA, 25 bp, Homo sapien
caggctttccttaagcaactcatcc

SEQ ID NO: 2606249 - DNA, 25 bp, Homo sapien
gcaggctttccttaagcaactcatc

SEQ ID NO: 2606250 - DNA, 25 bp, Homo sapien
gacagtgggacatctgtgtgtccat

SEQ ID NO: 2606251 - DNA, 25 bp, Homo sapien
tccaacagggagacagtgggacatc

SEQ ID NO: 2606252 - DNA, 25 bp, Homo sapien
ctgcaactgcaagcaaggcacatct

SEQ ID NO: 2606253 - DNA, 25 bp, Homo sapien
tgcaagcaaggcacatctccaacag

SEQ ID NO: 2606254 - DNA, 25 bp, Homo sapien
ttaatcctccctttagactgtggga

SEQ ID NO: 2606255 - DNA, 25 bp, Homo sapien
tcacttgggctggaccttagggcta

SEQ ID NO: 2606256 - DNA, 25 bp, Homo sapien
ctccctttagactgtgggacacttt

SEQ ID NO: 2606257 - DNA, 25 bp, Homo sapien
tgggctggaccttagggctaaagta

SEQ ID NO: 2606258 - DNA, 25 bp, Homo sapien
gcaaactcataatcagcctcctctg

SEQ ID NO: 2606259 - DNA, 25 bp, Homo sapien
caaactcataatcagcctcctctgc

SEQ ID NO: 2606260 - DNA, 25 bp, Homo sapien
tgtccaatcattagagaagagagag

SEQ ID NO: 2606261 - DNA, 25 bp, Homo sapien
tctgtccaatcattagagaagagag

SEQ ID NO: 2606262 - DNA, 25 bp, Homo sapien
ccaatcattagagaagagagagcat

SEQ ID NO: 2606263 - DNA, 25 bp, Homo sapien
gagtctgtccaatcattagagaaga

SEQ ID NO: 2606264 - DNA, 25 bp, Homo sapien
tcacacagtggaaggcatctgttct

SEQ ID NO: 2606265 - DNA, 25 bp, Homo sapien
ttctgctatcagtgaggccgcatta

SEQ ID NO: 2606266 - DNA, 25 bp, Homo sapien
ctccgaacttctgctatcagtgagg

SEQ ID NO: 2606267 - DNA, 25 bp, Homo sapien
cgaacttctgctatcagtgaggccg

SEQ ID NO: 2606268 - DNA, 25 bp, Homo sapien
aacttctgctatcagtgaggccgca

SEQ ID NO: 2606269 - DNA, 25 bp, Homo sapien
taagcccggcagatgaaatcagaac

SEQ ID NO: 2606270 - DNA, 25 bp, Homo sapien
cattatgctgtaagggctaagtgca

SEQ ID NO: 2606271 - DNA, 25 bp, Homo sapien
cacagtagctctctctaaaggatca

SEQ ID NO: 2606272 - DNA, 25 bp, Homo sapien
tatataaaaagatgacagcatagcc

SEQ ID NO: 2606273 - DNA, 25 bp, Homo sapien
ggggttctgtgctgacggccaagag

SEQ ID NO: 2606274 - DNA, 25 bp, Homo sapien
ggttctgtgctgacggccaagagca

SEQ ID NO: 2606275 - DNA, 25 bp, Homo sapien
gggttctgtgctgacggccaagagc

SEQ ID NO: 2606276 - DNA, 25 bp, Homo sapien
tgtggaaggaggctgttttggaagc

SEQ ID NO: 2606277 - DNA, 25 bp, Homo sapien
aaggcctgtggaaggaggctgtttt

SEQ ID NO: 2606278 - DNA, 25 bp, Homo sapien
ggaaggaggctgttttggaagctgg

SEQ ID NO: 2606279 - DNA, 25 bp, Homo sapien
ttggaagctggaaggaggcggccat

SEQ ID NO: 2606280 - DNA, 25 bp, Homo sapien
ggtagtaatggtcaggagaaccttg

SEQ ID NO: 2606281 - DNA, 25 bp, Homo sapien
tgtttaggcatttacgactgttctc

SEQ ID NO: 2606282 - DNA, 25 bp, Homo sapien
tcaggagaaccttgtttaggcattt

SEQ ID NO: 2606283 - DNA, 25 bp, Homo sapien
taatggtcaggagaaccttgtttag

SEQ ID NO: 2606284 - DNA, 25 bp, Homo sapien
acatatcagctttctcggtgaactc

SEQ ID NO: 2606285 - DNA, 25 bp, Homo sapien
aactctgcatccttgagtcgagtca

SEQ ID NO: 2606286 - DNA, 25 bp, Homo sapien
tcggtgaactctgcatccttgagtc

SEQ ID NO: 2606287 - DNA, 25 bp, Homo sapien
tatcagctttctcggtgaactctgc

SEQ ID NO: 2606288 - DNA, 25 bp, Homo sapien
gtgattcccatcacatcaccattag

SEQ ID NO: 2606289 - DNA, 25 bp, Homo sapien
tcccatcacatcaccattagtggac

SEQ ID NO: 2606290 - DNA, 25 bp, Homo sapien
tgtgacagcgtgattcccatcacat

SEQ ID NO: 2606291 - DNA, 25 bp, Homo sapien
tcacatcaccattagtggaccccat

SEQ ID NO: 2606292 - DNA, 25 bp, Homo sapien
ttgacgttgattggctgcatgagca

SEQ ID NO: 2606293 - DNA, 25 bp, Homo sapien
gcactgaacatttgacgttgattgg

SEQ ID NO: 2606294 - DNA, 25 bp, Homo sapien
tgcatgagcacaatgtgtggcccga

SEQ ID NO: 2606295 - DNA, 25 bp, Homo sapien
cgagccctcggctgctggacacgga

SEQ ID NO: 2606296 - DNA, 25 bp, Homo sapien
ttagaggacttcttgcaagatcgcc

SEQ ID NO: 2606297 - DNA, 25 bp, Homo sapien
ggacttcttgcaagatcgcctcagg

SEQ ID NO: 2606298 - DNA, 25 bp, Homo sapien
cttcttgcaagatcgcctcaggtat

SEQ ID NO: 2606299 - DNA, 25 bp, Homo sapien
gaggacttcttgcaagatcgcctca

SEQ ID NO: 2606300 - DNA, 25 bp, Homo sapien
tagtttctgcttccaaatgaatacc

SEQ ID NO: 2606301 - DNA, 25 bp, Homo sapien
tctgcttccaaatgaataccacatt

SEQ ID NO: 2606302 - DNA, 25 bp, Homo sapien
tttctgcttccaaatgaataccaca

SEQ ID NO: 2606303 - DNA, 25 bp, Homo sapien
gtttctgcttccaaatgaataccac

SEQ ID NO: 2606304 - DNA, 25 bp, Homo sapien
caccaccctgggggattgtcttcca

SEQ ID NO: 2606305 - DNA, 25 bp, Homo sapien
caccaccaccctgggggattgtctt

SEQ ID NO: 2606306 - DNA, 25 bp, Homo sapien
caccctgggggattgtcttccattc

SEQ ID NO: 2606307 - DNA, 25 bp, Homo sapien
acaccaccaccctgggggattgtct

SEQ ID NO: 2606308 - DNA, 25 bp, Homo sapien
gatttgtccagtgcacccaggaagg

SEQ ID NO: 2606309 - DNA, 25 bp, Homo sapien
ctgctgaatgcatatggcaggaatc

SEQ ID NO: 2606310 - DNA, 25 bp, Homo sapien
ggtggcccatctggcagcatagaca

SEQ ID NO: 2606311 - DNA, 25 bp, Homo sapien
acatagagtgtctgctgaatgcata

SEQ ID NO: 2606312 - DNA, 25 bp, Homo sapien
aacaccacgactgacgcagactcgg

SEQ ID NO: 2606313 - DNA, 25 bp, Homo sapien
tccagccgcggagctgtgctgggtg

SEQ ID NO: 2606314 - DNA, 25 bp, Homo sapien
gactgacgcagactcggtgttcatt

SEQ ID NO: 2606315 - DNA, 25 bp, Homo sapien
gactcggtgttcattgccatgtcca

SEQ ID NO: 2606316 - DNA, 25 bp, Homo sapien
ttgtgaccctgaagttatttcctcc

SEQ ID NO: 2606317 - DNA, 25 bp, Homo sapien
caacagctggttacaatgtccttca

SEQ ID NO: 2606318 - DNA, 25 bp, Homo sapien
gtccttcagggcgttcattccttcc

SEQ ID NO: 2606319 - DNA, 25 bp, Homo sapien
ttccttccgcagacttttttgtgac

SEQ ID NO: 2606320 - DNA, 25 bp, Homo sapien
ttttactcttcactcttgctgccac

SEQ ID NO: 2606321 - DNA, 25 bp, Homo sapien
ttactcttcactcttgctgccacca

SEQ ID NO: 2606322 - DNA, 25 bp, Homo sapien
gttttactcttcactcttgctgcca

SEQ ID NO: 2606323 - DNA, 25 bp, Homo sapien
ctgttttactcttcactcttgctgc

SEQ ID NO: 2606324 - DNA, 25 bp, Homo sapien
ggtggctccatggctcagatgcagg

SEQ ID NO: 2606325 - DNA, 25 bp, Homo sapien
caggtggctccatggctcagatgca

SEQ ID NO: 2606326 - DNA, 25 bp, Homo sapien
aggtggctccatggctcagatgcag

SEQ ID NO: 2606327 - DNA, 25 bp, Homo sapien
tggaggtgggatcagaggaggtcac

SEQ ID NO: 2606328 - DNA, 25 bp, Homo sapien
ggaggtgggatcagaggaggtcaca

SEQ ID NO: 2606329 - DNA, 25 bp, Homo sapien
aagccacatgctccttggttgtagc

SEQ ID NO: 2606330 - DNA, 25 bp, Homo sapien
cacatgctccttggttgtagcccat

SEQ ID NO: 2606331 - DNA, 25 bp, Homo sapien
tagcccattcttgcggctgagcctt

SEQ ID NO: 2606332 - DNA, 25 bp, Homo sapien
tccttggttgtagcccattcttgcg

SEQ ID NO: 2606333 - DNA, 25 bp, Homo sapien
gtgtcttccagtgccgactcctaag

SEQ ID NO: 2606334 - DNA, 25 bp, Homo sapien
cccatctgggcctttttgttcggca

SEQ ID NO: 2606335 - DNA, 25 bp, Homo sapien
gccgactcctaagtcaaagccaggg

SEQ ID NO: 2606336 - DNA, 25 bp, Homo sapien
ccatctgggcctttttgttcggcac

SEQ ID NO: 2606337 - DNA, 25 bp, Homo sapien
agggtcccccaagaccttgcaatca

SEQ ID NO: 2606338 - DNA, 25 bp, Homo sapien
agaccttgcaatcatggaccaccaa

SEQ ID NO: 2606339 - DNA, 25 bp, Homo sapien
ggtcactgtcttagatactgttgct

SEQ ID NO: 2606340 - DNA, 25 bp, Homo sapien
ggacagttgcacaaagggctgaggg

SEQ ID NO: 2606341 - DNA, 25 bp, Homo sapien
ttctaaggaggttctcaggaggcag

SEQ ID NO: 2606342 - DNA, 25 bp, Homo sapien
tgctccaattcctctttctaaggag

SEQ ID NO: 2606343 - DNA, 25 bp, Homo sapien
tcctctttctaaggaggttctcagg

SEQ ID NO: 2606344 - DNA, 25 bp, Homo sapien
cataagggcctccatgctccaattc

SEQ ID NO: 2606345 - DNA, 25 bp, Homo sapien
tctgtgcgccagcaaagcgaggctg

SEQ ID NO: 2606346 - DNA, 25 bp, Homo sapien
tccacgttcgtgttgggaccggctc

SEQ ID NO: 2606347 - DNA, 25 bp, Homo sapien
tgcaagccctgtggatgttgacgca

SEQ ID NO: 2606348 - DNA, 25 bp, Homo sapien
ggaccggctcgtgatgcttcagaga

SEQ ID NO: 2606349 - DNA, 25 bp, Homo sapien
cattccggtgaaatcgaagtggtcg

SEQ ID NO: 2606350 - DNA, 25 bp, Homo sapien
gggaagccagcgtcgccgctcagct

SEQ ID NO: 2606351 - DNA, 25 bp, Homo sapien
gaactgtagccccactcgagcattc

SEQ ID NO: 2606352 - DNA, 25 bp, Homo sapien
agaagcgcgccgctttgggagtcca

SEQ ID NO: 2606353 - DNA, 25 bp, Homo sapien
caaatgacgccattaggccgaagct

SEQ ID NO: 2606354 - DNA, 25 bp, Homo sapien
caaaggaccatgaggcaaatgacgc

SEQ ID NO: 2606355 - DNA, 25 bp, Homo sapien
aggtaacctgctagggacccagaga

SEQ ID NO: 2606356 - DNA, 25 bp, Homo sapien
gctctccaagtaagaaggctctgcc

SEQ ID NO: 2606357 - DNA, 25 bp, Homo sapien
gagaatgggcgtggagaaaatccac

SEQ ID NO: 2606358 - DNA, 25 bp, Homo sapien
tgtttctaggcagtcttctttggaa

SEQ ID NO: 2606359 - DNA, 25 bp, Homo sapien
gacagcccttatgcttaaacaagga

SEQ ID NO: 2606360 - DNA, 25 bp, Homo sapien
gactgaacggaagtccgctcatctt

SEQ ID NO: 2606361 - DNA, 25 bp, Homo sapien
tttattgtacgttagcatgatttgc

SEQ ID NO: 2606362 - DNA, 25 bp, Homo sapien
tgacgcttatctgggactctagcac

SEQ ID NO: 2606363 - DNA, 25 bp, Homo sapien
cacgattaacttaaaccggagtgtg

SEQ ID NO: 2606364 - DNA, 25 bp, Homo sapien
gaagacccaggcattcgatttcacg

SEQ ID NO: 2606365 - DNA, 25 bp, Homo sapien
gatctaagtgaaagcattgtcacct

SEQ ID NO: 2606366 - DNA, 25 bp, Homo sapien
taactccatgttgctctctagccaa

SEQ ID NO: 2606367 - DNA, 25 bp, Homo sapien
tctctagccaaaattgaacatcggg

SEQ ID NO: 2606368 - DNA, 25 bp, Homo sapien
ggtgcaatcaaagcctacaactggg

SEQ ID NO: 2606369 - DNA, 25 bp, Homo sapien
agggtagccattctctctgtgtagc

SEQ ID NO: 2606370 - DNA, 25 bp, Homo sapien
caaacttcagccagatctggcccat

SEQ ID NO: 2606371 - DNA, 25 bp, Homo sapien
aaagccaaacttcagccagatctgg

SEQ ID NO: 2606372 - DNA, 25 bp, Homo sapien
tggtccaaggcttggcttcaaagcc

SEQ ID NO: 2606373 - DNA, 25 bp, Homo sapien
caggtagaaggcatccgggaggtag

SEQ ID NO: 2606374 - DNA, 25 bp, Homo sapien
cagagcaggtagaaggcatccggga

SEQ ID NO: 2606375 - DNA, 25 bp, Homo sapien
ccagcatccatcttgtcccagagca

SEQ ID NO: 2606376 - DNA, 25 bp, Homo sapien
agcatccatcttgtcccagagcagg

SEQ ID NO: 2606377 - DNA, 25 bp, Homo sapien
tgagggactgtcacactatccagaa

SEQ ID NO: 2606378 - DNA, 25 bp, Homo sapien
cccgcacaggtgagagtttagtagg

SEQ ID NO: 2606379 - DNA, 25 bp, Homo sapien
tttatcttttgtgatgaacttccaa

SEQ ID NO: 2606380 - DNA, 25 bp, Homo sapien
taggttcaaggtaacggccgtcaca

SEQ ID NO: 2606381 - DNA, 25 bp, Homo sapien
gatcatcacggcagacgctaggcat

SEQ ID NO: 2606382 - DNA, 25 bp, Homo sapien
ctgggctcagggaaggatcatcacg

SEQ ID NO: 2606383 - DNA, 25 bp, Homo sapien
gatacgttgactgccagaaggccct

SEQ ID NO: 2606384 - DNA, 25 bp, Homo sapien
gagcccttgtctcccagatacgttg

SEQ ID NO: 2606385 - DNA, 25 bp, Homo sapien
gaacaggtcagcaggtagcatggaa

SEQ ID NO: 2606386 - DNA, 25 bp, Homo sapien
cagatatttctggttggtagacagg

SEQ ID NO: 2606387 - DNA, 25 bp, Homo sapien
ttttgctgccagaattgcaccagac

SEQ ID NO: 2606388 - DNA, 25 bp, Homo sapien
cttgcctagagaccaagtgatgggc

SEQ ID NO: 2606389 - DNA, 25 bp, Homo sapien
atcccaaagtaggacaaacccatct

SEQ ID NO: 2606390 - DNA, 25 bp, Homo sapien
tcttctctcagctttagatggattc

SEQ ID NO: 2606391 - DNA, 25 bp, Homo sapien
ctctcagctttagatggattcttcc

SEQ ID NO: 2606392 - DNA, 25 bp, Homo sapien
cacatcccaaagtaggacaaaccca

SEQ ID NO: 2606393 - DNA, 25 bp, Homo sapien
ctttcctgtgcattacctggcctca

SEQ ID NO: 2606394 - DNA, 25 bp, Homo sapien
gctcaagttcagaacagcaaatctg

SEQ ID NO: 2606395 - DNA, 25 bp, Homo sapien
cctggcctcagatagtaagggggcc

SEQ ID NO: 2606396 - DNA, 25 bp, Homo sapien
cacctgagggccctttcctgtgcat

SEQ ID NO: 2606397 - DNA, 25 bp, Homo sapien
ggtaaatatcagggcaatctaacat

SEQ ID NO: 2606398 - DNA, 25 bp, Homo sapien
tggtaaatatcagggcaatctaaca

SEQ ID NO: 2606399 - DNA, 25 bp, Homo sapien
aatggtaaatatcagggcaatctaa

SEQ ID NO: 2606400 - DNA, 25 bp, Homo sapien
atggtaaatatcagggcaatctaac

SEQ ID NO: 2606401 - DNA, 25 bp, Homo sapien
ggctgtcccatggaacatttctctc

SEQ ID NO: 2606402 - DNA, 25 bp, Homo sapien
ggtcagcagatccaaaatgatcacc

SEQ ID NO: 2606403 - DNA, 25 bp, Homo sapien
tctctccagttaggaccctgaatca

SEQ ID NO: 2606404 - DNA, 25 bp, Homo sapien
cacagtggtcagcagatccaaaatg

SEQ ID NO: 2606405 - DNA, 25 bp, Homo sapien
agcagagaaactgggaaggttccag

SEQ ID NO: 2606406 - DNA, 25 bp, Homo sapien
cagagaaactgggaaggttccaggg

SEQ ID NO: 2606407 - DNA, 25 bp, Homo sapien
tcagcagagaaactgggaaggttcc

SEQ ID NO: 2606408 - DNA, 25 bp, Homo sapien
cagcagagaaactgggaaggttcca

SEQ ID NO: 2606409 - DNA, 25 bp, Homo sapien
tccagattgaagcagatattgtgca

SEQ ID NO: 2606410 - DNA, 25 bp, Homo sapien
atgccaggggcttccagattgaagc

SEQ ID NO: 2606411 - DNA, 25 bp, Homo sapien
ttccagattgaagcagatattgtgc

SEQ ID NO: 2606412 - DNA, 25 bp, Homo sapien
ctagctgtggacacccatggctgtt

SEQ ID NO: 2606413 - DNA, 25 bp, Homo sapien
gctgggcagctatgaagccactttg

SEQ ID NO: 2606414 - DNA, 25 bp, Homo sapien
ctgttgttgatgtctctggctgggc

SEQ ID NO: 2606415 - DNA, 25 bp, Homo sapien
tgtggacacccatggctgttgttga

SEQ ID NO: 2606416 - DNA, 25 bp, Homo sapien
atctccagtggcctgcccttctgat

SEQ ID NO: 2606417 - DNA, 25 bp, Homo sapien
tcaatgacccacataccctcaaagg

SEQ ID NO: 2606418 - DNA, 25 bp, Homo sapien
tcctctgcagtaggtaattcagtca

SEQ ID NO: 2606419 - DNA, 25 bp, Homo sapien
agtcaatgacccacataccctcaaa

SEQ ID NO: 2606420 - DNA, 25 bp, Homo sapien
gacctcctctgcagtaggtaattca

SEQ ID NO: 2606421 - DNA, 25 bp, Homo sapien
ccactaaaatagaggtgatggtgaa

SEQ ID NO: 2606422 - DNA, 25 bp, Homo sapien
tgtggctgctcgcatctctctgaga

SEQ ID NO: 2606423 - DNA, 25 bp, Homo sapien
ctctctgagaaagagctgaataatt

SEQ ID NO: 2606424 - DNA, 25 bp, Homo sapien
tttccccttgaagtagatggcaccg

SEQ ID NO: 2606425 - DNA, 25 bp, Homo sapien
cactggatagaagaatacaagaagg

SEQ ID NO: 2606426 - DNA, 25 bp, Homo sapien
gagcaagttgtgttgagttcaggca

SEQ ID NO: 2606427 - DNA, 25 bp, Homo sapien
gaaggaatgccgacttgaggagcaa

SEQ ID NO: 2606428 - DNA, 25 bp, Homo sapien
tcagccgtagccactggatagaaga

SEQ ID NO: 2606429 - DNA, 25 bp, Homo sapien
ccagttagtgttacatccacattca

SEQ ID NO: 2606430 - DNA, 25 bp, Homo sapien
tcttcaattatccagttagtgttac

SEQ ID NO: 2606431 - DNA, 25 bp, Homo sapien
gagatatagaaagctaaatgttctg

SEQ ID NO: 2606432 - DNA, 25 bp, Homo sapien
cacattcattctctgagatatagaa

SEQ ID NO: 2606433 - DNA, 25 bp, Homo sapien
tttgctcttccaggttctgctgcgg

SEQ ID NO: 2606434 - DNA, 25 bp, Homo sapien
cttccaggttctgctgcgggtccac

SEQ ID NO: 2606435 - DNA, 25 bp, Homo sapien
cagctgcctttgctcttccaggttc

SEQ ID NO: 2606436 - DNA, 25 bp, Homo sapien
atgacggcctcacacatttcccagc

SEQ ID NO: 2606437 - DNA, 25 bp, Homo sapien
gcggctgcgttcgtacctgatatga

SEQ ID NO: 2606438 - DNA, 25 bp, Homo sapien
tctagcatagagtgactgcggctgc

SEQ ID NO: 2606439 - DNA, 25 bp, Homo sapien
tggctgcactccagaagtcccttgc

SEQ ID NO: 2606440 - DNA, 25 bp, Homo sapien
tacatgtgggttcttttgctcagca

SEQ ID NO: 2606441 - DNA, 25 bp, Homo sapien
tgtgtgtgagtcatagaatttcccg

SEQ ID NO: 2606442 - DNA, 25 bp, Homo sapien
aatgtaacactgaaaaccttgtgct

SEQ ID NO: 2606443 - DNA, 25 bp, Homo sapien
tacagtcaaggtagaaaggtaacac

SEQ ID NO: 2606444 - DNA, 25 bp, Homo sapien
cacatacggtggaccattttaaggt

SEQ ID NO: 2606445 - DNA, 25 bp, Homo sapien
ctgaggccttcgggccgtggacgcc

SEQ ID NO: 2606446 - DNA, 25 bp, Homo sapien
ctccgagggccttcgggctggctct

SEQ ID NO: 2606447 - DNA, 25 bp, Homo sapien
tcccctgctggcctccgagggcctt

SEQ ID NO: 2606448 - DNA, 25 bp, Homo sapien
ttccttcacggtctccgagctcctc

SEQ ID NO: 2606449 - DNA, 25 bp, Homo sapien
acatccacaggtgccctccttccct

SEQ ID NO: 2606450 - DNA, 25 bp, Homo sapien
ctctccactcttcacacatccacag

SEQ ID NO: 2606451 - DNA, 25 bp, Homo sapien
tcacacatccacaggtgccctcctt

SEQ ID NO: 2606452 - DNA, 25 bp, Homo sapien
cttcacacatccacaggtgccctcc

SEQ ID NO: 2606453 - DNA, 25 bp, Homo sapien
gcctgaacctgagaagcttgtcatg

SEQ ID NO: 2606454 - DNA, 25 bp, Homo sapien
tgaacctgagaagcttgtcatgcat

SEQ ID NO: 2606455 - DNA, 25 bp, Homo sapien
cagcctgaacctgagaagcttgtca

SEQ ID NO: 2606456 - DNA, 25 bp, Homo sapien
ttggcagcctgaacctgagaagctt

SEQ ID NO: 2606457 - DNA, 25 bp, Homo sapien
tttaatcccaggaccggtgtggagc

SEQ ID NO: 2606458 - DNA, 25 bp, Homo sapien
cccctgggacacagctccgttgtaa

SEQ ID NO: 2606459 - DNA, 25 bp, Homo sapien
caagatggagcgtgtgatgccttcc

SEQ ID NO: 2606460 - DNA, 25 bp, Homo sapien
ccaggaccggtgtggagctccacgc

SEQ ID NO: 2606461 - DNA, 25 bp, Homo sapien
agttttgtaataaggtcctgtctgg

SEQ ID NO: 2606462 - DNA, 25 bp, Homo sapien
tttgtaataaggtcctgtctggttg

SEQ ID NO: 2606463 - DNA, 25 bp, Homo sapien
tgtaataaggtcctgtctggttggg

SEQ ID NO: 2606464 - DNA, 25 bp, Homo sapien
aagttttgtaataaggtcctgtctg

SEQ ID NO: 2606465 - DNA, 25 bp, Homo sapien
gaaactctgtcccccagatgccttc

SEQ ID NO: 2606466 - DNA, 25 bp, Homo sapien
gatgccttctctccccgcccactga

SEQ ID NO: 2606467 - DNA, 25 bp, Homo sapien
ttctaaaaggaatagtgaaactctg

SEQ ID NO: 2606468 - DNA, 25 bp, Homo sapien
tgttttcattgccaactttctaaaa

SEQ ID NO: 2606469 - DNA, 25 bp, Homo sapien
agcttttcccatggaatgcatttat

SEQ ID NO: 2606470 - DNA, 25 bp, Homo sapien
ttcattacttcactttcatcaactg

SEQ ID NO: 2606471 - DNA, 25 bp, Homo sapien
atggaatgcatttatttttccccac

SEQ ID NO: 2606472 - DNA, 25 bp, Homo sapien
ttacttcactttcatcaactgctct

SEQ ID NO: 2606473 - DNA, 25 bp, Homo sapien
tgtgaaactgtgtcaattacctttg

SEQ ID NO: 2606474 - DNA, 25 bp, Homo sapien
ttctgtgaaactgtgtcaattacct

SEQ ID NO: 2606475 - DNA, 25 bp, Homo sapien
agcttagatgccttctgtgaaactg

SEQ ID NO: 2606476 - DNA, 25 bp, Homo sapien
atagagcttagatgccttctgtgaa

SEQ ID NO: 2606477 - DNA, 25 bp, Homo sapien
atcatttcactttgcttgagttgtg

SEQ ID NO: 2606478 - DNA, 25 bp, Homo sapien
tcactttgcttgagttgtggaatca

SEQ ID NO: 2606479 - DNA, 25 bp, Homo sapien
gtgatcatttcactttgcttgagtt

SEQ ID NO: 2606480 - DNA, 25 bp, Homo sapien
cactttgcttgagttgtggaatcat

SEQ ID NO: 2606481 - DNA, 25 bp, Homo sapien
tcgctgatccgctttgaactgcttc

SEQ ID NO: 2606482 - DNA, 25 bp, Homo sapien
tgtggccaagtctctcagagctaag

SEQ ID NO: 2606483 - DNA, 25 bp, Homo sapien
gacattcacagttcgtcgctgatcc

SEQ ID NO: 2606484 - DNA, 25 bp, Homo sapien
gaactgcttcttactatcaggcttg

SEQ ID NO: 2606485 - DNA, 25 bp, Homo sapien
aaagtagccacagacgaaaggtgat

SEQ ID NO: 2606486 - DNA, 25 bp, Homo sapien
agtagccacagacgaaaggtgatat

SEQ ID NO: 2606487 - DNA, 25 bp, Homo sapien
aagtagccacagacgaaaggtgata

SEQ ID NO: 2606488 - DNA, 25 bp, Homo sapien
gcaatgcactatcatttctggcctg

SEQ ID NO: 2606489 - DNA, 25 bp, Homo sapien
tggcctgtggatctatagtcatcaa

SEQ ID NO: 2606490 - DNA, 25 bp, Homo sapien
gtgcttctttttgtgcaatgcacta

SEQ ID NO: 2606491 - DNA, 25 bp, Homo sapien
ggagcgtgtggctggctacatcacc

SEQ ID NO: 2606492 - DNA, 25 bp, Homo sapien
tcactaatcttaaggcccactggag

SEQ ID NO: 2606493 - DNA, 25 bp, Homo sapien
cccactggaggcctaaatgtagctt

SEQ ID NO: 2606494 - DNA, 25 bp, Homo sapien
ctcctcgtggctgagcctttgtctg

SEQ ID NO: 2606495 - DNA, 25 bp, Homo sapien
acaagatgctgtcccataacttgat

SEQ ID NO: 2606496 - DNA, 25 bp, Homo sapien
tgatttgttacaaacaacaccttgt

SEQ ID NO: 2606497 - DNA, 25 bp, Homo sapien
gagggtccatgacaaccggtcaagg

SEQ ID NO: 2606498 - DNA, 25 bp, Homo sapien
ccgtccatcaaggtggccctcagag

SEQ ID NO: 2606499 - DNA, 25 bp, Homo sapien
tagggactctggacatgcccgtcca

SEQ ID NO: 2606500 - DNA, 25 bp, Homo sapien
tctccaagcgttagcgttgatggac

SEQ ID NO: 2606501 - DNA, 25 bp, Homo sapien
ctgggtctccaagcgttagcgttga

SEQ ID NO: 2606502 - DNA, 25 bp, Homo sapien
caagcgttagcgttgatggactcta

SEQ ID NO: 2606503 - DNA, 25 bp, Homo sapien
cgttgatggactctattttcttgca

SEQ ID NO: 2606504 - DNA, 25 bp, Homo sapien
caagagccctgcatatacacgaaat

SEQ ID NO: 2606505 - DNA, 25 bp, Homo sapien
cacgaaatgggtgttcttcaacaaa

SEQ ID NO: 2606506 - DNA, 25 bp, Homo sapien
tgaaggacacgtacagaccctctgt

SEQ ID NO: 2606507 - DNA, 25 bp, Homo sapien
cctctgtcatgcagacttgagaaag

SEQ ID NO: 2606508 - DNA, 25 bp, Homo sapien
acttggatttatcctgcaggatata

SEQ ID NO: 2606509 - DNA, 25 bp, Homo sapien
cttggatttatcctgcaggatataa

SEQ ID NO: 2606510 - DNA, 25 bp, Homo sapien
cacttggatttatcctgcaggatat

SEQ ID NO: 2606511 - DNA, 25 bp, Homo sapien
gctcgtttcagacctcctccaggaa

SEQ ID NO: 2606512 - DNA, 25 bp, Homo sapien
ctagaggttgttgatggggccatta

SEQ ID NO: 2606513 - DNA, 25 bp, Homo sapien
gggccattaatcatacgtcctgtgc

SEQ ID NO: 2606514 - DNA, 25 bp, Homo sapien
tcctgtgccggctcgtttcagacct

SEQ ID NO: 2606515 - DNA, 25 bp, Homo sapien
tctttatgcaaaggttgtgatggtt

SEQ ID NO: 2606516 - DNA, 25 bp, Homo sapien
aaggttgtgatggtttcttcctcat

SEQ ID NO: 2606517 - DNA, 25 bp, Homo sapien
ctctttctttatgcaaaggttgtga

SEQ ID NO: 2606518 - DNA, 25 bp, Homo sapien
atgcaaaggttgtgatggtttcttc

SEQ ID NO: 2606519 - DNA, 25 bp, Homo sapien
ctggatttttatatcaaactttctt

SEQ ID NO: 2606520 - DNA, 25 bp, Homo sapien
catgcagtcagggttatctgttctg

SEQ ID NO: 2606521 - DNA, 25 bp, Homo sapien
gtagcagcaaaggtcccagatacct

SEQ ID NO: 2606522 - DNA, 25 bp, Homo sapien
gttctgttgcatagccatcctggtc

SEQ ID NO: 2606523 - DNA, 25 bp, Homo sapien
tagcagcaaaggtcccagatacctg

SEQ ID NO: 2606524 - DNA, 25 bp, Homo sapien
catctgtggcctgagcagaagacgt

SEQ ID NO: 2606525 - DNA, 25 bp, Homo sapien
cagaagacgtaagggaagacgccgc

SEQ ID NO: 2606526 - DNA, 25 bp, Homo sapien
gacgccgcgatactcaggtcattga

SEQ ID NO: 2606527 - DNA, 25 bp, Homo sapien
taaacagatgtcgacaggacacagc

SEQ ID NO: 2606528 - DNA, 25 bp, Homo sapien
tgtgtctgccatgttaatcaagtac

SEQ ID NO: 2606529 - DNA, 25 bp, Homo sapien
aactgtgtctgccatgttaatcaag

SEQ ID NO: 2606530 - DNA, 25 bp, Homo sapien
tgccatgttaatcaagtacagctgg

SEQ ID NO: 2606531 - DNA, 25 bp, Homo sapien
tctgccatgttaatcaagtacagct

SEQ ID NO: 2606532 - DNA, 25 bp, Homo sapien
aactggagatgtcaaaaccttgaaa

SEQ ID NO: 2606533 - DNA, 25 bp, Homo sapien
ttaactggagatgtcaaaaccttga

SEQ ID NO: 2606534 - DNA, 25 bp, Homo sapien
taactggagatgtcaaaaccttgaa

SEQ ID NO: 2606535 - DNA, 25 bp, Homo sapien
ctggagatgtcaaaaccttgaaagt

SEQ ID NO: 2606536 - DNA, 25 bp, Homo sapien
tggacaccgtgctggtctcatgtca

SEQ ID NO: 2606537 - DNA, 25 bp, Homo sapien
cacatggacaccgtgctggtctcat

SEQ ID NO: 2606538 - DNA, 25 bp, Homo sapien
aatgctgtatgtggagcagatggca

SEQ ID NO: 2606539 - DNA, 25 bp, Homo sapien
cgtgctggtctcatgtcagaatgca

SEQ ID NO: 2606540 - DNA, 25 bp, Homo sapien
tgggaggagcccacgtgaagaggat

SEQ ID NO: 2606541 - DNA, 25 bp, Homo sapien
atctgggaactggtttccagcgacc

SEQ ID NO: 2606542 - DNA, 25 bp, Homo sapien
ttgtaaacacaaagagcgctgccct

SEQ ID NO: 2606543 - DNA, 25 bp, Homo sapien
gggatctccacatctcagggcagtt

SEQ ID NO: 2606544 - DNA, 25 bp, Homo sapien
tgctttagttcttattgtccagtca

SEQ ID NO: 2606545 - DNA, 25 bp, Homo sapien
tattgtccagtcatgcactggtttt

SEQ ID NO: 2606546 - DNA, 25 bp, Homo sapien
gaacttgaaagatggaagtcttcac

SEQ ID NO: 2606547 - DNA, 25 bp, Homo sapien
gatcttcttccgtgaatccgatggt

SEQ ID NO: 2606548 - DNA, 25 bp, Homo sapien
cacctgtgtgggccgcaggcgttca

SEQ ID NO: 2606549 - DNA, 25 bp, Homo sapien
ccagcacctgtgtgggccgcaggcg

SEQ ID NO: 2606550 - DNA, 25 bp, Homo sapien
tgctccagcacctgtgtgggccgca

SEQ ID NO: 2606551 - DNA, 25 bp, Homo sapien
tgtgtgggccgcaggcgttcaggac

SEQ ID NO: 2606552 - DNA, 25 bp, Homo sapien
aggtgcctgaggtttgcggaatcac

SEQ ID NO: 2606553 - DNA, 25 bp, Homo sapien
caggtgcctgaggtttgcggaatca

SEQ ID NO: 2606554 - DNA, 25 bp, Homo sapien
tcaggtgcctgaggtttgcggaatc

SEQ ID NO: 2606555 - DNA, 25 bp, Homo sapien
aatactgccccttgtgcctgctggg

SEQ ID NO: 2606556 - DNA, 25 bp, Homo sapien
tgcttgcaggatgtacagagggact

SEQ ID NO: 2606557 - DNA, 25 bp, Homo sapien
tactaacagtatattggatgcctcc

SEQ ID NO: 2606558 - DNA, 25 bp, Homo sapien
tgtctcaggctcctagaatcttggg

SEQ ID NO: 2606559 - DNA, 25 bp, Homo sapien
tgccgaaattgttctaaggccttgt

SEQ ID NO: 2606560 - DNA, 25 bp, Homo sapien
cccacttatgccgaaattgttctaa

SEQ ID NO: 2606561 - DNA, 25 bp, Homo sapien
tgaggaaacccacttatgccgaaat

SEQ ID NO: 2606562 - DNA, 25 bp, Homo sapien
tgttctaaggccttgttaattggaa

SEQ ID NO: 2606563 - DNA, 25 bp, Homo sapien
agcatcagaccagcgcccttttcct

SEQ ID NO: 2606564 - DNA, 25 bp, Homo sapien
cagaccagcgcccttttcctgttcc

SEQ ID NO: 2606565 - DNA, 25 bp, Homo sapien
tcacagcatcagaccagcgcccttt

SEQ ID NO: 2606566 - DNA, 25 bp, Homo sapien
cttgggccgtgtaccctccccacag

SEQ ID NO: 2606567 - DNA, 25 bp, Homo sapien
gggtactggaaactgtcgtggaaca

SEQ ID NO: 2606568 - DNA, 25 bp, Homo sapien
tgtcactctttttggggtactggaa

SEQ ID NO: 2606569 - DNA, 25 bp, Homo sapien
gaaactgtcgtggaacatcagcgat

SEQ ID NO: 2606570 - DNA, 25 bp, Homo sapien
aacatcagcgatgatgggatgcagg

SEQ ID NO: 2606571 - DNA, 25 bp, Homo sapien
ccacaaaataggcagggaggatggt

SEQ ID NO: 2606572 - DNA, 25 bp, Homo sapien
gaggctggcactgttactgcaggaa

SEQ ID NO: 2606573 - DNA, 25 bp, Homo sapien
gatccaagaattaggctctggcggt

SEQ ID NO: 2606574 - DNA, 25 bp, Homo sapien
tgcgctcttgctggccacaaaatag

SEQ ID NO: 2606575 - DNA, 25 bp, Homo sapien
gtgctggttggcctgactactggtg

SEQ ID NO: 2606576 - DNA, 25 bp, Homo sapien
ttggcctgactactggtggtcagtg

SEQ ID NO: 2606577 - DNA, 25 bp, Homo sapien
ctggttggcctgactactggtggtc

SEQ ID NO: 2606578 - DNA, 25 bp, Homo sapien
ctggggtgctggttggcctgactac

SEQ ID NO: 2606579 - DNA, 25 bp, Homo sapien
tgcctttcacaaggtacgtgtctat

SEQ ID NO: 2606580 - DNA, 25 bp, Homo sapien
gtacgtgtctatgctcttggttttg

SEQ ID NO: 2606581 - DNA, 25 bp, Homo sapien
ttcacaaggtacgtgtctatgctct

SEQ ID NO: 2606582 - DNA, 25 bp, Homo sapien
caaggtacgtgtctatgctcttggt

SEQ ID NO: 2606583 - DNA, 25 bp, Homo sapien
cccgtgagtcctggccgcatgtgga

SEQ ID NO: 2606584 - DNA, 25 bp, Homo sapien
cctgggtgaaaggacaaggaccctg

SEQ ID NO: 2606585 - DNA, 25 bp, Homo sapien
ggaaggttgcgctgggcatttcaca

SEQ ID NO: 2606586 - DNA, 25 bp, Homo sapien
tgcctagctcctgggtgaaaggaca

SEQ ID NO: 2606587 - DNA, 25 bp, Homo sapien
taggaccagagacagctaagggtat

SEQ ID NO: 2606588 - DNA, 25 bp, Homo sapien
ttgtcgaggagatcaggcctgtact

SEQ ID NO: 2606589 - DNA, 25 bp, Homo sapien
ctaaactttaggaccagagacagct

SEQ ID NO: 2606590 - DNA, 25 bp, Homo sapien
ctaagggtatgttgtcgaggagatc

SEQ ID NO: 2606591 - DNA, 25 bp, Homo sapien
aattcagtgtatgcttgttgagaca

SEQ ID NO: 2606592 - DNA, 25 bp, Homo sapien
tcagtgtatgcttgttgagacactt

SEQ ID NO: 2606593 - DNA, 25 bp, Homo sapien
agtgtatgcttgttgagacacttga

SEQ ID NO: 2606594 - DNA, 25 bp, Homo sapien
ttaattcagtgtatgcttgttgaga

SEQ ID NO: 2606595 - DNA, 25 bp, Homo sapien
tcccactcatgaggtcccagtgcca

SEQ ID NO: 2606596 - DNA, 25 bp, Homo sapien
gaaggatggtctgtcagttcccact

SEQ ID NO: 2606597 - DNA, 25 bp, Homo sapien
ccttcctattgggtttcgccagagg

SEQ ID NO: 2606598 - DNA, 25 bp, Homo sapien
attgggtttcgccagaggcgctgaa

SEQ ID NO: 2606599 - DNA, 25 bp, Homo sapien
cagggcagagatgaacagcctggcc

SEQ ID NO: 2606600 - DNA, 25 bp, Homo sapien
cagggcttctttcagtattgtctct

SEQ ID NO: 2606601 - DNA, 25 bp, Homo sapien
tgctaggcagccctgtgttgtctga

SEQ ID NO: 2606602 - DNA, 25 bp, Homo sapien
gccagctctgtgataagaactggga

SEQ ID NO: 2606603 - DNA, 25 bp, Homo sapien
aagcgatggcttgggtgttgttgac

SEQ ID NO: 2606604 - DNA, 25 bp, Homo sapien
gaagcgatggcttgggtgttgttga

SEQ ID NO: 2606605 - DNA, 25 bp, Homo sapien
gatggagaacctgaagcgatggctt

SEQ ID NO: 2606606 - DNA, 25 bp, Homo sapien
cttgatggagaacctgaagcgatgg

SEQ ID NO: 2606607 - DNA, 25 bp, Homo sapien
gactcggtggattggagtgtgctct

SEQ ID NO: 2606608 - DNA, 25 bp, Homo sapien
actcggtggattggagtgtgctctg

SEQ ID NO: 2606609 - DNA, 25 bp, Homo sapien
ctgactcggtggattggagtgtgct

SEQ ID NO: 2606610 - DNA, 25 bp, Homo sapien
tgactcggtggattggagtgtgctc

SEQ ID NO: 2606611 - DNA, 25 bp, Homo sapien
agagggggaaccgcaggacttggtg

SEQ ID NO: 2606612 - DNA, 25 bp, Homo sapien
tcagagggggaaccgcaggacttgg

SEQ ID NO: 2606613 - DNA, 25 bp, Homo sapien
gagggggaaccgcaggacttggtga

SEQ ID NO: 2606614 - DNA, 25 bp, Homo sapien
cagagggggaaccgcaggacttggt

SEQ ID NO: 2606615 - DNA, 25 bp, Homo sapien
aataggggctctgttacagagatct

SEQ ID NO: 2606616 - DNA, 25 bp, Homo sapien
gatgaaaataggggctctgttacag

SEQ ID NO: 2606617 - DNA, 25 bp, Homo sapien
gaaaataggggctctgttacagaga

SEQ ID NO: 2606618 - DNA, 25 bp, Homo sapien
tgaaaataggggctctgttacagag

SEQ ID NO: 2606619 - DNA, 25 bp, Homo sapien
aggaccttttgcaccatcaaacttt

SEQ ID NO: 2606620 - DNA, 25 bp, Homo sapien
ctttctagacttatagtcagcaaca

SEQ ID NO: 2606621 - DNA, 25 bp, Homo sapien
ccttttgcaccatcaaactttctag

SEQ ID NO: 2606622 - DNA, 25 bp, Homo sapien
ttgcaccatcaaactttctagactt

SEQ ID NO: 2606623 - DNA, 25 bp, Homo sapien
cagttggtcaatggagaccttttcc

SEQ ID NO: 2606624 - DNA, 25 bp, Homo sapien
ttcctgatttacatgtagctgtccc

SEQ ID NO: 2606625 - DNA, 25 bp, Homo sapien
agagaccagaggagcagttggtcaa

SEQ ID NO: 2606626 - DNA, 25 bp, Homo sapien
cttcctgatttacatgtagctgtcc

SEQ ID NO: 2606627 - DNA, 25 bp, Homo sapien
ttgcgtccgggagctgcagaggagc

SEQ ID NO: 2606628 - DNA, 25 bp, Homo sapien
cagaggttgcgtccgggagctgcag

SEQ ID NO: 2606629 - DNA, 25 bp, Homo sapien
cagaggagctgctttgtccgtccat

SEQ ID NO: 2606630 - DNA, 25 bp, Homo sapien
tgcagaggagctgctttgtccgtcc

SEQ ID NO: 2606631 - DNA, 25 bp, Homo sapien
gacttgtcttcagctcaaagtgatg

SEQ ID NO: 2606632 - DNA, 25 bp, Homo sapien
tgtcttcagctcaaagtgatgtctg

SEQ ID NO: 2606633 - DNA, 25 bp, Homo sapien
cctgacttgtcttcagctcaaagtg

SEQ ID NO: 2606634 - DNA, 25 bp, Homo sapien
aaagtgatgtctgatggtggagacc

SEQ ID NO: 2606635 - DNA, 25 bp, Homo sapien
atctccggggtcacacatgcagtag

SEQ ID NO: 2606636 - DNA, 25 bp, Homo sapien
ccgaacagggaagggacatctccgg

SEQ ID NO: 2606637 - DNA, 25 bp, Homo sapien
cacatgcagtaggccaactgcagcc

SEQ ID NO: 2606638 - DNA, 25 bp, Homo sapien
ctttggtcattccatcagagagaat

SEQ ID NO: 2606639 - DNA, 25 bp, Homo sapien
gtttatccccagacccattccactc

SEQ ID NO: 2606640 - DNA, 25 bp, Homo sapien
ttatccccagacccattccactcac

SEQ ID NO: 2606641 - DNA, 25 bp, Homo sapien
tcgtttatccccagacccattccac

SEQ ID NO: 2606642 - DNA, 25 bp, Homo sapien
ctcgtttatccccagacccattcca

SEQ ID NO: 2606643 - DNA, 25 bp, Homo sapien
cagtaagaggtgttgatcactgact

SEQ ID NO: 2606644 - DNA, 25 bp, Homo sapien
agatgtagcagcttcgatggcgcca

SEQ ID NO: 2606645 - DNA, 25 bp, Homo sapien
gctagacagtgtccctgcggttgcc

SEQ ID NO: 2606646 - DNA, 25 bp, Homo sapien
tcaaagcccaggtctgctagacagt

SEQ ID NO: 2606647 - DNA, 25 bp, Homo sapien
ggttgccccgatgatcctgccgttt

SEQ ID NO: 2606648 - DNA, 25 bp, Homo sapien
tcaagactcaggtgacgttaggtgg

SEQ ID NO: 2606649 - DNA, 25 bp, Homo sapien
aagactcaggtgacgttaggtggca

SEQ ID NO: 2606650 - DNA, 25 bp, Homo sapien
tggcaggtgtaccacttcttaaact

SEQ ID NO: 2606651 - DNA, 25 bp, Homo sapien
gacgttaggtggcaggtgtaccact

SEQ ID NO: 2606652 - DNA, 25 bp, Homo sapien
ttgccacccagttcgttccaatccc

SEQ ID NO: 2606653 - DNA, 25 bp, Homo sapien
ctgggacggtatcagccatttcgat

SEQ ID NO: 2606654 - DNA, 25 bp, Homo sapien
gacggtatcagccatttcgatcagc

SEQ ID NO: 2606655 - DNA, 25 bp, Homo sapien
cccattgccacccagttcgttccaa

SEQ ID NO: 2606656 - DNA, 25 bp, Homo sapien
cagcctgaagaagatgcacctgatg

SEQ ID NO: 2606657 - DNA, 25 bp, Homo sapien
tgcctggtgggaccaatcaccagca

SEQ ID NO: 2606658 - DNA, 25 bp, Homo sapien
tgggaccaatcaccagcacatcagg

SEQ ID NO: 2606659 - DNA, 25 bp, Homo sapien
cctgaagaagatgcacctgatgcct

SEQ ID NO: 2606660 - DNA, 25 bp, Homo sapien
atgcaggaaggctggtaattgtaag

SEQ ID NO: 2606661 - DNA, 25 bp, Homo sapien
ggtaattgtaagctgagcttctggt

SEQ ID NO: 2606662 - DNA, 25 bp, Homo sapien
cactggtctctgagtacctgcacag

SEQ ID NO: 2606663 - DNA, 25 bp, Homo sapien
aattgtaagctgagcttctggtctc

SEQ ID NO: 2606664 - DNA, 25 bp, Homo sapien
gactgcactgtgtgttatagaaccg

SEQ ID NO: 2606665 - DNA, 25 bp, Homo sapien
ctgggttgaatgctccacaggatga

SEQ ID NO: 2606666 - DNA, 25 bp, Homo sapien
tagaaccggggctgcttccatctgg

SEQ ID NO: 2606667 - DNA, 25 bp, Homo sapien
taacatgtgccagcagacatcagaa

SEQ ID NO: 2606668 - DNA, 25 bp, Homo sapien
tctggttccttctgctgtacgatga

SEQ ID NO: 2606669 - DNA, 25 bp, Homo sapien
gaagaatgatttcaggtggtgagaa

SEQ ID NO: 2606670 - DNA, 25 bp, Homo sapien
gcagctgacggcagcagaaaggctt

SEQ ID NO: 2606671 - DNA, 25 bp, Homo sapien
acgagtggcttggttgaagggcgac

SEQ ID NO: 2606672 - DNA, 25 bp, Homo sapien
tgagttttccaacctagcatttcgg

SEQ ID NO: 2606673 - DNA, 25 bp, Homo sapien
gactgcggtaattaatcagctgtga

SEQ ID NO: 2606674 - DNA, 25 bp, Homo sapien
caagtccatgtgtggagaaaccact

SEQ ID NO: 2606675 - DNA, 25 bp, Homo sapien
ttcgggaaaggttctggcaagtcca

SEQ ID NO: 2606676 - DNA, 25 bp, Homo sapien
taggagccatctaaatcagctctga

SEQ ID NO: 2606677 - DNA, 25 bp, Homo sapien
tcataaggagtcttgaagaaccatt

SEQ ID NO: 2606678 - DNA, 25 bp, Homo sapien
aggagtcttgaagaaccatttggct

SEQ ID NO: 2606679 - DNA, 25 bp, Homo sapien
gccatctaaatcagctctgacagct

SEQ ID NO: 2606680 - DNA, 25 bp, Homo sapien
ctgtacatgcatatttgcacttaac

SEQ ID NO: 2606681 - DNA, 25 bp, Homo sapien
tgcacttaacagtatttctaattca

SEQ ID NO: 2606682 - DNA, 25 bp, Homo sapien
ttctaattcaatgtcaacatcacaa

SEQ ID NO: 2606683 - DNA, 25 bp, Homo sapien
tgtacatgcatatttgcacttaaca

SEQ ID NO: 2606684 - DNA, 25 bp, Homo sapien
ctatgaacgctgaaagcaatgtggg

SEQ ID NO: 2606685 - DNA, 25 bp, Homo sapien
cgcagctccctgaggtctttgttct

SEQ ID NO: 2606686 - DNA, 25 bp, Homo sapien
tttgaaacagaatcctatgaacgct

SEQ ID NO: 2606687 - DNA, 25 bp, Homo sapien
caatgtgggttcagaaagtgttgta

SEQ ID NO: 2606688 - DNA, 25 bp, Homo sapien
caactgtgttttccacgtgtgggtg

SEQ ID NO: 2606689 - DNA, 25 bp, Homo sapien
ttattatgtccacgccaacgctggc

SEQ ID NO: 2606690 - DNA, 25 bp, Homo sapien
tgtttcgtggcattacaccggaagt

SEQ ID NO: 2606691 - DNA, 25 bp, Homo sapien
caacgctggcatcagataattctgg

SEQ ID NO: 2606692 - DNA, 25 bp, Homo sapien
ggtacagggcacttgttctcttgct

SEQ ID NO: 2606693 - DNA, 25 bp, Homo sapien
tcagggaggtatttggcagaggcat

SEQ ID NO: 2606694 - DNA, 25 bp, Homo sapien
gtgactggcttcacagcaaaggccc

SEQ ID NO: 2606695 - DNA, 25 bp, Homo sapien
cttcagagccatgggatgcagcgag

SEQ ID NO: 2606696 - DNA, 25 bp, Homo sapien
ttcagcctcggcactattgatggtg

SEQ ID NO: 2606697 - DNA, 25 bp, Homo sapien
cctgatgccggagtagtagaaaatc

SEQ ID NO: 2606698 - DNA, 25 bp, Homo sapien
tatgcaaggattagtcaaggtcaaa

SEQ ID NO: 2606699 - DNA, 25 bp, Homo sapien
atagcagctaatgcaccatgcctga

SEQ ID NO: 2606700 - DNA, 25 bp, Homo sapien
cacagccgccaaacaccagtgaaag

SEQ ID NO: 2606701 - DNA, 25 bp, Homo sapien
taaaggtgccctttttagcagccgc

SEQ ID NO: 2606702 - DNA, 25 bp, Homo sapien
gcatcagctcccgtaaatgccacag

SEQ ID NO: 2606703 - DNA, 25 bp, Homo sapien
gcagccgccttgcaatttctttctc

SEQ ID NO: 2606704 - DNA, 25 bp, Homo sapien
aaacaccttccagttcccgtggcag

SEQ ID NO: 2606705 - DNA, 25 bp, Homo sapien
tctgtcttccaagccgagttttggc

SEQ ID NO: 2606706 - DNA, 25 bp, Homo sapien
gtgaatatggtgttaggtcattgac

SEQ ID NO: 2606707 - DNA, 25 bp, Homo sapien
ttaggtcattgacagaatgtaaatg

SEQ ID NO: 2606708 - DNA, 25 bp, Homo sapien
ggcgccttgtcgcgcggggccagct

SEQ ID NO: 2606709 - DNA, 25 bp, Homo sapien
ccggcgccttgtcgcgcggggccag

SEQ ID NO: 2606710 - DNA, 25 bp, Homo sapien
cagccgccggcgccttgtcgcgcgg

SEQ ID NO: 2606711 - DNA, 25 bp, Homo sapien
cgccggcgccttgtcgcgcggggcc

SEQ ID NO: 2606712 - DNA, 25 bp, Homo sapien
ctgcgtgcagtgttgctggcgcgcc

SEQ ID NO: 2606713 - DNA, 25 bp, Homo sapien
gcgtgcagtgttgctggcgcgccgc

SEQ ID NO: 2606714 - DNA, 25 bp, Homo sapien
tgcagtgttgctggcgcgccgcggg

SEQ ID NO: 2606715 - DNA, 25 bp, Homo sapien
gtgcagtgttgctggcgcgccgcgg

SEQ ID NO: 2606716 - DNA, 25 bp, Homo sapien
tccacggagatgaagcggtcgctaa

SEQ ID NO: 2606717 - DNA, 25 bp, Homo sapien
gaactcggtgttggtctccttcatg

SEQ ID NO: 2606718 - DNA, 25 bp, Homo sapien
gcttcacgttccagtcgaacaggct

SEQ ID NO: 2606719 - DNA, 25 bp, Homo sapien
ctaaggcgcgcgatgtcctgcagct

SEQ ID NO: 2606720 - DNA, 25 bp, Homo sapien
aatcttttgcggatggctggctgag

SEQ ID NO: 2606721 - DNA, 25 bp, Homo sapien
tgtgaatcttttgcggatggctggc

SEQ ID NO: 2606722 - DNA, 25 bp, Homo sapien
tgaatcttttgcggatggctggctg

SEQ ID NO: 2606723 - DNA, 25 bp, Homo sapien
ctgtgaatcttttgcggatggctgg

SEQ ID NO: 2606724 - DNA, 25 bp, Homo sapien
gaagatgggcaagaggggcttccag

SEQ ID NO: 2606725 - DNA, 25 bp, Homo sapien
tgaagatgggcaagaggggcttcca

SEQ ID NO: 2606726 - DNA, 25 bp, Homo sapien
ccatccgtcctctcgtggattgatt

SEQ ID NO: 2606727 - DNA, 25 bp, Homo sapien
ttgatggatgcaccatccgtcctct

SEQ ID NO: 2606728 - DNA, 25 bp, Homo sapien
catgtgtcagacttgatggatgcac

SEQ ID NO: 2606729 - DNA, 25 bp, Homo sapien
tggatgcaccatccgtcctctcgtg

SEQ ID NO: 2606730 - DNA, 25 bp, Homo sapien
tggaggatcctaacccgctactgtg

SEQ ID NO: 2606731 - DNA, 25 bp, Homo sapien
gcttgtaactcactcaattctggtg

SEQ ID NO: 2606732 - DNA, 25 bp, Homo sapien
gcagctctcctgcattagttttagg

SEQ ID NO: 2606733 - DNA, 25 bp, Homo sapien
tgctgtcagacgcaggcacatgtgc

SEQ ID NO: 2606734 - DNA, 25 bp, Homo sapien
cctgagacctctaaacggtgtgtga

SEQ ID NO: 2606735 - DNA, 25 bp, Homo sapien
ccaaatgggacattcggtggagctg

SEQ ID NO: 2606736 - DNA, 25 bp, Homo sapien
gaacctgagacctctaaacggtgtg

SEQ ID NO: 2606737 - DNA, 25 bp, Homo sapien
cctgcggcttatccaaatgggacat

SEQ ID NO: 2606738 - DNA, 25 bp, Homo sapien
tggccttcatcatggccaataaggt

SEQ ID NO: 2606739 - DNA, 25 bp, Homo sapien
ggcttgtccagcctactggccttca

SEQ ID NO: 2606740 - DNA, 25 bp, Homo sapien
catggccaataaggtcaagtgctga

SEQ ID NO: 2606741 - DNA, 25 bp, Homo sapien
tgtccagcctactggccttcatcat

SEQ ID NO: 2606742 - DNA, 25 bp, Homo sapien
gagtcctgaccaagacccagttctg

SEQ ID NO: 2606743 - DNA, 25 bp, Homo sapien
tgactctcagggtagcccattggct

SEQ ID NO: 2606744 - DNA, 25 bp, Homo sapien
cccagttctgaagtctcggagcatc

SEQ ID NO: 2606745 - DNA, 25 bp, Homo sapien
gattgtcttttctggtcgagtcctg

SEQ ID NO: 2606746 - DNA, 25 bp, Homo sapien
ggagaacttcggaccacggtctcgc

SEQ ID NO: 2606747 - DNA, 25 bp, Homo sapien
tcggaccacggtctcgctcccggtc

SEQ ID NO: 2606748 - DNA, 25 bp, Homo sapien
agaacttcggaccacggtctcgctc

SEQ ID NO: 2606749 - DNA, 25 bp, Homo sapien
acttcggaccacggtctcgctcccg

SEQ ID NO: 2606750 - DNA, 25 bp, Homo sapien
cccatgttgctgcccgccaggggcc

SEQ ID NO: 2606751 - DNA, 25 bp, Homo sapien
ccatgttgctgcccgccaggggcca

SEQ ID NO: 2606752 - DNA, 25 bp, Homo sapien
ccccatgttgctgcccgccaggggc

SEQ ID NO: 2606753 - DNA, 25 bp, Homo sapien
ggcgtaagagataaaggcgatacag

SEQ ID NO: 2606754 - DNA, 25 bp, Homo sapien
cgtaagagataaaggcgatacagtg

SEQ ID NO: 2606755 - DNA, 25 bp, Homo sapien
tcaggcgtaagagataaaggcgata

SEQ ID NO: 2606756 - DNA, 25 bp, Homo sapien
caggcgtaagagataaaggcgatac

SEQ ID NO: 2606757 - DNA, 25 bp, Homo sapien
cagtggtgaggcgatgctccaaacc

SEQ ID NO: 2606758 - DNA, 25 bp, Homo sapien
tccctgagcagttagcagtggtgag

SEQ ID NO: 2606759 - DNA, 25 bp, Homo sapien
ccagggaggatgaccggcttccctg

SEQ ID NO: 2606760 - DNA, 25 bp, Homo sapien
gctcaaccaggacaaggcattttca

SEQ ID NO: 2606761 - DNA, 25 bp, Homo sapien
ttgcagagttcaagattccaaggag

SEQ ID NO: 2606762 - DNA, 25 bp, Homo sapien
caagattccaaggaggcaagagaca

SEQ ID NO: 2606763 - DNA, 25 bp, Homo sapien
attccaaggaggcaagagacaggag

SEQ ID NO: 2606764 - DNA, 25 bp, Homo sapien
cttgcagagttcaagattccaagga

SEQ ID NO: 2606765 - DNA, 25 bp, Homo sapien
agatttgctgccctccatcaatgct

SEQ ID NO: 2606766 - DNA, 25 bp, Homo sapien
gaagataacaattgatctggagaag

SEQ ID NO: 2606767 - DNA, 25 bp, Homo sapien
aacaattgatctggagaagacgcag

SEQ ID NO: 2606768 - DNA, 25 bp, Homo sapien
tgcatctggacacatgaagataaca

SEQ ID NO: 2606769 - DNA, 25 bp, Homo sapien
ttgaagacttagttgaccaggaata

SEQ ID NO: 2606770 - DNA, 25 bp, Homo sapien
cagcagccttttgaagacttagttg

SEQ ID NO: 2606771 - DNA, 25 bp, Homo sapien
gaagacttagttgaccaggaatatg

SEQ ID NO: 2606772 - DNA, 25 bp, Homo sapien
gccttttgaagacttagttgaccag

SEQ ID NO: 2606773 - DNA, 25 bp, Homo sapien
aggctcgtgctcttgtgagctcaca

SEQ ID NO: 2606774 - DNA, 25 bp, Homo sapien
cgaggctcgtgctcttgtgagctca

SEQ ID NO: 2606775 - DNA, 25 bp, Homo sapien
gggtatcaagcccagaagatccact

SEQ ID NO: 2606776 - DNA, 25 bp, Homo sapien
gtgagctcacagctgggtatcaagc

SEQ ID NO: 2606777 - DNA, 25 bp, Homo sapien
ctaagccttgagacataggtgggca

SEQ ID NO: 2606778 - DNA, 25 bp, Homo sapien
cattgttaaacgtccccacaggagc

SEQ ID NO: 2606779 - DNA, 25 bp, Homo sapien
tgtagaactaaaagagccagaggca

SEQ ID NO: 2606780 - DNA, 25 bp, Homo sapien
ggcaccccatgagtaatgacagaaa

SEQ ID NO: 2606781 - DNA, 25 bp, Homo sapien
tcttcaccaaactcttaaaggtagc

SEQ ID NO: 2606782 - DNA, 25 bp, Homo sapien
gcttccttgcgactgaaggactttt

SEQ ID NO: 2606783 - DNA, 25 bp, Homo sapien
cacgggcggggtgacccaaccatat

SEQ ID NO: 2606784 - DNA, 25 bp, Homo sapien
caaccatatttttcatgcgtcttca

SEQ ID NO: 2606785 - DNA, 25 bp, Homo sapien
gacgagactgttcgcagctgaccat

SEQ ID NO: 2606786 - DNA, 25 bp, Homo sapien
taacttaaacgtctcctgggcattc

SEQ ID NO: 2606787 - DNA, 25 bp, Homo sapien
ggaagtttacaccacagcaagggtg

SEQ ID NO: 2606788 - DNA, 25 bp, Homo sapien
cacaaatcagcatcgagagcacgtt

SEQ ID NO: 2606789 - DNA, 25 bp, Homo sapien
taaagcctgctgtaatgtaaacgtc

SEQ ID NO: 2606790 - DNA, 25 bp, Homo sapien
caccccttggtgcagttctcagaga

SEQ ID NO: 2606791 - DNA, 25 bp, Homo sapien
gcttgcctacgaagggagtctacca

SEQ ID NO: 2606792 - DNA, 25 bp, Homo sapien
tggtacctgacttagaacgctgctc

SEQ ID NO: 2606793 - DNA, 25 bp, Homo sapien
aaagttctgactacagtcccatagg

SEQ ID NO: 2606794 - DNA, 25 bp, Homo sapien
taatactatgggaactagaggctgc

SEQ ID NO: 2606795 - DNA, 25 bp, Homo sapien
tgctttgggcacagaatggatcctg

SEQ ID NO: 2606796 - DNA, 25 bp, Homo sapien
cttggaagacttgcaactgtactga

SEQ ID NO: 2606797 - DNA, 25 bp, Homo sapien
tgaaagttcgcagtcactcatggtg

SEQ ID NO: 2606798 - DNA, 25 bp, Homo sapien
tggtgtacagatcagcatcctagca

SEQ ID NO: 2606799 - DNA, 25 bp, Homo sapien
aaagtctccccatgaattgcggtga

SEQ ID NO: 2606800 - DNA, 25 bp, Homo sapien
gactgcccaaggtctagaggtacaa

SEQ ID NO: 2606801 - DNA, 25 bp, Homo sapien
tgcaggtgttcgtgccgatttccat

SEQ ID NO: 2606802 - DNA, 25 bp, Homo sapien
cagtgccatgatcgtggagcagtgt

SEQ ID NO: 2606803 - DNA, 25 bp, Homo sapien
cagggatgcaggtgttcgtgccgat

SEQ ID NO: 2606804 - DNA, 25 bp, Homo sapien
ctctggtgtggcagtgccatgatcg

SEQ ID NO: 2606805 - DNA, 25 bp, Homo sapien
gatgacagtccgatgtgataagcat

SEQ ID NO: 2606806 - DNA, 25 bp, Homo sapien
ggatgacagtccgatgtgataagca

SEQ ID NO: 2606807 - DNA, 25 bp, Homo sapien
ctggatgacagtccgatgtgataag

SEQ ID NO: 2606808 - DNA, 25 bp, Homo sapien
tggatgacagtccgatgtgataagc

SEQ ID NO: 2606809 - DNA, 25 bp, Homo sapien
ccaggatcaaaggccgagactgagt

SEQ ID NO: 2606810 - DNA, 25 bp, Homo sapien
caggcagcaatccaaccagggaggt

SEQ ID NO: 2606811 - DNA, 25 bp, Homo sapien
catgttcaggtggatggcgagtccc

SEQ ID NO: 2606812 - DNA, 25 bp, Homo sapien
agagtgggttgtggtgaccttcaca

SEQ ID NO: 2606813 - DNA, 25 bp, Homo sapien
cttggagagatcaacgcccctggaa

SEQ ID NO: 2606814 - DNA, 25 bp, Homo sapien
agatcaacgcccctggaaggattgc

SEQ ID NO: 2606815 - DNA, 25 bp, Homo sapien
aacgcccctggaaggattgcatggg

SEQ ID NO: 2606816 - DNA, 25 bp, Homo sapien
tggagagatcaacgcccctggaagg

SEQ ID NO: 2606817 - DNA, 25 bp, Homo sapien
tagcgtacaggatgccctggggtac

SEQ ID NO: 2606818 - DNA, 25 bp, Homo sapien
tacaggatgccctggggtacaggat

SEQ ID NO: 2606819 - DNA, 25 bp, Homo sapien
aggatgccctggggtacaggatgcc

SEQ ID NO: 2606820 - DNA, 25 bp, Homo sapien
ctagcgtacaggatgccctggggta

SEQ ID NO: 2606821 - DNA, 25 bp, Homo sapien
cacgatgctccgggtagaggatgtt

SEQ ID NO: 2606822 - DNA, 25 bp, Homo sapien
tcccaaggagtcttccctctgcttg

SEQ ID NO: 2606823 - DNA, 25 bp, Homo sapien
gatgctctgggtagaggatgctccg

SEQ ID NO: 2606824 - DNA, 25 bp, Homo sapien
tgctccagggtacaggatgttccag

SEQ ID NO: 2606825 - DNA, 25 bp, Homo sapien
agatcagggcagagattgccatgag

SEQ ID NO: 2606826 - DNA, 25 bp, Homo sapien
tggaaggggtgaagatcagggcaga

SEQ ID NO: 2606827 - DNA, 25 bp, Homo sapien
tgaagatcagggcagagattgccat

SEQ ID NO: 2606828 - DNA, 25 bp, Homo sapien
tcagggcagagattgccatgaggat

SEQ ID NO: 2606829 - DNA, 25 bp, Homo sapien
tcttggtcaatcggtttttggtcga

SEQ ID NO: 2606830 - DNA, 25 bp, Homo sapien
ctgaggaaggaggtttccagttcgt

SEQ ID NO: 2606831 - DNA, 25 bp, Homo sapien
gacccctgttctcgatcctgttttc

SEQ ID NO: 2606832 - DNA, 25 bp, Homo sapien
tttggtcgacccctgttctcgatcc

SEQ ID NO: 2606833 - DNA, 25 bp, Homo sapien
tctaggtacgagacagtgatttact

SEQ ID NO: 2606834 - DNA, 25 bp, Homo sapien
tcattttgtattctaggtacgagac

SEQ ID NO: 2606835 - DNA, 25 bp, Homo sapien
tttgtattctaggtacgagacagtg

SEQ ID NO: 2606836 - DNA, 25 bp, Homo sapien
gtattctaggtacgagacagtgatt

SEQ ID NO: 2606837 - DNA, 25 bp, Homo sapien
tcaaaaacctcaaccacagccagga

SEQ ID NO: 2606838 - DNA, 25 bp, Homo sapien
tggaatggggaatgatggcatcaaa

SEQ ID NO: 2606839 - DNA, 25 bp, Homo sapien
gttgagtagaagcatatccaataga

SEQ ID NO: 2606840 - DNA, 25 bp, Homo sapien
agcatatccaatagaaagtccctgg

SEQ ID NO: 2606841 - DNA, 25 bp, Homo sapien
tccttgagcctcaacatgagtgatg

SEQ ID NO: 2606842 - DNA, 25 bp, Homo sapien
tctgtggccctgggttgatgactct

SEQ ID NO: 2606843 - DNA, 25 bp, Homo sapien
gctattagcagctgcattggaggtc

SEQ ID NO: 2606844 - DNA, 25 bp, Homo sapien
tgactctgggcaacaagtgacaatc

SEQ ID NO: 2606845 - DNA, 25 bp, Homo sapien
cagttggaacccagagtgtctgaga

SEQ ID NO: 2606846 - DNA, 25 bp, Homo sapien
cagaagaggagccagttggaaccca

SEQ ID NO: 2606847 - DNA, 25 bp, Homo sapien
cagatggtaccaccagaatgctctg

SEQ ID NO: 2606848 - DNA, 25 bp, Homo sapien
gaatggcttcgtgtctcctccagaa

SEQ ID NO: 2606849 - DNA, 25 bp, Homo sapien
ttcctccatcagcaggcctactgag

SEQ ID NO: 2606850 - DNA, 25 bp, Homo sapien
gcctactgaggtgctcagtggttgc

SEQ ID NO: 2606851 - DNA, 25 bp, Homo sapien
tcatgacatcctccttttggcagag

SEQ ID NO: 2606852 - DNA, 25 bp, Homo sapien
gcagagttgtgtcggccgagttcct

SEQ ID NO: 2606853 - DNA, 25 bp, Homo sapien
tccatcctggtggaccgtttgctct

SEQ ID NO: 2606854 - DNA, 25 bp, Homo sapien
tcctggtggaccgtttgctctttcg

SEQ ID NO: 2606855 - DNA, 25 bp, Homo sapien
cgtttgctctttcggtgtttctggg

SEQ ID NO: 2606856 - DNA, 25 bp, Homo sapien
cggtgtttctgggatgcaagacccc

SEQ ID NO: 2606857 - DNA, 25 bp, Homo sapien
cctttggagcccttgcgagcagagg

SEQ ID NO: 2606858 - DNA, 25 bp, Homo sapien
cagtgcccagggtgaggaacctgct

SEQ ID NO: 2606859 - DNA, 25 bp, Homo sapien
tcgaaacgtgacacccttaaccagc

SEQ ID NO: 2606860 - DNA, 25 bp, Homo sapien
ggctcctttcatgcccgtctcgaaa

SEQ ID NO: 2606861 - DNA, 25 bp, Homo sapien
tggctcttaacgtacctacgaggaa

SEQ ID NO: 2606862 - DNA, 25 bp, Homo sapien
tgacatcttggggatagtggccctg

SEQ ID NO: 2606863 - DNA, 25 bp, Homo sapien
acagtggctcttaacgtacctacga

SEQ ID NO: 2606864 - DNA, 25 bp, Homo sapien
cttggggatagtggccctgctgcca

SEQ ID NO: 2606865 - DNA, 25 bp, Homo sapien
tgagttccctgcaaagccccggcag

SEQ ID NO: 2606866 - DNA, 25 bp, Homo sapien
ccagtgagactgtagactggtaaca

SEQ ID NO: 2606867 - DNA, 25 bp, Homo sapien
gagactgtagactggtaacacactg

SEQ ID NO: 2606868 - DNA, 25 bp, Homo sapien
gcaaagccccggcaggaggtgtcat

SEQ ID NO: 2606869 - DNA, 25 bp, Homo sapien
gcaccgttcactgggttttcctgca

SEQ ID NO: 2606870 - DNA, 25 bp, Homo sapien
ggcaccgttcactgggttttcctgc

SEQ ID NO: 2606871 - DNA, 25 bp, Homo sapien
gcagcgcctggctccttaatgcaga

SEQ ID NO: 2606872 - DNA, 25 bp, Homo sapien
ggtcacgtaccaaagagctgcagcg

SEQ ID NO: 2606873 - DNA, 25 bp, Homo sapien
gcgatgaatgatgaaggactccact

SEQ ID NO: 2606874 - DNA, 25 bp, Homo sapien
taggaagcgagttgtctacttgcga

SEQ ID NO: 2606875 - DNA, 25 bp, Homo sapien
tgacgtgaggtctttgcaggttgcc

SEQ ID NO: 2606876 - DNA, 25 bp, Homo sapien
tgcgccctcctaggcgtgcaggtgc

SEQ ID NO: 2606877 - DNA, 25 bp, Homo sapien
gggcaaacgccgcaagtttctgtga

SEQ ID NO: 2606878 - DNA, 25 bp, Homo sapien
cggctgggaactggcgcccttcaaa

SEQ ID NO: 2606879 - DNA, 25 bp, Homo sapien
cagcttcgtccaaagcggtttccaa

SEQ ID NO: 2606880 - DNA, 25 bp, Homo sapien
agagatgctcagcttcgtccaaagc

SEQ ID NO: 2606881 - DNA, 25 bp, Homo sapien
gggcggtgtccacactcgcgcaccg

SEQ ID NO: 2606882 - DNA, 25 bp, Homo sapien
ccagggctgtagacgcagaaggcgg

SEQ ID NO: 2606883 - DNA, 25 bp, Homo sapien
tctccaccgcccaaagcaaggtttg

SEQ ID NO: 2606884 - DNA, 25 bp, Homo sapien
tcatgctgttgacatgtgaggaacc

SEQ ID NO: 2606885 - DNA, 25 bp, Homo sapien
cacacgctgatctgggacatgatat

SEQ ID NO: 2606886 - DNA, 25 bp, Homo sapien
ctgctttaacactgcacacctgtgg

SEQ ID NO: 2606887 - DNA, 25 bp, Homo sapien
ggaagtgttcgtgcacccagcagat

SEQ ID NO: 2606888 - DNA, 25 bp, Homo sapien
tataaactcaggcaagagggtggca

SEQ ID NO: 2606889 - DNA, 25 bp, Homo sapien
tcttaagcatcaccggaaagtccga

SEQ ID NO: 2606890 - DNA, 25 bp, Homo sapien
taagggagctaaccaagctgaggcg

SEQ ID NO: 2606891 - DNA, 25 bp, Homo sapien
gccaagttcatccctggtcatggct

SEQ ID NO: 2606892 - DNA, 25 bp, Homo sapien
ccaagttcatccctggtcatggctg

SEQ ID NO: 2606893 - DNA, 25 bp, Homo sapien
ccgcagtagttgcaaaaagccagca

SEQ ID NO: 2606894 - DNA, 25 bp, Homo sapien
tctaagacttccaccgcagtagttg

SEQ ID NO: 2606895 - DNA, 25 bp, Homo sapien
ggtggctactctaagacttccaccg

SEQ ID NO: 2606896 - DNA, 25 bp, Homo sapien
ctggcgaagtgaaggtctgagtaca

SEQ ID NO: 2606897 - DNA, 25 bp, Homo sapien
caaggtgggctttccatgtgcttct

SEQ ID NO: 2606898 - DNA, 25 bp, Homo sapien
tgtttgtgtttgacgaagctgctga

SEQ ID NO: 2606899 - DNA, 25 bp, Homo sapien
tgtgtttgacgaagctgctgacact

SEQ ID NO: 2606900 - DNA, 25 bp, Homo sapien
tggaatagctgggtcttcttgcaag

SEQ ID NO: 2606901 - DNA, 25 bp, Homo sapien
taaggcgtatgtaccagaaatcctg

SEQ ID NO: 2606902 - DNA, 25 bp, Homo sapien
tcaacattccacatctgaggtgcag

SEQ ID NO: 2606903 - DNA, 25 bp, Homo sapien
tatgcctggccttaacgctaaaatc

SEQ ID NO: 2606904 - DNA, 25 bp, Homo sapien
tacaaatggccgataaacagctcca

SEQ ID NO: 2606905 - DNA, 25 bp, Homo sapien
ccaccttgcccagccgtgttacaca

SEQ ID NO: 2606906 - DNA, 25 bp, Homo sapien
acacaaatattgacatctattcaga

SEQ ID NO: 2606907 - DNA, 25 bp, Homo sapien
accttgcccagccgtgttacacaaa

SEQ ID NO: 2606908 - DNA, 25 bp, Homo sapien
ttgacatctattcagaatgttttgt

SEQ ID NO: 2606909 - DNA, 25 bp, Homo sapien
tgccagcatttgtgacctacagaag

SEQ ID NO: 2606910 - DNA, 25 bp, Homo sapien
tgtctgacctcacatcccactatgg

SEQ ID NO: 2606911 - DNA, 25 bp, Homo sapien
tactgctacagagagtctatttgcc

SEQ ID NO: 2606912 - DNA, 25 bp, Homo sapien
agaagacccagttaagccctgccag

SEQ ID NO: 2606913 - DNA, 25 bp, Homo sapien
tctttggccaagctgggtctagtgt

SEQ ID NO: 2606914 - DNA, 25 bp, Homo sapien
tcttttgctgggaatagactttcaa

SEQ ID NO: 2606915 - DNA, 25 bp, Homo sapien
cctcagtggtgtgtcattaacatgc

SEQ ID NO: 2606916 - DNA, 25 bp, Homo sapien
gactgctttctttggagctgatgaa

SEQ ID NO: 2606917 - DNA, 25 bp, Homo sapien
tctaaattagttgtgatcctgaacc

SEQ ID NO: 2606918 - DNA, 25 bp, Homo sapien
aggatgaaactttagaggttactca

SEQ ID NO: 2606919 - DNA, 25 bp, Homo sapien
aagaaaactggactgtgattatgaa

SEQ ID NO: 2606920 - DNA, 25 bp, Homo sapien
tttactttgtgaacatgatagataa

SEQ ID NO: 2606921 - DNA, 25 bp, Homo sapien
tgactcacagtcagagcagggtccc

SEQ ID NO: 2606922 - DNA, 25 bp, Homo sapien
aagagccttggcgtcccagtagcag

SEQ ID NO: 2606923 - DNA, 25 bp, Homo sapien
cagggtcccggcttgtgttcaggat

SEQ ID NO: 2606924 - DNA, 25 bp, Homo sapien
ccagagatgagcagaggtacaccca

SEQ ID NO: 2606925 - DNA, 25 bp, Homo sapien
gatcgtcaaggagaacaagctgttc

SEQ ID NO: 2606926 - DNA, 25 bp, Homo sapien
agctgttcgagcactactaccagga

SEQ ID NO: 2606927 - DNA, 25 bp, Homo sapien
agctcaagatcgtgcccgagggcga

SEQ ID NO: 2606928 - DNA, 25 bp, Homo sapien
ctgggaaggaggctaccccgagatc

SEQ ID NO: 2606929 - DNA, 25 bp, Homo sapien
ggcggtcgcggggtcggcggctcca

SEQ ID NO: 2606930 - DNA, 25 bp, Homo sapien
aggatggcgccgagggtggtggaaa

SEQ ID NO: 2606931 - DNA, 25 bp, Homo sapien
gcgccgagggtggtggaaagcgcgg

SEQ ID NO: 2606932 - DNA, 25 bp, Homo sapien
atggcgccgagggtggtggaaagcg

SEQ ID NO: 2606933 - DNA, 25 bp, Homo sapien
ggagtcccgcactgccgggactctg

SEQ ID NO: 2606934 - DNA, 25 bp, Homo sapien
ggccgcggcgggcaacatatagggc

SEQ ID NO: 2606935 - DNA, 25 bp, Homo sapien
gggcaacatatagggcggcggcgcg

SEQ ID NO: 2606936 - DNA, 25 bp, Homo sapien
gggcggctaccggagtcccgcactg

SEQ ID NO: 2606937 - DNA, 25 bp, Homo sapien
cccacggcgcactgcaggtaggcga

SEQ ID NO: 2606938 - DNA, 25 bp, Homo sapien
acggcgcactgcaggtaggcgagcg

SEQ ID NO: 2606939 - DNA, 25 bp, Homo sapien
cagcccacggcgcactgcaggtagg

SEQ ID NO: 2606940 - DNA, 25 bp, Homo sapien
gcgcactgcaggtaggcgagcgcgg

SEQ ID NO: 2606941 - DNA, 25 bp, Homo sapien
gctgggcagcgcgtggcggccgtac

SEQ ID NO: 2606942 - DNA, 25 bp, Homo sapien
tggctgggcagcgcgtggcggccgt

SEQ ID NO: 2606943 - DNA, 25 bp, Homo sapien
ggcggactcgctggcgtactggtag

SEQ ID NO: 2606944 - DNA, 25 bp, Homo sapien
tgggcagcgcgtggcggccgtacac

SEQ ID NO: 2606945 - DNA, 25 bp, Homo sapien
tggacgaggaacatggccaggagga

SEQ ID NO: 2606946 - DNA, 25 bp, Homo sapien
gtagtggacgaggaacatggccagg

SEQ ID NO: 2606947 - DNA, 25 bp, Homo sapien
tagtggacgaggaacatggccagga

SEQ ID NO: 2606948 - DNA, 25 bp, Homo sapien
agtggacgaggaacatggccaggag

SEQ ID NO: 2606949 - DNA, 25 bp, Homo sapien
gcaaagagcaaaagggacaccggta

SEQ ID NO: 2606950 - DNA, 25 bp, Homo sapien
gactcagttcataagaggtcgggcc

SEQ ID NO: 2606951 - DNA, 25 bp, Homo sapien
taggagattctcaatgcggcaaaga

SEQ ID NO: 2606952 - DNA, 25 bp, Homo sapien
gcaagcagcccacttctgaagtcag

SEQ ID NO: 2606953 - DNA, 25 bp, Homo sapien
aattataccttaatagagcaggaaa

SEQ ID NO: 2606954 - DNA, 25 bp, Homo sapien
cattagttatggttatgaacgtcga

SEQ ID NO: 2606955 - DNA, 25 bp, Homo sapien
gaccatgtgcgccagggtaaagtca

SEQ ID NO: 2606956 - DNA, 25 bp, Homo sapien
cagtaatcacataatagtagtgtca

SEQ ID NO: 2606957 - DNA, 25 bp, Homo sapien
cgccaacagtggcataggctttcct

SEQ ID NO: 2606958 - DNA, 25 bp, Homo sapien
tgtacacgccaacagtggcataggc

SEQ ID NO: 2606959 - DNA, 25 bp, Homo sapien
caacagtggcataggctttcctcct

SEQ ID NO: 2606960 - DNA, 25 bp, Homo sapien
tacacgccaacagtggcataggctt

SEQ ID NO: 2606961 - DNA, 25 bp, Homo sapien
tgcacaatggctcaagtatctgctt

SEQ ID NO: 2606962 - DNA, 25 bp, Homo sapien
tcagcatacactgcacaatggctca

SEQ ID NO: 2606963 - DNA, 25 bp, Homo sapien
tacaggtacagaacataatcgccat

SEQ ID NO: 2606964 - DNA, 25 bp, Homo sapien
ttacaggtacagaacataatcgcca

SEQ ID NO: 2606965 - DNA, 25 bp, Homo sapien
gagtaagctgggaccatggtgcgtg

SEQ ID NO: 2606966 - DNA, 25 bp, Homo sapien
tgagtaagctgggaccatggtgcgt

SEQ ID NO: 2606967 - DNA, 25 bp, Homo sapien
taagctgggaccatggtgcgtgtca

SEQ ID NO: 2606968 - DNA, 25 bp, Homo sapien
agtaagctgggaccatggtgcgtgt

SEQ ID NO: 2606969 - DNA, 25 bp, Homo sapien
cataaatcgtgtgatctgcacagga

SEQ ID NO: 2606970 - DNA, 25 bp, Homo sapien
gagaacatggggaggcataaatcgt

SEQ ID NO: 2606971 - DNA, 25 bp, Homo sapien
tctgcacaggaactcaaaagcctgt

SEQ ID NO: 2606972 - DNA, 25 bp, Homo sapien
gggaggcataaatcgtgtgatctgc

SEQ ID NO: 2606973 - DNA, 25 bp, Homo sapien
tttctcacaaaatctgcatgaggca

SEQ ID NO: 2606974 - DNA, 25 bp, Homo sapien
tctcacaaaatctgcatgaggcaat

SEQ ID NO: 2606975 - DNA, 25 bp, Homo sapien
cagacagacgcatcccacttatttc

SEQ ID NO: 2606976 - DNA, 25 bp, Homo sapien
agacgcatcccacttatttctcaca

SEQ ID NO: 2606977 - DNA, 25 bp, Homo sapien
cttggtattttgtatccagtatctc

SEQ ID NO: 2606978 - DNA, 25 bp, Homo sapien
tgtttatcaacatgcccgttaacca

SEQ ID NO: 2606979 - DNA, 25 bp, Homo sapien
gattccttaggatatgatctgaatg

SEQ ID NO: 2606980 - DNA, 25 bp, Homo sapien
catgcccgttaaccacaagccaaaa

SEQ ID NO: 2606981 - DNA, 25 bp, Homo sapien
gccattgatggccacaggccgtcag

SEQ ID NO: 2606982 - DNA, 25 bp, Homo sapien
caggaagctgggttgattactagct

SEQ ID NO: 2606983 - DNA, 25 bp, Homo sapien
ctagcttcaggaaggcggctacatg

SEQ ID NO: 2606984 - DNA, 25 bp, Homo sapien
gctgggttgattactagcttcagga

SEQ ID NO: 2606985 - DNA, 25 bp, Homo sapien
tgaaagacctcacggagtcactgga

SEQ ID NO: 2606986 - DNA, 25 bp, Homo sapien
tcacaaagccgaccatggtggagtc

SEQ ID NO: 2606987 - DNA, 25 bp, Homo sapien
gagtcctgcgaagcgtttctgaaag

SEQ ID NO: 2606988 - DNA, 25 bp, Homo sapien
tatagggtgcgtacctgcaaacggc

SEQ ID NO: 2606989 - DNA, 25 bp, Homo sapien
gcatagccacaccactccatgattt

SEQ ID NO: 2606990 - DNA, 25 bp, Homo sapien
aagaaagcaaaagccgcgccttgga

SEQ ID NO: 2606991 - DNA, 25 bp, Homo sapien
atttctccaaaatagttggctgcag

SEQ ID NO: 2606992 - DNA, 25 bp, Homo sapien
gcagttacgtattcaaataagcctc

SEQ ID NO: 2606993 - DNA, 25 bp, Homo sapien
caacaaagtcatctggcggaggaga

SEQ ID NO: 2606994 - DNA, 25 bp, Homo sapien
gataacgttctccagtaaggtcgct

SEQ ID NO: 2606995 - DNA, 25 bp, Homo sapien
tgtctatgcgtgaaaataccaggcc

SEQ ID NO: 2606996 - DNA, 25 bp, Homo sapien
taaggtcgctttcacaggtgccagg

SEQ ID NO: 2606997 - DNA, 25 bp, Homo sapien
aaggctgggctccgtgacatcagaa

SEQ ID NO: 2606998 - DNA, 25 bp, Homo sapien
gaaatgggcaaacacgagagggcag

SEQ ID NO: 2606999 - DNA, 25 bp, Homo sapien
ggcaaacacgagagggcaggtggga

SEQ ID NO: 2607000 - DNA, 25 bp, Homo sapien
gggctccgtgacatcagaaagaaca

SEQ ID NO: 2607001 - DNA, 25 bp, Homo sapien
ctggcccgaaaaggcaagggcagag

SEQ ID NO: 2607002 - DNA, 25 bp, Homo sapien
gggcagagtacatgacagcaggaga

SEQ ID NO: 2607003 - DNA, 25 bp, Homo sapien
ccgaaaaggcaagggcagagtacat

SEQ ID NO: 2607004 - DNA, 25 bp, Homo sapien
aaggcaagggcagagtacatgacag

SEQ ID NO: 2607005 - DNA, 25 bp, Homo sapien
caggccatccagcacttgcaagtgc

SEQ ID NO: 2607006 - DNA, 25 bp, Homo sapien
tcccagaaactgcccgtgggaagat

SEQ ID NO: 2607007 - DNA, 25 bp, Homo sapien
ggccgccgcacagtgacatagcagg

SEQ ID NO: 2607008 - DNA, 25 bp, Homo sapien
agcggcactggccgccgcacagtga

SEQ ID NO: 2607009 - DNA, 25 bp, Homo sapien
agtgcattgcaaacatgttcgctgg

SEQ ID NO: 2607010 - DNA, 25 bp, Homo sapien
tcaaacctgcgaaagtgcattgcaa

SEQ ID NO: 2607011 - DNA, 25 bp, Homo sapien
aaacctgcgaaagtgcattgcaaac

SEQ ID NO: 2607012 - DNA, 25 bp, Homo sapien
caaacctgcgaaagtgcattgcaaa

SEQ ID NO: 2607013 - DNA, 25 bp, Homo sapien
gatactcttcaaatttccggaggta

SEQ ID NO: 2607014 - DNA, 25 bp, Homo sapien
actttggatactcttcaaatttccg

SEQ ID NO: 2607015 - DNA, 25 bp, Homo sapien
tctgaactttggatactcttcaaat

SEQ ID NO: 2607016 - DNA, 25 bp, Homo sapien
ttggatactcttcaaatttccggag

SEQ ID NO: 2607017 - DNA, 25 bp, Homo sapien
tacacagtaggatattcaacctcca

SEQ ID NO: 2607018 - DNA, 25 bp, Homo sapien
tttacaaagtccatagagaagcgcc

SEQ ID NO: 2607019 - DNA, 25 bp, Homo sapien
gaaattctgacctgttacacagtag

SEQ ID NO: 2607020 - DNA, 25 bp, Homo sapien
gcaagacatagccaaaagaggtaaa

SEQ ID NO: 2607021 - DNA, 25 bp, Homo sapien
tttatattgataacaggtacaggct

SEQ ID NO: 2607022 - DNA, 25 bp, Homo sapien
tgtggcctccgagagagggctccta

SEQ ID NO: 2607023 - DNA, 25 bp, Homo sapien
tccagatgagatgataaggcaaagc

SEQ ID NO: 2607024 - DNA, 25 bp, Homo sapien
tgcagttgaccttgaagagatcact

SEQ ID NO: 2607025 - DNA, 25 bp, Homo sapien
caacagcagggatagccaacatttg

SEQ ID NO: 2607026 - DNA, 25 bp, Homo sapien
catagggtctgtacttgctccaaca

SEQ ID NO: 2607027 - DNA, 25 bp, Homo sapien
tcaaattagacagaacaatcggtgc

SEQ ID NO: 2607028 - DNA, 25 bp, Homo sapien
gggaagcaactaactcagactgtca

SEQ ID NO: 2607029 - DNA, 25 bp, Homo sapien
tataagctttttgatagaggtatct

SEQ ID NO: 2607030 - DNA, 25 bp, Homo sapien
ggtatctggttgactttctgtatca

SEQ ID NO: 2607031 - DNA, 25 bp, Homo sapien
gactttctgtatcaatcaattgaat

SEQ ID NO: 2607032 - DNA, 25 bp, Homo sapien
atgaagtcaattgggaaatttctgt

SEQ ID NO: 2607033 - DNA, 25 bp, Homo sapien
ggcaccggctgtgcatcccacactg

SEQ ID NO: 2607034 - DNA, 25 bp, Homo sapien
gcaccggctgtgcatcccacactgt

SEQ ID NO: 2607035 - DNA, 25 bp, Homo sapien
aggcaccggctgtgcatcccacact

SEQ ID NO: 2607036 - DNA, 25 bp, Homo sapien
accggctgtgcatcccacactgtct

SEQ ID NO: 2607037 - DNA, 25 bp, Homo sapien
agggcccacagcaggagtggcatgc

SEQ ID NO: 2607038 - DNA, 25 bp, Homo sapien
tcatcctcgcatctccagggcccac

SEQ ID NO: 2607039 - DNA, 25 bp, Homo sapien
catgcacaaagatggagtgaatcca

SEQ ID NO: 2607040 - DNA, 25 bp, Homo sapien
agcaggagtggcatgcacaaagatg

SEQ ID NO: 2607041 - DNA, 25 bp, Homo sapien
tgttggagtagaacccacagtttcc

SEQ ID NO: 2607042 - DNA, 25 bp, Homo sapien
actgtgggctctgttggagtagaac

SEQ ID NO: 2607043 - DNA, 25 bp, Homo sapien
ccccttcagactgtgggctctgttg

SEQ ID NO: 2607044 - DNA, 25 bp, Homo sapien
gccacccccttcagactgtgggctc

SEQ ID NO: 2607045 - DNA, 25 bp, Homo sapien
gaagctaccagagctggtttgccca

SEQ ID NO: 2607046 - DNA, 25 bp, Homo sapien
aagctaccagagctggtttgcccat

SEQ ID NO: 2607047 - DNA, 25 bp, Homo sapien
tggaagctgggaagtaatcatcatg

SEQ ID NO: 2607048 - DNA, 25 bp, Homo sapien
attgcggaagatcccatgcgcctct

SEQ ID NO: 2607049 - DNA, 25 bp, Homo sapien
ggcagcctgcctagcattgcggaag

SEQ ID NO: 2607050 - DNA, 25 bp, Homo sapien
ccagggcgtgctttgtttggcccac

SEQ ID NO: 2607051 - DNA, 25 bp, Homo sapien
tgagaaaggacagcgcatactggta

SEQ ID NO: 2607052 - DNA, 25 bp, Homo sapien
ttgagaaaggacagcgcatactggt

SEQ ID NO: 2607053 - DNA, 25 bp, Homo sapien
tccataggagtatttgaggacctca

SEQ ID NO: 2607054 - DNA, 25 bp, Homo sapien
catgcagctgggaaaacgtggtctc

SEQ ID NO: 2607055 - DNA, 25 bp, Homo sapien
gttttagctgtgaaatgcctccatg

SEQ ID NO: 2607056 - DNA, 25 bp, Homo sapien
tcctcctacacaaagaggcttgcag

SEQ ID NO: 2607057 - DNA, 25 bp, Homo sapien
tccagtgaattctgtgccaccagaa

SEQ ID NO: 2607058 - DNA, 25 bp, Homo sapien
ataggcgatggctggtgccctcacg

SEQ ID NO: 2607059 - DNA, 25 bp, Homo sapien
caccagtgggctgtttgttgagaaa

SEQ ID NO: 2607060 - DNA, 25 bp, Homo sapien
aattttagccattacacggatgatg

SEQ ID NO: 2607061 - DNA, 25 bp, Homo sapien
tatctgggtaattactacactcagg

SEQ ID NO: 2607062 - DNA, 25 bp, Homo sapien
aaatagcaagtttacagacctgtgg

SEQ ID NO: 2607063 - DNA, 25 bp, Homo sapien
aaactggcgcaagtccactgaggcc

SEQ ID NO: 2607064 - DNA, 25 bp, Homo sapien
acactcaggaaactggcgcaagtcc

SEQ ID NO: 2607065 - DNA, 25 bp, Homo sapien
catctaacttgagggaggctggact

SEQ ID NO: 2607066 - DNA, 25 bp, Homo sapien
atcctgcaggaggtttagggtccag

SEQ ID NO: 2607067 - DNA, 25 bp, Homo sapien
gccacaacatgtttcggaggtaaaa

SEQ ID NO: 2607068 - DNA, 25 bp, Homo sapien
actatatagtccagctgagagccca

SEQ ID NO: 2607069 - DNA, 25 bp, Homo sapien
gtccaaagcaaacgccagtgtcgtt

SEQ ID NO: 2607070 - DNA, 25 bp, Homo sapien
aaagcaaacgccagtgtcgttgatc

SEQ ID NO: 2607071 - DNA, 25 bp, Homo sapien
ccaaagcaaacgccagtgtcgttga

SEQ ID NO: 2607072 - DNA, 25 bp, Homo sapien
agcaaacgccagtgtcgttgatcat

SEQ ID NO: 2607073 - DNA, 25 bp, Homo sapien
cgccgccggtggaagtttccgagca

SEQ ID NO: 2607074 - DNA, 25 bp, Homo sapien
gtgccgtgccgggtggctggctccg

SEQ ID NO: 2607075 - DNA, 25 bp, Homo sapien
gggtgagcggccagcgtgccgtgcc

SEQ ID NO: 2607076 - DNA, 25 bp, Homo sapien
agcaggtcacgctgcgctctctggg

SEQ ID NO: 2607077 - DNA, 25 bp, Homo sapien
ggatccaggccacgcgcggatccat

SEQ ID NO: 2607078 - DNA, 25 bp, Homo sapien
aggcagaaataggacgcgaagcccg

SEQ ID NO: 2607079 - DNA, 25 bp, Homo sapien
acagggcattggccggccccttctg

SEQ ID NO: 2607080 - DNA, 25 bp, Homo sapien
ctgctcgggctggatccaggccacg

SEQ ID NO: 2607081 - DNA, 25 bp, Homo sapien
gaagttgaagaaggcgccgccgcgg

SEQ ID NO: 2607082 - DNA, 25 bp, Homo sapien
gaggacgacgacgagcagccggggc

SEQ ID NO: 2607083 - DNA, 25 bp, Homo sapien
cccggccggcccagcgaggcgctgc

SEQ ID NO: 2607084 - DNA, 25 bp, Homo sapien
gctctcggtgcccgactccgcgttg

SEQ ID NO: 2607085 - DNA, 25 bp, Homo sapien
tgcgacggggagccggcgggcgcgg

SEQ ID NO: 2607086 - DNA, 25 bp, Homo sapien
ggagccggcgggcgcggggccgcgc

SEQ ID NO: 2607087 - DNA, 25 bp, Homo sapien
gccggcgggcgcggggccgcgcggc

SEQ ID NO: 2607088 - DNA, 25 bp, Homo sapien
ctgcgacggggagccggcgggcgcg

SEQ ID NO: 2607089 - DNA, 25 bp, Homo sapien
gtagttgaggccgtaggtgctggcc

SEQ ID NO: 2607090 - DNA, 25 bp, Homo sapien
tgtacgcgcggctcttccacggggt

SEQ ID NO: 2607091 - DNA, 25 bp, Homo sapien
tggccttgttctcgcgtttccggcg

SEQ ID NO: 2607092 - DNA, 25 bp, Homo sapien
atgcccgggctgtacgcgcggctct

SEQ ID NO: 2607093 - DNA, 25 bp, Homo sapien
cgacgtgattcgagttcctggcaat

SEQ ID NO: 2607094 - DNA, 25 bp, Homo sapien
tttcagtgcagagtcgggccttggc

SEQ ID NO: 2607095 - DNA, 25 bp, Homo sapien
gtagagagtcgatttcccgttccaa

SEQ ID NO: 2607096 - DNA, 25 bp, Homo sapien
tatctacgccccactttgacaaggg

SEQ ID NO: 2607097 - DNA, 25 bp, Homo sapien
gctctcagaaagttctacaggtaag

SEQ ID NO: 2607098 - DNA, 25 bp, Homo sapien
tgctctcagaaagttctacaggtaa

SEQ ID NO: 2607099 - DNA, 25 bp, Homo sapien
ctgctctcagaaagttctacaggta

SEQ ID NO: 2607100 - DNA, 25 bp, Homo sapien
tctcagaaagttctacaggtaagaa

SEQ ID NO: 2607101 - DNA, 25 bp, Homo sapien
gcacctccggctgcttgagcaatct

SEQ ID NO: 2607102 - DNA, 25 bp, Homo sapien
caatctccacagaagtaacaagagc

SEQ ID NO: 2607103 - DNA, 25 bp, Homo sapien
gatgggaaaggactcaagcaggacc

SEQ ID NO: 2607104 - DNA, 25 bp, Homo sapien
gagtgcatcaaaggcacctccggct

SEQ ID NO: 2607105 - DNA, 25 bp, Homo sapien
taaggatgtggccaaatatctgagg

SEQ ID NO: 2607106 - DNA, 25 bp, Homo sapien
atgtggccaaatatctgagggccat

SEQ ID NO: 2607107 - DNA, 25 bp, Homo sapien
ggatgtggccaaatatctgagggcc

SEQ ID NO: 2607108 - DNA, 25 bp, Homo sapien
cagtaaggatgtggccaaatatctg

SEQ ID NO: 2607109 - DNA, 25 bp, Homo sapien
tgtgtcctcgttcaactacattctt

SEQ ID NO: 2607110 - DNA, 25 bp, Homo sapien
atagaagctgttcagggcccgggac

SEQ ID NO: 2607111 - DNA, 25 bp, Homo sapien
cacagccttcgaaaggccaaactct

SEQ ID NO: 2607112 - DNA, 25 bp, Homo sapien
gacacctgcatgtgtcctcgttcaa

SEQ ID NO: 2607113 - DNA, 25 bp, Homo sapien
gcaagtatctgcttagtgtgatcat

SEQ ID NO: 2607114 - DNA, 25 bp, Homo sapien
caaaagacaggaacaagtgatgcta

SEQ ID NO: 2607115 - DNA, 25 bp, Homo sapien
cagaaagcaaggtccacacgtgcca

SEQ ID NO: 2607116 - DNA, 25 bp, Homo sapien
caagcttatacctctgggactcgga

SEQ ID NO: 2607117 - DNA, 25 bp, Homo sapien
gccagtgtcttgcactcgattttca

SEQ ID NO: 2607118 - DNA, 25 bp, Homo sapien
aaaactttcctcaactccagcacag

SEQ ID NO: 2607119 - DNA, 25 bp, Homo sapien
agacatatggtgcaagcaggtctcc

SEQ ID NO: 2607120 - DNA, 25 bp, Homo sapien
cctcatctatcagtgaccagacata

SEQ ID NO: 2607121 - DNA, 25 bp, Homo sapien
ctccgaccctccttttccagagtct

SEQ ID NO: 2607122 - DNA, 25 bp, Homo sapien
attcccagccagtttaatactccga

SEQ ID NO: 2607123 - DNA, 25 bp, Homo sapien
cagccagtttaatactccgaccctc

SEQ ID NO: 2607124 - DNA, 25 bp, Homo sapien
tttccagagtctgtcatgccctcct

SEQ ID NO: 2607125 - DNA, 25 bp, Homo sapien
caagccagaggacggaactggcaat

SEQ ID NO: 2607126 - DNA, 25 bp, Homo sapien
aggttctcctggttatagtggctgc

SEQ ID NO: 2607127 - DNA, 25 bp, Homo sapien
ggttctcctggttatagtggctgcc

SEQ ID NO: 2607128 - DNA, 25 bp, Homo sapien
tgtgcttggcactaagaatgcgggc

SEQ ID NO: 2607129 - DNA, 25 bp, Homo sapien
ggcactaagaatgcgggctacaata

SEQ ID NO: 2607130 - DNA, 25 bp, Homo sapien
ttagtggctaccgtgtgcttggcac

SEQ ID NO: 2607131 - DNA, 25 bp, Homo sapien
gaatgcgggctacaatacagcccct

SEQ ID NO: 2607132 - DNA, 25 bp, Homo sapien
ggtgccagcaaaggccccactgcct

SEQ ID NO: 2607133 - DNA, 25 bp, Homo sapien
tcagaaggtcaggatgcagagccca

SEQ ID NO: 2607134 - DNA, 25 bp, Homo sapien
gcagagcccaggtgccagcaaaggc

SEQ ID NO: 2607135 - DNA, 25 bp, Homo sapien
cactgcctcctgctgagacgccagg

SEQ ID NO: 2607136 - DNA, 25 bp, Homo sapien
gggattcgtggtctgcagctattta

SEQ ID NO: 2607137 - DNA, 25 bp, Homo sapien
agctatttaccgtgagcctctgcac

SEQ ID NO: 2607138 - DNA, 25 bp, Homo sapien
gcacagcataccctggctgatacag

SEQ ID NO: 2607139 - DNA, 25 bp, Homo sapien
tgagcctctgcacagcataccctgg

SEQ ID NO: 2607140 - DNA, 25 bp, Homo sapien
caagtccgaaaaccctccagatgag

SEQ ID NO: 2607141 - DNA, 25 bp, Homo sapien
tagactgcagcagtacacgtccctg

SEQ ID NO: 2607142 - DNA, 25 bp, Homo sapien
gaaagttatcccataccctagactg

SEQ ID NO: 2607143 - DNA, 25 bp, Homo sapien
gaaaaagctatcctacaagtccgaa

SEQ ID NO: 2607144 - DNA, 25 bp, Homo sapien
gaaccgcgcctgctgtgaaactgcg

SEQ ID NO: 2607145 - DNA, 25 bp, Homo sapien
cctggaagctagtgcaagccttgct

SEQ ID NO: 2607146 - DNA, 25 bp, Homo sapien
gacatatggtaactggcccaagacc

SEQ ID NO: 2607147 - DNA, 25 bp, Homo sapien
gaaactgcgtgactgcgcctggaag

SEQ ID NO: 2607148 - DNA, 25 bp, Homo sapien
taagggctctgcagcttaggaatca

SEQ ID NO: 2607149 - DNA, 25 bp, Homo sapien
cagggagggacctatcgatgtgcct

SEQ ID NO: 2607150 - DNA, 25 bp, Homo sapien
gaatctgcattggttctaagcccac

SEQ ID NO: 2607151 - DNA, 25 bp, Homo sapien
tgagacagccaatgctaactcggtg

SEQ ID NO: 2607152 - DNA, 25 bp, Homo sapien
gtgagggcaccgcccagccgtgccc

SEQ ID NO: 2607153 - DNA, 25 bp, Homo sapien
gccgtgcccacccagcggcctccct

SEQ ID NO: 2607154 - DNA, 25 bp, Homo sapien
gcccttcggcctccctgcaaccgca

SEQ ID NO: 2607155 - DNA, 25 bp, Homo sapien
agcggcctccctggcccttcggcct

SEQ ID NO: 2607156 - DNA, 25 bp, Homo sapien
aaagtcaattatttcctcatgtagt

SEQ ID NO: 2607157 - DNA, 25 bp, Homo sapien
tcggccaaaggtctttcaccacagt

SEQ ID NO: 2607158 - DNA, 25 bp, Homo sapien
tcaccacagtttcgatccgtttcac

SEQ ID NO: 2607159 - DNA, 25 bp, Homo sapien
ttctcatagctgcttcttcaggaca

SEQ ID NO: 2607160 - DNA, 25 bp, Homo sapien
tcagccgtcggccaaaggtctttca

SEQ ID NO: 2607161 - DNA, 25 bp, Homo sapien
ataaagacctgtactaaagctgcca

SEQ ID NO: 2607162 - DNA, 25 bp, Homo sapien
ctagttggaagataaagacctgtac

SEQ ID NO: 2607163 - DNA, 25 bp, Homo sapien
tactaaagctgccaaatatctgtac

SEQ ID NO: 2607164 - DNA, 25 bp, Homo sapien
gacctgtactaaagctgccaaatat

SEQ ID NO: 2607165 - DNA, 25 bp, Homo sapien
catttcccgaagaccaccaggtcta

SEQ ID NO: 2607166 - DNA, 25 bp, Homo sapien
tcagccacgttgtgcttccgcaggg

SEQ ID NO: 2607167 - DNA, 25 bp, Homo sapien
tgtaaaggaggacgctcccatttcc

SEQ ID NO: 2607168 - DNA, 25 bp, Homo sapien
tagccttgtcaaggactttgatgga

SEQ ID NO: 2607169 - DNA, 25 bp, Homo sapien
tgacgcaggcgtatcctgtgaccac

SEQ ID NO: 2607170 - DNA, 25 bp, Homo sapien
aactgtagccaataactgtgtaaaa

SEQ ID NO: 2607171 - DNA, 25 bp, Homo sapien
ccacaagctcgtgacgcaggcgtat

SEQ ID NO: 2607172 - DNA, 25 bp, Homo sapien
ctgtgtaaaataccacaagctcgtg

SEQ ID NO: 2607173 - DNA, 25 bp, Homo sapien
gacgcccgtctccatgttaaagctg

SEQ ID NO: 2607174 - DNA, 25 bp, Homo sapien
atgtaattcttgatgaactccgctg

SEQ ID NO: 2607175 - DNA, 25 bp, Homo sapien
cttcatgtaattcttgatgaactcc

SEQ ID NO: 2607176 - DNA, 25 bp, Homo sapien
ccggacgcccgtctccatgttaaag

SEQ ID NO: 2607177 - DNA, 25 bp, Homo sapien
ttaggctgtatgagctaattccacc

SEQ ID NO: 2607178 - DNA, 25 bp, Homo sapien
taggctgtatgagctaattccacct

SEQ ID NO: 2607179 - DNA, 25 bp, Homo sapien
aggctgtatgagctaattccacctg

SEQ ID NO: 2607180 - DNA, 25 bp, Homo sapien
aattaggctgtatgagctaattcca

SEQ ID NO: 2607181 - DNA, 25 bp, Homo sapien
gtacccgctggtcatggctttcatg

SEQ ID NO: 2607182 - DNA, 25 bp, Homo sapien
agctctccgggcatcaattcttgga

SEQ ID NO: 2607183 - DNA, 25 bp, Homo sapien
tcaatgcacagcatcgacggtctgt

SEQ ID NO: 2607184 - DNA, 25 bp, Homo sapien
ctctttggcgatataggcacctcct

SEQ ID NO: 2607185 - DNA, 25 bp, Homo sapien
gacaaaagttaattagaagcattaa

SEQ ID NO: 2607186 - DNA, 25 bp, Homo sapien
tcaagagcaaatgaactgcccgggg

SEQ ID NO: 2607187 - DNA, 25 bp, Homo sapien
tataagagaaacctgcatcaagagc

SEQ ID NO: 2607188 - DNA, 25 bp, Homo sapien
agctctcagcagtggagatcagggc

SEQ ID NO: 2607189 - DNA, 25 bp, Homo sapien
ggaatgaggacataaatacccctga

SEQ ID NO: 2607190 - DNA, 25 bp, Homo sapien
cgtccgccaacgattttatcaccaa

SEQ ID NO: 2607191 - DNA, 25 bp, Homo sapien
aacacatggttttatcagattggca

SEQ ID NO: 2607192 - DNA, 25 bp, Homo sapien
tcacctaacagacgctcaatcaaaa

SEQ ID NO: 2607193 - DNA, 25 bp, Homo sapien
tatgtaggcataatcgaagacctgc

SEQ ID NO: 2607194 - DNA, 25 bp, Homo sapien
tctgtttggataggacctggccagc

SEQ ID NO: 2607195 - DNA, 25 bp, Homo sapien
tggccagcggtgacacagcatggct

SEQ ID NO: 2607196 - DNA, 25 bp, Homo sapien
gcttcacctgcatggcgccatagga

SEQ ID NO: 2607197 - DNA, 25 bp, Homo sapien
gattcagctcaagcataccctggga

SEQ ID NO: 2607198 - DNA, 25 bp, Homo sapien
gatcatctcgctaggtgaaggacag

SEQ ID NO: 2607199 - DNA, 25 bp, Homo sapien
tcccactgcacggacgagaatggag

SEQ ID NO: 2607200 - DNA, 25 bp, Homo sapien
tgaaaacaccgagcagacagcggct

SEQ ID NO: 2607201 - DNA, 25 bp, Homo sapien
gtcaatcacctcctgagttactttg

SEQ ID NO: 2607202 - DNA, 25 bp, Homo sapien
ttctctttgatccacctccggtagt

SEQ ID NO: 2607203 - DNA, 25 bp, Homo sapien
tttgatccacctccggtagtcaatc

SEQ ID NO: 2607204 - DNA, 25 bp, Homo sapien
agtcaatcacctcctgagttacttt

SEQ ID NO: 2607205 - DNA, 25 bp, Homo sapien
tagagacacttctgcatgaacatgc

SEQ ID NO: 2607206 - DNA, 25 bp, Homo sapien
gacacttctgcatgaacatgccagc

SEQ ID NO: 2607207 - DNA, 25 bp, Homo sapien
gaacacaaatgaattaatctctcac

SEQ ID NO: 2607208 - DNA, 25 bp, Homo sapien
taggatgaacacaaatgaattaatc

SEQ ID NO: 2607209 - DNA, 25 bp, Homo sapien
taactcctgagaactgcggcgtgga

SEQ ID NO: 2607210 - DNA, 25 bp, Homo sapien
ctcctgagaactgcggcgtggagcc

SEQ ID NO: 2607211 - DNA, 25 bp, Homo sapien
gttaataactcctgagaactgcggc

SEQ ID NO: 2607212 - DNA, 25 bp, Homo sapien
cccggcagcatcagtcacgggctct

SEQ ID NO: 2607213 - DNA, 25 bp, Homo sapien
aagtcaagcgctggccatagggaga

SEQ ID NO: 2607214 - DNA, 25 bp, Homo sapien
cgtctgctccccattgcatgtggct

SEQ ID NO: 2607215 - DNA, 25 bp, Homo sapien
tcactcccagaaagtgaagacacag

SEQ ID NO: 2607216 - DNA, 25 bp, Homo sapien
agactcgggctctcggttctgcgtc

SEQ ID NO: 2607217 - DNA, 25 bp, Homo sapien
gagattttaagctcgcggctatgga

SEQ ID NO: 2607218 - DNA, 25 bp, Homo sapien
cgcatgagtcgcacagacaggttct

SEQ ID NO: 2607219 - DNA, 25 bp, Homo sapien
tgtccaacagacacacggaggaggg

SEQ ID NO: 2607220 - DNA, 25 bp, Homo sapien
tagaggattactgccctcgacagcc

SEQ ID NO: 2607221 - DNA, 25 bp, Homo sapien
acagctgtaccacaaaggtgcacta

SEQ ID NO: 2607222 - DNA, 25 bp, Homo sapien
ccaggctggctatgaaaggttattc

SEQ ID NO: 2607223 - DNA, 25 bp, Homo sapien
gcttccttcaagtaatttcatcaca

SEQ ID NO: 2607224 - DNA, 25 bp, Homo sapien
ttaaagctatgaaaagaaacgcctg

SEQ ID NO: 2607225 - DNA, 25 bp, Homo sapien
tggttgtcatgatcagtgttctgga

SEQ ID NO: 2607226 - DNA, 25 bp, Homo sapien
ggagctggcgcttgcagactgaact

SEQ ID NO: 2607227 - DNA, 25 bp, Homo sapien
agactgaactggtaaacactgggcg

SEQ ID NO: 2607228 - DNA, 25 bp, Homo sapien
tgaggtttgccactgggcattggca

SEQ ID NO: 2607229 - DNA, 25 bp, Homo sapien
tctagtgcatatcacagctcggatg

SEQ ID NO: 2607230 - DNA, 25 bp, Homo sapien
tgcaggaaggcagtcaacctggccc

SEQ ID NO: 2607231 - DNA, 25 bp, Homo sapien
tcctcgctgctgaaactatacatgg

SEQ ID NO: 2607232 - DNA, 25 bp, Homo sapien
tttcctagaacaacacaccaatggc

SEQ ID NO: 2607233 - DNA, 25 bp, Homo sapien
gacttgcaatactgacctggttgca

SEQ ID NO: 2607234 - DNA, 25 bp, Homo sapien
agaagtgcgctaacgagaacccctt

SEQ ID NO: 2607235 - DNA, 25 bp, Homo sapien
gcttctatgtcagcatcacccgtta

SEQ ID NO: 2607236 - DNA, 25 bp, Homo sapien
tcacccgttactgtcagcagcagaa

SEQ ID NO: 2607237 - DNA, 25 bp, Homo sapien
ctgcaaggaacaggagcaaccccta

SEQ ID NO: 2607238 - DNA, 25 bp, Homo sapien
acaggagcaacccctagggtcggtg

SEQ ID NO: 2607239 - DNA, 25 bp, Homo sapien
caggagcaacccctagggtcggtgg

SEQ ID NO: 2607240 - DNA, 25 bp, Homo sapien
caaggaacaggagcaacccctaggg

SEQ ID NO: 2607241 - DNA, 25 bp, Homo sapien
ttcaaagacgcagttccttctacac

SEQ ID NO: 2607242 - DNA, 25 bp, Homo sapien
gaagacatgtggtggacggctttca

SEQ ID NO: 2607243 - DNA, 25 bp, Homo sapien
tgatacagatgagggctcgagagcg

SEQ ID NO: 2607244 - DNA, 25 bp, Homo sapien
tgtggtggacggctttcaaagacgc

SEQ ID NO: 2607245 - DNA, 25 bp, Homo sapien
ttgcacctgtaattccaccactttg

SEQ ID NO: 2607246 - DNA, 25 bp, Homo sapien
tggcttgcacctgtaattccaccac

SEQ ID NO: 2607247 - DNA, 25 bp, Homo sapien
gcttgcacctgtaattccaccactt

SEQ ID NO: 2607248 - DNA, 25 bp, Homo sapien
tactcaagaagctgaggcacaagaa

SEQ ID NO: 2607249 - DNA, 25 bp, Homo sapien
ccgtgagagcccttcatggacagtt

SEQ ID NO: 2607250 - DNA, 25 bp, Homo sapien
cgccgccttgggtgtggccgtgaga

SEQ ID NO: 2607251 - DNA, 25 bp, Homo sapien
acctccgctacccacagagctgtag

SEQ ID NO: 2607252 - DNA, 25 bp, Homo sapien
ccggtgcggttatactggtggtgtc

SEQ ID NO: 2607253 - DNA, 25 bp, Homo sapien
tgctggtctcggttcccctgccggt

SEQ ID NO: 2607254 - DNA, 25 bp, Homo sapien
ttcacagatgagcacaacgagctgt

SEQ ID NO: 2607255 - DNA, 25 bp, Homo sapien
cgtccacgtttaataaggcttcaca

SEQ ID NO: 2607256 - DNA, 25 bp, Homo sapien
ccaccacacgaagaaacatgcagag

SEQ ID NO: 2607257 - DNA, 25 bp, Homo sapien
tttttgtcaaacctgtagcacgcga

SEQ ID NO: 2607258 - DNA, 25 bp, Homo sapien
tatacctgtatgcttccgacgtcgg

SEQ ID NO: 2607259 - DNA, 25 bp, Homo sapien
tgtagtgtttagcaagaccagaccc

SEQ ID NO: 2607260 - DNA, 25 bp, Homo sapien
taaagcttgtccttgctgggcgtcg

SEQ ID NO: 2607261 - DNA, 25 bp, Homo sapien
ctgaaagacagctggtccccattca

SEQ ID NO: 2607262 - DNA, 25 bp, Homo sapien
ccccattcacagaggacactgggga

SEQ ID NO: 2607263 - DNA, 25 bp, Homo sapien
tgaaagacagctggtccccattcac

SEQ ID NO: 2607264 - DNA, 25 bp, Homo sapien
cactggggacaacaggcagggggct

SEQ ID NO: 2607265 - DNA, 25 bp, Homo sapien
gaattggccccagaacttggtgcag

SEQ ID NO: 2607266 - DNA, 25 bp, Homo sapien
catcaagctcatgtccgacatcggg

SEQ ID NO: 2607267 - DNA, 25 bp, Homo sapien
gatttcagcaattctagcagaccct

SEQ ID NO: 2607268 - DNA, 25 bp, Homo sapien
ggtggctgcgagtctgatttcagca

SEQ ID NO: 2607269 - DNA, 25 bp, Homo sapien
acgctttgaccaatgggtgggaagt

SEQ ID NO: 2607270 - DNA, 25 bp, Homo sapien
cagcaacctggtccattcagggtgg

SEQ ID NO: 2607271 - DNA, 25 bp, Homo sapien
tgtccacagagtccccgatgagctg

SEQ ID NO: 2607272 - DNA, 25 bp, Homo sapien
cacagggatcagtgtccaccagcaa

SEQ ID NO: 2607273 - DNA, 25 bp, Homo sapien
tccgcagcttcgcagagccctggcg

SEQ ID NO: 2607274 - DNA, 25 bp, Homo sapien
cgcggcttccccagatcgcaggtca

SEQ ID NO: 2607275 - DNA, 25 bp, Homo sapien
acactgacgcctccctcgtccgcag

SEQ ID NO: 2607276 - DNA, 25 bp, Homo sapien
gcgcggcttccccagatcgcaggtc

SEQ ID NO: 2607277 - DNA, 25 bp, Homo sapien
ggccagggttccctctaagtatgag

SEQ ID NO: 2607278 - DNA, 25 bp, Homo sapien
tcccagtggaaagagtcctggatcg

SEQ ID NO: 2607279 - DNA, 25 bp, Homo sapien
cctaagacatgacacggcagcacgt

SEQ ID NO: 2607280 - DNA, 25 bp, Homo sapien
gaacggagccctcgcactggttgtt

SEQ ID NO: 2607281 - DNA, 25 bp, Homo sapien
tcctctgaactctgtcaaggaggcc

SEQ ID NO: 2607282 - DNA, 25 bp, Homo sapien
gaggagtaacgagtcccaagttgag

SEQ ID NO: 2607283 - DNA, 25 bp, Homo sapien
gagaaggatggagccgcatcctctg

SEQ ID NO: 2607284 - DNA, 25 bp, Homo sapien
gagctgaactgaggagtaacgagtc

SEQ ID NO: 2607285 - DNA, 25 bp, Homo sapien
attctctcagcagaatccttgtcct

SEQ ID NO: 2607286 - DNA, 25 bp, Homo sapien
catgatcacttgagcaaccctcgga

SEQ ID NO: 2607287 - DNA, 25 bp, Homo sapien
gaatggtttgatgcattatttccca

SEQ ID NO: 2607288 - DNA, 25 bp, Homo sapien
gcaaccctcggagcaattctctcag

SEQ ID NO: 2607289 - DNA, 25 bp, Homo sapien
ggtcagtgccttctgacttttatgg

SEQ ID NO: 2607290 - DNA, 25 bp, Homo sapien
tgggcacaggcgaagaaaaggcaca

SEQ ID NO: 2607291 - DNA, 25 bp, Homo sapien
cttttatggttatggtccatctcag

SEQ ID NO: 2607292 - DNA, 25 bp, Homo sapien
tatggtccatctcaggtggatgggc

SEQ ID NO: 2607293 - DNA, 25 bp, Homo sapien
aggaggtgatgggaaagcgtggcca

SEQ ID NO: 2607294 - DNA, 25 bp, Homo sapien
ggaggtgatgggaaagcgtggccag

SEQ ID NO: 2607295 - DNA, 25 bp, Homo sapien
gaaatccagcacaagatgaaagcct

SEQ ID NO: 2607296 - DNA, 25 bp, Homo sapien
taaagagctaggctaaaagttcctg

SEQ ID NO: 2607297 - DNA, 25 bp, Homo sapien
gacaaatgtgggtatcaaggctcag

SEQ ID NO: 2607298 - DNA, 25 bp, Homo sapien
caaaattagcgggtagggcatccaa

SEQ ID NO: 2607299 - DNA, 25 bp, Homo sapien
aatgggacttgtcccactccaactg

SEQ ID NO: 2607300 - DNA, 25 bp, Homo sapien
accacacaccatcaaatgggacttg

SEQ ID NO: 2607301 - DNA, 25 bp, Homo sapien
tgctgtagcgaccacacaccatcaa

SEQ ID NO: 2607302 - DNA, 25 bp, Homo sapien
cacacaccatcaaatgggacttgtc

SEQ ID NO: 2607303 - DNA, 25 bp, Homo sapien
ttgtagaccaccgtgagacagctct

SEQ ID NO: 2607304 - DNA, 25 bp, Homo sapien
cagattcctcaagctgaagcaccca

SEQ ID NO: 2607305 - DNA, 25 bp, Homo sapien
tgcactgctatgcacaaagctctgc

SEQ ID NO: 2607306 - DNA, 25 bp, Homo sapien
gttttgaccacaccctattgcacga

SEQ ID NO: 2607307 - DNA, 25 bp, Homo sapien
ccaggtccaggctcctcttggcagg

SEQ ID NO: 2607308 - DNA, 25 bp, Homo sapien
caggccccagcttggagtcctggat

SEQ ID NO: 2607309 - DNA, 25 bp, Homo sapien
ggccccagcttggagtcctggatct

SEQ ID NO: 2607310 - DNA, 25 bp, Homo sapien
tccccaggtccaggctcctcttggc

SEQ ID NO: 2607311 - DNA, 25 bp, Homo sapien
tggtgctaggatccaggtcctcagg

SEQ ID NO: 2607312 - DNA, 25 bp, Homo sapien
gtcaccatttttccaagggtggtgc

SEQ ID NO: 2607313 - DNA, 25 bp, Homo sapien
agtcaccatttttccaagggtggtg

SEQ ID NO: 2607314 - DNA, 25 bp, Homo sapien
gtgctaggatccaggtcctcaggag

SEQ ID NO: 2607315 - DNA, 25 bp, Homo sapien
cagtagctcccaattgtgaggcata

SEQ ID NO: 2607316 - DNA, 25 bp, Homo sapien
caatttctgccgacgtatgtttagc

SEQ ID NO: 2607317 - DNA, 25 bp, Homo sapien
ttgtgaggcatacaccacaccaggc

SEQ ID NO: 2607318 - DNA, 25 bp, Homo sapien
tgtttagcataccagcagtagctcc

SEQ ID NO: 2607319 - DNA, 25 bp, Homo sapien
aattttcagtaggaccatttgcata

SEQ ID NO: 2607320 - DNA, 25 bp, Homo sapien
ggttgtaccattggcaaattttcag

SEQ ID NO: 2607321 - DNA, 25 bp, Homo sapien
tagttacaagaaaatggctcatcgt

SEQ ID NO: 2607322 - DNA, 25 bp, Homo sapien
cactttattacttgaacaggtgaga

SEQ ID NO: 2607323 - DNA, 25 bp, Homo sapien
tatgtctgggttcccggtatcgcca

SEQ ID NO: 2607324 - DNA, 25 bp, Homo sapien
cacattccggtgtcaaagaaaggca

SEQ ID NO: 2607325 - DNA, 25 bp, Homo sapien
tgccatttgggctgaagaccagctg

SEQ ID NO: 2607326 - DNA, 25 bp, Homo sapien
gacagcttgtgtctacacctgcaga

SEQ ID NO: 2607327 - DNA, 25 bp, Homo sapien
gaggtccgtgagtggtagaccctac

SEQ ID NO: 2607328 - DNA, 25 bp, Homo sapien
gcaagaaacctgtcccgatgtgtca

SEQ ID NO: 2607329 - DNA, 25 bp, Homo sapien
tacaaacatactcagcaatgcccag

SEQ ID NO: 2607330 - DNA, 25 bp, Homo sapien
cacggaggtgagaagaggcgtaact

SEQ ID NO: 2607331 - DNA, 25 bp, Homo sapien
tccatcagaaaatgcaatcttcgtc

SEQ ID NO: 2607332 - DNA, 25 bp, Homo sapien
gcaatcttcgtcaactgtaagctgt

SEQ ID NO: 2607333 - DNA, 25 bp, Homo sapien
cgtcaactgtaagctgtcatagtac

SEQ ID NO: 2607334 - DNA, 25 bp, Homo sapien
caagctcgcttataccactctccat

SEQ ID NO: 2607335 - DNA, 25 bp, Homo sapien
agcactcactctcggagggcatttg

SEQ ID NO: 2607336 - DNA, 25 bp, Homo sapien
gtcactggagcagctccctggactt

SEQ ID NO: 2607337 - DNA, 25 bp, Homo sapien
ggagggcatttgaccaccactggga

SEQ ID NO: 2607338 - DNA, 25 bp, Homo sapien
ggatgggaaggcgagcttactctca

SEQ ID NO: 2607339 - DNA, 25 bp, Homo sapien
ggactggcagttacctctccctggt

SEQ ID NO: 2607340 - DNA, 25 bp, Homo sapien
taatccatttgtccgtgggactggc

SEQ ID NO: 2607341 - DNA, 25 bp, Homo sapien
tctctggctctagcgtgcctgggtc

SEQ ID NO: 2607342 - DNA, 25 bp, Homo sapien
gagttcagtcacaccaactgaggag

SEQ ID NO: 2607343 - DNA, 25 bp, Homo sapien
gaaacgctgcatttcttgacagcat

SEQ ID NO: 2607344 - DNA, 25 bp, Homo sapien
tgactgaggtaagaaacgctgcatt

SEQ ID NO: 2607345 - DNA, 25 bp, Homo sapien
ttgcttctgcgttcacccttatagt

SEQ ID NO: 2607346 - DNA, 25 bp, Homo sapien
tatagtctggaatcgccttaatttt

SEQ ID NO: 2607347 - DNA, 25 bp, Homo sapien
aaatgatttgaaagagtcaggaaaa

SEQ ID NO: 2607348 - DNA, 25 bp, Homo sapien
caaatgatttgaaagagtcaggaaa

SEQ ID NO: 2607349 - DNA, 25 bp, Homo sapien
aatgatttgaaagagtcaggaaaag

SEQ ID NO: 2607350 - DNA, 25 bp, Homo sapien
tccgcgacaagagtgaagtcacttg

SEQ ID NO: 2607351 - DNA, 25 bp, Homo sapien
tgccagacacatccgcgacaagagt

SEQ ID NO: 2607352 - DNA, 25 bp, Homo sapien
cacaagggacgcttcttattatcat

SEQ ID NO: 2607353 - DNA, 25 bp, Homo sapien
gcacagccgctggtgacagccataa

SEQ ID NO: 2607354 - DNA, 25 bp, Homo sapien
cagcacagcacagcgtcctgcgtgt

SEQ ID NO: 2607355 - DNA, 25 bp, Homo sapien
gcgtcctgcgtgtgcctgctgcaga

SEQ ID NO: 2607356 - DNA, 25 bp, Homo sapien
acagcacagcgtcctgcgtgtgcct

SEQ ID NO: 2607357 - DNA, 25 bp, Homo sapien
gagtcacacttctcaccatgcacag

SEQ ID NO: 2607358 - DNA, 25 bp, Homo sapien
caaagccccacagctgaatggcgta

SEQ ID NO: 2607359 - DNA, 25 bp, Homo sapien
agccccacttggctgatcaatgagg

SEQ ID NO: 2607360 - DNA, 25 bp, Homo sapien
atggcgtaccgcagaaatacagctg

SEQ ID NO: 2607361 - DNA, 25 bp, Homo sapien
tcatccagtatgagtgcaggaggct

SEQ ID NO: 2607362 - DNA, 25 bp, Homo sapien
agccacccattgactccagaagctc

SEQ ID NO: 2607363 - DNA, 25 bp, Homo sapien
gaaaaacgctcaaagccatagggaa

SEQ ID NO: 2607364 - DNA, 25 bp, Homo sapien
gaacacacaagaaaaacgctcaaag

SEQ ID NO: 2607365 - DNA, 25 bp, Homo sapien
aaattccaggatgaacacacaagaa

SEQ ID NO: 2607366 - DNA, 25 bp, Homo sapien
gaaaaatctgagtccaaacctcctg

SEQ ID NO: 2607367 - DNA, 25 bp, Homo sapien
aaaagcagtcatcacagccctgggc

SEQ ID NO: 2607368 - DNA, 25 bp, Homo sapien
gagtatgtctcaccatcgtgggtca

SEQ ID NO: 2607369 - DNA, 25 bp, Homo sapien
gttaaagccacagggacaacagccc

SEQ ID NO: 2607370 - DNA, 25 bp, Homo sapien
ctggtgacgtcagccagaaacagaa

SEQ ID NO: 2607371 - DNA, 25 bp, Homo sapien
accaatctggagcatgctgccctgc

SEQ ID NO: 2607372 - DNA, 25 bp, Homo sapien
aattgcactggtcccacaactagag

SEQ ID NO: 2607373 - DNA, 25 bp, Homo sapien
acaactagagacagcccctacgctt

SEQ ID NO: 2607374 - DNA, 25 bp, Homo sapien
ctgttggagccccagttcccagtct

SEQ ID NO: 2607375 - DNA, 25 bp, Homo sapien
aaaccgctgcccactaggctaactg

SEQ ID NO: 2607376 - DNA, 25 bp, Homo sapien
aaggccacaagccatggcactccat

SEQ ID NO: 2607377 - DNA, 25 bp, Homo sapien
tctcctgtgctctagaaagcccagg

SEQ ID NO: 2607378 - DNA, 25 bp, Homo sapien
tctggcaccatccatactttcctat

SEQ ID NO: 2607379 - DNA, 25 bp, Homo sapien
tctgaattccaattcgattttcagg

SEQ ID NO: 2607380 - DNA, 25 bp, Homo sapien
atactttcctatacctgtaactttg

SEQ ID NO: 2607381 - DNA, 25 bp, Homo sapien
ggccacttcccccacagtgtggatg

SEQ ID NO: 2607382 - DNA, 25 bp, Homo sapien
gtccgccttcctggtcagaaatcgt

SEQ ID NO: 2607383 - DNA, 25 bp, Homo sapien
actttaatgcgctgtcagcagcttc

SEQ ID NO: 2607384 - DNA, 25 bp, Homo sapien
gaaatcgtactgaactttaatgcgc

SEQ ID NO: 2607385 - DNA, 25 bp, Homo sapien
ggctttacatctaaagaaatctgag

SEQ ID NO: 2607386 - DNA, 25 bp, Homo sapien
acctactggcgggaaatactgccca

SEQ ID NO: 2607387 - DNA, 25 bp, Homo sapien
gcataaaaacatggcgggaagacag

SEQ ID NO: 2607388 - DNA, 25 bp, Homo sapien
ggcgggaaatactgcccaactccac

SEQ ID NO: 2607389 - DNA, 25 bp, Homo sapien
tcctgttagagccacctactggcgg

SEQ ID NO: 2607390 - DNA, 25 bp, Homo sapien
ggtggccagtggtgtggcagctaca

SEQ ID NO: 2607391 - DNA, 25 bp, Homo sapien
gtgctccggagacacaattccaaca

SEQ ID NO: 2607392 - DNA, 25 bp, Homo sapien
gagacacaattccaacactaagctg

SEQ ID NO: 2607393 - DNA, 25 bp, Homo sapien
cactaagctgtctgatttctaagaa

SEQ ID NO: 2607394 - DNA, 25 bp, Homo sapien
cctcctattatcatgtagcagtaag

SEQ ID NO: 2607395 - DNA, 25 bp, Homo sapien
aacataccagtagggttggctttca

SEQ ID NO: 2607396 - DNA, 25 bp, Homo sapien
tattatcatgtagcagtaagtgtgg

SEQ ID NO: 2607397 - DNA, 25 bp, Homo sapien
tcagattcacactaccacctgcagg

SEQ ID NO: 2607398 - DNA, 25 bp, Homo sapien
ccgaatgtgtaagaaatgaccgcaa

SEQ ID NO: 2607399 - DNA, 25 bp, Homo sapien
gctgactcaccgaatgtgtaagaaa

SEQ ID NO: 2607400 - DNA, 25 bp, Homo sapien
aaatgaccgcaaaacaaatatggaa

SEQ ID NO: 2607401 - DNA, 25 bp, Homo sapien
ttctgaggcagctgactcaccgaat

SEQ ID NO: 2607402 - DNA, 25 bp, Homo sapien
cttgagtgtctcgtgaatcagggac

SEQ ID NO: 2607403 - DNA, 25 bp, Homo sapien
gaaactctcacataagtgtcctgat

SEQ ID NO: 2607404 - DNA, 25 bp, Homo sapien
tgttctgttgcacatgtgacactcg

SEQ ID NO: 2607405 - DNA, 25 bp, Homo sapien
tttgttgcatcctgtgaagcacgac

SEQ ID NO: 2607406 - DNA, 25 bp, Homo sapien
tgcaacacctggtattcccatgtgg

SEQ ID NO: 2607407 - DNA, 25 bp, Homo sapien
aaccctgcaacacctggtattccca

SEQ ID NO: 2607408 - DNA, 25 bp, Homo sapien
gatcaagcacgttcaaagtggtatg

SEQ ID NO: 2607409 - DNA, 25 bp, Homo sapien
ccctgcaacacctggtattcccatg

SEQ ID NO: 2607410 - DNA, 25 bp, Homo sapien
gtagaacttgccctcatcactaggg

SEQ ID NO: 2607411 - DNA, 25 bp, Homo sapien
tatatgcctggtgacgatggccgag

SEQ ID NO: 2607412 - DNA, 25 bp, Homo sapien
gagatttacaatgccctgctggaag

SEQ ID NO: 2607413 - DNA, 25 bp, Homo sapien
ggaacagctggacaacttgatggct

SEQ ID NO: 2607414 - DNA, 25 bp, Homo sapien
ttttctagctacagaagagcaaagc

SEQ ID NO: 2607415 - DNA, 25 bp, Homo sapien
aagagcaaagcgcagtaccacgtgc

SEQ ID NO: 2607416 - DNA, 25 bp, Homo sapien
ccaccctcaaagtgaatggcagcca

SEQ ID NO: 2607417 - DNA, 25 bp, Homo sapien
gcaaagcgcagtaccacgtgctcct

SEQ ID NO: 2607418 - DNA, 25 bp, Homo sapien
gcactggaaagtctagtctgtgccc

SEQ ID NO: 2607419 - DNA, 25 bp, Homo sapien
tgtctgaatgcagttccgtctctct

SEQ ID NO: 2607420 - DNA, 25 bp, Homo sapien
tctctgcaccataacaaatctcgga

SEQ ID NO: 2607421 - DNA, 25 bp, Homo sapien
gtgtggctaagccaacctctgctcc

SEQ ID NO: 2607422 - DNA, 25 bp, Homo sapien
ctccacctgtctgcatgtcggttgc

SEQ ID NO: 2607423 - DNA, 25 bp, Homo sapien
catgtcggttgctgcgtccatataa

SEQ ID NO: 2607424 - DNA, 25 bp, Homo sapien
gtctgcatgtcggttgctgcgtcca

SEQ ID NO: 2607425 - DNA, 25 bp, Homo sapien
tcggttgctgcgtccatataaagtg

SEQ ID NO: 2607426 - DNA, 25 bp, Homo sapien
tccatttctttgcaggtgagaacac

SEQ ID NO: 2607427 - DNA, 25 bp, Homo sapien
gcgtgtttgtgggtgagctcattcc

SEQ ID NO: 2607428 - DNA, 25 bp, Homo sapien
tcctatagggactggactggtttgt

SEQ ID NO: 2607429 - DNA, 25 bp, Homo sapien
aaggtgagggcttcgattccatttc

SEQ ID NO: 2607430 - DNA, 25 bp, Homo sapien
ccagaatggttgtagctaaacaaag

SEQ ID NO: 2607431 - DNA, 25 bp, Homo sapien
tggctggtccacctagcattcccag

SEQ ID NO: 2607432 - DNA, 25 bp, Homo sapien
tagaacaggcttcatcagacaccca

SEQ ID NO: 2607433 - DNA, 25 bp, Homo sapien
aacaaagtttagaacaggcttcatc

SEQ ID NO: 2607434 - DNA, 25 bp, Homo sapien
tgatgctgtaaatgggccccgtcgt

SEQ ID NO: 2607435 - DNA, 25 bp, Homo sapien
caaccaggggttcgtgtgtgcatcc

SEQ ID NO: 2607436 - DNA, 25 bp, Homo sapien
ccgtcgtcccaactgctaaggtgct

SEQ ID NO: 2607437 - DNA, 25 bp, Homo sapien
tggacaccgggactgccttcgtgat

SEQ ID NO: 2607438 - DNA, 25 bp, Homo sapien
ttactggtgctaccccgatgtcttc

SEQ ID NO: 2607439 - DNA, 25 bp, Homo sapien
ttggggcagtgatcctgaagtgcat

SEQ ID NO: 2607440 - DNA, 25 bp, Homo sapien
gtcttggagaccactgcatgtgcac

SEQ ID NO: 2607441 - DNA, 25 bp, Homo sapien
gcagtgctgagctttactggtgcta

SEQ ID NO: 2607442 - DNA, 25 bp, Homo sapien
aagatggggaaatgacgcctgctgc

SEQ ID NO: 2607443 - DNA, 25 bp, Homo sapien
ccccagagacactttcaggatgaag

SEQ ID NO: 2607444 - DNA, 25 bp, Homo sapien
tgtccacactgctctcacatgtggg

SEQ ID NO: 2607445 - DNA, 25 bp, Homo sapien
gtttgaatgtttccctgagacctgc

SEQ ID NO: 2607446 - DNA, 25 bp, Homo sapien
ggaatagatgtccaagatttctcat

SEQ ID NO: 2607447 - DNA, 25 bp, Homo sapien
ccacgagggttagaacaggcagccc

SEQ ID NO: 2607448 - DNA, 25 bp, Homo sapien
gacatctgtaggaactgaccttggg

SEQ ID NO: 2607449 - DNA, 25 bp, Homo sapien
tctgttcacggacatctgtaggaac

SEQ ID NO: 2607450 - DNA, 25 bp, Homo sapien
caggctactcgtttggttttctcca

SEQ ID NO: 2607451 - DNA, 25 bp, Homo sapien
ctgcaagccattaaacaggctactc

SEQ ID NO: 2607452 - DNA, 25 bp, Homo sapien
cattaaacaggctactcgtttggtt

SEQ ID NO: 2607453 - DNA, 25 bp, Homo sapien
agccattaaacaggctactcgtttg

SEQ ID NO: 2607454 - DNA, 25 bp, Homo sapien
tggaggtggatgatttccggcactg

SEQ ID NO: 2607455 - DNA, 25 bp, Homo sapien
tgatttccggcactgtcacctctct

SEQ ID NO: 2607456 - DNA, 25 bp, Homo sapien
ggtggatgatttccggcactgtcac

SEQ ID NO: 2607457 - DNA, 25 bp, Homo sapien
gtcacctctctgaacaatcaggaaa

SEQ ID NO: 2607458 - DNA, 25 bp, Homo sapien
tgctgaaggatagagctggccactc

SEQ ID NO: 2607459 - DNA, 25 bp, Homo sapien
gactttttgaacattctgcagccag

SEQ ID NO: 2607460 - DNA, 25 bp, Homo sapien
tgtgcttcacaccatattccccagt

SEQ ID NO: 2607461 - DNA, 25 bp, Homo sapien
tggccactctgggatagcactgatg

SEQ ID NO: 2607462 - DNA, 25 bp, Homo sapien
tgccatccctgtgaacatctgcagt

SEQ ID NO: 2607463 - DNA, 25 bp, Homo sapien
gccatccctgtgaacatctgcagtc

SEQ ID NO: 2607464 - DNA, 25 bp, Homo sapien
gcttcattgaggcatttgctgtgtc

SEQ ID NO: 2607465 - DNA, 25 bp, Homo sapien
cttcattgaggcatttgctgtgtcc

SEQ ID NO: 2607466 - DNA, 25 bp, Homo sapien
tggcttccaaattgcactaaaacag

SEQ ID NO: 2607467 - DNA, 25 bp, Homo sapien
tcttagatgaaagactttgggctga

SEQ ID NO: 2607468 - DNA, 25 bp, Homo sapien
tgagggaagatgcacggcagtctta

SEQ ID NO: 2607469 - DNA, 25 bp, Homo sapien
aattgcactaaaacagcaaatgcac

SEQ ID NO: 2607470 - DNA, 25 bp, Homo sapien
agggccagttgtggctgaacacccc

SEQ ID NO: 2607471 - DNA, 25 bp, Homo sapien
ggctgaacaccccctgttgcttcat

SEQ ID NO: 2607472 - DNA, 25 bp, Homo sapien
cagggccagttgtggctgaacaccc

SEQ ID NO: 2607473 - DNA, 25 bp, Homo sapien
tggctgaacaccccctgttgcttca

SEQ ID NO: 2607474 - DNA, 25 bp, Homo sapien
tctcggagtgcaaaactgatgttgc

SEQ ID NO: 2607475 - DNA, 25 bp, Homo sapien
tgtcttcaccttcgggctggtttct

SEQ ID NO: 2607476 - DNA, 25 bp, Homo sapien
gctggtttctcggagtgcaaaactg

SEQ ID NO: 2607477 - DNA, 25 bp, Homo sapien
ctgtcttcaccttcgggctggtttc

SEQ ID NO: 2607478 - DNA, 25 bp, Homo sapien
tagcatattgatagccatcggccat

SEQ ID NO: 2607479 - DNA, 25 bp, Homo sapien
actggtgtttctgggtgaccctggt

SEQ ID NO: 2607480 - DNA, 25 bp, Homo sapien
aagagggacctcaaccagcactggt

SEQ ID NO: 2607481 - DNA, 25 bp, Homo sapien
tcctgtggcaacttactatccttag

SEQ ID NO: 2607482 - DNA, 25 bp, Homo sapien
ggctgtcacggatgccggtttgttc

SEQ ID NO: 2607483 - DNA, 25 bp, Homo sapien
tcacggatgccggtttgttcagcta

SEQ ID NO: 2607484 - DNA, 25 bp, Homo sapien
cggatgccggtttgttcagctacat

SEQ ID NO: 2607485 - DNA, 25 bp, Homo sapien
tgccggtttgttcagctacatctgc

SEQ ID NO: 2607486 - DNA, 25 bp, Homo sapien
cactgaagccttggtcttctcttag

SEQ ID NO: 2607487 - DNA, 25 bp, Homo sapien
tctcttaggtggttattggcgatgg

SEQ ID NO: 2607488 - DNA, 25 bp, Homo sapien
ttccactgaagccttggtcttctct

SEQ ID NO: 2607489 - DNA, 25 bp, Homo sapien
attggcgatggtgttcatgagaatc

SEQ ID NO: 2607490 - DNA, 25 bp, Homo sapien
gaacctccattgtaacagctccaca

SEQ ID NO: 2607491 - DNA, 25 bp, Homo sapien
ctggaacctccattgtaacagctcc

SEQ ID NO: 2607492 - DNA, 25 bp, Homo sapien
ggaacctccattgtaacagctccac

SEQ ID NO: 2607493 - DNA, 25 bp, Homo sapien
tggaacctccattgtaacagctcca

SEQ ID NO: 2607494 - DNA, 25 bp, Homo sapien
tggatccaccttcaggatatagggt

SEQ ID NO: 2607495 - DNA, 25 bp, Homo sapien
tttcattggatccaccttcaggata

SEQ ID NO: 2607496 - DNA, 25 bp, Homo sapien
cattggatccaccttcaggatatag

SEQ ID NO: 2607497 - DNA, 25 bp, Homo sapien
ttttttcattggatccaccttcagg

SEQ ID NO: 2607498 - DNA, 25 bp, Homo sapien
tggtgaactgttacgggaactcttc

SEQ ID NO: 2607499 - DNA, 25 bp, Homo sapien
taagtgtcttcattggagccaaccc

SEQ ID NO: 2607500 - DNA, 25 bp, Homo sapien
taactgccccagagatggtgaactg

SEQ ID NO: 2607501 - DNA, 25 bp, Homo sapien
ggatccctgttgtataactgcccca

SEQ ID NO: 2607502 - DNA, 25 bp, Homo sapien
caattaacctctccatgggtatgtg

SEQ ID NO: 2607503 - DNA, 25 bp, Homo sapien
ttttcactgatcctatcaattaacc

SEQ ID NO: 2607504 - DNA, 25 bp, Homo sapien
caatgcccatagagcttttcactga

SEQ ID NO: 2607505 - DNA, 25 bp, Homo sapien
ccatgggtatgtgttcttgctcatc

SEQ ID NO: 2607506 - DNA, 25 bp, Homo sapien
cttctgttaccataagccagttctc

SEQ ID NO: 2607507 - DNA, 25 bp, Homo sapien
ttctgttaccataagccagttctca

SEQ ID NO: 2607508 - DNA, 25 bp, Homo sapien
tcttctgttaccataagccagttct

SEQ ID NO: 2607509 - DNA, 25 bp, Homo sapien
tctgttaccataagccagttctcaa

SEQ ID NO: 2607510 - DNA, 25 bp, Homo sapien
tttctagtgacctgactcttcatat

SEQ ID NO: 2607511 - DNA, 25 bp, Homo sapien
tattctgttttctagtgacctgact

SEQ ID NO: 2607512 - DNA, 25 bp, Homo sapien
tgttttctagtgacctgactcttca

SEQ ID NO: 2607513 - DNA, 25 bp, Homo sapien
tctgttttctagtgacctgactctt

SEQ ID NO: 2607514 - DNA, 25 bp, Homo sapien
gctgcttggaggacaaggcacattc

SEQ ID NO: 2607515 - DNA, 25 bp, Homo sapien
ccagttatagggtgtcaaagagcac

SEQ ID NO: 2607516 - DNA, 25 bp, Homo sapien
tggaaagtaattgctgcaggcacct

SEQ ID NO: 2607517 - DNA, 25 bp, Homo sapien
tattcaacataacaagagggcttct

SEQ ID NO: 2607518 - DNA, 25 bp, Homo sapien
cagaagtaatgagggaagtgccttc

SEQ ID NO: 2607519 - DNA, 25 bp, Homo sapien
taatgagggaagtgccttcgtgttt

SEQ ID NO: 2607520 - DNA, 25 bp, Homo sapien
gagggaagtgccttcgtgttttcca

SEQ ID NO: 2607521 - DNA, 25 bp, Homo sapien
gaagtgccttcgtgttttccatgtg

SEQ ID NO: 2607522 - DNA, 25 bp, Homo sapien
gttgctacaaactgctctggcccat

SEQ ID NO: 2607523 - DNA, 25 bp, Homo sapien
gagtctacacaatggaggttccagt

SEQ ID NO: 2607524 - DNA, 25 bp, Homo sapien
gttccagtgtggagatatcccttct

SEQ ID NO: 2607525 - DNA, 25 bp, Homo sapien
caaggaccacgccttgaggagcaaa

SEQ ID NO: 2607526 - DNA, 25 bp, Homo sapien
taaggcaatcaatctgaaatcaggc

SEQ ID NO: 2607527 - DNA, 25 bp, Homo sapien
ctctggtcagaatgactaggtggga

SEQ ID NO: 2607528 - DNA, 25 bp, Homo sapien
tttgcgggtgtcttatgggacctcc

SEQ ID NO: 2607529 - DNA, 25 bp, Homo sapien
tggacatgggccctttaataaggca

SEQ ID NO: 2607530 - DNA, 25 bp, Homo sapien
gacatcagtactgctaagggaagtt

SEQ ID NO: 2607531 - DNA, 25 bp, Homo sapien
gaagttgttccccagactcctacaa

SEQ ID NO: 2607532 - DNA, 25 bp, Homo sapien
tcctacaagatctggcaggccctgt

SEQ ID NO: 2607533 - DNA, 25 bp, Homo sapien
gaacaccatggatcaggtctctgaa

SEQ ID NO: 2607534 - DNA, 25 bp, Homo sapien
agcagcaccgctgctaaaattcttc

SEQ ID NO: 2607535 - DNA, 25 bp, Homo sapien
tgcactatagcagcaccgctgctaa

SEQ ID NO: 2607536 - DNA, 25 bp, Homo sapien
ctttttgcactatagcagcaccgct

SEQ ID NO: 2607537 - DNA, 25 bp, Homo sapien
tagcagcaccgctgctaaaattctt

SEQ ID NO: 2607538 - DNA, 25 bp, Homo sapien
tatagccctgtaagaatgtgacaag

SEQ ID NO: 2607539 - DNA, 25 bp, Homo sapien
gaaaatatagccctgtaagaatgtg

SEQ ID NO: 2607540 - DNA, 25 bp, Homo sapien
aatgtgacaaggtgatgatttctcc

SEQ ID NO: 2607541 - DNA, 25 bp, Homo sapien
ttttgatgttgaaaatatagccctg

SEQ ID NO: 2607542 - DNA, 25 bp, Homo sapien
cttcccatagagcaacacttacaga

SEQ ID NO: 2607543 - DNA, 25 bp, Homo sapien
gcaacacttacagacgccaccgttt

SEQ ID NO: 2607544 - DNA, 25 bp, Homo sapien
gagcaacacttacagacgccaccgt

SEQ ID NO: 2607545 - DNA, 25 bp, Homo sapien
catagagcaacacttacagacgcca

SEQ ID NO: 2607546 - DNA, 25 bp, Homo sapien
ccagaaaccgtgtggtacacctggt

SEQ ID NO: 2607547 - DNA, 25 bp, Homo sapien
gcttcttccagatacgcggtgtcca

SEQ ID NO: 2607548 - DNA, 25 bp, Homo sapien
gattctaaatgaaccacactggagt

SEQ ID NO: 2607549 - DNA, 25 bp, Homo sapien
ggtgtccattgtacttccctgctta

SEQ ID NO: 2607550 - DNA, 25 bp, Homo sapien
cttgttcccaccaatccaggatggc

SEQ ID NO: 2607551 - DNA, 25 bp, Homo sapien
ggctctgtgcaaaccataggcattt

SEQ ID NO: 2607552 - DNA, 25 bp, Homo sapien
cattatgcatgtttgtctgacccca

SEQ ID NO: 2607553 - DNA, 25 bp, Homo sapien
gccacgtcgtgcttgtcctttggaa

SEQ ID NO: 2607554 - DNA, 25 bp, Homo sapien
taggtcacactttctctaacgccaa

SEQ ID NO: 2607555 - DNA, 25 bp, Homo sapien
cagatacttgagctgacccttccat

SEQ ID NO: 2607556 - DNA, 25 bp, Homo sapien
cagaattcaatgatgtaggtcacac

SEQ ID NO: 2607557 - DNA, 25 bp, Homo sapien
caatagacattatctgaaggatcag

SEQ ID NO: 2607558 - DNA, 25 bp, Homo sapien
gaagtttaaggcatcaaatactgca

SEQ ID NO: 2607559 - DNA, 25 bp, Homo sapien
tgtgtaacgatataaaggcatgtga

SEQ ID NO: 2607560 - DNA, 25 bp, Homo sapien
gccacatttgagctgataatcaatg

SEQ ID NO: 2607561 - DNA, 25 bp, Homo sapien
catgtacaacacactgaatcagtta

SEQ ID NO: 2607562 - DNA, 25 bp, Homo sapien
ttcatcattggtgtaaagaacagtt

SEQ ID NO: 2607563 - DNA, 25 bp, Homo sapien
ctgattttactaggcttgtttagca

SEQ ID NO: 2607564 - DNA, 25 bp, Homo sapien
tccctgattttactaggcttgttta

SEQ ID NO: 2607565 - DNA, 25 bp, Homo sapien
tgctgaaccattcatcattggtgta

SEQ ID NO: 2607566 - DNA, 25 bp, Homo sapien
cactcaagaatgcaacatcgtgatt

SEQ ID NO: 2607567 - DNA, 25 bp, Homo sapien
agaatgcaacatcgtgattaacttg

SEQ ID NO: 2607568 - DNA, 25 bp, Homo sapien
gcacactcaagaatgcaacatcgtg

SEQ ID NO: 2607569 - DNA, 25 bp, Homo sapien
tcaagaatgcaacatcgtgattaac

SEQ ID NO: 2607570 - DNA, 25 bp, Homo sapien
gcgacccccgccaccggcgcttatg

SEQ ID NO: 2607571 - DNA, 25 bp, Homo sapien
ggcgcttatggccaatctcaaggcg

SEQ ID NO: 2607572 - DNA, 25 bp, Homo sapien
cgccaccggcgcttatggccaatct

SEQ ID NO: 2607573 - DNA, 25 bp, Homo sapien
accggcgcttatggccaatctcaag

SEQ ID NO: 2607574 - DNA, 25 bp, Homo sapien
caaccattcggtgtcaaggcgagcc

SEQ ID NO: 2607575 - DNA, 25 bp, Homo sapien
ccattcggtgtcaaggcgagcctgg

SEQ ID NO: 2607576 - DNA, 25 bp, Homo sapien
ttcaaccattcggtgtcaaggcgag

SEQ ID NO: 2607577 - DNA, 25 bp, Homo sapien
gttttcaaccattcggtgtcaaggc

SEQ ID NO: 2607578 - DNA, 25 bp, Homo sapien
ttgccccacgcccaggtctccagaa

SEQ ID NO: 2607579 - DNA, 25 bp, Homo sapien
cccacgcccaggtctccagaattga

SEQ ID NO: 2607580 - DNA, 25 bp, Homo sapien
ggttgcttgccccacgcccaggtct

SEQ ID NO: 2607581 - DNA, 25 bp, Homo sapien
cacgcccaggtctccagaattgact

SEQ ID NO: 2607582 - DNA, 25 bp, Homo sapien
ccccagcaagattgattaacaaaac

SEQ ID NO: 2607583 - DNA, 25 bp, Homo sapien
gacaaaaggcacaaactctaaccgc

SEQ ID NO: 2607584 - DNA, 25 bp, Homo sapien
catttctcaaattgtctaaccagca

SEQ ID NO: 2607585 - DNA, 25 bp, Homo sapien
gaaaactacagtctcacatggctta

SEQ ID NO: 2607586 - DNA, 25 bp, Homo sapien
gttacgtcttaaactgaggttgcag

SEQ ID NO: 2607587 - DNA, 25 bp, Homo sapien
tacctgggaagataaacctgtaatc

SEQ ID NO: 2607588 - DNA, 25 bp, Homo sapien
gagtcaattatgcagccatctcagg

SEQ ID NO: 2607589 - DNA, 25 bp, Homo sapien
caggatagcctgaagagtgcttgat

SEQ ID NO: 2607590 - DNA, 25 bp, Homo sapien
acatcaatagagctttgtggagcca

SEQ ID NO: 2607591 - DNA, 25 bp, Homo sapien
caaaaaatgagccaccgactgaggc

SEQ ID NO: 2607592 - DNA, 25 bp, Homo sapien
gaaatgactgtgacccctgctttcc

SEQ ID NO: 2607593 - DNA, 25 bp, Homo sapien
tgtggagccacaatttgacgacacc

SEQ ID NO: 2607594 - DNA, 25 bp, Homo sapien
ctgggttccagatgacgaaacacag

SEQ ID NO: 2607595 - DNA, 25 bp, Homo sapien
caaggaactccacgtgcctcaccct

SEQ ID NO: 2607596 - DNA, 25 bp, Homo sapien
cacagatcttttctagtcttagttt

SEQ ID NO: 2607597 - DNA, 25 bp, Homo sapien
caagatgaggggtcaaggaactcca

SEQ ID NO: 2607598 - DNA, 25 bp, Homo sapien
ttgtacaacaagctttattgagtgg

SEQ ID NO: 2607599 - DNA, 25 bp, Homo sapien
tctccgggtcatggagctcttagaa

SEQ ID NO: 2607600 - DNA, 25 bp, Homo sapien
ttattgagtggcacttgggcaggga

SEQ ID NO: 2607601 - DNA, 25 bp, Homo sapien
cacagagtttgtcttatctatggct

SEQ ID NO: 2607602 - DNA, 25 bp, Homo sapien
gactgaaaatggtgggctgtctcta

SEQ ID NO: 2607603 - DNA, 25 bp, Homo sapien
gctgagtggtgacgcagtcccaaaa

SEQ ID NO: 2607604 - DNA, 25 bp, Homo sapien
catttacccctcgacattgagcagt

SEQ ID NO: 2607605 - DNA, 25 bp, Homo sapien
tgttcttggcaaaccctatagggta

SEQ ID NO: 2607606 - DNA, 25 bp, Homo sapien
cagagctgtatcttcatggccattc

SEQ ID NO: 2607607 - DNA, 25 bp, Homo sapien
cagcagagctgtatcttcatggcca

SEQ ID NO: 2607608 - DNA, 25 bp, Homo sapien
ccagcagagctgtatcttcatggcc

SEQ ID NO: 2607609 - DNA, 25 bp, Homo sapien
gcagagctgtatcttcatggccatt

SEQ ID NO: 2607610 - DNA, 25 bp, Homo sapien
gaattctgccccaatataccttcag

SEQ ID NO: 2607611 - DNA, 25 bp, Homo sapien
ctgaggagggaaaaactaaggcact

SEQ ID NO: 2607612 - DNA, 25 bp, Homo sapien
tagaacacctggatgcaattagcac

SEQ ID NO: 2607613 - DNA, 25 bp, Homo sapien
gacagagccatttaagccaacaaca

SEQ ID NO: 2607614 - DNA, 25 bp, Homo sapien
gaagtagggaagtgctcaaaggatt

SEQ ID NO: 2607615 - DNA, 25 bp, Homo sapien
aaggatttctgccacaagatggtca

SEQ ID NO: 2607616 - DNA, 25 bp, Homo sapien
ggaagtgctcaaaggatttctgcca

SEQ ID NO: 2607617 - DNA, 25 bp, Homo sapien
gccacaagatggtcaataaatggaa

SEQ ID NO: 2607618 - DNA, 25 bp, Homo sapien
aatgtccctgaacttcagcttccca

SEQ ID NO: 2607619 - DNA, 25 bp, Homo sapien
tgaacttcagcttcccataccctcc

SEQ ID NO: 2607620 - DNA, 25 bp, Homo sapien
agtaatgtccctgaacttcagcttc

SEQ ID NO: 2607621 - DNA, 25 bp, Homo sapien
gagctgctgatgtgtttcatgaaag

SEQ ID NO: 2607622 - DNA, 25 bp, Homo sapien
gattaattgtctcttacgccgaaag

SEQ ID NO: 2607623 - DNA, 25 bp, Homo sapien
ccgaaagtcctaaccacgcagtgct

SEQ ID NO: 2607624 - DNA, 25 bp, Homo sapien
tcagtggcagcctttacccagcagt

SEQ ID NO: 2607625 - DNA, 25 bp, Homo sapien
caccctaggaggaaggtccaattca

SEQ ID NO: 2607626 - DNA, 25 bp, Homo sapien
gaatggttgccgtttgtcaaggcag

SEQ ID NO: 2607627 - DNA, 25 bp, Homo sapien
cgtttgtcaaggcagagctctgatc

SEQ ID NO: 2607628 - DNA, 25 bp, Homo sapien
tgtggagcacacatggacggtagcc

SEQ ID NO: 2607629 - DNA, 25 bp, Homo sapien
tgcctttcaatggaatagaaacgga

SEQ ID NO: 2607630 - DNA, 25 bp, Homo sapien
acacattttctccatgacgtaggtg

SEQ ID NO: 2607631 - DNA, 25 bp, Homo sapien
agttgcgggtagacacattttctcc

SEQ ID NO: 2607632 - DNA, 25 bp, Homo sapien
gggtagacacattttctccatgacg

SEQ ID NO: 2607633 - DNA, 25 bp, Homo sapien
ttagcgggagttgcgggtagacaca

SEQ ID NO: 2607634 - DNA, 25 bp, Homo sapien
agagctgccttctctagggcaaaga

SEQ ID NO: 2607635 - DNA, 25 bp, Homo sapien
caaagaatttaggtcctgagctctc

SEQ ID NO: 2607636 - DNA, 25 bp, Homo sapien
gggcttcagcatagatggcatgaaa

SEQ ID NO: 2607637 - DNA, 25 bp, Homo sapien
catgaaagtgggtaacttcttactc

SEQ ID NO: 2607638 - DNA, 25 bp, Homo sapien
tgaagtgctgatgggtctggacttc

SEQ ID NO: 2607639 - DNA, 25 bp, Homo sapien
gatgggtctggacttcttctggact

SEQ ID NO: 2607640 - DNA, 25 bp, Homo sapien
tgcagcaaaaattgtggtttccatg

SEQ ID NO: 2607641 - DNA, 25 bp, Homo sapien
tgtggtttccatggctttttgctgt

SEQ ID NO: 2607642 - DNA, 25 bp, Homo sapien
taatgagatgtatcaggtatgccat

SEQ ID NO: 2607643 - DNA, 25 bp, Homo sapien
ttaatgagatgtatcaggtatgcca

SEQ ID NO: 2607644 - DNA, 25 bp, Homo sapien
taggttctaaggctggcctccacgg

SEQ ID NO: 2607645 - DNA, 25 bp, Homo sapien
tgctgacgtcatccccatacttgcc

SEQ ID NO: 2607646 - DNA, 25 bp, Homo sapien
tcctcttgcagggttgtaggttcta

SEQ ID NO: 2607647 - DNA, 25 bp, Homo sapien
ggttgtaggttctaaggctggcctc

SEQ ID NO: 2607648 - DNA, 25 bp, Homo sapien
aggtcgtagccgctgtgagtcttag

SEQ ID NO: 2607649 - DNA, 25 bp, Homo sapien
gtagccgctgtgagtcttagcttct

SEQ ID NO: 2607650 - DNA, 25 bp, Homo sapien
tctggctcagacttagtcacccagc

SEQ ID NO: 2607651 - DNA, 25 bp, Homo sapien
gtagagcatatgatctttactgatg

SEQ ID NO: 2607652 - DNA, 25 bp, Homo sapien
tccacctcagtatggttaccttcca

SEQ ID NO: 2607653 - DNA, 25 bp, Homo sapien
cacctcagtatggttaccttccaga

SEQ ID NO: 2607654 - DNA, 25 bp, Homo sapien
ggttaccttccagaatctcagaatc

SEQ ID NO: 2607655 - DNA, 25 bp, Homo sapien
ccacctcagtatggttaccttccag

SEQ ID NO: 2607656 - DNA, 25 bp, Homo sapien
ttgactgaggtaactttgcctggca

SEQ ID NO: 2607657 - DNA, 25 bp, Homo sapien
gcactggctgatggatggtgtaact

SEQ ID NO: 2607658 - DNA, 25 bp, Homo sapien
tcagggtctggtggcactccagtct

SEQ ID NO: 2607659 - DNA, 25 bp, Homo sapien
taacttgtggctaccccagtcaggg

SEQ ID NO: 2607660 - DNA, 25 bp, Homo sapien
tccaggaggcttggactgtactgct

SEQ ID NO: 2607661 - DNA, 25 bp, Homo sapien
gctgccaatgttacccagtattttc

SEQ ID NO: 2607662 - DNA, 25 bp, Homo sapien
caactattgttgctgccaatgttac

SEQ ID NO: 2607663 - DNA, 25 bp, Homo sapien
tggcccacatccaaacaactattgt

SEQ ID NO: 2607664 - DNA, 25 bp, Homo sapien
taatgactaatcagttccagcacgt

SEQ ID NO: 2607665 - DNA, 25 bp, Homo sapien
tccagcacgtctacagccttgtgag

SEQ ID NO: 2607666 - DNA, 25 bp, Homo sapien
ctcttgctcggagaacgtgatctaa

SEQ ID NO: 2607667 - DNA, 25 bp, Homo sapien
tcctgccgccatggagacgtgtgct

SEQ ID NO: 2607668 - DNA, 25 bp, Homo sapien
ttggttctgtcttcctccggctgtg

SEQ ID NO: 2607669 - DNA, 25 bp, Homo sapien
cggtttctattgtgttggttctgtc

SEQ ID NO: 2607670 - DNA, 25 bp, Homo sapien
tattgtgttggttctgtcttcctcc

SEQ ID NO: 2607671 - DNA, 25 bp, Homo sapien
gggaagctggacacggtttctattg

SEQ ID NO: 2607672 - DNA, 25 bp, Homo sapien
gctttgctatgaacctcaggatgtg

SEQ ID NO: 2607673 - DNA, 25 bp, Homo sapien
tccgcggtataaatatccagaaccc

SEQ ID NO: 2607674 - DNA, 25 bp, Homo sapien
caggatgtgattactatactcccag

SEQ ID NO: 2607675 - DNA, 25 bp, Homo sapien
tgagagcaagcttccatgacagaca

SEQ ID NO: 2607676 - DNA, 25 bp, Homo sapien
ctcaggtccggccccaccaggctcc

SEQ ID NO: 2607677 - DNA, 25 bp, Homo sapien
gctccctggtccctggacttccctc

SEQ ID NO: 2607678 - DNA, 25 bp, Homo sapien
accaggctccctggtccctggactt

SEQ ID NO: 2607679 - DNA, 25 bp, Homo sapien
aggtccggccccaccaggctccctg

SEQ ID NO: 2607680 - DNA, 25 bp, Homo sapien
cagatctcatagacaccagaggcag

SEQ ID NO: 2607681 - DNA, 25 bp, Homo sapien
ccgcagatctcatagacaccagagg

SEQ ID NO: 2607682 - DNA, 25 bp, Homo sapien
atctcatagacaccagaggcaggga

SEQ ID NO: 2607683 - DNA, 25 bp, Homo sapien
gaggtggccgaggagactgggccca

SEQ ID NO: 2607684 - DNA, 25 bp, Homo sapien
ctagagacccggcaggagcgttgtg

SEQ ID NO: 2607685 - DNA, 25 bp, Homo sapien
ctcccgacacgcgtgggagcggagg

SEQ ID NO: 2607686 - DNA, 25 bp, Homo sapien
ttgtgggggcggatgtcaccaggga

SEQ ID NO: 2607687 - DNA, 25 bp, Homo sapien
ctggacgcaggaggcgctagagacc

SEQ ID NO: 2607688 - DNA, 25 bp, Homo sapien
cgagggcggcagggcgcggaaacgc

SEQ ID NO: 2607689 - DNA, 25 bp, Homo sapien
ggcggcagggcgcggaaacgccagg

SEQ ID NO: 2607690 - DNA, 25 bp, Homo sapien
gcgagggcggcagggcgcggaaacg

SEQ ID NO: 2607691 - DNA, 25 bp, Homo sapien
ggcagggcgcggaaacgccagggga

SEQ ID NO: 2607692 - DNA, 25 bp, Homo sapien
cttcccctcagcgtagcagggttga

SEQ ID NO: 2607693 - DNA, 25 bp, Homo sapien
gcccttcttcccctcagcgtagcag

SEQ ID NO: 2607694 - DNA, 25 bp, Homo sapien
tcccctcagcgtagcagggttgagg

SEQ ID NO: 2607695 - DNA, 25 bp, Homo sapien
cttcttcccctcagcgtagcagggt

SEQ ID NO: 2607696 - DNA, 25 bp, Homo sapien
tttagtacgcgggtcagaggacagc

SEQ ID NO: 2607697 - DNA, 25 bp, Homo sapien
tccctcctttagtacgcgggtcaga

SEQ ID NO: 2607698 - DNA, 25 bp, Homo sapien
cctcctttagtacgcgggtcagagg

SEQ ID NO: 2607699 - DNA, 25 bp, Homo sapien
cctttagtacgcgggtcagaggaca

SEQ ID NO: 2607700 - DNA, 25 bp, Homo sapien
cggggccgctcacagggcgcccgcc

SEQ ID NO: 2607701 - DNA, 25 bp, Homo sapien
gccgctcacagggcgcccgccgtgc

SEQ ID NO: 2607702 - DNA, 25 bp, Homo sapien
cccgggcagcgccgctcgccgcggc

SEQ ID NO: 2607703 - DNA, 25 bp, Homo sapien
cgggcagcgccgctcgccgcggccg

SEQ ID NO: 2607704 - DNA, 25 bp, Homo sapien
gagcccatgacgatgagcagcagga

SEQ ID NO: 2607705 - DNA, 25 bp, Homo sapien
ggctcatgcagtagtaggactcgta

SEQ ID NO: 2607706 - DNA, 25 bp, Homo sapien
taggactcgtagagccagtcccggg

SEQ ID NO: 2607707 - DNA, 25 bp, Homo sapien
caggaagacgatgagcgggtgctgc

SEQ ID NO: 2607708 - DNA, 25 bp, Homo sapien
tgctgtgggaaatgcccactttgtg

SEQ ID NO: 2607709 - DNA, 25 bp, Homo sapien
gaaatgcccactttgtgcttaaaat

SEQ ID NO: 2607710 - DNA, 25 bp, Homo sapien
tcaccataggtgacagccatgctgt

SEQ ID NO: 2607711 - DNA, 25 bp, Homo sapien
acagccatgctgtgggaaatgccca

SEQ ID NO: 2607712 - DNA, 25 bp, Homo sapien
cccgactctcacttgcatctggctc

SEQ ID NO: 2607713 - DNA, 25 bp, Homo sapien
ctacccgactctcacttgcatctgg

SEQ ID NO: 2607714 - DNA, 25 bp, Homo sapien
gtgtctacccgactctcacttgcat

SEQ ID NO: 2607715 - DNA, 25 bp, Homo sapien
tgtgtctacccgactctcacttgca

SEQ ID NO: 2607716 - DNA, 25 bp, Homo sapien
gctggtaaagcagcccacaatggtt

SEQ ID NO: 2607717 - DNA, 25 bp, Homo sapien
ctggtaaagcagcccacaatggttt

SEQ ID NO: 2607718 - DNA, 25 bp, Homo sapien
ggcgcagcagcttcttaaacacaga

SEQ ID NO: 2607719 - DNA, 25 bp, Homo sapien
cacagactcgatgcagaccaggata

SEQ ID NO: 2607720 - DNA, 25 bp, Homo sapien
tatcgcaaagaaaatcgccagggca

SEQ ID NO: 2607721 - DNA, 25 bp, Homo sapien
tgttattagaaacgccacatggtct

SEQ ID NO: 2607722 - DNA, 25 bp, Homo sapien
ggtatccgaagccaccccttcaata

SEQ ID NO: 2607723 - DNA, 25 bp, Homo sapien
tgtggagggaaaatcagtgtcacag

SEQ ID NO: 2607724 - DNA, 25 bp, Homo sapien
agccaccccttcaatagcttgtgac

SEQ ID NO: 2607725 - DNA, 25 bp, Homo sapien
cgaagccaccccttcaatagcttgt

SEQ ID NO: 2607726 - DNA, 25 bp, Homo sapien
catctggcaattcgaaacagtgaca

SEQ ID NO: 2607727 - DNA, 25 bp, Homo sapien
gtcaccaatgacagtgggcatctgg

SEQ ID NO: 2607728 - DNA, 25 bp, Homo sapien
acctcacagggttatacagatcaaa

SEQ ID NO: 2607729 - DNA, 25 bp, Homo sapien
cacatggtgcctgctactggaggac

SEQ ID NO: 2607730 - DNA, 25 bp, Homo sapien
gccctttgcacctgatgaggttttc

SEQ ID NO: 2607731 - DNA, 25 bp, Homo sapien
tccagtgccctttgcacctgatgag

SEQ ID NO: 2607732 - DNA, 25 bp, Homo sapien
ctggcgagtggctggattgaaccct

SEQ ID NO: 2607733 - DNA, 25 bp, Homo sapien
tgtggcatcctagtgaatgcccttc

SEQ ID NO: 2607734 - DNA, 25 bp, Homo sapien
ccttgttgcgcccttgtgttgcctt

SEQ ID NO: 2607735 - DNA, 25 bp, Homo sapien
tgagagctgcacacataggtctggg

SEQ ID NO: 2607736 - DNA, 25 bp, Homo sapien
tctggggctctcgagacagtgagca

SEQ ID NO: 2607737 - DNA, 25 bp, Homo sapien
tgttgccttccctaggaggctcttc

SEQ ID NO: 2607738 - DNA, 25 bp, Homo sapien
ctgaagtctataattcactctctta

SEQ ID NO: 2607739 - DNA, 25 bp, Homo sapien
tagcaacttttcacaggaaataatt

SEQ ID NO: 2607740 - DNA, 25 bp, Homo sapien
ctataattcactctcttacattcca

SEQ ID NO: 2607741 - DNA, 25 bp, Homo sapien
cagcaggttctctgcatgcctgcat

SEQ ID NO: 2607742 - DNA, 25 bp, Homo sapien
taaattctgcgcctggtgagcctcc

SEQ ID NO: 2607743 - DNA, 25 bp, Homo sapien
tttctctcctaaattctgcgcctgg

SEQ ID NO: 2607744 - DNA, 25 bp, Homo sapien
aagccgttacagagggtggaagcca

SEQ ID NO: 2607745 - DNA, 25 bp, Homo sapien
gcaaaaggagccatgacctcaaagc

SEQ ID NO: 2607746 - DNA, 25 bp, Homo sapien
caagaccgtggcacaacatagcgac

SEQ ID NO: 2607747 - DNA, 25 bp, Homo sapien
gtgacagtgatactcctcggattct

SEQ ID NO: 2607748 - DNA, 25 bp, Homo sapien
tcacgtaacatagcccaagaccgtg

SEQ ID NO: 2607749 - DNA, 25 bp, Homo sapien
tagcgaccacatagtgtgacagtga

SEQ ID NO: 2607750 - DNA, 25 bp, Homo sapien
caaagacatgcggacttagggatct

SEQ ID NO: 2607751 - DNA, 25 bp, Homo sapien
cactggtggctgatgagcaaatgtc

SEQ ID NO: 2607752 - DNA, 25 bp, Homo sapien
tggagaaggcaacgatagagataga

SEQ ID NO: 2607753 - DNA, 25 bp, Homo sapien
cacagagacatcgaagccaaggcat

SEQ ID NO: 2607754 - DNA, 25 bp, Homo sapien
catcaaaagattccctagcacacgc

SEQ ID NO: 2607755 - DNA, 25 bp, Homo sapien
cacacgcctggcatgttatccttag

SEQ ID NO: 2607756 - DNA, 25 bp, Homo sapien
ggtggctcggctccaacaagttcag

SEQ ID NO: 2607757 - DNA, 25 bp, Homo sapien
caagagtgccgcgatgatgcgtcac

SEQ ID NO: 2607758 - DNA, 25 bp, Homo sapien
ccccttgtgaaggtggagctgattt

SEQ ID NO: 2607759 - DNA, 25 bp, Homo sapien
tccttaaataccactggagggacag

SEQ ID NO: 2607760 - DNA, 25 bp, Homo sapien
tggcctgagttcctgcaaccttctg

SEQ ID NO: 2607761 - DNA, 25 bp, Homo sapien
cactttgtaaaagtcctgtccagca

SEQ ID NO: 2607762 - DNA, 25 bp, Homo sapien
caggtactggtacattttgcagcat

SEQ ID NO: 2607763 - DNA, 25 bp, Homo sapien
atccatgacatgaagtgccctggac

SEQ ID NO: 2607764 - DNA, 25 bp, Homo sapien
catccatgacatgaagtgccctgga

SEQ ID NO: 2607765 - DNA, 25 bp, Homo sapien
cctcatccatgacatgaagtgccct

SEQ ID NO: 2607766 - DNA, 25 bp, Homo sapien
tcatccatgacatgaagtgccctgg

SEQ ID NO: 2607767 - DNA, 25 bp, Homo sapien
tgtagagtggtaaactccttcactc

SEQ ID NO: 2607768 - DNA, 25 bp, Homo sapien
gagtggtaaactccttcactccctc

SEQ ID NO: 2607769 - DNA, 25 bp, Homo sapien
tagagtggtaaactccttcactccc

SEQ ID NO: 2607770 - DNA, 25 bp, Homo sapien
ctgtagagtggtaaactccttcact

SEQ ID NO: 2607771 - DNA, 25 bp, Homo sapien
caccatgaaggatcactggcatctt

SEQ ID NO: 2607772 - DNA, 25 bp, Homo sapien
tcaccatgaaggatcactggcatct

SEQ ID NO: 2607773 - DNA, 25 bp, Homo sapien
agcggatctgtcactgtgtttcctc

SEQ ID NO: 2607774 - DNA, 25 bp, Homo sapien
catctttaatcctcattagcggatc

SEQ ID NO: 2607775 - DNA, 25 bp, Homo sapien
ttctgaagtgaagggatccctataa

SEQ ID NO: 2607776 - DNA, 25 bp, Homo sapien
tgaggtccaggatctcaattccctg

SEQ ID NO: 2607777 - DNA, 25 bp, Homo sapien
ccaggatgatgctgcaagccctttc

SEQ ID NO: 2607778 - DNA, 25 bp, Homo sapien
ggatccctataagagacttgctttc

SEQ ID NO: 2607779 - DNA, 25 bp, Homo sapien
caagagggcctgttgtaagcagagc

SEQ ID NO: 2607780 - DNA, 25 bp, Homo sapien
cacacagggtttgcacacaagaggg

SEQ ID NO: 2607781 - DNA, 25 bp, Homo sapien
caccgtgtctgtggaagtcttggcc

SEQ ID NO: 2607782 - DNA, 25 bp, Homo sapien
ccaactgtgagtgcaagaaattctg

SEQ ID NO: 2607783 - DNA, 25 bp, Homo sapien
ggtctggcacacgacattcttcaga

SEQ ID NO: 2607784 - DNA, 25 bp, Homo sapien
cagagacccttctgcatctttaatg

SEQ ID NO: 2607785 - DNA, 25 bp, Homo sapien
tcttcagagacccttctgcatcttt

SEQ ID NO: 2607786 - DNA, 25 bp, Homo sapien
gggtctggcacacgacattcttcag

SEQ ID NO: 2607787 - DNA, 25 bp, Homo sapien
gaaagtgaagctggcacctcttggt

SEQ ID NO: 2607788 - DNA, 25 bp, Homo sapien
tagcacagcctgaaagtgaagctgg

SEQ ID NO: 2607789 - DNA, 25 bp, Homo sapien
atttagtagcacagcctgaaagtga

SEQ ID NO: 2607790 - DNA, 25 bp, Homo sapien
agtgaagctggcacctcttggttgt

SEQ ID NO: 2607791 - DNA, 25 bp, Homo sapien
tgttaactgagccttgagcaagtca

SEQ ID NO: 2607792 - DNA, 25 bp, Homo sapien
ttgcctcagtgttgacagccgctga

SEQ ID NO: 2607793 - DNA, 25 bp, Homo sapien
tgacagccgctgactcaaggtgcta

SEQ ID NO: 2607794 - DNA, 25 bp, Homo sapien
gacagctggtcagacatgaacaggg

SEQ ID NO: 2607795 - DNA, 25 bp, Homo sapien
ccagccaacgcacagacctgagtga

SEQ ID NO: 2607796 - DNA, 25 bp, Homo sapien
aatcccagccaacgcacagacctga

SEQ ID NO: 2607797 - DNA, 25 bp, Homo sapien
ccaaatcccagccaacgcacagacc

SEQ ID NO: 2607798 - DNA, 25 bp, Homo sapien
tcccagccaacgcacagacctgagt

SEQ ID NO: 2607799 - DNA, 25 bp, Homo sapien
cataggacctgtcccctaagtcatc

SEQ ID NO: 2607800 - DNA, 25 bp, Homo sapien
gtcatcccccattgctttctttgta

SEQ ID NO: 2607801 - DNA, 25 bp, Homo sapien
taagtcatcccccattgctttcttt

SEQ ID NO: 2607802 - DNA, 25 bp, Homo sapien
tacataagatgcaccaaaacacagc

SEQ ID NO: 2607803 - DNA, 25 bp, Homo sapien
gttccagggctacattttgactttc

SEQ ID NO: 2607804 - DNA, 25 bp, Homo sapien
tcgggctctgttgaccactctggca

SEQ ID NO: 2607805 - DNA, 25 bp, Homo sapien
gagtccctgaggagtttcgggctct

SEQ ID NO: 2607806 - DNA, 25 bp, Homo sapien
tcccacaacaatgtccaggcgtggg

SEQ ID NO: 2607807 - DNA, 25 bp, Homo sapien
agttcccagtgtttagggcacacac

SEQ ID NO: 2607808 - DNA, 25 bp, Homo sapien
gaaccataagaatcagctctgagaa

SEQ ID NO: 2607809 - DNA, 25 bp, Homo sapien
caggtcactgggaactaaacttggg

SEQ ID NO: 2607810 - DNA, 25 bp, Homo sapien
tgagaagcggcttttgggaaatctg

SEQ ID NO: 2607811 - DNA, 25 bp, Homo sapien
tgtgtagacaagacagaaccataag

SEQ ID NO: 2607812 - DNA, 25 bp, Homo sapien
taaatggtttcatgtcagatgggtt

SEQ ID NO: 2607813 - DNA, 25 bp, Homo sapien
tattctcatcaaaagtggaataatc

SEQ ID NO: 2607814 - DNA, 25 bp, Homo sapien
tgggttattctcatcaaaagtggaa

SEQ ID NO: 2607815 - DNA, 25 bp, Homo sapien
catgtcagatgggttattctcatca

SEQ ID NO: 2607816 - DNA, 25 bp, Homo sapien
aacttccacttcaacgtgctcccca

SEQ ID NO: 2607817 - DNA, 25 bp, Homo sapien
ctaacttccacttcaacgtgctccc

SEQ ID NO: 2607818 - DNA, 25 bp, Homo sapien
taacttccacttcaacgtgctcccc

SEQ ID NO: 2607819 - DNA, 25 bp, Homo sapien
tctggaccgcaaatgagcctgagga

SEQ ID NO: 2607820 - DNA, 25 bp, Homo sapien
ttactgatgagggacagatgactca

SEQ ID NO: 2607821 - DNA, 25 bp, Homo sapien
tgaggaggagatctgcagcttaacc

SEQ ID NO: 2607822 - DNA, 25 bp, Homo sapien
tcccaggaatcttggtgttgtgggc

SEQ ID NO: 2607823 - DNA, 25 bp, Homo sapien
ctctaaccccacattgtagacatcg

SEQ ID NO: 2607824 - DNA, 25 bp, Homo sapien
tcttctaggaagggatccccctcta

SEQ ID NO: 2607825 - DNA, 25 bp, Homo sapien
cattgtagacatcgtcgtttccagc

SEQ ID NO: 2607826 - DNA, 25 bp, Homo sapien
cccacattgtagacatcgtcgtttc

SEQ ID NO: 2607827 - DNA, 25 bp, Homo sapien
tgttgatgaagcttgtgttgatcat

SEQ ID NO: 2607828 - DNA, 25 bp, Homo sapien
acagctctccctgttgatgaagctt

SEQ ID NO: 2607829 - DNA, 25 bp, Homo sapien
tctccctgttgatgaagcttgtgtt

SEQ ID NO: 2607830 - DNA, 25 bp, Homo sapien
gctctccctgttgatgaagcttgtg

SEQ ID NO: 2607831 - DNA, 25 bp, Homo sapien
ttgaagaagtgtggttgtaaacact

SEQ ID NO: 2607832 - DNA, 25 bp, Homo sapien
gaagaagtgtggttgtaaacactgc

SEQ ID NO: 2607833 - DNA, 25 bp, Homo sapien
aagaagtgtggttgtaaacactgct

SEQ ID NO: 2607834 - DNA, 25 bp, Homo sapien
ctttgaagaagtgtggttgtaaaca

SEQ ID NO: 2607835 - DNA, 25 bp, Homo sapien
taagcccatctctttctcttggtat

SEQ ID NO: 2607836 - DNA, 25 bp, Homo sapien
tcatcactggctgacgaaagtgtcc

SEQ ID NO: 2607837 - DNA, 25 bp, Homo sapien
ggccaagagatcagcccggaagcac

SEQ ID NO: 2607838 - DNA, 25 bp, Homo sapien
ctcttggtatcatcggccatcaggg

SEQ ID NO: 2607839 - DNA, 25 bp, Homo sapien
gaaggttatgagtagggaagcccca

SEQ ID NO: 2607840 - DNA, 25 bp, Homo sapien
gttaattccctagtgcctcaggcag

SEQ ID NO: 2607841 - DNA, 25 bp, Homo sapien
caggttctcagcaacgtggaagtcc

SEQ ID NO: 2607842 - DNA, 25 bp, Homo sapien
gccccaaggaggctgactgagcaga

SEQ ID NO: 2607843 - DNA, 25 bp, Homo sapien
gtgctccttgcctcccggtgttgca

SEQ ID NO: 2607844 - DNA, 25 bp, Homo sapien
gttgcagacaggcagacgctaagca

SEQ ID NO: 2607845 - DNA, 25 bp, Homo sapien
caggcagacgctaagcacgatggtg

SEQ ID NO: 2607846 - DNA, 25 bp, Homo sapien
acgctggcaatgatggcgtctcgca

SEQ ID NO: 2607847 - DNA, 25 bp, Homo sapien
tggtgggatgtggaaagtcattctc

SEQ ID NO: 2607848 - DNA, 25 bp, Homo sapien
ggtgggatgtggaaagtcattctcc

SEQ ID NO: 2607849 - DNA, 25 bp, Homo sapien
taatgctcatagacctgatagaaaa

SEQ ID NO: 2607850 - DNA, 25 bp, Homo sapien
taagtgactgttgatcccaccaatg

SEQ ID NO: 2607851 - DNA, 25 bp, Homo sapien
tacagttgctaattgctaagtgact

SEQ ID NO: 2607852 - DNA, 25 bp, Homo sapien
tcaaggtagagcaaaggtgggaaca

SEQ ID NO: 2607853 - DNA, 25 bp, Homo sapien
gaacacctaatgttgagcttaacag

SEQ ID NO: 2607854 - DNA, 25 bp, Homo sapien
ggtagagattgtatccacaggagtg

SEQ ID NO: 2607855 - DNA, 25 bp, Homo sapien
accctgacccatatgtgaacaccta

SEQ ID NO: 2607856 - DNA, 25 bp, Homo sapien
caaataaacgagaagatggaagagt

SEQ ID NO: 2607857 - DNA, 25 bp, Homo sapien
tttctggaacctcaaaccagtggta

SEQ ID NO: 2607858 - DNA, 25 bp, Homo sapien
tacaagggatgtgttccagggtacc

SEQ ID NO: 2607859 - DNA, 25 bp, Homo sapien
gctcatgtgagaagggatttcccac

SEQ ID NO: 2607860 - DNA, 25 bp, Homo sapien
tatttccaacagtggccaagggtac

SEQ ID NO: 2607861 - DNA, 25 bp, Homo sapien
gtacttaaggtagccctcacctcca

SEQ ID NO: 2607862 - DNA, 25 bp, Homo sapien
tatgatatttcgatacttgtttaca

SEQ ID NO: 2607863 - DNA, 25 bp, Homo sapien
tgtttacaaggtgtaatgattaaat

SEQ ID NO: 2607864 - DNA, 25 bp, Homo sapien
tataatgaattgttgtaaactataa

SEQ ID NO: 2607865 - DNA, 25 bp, Homo sapien
tcctggtctccccggacacgcccat

SEQ ID NO: 2607866 - DNA, 25 bp, Homo sapien
ctgcatctgaaccaggggcacctgg

SEQ ID NO: 2607867 - DNA, 25 bp, Homo sapien
gtcctggtctccccggacacgccca

SEQ ID NO: 2607868 - DNA, 25 bp, Homo sapien
gttctaggcaagctgccaagaagat

SEQ ID NO: 2607869 - DNA, 25 bp, Homo sapien
ttcatttgtatgcaaatcacagatg

SEQ ID NO: 2607870 - DNA, 25 bp, Homo sapien
ttctaggcaagctgccaagaagatt

SEQ ID NO: 2607871 - DNA, 25 bp, Homo sapien
tctaggcaagctgccaagaagattc

SEQ ID NO: 2607872 - DNA, 25 bp, Homo sapien
catctgttgagaatactgaacttgt

SEQ ID NO: 2607873 - DNA, 25 bp, Homo sapien
gaatactgaacttgtgtgagtctga

SEQ ID NO: 2607874 - DNA, 25 bp, Homo sapien
tgttgagaatactgaacttgtgtga

SEQ ID NO: 2607875 - DNA, 25 bp, Homo sapien
actgaacttgtgtgagtctgagtct

SEQ ID NO: 2607876 - DNA, 25 bp, Homo sapien
ggcatgagggctttacagcccatgt

SEQ ID NO: 2607877 - DNA, 25 bp, Homo sapien
catgtgcgtttattccaggctctga

SEQ ID NO: 2607878 - DNA, 25 bp, Homo sapien
tttacagcccatgtgcgtttattcc

SEQ ID NO: 2607879 - DNA, 25 bp, Homo sapien
ctgggccaccggcatgagggcttta

SEQ ID NO: 2607880 - DNA, 25 bp, Homo sapien
taagggctgttaatcgtcatttggc

SEQ ID NO: 2607881 - DNA, 25 bp, Homo sapien
caaagacttgggtctgtgaacacat

SEQ ID NO: 2607882 - DNA, 25 bp, Homo sapien
tcagtgctctgggattctaagggct

SEQ ID NO: 2607883 - DNA, 25 bp, Homo sapien
gactctgtgctaaggcagccactgg

SEQ ID NO: 2607884 - DNA, 25 bp, Homo sapien
gaactactgcccctcaattcaaaga

SEQ ID NO: 2607885 - DNA, 25 bp, Homo sapien
tattgtgcttggatcaacagaaacc

SEQ ID NO: 2607886 - DNA, 25 bp, Homo sapien
tcaaagcctgcagcaataaaatggt

SEQ ID NO: 2607887 - DNA, 25 bp, Homo sapien
taattctacttgttcttgggagcta

SEQ ID NO: 2607888 - DNA, 25 bp, Homo sapien
tcacttagactcatgcagctccatg

SEQ ID NO: 2607889 - DNA, 25 bp, Homo sapien
acttagactcatgcagctccatgtc

SEQ ID NO: 2607890 - DNA, 25 bp, Homo sapien
cagctccatgtcatcatggctgaca

SEQ ID NO: 2607891 - DNA, 25 bp, Homo sapien
gctccatgtcatcatggctgacaaa

SEQ ID NO: 2607892 - DNA, 25 bp, Homo sapien
tatactatgtctgtgcccatagccc

SEQ ID NO: 2607893 - DNA, 25 bp, Homo sapien
gaatttgacagggaatgctcatctt

SEQ ID NO: 2607894 - DNA, 25 bp, Homo sapien
cactaaattcgtggtctgtggatga

SEQ ID NO: 2607895 - DNA, 25 bp, Homo sapien
tgtgaacatattctcagaggagacc

SEQ ID NO: 2607896 - DNA, 25 bp, Homo sapien
tagtttggtgtcgacataggcctgc

SEQ ID NO: 2607897 - DNA, 25 bp, Homo sapien
gaatagtttggtgtcgacataggcc

SEQ ID NO: 2607898 - DNA, 25 bp, Homo sapien
ggtgtcgacataggcctgcactgag

SEQ ID NO: 2607899 - DNA, 25 bp, Homo sapien
tgacacagaatagtttggtgtcgac

SEQ ID NO: 2607900 - DNA, 25 bp, Homo sapien
ttgtccataatataaataggaatca

SEQ ID NO: 2607901 - DNA, 25 bp, Homo sapien
attttctaaattgattgctgtcatt

SEQ ID NO: 2607902 - DNA, 25 bp, Homo sapien
tccataatataaataggaatcattt

SEQ ID NO: 2607903 - DNA, 25 bp, Homo sapien
gctgtcattctgaatataactttgt

SEQ ID NO: 2607904 - DNA, 25 bp, Homo sapien
tcttgaaagagaagtcagttccagt

SEQ ID NO: 2607905 - DNA, 25 bp, Homo sapien
ggtgtgcaccatatttcctcaggga

SEQ ID NO: 2607906 - DNA, 25 bp, Homo sapien
tttgcagaaccctgaagtccatccc

SEQ ID NO: 2607907 - DNA, 25 bp, Homo sapien
catttgtagccatgtccataccagt

SEQ ID NO: 2607908 - DNA, 25 bp, Homo sapien
ctgaagagcgagttccatgaggtgc

SEQ ID NO: 2607909 - DNA, 25 bp, Homo sapien
aattccaacttgatccgcgacttga

SEQ ID NO: 2607910 - DNA, 25 bp, Homo sapien
acttgatgcaattacaggtgtcctg

SEQ ID NO: 2607911 - DNA, 25 bp, Homo sapien
catgaggtgcttatggtaggctccc

SEQ ID NO: 2607912 - DNA, 25 bp, Homo sapien
tgttaggcatcaatactggacagtg

SEQ ID NO: 2607913 - DNA, 25 bp, Homo sapien
gaggttgattgcacagtcatagcac

SEQ ID NO: 2607914 - DNA, 25 bp, Homo sapien
tttgtaaacccctataatggcctgc

SEQ ID NO: 2607915 - DNA, 25 bp, Homo sapien
tcgcaaatttgtggtgatctcaacc

SEQ ID NO: 2607916 - DNA, 25 bp, Homo sapien
taacatgacatgcactgatatgtgc

SEQ ID NO: 2607917 - DNA, 25 bp, Homo sapien
tgtgcttgtagttaaactgcccaac

SEQ ID NO: 2607918 - DNA, 25 bp, Homo sapien
aaccttgaaactctcatgctctgga

SEQ ID NO: 2607919 - DNA, 25 bp, Homo sapien
actgcccaaccttgaaactctcatg

SEQ ID NO: 2607920 - DNA, 25 bp, Homo sapien
gaggagaagctcctagcctttttgc

SEQ ID NO: 2607921 - DNA, 25 bp, Homo sapien
ggaggagaagctcctagcctttttg

SEQ ID NO: 2607922 - DNA, 25 bp, Homo sapien
tccgggatccaactctctggtggct

SEQ ID NO: 2607923 - DNA, 25 bp, Homo sapien
catgcctcatgccaggagtgtgttt

SEQ ID NO: 2607924 - DNA, 25 bp, Homo sapien
aagacttctgcaaggcacttacaca

SEQ ID NO: 2607925 - DNA, 25 bp, Homo sapien
cttacacacattggcctcatgctgg

SEQ ID NO: 2607926 - DNA, 25 bp, Homo sapien
agactgtttccatttccattcaaaa

SEQ ID NO: 2607927 - DNA, 25 bp, Homo sapien
cagactgtttccatttccattcaaa

SEQ ID NO: 2607928 - DNA, 25 bp, Homo sapien
gactgtttccatttccattcaaaag

SEQ ID NO: 2607929 - DNA, 25 bp, Homo sapien
caggctacttccgtgctggtggcca

SEQ ID NO: 2607930 - DNA, 25 bp, Homo sapien
ggcagcagctgttatctgcactagc

SEQ ID NO: 2607931 - DNA, 25 bp, Homo sapien
gcagctgttatctgcactagcaaca

SEQ ID NO: 2607932 - DNA, 25 bp, Homo sapien
ttccgtgctggtggccactatgccg

SEQ ID NO: 2607933 - DNA, 25 bp, Homo sapien
gaaaatttcccgtatagcacagagc

SEQ ID NO: 2607934 - DNA, 25 bp, Homo sapien
ccttccaagagagagttctgagcta

SEQ ID NO: 2607935 - DNA, 25 bp, Homo sapien
gacctctgcaattcccagtttagag

SEQ ID NO: 2607936 - DNA, 25 bp, Homo sapien
aaagagtcacacttcggaaatcctc

SEQ ID NO: 2607937 - DNA, 25 bp, Homo sapien
tgtggggcacgatgatgaaggtaac

SEQ ID NO: 2607938 - DNA, 25 bp, Homo sapien
ctacttgtggggcacgatgatgaag

SEQ ID NO: 2607939 - DNA, 25 bp, Homo sapien
cttgtggggcacgatgatgaaggta

SEQ ID NO: 2607940 - DNA, 25 bp, Homo sapien
gggcacgatgatgaaggtaactgac

SEQ ID NO: 2607941 - DNA, 25 bp, Homo sapien
tcagggtaaaagctctggaaagccc

SEQ ID NO: 2607942 - DNA, 25 bp, Homo sapien
ccacctgtgaggagtcttcagggca

SEQ ID NO: 2607943 - DNA, 25 bp, Homo sapien
gagcaggaatgatcccaccgagtac

SEQ ID NO: 2607944 - DNA, 25 bp, Homo sapien
tgtcagaattacacagagcaggaat

SEQ ID NO: 2607945 - DNA, 25 bp, Homo sapien
ctgatttgtaggaaggccagtttgg

SEQ ID NO: 2607946 - DNA, 25 bp, Homo sapien
tttcctggaagctaaaatacagatt

SEQ ID NO: 2607947 - DNA, 25 bp, Homo sapien
cattggagatcctcactgatttgta

SEQ ID NO: 2607948 - DNA, 25 bp, Homo sapien
cctcactgatttgtaggaaggccag

SEQ ID NO: 2607949 - DNA, 25 bp, Homo sapien
aaggaggaacaaatgtctctcagac

SEQ ID NO: 2607950 - DNA, 25 bp, Homo sapien
ggaggaacaaatgtctctcagacac

SEQ ID NO: 2607951 - DNA, 25 bp, Homo sapien
gaaggaggaacaaatgtctctcaga

SEQ ID NO: 2607952 - DNA, 25 bp, Homo sapien
gggaaggaggaacaaatgtctctca

SEQ ID NO: 2607953 - DNA, 25 bp, Homo sapien
ctcacgtttgtatgccgcttcacat

SEQ ID NO: 2607954 - DNA, 25 bp, Homo sapien
tgcagcctctggatgatctccgctt

SEQ ID NO: 2607955 - DNA, 25 bp, Homo sapien
catacaggttgtggaagttatttgt

SEQ ID NO: 2607956 - DNA, 25 bp, Homo sapien
ggatgatctccgctttcatctccat

SEQ ID NO: 2607957 - DNA, 25 bp, Homo sapien
ttccagaatgaagaccccgctgtcc

SEQ ID NO: 2607958 - DNA, 25 bp, Homo sapien
taggcactgtaattcccagaacgac

SEQ ID NO: 2607959 - DNA, 25 bp, Homo sapien
cacggtaaattagctaaggtgcaca

SEQ ID NO: 2607960 - DNA, 25 bp, Homo sapien
tctagagctcatgggagacagaagc

SEQ ID NO: 2607961 - DNA, 25 bp, Homo sapien
gattacttaaatgattctggagtcc

SEQ ID NO: 2607962 - DNA, 25 bp, Homo sapien
acgagacagtgttatgacagagaag

SEQ ID NO: 2607963 - DNA, 25 bp, Homo sapien
ttagctgggaggatgtattgaacaa

SEQ ID NO: 2607964 - DNA, 25 bp, Homo sapien
agggctacagaggaaaacgagacag

SEQ ID NO: 2607965 - DNA, 25 bp, Homo sapien
ttgccagccgggtaaagccaacgat

SEQ ID NO: 2607966 - DNA, 25 bp, Homo sapien
gccaacgatgtcagcgtataagatg

SEQ ID NO: 2607967 - DNA, 25 bp, Homo sapien
ttctcccggggagcagtcacttgcc

SEQ ID NO: 2607968 - DNA, 25 bp, Homo sapien
cagcatgtggactagttctcccggg

SEQ ID NO: 2607969 - DNA, 25 bp, Homo sapien
tatggcttcacacatgtccagcccc

SEQ ID NO: 2607970 - DNA, 25 bp, Homo sapien
gatatagggagtccagatacacagt

SEQ ID NO: 2607971 - DNA, 25 bp, Homo sapien
ttagggagagatatagggagtccag

SEQ ID NO: 2607972 - DNA, 25 bp, Homo sapien
acagttcttggcatggttagggaga

SEQ ID NO: 2607973 - DNA, 25 bp, Homo sapien
tcatattgccacttctgcagaccaa

SEQ ID NO: 2607974 - DNA, 25 bp, Homo sapien
tgatatcaactccagtagcatccct

SEQ ID NO: 2607975 - DNA, 25 bp, Homo sapien
aggacattcccagaatgcacgccca

SEQ ID NO: 2607976 - DNA, 25 bp, Homo sapien
cacgcccacgcgcatgttgatatca

SEQ ID NO: 2607977 - DNA, 25 bp, Homo sapien
ctttataagcgccattcaagtgctc

SEQ ID NO: 2607978 - DNA, 25 bp, Homo sapien
tcctccactttataagcgccattca

SEQ ID NO: 2607979 - DNA, 25 bp, Homo sapien
ataagcgccattcaagtgctccagg

SEQ ID NO: 2607980 - DNA, 25 bp, Homo sapien
ctccactttataagcgccattcaag

SEQ ID NO: 2607981 - DNA, 25 bp, Homo sapien
agggtgtggcgaggtctgaagagat

SEQ ID NO: 2607982 - DNA, 25 bp, Homo sapien
ctccatcaagggtgtggcgaggtct

SEQ ID NO: 2607983 - DNA, 25 bp, Homo sapien
gatgctgggggctccgtcgttctcc

SEQ ID NO: 2607984 - DNA, 25 bp, Homo sapien
agatgctgggggctccgtcgttctc

SEQ ID NO: 2607985 - DNA, 25 bp, Homo sapien
gggtcatgcggaccgaggccctcat

SEQ ID NO: 2607986 - DNA, 25 bp, Homo sapien
ggactccaagtaccgggtcatgcgg

SEQ ID NO: 2607987 - DNA, 25 bp, Homo sapien
caagtaccgggtcatgcggaccgag

SEQ ID NO: 2607988 - DNA, 25 bp, Homo sapien
catgcggaccgaggccctcattttg

SEQ ID NO: 2607989 - DNA, 25 bp, Homo sapien
cgtggtgctgatcttgccgttctct

SEQ ID NO: 2607990 - DNA, 25 bp, Homo sapien
tggtgctgatcttgccgttctctgt

SEQ ID NO: 2607991 - DNA, 25 bp, Homo sapien
tgtgatgtaggtgtgcaaagggctt

SEQ ID NO: 2607992 - DNA, 25 bp, Homo sapien
tgatgtaggtgtgcaaagggcttgg

SEQ ID NO: 2607993 - DNA, 25 bp, Homo sapien
ccctgatggttgttcataagggcct

SEQ ID NO: 2607994 - DNA, 25 bp, Homo sapien
cctgatggttgttcataagggcctc

SEQ ID NO: 2607995 - DNA, 25 bp, Homo sapien
ctgatggttgttcataagggcctct

SEQ ID NO: 2607996 - DNA, 25 bp, Homo sapien
aattatgctgacccatgggtacatc

SEQ ID NO: 2607997 - DNA, 25 bp, Homo sapien
gcattaatcccatcaattgcttgaa

SEQ ID NO: 2607998 - DNA, 25 bp, Homo sapien
ttctgtgcattaatcccatcaattg

SEQ ID NO: 2607999 - DNA, 25 bp, Homo sapien
taatcccatcaattgcttgaatcat

SEQ ID NO: 2608000 - DNA, 25 bp, Homo sapien
ccatcaattgcttgaatcatccttt

SEQ ID NO: 2608001 - DNA, 25 bp, Homo sapien
cagaacccatgtggtgcttcgtgaa

SEQ ID NO: 2608002 - DNA, 25 bp, Homo sapien
cctttgccaaagcacaccgggtctg

SEQ ID NO: 2608003 - DNA, 25 bp, Homo sapien
caggatcaggcttccttgccttaag

SEQ ID NO: 2608004 - DNA, 25 bp, Homo sapien
gtgaaccccagcattagatctgtgc

SEQ ID NO: 2608005 - DNA, 25 bp, Homo sapien
ttcataggactagatggaggaatca

SEQ ID NO: 2608006 - DNA, 25 bp, Homo sapien
caagggtataagctgtagggaaaca

SEQ ID NO: 2608007 - DNA, 25 bp, Homo sapien
cttattactgtaccagctgcagaac

SEQ ID NO: 2608008 - DNA, 25 bp, Homo sapien
tctttgattcaagggtataagctgt

SEQ ID NO: 2608009 - DNA, 25 bp, Homo sapien
ttatagaaaagcagtgagattctct

SEQ ID NO: 2608010 - DNA, 25 bp, Homo sapien
aaagcagtgagattctctgaatgtc

SEQ ID NO: 2608011 - DNA, 25 bp, Homo sapien
ttctagtactttgttatagaaaagc

SEQ ID NO: 2608012 - DNA, 25 bp, Homo sapien
aatgtcttcagacttgagccattgc

SEQ ID NO: 2608013 - DNA, 25 bp, Homo sapien
tacttgaacgctggcagtgccgtgg

SEQ ID NO: 2608014 - DNA, 25 bp, Homo sapien
gacaggcacaagtcacataatactt

SEQ ID NO: 2608015 - DNA, 25 bp, Homo sapien
tttggcagcacgagaatctgcacaa

SEQ ID NO: 2608016 - DNA, 25 bp, Homo sapien
cgagaatctgcacaatgaagatgca

SEQ ID NO: 2608017 - DNA, 25 bp, Homo sapien
aatgtggtttgctcagattctccca

SEQ ID NO: 2608018 - DNA, 25 bp, Homo sapien
tcggctgaaccttgacctataacaa

SEQ ID NO: 2608019 - DNA, 25 bp, Homo sapien
gaaggaattcacctcgaagcatgaa

SEQ ID NO: 2608020 - DNA, 25 bp, Homo sapien
cattaagtggaaccagaaggaattc

SEQ ID NO: 2608021 - DNA, 25 bp, Homo sapien
cacgctgtcctaacttatcattagt

SEQ ID NO: 2608022 - DNA, 25 bp, Homo sapien
tatttttagtgattgctcaaggctt

SEQ ID NO: 2608023 - DNA, 25 bp, Homo sapien
cctcttggctttttagctatcctta

SEQ ID NO: 2608024 - DNA, 25 bp, Homo sapien
gcattaatattgtgccacttcaaaa

SEQ ID NO: 2608025 - DNA, 25 bp, Homo sapien
gaaacgcagccccaaaggagatgcc

SEQ ID NO: 2608026 - DNA, 25 bp, Homo sapien
aaaggagatgcccaggacggacgtt

SEQ ID NO: 2608027 - DNA, 25 bp, Homo sapien
gatgaaggccagcaagagaaacgca

SEQ ID NO: 2608028 - DNA, 25 bp, Homo sapien
cagcaaagcagacgaagaggatgaa

SEQ ID NO: 2608029 - DNA, 25 bp, Homo sapien
ctgaagggtgtgtgtttccttaact

SEQ ID NO: 2608030 - DNA, 25 bp, Homo sapien
tgtttccttaactgggatctggagt

SEQ ID NO: 2608031 - DNA, 25 bp, Homo sapien
tgaagtggtaaagcaataagctcct

SEQ ID NO: 2608032 - DNA, 25 bp, Homo sapien
aagaagcgccacatttgaataccta

SEQ ID NO: 2608033 - DNA, 25 bp, Homo sapien
gttttgaatcatcttcatattcgtg

SEQ ID NO: 2608034 - DNA, 25 bp, Homo sapien
tattcgtgtcttggttgtgcatgag

SEQ ID NO: 2608035 - DNA, 25 bp, Homo sapien
tcccagtctatattcctggttatag

SEQ ID NO: 2608036 - DNA, 25 bp, Homo sapien
tgtgcatgaggggtcccagtctata

SEQ ID NO: 2608037 - DNA, 25 bp, Homo sapien
tccctcctctatacaacccacaatg

SEQ ID NO: 2608038 - DNA, 25 bp, Homo sapien
tcagggggtttcagagaatcgagat

SEQ ID NO: 2608039 - DNA, 25 bp, Homo sapien
ggagtggattcatattaaccaaggg

SEQ ID NO: 2608040 - DNA, 25 bp, Homo sapien
cacaatgtcttcagggggtttcaga

SEQ ID NO: 2608041 - DNA, 25 bp, Homo sapien
ggcttcaggagatttgtgggggcaa

SEQ ID NO: 2608042 - DNA, 25 bp, Homo sapien
atggttcctgttttggaaacctgag

SEQ ID NO: 2608043 - DNA, 25 bp, Homo sapien
aaccaccaatgatggttcctgtttt

SEQ ID NO: 2608044 - DNA, 25 bp, Homo sapien
tggaaccaccaatgatggttcctgt

SEQ ID NO: 2608045 - DNA, 25 bp, Homo sapien
gttagtcacaatgatctgaactgac

SEQ ID NO: 2608046 - DNA, 25 bp, Homo sapien
agttagtcacaatgatctgaactga

SEQ ID NO: 2608047 - DNA, 25 bp, Homo sapien
tagttagtcacaatgatctgaactg

SEQ ID NO: 2608048 - DNA, 25 bp, Homo sapien
ctagttagtcacaatgatctgaact

SEQ ID NO: 2608049 - DNA, 25 bp, Homo sapien
cagcatcttagagggtcaggtagcc

SEQ ID NO: 2608050 - DNA, 25 bp, Homo sapien
cagagaacatccacccacgaatggt

SEQ ID NO: 2608051 - DNA, 25 bp, Homo sapien
taatgcatgctacttctaataatac

SEQ ID NO: 2608052 - DNA, 25 bp, Homo sapien
cacccacgaatggttatcattattg

SEQ ID NO: 2608053 - DNA, 25 bp, Homo sapien
tgtcatgcagcaagatgtcccttaa

SEQ ID NO: 2608054 - DNA, 25 bp, Homo sapien
gctctgcaggacatctgatcaccgg

SEQ ID NO: 2608055 - DNA, 25 bp, Homo sapien
gaaccagatctgtacttgacgcttc

SEQ ID NO: 2608056 - DNA, 25 bp, Homo sapien
tgatcaccggcaacagaagaaccag

SEQ ID NO: 2608057 - DNA, 25 bp, Homo sapien
ctgcgccctcgtctcatttctctga

SEQ ID NO: 2608058 - DNA, 25 bp, Homo sapien
cttgggctgattttcctgcgccctc

SEQ ID NO: 2608059 - DNA, 25 bp, Homo sapien
tgtttgtgtacagcgcacatgcccc

SEQ ID NO: 2608060 - DNA, 25 bp, Homo sapien
acatgcccccctgagggagacgcag

SEQ ID NO: 2608061 - DNA, 25 bp, Homo sapien
cccaggtatgagtgtggagcagtac

SEQ ID NO: 2608062 - DNA, 25 bp, Homo sapien
gacatcaactctgcctatgcagatg

SEQ ID NO: 2608063 - DNA, 25 bp, Homo sapien
tgtggagcagtacacagagttccac

SEQ ID NO: 2608064 - DNA, 25 bp, Homo sapien
actgaactgtgggtgacatcaactc

SEQ ID NO: 2608065 - DNA, 25 bp, Homo sapien
gggccacctttccaaggattctcac

SEQ ID NO: 2608066 - DNA, 25 bp, Homo sapien
ttgagggccacctttccaaggattc

SEQ ID NO: 2608067 - DNA, 25 bp, Homo sapien
gagggccacctttccaaggattctc

SEQ ID NO: 2608068 - DNA, 25 bp, Homo sapien
tcttgagggccacctttccaaggat

SEQ ID NO: 2608069 - DNA, 25 bp, Homo sapien
gctgtggtgatgatcgtgagagaga

SEQ ID NO: 2608070 - DNA, 25 bp, Homo sapien
tgatcgtgagagagatccgtggcca

SEQ ID NO: 2608071 - DNA, 25 bp, Homo sapien
gatgcccgaggacttcaaaagccac

SEQ ID NO: 2608072 - DNA, 25 bp, Homo sapien
cggttggcaatgatgcccgaggact

SEQ ID NO: 2608073 - DNA, 25 bp, Homo sapien
gagtgaagcctccactacaggaagc

SEQ ID NO: 2608074 - DNA, 25 bp, Homo sapien
atcagatctcctacagctgctgctg

SEQ ID NO: 2608075 - DNA, 25 bp, Homo sapien
acagtgagtgaagcctccactacag

SEQ ID NO: 2608076 - DNA, 25 bp, Homo sapien
gaagcatcagatctcctacagctgc

SEQ ID NO: 2608077 - DNA, 25 bp, Homo sapien
cctgctgctagtgcttggcccatct

SEQ ID NO: 2608078 - DNA, 25 bp, Homo sapien
ccaggctacacaaagcgatggagag

SEQ ID NO: 2608079 - DNA, 25 bp, Homo sapien
tttacgatctctcgcgtgacctgga

SEQ ID NO: 2608080 - DNA, 25 bp, Homo sapien
gcaggtgtcactaagatcaatttcc

SEQ ID NO: 2608081 - DNA, 25 bp, Homo sapien
tcatgttctttcttggggagctcct

SEQ ID NO: 2608082 - DNA, 25 bp, Homo sapien
ctttcagtggcccgcatgcctgggg

SEQ ID NO: 2608083 - DNA, 25 bp, Homo sapien
cacatcagggctggcctcatgttct

SEQ ID NO: 2608084 - DNA, 25 bp, Homo sapien
atgcctggggagcccacatcagggc

SEQ ID NO: 2608085 - DNA, 25 bp, Homo sapien
tcaagggtcatccatcatactttta

SEQ ID NO: 2608086 - DNA, 25 bp, Homo sapien
agggtcatccatcatacttttaatg

SEQ ID NO: 2608087 - DNA, 25 bp, Homo sapien
ggtcatccatcatacttttaatgtg

SEQ ID NO: 2608088 - DNA, 25 bp, Homo sapien
caagggtcatccatcatacttttaa

SEQ ID NO: 2608089 - DNA, 25 bp, Homo sapien
tgacataagtacaagaggagcaccc

SEQ ID NO: 2608090 - DNA, 25 bp, Homo sapien
tggcaccaggtatcaacacaaatgg

SEQ ID NO: 2608091 - DNA, 25 bp, Homo sapien
tacaagaggagcacccgtgtggttc

SEQ ID NO: 2608092 - DNA, 25 bp, Homo sapien
ggttcatggcaccaggtatcaacac

SEQ ID NO: 2608093 - DNA, 25 bp, Homo sapien
atcaaatcggagccttcggaatgct

SEQ ID NO: 2608094 - DNA, 25 bp, Homo sapien
catcaaatcggagccttcggaatgc

SEQ ID NO: 2608095 - DNA, 25 bp, Homo sapien
gaaaaataaattctgcgcacgcaga

SEQ ID NO: 2608096 - DNA, 25 bp, Homo sapien
ggctgaaaagcttgtgtttgttgtg

SEQ ID NO: 2608097 - DNA, 25 bp, Homo sapien
tatttgaggctgaaaagcttgtgtt

SEQ ID NO: 2608098 - DNA, 25 bp, Homo sapien
cgcagaatcgccacctgattatttg

SEQ ID NO: 2608099 - DNA, 25 bp, Homo sapien
caacgctggccaggatcttcaaggc

SEQ ID NO: 2608100 - DNA, 25 bp, Homo sapien
gggcagccagtccacgtagacctgg

SEQ ID NO: 2608101 - DNA, 25 bp, Homo sapien
ctgggatcctttagggaggaagcca

SEQ ID NO: 2608102 - DNA, 25 bp, Homo sapien
tgaggactgctaaacccgtgagttc

SEQ ID NO: 2608103 - DNA, 25 bp, Homo sapien
tcagctcatagtttacccgcaggaa

SEQ ID NO: 2608104 - DNA, 25 bp, Homo sapien
tatcagtcccagaatgcagctgtag

SEQ ID NO: 2608105 - DNA, 25 bp, Homo sapien
gatggtgttgtagcccaccaaggcc

SEQ ID NO: 2608106 - DNA, 25 bp, Homo sapien
cgcaggaacacggaacaggatatca

SEQ ID NO: 2608107 - DNA, 25 bp, Homo sapien
tctacccagaacaagcagtgtgatg

SEQ ID NO: 2608108 - DNA, 25 bp, Homo sapien
ctgtctacccagaacaagcagtgtg

SEQ ID NO: 2608109 - DNA, 25 bp, Homo sapien
tgtctacccagaacaagcagtgtga

SEQ ID NO: 2608110 - DNA, 25 bp, Homo sapien
acccagaacaagcagtgtgatgaag

SEQ ID NO: 2608111 - DNA, 25 bp, Homo sapien
gaagattaactacaatgcacagcaa

SEQ ID NO: 2608112 - DNA, 25 bp, Homo sapien
gcatccacaccctgtactaactagt

SEQ ID NO: 2608113 - DNA, 25 bp, Homo sapien
tctaattcttagacgtttgtttcca

SEQ ID NO: 2608114 - DNA, 25 bp, Homo sapien
tccttttgtctatatcgaagcatcc

SEQ ID NO: 2608115 - DNA, 25 bp, Homo sapien
actgcttgggaagctagaggacagt

SEQ ID NO: 2608116 - DNA, 25 bp, Homo sapien
tgacagccagatccagacttggtcc

SEQ ID NO: 2608117 - DNA, 25 bp, Homo sapien
ccagatccagacttggtccaactgt

SEQ ID NO: 2608118 - DNA, 25 bp, Homo sapien
ttgtcccggactgctggcctgacag

SEQ ID NO: 2608119 - DNA, 25 bp, Homo sapien
tgcctggggctactctacaggtttt

SEQ ID NO: 2608120 - DNA, 25 bp, Homo sapien
ttttcaggggcccagatcccatgaa

SEQ ID NO: 2608121 - DNA, 25 bp, Homo sapien
aagagacaccgaatttgcttttcac

SEQ ID NO: 2608122 - DNA, 25 bp, Homo sapien
tcccatgaagagacaccgaatttgc

SEQ ID NO: 2608123 - DNA, 25 bp, Homo sapien
cctccccataaagccctctgtgtcc

SEQ ID NO: 2608124 - DNA, 25 bp, Homo sapien
gcatcttgtcctgccagagagtgga

SEQ ID NO: 2608125 - DNA, 25 bp, Homo sapien
agaaacaataggcatcttgtcctgc

SEQ ID NO: 2608126 - DNA, 25 bp, Homo sapien
gaggtaaagaaacaataggcatctt

SEQ ID NO: 2608127 - DNA, 25 bp, Homo sapien
tgaatttgttcttccataagaagtc

SEQ ID NO: 2608128 - DNA, 25 bp, Homo sapien
aatttgttcttccataagaagtcta

SEQ ID NO: 2608129 - DNA, 25 bp, Homo sapien
tctctatctcctcccgctctttttt

SEQ ID NO: 2608130 - DNA, 25 bp, Homo sapien
ggtctctatctcctcccgctctttt

SEQ ID NO: 2608131 - DNA, 25 bp, Homo sapien
tcagccacgtgcgcgggaagcacgt

SEQ ID NO: 2608132 - DNA, 25 bp, Homo sapien
cacgtgcgcgggaagcacgttctcc

SEQ ID NO: 2608133 - DNA, 25 bp, Homo sapien
ccacgtgcgcgggaagcacgttctc

SEQ ID NO: 2608134 - DNA, 25 bp, Homo sapien
gtgcgcgggaagcacgttctccagc

SEQ ID NO: 2608135 - DNA, 25 bp, Homo sapien
tgtgtatctgatatctttgaaattc

SEQ ID NO: 2608136 - DNA, 25 bp, Homo sapien
atctttgaaattctaagagccttgg

SEQ ID NO: 2608137 - DNA, 25 bp, Homo sapien
ttgaaattctaagagccttggaagg

SEQ ID NO: 2608138 - DNA, 25 bp, Homo sapien
ctttgaaattctaagagccttggaa

SEQ ID NO: 2608139 - DNA, 25 bp, Homo sapien
catgagacttgttgtgtagccctgg

SEQ ID NO: 2608140 - DNA, 25 bp, Homo sapien
ccaccaaatgtagtaaacaccagga

SEQ ID NO: 2608141 - DNA, 25 bp, Homo sapien
tgggccatgagacttgttgtgtagc

SEQ ID NO: 2608142 - DNA, 25 bp, Homo sapien
caccaggagaagagataggaaagcc

SEQ ID NO: 2608143 - DNA, 25 bp, Homo sapien
tgaaatgcccgcctcacctggagga

SEQ ID NO: 2608144 - DNA, 25 bp, Homo sapien
ctgtgaaatgcccgcctcacctgga

SEQ ID NO: 2608145 - DNA, 25 bp, Homo sapien
tgtgaaatgcccgcctcacctggag

SEQ ID NO: 2608146 - DNA, 25 bp, Homo sapien
gtgaaatgcccgcctcacctggagg

SEQ ID NO: 2608147 - DNA, 25 bp, Homo sapien
cagtggcatgaaggtccctggtaca

SEQ ID NO: 2608148 - DNA, 25 bp, Homo sapien
ccaagacccgcactttgctgctgtc

SEQ ID NO: 2608149 - DNA, 25 bp, Homo sapien
tctcatgcgtatcccacctgtgtgg

SEQ ID NO: 2608150 - DNA, 25 bp, Homo sapien
aagtggaggagtcactgtgagctgc

SEQ ID NO: 2608151 - DNA, 25 bp, Homo sapien
gcagggggatttatatcaatgctta

SEQ ID NO: 2608152 - DNA, 25 bp, Homo sapien
gggggatttatatcaatgcttaaag

SEQ ID NO: 2608153 - DNA, 25 bp, Homo sapien
gggatttatatcaatgcttaaagac

SEQ ID NO: 2608154 - DNA, 25 bp, Homo sapien
cagggggatttatatcaatgcttaa

SEQ ID NO: 2608155 - DNA, 25 bp, Homo sapien
caactggaagcttggtgaacaggca

SEQ ID NO: 2608156 - DNA, 25 bp, Homo sapien
catgcctgttatggaacgtggagcc

SEQ ID NO: 2608157 - DNA, 25 bp, Homo sapien
tgaggaccccgtgtttcccgaatga

SEQ ID NO: 2608158 - DNA, 25 bp, Homo sapien
ccagtcaggtgtagatttgaggacc

SEQ ID NO: 2608159 - DNA, 25 bp, Homo sapien
tgttcccgcaactggctagcaaacc

SEQ ID NO: 2608160 - DNA, 25 bp, Homo sapien
tcccgcaactggctagcaaacctcc

SEQ ID NO: 2608161 - DNA, 25 bp, Homo sapien
ttcccgcaactggctagcaaacctc

SEQ ID NO: 2608162 - DNA, 25 bp, Homo sapien
gttcccgcaactggctagcaaacct

SEQ ID NO: 2608163 - DNA, 25 bp, Homo sapien
agtatttggtcctgacactgtagag

SEQ ID NO: 2608164 - DNA, 25 bp, Homo sapien
cttagggaggaaaagagctcaggca

SEQ ID NO: 2608165 - DNA, 25 bp, Homo sapien
tatttggtcctgacactgtagaggg

SEQ ID NO: 2608166 - DNA, 25 bp, Homo sapien
tcagtatttggtcctgacactgtag

SEQ ID NO: 2608167 - DNA, 25 bp, Homo sapien
tgcagggacttctttggtcccagca

SEQ ID NO: 2608168 - DNA, 25 bp, Homo sapien
ctctgccatgcagtttcagtaaggg

SEQ ID NO: 2608169 - DNA, 25 bp, Homo sapien
gccacactctgccatgcagtttcag

SEQ ID NO: 2608170 - DNA, 25 bp, Homo sapien
tcagtaaggggtagggcttctgctt

SEQ ID NO: 2608171 - DNA, 25 bp, Homo sapien
ctcagggcagtgattctgcagggaa

SEQ ID NO: 2608172 - DNA, 25 bp, Homo sapien
agggcagtgattctgcagggaagca

SEQ ID NO: 2608173 - DNA, 25 bp, Homo sapien
gattctgcagggaagcagcccccat

SEQ ID NO: 2608174 - DNA, 25 bp, Homo sapien
cctcagggcagtgattctgcaggga

SEQ ID NO: 2608175 - DNA, 25 bp, Homo sapien
ctgtcagttttggtcccaggaagtc

SEQ ID NO: 2608176 - DNA, 25 bp, Homo sapien
tgtcagttttggtcccaggaagtcg

SEQ ID NO: 2608177 - DNA, 25 bp, Homo sapien
aggctcccatctgggtgcacagaac

SEQ ID NO: 2608178 - DNA, 25 bp, Homo sapien
acagagaaggctcccatctgggtgc

SEQ ID NO: 2608179 - DNA, 25 bp, Homo sapien
aacaggcttccgaaacagagaaggc

SEQ ID NO: 2608180 - DNA, 25 bp, Homo sapien
atgagcctgagggttgtgtgggctg

SEQ ID NO: 2608181 - DNA, 25 bp, Homo sapien
gagctggctttgatgcccattgaag

SEQ ID NO: 2608182 - DNA, 25 bp, Homo sapien
ggcattggctctctccgaatgagga

SEQ ID NO: 2608183 - DNA, 25 bp, Homo sapien
tctgtggtggcatccgtggctcatg

SEQ ID NO: 2608184 - DNA, 25 bp, Homo sapien
aatgaggatgtctggctcacaatcc

SEQ ID NO: 2608185 - DNA, 25 bp, Homo sapien
ggcatagagcttaaagcttagcact

SEQ ID NO: 2608186 - DNA, 25 bp, Homo sapien
tgagtgatctgcctggtcgtcactg

SEQ ID NO: 2608187 - DNA, 25 bp, Homo sapien
ctggtcgtcactgggagggttctca

SEQ ID NO: 2608188 - DNA, 25 bp, Homo sapien
gcttagcactgttgagtgatctgcc

SEQ ID NO: 2608189 - DNA, 25 bp, Homo sapien
gaggctttggatcgtccacgtttcc

SEQ ID NO: 2608190 - DNA, 25 bp, Homo sapien
ccagaccagactggtgctttgtctc

SEQ ID NO: 2608191 - DNA, 25 bp, Homo sapien
cactgacttgggctgcatagaggct

SEQ ID NO: 2608192 - DNA, 25 bp, Homo sapien
acttgggctgcatagaggctttgga

SEQ ID NO: 2608193 - DNA, 25 bp, Homo sapien
cttgctagctgggttttccaaacca

SEQ ID NO: 2608194 - DNA, 25 bp, Homo sapien
ccagtgtgggccttttgcaagtgga

SEQ ID NO: 2608195 - DNA, 25 bp, Homo sapien
gtggcttgtgcccttccccagtgtg

SEQ ID NO: 2608196 - DNA, 25 bp, Homo sapien
caaaccatccagaatggagaagagg

SEQ ID NO: 2608197 - DNA, 25 bp, Homo sapien
aagcaagagctgatcactaggagac

SEQ ID NO: 2608198 - DNA, 25 bp, Homo sapien
aaaagcaagagctgatcactaggag

SEQ ID NO: 2608199 - DNA, 25 bp, Homo sapien
gcaagagctgatcactaggagactg

SEQ ID NO: 2608200 - DNA, 25 bp, Homo sapien
aagagctgatcactaggagactgac

SEQ ID NO: 2608201 - DNA, 25 bp, Homo sapien
gaaggcattccaagccctccttgtt

SEQ ID NO: 2608202 - DNA, 25 bp, Homo sapien
agcgatgatctcgttcaggagccga

SEQ ID NO: 2608203 - DNA, 25 bp, Homo sapien
tcacgtcggattctgtataaaattc

SEQ ID NO: 2608204 - DNA, 25 bp, Homo sapien
tgaaatccggaatggaggcaaacat

SEQ ID NO: 2608205 - DNA, 25 bp, Homo sapien
tcttgtatttcatacagcgcatgtc

SEQ ID NO: 2608206 - DNA, 25 bp, Homo sapien
ttcttgtatttcatacagcgcatgt

SEQ ID NO: 2608207 - DNA, 25 bp, Homo sapien
cttcttgtatttcatacagcgcatg

SEQ ID NO: 2608208 - DNA, 25 bp, Homo sapien
ctgtgaagcaatgacaaccgtccag

SEQ ID NO: 2608209 - DNA, 25 bp, Homo sapien
tgtgaagcaatgacaaccgtccagt

SEQ ID NO: 2608210 - DNA, 25 bp, Homo sapien
caaccgtccagttactcagctggat

SEQ ID NO: 2608211 - DNA, 25 bp, Homo sapien
gcaatgacaaccgtccagttactca

SEQ ID NO: 2608212 - DNA, 25 bp, Homo sapien
cagacctgttgctgccatgtatgtg

SEQ ID NO: 2608213 - DNA, 25 bp, Homo sapien
agacctgttgctgccatgtatgtgc

SEQ ID NO: 2608214 - DNA, 25 bp, Homo sapien
acctgttgctgccatgtatgtgctg

SEQ ID NO: 2608215 - DNA, 25 bp, Homo sapien
tcagacctgttgctgccatgtatgt

SEQ ID NO: 2608216 - DNA, 25 bp, Homo sapien
gtgccgttaagtggccaacgcgtct

SEQ ID NO: 2608217 - DNA, 25 bp, Homo sapien
gccgttaagtggccaacgcgtctta

SEQ ID NO: 2608218 - DNA, 25 bp, Homo sapien
ctgtgccgttaagtggccaacgcgt

SEQ ID NO: 2608219 - DNA, 25 bp, Homo sapien
tgtgccgttaagtggccaacgcgtc

SEQ ID NO: 2608220 - DNA, 25 bp, Homo sapien
tagttggctgtccaagagcaaaggg

SEQ ID NO: 2608221 - DNA, 25 bp, Homo sapien
tggtgcctcggaagatctcccactc

SEQ ID NO: 2608222 - DNA, 25 bp, Homo sapien
tgtggtggtgcctcggaagatctcc

SEQ ID NO: 2608223 - DNA, 25 bp, Homo sapien
ccgaggccctgccaaagtattgtta

SEQ ID NO: 2608224 - DNA, 25 bp, Homo sapien
tggagacttttcttgaacatccaga

SEQ ID NO: 2608225 - DNA, 25 bp, Homo sapien
gaacatccagaagactgggtctgat

SEQ ID NO: 2608226 - DNA, 25 bp, Homo sapien
ggcagagttagggtcaggaagaaca

SEQ ID NO: 2608227 - DNA, 25 bp, Homo sapien
tttcttgaacatccagaagactggg

SEQ ID NO: 2608228 - DNA, 25 bp, Homo sapien
tagagaaaagctgctactaaggtgg

SEQ ID NO: 2608229 - DNA, 25 bp, Homo sapien
agagaaaagctgctactaaggtggt

SEQ ID NO: 2608230 - DNA, 25 bp, Homo sapien
tgacagcaaggtagagaaaagctgc

SEQ ID NO: 2608231 - DNA, 25 bp, Homo sapien
ggtgacagcaaggtagagaaaagct

SEQ ID NO: 2608232 - DNA, 25 bp, Homo sapien
gaatgtgcccactacagcaggtgag

SEQ ID NO: 2608233 - DNA, 25 bp, Homo sapien
gataccagagggttgagctggcaat

SEQ ID NO: 2608234 - DNA, 25 bp, Homo sapien
cactacagcaggtgagggctccaag

SEQ ID NO: 2608235 - DNA, 25 bp, Homo sapien
ccaggaaggatcgtgaatgtgccca

SEQ ID NO: 2608236 - DNA, 25 bp, Homo sapien
tgtgcatgtactgccgctcgggctc

SEQ ID NO: 2608237 - DNA, 25 bp, Homo sapien
cactcgcaatttgaagtcgttgaag

SEQ ID NO: 2608238 - DNA, 25 bp, Homo sapien
caccatggtgccaatgtgcatgtac

SEQ ID NO: 2608239 - DNA, 25 bp, Homo sapien
aagtcgttgaaggagtgcttgttga

SEQ ID NO: 2608240 - DNA, 25 bp, Homo sapien
tgtattttgtccaggactccggtgc

SEQ ID NO: 2608241 - DNA, 25 bp, Homo sapien
cagtgttgccccagatatcatattg

SEQ ID NO: 2608242 - DNA, 25 bp, Homo sapien
actccggtgctgtccatcctactgg

SEQ ID NO: 2608243 - DNA, 25 bp, Homo sapien
ccagctatcacaggtccatggttaa

SEQ ID NO: 2608244 - DNA, 25 bp, Homo sapien
ttgatgcaggcagcgcagaccacac

SEQ ID NO: 2608245 - DNA, 25 bp, Homo sapien
ttcccaagagaacagacatggttga

SEQ ID NO: 2608246 - DNA, 25 bp, Homo sapien
tcccaagagaacagacatggttgat

SEQ ID NO: 2608247 - DNA, 25 bp, Homo sapien
caagagaacagacatggttgatgca

SEQ ID NO: 2608248 - DNA, 25 bp, Homo sapien
tgggcaactgagcagtctccacaga

SEQ ID NO: 2608249 - DNA, 25 bp, Homo sapien
ccacgattcttgttctggctgggca

SEQ ID NO: 2608250 - DNA, 25 bp, Homo sapien
caaaacgccccacgattcttgttct

SEQ ID NO: 2608251 - DNA, 25 bp, Homo sapien
taggctgccaaaacgccccacgatt

SEQ ID NO: 2608252 - DNA, 25 bp, Homo sapien
ccaaatgcagcccttcagcttccgt

SEQ ID NO: 2608253 - DNA, 25 bp, Homo sapien
caaatgcagcccttcagcttccgtg

SEQ ID NO: 2608254 - DNA, 25 bp, Homo sapien
aatgtcatggaaggacagcccctag

SEQ ID NO: 2608255 - DNA, 25 bp, Homo sapien
tctgcagtcattggacgagcggcct

SEQ ID NO: 2608256 - DNA, 25 bp, Homo sapien
tatccactggtgttcataatgccga

SEQ ID NO: 2608257 - DNA, 25 bp, Homo sapien
tccatgcgcagatctcaagggcggg

SEQ ID NO: 2608258 - DNA, 25 bp, Homo sapien
cagcagttttatggcgcacagcagc

SEQ ID NO: 2608259 - DNA, 25 bp, Homo sapien
ccagcagcgttgttacggcacacaa

SEQ ID NO: 2608260 - DNA, 25 bp, Homo sapien
caagtgttgttacagcacacagcag

SEQ ID NO: 2608261 - DNA, 25 bp, Homo sapien
cagcagcgttattatgggacacagc

SEQ ID NO: 2608262 - DNA, 25 bp, Homo sapien
gcagacagaaagccctggtaatgct

SEQ ID NO: 2608263 - DNA, 25 bp, Homo sapien
tttggaaccatgagaaaaaggcaca

SEQ ID NO: 2608264 - DNA, 25 bp, Homo sapien
ccagtgtcccctagcaggtatctga

SEQ ID NO: 2608265 - DNA, 25 bp, Homo sapien
gcacaaaggagcaatctcctcccac

SEQ ID NO: 2608266 - DNA, 25 bp, Homo sapien
cgtgtgctgcgccttccttaggaca

SEQ ID NO: 2608267 - DNA, 25 bp, Homo sapien
ggctccctgagcttctgcgtgtgct

SEQ ID NO: 2608268 - DNA, 25 bp, Homo sapien
tcctcagcggagatgcactgtccag

SEQ ID NO: 2608269 - DNA, 25 bp, Homo sapien
ctgcaggtcggatggccgtgaactt

SEQ ID NO: 2608270 - DNA, 25 bp, Homo sapien
aggacgaggctcgtctcctcggtaa

SEQ ID NO: 2608271 - DNA, 25 bp, Homo sapien
tgtgtttacaaagtacgtcttcagg

SEQ ID NO: 2608272 - DNA, 25 bp, Homo sapien
cacgtgtatccgagggtctgcagga

SEQ ID NO: 2608273 - DNA, 25 bp, Homo sapien
gattattcctcgacaggtgcacgtg

SEQ ID NO: 2608274 - DNA, 25 bp, Homo sapien
aggatgccacgttgctctgggaaag

SEQ ID NO: 2608275 - DNA, 25 bp, Homo sapien
gatgccacgttgctctgggaaaggg

SEQ ID NO: 2608276 - DNA, 25 bp, Homo sapien
tcaggatgccacgttgctctgggaa

SEQ ID NO: 2608277 - DNA, 25 bp, Homo sapien
tgccacgttgctctgggaaagggac

SEQ ID NO: 2608278 - DNA, 25 bp, Homo sapien
gtcttcttgccaaaatgaaggtgac

SEQ ID NO: 2608279 - DNA, 25 bp, Homo sapien
aaatacagtcttcttgccaaaatga

SEQ ID NO: 2608280 - DNA, 25 bp, Homo sapien
tcttcttgccaaaatgaaggtgact

SEQ ID NO: 2608281 - DNA, 25 bp, Homo sapien
ttcctgaaaatacagtcttcttgcc

SEQ ID NO: 2608282 - DNA, 25 bp, Homo sapien
tccataggacagacagcacgcacat

SEQ ID NO: 2608283 - DNA, 25 bp, Homo sapien
gacagcacgcacatcaaaaacaagg

SEQ ID NO: 2608284 - DNA, 25 bp, Homo sapien
gttgcagtcagaaagtgtgtgatac

SEQ ID NO: 2608285 - DNA, 25 bp, Homo sapien
aaaaacaagggacagaagttgcagt

SEQ ID NO: 2608286 - DNA, 25 bp, Homo sapien
ttttcttctatcacgcgcgctcctt

SEQ ID NO: 2608287 - DNA, 25 bp, Homo sapien
caagcacagtgcaagtggcagaacg

SEQ ID NO: 2608288 - DNA, 25 bp, Homo sapien
caccaaacggtatgccactgggtca

SEQ ID NO: 2608289 - DNA, 25 bp, Homo sapien
gcagaacgatctgggcacacatcag

SEQ ID NO: 2608290 - DNA, 25 bp, Homo sapien
caaatggcatcaaaacatcagacga

SEQ ID NO: 2608291 - DNA, 25 bp, Homo sapien
caatgagacaatgggtgagcacaga

SEQ ID NO: 2608292 - DNA, 25 bp, Homo sapien
gcagatgcggttggcgagctaccat

SEQ ID NO: 2608293 - DNA, 25 bp, Homo sapien
actaattctggtgacggatggcgac

SEQ ID NO: 2608294 - DNA, 25 bp, Homo sapien
tatgggaccacacctagaagggacc

SEQ ID NO: 2608295 - DNA, 25 bp, Homo sapien
cacccggcctgatgatgttacctgg

SEQ ID NO: 2608296 - DNA, 25 bp, Homo sapien
tttatgagaacttggtggaccaccc

SEQ ID NO: 2608297 - DNA, 25 bp, Homo sapien
tttgagctcacggaaacgctacggc

SEQ ID NO: 2608298 - DNA, 25 bp, Homo sapien
tactgttggaattcttatgaatctt

SEQ ID NO: 2608299 - DNA, 25 bp, Homo sapien
ctgttggaattcttatgaatcttaa

SEQ ID NO: 2608300 - DNA, 25 bp, Homo sapien
gttactgttggaattcttatgaatc

SEQ ID NO: 2608301 - DNA, 25 bp, Homo sapien
catgttactgttggaattcttatga

SEQ ID NO: 2608302 - DNA, 25 bp, Homo sapien
aggataatccaagcaccccagtggg

SEQ ID NO: 2608303 - DNA, 25 bp, Homo sapien
ccaggataatccaagcaccccagtg

SEQ ID NO: 2608304 - DNA, 25 bp, Homo sapien
ggagggttggacctgattaaaagca

SEQ ID NO: 2608305 - DNA, 25 bp, Homo sapien
cagtgggggctcactcagttcagga

SEQ ID NO: 2608306 - DNA, 25 bp, Homo sapien
tttgccaagtgcagccaagcaccta

SEQ ID NO: 2608307 - DNA, 25 bp, Homo sapien
gccaagtgcagccaagcacctatac

SEQ ID NO: 2608308 - DNA, 25 bp, Homo sapien
ttgccaagtgcagccaagcacctat

SEQ ID NO: 2608309 - DNA, 25 bp, Homo sapien
aagtgcagccaagcacctatacaga

SEQ ID NO: 2608310 - DNA, 25 bp, Homo sapien
ggtagagagggatatagattagcca

SEQ ID NO: 2608311 - DNA, 25 bp, Homo sapien
agagggatatagattagccaggtgt

SEQ ID NO: 2608312 - DNA, 25 bp, Homo sapien
gcaggcgtaactgggacaggtcttt

SEQ ID NO: 2608313 - DNA, 25 bp, Homo sapien
ctgaaaaggagcattcattgaggac

SEQ ID NO: 2608314 - DNA, 25 bp, Homo sapien
caccattgttcctaaatgtccccgg

SEQ ID NO: 2608315 - DNA, 25 bp, Homo sapien
caaagccagttgagggtcatctact

SEQ ID NO: 2608316 - DNA, 25 bp, Homo sapien
ttcctgggatgggatctgcgagtct

SEQ ID NO: 2608317 - DNA, 25 bp, Homo sapien
tgtccccggtttgtcttgctcaaga

SEQ ID NO: 2608318 - DNA, 25 bp, Homo sapien
gtgcggagatgaagggggcgcggca

SEQ ID NO: 2608319 - DNA, 25 bp, Homo sapien
gagcgtgcggagatgaagggggcgc

SEQ ID NO: 2608320 - DNA, 25 bp, Homo sapien
gggtgggagcgtgcggagatgaagg

SEQ ID NO: 2608321 - DNA, 25 bp, Homo sapien
ccgggtgggagcgtgcggagatgaa

SEQ ID NO: 2608322 - DNA, 25 bp, Homo sapien
ggcgcagtccgccttcagctacatc

SEQ ID NO: 2608323 - DNA, 25 bp, Homo sapien
aaagagcacagctactactaccgcc

SEQ ID NO: 2608324 - DNA, 25 bp, Homo sapien
acggtggcggcatggaggacgacga

SEQ ID NO: 2608325 - DNA, 25 bp, Homo sapien
acgacgaggaggagaccaccgcgtc

SEQ ID NO: 2608326 - DNA, 25 bp, Homo sapien
gcgctgagcaacctgaggcctgcag

SEQ ID NO: 2608327 - DNA, 25 bp, Homo sapien
acgctggcgctgagcaacctgaggc

SEQ ID NO: 2608328 - DNA, 25 bp, Homo sapien
ctggcgctgagcaacctgaggcctg

SEQ ID NO: 2608329 - DNA, 25 bp, Homo sapien
tggcgctgagcaacctgaggcctgc

SEQ ID NO: 2608330 - DNA, 25 bp, Homo sapien
gctcctgacacaccatgcgctaggt

SEQ ID NO: 2608331 - DNA, 25 bp, Homo sapien
tcaaataagaaacgacacacgtggc

SEQ ID NO: 2608332 - DNA, 25 bp, Homo sapien
ctggagcctcggcaagtcatttggc

SEQ ID NO: 2608333 - DNA, 25 bp, Homo sapien
gctcagtcactaatggtctcgcgaa

SEQ ID NO: 2608334 - DNA, 25 bp, Homo sapien
gatcaagggccaacgtaaacacact

SEQ ID NO: 2608335 - DNA, 25 bp, Homo sapien
tggcaaaggattgcaagagccctgt

SEQ ID NO: 2608336 - DNA, 25 bp, Homo sapien
caaacggaacgcaggtattgaccca

SEQ ID NO: 2608337 - DNA, 25 bp, Homo sapien
tactgtaactgctagccacacgtgg

SEQ ID NO: 2608338 - DNA, 25 bp, Homo sapien
ctccacttggtcactcctttgacat

SEQ ID NO: 2608339 - DNA, 25 bp, Homo sapien
ccttgccttcctctatgtgaggaat

SEQ ID NO: 2608340 - DNA, 25 bp, Homo sapien
ggaaaacggaagcagtcagttcctc

SEQ ID NO: 2608341 - DNA, 25 bp, Homo sapien
cctctatgtgaggaatgtgcgtcgc

SEQ ID NO: 2608342 - DNA, 25 bp, Homo sapien
cgtcgcttgggtacatgtggacact

SEQ ID NO: 2608343 - DNA, 25 bp, Homo sapien
gttttacttgctagcacaacccctg

SEQ ID NO: 2608344 - DNA, 25 bp, Homo sapien
cagcagttgaaactagaggatctct

SEQ ID NO: 2608345 - DNA, 25 bp, Homo sapien
ctgaacaacacaggcagtcttcttt

SEQ ID NO: 2608346 - DNA, 25 bp, Homo sapien
gcaacagtgatagtctttgggccta

SEQ ID NO: 2608347 - DNA, 25 bp, Homo sapien
gacaagagagccgactggagtagca

SEQ ID NO: 2608348 - DNA, 25 bp, Homo sapien
cacagtcaggttacagtttcaagga

SEQ ID NO: 2608349 - DNA, 25 bp, Homo sapien
tagattctgatgtatccgggtaccc

SEQ ID NO: 2608350 - DNA, 25 bp, Homo sapien
gaccttgccgctcatttgggacctg

SEQ ID NO: 2608351 - DNA, 25 bp, Homo sapien
taagcagcggtatctttttctcaag

SEQ ID NO: 2608352 - DNA, 25 bp, Homo sapien
aggctaataagcagcggtatctttt

SEQ ID NO: 2608353 - DNA, 25 bp, Homo sapien
ggctaataagcagcggtatcttttt

SEQ ID NO: 2608354 - DNA, 25 bp, Homo sapien
taataagcagcggtatctttttctc

SEQ ID NO: 2608355 - DNA, 25 bp, Homo sapien
ggttagcagcagagccgttgagtca

SEQ ID NO: 2608356 - DNA, 25 bp, Homo sapien
tatgtgaagattgggctgactaacc

SEQ ID NO: 2608357 - DNA, 25 bp, Homo sapien
tacctggaacgtaggaaatgctcac

SEQ ID NO: 2608358 - DNA, 25 bp, Homo sapien
tcaaatattagccacgtagtagcag

SEQ ID NO: 2608359 - DNA, 25 bp, Homo sapien
tctccagcatcgtttattatattgc

SEQ ID NO: 2608360 - DNA, 25 bp, Homo sapien
gcatcgtttattatattgctatcct

SEQ ID NO: 2608361 - DNA, 25 bp, Homo sapien
cagcctgtctgtgcttaaaaggttt

SEQ ID NO: 2608362 - DNA, 25 bp, Homo sapien
tagcatctgtcatggatgacagaag

SEQ ID NO: 2608363 - DNA, 25 bp, Homo sapien
catattttcccgatttgtactcttt

SEQ ID NO: 2608364 - DNA, 25 bp, Homo sapien
tgtctttaaggactcattgtaaaac

SEQ ID NO: 2608365 - DNA, 25 bp, Homo sapien
tgtcttttatgacttccgaggttcc

SEQ ID NO: 2608366 - DNA, 25 bp, Homo sapien
cgaggttcctatctcaagagcatga

SEQ ID NO: 2608367 - DNA, 25 bp, Homo sapien
taaaagcagtttctacgcccaaatg

SEQ ID NO: 2608368 - DNA, 25 bp, Homo sapien
caacttttgtctctatcgggaatgc

SEQ ID NO: 2608369 - DNA, 25 bp, Homo sapien
tagagttcgctcttcccataaagac

SEQ ID NO: 2608370 - DNA, 25 bp, Homo sapien
gtatatcatggccatccctcgaggc

SEQ ID NO: 2608371 - DNA, 25 bp, Homo sapien
ttccttcaacggctgcaaggtgagt

SEQ ID NO: 2608372 - DNA, 25 bp, Homo sapien
gaatgccatccagtcaactttctgg

SEQ ID NO: 2608373 - DNA, 25 bp, Homo sapien
gctggaaaacgtgctattcactcat

SEQ ID NO: 2608374 - DNA, 25 bp, Homo sapien
aaagtaacctttgaactggcagtgg

SEQ ID NO: 2608375 - DNA, 25 bp, Homo sapien
cggtacccaggaccaatagaaagct

SEQ ID NO: 2608376 - DNA, 25 bp, Homo sapien
tcggtacccaggaccaatagaaagc

SEQ ID NO: 2608377 - DNA, 25 bp, Homo sapien
gtacccaggaccaatagaaagctcc

SEQ ID NO: 2608378 - DNA, 25 bp, Homo sapien
gctcggtacccaggaccaatagaaa

SEQ ID NO: 2608379 - DNA, 25 bp, Homo sapien
ctgcacaacgcgacttccaccaacc

SEQ ID NO: 2608380 - DNA, 25 bp, Homo sapien
cagcgcgcactgacgcagcgcccat

SEQ ID NO: 2608381 - DNA, 25 bp, Homo sapien
ccaaccttgcgccagcgcgcactga

SEQ ID NO: 2608382 - DNA, 25 bp, Homo sapien
tgcacaacgcgacttccaccaacct

SEQ ID NO: 2608383 - DNA, 25 bp, Homo sapien
ccacgccgcgccagccgggcacgaa

SEQ ID NO: 2608384 - DNA, 25 bp, Homo sapien
cacgccgcgccagccgggcacgaac

SEQ ID NO: 2608385 - DNA, 25 bp, Homo sapien
cacttcaaggcatgtaacagtgaaa

SEQ ID NO: 2608386 - DNA, 25 bp, Homo sapien
cttatcggattcactaatacagtga

SEQ ID NO: 2608387 - DNA, 25 bp, Homo sapien
gcatatagtaacagaaacctcctca

SEQ ID NO: 2608388 - DNA, 25 bp, Homo sapien
gatctgcagaaaatccatgtaccac

SEQ ID NO: 2608389 - DNA, 25 bp, Homo sapien
tgtccctgctgtgtagcatatagta

SEQ ID NO: 2608390 - DNA, 25 bp, Homo sapien
tctccggtgcccgtggtagaaacca

SEQ ID NO: 2608391 - DNA, 25 bp, Homo sapien
gagcaaagaaatcaaccggcagtgt

SEQ ID NO: 2608392 - DNA, 25 bp, Homo sapien
gaaaccacaacaacaagaggagctg

SEQ ID NO: 2608393 - DNA, 25 bp, Homo sapien
tccttaacaaacttgcgggctgtgt

SEQ ID NO: 2608394 - DNA, 25 bp, Homo sapien
tccaagctcttgaagtcgtttatca

SEQ ID NO: 2608395 - DNA, 25 bp, Homo sapien
tgtcatagaaatgccgggctccaag

SEQ ID NO: 2608396 - DNA, 25 bp, Homo sapien
tcgtttatcaattatcttcccccca

SEQ ID NO: 2608397 - DNA, 25 bp, Homo sapien
taggtgtattctgaatcaccgagac

SEQ ID NO: 2608398 - DNA, 25 bp, Homo sapien
ggctccacgtgcatggcagagagaa

SEQ ID NO: 2608399 - DNA, 25 bp, Homo sapien
taaagttcctaaagaacaagctgat

SEQ ID NO: 2608400 - DNA, 25 bp, Homo sapien
ggctccctccatgtaaagagcccaa

SEQ ID NO: 2608401 - DNA, 25 bp, Homo sapien
agagaagcacatgcacgattaaagt

SEQ ID NO: 2608402 - DNA, 25 bp, Homo sapien
ggttacacattagagctgccctgag

SEQ ID NO: 2608403 - DNA, 25 bp, Homo sapien
ccctgaggagcctttgtgaaaacaa

SEQ ID NO: 2608404 - DNA, 25 bp, Homo sapien
tcatttcactgtgctcgggaggtgc

SEQ ID NO: 2608405 - DNA, 25 bp, Homo sapien
tcaggcccgtgtgtcattatgactc

SEQ ID NO: 2608406 - DNA, 25 bp, Homo sapien
aaatgctttctgagggctggccaga

SEQ ID NO: 2608407 - DNA, 25 bp, Homo sapien
ggagtgcgccacttatctcctcttg

SEQ ID NO: 2608408 - DNA, 25 bp, Homo sapien
ttgtcctctgcttgacctaaaatgc

SEQ ID NO: 2608409 - DNA, 25 bp, Homo sapien
tgcaggtgatgccaccgggagtgcg

SEQ ID NO: 2608410 - DNA, 25 bp, Homo sapien
acaacattggattggttgctgttca

SEQ ID NO: 2608411 - DNA, 25 bp, Homo sapien
ttcctgaatcatcgaatctcagaag

SEQ ID NO: 2608412 - DNA, 25 bp, Homo sapien
gaagctcgacttgagattcaatgtg

SEQ ID NO: 2608413 - DNA, 25 bp, Homo sapien
tcaattacaacattggattggttgc

SEQ ID NO: 2608414 - DNA, 25 bp, Homo sapien
ccaggaatattcagagaggcttgtg

SEQ ID NO: 2608415 - DNA, 25 bp, Homo sapien
taccgaacgggtaagtgaggactca

SEQ ID NO: 2608416 - DNA, 25 bp, Homo sapien
gcttgtgagagtgggggtaccgaac

SEQ ID NO: 2608417 - DNA, 25 bp, Homo sapien
tctgggggtaaaccaggaatattca

SEQ ID NO: 2608418 - DNA, 25 bp, Homo sapien
tggccaagagactcctgcagatgta

SEQ ID NO: 2608419 - DNA, 25 bp, Homo sapien
ctggccaagagactcctgcagatgt

SEQ ID NO: 2608420 - DNA, 25 bp, Homo sapien
ggccaagagactcctgcagatgtac

SEQ ID NO: 2608421 - DNA, 25 bp, Homo sapien
gatcctgtctgtggtgcaacactgc

SEQ ID NO: 2608422 - DNA, 25 bp, Homo sapien
ccgctgccatgaactgatcctgtct

SEQ ID NO: 2608423 - DNA, 25 bp, Homo sapien
tgattaatctctatccccgctgcca

SEQ ID NO: 2608424 - DNA, 25 bp, Homo sapien
taaactcttaacagatcttccggct

SEQ ID NO: 2608425 - DNA, 25 bp, Homo sapien
tggcatcattcgtagtaagttgaac

SEQ ID NO: 2608426 - DNA, 25 bp, Homo sapien
gaaaaactggatctgctgaagtcac

SEQ ID NO: 2608427 - DNA, 25 bp, Homo sapien
aagttgaactgcctttgaaattggc

SEQ ID NO: 2608428 - DNA, 25 bp, Homo sapien
tgaaatgtccaattctaccagcaga

SEQ ID NO: 2608429 - DNA, 25 bp, Homo sapien
tggactaagcacagaccaacccttg

SEQ ID NO: 2608430 - DNA, 25 bp, Homo sapien
ccttaatgtgcccttgcttttctga

SEQ ID NO: 2608431 - DNA, 25 bp, Homo sapien
taaacggttgagctaaatgactttg

SEQ ID NO: 2608432 - DNA, 25 bp, Homo sapien
gagcctctcacaatgacacaagctc

SEQ ID NO: 2608433 - DNA, 25 bp, Homo sapien
cactgttagggcagatcacgctgaa

SEQ ID NO: 2608434 - DNA, 25 bp, Homo sapien
ggcagatcacgctgaaggcatctcc

SEQ ID NO: 2608435 - DNA, 25 bp, Homo sapien
ctcagaatcactgttagggcagatc

SEQ ID NO: 2608436 - DNA, 25 bp, Homo sapien
ccaggctgataggaaaagtctgtat

SEQ ID NO: 2608437 - DNA, 25 bp, Homo sapien
ttattttcaaaaggacgcagtgctc

SEQ ID NO: 2608438 - DNA, 25 bp, Homo sapien
gcagtctttggagtaggctttgtac

SEQ ID NO: 2608439 - DNA, 25 bp, Homo sapien
tcttttatcttcaagctgcagtctt

SEQ ID NO: 2608440 - DNA, 25 bp, Homo sapien
aaggacgcagtgctctcttttatct

SEQ ID NO: 2608441 - DNA, 25 bp, Homo sapien
gaattgctcggatttcaagacacca

SEQ ID NO: 2608442 - DNA, 25 bp, Homo sapien
aactggagagaacatcccgcaggta

SEQ ID NO: 2608443 - DNA, 25 bp, Homo sapien
tttttaggaattgctcggatttcaa

SEQ ID NO: 2608444 - DNA, 25 bp, Homo sapien
gaacatcccgcaggtatatgctggg

SEQ ID NO: 2608445 - DNA, 25 bp, Homo sapien
tcactgtggaatgtgctacgtagtt

SEQ ID NO: 2608446 - DNA, 25 bp, Homo sapien
cactgtggaatgtgctacgtagtta

SEQ ID NO: 2608447 - DNA, 25 bp, Homo sapien
gtggaatgtgctacgtagttaataa

SEQ ID NO: 2608448 - DNA, 25 bp, Homo sapien
ctgtggaatgtgctacgtagttaat

SEQ ID NO: 2608449 - DNA, 25 bp, Homo sapien
tacatctcgagctgattaccaggaa

SEQ ID NO: 2608450 - DNA, 25 bp, Homo sapien
gacaatacaagtgtggcaaggcaca

SEQ ID NO: 2608451 - DNA, 25 bp, Homo sapien
tccgggagctggttagaagaaatca

SEQ ID NO: 2608452 - DNA, 25 bp, Homo sapien
gatggcggcctaattacaacactct

SEQ ID NO: 2608453 - DNA, 25 bp, Homo sapien
tctgcaaagactttggcaagataat

SEQ ID NO: 2608454 - DNA, 25 bp, Homo sapien
aaatactgcactgtttttggagaac

SEQ ID NO: 2608455 - DNA, 25 bp, Homo sapien
actttatggtactacaacaggaaat

SEQ ID NO: 2608456 - DNA, 25 bp, Homo sapien
acactgctgaatggacgccccaaat

SEQ ID NO: 2608457 - DNA, 25 bp, Homo sapien
aaagccactaggagctattgtcagg

SEQ ID NO: 2608458 - DNA, 25 bp, Homo sapien
taaatgtctgcctagggatgcaccc

SEQ ID NO: 2608459 - DNA, 25 bp, Homo sapien
ggagcccgccttaaattgtgacaca

SEQ ID NO: 2608460 - DNA, 25 bp, Homo sapien
ggatgcacccaattacccaagaaaa

SEQ ID NO: 2608461 - DNA, 25 bp, Homo sapien
ggtatagtccacaagggctcgcaaa

SEQ ID NO: 2608462 - DNA, 25 bp, Homo sapien
agtccacaagggctcgcaaaaatgc

SEQ ID NO: 2608463 - DNA, 25 bp, Homo sapien
cagcactgtcactggtatagtccac

SEQ ID NO: 2608464 - DNA, 25 bp, Homo sapien
tgtcactggtatagtccacaagggc

SEQ ID NO: 2608465 - DNA, 25 bp, Homo sapien
acaaagcggctataatcggctgccc

SEQ ID NO: 2608466 - DNA, 25 bp, Homo sapien
aggcacaggcatctcgtacaaagcg

SEQ ID NO: 2608467 - DNA, 25 bp, Homo sapien
aatcggctgccccttgtttactgca

SEQ ID NO: 2608468 - DNA, 25 bp, Homo sapien
caggcatctcgtacaaagcggctat

SEQ ID NO: 2608469 - DNA, 25 bp, Homo sapien
cctgacttgcaaagaagggtgcctt

SEQ ID NO: 2608470 - DNA, 25 bp, Homo sapien
ttgctggcccaagagtaaaaaggac

SEQ ID NO: 2608471 - DNA, 25 bp, Homo sapien
tactgggcatcgaaaaggatcttgc

SEQ ID NO: 2608472 - DNA, 25 bp, Homo sapien
gaggtcctaggacatcgactgctca

SEQ ID NO: 2608473 - DNA, 25 bp, Homo sapien
ctgctgatggttctcgaagacttca

SEQ ID NO: 2608474 - DNA, 25 bp, Homo sapien
tgtcatcctattcctgctgatggtt

SEQ ID NO: 2608475 - DNA, 25 bp, Homo sapien
gatggttctcgaagacttcactgaa

SEQ ID NO: 2608476 - DNA, 25 bp, Homo sapien
ttctgtcatcctattcctgctgatg

SEQ ID NO: 2608477 - DNA, 25 bp, Homo sapien
cacacgaatatggtctgggttgaag

SEQ ID NO: 2608478 - DNA, 25 bp, Homo sapien
cacgaatatggtctgggttgaagtt

SEQ ID NO: 2608479 - DNA, 25 bp, Homo sapien
aatatggtctgggttgaagtttagg

SEQ ID NO: 2608480 - DNA, 25 bp, Homo sapien
cttgcacacgaatatggtctgggtt

SEQ ID NO: 2608481 - DNA, 25 bp, Homo sapien
cgcccggactcatcaaatgttttat

SEQ ID NO: 2608482 - DNA, 25 bp, Homo sapien
ccacgcccggactcatcaaatgttt

SEQ ID NO: 2608483 - DNA, 25 bp, Homo sapien
cacgcccggactcatcaaatgtttt

SEQ ID NO: 2608484 - DNA, 25 bp, Homo sapien
accacgcccggactcatcaaatgtt

SEQ ID NO: 2608485 - DNA, 25 bp, Homo sapien
gaacctctgttgtggcagtagacag

SEQ ID NO: 2608486 - DNA, 25 bp, Homo sapien
cagaaattccacaatgttgaagaca

SEQ ID NO: 2608487 - DNA, 25 bp, Homo sapien
cccttccgcagaacctctgttgtgg

SEQ ID NO: 2608488 - DNA, 25 bp, Homo sapien
gacaaaatggagctttcctgggtga

SEQ ID NO: 2608489 - DNA, 25 bp, Homo sapien
catgggatgcatgtatgtttggctg

SEQ ID NO: 2608490 - DNA, 25 bp, Homo sapien
tcccgctgtcttcatgggatgcatg

SEQ ID NO: 2608491 - DNA, 25 bp, Homo sapien
agggctttcccgctgtcttcatggg

SEQ ID NO: 2608492 - DNA, 25 bp, Homo sapien
tatgtttggctgaagaactgaagca

SEQ ID NO: 2608493 - DNA, 25 bp, Homo sapien
taaactgttgcctacacacgtggtc

SEQ ID NO: 2608494 - DNA, 25 bp, Homo sapien
cattcttgtggacaactttaaactg

SEQ ID NO: 2608495 - DNA, 25 bp, Homo sapien
aaattctgctgagtgccgtatcaaa

SEQ ID NO: 2608496 - DNA, 25 bp, Homo sapien
cactgagtccaagtgtaaagtgtcc

SEQ ID NO: 2608497 - DNA, 25 bp, Homo sapien
gagcacatttgtcactacagaaaga

SEQ ID NO: 2608498 - DNA, 25 bp, Homo sapien
cagattttattgaaaccatgagcac

SEQ ID NO: 2608499 - DNA, 25 bp, Homo sapien
caataaagattagcatcacgatgag

SEQ ID NO: 2608500 - DNA, 25 bp, Homo sapien
tctggtgggcagacaatagcatata

SEQ ID NO: 2608501 - DNA, 25 bp, Homo sapien
gttcctggacccaccattatgatgg

SEQ ID NO: 2608502 - DNA, 25 bp, Homo sapien
ataaacggggctatgccggttcctg

SEQ ID NO: 2608503 - DNA, 25 bp, Homo sapien
aaagaatttgttgttcgaggagaga

SEQ ID NO: 2608504 - DNA, 25 bp, Homo sapien
ctatgttgtaggaacccaataaacg

SEQ ID NO: 2608505 - DNA, 25 bp, Homo sapien
aatccctatccttatgcctgcagcc

SEQ ID NO: 2608506 - DNA, 25 bp, Homo sapien
taatccctatccttatgcctgcagc

SEQ ID NO: 2608507 - DNA, 25 bp, Homo sapien
gtacaatactggaattgtacaatac

SEQ ID NO: 2608508 - DNA, 25 bp, Homo sapien
cagtggttgagtacaatactggaat

SEQ ID NO: 2608509 - DNA, 25 bp, Homo sapien
gaattagaattgtacactcagtggt

SEQ ID NO: 2608510 - DNA, 25 bp, Homo sapien
aatggatcactaaaaggttgtcaag

SEQ ID NO: 2608511 - DNA, 25 bp, Homo sapien
gagaaggaaacctttagatgagtta

SEQ ID NO: 2608512 - DNA, 25 bp, Homo sapien
gatgagttaagatcccatgcttaag

SEQ ID NO: 2608513 - DNA, 25 bp, Homo sapien
agttaagatcccatgcttaaggaaa

SEQ ID NO: 2608514 - DNA, 25 bp, Homo sapien
tagatgagttaagatcccatgctta

SEQ ID NO: 2608515 - DNA, 25 bp, Homo sapien
atgttgtcttgcacatactttgctg

SEQ ID NO: 2608516 - DNA, 25 bp, Homo sapien
tctcctggaggaggattctcgccac

SEQ ID NO: 2608517 - DNA, 25 bp, Homo sapien
gttgtcttgcacatactttgctggg

SEQ ID NO: 2608518 - DNA, 25 bp, Homo sapien
gaggaggattctcgccacctgctgg

SEQ ID NO: 2608519 - DNA, 25 bp, Homo sapien
tccatatgttctgggtcacgatgcc

SEQ ID NO: 2608520 - DNA, 25 bp, Homo sapien
tatcaccaagaattatgcctagcag

SEQ ID NO: 2608521 - DNA, 25 bp, Homo sapien
tgtatttgaccaccgatgacactgt

SEQ ID NO: 2608522 - DNA, 25 bp, Homo sapien
tgtaacagatcttgcctcagaaagt

SEQ ID NO: 2608523 - DNA, 25 bp, Homo sapien
tatcctgaaggtagcgtttttcttc

SEQ ID NO: 2608524 - DNA, 25 bp, Homo sapien
atatcctgaaggtagcgtttttctt

SEQ ID NO: 2608525 - DNA, 25 bp, Homo sapien
ttatttgcacaagggcatcatgtac

SEQ ID NO: 2608526 - DNA, 25 bp, Homo sapien
aagggcatcatgtacatccttggcc

SEQ ID NO: 2608527 - DNA, 25 bp, Homo sapien
aaggtttggcactagtaaagctgac

SEQ ID NO: 2608528 - DNA, 25 bp, Homo sapien
cagtcagtctccctatttcaggaag

SEQ ID NO: 2608529 - DNA, 25 bp, Homo sapien
gagctcaaggcaacagggcaatttg

SEQ ID NO: 2608530 - DNA, 25 bp, Homo sapien
tcaggaagcctttgcatggaaggac

SEQ ID NO: 2608531 - DNA, 25 bp, Homo sapien
aagtcagtattttaggtccagcaca

SEQ ID NO: 2608532 - DNA, 25 bp, Homo sapien
cactgcttgagtggtatcatggaga

SEQ ID NO: 2608533 - DNA, 25 bp, Homo sapien
gatagataaatcatatgccagagtg

SEQ ID NO: 2608534 - DNA, 25 bp, Homo sapien
taacagggaattagacactgggaat

SEQ ID NO: 2608535 - DNA, 25 bp, Homo sapien
tatcactagctcgtaagtctgcggg

SEQ ID NO: 2608536 - DNA, 25 bp, Homo sapien
gactttatctagcaaggccctaggg

SEQ ID NO: 2608537 - DNA, 25 bp, Homo sapien
tgtgacgcaccttgagtaaactctt

SEQ ID NO: 2608538 - DNA, 25 bp, Homo sapien
tagcaggttagaaaaggtccctcac

SEQ ID NO: 2608539 - DNA, 25 bp, Homo sapien
cttccttttgacaagtgcggcctga

SEQ ID NO: 2608540 - DNA, 25 bp, Homo sapien
taaagaaagtgactctctggttgtg

SEQ ID NO: 2608541 - DNA, 25 bp, Homo sapien
catgggaacacaacagttgataaac

SEQ ID NO: 2608542 - DNA, 25 bp, Homo sapien
ccatgtacattaggatctcttaaag

SEQ ID NO: 2608543 - DNA, 25 bp, Homo sapien
tgaaaatgggtcatgagctgggctc

SEQ ID NO: 2608544 - DNA, 25 bp, Homo sapien
tgagaattgaaaatgggtcatgagc

SEQ ID NO: 2608545 - DNA, 25 bp, Homo sapien
gaagatcgcttgagttcaacatagt

SEQ ID NO: 2608546 - DNA, 25 bp, Homo sapien
ttttcttttggaagatgagaattga

SEQ ID NO: 2608547 - DNA, 25 bp, Homo sapien
tcctgagtcctggatcttgctacag

SEQ ID NO: 2608548 - DNA, 25 bp, Homo sapien
ctcctgagtcctggatcttgctaca

SEQ ID NO: 2608549 - DNA, 25 bp, Homo sapien
cctgagtcctggatcttgctacaga

SEQ ID NO: 2608550 - DNA, 25 bp, Homo sapien
tgagtcctggatcttgctacagatt

SEQ ID NO: 2608551 - DNA, 25 bp, Homo sapien
aattgagttcattccagaggactag

SEQ ID NO: 2608552 - DNA, 25 bp, Homo sapien
gtaaatcttcatgctccattaaaat

SEQ ID NO: 2608553 - DNA, 25 bp, Homo sapien
tcatccaaggttgtagaatgcctct

SEQ ID NO: 2608554 - DNA, 25 bp, Homo sapien
gaatgcctctaatatgtaggtaaat

SEQ ID NO: 2608555 - DNA, 25 bp, Homo sapien
ctcccaccttttagcccagacaggg

SEQ ID NO: 2608556 - DNA, 25 bp, Homo sapien
ccagacagggtcaaccagagcatct

SEQ ID NO: 2608557 - DNA, 25 bp, Homo sapien
gttgacacataggtgagcactttca

SEQ ID NO: 2608558 - DNA, 25 bp, Homo sapien
tgttgctaacagtaagcccctcttc

SEQ ID NO: 2608559 - DNA, 25 bp, Homo sapien
tcactgagttcccaccaggcttggg

SEQ ID NO: 2608560 - DNA, 25 bp, Homo sapien
gtttgatgtcaaagggtcactcggc

SEQ ID NO: 2608561 - DNA, 25 bp, Homo sapien
aagagactttgtcctgccagcgcca

SEQ ID NO: 2608562 - DNA, 25 bp, Homo sapien
gtcaaagggtcactcggccactctt

SEQ ID NO: 2608563 - DNA, 25 bp, Homo sapien
tccctgtgctcgtgacccccgccac

SEQ ID NO: 2608564 - DNA, 25 bp, Homo sapien
ttccctgtgctcgtgacccccgcca

SEQ ID NO: 2608565 - DNA, 25 bp, Homo sapien
gctttgctgaaagtccccgcgtcca

SEQ ID NO: 2608566 - DNA, 25 bp, Homo sapien
gctgagccccacgtgatcatgtgga

SEQ ID NO: 2608567 - DNA, 25 bp, Homo sapien
taggtatagaccagcaggctgagcc

SEQ ID NO: 2608568 - DNA, 25 bp, Homo sapien
agacggagtggacgacagtcgcatt

SEQ ID NO: 2608569 - DNA, 25 bp, Homo sapien
gatagcgatacaatagttgtctcag

SEQ ID NO: 2608570 - DNA, 25 bp, Homo sapien
gagatctgaaggtgtaattgatagc

SEQ ID NO: 2608571 - DNA, 25 bp, Homo sapien
tctcaggctgccatctagaggcagg

SEQ ID NO: 2608572 - DNA, 25 bp, Homo sapien
gttgtctcaggctgccatctagagg

SEQ ID NO: 2608573 - DNA, 25 bp, Homo sapien
tcaatacatcattcctcaagaggat

SEQ ID NO: 2608574 - DNA, 25 bp, Homo sapien
gagagagggtgactataacccaact

SEQ ID NO: 2608575 - DNA, 25 bp, Homo sapien
gagggccttagtaaacacacatgga

SEQ ID NO: 2608576 - DNA, 25 bp, Homo sapien
gctcatatagctgtgcgtttgggca

SEQ ID NO: 2608577 - DNA, 25 bp, Homo sapien
tagaaaattccctgaaacgtggcag

SEQ ID NO: 2608578 - DNA, 25 bp, Homo sapien
cctgaggccacgtgcgatttaaagt

SEQ ID NO: 2608579 - DNA, 25 bp, Homo sapien
cactgtgtgggatatcctgaggcca

SEQ ID NO: 2608580 - DNA, 25 bp, Homo sapien
tagagtggcctctaatccagtacga

SEQ ID NO: 2608581 - DNA, 25 bp, Homo sapien
gataacaggtgagtttactgggctg

SEQ ID NO: 2608582 - DNA, 25 bp, Homo sapien
tatagatgatctgaccattgtccct

SEQ ID NO: 2608583 - DNA, 25 bp, Homo sapien
cacaccaaacgagtgctagggctgg

SEQ ID NO: 2608584 - DNA, 25 bp, Homo sapien
tacttccctatgaccaacactgaca

SEQ ID NO: 2608585 - DNA, 25 bp, Homo sapien
tttcatgcagttgcttgatgcaatc

SEQ ID NO: 2608586 - DNA, 25 bp, Homo sapien
ctttcatgcagttgcttgatgcaat

SEQ ID NO: 2608587 - DNA, 25 bp, Homo sapien
aatgacgggtcagcacatgtggagt

SEQ ID NO: 2608588 - DNA, 25 bp, Homo sapien
aagtgtaaatgcagttccctactgc

SEQ ID NO: 2608589 - DNA, 25 bp, Homo sapien
atcacatttgggaaaatgacgggtc

SEQ ID NO: 2608590 - DNA, 25 bp, Homo sapien
gttccctactgccacaattatgcag

SEQ ID NO: 2608591 - DNA, 25 bp, Homo sapien
gctctctcaacagctcgtgcatgtc

SEQ ID NO: 2608592 - DNA, 25 bp, Homo sapien
tgactctatcggtccatcaggtcca

SEQ ID NO: 2608593 - DNA, 25 bp, Homo sapien
tccaccacttcattgactctatcgg

SEQ ID NO: 2608594 - DNA, 25 bp, Homo sapien
ctctcaacagctcgtgcatgtctct

SEQ ID NO: 2608595 - DNA, 25 bp, Homo sapien
agcgtgttacacttattaggctctt

SEQ ID NO: 2608596 - DNA, 25 bp, Homo sapien
gcgtgttacacttattaggctcttc

SEQ ID NO: 2608597 - DNA, 25 bp, Homo sapien
cagcgtgttacacttattaggctct

SEQ ID NO: 2608598 - DNA, 25 bp, Homo sapien
ttcattaattatcaatgcagtaatt

SEQ ID NO: 2608599 - DNA, 25 bp, Homo sapien
tcaacagcgacattcttcattaatt

SEQ ID NO: 2608600 - DNA, 25 bp, Homo sapien
caacagcgacattcttcattaatta

SEQ ID NO: 2608601 - DNA, 25 bp, Homo sapien
attatcaatgcagtaatttcataaa

SEQ ID NO: 2608602 - DNA, 25 bp, Homo sapien
ctatccacccagtcgtgagtcatga

SEQ ID NO: 2608603 - DNA, 25 bp, Homo sapien
agcctaaaccagcagagcagaaccg

SEQ ID NO: 2608604 - DNA, 25 bp, Homo sapien
cacccagtcgtgagtcatgaccaac

SEQ ID NO: 2608605 - DNA, 25 bp, Homo sapien
cctgcccaggtaagacgaagcctaa

SEQ ID NO: 2608606 - DNA, 25 bp, Homo sapien
aattcctgctcgacttgcatcttag

SEQ ID NO: 2608607 - DNA, 25 bp, Homo sapien
tctcttcttggctgcggactgctga

SEQ ID NO: 2608608 - DNA, 25 bp, Homo sapien
acaaagtacccaagactgtgtggct

SEQ ID NO: 2608609 - DNA, 25 bp, Homo sapien
taagcatgccagcagggttaaattc

SEQ ID NO: 2608610 - DNA, 25 bp, Homo sapien
gaaacttataatcacagcaaaaggg

SEQ ID NO: 2608611 - DNA, 25 bp, Homo sapien
agttcaacatgacttgggaggcctc

SEQ ID NO: 2608612 - DNA, 25 bp, Homo sapien
ttcaacatgacttgggaggcctcag

SEQ ID NO: 2608613 - DNA, 25 bp, Homo sapien
aggaaacttataatcacagcaaaag

SEQ ID NO: 2608614 - DNA, 25 bp, Homo sapien
taatgacacggccagataataagtg

SEQ ID NO: 2608615 - DNA, 25 bp, Homo sapien
gataataagtgaggttagtaagcct

SEQ ID NO: 2608616 - DNA, 25 bp, Homo sapien
tgaggttagtaagccttacttcttc

SEQ ID NO: 2608617 - DNA, 25 bp, Homo sapien
tagagataatgacacggccagataa

SEQ ID NO: 2608618 - DNA, 25 bp, Homo sapien
caggtcctccctgagaacacagtca

SEQ ID NO: 2608619 - DNA, 25 bp, Homo sapien
gtttccaggtcctccctgagaacac

SEQ ID NO: 2608620 - DNA, 25 bp, Homo sapien
aggtcctccctgagaacacagtcaa

SEQ ID NO: 2608621 - DNA, 25 bp, Homo sapien
tccaggtcctccctgagaacacagt

SEQ ID NO: 2608622 - DNA, 25 bp, Homo sapien
tcttagcacagtcattccaaaacag

SEQ ID NO: 2608623 - DNA, 25 bp, Homo sapien
tccaaaacaggggtaattgctgcat

SEQ ID NO: 2608624 - DNA, 25 bp, Homo sapien
tttcttagcacagtcattccaaaac

SEQ ID NO: 2608625 - DNA, 25 bp, Homo sapien
ttagcacagtcattccaaaacaggg

SEQ ID NO: 2608626 - DNA, 25 bp, Homo sapien
tatccaacaggtgggatgttggcat

SEQ ID NO: 2608627 - DNA, 25 bp, Homo sapien
ttatccaacaggtgggatgttggca

SEQ ID NO: 2608628 - DNA, 25 bp, Homo sapien
cttatccaacaggtgggatgttggc

SEQ ID NO: 2608629 - DNA, 25 bp, Homo sapien
gggagccggacaaattcccatgatc

SEQ ID NO: 2608630 - DNA, 25 bp, Homo sapien
tggggagccggacaaattcccatga

SEQ ID NO: 2608631 - DNA, 25 bp, Homo sapien
ctctggggagccggacaaattccca

SEQ ID NO: 2608632 - DNA, 25 bp, Homo sapien
ggagccggacaaattcccatgatct

SEQ ID NO: 2608633 - DNA, 25 bp, Homo sapien
aagaatcacaggttgtgagtgatat

SEQ ID NO: 2608634 - DNA, 25 bp, Homo sapien
ttaaagaatcacaggttgtgagtga

SEQ ID NO: 2608635 - DNA, 25 bp, Homo sapien
taaagaatcacaggttgtgagtgat

SEQ ID NO: 2608636 - DNA, 25 bp, Homo sapien
gaatcacaggttgtgagtgatattg

SEQ ID NO: 2608637 - DNA, 25 bp, Homo sapien
gactgcaactctatgaaggctcctg

SEQ ID NO: 2608638 - DNA, 25 bp, Homo sapien
ttctgcctctgaggggcaaacagtc

SEQ ID NO: 2608639 - DNA, 25 bp, Homo sapien
atgactgcaactctatgaaggctcc

SEQ ID NO: 2608640 - DNA, 25 bp, Homo sapien
gcaactctatgaaggctcctgaccc

SEQ ID NO: 2608641 - DNA, 25 bp, Homo sapien
ggaagcaatggaatgcctcaaggag

SEQ ID NO: 2608642 - DNA, 25 bp, Homo sapien
aagcaatggaatgcctcaaggagag

SEQ ID NO: 2608643 - DNA, 25 bp, Homo sapien
ctgtgggggtaaagggaagcaatgg

SEQ ID NO: 2608644 - DNA, 25 bp, Homo sapien
tggaatgcctcaaggagaggagcac

SEQ ID NO: 2608645 - DNA, 25 bp, Homo sapien
caagtcgtgcaaggagaaggatgca

SEQ ID NO: 2608646 - DNA, 25 bp, Homo sapien
tccttttggaaggaccgtcagcacc

SEQ ID NO: 2608647 - DNA, 25 bp, Homo sapien
tgcagtgtctcccaaggcgcttttc

SEQ ID NO: 2608648 - DNA, 25 bp, Homo sapien
gacttagacaagtcgtgcaaggaga

SEQ ID NO: 2608649 - DNA, 25 bp, Homo sapien
gaacttgcagaatccacctggtgaa

SEQ ID NO: 2608650 - DNA, 25 bp, Homo sapien
gaatggccagaataagactcaaagt

SEQ ID NO: 2608651 - DNA, 25 bp, Homo sapien
tcactcctctatattgaatggccag

SEQ ID NO: 2608652 - DNA, 25 bp, Homo sapien
aagtcagggtcactgttggtacatg

SEQ ID NO: 2608653 - DNA, 25 bp, Homo sapien
ctgggactctgcatcagtagagaag

SEQ ID NO: 2608654 - DNA, 25 bp, Homo sapien
agagaagtaaatgggtagatgcctc

SEQ ID NO: 2608655 - DNA, 25 bp, Homo sapien
tctgcatcagtagagaagtaaatgg

SEQ ID NO: 2608656 - DNA, 25 bp, Homo sapien
gtaaatgggtagatgcctccttgga

SEQ ID NO: 2608657 - DNA, 25 bp, Homo sapien
atggtgagtgacgtcatccagggca

SEQ ID NO: 2608658 - DNA, 25 bp, Homo sapien
cggtcatggtgagtgacgtcatcca

SEQ ID NO: 2608659 - DNA, 25 bp, Homo sapien
ctgcggtcatggtgagtgacgtcat

SEQ ID NO: 2608660 - DNA, 25 bp, Homo sapien
tcatggtgagtgacgtcatccaggg

SEQ ID NO: 2608661 - DNA, 25 bp, Homo sapien
tcccgcggctcagcggatgctcgtg

SEQ ID NO: 2608662 - DNA, 25 bp, Homo sapien
gatttcatagcatttccaatagcaa

SEQ ID NO: 2608663 - DNA, 25 bp, Homo sapien
tgttggcgccggaattggcatccag

SEQ ID NO: 2608664 - DNA, 25 bp, Homo sapien
tgttgtacaaggtgcctataatatt

SEQ ID NO: 2608665 - DNA, 25 bp, Homo sapien
ctttggtccattctgtggcactctg

SEQ ID NO: 2608666 - DNA, 25 bp, Homo sapien
tccattctgtggcactctgcagtgg

SEQ ID NO: 2608667 - DNA, 25 bp, Homo sapien
ggtccattctgtggcactctgcagt

SEQ ID NO: 2608668 - DNA, 25 bp, Homo sapien
cattctgtggcactctgcagtggca

SEQ ID NO: 2608669 - DNA, 25 bp, Homo sapien
ttccaacaatgatgctcagctgagg

SEQ ID NO: 2608670 - DNA, 25 bp, Homo sapien
caagcaggggtggagacgattttat

SEQ ID NO: 2608671 - DNA, 25 bp, Homo sapien
caacattggttgagttattccaaca

SEQ ID NO: 2608672 - DNA, 25 bp, Homo sapien
gggtggagacgattttatcctccac

SEQ ID NO: 2608673 - DNA, 25 bp, Homo sapien
gtttgccaccctcgcgggaagagca

SEQ ID NO: 2608674 - DNA, 25 bp, Homo sapien
tcagtccctttacactttcagaacg

SEQ ID NO: 2608675 - DNA, 25 bp, Homo sapien
gaagctctaaccaggaggctcggct

SEQ ID NO: 2608676 - DNA, 25 bp, Homo sapien
aactgtttctgttttgccttgaaga

SEQ ID NO: 2608677 - DNA, 25 bp, Homo sapien
ctctctgctgcgctatttcctgctt

SEQ ID NO: 2608678 - DNA, 25 bp, Homo sapien
tctggcttgtaagatgctctctgct

SEQ ID NO: 2608679 - DNA, 25 bp, Homo sapien
ctctgctgcgctatttcctgcttgt

SEQ ID NO: 2608680 - DNA, 25 bp, Homo sapien
cctctggcttgtaagatgctctctg

SEQ ID NO: 2608681 - DNA, 25 bp, Homo sapien
ggaaggtgctgtttacttgattgat

SEQ ID NO: 2608682 - DNA, 25 bp, Homo sapien
gctggtcctgaacatctgacatgat

SEQ ID NO: 2608683 - DNA, 25 bp, Homo sapien
ctaagtgggtgtttgccattgacta

SEQ ID NO: 2608684 - DNA, 25 bp, Homo sapien
ctgccacatattcaaggaaggtgct

SEQ ID NO: 2608685 - DNA, 25 bp, Homo sapien
ctagagggaagtttgtgacacagca

SEQ ID NO: 2608686 - DNA, 25 bp, Homo sapien
ttatcaactctaccccagtaaagga

SEQ ID NO: 2608687 - DNA, 25 bp, Homo sapien
tgacacagcagacgggagcagtgat

SEQ ID NO: 2608688 - DNA, 25 bp, Homo sapien
gggccaagcttatgctcagagtcaa

SEQ ID NO: 2608689 - DNA, 25 bp, Homo sapien
gcacaaagggccaaggtatacctcc

SEQ ID NO: 2608690 - DNA, 25 bp, Homo sapien
ggaaacctgatattgagctctaact

SEQ ID NO: 2608691 - DNA, 25 bp, Homo sapien
tttggaacagctaaatgtcaaggcc

SEQ ID NO: 2608692 - DNA, 25 bp, Homo sapien
tattgtagtgggcacgacctcaggc

SEQ ID NO: 2608693 - DNA, 25 bp, Homo sapien
tcagagttgctactctctgctgcac

SEQ ID NO: 2608694 - DNA, 25 bp, Homo sapien
ccttttattgtcagagttgctactc

SEQ ID NO: 2608695 - DNA, 25 bp, Homo sapien
tactctctgctgcacatcaacttct

SEQ ID NO: 2608696 - DNA, 25 bp, Homo sapien
actctctgctgcacatcaacttctg

SEQ ID NO: 2608697 - DNA, 25 bp, Homo sapien
tttttgggtccctaagatgagcctg

SEQ ID NO: 2608698 - DNA, 25 bp, Homo sapien
tgggtccctaagatgagcctgtgcc

SEQ ID NO: 2608699 - DNA, 25 bp, Homo sapien
tttgggtccctaagatgagcctgtg

SEQ ID NO: 2608700 - DNA, 25 bp, Homo sapien
tccctaagatgagcctgtgccagat

SEQ ID NO: 2608701 - DNA, 25 bp, Homo sapien
caggtaatagcccttcttgtcattg

SEQ ID NO: 2608702 - DNA, 25 bp, Homo sapien
tggaaacctttcttagacttctgaa

SEQ ID NO: 2608703 - DNA, 25 bp, Homo sapien
agacttctgaaacttccgcaggtaa

SEQ ID NO: 2608704 - DNA, 25 bp, Homo sapien
cagaactgataggatggctgaagcc

SEQ ID NO: 2608705 - DNA, 25 bp, Homo sapien
gggaggatgtaaccaaccattctct

SEQ ID NO: 2608706 - DNA, 25 bp, Homo sapien
tttaactaagggacgaatatctaca

SEQ ID NO: 2608707 - DNA, 25 bp, Homo sapien
ctacaccatgaggtgtggtaagcac

SEQ ID NO: 2608708 - DNA, 25 bp, Homo sapien
tggtaagcaccactcggagggtgtc

SEQ ID NO: 2608709 - DNA, 25 bp, Homo sapien
caaaactataaggtccccagagtgt

SEQ ID NO: 2608710 - DNA, 25 bp, Homo sapien
tccttccaaggctcttgatccaaaa

SEQ ID NO: 2608711 - DNA, 25 bp, Homo sapien
ccagagtgttgagatgcacaagatg

SEQ ID NO: 2608712 - DNA, 25 bp, Homo sapien
atgcaggctgaatccccagaaccct

SEQ ID NO: 2608713 - DNA, 25 bp, Homo sapien
gtcatttgcctggtcacgtccactc

SEQ ID NO: 2608714 - DNA, 25 bp, Homo sapien
tgtggggatgcctgagtcctctggg

SEQ ID NO: 2608715 - DNA, 25 bp, Homo sapien
cttctgtcatttgcctggtcacgtc

SEQ ID NO: 2608716 - DNA, 25 bp, Homo sapien
tctgtcatttgcctggtcacgtcca

SEQ ID NO: 2608717 - DNA, 25 bp, Homo sapien
taaaaccaatttccgcagataccga

SEQ ID NO: 2608718 - DNA, 25 bp, Homo sapien
gaactcttgtatacagagtgccagc

SEQ ID NO: 2608719 - DNA, 25 bp, Homo sapien
gagtgccagcttttcctatatgcag

SEQ ID NO: 2608720 - DNA, 25 bp, Homo sapien
aagtcacagggaattgcacacagat

SEQ ID NO: 2608721 - DNA, 25 bp, Homo sapien
agcctacaagggacaagtgtgacgg

SEQ ID NO: 2608722 - DNA, 25 bp, Homo sapien
cttgccagacctgtccactgtaggt

SEQ ID NO: 2608723 - DNA, 25 bp, Homo sapien
ggtgcattggcttaacagaacagta

SEQ ID NO: 2608724 - DNA, 25 bp, Homo sapien
gaacagtatttgtccccttgccaga

SEQ ID NO: 2608725 - DNA, 25 bp, Homo sapien
tatgctgggttactagggcctctgc

SEQ ID NO: 2608726 - DNA, 25 bp, Homo sapien
tctgagcaaggaacactatgctggg

SEQ ID NO: 2608727 - DNA, 25 bp, Homo sapien
ctctgtgagaggattcggcccgtgc

SEQ ID NO: 2608728 - DNA, 25 bp, Homo sapien
tctacaaagagtgcatggatgcttc

SEQ ID NO: 2608729 - DNA, 25 bp, Homo sapien
attttccattatcacagtctgtcca

SEQ ID NO: 2608730 - DNA, 25 bp, Homo sapien
ttccattatcacagtctgtccacag

SEQ ID NO: 2608731 - DNA, 25 bp, Homo sapien
attatcacagtctgtccacagtatg

SEQ ID NO: 2608732 - DNA, 25 bp, Homo sapien
cattatcacagtctgtccacagtat

SEQ ID NO: 2608733 - DNA, 25 bp, Homo sapien
cttcgacattgtgctcagtgcaagg

SEQ ID NO: 2608734 - DNA, 25 bp, Homo sapien
atgtgagggtcaccagcatcacccc

SEQ ID NO: 2608735 - DNA, 25 bp, Homo sapien
tgcaaggcgggaaatgtgagggtca

SEQ ID NO: 2608736 - DNA, 25 bp, Homo sapien
tgtgctcagtgcaaggcgggaaatg

SEQ ID NO: 2608737 - DNA, 25 bp, Homo sapien
gaaaagaggttacatggcaataata

SEQ ID NO: 2608738 - DNA, 25 bp, Homo sapien
gagaaaagaggttacatggcaataa

SEQ ID NO: 2608739 - DNA, 25 bp, Homo sapien
taaattgaaaacatgggtctggctg

SEQ ID NO: 2608740 - DNA, 25 bp, Homo sapien
tgagaaaagaggttacatggcaata

SEQ ID NO: 2608741 - DNA, 25 bp, Homo sapien
ttatagaattgattgtagtcgttca

SEQ ID NO: 2608742 - DNA, 25 bp, Homo sapien
gattgtagtcgttcatctttgtcag

SEQ ID NO: 2608743 - DNA, 25 bp, Homo sapien
tagaattgattgtagtcgttcatct

SEQ ID NO: 2608744 - DNA, 25 bp, Homo sapien
aattgattgtagtcgttcatctttg

SEQ ID NO: 2608745 - DNA, 25 bp, Homo sapien
gctgtcttcagatggtaattattct

SEQ ID NO: 2608746 - DNA, 25 bp, Homo sapien
cctgggagctgtcttcagatggtaa

SEQ ID NO: 2608747 - DNA, 25 bp, Homo sapien
catggatcatcctgggagctgtctt

SEQ ID NO: 2608748 - DNA, 25 bp, Homo sapien
tcagatggtaattattctcagctga

SEQ ID NO: 2608749 - DNA, 25 bp, Homo sapien
gaagcaaattttgtgtcagctcctc

SEQ ID NO: 2608750 - DNA, 25 bp, Homo sapien
gcaaattttgtgtcagctcctccag

SEQ ID NO: 2608751 - DNA, 25 bp, Homo sapien
agcaaattttgtgtcagctcctcca

SEQ ID NO: 2608752 - DNA, 25 bp, Homo sapien
ccagaagcaaattttgtgtcagctc

SEQ ID NO: 2608753 - DNA, 25 bp, Homo sapien
tgtatctttcacctgaagttcccgg

SEQ ID NO: 2608754 - DNA, 25 bp, Homo sapien
gaagataaggagctaacccagtggg

SEQ ID NO: 2608755 - DNA, 25 bp, Homo sapien
taaacagagaatggagcaccaggtg

SEQ ID NO: 2608756 - DNA, 25 bp, Homo sapien
gaagccgagctcagtaaggtacaga

SEQ ID NO: 2608757 - DNA, 25 bp, Homo sapien
ggacagacggcacaagcccctggga

SEQ ID NO: 2608758 - DNA, 25 bp, Homo sapien
ctgggaagcacccagccttctctgc

SEQ ID NO: 2608759 - DNA, 25 bp, Homo sapien
gggaagcacccagccttctctgcac

SEQ ID NO: 2608760 - DNA, 25 bp, Homo sapien
ctggacagacggcacaagcccctgg

SEQ ID NO: 2608761 - DNA, 25 bp, Homo sapien
tatgggcaagatccaatggccacac

SEQ ID NO: 2608762 - DNA, 25 bp, Homo sapien
caatggccacacttggatgagaggg

SEQ ID NO: 2608763 - DNA, 25 bp, Homo sapien
gctggaccactaggggtgctcttca

SEQ ID NO: 2608764 - DNA, 25 bp, Homo sapien
ttctttccacataatatgggcaaga

SEQ ID NO: 2608765 - DNA, 25 bp, Homo sapien
ctgctgtggacttcattatactggg

SEQ ID NO: 2608766 - DNA, 25 bp, Homo sapien
cccgagcaacgggtaagtcacaaag

SEQ ID NO: 2608767 - DNA, 25 bp, Homo sapien
tgtggacttcattatactgggtttc

SEQ ID NO: 2608768 - DNA, 25 bp, Homo sapien
gcaacgggtaagtcacaaagctgct

SEQ ID NO: 2608769 - DNA, 25 bp, Homo sapien
gagcttgcgcagtactggctcagaa

SEQ ID NO: 2608770 - DNA, 25 bp, Homo sapien
ggaactcaccctgagcactgcagag

SEQ ID NO: 2608771 - DNA, 25 bp, Homo sapien
tataggtttccctaagctcccagcc

SEQ ID NO: 2608772 - DNA, 25 bp, Homo sapien
tttagtgccagctgagctaacagga

SEQ ID NO: 2608773 - DNA, 25 bp, Homo sapien
tcaggccggccaggtgcttcactgc

SEQ ID NO: 2608774 - DNA, 25 bp, Homo sapien
cggccaggtgcttcactgcctgtct

SEQ ID NO: 2608775 - DNA, 25 bp, Homo sapien
gtgtcaggccggccaggtgcttcac

SEQ ID NO: 2608776 - DNA, 25 bp, Homo sapien
ggccaggtgcttcactgcctgtctt

SEQ ID NO: 2608777 - DNA, 25 bp, Homo sapien
cctgcttggcccacatgcaaataca

SEQ ID NO: 2608778 - DNA, 25 bp, Homo sapien
gggaaaatcgctccagcctgccatt

SEQ ID NO: 2608779 - DNA, 25 bp, Homo sapien
caggagattccagtagtagtaagtt

SEQ ID NO: 2608780 - DNA, 25 bp, Homo sapien
tacagctcagatgttcagcagacct

SEQ ID NO: 2608781 - DNA, 25 bp, Homo sapien
gccaaaatacagctctctggaagcc

SEQ ID NO: 2608782 - DNA, 25 bp, Homo sapien
ttttcccttagaagcgaagtgaaca

SEQ ID NO: 2608783 - DNA, 25 bp, Homo sapien
caatctggctacttaggtctgtgag

SEQ ID NO: 2608784 - DNA, 25 bp, Homo sapien
ccgcagttgccccagatgacacttt

SEQ ID NO: 2608785 - DNA, 25 bp, Homo sapien
ctcaagctaacgcagccgcagttgc

SEQ ID NO: 2608786 - DNA, 25 bp, Homo sapien
tcccttgggctgagtatcatcatcc

SEQ ID NO: 2608787 - DNA, 25 bp, Homo sapien
ccttgggctgagtatcatcatcccc

SEQ ID NO: 2608788 - DNA, 25 bp, Homo sapien
cacccgggttgggctaggccaggag

SEQ ID NO: 2608789 - DNA, 25 bp, Homo sapien
gttgggctaggccaggagagacctg

SEQ ID NO: 2608790 - DNA, 25 bp, Homo sapien
ggctacctatagcagagaacaggct

SEQ ID NO: 2608791 - DNA, 25 bp, Homo sapien
catatccccaggatgcagacagagg

SEQ ID NO: 2608792 - DNA, 25 bp, Homo sapien
aggatgctcaagagattcccaagaa

SEQ ID NO: 2608793 - DNA, 25 bp, Homo sapien
atcagggagtcaccgagaacatcac

SEQ ID NO: 2608794 - DNA, 25 bp, Homo sapien
ggtgctgactgcagcacttgagaaa

SEQ ID NO: 2608795 - DNA, 25 bp, Homo sapien
cagcacttgagaaagagcagcattt

SEQ ID NO: 2608796 - DNA, 25 bp, Homo sapien
agagtttcggtagagtccatgcact

SEQ ID NO: 2608797 - DNA, 25 bp, Homo sapien
ttcggtagagtccatgcactgcctt

SEQ ID NO: 2608798 - DNA, 25 bp, Homo sapien
agcaatgttttaaaaaggcagttgg

SEQ ID NO: 2608799 - DNA, 25 bp, Homo sapien
tgaagcaatgttttaaaaaggcagt

SEQ ID NO: 2608800 - DNA, 25 bp, Homo sapien
tcaggtgaagcaatgttttaaaaag

SEQ ID NO: 2608801 - DNA, 25 bp, Homo sapien
ggtgaagcaatgttttaaaaaggca

SEQ ID NO: 2608802 - DNA, 25 bp, Homo sapien
gtttagggaagacctcaagttgcgc

SEQ ID NO: 2608803 - DNA, 25 bp, Homo sapien
tcaagttgcgctcggcaaatagggt

SEQ ID NO: 2608804 - DNA, 25 bp, Homo sapien
caaatagggtgatgatacagcccca

SEQ ID NO: 2608805 - DNA, 25 bp, Homo sapien
cgctcggcaaatagggtgatgatac

SEQ ID NO: 2608806 - DNA, 25 bp, Homo sapien
ttcagttccagctcgtaaatctagg

SEQ ID NO: 2608807 - DNA, 25 bp, Homo sapien
cacagcggctttgcggaattacatc

SEQ ID NO: 2608808 - DNA, 25 bp, Homo sapien
tgttactgagctttgcacagcggct

SEQ ID NO: 2608809 - DNA, 25 bp, Homo sapien
ttgaaatctcctgtactccgaagag

SEQ ID NO: 2608810 - DNA, 25 bp, Homo sapien
tgcaggctgtgaaacttcgtattct

SEQ ID NO: 2608811 - DNA, 25 bp, Homo sapien
tttccaactgccttttgcttagcct

SEQ ID NO: 2608812 - DNA, 25 bp, Homo sapien
caaatcattttgatggccgttttcc

SEQ ID NO: 2608813 - DNA, 25 bp, Homo sapien
ccaatatggccactttgcaggctgt

SEQ ID NO: 2608814 - DNA, 25 bp, Homo sapien
caggagccacctgacatagcagctt

SEQ ID NO: 2608815 - DNA, 25 bp, Homo sapien
catagcagctttggtgaagtggccc

SEQ ID NO: 2608816 - DNA, 25 bp, Homo sapien
cagctttggtgaagtggcccagttt

SEQ ID NO: 2608817 - DNA, 25 bp, Homo sapien
ccacctgacatagcagctttggtga

SEQ ID NO: 2608818 - DNA, 25 bp, Homo sapien
gcccaacaatatagtttcactaaga

SEQ ID NO: 2608819 - DNA, 25 bp, Homo sapien
tgctttaagcccaacaatatagttt

SEQ ID NO: 2608820 - DNA, 25 bp, Homo sapien
gggctttaggtgaggcaatgttcac

SEQ ID NO: 2608821 - DNA, 25 bp, Homo sapien
gatgccctattacactgctttaagc

SEQ ID NO: 2608822 - DNA, 25 bp, Homo sapien
cacagagacatgcagagaaatttct

SEQ ID NO: 2608823 - DNA, 25 bp, Homo sapien
ctacaccccagtttgcaccttaggt

SEQ ID NO: 2608824 - DNA, 25 bp, Homo sapien
tttgcaccttaggtgcacctgatgc

SEQ ID NO: 2608825 - DNA, 25 bp, Homo sapien
gcacagagacatgcagagaaatttc

SEQ ID NO: 2608826 - DNA, 25 bp, Homo sapien
cttttccaagcccatgtagagttgg

SEQ ID NO: 2608827 - DNA, 25 bp, Homo sapien
cacggtaaaagtggtccatggtctc

SEQ ID NO: 2608828 - DNA, 25 bp, Homo sapien
gaagtgcaagcaaaccacggtaaaa

SEQ ID NO: 2608829 - DNA, 25 bp, Homo sapien
taggtgatctggcagagatagaagt

SEQ ID NO: 2608830 - DNA, 25 bp, Homo sapien
agaaaacgtatgaaggcttctttgt

SEQ ID NO: 2608831 - DNA, 25 bp, Homo sapien
ggagctactttataggcagcagaag

SEQ ID NO: 2608832 - DNA, 25 bp, Homo sapien
cagcagaaggcttgacctgtactgg

SEQ ID NO: 2608833 - DNA, 25 bp, Homo sapien
tgtactggttttggacctgattccc

SEQ ID NO: 2608834 - DNA, 25 bp, Homo sapien
gagaaagaggagctactttataggc

SEQ ID NO: 2608835 - DNA, 25 bp, Homo sapien
tttgatgaatgaatatttaataagc

SEQ ID NO: 2608836 - DNA, 25 bp, Homo sapien
atcttgacaggactttgagtagaga

SEQ ID NO: 2608837 - DNA, 25 bp, Homo sapien
aacatgttgcttttccttagcgtcg

SEQ ID NO: 2608838 - DNA, 25 bp, Homo sapien
gactttgagtagagaaccacaggga

SEQ ID NO: 2608839 - DNA, 25 bp, Homo sapien
gaaaacatgttgcttttccttagcg

SEQ ID NO: 2608840 - DNA, 25 bp, Homo sapien
ctgtttctgctcgggaaggtccttc

SEQ ID NO: 2608841 - DNA, 25 bp, Homo sapien
cccctgaaccgagccagtctcccct

SEQ ID NO: 2608842 - DNA, 25 bp, Homo sapien
agtcctggtgcttccaagacccctg

SEQ ID NO: 2608843 - DNA, 25 bp, Homo sapien
tttctgctcgggaaggtccttcctg

SEQ ID NO: 2608844 - DNA, 25 bp, Homo sapien
gtaatcagaattctattgatcttag

SEQ ID NO: 2608845 - DNA, 25 bp, Homo sapien
gtatggcagcaacttaatcttttga

SEQ ID NO: 2608846 - DNA, 25 bp, Homo sapien
tgatcttagacaatgcagcatgtgt

SEQ ID NO: 2608847 - DNA, 25 bp, Homo sapien
tgtgtgtgtgaagtatggcagcaac

SEQ ID NO: 2608848 - DNA, 25 bp, Homo sapien
tactaatgagaatggagattcggtt

SEQ ID NO: 2608849 - DNA, 25 bp, Homo sapien
ccaaaataatcatttgttctgtgcg

SEQ ID NO: 2608850 - DNA, 25 bp, Homo sapien
ggagattcggttgttcataattctg

SEQ ID NO: 2608851 - DNA, 25 bp, Homo sapien
tgcgtactaccactttccgaggcga

SEQ ID NO: 2608852 - DNA, 25 bp, Homo sapien
gaaactacagtgtaagctcagccga

SEQ ID NO: 2608853 - DNA, 25 bp, Homo sapien
ggttctgctggttcctatgtccagg

SEQ ID NO: 2608854 - DNA, 25 bp, Homo sapien
gaagaagcaattcggtggccctgtg

SEQ ID NO: 2608855 - DNA, 25 bp, Homo sapien
tttgggtgaattggaaaatgactcc

SEQ ID NO: 2608856 - DNA, 25 bp, Homo sapien
tggggttcaaccctagagcaggttg

SEQ ID NO: 2608857 - DNA, 25 bp, Homo sapien
caggccactcctgagcaaggaaagg

SEQ ID NO: 2608858 - DNA, 25 bp, Homo sapien
cccacagggcggtactcagggaggt

SEQ ID NO: 2608859 - DNA, 25 bp, Homo sapien
tcttgattggggttcaaccctagag

SEQ ID NO: 2608860 - DNA, 25 bp, Homo sapien
aggagcatgagtccatagaggaggg

SEQ ID NO: 2608861 - DNA, 25 bp, Homo sapien
gggctgggctccactcaggatgcca

SEQ ID NO: 2608862 - DNA, 25 bp, Homo sapien
tccactcaggatgccagatccaagg

SEQ ID NO: 2608863 - DNA, 25 bp, Homo sapien
tgccagatccaaggagcatgagtcc

SEQ ID NO: 2608864 - DNA, 25 bp, Homo sapien
tagatgggtcacattcaagagtgtg

SEQ ID NO: 2608865 - DNA, 25 bp, Homo sapien
tgctttagaaggagagtggcctctc

SEQ ID NO: 2608866 - DNA, 25 bp, Homo sapien
caaaatgaagaaggaggcgtgcctg

SEQ ID NO: 2608867 - DNA, 25 bp, Homo sapien
gagtctggatctccgtgggtcagca

SEQ ID NO: 2608868 - DNA, 25 bp, Homo sapien
acactggcgtccatctgaaggccca

SEQ ID NO: 2608869 - DNA, 25 bp, Homo sapien
ggcgtcatctcctgcattgctcaag

SEQ ID NO: 2608870 - DNA, 25 bp, Homo sapien
ccagtgcaggagtttgtgcattcca

SEQ ID NO: 2608871 - DNA, 25 bp, Homo sapien
tgaaggcccaggaggacggcatctt

SEQ ID NO: 2608872 - DNA, 25 bp, Homo sapien
actgggctctgaggacaaactgtcc

SEQ ID NO: 2608873 - DNA, 25 bp, Homo sapien
ctggtgactgggctctgaggacaaa

SEQ ID NO: 2608874 - DNA, 25 bp, Homo sapien
gtgactgggctctgaggacaaactg

SEQ ID NO: 2608875 - DNA, 25 bp, Homo sapien
tgggctctgaggacaaactgtccac

SEQ ID NO: 2608876 - DNA, 25 bp, Homo sapien
tgctctccttgcacagagagattcg

SEQ ID NO: 2608877 - DNA, 25 bp, Homo sapien
catgtgcagtcttggtaaaaagcca

SEQ ID NO: 2608878 - DNA, 25 bp, Homo sapien
agattcgggccccaaccctgtgaag

SEQ ID NO: 2608879 - DNA, 25 bp, Homo sapien
gccccaaccctgtgaagcggatgca

SEQ ID NO: 2608880 - DNA, 25 bp, Homo sapien
tttgggcaacagagaaatggtttca

SEQ ID NO: 2608881 - DNA, 25 bp, Homo sapien
ctgagtttgggcaacagagaaatgg

SEQ ID NO: 2608882 - DNA, 25 bp, Homo sapien
gtttgggcaacagagaaatggtttc

SEQ ID NO: 2608883 - DNA, 25 bp, Homo sapien
gagtttgggcaacagagaaatggtt

SEQ ID NO: 2608884 - DNA, 25 bp, Homo sapien
gggctgcctcgtcccacaacttcag

SEQ ID NO: 2608885 - DNA, 25 bp, Homo sapien
tccatgtgccttgcacagcctgtgc

SEQ ID NO: 2608886 - DNA, 25 bp, Homo sapien
gtcccacaacttcaggggagccatt

SEQ ID NO: 2608887 - DNA, 25 bp, Homo sapien
gcctgtgcggccacaatcggcagca

SEQ ID NO: 2608888 - DNA, 25 bp, Homo sapien
tctaattctgccaataaaatcctct

SEQ ID NO: 2608889 - DNA, 25 bp, Homo sapien
taattctgccaataaaatcctcttt

SEQ ID NO: 2608890 - DNA, 25 bp, Homo sapien
tgtgggtttctcaggagtagctgtt

SEQ ID NO: 2608891 - DNA, 25 bp, Homo sapien
cttgtgggtttctcaggagtagctg

SEQ ID NO: 2608892 - DNA, 25 bp, Homo sapien
cctctgctttgggtaacgattatta

SEQ ID NO: 2608893 - DNA, 25 bp, Homo sapien
tctgctttgggtaacgattattacc

SEQ ID NO: 2608894 - DNA, 25 bp, Homo sapien
tctgaacgctcttcctacccattgt

SEQ ID NO: 2608895 - DNA, 25 bp, Homo sapien
tttgatgtctactctgaacgctctt

SEQ ID NO: 2608896 - DNA, 25 bp, Homo sapien
tccaactacagccagactcacttcc

SEQ ID NO: 2608897 - DNA, 25 bp, Homo sapien
gaagggtccaatcacgctgttctcc

SEQ ID NO: 2608898 - DNA, 25 bp, Homo sapien
aagggtccaatcacgctgttctcca

SEQ ID NO: 2608899 - DNA, 25 bp, Homo sapien
ctgttctccaactacagccagactc

SEQ ID NO: 2608900 - DNA, 25 bp, Homo sapien
gccattgatattgtgcagagcagag

SEQ ID NO: 2608901 - DNA, 25 bp, Homo sapien
aagtgggagttctgccctcatccga

SEQ ID NO: 2608902 - DNA, 25 bp, Homo sapien
gagcctggacattaatctgatgaag

SEQ ID NO: 2608903 - DNA, 25 bp, Homo sapien
acaccgtccgtttggccacaagtgg

SEQ ID NO: 2608904 - DNA, 25 bp, Homo sapien
tcatgtcacagctttgtgcctcttt

SEQ ID NO: 2608905 - DNA, 25 bp, Homo sapien
cccctggagattaggctgtggttgt

SEQ ID NO: 2608906 - DNA, 25 bp, Homo sapien
tcagtatctcatgtcacagctttgt

SEQ ID NO: 2608907 - DNA, 25 bp, Homo sapien
agattaggctgtggttgttgatgtt

SEQ ID NO: 2608908 - DNA, 25 bp, Homo sapien
tataccagcaggcaacgaataacaa

SEQ ID NO: 2608909 - DNA, 25 bp, Homo sapien
gcaggcaacgaataacaataatttc

SEQ ID NO: 2608910 - DNA, 25 bp, Homo sapien
ccagcaggcaacgaataacaataat

SEQ ID NO: 2608911 - DNA, 25 bp, Homo sapien
taccagcaggcaacgaataacaata

SEQ ID NO: 2608912 - DNA, 25 bp, Homo sapien
tcttccccaaataggtaggcatcaa

SEQ ID NO: 2608913 - DNA, 25 bp, Homo sapien
aaataggtaggcatcaagacttaag

SEQ ID NO: 2608914 - DNA, 25 bp, Homo sapien
tcaagacttaagcaatgaaatggat

SEQ ID NO: 2608915 - DNA, 25 bp, Homo sapien
ggtaggcatcaagacttaagcaatg

SEQ ID NO: 2608916 - DNA, 25 bp, Homo sapien
ttaagtgtagacacattcaaatcac

SEQ ID NO: 2608917 - DNA, 25 bp, Homo sapien
cttaagtgtagacacattcaaatca

SEQ ID NO: 2608918 - DNA, 25 bp, Homo sapien
ttcttatgttcatcatatgacattg

SEQ ID NO: 2608919 - DNA, 25 bp, Homo sapien
tcttatgttcatcatatgacattgt

SEQ ID NO: 2608920 - DNA, 25 bp, Homo sapien
tatgttcatcatatgacattgtctc

SEQ ID NO: 2608921 - DNA, 25 bp, Homo sapien
cttatgttcatcatatgacattgtc

SEQ ID NO: 2608922 - DNA, 25 bp, Homo sapien
gaggccccagtagcagatcagtttg

SEQ ID NO: 2608923 - DNA, 25 bp, Homo sapien
tactaaggtccagtagcacaccagg

SEQ ID NO: 2608924 - DNA, 25 bp, Homo sapien
tggatctgctaggtcatgaggcccc

SEQ ID NO: 2608925 - DNA, 25 bp, Homo sapien
gatcagtttgtatgacagcccagac

SEQ ID NO: 2608926 - DNA, 25 bp, Homo sapien
catggatagaaaaggctctgaagtt

SEQ ID NO: 2608927 - DNA, 25 bp, Homo sapien
aaaattgagtctgggtcgtttcatc

SEQ ID NO: 2608928 - DNA, 25 bp, Homo sapien
ttgagtctgggtcgtttcatcatca

SEQ ID NO: 2608929 - DNA, 25 bp, Homo sapien
ggaaaattgagtctgggtcgtttca

SEQ ID NO: 2608930 - DNA, 25 bp, Homo sapien
acgcgcccacgaccaaagtgcgcat

SEQ ID NO: 2608931 - DNA, 25 bp, Homo sapien
aggacgcccatggacagcgcgacct

SEQ ID NO: 2608932 - DNA, 25 bp, Homo sapien
atggacagcgcgacctcctcccatt

SEQ ID NO: 2608933 - DNA, 25 bp, Homo sapien
ctgggtggcgcaggccaaggacgcc

SEQ ID NO: 2608934 - DNA, 25 bp, Homo sapien
ccatgggtgccattgacgtctttgg

SEQ ID NO: 2608935 - DNA, 25 bp, Homo sapien
actatgcttactatgtccatgggtg

SEQ ID NO: 2608936 - DNA, 25 bp, Homo sapien
tgatcaaatgttccgaagacactgc

SEQ ID NO: 2608937 - DNA, 25 bp, Homo sapien
gctcaaaatagttgacattgtcatt

SEQ ID NO: 2608938 - DNA, 25 bp, Homo sapien
tgttgagtgtttacccacccccatc

SEQ ID NO: 2608939 - DNA, 25 bp, Homo sapien
caaatatgctctctaggaaatgtga

SEQ ID NO: 2608940 - DNA, 25 bp, Homo sapien
tatgctctctaggaaatgtgaaagt

SEQ ID NO: 2608941 - DNA, 25 bp, Homo sapien
atccacacaaatatgctctctagga

SEQ ID NO: 2608942 - DNA, 25 bp, Homo sapien
ccccagggaggtgccgacgggatgt

SEQ ID NO: 2608943 - DNA, 25 bp, Homo sapien
cctgtgaagttctccagggtgtaaa

SEQ ID NO: 2608944 - DNA, 25 bp, Homo sapien
tctccagggtgtaaagaaggcccca

SEQ ID NO: 2608945 - DNA, 25 bp, Homo sapien
ccgacgggatgtgagggctgccttt

SEQ ID NO: 2608946 - DNA, 25 bp, Homo sapien
cagggaagtcgtctctgacacaggg

SEQ ID NO: 2608947 - DNA, 25 bp, Homo sapien
ttttggcagagtaagtccgcaggac

SEQ ID NO: 2608948 - DNA, 25 bp, Homo sapien
taagatggccatgctgtcaccgcat

SEQ ID NO: 2608949 - DNA, 25 bp, Homo sapien
gaaaaatcgcaaacagaactggcag

SEQ ID NO: 2608950 - DNA, 25 bp, Homo sapien
ctgggactacattacacgcctggct

SEQ ID NO: 2608951 - DNA, 25 bp, Homo sapien
tgtaatagactcagttgcccataag

SEQ ID NO: 2608952 - DNA, 25 bp, Homo sapien
gagtttcctaactggccattcgtct

SEQ ID NO: 2608953 - DNA, 25 bp, Homo sapien
gccacgttgcttaggttagactcaa

SEQ ID NO: 2608954 - DNA, 25 bp, Homo sapien
catgacgcttgttttcagaggacag

SEQ ID NO: 2608955 - DNA, 25 bp, Homo sapien
aagcaagcgtatatgtgaatccgga

SEQ ID NO: 2608956 - DNA, 25 bp, Homo sapien
tttttcacagacacatgacgcttgt

SEQ ID NO: 2608957 - DNA, 25 bp, Homo sapien
ccggaatgaacaccactcaatttta

SEQ ID NO: 2608958 - DNA, 25 bp, Homo sapien
gcagcgcacactggttctcctgtct

SEQ ID NO: 2608959 - DNA, 25 bp, Homo sapien
tctgcccctggaatgagaagttcgt

SEQ ID NO: 2608960 - DNA, 25 bp, Homo sapien
tgagaagttcgtgccatacagaggc

SEQ ID NO: 2608961 - DNA, 25 bp, Homo sapien
ggcagcacctctattgtcaggaata

SEQ ID NO: 2608962 - DNA, 25 bp, Homo sapien
gttgggcaagaccttggaactgtcc

SEQ ID NO: 2608963 - DNA, 25 bp, Homo sapien
agttgggcaagaccttggaactgtc

SEQ ID NO: 2608964 - DNA, 25 bp, Homo sapien
tccatatgcctcaggcagcgatgac

SEQ ID NO: 2608965 - DNA, 25 bp, Homo sapien
atgcctcaggcagcgatgaccccaa

SEQ ID NO: 2608966 - DNA, 25 bp, Homo sapien
caatccatatgcctcaggcagcgat

SEQ ID NO: 2608967 - DNA, 25 bp, Homo sapien
atatgcctcaggcagcgatgacccc

SEQ ID NO: 2608968 - DNA, 25 bp, Homo sapien
ttcgttcaccctgactctcctcact

SEQ ID NO: 2608969 - DNA, 25 bp, Homo sapien
ctttgctctctttttcggctttcct

SEQ ID NO: 2608970 - DNA, 25 bp, Homo sapien
cagtcttttcgttcaccctgactct

SEQ ID NO: 2608971 - DNA, 25 bp, Homo sapien
ttgctctctttttcggctttcctca

SEQ ID NO: 2608972 - DNA, 25 bp, Homo sapien
acaggttagctgtgttacaaacata

SEQ ID NO: 2608973 - DNA, 25 bp, Homo sapien
ctgagagaagatcagcattccattt

SEQ ID NO: 2608974 - DNA, 25 bp, Homo sapien
catttacacaggttagctgtgttac

SEQ ID NO: 2608975 - DNA, 25 bp, Homo sapien
cattccatttacacaggttagctgt

SEQ ID NO: 2608976 - DNA, 25 bp, Homo sapien
atgtgagttcacagccgaggtgcta

SEQ ID NO: 2608977 - DNA, 25 bp, Homo sapien
ggtgctatcgtgatgaacctggact

SEQ ID NO: 2608978 - DNA, 25 bp, Homo sapien
cagccgaggtgctatcgtgatgaac

SEQ ID NO: 2608979 - DNA, 25 bp, Homo sapien
tcgtgatgaacctggactttctcca

SEQ ID NO: 2608980 - DNA, 25 bp, Homo sapien
tccttatgggttatgatagctaaca

SEQ ID NO: 2608981 - DNA, 25 bp, Homo sapien
cagcctaggtcatagccttttaata

SEQ ID NO: 2608982 - DNA, 25 bp, Homo sapien
atatttccttatgggttatgatagc

SEQ ID NO: 2608983 - DNA, 25 bp, Homo sapien
tcagcctaggtcatagccttttaat

SEQ ID NO: 2608984 - DNA, 25 bp, Homo sapien
ggtcagattagacttggcaagatca

SEQ ID NO: 2608985 - DNA, 25 bp, Homo sapien
cttgtgtacgatgcaaagctgtcaa

SEQ ID NO: 2608986 - DNA, 25 bp, Homo sapien
gtccccagtcacttgtgtacgatgc

SEQ ID NO: 2608987 - DNA, 25 bp, Homo sapien
tcatctctggattcagaggagaggt

SEQ ID NO: 2608988 - DNA, 25 bp, Homo sapien
tatctgcaggattcttccaagtggc

SEQ ID NO: 2608989 - DNA, 25 bp, Homo sapien
ctatctgcaggattcttccaagtgg

SEQ ID NO: 2608990 - DNA, 25 bp, Homo sapien
tgcaggattcttccaagtggctcac

SEQ ID NO: 2608991 - DNA, 25 bp, Homo sapien
tctgcaggattcttccaagtggctc

SEQ ID NO: 2608992 - DNA, 25 bp, Homo sapien
tgcgccaccctcacagcacgcagat

SEQ ID NO: 2608993 - DNA, 25 bp, Homo sapien
aggatataagtaatcagccagatga

SEQ ID NO: 2608994 - DNA, 25 bp, Homo sapien
aagagatacataggtgtgaggtctg

SEQ ID NO: 2608995 - DNA, 25 bp, Homo sapien
gtctggaagggtcctaaatgcagga

SEQ ID NO: 2608996 - DNA, 25 bp, Homo sapien
gcatgtccaccacttagaagtaatg

SEQ ID NO: 2608997 - DNA, 25 bp, Homo sapien
catgtccaccacttagaagtaatgc

SEQ ID NO: 2608998 - DNA, 25 bp, Homo sapien
tgctcaggtgaatggtgctcctcac

SEQ ID NO: 2608999 - DNA, 25 bp, Homo sapien
aaggcccttctccgctggccatgtg

SEQ ID NO: 2609000 - DNA, 25 bp, Homo sapien
cagtctgagaggtagggcaaggccc

SEQ ID NO: 2609001 - DNA, 25 bp, Homo sapien
agctgctcaggtgaatggtgctcct

SEQ ID NO: 2609002 - DNA, 25 bp, Homo sapien
cgtgtgctcagattggtagaaccgt

SEQ ID NO: 2609003 - DNA, 25 bp, Homo sapien
tgctcagattggtagaaccgtatga

SEQ ID NO: 2609004 - DNA, 25 bp, Homo sapien
ttggtagaaccgtatgactgaaggc

SEQ ID NO: 2609005 - DNA, 25 bp, Homo sapien
tagaaccgtatgactgaaggcagat

SEQ ID NO: 2609006 - DNA, 25 bp, Homo sapien
atatccactcaacagttaatggaca

SEQ ID NO: 2609007 - DNA, 25 bp, Homo sapien
taatttgagggatgtggctgtcctc

SEQ ID NO: 2609008 - DNA, 25 bp, Homo sapien
actgccttcaggtccttgatgcctc

SEQ ID NO: 2609009 - DNA, 25 bp, Homo sapien
catcagaatttatatatccactcaa

SEQ ID NO: 2609010 - DNA, 25 bp, Homo sapien
tcttcttcgaatacttccatatctt

SEQ ID NO: 2609011 - DNA, 25 bp, Homo sapien
tctctgaagccctacgtggccagct

SEQ ID NO: 2609012 - DNA, 25 bp, Homo sapien
gccatgacgggcaattccttgacac

SEQ ID NO: 2609013 - DNA, 25 bp, Homo sapien
tttacaagcccagataaaatctcgc

SEQ ID NO: 2609014 - DNA, 25 bp, Homo sapien
gcctttcgaacaattaggtttgcag

SEQ ID NO: 2609015 - DNA, 25 bp, Homo sapien
gtcggtcaataagaagagcctttcg

SEQ ID NO: 2609016 - DNA, 25 bp, Homo sapien
taatttcattgttggctcaaagcag

SEQ ID NO: 2609017 - DNA, 25 bp, Homo sapien
caatgcacataaatataggtcggtc

SEQ ID NO: 2609018 - DNA, 25 bp, Homo sapien
atgctgtgaacaaattgcctcctct

SEQ ID NO: 2609019 - DNA, 25 bp, Homo sapien
tccatctctgctggactgccgaaaa

SEQ ID NO: 2609020 - DNA, 25 bp, Homo sapien
ctggactgccgaaaagccaccaggt

SEQ ID NO: 2609021 - DNA, 25 bp, Homo sapien
cactgtgtggtcatgttgacacctc

SEQ ID NO: 2609022 - DNA, 25 bp, Homo sapien
gagagaccctaagcagaatatttgg

SEQ ID NO: 2609023 - DNA, 25 bp, Homo sapien
gagccagtattctcagtcacacagt

SEQ ID NO: 2609024 - DNA, 25 bp, Homo sapien
tctggaagaagcacactgctgtgtc

SEQ ID NO: 2609025 - DNA, 25 bp, Homo sapien
tgtcaacctcagtgagactcaccgg

SEQ ID NO: 2609026 - DNA, 25 bp, Homo sapien
gctcttttgagaggccatcgccata

SEQ ID NO: 2609027 - DNA, 25 bp, Homo sapien
tcacagcgtagaaacagttctatgt

SEQ ID NO: 2609028 - DNA, 25 bp, Homo sapien
gccataacagaagaatctgggttct

SEQ ID NO: 2609029 - DNA, 25 bp, Homo sapien
ctgaagcagtgttgtcgggaaaacc

SEQ ID NO: 2609030 - DNA, 25 bp, Homo sapien
atgcggtgatataatgtctgatcac

SEQ ID NO: 2609031 - DNA, 25 bp, Homo sapien
gcggtgatataatgtctgatcacac

SEQ ID NO: 2609032 - DNA, 25 bp, Homo sapien
ggtgatataatgtctgatcacaccc

SEQ ID NO: 2609033 - DNA, 25 bp, Homo sapien
gtgatataatgtctgatcacacccc

SEQ ID NO: 2609034 - DNA, 25 bp, Homo sapien
tcttcaacattgtctgaggaacttc

SEQ ID NO: 2609035 - DNA, 25 bp, Homo sapien
actcacaggtgggtagaagctggcc

SEQ ID NO: 2609036 - DNA, 25 bp, Homo sapien
tgtccttgccaatttccgtgttgta

SEQ ID NO: 2609037 - DNA, 25 bp, Homo sapien
tactgcctctcgtttcaagctacca

SEQ ID NO: 2609038 - DNA, 25 bp, Homo sapien
cattgccgtggtctgttggttgaat

SEQ ID NO: 2609039 - DNA, 25 bp, Homo sapien
attgccgtggtctgttggttgaatc

SEQ ID NO: 2609040 - DNA, 25 bp, Homo sapien
ggcccagggggacatagacattgct

SEQ ID NO: 2609041 - DNA, 25 bp, Homo sapien
gcccagggggacatagacattgctc

SEQ ID NO: 2609042 - DNA, 25 bp, Homo sapien
ccagggggacatagacattgctctt

SEQ ID NO: 2609043 - DNA, 25 bp, Homo sapien
agggggacatagacattgctcttgg

SEQ ID NO: 2609044 - DNA, 25 bp, Homo sapien
tacgtccattctgagaagtcgagaa

SEQ ID NO: 2609045 - DNA, 25 bp, Homo sapien
catctacgtccattctgagaagtcg

SEQ ID NO: 2609046 - DNA, 25 bp, Homo sapien
tgtctctcatctacgtccattctga

SEQ ID NO: 2609047 - DNA, 25 bp, Homo sapien
gatctgtctctcatctacgtccatt

SEQ ID NO: 2609048 - DNA, 25 bp, Homo sapien
ccatattctggactgtggtatcaaa

SEQ ID NO: 2609049 - DNA, 25 bp, Homo sapien
cttccatattctggactgtggtatc

SEQ ID NO: 2609050 - DNA, 25 bp, Homo sapien
catattctggactgtggtatcaaac

SEQ ID NO: 2609051 - DNA, 25 bp, Homo sapien
tccatattctggactgtggtatcaa

SEQ ID NO: 2609052 - DNA, 25 bp, Homo sapien
caacattcactattcctgaattacc

SEQ ID NO: 2609053 - DNA, 25 bp, Homo sapien
ctgccagcaacattcactattcctg

SEQ ID NO: 2609054 - DNA, 25 bp, Homo sapien
cagcaacattcactattcctgaatt

SEQ ID NO: 2609055 - DNA, 25 bp, Homo sapien
gccagcaacattcactattcctgaa

SEQ ID NO: 2609056 - DNA, 25 bp, Homo sapien
gatggatggtaagattgcctgtgca

SEQ ID NO: 2609057 - DNA, 25 bp, Homo sapien
ttactcaacagtcggaatattatgc

SEQ ID NO: 2609058 - DNA, 25 bp, Homo sapien
gacgtgtgaagcatgggaataactg

SEQ ID NO: 2609059 - DNA, 25 bp, Homo sapien
ggaaggtaattttgcctgggtctga

SEQ ID NO: 2609060 - DNA, 25 bp, Homo sapien
gcgaggagagtagtactcccgagtg

SEQ ID NO: 2609061 - DNA, 25 bp, Homo sapien
agcgaggagagtagtactcccgagt

SEQ ID NO: 2609062 - DNA, 25 bp, Homo sapien
cgaggagagtagtactcccgagtgg

SEQ ID NO: 2609063 - DNA, 25 bp, Homo sapien
gaggagagtagtactcccgagtggg

SEQ ID NO: 2609064 - DNA, 25 bp, Homo sapien
ggtatagtttcagtatagtcacccc

SEQ ID NO: 2609065 - DNA, 25 bp, Homo sapien
tcagtatagtcacccccaagtgtca

SEQ ID NO: 2609066 - DNA, 25 bp, Homo sapien
cagatgccaggtatagtttcagtat

SEQ ID NO: 2609067 - DNA, 25 bp, Homo sapien
ccaggtatagtttcagtatagtcac

SEQ ID NO: 2609068 - DNA, 25 bp, Homo sapien
tcaaatccgaattcgtccacagagg

SEQ ID NO: 2609069 - DNA, 25 bp, Homo sapien
tccacagaggattggtcagggacca

SEQ ID NO: 2609070 - DNA, 25 bp, Homo sapien
gctgtgatagcatcccccgaagtta

SEQ ID NO: 2609071 - DNA, 25 bp, Homo sapien
caggccgtccgcgatgctgtgatag

SEQ ID NO: 2609072 - DNA, 25 bp, Homo sapien
ctctgaatgaataactgtattaact

SEQ ID NO: 2609073 - DNA, 25 bp, Homo sapien
tttcagtgccttgctctgaatgaat

SEQ ID NO: 2609074 - DNA, 25 bp, Homo sapien
tgtttatagggttgtgtggacccat

SEQ ID NO: 2609075 - DNA, 25 bp, Homo sapien
ttatagggttgtgtggacccatcta

SEQ ID NO: 2609076 - DNA, 25 bp, Homo sapien
cttctatttgctattcctgaactgg

SEQ ID NO: 2609077 - DNA, 25 bp, Homo sapien
gcttccttgtctttagcacagcact

SEQ ID NO: 2609078 - DNA, 25 bp, Homo sapien
tgcttccttgtctttagcacagcac

SEQ ID NO: 2609079 - DNA, 25 bp, Homo sapien
tcctgaaaatttggtagctgctgca

SEQ ID NO: 2609080 - DNA, 25 bp, Homo sapien
ggtgtacagcacacaaacagtggtc

SEQ ID NO: 2609081 - DNA, 25 bp, Homo sapien
agaaggaaactcgagtcctgaaaat

SEQ ID NO: 2609082 - DNA, 25 bp, Homo sapien
tgagtatcataagaaaccaagtagg

SEQ ID NO: 2609083 - DNA, 25 bp, Homo sapien
gccgtcttccgacctttgccaccat

SEQ ID NO: 2609084 - DNA, 25 bp, Homo sapien
catcactcatgactgagacgtcaga

SEQ ID NO: 2609085 - DNA, 25 bp, Homo sapien
tactttgccgcaggaagttgcccaa

SEQ ID NO: 2609086 - DNA, 25 bp, Homo sapien
gacgtcagagctactttgccgcagg

SEQ ID NO: 2609087 - DNA, 25 bp, Homo sapien
cagctttgcgatgtccggatacaac

SEQ ID NO: 2609088 - DNA, 25 bp, Homo sapien
tgcgatgtccggatacaacaggacg

SEQ ID NO: 2609089 - DNA, 25 bp, Homo sapien
caacaggacgacaaacgtgaaaaga

SEQ ID NO: 2609090 - DNA, 25 bp, Homo sapien
cggatacaacaggacgacaaacgtg

SEQ ID NO: 2609091 - DNA, 25 bp, Homo sapien
aaaaggacgagtgctgctttcattt

SEQ ID NO: 2609092 - DNA, 25 bp, Homo sapien
gaaaaaggacgagtgctgctttcat

SEQ ID NO: 2609093 - DNA, 25 bp, Homo sapien
gccagaaaaaggacgagtgctgctt

SEQ ID NO: 2609094 - DNA, 25 bp, Homo sapien
cagaaaaaggacgagtgctgctttc

SEQ ID NO: 2609095 - DNA, 25 bp, Homo sapien
ccagtgacagcttctctgagtgcag

SEQ ID NO: 2609096 - DNA, 25 bp, Homo sapien
caactgagatgccagtgacagcttc

SEQ ID NO: 2609097 - DNA, 25 bp, Homo sapien
ttctctgagtgcaggcggctccttt

SEQ ID NO: 2609098 - DNA, 25 bp, Homo sapien
gtgcaggcggctcctttcatcttca

SEQ ID NO: 2609099 - DNA, 25 bp, Homo sapien
tcagttcaaagtcaatgtaaggtct

SEQ ID NO: 2609100 - DNA, 25 bp, Homo sapien
cagttcaaagtcaatgtaaggtctc

SEQ ID NO: 2609101 - DNA, 25 bp, Homo sapien
ctagtggcataacttctgaagatgt

SEQ ID NO: 2609102 - DNA, 25 bp, Homo sapien
ttttgtctttactagtggcataact

SEQ ID NO: 2609103 - DNA, 25 bp, Homo sapien
tctcttctgccccagtgacggtgaa

SEQ ID NO: 2609104 - DNA, 25 bp, Homo sapien
ccagtgacggtgaagttcccaagtt

SEQ ID NO: 2609105 - DNA, 25 bp, Homo sapien
gccccagtgacggtgaagttcccaa

SEQ ID NO: 2609106 - DNA, 25 bp, Homo sapien
tctgccccagtgacggtgaagttcc

SEQ ID NO: 2609107 - DNA, 25 bp, Homo sapien
aacacctactgtccattgcacacta

SEQ ID NO: 2609108 - DNA, 25 bp, Homo sapien
tgcaagactcagaacaccaggctcc

SEQ ID NO: 2609109 - DNA, 25 bp, Homo sapien
cagaaacaccataggtgacccgagg

SEQ ID NO: 2609110 - DNA, 25 bp, Homo sapien
gtccattgcacactactcagaaaca

SEQ ID NO: 2609111 - DNA, 25 bp, Homo sapien
tcttccagctgattgaatcggctac

SEQ ID NO: 2609112 - DNA, 25 bp, Homo sapien
tccagctgattgaatcggctactga

SEQ ID NO: 2609113 - DNA, 25 bp, Homo sapien
ttcttccagctgattgaatcggcta

SEQ ID NO: 2609114 - DNA, 25 bp, Homo sapien
cagctgattgaatcggctactgagg

SEQ ID NO: 2609115 - DNA, 25 bp, Homo sapien
tgtgatcttcggtatttgcactgga

SEQ ID NO: 2609116 - DNA, 25 bp, Homo sapien
ggtatttgcactggatctacggatc

SEQ ID NO: 2609117 - DNA, 25 bp, Homo sapien
gagcagagtttgtgatcttcggtat

SEQ ID NO: 2609118 - DNA, 25 bp, Homo sapien
tgcactggatctacggatctgtgtc

SEQ ID NO: 2609119 - DNA, 25 bp, Homo sapien
tgggccagctccgactaggggctat

SEQ ID NO: 2609120 - DNA, 25 bp, Homo sapien
gagtctcagcctcagaggaacttgg

SEQ ID NO: 2609121 - DNA, 25 bp, Homo sapien
atcccctctccaacagagtctcagc

SEQ ID NO: 2609122 - DNA, 25 bp, Homo sapien
tccgactaggggctatccagccact

SEQ ID NO: 2609123 - DNA, 25 bp, Homo sapien
ttccatttatccctcttagctgtac

SEQ ID NO: 2609124 - DNA, 25 bp, Homo sapien
aggacctttccactgtctctagaag

SEQ ID NO: 2609125 - DNA, 25 bp, Homo sapien
gacgttgccaagttccacacaaggg

SEQ ID NO: 2609126 - DNA, 25 bp, Homo sapien
tgtttgaagtcgaatctccaccagg

SEQ ID NO: 2609127 - DNA, 25 bp, Homo sapien
tacccctctgaaaggattcagcctg

SEQ ID NO: 2609128 - DNA, 25 bp, Homo sapien
gactagcgcctttgcagcctgtgtg

SEQ ID NO: 2609129 - DNA, 25 bp, Homo sapien
tgtttgaggagctctatcctgggtg

SEQ ID NO: 2609130 - DNA, 25 bp, Homo sapien
gaagtgtgagggtattacccctctg

SEQ ID NO: 2609131 - DNA, 25 bp, Homo sapien
gctattgctttgaagagttgtctga

SEQ ID NO: 2609132 - DNA, 25 bp, Homo sapien
gctgccatccacatgcctgaggaac

SEQ ID NO: 2609133 - DNA, 25 bp, Homo sapien
gaaagctaagtggatgctgccatcc

SEQ ID NO: 2609134 - DNA, 25 bp, Homo sapien
ctttctgagtaagtcctgtgtgatc

SEQ ID NO: 2609135 - DNA, 25 bp, Homo sapien
attaggtttccaacttatgatcttt

SEQ ID NO: 2609136 - DNA, 25 bp, Homo sapien
tctaccccttaacttcgagtctata

SEQ ID NO: 2609137 - DNA, 25 bp, Homo sapien
tctataagaatcgttatgtgtttgg

SEQ ID NO: 2609138 - DNA, 25 bp, Homo sapien
aaagtctggtttatctaagaatagt

SEQ ID NO: 2609139 - DNA, 25 bp, Homo sapien
tgagcagatgcatgacaatagaatt

SEQ ID NO: 2609140 - DNA, 25 bp, Homo sapien
agaaggctgtgatccccaacccttg

SEQ ID NO: 2609141 - DNA, 25 bp, Homo sapien
cagctcttcatgagtggtgcagggt

SEQ ID NO: 2609142 - DNA, 25 bp, Homo sapien
caaaagactgaattactactggaga

SEQ ID NO: 2609143 - DNA, 25 bp, Homo sapien
tcgacattcagcttcgtagttgtaa

SEQ ID NO: 2609144 - DNA, 25 bp, Homo sapien
ctcgtggggtttaacacaaggctcg

SEQ ID NO: 2609145 - DNA, 25 bp, Homo sapien
tcagcttcgtagttgtaaaactcta

SEQ ID NO: 2609146 - DNA, 25 bp, Homo sapien
ctctcgacattcagcttcgtagttg

SEQ ID NO: 2609147 - DNA, 25 bp, Homo sapien
ctggagatgagctgatttgcctggc

SEQ ID NO: 2609148 - DNA, 25 bp, Homo sapien
ctgctggagatgagctgatttgcct

SEQ ID NO: 2609149 - DNA, 25 bp, Homo sapien
agatgagctgatttgcctggcagcc

SEQ ID NO: 2609150 - DNA, 25 bp, Homo sapien
tggagatgagctgatttgcctggca

SEQ ID NO: 2609151 - DNA, 25 bp, Homo sapien
ctgctttgtgttcgccggcagctgc

SEQ ID NO: 2609152 - DNA, 25 bp, Homo sapien
tcgggccccttcgactcgtctccag

SEQ ID NO: 2609153 - DNA, 25 bp, Homo sapien
tggcttcaaccatcacagagctgct

SEQ ID NO: 2609154 - DNA, 25 bp, Homo sapien
cttcgactcgtctccagggattgca

SEQ ID NO: 2609155 - DNA, 25 bp, Homo sapien
cacggtcctcttgtcctagtgctca

SEQ ID NO: 2609156 - DNA, 25 bp, Homo sapien
ggtcctcttgtcctagtgctcatca

SEQ ID NO: 2609157 - DNA, 25 bp, Homo sapien
cttctatgtctgtttgtcacggtcc

SEQ ID NO: 2609158 - DNA, 25 bp, Homo sapien
gtttgtcacggtcctcttgtcctag

SEQ ID NO: 2609159 - DNA, 25 bp, Homo sapien
agaatgtcgggaccccagcgcatcc

SEQ ID NO: 2609160 - DNA, 25 bp, Homo sapien
gaccctgacagaatgtcgggacccc

SEQ ID NO: 2609161 - DNA, 25 bp, Homo sapien
ggtgtttggaccctgacagaatgtc

SEQ ID NO: 2609162 - DNA, 25 bp, Homo sapien
ccatcctactcaggtgctccatgcc

SEQ ID NO: 2609163 - DNA, 25 bp, Homo sapien
ttgatcttggacttccccagtctcc

SEQ ID NO: 2609164 - DNA, 25 bp, Homo sapien
cagatactgaatctgctggagcctt

SEQ ID NO: 2609165 - DNA, 25 bp, Homo sapien
gatcttggacttccccagtctccag

SEQ ID NO: 2609166 - DNA, 25 bp, Homo sapien
gatactgaatctgctggagccttga

SEQ ID NO: 2609167 - DNA, 25 bp, Homo sapien
gaatgcaagggtgtctgggcaggaa

SEQ ID NO: 2609168 - DNA, 25 bp, Homo sapien
gtccttgcaggtgttcctgttgaag

SEQ ID NO: 2609169 - DNA, 25 bp, Homo sapien
ctggtccttgcaggtgttcctgttg

SEQ ID NO: 2609170 - DNA, 25 bp, Homo sapien
gagaatgcaagggtgtctgggcagg

SEQ ID NO: 2609171 - DNA, 25 bp, Homo sapien
ctggcagaaggagagcgcagcaatt

SEQ ID NO: 2609172 - DNA, 25 bp, Homo sapien
caacgctgggcttatgagttacaat

SEQ ID NO: 2609173 - DNA, 25 bp, Homo sapien
gccattctgggatgcaccactacag

SEQ ID NO: 2609174 - DNA, 25 bp, Homo sapien
gagaaacagggatagtgcttagaag

SEQ ID NO: 2609175 - DNA, 25 bp, Homo sapien
aaggatgagatcctgtgatccattc

SEQ ID NO: 2609176 - DNA, 25 bp, Homo sapien
gagttagtactgatggtttcccgac

SEQ ID NO: 2609177 - DNA, 25 bp, Homo sapien
caagaagtttgtggcaaaattctca

SEQ ID NO: 2609178 - DNA, 25 bp, Homo sapien
tgctctccccttgtttggtaaagaa

SEQ ID NO: 2609179 - DNA, 25 bp, Homo sapien
cacataatctgtttttatggctgtt

SEQ ID NO: 2609180 - DNA, 25 bp, Homo sapien
ataatctgtttttatggctgttttc

SEQ ID NO: 2609181 - DNA, 25 bp, Homo sapien
aatctgtttttatggctgttttctt

SEQ ID NO: 2609182 - DNA, 25 bp, Homo sapien
ctgtttttatggctgttttcttcat

SEQ ID NO: 2609183 - DNA, 25 bp, Homo sapien
ctggagatacaagtgccccactcgc

SEQ ID NO: 2609184 - DNA, 25 bp, Homo sapien
gccataggggatccatactctctgt

SEQ ID NO: 2609185 - DNA, 25 bp, Homo sapien
ggttctcttgctcagttgggccata

SEQ ID NO: 2609186 - DNA, 25 bp, Homo sapien
tggcacagtccagttccgagcaggg

SEQ ID NO: 2609187 - DNA, 25 bp, Homo sapien
cttccaaggtccgtgagtgctgaga

SEQ ID NO: 2609188 - DNA, 25 bp, Homo sapien
cagaggccttcgtgaagatgcaggc

SEQ ID NO: 2609189 - DNA, 25 bp, Homo sapien
cagaagtgcgcttcacaatgaaggc

SEQ ID NO: 2609190 - DNA, 25 bp, Homo sapien
ctctgagggagaacggcgcagaaca

SEQ ID NO: 2609191 - DNA, 25 bp, Homo sapien
tgggccacctgtcaagtcattctga

SEQ ID NO: 2609192 - DNA, 25 bp, Homo sapien
tccggtggttccacgtcactggaga

SEQ ID NO: 2609193 - DNA, 25 bp, Homo sapien
tagctggttcagatgcctccggtgg

SEQ ID NO: 2609194 - DNA, 25 bp, Homo sapien
gctttgctgagaggtcagttcatca

SEQ ID NO: 2609195 - DNA, 25 bp, Homo sapien
cgagaaggttttgggataaatgagc

SEQ ID NO: 2609196 - DNA, 25 bp, Homo sapien
ataaatgagccccagtgcacttgag

SEQ ID NO: 2609197 - DNA, 25 bp, Homo sapien
cagggctcccgaaactcgagaaggt

SEQ ID NO: 2609198 - DNA, 25 bp, Homo sapien
agaatgtgggcttaagtcagtagca

SEQ ID NO: 2609199 - DNA, 25 bp, Homo sapien
gcttttcatcaccagaaggctcaga

SEQ ID NO: 2609200 - DNA, 25 bp, Homo sapien
aggtggctctccagaaagcttttca

SEQ ID NO: 2609201 - DNA, 25 bp, Homo sapien
acatgggcaggttctcagtgaaggc

SEQ ID NO: 2609202 - DNA, 25 bp, Homo sapien
gctgctttcctcctgacatgggcag

SEQ ID NO: 2609203 - DNA, 25 bp, Homo sapien
ttatcatttttgacagtaactgcat

SEQ ID NO: 2609204 - DNA, 25 bp, Homo sapien
tttggcaattatcatttttgacagt

SEQ ID NO: 2609205 - DNA, 25 bp, Homo sapien
gcaattatcatttttgacagtaact

SEQ ID NO: 2609206 - DNA, 25 bp, Homo sapien
aattatcatttttgacagtaactgc

SEQ ID NO: 2609207 - DNA, 25 bp, Homo sapien
gcctggggtcgtagaatagattcct

SEQ ID NO: 2609208 - DNA, 25 bp, Homo sapien
tagcctggggtcgtagaatagattc

SEQ ID NO: 2609209 - DNA, 25 bp, Homo sapien
aaattagcctggggtcgtagaatag

SEQ ID NO: 2609210 - DNA, 25 bp, Homo sapien
ttagcctggggtcgtagaatagatt

SEQ ID NO: 2609211 - DNA, 25 bp, Homo sapien
gctgtccaacagagagcgactagag

SEQ ID NO: 2609212 - DNA, 25 bp, Homo sapien
gcgactagaggagacagtgactttc

SEQ ID NO: 2609213 - DNA, 25 bp, Homo sapien
gccaaatattctaacttgctgtcca

SEQ ID NO: 2609214 - DNA, 25 bp, Homo sapien
gactttcacaactggctgggttctc

SEQ ID NO: 2609215 - DNA, 25 bp, Homo sapien
cagtcattattggtagcccctccct

SEQ ID NO: 2609216 - DNA, 25 bp, Homo sapien
tattggtagcccctccctaaattca

SEQ ID NO: 2609217 - DNA, 25 bp, Homo sapien
ttggtgttgattttcttagtacatc

SEQ ID NO: 2609218 - DNA, 25 bp, Homo sapien
ggtgttgattttcttagtacatcat

SEQ ID NO: 2609219 - DNA, 25 bp, Homo sapien
ggcagagtttatccacatgatttgg

SEQ ID NO: 2609220 - DNA, 25 bp, Homo sapien
tactgtgactttcttctacacatct

SEQ ID NO: 2609221 - DNA, 25 bp, Homo sapien
gatttggttcccctctactgtgact

SEQ ID NO: 2609222 - DNA, 25 bp, Homo sapien
agtttatccacatgatttggttccc

SEQ ID NO: 2609223 - DNA, 25 bp, Homo sapien
aacataatatattgactgatgaggg

SEQ ID NO: 2609224 - DNA, 25 bp, Homo sapien
tattgactgatgagggtgtgaagtc

SEQ ID NO: 2609225 - DNA, 25 bp, Homo sapien
taatatattgactgatgagggtgtg

SEQ ID NO: 2609226 - DNA, 25 bp, Homo sapien
tatattgactgatgagggtgtgaag

SEQ ID NO: 2609227 - DNA, 25 bp, Homo sapien
gcttccaagatagcatgagatgtgt

SEQ ID NO: 2609228 - DNA, 25 bp, Homo sapien
gaaccttgtctgtcatgttcactaa

SEQ ID NO: 2609229 - DNA, 25 bp, Homo sapien
tagaactccaagtcaggcaacatac

SEQ ID NO: 2609230 - DNA, 25 bp, Homo sapien
tcactaatgtgcctccatcctgcag

SEQ ID NO: 2609231 - DNA, 25 bp, Homo sapien
gatctggggactcaaagaaggtaaa

SEQ ID NO: 2609232 - DNA, 25 bp, Homo sapien
tacatcaatcctaaaggctaggaga

SEQ ID NO: 2609233 - DNA, 25 bp, Homo sapien
taaggtgtgtcctatatttacatca

SEQ ID NO: 2609234 - DNA, 25 bp, Homo sapien
gctcagttttgtactcaacatccag

SEQ ID NO: 2609235 - DNA, 25 bp, Homo sapien
gaacatgctcagttttgtactcaac

SEQ ID NO: 2609236 - DNA, 25 bp, Homo sapien
atgagtagggatgtccctgcagtac

SEQ ID NO: 2609237 - DNA, 25 bp, Homo sapien
cctgaaaactgctggcagacctctg

SEQ ID NO: 2609238 - DNA, 25 bp, Homo sapien
ttgatgagtagggatgtccctgcag

SEQ ID NO: 2609239 - DNA, 25 bp, Homo sapien
gcctgtcctgaaaactgctggcaga

SEQ ID NO: 2609240 - DNA, 25 bp, Homo sapien
accatggtccatccgaagggaagga

SEQ ID NO: 2609241 - DNA, 25 bp, Homo sapien
tgactctttctcagatcttctcggt

SEQ ID NO: 2609242 - DNA, 25 bp, Homo sapien
tttctcagatcttctcggtttagtg

SEQ ID NO: 2609243 - DNA, 25 bp, Homo sapien
ctcagatcttctcggtttagtggct

SEQ ID NO: 2609244 - DNA, 25 bp, Homo sapien
gactctttctcagatcttctcggtt

SEQ ID NO: 2609245 - DNA, 25 bp, Homo sapien
gagagctgtctaggtctgtatccca

SEQ ID NO: 2609246 - DNA, 25 bp, Homo sapien
gaacacttgtagattgctgggtcct

SEQ ID NO: 2609247 - DNA, 25 bp, Homo sapien
ggaaactcattacctgctgcattgg

SEQ ID NO: 2609248 - DNA, 25 bp, Homo sapien
cccttggtaagcttgcagacagtta

SEQ ID NO: 2609249 - DNA, 25 bp, Homo sapien
taagaaacgcataaaagggaatgcc

SEQ ID NO: 2609250 - DNA, 25 bp, Homo sapien
aactctacaaacactaagccaagga

SEQ ID NO: 2609251 - DNA, 25 bp, Homo sapien
tagatgccatttgagccccttactt

SEQ ID NO: 2609252 - DNA, 25 bp, Homo sapien
gaagcatgttgacacaacgttacca

SEQ ID NO: 2609253 - DNA, 25 bp, Homo sapien
tgctatggacagttcccggaaacgg

SEQ ID NO: 2609254 - DNA, 25 bp, Homo sapien
gccagagttttagccaaaggtgtac

SEQ ID NO: 2609255 - DNA, 25 bp, Homo sapien
ccaggatcaactgcccagagtgcca

SEQ ID NO: 2609256 - DNA, 25 bp, Homo sapien
caggtccatgggtctgacccttgga

SEQ ID NO: 2609257 - DNA, 25 bp, Homo sapien
aggaaatagtcggataagtaggtga

SEQ ID NO: 2609258 - DNA, 25 bp, Homo sapien
atggaggaaatagtcggataagtag

SEQ ID NO: 2609259 - DNA, 25 bp, Homo sapien
aatagtcggataagtaggtgacgtg

SEQ ID NO: 2609260 - DNA, 25 bp, Homo sapien
gatgaaccaggggtctggccccatc

SEQ ID NO: 2609261 - DNA, 25 bp, Homo sapien
ttcatgtttgtagggatggttccct

SEQ ID NO: 2609262 - DNA, 25 bp, Homo sapien
tgtgacttacatgaggcatctcagc

SEQ ID NO: 2609263 - DNA, 25 bp, Homo sapien
tgttcaagtaggctctcactagagt

SEQ ID NO: 2609264 - DNA, 25 bp, Homo sapien
atggttccctaagcctgttcaagta

SEQ ID NO: 2609265 - DNA, 25 bp, Homo sapien
gctccagggacatgtagctttggtg

SEQ ID NO: 2609266 - DNA, 25 bp, Homo sapien
gtggtcaggctccaccgcacagaag

SEQ ID NO: 2609267 - DNA, 25 bp, Homo sapien
aacatgtgggcttcctgtagctcca

SEQ ID NO: 2609268 - DNA, 25 bp, Homo sapien
gggttttgtaacctctgaatgatat

SEQ ID NO: 2609269 - DNA, 25 bp, Homo sapien
taaagccgctcttccttaggcctgg

SEQ ID NO: 2609270 - DNA, 25 bp, Homo sapien
ataaagccgctcttccttaggcctg

SEQ ID NO: 2609271 - DNA, 25 bp, Homo sapien
agtcctggtgaaactttgcggttca

SEQ ID NO: 2609272 - DNA, 25 bp, Homo sapien
aaagccgctcttccttaggcctggg

SEQ ID NO: 2609273 - DNA, 25 bp, Homo sapien
cctatggcagttggttgaataatta

SEQ ID NO: 2609274 - DNA, 25 bp, Homo sapien
aaccaatacataacctatggcagtt

SEQ ID NO: 2609275 - DNA, 25 bp, Homo sapien
ttctcacaaacaaccaatacataac

SEQ ID NO: 2609276 - DNA, 25 bp, Homo sapien
tacataacctatggcagttggttga

SEQ ID NO: 2609277 - DNA, 25 bp, Homo sapien
agagtgtgctaacaccattcacaga

SEQ ID NO: 2609278 - DNA, 25 bp, Homo sapien
tcaggatagctggaagtaagggttt

SEQ ID NO: 2609279 - DNA, 25 bp, Homo sapien
aagcatttaagagtgtgctaacacc

SEQ ID NO: 2609280 - DNA, 25 bp, Homo sapien
tcttcactgatcatcgataagcatt

SEQ ID NO: 2609281 - DNA, 25 bp, Homo sapien
tccctgcatggaggcaacagcattt

SEQ ID NO: 2609282 - DNA, 25 bp, Homo sapien
cctaccacgagcattaataccatgt

SEQ ID NO: 2609283 - DNA, 25 bp, Homo sapien
tatacccaatgtgtggcaatcagcc

SEQ ID NO: 2609284 - DNA, 25 bp, Homo sapien
tctgccaggtccacacgaagtgcta

SEQ ID NO: 2609285 - DNA, 25 bp, Homo sapien
ttagcgtttggatagactccatgcc

SEQ ID NO: 2609286 - DNA, 25 bp, Homo sapien
cttacttagcgtttggatagactcc

SEQ ID NO: 2609287 - DNA, 25 bp, Homo sapien
tttggatagactccatgccttctct

SEQ ID NO: 2609288 - DNA, 25 bp, Homo sapien
caaccacttacttagcgtttggata

SEQ ID NO: 2609289 - DNA, 25 bp, Homo sapien
tctggtccatagtgacgtcctgaag

SEQ ID NO: 2609290 - DNA, 25 bp, Homo sapien
cattccaggaagctccttgccatgc

SEQ ID NO: 2609291 - DNA, 25 bp, Homo sapien
atgctgttggcctggaagtccacct

SEQ ID NO: 2609292 - DNA, 25 bp, Homo sapien
tttcatggcattccaggaagctcct

SEQ ID NO: 2609293 - DNA, 25 bp, Homo sapien
tacagtagactgtgaggcaccccac

SEQ ID NO: 2609294 - DNA, 25 bp, Homo sapien
ttctgcaggttgctgcaaaactcac

SEQ ID NO: 2609295 - DNA, 25 bp, Homo sapien
tgaagcgtggatgtgttctgcaggt

SEQ ID NO: 2609296 - DNA, 25 bp, Homo sapien
tgttttcatcttgcctgggaagccc

SEQ ID NO: 2609297 - DNA, 25 bp, Homo sapien
catttcaagtgcatttcaagccacc

SEQ ID NO: 2609298 - DNA, 25 bp, Homo sapien
ttcaagccaccagagtgtcccattg

SEQ ID NO: 2609299 - DNA, 25 bp, Homo sapien
tctgaggcttcagagtcgaagtttg

SEQ ID NO: 2609300 - DNA, 25 bp, Homo sapien
aatccccagttcctcaaggcctgtg

SEQ ID NO: 2609301 - DNA, 25 bp, Homo sapien
tcacaaactgccaaccttattctgg

SEQ ID NO: 2609302 - DNA, 25 bp, Homo sapien
gcttctcgtggtaacttcataacta

SEQ ID NO: 2609303 - DNA, 25 bp, Homo sapien
ggtaattaggcaagtcctccatggg

SEQ ID NO: 2609304 - DNA, 25 bp, Homo sapien
gttgaaaacttaaccagaagatatc

SEQ ID NO: 2609305 - DNA, 25 bp, Homo sapien
tgctccgacataacacaggtcttgg

SEQ ID NO: 2609306 - DNA, 25 bp, Homo sapien
ctattttagagatataagtccatgc

SEQ ID NO: 2609307 - DNA, 25 bp, Homo sapien
gatataagtccatgctggcaaattt

SEQ ID NO: 2609308 - DNA, 25 bp, Homo sapien
atcacttgagccaatcctattttag

SEQ ID NO: 2609309 - DNA, 25 bp, Homo sapien
cagccaagtactccctttttgtgtt

SEQ ID NO: 2609310 - DNA, 25 bp, Homo sapien
caacagccaagtactccctttttgt

SEQ ID NO: 2609311 - DNA, 25 bp, Homo sapien
tttttgtgttgtgcaacttgtagca

SEQ ID NO: 2609312 - DNA, 25 bp, Homo sapien
ttttgtgttgtgcaacttgtagcat

SEQ ID NO: 2609313 - DNA, 25 bp, Homo sapien
gagtgtcgagagtgaagctggagct

SEQ ID NO: 2609314 - DNA, 25 bp, Homo sapien
cagagtgtcgagagtgaagctggag

SEQ ID NO: 2609315 - DNA, 25 bp, Homo sapien
cacagagtgtcgagagtgaagctgg

SEQ ID NO: 2609316 - DNA, 25 bp, Homo sapien
agagtgtcgagagtgaagctggagc

SEQ ID NO: 2609317 - DNA, 25 bp, Homo sapien
ccctgtgcctttcttatgagctcct

SEQ ID NO: 2609318 - DNA, 25 bp, Homo sapien
ttgcttaagaccctactaattcatg

SEQ ID NO: 2609319 - DNA, 25 bp, Homo sapien
gagctcctcttttgccgattcatat

SEQ ID NO: 2609320 - DNA, 25 bp, Homo sapien
taattcatgctaggccaaaagaaaa

SEQ ID NO: 2609321 - DNA, 25 bp, Homo sapien
tgatcctggattgaaaacgctgccc

SEQ ID NO: 2609322 - DNA, 25 bp, Homo sapien
ttaccctgccagagtgcaattgctg

SEQ ID NO: 2609323 - DNA, 25 bp, Homo sapien
aagtcttcaactactccggccatgg

SEQ ID NO: 2609324 - DNA, 25 bp, Homo sapien
tcactgtgatttgcccaatgcagtt

SEQ ID NO: 2609325 - DNA, 25 bp, Homo sapien
caagtaagatcagaaggtaacaagg

SEQ ID NO: 2609326 - DNA, 25 bp, Homo sapien
agatcagaaggtaacaaggatctgc

SEQ ID NO: 2609327 - DNA, 25 bp, Homo sapien
gtaagatcagaaggtaacaaggatc

SEQ ID NO: 2609328 - DNA, 25 bp, Homo sapien
tcagaaggtaacaaggatctgccat

SEQ ID NO: 2609329 - DNA, 25 bp, Homo sapien
aactgcgaaggcgttgcaacagtca

SEQ ID NO: 2609330 - DNA, 25 bp, Homo sapien
ttagaactgcgaaggcgttgcaaca

SEQ ID NO: 2609331 - DNA, 25 bp, Homo sapien
atgctttagaactgcgaaggcgttg

SEQ ID NO: 2609332 - DNA, 25 bp, Homo sapien
gaaggcgttgcaacagtcagcctgt

SEQ ID NO: 2609333 - DNA, 25 bp, Homo sapien
ctgtattgagagccagactgaatcc

SEQ ID NO: 2609334 - DNA, 25 bp, Homo sapien
aacccgtagatcctgttcaaggtca

SEQ ID NO: 2609335 - DNA, 25 bp, Homo sapien
gggccaacccgtagatcctgttcaa

SEQ ID NO: 2609336 - DNA, 25 bp, Homo sapien
gaagagaccgcctagtgtgcgttcc

SEQ ID NO: 2609337 - DNA, 25 bp, Homo sapien
ctagtgtgcgttcccatagaggact

SEQ ID NO: 2609338 - DNA, 25 bp, Homo sapien
gcctgagcatgacgcagtgggaaca

SEQ ID NO: 2609339 - DNA, 25 bp, Homo sapien
gtatcttatcatgggtaaagcgacc

SEQ ID NO: 2609340 - DNA, 25 bp, Homo sapien
ccaggacccttactgtggctgggat

SEQ ID NO: 2609341 - DNA, 25 bp, Homo sapien
cagagcatctctgcgtgtccggtga

SEQ ID NO: 2609342 - DNA, 25 bp, Homo sapien
ctctccagtgtgcagcctaaatacc

SEQ ID NO: 2609343 - DNA, 25 bp, Homo sapien
atacccattgggcttcatatgtaag

SEQ ID NO: 2609344 - DNA, 25 bp, Homo sapien
gcctaaatacccattgggcttcata

SEQ ID NO: 2609345 - DNA, 25 bp, Homo sapien
tgtgcagcctaaatacccattgggc

SEQ ID NO: 2609346 - DNA, 25 bp, Homo sapien
ccacccgggtctgtctcatgagttg

SEQ ID NO: 2609347 - DNA, 25 bp, Homo sapien
acccgggtctgtctcatgagttgca

SEQ ID NO: 2609348 - DNA, 25 bp, Homo sapien
cacccgggtctgtctcatgagttgc

SEQ ID NO: 2609349 - DNA, 25 bp, Homo sapien
tgtactacacagaagggttccttgg

SEQ ID NO: 2609350 - DNA, 25 bp, Homo sapien
tgggctgtactacacagaagggttc

SEQ ID NO: 2609351 - DNA, 25 bp, Homo sapien
ggttccttggcattgaacctcttcc

SEQ ID NO: 2609352 - DNA, 25 bp, Homo sapien
gctgtactacacagaagggttcctt

SEQ ID NO: 2609353 - DNA, 25 bp, Homo sapien
ggcagacctcacacttgctgtaact

SEQ ID NO: 2609354 - DNA, 25 bp, Homo sapien
tgaaggctacacaaggccaagtgtg

SEQ ID NO: 2609355 - DNA, 25 bp, Homo sapien
ggattcaggcactgatgaaggctac

SEQ ID NO: 2609356 - DNA, 25 bp, Homo sapien
gagagccaggtgcttgccttcacca

SEQ ID NO: 2609357 - DNA, 25 bp, Homo sapien
gctgacacatgtgagctgatgtcac

SEQ ID NO: 2609358 - DNA, 25 bp, Homo sapien
gtgagctgatgtcaccttccctgaa

SEQ ID NO: 2609359 - DNA, 25 bp, Homo sapien
tgtggctgacacatgtgagctgatg

SEQ ID NO: 2609360 - DNA, 25 bp, Homo sapien
cctcatggggacctccttgcagggc

SEQ ID NO: 2609361 - DNA, 25 bp, Homo sapien
caccatgtgcatgcctggagcctgc

SEQ ID NO: 2609362 - DNA, 25 bp, Homo sapien
ggggccaccatgtgcatgcctggag

SEQ ID NO: 2609363 - DNA, 25 bp, Homo sapien
ccatgtgcatgcctggagcctgcct

SEQ ID NO: 2609364 - DNA, 25 bp, Homo sapien
gccaccatgtgcatgcctggagcct

SEQ ID NO: 2609365 - DNA, 25 bp, Homo sapien
cttgggctgcaagtgcttcctggtg

SEQ ID NO: 2609366 - DNA, 25 bp, Homo sapien
ttcctggtggccgttgccagagcac

SEQ ID NO: 2609367 - DNA, 25 bp, Homo sapien
tgcatgtccagggtatgccacaatc

SEQ ID NO: 2609368 - DNA, 25 bp, Homo sapien
tgccacaatcacaggctcttgggct

SEQ ID NO: 2609369 - DNA, 25 bp, Homo sapien
tctctgtctttctgccactgaaaga

SEQ ID NO: 2609370 - DNA, 25 bp, Homo sapien
gggtgtctcttctatagggccatct

SEQ ID NO: 2609371 - DNA, 25 bp, Homo sapien
tgtctcttctatagggccatctctg

SEQ ID NO: 2609372 - DNA, 25 bp, Homo sapien
tttcggggtgtctcttctatagggc

SEQ ID NO: 2609373 - DNA, 25 bp, Homo sapien
ctactcatctatagttatgtgaact

SEQ ID NO: 2609374 - DNA, 25 bp, Homo sapien
tcactgtttgcccaaggatgctcga

SEQ ID NO: 2609375 - DNA, 25 bp, Homo sapien
tttgcccaaggatgctcgagtccac

SEQ ID NO: 2609376 - DNA, 25 bp, Homo sapien
cagttggtttaagggagcaggaagg

SEQ ID NO: 2609377 - DNA, 25 bp, Homo sapien
ttctttcctttctttgtactgccaa

SEQ ID NO: 2609378 - DNA, 25 bp, Homo sapien
tcctttctttgtactgccaatggga

SEQ ID NO: 2609379 - DNA, 25 bp, Homo sapien
ttcctttctttgtactgccaatggg

SEQ ID NO: 2609380 - DNA, 25 bp, Homo sapien
ctttcctttctttgtactgccaatg

SEQ ID NO: 2609381 - DNA, 25 bp, Homo sapien
tcagtgttaaacgtgtaagggccac

SEQ ID NO: 2609382 - DNA, 25 bp, Homo sapien
gtgtaagggccaccgccatctctgc

SEQ ID NO: 2609383 - DNA, 25 bp, Homo sapien
ctgtcagtgttaaacgtgtaagggc

SEQ ID NO: 2609384 - DNA, 25 bp, Homo sapien
acgtgtaagggccaccgccatctct

SEQ ID NO: 2609385 - DNA, 25 bp, Homo sapien
catggagcagataaatttcctgttt

SEQ ID NO: 2609386 - DNA, 25 bp, Homo sapien
cttcatggagcagataaatttcctg

SEQ ID NO: 2609387 - DNA, 25 bp, Homo sapien
tcccagtatgttctaaataggatgc

SEQ ID NO: 2609388 - DNA, 25 bp, Homo sapien
taaataggatgcaaccaacttcatc

SEQ ID NO: 2609389 - DNA, 25 bp, Homo sapien
taaggtgtcacgtgagccaaggctc

SEQ ID NO: 2609390 - DNA, 25 bp, Homo sapien
gggacccattttactatctgaggaa

SEQ ID NO: 2609391 - DNA, 25 bp, Homo sapien
cattggtcaggtcgtaagttcaacc

SEQ ID NO: 2609392 - DNA, 25 bp, Homo sapien
cacctgggcttggatgagatcgcac

SEQ ID NO: 2609393 - DNA, 25 bp, Homo sapien
gcattgcggcctcagctgtgtgcgt

SEQ ID NO: 2609394 - DNA, 25 bp, Homo sapien
tgtgtgcgtcttcaacctgagcgcc

SEQ ID NO: 2609395 - DNA, 25 bp, Homo sapien
ccttttgggatctttaagagactgt

SEQ ID NO: 2609396 - DNA, 25 bp, Homo sapien
tgctgccgagctctctgactgcctt

SEQ ID NO: 2609397 - DNA, 25 bp, Homo sapien
tgttcccacaacactattaaaggat

SEQ ID NO: 2609398 - DNA, 25 bp, Homo sapien
ctggcagctactgggacatccaggg

SEQ ID NO: 2609399 - DNA, 25 bp, Homo sapien
tcagtcctggtggttgtagtgaaca

SEQ ID NO: 2609400 - DNA, 25 bp, Homo sapien
tattaaaggatgctcagactggcag

SEQ ID NO: 2609401 - DNA, 25 bp, Homo sapien
tctcattctcaaggtcatgttctag

SEQ ID NO: 2609402 - DNA, 25 bp, Homo sapien
gtctggagaccctgaagaagcgagt

SEQ ID NO: 2609403 - DNA, 25 bp, Homo sapien
tcatgttctagacctgggctgccct

SEQ ID NO: 2609404 - DNA, 25 bp, Homo sapien
gaagcgagtgaatatgtacttcctg

SEQ ID NO: 2609405 - DNA, 25 bp, Homo sapien
tcagtggagtcattctctggattat

SEQ ID NO: 2609406 - DNA, 25 bp, Homo sapien
tcactcaatgtaccagcaaattcct

SEQ ID NO: 2609407 - DNA, 25 bp, Homo sapien
ggattattgccagatgcaaaactct

SEQ ID NO: 2609408 - DNA, 25 bp, Homo sapien
tcaagggccaggtggcaactcccac

SEQ ID NO: 2609409 - DNA, 25 bp, Homo sapien
ttatatctttcatcacagactcatg

SEQ ID NO: 2609410 - DNA, 25 bp, Homo sapien
acttatatctttcatcacagactca

SEQ ID NO: 2609411 - DNA, 25 bp, Homo sapien
tatatctttcatcacagactcatgt

SEQ ID NO: 2609412 - DNA, 25 bp, Homo sapien
tatctttcatcacagactcatgttt

SEQ ID NO: 2609413 - DNA, 25 bp, Homo sapien
tcaaggcagacgtagcaccagcagt

SEQ ID NO: 2609414 - DNA, 25 bp, Homo sapien
accagcagtatttggagctcataca

SEQ ID NO: 2609415 - DNA, 25 bp, Homo sapien
catacagtgcggcattgaggacgga

SEQ ID NO: 2609416 - DNA, 25 bp, Homo sapien
tggagctcatacagtgcggcattga

SEQ ID NO: 2609417 - DNA, 25 bp, Homo sapien
tatccgtctggtcagctacaactgc

SEQ ID NO: 2609418 - DNA, 25 bp, Homo sapien
tttagagcaatctgatgacacggga

SEQ ID NO: 2609419 - DNA, 25 bp, Homo sapien
ttagagcaatctgatgacacgggag

SEQ ID NO: 2609420 - DNA, 25 bp, Homo sapien
gggtccctttatccgtctggtcagc

SEQ ID NO: 2609421 - DNA, 25 bp, Homo sapien
cctctgtactgggaagcttctatga

SEQ ID NO: 2609422 - DNA, 25 bp, Homo sapien
gcttctatgactgctgtcatgcccc

SEQ ID NO: 2609423 - DNA, 25 bp, Homo sapien
ccctctcgcggccagctggataggg

SEQ ID NO: 2609424 - DNA, 25 bp, Homo sapien
gatagggccatggaaaaggtccttg

SEQ ID NO: 2609425 - DNA, 25 bp, Homo sapien
ttcatgagagtgttcttggctagaa

SEQ ID NO: 2609426 - DNA, 25 bp, Homo sapien
gagagtgttcttggctagaaatata

SEQ ID NO: 2609427 - DNA, 25 bp, Homo sapien
catgagagtgttcttggctagaaat

SEQ ID NO: 2609428 - DNA, 25 bp, Homo sapien
tcattcatgagagtgttcttggcta

SEQ ID NO: 2609429 - DNA, 25 bp, Homo sapien
ggacagcactaggtattgagacatt

SEQ ID NO: 2609430 - DNA, 25 bp, Homo sapien
gagttcagcacaataggtgttgaca

SEQ ID NO: 2609431 - DNA, 25 bp, Homo sapien
cagggttttagcatccatctcgtgg

SEQ ID NO: 2609432 - DNA, 25 bp, Homo sapien
catctcgtggcatctggcagaactg

SEQ ID NO: 2609433 - DNA, 25 bp, Homo sapien
gacattttggtcacctaactttata

SEQ ID NO: 2609434 - DNA, 25 bp, Homo sapien
gacacatatggattatggcccaccc

SEQ ID NO: 2609435 - DNA, 25 bp, Homo sapien
ttggcattctcagcttgtacacaca

SEQ ID NO: 2609436 - DNA, 25 bp, Homo sapien
tcctctatgcttgtctggctcagca

SEQ ID NO: 2609437 - DNA, 25 bp, Homo sapien
gggccctttcagctctaagactgtt

SEQ ID NO: 2609438 - DNA, 25 bp, Homo sapien
tccaacaggattagaccagatgaat

SEQ ID NO: 2609439 - DNA, 25 bp, Homo sapien
gatttgcgcgcacattaggtaaaga

SEQ ID NO: 2609440 - DNA, 25 bp, Homo sapien
ggatggatattatgcccctaaaagc

SEQ ID NO: 2609441 - DNA, 25 bp, Homo sapien
gacccaatgtgagtagcagcccata

SEQ ID NO: 2609442 - DNA, 25 bp, Homo sapien
ttgcacacctgacccaatgtaccag

SEQ ID NO: 2609443 - DNA, 25 bp, Homo sapien
catctgaccccatgtgagtaccagc

SEQ ID NO: 2609444 - DNA, 25 bp, Homo sapien
tgtgagtaccaacccatagctgcat

SEQ ID NO: 2609445 - DNA, 25 bp, Homo sapien
cttagtccagtagcaatactggggg

SEQ ID NO: 2609446 - DNA, 25 bp, Homo sapien
gatgctcacttccaacaaatttcat

SEQ ID NO: 2609447 - DNA, 25 bp, Homo sapien
cagtagcaatactgggggatttctg

SEQ ID NO: 2609448 - DNA, 25 bp, Homo sapien
tctgatgctcacttccaacaaattt

SEQ ID NO: 2609449 - DNA, 25 bp, Homo sapien
tctttagcctggttcctgttggcca

SEQ ID NO: 2609450 - DNA, 25 bp, Homo sapien
gaccaaaacctgatgtatgtctctt

SEQ ID NO: 2609451 - DNA, 25 bp, Homo sapien
tcccgttgttcagtatagggaccaa

SEQ ID NO: 2609452 - DNA, 25 bp, Homo sapien
ttagcctggttcctgttggccactt

SEQ ID NO: 2609453 - DNA, 25 bp, Homo sapien
tgaagtaacaggcctggtaacgcaa

SEQ ID NO: 2609454 - DNA, 25 bp, Homo sapien
ttgaagtaacaggcctggtaacgca

SEQ ID NO: 2609455 - DNA, 25 bp, Homo sapien
gaagtaacaggcctggtaacgcaaa

SEQ ID NO: 2609456 - DNA, 25 bp, Homo sapien
gttgaagtaacaggcctggtaacgc

SEQ ID NO: 2609457 - DNA, 25 bp, Homo sapien
aagggactcccatgtgactttccag

SEQ ID NO: 2609458 - DNA, 25 bp, Homo sapien
agaatgcatgcattccagtgaaggc

SEQ ID NO: 2609459 - DNA, 25 bp, Homo sapien
tgcattccagtgaaggcaggagcag

SEQ ID NO: 2609460 - DNA, 25 bp, Homo sapien
tggtggacaggcttcatgtctggaa

SEQ ID NO: 2609461 - DNA, 25 bp, Homo sapien
ccctcactgaaacagtgcacgcatt

SEQ ID NO: 2609462 - DNA, 25 bp, Homo sapien
acacaggagtcccttctggacatga

SEQ ID NO: 2609463 - DNA, 25 bp, Homo sapien
aggagtcccttctggacatgaagcc

SEQ ID NO: 2609464 - DNA, 25 bp, Homo sapien
gccctcactgaaacagtgcacgcat

SEQ ID NO: 2609465 - DNA, 25 bp, Homo sapien
gatccagtatgtggccacatctgcc

SEQ ID NO: 2609466 - DNA, 25 bp, Homo sapien
cattaaatgattagtgtgcatggtt

SEQ ID NO: 2609467 - DNA, 25 bp, Homo sapien
cactgttttaagtgtagatccagta

SEQ ID NO: 2609468 - DNA, 25 bp, Homo sapien
tctgtagaacattaaatgattagtg

SEQ ID NO: 2609469 - DNA, 25 bp, Homo sapien
cagggtgagttttctataggtgatc

SEQ ID NO: 2609470 - DNA, 25 bp, Homo sapien
cttttcagggtgagttttctatagg

SEQ ID NO: 2609471 - DNA, 25 bp, Homo sapien
ctataggtgatccttcctttcttcc

SEQ ID NO: 2609472 - DNA, 25 bp, Homo sapien
gagttttctataggtgatccttcct

SEQ ID NO: 2609473 - DNA, 25 bp, Homo sapien
gatgttacatgaactcatttcggca

SEQ ID NO: 2609474 - DNA, 25 bp, Homo sapien
caaccagactatatcagactgtttt

SEQ ID NO: 2609475 - DNA, 25 bp, Homo sapien
agagggccccaaatcattcatgagg

SEQ ID NO: 2609476 - DNA, 25 bp, Homo sapien
gggcatatcacatgccaagagcggg

SEQ ID NO: 2609477 - DNA, 25 bp, Homo sapien
aaatcttgggtaaaactgcttccag

SEQ ID NO: 2609478 - DNA, 25 bp, Homo sapien
caggacaggctgcagtagaggattc

SEQ ID NO: 2609479 - DNA, 25 bp, Homo sapien
tcctcgagtccctgtgagattccag

SEQ ID NO: 2609480 - DNA, 25 bp, Homo sapien
tgtgagattccagaggtttctgagt

SEQ ID NO: 2609481 - DNA, 25 bp, Homo sapien
tccatgcgtgtctcatgatgctctg

SEQ ID NO: 2609482 - DNA, 25 bp, Homo sapien
catggttccatgcacgtccacatct

SEQ ID NO: 2609483 - DNA, 25 bp, Homo sapien
tgtctaatgcaccaagcagttgtgt

SEQ ID NO: 2609484 - DNA, 25 bp, Homo sapien
gcctcttcattaggatacagcaacc

SEQ ID NO: 2609485 - DNA, 25 bp, Homo sapien
tgtgtccatgtatccatgcatatcc

SEQ ID NO: 2609486 - DNA, 25 bp, Homo sapien
tgcatatcccatccctccatgtgtg

SEQ ID NO: 2609487 - DNA, 25 bp, Homo sapien
tccacagttctaggcatgttcacaa

SEQ ID NO: 2609488 - DNA, 25 bp, Homo sapien
tcacaactccatgtatgtatgtccc

SEQ ID NO: 2609489 - DNA, 25 bp, Homo sapien
ttatcctttatctggaggatgacaa

SEQ ID NO: 2609490 - DNA, 25 bp, Homo sapien
ctgaataagtttatcctttatctgg

SEQ ID NO: 2609491 - DNA, 25 bp, Homo sapien
caagtggggattcggaggtgcctgg

SEQ ID NO: 2609492 - DNA, 25 bp, Homo sapien
ggatgacaaaatgccggcagggaca

SEQ ID NO: 2609493 - DNA, 25 bp, Homo sapien
cagcacgcactgattgcaaagccgt

SEQ ID NO: 2609494 - DNA, 25 bp, Homo sapien
ctataaaggtaaggaaccagcacgc

SEQ ID NO: 2609495 - DNA, 25 bp, Homo sapien
cagggtacgactcagtgccagagaa

SEQ ID NO: 2609496 - DNA, 25 bp, Homo sapien
gcatccagtcatctcctataaaggt

SEQ ID NO: 2609497 - DNA, 25 bp, Homo sapien
ggagttctaaagcagacaccagttt

SEQ ID NO: 2609498 - DNA, 25 bp, Homo sapien
gacaccagttttgcacactgtaact

SEQ ID NO: 2609499 - DNA, 25 bp, Homo sapien
ccagttttgcacactgtaactcctt

SEQ ID NO: 2609500 - DNA, 25 bp, Homo sapien
cagacaccagttttgcacactgtaa

SEQ ID NO: 2609501 - DNA, 25 bp, Homo sapien
gtctggaaggcgactctagtttctg

SEQ ID NO: 2609502 - DNA, 25 bp, Homo sapien
tcagtctggaaggcgactctagttt

SEQ ID NO: 2609503 - DNA, 25 bp, Homo sapien
gttcatctgatcccttaaaacaggg

SEQ ID NO: 2609504 - DNA, 25 bp, Homo sapien
tgtagggcatggcttcggggttggt

SEQ ID NO: 2609505 - DNA, 25 bp, Homo sapien
cttgtccaccgaagaaatccttcat

SEQ ID NO: 2609506 - DNA, 25 bp, Homo sapien
catcctcgctcctatcttggaaagc

SEQ ID NO: 2609507 - DNA, 25 bp, Homo sapien
gactactctgagctgtgatctggga

SEQ ID NO: 2609508 - DNA, 25 bp, Homo sapien
tctattcctacttcgatttcataaa

SEQ ID NO: 2609509 - DNA, 25 bp, Homo sapien
tgtttctgacgactttgcttctatt

SEQ ID NO: 2609510 - DNA, 25 bp, Homo sapien
tgaggagtgagttttggtaagatgg

SEQ ID NO: 2609511 - DNA, 25 bp, Homo sapien
tgagttttggtaagatggaggagga

SEQ ID NO: 2609512 - DNA, 25 bp, Homo sapien
gggtatcccttgagctctgagttgg

SEQ ID NO: 2609513 - DNA, 25 bp, Homo sapien
tgagttggctgtctgagtgatggtg

SEQ ID NO: 2609514 - DNA, 25 bp, Homo sapien
gggccagatagggacgagagaaaag

SEQ ID NO: 2609515 - DNA, 25 bp, Homo sapien
ggaataagaatcaacgtacagtggg

SEQ ID NO: 2609516 - DNA, 25 bp, Homo sapien
tcaacgtacagtggggccagatagg

SEQ ID NO: 2609517 - DNA, 25 bp, Homo sapien
cagatagggacgagagaaaagtggg

SEQ ID NO: 2609518 - DNA, 25 bp, Homo sapien
tgtttttctgcactatgtccagtac

SEQ ID NO: 2609519 - DNA, 25 bp, Homo sapien
tgtccagtactatctggagactgag

SEQ ID NO: 2609520 - DNA, 25 bp, Homo sapien
cagccttgttttagaaggaggcaga

SEQ ID NO: 2609521 - DNA, 25 bp, Homo sapien
acacaggtaattgtagttcaggatg

SEQ ID NO: 2609522 - DNA, 25 bp, Homo sapien
tattgtaaagaggtacagaggtaag

SEQ ID NO: 2609523 - DNA, 25 bp, Homo sapien
aaagaggtacagaggtaaggtagag

SEQ ID NO: 2609524 - DNA, 25 bp, Homo sapien
tgtaaagaggtacagaggtaaggta

SEQ ID NO: 2609525 - DNA, 25 bp, Homo sapien
taaagaggtacagaggtaaggtaga

SEQ ID NO: 2609526 - DNA, 25 bp, Homo sapien
aatgggacctccttgagtcctgtct

SEQ ID NO: 2609527 - DNA, 25 bp, Homo sapien
ggaaatgggacctccttgagtcctg

SEQ ID NO: 2609528 - DNA, 25 bp, Homo sapien
tgggacctccttgagtcctgtctcc

SEQ ID NO: 2609529 - DNA, 25 bp, Homo sapien
gaaatgggacctccttgagtcctgt

SEQ ID NO: 2609530 - DNA, 25 bp, Homo sapien
gaacagagccaggaatgattcaacc

SEQ ID NO: 2609531 - DNA, 25 bp, Homo sapien
ccttgacaagtagacggtaccagta

SEQ ID NO: 2609532 - DNA, 25 bp, Homo sapien
caagggtgctgaattgttggtgcaa

SEQ ID NO: 2609533 - DNA, 25 bp, Homo sapien
tgattcaaccaggatactggctggg

SEQ ID NO: 2609534 - DNA, 25 bp, Homo sapien
gagttggtgacctctgttacagaca

SEQ ID NO: 2609535 - DNA, 25 bp, Homo sapien
tacttctctgactacgtaaggcaga

SEQ ID NO: 2609536 - DNA, 25 bp, Homo sapien
cctgttgggtaaagacaggtcccag

SEQ ID NO: 2609537 - DNA, 25 bp, Homo sapien
tgtctgcatctgctcaccgtggatg

SEQ ID NO: 2609538 - DNA, 25 bp, Homo sapien
ttgattaatttgagtcaaatgtctg

SEQ ID NO: 2609539 - DNA, 25 bp, Homo sapien
ctttttgattaatttgagtcaaatg

SEQ ID NO: 2609540 - DNA, 25 bp, Homo sapien
gattaatttgagtcaaatgtctgta

SEQ ID NO: 2609541 - DNA, 25 bp, Homo sapien
attaatttgagtcaaatgtctgtat

SEQ ID NO: 2609542 - DNA, 25 bp, Homo sapien
catctgtgccaaaggttaagaaagc

SEQ ID NO: 2609543 - DNA, 25 bp, Homo sapien
tggtgtatgacagcttcttataagc

SEQ ID NO: 2609544 - DNA, 25 bp, Homo sapien
gaaagcattcttgaacatgcagttt

SEQ ID NO: 2609545 - DNA, 25 bp, Homo sapien
ggatgttttatcttagtaattgcag

SEQ ID NO: 2609546 - DNA, 25 bp, Homo sapien
acatctgcattgaagggtgagacca

SEQ ID NO: 2609547 - DNA, 25 bp, Homo sapien
atctgcattgaagggtgagaccaac

SEQ ID NO: 2609548 - DNA, 25 bp, Homo sapien
cctataacatctgcattgaagggtg

SEQ ID NO: 2609549 - DNA, 25 bp, Homo sapien
taacatctgcattgaagggtgagac

SEQ ID NO: 2609550 - DNA, 25 bp, Homo sapien
atagtttttgggctcagaattctgg

SEQ ID NO: 2609551 - DNA, 25 bp, Homo sapien
tggtctgtatttaggttcgggtcaa

SEQ ID NO: 2609552 - DNA, 25 bp, Homo sapien
ctttcatgatgcttcttctccggat

SEQ ID NO: 2609553 - DNA, 25 bp, Homo sapien
gcttcttctccggatgctggagata

SEQ ID NO: 2609554 - DNA, 25 bp, Homo sapien
ggtcgactgcattccgttagccttt

SEQ ID NO: 2609555 - DNA, 25 bp, Homo sapien
aagacagtcggttctttcttgcaaa

SEQ ID NO: 2609556 - DNA, 25 bp, Homo sapien
tgacagatctagagaaagataccct

SEQ ID NO: 2609557 - DNA, 25 bp, Homo sapien
taagaaactagttctcggtcgactg

SEQ ID NO: 2609558 - DNA, 25 bp, Homo sapien
ccagctgcagtaggcatacttgttg

SEQ ID NO: 2609559 - DNA, 25 bp, Homo sapien
tgttgggcgagaggctctttgacct

SEQ ID NO: 2609560 - DNA, 25 bp, Homo sapien
ttgagaggcctgctgagaatttttg

SEQ ID NO: 2609561 - DNA, 25 bp, Homo sapien
cagcagttagtgatgcaggccagag

SEQ ID NO: 2609562 - DNA, 25 bp, Homo sapien
taactgtgccttattactggttgtg

SEQ ID NO: 2609563 - DNA, 25 bp, Homo sapien
ttacatccctgaagctataactgtg

SEQ ID NO: 2609564 - DNA, 25 bp, Homo sapien
gccttattactggttgtgttcccag

SEQ ID NO: 2609565 - DNA, 25 bp, Homo sapien
tccctgaagctataactgtgcctta

SEQ ID NO: 2609566 - DNA, 25 bp, Homo sapien
tgagatccttctaaagtccgtttct

SEQ ID NO: 2609567 - DNA, 25 bp, Homo sapien
acaggaaagactgtgagatccttct

SEQ ID NO: 2609568 - DNA, 25 bp, Homo sapien
tgtgagatccttctaaagtccgttt

SEQ ID NO: 2609569 - DNA, 25 bp, Homo sapien
aaagacaggaaagactgtgagatcc

SEQ ID NO: 2609570 - DNA, 25 bp, Homo sapien
tgtgttggcttgctttggatggtca

SEQ ID NO: 2609571 - DNA, 25 bp, Homo sapien
gcttgctttggatggtcagcggtta

SEQ ID NO: 2609572 - DNA, 25 bp, Homo sapien
gctttggatggtcagcggttatcat

SEQ ID NO: 2609573 - DNA, 25 bp, Homo sapien
tgttggcttgctttggatggtcagc

SEQ ID NO: 2609574 - DNA, 25 bp, Homo sapien
gcccacgtagattcaggttcacata

SEQ ID NO: 2609575 - DNA, 25 bp, Homo sapien
gaagaaacggaggtctgcattttgt

SEQ ID NO: 2609576 - DNA, 25 bp, Homo sapien
cacatagtgtcttaaccggaacctc

SEQ ID NO: 2609577 - DNA, 25 bp, Homo sapien
ctttctccagcccacgtagattcag

SEQ ID NO: 2609578 - DNA, 25 bp, Homo sapien
agtcccctgtacctgctgggtaagc

SEQ ID NO: 2609579 - DNA, 25 bp, Homo sapien
gggtaagccctaaacctctcatgat

SEQ ID NO: 2609580 - DNA, 25 bp, Homo sapien
tctgaagcactttagacctaggtgt

SEQ ID NO: 2609581 - DNA, 25 bp, Homo sapien
tcatgatactctcagggatcctcct

SEQ ID NO: 2609582 - DNA, 25 bp, Homo sapien
tcatgattgaggaaacgcgtcctcc

SEQ ID NO: 2609583 - DNA, 25 bp, Homo sapien
gagacatctaaatgggaagtgaaga

SEQ ID NO: 2609584 - DNA, 25 bp, Homo sapien
tctctccttggtaagtgagacatct

SEQ ID NO: 2609585 - DNA, 25 bp, Homo sapien
gtgattcatgattgaggaaacgcgt

SEQ ID NO: 2609586 - DNA, 25 bp, Homo sapien
tgtgggaatcactgcctagagggac

SEQ ID NO: 2609587 - DNA, 25 bp, Homo sapien
ggaagaatgtcagggtgtttcacat

SEQ ID NO: 2609588 - DNA, 25 bp, Homo sapien
atcactgcctagagggacagccaga

SEQ ID NO: 2609589 - DNA, 25 bp, Homo sapien
gggtggcgaggaagaatgtcagggt

SEQ ID NO: 2609590 - DNA, 25 bp, Homo sapien
gcaggcagatggcctcggatcatga

SEQ ID NO: 2609591 - DNA, 25 bp, Homo sapien
cagatggcctcggatcatgactgaa

SEQ ID NO: 2609592 - DNA, 25 bp, Homo sapien
caggcagatggcctcggatcatgac

SEQ ID NO: 2609593 - DNA, 25 bp, Homo sapien
ggcagatggcctcggatcatgactg

SEQ ID NO: 2609594 - DNA, 25 bp, Homo sapien
tcttatacctgatgactttcagctg

SEQ ID NO: 2609595 - DNA, 25 bp, Homo sapien
tggtgctggcgtaaatggctcttct

SEQ ID NO: 2609596 - DNA, 25 bp, Homo sapien
taaatggctcttctcttatacctga

SEQ ID NO: 2609597 - DNA, 25 bp, Homo sapien
catggtgctggcgtaaatggctctt

SEQ ID NO: 2609598 - DNA, 25 bp, Homo sapien
ctgtttgggtgtccgactggatcag

SEQ ID NO: 2609599 - DNA, 25 bp, Homo sapien
ttctgtttgggtgtccgactggatc

SEQ ID NO: 2609600 - DNA, 25 bp, Homo sapien
tttgggtgtccgactggatcaggtt

SEQ ID NO: 2609601 - DNA, 25 bp, Homo sapien
gtttgggtgtccgactggatcaggt

SEQ ID NO: 2609602 - DNA, 25 bp, Homo sapien
tgtcaaaagtaaagaggaggacact

SEQ ID NO: 2609603 - DNA, 25 bp, Homo sapien
cataggatagctcagaaaggttggg

SEQ ID NO: 2609604 - DNA, 25 bp, Homo sapien
gaagaagcatcttggcccctccaaa

SEQ ID NO: 2609605 - DNA, 25 bp, Homo sapien
ggcagttgggatagactctggctcc

SEQ ID NO: 2609606 - DNA, 25 bp, Homo sapien
caaggtatgttgttcccccccatat

SEQ ID NO: 2609607 - DNA, 25 bp, Homo sapien
ccatatatccatgcattctcattgt

SEQ ID NO: 2609608 - DNA, 25 bp, Homo sapien
gctcccaacaggtcccaaggtatgt

SEQ ID NO: 2609609 - DNA, 25 bp, Homo sapien
tgcacaggtcatctcatcgcctagg

SEQ ID NO: 2609610 - DNA, 25 bp, Homo sapien
gcagtgagaagaaagctccttcaaa

SEQ ID NO: 2609611 - DNA, 25 bp, Homo sapien
cagcaagggagatgctttcaggtca

SEQ ID NO: 2609612 - DNA, 25 bp, Homo sapien
gtcattggatgggtgaaggagcctg

SEQ ID NO: 2609613 - DNA, 25 bp, Homo sapien
gtaggtgtgacaggcagcagcaagg

SEQ ID NO: 2609614 - DNA, 25 bp, Homo sapien
cagctttggaattccagtgcagctt

SEQ ID NO: 2609615 - DNA, 25 bp, Homo sapien
gctttggaattccagtgcagcttca

SEQ ID NO: 2609616 - DNA, 25 bp, Homo sapien
ggaagcaaaccactgcttcacagcc

SEQ ID NO: 2609617 - DNA, 25 bp, Homo sapien
tttggaattccagtgcagcttcagc

SEQ ID NO: 2609618 - DNA, 25 bp, Homo sapien
gctgcatgaggactgggctgaaggg

SEQ ID NO: 2609619 - DNA, 25 bp, Homo sapien
ctgggctgaagggacgggagtctga

SEQ ID NO: 2609620 - DNA, 25 bp, Homo sapien
cagttaggctgcatgaggactgggc

SEQ ID NO: 2609621 - DNA, 25 bp, Homo sapien
taggctgcatgaggactgggctgaa

SEQ ID NO: 2609622 - DNA, 25 bp, Homo sapien
tgctgggtggcgtatgggcgagtgc

SEQ ID NO: 2609623 - DNA, 25 bp, Homo sapien
gagcagtttgccaccatcttgtgtg

SEQ ID NO: 2609624 - DNA, 25 bp, Homo sapien
cccagagcagtttgccaccatcttg

SEQ ID NO: 2609625 - DNA, 25 bp, Homo sapien
gctatctgaatcaccttaactgcct

SEQ ID NO: 2609626 - DNA, 25 bp, Homo sapien
ttagtaataacaggggcaagctgag

SEQ ID NO: 2609627 - DNA, 25 bp, Homo sapien
agttataatcttccatgcctttaag

SEQ ID NO: 2609628 - DNA, 25 bp, Homo sapien
gtcagctcttggtcattatatttgc

SEQ ID NO: 2609629 - DNA, 25 bp, Homo sapien
gactgctattgctgtaagcatttcc

SEQ ID NO: 2609630 - DNA, 25 bp, Homo sapien
ccaaggttgtagatagcagtgccac

SEQ ID NO: 2609631 - DNA, 25 bp, Homo sapien
gcagtgccaccatcctaacaatgga

SEQ ID NO: 2609632 - DNA, 25 bp, Homo sapien
tctggctagaaaggctaacttggag

SEQ ID NO: 2609633 - DNA, 25 bp, Homo sapien
aacaatggatgtaggccaatgatca

SEQ ID NO: 2609634 - DNA, 25 bp, Homo sapien
gacagaggaaagccccacgttggca

SEQ ID NO: 2609635 - DNA, 25 bp, Homo sapien
agggacagaggaaagccccacgttg

SEQ ID NO: 2609636 - DNA, 25 bp, Homo sapien
ttagattccttggaagacagtgagc

SEQ ID NO: 2609637 - DNA, 25 bp, Homo sapien
agaggtctcagtggcttggagcacc

SEQ ID NO: 2609638 - DNA, 25 bp, Homo sapien
ttggactccatgtggtcaccctgtc

SEQ ID NO: 2609639 - DNA, 25 bp, Homo sapien
tattcatgcctggtatcctcgtgct

SEQ ID NO: 2609640 - DNA, 25 bp, Homo sapien
ccatatgttgtggagtgggcattcc

SEQ ID NO: 2609641 - DNA, 25 bp, Homo sapien
catcgctttttgtgggtagacgtcc

SEQ ID NO: 2609642 - DNA, 25 bp, Homo sapien
ctaatttgcacacccccagtgcatg

SEQ ID NO: 2609643 - DNA, 25 bp, Homo sapien
tgtaagtgatgaatgttcccagcct

SEQ ID NO: 2609644 - DNA, 25 bp, Homo sapien
ttgcacacccccagtgcatggatct

SEQ ID NO: 2609645 - DNA, 25 bp, Homo sapien
tccaggaccacttgaactgcacatc

SEQ ID NO: 2609646 - DNA, 25 bp, Homo sapien
gcaggaacagtgaggactgatgctg

SEQ ID NO: 2609647 - DNA, 25 bp, Homo sapien
gttagggcaggaacagtgaggactg

SEQ ID NO: 2609648 - DNA, 25 bp, Homo sapien
tagggctggaaagttagggcaggaa

SEQ ID NO: 2609649 - DNA, 25 bp, Homo sapien
ttagggctggaaagttagggcagga

SEQ ID NO: 2609650 - DNA, 25 bp, Homo sapien
ggttaacttgggatggtgtcttggc

SEQ ID NO: 2609651 - DNA, 25 bp, Homo sapien
ggatcagatagactgttagggttaa

SEQ ID NO: 2609652 - DNA, 25 bp, Homo sapien
caggatcagatagactgttagggtt

SEQ ID NO: 2609653 - DNA, 25 bp, Homo sapien
ggtgtcttggcatacatctctgtat

SEQ ID NO: 2609654 - DNA, 25 bp, Homo sapien
tcatctttggcgagtagtttttgtc

SEQ ID NO: 2609655 - DNA, 25 bp, Homo sapien
ttctgaactcctccattgctgacat

SEQ ID NO: 2609656 - DNA, 25 bp, Homo sapien
tttgcccacttaatgctctttctgt

SEQ ID NO: 2609657 - DNA, 25 bp, Homo sapien
acttaaagggtgtaaacagctgctg

SEQ ID NO: 2609658 - DNA, 25 bp, Homo sapien
cacagatgcaaacgaaaatttgaat

SEQ ID NO: 2609659 - DNA, 25 bp, Homo sapien
gacaacaatgacttctcgggtatct

SEQ ID NO: 2609660 - DNA, 25 bp, Homo sapien
ttctcgggtatcttctggaatgggc

SEQ ID NO: 2609661 - DNA, 25 bp, Homo sapien
agatgcaaacgaaaatttgaatggc

SEQ ID NO: 2609662 - DNA, 25 bp, Homo sapien
agaatgtatctctttaacttaaggg

SEQ ID NO: 2609663 - DNA, 25 bp, Homo sapien
aacataaggctctgttgtaaaaaga

SEQ ID NO: 2609664 - DNA, 25 bp, Homo sapien
aaagaatgtatctctttaacttaag

SEQ ID NO: 2609665 - DNA, 25 bp, Homo sapien
gatgaaaacataaggctctgttgta

SEQ ID NO: 2609666 - DNA, 25 bp, Homo sapien
cccaaactgtgaaggatgtttccaa

SEQ ID NO: 2609667 - DNA, 25 bp, Homo sapien
ttttgtctctggtcaaaagagaaca

SEQ ID NO: 2609668 - DNA, 25 bp, Homo sapien
atccccaaactgtgaaggatgtttc

SEQ ID NO: 2609669 - DNA, 25 bp, Homo sapien
cttttgtctctggtcaaaagagaac

SEQ ID NO: 2609670 - DNA, 25 bp, Homo sapien
cagagcaactgcaatccttggagcc

SEQ ID NO: 2609671 - DNA, 25 bp, Homo sapien
tggtagttcagtagtggccacaagg

SEQ ID NO: 2609672 - DNA, 25 bp, Homo sapien
cagataatactgatgccacaggtcc

SEQ ID NO: 2609673 - DNA, 25 bp, Homo sapien
ccataaaccgtgaccagaagggaga

SEQ ID NO: 2609674 - DNA, 25 bp, Homo sapien
cttctgaaatcctggtgcctttact

SEQ ID NO: 2609675 - DNA, 25 bp, Homo sapien
ttctgaaatcctggtgcctttactg

SEQ ID NO: 2609676 - DNA, 25 bp, Homo sapien
tcctggtgcctttactgttgctgcc

SEQ ID NO: 2609677 - DNA, 25 bp, Homo sapien
tccttttacattgatcttggcttct

SEQ ID NO: 2609678 - DNA, 25 bp, Homo sapien
tgagttgtcacctaaagcccacagt

SEQ ID NO: 2609679 - DNA, 25 bp, Homo sapien
gaagtcactgacagcccagtagggt

SEQ ID NO: 2609680 - DNA, 25 bp, Homo sapien
ccacagtgctaaggcaatttccagc

SEQ ID NO: 2609681 - DNA, 25 bp, Homo sapien
ttcccagttcttgagttgtcaccta

SEQ ID NO: 2609682 - DNA, 25 bp, Homo sapien
tcagcagatatgttattaattatag

SEQ ID NO: 2609683 - DNA, 25 bp, Homo sapien
gcagatatgttattaattatagagg

SEQ ID NO: 2609684 - DNA, 25 bp, Homo sapien
agtttggaatcagcagatatgttat

SEQ ID NO: 2609685 - DNA, 25 bp, Homo sapien
tggaatcagcagatatgttattaat

SEQ ID NO: 2609686 - DNA, 25 bp, Homo sapien
gcagaaccaggcagatcttgcaata

SEQ ID NO: 2609687 - DNA, 25 bp, Homo sapien
gaaccaggcagatcttgcaataatt

SEQ ID NO: 2609688 - DNA, 25 bp, Homo sapien
cagaaccaggcagatcttgcaataa

SEQ ID NO: 2609689 - DNA, 25 bp, Homo sapien
accaggcagatcttgcaataatttc

SEQ ID NO: 2609690 - DNA, 25 bp, Homo sapien
gatttaactttcctgcgcctgcggc

SEQ ID NO: 2609691 - DNA, 25 bp, Homo sapien
gcgagcgagcgctcggaggacgagg

SEQ ID NO: 2609692 - DNA, 25 bp, Homo sapien
tgccgcggccggagttgggatttaa

SEQ ID NO: 2609693 - DNA, 25 bp, Homo sapien
tgcgcctgcggcgtcctcgggattc

SEQ ID NO: 2609694 - DNA, 25 bp, Homo sapien
ggaagtttgtgtacccgcctgtgcc

SEQ ID NO: 2609695 - DNA, 25 bp, Homo sapien
ttgcgcgtacaggattaggacgacc

SEQ ID NO: 2609696 - DNA, 25 bp, Homo sapien
cacagttgagctagtgcacgggctg

SEQ ID NO: 2609697 - DNA, 25 bp, Homo sapien
aggattaggacgaccgtcagtccgg

SEQ ID NO: 2609698 - DNA, 25 bp, Homo sapien
gggaccgtgctcgtggcccccaagc

SEQ ID NO: 2609699 - DNA, 25 bp, Homo sapien
ggaactcagcgagtagggggcggct

SEQ ID NO: 2609700 - DNA, 25 bp, Homo sapien
ccccaagccggtgcccccattctgg

SEQ ID NO: 2609701 - DNA, 25 bp, Homo sapien
ccggtgcccccattctggaactcag

SEQ ID NO: 2609702 - DNA, 25 bp, Homo sapien
tggcttggacacccaactttgccac

SEQ ID NO: 2609703 - DNA, 25 bp, Homo sapien
cacctcgagggtcgtctctgctggg

SEQ ID NO: 2609704 - DNA, 25 bp, Homo sapien
ggccagtgtcgctcatcccgggacg

SEQ ID NO: 2609705 - DNA, 25 bp, Homo sapien
gactgccccgcggagctggcttgga

SEQ ID NO: 2609706 - DNA, 25 bp, Homo sapien
gagcccccaaaagtcagcgctcggc

SEQ ID NO: 2609707 - DNA, 25 bp, Homo sapien
cgtctgaaccgggacagcgggcggg

SEQ ID NO: 2609708 - DNA, 25 bp, Homo sapien
ggagcgccacgtctcaggtctcggc

SEQ ID NO: 2609709 - DNA, 25 bp, Homo sapien
aaaagtcagcgctcggccgcactcg

SEQ ID NO: 2609710 - DNA, 25 bp, Homo sapien
tagtgctctaagtgccaagcaaggg

SEQ ID NO: 2609711 - DNA, 25 bp, Homo sapien
tgtctggaatggaactagtgctcta

SEQ ID NO: 2609712 - DNA, 25 bp, Homo sapien
gaatgcttgccaagaaggcctgccc

SEQ ID NO: 2609713 - DNA, 25 bp, Homo sapien
gccacgtaggcaagataatcggaat

SEQ ID NO: 2609714 - DNA, 25 bp, Homo sapien
tgtgtgcatggctcacctaaaacag

SEQ ID NO: 2609715 - DNA, 25 bp, Homo sapien
gatagctttctagcaagcaagacct

SEQ ID NO: 2609716 - DNA, 25 bp, Homo sapien
gtcacatgaatcagcgccccagaat

SEQ ID NO: 2609717 - DNA, 25 bp, Homo sapien
gccaggctggtgtgtctaagctcca

SEQ ID NO: 2609718 - DNA, 25 bp, Homo sapien
tggcccacagtcatgtcctgatttc

SEQ ID NO: 2609719 - DNA, 25 bp, Homo sapien
actcatggcccacagtcatgtcctg

SEQ ID NO: 2609720 - DNA, 25 bp, Homo sapien
tgagatggcagcttagggatgtggc

SEQ ID NO: 2609721 - DNA, 25 bp, Homo sapien
taaagaccacagatacccggctttc

SEQ ID NO: 2609722 - DNA, 25 bp, Homo sapien
ttctataattttaatacaatcttac

SEQ ID NO: 2609723 - DNA, 25 bp, Homo sapien
catctcattggtaggaaaatgcagt

SEQ ID NO: 2609724 - DNA, 25 bp, Homo sapien
taatgcatctcattggtaggaaaat

SEQ ID NO: 2609725 - DNA, 25 bp, Homo sapien
cttatggaggatgattgtaatgcat

SEQ ID NO: 2609726 - DNA, 25 bp, Homo sapien
tggaggatgattgtaatgcatctca

SEQ ID NO: 2609727 - DNA, 25 bp, Homo sapien
taactttgccaatagagtgggctgc

SEQ ID NO: 2609728 - DNA, 25 bp, Homo sapien
gtcatgctgtgccaacctctgggaa

SEQ ID NO: 2609729 - DNA, 25 bp, Homo sapien
ggctgccacactaaagaggaatgcg

SEQ ID NO: 2609730 - DNA, 25 bp, Homo sapien
ccctggtggacttgagtggaagctc

SEQ ID NO: 2609731 - DNA, 25 bp, Homo sapien
tgagaaatgggttccagagagctcg

SEQ ID NO: 2609732 - DNA, 25 bp, Homo sapien
aatgcgtgctctgcttctggtatcc

SEQ ID NO: 2609733 - DNA, 25 bp, Homo sapien
gagtcattgctttagccaggctgct

SEQ ID NO: 2609734 - DNA, 25 bp, Homo sapien
gcgagtcagcgcatcttcttaaatg

SEQ ID NO: 2609735 - DNA, 25 bp, Homo sapien
gcacccatagctgaagtaaaataca

SEQ ID NO: 2609736 - DNA, 25 bp, Homo sapien
cccatagctgaagtaaaatacaata

SEQ ID NO: 2609737 - DNA, 25 bp, Homo sapien
tgcacccatagctgaagtaaaatac

SEQ ID NO: 2609738 - DNA, 25 bp, Homo sapien
cacccatagctgaagtaaaatacaa

SEQ ID NO: 2609739 - DNA, 25 bp, Homo sapien
tctgtgttattaacggtaatgatga

SEQ ID NO: 2609740 - DNA, 25 bp, Homo sapien
tcaggaagacggtaagaggaggtgt

SEQ ID NO: 2609741 - DNA, 25 bp, Homo sapien
actggagtcaggaagacggtaagag

SEQ ID NO: 2609742 - DNA, 25 bp, Homo sapien
aggtctgtgttattaacggtaatga

SEQ ID NO: 2609743 - DNA, 25 bp, Homo sapien
ttaaagccaagtagtttccaattca

SEQ ID NO: 2609744 - DNA, 25 bp, Homo sapien
taaagccaagtagtttccaattcaa

SEQ ID NO: 2609745 - DNA, 25 bp, Homo sapien
taattccagacattagagatggcca

SEQ ID NO: 2609746 - DNA, 25 bp, Homo sapien
tctcaatacagtccaagatggaatg

SEQ ID NO: 2609747 - DNA, 25 bp, Homo sapien
gcacagtaagcaaacactaagactc

SEQ ID NO: 2609748 - DNA, 25 bp, Homo sapien
caagtgaatctttgagcacagtaag

SEQ ID NO: 2609749 - DNA, 25 bp, Homo sapien
tctttctcataataatctaccccat

SEQ ID NO: 2609750 - DNA, 25 bp, Homo sapien
tctcataataatctaccccatcccc

SEQ ID NO: 2609751 - DNA, 25 bp, Homo sapien
tttctcataataatctaccccatcc

SEQ ID NO: 2609752 - DNA, 25 bp, Homo sapien
ttctttctcataataatctacccca

SEQ ID NO: 2609753 - DNA, 25 bp, Homo sapien
aaaggccaaggttattgatgcccca

SEQ ID NO: 2609754 - DNA, 25 bp, Homo sapien
gccaaggttattgatgccccaacaa

SEQ ID NO: 2609755 - DNA, 25 bp, Homo sapien
caaggttattgatgccccaacaaga

SEQ ID NO: 2609756 - DNA, 25 bp, Homo sapien
ggccaaggttattgatgccccaaca

SEQ ID NO: 2609757 - DNA, 25 bp, Homo sapien
tgtgctggtgtccatgattggcagt

SEQ ID NO: 2609758 - DNA, 25 bp, Homo sapien
gctctgcctctagtgaatgtgctgg

SEQ ID NO: 2609759 - DNA, 25 bp, Homo sapien
gaacagttgttctggcggcggcatc

SEQ ID NO: 2609760 - DNA, 25 bp, Homo sapien
gcatctggtaattgcatttgagtag

SEQ ID NO: 2609761 - DNA, 25 bp, Homo sapien
cagcggtggagatgattgtccagga

SEQ ID NO: 2609762 - DNA, 25 bp, Homo sapien
tggagatgattgtccaggagtggac

SEQ ID NO: 2609763 - DNA, 25 bp, Homo sapien
agatgattgtccaggagtggacagt

SEQ ID NO: 2609764 - DNA, 25 bp, Homo sapien
ctcagagcagcggtggagatgattg

SEQ ID NO: 2609765 - DNA, 25 bp, Homo sapien
tgagtttagaacaaccacagaatgg

SEQ ID NO: 2609766 - DNA, 25 bp, Homo sapien
aatgggccacctaatgtgagtgggc

SEQ ID NO: 2609767 - DNA, 25 bp, Homo sapien
tgtgcacaagcctgcagcaattcat

SEQ ID NO: 2609768 - DNA, 25 bp, Homo sapien
cacagaatgggccacctaatgtgag

SEQ ID NO: 2609769 - DNA, 25 bp, Homo sapien
gggaagtccagggaaccttctgagc

SEQ ID NO: 2609770 - DNA, 25 bp, Homo sapien
tccagggaaccttctgagcacggga

SEQ ID NO: 2609771 - DNA, 25 bp, Homo sapien
gaaccttctgagcacgggatgctgt

SEQ ID NO: 2609772 - DNA, 25 bp, Homo sapien
tctgagcacgggatgctgtcctgaa

SEQ ID NO: 2609773 - DNA, 25 bp, Homo sapien
agtgatattgagctcagttggtgtc

SEQ ID NO: 2609774 - DNA, 25 bp, Homo sapien
tcacaacgggaaatgtggatgactg

SEQ ID NO: 2609775 - DNA, 25 bp, Homo sapien
tctgtggattccgtggactggtaat

SEQ ID NO: 2609776 - DNA, 25 bp, Homo sapien
attccgtggactggtaatgatgacc

SEQ ID NO: 2609777 - DNA, 25 bp, Homo sapien
gggtcacctgagttcttggatcgtg

SEQ ID NO: 2609778 - DNA, 25 bp, Homo sapien
gagttcttggatcgtgaagatgagc

SEQ ID NO: 2609779 - DNA, 25 bp, Homo sapien
cacctgagttcttggatcgtgaaga

SEQ ID NO: 2609780 - DNA, 25 bp, Homo sapien
cttggatcgtgaagatgagcagaac

SEQ ID NO: 2609781 - DNA, 25 bp, Homo sapien
tcttctttagcatccagttatgtgc

SEQ ID NO: 2609782 - DNA, 25 bp, Homo sapien
ggcagtcagttaatgcagacctctt

SEQ ID NO: 2609783 - DNA, 25 bp, Homo sapien
cagttatgtgctccacagtaggata

SEQ ID NO: 2609784 - DNA, 25 bp, Homo sapien
ggtctcccgctgtaggatggtgtca

SEQ ID NO: 2609785 - DNA, 25 bp, Homo sapien
catagacctgcaaggatgaccatca

SEQ ID NO: 2609786 - DNA, 25 bp, Homo sapien
gacccgcgtaagtgtctctggacat

SEQ ID NO: 2609787 - DNA, 25 bp, Homo sapien
gaccatcaatgcaggacccgcgtaa

SEQ ID NO: 2609788 - DNA, 25 bp, Homo sapien
gacctgcaaggatgaccatcaatgc

SEQ ID NO: 2609789 - DNA, 25 bp, Homo sapien
gcagggcggacaaatgggactacct

SEQ ID NO: 2609790 - DNA, 25 bp, Homo sapien
tcgagggtacaggatttaccaccat

SEQ ID NO: 2609791 - DNA, 25 bp, Homo sapien
ctgcagggcggacaaatgggactac

SEQ ID NO: 2609792 - DNA, 25 bp, Homo sapien
ctacctggtggggtcgagggtacag

SEQ ID NO: 2609793 - DNA, 25 bp, Homo sapien
ctggagcaggtaggaacagctcaag

SEQ ID NO: 2609794 - DNA, 25 bp, Homo sapien
gaaggaagtctcctactgtaagctt

SEQ ID NO: 2609795 - DNA, 25 bp, Homo sapien
ctgtaagcttcattcttgttatggt

SEQ ID NO: 2609796 - DNA, 25 bp, Homo sapien
tgaatctgccacatccctgaatctc

SEQ ID NO: 2609797 - DNA, 25 bp, Homo sapien
taaacccactactgagtgggagcca

SEQ ID NO: 2609798 - DNA, 25 bp, Homo sapien
tgtagcctctcaccagcaaaatgta

SEQ ID NO: 2609799 - DNA, 25 bp, Homo sapien
gcctctcaccagcaaaatgtaatgg

SEQ ID NO: 2609800 - DNA, 25 bp, Homo sapien
ctgcaagatgcaaggcaatgctgcc

SEQ ID NO: 2609801 - DNA, 25 bp, Homo sapien
aatgtaatggtgactactgggctgg

SEQ ID NO: 2609802 - DNA, 25 bp, Homo sapien
cccatcggtccaaaaggggcaggct

SEQ ID NO: 2609803 - DNA, 25 bp, Homo sapien
atgccccatcggtccaaaaggggca

SEQ ID NO: 2609804 - DNA, 25 bp, Homo sapien
cgggatgccccatcggtccaaaagg

SEQ ID NO: 2609805 - DNA, 25 bp, Homo sapien
ctcgggatgccccatcggtccaaaa

SEQ ID NO: 2609806 - DNA, 25 bp, Homo sapien
actcttgcaggagtggtccacccca

SEQ ID NO: 2609807 - DNA, 25 bp, Homo sapien
agagcagcatccttcagatccatct

SEQ ID NO: 2609808 - DNA, 25 bp, Homo sapien
aagagcagcatccttcagatccatc

SEQ ID NO: 2609809 - DNA, 25 bp, Homo sapien
ttgcaggagtggtccaccccaagca

SEQ ID NO: 2609810 - DNA, 25 bp, Homo sapien
taatgaataacaagtagtggagaag

SEQ ID NO: 2609811 - DNA, 25 bp, Homo sapien
gaattcaccatcttaataaatgagc

SEQ ID NO: 2609812 - DNA, 25 bp, Homo sapien
gctgatatagcagagaactcagaaa

SEQ ID NO: 2609813 - DNA, 25 bp, Homo sapien
catgcctggcgtttttacatgttta

SEQ ID NO: 2609814 - DNA, 25 bp, Homo sapien
gacacaggttcattctcacttgtgt

SEQ ID NO: 2609815 - DNA, 25 bp, Homo sapien
tgttcagcagccctgttactgttca

SEQ ID NO: 2609816 - DNA, 25 bp, Homo sapien
tcagcagccctgttactgttcacac

SEQ ID NO: 2609817 - DNA, 25 bp, Homo sapien
cttgtgtcgtgcactggctgtggct

SEQ ID NO: 2609818 - DNA, 25 bp, Homo sapien
catgggaactaagctctgagtgtac

SEQ ID NO: 2609819 - DNA, 25 bp, Homo sapien
actaagctctgagtgtactctcaac

SEQ ID NO: 2609820 - DNA, 25 bp, Homo sapien
tcttgggcatgggaactaagctctg

SEQ ID NO: 2609821 - DNA, 25 bp, Homo sapien
gctctgagtgtactctcaacttccc

SEQ ID NO: 2609822 - DNA, 25 bp, Homo sapien
ctacgttaatgtgattgttatcttc

SEQ ID NO: 2609823 - DNA, 25 bp, Homo sapien
ttcttgcagtgatacaatttcttct

SEQ ID NO: 2609824 - DNA, 25 bp, Homo sapien
gaatggcattgacttgatcaagcac

SEQ ID NO: 2609825 - DNA, 25 bp, Homo sapien
gttgttcatcttctacgttaatgtg

SEQ ID NO: 2609826 - DNA, 25 bp, Homo sapien
ttatttgcctgtgatgactttgaaa

SEQ ID NO: 2609827 - DNA, 25 bp, Homo sapien
cctgtgatgactttgaaagctaggt

SEQ ID NO: 2609828 - DNA, 25 bp, Homo sapien
ttgcctgtgatgactttgaaagcta

SEQ ID NO: 2609829 - DNA, 25 bp, Homo sapien
tgtgatgactttgaaagctaggtaa

SEQ ID NO: 2609830 - DNA, 25 bp, Homo sapien
tttgaatatagctgacaatagttgc

SEQ ID NO: 2609831 - DNA, 25 bp, Homo sapien
tagctgacaatagttgcttttgaga

SEQ ID NO: 2609832 - DNA, 25 bp, Homo sapien
gaatatagctgacaatagttgcttt

SEQ ID NO: 2609833 - DNA, 25 bp, Homo sapien
ctgacaatagttgcttttgagatac

SEQ ID NO: 2609834 - DNA, 25 bp, Homo sapien
gagtgttaagtcagattttgcaatg

SEQ ID NO: 2609835 - DNA, 25 bp, Homo sapien
cactgccagataaaagagtgttaag

SEQ ID NO: 2609836 - DNA, 25 bp, Homo sapien
tcctcttcatgagcctgtggccttg

SEQ ID NO: 2609837 - DNA, 25 bp, Homo sapien
ggctgtatttggcttgaggtccata

SEQ ID NO: 2609838 - DNA, 25 bp, Homo sapien
gctcagggcttgttggtgggctgaa

SEQ ID NO: 2609839 - DNA, 25 bp, Homo sapien
tagacatgatgaatggaacagtgat

SEQ ID NO: 2609840 - DNA, 25 bp, Homo sapien
gacgcccagccgctcagggcttgtt

SEQ ID NO: 2609841 - DNA, 25 bp, Homo sapien
gatcaagttcatagacatgatgaat

SEQ ID NO: 2609842 - DNA, 25 bp, Homo sapien
gagctcaactgtttctgcatcaaat

SEQ ID NO: 2609843 - DNA, 25 bp, Homo sapien
catttagagtagagctcaactgttt

SEQ ID NO: 2609844 - DNA, 25 bp, Homo sapien
ccttgtactctgcatttagagtaga

SEQ ID NO: 2609845 - DNA, 25 bp, Homo sapien
agctcaactgtttctgcatcaaatg

SEQ ID NO: 2609846 - DNA, 25 bp, Homo sapien
tggactctatgcagccatactccca

SEQ ID NO: 2609847 - DNA, 25 bp, Homo sapien
cagtgcacccaagccgctttttaaa

SEQ ID NO: 2609848 - DNA, 25 bp, Homo sapien
tctctggactctatgcagccatact

SEQ ID NO: 2609849 - DNA, 25 bp, Homo sapien
gagtcgtggagacctggcaattctc

SEQ ID NO: 2609850 - DNA, 25 bp, Homo sapien
tcaattccccattggctgacaaatt

SEQ ID NO: 2609851 - DNA, 25 bp, Homo sapien
catcaattccccattggctgacaaa

SEQ ID NO: 2609852 - DNA, 25 bp, Homo sapien
ccacatcaattccccattggctgac

SEQ ID NO: 2609853 - DNA, 25 bp, Homo sapien
acatcaattccccattggctgacaa

SEQ ID NO: 2609854 - DNA, 25 bp, Homo sapien
tccctggcttttatggtgcactgct

SEQ ID NO: 2609855 - DNA, 25 bp, Homo sapien
gcttgaaagagtggacgagcaccct

SEQ ID NO: 2609856 - DNA, 25 bp, Homo sapien
ccaattgggtgggtgctttcaaact

SEQ ID NO: 2609857 - DNA, 25 bp, Homo sapien
tgtgaggttcaaccacctgctgtag

SEQ ID NO: 2609858 - DNA, 25 bp, Homo sapien
gcagtgaggtaacagttgtctaagg

SEQ ID NO: 2609859 - DNA, 25 bp, Homo sapien
agtgaggtaacagttgtctaaggcc

SEQ ID NO: 2609860 - DNA, 25 bp, Homo sapien
tgaggtaacagttgtctaaggccag

SEQ ID NO: 2609861 - DNA, 25 bp, Homo sapien
tgagcagtgaggtaacagttgtcta

SEQ ID NO: 2609862 - DNA, 25 bp, Homo sapien
tgctgcatcctctgtgtgagattta

SEQ ID NO: 2609863 - DNA, 25 bp, Homo sapien
catcctctgtgtgagatttattagg

SEQ ID NO: 2609864 - DNA, 25 bp, Homo sapien
tgtgagatttattaggaggtcggtt

SEQ ID NO: 2609865 - DNA, 25 bp, Homo sapien
caaattgctgcatcctctgtgtgag

SEQ ID NO: 2609866 - DNA, 25 bp, Homo sapien
ccttgtcatcgccctggaggctgga

SEQ ID NO: 2609867 - DNA, 25 bp, Homo sapien
cttgtcatcgccctggaggctggac

SEQ ID NO: 2609868 - DNA, 25 bp, Homo sapien
tctccttgttcctgacctggcaggc

SEQ ID NO: 2609869 - DNA, 25 bp, Homo sapien
tgatgtgcatgatgaatcattcagc

SEQ ID NO: 2609870 - DNA, 25 bp, Homo sapien
ctccttgttcctgacctggcaggct

SEQ ID NO: 2609871 - DNA, 25 bp, Homo sapien
tgcatgatgaatcattcagctccac

SEQ ID NO: 2609872 - DNA, 25 bp, Homo sapien
ttttgctggtaaagaagtaagtcat

SEQ ID NO: 2609873 - DNA, 25 bp, Homo sapien
tttttgctggtaaagaagtaagtca

SEQ ID NO: 2609874 - DNA, 25 bp, Homo sapien
gggaaggtgacggagggaccagata

SEQ ID NO: 2609875 - DNA, 25 bp, Homo sapien
tcaccttcactatgagaagctataa

SEQ ID NO: 2609876 - DNA, 25 bp, Homo sapien
gggaccagataagccagcacgctgt

SEQ ID NO: 2609877 - DNA, 25 bp, Homo sapien
gcacgctgttcaccttcactatgag

SEQ ID NO: 2609878 - DNA, 25 bp, Homo sapien
gaagtgctccaactgtttggaagca

SEQ ID NO: 2609879 - DNA, 25 bp, Homo sapien
tctgattgccaatttgaggattgat

SEQ ID NO: 2609880 - DNA, 25 bp, Homo sapien
tgtacttgatcactgcttttggaag

SEQ ID NO: 2609881 - DNA, 25 bp, Homo sapien
tctttaacctgagaggaaacagtta

SEQ ID NO: 2609882 - DNA, 25 bp, Homo sapien
ctataggtggacaataatggtctct

SEQ ID NO: 2609883 - DNA, 25 bp, Homo sapien
tgtagaactgaagctgtaaattctg

SEQ ID NO: 2609884 - DNA, 25 bp, Homo sapien
tttgaaatctggaccacggagttcg

SEQ ID NO: 2609885 - DNA, 25 bp, Homo sapien
ctcttctctgttgggtgagagacac

SEQ ID NO: 2609886 - DNA, 25 bp, Homo sapien
agatcgacgagctcgggtgcgttca

SEQ ID NO: 2609887 - DNA, 25 bp, Homo sapien
tagcttcggagatcgacgagctcgg

SEQ ID NO: 2609888 - DNA, 25 bp, Homo sapien
ttcggagatcgacgagctcgggtgc

SEQ ID NO: 2609889 - DNA, 25 bp, Homo sapien
ttagcttcggagatcgacgagctcg

SEQ ID NO: 2609890 - DNA, 25 bp, Homo sapien
cttgtattcagttgacagatgtgta

SEQ ID NO: 2609891 - DNA, 25 bp, Homo sapien
gccacagtcatgtagttcagaggct

SEQ ID NO: 2609892 - DNA, 25 bp, Homo sapien
catgtagttcagaggctggccatta

SEQ ID NO: 2609893 - DNA, 25 bp, Homo sapien
ctggccattagtctgagtcagtcct

SEQ ID NO: 2609894 - DNA, 25 bp, Homo sapien
tcctccactgtatggggttgcccag

SEQ ID NO: 2609895 - DNA, 25 bp, Homo sapien
tgagagagtggggagctgtagccat

SEQ ID NO: 2609896 - DNA, 25 bp, Homo sapien
gatgagagagtggggagctgtagcc

SEQ ID NO: 2609897 - DNA, 25 bp, Homo sapien
ctggctgtggggagatgagagagtg

SEQ ID NO: 2609898 - DNA, 25 bp, Homo sapien
gagatgagagagtggggagctgtag

SEQ ID NO: 2609899 - DNA, 25 bp, Homo sapien
tctaatgagtttactgttgttcggc

SEQ ID NO: 2609900 - DNA, 25 bp, Homo sapien
aacctccactctgtattcttttcta

SEQ ID NO: 2609901 - DNA, 25 bp, Homo sapien
ctgttgttcggctgaaatcaaccca

SEQ ID NO: 2609902 - DNA, 25 bp, Homo sapien
ccatcttgtagcttctaatgagttt

SEQ ID NO: 2609903 - DNA, 25 bp, Homo sapien
tccacttcaaaagtcgggttgatcg

SEQ ID NO: 2609904 - DNA, 25 bp, Homo sapien
ttttggaatgaaagtcgtgttgtca

SEQ ID NO: 2609905 - DNA, 25 bp, Homo sapien
agctgccgtgcaagtaatttttcca

SEQ ID NO: 2609906 - DNA, 25 bp, Homo sapien
gggttgatcgttgccagtgtttgta

SEQ ID NO: 2609907 - DNA, 25 bp, Homo sapien
gcctatatatggagcagtgtttccc

SEQ ID NO: 2609908 - DNA, 25 bp, Homo sapien
agtgactgtagcaacaatgtctgcc

SEQ ID NO: 2609909 - DNA, 25 bp, Homo sapien
gtggctccaagacacgttgcctata

SEQ ID NO: 2609910 - DNA, 25 bp, Homo sapien
caatgtctgccgactaaggacagtc

SEQ ID NO: 2609911 - DNA, 25 bp, Homo sapien
aagaagactgggtgattgtcaggca

SEQ ID NO: 2609912 - DNA, 25 bp, Homo sapien
gaagggtccacttttctaatgctcc

SEQ ID NO: 2609913 - DNA, 25 bp, Homo sapien
tttgccatgatattcagaagggtcc

SEQ ID NO: 2609914 - DNA, 25 bp, Homo sapien
ctaatgctccctggattatggatcc

SEQ ID NO: 2609915 - DNA, 25 bp, Homo sapien
tgatggctgaatcatgttgaattgt

SEQ ID NO: 2609916 - DNA, 25 bp, Homo sapien
ctctggaggaatgctcctctgggtt

SEQ ID NO: 2609917 - DNA, 25 bp, Homo sapien
cctctgggttatttgcatcaaccat

SEQ ID NO: 2609918 - DNA, 25 bp, Homo sapien
cttgatctctggaggaatgctcctc

SEQ ID NO: 2609919 - DNA, 25 bp, Homo sapien
ggaatgctcctctgggttatttgca

SEQ ID NO: 2609920 - DNA, 25 bp, Homo sapien
tgtatgtgaataaggagggcatgcg

SEQ ID NO: 2609921 - DNA, 25 bp, Homo sapien
ttgtatgtgaataaggagggcatgc

SEQ ID NO: 2609922 - DNA, 25 bp, Homo sapien
tgtgaataaggagggcatgcggaca

SEQ ID NO: 2609923 - DNA, 25 bp, Homo sapien
tatgtgaataaggagggcatgcgga

SEQ ID NO: 2609924 - DNA, 25 bp, Homo sapien
gcagaaacagttctgctctgcttcc

SEQ ID NO: 2609925 - DNA, 25 bp, Homo sapien
agggaccttacgctcttccaggtag

SEQ ID NO: 2609926 - DNA, 25 bp, Homo sapien
tacagccagggaccttacgctcttc

SEQ ID NO: 2609927 - DNA, 25 bp, Homo sapien
agctcctgagcgcttgacgcagaaa

SEQ ID NO: 2609928 - DNA, 25 bp, Homo sapien
gctgcgcagctcaggcttcatcact

SEQ ID NO: 2609929 - DNA, 25 bp, Homo sapien
taaaacgtgatgtttttccatcggc

SEQ ID NO: 2609930 - DNA, 25 bp, Homo sapien
cagttagtccaggtctgaaaccaga

SEQ ID NO: 2609931 - DNA, 25 bp, Homo sapien
cactgtggtgataacagagacctgc

SEQ ID NO: 2609932 - DNA, 25 bp, Homo sapien
ctggcaagggccacggtcattctca

SEQ ID NO: 2609933 - DNA, 25 bp, Homo sapien
cagtgtgtagaacattgtcccagac

SEQ ID NO: 2609934 - DNA, 25 bp, Homo sapien
gaaacattgtcgtcgccctccaaaa

SEQ ID NO: 2609935 - DNA, 25 bp, Homo sapien
gtgtagaacattgtcccagactatg

SEQ ID NO: 2609936 - DNA, 25 bp, Homo sapien
gactatgaggagaccagaatggatg

SEQ ID NO: 2609937 - DNA, 25 bp, Homo sapien
ctggtgggtgatgtaccctccgtga

SEQ ID NO: 2609938 - DNA, 25 bp, Homo sapien
taccctccgtgatggattctgctgc

SEQ ID NO: 2609939 - DNA, 25 bp, Homo sapien
gctgctctacaatgggcaacatctg

SEQ ID NO: 2609940 - DNA, 25 bp, Homo sapien
ctacaatgggcaacatctgcagatg

SEQ ID NO: 2609941 - DNA, 25 bp, Homo sapien
ctgtttggcaacagtgcctgaacag

SEQ ID NO: 2609942 - DNA, 25 bp, Homo sapien
gtttggcaacagtgcctgaacaggc

SEQ ID NO: 2609943 - DNA, 25 bp, Homo sapien
tgtttggcaacagtgcctgaacagg

SEQ ID NO: 2609944 - DNA, 25 bp, Homo sapien
gagcccagcatgtgccagttcttct

SEQ ID NO: 2609945 - DNA, 25 bp, Homo sapien
gaagagctggttcgggggcacagcc

SEQ ID NO: 2609946 - DNA, 25 bp, Homo sapien
tcaaggatgcccatttgccaatgtg

SEQ ID NO: 2609947 - DNA, 25 bp, Homo sapien
ggatgcccatttgccaatgtggaag

SEQ ID NO: 2609948 - DNA, 25 bp, Homo sapien
tgtttgggtggtaggaggcctgtgg

SEQ ID NO: 2609949 - DNA, 25 bp, Homo sapien
ccatctgtttgggtggtaggaggcc

SEQ ID NO: 2609950 - DNA, 25 bp, Homo sapien
acgtgtgcccatctgtttgggtggt

SEQ ID NO: 2609951 - DNA, 25 bp, Homo sapien
cgtgtgcccatctgtttgggtggta

SEQ ID NO: 2609952 - DNA, 25 bp, Homo sapien
attatgtggcttccccgcatcctgt

SEQ ID NO: 2609953 - DNA, 25 bp, Homo sapien
cagttgctttgccagacgatgatct

SEQ ID NO: 2609954 - DNA, 25 bp, Homo sapien
tccagtactgggcagcatattggtc

SEQ ID NO: 2609955 - DNA, 25 bp, Homo sapien
cagcatattggtccagcaactgggc

SEQ ID NO: 2609956 - DNA, 25 bp, Homo sapien
gtcacagccctgtatgggtatttat

SEQ ID NO: 2609957 - DNA, 25 bp, Homo sapien
tagcttccacatgtcacagccctgt

SEQ ID NO: 2609958 - DNA, 25 bp, Homo sapien
agcttccacatgtcacagccctgta

SEQ ID NO: 2609959 - DNA, 25 bp, Homo sapien
ttacaactctgatagatgaggcccc

SEQ ID NO: 2609960 - DNA, 25 bp, Homo sapien
ttagcctgaagaagacgctacagac

SEQ ID NO: 2609961 - DNA, 25 bp, Homo sapien
tacgtgttgaattgcatccctccag

SEQ ID NO: 2609962 - DNA, 25 bp, Homo sapien
cgctacagactgttatggaaatatt

SEQ ID NO: 2609963 - DNA, 25 bp, Homo sapien
tacaggtatgctacacaggtaaacg

SEQ ID NO: 2609964 - DNA, 25 bp, Homo sapien
ttttaagctcgggtatatgtgcagg

SEQ ID NO: 2609965 - DNA, 25 bp, Homo sapien
gctccatatataccagttgttcaca

SEQ ID NO: 2609966 - DNA, 25 bp, Homo sapien
gccttggtattaagctccacatcca

SEQ ID NO: 2609967 - DNA, 25 bp, Homo sapien
cggcttttatctggtccccctgcat

SEQ ID NO: 2609968 - DNA, 25 bp, Homo sapien
tgaggtttctaatgggcggctttta

SEQ ID NO: 2609969 - DNA, 25 bp, Homo sapien
aactgaggtttctaatgggcggctt

SEQ ID NO: 2609970 - DNA, 25 bp, Homo sapien
cattactttgcttgaatgcgtgtga

SEQ ID NO: 2609971 - DNA, 25 bp, Homo sapien
gcatgtttgttgacgatagctggag

SEQ ID NO: 2609972 - DNA, 25 bp, Homo sapien
tgttgacgatagctggagtaatata

SEQ ID NO: 2609973 - DNA, 25 bp, Homo sapien
tgtttgttgacgatagctggagtaa

SEQ ID NO: 2609974 - DNA, 25 bp, Homo sapien
gttgaagcatgtttgttgacgatag

SEQ ID NO: 2609975 - DNA, 25 bp, Homo sapien
ttatactgatgtaactgagactttg

SEQ ID NO: 2609976 - DNA, 25 bp, Homo sapien
actggatcctgtgagagaggtaaga

SEQ ID NO: 2609977 - DNA, 25 bp, Homo sapien
gaattattgtctttgtagttatact

SEQ ID NO: 2609978 - DNA, 25 bp, Homo sapien
tgatgtaactgagactttgacccat

SEQ ID NO: 2609979 - DNA, 25 bp, Homo sapien
ggataccaaccacaattagcaaaga

SEQ ID NO: 2609980 - DNA, 25 bp, Homo sapien
caacaatctagtcccagtggagtca

SEQ ID NO: 2609981 - DNA, 25 bp, Homo sapien
gaaaccaggtgcaaactttcaacaa

SEQ ID NO: 2609982 - DNA, 25 bp, Homo sapien
tgaattatgataatacatctgaaac

SEQ ID NO: 2609983 - DNA, 25 bp, Homo sapien
cagtagtgcaccagatctcccttct

SEQ ID NO: 2609984 - DNA, 25 bp, Homo sapien
gagccattgagttgtggtaactcca

SEQ ID NO: 2609985 - DNA, 25 bp, Homo sapien
cagaatggtcaatgctggccagtag

SEQ ID NO: 2609986 - DNA, 25 bp, Homo sapien
gctgtgggatttcgtactgtgtgat

SEQ ID NO: 2609987 - DNA, 25 bp, Homo sapien
ctactcggagggagatgctgctcac

SEQ ID NO: 2609988 - DNA, 25 bp, Homo sapien
catgtagctgggctcgtgagttcca

SEQ ID NO: 2609989 - DNA, 25 bp, Homo sapien
gaaacatgtagctgggctcgtgagt

SEQ ID NO: 2609990 - DNA, 25 bp, Homo sapien
gctgggctcgtgagttccaggccct

SEQ ID NO: 2609991 - DNA, 25 bp, Homo sapien
cttcctgaaacatgtagctgggctc

SEQ ID NO: 2609992 - DNA, 25 bp, Homo sapien
ggtgctcaaactctccaataactgt

SEQ ID NO: 2609993 - DNA, 25 bp, Homo sapien
aatccatgtatgcttccaggttctc

SEQ ID NO: 2609994 - DNA, 25 bp, Homo sapien
gtgatatattcctcaggtgctcaaa

SEQ ID NO: 2609995 - DNA, 25 bp, Homo sapien
taactgttaccaaattcttgatgtg

SEQ ID NO: 2609996 - DNA, 25 bp, Homo sapien
gacaaagctactcctgatgtgaggg

SEQ ID NO: 2609997 - DNA, 25 bp, Homo sapien
gaaggagctcttgacaaagctactc

SEQ ID NO: 2609998 - DNA, 25 bp, Homo sapien
cagctcccgtgagagggctgagcag

SEQ ID NO: 2609999 - DNA, 25 bp, Homo sapien
tgagcagtgaaggagctcttgacaa

SEQ ID NO: 2610000 - DNA, 25 bp, Homo sapien
tggagcatttatcctagttgtaatt

SEQ ID NO: 2610001 - DNA, 25 bp, Homo sapien
ctccctgtccactgttagcaccatg

SEQ ID NO: 2610002 - DNA, 25 bp, Homo sapien
ctgtccactgttagcaccatggatg

SEQ ID NO: 2610003 - DNA, 25 bp, Homo sapien
tatcctagttgtaatttgctgttta

SEQ ID NO: 2610004 - DNA, 25 bp, Homo sapien
gttacatcactgttgccccagcaca

SEQ ID NO: 2610005 - DNA, 25 bp, Homo sapien
acaatctgctccacacaataaagtc

SEQ ID NO: 2610006 - DNA, 25 bp, Homo sapien
acatgaggggcctttggcagcctcc

SEQ ID NO: 2610007 - DNA, 25 bp, Homo sapien
gctctgatgacttggtatccacttc

SEQ ID NO: 2610008 - DNA, 25 bp, Homo sapien
cctggtctaatatctgttctctggg

SEQ ID NO: 2610009 - DNA, 25 bp, Homo sapien
tgggtactgggtgtaatacgagtcc

SEQ ID NO: 2610010 - DNA, 25 bp, Homo sapien
tgtccaactgccctgatgggtactg

SEQ ID NO: 2610011 - DNA, 25 bp, Homo sapien
cactgtccaactgccctgatgggta

SEQ ID NO: 2610012 - DNA, 25 bp, Homo sapien
tccgaggacgactagtgcaaacaga

SEQ ID NO: 2610013 - DNA, 25 bp, Homo sapien
caaagcagctgcgaatctgagccaa

SEQ ID NO: 2610014 - DNA, 25 bp, Homo sapien
gatcaactgctctgttgcggctgaa

SEQ ID NO: 2610015 - DNA, 25 bp, Homo sapien
caaggtattgtgtcctccgaggacg

SEQ ID NO: 2610016 - DNA, 25 bp, Homo sapien
gagtagcatcttgcagtccagcgag

SEQ ID NO: 2610017 - DNA, 25 bp, Homo sapien
catgctttgcccgtgatatctgagg

SEQ ID NO: 2610018 - DNA, 25 bp, Homo sapien
taatggaagattaacaggagtagca

SEQ ID NO: 2610019 - DNA, 25 bp, Homo sapien
tatctgagggacagacgtaacatca

SEQ ID NO: 2610020 - DNA, 25 bp, Homo sapien
tgggtcaatggagaaacggtgttca

SEQ ID NO: 2610021 - DNA, 25 bp, Homo sapien
tagggcaattagcaaagtaggtgat

SEQ ID NO: 2610022 - DNA, 25 bp, Homo sapien
gctccaagtccggtagggttgcagt

SEQ ID NO: 2610023 - DNA, 25 bp, Homo sapien
ggcagtgtagggcaattagcaaagt

SEQ ID NO: 2610024 - DNA, 25 bp, Homo sapien
ggtcctgagaccttaggcatccaca

SEQ ID NO: 2610025 - DNA, 25 bp, Homo sapien
gaccttaggcatccacatcagcttc

SEQ ID NO: 2610026 - DNA, 25 bp, Homo sapien
gttcgtgggtcctgagaccttaggc

SEQ ID NO: 2610027 - DNA, 25 bp, Homo sapien
gggattagtggttcgcccaggctca

SEQ ID NO: 2610028 - DNA, 25 bp, Homo sapien
ctgtggcaggatagagaatgagaaa

SEQ ID NO: 2610029 - DNA, 25 bp, Homo sapien
tgtggcaggatagagaatgagaaat

SEQ ID NO: 2610030 - DNA, 25 bp, Homo sapien
tggcaggatagagaatgagaaataa

SEQ ID NO: 2610031 - DNA, 25 bp, Homo sapien
ggcaggatagagaatgagaaataac

SEQ ID NO: 2610032 - DNA, 25 bp, Homo sapien
cagaactggttctgtctgatttttt

SEQ ID NO: 2610033 - DNA, 25 bp, Homo sapien
cattccatagaaaggaaaatcaata

SEQ ID NO: 2610034 - DNA, 25 bp, Homo sapien
tggcaaggacaacacgcagtcaccc

SEQ ID NO: 2610035 - DNA, 25 bp, Homo sapien
tgaccctggtggtgtagcccagtgt

SEQ ID NO: 2610036 - DNA, 25 bp, Homo sapien
acccacgactgtgagggagagtgcc

SEQ ID NO: 2610037 - DNA, 25 bp, Homo sapien
aaagcagtccatttatgctgagatt

SEQ ID NO: 2610038 - DNA, 25 bp, Homo sapien
aaagtctgcgaatacagagctcctc

SEQ ID NO: 2610039 - DNA, 25 bp, Homo sapien
gaaagcagtccatttatgctgagat

SEQ ID NO: 2610040 - DNA, 25 bp, Homo sapien
ttaaagtctgcgaatacagagctcc

SEQ ID NO: 2610041 - DNA, 25 bp, Homo sapien
gcgacagtcgtgcagattacactgt

SEQ ID NO: 2610042 - DNA, 25 bp, Homo sapien
tccaccaagagtgcctgttctatca

SEQ ID NO: 2610043 - DNA, 25 bp, Homo sapien
gcagattacactgttccaccaagag

SEQ ID NO: 2610044 - DNA, 25 bp, Homo sapien
tgttccaccaagagtgcctgttcta

SEQ ID NO: 2610045 - DNA, 25 bp, Homo sapien
gactgtgagaattcctctgcttgga

SEQ ID NO: 2610046 - DNA, 25 bp, Homo sapien
gcagtaatgtgccaccacgtttcag

SEQ ID NO: 2610047 - DNA, 25 bp, Homo sapien
catgggtgctcagtagtgcgaatga

SEQ ID NO: 2610048 - DNA, 25 bp, Homo sapien
tgcgaatgaggtgttggatgcaccc

SEQ ID NO: 2610049 - DNA, 25 bp, Homo sapien
ggtggagcactatttgggtaacaca

SEQ ID NO: 2610050 - DNA, 25 bp, Homo sapien
gctttggatttctcctggtggagca

SEQ ID NO: 2610051 - DNA, 25 bp, Homo sapien
ttgggtaacacactcttagactttc

SEQ ID NO: 2610052 - DNA, 25 bp, Homo sapien
ttggatttctcctggtggagcacta

SEQ ID NO: 2610053 - DNA, 25 bp, Homo sapien
cgttcttattgtagttggctcatta

SEQ ID NO: 2610054 - DNA, 25 bp, Homo sapien
tgtccaaacctatcagagcagcctc

SEQ ID NO: 2610055 - DNA, 25 bp, Homo sapien
taccagccatgtccaaacctatcag

SEQ ID NO: 2610056 - DNA, 25 bp, Homo sapien
tagttggctcattaccagccatgtc

SEQ ID NO: 2610057 - DNA, 25 bp, Homo sapien
ataatagccatgaacagtgaacagc

SEQ ID NO: 2610058 - DNA, 25 bp, Homo sapien
gtttccttgatcttaggtctccatg

SEQ ID NO: 2610059 - DNA, 25 bp, Homo sapien
acagtgaacagcacagataatgaag

SEQ ID NO: 2610060 - DNA, 25 bp, Homo sapien
ccgcgtttccttgatcttaggtctc

SEQ ID NO: 2610061 - DNA, 25 bp, Homo sapien
cagctggatagaggatgacattttg

SEQ ID NO: 2610062 - DNA, 25 bp, Homo sapien
cttatcttctagaactggaacttgg

SEQ ID NO: 2610063 - DNA, 25 bp, Homo sapien
tcgagaatcttctgttcacagctgg

SEQ ID NO: 2610064 - DNA, 25 bp, Homo sapien
caaggcgagtaggtgttcgagaatc

SEQ ID NO: 2610065 - DNA, 25 bp, Homo sapien
tactggatgggtcacgaggacagcc

SEQ ID NO: 2610066 - DNA, 25 bp, Homo sapien
atgggtcacgaggacagccacgacc

SEQ ID NO: 2610067 - DNA, 25 bp, Homo sapien
cttgcatgatactggatgggtcacg

SEQ ID NO: 2610068 - DNA, 25 bp, Homo sapien
gacagccacgaccagaactggagcc

SEQ ID NO: 2610069 - DNA, 25 bp, Homo sapien
cctgtttgagggcatgcattcatga

SEQ ID NO: 2610070 - DNA, 25 bp, Homo sapien
gaaaacttagggttggatgcaagga

SEQ ID NO: 2610071 - DNA, 25 bp, Homo sapien
aatggaaggttttgaatctcagaac

SEQ ID NO: 2610072 - DNA, 25 bp, Homo sapien
tgtatattcagtttcggataagcct

SEQ ID NO: 2610073 - DNA, 25 bp, Homo sapien
tagccttctcccataaatatgtagc

SEQ ID NO: 2610074 - DNA, 25 bp, Homo sapien
cttctcccataaatatgtagcattt

SEQ ID NO: 2610075 - DNA, 25 bp, Homo sapien
ctagccttctcccataaatatgtag

SEQ ID NO: 2610076 - DNA, 25 bp, Homo sapien
gccttctcccataaatatgtagcat

SEQ ID NO: 2610077 - DNA, 25 bp, Homo sapien
atatcattggcagagatcatggaag

SEQ ID NO: 2610078 - DNA, 25 bp, Homo sapien
ggcacctggaggaataatatcattg

SEQ ID NO: 2610079 - DNA, 25 bp, Homo sapien
agatcatggaagagacttgattcat

SEQ ID NO: 2610080 - DNA, 25 bp, Homo sapien
gaataatatcattggcagagatcat

SEQ ID NO: 2610081 - DNA, 25 bp, Homo sapien
actaaagtcaggctcagcattggta

SEQ ID NO: 2610082 - DNA, 25 bp, Homo sapien
ctaaagtcaggctcagcattggtaa

SEQ ID NO: 2610083 - DNA, 25 bp, Homo sapien
gactaaagtcaggctcagcattggt

SEQ ID NO: 2610084 - DNA, 25 bp, Homo sapien
taaagtcaggctcagcattggtaaa

SEQ ID NO: 2610085 - DNA, 25 bp, Homo sapien
tatccccgaaatcacacagggcttt

SEQ ID NO: 2610086 - DNA, 25 bp, Homo sapien
gctttccactgagagcgcattgcat

SEQ ID NO: 2610087 - DNA, 25 bp, Homo sapien
cagggctttccactgagagcgcatt

SEQ ID NO: 2610088 - DNA, 25 bp, Homo sapien
ctttgccgctctatccccgaaatca

SEQ ID NO: 2610089 - DNA, 25 bp, Homo sapien
cttgggccacgtgggaggaacatta

SEQ ID NO: 2610090 - DNA, 25 bp, Homo sapien
ggccacgtgggaggaacattactga

SEQ ID NO: 2610091 - DNA, 25 bp, Homo sapien
gccacgtgggaggaacattactgac

SEQ ID NO: 2610092 - DNA, 25 bp, Homo sapien
ctacttgggccacgtgggaggaaca

SEQ ID NO: 2610093 - DNA, 25 bp, Homo sapien
gattgctaactccatcgaacactgt

SEQ ID NO: 2610094 - DNA, 25 bp, Homo sapien
gcttcccaagggattgctaactcca

SEQ ID NO: 2610095 - DNA, 25 bp, Homo sapien
catcttcccagtgatgaagcttccc

SEQ ID NO: 2610096 - DNA, 25 bp, Homo sapien
tccatcgaacactgtctcctttttg

SEQ ID NO: 2610097 - DNA, 25 bp, Homo sapien
tgatgagggccattgtgtggacaga

SEQ ID NO: 2610098 - DNA, 25 bp, Homo sapien
tgagggccattgtgtggacagaaac

SEQ ID NO: 2610099 - DNA, 25 bp, Homo sapien
agggccattgtgtggacagaaacat

SEQ ID NO: 2610100 - DNA, 25 bp, Homo sapien
ttcaggtgatgagggccattgtgtg

SEQ ID NO: 2610101 - DNA, 25 bp, Homo sapien
cgcaaggccgtcctgagcaggtcac

SEQ ID NO: 2610102 - DNA, 25 bp, Homo sapien
ctgcatgactccacggattttgggc

SEQ ID NO: 2610103 - DNA, 25 bp, Homo sapien
tgccgcaaggccgtcctgagcaggt

SEQ ID NO: 2610104 - DNA, 25 bp, Homo sapien
ctggtgacctaacagctgcatgact

SEQ ID NO: 2610105 - DNA, 25 bp, Homo sapien
gaggaccatccttgataaacctggc

SEQ ID NO: 2610106 - DNA, 25 bp, Homo sapien
tggaatatcaactggacctgcttct

SEQ ID NO: 2610107 - DNA, 25 bp, Homo sapien
cctggccactctcaaaatttgcaag

SEQ ID NO: 2610108 - DNA, 25 bp, Homo sapien
acaagttctgtagctgtgagtgaca

SEQ ID NO: 2610109 - DNA, 25 bp, Homo sapien
ccttaaagtctggagataaagagca

SEQ ID NO: 2610110 - DNA, 25 bp, Homo sapien
tgccaactggatgccctcttttagg

SEQ ID NO: 2610111 - DNA, 25 bp, Homo sapien
aaagacatctggattccttaaagtc

SEQ ID NO: 2610112 - DNA, 25 bp, Homo sapien
taaagagcaaagtcatgggagggat

SEQ ID NO: 2610113 - DNA, 25 bp, Homo sapien
tctctgtccgtagcctctttgaaag

SEQ ID NO: 2610114 - DNA, 25 bp, Homo sapien
gttaaagcacgcagcagaattctta

SEQ ID NO: 2610115 - DNA, 25 bp, Homo sapien
tttgaaagttaaagcacgcagcaga

SEQ ID NO: 2610116 - DNA, 25 bp, Homo sapien
gggagcccagcgaagtttccactct

SEQ ID NO: 2610117 - DNA, 25 bp, Homo sapien
caccctgatacctggtgttacagac

SEQ ID NO: 2610118 - DNA, 25 bp, Homo sapien
ataacaaggatcagttttcaccctg

SEQ ID NO: 2610119 - DNA, 25 bp, Homo sapien
taacataacaaggatcagttttcac

SEQ ID NO: 2610120 - DNA, 25 bp, Homo sapien
cctggtgttacagacagctcagtca

SEQ ID NO: 2610121 - DNA, 25 bp, Homo sapien
cagtgagtacattggattttaagcc

SEQ ID NO: 2610122 - DNA, 25 bp, Homo sapien
gagtacattggattttaagcctggt

SEQ ID NO: 2610123 - DNA, 25 bp, Homo sapien
gtggacttgggacatctgcgtgctt

SEQ ID NO: 2610124 - DNA, 25 bp, Homo sapien
gcgtgctttacatcagtgcttttaa

SEQ ID NO: 2610125 - DNA, 25 bp, Homo sapien
cccagggaactatctacttttagat

SEQ ID NO: 2610126 - DNA, 25 bp, Homo sapien
agggaactatctacttttagatatg

SEQ ID NO: 2610127 - DNA, 25 bp, Homo sapien
ccagggaactatctacttttagata

SEQ ID NO: 2610128 - DNA, 25 bp, Homo sapien
gcccagggaactatctacttttaga

SEQ ID NO: 2610129 - DNA, 25 bp, Homo sapien
gatcactgcccaatccaggatgcaa

SEQ ID NO: 2610130 - DNA, 25 bp, Homo sapien
gatgcaaggctgtgagcgctgtact

SEQ ID NO: 2610131 - DNA, 25 bp, Homo sapien
gctcccgctaataggtcacctgatg

SEQ ID NO: 2610132 - DNA, 25 bp, Homo sapien
tgcactgcctctatgctcctcggaa

SEQ ID NO: 2610133 - DNA, 25 bp, Homo sapien
tccacgtttgcaactaaccttgtaa

SEQ ID NO: 2610134 - DNA, 25 bp, Homo sapien
aaccttgtaaaatcccgtggcaatg

SEQ ID NO: 2610135 - DNA, 25 bp, Homo sapien
tgtcttgtccacgtttgcaactaac

SEQ ID NO: 2610136 - DNA, 25 bp, Homo sapien
caccagagttgtcttgtccacgttt

SEQ ID NO: 2610137 - DNA, 25 bp, Homo sapien
gaataccttagaaccagccataggt

SEQ ID NO: 2610138 - DNA, 25 bp, Homo sapien
agccataggtgagcacagaaattcc

SEQ ID NO: 2610139 - DNA, 25 bp, Homo sapien
cagaaattcccggacagagttaata

SEQ ID NO: 2610140 - DNA, 25 bp, Homo sapien
ggcagcagaaagaaatatgatgttc

SEQ ID NO: 2610141 - DNA, 25 bp, Homo sapien
tgtctggggacagggtcctgtccat

SEQ ID NO: 2610142 - DNA, 25 bp, Homo sapien
ctggggaccagccacagatgccatg

SEQ ID NO: 2610143 - DNA, 25 bp, Homo sapien
ccagccacagatgccatggacggtg

SEQ ID NO: 2610144 - DNA, 25 bp, Homo sapien
acagatgccatggacggtgtctggg

SEQ ID NO: 2610145 - DNA, 25 bp, Homo sapien
ctgaccctggaaagttactggaagt

SEQ ID NO: 2610146 - DNA, 25 bp, Homo sapien
tccaagtctggattgaacaggaaag

SEQ ID NO: 2610147 - DNA, 25 bp, Homo sapien
tgaatcattgcattactgctgtggg

SEQ ID NO: 2610148 - DNA, 25 bp, Homo sapien
ggtgcaaataacaaagccatagggc

SEQ ID NO: 2610149 - DNA, 25 bp, Homo sapien
gcactgtatatctggagtatttaaa

SEQ ID NO: 2610150 - DNA, 25 bp, Homo sapien
cttcatatggcactgtatatctgga

SEQ ID NO: 2610151 - DNA, 25 bp, Homo sapien
catagtagctgccccacgtctgggc

SEQ ID NO: 2610152 - DNA, 25 bp, Homo sapien
gaacttcagggtctactatgggctc

SEQ ID NO: 2610153 - DNA, 25 bp, Homo sapien
ggtccctgtctcttaggtgctcaga

SEQ ID NO: 2610154 - DNA, 25 bp, Homo sapien
tgtgctgtaagcttaatgaagtcca

SEQ ID NO: 2610155 - DNA, 25 bp, Homo sapien
aggaacattaatttgctggcaggcc

SEQ ID NO: 2610156 - DNA, 25 bp, Homo sapien
ggccccaaagtgctcatcaacctgt

SEQ ID NO: 2610157 - DNA, 25 bp, Homo sapien
tctgttttccatgagctcttggtct

SEQ ID NO: 2610158 - DNA, 25 bp, Homo sapien
tgagcctgctgaaccattggcacca

SEQ ID NO: 2610159 - DNA, 25 bp, Homo sapien
atgttcttggatgaatgcacgctgc

SEQ ID NO: 2610160 - DNA, 25 bp, Homo sapien
gtttctcaggccaatgttcttggat

SEQ ID NO: 2610161 - DNA, 25 bp, Homo sapien
ccaccggactccatgaacaaagaga

SEQ ID NO: 2610162 - DNA, 25 bp, Homo sapien
tgtggcaacgagcatcgctgagctg

SEQ ID NO: 2610163 - DNA, 25 bp, Homo sapien
acatatggctgcaggatgtaggagc

SEQ ID NO: 2610164 - DNA, 25 bp, Homo sapien
gacacttgccccagatggtacatat

SEQ ID NO: 2610165 - DNA, 25 bp, Homo sapien
gccagcaccttgaaatggtattaat

SEQ ID NO: 2610166 - DNA, 25 bp, Homo sapien
acatgccagcaccttgaaatggtat

SEQ ID NO: 2610167 - DNA, 25 bp, Homo sapien
catgaagaatttctagagttttatc

SEQ ID NO: 2610168 - DNA, 25 bp, Homo sapien
tttatcattcctgctcacatgccag

SEQ ID NO: 2610169 - DNA, 25 bp, Homo sapien
tcattttcggttctcaatctacctc

SEQ ID NO: 2610170 - DNA, 25 bp, Homo sapien
cattttcggttctcaatctacctct

SEQ ID NO: 2610171 - DNA, 25 bp, Homo sapien
atactcattttcggttctcaatcta

SEQ ID NO: 2610172 - DNA, 25 bp, Homo sapien
actcattttcggttctcaatctacc

SEQ ID NO: 2610173 - DNA, 25 bp, Homo sapien
ccattcacccatggtcctccggagt

SEQ ID NO: 2610174 - DNA, 25 bp, Homo sapien
cctcagtaatgatactcaaggacct

SEQ ID NO: 2610175 - DNA, 25 bp, Homo sapien
ccattgggtcctcagtaatgatact

SEQ ID NO: 2610176 - DNA, 25 bp, Homo sapien
tgggtcctcagtaatgatactcaag

SEQ ID NO: 2610177 - DNA, 25 bp, Homo sapien
atttatttccccatccacgtttgag

SEQ ID NO: 2610178 - DNA, 25 bp, Homo sapien
caaggcacttccgttagcacaaaaa

SEQ ID NO: 2610179 - DNA, 25 bp, Homo sapien
aatggcctttttcaacaagatgacg

SEQ ID NO: 2610180 - DNA, 25 bp, Homo sapien
gaaaaattgtggatagtcaaatgat

SEQ ID NO: 2610181 - DNA, 25 bp, Homo sapien
cctctgagagtcacagttgataagg

SEQ ID NO: 2610182 - DNA, 25 bp, Homo sapien
tattgcagaatgatgtcgagttcca

SEQ ID NO: 2610183 - DNA, 25 bp, Homo sapien
ttgcctgagcaagccaaacattttg

SEQ ID NO: 2610184 - DNA, 25 bp, Homo sapien
ggtgcactagacagggcgctctctt

SEQ ID NO: 2610185 - DNA, 25 bp, Homo sapien
cgagttccattttggactcatagag

SEQ ID NO: 2610186 - DNA, 25 bp, Homo sapien
tttgctacaatcagtcctgcatgag

SEQ ID NO: 2610187 - DNA, 25 bp, Homo sapien
tcagaatttcacgtacaatgtggcc

SEQ ID NO: 2610188 - DNA, 25 bp, Homo sapien
tcctgtttgctacaatcagtcctgc

SEQ ID NO: 2610189 - DNA, 25 bp, Homo sapien
tgtttgctacaatcagtcctgcatg

SEQ ID NO: 2610190 - DNA, 25 bp, Homo sapien
tatgaatgtgaattgggttccagcc

SEQ ID NO: 2610191 - DNA, 25 bp, Homo sapien
gcgtcttccatctcaactctggtgg

SEQ ID NO: 2610192 - DNA, 25 bp, Homo sapien
gaatgagctttcctttaccgcagag

SEQ ID NO: 2610193 - DNA, 25 bp, Homo sapien
taccgcagagtctggaggcaaacca

SEQ ID NO: 2610194 - DNA, 25 bp, Homo sapien
ccctttccacatggtcccttatagt

SEQ ID NO: 2610195 - DNA, 25 bp, Homo sapien
tgctacctggctataaatgccatgg

SEQ ID NO: 2610196 - DNA, 25 bp, Homo sapien
aggggcttgtgattccacttgtccc

SEQ ID NO: 2610197 - DNA, 25 bp, Homo sapien
tggtcccttatagtccactgctgct

SEQ ID NO: 2610198 - DNA, 25 bp, Homo sapien
ctgtctccaaattgggtgccaggga

SEQ ID NO: 2610199 - DNA, 25 bp, Homo sapien
gtctccaaattgggtgccagggaag

SEQ ID NO: 2610200 - DNA, 25 bp, Homo sapien
tgtctccaaattgggtgccagggaa

SEQ ID NO: 2610201 - DNA, 25 bp, Homo sapien
tcagggttcatgttcctagtctcca

SEQ ID NO: 2610202 - DNA, 25 bp, Homo sapien
ctgcctttcttgtgggtcctgggtc

SEQ ID NO: 2610203 - DNA, 25 bp, Homo sapien
aattctgcctttcttgtgggtcctg

SEQ ID NO: 2610204 - DNA, 25 bp, Homo sapien
ccttttttgctacttcagggttcat

SEQ ID NO: 2610205 - DNA, 25 bp, Homo sapien
tgccggttggaaatgtcaagtctcc

SEQ ID NO: 2610206 - DNA, 25 bp, Homo sapien
atcacaccagcctggaattatcttc

SEQ ID NO: 2610207 - DNA, 25 bp, Homo sapien
tacatgattttaaacgattgccggt

SEQ ID NO: 2610208 - DNA, 25 bp, Homo sapien
agttgcaaatggcatgtacatgatt

SEQ ID NO: 2610209 - DNA, 25 bp, Homo sapien
gtgctgaggccgaactccaccagct

SEQ ID NO: 2610210 - DNA, 25 bp, Homo sapien
tcagatgaagggtaagcctgcaggt

SEQ ID NO: 2610211 - DNA, 25 bp, Homo sapien
gtatcagtttacaggatgggtcaga

SEQ ID NO: 2610212 - DNA, 25 bp, Homo sapien
ctgacacattggaagaggtatttaa

SEQ ID NO: 2610213 - DNA, 25 bp, Homo sapien
gaatgtaatgaaccaggtgaaaacc

SEQ ID NO: 2610214 - DNA, 25 bp, Homo sapien
tgtagacagccagcccatctgggac

SEQ ID NO: 2610215 - DNA, 25 bp, Homo sapien
cctgatttaatatctgtctctgcaa

SEQ ID NO: 2610216 - DNA, 25 bp, Homo sapien
tcctgtgggcattgccgtatcaaaa

SEQ ID NO: 2610217 - DNA, 25 bp, Homo sapien
caaaggggactggttgaggctggtt

SEQ ID NO: 2610218 - DNA, 25 bp, Homo sapien
catggattccattttcaatgccccc

SEQ ID NO: 2610219 - DNA, 25 bp, Homo sapien
gactggttgaggctggtttgggcat

SEQ ID NO: 2610220 - DNA, 25 bp, Homo sapien
ttccattttcaatgcccccatgtac

SEQ ID NO: 2610221 - DNA, 25 bp, Homo sapien
agccaagcctatgcccttcacataa

SEQ ID NO: 2610222 - DNA, 25 bp, Homo sapien
aacctgaaaggtcagccaagcctat

SEQ ID NO: 2610223 - DNA, 25 bp, Homo sapien
gaaacctgaaaggtcagccaagcct

SEQ ID NO: 2610224 - DNA, 25 bp, Homo sapien
tcagccaagcctatgcccttcacat

SEQ ID NO: 2610225 - DNA, 25 bp, Homo sapien
ccttctgtgtgtagcccttctgcct

SEQ ID NO: 2610226 - DNA, 25 bp, Homo sapien
gattgtcctttaaggtgcaggatcc

SEQ ID NO: 2610227 - DNA, 25 bp, Homo sapien
ttctgcctgccccatgtacaggatg

SEQ ID NO: 2610228 - DNA, 25 bp, Homo sapien
tgccccatgtacaggatgtgggtgc

SEQ ID NO: 2610229 - DNA, 25 bp, Homo sapien
cctggggctagcttcaacaccatca

SEQ ID NO: 2610230 - DNA, 25 bp, Homo sapien
ggctgttccccatccttgagcctgt

SEQ ID NO: 2610231 - DNA, 25 bp, Homo sapien
atcatactctcctgacccaggctgt

SEQ ID NO: 2610232 - DNA, 25 bp, Homo sapien
tgccttgatagaccccctggggcta

SEQ ID NO: 2610233 - DNA, 25 bp, Homo sapien
ggcaggcccagcaaatcttccagtt

SEQ ID NO: 2610234 - DNA, 25 bp, Homo sapien
gtccctagagcctgtttgttcatgt

SEQ ID NO: 2610235 - DNA, 25 bp, Homo sapien
catcttgttagatgcggggccgctg

SEQ ID NO: 2610236 - DNA, 25 bp, Homo sapien
tcatgtctgtggatgaagcctgtca

SEQ ID NO: 2610237 - DNA, 25 bp, Homo sapien
gagctccaagtaaggctgaaataaa

SEQ ID NO: 2610238 - DNA, 25 bp, Homo sapien
caagggatgagctccaagtaaggct

SEQ ID NO: 2610239 - DNA, 25 bp, Homo sapien
ccaagtaaggctgaaataaagtaat

SEQ ID NO: 2610240 - DNA, 25 bp, Homo sapien
gggatgagctccaagtaaggctgaa

SEQ ID NO: 2610241 - DNA, 25 bp, Homo sapien
cacgaggttcgtatcacaagtgact

SEQ ID NO: 2610242 - DNA, 25 bp, Homo sapien
gctgtgctgtattgcagtgccagga

SEQ ID NO: 2610243 - DNA, 25 bp, Homo sapien
tgtcgactgaacaatggtgctgtgc

SEQ ID NO: 2610244 - DNA, 25 bp, Homo sapien
caggcttggtactttggatgctctc

SEQ ID NO: 2610245 - DNA, 25 bp, Homo sapien
catctttcctgtagcgggctgaatg

SEQ ID NO: 2610246 - DNA, 25 bp, Homo sapien
aggagaaattgacaatcctggagag

SEQ ID NO: 2610247 - DNA, 25 bp, Homo sapien
ttgacaatcctggagagattttgac

SEQ ID NO: 2610248 - DNA, 25 bp, Homo sapien
ctgtagcgggctgaatggtggctcc

SEQ ID NO: 2610249 - DNA, 25 bp, Homo sapien
ccggacacgtgttttttggcgcatc

SEQ ID NO: 2610250 - DNA, 25 bp, Homo sapien
tttcagatgacagggtccacttggc

SEQ ID NO: 2610251 - DNA, 25 bp, Homo sapien
aatggaaatgtgactggccactcac

SEQ ID NO: 2610252 - DNA, 25 bp, Homo sapien
cgtggcttccgctggtcagatttag

SEQ ID NO: 2610253 - DNA, 25 bp, Homo sapien
tgtgtgcaaatacgatgcttcaagt

SEQ ID NO: 2610254 - DNA, 25 bp, Homo sapien
cacattgctgtaattcgactctcca

SEQ ID NO: 2610255 - DNA, 25 bp, Homo sapien
actgtatagctgcagccaaactgga

SEQ ID NO: 2610256 - DNA, 25 bp, Homo sapien
gaatctagacctatttgtgtgcaaa

SEQ ID NO: 2610257 - DNA, 25 bp, Homo sapien
ctgtgttcgtttatatctgctggaa

SEQ ID NO: 2610258 - DNA, 25 bp, Homo sapien
cgtttatatctgctggaaatgccat

SEQ ID NO: 2610259 - DNA, 25 bp, Homo sapien
ttcgtttatatctgctggaaatgcc

SEQ ID NO: 2610260 - DNA, 25 bp, Homo sapien
tgttcgtttatatctgctggaaatg

SEQ ID NO: 2610261 - DNA, 25 bp, Homo sapien
gtcacagtcgtcctccacactgcta

SEQ ID NO: 2610262 - DNA, 25 bp, Homo sapien
cagaccagtaaaacctcttggtggc

SEQ ID NO: 2610263 - DNA, 25 bp, Homo sapien
acactgctatcatctcttccgctta

SEQ ID NO: 2610264 - DNA, 25 bp, Homo sapien
cgcttactcgaagcaacaacaacag

SEQ ID NO: 2610265 - DNA, 25 bp, Homo sapien
cctgggaccctcacaaattctacac

SEQ ID NO: 2610266 - DNA, 25 bp, Homo sapien
gaccactacccgattgttgagccct

SEQ ID NO: 2610267 - DNA, 25 bp, Homo sapien
cagctgcggcttccttggacacgac

SEQ ID NO: 2610268 - DNA, 25 bp, Homo sapien
cttggacacgaccactacccgattg

SEQ ID NO: 2610269 - DNA, 25 bp, Homo sapien
agttcctggtcattcttagccttta

SEQ ID NO: 2610270 - DNA, 25 bp, Homo sapien
gaagttcctggtcattcttagcctt

SEQ ID NO: 2610271 - DNA, 25 bp, Homo sapien
aagttcctggtcattcttagccttt

SEQ ID NO: 2610272 - DNA, 25 bp, Homo sapien
tcccagcaaggactgctgatcccat

SEQ ID NO: 2610273 - DNA, 25 bp, Homo sapien
caaggactgctgatcccatgacatc

SEQ ID NO: 2610274 - DNA, 25 bp, Homo sapien
agggttcccagcaaggactgctgat

SEQ ID NO: 2610275 - DNA, 25 bp, Homo sapien
agcaaggactgctgatcccatgaca

SEQ ID NO: 2610276 - DNA, 25 bp, Homo sapien
tttgaggtggtggggttgattccca

SEQ ID NO: 2610277 - DNA, 25 bp, Homo sapien
ggcgacgagtgatggccacactcct

SEQ ID NO: 2610278 - DNA, 25 bp, Homo sapien
tgctgttaacccaggcgacgagtga

SEQ ID NO: 2610279 - DNA, 25 bp, Homo sapien
aggcttgcctgctgttaacccaggc

SEQ ID NO: 2610280 - DNA, 25 bp, Homo sapien
gagggctaaaaatctcaggacttga

SEQ ID NO: 2610281 - DNA, 25 bp, Homo sapien
tggaccgcagggcatcattttactt

SEQ ID NO: 2610282 - DNA, 25 bp, Homo sapien
catgttcgatgggtgggctcagacc

SEQ ID NO: 2610283 - DNA, 25 bp, Homo sapien
cagtggaaactttgccagggaagat

SEQ ID NO: 2610284 - DNA, 25 bp, Homo sapien
tcaaacagctagctggacctgtggc

SEQ ID NO: 2610285 - DNA, 25 bp, Homo sapien
tcacttgcattgctcgggtagctcg

SEQ ID NO: 2610286 - DNA, 25 bp, Homo sapien
tcgtagcgtacccaggaaaggttca

SEQ ID NO: 2610287 - DNA, 25 bp, Homo sapien
agaggtactctggagaaggctttac

SEQ ID NO: 2610288 - DNA, 25 bp, Homo sapien
gttcaaccttatgagaacattctgg

SEQ ID NO: 2610289 - DNA, 25 bp, Homo sapien
tctgttggatgttcttcagggccag

SEQ ID NO: 2610290 - DNA, 25 bp, Homo sapien
actcctggcctgagctccaagcatc

SEQ ID NO: 2610291 - DNA, 25 bp, Homo sapien
ggaggtggctgccacactcctggcc

SEQ ID NO: 2610292 - DNA, 25 bp, Homo sapien
ccaagcatctgttggatgttcttca

SEQ ID NO: 2610293 - DNA, 25 bp, Homo sapien
tttgagagcataagagaatttgctc

SEQ ID NO: 2610294 - DNA, 25 bp, Homo sapien
tgagagcataagagaatttgctcat

SEQ ID NO: 2610295 - DNA, 25 bp, Homo sapien
ttgagagcataagagaatttgctca

SEQ ID NO: 2610296 - DNA, 25 bp, Homo sapien
gagttctgggcaaggtgctctttgc

SEQ ID NO: 2610297 - DNA, 25 bp, Homo sapien
tctccctggaggacgataactcaga

SEQ ID NO: 2610298 - DNA, 25 bp, Homo sapien
tgacgtctcccagtgcgtctggtcc

SEQ ID NO: 2610299 - DNA, 25 bp, Homo sapien
ggaaaataatgtctcctctcgtctg

SEQ ID NO: 2610300 - DNA, 25 bp, Homo sapien
aagagaggattaggtgttcaacact

SEQ ID NO: 2610301 - DNA, 25 bp, Homo sapien
gtcacctgagtagacctgtgccatt

SEQ ID NO: 2610302 - DNA, 25 bp, Homo sapien
gctgcacagaattacagagcacaca

SEQ ID NO: 2610303 - DNA, 25 bp, Homo sapien
tcttttcagcacctttctaatcccg

SEQ ID NO: 2610304 - DNA, 25 bp, Homo sapien
tttctaaaggattcagagaggcgtt

SEQ ID NO: 2610305 - DNA, 25 bp, Homo sapien
taagcctgacgtgggttcagattcc

SEQ ID NO: 2610306 - DNA, 25 bp, Homo sapien
caagaggcctcggacccatgactta

SEQ ID NO: 2610307 - DNA, 25 bp, Homo sapien
ctgccactgggataatggtacacat

SEQ ID NO: 2610308 - DNA, 25 bp, Homo sapien
tcacgttagctttgccaattcagtg

SEQ ID NO: 2610309 - DNA, 25 bp, Homo sapien
ttcatttggctccttcgattgttgt

SEQ ID NO: 2610310 - DNA, 25 bp, Homo sapien
ggctccttcgattgttgtgaaaaat

SEQ ID NO: 2610311 - DNA, 25 bp, Homo sapien
gaccttgaagtgttcttcaaggaca

SEQ ID NO: 2610312 - DNA, 25 bp, Homo sapien
ccctgtctgcaaagtgacggtggta

SEQ ID NO: 2610313 - DNA, 25 bp, Homo sapien
gcaagtgactcagcctttggcacga

SEQ ID NO: 2610314 - DNA, 25 bp, Homo sapien
cagctgaggtctccactgtcgaggc

SEQ ID NO: 2610315 - DNA, 25 bp, Homo sapien
ggcacactgatggattggaatcgca

SEQ ID NO: 2610316 - DNA, 25 bp, Homo sapien
tagtttctcgatagtgggtcccaag

SEQ ID NO: 2610317 - DNA, 25 bp, Homo sapien
gagactaatttcacgccagacagta

SEQ ID NO: 2610318 - DNA, 25 bp, Homo sapien
cagtatcttctggaatcggcggcct

SEQ ID NO: 2610319 - DNA, 25 bp, Homo sapien
gacgcgcgggacttatgtttctact

SEQ ID NO: 2610320 - DNA, 25 bp, Homo sapien
gacttgcggtcctgatccttgatga

SEQ ID NO: 2610321 - DNA, 25 bp, Homo sapien
catattcatcgaaggcgagggtccc

SEQ ID NO: 2610322 - DNA, 25 bp, Homo sapien
ggaaagggcgcccatattcatcgaa

SEQ ID NO: 2610323 - DNA, 25 bp, Homo sapien
aagtcccataagacgggacttgcgg

SEQ ID NO: 2610324 - DNA, 25 bp, Homo sapien
cgcgagcaggtccctgtgccattac

SEQ ID NO: 2610325 - DNA, 25 bp, Homo sapien
gacctttccggggagcacatggcag

SEQ ID NO: 2610326 - DNA, 25 bp, Homo sapien
tcagtaagcgggctgagcggccgga

SEQ ID NO: 2610327 - DNA, 25 bp, Homo sapien
cagggagacggagattctcgacctt

SEQ ID NO: 2610328 - DNA, 25 bp, Homo sapien
atggcagagccgctcctcaactcgc

SEQ ID NO: 2610329 - DNA, 25 bp, Homo sapien
aggcggtcccgctttgctcccgcgg

SEQ ID NO: 2610330 - DNA, 25 bp, Homo sapien
cccacattccgagcccaggattagg

SEQ ID NO: 2610331 - DNA, 25 bp, Homo sapien
agcccaggattaggcgccggcgtct

SEQ ID NO: 2610332 - DNA, 25 bp, Homo sapien
tcccgcgggcgaccggactgagcgg

SEQ ID NO: 2610333 - DNA, 25 bp, Homo sapien
ggagcgcagtcccacgcggccgtca

SEQ ID NO: 2610334 - DNA, 25 bp, Homo sapien
gtggaccagcgaaaggttaagcagc

SEQ ID NO: 2610335 - DNA, 25 bp, Homo sapien
ggccgttgcgggtggaccagcgaaa

SEQ ID NO: 2610336 - DNA, 25 bp, Homo sapien
gcgccttaaccgacaggtgacagag

SEQ ID NO: 2610337 - DNA, 25 bp, Homo sapien
tataacaaaccctgaaggccctctc

SEQ ID NO: 2610338 - DNA, 25 bp, Homo sapien
acactaagtgaacagggacacctga

SEQ ID NO: 2610339 - DNA, 25 bp, Homo sapien
cattttctgtcaacgtctggtgctc

SEQ ID NO: 2610340 - DNA, 25 bp, Homo sapien
gcattcaatagcttccaccttcggg

SEQ ID NO: 2610341 - DNA, 25 bp, Homo sapien
taaggctctaaatgaccagagagaa

SEQ ID NO: 2610342 - DNA, 25 bp, Homo sapien
aaacgttcacgtcctggcctataca

SEQ ID NO: 2610343 - DNA, 25 bp, Homo sapien
tagctggacgttctatgaggtcagg

SEQ ID NO: 2610344 - DNA, 25 bp, Homo sapien
gtgtatatccctaaactgctgagcc

SEQ ID NO: 2610345 - DNA, 25 bp, Homo sapien
gagacagattcttttaccagcccat

SEQ ID NO: 2610346 - DNA, 25 bp, Homo sapien
gtctagaagcttctacatttaaggg

SEQ ID NO: 2610347 - DNA, 25 bp, Homo sapien
gaagagggacagtatgactatgacc

SEQ ID NO: 2610348 - DNA, 25 bp, Homo sapien
gactatgaccttacaggcgttgcaa

SEQ ID NO: 2610349 - DNA, 25 bp, Homo sapien
gtatttgctacagcctttgctgcca

SEQ ID NO: 2610350 - DNA, 25 bp, Homo sapien
catttggtccaagtgatgttctcat

SEQ ID NO: 2610351 - DNA, 25 bp, Homo sapien
tgatgttctcattgtatttgctaca

SEQ ID NO: 2610352 - DNA, 25 bp, Homo sapien
attgtatttgctacagcctttgctg

SEQ ID NO: 2610353 - DNA, 25 bp, Homo sapien
ccccatcattagttacagtcacatc

SEQ ID NO: 2610354 - DNA, 25 bp, Homo sapien
tcggtctagcaattgctccgcttct

SEQ ID NO: 2610355 - DNA, 25 bp, Homo sapien
gcctcggtctagcaattgctccgct

SEQ ID NO: 2610356 - DNA, 25 bp, Homo sapien
tctagcaattgctccgcttcttcta

SEQ ID NO: 2610357 - DNA, 25 bp, Homo sapien
gaatgcctcggtctagcaattgctc

SEQ ID NO: 2610358 - DNA, 25 bp, Homo sapien
tgtccaggtgttcaatagcaacacg

SEQ ID NO: 2610359 - DNA, 25 bp, Homo sapien
ggtgttcaatagcaacacgagcagc

SEQ ID NO: 2610360 - DNA, 25 bp, Homo sapien
tatgtcaacaaggacgctatcgctg

SEQ ID NO: 2610361 - DNA, 25 bp, Homo sapien
caaggacgctatcgctgatcttgtc

SEQ ID NO: 2610362 - DNA, 25 bp, Homo sapien
acaaactgcctcctctacaaatggg

SEQ ID NO: 2610363 - DNA, 25 bp, Homo sapien
caaaatgcatctgtctacatctaca

SEQ ID NO: 2610364 - DNA, 25 bp, Homo sapien
caaatcgatacaaatccaccagtgg

SEQ ID NO: 2610365 - DNA, 25 bp, Homo sapien
ccaccagtggtcattttgtgttgcc

SEQ ID NO: 2610366 - DNA, 25 bp, Homo sapien
tgctacagtgaggacggcattcaca

SEQ ID NO: 2610367 - DNA, 25 bp, Homo sapien
agcaatctcagccatctgtcggtga

SEQ ID NO: 2610368 - DNA, 25 bp, Homo sapien
ctgctacagtgaggacggcattcac

SEQ ID NO: 2610369 - DNA, 25 bp, Homo sapien
aatctcagccatctgtcggtgacaa

SEQ ID NO: 2610370 - DNA, 25 bp, Homo sapien
gctcaaagtcaacgtctctccgctc

SEQ ID NO: 2610371 - DNA, 25 bp, Homo sapien
aaagtcaacgtctctccgctccata

SEQ ID NO: 2610372 - DNA, 25 bp, Homo sapien
tataatcttcgacagaggtcacatc

SEQ ID NO: 2610373 - DNA, 25 bp, Homo sapien
tttctgaagggctttataatcttcg

SEQ ID NO: 2610374 - DNA, 25 bp, Homo sapien
tttgggtggttcaaatggacatgtg

SEQ ID NO: 2610375 - DNA, 25 bp, Homo sapien
gacatgtgagaattgcaatcttcgc

SEQ ID NO: 2610376 - DNA, 25 bp, Homo sapien
cacagttgggtgtaaggcaggtgca

SEQ ID NO: 2610377 - DNA, 25 bp, Homo sapien
ggcaggtgcactcaaacacaaaagc

SEQ ID NO: 2610378 - DNA, 25 bp, Homo sapien
ggaaatagacaagtgtccacttttc

SEQ ID NO: 2610379 - DNA, 25 bp, Homo sapien
caatcgtattaagagaaagtgggta

SEQ ID NO: 2610380 - DNA, 25 bp, Homo sapien
ctaggttagcaccagtctctttaat

SEQ ID NO: 2610381 - DNA, 25 bp, Homo sapien
gccagccttggtgtgatgcagttat

SEQ ID NO: 2610382 - DNA, 25 bp, Homo sapien
agtctcttcacgtggaacatcctac

SEQ ID NO: 2610383 - DNA, 25 bp, Homo sapien
tcaacacataagatgaacccctact

SEQ ID NO: 2610384 - DNA, 25 bp, Homo sapien
taagatgaacccctacttctcaaag

SEQ ID NO: 2610385 - DNA, 25 bp, Homo sapien
tcttgagctggacgtcttgattggg

SEQ ID NO: 2610386 - DNA, 25 bp, Homo sapien
tgctaggtaacaaggctcttgagct

SEQ ID NO: 2610387 - DNA, 25 bp, Homo sapien
gcatgttccttgcactgcgctgcag

SEQ ID NO: 2610388 - DNA, 25 bp, Homo sapien
gagacatctccagttcaacccaaag

SEQ ID NO: 2610389 - DNA, 25 bp, Homo sapien
gggacgatccgccctcctgttgcga

SEQ ID NO: 2610390 - DNA, 25 bp, Homo sapien
gagaacctggggacgatccgccctc

SEQ ID NO: 2610391 - DNA, 25 bp, Homo sapien
acgatccgccctcctgttgcgatgg

SEQ ID NO: 2610392 - DNA, 25 bp, Homo sapien
tggggacgatccgccctcctgttgc

SEQ ID NO: 2610393 - DNA, 25 bp, Homo sapien
agctctggagttcttacactgctcg

SEQ ID NO: 2610394 - DNA, 25 bp, Homo sapien
tctggagttcttacactgctcgatg

SEQ ID NO: 2610395 - DNA, 25 bp, Homo sapien
tcttacactgctcgatgaccagcat

SEQ ID NO: 2610396 - DNA, 25 bp, Homo sapien
gagttcttacactgctcgatgacca

SEQ ID NO: 2610397 - DNA, 25 bp, Homo sapien
tctacctaagggacagatgtaagtc

SEQ ID NO: 2610398 - DNA, 25 bp, Homo sapien
taggatacacggtcaagcaagagtc

SEQ ID NO: 2610399 - DNA, 25 bp, Homo sapien
tgagtcttatgttgctagggctagc

SEQ ID NO: 2610400 - DNA, 25 bp, Homo sapien
tcaatggttattcacttgggttccc

SEQ ID NO: 2610401 - DNA, 25 bp, Homo sapien
tcgtgaagggatcgtttcgcctcct

SEQ ID NO: 2610402 - DNA, 25 bp, Homo sapien
cgattatcgcggatgaggttccgga

SEQ ID NO: 2610403 - DNA, 25 bp, Homo sapien
ttccggatgacacacaaagcatcgt

SEQ ID NO: 2610404 - DNA, 25 bp, Homo sapien
tcctccatacaccacacgattatcg

SEQ ID NO: 2610405 - DNA, 25 bp, Homo sapien
gccatggggatgacctccagtgcgt

SEQ ID NO: 2610406 - DNA, 25 bp, Homo sapien
gacctccagtgcgtcggcaaacgct

SEQ ID NO: 2610407 - DNA, 25 bp, Homo sapien
gtctggctcggacttcggtcatagt

SEQ ID NO: 2610408 - DNA, 25 bp, Homo sapien
gctcggacttcggtcatagtctgga

SEQ ID NO: 2610409 - DNA, 25 bp, Homo sapien
gtgcaaacagtcgatgccaagagca

SEQ ID NO: 2610410 - DNA, 25 bp, Homo sapien
cttgtgcaaacagtcgatgccaaga

SEQ ID NO: 2610411 - DNA, 25 bp, Homo sapien
ttgtgcaaacagtcgatgccaagag

SEQ ID NO: 2610412 - DNA, 25 bp, Homo sapien
tgtgcaaacagtcgatgccaagagc

SEQ ID NO: 2610413 - DNA, 25 bp, Homo sapien
tttgtgttgcaagagatatctgttg

SEQ ID NO: 2610414 - DNA, 25 bp, Homo sapien
ttgtgttgcaagagatatctgttgc

SEQ ID NO: 2610415 - DNA, 25 bp, Homo sapien
atttgtgttgcaagagatatctgtt

SEQ ID NO: 2610416 - DNA, 25 bp, Homo sapien
tgtgttgcaagagatatctgttgct

SEQ ID NO: 2610417 - DNA, 25 bp, Homo sapien
cagaagtggatcttgctacatagtt

SEQ ID NO: 2610418 - DNA, 25 bp, Homo sapien
tgcatcacgagacatccatttactt

SEQ ID NO: 2610419 - DNA, 25 bp, Homo sapien
taaataactgtagatgcatcacgag

SEQ ID NO: 2610420 - DNA, 25 bp, Homo sapien
cagtgtctggaaaaggatgtaacaa

SEQ ID NO: 2610421 - DNA, 25 bp, Homo sapien
acaaaagcagttgagatggtacccc

SEQ ID NO: 2610422 - DNA, 25 bp, Homo sapien
gatggtacccccacgattacacagc

SEQ ID NO: 2610423 - DNA, 25 bp, Homo sapien
cgattacacagctttgaacaagtga

SEQ ID NO: 2610424 - DNA, 25 bp, Homo sapien
tttaatacaatgaatacaaaagcag

SEQ ID NO: 2610425 - DNA, 25 bp, Homo sapien
catttaattactgttacaataaacg

SEQ ID NO: 2610426 - DNA, 25 bp, Homo sapien
gcagcatttaattactgttacaata

SEQ ID NO: 2610427 - DNA, 25 bp, Homo sapien
aattaaggcagcatttaattactgt

SEQ ID NO: 2610428 - DNA, 25 bp, Homo sapien
caattaaggcagcatttaattactg

SEQ ID NO: 2610429 - DNA, 25 bp, Homo sapien
ggtggaccctctacaatcaaatggc

SEQ ID NO: 2610430 - DNA, 25 bp, Homo sapien
aaagcaaaggctcacatgggtctcc

SEQ ID NO: 2610431 - DNA, 25 bp, Homo sapien
tagagttctcggagcgtcttggccc

SEQ ID NO: 2610432 - DNA, 25 bp, Homo sapien
tcagaacagacaatcccggtagagt

SEQ ID NO: 2610433 - DNA, 25 bp, Homo sapien
gtgggcattgccgacgaacatggcc

SEQ ID NO: 2610434 - DNA, 25 bp, Homo sapien
tgatttccagagacgtcaccagtgg

SEQ ID NO: 2610435 - DNA, 25 bp, Homo sapien
tgacagcatgtgtaacgaggactct

SEQ ID NO: 2610436 - DNA, 25 bp, Homo sapien
ggtggccccaaacacatctgccatg

SEQ ID NO: 2610437 - DNA, 25 bp, Homo sapien
tctttgccgcgtgcacgggtaagga

SEQ ID NO: 2610438 - DNA, 25 bp, Homo sapien
gaactcccgcgtgtgttctgactat

SEQ ID NO: 2610439 - DNA, 25 bp, Homo sapien
tctgactatggcaaagaaggtcttt

SEQ ID NO: 2610440 - DNA, 25 bp, Homo sapien
gaggctacgactggagccactggtc

SEQ ID NO: 2610441 - DNA, 25 bp, Homo sapien
tccataacaacacctttgcagtggg

SEQ ID NO: 2610442 - DNA, 25 bp, Homo sapien
aagtgcggccaccacggtgcaatgg

SEQ ID NO: 2610443 - DNA, 25 bp, Homo sapien
taacggcacaaatcccattcttggg

SEQ ID NO: 2610444 - DNA, 25 bp, Homo sapien
gaagctgttgtcataaccttgggca

SEQ ID NO: 2610445 - DNA, 25 bp, Homo sapien
tgtgcacaggattcagcgctttccc

SEQ ID NO: 2610446 - DNA, 25 bp, Homo sapien
acaggattcagcgctttcccagcgg

SEQ ID NO: 2610447 - DNA, 25 bp, Homo sapien
tgcacaggattcagcgctttcccag

SEQ ID NO: 2610448 - DNA, 25 bp, Homo sapien
ctgtgcacaggattcagcgctttcc

SEQ ID NO: 2610449 - DNA, 25 bp, Homo sapien
ctgcgtactggagcggagccatagt

SEQ ID NO: 2610450 - DNA, 25 bp, Homo sapien
agcctcaattttcgtgcctgtgtga

SEQ ID NO: 2610451 - DNA, 25 bp, Homo sapien
ctggaattcaatctgcgaggcggga

SEQ ID NO: 2610452 - DNA, 25 bp, Homo sapien
gagccatagtagttcacgcagtttg

SEQ ID NO: 2610453 - DNA, 25 bp, Homo sapien
gctgcagccctttatgagaagaaag

SEQ ID NO: 2610454 - DNA, 25 bp, Homo sapien
ctttctaggtttatgaaccttgtca

SEQ ID NO: 2610455 - DNA, 25 bp, Homo sapien
ttcctcagttgacaagtgacattat

SEQ ID NO: 2610456 - DNA, 25 bp, Homo sapien
ttgtcattcctcagttgacaagtga

SEQ ID NO: 2610457 - DNA, 25 bp, Homo sapien
aggcaggagaatcacttgaacctgg

SEQ ID NO: 2610458 - DNA, 25 bp, Homo sapien
gtaaccccagctgctccagaggctg

SEQ ID NO: 2610459 - DNA, 25 bp, Homo sapien
atgacaccaccgcactccagcctgg

SEQ ID NO: 2610460 - DNA, 25 bp, Homo sapien
gaggtggaggctgcagtgagccgag

SEQ ID NO: 2610461 - DNA, 25 bp, Homo sapien
cattggcagccagaaatggacaagg

SEQ ID NO: 2610462 - DNA, 25 bp, Homo sapien
taggtacagaggaactatgcagatg

SEQ ID NO: 2610463 - DNA, 25 bp, Homo sapien
taacttggtgcattgtagttggacc

SEQ ID NO: 2610464 - DNA, 25 bp, Homo sapien
tccttgagggtagcttgtaggtaca

SEQ ID NO: 2610465 - DNA, 25 bp, Homo sapien
tttcacaaaccatgacaactcaagc

SEQ ID NO: 2610466 - DNA, 25 bp, Homo sapien
gcagagctctgatttgcacgcaagc

SEQ ID NO: 2610467 - DNA, 25 bp, Homo sapien
gagctcagagctctgccgcttaact

SEQ ID NO: 2610468 - DNA, 25 bp, Homo sapien
catggagagttaagcacagcagcag

SEQ ID NO: 2610469 - DNA, 25 bp, Homo sapien
gccaccttgctgcagagactgagaa

SEQ ID NO: 2610470 - DNA, 25 bp, Homo sapien
aatcccgcctctatattcaactcag

SEQ ID NO: 2610471 - DNA, 25 bp, Homo sapien
aatgtcatggtacagtttaggaaca

SEQ ID NO: 2610472 - DNA, 25 bp, Homo sapien
tgatctctttgcacaatgagcttgc

SEQ ID NO: 2610473 - DNA, 25 bp, Homo sapien
gaataagcattggatccagaatcca

SEQ ID NO: 2610474 - DNA, 25 bp, Homo sapien
ctgtttgaataagcattggatccag

SEQ ID NO: 2610475 - DNA, 25 bp, Homo sapien
tttgaataagcattggatccagaat

SEQ ID NO: 2610476 - DNA, 25 bp, Homo sapien
tgaataagcattggatccagaatcc

SEQ ID NO: 2610477 - DNA, 25 bp, Homo sapien
cttcctccacattgctgccctttgt

SEQ ID NO: 2610478 - DNA, 25 bp, Homo sapien
ttcctccacattgctgccctttgtc

SEQ ID NO: 2610479 - DNA, 25 bp, Homo sapien
cctccacattgctgccctttgtcat

SEQ ID NO: 2610480 - DNA, 25 bp, Homo sapien
tcctccacattgctgccctttgtca

SEQ ID NO: 2610481 - DNA, 25 bp, Homo sapien
catgggttctcctgaaattaaggaa

SEQ ID NO: 2610482 - DNA, 25 bp, Homo sapien
gatgatactcctttcatgggttctc

SEQ ID NO: 2610483 - DNA, 25 bp, Homo sapien
atgggttctcctgaaattaaggaat

SEQ ID NO: 2610484 - DNA, 25 bp, Homo sapien
tgatactcctttcatgggttctcct

SEQ ID NO: 2610485 - DNA, 25 bp, Homo sapien
ggatcctttcataattccataaatt

SEQ ID NO: 2610486 - DNA, 25 bp, Homo sapien
tgtttagacattaggaaaccaaaga

SEQ ID NO: 2610487 - DNA, 25 bp, Homo sapien
gggagctggatcctttcataattcc

SEQ ID NO: 2610488 - DNA, 25 bp, Homo sapien
atgtttagacattaggaaaccaaag

SEQ ID NO: 2610489 - DNA, 25 bp, Homo sapien
tgtttccgtattcctctgtcacacc

SEQ ID NO: 2610490 - DNA, 25 bp, Homo sapien
ccagctgcctcgtgtcccggaagga

SEQ ID NO: 2610491 - DNA, 25 bp, Homo sapien
ttctccctgtttccgtattcctctg

SEQ ID NO: 2610492 - DNA, 25 bp, Homo sapien
cagctgcctcgtgtcccggaaggac

SEQ ID NO: 2610493 - DNA, 25 bp, Homo sapien
cccatccatgcccagcaacacatgt

SEQ ID NO: 2610494 - DNA, 25 bp, Homo sapien
acacatgtgcaaacccctcccggct

SEQ ID NO: 2610495 - DNA, 25 bp, Homo sapien
atgtgcaaacccctcccggctcctc

SEQ ID NO: 2610496 - DNA, 25 bp, Homo sapien
atccatgcccagcaacacatgtgca

SEQ ID NO: 2610497 - DNA, 25 bp, Homo sapien
agccttcctccggacgcgcctaggg

SEQ ID NO: 2610498 - DNA, 25 bp, Homo sapien
tccgggtgagccttcctccggacgc

SEQ ID NO: 2610499 - DNA, 25 bp, Homo sapien
ggcggcctccgggtgagccttcctc

SEQ ID NO: 2610500 - DNA, 25 bp, Homo sapien
cgcctaggggctcctcacccacctg

SEQ ID NO: 2610501 - DNA, 25 bp, Homo sapien
tcggagttcgaatatgcttggcttc

SEQ ID NO: 2610502 - DNA, 25 bp, Homo sapien
cgcggtctaaggtcggcagcgacct

SEQ ID NO: 2610503 - DNA, 25 bp, Homo sapien
cgatcgagcggattcggagttcgaa

SEQ ID NO: 2610504 - DNA, 25 bp, Homo sapien
gggaaccgaacccagatggcaggtc

SEQ ID NO: 2610505 - DNA, 25 bp, Homo sapien
ggagtcagggcgcattccgccgact

SEQ ID NO: 2610506 - DNA, 25 bp, Homo sapien
tctttcattctgagccggctctcgg

SEQ ID NO: 2610507 - DNA, 25 bp, Homo sapien
gactcagcgccctgaattcgtgggt

SEQ ID NO: 2610508 - DNA, 25 bp, Homo sapien
tccgcgctctttcattctgagccgg

SEQ ID NO: 2610509 - DNA, 25 bp, Homo sapien
taatacaaatactgccatttcccag

SEQ ID NO: 2610510 - DNA, 25 bp, Homo sapien
aatacaaatactgccatttcccaga

SEQ ID NO: 2610511 - DNA, 25 bp, Homo sapien
atacaaatactgccatttcccagac

SEQ ID NO: 2610512 - DNA, 25 bp, Homo sapien
ctaatacaaatactgccatttccca

SEQ ID NO: 2610513 - DNA, 25 bp, Homo sapien
aaaatccttagtttgccaggcgctg

SEQ ID NO: 2610514 - DNA, 25 bp, Homo sapien
tttctagacattaggccgtggacat

SEQ ID NO: 2610515 - DNA, 25 bp, Homo sapien
aaaatccttagcttgatcacatctg

SEQ ID NO: 2610516 - DNA, 25 bp, Homo sapien
ccgtggacattcttggagggccatt

SEQ ID NO: 2610517 - DNA, 25 bp, Homo sapien
agaagcggggaaagagtagaaggag

SEQ ID NO: 2610518 - DNA, 25 bp, Homo sapien
tgagaagcggggaaagagtagaagg

SEQ ID NO: 2610519 - DNA, 25 bp, Homo sapien
gcagtggtgagaagcggggaaagag

SEQ ID NO: 2610520 - DNA, 25 bp, Homo sapien
tgatctgtaactgtctgggaacaat

SEQ ID NO: 2610521 - DNA, 25 bp, Homo sapien
gctggctgttaatggtgtcacttag

SEQ ID NO: 2610522 - DNA, 25 bp, Homo sapien
gcttagactgcgttgcttagcaatg

SEQ ID NO: 2610523 - DNA, 25 bp, Homo sapien
gaaataaccaacagcgtaaatcgtg

SEQ ID NO: 2610524 - DNA, 25 bp, Homo sapien
tgtcacttagttgtgcagcttagac

SEQ ID NO: 2610525 - DNA, 25 bp, Homo sapien
ctagcagcaaaaaggacgactgtca

SEQ ID NO: 2610526 - DNA, 25 bp, Homo sapien
tgctgaaccaggcaaacttgaactt

SEQ ID NO: 2610527 - DNA, 25 bp, Homo sapien
gtaaatggaacatgaaggctgcttt

SEQ ID NO: 2610528 - DNA, 25 bp, Homo sapien
aaaaaggacgactgtcaaagcccag

SEQ ID NO: 2610529 - DNA, 25 bp, Homo sapien
gaaaagtggtgatgttcgcttccct

SEQ ID NO: 2610530 - DNA, 25 bp, Homo sapien
aacattggcgaatctgggtgacgac

SEQ ID NO: 2610531 - DNA, 25 bp, Homo sapien
gattgtcttgcactctacttggaac

SEQ ID NO: 2610532 - DNA, 25 bp, Homo sapien
gcagactgggttttttagaccaaca

SEQ ID NO: 2610533 - DNA, 25 bp, Homo sapien
agacctgtagcagagcacgtattgg

SEQ ID NO: 2610534 - DNA, 25 bp, Homo sapien
cctgtagcagagcacgtattggcct

SEQ ID NO: 2610535 - DNA, 25 bp, Homo sapien
ctgtagcagagcacgtattggcctg

SEQ ID NO: 2610536 - DNA, 25 bp, Homo sapien
acctgtagcagagcacgtattggcc

SEQ ID NO: 2610537 - DNA, 25 bp, Homo sapien
ttatatatactaccgccaaagaaac

SEQ ID NO: 2610538 - DNA, 25 bp, Homo sapien
tatgtttatatatactaccgccaaa

SEQ ID NO: 2610539 - DNA, 25 bp, Homo sapien
actatattgaccagtatgattttca

SEQ ID NO: 2610540 - DNA, 25 bp, Homo sapien
ctaccgccaaagaaacaatttgaag

SEQ ID NO: 2610541 - DNA, 25 bp, Homo sapien
ggtgcacgttttgaggaactactaa

SEQ ID NO: 2610542 - DNA, 25 bp, Homo sapien
gcacgttttgaggaactactaaagc

SEQ ID NO: 2610543 - DNA, 25 bp, Homo sapien
ttggcagccgggcagttgtggtgca

SEQ ID NO: 2610544 - DNA, 25 bp, Homo sapien
ttgtggtgcacgttttgaggaacta

SEQ ID NO: 2610545 - DNA, 25 bp, Homo sapien
aatggctagagtgggcccaggcatc

SEQ ID NO: 2610546 - DNA, 25 bp, Homo sapien
gccaaatggctagagtgggcccagg

SEQ ID NO: 2610547 - DNA, 25 bp, Homo sapien
cgtgatgccgaggccaaatggctag

SEQ ID NO: 2610548 - DNA, 25 bp, Homo sapien
caaatggctagagtgggcccaggca

SEQ ID NO: 2610549 - DNA, 25 bp, Homo sapien
tcctgtgacaatgcgagtctgcgcc

SEQ ID NO: 2610550 - DNA, 25 bp, Homo sapien
cccagccgacgtgcgagacaaaggc

SEQ ID NO: 2610551 - DNA, 25 bp, Homo sapien
aaagaaggcgcagagcggtgggagg

SEQ ID NO: 2610552 - DNA, 25 bp, Homo sapien
gaggaggctgcgagaacctagctcc

SEQ ID NO: 2610553 - DNA, 25 bp, Homo sapien
gcggcgaatcctcgcgtgcgccagg

SEQ ID NO: 2610554 - DNA, 25 bp, Homo sapien
cagcggggccgaaacctaatcagga

SEQ ID NO: 2610555 - DNA, 25 bp, Homo sapien
gtagtcgccgagactgcgccggcca

SEQ ID NO: 2610556 - DNA, 25 bp, Homo sapien
ccgaaacctaatcaggagctgagct

SEQ ID NO: 2610557 - DNA, 25 bp, Homo sapien
ggcgtgcactgtcggtcggcggcta

SEQ ID NO: 2610558 - DNA, 25 bp, Homo sapien
ggcggccgcggcgtgcactgtcggt

SEQ ID NO: 2610559 - DNA, 25 bp, Homo sapien
tgcactgtcggtcggcggctaagga

SEQ ID NO: 2610560 - DNA, 25 bp, Homo sapien
cgcggcgtgcactgtcggtcggcgg

SEQ ID NO: 2610561 - DNA, 25 bp, Homo sapien
gggcggcggtgacgcagccacgagg

SEQ ID NO: 2610562 - DNA, 25 bp, Homo sapien
agaggctgacagaaagcgagcgaca

SEQ ID NO: 2610563 - DNA, 25 bp, Homo sapien
ggcccgggcaggtgcgtacgctcag

SEQ ID NO: 2610564 - DNA, 25 bp, Homo sapien
caggtgcgtacgctcaggtgcgaga

SEQ ID NO: 2610565 - DNA, 25 bp, Homo sapien
ctcgggcgccgcgcgtcgccgactt

SEQ ID NO: 2610566 - DNA, 25 bp, Homo sapien
ggcgccgacgcaagggctcgggcgc

SEQ ID NO: 2610567 - DNA, 25 bp, Homo sapien
cgggcgccgcgcgtcgccgacttac

SEQ ID NO: 2610568 - DNA, 25 bp, Homo sapien
ccgggcgccgacgcaagggctcggg

SEQ ID NO: 2610569 - DNA, 25 bp, Homo sapien
taaggttgaaagacgctcatacccc

SEQ ID NO: 2610570 - DNA, 25 bp, Homo sapien
tcgccaaaatcgcaacccataaggt

SEQ ID NO: 2610571 - DNA, 25 bp, Homo sapien
ttcgtttaaaatcgccaaaatcgca

SEQ ID NO: 2610572 - DNA, 25 bp, Homo sapien
tattgcactccatgacggcgtttga

SEQ ID NO: 2610573 - DNA, 25 bp, Homo sapien
tacaagcagtaatttagcaaaatgg

SEQ ID NO: 2610574 - DNA, 25 bp, Homo sapien
cagctttatatcactgagccgaaat

SEQ ID NO: 2610575 - DNA, 25 bp, Homo sapien
ccgaaatgtgggcattctatgacaa

SEQ ID NO: 2610576 - DNA, 25 bp, Homo sapien
taatattatctttgagaactgcaca

SEQ ID NO: 2610577 - DNA, 25 bp, Homo sapien
tatgttccgtaaagcataaagaaca

SEQ ID NO: 2610578 - DNA, 25 bp, Homo sapien
gcttcacacttttcgaatgaatatg

SEQ ID NO: 2610579 - DNA, 25 bp, Homo sapien
cataatactctttagcttcacactt

SEQ ID NO: 2610580 - DNA, 25 bp, Homo sapien
tatagaacatgatcaaccataatac

SEQ ID NO: 2610581 - DNA, 25 bp, Homo sapien
taatgcgtggtaagaaacatgcagc

SEQ ID NO: 2610582 - DNA, 25 bp, Homo sapien
gaaagagaggaactagctgtctgat

SEQ ID NO: 2610583 - DNA, 25 bp, Homo sapien
ctggctcataacaggtcctcagtaa

SEQ ID NO: 2610584 - DNA, 25 bp, Homo sapien
tgttccttgcctagcccaaatgcat

SEQ ID NO: 2610585 - DNA, 25 bp, Homo sapien
tatgtctcacgtcagctcaaaaccc

SEQ ID NO: 2610586 - DNA, 25 bp, Homo sapien
tattgaacactctaggcatgctccc

SEQ ID NO: 2610587 - DNA, 25 bp, Homo sapien
gctctcctggtgatttattgaacac

SEQ ID NO: 2610588 - DNA, 25 bp, Homo sapien
cccacaaatacagaaagctggctgc

SEQ ID NO: 2610589 - DNA, 25 bp, Homo sapien
tcctagcgtaacaaatgaaggttcc

SEQ ID NO: 2610590 - DNA, 25 bp, Homo sapien
tacaaacacttggtacggtcagtca

SEQ ID NO: 2610591 - DNA, 25 bp, Homo sapien
tgctccccagaagaagtggtgtacc

SEQ ID NO: 2610592 - DNA, 25 bp, Homo sapien
caggacttgcacaggtacacacagt

SEQ ID NO: 2610593 - DNA, 25 bp, Homo sapien
cagtaactgtcatagtgacagtctc

SEQ ID NO: 2610594 - DNA, 25 bp, Homo sapien
aataaccgtggcactatgccacatg

SEQ ID NO: 2610595 - DNA, 25 bp, Homo sapien
tgacagtctcaagtaataaccgtgg

SEQ ID NO: 2610596 - DNA, 25 bp, Homo sapien
aacagcagtaactgtcatagtgaca

SEQ ID NO: 2610597 - DNA, 25 bp, Homo sapien
ctatagcgagctatgacggcgccac

SEQ ID NO: 2610598 - DNA, 25 bp, Homo sapien
attatcaaccaagggccaaatgagg

SEQ ID NO: 2610599 - DNA, 25 bp, Homo sapien
cagtaacgccagatatggcagctca

SEQ ID NO: 2610600 - DNA, 25 bp, Homo sapien
gatctgaacacactcaccgaaagag

SEQ ID NO: 2610601 - DNA, 25 bp, Homo sapien
cattggcagcaataaatattactat

SEQ ID NO: 2610602 - DNA, 25 bp, Homo sapien
cattcaattgttactttgacatcag

SEQ ID NO: 2610603 - DNA, 25 bp, Homo sapien
ccctttatttcattacctactgata

SEQ ID NO: 2610604 - DNA, 25 bp, Homo sapien
tttgaaatatctatgaggagtgggc

SEQ ID NO: 2610605 - DNA, 25 bp, Homo sapien
tgacgggtcggccattgactatggc

SEQ ID NO: 2610606 - DNA, 25 bp, Homo sapien
ggaacatcgtgacgggtcggccatt

SEQ ID NO: 2610607 - DNA, 25 bp, Homo sapien
tgactatggcctggggtatggcaaa

SEQ ID NO: 2610608 - DNA, 25 bp, Homo sapien
gccctccaggaacatcgtgacgggt

SEQ ID NO: 2610609 - DNA, 25 bp, Homo sapien
aatgtgattgatctaggttacctag

SEQ ID NO: 2610610 - DNA, 25 bp, Homo sapien
gatctaggttacctagaatcaccag

SEQ ID NO: 2610611 - DNA, 25 bp, Homo sapien
aaaatgtgattgatctaggttacct

SEQ ID NO: 2610612 - DNA, 25 bp, Homo sapien
aggttacctagaatcaccagagtca

SEQ ID NO: 2610613 - DNA, 25 bp, Homo sapien
tggtcacagtggtcgcctcagtagg

SEQ ID NO: 2610614 - DNA, 25 bp, Homo sapien
cctgctgcattctttagatagggta

SEQ ID NO: 2610615 - DNA, 25 bp, Homo sapien
tctctctctgcagaatcaaattgag

SEQ ID NO: 2610616 - DNA, 25 bp, Homo sapien
cattatcctccagggttgggagtgg

SEQ ID NO: 2610617 - DNA, 25 bp, Homo sapien
tggactttcttgcaatggaccccgg

SEQ ID NO: 2610618 - DNA, 25 bp, Homo sapien
tgaaagtgggattaccgtggctgcc

SEQ ID NO: 2610619 - DNA, 25 bp, Homo sapien
cagaatttgagtcctagcggtgcaa

SEQ ID NO: 2610620 - DNA, 25 bp, Homo sapien
tatgttcgtaactacacaggacctg

SEQ ID NO: 2610621 - DNA, 25 bp, Homo sapien
ggttagcacgctaatctccctggtt

SEQ ID NO: 2610622 - DNA, 25 bp, Homo sapien
tttaagagcatcacaggcctgtggc

SEQ ID NO: 2610623 - DNA, 25 bp, Homo sapien
gatgccgaatgctcacctaactggt

SEQ ID NO: 2610624 - DNA, 25 bp, Homo sapien
accagctgggcaatccagagcctaa

SEQ ID NO: 2610625 - DNA, 25 bp, Homo sapien
catccatcggattcaagtgagcaca

SEQ ID NO: 2610626 - DNA, 25 bp, Homo sapien
cgatccccatcactaatgcacttaa

SEQ ID NO: 2610627 - DNA, 25 bp, Homo sapien
actaatgcacttaacgggtctctga

SEQ ID NO: 2610628 - DNA, 25 bp, Homo sapien
taacgggtctctgacatccatcgga

SEQ ID NO: 2610629 - DNA, 25 bp, Homo sapien
cacaataacagcagttagaagacaa

SEQ ID NO: 2610630 - DNA, 25 bp, Homo sapien
aacagcagttagaagacaagctttt

SEQ ID NO: 2610631 - DNA, 25 bp, Homo sapien
taacagcagttagaagacaagcttt

SEQ ID NO: 2610632 - DNA, 25 bp, Homo sapien
caataacagcagttagaagacaagc

SEQ ID NO: 2610633 - DNA, 25 bp, Homo sapien
taatactgccagtacatacacaagg

SEQ ID NO: 2610634 - DNA, 25 bp, Homo sapien
gataaagcggtttctcaggtgttcc

SEQ ID NO: 2610635 - DNA, 25 bp, Homo sapien
caggtgttccttctgaccgacacac

SEQ ID NO: 2610636 - DNA, 25 bp, Homo sapien
acaaggatgataaagcggtttctca

SEQ ID NO: 2610637 - DNA, 25 bp, Homo sapien
gactgtgtttcagccattgaactaa

SEQ ID NO: 2610638 - DNA, 25 bp, Homo sapien
aagcaaatctgtgcttgcataattc

SEQ ID NO: 2610639 - DNA, 25 bp, Homo sapien
cgactgtgtttcagccattgaacta

SEQ ID NO: 2610640 - DNA, 25 bp, Homo sapien
tgtgcttgcataattcacagtattc

SEQ ID NO: 2610641 - DNA, 25 bp, Homo sapien
tagcaacttttaatggcacatgccc

SEQ ID NO: 2610642 - DNA, 25 bp, Homo sapien
taccacaggtagctcggaaagaaca

SEQ ID NO: 2610643 - DNA, 25 bp, Homo sapien
gaaatcaacaaaggcctctgggcag

SEQ ID NO: 2610644 - DNA, 25 bp, Homo sapien
gttagccactttcccgatgttagca

SEQ ID NO: 2610645 - DNA, 25 bp, Homo sapien
tatcgtattgcagtgccaatacttg

SEQ ID NO: 2610646 - DNA, 25 bp, Homo sapien
ggccacaagtgtataatgaaaccaa

SEQ ID NO: 2610647 - DNA, 25 bp, Homo sapien
caatacttgtaaccagtccagcaaa

SEQ ID NO: 2610648 - DNA, 25 bp, Homo sapien
ccgtgaaggcatatctggagaataa

SEQ ID NO: 2610649 - DNA, 25 bp, Homo sapien
aactcattcttagttccgatgaaca

SEQ ID NO: 2610650 - DNA, 25 bp, Homo sapien
tgtttaaataactccaatcagaggc

SEQ ID NO: 2610651 - DNA, 25 bp, Homo sapien
taaggctttcctaatacatgacact

SEQ ID NO: 2610652 - DNA, 25 bp, Homo sapien
tagcccttgaaagctctagcatact

SEQ ID NO: 2610653 - DNA, 25 bp, Homo sapien
ccgatctgtggtggcacttttgtca

SEQ ID NO: 2610654 - DNA, 25 bp, Homo sapien
tgattgctgccataccatttactga

SEQ ID NO: 2610655 - DNA, 25 bp, Homo sapien
tctgggtagttataagtctagtcca

SEQ ID NO: 2610656 - DNA, 25 bp, Homo sapien
tttctgtacggccatctgattgctg

SEQ ID NO: 2610657 - DNA, 25 bp, Homo sapien
cacacagtcacaactcgcatcatga

SEQ ID NO: 2610658 - DNA, 25 bp, Homo sapien
tggcacacagtcacaactcgcatca

SEQ ID NO: 2610659 - DNA, 25 bp, Homo sapien
ggcacacagtcacaactcgcatcat

SEQ ID NO: 2610660 - DNA, 25 bp, Homo sapien
cacagtcacaactcgcatcatgaat

SEQ ID NO: 2610661 - DNA, 25 bp, Homo sapien
tcagtagtgagctcacggagccagt

SEQ ID NO: 2610662 - DNA, 25 bp, Homo sapien
taatggcagcgtcagtagtgagctc

SEQ ID NO: 2610663 - DNA, 25 bp, Homo sapien
cggagccagtaaacaagcacttgta

SEQ ID NO: 2610664 - DNA, 25 bp, Homo sapien
gttgacagcatatctaatggcagcg

SEQ ID NO: 2610665 - DNA, 25 bp, Homo sapien
taaaaacttgattagctgacacctg

SEQ ID NO: 2610666 - DNA, 25 bp, Homo sapien
gagaagctcctccagataagtctaa

SEQ ID NO: 2610667 - DNA, 25 bp, Homo sapien
taaaaactctgtccaactctaagag

SEQ ID NO: 2610668 - DNA, 25 bp, Homo sapien
aaagcagtctaacacttgacaaagg

SEQ ID NO: 2610669 - DNA, 25 bp, Homo sapien
acacagtgtgcacgtcaccacaaaa

SEQ ID NO: 2610670 - DNA, 25 bp, Homo sapien
gggcagcatgctccaaccaaattgg

SEQ ID NO: 2610671 - DNA, 25 bp, Homo sapien
caccaggctgatgaatgcacacagt

SEQ ID NO: 2610672 - DNA, 25 bp, Homo sapien
catggactatctgctctctcaacca

SEQ ID NO: 2610673 - DNA, 25 bp, Homo sapien
agtcgtaataccactttcttgattt

SEQ ID NO: 2610674 - DNA, 25 bp, Homo sapien
tagaaaattaagaggcaaagtcgta

SEQ ID NO: 2610675 - DNA, 25 bp, Homo sapien
catcttcacccaaacctttccgctg

SEQ ID NO: 2610676 - DNA, 25 bp, Homo sapien
gtgtacatggacttcagtatacccc

SEQ ID NO: 2610677 - DNA, 25 bp, Homo sapien
ggtgggttagcaggctgatcagcag

SEQ ID NO: 2610678 - DNA, 25 bp, Homo sapien
ctggtgggttagcaggctgatcagc

SEQ ID NO: 2610679 - DNA, 25 bp, Homo sapien
ctcagctggtgggttagcaggctga

SEQ ID NO: 2610680 - DNA, 25 bp, Homo sapien
agctggtgggttagcaggctgatca

SEQ ID NO: 2610681 - DNA, 25 bp, Homo sapien
ttattagcatctgccgcatcctcca

SEQ ID NO: 2610682 - DNA, 25 bp, Homo sapien
cctgggctccgttattagcatctgc

SEQ ID NO: 2610683 - DNA, 25 bp, Homo sapien
gcatcctccacaccagcgtcatctt

SEQ ID NO: 2610684 - DNA, 25 bp, Homo sapien
ggtcatcctgggcatcagggttttc

SEQ ID NO: 2610685 - DNA, 25 bp, Homo sapien
cagcagctcggtcccattctaaagc

SEQ ID NO: 2610686 - DNA, 25 bp, Homo sapien
agcagctcggtcccattctaaagca

SEQ ID NO: 2610687 - DNA, 25 bp, Homo sapien
cagaaaaactagtgatccatcaagt

SEQ ID NO: 2610688 - DNA, 25 bp, Homo sapien
aaaactagtgatccatcaagtccta

SEQ ID NO: 2610689 - DNA, 25 bp, Homo sapien
aactagtgatccatcaagtcctagc

SEQ ID NO: 2610690 - DNA, 25 bp, Homo sapien
gaaaaactagtgatccatcaagtcc

SEQ ID NO: 2610691 - DNA, 25 bp, Homo sapien
tagacttgcaatctttactaatatg

SEQ ID NO: 2610692 - DNA, 25 bp, Homo sapien
cttagacttgcaatctttactaata

SEQ ID NO: 2610693 - DNA, 25 bp, Homo sapien
ttagacttgcaatctttactaatat

SEQ ID NO: 2610694 - DNA, 25 bp, Homo sapien
tccccgcaaccatcaagttaaatga

SEQ ID NO: 2610695 - DNA, 25 bp, Homo sapien
cacctctaaggcgacagctatctgc

SEQ ID NO: 2610696 - DNA, 25 bp, Homo sapien
tgttacacacaccttagctatgccc

SEQ ID NO: 2610697 - DNA, 25 bp, Homo sapien
tatggtgccctgactttctttgtcc

SEQ ID NO: 2610698 - DNA, 25 bp, Homo sapien
tgaacagtgtatttaaagataccac

SEQ ID NO: 2610699 - DNA, 25 bp, Homo sapien
tatttaaagataccacccagaagac

SEQ ID NO: 2610700 - DNA, 25 bp, Homo sapien
cagtgtatttaaagataccacccag

SEQ ID NO: 2610701 - DNA, 25 bp, Homo sapien
aagataccacccagaagacatgttc

SEQ ID NO: 2610702 - DNA, 25 bp, Homo sapien
agggagaaatgaccaatatggtaag

SEQ ID NO: 2610703 - DNA, 25 bp, Homo sapien
ggagaaatgaccaatatggtaaggg

SEQ ID NO: 2610704 - DNA, 25 bp, Homo sapien
caagggagaaatgaccaatatggta

SEQ ID NO: 2610705 - DNA, 25 bp, Homo sapien
agaaatgaccaatatggtaagggca

SEQ ID NO: 2610706 - DNA, 25 bp, Homo sapien
tacaggttcttgagatggacagaaa

SEQ ID NO: 2610707 - DNA, 25 bp, Homo sapien
ggcaacatgaccactatctcttgag

SEQ ID NO: 2610708 - DNA, 25 bp, Homo sapien
tgagacggtattgcctaactattcc

SEQ ID NO: 2610709 - DNA, 25 bp, Homo sapien
taactattcccttgcataatgccaa

SEQ ID NO: 2610710 - DNA, 25 bp, Homo sapien
caactagtgagaatcagaggtgtac

SEQ ID NO: 2610711 - DNA, 25 bp, Homo sapien
gcagatttgctaaaggctaaccact

SEQ ID NO: 2610712 - DNA, 25 bp, Homo sapien
caccagctgggtaatatcctagcca

SEQ ID NO: 2610713 - DNA, 25 bp, Homo sapien
gttctagggccccaacagagaagta

SEQ ID NO: 2610714 - DNA, 25 bp, Homo sapien
atgacaaattatcagtgttattgct

SEQ ID NO: 2610715 - DNA, 25 bp, Homo sapien
agtatatacccaactatggttgtga

SEQ ID NO: 2610716 - DNA, 25 bp, Homo sapien
aaaagtatatacccaactatggttg

SEQ ID NO: 2610717 - DNA, 25 bp, Homo sapien
tgacaaattatcagtgttattgcta

SEQ ID NO: 2610718 - DNA, 25 bp, Homo sapien
gcgacgagatctatgaaatttcaca

SEQ ID NO: 2610719 - DNA, 25 bp, Homo sapien
cccagtaagcgacgagatctatgaa

SEQ ID NO: 2610720 - DNA, 25 bp, Homo sapien
cttaacaacaatatagcagactccc

SEQ ID NO: 2610721 - DNA, 25 bp, Homo sapien
tagcagactcccagtaagcgacgag

SEQ ID NO: 2610722 - DNA, 25 bp, Homo sapien
caaggaacagatatccagccaccaa

SEQ ID NO: 2610723 - DNA, 25 bp, Homo sapien
aaggaacagatatccagccaccaac

SEQ ID NO: 2610724 - DNA, 25 bp, Homo sapien
cagttctcgatctttcagagtagca

SEQ ID NO: 2610725 - DNA, 25 bp, Homo sapien
gaaagctcagttctcgatctttcag

SEQ ID NO: 2610726 - DNA, 25 bp, Homo sapien
gccgactgaaagctcagttctcgat

SEQ ID NO: 2610727 - DNA, 25 bp, Homo sapien
cctggagccgactgaaagctcagtt

SEQ ID NO: 2610728 - DNA, 25 bp, Homo sapien
gtagaagacatataccattcccact

SEQ ID NO: 2610729 - DNA, 25 bp, Homo sapien
tataccattcccactagccaatgca

SEQ ID NO: 2610730 - DNA, 25 bp, Homo sapien
taccattcccactagccaatgcaga

SEQ ID NO: 2610731 - DNA, 25 bp, Homo sapien
gaggcaaagtagaagacatatacca

SEQ ID NO: 2610732 - DNA, 25 bp, Homo sapien
aataaatcttcggagatgcctatat

SEQ ID NO: 2610733 - DNA, 25 bp, Homo sapien
cctatatattggcaaatggatcatt

SEQ ID NO: 2610734 - DNA, 25 bp, Homo sapien
gagatgcctatatattggcaaatgg

SEQ ID NO: 2610735 - DNA, 25 bp, Homo sapien
cttcggagatgcctatatattggca

SEQ ID NO: 2610736 - DNA, 25 bp, Homo sapien
gaaaattaggcagcacactcttaat

SEQ ID NO: 2610737 - DNA, 25 bp, Homo sapien
cttaattatacgtataggaagccaa

SEQ ID NO: 2610738 - DNA, 25 bp, Homo sapien
gcacactcttaattatacgtatagg

SEQ ID NO: 2610739 - DNA, 25 bp, Homo sapien
gagcatgacattgtatggaagaaaa

SEQ ID NO: 2610740 - DNA, 25 bp, Homo sapien
gaagcagctcgagggacagttcact

SEQ ID NO: 2610741 - DNA, 25 bp, Homo sapien
cctgttcgagtaatgctggcaagac

SEQ ID NO: 2610742 - DNA, 25 bp, Homo sapien
cactgcctcgtgtgtccctgttcga

SEQ ID NO: 2610743 - DNA, 25 bp, Homo sapien
aagtatccggcggtcacagtccacg

SEQ ID NO: 2610744 - DNA, 25 bp, Homo sapien
gcgttgttatttcgagcatgctgat

SEQ ID NO: 2610745 - DNA, 25 bp, Homo sapien
ctccctgctggagtatggcttggtg

SEQ ID NO: 2610746 - DNA, 25 bp, Homo sapien
ttctcccaccacaggaatagcgttg

SEQ ID NO: 2610747 - DNA, 25 bp, Homo sapien
aacttgttgatttgcactgttttca

SEQ ID NO: 2610748 - DNA, 25 bp, Homo sapien
tgagtctgtctctgatctggccaga

SEQ ID NO: 2610749 - DNA, 25 bp, Homo sapien
tcattttttgagtctgtctctgatc

SEQ ID NO: 2610750 - DNA, 25 bp, Homo sapien
aaagtcattttttgagtctgtctct

SEQ ID NO: 2610751 - DNA, 25 bp, Homo sapien
agtcattttttgagtctgtctctga

SEQ ID NO: 2610752 - DNA, 25 bp, Homo sapien
tgggaagcccgaaaaggacagataa

SEQ ID NO: 2610753 - DNA, 25 bp, Homo sapien
gataacaaaacccaggagactctga

SEQ ID NO: 2610754 - DNA, 25 bp, Homo sapien
aaggacagataacaaaacccaggag

SEQ ID NO: 2610755 - DNA, 25 bp, Homo sapien
gtgggaagcccgaaaaggacagata

SEQ ID NO: 2610756 - DNA, 25 bp, Homo sapien
ggtggatctccacaagaccagaggg

SEQ ID NO: 2610757 - DNA, 25 bp, Homo sapien
ggatctccacaagaccagagggcag

SEQ ID NO: 2610758 - DNA, 25 bp, Homo sapien
caggtggatctccacaagaccagag

SEQ ID NO: 2610759 - DNA, 25 bp, Homo sapien
tggatctccacaagaccagagggca

SEQ ID NO: 2610760 - DNA, 25 bp, Homo sapien
tgttatacacatgaagacaatcaac

SEQ ID NO: 2610761 - DNA, 25 bp, Homo sapien
gttatacacatgaagacaatcaaca

SEQ ID NO: 2610762 - DNA, 25 bp, Homo sapien
ttatacacatgaagacaatcaacag

SEQ ID NO: 2610763 - DNA, 25 bp, Homo sapien
atgttatacacatgaagacaatcaa

SEQ ID NO: 2610764 - DNA, 25 bp, Homo sapien
tcacaatgtctaaagagtacacaat

SEQ ID NO: 2610765 - DNA, 25 bp, Homo sapien
gtcatcttcatgttgttatgttagt

SEQ ID NO: 2610766 - DNA, 25 bp, Homo sapien
aaaagatatcacattcgatatatca

SEQ ID NO: 2610767 - DNA, 25 bp, Homo sapien
cacattcgatatatcaatgtcttca

SEQ ID NO: 2610768 - DNA, 25 bp, Homo sapien
aaaagctgataaatgagacatgtgg

SEQ ID NO: 2610769 - DNA, 25 bp, Homo sapien
ctgaaaatagaaaagctgataaatg

SEQ ID NO: 2610770 - DNA, 25 bp, Homo sapien
aaatagaaaagctgataaatgagac

SEQ ID NO: 2610771 - DNA, 25 bp, Homo sapien
tagaaaagctgataaatgagacatg

SEQ ID NO: 2610772 - DNA, 25 bp, Homo sapien
ggaagatcactctgcgtccctgagg

SEQ ID NO: 2610773 - DNA, 25 bp, Homo sapien
gacattaaccaacggccagcaaata

SEQ ID NO: 2610774 - DNA, 25 bp, Homo sapien
gagagaccactctttaaccttctgg

SEQ ID NO: 2610775 - DNA, 25 bp, Homo sapien
cacagcccttatggttagccagcaa

SEQ ID NO: 2610776 - DNA, 25 bp, Homo sapien
gatcagtcttgtattacacacacat

SEQ ID NO: 2610777 - DNA, 25 bp, Homo sapien
atcagtcttgtattacacacacata

SEQ ID NO: 2610778 - DNA, 25 bp, Homo sapien
aagatcagtcttgtattacacacac

SEQ ID NO: 2610779 - DNA, 25 bp, Homo sapien
agatcagtcttgtattacacacaca

SEQ ID NO: 2610780 - DNA, 25 bp, Homo sapien
ccaacagcaccgcaactatcaaagt

SEQ ID NO: 2610781 - DNA, 25 bp, Homo sapien
cccagaaggagagggacaactccag

SEQ ID NO: 2610782 - DNA, 25 bp, Homo sapien
aatgaccagctcaaacaggagcccc

SEQ ID NO: 2610783 - DNA, 25 bp, Homo sapien
aaaaagaggagtctgatccaaggga

SEQ ID NO: 2610784 - DNA, 25 bp, Homo sapien
ctgggaccagacgcatgagccaatt

SEQ ID NO: 2610785 - DNA, 25 bp, Homo sapien
gggaccagacgcatgagccaatttt

SEQ ID NO: 2610786 - DNA, 25 bp, Homo sapien
tgggaccagacgcatgagccaattt

SEQ ID NO: 2610787 - DNA, 25 bp, Homo sapien
gccataaagtaatccataaggtgac

SEQ ID NO: 2610788 - DNA, 25 bp, Homo sapien
gtactttgcttgatcactgactggg

SEQ ID NO: 2610789 - DNA, 25 bp, Homo sapien
gctccttgatgccacgggatgctct

SEQ ID NO: 2610790 - DNA, 25 bp, Homo sapien
cagggctcatgctgcgtaacattaa

SEQ ID NO: 2610791 - DNA, 25 bp, Homo sapien
gctgctctgctagaattccaactgg

SEQ ID NO: 2610792 - DNA, 25 bp, Homo sapien
cccaaatgagattaatgtttaccca

SEQ ID NO: 2610793 - DNA, 25 bp, Homo sapien
aaggaggtccaagatcactgtgatt

SEQ ID NO: 2610794 - DNA, 25 bp, Homo sapien
tgattcgcgttctccaaaaacccac

SEQ ID NO: 2610795 - DNA, 25 bp, Homo sapien
agtgctgtcaaactggcatgtgttc

SEQ ID NO: 2610796 - DNA, 25 bp, Homo sapien
taacttcctttctgcggctgctaag

SEQ ID NO: 2610797 - DNA, 25 bp, Homo sapien
ctgactgctctgccttaacttcctt

SEQ ID NO: 2610798 - DNA, 25 bp, Homo sapien
tgctgtcaaactggcatgtgttctg

SEQ ID NO: 2610799 - DNA, 25 bp, Homo sapien
tgagaggttgatacatacactgaat

SEQ ID NO: 2610800 - DNA, 25 bp, Homo sapien
gctaagtctcctagatgtttcctcc

SEQ ID NO: 2610801 - DNA, 25 bp, Homo sapien
tgatttccccgtgtctaataagata

SEQ ID NO: 2610802 - DNA, 25 bp, Homo sapien
tctgggtagaggaagcttggctttt

SEQ ID NO: 2610803 - DNA, 25 bp, Homo sapien
tgaggacccatcaatgttatagctg

SEQ ID NO: 2610804 - DNA, 25 bp, Homo sapien
ggacccatcaatgttatagctgcaa

SEQ ID NO: 2610805 - DNA, 25 bp, Homo sapien
actgaggacccatcaatgttatagc

SEQ ID NO: 2610806 - DNA, 25 bp, Homo sapien
caccactgaggacccatcaatgtta

SEQ ID NO: 2610807 - DNA, 25 bp, Homo sapien
tagtaaaggaacaacaccagaagct

SEQ ID NO: 2610808 - DNA, 25 bp, Homo sapien
agcacagagatcacgggagctgcca

SEQ ID NO: 2610809 - DNA, 25 bp, Homo sapien
gtgaaggtcaatgttccggatgcca

SEQ ID NO: 2610810 - DNA, 25 bp, Homo sapien
ggagctgccagtttacgaacaatat

SEQ ID NO: 2610811 - DNA, 25 bp, Homo sapien
tcaacaaaagtcaggagcaaaggct

SEQ ID NO: 2610812 - DNA, 25 bp, Homo sapien
caaaaggttggactgcattaaaggc

SEQ ID NO: 2610813 - DNA, 25 bp, Homo sapien
tcttcagggaagaatgggacacttg

SEQ ID NO: 2610814 - DNA, 25 bp, Homo sapien
gctccagagacgagagaccagattc

SEQ ID NO: 2610815 - DNA, 25 bp, Homo sapien
cggacttggaaggacaaaattgcca

SEQ ID NO: 2610816 - DNA, 25 bp, Homo sapien
aaaatggataaatccgccgatggac

SEQ ID NO: 2610817 - DNA, 25 bp, Homo sapien
ttgccatcaataccacgaccatcag

SEQ ID NO: 2610818 - DNA, 25 bp, Homo sapien
ttcataaaggcgcttaaactggcgg

SEQ ID NO: 2610819 - DNA, 25 bp, Homo sapien
aatgggaacgtctagacccctggca

SEQ ID NO: 2610820 - DNA, 25 bp, Homo sapien
tatacaacagctgacaagacatgcc

SEQ ID NO: 2610821 - DNA, 25 bp, Homo sapien
gaaagaggacactgggctacaggaa

SEQ ID NO: 2610822 - DNA, 25 bp, Homo sapien
ggcaggcatccagcataaagaaaga

SEQ ID NO: 2610823 - DNA, 25 bp, Homo sapien
cagatggcttgcaggctgatcccaa

SEQ ID NO: 2610824 - DNA, 25 bp, Homo sapien
ttgcaggctgatcccaagaggacag

SEQ ID NO: 2610825 - DNA, 25 bp, Homo sapien
tggcttgcaggctgatcccaagagg

SEQ ID NO: 2610826 - DNA, 25 bp, Homo sapien
tgagcagatggcttgcaggctgatc

SEQ ID NO: 2610827 - DNA, 25 bp, Homo sapien
gagacagactaaaaacatgaccatc

SEQ ID NO: 2610828 - DNA, 25 bp, Homo sapien
taaaacaacttagtgggcagatcta

SEQ ID NO: 2610829 - DNA, 25 bp, Homo sapien
gaggccaggagggatacagtaaact

SEQ ID NO: 2610830 - DNA, 25 bp, Homo sapien
taaacttatgcagtggatttatctg

SEQ ID NO: 2610831 - DNA, 25 bp, Homo sapien
aggtatgggtttgtaggaagctgca

SEQ ID NO: 2610832 - DNA, 25 bp, Homo sapien
tatgggtttgtaggaagctgcagaa

SEQ ID NO: 2610833 - DNA, 25 bp, Homo sapien
gcttcagtcagtggtttagggggtc

SEQ ID NO: 2610834 - DNA, 25 bp, Homo sapien
gaaggcctccaatgctgtgcaatgg

SEQ ID NO: 2610835 - DNA, 25 bp, Homo sapien
tgccagatttccgttcgtagttcac

SEQ ID NO: 2610836 - DNA, 25 bp, Homo sapien
cgttcgtagttcacgagtcgttgac

SEQ ID NO: 2610837 - DNA, 25 bp, Homo sapien
ttattcttgggatgactgtggaggt

SEQ ID NO: 2610838 - DNA, 25 bp, Homo sapien
cacgagtcgttgacccacaaggtac

SEQ ID NO: 2610839 - DNA, 25 bp, Homo sapien
atgtcagaagatccagggagaacag

SEQ ID NO: 2610840 - DNA, 25 bp, Homo sapien
tgagagatcactgggaaaaatctcc

SEQ ID NO: 2610841 - DNA, 25 bp, Homo sapien
gcagaatcttacaccgctgctctct

SEQ ID NO: 2610842 - DNA, 25 bp, Homo sapien
catatacaaatctcagacagcagta

SEQ ID NO: 2610843 - DNA, 25 bp, Homo sapien
gacaactagatttaataaattaata

SEQ ID NO: 2610844 - DNA, 25 bp, Homo sapien
tgacaactagatttaataaattaat

SEQ ID NO: 2610845 - DNA, 25 bp, Homo sapien
ttaatatacattttgtttaaagatg

SEQ ID NO: 2610846 - DNA, 25 bp, Homo sapien
gtgacaactagatttaataaattaa

SEQ ID NO: 2610847 - DNA, 25 bp, Homo sapien
gagagctgctaggacatcatgaact

SEQ ID NO: 2610848 - DNA, 25 bp, Homo sapien
tcatgaactgcgttccacaaggcgt

SEQ ID NO: 2610849 - DNA, 25 bp, Homo sapien
gaaaagtcttgcctgcgcactactg

SEQ ID NO: 2610850 - DNA, 25 bp, Homo sapien
tgtggcacgtttcctgtcgagatca

SEQ ID NO: 2610851 - DNA, 25 bp, Homo sapien
gcactaaccagcgagaccagatgtt

SEQ ID NO: 2610852 - DNA, 25 bp, Homo sapien
ggagaaatgcacacctagtcctcag

SEQ ID NO: 2610853 - DNA, 25 bp, Homo sapien
gcagctcccgataccgatgttttta

SEQ ID NO: 2610854 - DNA, 25 bp, Homo sapien
tatgaccttgcaggactttcggcca

SEQ ID NO: 2610855 - DNA, 25 bp, Homo sapien
taaccttttgaagtatctgcctagg

SEQ ID NO: 2610856 - DNA, 25 bp, Homo sapien
attacctgccagtaaaatggagggc

SEQ ID NO: 2610857 - DNA, 25 bp, Homo sapien
taaaacccggatgctacccaagcaa

SEQ ID NO: 2610858 - DNA, 25 bp, Homo sapien
taaggctagctatacacaaacgtca

SEQ ID NO: 2610859 - DNA, 25 bp, Homo sapien
gcattttgccaatacagaaatgacg

SEQ ID NO: 2610860 - DNA, 25 bp, Homo sapien
gaatccacaataatagcagttacat

SEQ ID NO: 2610861 - DNA, 25 bp, Homo sapien
ctggaattgagatggcccatcttca

SEQ ID NO: 2610862 - DNA, 25 bp, Homo sapien
gacgtatcttggatcaaatcatttt

SEQ ID NO: 2610863 - DNA, 25 bp, Homo sapien
ggcactacattctcctgcacgtgtg

SEQ ID NO: 2610864 - DNA, 25 bp, Homo sapien
gcaatacaatgtagaactgtccagt

SEQ ID NO: 2610865 - DNA, 25 bp, Homo sapien
tgttcacgcacattcgcaaacgcaa

SEQ ID NO: 2610866 - DNA, 25 bp, Homo sapien
gagcttagagtactcaaccctgaaa

SEQ ID NO: 2610867 - DNA, 25 bp, Homo sapien
taataatactttactggtaagacat

SEQ ID NO: 2610868 - DNA, 25 bp, Homo sapien
atactttactggtaagacattttag

SEQ ID NO: 2610869 - DNA, 25 bp, Homo sapien
gatggctgaataacatcctaaagaa

SEQ ID NO: 2610870 - DNA, 25 bp, Homo sapien
cacaaatgaggcttttaataatact

SEQ ID NO: 2610871 - DNA, 25 bp, Homo sapien
ttaaagaagcccttactcatgatgg

SEQ ID NO: 2610872 - DNA, 25 bp, Homo sapien
tgaggcactcgtacaaaacaggaat

SEQ ID NO: 2610873 - DNA, 25 bp, Homo sapien
tgcgttgatagaaaattgacacccc

SEQ ID NO: 2610874 - DNA, 25 bp, Homo sapien
aacttagaaggcaacaaatgaccac

SEQ ID NO: 2610875 - DNA, 25 bp, Homo sapien
gggactgatcccaaaaacatatgag

SEQ ID NO: 2610876 - DNA, 25 bp, Homo sapien
gaagcagaaaaactccggcactgtt

SEQ ID NO: 2610877 - DNA, 25 bp, Homo sapien
tgagacaggaatgccccagtagctg

SEQ ID NO: 2610878 - DNA, 25 bp, Homo sapien
gagagccgggagtacaaaatacagc

SEQ ID NO: 2610879 - DNA, 25 bp, Homo sapien
aaatgattctgtgaaggtatgtctg

SEQ ID NO: 2610880 - DNA, 25 bp, Homo sapien
gcatagtatgacacctttattgtga

SEQ ID NO: 2610881 - DNA, 25 bp, Homo sapien
ctaaactattaacagcagttacctc

SEQ ID NO: 2610882 - DNA, 25 bp, Homo sapien
ctgggaaataggacagggatttcag

SEQ ID NO: 2610883 - DNA, 25 bp, Homo sapien
tctgtcaaaagagcctcgagtcgaa

SEQ ID NO: 2610884 - DNA, 25 bp, Homo sapien
gagaaacctcgaatttggtgggtgc

SEQ ID NO: 2610885 - DNA, 25 bp, Homo sapien
caatgtgactggctctaggaggaaa

SEQ ID NO: 2610886 - DNA, 25 bp, Homo sapien
tcgagtcgaaggataggagaaacct

SEQ ID NO: 2610887 - DNA, 25 bp, Homo sapien
aacttctcgggcttcgaacttcgca

SEQ ID NO: 2610888 - DNA, 25 bp, Homo sapien
ttctcgggcttcgaacttcgcacat

SEQ ID NO: 2610889 - DNA, 25 bp, Homo sapien
tcctccaaacttctcgggcttcgaa

SEQ ID NO: 2610890 - DNA, 25 bp, Homo sapien
ctccaaacttctcgggcttcgaact

SEQ ID NO: 2610891 - DNA, 25 bp, Homo sapien
tgagcgtttcgcctacaaaagcatc

SEQ ID NO: 2610892 - DNA, 25 bp, Homo sapien
ttcgggagaaattcggaccaactgc

SEQ ID NO: 2610893 - DNA, 25 bp, Homo sapien
gatcggtttcccaccgccgaatgtg

SEQ ID NO: 2610894 - DNA, 25 bp, Homo sapien
tgtgagcggcgaactcacgaaggac

SEQ ID NO: 2610895 - DNA, 25 bp, Homo sapien
ggcggctgtcggctacgacgcggtg

SEQ ID NO: 2610896 - DNA, 25 bp, Homo sapien
ctgcgaggaagaagggcggctgtcg

SEQ ID NO: 2610897 - DNA, 25 bp, Homo sapien
acgacgcggtggacccgctagcagc

SEQ ID NO: 2610898 - DNA, 25 bp, Homo sapien
ctgtcggctacgacgcggtggaccc

SEQ ID NO: 2610899 - DNA, 25 bp, Homo sapien
cgcagaagggaccaggctggtgaat

SEQ ID NO: 2610900 - DNA, 25 bp, Homo sapien
ccgcagaagggaccaggctggtgaa

SEQ ID NO: 2610901 - DNA, 25 bp, Homo sapien
cacgtcggccggctgggtgcggatg

SEQ ID NO: 2610902 - DNA, 25 bp, Homo sapien
cggatggcagccttggtgaattgct

SEQ ID NO: 2610903 - DNA, 25 bp, Homo sapien
gaattgcttcaggatgtccggcagc

SEQ ID NO: 2610904 - DNA, 25 bp, Homo sapien
gaatgtggatctgctgagcgcagaa

SEQ ID NO: 2610905 - DNA, 25 bp, Homo sapien
caattgagttgccattacgttgtag

SEQ ID NO: 2610906 - DNA, 25 bp, Homo sapien
caatgatttcgggtctcatagtcga

SEQ ID NO: 2610907 - DNA, 25 bp, Homo sapien
gttttagtctatcttcatcataaac

SEQ ID NO: 2610908 - DNA, 25 bp, Homo sapien
tacgttgtaggtaagtgagcatttt

SEQ ID NO: 2610909 - DNA, 25 bp, Homo sapien
ctgtcctttacaggaagtggatctc

SEQ ID NO: 2610910 - DNA, 25 bp, Homo sapien
tctgggttgccgtgggcatttccat

SEQ ID NO: 2610911 - DNA, 25 bp, Homo sapien
agtggatctcctctcgacagagctg

SEQ ID NO: 2610912 - DNA, 25 bp, Homo sapien
ctcctctcgacagagctgaaaaata

SEQ ID NO: 2610913 - DNA, 25 bp, Homo sapien
gggcaaagaagcgcaaggcaggaag

SEQ ID NO: 2610914 - DNA, 25 bp, Homo sapien
tgtggggcaaagaagcgcaaggcag

SEQ ID NO: 2610915 - DNA, 25 bp, Homo sapien
gcaaagaagcgcaaggcaggaaggg

SEQ ID NO: 2610916 - DNA, 25 bp, Homo sapien
tggggcaaagaagcgcaaggcagga

SEQ ID NO: 2610917 - DNA, 25 bp, Homo sapien
tgttaattccacataccgcttgtgg

SEQ ID NO: 2610918 - DNA, 25 bp, Homo sapien
gaatttttccttcggcaggcacaag

SEQ ID NO: 2610919 - DNA, 25 bp, Homo sapien
cacaaggatccagttgtaagagcgc

SEQ ID NO: 2610920 - DNA, 25 bp, Homo sapien
gcatgctgcatccaagcgctaaaaa

SEQ ID NO: 2610921 - DNA, 25 bp, Homo sapien
gctttctacaaccaggagaggcctc

SEQ ID NO: 2610922 - DNA, 25 bp, Homo sapien
caggtgtttgaactcgtgctcagca

SEQ ID NO: 2610923 - DNA, 25 bp, Homo sapien
tgaacgacatgaagaaacccctcct

SEQ ID NO: 2610924 - DNA, 25 bp, Homo sapien
tgaacgcttatgacgctgaacgaca

SEQ ID NO: 2610925 - DNA, 25 bp, Homo sapien
taacgcctgctcatgtggagatcac

SEQ ID NO: 2610926 - DNA, 25 bp, Homo sapien
ggatggtcacgctgcctactgatga

SEQ ID NO: 2610927 - DNA, 25 bp, Homo sapien
gcagtgaacagacacctaacgcctg

SEQ ID NO: 2610928 - DNA, 25 bp, Homo sapien
attttcaatcgggtggtcagggacg

SEQ ID NO: 2610929 - DNA, 25 bp, Homo sapien
tccgtgaggatctcgcacaggtgct

SEQ ID NO: 2610930 - DNA, 25 bp, Homo sapien
caaggtaggattccgtctccaaggg

SEQ ID NO: 2610931 - DNA, 25 bp, Homo sapien
cacaggtgcttcagcgcagtgttca

SEQ ID NO: 2610932 - DNA, 25 bp, Homo sapien
cacatctgagtctaatctggccaag

SEQ ID NO: 2610933 - DNA, 25 bp, Homo sapien
ttgtggtgagagagcaaaggaaaaa

SEQ ID NO: 2610934 - DNA, 25 bp, Homo sapien
cctgaatcctagagagggtgcatac

SEQ ID NO: 2610935 - DNA, 25 bp, Homo sapien
ccatggtcaacatacctgaatccta

SEQ ID NO: 2610936 - DNA, 25 bp, Homo sapien
attctcccatggtcaacatacctga

SEQ ID NO: 2610937 - DNA, 25 bp, Homo sapien
ttccgcaggacccaagagctttgtt

SEQ ID NO: 2610938 - DNA, 25 bp, Homo sapien
gcagagtcagcacccaatgatggtt

SEQ ID NO: 2610939 - DNA, 25 bp, Homo sapien
cacagggtcccagttctttggaggc

SEQ ID NO: 2610940 - DNA, 25 bp, Homo sapien
catcctaggtggcatcatggccggt

SEQ ID NO: 2610941 - DNA, 25 bp, Homo sapien
aagaaatctgaaagacctatcatgc

SEQ ID NO: 2610942 - DNA, 25 bp, Homo sapien
gaaagacctatcatgccgttcttcc

SEQ ID NO: 2610943 - DNA, 25 bp, Homo sapien
ctatcatgccgttcttcctggcgtc

SEQ ID NO: 2610944 - DNA, 25 bp, Homo sapien
tctgaaagacctatcatgccgttct

SEQ ID NO: 2610945 - DNA, 25 bp, Homo sapien
ggtaagttgtatttggtgccagaat

SEQ ID NO: 2610946 - DNA, 25 bp, Homo sapien
ttcagggtaagttgtatttggtgcc

SEQ ID NO: 2610947 - DNA, 25 bp, Homo sapien
taaagagcactattttgacattaaa

SEQ ID NO: 2610948 - DNA, 25 bp, Homo sapien
gtgattcagggtaagttgtatttgg

SEQ ID NO: 2610949 - DNA, 25 bp, Homo sapien
gattctggttgtgctcagccaggac

SEQ ID NO: 2610950 - DNA, 25 bp, Homo sapien
ctggttgtgctcagccaggacaaga

SEQ ID NO: 2610951 - DNA, 25 bp, Homo sapien
gcccagcatagctgacctgtgtatc

SEQ ID NO: 2610952 - DNA, 25 bp, Homo sapien
tctgagcccagcatagctgacctgt

SEQ ID NO: 2610953 - DNA, 25 bp, Homo sapien
tagagcaggtctatcttctctccat

SEQ ID NO: 2610954 - DNA, 25 bp, Homo sapien
tctagagcaggtctatcttctctcc

SEQ ID NO: 2610955 - DNA, 25 bp, Homo sapien
ttttctagagcaggtctatcttctc

SEQ ID NO: 2610956 - DNA, 25 bp, Homo sapien
atttttctagagcaggtctatcttc

SEQ ID NO: 2610957 - DNA, 25 bp, Homo sapien
aaagatgtggggtgtctgagccaag

SEQ ID NO: 2610958 - DNA, 25 bp, Homo sapien
ctaaagatgtggggtgtctgagcca

SEQ ID NO: 2610959 - DNA, 25 bp, Homo sapien
taaagatgtggggtgtctgagccaa

SEQ ID NO: 2610960 - DNA, 25 bp, Homo sapien
gcggtaaactatgataagaaagtgt

SEQ ID NO: 2610961 - DNA, 25 bp, Homo sapien
aactatgataagaaagtgtagcatt

SEQ ID NO: 2610962 - DNA, 25 bp, Homo sapien
taaactatgataagaaagtgtagca

SEQ ID NO: 2610963 - DNA, 25 bp, Homo sapien
taattgcggtaaactatgataagaa

SEQ ID NO: 2610964 - DNA, 25 bp, Homo sapien
ctgcctcccggtaccctgccctgta

SEQ ID NO: 2610965 - DNA, 25 bp, Homo sapien
cacacagaggttgcctgccacatgg

SEQ ID NO: 2610966 - DNA, 25 bp, Homo sapien
ccacacagaggttgcctgccacatg

SEQ ID NO: 2610967 - DNA, 25 bp, Homo sapien
taccctgccctgtagaatttttctg

SEQ ID NO: 2610968 - DNA, 25 bp, Homo sapien
tgctggctctgacacaagttttccg

SEQ ID NO: 2610969 - DNA, 25 bp, Homo sapien
acacagtcctagaagccagaggcag

SEQ ID NO: 2610970 - DNA, 25 bp, Homo sapien
gaggtcctcgggctctgatccaagt

SEQ ID NO: 2610971 - DNA, 25 bp, Homo sapien
tcttgttgccgggtaaagctgcccg

SEQ ID NO: 2610972 - DNA, 25 bp, Homo sapien
cccggcctgatgtccgcagggtcat

SEQ ID NO: 2610973 - DNA, 25 bp, Homo sapien
ttccttctgtgggagcgctggctca

SEQ ID NO: 2610974 - DNA, 25 bp, Homo sapien
tcccggcctgatgtccgcagggtca

SEQ ID NO: 2610975 - DNA, 25 bp, Homo sapien
ccttctgtgggagcgctggctcagg

SEQ ID NO: 2610976 - DNA, 25 bp, Homo sapien
accctggactccaaacttgtaagtg

SEQ ID NO: 2610977 - DNA, 25 bp, Homo sapien
cttgtaagtgctagagtgggcagct

SEQ ID NO: 2610978 - DNA, 25 bp, Homo sapien
gactccaaacttgtaagtgctagag

SEQ ID NO: 2610979 - DNA, 25 bp, Homo sapien
caaacttgtaagtgctagagtgggc

SEQ ID NO: 2610980 - DNA, 25 bp, Homo sapien
cagtagtgctttgcaggctacaaca

SEQ ID NO: 2610981 - DNA, 25 bp, Homo sapien
cctgctgtcgtttccgaggagcctg

SEQ ID NO: 2610982 - DNA, 25 bp, Homo sapien
gcctcctggagcacagtcatgagca

SEQ ID NO: 2610983 - DNA, 25 bp, Homo sapien
ggctacaacatctctcctgtgggcc

SEQ ID NO: 2610984 - DNA, 25 bp, Homo sapien
gaatgtgaggagtgctatgaccacc

SEQ ID NO: 2610985 - DNA, 25 bp, Homo sapien
ggttctctttcatccgaggtttgac

SEQ ID NO: 2610986 - DNA, 25 bp, Homo sapien
actggccgccactggttctctttca

SEQ ID NO: 2610987 - DNA, 25 bp, Homo sapien
accaccagatgcacaagggcctctg

SEQ ID NO: 2610988 - DNA, 25 bp, Homo sapien
tttcccaactgggtgtgaaactcac

SEQ ID NO: 2610989 - DNA, 25 bp, Homo sapien
aagcaatgtattcataactgagcgt

SEQ ID NO: 2610990 - DNA, 25 bp, Homo sapien
cacaacgatcaagtttaagcaatgt

SEQ ID NO: 2610991 - DNA, 25 bp, Homo sapien
taactgagcgttgaccccaggagat

SEQ ID NO: 2610992 - DNA, 25 bp, Homo sapien
tacttgttgcttgctctctcggctc

SEQ ID NO: 2610993 - DNA, 25 bp, Homo sapien
ggtcagtgatggtactgtcttctgg

SEQ ID NO: 2610994 - DNA, 25 bp, Homo sapien
aactgcttaaccaccagcaatgagg

SEQ ID NO: 2610995 - DNA, 25 bp, Homo sapien
gatgctgaggtaagaagtgagctaa

SEQ ID NO: 2610996 - DNA, 25 bp, Homo sapien
atttccatcaagaagatggagggtg

SEQ ID NO: 2610997 - DNA, 25 bp, Homo sapien
gagcaacacggcagtttccttcagt

SEQ ID NO: 2610998 - DNA, 25 bp, Homo sapien
ttaatgcacggacggagaaatttcc

SEQ ID NO: 2610999 - DNA, 25 bp, Homo sapien
gaaaggctatcatgtaactgtcctc

SEQ ID NO: 2611000 - DNA, 25 bp, Homo sapien
tcagtcgcaacctcagatgcaaagt

SEQ ID NO: 2611001 - DNA, 25 bp, Homo sapien
acaccaagcataggctcgaaggctg

SEQ ID NO: 2611002 - DNA, 25 bp, Homo sapien
gaggacaccaagcataggctcgaag

SEQ ID NO: 2611003 - DNA, 25 bp, Homo sapien
caagccaaggatcaaaggctgcaaa

SEQ ID NO: 2611004 - DNA, 25 bp, Homo sapien
accaagcataggctcgaaggctgca

SEQ ID NO: 2611005 - DNA, 25 bp, Homo sapien
tggaccatgatccagcctcaactgc

SEQ ID NO: 2611006 - DNA, 25 bp, Homo sapien
tcaactgcaaatgcctcaactccag

SEQ ID NO: 2611007 - DNA, 25 bp, Homo sapien
actcagccagcacagtggaccatga

SEQ ID NO: 2611008 - DNA, 25 bp, Homo sapien
tccagccgcgtctccactagatttt

SEQ ID NO: 2611009 - DNA, 25 bp, Homo sapien
tgaagccaagaaggggccagtaggg

SEQ ID NO: 2611010 - DNA, 25 bp, Homo sapien
gaagccaagaaggggccagtagggc

SEQ ID NO: 2611011 - DNA, 25 bp, Homo sapien
ctgaagccaagaaggggccagtagg

SEQ ID NO: 2611012 - DNA, 25 bp, Homo sapien
cagtgtgtttctcaggcagccgcat

SEQ ID NO: 2611013 - DNA, 25 bp, Homo sapien
gggttgggagcccatccactcttga

SEQ ID NO: 2611014 - DNA, 25 bp, Homo sapien
tcagccctctgcgtgtcagtgtgtt

SEQ ID NO: 2611015 - DNA, 25 bp, Homo sapien
aggaagacgaccagcccagtccttc

SEQ ID NO: 2611016 - DNA, 25 bp, Homo sapien
gaggatcccggtgtcatcctgcttg

SEQ ID NO: 2611017 - DNA, 25 bp, Homo sapien
agagaagaggatcccggtgtcatcc

SEQ ID NO: 2611018 - DNA, 25 bp, Homo sapien
aagaggatcccggtgtcatcctgct

SEQ ID NO: 2611019 - DNA, 25 bp, Homo sapien
gatcccggtgtcatcctgcttgcag

SEQ ID NO: 2611020 - DNA, 25 bp, Homo sapien
gggagcaccacgcagccttttctgg

SEQ ID NO: 2611021 - DNA, 25 bp, Homo sapien
tgaccgcgtcactcagcaagggaat

SEQ ID NO: 2611022 - DNA, 25 bp, Homo sapien
gagagcactgcgtcactttacagca

SEQ ID NO: 2611023 - DNA, 25 bp, Homo sapien
cccgtaggcgattggtgctcattga

SEQ ID NO: 2611024 - DNA, 25 bp, Homo sapien
taggatgaggacacgtttaaactgc

SEQ ID NO: 2611025 - DNA, 25 bp, Homo sapien
tttaaactgcgaagccgctcgagcc

SEQ ID NO: 2611026 - DNA, 25 bp, Homo sapien
caccgatttctggtgaagacgccct

SEQ ID NO: 2611027 - DNA, 25 bp, Homo sapien
tctgagcgagcagcgaactgagact

SEQ ID NO: 2611028 - DNA, 25 bp, Homo sapien
tcctcaaactcttcgtagtcagcgg

SEQ ID NO: 2611029 - DNA, 25 bp, Homo sapien
cctcaaactcttcgtagtcagcggg

SEQ ID NO: 2611030 - DNA, 25 bp, Homo sapien
agtcctcaaactcttcgtagtcagc

SEQ ID NO: 2611031 - DNA, 25 bp, Homo sapien
caaactcttcgtagtcagcggggtc

SEQ ID NO: 2611032 - DNA, 25 bp, Homo sapien
gtccgaggcgatgctgcgggtgtct

SEQ ID NO: 2611033 - DNA, 25 bp, Homo sapien
cgaggcgatgctgcgggtgtctggc

SEQ ID NO: 2611034 - DNA, 25 bp, Homo sapien
tagaaagagtcgtccgaggcgatgc

SEQ ID NO: 2611035 - DNA, 25 bp, Homo sapien
ctcgtcctcgaaagggtagaaagag

SEQ ID NO: 2611036 - DNA, 25 bp, Homo sapien
aggcggcgcgcaggagggtcgccgt

SEQ ID NO: 2611037 - DNA, 25 bp, Homo sapien
gcagcagccccacgttgttggcgca

SEQ ID NO: 2611038 - DNA, 25 bp, Homo sapien
ctgcgcctcctcgacgctcaccccg

SEQ ID NO: 2611039 - DNA, 25 bp, Homo sapien
ccctccgggacgctctccgcgctct

SEQ ID NO: 2611040 - DNA, 25 bp, Homo sapien
gcagccagcgcgaattcagtcagga

SEQ ID NO: 2611041 - DNA, 25 bp, Homo sapien
gaagcccatcctggattgcagcacg

SEQ ID NO: 2611042 - DNA, 25 bp, Homo sapien
gcgaattcagtcaggaggtccacgg

SEQ ID NO: 2611043 - DNA, 25 bp, Homo sapien
gactggcgtttctgccgcgctgaca

SEQ ID NO: 2611044 - DNA, 25 bp, Homo sapien
cgccccagcgtgttaggacaagggc

SEQ ID NO: 2611045 - DNA, 25 bp, Homo sapien
cccggcgagggaagaaactgttgct

SEQ ID NO: 2611046 - DNA, 25 bp, Homo sapien
gcttccaaatcattgcggctggagg

SEQ ID NO: 2611047 - DNA, 25 bp, Homo sapien
gctggaggagccgatctgcgcccca

SEQ ID NO: 2611048 - DNA, 25 bp, Homo sapien
ccagattcagttttgagtctgctaa

SEQ ID NO: 2611049 - DNA, 25 bp, Homo sapien
taggtctgcggtaaacactttggca

SEQ ID NO: 2611050 - DNA, 25 bp, Homo sapien
gagcacagtaggtctgcggtaaaca

SEQ ID NO: 2611051 - DNA, 25 bp, Homo sapien
ctaaagtacctagcgggagcacagt

SEQ ID NO: 2611052 - DNA, 25 bp, Homo sapien
taggacccacacttctggcaaggga

SEQ ID NO: 2611053 - DNA, 25 bp, Homo sapien
ccacacttctggcaagggacattcc

SEQ ID NO: 2611054 - DNA, 25 bp, Homo sapien
tgaattaggacccacacttctggca

SEQ ID NO: 2611055 - DNA, 25 bp, Homo sapien
gacccacacttctggcaagggacat

SEQ ID NO: 2611056 - DNA, 25 bp, Homo sapien
ctccaccctcgcgtcatccgaggtg

SEQ ID NO: 2611057 - DNA, 25 bp, Homo sapien
ggctccaccctcgcgtcatccgagg

SEQ ID NO: 2611058 - DNA, 25 bp, Homo sapien
accctcgcgtcatccgaggtgccca

SEQ ID NO: 2611059 - DNA, 25 bp, Homo sapien
ccaccctcgcgtcatccgaggtgcc

SEQ ID NO: 2611060 - DNA, 25 bp, Homo sapien
caagttgcgaactgcgatgagggtc

SEQ ID NO: 2611061 - DNA, 25 bp, Homo sapien
aaggatccaccatggcggaacaggg

SEQ ID NO: 2611062 - DNA, 25 bp, Homo sapien
ccttgcagtcaaaggagggacaggt

SEQ ID NO: 2611063 - DNA, 25 bp, Homo sapien
gaagccatgcggcaaaggagcccac

SEQ ID NO: 2611064 - DNA, 25 bp, Homo sapien
tccaggtgtttctcagtgcgtttct

SEQ ID NO: 2611065 - DNA, 25 bp, Homo sapien
aagccacaaacacccaggaagtgct

SEQ ID NO: 2611066 - DNA, 25 bp, Homo sapien
catctccagggctgacagaggaagc

SEQ ID NO: 2611067 - DNA, 25 bp, Homo sapien
tgttagccacacaggcctttgggca

SEQ ID NO: 2611068 - DNA, 25 bp, Homo sapien
tccttgatgatagagccccgtggct

SEQ ID NO: 2611069 - DNA, 25 bp, Homo sapien
caaaactctgggatgggcgaaggac

SEQ ID NO: 2611070 - DNA, 25 bp, Homo sapien
cgaaggactgatggatgcaactgct

SEQ ID NO: 2611071 - DNA, 25 bp, Homo sapien
ttggcctccagtctcctgcggaaag

SEQ ID NO: 2611072 - DNA, 25 bp, Homo sapien
ataatggaagaaagaaatgctatgc

SEQ ID NO: 2611073 - DNA, 25 bp, Homo sapien
aatggaagaaagaaatgctatgcaa

SEQ ID NO: 2611074 - DNA, 25 bp, Homo sapien
acataatggaagaaagaaatgctat

SEQ ID NO: 2611075 - DNA, 25 bp, Homo sapien
ttacataatggaagaaagaaatgct

SEQ ID NO: 2611076 - DNA, 25 bp, Homo sapien
tagacctcaagaagataagacagac

SEQ ID NO: 2611077 - DNA, 25 bp, Homo sapien
tacaaagggctagtaaacatgtgat

SEQ ID NO: 2611078 - DNA, 25 bp, Homo sapien
tattcaggaaactctataaacccca

SEQ ID NO: 2611079 - DNA, 25 bp, Homo sapien
actgacaagagatatcaagccgcat

SEQ ID NO: 2611080 - DNA, 25 bp, Homo sapien
gcatccagtttccaagacgaccagg

SEQ ID NO: 2611081 - DNA, 25 bp, Homo sapien
gacgaccaggacttgcaggcctgat

SEQ ID NO: 2611082 - DNA, 25 bp, Homo sapien
taaatatccatttggaggcatccag

SEQ ID NO: 2611083 - DNA, 25 bp, Homo sapien
gattgtattccagaaagaaggcgga

SEQ ID NO: 2611084 - DNA, 25 bp, Homo sapien
ctatttgcagttcacccatcctcta

SEQ ID NO: 2611085 - DNA, 25 bp, Homo sapien
aactctatttgcagttcacccatcc

SEQ ID NO: 2611086 - DNA, 25 bp, Homo sapien
catcctctaccaagacaatcaccac

SEQ ID NO: 2611087 - DNA, 25 bp, Homo sapien
accaagacaatcaccactcctgctg

SEQ ID NO: 2611088 - DNA, 25 bp, Homo sapien
catttcgtctcttaagggtgtccaa

SEQ ID NO: 2611089 - DNA, 25 bp, Homo sapien
tcacacctgctcgttcacagaggag

SEQ ID NO: 2611090 - DNA, 25 bp, Homo sapien
tatgagtcagcgaaggcagtttcac

SEQ ID NO: 2611091 - DNA, 25 bp, Homo sapien
tgggacacgtaattccaggaagcgc

SEQ ID NO: 2611092 - DNA, 25 bp, Homo sapien
tgttttcctagcacaatatatgaac

SEQ ID NO: 2611093 - DNA, 25 bp, Homo sapien
tttcctagcacaatatatgaacaca

SEQ ID NO: 2611094 - DNA, 25 bp, Homo sapien
ctgttttcctagcacaatatatgaa

SEQ ID NO: 2611095 - DNA, 25 bp, Homo sapien
gttttcctagcacaatatatgaaca

SEQ ID NO: 2611096 - DNA, 25 bp, Homo sapien
tctgctctggactaatagcacctcc

SEQ ID NO: 2611097 - DNA, 25 bp, Homo sapien
tcaaccagtgaagggttctgctctg

SEQ ID NO: 2611098 - DNA, 25 bp, Homo sapien
agggttctgctctggactaatagca

SEQ ID NO: 2611099 - DNA, 25 bp, Homo sapien
ggttctgctctggactaatagcacc

SEQ ID NO: 2611100 - DNA, 25 bp, Homo sapien
tgcctttgccaaccctgatatccaa

SEQ ID NO: 2611101 - DNA, 25 bp, Homo sapien
cctgcacttaaagggctcaggttaa

SEQ ID NO: 2611102 - DNA, 25 bp, Homo sapien
tgatatccaacctgcacttaaaggg

SEQ ID NO: 2611103 - DNA, 25 bp, Homo sapien
agggctcaggttaaaaggaatgcct

SEQ ID NO: 2611104 - DNA, 25 bp, Homo sapien
ctgctttcgcataaatgtgccggaa

SEQ ID NO: 2611105 - DNA, 25 bp, Homo sapien
tcgcataaatgtgccggaaaacttg

SEQ ID NO: 2611106 - DNA, 25 bp, Homo sapien
ataaatgtgccggaaaacttgtcat

SEQ ID NO: 2611107 - DNA, 25 bp, Homo sapien
ctttcgcataaatgtgccggaaaac

SEQ ID NO: 2611108 - DNA, 25 bp, Homo sapien
gttgacgtcaacgtgggggcactct

SEQ ID NO: 2611109 - DNA, 25 bp, Homo sapien
ctgtgttcccctcgctgtcctgcca

SEQ ID NO: 2611110 - DNA, 25 bp, Homo sapien
cagctgtgattagggctgtgttccc

SEQ ID NO: 2611111 - DNA, 25 bp, Homo sapien
cctgtgcagctgtgattagggctgt

SEQ ID NO: 2611112 - DNA, 25 bp, Homo sapien
gcatcgcaacgggagcccgggctgc

SEQ ID NO: 2611113 - DNA, 25 bp, Homo sapien
tgcatcgcaacgggagcccgggctg

SEQ ID NO: 2611114 - DNA, 25 bp, Homo sapien
catcgcaacgggagcccgggctgcc

SEQ ID NO: 2611115 - DNA, 25 bp, Homo sapien
aggcaaagaaatgtgaaaggggtca

SEQ ID NO: 2611116 - DNA, 25 bp, Homo sapien
aagaaatgtgaaaggggtcagtgat

SEQ ID NO: 2611117 - DNA, 25 bp, Homo sapien
aatgtgaaaggggtcagtgataaac

SEQ ID NO: 2611118 - DNA, 25 bp, Homo sapien
tttggaggcaaagaaatgtgaaagg

SEQ ID NO: 2611119 - DNA, 25 bp, Homo sapien
ggaggtctccttttggtgacagcaa

SEQ ID NO: 2611120 - DNA, 25 bp, Homo sapien
tcaacaacccgacaaccgtgtaagc

SEQ ID NO: 2611121 - DNA, 25 bp, Homo sapien
gaacttgaccgatgaaacagacaga

SEQ ID NO: 2611122 - DNA, 25 bp, Homo sapien
acaagcgcctgttcttcctggctca

SEQ ID NO: 2611123 - DNA, 25 bp, Homo sapien
cttgattgaaaagtagggtgcccag

SEQ ID NO: 2611124 - DNA, 25 bp, Homo sapien
tggaaccctccatggaagtgatgcc

SEQ ID NO: 2611125 - DNA, 25 bp, Homo sapien
tgaacacatgttagcacagcccctg

SEQ ID NO: 2611126 - DNA, 25 bp, Homo sapien
gatgcctcacgcttcgaaacctgag

SEQ ID NO: 2611127 - DNA, 25 bp, Homo sapien
caaggacatatcatggccaatgcca

SEQ ID NO: 2611128 - DNA, 25 bp, Homo sapien
cacactggcagtatgtgtcctgata

SEQ ID NO: 2611129 - DNA, 25 bp, Homo sapien
tgtgctcctgactctgaagaaacaa

SEQ ID NO: 2611130 - DNA, 25 bp, Homo sapien
gccaaaaatatacgatgtgctcctg

SEQ ID NO: 2611131 - DNA, 25 bp, Homo sapien
tggtggccctactctcatgatctca

SEQ ID NO: 2611132 - DNA, 25 bp, Homo sapien
gagccatcttcagggttaccaactg

SEQ ID NO: 2611133 - DNA, 25 bp, Homo sapien
tacagctggttacagacagggactg

SEQ ID NO: 2611134 - DNA, 25 bp, Homo sapien
caaaccaggtttcttgccgacaaag

SEQ ID NO: 2611135 - DNA, 25 bp, Homo sapien
tggcggccacagagagctcaagcaa

SEQ ID NO: 2611136 - DNA, 25 bp, Homo sapien
gcagcagcctaggttgggtgtccag

SEQ ID NO: 2611137 - DNA, 25 bp, Homo sapien
gcctccgtatgcaacctcaacaatt

SEQ ID NO: 2611138 - DNA, 25 bp, Homo sapien
acacaaggaagctttttaatctgtg

SEQ ID NO: 2611139 - DNA, 25 bp, Homo sapien
ttaattccgtgatgcctctgtgtct

SEQ ID NO: 2611140 - DNA, 25 bp, Homo sapien
tgtctgacaacatctctcgtggggt

SEQ ID NO: 2611141 - DNA, 25 bp, Homo sapien
gctggtcttcagtgcccactgagag

SEQ ID NO: 2611142 - DNA, 25 bp, Homo sapien
cactgagaggggtcctttgccgtca

SEQ ID NO: 2611143 - DNA, 25 bp, Homo sapien
tctactctcttatttgaaacggtat

SEQ ID NO: 2611144 - DNA, 25 bp, Homo sapien
ctactctcttatttgaaacggtata

SEQ ID NO: 2611145 - DNA, 25 bp, Homo sapien
tactctcttatttgaaacggtataa

SEQ ID NO: 2611146 - DNA, 25 bp, Homo sapien
tatgtgcggggaggggctaaggcca

SEQ ID NO: 2611147 - DNA, 25 bp, Homo sapien
ctatgtgcggggaggggctaaggcc

SEQ ID NO: 2611148 - DNA, 25 bp, Homo sapien
gcttttttgactcatttacaccaca

SEQ ID NO: 2611149 - DNA, 25 bp, Homo sapien
tgactcatttacaccacattgctct

SEQ ID NO: 2611150 - DNA, 25 bp, Homo sapien
agccagtcgctggtgcttttttgac

SEQ ID NO: 2611151 - DNA, 25 bp, Homo sapien
tcgctggtgcttttttgactcattt

SEQ ID NO: 2611152 - DNA, 25 bp, Homo sapien
ccaaaaaggatctaactttctgctc

SEQ ID NO: 2611153 - DNA, 25 bp, Homo sapien
caaaaaggatctaactttctgctca

SEQ ID NO: 2611154 - DNA, 25 bp, Homo sapien
aaaggatctaactttctgctcattc

SEQ ID NO: 2611155 - DNA, 25 bp, Homo sapien
aaaaaggatctaactttctgctcat

SEQ ID NO: 2611156 - DNA, 25 bp, Homo sapien
agtgtcgcaggcaaggccctcagct

SEQ ID NO: 2611157 - DNA, 25 bp, Homo sapien
caaggccctcagctataaagcaaag

SEQ ID NO: 2611158 - DNA, 25 bp, Homo sapien
tataaagcaaagcaggtaaggagat

SEQ ID NO: 2611159 - DNA, 25 bp, Homo sapien
atcccacagagtgtcgcaggcaagg

SEQ ID NO: 2611160 - DNA, 25 bp, Homo sapien
agaaccgcttccaagtgctccagag

SEQ ID NO: 2611161 - DNA, 25 bp, Homo sapien
taggacagtgccaattcacgctggc

SEQ ID NO: 2611162 - DNA, 25 bp, Homo sapien
gagacgcccgtgcaaacagatgcaa

SEQ ID NO: 2611163 - DNA, 25 bp, Homo sapien
gctgcaaatgagcttcagaaccgct

SEQ ID NO: 2611164 - DNA, 25 bp, Homo sapien
tgtcccattacactactgggggtgg

SEQ ID NO: 2611165 - DNA, 25 bp, Homo sapien
tgggttcttgcaggtccccttcggc

SEQ ID NO: 2611166 - DNA, 25 bp, Homo sapien
cttcggcaaagcactcgagggagga

SEQ ID NO: 2611167 - DNA, 25 bp, Homo sapien
ttgcaggtccccttcggcaaagcac

SEQ ID NO: 2611168 - DNA, 25 bp, Homo sapien
tgtacacgtgtattggttcccactt

SEQ ID NO: 2611169 - DNA, 25 bp, Homo sapien
tattggttcccacttccacaaaatg

SEQ ID NO: 2611170 - DNA, 25 bp, Homo sapien
taaagagaagtgtacacgtgtattg

SEQ ID NO: 2611171 - DNA, 25 bp, Homo sapien
gaagtgtacacgtgtattggttccc

SEQ ID NO: 2611172 - DNA, 25 bp, Homo sapien
gaacgcgttcctcctttcaaggtca

SEQ ID NO: 2611173 - DNA, 25 bp, Homo sapien
aggtcaagaccagggaaatagttca

SEQ ID NO: 2611174 - DNA, 25 bp, Homo sapien
ctcggatgcagtccgttcgaccctg

SEQ ID NO: 2611175 - DNA, 25 bp, Homo sapien
tagcatcagggctcggatgcagtcc

SEQ ID NO: 2611176 - DNA, 25 bp, Homo sapien
cttcaacagcacagtcttgccattt

SEQ ID NO: 2611177 - DNA, 25 bp, Homo sapien
gccatttacagccaagggatcaccc

SEQ ID NO: 2611178 - DNA, 25 bp, Homo sapien
aacagcacagtcttgccatttacag

SEQ ID NO: 2611179 - DNA, 25 bp, Homo sapien
catttacagccaagggatcacccct

SEQ ID NO: 2611180 - DNA, 25 bp, Homo sapien
ggatgggcttgcaaagtggagaata

SEQ ID NO: 2611181 - DNA, 25 bp, Homo sapien
gggagagtctcaaatctaatgtcaa

SEQ ID NO: 2611182 - DNA, 25 bp, Homo sapien
ccgtggattgttctagactgtgatg

SEQ ID NO: 2611183 - DNA, 25 bp, Homo sapien
ccacagacaataatccgtggattgt

SEQ ID NO: 2611184 - DNA, 25 bp, Homo sapien
atctctgttcctcgccgtcctttaa

SEQ ID NO: 2611185 - DNA, 25 bp, Homo sapien
tctctgttcctcgccgtcctttaaa

SEQ ID NO: 2611186 - DNA, 25 bp, Homo sapien
tgttcctcgccgtcctttaaatcca

SEQ ID NO: 2611187 - DNA, 25 bp, Homo sapien
tctgttcctcgccgtcctttaaatc

SEQ ID NO: 2611188 - DNA, 25 bp, Homo sapien
gcgcctggccaaattacagaatttt

SEQ ID NO: 2611189 - DNA, 25 bp, Homo sapien
tgcgcctggccaaattacagaattt

SEQ ID NO: 2611190 - DNA, 25 bp, Homo sapien
actgcgcctggccaaattacagaat

SEQ ID NO: 2611191 - DNA, 25 bp, Homo sapien
ctgcgcctggccaaattacagaatt

SEQ ID NO: 2611192 - DNA, 25 bp, Homo sapien
agcccaacctgccttttaagtgctc

SEQ ID NO: 2611193 - DNA, 25 bp, Homo sapien
tggggctacaccaccgcccaggtaa

SEQ ID NO: 2611194 - DNA, 25 bp, Homo sapien
cagcccaacctgccttttaagtgct

SEQ ID NO: 2611195 - DNA, 25 bp, Homo sapien
tagctggggctacaccaccgcccag

SEQ ID NO: 2611196 - DNA, 25 bp, Homo sapien
gggggtccctcgcgtggacatccgc

SEQ ID NO: 2611197 - DNA, 25 bp, Homo sapien
cgggggtccctcgcgtggacatccg

SEQ ID NO: 2611198 - DNA, 25 bp, Homo sapien
gcgggggtccctcgcgtggacatcc

SEQ ID NO: 2611199 - DNA, 25 bp, Homo sapien
tcagcacggacagcacgcagtctgt

SEQ ID NO: 2611200 - DNA, 25 bp, Homo sapien
gctcgggccggtacttctcccagaa

SEQ ID NO: 2611201 - DNA, 25 bp, Homo sapien
tgcatgagacggacggcatccacgc

SEQ ID NO: 2611202 - DNA, 25 bp, Homo sapien
acgcggcccgtgtaagtggcccact

SEQ ID NO: 2611203 - DNA, 25 bp, Homo sapien
agtccgcgtcctcctgtccggtccg

SEQ ID NO: 2611204 - DNA, 25 bp, Homo sapien
cgcgtcctcctgtccggtccgcccg

SEQ ID NO: 2611205 - DNA, 25 bp, Homo sapien
ctcctgtccggtccgcccgcgctgc

SEQ ID NO: 2611206 - DNA, 25 bp, Homo sapien
tcctcctgtccggtccgcccgcgct

SEQ ID NO: 2611207 - DNA, 25 bp, Homo sapien
cttccgcggggcgggcgctgcgggg

SEQ ID NO: 2611208 - DNA, 25 bp, Homo sapien
ttccgcggggcgggcgctgcggggc

SEQ ID NO: 2611209 - DNA, 25 bp, Homo sapien
tccgcggggcgggcgctgcggggcc

SEQ ID NO: 2611210 - DNA, 25 bp, Homo sapien
ctccttctgcgcctcggcctggcgc

SEQ ID NO: 2611211 - DNA, 25 bp, Homo sapien
ttggcctccttgtaccgccacttgg

SEQ ID NO: 2611212 - DNA, 25 bp, Homo sapien
tcttcttccagggcgcagtgcgcct

SEQ ID NO: 2611213 - DNA, 25 bp, Homo sapien
acaccgggccgcacgcttctccgcc

SEQ ID NO: 2611214 - DNA, 25 bp, Homo sapien
tgactaagaacatccagtgtgcacc

SEQ ID NO: 2611215 - DNA, 25 bp, Homo sapien
tgtgcacctacacccacgatgagga

SEQ ID NO: 2611216 - DNA, 25 bp, Homo sapien
gagccaatgcctccgtcaaatagaa

SEQ ID NO: 2611217 - DNA, 25 bp, Homo sapien
ggctggcgacaagcgaatccatgtg

SEQ ID NO: 2611218 - DNA, 25 bp, Homo sapien
taagactctcaccaagagcttgtgg

SEQ ID NO: 2611219 - DNA, 25 bp, Homo sapien
cacaacggactctttggaactgagc

SEQ ID NO: 2611220 - DNA, 25 bp, Homo sapien
taatttgcgtcattctgggctcctg

SEQ ID NO: 2611221 - DNA, 25 bp, Homo sapien
gaaattctaagaggtcggcataagg

SEQ ID NO: 2611222 - DNA, 25 bp, Homo sapien
gtgatcgtgcgtgtccaagtatttc

SEQ ID NO: 2611223 - DNA, 25 bp, Homo sapien
taggcctgtgatcgtgcgtgtccaa

SEQ ID NO: 2611224 - DNA, 25 bp, Homo sapien
gagcctccaaataggcctgtgatcg

SEQ ID NO: 2611225 - DNA, 25 bp, Homo sapien
caaataggcctgtgatcgtgcgtgt

SEQ ID NO: 2611226 - DNA, 25 bp, Homo sapien
cttctgggattaaggaggaactcac

SEQ ID NO: 2611227 - DNA, 25 bp, Homo sapien
tctcaaagagggtccagtctcctgt

SEQ ID NO: 2611228 - DNA, 25 bp, Homo sapien
cgagggtgacccacagtcaactaat

SEQ ID NO: 2611229 - DNA, 25 bp, Homo sapien
gatccctggttgctcgatgcctgct

SEQ ID NO: 2611230 - DNA, 25 bp, Homo sapien
cagggccttgagaaccttcacagca

SEQ ID NO: 2611231 - DNA, 25 bp, Homo sapien
catggtggaaacaggcaggaatgtc

SEQ ID NO: 2611232 - DNA, 25 bp, Homo sapien
caatcactgtgttagagctgcggtt

SEQ ID NO: 2611233 - DNA, 25 bp, Homo sapien
cagaatgggtgtcctctcgcaatca

SEQ ID NO: 2611234 - DNA, 25 bp, Homo sapien
tgtgtcaccagtacctagggctaga

SEQ ID NO: 2611235 - DNA, 25 bp, Homo sapien
gggtgtttctgtccacctctacgac

SEQ ID NO: 2611236 - DNA, 25 bp, Homo sapien
ttggaaaattcctctactagcaaat

SEQ ID NO: 2611237 - DNA, 25 bp, Homo sapien
tgttgcttaagtatgaactgacccg

SEQ ID NO: 2611238 - DNA, 25 bp, Homo sapien
aggtgaagagaaggggtcggtgctc

SEQ ID NO: 2611239 - DNA, 25 bp, Homo sapien
caggtgaagagaaggggtcggtgct

SEQ ID NO: 2611240 - DNA, 25 bp, Homo sapien
agggatgatcaagaacttaaaccag

SEQ ID NO: 2611241 - DNA, 25 bp, Homo sapien
acagggacaacacattgccccacac

SEQ ID NO: 2611242 - DNA, 25 bp, Homo sapien
ccagggatgatcaagaacttaaacc

SEQ ID NO: 2611243 - DNA, 25 bp, Homo sapien
ctgttcttggaagaccttagggtag

SEQ ID NO: 2611244 - DNA, 25 bp, Homo sapien
ggcaggcctgccattcattcactct

SEQ ID NO: 2611245 - DNA, 25 bp, Homo sapien
cacagtcactggcaggcctgccatt

SEQ ID NO: 2611246 - DNA, 25 bp, Homo sapien
ttcattcactctggggtctaggagg

SEQ ID NO: 2611247 - DNA, 25 bp, Homo sapien
attcattcactctggggtctaggag

SEQ ID NO: 2611248 - DNA, 25 bp, Homo sapien
gatacacacgttccatccagaagag

SEQ ID NO: 2611249 - DNA, 25 bp, Homo sapien
tgtaggtcccaaaatagccctgagg

SEQ ID NO: 2611250 - DNA, 25 bp, Homo sapien
aaagatctgtcatggtcagggtccc

SEQ ID NO: 2611251 - DNA, 25 bp, Homo sapien
caaatgggttctatatgagccgcct

SEQ ID NO: 2611252 - DNA, 25 bp, Homo sapien
ctaaacgagttgtgtatacaggtac

SEQ ID NO: 2611253 - DNA, 25 bp, Homo sapien
ccaaggcaggccctttttgcaggac

SEQ ID NO: 2611254 - DNA, 25 bp, Homo sapien
cctggcctataagcaggtcagggcc

SEQ ID NO: 2611255 - DNA, 25 bp, Homo sapien
ggccctttttgcaggacacagactg

SEQ ID NO: 2611256 - DNA, 25 bp, Homo sapien
tttttgcaggacacagactggccat

SEQ ID NO: 2611257 - DNA, 25 bp, Homo sapien
gagttgccgcaatgtctcaagggcc

SEQ ID NO: 2611258 - DNA, 25 bp, Homo sapien
ccagcgtgtagagttagaggaacac

SEQ ID NO: 2611259 - DNA, 25 bp, Homo sapien
tcactgagaagatgagagttgccgc

SEQ ID NO: 2611260 - DNA, 25 bp, Homo sapien
acctggccctgagtccacgatgagg

SEQ ID NO: 2611261 - DNA, 25 bp, Homo sapien
caactgtgtcgtgagcagctgccaa

SEQ ID NO: 2611262 - DNA, 25 bp, Homo sapien
cagagggttcacctagtcagacgaa

SEQ ID NO: 2611263 - DNA, 25 bp, Homo sapien
tgcgtcctcgaaaagccagagggtt

SEQ ID NO: 2611264 - DNA, 25 bp, Homo sapien
tcacgtctgccagctggtgagggca

SEQ ID NO: 2611265 - DNA, 25 bp, Homo sapien
tcaacatgccaaagaatgaggctgg

SEQ ID NO: 2611266 - DNA, 25 bp, Homo sapien
tctggcatgagatctcggcacggca

SEQ ID NO: 2611267 - DNA, 25 bp, Homo sapien
cacccatgagaaaagccgaaaaagc

SEQ ID NO: 2611268 - DNA, 25 bp, Homo sapien
gaaatagcccctcaattccaggagt

SEQ ID NO: 2611269 - DNA, 25 bp, Homo sapien
aggaagtggtgagcggaaagtgccc

SEQ ID NO: 2611270 - DNA, 25 bp, Homo sapien
acacataggaagtggtgagcggaaa

SEQ ID NO: 2611271 - DNA, 25 bp, Homo sapien
gagacacataggaagtggtgagcgg

SEQ ID NO: 2611272 - DNA, 25 bp, Homo sapien
taggaagtggtgagcggaaagtgcc

SEQ ID NO: 2611273 - DNA, 25 bp, Homo sapien
catgccgtgtgcatcgggtttttct

SEQ ID NO: 2611274 - DNA, 25 bp, Homo sapien
tggacctgaagcatgccgtgtgcat

SEQ ID NO: 2611275 - DNA, 25 bp, Homo sapien
tcgtgttgttcatgaagatggacct

SEQ ID NO: 2611276 - DNA, 25 bp, Homo sapien
gctgagcccttttctcgagggcagt

SEQ ID NO: 2611277 - DNA, 25 bp, Homo sapien
ctccaagtcactggagccctcatcc

SEQ ID NO: 2611278 - DNA, 25 bp, Homo sapien
tcttccctccaagtcactggagccc

SEQ ID NO: 2611279 - DNA, 25 bp, Homo sapien
tggggagcaccagcactcttccctc

SEQ ID NO: 2611280 - DNA, 25 bp, Homo sapien
agcaccagcactcttccctccaagt

SEQ ID NO: 2611281 - DNA, 25 bp, Homo sapien
aatgggcccaaaacaaacacggctg

SEQ ID NO: 2611282 - DNA, 25 bp, Homo sapien
ttgttttcactttgccagggattcc

SEQ ID NO: 2611283 - DNA, 25 bp, Homo sapien
tttcccagccttagcgaggccaagc

SEQ ID NO: 2611284 - DNA, 25 bp, Homo sapien
ctctaccaaattcatgatgacgata

SEQ ID NO: 2611285 - DNA, 25 bp, Homo sapien
ccacacgcctcaggactggagacag

SEQ ID NO: 2611286 - DNA, 25 bp, Homo sapien
taaccatgtcagaggctagcgattg

SEQ ID NO: 2611287 - DNA, 25 bp, Homo sapien
ggaacacaacaaccactcagaaacc

SEQ ID NO: 2611288 - DNA, 25 bp, Homo sapien
agcccgagctcaggacccggcataa

SEQ ID NO: 2611289 - DNA, 25 bp, Homo sapien
cccacaagtgcatgctggagctcgc

SEQ ID NO: 2611290 - DNA, 25 bp, Homo sapien
gatgctagggtagctgtcccaggac

SEQ ID NO: 2611291 - DNA, 25 bp, Homo sapien
ctgcagaatgcatgtggaaagagga

SEQ ID NO: 2611292 - DNA, 25 bp, Homo sapien
gttcctggatgtctgagcacttctg

SEQ ID NO: 2611293 - DNA, 25 bp, Homo sapien
ctggccaaaggcagagccgcaacat

SEQ ID NO: 2611294 - DNA, 25 bp, Homo sapien
aaggcagagccgcaacatggcccag

SEQ ID NO: 2611295 - DNA, 25 bp, Homo sapien
tggcccaggcactgagtgacatgta

SEQ ID NO: 2611296 - DNA, 25 bp, Homo sapien
aggtgctggagtgccacgggccaca

SEQ ID NO: 2611297 - DNA, 25 bp, Homo sapien
ccaggacatgggttacattaaagcg

SEQ ID NO: 2611298 - DNA, 25 bp, Homo sapien
gggaggagcgccttgatttccaccc

SEQ ID NO: 2611299 - DNA, 25 bp, Homo sapien
ttaaattgcatacagagacacaccc

SEQ ID NO: 2611300 - DNA, 25 bp, Homo sapien
tgaattgcagagtaaacagctaggc

SEQ ID NO: 2611301 - DNA, 25 bp, Homo sapien
tagaacatagggatctaagcagcct

SEQ ID NO: 2611302 - DNA, 25 bp, Homo sapien
tgagcaaatcctaaacttctgagcc

SEQ ID NO: 2611303 - DNA, 25 bp, Homo sapien
ttcataccgactcaagaaccaagga

SEQ ID NO: 2611304 - DNA, 25 bp, Homo sapien
tgatgattaattagaggctgccagc

SEQ ID NO: 2611305 - DNA, 25 bp, Homo sapien
gccgccgcctcggccccgcggaagc

SEQ ID NO: 2611306 - DNA, 25 bp, Homo sapien
gcgccgccgcctcggccccgcggaa

SEQ ID NO: 2611307 - DNA, 25 bp, Homo sapien
ccccgcggaagccccgccgcgtcat

SEQ ID NO: 2611308 - DNA, 25 bp, Homo sapien
cggcccgagaaccgcgccgccgcct

SEQ ID NO: 2611309 - DNA, 25 bp, Homo sapien
gcctcaggggacggtcgcctccctg

SEQ ID NO: 2611310 - DNA, 25 bp, Homo sapien
tcaggggacggtcgcctccctgccg

SEQ ID NO: 2611311 - DNA, 25 bp, Homo sapien
cccgcactgtggggcgcagtcaccc

SEQ ID NO: 2611312 - DNA, 25 bp, Homo sapien
cgcactgtggggcgcagtcacccag

SEQ ID NO: 2611313 - DNA, 25 bp, Homo sapien
ttaacaaattcctgctctctcggcc

SEQ ID NO: 2611314 - DNA, 25 bp, Homo sapien
gggctctcctttccgcgcttcatta

SEQ ID NO: 2611315 - DNA, 25 bp, Homo sapien
agcgctggccctcactcggaaagca

SEQ ID NO: 2611316 - DNA, 25 bp, Homo sapien
gcaggctctcccctcgcatcgtctt

SEQ ID NO: 2611317 - DNA, 25 bp, Homo sapien
catgcagatgaagccgggaatacac

SEQ ID NO: 2611318 - DNA, 25 bp, Homo sapien
catccgttggctgcagggcttagaa

SEQ ID NO: 2611319 - DNA, 25 bp, Homo sapien
gaggcgtccgggtcataggtacatt

SEQ ID NO: 2611320 - DNA, 25 bp, Homo sapien
gataacttagaaggccacaggcgga

SEQ ID NO: 2611321 - DNA, 25 bp, Homo sapien
gcacagtgacttgccagcgcttgga

SEQ ID NO: 2611322 - DNA, 25 bp, Homo sapien
tacattggcatacttctggagtctt

SEQ ID NO: 2611323 - DNA, 25 bp, Homo sapien
taactttagagatcaagtgcacggt

SEQ ID NO: 2611324 - DNA, 25 bp, Homo sapien
taccagcctcatgttcctagaaggt

SEQ ID NO: 2611325 - DNA, 25 bp, Homo sapien
agagttgcatcccacataagtccaa

SEQ ID NO: 2611326 - DNA, 25 bp, Homo sapien
ttttccttggtacatcttactccta

SEQ ID NO: 2611327 - DNA, 25 bp, Homo sapien
taagtccaacaatccttctcttctc

SEQ ID NO: 2611328 - DNA, 25 bp, Homo sapien
tgttttccttggtacatcttactcc

SEQ ID NO: 2611329 - DNA, 25 bp, Homo sapien
tcaagccatagaagtagtaaataag

SEQ ID NO: 2611330 - DNA, 25 bp, Homo sapien
catgagccagtcacttattaaagat

SEQ ID NO: 2611331 - DNA, 25 bp, Homo sapien
ttttaatacacactgggactattcg

SEQ ID NO: 2611332 - DNA, 25 bp, Homo sapien
gaattcatcctcttatcgggagccc

SEQ ID NO: 2611333 - DNA, 25 bp, Homo sapien
caataagaacttggagttggtttct

SEQ ID NO: 2611334 - DNA, 25 bp, Homo sapien
ctttcagaggctgccggagtcttct

SEQ ID NO: 2611335 - DNA, 25 bp, Homo sapien
cagaggctgccggagtcttctcctt

SEQ ID NO: 2611336 - DNA, 25 bp, Homo sapien
ggctgccggagtcttctccttaata

SEQ ID NO: 2611337 - DNA, 25 bp, Homo sapien
tcctccttcggatgctcagccaaag

SEQ ID NO: 2611338 - DNA, 25 bp, Homo sapien
catagcccaggaacccagcattgtt

SEQ ID NO: 2611339 - DNA, 25 bp, Homo sapien
caagagtccttcctctaaggcccgg

SEQ ID NO: 2611340 - DNA, 25 bp, Homo sapien
gagggcccagggaactttcgtctga

SEQ ID NO: 2611341 - DNA, 25 bp, Homo sapien
ttctctagtaactgccctgcttttg

SEQ ID NO: 2611342 - DNA, 25 bp, Homo sapien
tctgttctctagtaactgccctgct

SEQ ID NO: 2611343 - DNA, 25 bp, Homo sapien
ttgcctggactcttttcaatgtttt

SEQ ID NO: 2611344 - DNA, 25 bp, Homo sapien
ctagtaactgccctgcttttgcctg

SEQ ID NO: 2611345 - DNA, 25 bp, Homo sapien
tagaggcagatctgaagcccatgtg

SEQ ID NO: 2611346 - DNA, 25 bp, Homo sapien
aaaacaaagggcatgactgtacgac

SEQ ID NO: 2611347 - DNA, 25 bp, Homo sapien
gccttcatggcgtactccttggaga

SEQ ID NO: 2611348 - DNA, 25 bp, Homo sapien
cgactcaagtcctgaaaatacttga

SEQ ID NO: 2611349 - DNA, 25 bp, Homo sapien
tcttccgtggacaatttgcctgctc

SEQ ID NO: 2611350 - DNA, 25 bp, Homo sapien
tcacacgtacttctacatctgcaaa

SEQ ID NO: 2611351 - DNA, 25 bp, Homo sapien
caaacacacttggaggatttaacac

SEQ ID NO: 2611352 - DNA, 25 bp, Homo sapien
aattctagtatctcactcacacgta

SEQ ID NO: 2611353 - DNA, 25 bp, Homo sapien
gattattttggcttcacaataacta

SEQ ID NO: 2611354 - DNA, 25 bp, Homo sapien
aataactaggaataagggtgtgctc

SEQ ID NO: 2611355 - DNA, 25 bp, Homo sapien
taactaggaataagggtgtgctcat

SEQ ID NO: 2611356 - DNA, 25 bp, Homo sapien
tattttggcttcacaataactagga

SEQ ID NO: 2611357 - DNA, 25 bp, Homo sapien
cagtcgggtatgagcccagtttgcc

SEQ ID NO: 2611358 - DNA, 25 bp, Homo sapien
gatcttctgacacgctcaggaggca

SEQ ID NO: 2611359 - DNA, 25 bp, Homo sapien
ggtaaagttcgaaagggcatctctg

SEQ ID NO: 2611360 - DNA, 25 bp, Homo sapien
taaacttccagtctgagcatctgca

SEQ ID NO: 2611361 - DNA, 25 bp, Homo sapien
cacagggagggaacagccggtattc

SEQ ID NO: 2611362 - DNA, 25 bp, Homo sapien
cagaaaagtgtgtccttcagacata

SEQ ID NO: 2611363 - DNA, 25 bp, Homo sapien
cagccggtattctgaatccagaaga

SEQ ID NO: 2611364 - DNA, 25 bp, Homo sapien
gaagcttgtatcagaaagaccagag

SEQ ID NO: 2611365 - DNA, 25 bp, Homo sapien
ctaggaacgaccaagcatagttcca

SEQ ID NO: 2611366 - DNA, 25 bp, Homo sapien
taggaacgaccaagcatagttccaa

SEQ ID NO: 2611367 - DNA, 25 bp, Homo sapien
aggaacgaccaagcatagttccaaa

SEQ ID NO: 2611368 - DNA, 25 bp, Homo sapien
ggaacgaccaagcatagttccaaac

SEQ ID NO: 2611369 - DNA, 25 bp, Homo sapien
tctctggaactcttttccttgtctc

SEQ ID NO: 2611370 - DNA, 25 bp, Homo sapien
cactaaagcaaaaccgcaagtctga

SEQ ID NO: 2611371 - DNA, 25 bp, Homo sapien
atagtaccaagtggctttccttctc

SEQ ID NO: 2611372 - DNA, 25 bp, Homo sapien
tgtgaaatagtaccaagtggctttc

SEQ ID NO: 2611373 - DNA, 25 bp, Homo sapien
ggccgtatccattcgtttgatctta

SEQ ID NO: 2611374 - DNA, 25 bp, Homo sapien
agtattttcaccggccgtatccatt

SEQ ID NO: 2611375 - DNA, 25 bp, Homo sapien
tagggtaaagcacttgtagtttaca

SEQ ID NO: 2611376 - DNA, 25 bp, Homo sapien
caattactgctaatagggtaaagca

SEQ ID NO: 2611377 - DNA, 25 bp, Homo sapien
gtaggaggaggatgaactgacccaa

SEQ ID NO: 2611378 - DNA, 25 bp, Homo sapien
tgaactgacccaataaagtattccc

SEQ ID NO: 2611379 - DNA, 25 bp, Homo sapien
agcggtaggaggaggatgaactgac

SEQ ID NO: 2611380 - DNA, 25 bp, Homo sapien
tataaagggcgctggcaacagcggt

SEQ ID NO: 2611381 - DNA, 25 bp, Homo sapien
tccagatttaagtaatcgactttca

SEQ ID NO: 2611382 - DNA, 25 bp, Homo sapien
ggaaagctccattgggccaaataaa

SEQ ID NO: 2611383 - DNA, 25 bp, Homo sapien
aagctttgaatccaggggagtaaag

SEQ ID NO: 2611384 - DNA, 25 bp, Homo sapien
aagtaatcgactttcattcgcccca

SEQ ID NO: 2611385 - DNA, 25 bp, Homo sapien
tattttagcttttggcgatgtctcc

SEQ ID NO: 2611386 - DNA, 25 bp, Homo sapien
atattttagcttttggcgatgtctc

SEQ ID NO: 2611387 - DNA, 25 bp, Homo sapien
tcagctttctctggtgtgccagcca

SEQ ID NO: 2611388 - DNA, 25 bp, Homo sapien
ctccaactcatcagctttctctggt

SEQ ID NO: 2611389 - DNA, 25 bp, Homo sapien
aactcatcagctttctctggtgtgc

SEQ ID NO: 2611390 - DNA, 25 bp, Homo sapien
catcagctttctctggtgtgccagc

SEQ ID NO: 2611391 - DNA, 25 bp, Homo sapien
gcaaaagaaggcaaaggagcatttt

SEQ ID NO: 2611392 - DNA, 25 bp, Homo sapien
tgctggcaaaagaaggcaaaggagc

SEQ ID NO: 2611393 - DNA, 25 bp, Homo sapien
ctggcaaaagaaggcaaaggagcat

SEQ ID NO: 2611394 - DNA, 25 bp, Homo sapien
ctgctggcaaaagaaggcaaaggag

SEQ ID NO: 2611395 - DNA, 25 bp, Homo sapien
gagatacagagcatcgcaggtggct

SEQ ID NO: 2611396 - DNA, 25 bp, Homo sapien
tactgccatccctacagggagatac

SEQ ID NO: 2611397 - DNA, 25 bp, Homo sapien
tcgcttagacaaatgcgtgcactca

SEQ ID NO: 2611398 - DNA, 25 bp, Homo sapien
agcatcgcaggtggctcccatttcc

SEQ ID NO: 2611399 - DNA, 25 bp, Homo sapien
tacgtaacagcctggttacagtggt

SEQ ID NO: 2611400 - DNA, 25 bp, Homo sapien
ttacagtggttatggccatttccca

SEQ ID NO: 2611401 - DNA, 25 bp, Homo sapien
catgacaaagctgtggatagatccc

SEQ ID NO: 2611402 - DNA, 25 bp, Homo sapien
tgtacccagggtcccagaacacctg

SEQ ID NO: 2611403 - DNA, 25 bp, Homo sapien
tgctccctgtccgacgccaacttta

SEQ ID NO: 2611404 - DNA, 25 bp, Homo sapien
cagcatcgcatggtctttcaccact

SEQ ID NO: 2611405 - DNA, 25 bp, Homo sapien
agccatagagccacttagcaaaggg

SEQ ID NO: 2611406 - DNA, 25 bp, Homo sapien
cagagcctgagttccttgacccagc

SEQ ID NO: 2611407 - DNA, 25 bp, Homo sapien
agtctttaggctgcgggacatcact

SEQ ID NO: 2611408 - DNA, 25 bp, Homo sapien
tttaggctgcgggacatcactgttc

SEQ ID NO: 2611409 - DNA, 25 bp, Homo sapien
catcactgttctcctctagtccatc

SEQ ID NO: 2611410 - DNA, 25 bp, Homo sapien
tcagtctttaggctgcgggacatca

SEQ ID NO: 2611411 - DNA, 25 bp, Homo sapien
gaagcaaacatttccgttcttcttg

SEQ ID NO: 2611412 - DNA, 25 bp, Homo sapien
cagagaatgttaaccaatctgggga

SEQ ID NO: 2611413 - DNA, 25 bp, Homo sapien
gggacttgcacagtggaagcaaaca

SEQ ID NO: 2611414 - DNA, 25 bp, Homo sapien
aggtggaactagcagcagtaaggag

SEQ ID NO: 2611415 - DNA, 25 bp, Homo sapien
ggataactggtagggacctgatgac

SEQ ID NO: 2611416 - DNA, 25 bp, Homo sapien
ttcacaaaaatcaggttgtctgacg

SEQ ID NO: 2611417 - DNA, 25 bp, Homo sapien
gacctgatgacagtcctctgaagaa

SEQ ID NO: 2611418 - DNA, 25 bp, Homo sapien
gatctttgaagtttcatggaagatt

SEQ ID NO: 2611419 - DNA, 25 bp, Homo sapien
tagtgactcaggatattaggccagt

SEQ ID NO: 2611420 - DNA, 25 bp, Homo sapien
catgggccgcgggtaaactagcttt

SEQ ID NO: 2611421 - DNA, 25 bp, Homo sapien
taaccatcgaaaagaacatgggccg

SEQ ID NO: 2611422 - DNA, 25 bp, Homo sapien
tctttagatgcaagtggctgaggcc

SEQ ID NO: 2611423 - DNA, 25 bp, Homo sapien
ggatggatggtcacaataccacttt

SEQ ID NO: 2611424 - DNA, 25 bp, Homo sapien
catcgagagggaccggcaaaggccc

SEQ ID NO: 2611425 - DNA, 25 bp, Homo sapien
cacaataccactttgtagcctcgtc

SEQ ID NO: 2611426 - DNA, 25 bp, Homo sapien
agcctcgtcttcaaccatcgagagg

SEQ ID NO: 2611427 - DNA, 25 bp, Homo sapien
ccgagatctgaggagtctctacaaa

SEQ ID NO: 2611428 - DNA, 25 bp, Homo sapien
catgtggcagtaccgagatctgagg

SEQ ID NO: 2611429 - DNA, 25 bp, Homo sapien
ggtcctcaacagcatgtggcagtac

SEQ ID NO: 2611430 - DNA, 25 bp, Homo sapien
aaaagtggtcaaggctgcatctcag

SEQ ID NO: 2611431 - DNA, 25 bp, Homo sapien
gcaaggccatgtcggatgacacagt

SEQ ID NO: 2611432 - DNA, 25 bp, Homo sapien
gaagttggtcggcatctccaaaagc

SEQ ID NO: 2611433 - DNA, 25 bp, Homo sapien
caagaacatggagaacgccaaggcc

SEQ ID NO: 2611434 - DNA, 25 bp, Homo sapien
cgccaaggccttacgggatgccggt

SEQ ID NO: 2611435 - DNA, 25 bp, Homo sapien
ggaacgcctcacaaatttatgtatt

SEQ ID NO: 2611436 - DNA, 25 bp, Homo sapien
aaagatggaacgcctcacaaattta

SEQ ID NO: 2611437 - DNA, 25 bp, Homo sapien
gatggaacgcctcacaaatttatgt

SEQ ID NO: 2611438 - DNA, 25 bp, Homo sapien
agatggaacgcctcacaaatttatg

SEQ ID NO: 2611439 - DNA, 25 bp, Homo sapien
gtctcagacagacaattgtcttctg

SEQ ID NO: 2611440 - DNA, 25 bp, Homo sapien
tcgctcaggttggaggactaatttc

SEQ ID NO: 2611441 - DNA, 25 bp, Homo sapien
gctcaggttggaggactaatttcag

SEQ ID NO: 2611442 - DNA, 25 bp, Homo sapien
tctcatctgtctcagacagacaatt

SEQ ID NO: 2611443 - DNA, 25 bp, Homo sapien
taacgctttgttcagacagcacctc

SEQ ID NO: 2611444 - DNA, 25 bp, Homo sapien
tctcttttgccctaacgctttgttc

SEQ ID NO: 2611445 - DNA, 25 bp, Homo sapien
gaggaggtgcatcagcaaggctatt

SEQ ID NO: 2611446 - DNA, 25 bp, Homo sapien
ggtgcatcagcaaggctattcctga

SEQ ID NO: 2611447 - DNA, 25 bp, Homo sapien
tgcatttttgcgcagcaactctcgt

SEQ ID NO: 2611448 - DNA, 25 bp, Homo sapien
ggctgtgcatttttgcgcagcaact

SEQ ID NO: 2611449 - DNA, 25 bp, Homo sapien
agcaactctcgtctgccattatcca

SEQ ID NO: 2611450 - DNA, 25 bp, Homo sapien
tttttgcgcagcaactctcgtctgc

SEQ ID NO: 2611451 - DNA, 25 bp, Homo sapien
gtttgccggtgaaggcgcagagaga

SEQ ID NO: 2611452 - DNA, 25 bp, Homo sapien
gagagtttgccggtgaaggcgcaga

SEQ ID NO: 2611453 - DNA, 25 bp, Homo sapien
gagtttgccggtgaaggcgcagaga

SEQ ID NO: 2611454 - DNA, 25 bp, Homo sapien
gaaggagagtttgccggtgaaggcg

SEQ ID NO: 2611455 - DNA, 25 bp, Homo sapien
tgccaccacctgatgtcagcatgca

SEQ ID NO: 2611456 - DNA, 25 bp, Homo sapien
gaaccttaagtgaagatctccagct

SEQ ID NO: 2611457 - DNA, 25 bp, Homo sapien
tcacagaacaagcagagtccacgtg

SEQ ID NO: 2611458 - DNA, 25 bp, Homo sapien
cacagaacaagcagagtccacgtgg

SEQ ID NO: 2611459 - DNA, 25 bp, Homo sapien
atgcccctgttgatgaaccttaagt

SEQ ID NO: 2611460 - DNA, 25 bp, Homo sapien
agaagtttcgatgcttacagcacat

SEQ ID NO: 2611461 - DNA, 25 bp, Homo sapien
tagcgcgcttatgttgacatcaaca

SEQ ID NO: 2611462 - DNA, 25 bp, Homo sapien
cacgaattcaattagcgcgcttatg

SEQ ID NO: 2611463 - DNA, 25 bp, Homo sapien
ttgaaagccgtagaacccaagatgc

SEQ ID NO: 2611464 - DNA, 25 bp, Homo sapien
tcttggataagcaagcgtccacgaa

SEQ ID NO: 2611465 - DNA, 25 bp, Homo sapien
ttcctgctgctctagtgaacttgga

SEQ ID NO: 2611466 - DNA, 25 bp, Homo sapien
tgagaatttgcttccgtaagtcagc

SEQ ID NO: 2611467 - DNA, 25 bp, Homo sapien
gctgctctagtgaacttggatttaa

SEQ ID NO: 2611468 - DNA, 25 bp, Homo sapien
tgcttccgtaagtcagcagataaaa

SEQ ID NO: 2611469 - DNA, 25 bp, Homo sapien
tgttaacagtgtggtaggatttctc

SEQ ID NO: 2611470 - DNA, 25 bp, Homo sapien
tgttgcagcaccagtttccctcggt

SEQ ID NO: 2611471 - DNA, 25 bp, Homo sapien
tcagagaatttggatggagagaccc

SEQ ID NO: 2611472 - DNA, 25 bp, Homo sapien
taacgcggcagcctacttgcaacac

SEQ ID NO: 2611473 - DNA, 25 bp, Homo sapien
atgaaatattttcttttagagtcag

SEQ ID NO: 2611474 - DNA, 25 bp, Homo sapien
atattttcttttagagtcaggtaca

SEQ ID NO: 2611475 - DNA, 25 bp, Homo sapien
tgaaatattttcttttagagtcagg

SEQ ID NO: 2611476 - DNA, 25 bp, Homo sapien
attttcttttagagtcaggtacatt

SEQ ID NO: 2611477 - DNA, 25 bp, Homo sapien
ggccgaaatgatccagacagactat

SEQ ID NO: 2611478 - DNA, 25 bp, Homo sapien
ccagacatgctgaatggctcccctt

SEQ ID NO: 2611479 - DNA, 25 bp, Homo sapien
cggtgactccacaccttggcaggtg

SEQ ID NO: 2611480 - DNA, 25 bp, Homo sapien
tactatacactgaattctggccgaa

SEQ ID NO: 2611481 - DNA, 25 bp, Homo sapien
actctgtttgctccttgatccaggg

SEQ ID NO: 2611482 - DNA, 25 bp, Homo sapien
tgatctgaaatgaggctttctccca

SEQ ID NO: 2611483 - DNA, 25 bp, Homo sapien
tttgctccttgatccagggagttga

SEQ ID NO: 2611484 - DNA, 25 bp, Homo sapien
aacccagggccatcatttcgtacac

SEQ ID NO: 2611485 - DNA, 25 bp, Homo sapien
tggaagacagagctagatatatcaa

SEQ ID NO: 2611486 - DNA, 25 bp, Homo sapien
ttgtccaaagctatggaagacagag

SEQ ID NO: 2611487 - DNA, 25 bp, Homo sapien
caaagctatggaagacagagctaga

SEQ ID NO: 2611488 - DNA, 25 bp, Homo sapien
tagtttgtccaaagctatggaagac

SEQ ID NO: 2611489 - DNA, 25 bp, Homo sapien
gataagagaagatgccatacgcagt

SEQ ID NO: 2611490 - DNA, 25 bp, Homo sapien
ccaaatccaatttgataagagaaga

SEQ ID NO: 2611491 - DNA, 25 bp, Homo sapien
ttttggccaaatccaatttgataag

SEQ ID NO: 2611492 - DNA, 25 bp, Homo sapien
tccaatttgataagagaagatgcca

SEQ ID NO: 2611493 - DNA, 25 bp, Homo sapien
cagaggactattttgaaggcgagga

SEQ ID NO: 2611494 - DNA, 25 bp, Homo sapien
aaggcgtctgactgataccataggg

SEQ ID NO: 2611495 - DNA, 25 bp, Homo sapien
ctaagaataactttcccagtgctca

SEQ ID NO: 2611496 - DNA, 25 bp, Homo sapien
taccatagggatgtctgagcagttg

SEQ ID NO: 2611497 - DNA, 25 bp, Homo sapien
caactcagtccgagaaagtcatgga

SEQ ID NO: 2611498 - DNA, 25 bp, Homo sapien
tgtgccaaggatccaactcccagtt

SEQ ID NO: 2611499 - DNA, 25 bp, Homo sapien
ctcttcctcaaggacacaactcagt

SEQ ID NO: 2611500 - DNA, 25 bp, Homo sapien
ccagctcatggtgtgccaaggatcc

SEQ ID NO: 2611501 - DNA, 25 bp, Homo sapien
ctcagtactgatgggaagagccaac

SEQ ID NO: 2611502 - DNA, 25 bp, Homo sapien
tttccttcctctcagtactgatggg

SEQ ID NO: 2611503 - DNA, 25 bp, Homo sapien
tctgaaaaacacaagcccgcttccc

SEQ ID NO: 2611504 - DNA, 25 bp, Homo sapien
ctgaaaaacacaagcccgcttccct

SEQ ID NO: 2611505 - DNA, 25 bp, Homo sapien
tgtgcaagactctggaggaacatcc

SEQ ID NO: 2611506 - DNA, 25 bp, Homo sapien
catccctccgagacttcagctaaga

SEQ ID NO: 2611507 - DNA, 25 bp, Homo sapien
tcagctaagaggactccccggtaag

SEQ ID NO: 2611508 - DNA, 25 bp, Homo sapien
tcctgattgggagtggctgtcattc

SEQ ID NO: 2611509 - DNA, 25 bp, Homo sapien
caggagaaatctatgtcttggagct

SEQ ID NO: 2611510 - DNA, 25 bp, Homo sapien
agaaatctatgtcttggagctcttc

SEQ ID NO: 2611511 - DNA, 25 bp, Homo sapien
cctcctcatggaatcaaaaagcacc

SEQ ID NO: 2611512 - DNA, 25 bp, Homo sapien
catggaatcaaaaagcaccaggaga

SEQ ID NO: 2611513 - DNA, 25 bp, Homo sapien
cctacatcagtgagggcacatggaa

SEQ ID NO: 2611514 - DNA, 25 bp, Homo sapien
caagaacactaagaggctaatccag

SEQ ID NO: 2611515 - DNA, 25 bp, Homo sapien
cagtattggcctgaaagctgcagtg

SEQ ID NO: 2611516 - DNA, 25 bp, Homo sapien
tgccctgtcgggtggtgcttaagat

SEQ ID NO: 2611517 - DNA, 25 bp, Homo sapien
tattttagtaccgtgatccatgtgg

SEQ ID NO: 2611518 - DNA, 25 bp, Homo sapien
gattccttgagtctaccaaagtcag

SEQ ID NO: 2611519 - DNA, 25 bp, Homo sapien
gggcaaggacatggttcaacaccta

SEQ ID NO: 2611520 - DNA, 25 bp, Homo sapien
cagtagaatgcagctcagtcctgta

SEQ ID NO: 2611521 - DNA, 25 bp, Homo sapien
tgcctatgactaatgaactggaatg

SEQ ID NO: 2611522 - DNA, 25 bp, Homo sapien
tgtaaactccgtgcagaatggtcag

SEQ ID NO: 2611523 - DNA, 25 bp, Homo sapien
agtgaactatgccagttgaatgcaa

SEQ ID NO: 2611524 - DNA, 25 bp, Homo sapien
cagttgaatgcaattgagcagtgcc

SEQ ID NO: 2611525 - DNA, 25 bp, Homo sapien
cacgttcaatggcacactgtggtgg

SEQ ID NO: 2611526 - DNA, 25 bp, Homo sapien
tctccacgttcaatggcacactgtg

SEQ ID NO: 2611527 - DNA, 25 bp, Homo sapien
tccacgttcaatggcacactgtggt

SEQ ID NO: 2611528 - DNA, 25 bp, Homo sapien
cctctccacgttcaatggcacactg

SEQ ID NO: 2611529 - DNA, 25 bp, Homo sapien
gcctgtagcataccctctagcttga

SEQ ID NO: 2611530 - DNA, 25 bp, Homo sapien
tccacctgacccaatgcagtagcca

SEQ ID NO: 2611531 - DNA, 25 bp, Homo sapien
cttctctggttaacttcagcctgta

SEQ ID NO: 2611532 - DNA, 25 bp, Homo sapien
agcttgagatgcctcaacgtggacc

SEQ ID NO: 2611533 - DNA, 25 bp, Homo sapien
aatctgcacgtgtagatcttcaaag

SEQ ID NO: 2611534 - DNA, 25 bp, Homo sapien
tcgcaataatctgcacgtgtagatc

SEQ ID NO: 2611535 - DNA, 25 bp, Homo sapien
catagcattcagctgaagtgggact

SEQ ID NO: 2611536 - DNA, 25 bp, Homo sapien
gaagtgggacttcgcaataatctgc

SEQ ID NO: 2611537 - DNA, 25 bp, Homo sapien
tctggctagcttatcacaacttgta

SEQ ID NO: 2611538 - DNA, 25 bp, Homo sapien
acacatgctggtaatactttggaga

SEQ ID NO: 2611539 - DNA, 25 bp, Homo sapien
gacttgcataaggacataaagcgga

SEQ ID NO: 2611540 - DNA, 25 bp, Homo sapien
gagaaacgataaatcctcaaggact

SEQ ID NO: 2611541 - DNA, 25 bp, Homo sapien
taaaacctcatctaagaagaggttc

SEQ ID NO: 2611542 - DNA, 25 bp, Homo sapien
cactttcaggaatggatatttctgg

SEQ ID NO: 2611543 - DNA, 25 bp, Homo sapien
tgctgaggaccaaaccttgacacat

SEQ ID NO: 2611544 - DNA, 25 bp, Homo sapien
aagcttcagccttaaagagtctgct

SEQ ID NO: 2611545 - DNA, 25 bp, Homo sapien
ataaggcttgatccagcccagagac

SEQ ID NO: 2611546 - DNA, 25 bp, Homo sapien
tctcagtggcttcgtgcaagctcat

SEQ ID NO: 2611547 - DNA, 25 bp, Homo sapien
tccatatctcagtggcttcgtgcaa

SEQ ID NO: 2611548 - DNA, 25 bp, Homo sapien
cccatgttatagtagggaatccata

SEQ ID NO: 2611549 - DNA, 25 bp, Homo sapien
tatagtagggaatccatatctcagt

SEQ ID NO: 2611550 - DNA, 25 bp, Homo sapien
gacttgctctcaactggagcttcca

SEQ ID NO: 2611551 - DNA, 25 bp, Homo sapien
tctttcgaactagacctaactgggc

SEQ ID NO: 2611552 - DNA, 25 bp, Homo sapien
cttgtaaaggtggttaaggctgact

SEQ ID NO: 2611553 - DNA, 25 bp, Homo sapien
taactgggcactctcccaacgacag

SEQ ID NO: 2611554 - DNA, 25 bp, Homo sapien
tggtcccagaacaaagctataaagg

SEQ ID NO: 2611555 - DNA, 25 bp, Homo sapien
aatcaggagtcttagcttccagttc

SEQ ID NO: 2611556 - DNA, 25 bp, Homo sapien
agaaggatttggtaattgtgtcact

SEQ ID NO: 2611557 - DNA, 25 bp, Homo sapien
ggatttggtaattgtgtcactctag

SEQ ID NO: 2611558 - DNA, 25 bp, Homo sapien
gatgctgtgctcatatgcttccttt

SEQ ID NO: 2611559 - DNA, 25 bp, Homo sapien
aattgtgtcactctagtaacagatg

SEQ ID NO: 2611560 - DNA, 25 bp, Homo sapien
caggtaaaggctcgctgccacctgg

SEQ ID NO: 2611561 - DNA, 25 bp, Homo sapien
actcgcaggagctgtatgccacggc

SEQ ID NO: 2611562 - DNA, 25 bp, Homo sapien
agcagtacagcaagcactcgcagga

SEQ ID NO: 2611563 - DNA, 25 bp, Homo sapien
atcaacatcgtcgtgtcctcggccg

SEQ ID NO: 2611564 - DNA, 25 bp, Homo sapien
tctggacaagattcaaggaaagtgc

SEQ ID NO: 2611565 - DNA, 25 bp, Homo sapien
tctgagacctcctgcccagaagtgg

SEQ ID NO: 2611566 - DNA, 25 bp, Homo sapien
tcgaatgcaaatttgtctctggaca

SEQ ID NO: 2611567 - DNA, 25 bp, Homo sapien
tgagaggcgaatggctttcagtttg

SEQ ID NO: 2611568 - DNA, 25 bp, Homo sapien
ttccaaatatctgcagggaagcagt

SEQ ID NO: 2611569 - DNA, 25 bp, Homo sapien
cagatttgcagctttatagtgctaa

SEQ ID NO: 2611570 - DNA, 25 bp, Homo sapien
gggcccaatctattccaagtatatc

SEQ ID NO: 2611571 - DNA, 25 bp, Homo sapien
gaattgaactcttgtgacactaaag

SEQ ID NO: 2611572 - DNA, 25 bp, Homo sapien
gggttgtttatctgtgaacattctg

SEQ ID NO: 2611573 - DNA, 25 bp, Homo sapien
tgtccatttctcgtaaatgggttcc

SEQ ID NO: 2611574 - DNA, 25 bp, Homo sapien
tccttgtccatttctcgtaaatggg

SEQ ID NO: 2611575 - DNA, 25 bp, Homo sapien
catttctcgtaaatgggttcctcat

SEQ ID NO: 2611576 - DNA, 25 bp, Homo sapien
ctgtggtgaccttaggtgccaccag

SEQ ID NO: 2611577 - DNA, 25 bp, Homo sapien
cacctgtcataaccctgtgcttgca

SEQ ID NO: 2611578 - DNA, 25 bp, Homo sapien
cacacatgagctccaatgtcttcct

SEQ ID NO: 2611579 - DNA, 25 bp, Homo sapien
cagctgcacctgtcataaccctgtg

SEQ ID NO: 2611580 - DNA, 25 bp, Homo sapien
gtccgtggccacattcacattttga

SEQ ID NO: 2611581 - DNA, 25 bp, Homo sapien
tgtccttgtcacaacttaaaccact

SEQ ID NO: 2611582 - DNA, 25 bp, Homo sapien
cacaacttaaaccactctgcattga

SEQ ID NO: 2611583 - DNA, 25 bp, Homo sapien
ctcatgtccttgtcacaacttaaac

SEQ ID NO: 2611584 - DNA, 25 bp, Homo sapien
tgtcacaacttaaaccactctgcat

SEQ ID NO: 2611585 - DNA, 25 bp, Homo sapien
tggctgcttagatgcagacaccgcc

SEQ ID NO: 2611586 - DNA, 25 bp, Homo sapien
gctgcttagatgcagacaccgccat

SEQ ID NO: 2611587 - DNA, 25 bp, Homo sapien
gtctggctgcttagatgcagacacc

SEQ ID NO: 2611588 - DNA, 25 bp, Homo sapien
tgtgtctggctgcttagatgcagac

SEQ ID NO: 2611589 - DNA, 25 bp, Homo sapien
ttatgctccagggataactctttca

SEQ ID NO: 2611590 - DNA, 25 bp, Homo sapien
gagacagggtcctcaagttaggtca

SEQ ID NO: 2611591 - DNA, 25 bp, Homo sapien
tggcctcatctaaggcaagtggctg

SEQ ID NO: 2611592 - DNA, 25 bp, Homo sapien
gagatcctcacagttggaacatgct

SEQ ID NO: 2611593 - DNA, 25 bp, Homo sapien
tggagtctcagaggatacagagcct

SEQ ID NO: 2611594 - DNA, 25 bp, Homo sapien
gatgacgatcctcttcgcctagttt

SEQ ID NO: 2611595 - DNA, 25 bp, Homo sapien
cctttgaagatgacgatcctcttcg

SEQ ID NO: 2611596 - DNA, 25 bp, Homo sapien
tatatccagtccacaatacacagct

SEQ ID NO: 2611597 - DNA, 25 bp, Homo sapien
tcttcgcctagttttctatatccag

SEQ ID NO: 2611598 - DNA, 25 bp, Homo sapien
caaagtagtagggtggcaagcgcaa

SEQ ID NO: 2611599 - DNA, 25 bp, Homo sapien
gtagtcagctaaggtaaagtgatat

SEQ ID NO: 2611600 - DNA, 25 bp, Homo sapien
ctgtatctgaggcaaagtagtaggg

SEQ ID NO: 2611601 - DNA, 25 bp, Homo sapien
tcctggccagagtgcaatttaacgt

SEQ ID NO: 2611602 - DNA, 25 bp, Homo sapien
tgtactgtgttctctcggcattctg

SEQ ID NO: 2611603 - DNA, 25 bp, Homo sapien
ttggaccgagttgtactgtgttctc

SEQ ID NO: 2611604 - DNA, 25 bp, Homo sapien
ctcaggttcccgtgaaagggctggg

SEQ ID NO: 2611605 - DNA, 25 bp, Homo sapien
actgtgttctctcggcattctgcat

SEQ ID NO: 2611606 - DNA, 25 bp, Homo sapien
cacatttgatatgaagactgaggag

SEQ ID NO: 2611607 - DNA, 25 bp, Homo sapien
tgccaagtccacatgaggccgaggc

SEQ ID NO: 2611608 - DNA, 25 bp, Homo sapien
gacaggagggcatccgtgccaagtc

SEQ ID NO: 2611609 - DNA, 25 bp, Homo sapien
gactaagattgatggatggtccaca

SEQ ID NO: 2611610 - DNA, 25 bp, Homo sapien
tgtgggaagctgaccatcacataga

SEQ ID NO: 2611611 - DNA, 25 bp, Homo sapien
tgggaagctgaccatcacatagaac

SEQ ID NO: 2611612 - DNA, 25 bp, Homo sapien
ggaagctgaccatcacatagaacat

SEQ ID NO: 2611613 - DNA, 25 bp, Homo sapien
gtgtgggaagctgaccatcacatag

SEQ ID NO: 2611614 - DNA, 25 bp, Homo sapien
tacagatgatggtatgggcaccagc

SEQ ID NO: 2611615 - DNA, 25 bp, Homo sapien
caggcacttggagtataaccgttca

SEQ ID NO: 2611616 - DNA, 25 bp, Homo sapien
gatgaagcaagcacatagcggagct

SEQ ID NO: 2611617 - DNA, 25 bp, Homo sapien
tatcctgggaagattggcatagcac

SEQ ID NO: 2611618 - DNA, 25 bp, Homo sapien
agagcacttgcaaagaggagatgta

SEQ ID NO: 2611619 - DNA, 25 bp, Homo sapien
cattctgctctgcatatgagatgct

SEQ ID NO: 2611620 - DNA, 25 bp, Homo sapien
gatgtaactgtgatgacgggcatga

SEQ ID NO: 2611621 - DNA, 25 bp, Homo sapien
tgacattctgctctgcatatgagat

SEQ ID NO: 2611622 - DNA, 25 bp, Homo sapien
ggcgagaacaccagtctaaaagctc

SEQ ID NO: 2611623 - DNA, 25 bp, Homo sapien
cactactgaataaaaccttccttgt

SEQ ID NO: 2611624 - DNA, 25 bp, Homo sapien
gaatgttgcccatcttgtaaaggcg

SEQ ID NO: 2611625 - DNA, 25 bp, Homo sapien
gctcctttgccacagggtagtaacc

SEQ ID NO: 2611626 - DNA, 25 bp, Homo sapien
tgccagatacacaggtcctcttgtg

SEQ ID NO: 2611627 - DNA, 25 bp, Homo sapien
ccagatacacaggtcctcttgtggg

SEQ ID NO: 2611628 - DNA, 25 bp, Homo sapien
ggagaagcatctttcgggccactgg

SEQ ID NO: 2611629 - DNA, 25 bp, Homo sapien
agaagcatctttcgggccactgggt

SEQ ID NO: 2611630 - DNA, 25 bp, Homo sapien
cagcagctttaactgccagcatttt

SEQ ID NO: 2611631 - DNA, 25 bp, Homo sapien
agcagctttaactgccagcatttta

SEQ ID NO: 2611632 - DNA, 25 bp, Homo sapien
aggagtagatttggtcccctggaga

SEQ ID NO: 2611633 - DNA, 25 bp, Homo sapien
gcctttatccaaggagtagatttgg

SEQ ID NO: 2611634 - DNA, 25 bp, Homo sapien
tatccaaggagtagatttggtcccc

SEQ ID NO: 2611635 - DNA, 25 bp, Homo sapien
catgcctttatccaaggagtagatt

SEQ ID NO: 2611636 - DNA, 25 bp, Homo sapien
cagctggcacaggaaccatagaaaa

SEQ ID NO: 2611637 - DNA, 25 bp, Homo sapien
ggatgccatcgaagagaggaaaacc

SEQ ID NO: 2611638 - DNA, 25 bp, Homo sapien
gaaggatcttgtggttgagcaatga

SEQ ID NO: 2611639 - DNA, 25 bp, Homo sapien
ccatagaaaaatgacgggggcctgc

SEQ ID NO: 2611640 - DNA, 25 bp, Homo sapien
tttcctgagcctccgtcagtggcca

SEQ ID NO: 2611641 - DNA, 25 bp, Homo sapien
tggccaagtgcagtgtcccgagctg

SEQ ID NO: 2611642 - DNA, 25 bp, Homo sapien
caagtgcagtgtcccgagctgtgac

SEQ ID NO: 2611643 - DNA, 25 bp, Homo sapien
gtcccgagctgtgacaccatgcaca

SEQ ID NO: 2611644 - DNA, 25 bp, Homo sapien
catgtggtaccaaccttatgcaacg

SEQ ID NO: 2611645 - DNA, 25 bp, Homo sapien
ccttatgcaacggaggaaggaggaa

SEQ ID NO: 2611646 - DNA, 25 bp, Homo sapien
tgttgctcttgatccccttccagac

SEQ ID NO: 2611647 - DNA, 25 bp, Homo sapien
aggagcccatgtggtaccaacctta

SEQ ID NO: 2611648 - DNA, 25 bp, Homo sapien
ctgtgggacaggaccctgtgctgtc

SEQ ID NO: 2611649 - DNA, 25 bp, Homo sapien
ctgtctggtttcccacagcacagat

SEQ ID NO: 2611650 - DNA, 25 bp, Homo sapien
ttcccacagcacagatcattaaaag

SEQ ID NO: 2611651 - DNA, 25 bp, Homo sapien
ctgtgctgtctggtttcccacagca

SEQ ID NO: 2611652 - DNA, 25 bp, Homo sapien
tgctgtgatctgcacacgaccgtat

SEQ ID NO: 2611653 - DNA, 25 bp, Homo sapien
tgtggctgctcgtgctgtgatctgc

SEQ ID NO: 2611654 - DNA, 25 bp, Homo sapien
gcacacgaccgtatttcttctgctg

SEQ ID NO: 2611655 - DNA, 25 bp, Homo sapien
gatctgcacacgaccgtatttcttc

SEQ ID NO: 2611656 - DNA, 25 bp, Homo sapien
tagaatgagagtaaaggcagccacg

SEQ ID NO: 2611657 - DNA, 25 bp, Homo sapien
gaatgagagtaaaggcagccacgga

SEQ ID NO: 2611658 - DNA, 25 bp, Homo sapien
gatgtagaatgagagtaaaggcagc

SEQ ID NO: 2611659 - DNA, 25 bp, Homo sapien
tgagagtaaaggcagccacggacag

SEQ ID NO: 2611660 - DNA, 25 bp, Homo sapien
tgttgaccacaggtgctggacctac

SEQ ID NO: 2611661 - DNA, 25 bp, Homo sapien
ctaatactgttgaccacaggtgctg

SEQ ID NO: 2611662 - DNA, 25 bp, Homo sapien
catgctaatactgttgaccacaggt

SEQ ID NO: 2611663 - DNA, 25 bp, Homo sapien
tgctaatactgttgaccacaggtgc

SEQ ID NO: 2611664 - DNA, 25 bp, Homo sapien
gtggaacatttgcactcatagcaag

SEQ ID NO: 2611665 - DNA, 25 bp, Homo sapien
tcatagcaagtatcacagctgacca

SEQ ID NO: 2611666 - DNA, 25 bp, Homo sapien
cctgctcattgagagagtggctaaa

SEQ ID NO: 2611667 - DNA, 25 bp, Homo sapien
agtggctaaatccagcatgacctag

SEQ ID NO: 2611668 - DNA, 25 bp, Homo sapien
aagggcacacgctgtcttgagtgtc

SEQ ID NO: 2611669 - DNA, 25 bp, Homo sapien
tgaaagggcacacgctgtcttgagt

SEQ ID NO: 2611670 - DNA, 25 bp, Homo sapien
ggtgaaagggcacacgctgtcttga

SEQ ID NO: 2611671 - DNA, 25 bp, Homo sapien
gaggtgaaagggcacacgctgtctt

SEQ ID NO: 2611672 - DNA, 25 bp, Homo sapien
catggaggacgaactcttgaatatt

SEQ ID NO: 2611673 - DNA, 25 bp, Homo sapien
acatggaggacgaactcttgaatat

SEQ ID NO: 2611674 - DNA, 25 bp, Homo sapien
gacatggaggacgaactcttgaata

SEQ ID NO: 2611675 - DNA, 25 bp, Homo sapien
cagactccagggtgtaaggtgtgca

SEQ ID NO: 2611676 - DNA, 25 bp, Homo sapien
gaagtctaaagtgcctgctgaggtc

SEQ ID NO: 2611677 - DNA, 25 bp, Homo sapien
gaagagttccctgaggacctgacac

SEQ ID NO: 2611678 - DNA, 25 bp, Homo sapien
tcttctgtcagagctaggtcgctgc

SEQ ID NO: 2611679 - DNA, 25 bp, Homo sapien
gaagccgacaacatgaattgcccag

SEQ ID NO: 2611680 - DNA, 25 bp, Homo sapien
acatgaattgcccagccagacagct

SEQ ID NO: 2611681 - DNA, 25 bp, Homo sapien
gtgtctcttgaagccgacaacatga

SEQ ID NO: 2611682 - DNA, 25 bp, Homo sapien
ctcaagtgtgtctcttgaagccgac

SEQ ID NO: 2611683 - DNA, 25 bp, Homo sapien
ggtcagtggcaagcaacccttattt

SEQ ID NO: 2611684 - DNA, 25 bp, Homo sapien
gtctgtcctggttagcacactgtga

SEQ ID NO: 2611685 - DNA, 25 bp, Homo sapien
gcattgctatttcctgccggcacca

SEQ ID NO: 2611686 - DNA, 25 bp, Homo sapien
tagatcttcacagccaatgacggaa

SEQ ID NO: 2611687 - DNA, 25 bp, Homo sapien
tttatttagttccttgctgctggct

SEQ ID NO: 2611688 - DNA, 25 bp, Homo sapien
tttagttccttgctgctggcttttg

SEQ ID NO: 2611689 - DNA, 25 bp, Homo sapien
tatttagttccttgctgctggcttt

SEQ ID NO: 2611690 - DNA, 25 bp, Homo sapien
tggcttttgttcctgtatttgacat

SEQ ID NO: 2611691 - DNA, 25 bp, Homo sapien
ggcatctgtgagctctaaatcccac

SEQ ID NO: 2611692 - DNA, 25 bp, Homo sapien
gtctgctggctcacactggacctct

SEQ ID NO: 2611693 - DNA, 25 bp, Homo sapien
ttcttcacaatgaagccagcccggg

SEQ ID NO: 2611694 - DNA, 25 bp, Homo sapien
ctgaggtccagtgactttggctcat

SEQ ID NO: 2611695 - DNA, 25 bp, Homo sapien
tacacttgtgagtgtacaccatgca

SEQ ID NO: 2611696 - DNA, 25 bp, Homo sapien
ccctacagcctgaacataggatacc

SEQ ID NO: 2611697 - DNA, 25 bp, Homo sapien
cataggataccagtgatcattgtac

SEQ ID NO: 2611698 - DNA, 25 bp, Homo sapien
tctttttgtcccctacagcctgaac

SEQ ID NO: 2611699 - DNA, 25 bp, Homo sapien
tccttgcaactgaatgacttgctca

SEQ ID NO: 2611700 - DNA, 25 bp, Homo sapien
ggcttgctgcttgcataaacgtcac

SEQ ID NO: 2611701 - DNA, 25 bp, Homo sapien
ttgcataaacgtcacaagagaatcc

SEQ ID NO: 2611702 - DNA, 25 bp, Homo sapien
tacatggacccgtattaatggtttc

SEQ ID NO: 2611703 - DNA, 25 bp, Homo sapien
tacaaaggtgaaggggaacagtgca

SEQ ID NO: 2611704 - DNA, 25 bp, Homo sapien
cacatgcttcacagcttaacagcaa

SEQ ID NO: 2611705 - DNA, 25 bp, Homo sapien
cagcttaacagcaagtacatgtcaa

SEQ ID NO: 2611706 - DNA, 25 bp, Homo sapien
caagaagggcaatactggcaactga

SEQ ID NO: 2611707 - DNA, 25 bp, Homo sapien
gaatctggcgcagttcattattgat

SEQ ID NO: 2611708 - DNA, 25 bp, Homo sapien
cagcatgatgcagggatccgggtta

SEQ ID NO: 2611709 - DNA, 25 bp, Homo sapien
aaagaaggcgttctgtcctaacagg

SEQ ID NO: 2611710 - DNA, 25 bp, Homo sapien
gctttgcaggcatatactcttgtgt

SEQ ID NO: 2611711 - DNA, 25 bp, Homo sapien
cctgcagtactctcgtttgttgttc

SEQ ID NO: 2611712 - DNA, 25 bp, Homo sapien
aacctgcagtactctcgtttgttgt

SEQ ID NO: 2611713 - DNA, 25 bp, Homo sapien
taacctgcagtactctcgtttgttg

SEQ ID NO: 2611714 - DNA, 25 bp, Homo sapien
ttaacctgcagtactctcgtttgtt

SEQ ID NO: 2611715 - DNA, 25 bp, Homo sapien
ggttgtaaggcaccacagtctcact

SEQ ID NO: 2611716 - DNA, 25 bp, Homo sapien
ggcaccacagtctcacttgtgagca

SEQ ID NO: 2611717 - DNA, 25 bp, Homo sapien
ctgatggttgtaaggcaccacagtc

SEQ ID NO: 2611718 - DNA, 25 bp, Homo sapien
taaggcaccacagtctcacttgtga

SEQ ID NO: 2611719 - DNA, 25 bp, Homo sapien
cttgtcagttgtccagcagtgagga

SEQ ID NO: 2611720 - DNA, 25 bp, Homo sapien
taacttctctagcagagctggcact

SEQ ID NO: 2611721 - DNA, 25 bp, Homo sapien
tagagggaaggaactttacttgtca

SEQ ID NO: 2611722 - DNA, 25 bp, Homo sapien
cactgggcgtcagaaggccgtagag

SEQ ID NO: 2611723 - DNA, 25 bp, Homo sapien
gaattcccagggcaactgttataaa

SEQ ID NO: 2611724 - DNA, 25 bp, Homo sapien
tggctgcatagaggctacgcccatc

SEQ ID NO: 2611725 - DNA, 25 bp, Homo sapien
cctgactcagttgcattgtggctgc

SEQ ID NO: 2611726 - DNA, 25 bp, Homo sapien
gaaactttttgagccactgatcagc

SEQ ID NO: 2611727 - DNA, 25 bp, Homo sapien
ttccttttagccgtggtgcagggag

SEQ ID NO: 2611728 - DNA, 25 bp, Homo sapien
ttttcgaggctgttcttcactccct

SEQ ID NO: 2611729 - DNA, 25 bp, Homo sapien
cataggataattcagcgtcctgact

SEQ ID NO: 2611730 - DNA, 25 bp, Homo sapien
ccttctcggtttttgagctgctctg

SEQ ID NO: 2611731 - DNA, 25 bp, Homo sapien
taaactgtttgcgagtgaaagcaga

SEQ ID NO: 2611732 - DNA, 25 bp, Homo sapien
gtttgcgagtgaaagcagaaattac

SEQ ID NO: 2611733 - DNA, 25 bp, Homo sapien
ctgtttgcgagtgaaagcagaaatt

SEQ ID NO: 2611734 - DNA, 25 bp, Homo sapien
aactgtttgcgagtgaaagcagaaa

SEQ ID NO: 2611735 - DNA, 25 bp, Homo sapien
atccatttcagcagcgataactgct

SEQ ID NO: 2611736 - DNA, 25 bp, Homo sapien
cagcagcgataactgctggattaca

SEQ ID NO: 2611737 - DNA, 25 bp, Homo sapien
tctgtgttggagcttccccgtgtcc

SEQ ID NO: 2611738 - DNA, 25 bp, Homo sapien
atctgtgttggagcttccccgtgtc

SEQ ID NO: 2611739 - DNA, 25 bp, Homo sapien
ccccttggttgtggtgtagagggat

SEQ ID NO: 2611740 - DNA, 25 bp, Homo sapien
ttctcctcatcagcacgtatccccc

SEQ ID NO: 2611741 - DNA, 25 bp, Homo sapien
atcagcacgtatcccccttggttgt

SEQ ID NO: 2611742 - DNA, 25 bp, Homo sapien
tatcccccttggttgtggtgtagag

SEQ ID NO: 2611743 - DNA, 25 bp, Homo sapien
aaaattgagagccactgcaactgtg

SEQ ID NO: 2611744 - DNA, 25 bp, Homo sapien
ttgagagtcctggtgcagcacgtga

SEQ ID NO: 2611745 - DNA, 25 bp, Homo sapien
ttgagagccactgcaactgtgacat

SEQ ID NO: 2611746 - DNA, 25 bp, Homo sapien
gacaggcaagatgttttgagagtcc

SEQ ID NO: 2611747 - DNA, 25 bp, Homo sapien
tagctgtattttagcacacttttct

SEQ ID NO: 2611748 - DNA, 25 bp, Homo sapien
agctgtattttagcacacttttctt

SEQ ID NO: 2611749 - DNA, 25 bp, Homo sapien
ttagctgtattttagcacacttttc

SEQ ID NO: 2611750 - DNA, 25 bp, Homo sapien
gggttctcttgagggtcaaaattga

SEQ ID NO: 2611751 - DNA, 25 bp, Homo sapien
taatcatcacagcataatatcttaa

SEQ ID NO: 2611752 - DNA, 25 bp, Homo sapien
cagcataatatcttaagacagcagc

SEQ ID NO: 2611753 - DNA, 25 bp, Homo sapien
gtgttcatcagggttctcttgaggg

SEQ ID NO: 2611754 - DNA, 25 bp, Homo sapien
gccaagcggctttgatctgtgcatg

SEQ ID NO: 2611755 - DNA, 25 bp, Homo sapien
tctgtgcatgtagagagaactcagt

SEQ ID NO: 2611756 - DNA, 25 bp, Homo sapien
cataaaactctttgtcatcggcact

SEQ ID NO: 2611757 - DNA, 25 bp, Homo sapien
aaagtggaactttgtgtctggaaca

SEQ ID NO: 2611758 - DNA, 25 bp, Homo sapien
ggaaatgagtccacaccagcgttta

SEQ ID NO: 2611759 - DNA, 25 bp, Homo sapien
ctagttacattggttatctccagga

SEQ ID NO: 2611760 - DNA, 25 bp, Homo sapien
cagcgtttaattcagccctgaagca

SEQ ID NO: 2611761 - DNA, 25 bp, Homo sapien
gagtccacaccagcgtttaattcag

SEQ ID NO: 2611762 - DNA, 25 bp, Homo sapien
tgtagatgccaacttctcaactggc

SEQ ID NO: 2611763 - DNA, 25 bp, Homo sapien
gtagatgccaacttctcaactggca

SEQ ID NO: 2611764 - DNA, 25 bp, Homo sapien
tagatgccaacttctcaactggcat

SEQ ID NO: 2611765 - DNA, 25 bp, Homo sapien
tgctcctgtgccatgatcaggaaga

SEQ ID NO: 2611766 - DNA, 25 bp, Homo sapien
aaggaggtcaggcaacttgaggaaa

SEQ ID NO: 2611767 - DNA, 25 bp, Homo sapien
ggtcaggcaacttgaggaaactcac

SEQ ID NO: 2611768 - DNA, 25 bp, Homo sapien
tgcagaaggaggtcaggcaacttga

SEQ ID NO: 2611769 - DNA, 25 bp, Homo sapien
ccacctggttgcagaaggaggtcag

SEQ ID NO: 2611770 - DNA, 25 bp, Homo sapien
ttttactagttatgtactgaaagtg

SEQ ID NO: 2611771 - DNA, 25 bp, Homo sapien
agtactctgcaggtgcaagaatttt

SEQ ID NO: 2611772 - DNA, 25 bp, Homo sapien
agtggtgaccgagtactctgcaggt

SEQ ID NO: 2611773 - DNA, 25 bp, Homo sapien
gcaggtgcaagaattttactagtta

SEQ ID NO: 2611774 - DNA, 25 bp, Homo sapien
gagtttccactgttcgtggatcagt

SEQ ID NO: 2611775 - DNA, 25 bp, Homo sapien
gaagactttcctgtcaatgagtttc

SEQ ID NO: 2611776 - DNA, 25 bp, Homo sapien
gtcaatgagtttccactgttcgtgg

SEQ ID NO: 2611777 - DNA, 25 bp, Homo sapien
cactgttcgtggatcagtaggagca

SEQ ID NO: 2611778 - DNA, 25 bp, Homo sapien
gaatacaacaatacagatagcacag

SEQ ID NO: 2611779 - DNA, 25 bp, Homo sapien
aatacagatagcacaggaagccagg

SEQ ID NO: 2611780 - DNA, 25 bp, Homo sapien
tcccataatggattctgtttattcc

SEQ ID NO: 2611781 - DNA, 25 bp, Homo sapien
ccttggttgtcagtaatttgacttg

SEQ ID NO: 2611782 - DNA, 25 bp, Homo sapien
tgacttaaagcaaaactcgaataca

SEQ ID NO: 2611783 - DNA, 25 bp, Homo sapien
atgacttaaagcaaaactcgaatac

SEQ ID NO: 2611784 - DNA, 25 bp, Homo sapien
gacttaaagcaaaactcgaatacat

SEQ ID NO: 2611785 - DNA, 25 bp, Homo sapien
ccagagaatatttgccttcacttaa

SEQ ID NO: 2611786 - DNA, 25 bp, Homo sapien
cagagaatatttgccttcacttaaa

SEQ ID NO: 2611787 - DNA, 25 bp, Homo sapien
tccagagaatatttgccttcactta

SEQ ID NO: 2611788 - DNA, 25 bp, Homo sapien
agagaatatttgccttcacttaaaa

SEQ ID NO: 2611789 - DNA, 25 bp, Homo sapien
catagggtgtcaacagaggtttctt

SEQ ID NO: 2611790 - DNA, 25 bp, Homo sapien
ctccatagggtgtcaacagaggttt

SEQ ID NO: 2611791 - DNA, 25 bp, Homo sapien
agtctgccagtcatcataatggaaa

SEQ ID NO: 2611792 - DNA, 25 bp, Homo sapien
tggaaagacatggtaatgctgcctg

SEQ ID NO: 2611793 - DNA, 25 bp, Homo sapien
gtagtacagctgagatgacttagca

SEQ ID NO: 2611794 - DNA, 25 bp, Homo sapien
taaaatcctcgagtagtacagctga

SEQ ID NO: 2611795 - DNA, 25 bp, Homo sapien
gaaggagctgatttgcataaaatcc

SEQ ID NO: 2611796 - DNA, 25 bp, Homo sapien
aagcttcctgttttaaggcagttga

SEQ ID NO: 2611797 - DNA, 25 bp, Homo sapien
tagactatttctgcagtacagtgat

SEQ ID NO: 2611798 - DNA, 25 bp, Homo sapien
gaagcagtgtggtgaataaaagacc

SEQ ID NO: 2611799 - DNA, 25 bp, Homo sapien
gacactaagaaatgggtatgcagta

SEQ ID NO: 2611800 - DNA, 25 bp, Homo sapien
ttgcttctcaagtgtcaaaatatca

SEQ ID NO: 2611801 - DNA, 25 bp, Homo sapien
tgtcctagactcaaggctatgggtg

SEQ ID NO: 2611802 - DNA, 25 bp, Homo sapien
tagcttctgctgtgttacgatgtgc

SEQ ID NO: 2611803 - DNA, 25 bp, Homo sapien
actcaaggctatgggtggtgatgct

SEQ ID NO: 2611804 - DNA, 25 bp, Homo sapien
atttactgtcctagactcaaggcta

SEQ ID NO: 2611805 - DNA, 25 bp, Homo sapien
tcagagtgctagatcacaatttcct

SEQ ID NO: 2611806 - DNA, 25 bp, Homo sapien
catccttcttgtgatgagaatctga

SEQ ID NO: 2611807 - DNA, 25 bp, Homo sapien
gttgatagacgagctccatatttcc

SEQ ID NO: 2611808 - DNA, 25 bp, Homo sapien
gagaatctgatcctctcccgttgat

SEQ ID NO: 2611809 - DNA, 25 bp, Homo sapien
tctgtacggtggaataagccttgaa

SEQ ID NO: 2611810 - DNA, 25 bp, Homo sapien
tagcggtagctctgtacggtggaat

SEQ ID NO: 2611811 - DNA, 25 bp, Homo sapien
tagctctgtacggtggaataagcct

SEQ ID NO: 2611812 - DNA, 25 bp, Homo sapien
tgtacggtggaataagccttgaaga

SEQ ID NO: 2611813 - DNA, 25 bp, Homo sapien
agtggttgggactgccccttctcca

SEQ ID NO: 2611814 - DNA, 25 bp, Homo sapien
ctcccagtggttgggactgcccctt

SEQ ID NO: 2611815 - DNA, 25 bp, Homo sapien
tcgtccctgggcatttggcccagca

SEQ ID NO: 2611816 - DNA, 25 bp, Homo sapien
gaaccttgctgtgtgtatgactgcc

SEQ ID NO: 2611817 - DNA, 25 bp, Homo sapien
cgactcaagcagaatggtgccgtat

SEQ ID NO: 2611818 - DNA, 25 bp, Homo sapien
ccgtatgccagtctgccttgatagg

SEQ ID NO: 2611819 - DNA, 25 bp, Homo sapien
gaatggtgccgtatgccagtctgcc

SEQ ID NO: 2611820 - DNA, 25 bp, Homo sapien
aagcagaatggtgccgtatgccagt

SEQ ID NO: 2611821 - DNA, 25 bp, Homo sapien
tgcttggccagtcaaaacctagcat

SEQ ID NO: 2611822 - DNA, 25 bp, Homo sapien
agtgcttggccagtcaaaacctagc

SEQ ID NO: 2611823 - DNA, 25 bp, Homo sapien
tcagtgcttggccagtcaaaaccta

SEQ ID NO: 2611824 - DNA, 25 bp, Homo sapien
tcatcagtgcttggccagtcaaaac

SEQ ID NO: 2611825 - DNA, 25 bp, Homo sapien
ccagggggaacagcgatgaaggctc

SEQ ID NO: 2611826 - DNA, 25 bp, Homo sapien
cagcgatgaaggctctgtcaacaga

SEQ ID NO: 2611827 - DNA, 25 bp, Homo sapien
gcgatgaaggctctgtcaacagacc

SEQ ID NO: 2611828 - DNA, 25 bp, Homo sapien
gatgaaggctctgtcaacagacctc

SEQ ID NO: 2611829 - DNA, 25 bp, Homo sapien
cattgaagaaggattggctgactcc

SEQ ID NO: 2611830 - DNA, 25 bp, Homo sapien
ccaacagtcccaggacaggttctct

SEQ ID NO: 2611831 - DNA, 25 bp, Homo sapien
tcctttgcgccccaaatccaacagt

SEQ ID NO: 2611832 - DNA, 25 bp, Homo sapien
tcatatttgtagtcattgaagaagg

SEQ ID NO: 2611833 - DNA, 25 bp, Homo sapien
gttcagcacaagagcttcttttgtg

SEQ ID NO: 2611834 - DNA, 25 bp, Homo sapien
tcatggctgacagtaactgttcagc

SEQ ID NO: 2611835 - DNA, 25 bp, Homo sapien
cattccagctttgcactaatgccag

SEQ ID NO: 2611836 - DNA, 25 bp, Homo sapien
tcttttgtgatatcgacattccagc

SEQ ID NO: 2611837 - DNA, 25 bp, Homo sapien
tcctccctgagttctgtaggaaggg

SEQ ID NO: 2611838 - DNA, 25 bp, Homo sapien
caagctctccttgtgatattgcaca

SEQ ID NO: 2611839 - DNA, 25 bp, Homo sapien
tattgcacactttgattcattaggg

SEQ ID NO: 2611840 - DNA, 25 bp, Homo sapien
gggcccagagcttcgctcctttgac

SEQ ID NO: 2611841 - DNA, 25 bp, Homo sapien
cataagtagccatcgtggcatttat

SEQ ID NO: 2611842 - DNA, 25 bp, Homo sapien
catttgttctagctggtgtgcactt

SEQ ID NO: 2611843 - DNA, 25 bp, Homo sapien
tattctctgaccctttcggccattt

SEQ ID NO: 2611844 - DNA, 25 bp, Homo sapien
cttcaacataagtagccatcgtggc

SEQ ID NO: 2611845 - DNA, 25 bp, Homo sapien
ataaaaactttgagaccgcatggtc

SEQ ID NO: 2611846 - DNA, 25 bp, Homo sapien
ccactttcttggcatggcatcctca

SEQ ID NO: 2611847 - DNA, 25 bp, Homo sapien
gaatgttaaatgcagtcacccactt

SEQ ID NO: 2611848 - DNA, 25 bp, Homo sapien
tgtttgaccagtgtgaaaccagcat

SEQ ID NO: 2611849 - DNA, 25 bp, Homo sapien
aactcgatgacattgggagtgtgga

SEQ ID NO: 2611850 - DNA, 25 bp, Homo sapien
gttgatcataattctgaactctgtg

SEQ ID NO: 2611851 - DNA, 25 bp, Homo sapien
ttgaactcgatgacattgggagtgt

SEQ ID NO: 2611852 - DNA, 25 bp, Homo sapien
caataaattctaccacgttgatcat

SEQ ID NO: 2611853 - DNA, 25 bp, Homo sapien
tccttttggtgaagtaggcctgtgg

SEQ ID NO: 2611854 - DNA, 25 bp, Homo sapien
tctgtccgtgcgtcttagtacgtgg

SEQ ID NO: 2611855 - DNA, 25 bp, Homo sapien
accattatgcctctgtccgtgcgtc

SEQ ID NO: 2611856 - DNA, 25 bp, Homo sapien
cgtcttagtacgtggcgatggtgaa

SEQ ID NO: 2611857 - DNA, 25 bp, Homo sapien
ttatgtcttaagtctcatccgattc

SEQ ID NO: 2611858 - DNA, 25 bp, Homo sapien
ccccgcaaagctgtcccctccgctt

SEQ ID NO: 2611859 - DNA, 25 bp, Homo sapien
tgtcttaagtctcatccgattcaga

SEQ ID NO: 2611860 - DNA, 25 bp, Homo sapien
taagtctcatccgattcagaatttc

SEQ ID NO: 2611861 - DNA, 25 bp, Homo sapien
tgtagaatttcccttattatgcctt

SEQ ID NO: 2611862 - DNA, 25 bp, Homo sapien
tatatctcgatttactcctgtcacc

SEQ ID NO: 2611863 - DNA, 25 bp, Homo sapien
ccttacgttgcatgtctgttggcaa

SEQ ID NO: 2611864 - DNA, 25 bp, Homo sapien
gcaaattatattgcactgtggctta

SEQ ID NO: 2611865 - DNA, 25 bp, Homo sapien
cactggtggcgatggatattttctc

SEQ ID NO: 2611866 - DNA, 25 bp, Homo sapien
taggctctatggcaattccctttac

SEQ ID NO: 2611867 - DNA, 25 bp, Homo sapien
gcggccccgcttggagcttttgcct

SEQ ID NO: 2611868 - DNA, 25 bp, Homo sapien
tttcccagagcggccccgcttggag

SEQ ID NO: 2611869 - DNA, 25 bp, Homo sapien
tctctaggtaacataagatgctgct

SEQ ID NO: 2611870 - DNA, 25 bp, Homo sapien
ctttggtatctctaggtaacataag

SEQ ID NO: 2611871 - DNA, 25 bp, Homo sapien
ggtatctctaggtaacataagatgc

SEQ ID NO: 2611872 - DNA, 25 bp, Homo sapien
gtaacataagatgctgctgtccctg

SEQ ID NO: 2611873 - DNA, 25 bp, Homo sapien
tcctggtgtgatatatctggcccca

SEQ ID NO: 2611874 - DNA, 25 bp, Homo sapien
aaacaacaattgtttggcaatcaac

SEQ ID NO: 2611875 - DNA, 25 bp, Homo sapien
cgggatataccatttacactaagaa

SEQ ID NO: 2611876 - DNA, 25 bp, Homo sapien
cccattgagcaaaatcctttgagaa

SEQ ID NO: 2611877 - DNA, 25 bp, Homo sapien
gcagcggaggttggtcaaggccttt

SEQ ID NO: 2611878 - DNA, 25 bp, Homo sapien
gcgtccctcgagtgacctcttggaa

SEQ ID NO: 2611879 - DNA, 25 bp, Homo sapien
gcctttgctggtggcgtccctcgag

SEQ ID NO: 2611880 - DNA, 25 bp, Homo sapien
ttggaagcctgcctttcgttgtggg

SEQ ID NO: 2611881 - DNA, 25 bp, Homo sapien
ggtgataattcagctccactagcag

SEQ ID NO: 2611882 - DNA, 25 bp, Homo sapien
tgggaaattcccacgcagaaagtga

SEQ ID NO: 2611883 - DNA, 25 bp, Homo sapien
cagaacggagaggtgacttatacac

SEQ ID NO: 2611884 - DNA, 25 bp, Homo sapien
ggtagctgctttggtatctagccca

SEQ ID NO: 2611885 - DNA, 25 bp, Homo sapien
cagctggtcccgctttgggatggaa

SEQ ID NO: 2611886 - DNA, 25 bp, Homo sapien
ttgtgtcaccagctggtcccgcttt

SEQ ID NO: 2611887 - DNA, 25 bp, Homo sapien
atgtgttgaaggtcagtgcatgatg

SEQ ID NO: 2611888 - DNA, 25 bp, Homo sapien
aggctactgtgaagctgcacatttc

SEQ ID NO: 2611889 - DNA, 25 bp, Homo sapien
ttagattgccttttctaggctccct

SEQ ID NO: 2611890 - DNA, 25 bp, Homo sapien
cttttctaggctccctctgtattac

SEQ ID NO: 2611891 - DNA, 25 bp, Homo sapien
agattgccttttctaggctccctct

SEQ ID NO: 2611892 - DNA, 25 bp, Homo sapien
gccttttctaggctccctctgtatt

SEQ ID NO: 2611893 - DNA, 25 bp, Homo sapien
aatagtagggcttggatgtctgtgt

SEQ ID NO: 2611894 - DNA, 25 bp, Homo sapien
ctgaatagtagggcttggatgtctg

SEQ ID NO: 2611895 - DNA, 25 bp, Homo sapien
atgtctgtgttgtgagggcacttga

SEQ ID NO: 2611896 - DNA, 25 bp, Homo sapien
gtctgtgttgtgagggcacttgatt

SEQ ID NO: 2611897 - DNA, 25 bp, Homo sapien
agacacatctgtcccgagtacttgg

SEQ ID NO: 2611898 - DNA, 25 bp, Homo sapien
tcttccgtggggtactgtctccatg

SEQ ID NO: 2611899 - DNA, 25 bp, Homo sapien
gctgcaatcatgttctgcggtgcca

SEQ ID NO: 2611900 - DNA, 25 bp, Homo sapien
gggctccgtggtgctgcaatcatgt

SEQ ID NO: 2611901 - DNA, 25 bp, Homo sapien
ttaaaaagcagtagaataggccgga

SEQ ID NO: 2611902 - DNA, 25 bp, Homo sapien
ttctaattaaatagcaaatcagcct

SEQ ID NO: 2611903 - DNA, 25 bp, Homo sapien
ttaaagatctctgtaaagggaacga

SEQ ID NO: 2611904 - DNA, 25 bp, Homo sapien
atcagttatgtcatggatttttggc

SEQ ID NO: 2611905 - DNA, 25 bp, Homo sapien
caaatactaagggagatgtgccaac

SEQ ID NO: 2611906 - DNA, 25 bp, Homo sapien
tctgccacagggaaatactcttatc

SEQ ID NO: 2611907 - DNA, 25 bp, Homo sapien
cacaggctagtacgttggccctggg

SEQ ID NO: 2611908 - DNA, 25 bp, Homo sapien
gaattagcttaagtccctgagccca

SEQ ID NO: 2611909 - DNA, 25 bp, Homo sapien
ggccgacattgctgtgttgcaagta

SEQ ID NO: 2611910 - DNA, 25 bp, Homo sapien
caggtaaccatgtttgatctataaa

SEQ ID NO: 2611911 - DNA, 25 bp, Homo sapien
ttgcaagtagtaggtaggaggatca

SEQ ID NO: 2611912 - DNA, 25 bp, Homo sapien
ttgaaaaatacacaaccaggccgac

SEQ ID NO: 2611913 - DNA, 25 bp, Homo sapien
ctccctatcttcagctgcatggttg

SEQ ID NO: 2611914 - DNA, 25 bp, Homo sapien
gaaggtggcattctggccccttctc

SEQ ID NO: 2611915 - DNA, 25 bp, Homo sapien
tcagctgcatggttgacattctgca

SEQ ID NO: 2611916 - DNA, 25 bp, Homo sapien
gtgtagataatctcagagctcagtg

SEQ ID NO: 2611917 - DNA, 25 bp, Homo sapien
tactttgcttggtagttgagctctt

SEQ ID NO: 2611918 - DNA, 25 bp, Homo sapien
gacactacatcaagagttatcaagg

SEQ ID NO: 2611919 - DNA, 25 bp, Homo sapien
gttatcaaggtagcgtctaatgccc

SEQ ID NO: 2611920 - DNA, 25 bp, Homo sapien
gtagctttcacagtactttgcttgg

SEQ ID NO: 2611921 - DNA, 25 bp, Homo sapien
gcagcaaggcaagctgcttctttat

SEQ ID NO: 2611922 - DNA, 25 bp, Homo sapien
tgagctggcagagccaagccttgct

SEQ ID NO: 2611923 - DNA, 25 bp, Homo sapien
gcagggaggatgatctccagaggaa

SEQ ID NO: 2611924 - DNA, 25 bp, Homo sapien
cacagggacagagctttttctgagc

SEQ ID NO: 2611925 - DNA, 25 bp, Homo sapien
gacagtctgcggtgttcagggtcat

SEQ ID NO: 2611926 - DNA, 25 bp, Homo sapien
ttaggaggaacattcgacctggccc

SEQ ID NO: 2611927 - DNA, 25 bp, Homo sapien
tatttcacagcaggctacgcatggg

SEQ ID NO: 2611928 - DNA, 25 bp, Homo sapien
caagactttgaatacggtgattcca

SEQ ID NO: 2611929 - DNA, 25 bp, Homo sapien
tgagactttcatgcatgccgacaca

SEQ ID NO: 2611930 - DNA, 25 bp, Homo sapien
caaccatgtgccagttgtctgatta

SEQ ID NO: 2611931 - DNA, 25 bp, Homo sapien
taacatcagggatacacacagtagc

SEQ ID NO: 2611932 - DNA, 25 bp, Homo sapien
taattatacatgagctcaagttgtg

SEQ ID NO: 2611933 - DNA, 25 bp, Homo sapien
tcacatgcggtttaattgtgggagg

SEQ ID NO: 2611934 - DNA, 25 bp, Homo sapien
gagatcacatgcggtttaattgtgg

SEQ ID NO: 2611935 - DNA, 25 bp, Homo sapien
gatcacatgcggtttaattgtggga

SEQ ID NO: 2611936 - DNA, 25 bp, Homo sapien
acatgcggtttaattgtgggaggct

SEQ ID NO: 2611937 - DNA, 25 bp, Homo sapien
ggctgatcatgaactgcttcacgac

SEQ ID NO: 2611938 - DNA, 25 bp, Homo sapien
tgatcatgaactgcttcacgactgt

SEQ ID NO: 2611939 - DNA, 25 bp, Homo sapien
tgttgtgctgccaagcttgccatgt

SEQ ID NO: 2611940 - DNA, 25 bp, Homo sapien
gctgccaagcttgccatgtgtcatt

SEQ ID NO: 2611941 - DNA, 25 bp, Homo sapien
tccttctacgttctttggctgtagt

SEQ ID NO: 2611942 - DNA, 25 bp, Homo sapien
cctttaaactaaggatgggcttatg

SEQ ID NO: 2611943 - DNA, 25 bp, Homo sapien
ggctgtagttgcacctttaaactaa

SEQ ID NO: 2611944 - DNA, 25 bp, Homo sapien
taaggatgggcttatgcctattcat

SEQ ID NO: 2611945 - DNA, 25 bp, Homo sapien
tgtgtaggaccaagggacagatgcc

SEQ ID NO: 2611946 - DNA, 25 bp, Homo sapien
tgaaatgaagctagctggctgcagc

SEQ ID NO: 2611947 - DNA, 25 bp, Homo sapien
gatgccctgtgtcaaagccaacgag

SEQ ID NO: 2611948 - DNA, 25 bp, Homo sapien
gaaaccagagcgcagcctgtgtagg

SEQ ID NO: 2611949 - DNA, 25 bp, Homo sapien
gaggctctaggtgactgaaaacagc

SEQ ID NO: 2611950 - DNA, 25 bp, Homo sapien
gtatgaggctctaggtgactgaaaa

SEQ ID NO: 2611951 - DNA, 25 bp, Homo sapien
gctctaggtgactgaaaacagccat

SEQ ID NO: 2611952 - DNA, 25 bp, Homo sapien
tatgaggctctaggtgactgaaaac

SEQ ID NO: 2611953 - DNA, 25 bp, Homo sapien
gtcttcaacattgacctgttcttca

SEQ ID NO: 2611954 - DNA, 25 bp, Homo sapien
ttcaacattgacctgttcttcaccc

SEQ ID NO: 2611955 - DNA, 25 bp, Homo sapien
tggttgtcttcaacattgacctgtt

SEQ ID NO: 2611956 - DNA, 25 bp, Homo sapien
ggttgtcttcaacattgacctgttc

SEQ ID NO: 2611957 - DNA, 25 bp, Homo sapien
gtcatggtctcacatgtttctgtca

SEQ ID NO: 2611958 - DNA, 25 bp, Homo sapien
tgtcacttctacaagctctgcagca

SEQ ID NO: 2611959 - DNA, 25 bp, Homo sapien
catgatacttgcgtttgccactaag

SEQ ID NO: 2611960 - DNA, 25 bp, Homo sapien
ccagtagctacgcactgatgaggag

SEQ ID NO: 2611961 - DNA, 25 bp, Homo sapien
cacactcttgttggagtcagagggt

SEQ ID NO: 2611962 - DNA, 25 bp, Homo sapien
gacttcacactcttgttggagtcag

SEQ ID NO: 2611963 - DNA, 25 bp, Homo sapien
ttcacactcttgttggagtcagagg

SEQ ID NO: 2611964 - DNA, 25 bp, Homo sapien
acactcttgttggagtcagagggtt

SEQ ID NO: 2611965 - DNA, 25 bp, Homo sapien
ccctgacatgggatatgattggcct

SEQ ID NO: 2611966 - DNA, 25 bp, Homo sapien
ggcctttaatctgcactaccgctga

SEQ ID NO: 2611967 - DNA, 25 bp, Homo sapien
gatatgattggcctttaatctgcac

SEQ ID NO: 2611968 - DNA, 25 bp, Homo sapien
tgcactaccgctgaaacaggctcag

SEQ ID NO: 2611969 - DNA, 25 bp, Homo sapien
atgtgctcatacatttgtaacacct

SEQ ID NO: 2611970 - DNA, 25 bp, Homo sapien
ctcatacatttgtaacaccttcctc

SEQ ID NO: 2611971 - DNA, 25 bp, Homo sapien
tgtgctcatacatttgtaacacctt

SEQ ID NO: 2611972 - DNA, 25 bp, Homo sapien
tgctcatacatttgtaacaccttcc

SEQ ID NO: 2611973 - DNA, 25 bp, Homo sapien
ttctattaatggaactaatgctgaa

SEQ ID NO: 2611974 - DNA, 25 bp, Homo sapien
aaaccccagtgatactctggcggaa

SEQ ID NO: 2611975 - DNA, 25 bp, Homo sapien
aaccccagtgatactctggcggaag

SEQ ID NO: 2611976 - DNA, 25 bp, Homo sapien
taacactttctattaatggaactaa

SEQ ID NO: 2611977 - DNA, 25 bp, Homo sapien
gatattaggcatagcatcctgctgc

SEQ ID NO: 2611978 - DNA, 25 bp, Homo sapien
gggcctcagatctgcactggtgcag

SEQ ID NO: 2611979 - DNA, 25 bp, Homo sapien
tggtgcaggcagctttccactacaa

SEQ ID NO: 2611980 - DNA, 25 bp, Homo sapien
caatggtgatgttgagggagatatt

SEQ ID NO: 2611981 - DNA, 25 bp, Homo sapien
aagcatgttttccaacttgggtcca

SEQ ID NO: 2611982 - DNA, 25 bp, Homo sapien
ctcctggataatatcgtgaagcatg

SEQ ID NO: 2611983 - DNA, 25 bp, Homo sapien
ggtacagtaatcaaacataggtttc

SEQ ID NO: 2611984 - DNA, 25 bp, Homo sapien
cttgtatatgtttcatgaagttctt

SEQ ID NO: 2611985 - DNA, 25 bp, Homo sapien
cagtctgttactatggcaatgatca

SEQ ID NO: 2611986 - DNA, 25 bp, Homo sapien
ctgttactatggcaatgatcagcat

SEQ ID NO: 2611987 - DNA, 25 bp, Homo sapien
aacacagtctgttactatggcaatg

SEQ ID NO: 2611988 - DNA, 25 bp, Homo sapien
cacagtctgttactatggcaatgat

SEQ ID NO: 2611989 - DNA, 25 bp, Homo sapien
tcctttcaaactccaaacacttata

SEQ ID NO: 2611990 - DNA, 25 bp, Homo sapien
aatactgataatagcctaaatccac

SEQ ID NO: 2611991 - DNA, 25 bp, Homo sapien
taatagcctaaatccacgtctttcc

SEQ ID NO: 2611992 - DNA, 25 bp, Homo sapien
ccaaacacttatacggattatcttt

SEQ ID NO: 2611993 - DNA, 25 bp, Homo sapien
cagtttagcagggattcatcaagga

SEQ ID NO: 2611994 - DNA, 25 bp, Homo sapien
gagcataacttaagtctttattggt

SEQ ID NO: 2611995 - DNA, 25 bp, Homo sapien
cacctgacagtttagcagggattca

SEQ ID NO: 2611996 - DNA, 25 bp, Homo sapien
tattttgcacatacttcggagagag

SEQ ID NO: 2611997 - DNA, 25 bp, Homo sapien
agacaacacttctcacctacttcta

SEQ ID NO: 2611998 - DNA, 25 bp, Homo sapien
agtctgagcacctgtccatgggact

SEQ ID NO: 2611999 - DNA, 25 bp, Homo sapien
gcagtcagacaacacttctcaccta

SEQ ID NO: 2612000 - DNA, 25 bp, Homo sapien
gtcagacaacacttctcacctactt

SEQ ID NO: 2612001 - DNA, 25 bp, Homo sapien
tcccagatggagagctcacatttct

SEQ ID NO: 2612002 - DNA, 25 bp, Homo sapien
cccagatggagagctcacatttctt

SEQ ID NO: 2612003 - DNA, 25 bp, Homo sapien
tcagtttagtggatcagctatcgaa

SEQ ID NO: 2612004 - DNA, 25 bp, Homo sapien
gtttagtggatcagctatcgaatca

SEQ ID NO: 2612005 - DNA, 25 bp, Homo sapien
cagtttagtggatcagctatcgaat

SEQ ID NO: 2612006 - DNA, 25 bp, Homo sapien
tttagtggatcagctatcgaatcat

SEQ ID NO: 2612007 - DNA, 25 bp, Homo sapien
tgtactttctgctgcccaactggca

SEQ ID NO: 2612008 - DNA, 25 bp, Homo sapien
ttgtactttctgctgcccaactggc

SEQ ID NO: 2612009 - DNA, 25 bp, Homo sapien
gtactttctgctgcccaactggcat

SEQ ID NO: 2612010 - DNA, 25 bp, Homo sapien
tacaccactgaagtagcatgccacc

SEQ ID NO: 2612011 - DNA, 25 bp, Homo sapien
actggccgtagacacaggcgagcca

SEQ ID NO: 2612012 - DNA, 25 bp, Homo sapien
gaatcgagatgtgcgcagttgctgc

SEQ ID NO: 2612013 - DNA, 25 bp, Homo sapien
cagttgctgcatataagcactggcc

SEQ ID NO: 2612014 - DNA, 25 bp, Homo sapien
tgcagttactcaaaatggcaccctt

SEQ ID NO: 2612015 - DNA, 25 bp, Homo sapien
caatctgtttttcacgcgcactgta

SEQ ID NO: 2612016 - DNA, 25 bp, Homo sapien
cttcatgtggtttgcaacaatagct

SEQ ID NO: 2612017 - DNA, 25 bp, Homo sapien
cattttgtgggtgttgctcctggca

SEQ ID NO: 2612018 - DNA, 25 bp, Homo sapien
cattctgcagatttgggaagaccat

SEQ ID NO: 2612019 - DNA, 25 bp, Homo sapien
gatggcatcacccttatttactgac

SEQ ID NO: 2612020 - DNA, 25 bp, Homo sapien
taagaacagtatcttcgacacctct

SEQ ID NO: 2612021 - DNA, 25 bp, Homo sapien
tattcagctttctcccgatggcatc

SEQ ID NO: 2612022 - DNA, 25 bp, Homo sapien
tcagtcactcccgtaataagaacag

SEQ ID NO: 2612023 - DNA, 25 bp, Homo sapien
tatgcagaaaggaaggacagggttc

SEQ ID NO: 2612024 - DNA, 25 bp, Homo sapien
atgcagaaaggaaggacagggttca

SEQ ID NO: 2612025 - DNA, 25 bp, Homo sapien
ctatgcagaaaggaaggacagggtt

SEQ ID NO: 2612026 - DNA, 25 bp, Homo sapien
tgcagaaaggaaggacagggttcat

SEQ ID NO: 2612027 - DNA, 25 bp, Homo sapien
aggcactgctctccaagaattgtaa

SEQ ID NO: 2612028 - DNA, 25 bp, Homo sapien
taagttggaagttgcttgcttttca

SEQ ID NO: 2612029 - DNA, 25 bp, Homo sapien
ccaagaattgtaagttggaagttgc

SEQ ID NO: 2612030 - DNA, 25 bp, Homo sapien
tgctctccaagaattgtaagttgga

SEQ ID NO: 2612031 - DNA, 25 bp, Homo sapien
cagaagccttgtggtcagtttacca

SEQ ID NO: 2612032 - DNA, 25 bp, Homo sapien
tctctcacgaaccactccctctttc

SEQ ID NO: 2612033 - DNA, 25 bp, Homo sapien
ttctgtattgctttcagaagccttg

SEQ ID NO: 2612034 - DNA, 25 bp, Homo sapien
ccctctttcacaaaccactgccatg

SEQ ID NO: 2612035 - DNA, 25 bp, Homo sapien
tggttgttggctccccaggtaagta

SEQ ID NO: 2612036 - DNA, 25 bp, Homo sapien
caccattagtggttgttggctcccc

SEQ ID NO: 2612037 - DNA, 25 bp, Homo sapien
agtgcttagctactgtaccaattga

SEQ ID NO: 2612038 - DNA, 25 bp, Homo sapien
caattgagggattgtggttgacacc

SEQ ID NO: 2612039 - DNA, 25 bp, Homo sapien
ctgtgctttcaaggtcttatgcgta

SEQ ID NO: 2612040 - DNA, 25 bp, Homo sapien
gaagtcaagtattgtgatccctcct

SEQ ID NO: 2612041 - DNA, 25 bp, Homo sapien
tcacttttatatacagggagagaag

SEQ ID NO: 2612042 - DNA, 25 bp, Homo sapien
taaataaccaatgcatttcgggttc

SEQ ID NO: 2612043 - DNA, 25 bp, Homo sapien
atgcagaaagaccgtttgacaaata

SEQ ID NO: 2612044 - DNA, 25 bp, Homo sapien
tgcagaaagaccgtttgacaaatat

SEQ ID NO: 2612045 - DNA, 25 bp, Homo sapien
caagaagccttttcaggttattcat

SEQ ID NO: 2612046 - DNA, 25 bp, Homo sapien
aaggttttcagacaagcctgtagga

SEQ ID NO: 2612047 - DNA, 25 bp, Homo sapien
gcctgtaggatagggtcagccacat

SEQ ID NO: 2612048 - DNA, 25 bp, Homo sapien
tcaatacaccggaaaggttttcaga

SEQ ID NO: 2612049 - DNA, 25 bp, Homo sapien
tttcagacaagcctgtaggataggg

SEQ ID NO: 2612050 - DNA, 25 bp, Homo sapien
aaattgctatatgcacccactagag

SEQ ID NO: 2612051 - DNA, 25 bp, Homo sapien
tcttacctgcccctatgtagacatg

SEQ ID NO: 2612052 - DNA, 25 bp, Homo sapien
tgttgattctataaggtatggatga

SEQ ID NO: 2612053 - DNA, 25 bp, Homo sapien
ttatttgaatagacaagccagtttg

SEQ ID NO: 2612054 - DNA, 25 bp, Homo sapien
cacataattagcatctttctgtgtt

SEQ ID NO: 2612055 - DNA, 25 bp, Homo sapien
taagaattgtcacataattagcatc

SEQ ID NO: 2612056 - DNA, 25 bp, Homo sapien
attgtcacataattagcatctttct

SEQ ID NO: 2612057 - DNA, 25 bp, Homo sapien
cttttttctctaagaattgtcacat

SEQ ID NO: 2612058 - DNA, 25 bp, Homo sapien
attgtttgccctgttgaatatttgg

SEQ ID NO: 2612059 - DNA, 25 bp, Homo sapien
gcacacttgggcattgatcacatcc

SEQ ID NO: 2612060 - DNA, 25 bp, Homo sapien
gttagttgctgtaactcagagctta

SEQ ID NO: 2612061 - DNA, 25 bp, Homo sapien
ttttgcttgcgaagtgcacacttgg

SEQ ID NO: 2612062 - DNA, 25 bp, Homo sapien
gggggctttcatctttagcactact

SEQ ID NO: 2612063 - DNA, 25 bp, Homo sapien
tcatctttagcactactcttgtttt

SEQ ID NO: 2612064 - DNA, 25 bp, Homo sapien
agggggctttcatctttagcactac

SEQ ID NO: 2612065 - DNA, 25 bp, Homo sapien
catctttagcactactcttgttttc

SEQ ID NO: 2612066 - DNA, 25 bp, Homo sapien
agatggggtggggccattttatagg

SEQ ID NO: 2612067 - DNA, 25 bp, Homo sapien
cgaagggagatggggtggggccatt

SEQ ID NO: 2612068 - DNA, 25 bp, Homo sapien
tttttttttttgtgagcaacatggc

SEQ ID NO: 2612069 - DNA, 25 bp, Homo sapien
tgttctctggtgggcaggggtggat

SEQ ID NO: 2612070 - DNA, 25 bp, Homo sapien
cctctagctttgtaaggatggtcat

SEQ ID NO: 2612071 - DNA, 25 bp, Homo sapien
cttcctctagctttgtaaggatggt

SEQ ID NO: 2612072 - DNA, 25 bp, Homo sapien
tcctcatccacgtcttcctctagct

SEQ ID NO: 2612073 - DNA, 25 bp, Homo sapien
ctcaactcctcatccacgtcttcct

SEQ ID NO: 2612074 - DNA, 25 bp, Homo sapien
gactgcctcgcttacagaagtaggc

SEQ ID NO: 2612075 - DNA, 25 bp, Homo sapien
ttagtttatcgtttcataaccaagc

SEQ ID NO: 2612076 - DNA, 25 bp, Homo sapien
tgctttatgaggcaacttctccctg

SEQ ID NO: 2612077 - DNA, 25 bp, Homo sapien
cgtttcataaccaagctgaccacca

SEQ ID NO: 2612078 - DNA, 25 bp, Homo sapien
agtttcattcactctctcccttttt

SEQ ID NO: 2612079 - DNA, 25 bp, Homo sapien
tctcccttttttcaatttctctcat

SEQ ID NO: 2612080 - DNA, 25 bp, Homo sapien
ctagtttcattcactctctcccttt

SEQ ID NO: 2612081 - DNA, 25 bp, Homo sapien
tctctcccttttttcaatttctctc

SEQ ID NO: 2612082 - DNA, 25 bp, Homo sapien
acacagtcctaggaatgccagactt

SEQ ID NO: 2612083 - DNA, 25 bp, Homo sapien
atgcccattgacagtacagcaaagc

SEQ ID NO: 2612084 - DNA, 25 bp, Homo sapien
cagtcctaggaatgccagacttctt

SEQ ID NO: 2612085 - DNA, 25 bp, Homo sapien
gacagtacagcaaagcagcttgcca

SEQ ID NO: 2612086 - DNA, 25 bp, Homo sapien
gacccctttgacaattaggatgcca

SEQ ID NO: 2612087 - DNA, 25 bp, Homo sapien
tttgacccctttgacaattaggatg

SEQ ID NO: 2612088 - DNA, 25 bp, Homo sapien
cctttgacaattaggatgccattaa

SEQ ID NO: 2612089 - DNA, 25 bp, Homo sapien
aatgaaagccgtgtccaataaacca

SEQ ID NO: 2612090 - DNA, 25 bp, Homo sapien
tggagagtgttttgtcaagatcacg

SEQ ID NO: 2612091 - DNA, 25 bp, Homo sapien
tgacatgaagggaaagaagttggaa

SEQ ID NO: 2612092 - DNA, 25 bp, Homo sapien
ttgtggctaccagaattaattctgc

SEQ ID NO: 2612093 - DNA, 25 bp, Homo sapien
taattctgctgatacttcccaacca

SEQ ID NO: 2612094 - DNA, 25 bp, Homo sapien
tccaagctgcaccctcttattggtc

SEQ ID NO: 2612095 - DNA, 25 bp, Homo sapien
ttggtctcttaaatggggcaatgag

SEQ ID NO: 2612096 - DNA, 25 bp, Homo sapien
tctgcaatattccatacagtcttgt

SEQ ID NO: 2612097 - DNA, 25 bp, Homo sapien
tattccatacagtcttgtactccat

SEQ ID NO: 2612098 - DNA, 25 bp, Homo sapien
ccttgaggggtttgagttcctgatt

SEQ ID NO: 2612099 - DNA, 25 bp, Homo sapien
gaggggtttgagttcctgatttcca

SEQ ID NO: 2612100 - DNA, 25 bp, Homo sapien
ttgaggggtttgagttcctgatttc

SEQ ID NO: 2612101 - DNA, 25 bp, Homo sapien
aggggtttgagttcctgatttccat

SEQ ID NO: 2612102 - DNA, 25 bp, Homo sapien
tttgtttctgtcatcggcagggtgt

SEQ ID NO: 2612103 - DNA, 25 bp, Homo sapien
tcggcagggtgttagtcatggcaaa

SEQ ID NO: 2612104 - DNA, 25 bp, Homo sapien
tctgtcatcggcagggtgttagtca

SEQ ID NO: 2612105 - DNA, 25 bp, Homo sapien
tcatcggcagggtgttagtcatggc

SEQ ID NO: 2612106 - DNA, 25 bp, Homo sapien
aaaaggcggctgtaggatatagagt

SEQ ID NO: 2612107 - DNA, 25 bp, Homo sapien
tagaaaaggcggctgtaggatatag

SEQ ID NO: 2612108 - DNA, 25 bp, Homo sapien
ctgtaggatatagagtgagggcctt

SEQ ID NO: 2612109 - DNA, 25 bp, Homo sapien
gatatagagtgagggccttataaat

SEQ ID NO: 2612110 - DNA, 25 bp, Homo sapien
agtctattgctgagacgtgacagcg

SEQ ID NO: 2612111 - DNA, 25 bp, Homo sapien
tattgctgagacgtgacagcgtgct

SEQ ID NO: 2612112 - DNA, 25 bp, Homo sapien
caagagcagtctattgctgagacgt

SEQ ID NO: 2612113 - DNA, 25 bp, Homo sapien
gagcagtctattgctgagacgtgac

SEQ ID NO: 2612114 - DNA, 25 bp, Homo sapien
atactgattaccaacagattgcctg

SEQ ID NO: 2612115 - DNA, 25 bp, Homo sapien
tgattaccaacagattgcctgaggg

SEQ ID NO: 2612116 - DNA, 25 bp, Homo sapien
acagattgcctgagggaatcagggt

SEQ ID NO: 2612117 - DNA, 25 bp, Homo sapien
taccaacagattgcctgagggaatc

SEQ ID NO: 2612118 - DNA, 25 bp, Homo sapien
gatctcttgagactaggggttccag

SEQ ID NO: 2612119 - DNA, 25 bp, Homo sapien
atctcttgagactaggggttccagg

SEQ ID NO: 2612120 - DNA, 25 bp, Homo sapien
tctcttgagactaggggttccaggt

SEQ ID NO: 2612121 - DNA, 25 bp, Homo sapien
tcttgagactaggggttccaggttg

SEQ ID NO: 2612122 - DNA, 25 bp, Homo sapien
tattaattcaactcatttgactggg

SEQ ID NO: 2612123 - DNA, 25 bp, Homo sapien
gacatatccaacgattgaaaacttc

SEQ ID NO: 2612124 - DNA, 25 bp, Homo sapien
caattccagttgaacggcattagaa

SEQ ID NO: 2612125 - DNA, 25 bp, Homo sapien
tattgcagcactcttttgtagtaga

SEQ ID NO: 2612126 - DNA, 25 bp, Homo sapien
tttcctgtaactcttgtgatctcct

SEQ ID NO: 2612127 - DNA, 25 bp, Homo sapien
tcctgggcccttgtgcgtcacctgg

SEQ ID NO: 2612128 - DNA, 25 bp, Homo sapien
tcacctgggttggaggattatccat

SEQ ID NO: 2612129 - DNA, 25 bp, Homo sapien
gtaactcttgtgatctcctgggccc

SEQ ID NO: 2612130 - DNA, 25 bp, Homo sapien
gtggcccatggcaagccactggtct

SEQ ID NO: 2612131 - DNA, 25 bp, Homo sapien
tggcccatggcaagccactggtcta

SEQ ID NO: 2612132 - DNA, 25 bp, Homo sapien
taataccaccctgaatcccaaatgt

SEQ ID NO: 2612133 - DNA, 25 bp, Homo sapien
gaactaatatcatgctatccagatt

SEQ ID NO: 2612134 - DNA, 25 bp, Homo sapien
tgatagcctgactctacaaagccct

SEQ ID NO: 2612135 - DNA, 25 bp, Homo sapien
tcaatgaaagatgtaatcatctggc

SEQ ID NO: 2612136 - DNA, 25 bp, Homo sapien
gatgtgagataatcacaaaaagtga

SEQ ID NO: 2612137 - DNA, 25 bp, Homo sapien
agatgtgagataatcacaaaaagtg

SEQ ID NO: 2612138 - DNA, 25 bp, Homo sapien
gagatgtgagataatcacaaaaagt

SEQ ID NO: 2612139 - DNA, 25 bp, Homo sapien
gtcattataaggagtatgcattagt

SEQ ID NO: 2612140 - DNA, 25 bp, Homo sapien
gccaaattgcttgtcaacgtagttg

SEQ ID NO: 2612141 - DNA, 25 bp, Homo sapien
gccatataaaattggttgctccaca

SEQ ID NO: 2612142 - DNA, 25 bp, Homo sapien
gcattagtatccagtagcagtttaa

SEQ ID NO: 2612143 - DNA, 25 bp, Homo sapien
tgtggttgagtctgcttagctttgc

SEQ ID NO: 2612144 - DNA, 25 bp, Homo sapien
tctcatccacgtgccttctcatttt

SEQ ID NO: 2612145 - DNA, 25 bp, Homo sapien
tgcttagctttgcttggatctcatc

SEQ ID NO: 2612146 - DNA, 25 bp, Homo sapien
gctttgcttggatctcatccacgtg

SEQ ID NO: 2612147 - DNA, 25 bp, Homo sapien
tagcttcaggtgttctgcggttact

SEQ ID NO: 2612148 - DNA, 25 bp, Homo sapien
tatggcatatgctcttacttgtggg

SEQ ID NO: 2612149 - DNA, 25 bp, Homo sapien
gaatcctgggattaacttccacata

SEQ ID NO: 2612150 - DNA, 25 bp, Homo sapien
ccatggaatgctcacactgggatga

SEQ ID NO: 2612151 - DNA, 25 bp, Homo sapien
tttgaagccacctatatgatgcccc

SEQ ID NO: 2612152 - DNA, 25 bp, Homo sapien
gccagctgcaacataccagtggtta

SEQ ID NO: 2612153 - DNA, 25 bp, Homo sapien
gaagagatgcacagttagccctccc

SEQ ID NO: 2612154 - DNA, 25 bp, Homo sapien
ggtctaacaaccaactcactgagaa

SEQ ID NO: 2612155 - DNA, 25 bp, Homo sapien
taacggcatgcatgttgaagaggag

SEQ ID NO: 2612156 - DNA, 25 bp, Homo sapien
tcggagcagctcagaactatctttg

SEQ ID NO: 2612157 - DNA, 25 bp, Homo sapien
gcattttttcggagcagctcagaac

SEQ ID NO: 2612158 - DNA, 25 bp, Homo sapien
cagctcagaactatctttgatgtag

SEQ ID NO: 2612159 - DNA, 25 bp, Homo sapien
ttcatttctaactggagtggcacat

SEQ ID NO: 2612160 - DNA, 25 bp, Homo sapien
cttcatttctaactggagtggcaca

SEQ ID NO: 2612161 - DNA, 25 bp, Homo sapien
ctgctacttggtcgaagctaagaac

SEQ ID NO: 2612162 - DNA, 25 bp, Homo sapien
tgccaagggcaagtcatacctagtt

SEQ ID NO: 2612163 - DNA, 25 bp, Homo sapien
gccaaaatgtcagtggtcaatcaac

SEQ ID NO: 2612164 - DNA, 25 bp, Homo sapien
caattacactgagttggaatcacag

SEQ ID NO: 2612165 - DNA, 25 bp, Homo sapien
aaccagtgatttcaggaaacttgcc

SEQ ID NO: 2612166 - DNA, 25 bp, Homo sapien
gttattgccgaaattgaatgcactt

SEQ ID NO: 2612167 - DNA, 25 bp, Homo sapien
ctgttattgccgaaattgaatgcac

SEQ ID NO: 2612168 - DNA, 25 bp, Homo sapien
ccactatggatttgcccacacatta

SEQ ID NO: 2612169 - DNA, 25 bp, Homo sapien
ggatttgcccacacattactgttat

SEQ ID NO: 2612170 - DNA, 25 bp, Homo sapien
ttgggtggatgcactttaggtcccc

SEQ ID NO: 2612171 - DNA, 25 bp, Homo sapien
ctggcgtttgggtggatgcacttta

SEQ ID NO: 2612172 - DNA, 25 bp, Homo sapien
ggtcttaccactcttaacattctca

SEQ ID NO: 2612173 - DNA, 25 bp, Homo sapien
tcataactcatgagcagtttccaac

SEQ ID NO: 2612174 - DNA, 25 bp, Homo sapien
tccctgagaggtaagtgaggaaacc

SEQ ID NO: 2612175 - DNA, 25 bp, Homo sapien
ctagaatggggtccctgagaggtaa

SEQ ID NO: 2612176 - DNA, 25 bp, Homo sapien
ctgagaggtaagtgaggaaaccctg

SEQ ID NO: 2612177 - DNA, 25 bp, Homo sapien
ggtccctgagaggtaagtgaggaaa

SEQ ID NO: 2612178 - DNA, 25 bp, Homo sapien
gtgggctctaactattcaactgata

SEQ ID NO: 2612179 - DNA, 25 bp, Homo sapien
aactgataggaagagtcacatgccc

SEQ ID NO: 2612180 - DNA, 25 bp, Homo sapien
tacctgacagttagccaagcagtga

SEQ ID NO: 2612181 - DNA, 25 bp, Homo sapien
caattaatagacctacagtgggctc

SEQ ID NO: 2612182 - DNA, 25 bp, Homo sapien
tgttatcaagaggtgaccaacaacc

SEQ ID NO: 2612183 - DNA, 25 bp, Homo sapien
gatgttgtcatcaaacccaggttca

SEQ ID NO: 2612184 - DNA, 25 bp, Homo sapien
aaagcaggtttatctggagagccag

SEQ ID NO: 2612185 - DNA, 25 bp, Homo sapien
gctcactttcggtttgggtgtcaca

SEQ ID NO: 2612186 - DNA, 25 bp, Homo sapien
taggcgtgccttgatgccagagctt

SEQ ID NO: 2612187 - DNA, 25 bp, Homo sapien
gattttgggcctgagatctatctcc

SEQ ID NO: 2612188 - DNA, 25 bp, Homo sapien
cagagctttatgttccgagccctgc

SEQ ID NO: 2612189 - DNA, 25 bp, Homo sapien
ttagccctgatagccttaggcgtgc

SEQ ID NO: 2612190 - DNA, 25 bp, Homo sapien
tgcgttgcctgactcgacacagaag

SEQ ID NO: 2612191 - DNA, 25 bp, Homo sapien
cctatgacggttgtttgcagggctc

SEQ ID NO: 2612192 - DNA, 25 bp, Homo sapien
tctgagctgcgacagcctggttgcg

SEQ ID NO: 2612193 - DNA, 25 bp, Homo sapien
tggaggtcagaatgcctcttcgccg

SEQ ID NO: 2612194 - DNA, 25 bp, Homo sapien
tacatgtattttgactagcagccgc

SEQ ID NO: 2612195 - DNA, 25 bp, Homo sapien
tctctgagggagaacctggcgttaa

SEQ ID NO: 2612196 - DNA, 25 bp, Homo sapien
gcccagatgcatggcttggcccaga

SEQ ID NO: 2612197 - DNA, 25 bp, Homo sapien
cagaacgatgctgcttcggcgagca

SEQ ID NO: 2612198 - DNA, 25 bp, Homo sapien
ttcttaagactagggcatagatgac

SEQ ID NO: 2612199 - DNA, 25 bp, Homo sapien
caaaggaagtcatgtggtcaaacca

SEQ ID NO: 2612200 - DNA, 25 bp, Homo sapien
ttggcccagaataagagtgcatcat

SEQ ID NO: 2612201 - DNA, 25 bp, Homo sapien
tcaggtaggttcaccagatggcaag

SEQ ID NO: 2612202 - DNA, 25 bp, Homo sapien
ggtgtttaacactatcctggttgaa

SEQ ID NO: 2612203 - DNA, 25 bp, Homo sapien
tgaaccaaagtcgttacctctggac

SEQ ID NO: 2612204 - DNA, 25 bp, Homo sapien
ccctgaaccaaagtcgttacctctg

SEQ ID NO: 2612205 - DNA, 25 bp, Homo sapien
caaaatatcacttggtgtttaacac

SEQ ID NO: 2612206 - DNA, 25 bp, Homo sapien
gctcttcaggaggctgaggcaggag

SEQ ID NO: 2612207 - DNA, 25 bp, Homo sapien
atcccagctcttcaggaggctgagg

SEQ ID NO: 2612208 - DNA, 25 bp, Homo sapien
gccgggtgtagtggcagagcctgta

SEQ ID NO: 2612209 - DNA, 25 bp, Homo sapien
ttagccgggtgtagtggcagagcct

SEQ ID NO: 2612210 - DNA, 25 bp, Homo sapien
cttccaggtcgcagcttgcaaagcc

SEQ ID NO: 2612211 - DNA, 25 bp, Homo sapien
ttcttgttgatatggttgctattgc

SEQ ID NO: 2612212 - DNA, 25 bp, Homo sapien
cagttctccttccaggtcgcagctt

SEQ ID NO: 2612213 - DNA, 25 bp, Homo sapien
ttctccttccaggtcgcagcttgca

SEQ ID NO: 2612214 - DNA, 25 bp, Homo sapien
tcctccacatgctgttgtgcgtgca

SEQ ID NO: 2612215 - DNA, 25 bp, Homo sapien
gttgtgcgtgcaagaaaactcttat

SEQ ID NO: 2612216 - DNA, 25 bp, Homo sapien
tattgaagttttggatgaacagaat

SEQ ID NO: 2612217 - DNA, 25 bp, Homo sapien
tcttattgaagttttggatgaacag

SEQ ID NO: 2612218 - DNA, 25 bp, Homo sapien
tttagccattaaatgactgttgtca

SEQ ID NO: 2612219 - DNA, 25 bp, Homo sapien
tagtctcccgcgtaaatatgggtac

SEQ ID NO: 2612220 - DNA, 25 bp, Homo sapien
taatgttttgggtaccacatgttta

SEQ ID NO: 2612221 - DNA, 25 bp, Homo sapien
tttgctggaactgctagtctcccgc

SEQ ID NO: 2612222 - DNA, 25 bp, Homo sapien
tgattttggaatccgtacttgcaca

SEQ ID NO: 2612223 - DNA, 25 bp, Homo sapien
gttgattttggaatccgtacttgca

SEQ ID NO: 2612224 - DNA, 25 bp, Homo sapien
ttttggaatccgtacttgcacacat

SEQ ID NO: 2612225 - DNA, 25 bp, Homo sapien
ctttaataatgtccaactctttgag

SEQ ID NO: 2612226 - DNA, 25 bp, Homo sapien
aacataacaccattgatcagaggag

SEQ ID NO: 2612227 - DNA, 25 bp, Homo sapien
ttattgatggttgaggtcctggttg

SEQ ID NO: 2612228 - DNA, 25 bp, Homo sapien
gaggtcctggttgtcaaacataaca

SEQ ID NO: 2612229 - DNA, 25 bp, Homo sapien
attgatcagaggagatttggagatt

SEQ ID NO: 2612230 - DNA, 25 bp, Homo sapien
gcttgtgtatttagctgtctgtgca

SEQ ID NO: 2612231 - DNA, 25 bp, Homo sapien
tgttctcttcagtggttgaacttct

SEQ ID NO: 2612232 - DNA, 25 bp, Homo sapien
tagctgtctgtgcaacaatgtcttt

SEQ ID NO: 2612233 - DNA, 25 bp, Homo sapien
gtatttagctgtctgtgcaacaatg

SEQ ID NO: 2612234 - DNA, 25 bp, Homo sapien
acttttattggatcagctatgtgta

SEQ ID NO: 2612235 - DNA, 25 bp, Homo sapien
cgttaatggtccatgcatttatgaa

SEQ ID NO: 2612236 - DNA, 25 bp, Homo sapien
ttggatcagctatgtgtatgaaatc

SEQ ID NO: 2612237 - DNA, 25 bp, Homo sapien
ttccacatagctttcgttaatggtc

SEQ ID NO: 2612238 - DNA, 25 bp, Homo sapien
ttgatggcttgggtgtgacttcagg

SEQ ID NO: 2612239 - DNA, 25 bp, Homo sapien
cttgatggcttgggtgtgacttcag

SEQ ID NO: 2612240 - DNA, 25 bp, Homo sapien
catcgacgtcatgtagcattagcaa

SEQ ID NO: 2612241 - DNA, 25 bp, Homo sapien
ctcctgtggatctgccttgaagtgg

SEQ ID NO: 2612242 - DNA, 25 bp, Homo sapien
ccatagttaccaccagaagtaaaat

SEQ ID NO: 2612243 - DNA, 25 bp, Homo sapien
aagtaaaatataactcctgtggatc

SEQ ID NO: 2612244 - DNA, 25 bp, Homo sapien
caactgccgtttgtagatagggtcc

SEQ ID NO: 2612245 - DNA, 25 bp, Homo sapien
gctgcagctgcacctaattgattga

SEQ ID NO: 2612246 - DNA, 25 bp, Homo sapien
caatagagaaagtcgagcatcccac

SEQ ID NO: 2612247 - DNA, 25 bp, Homo sapien
aaactgatcctgttgcagacaaggc

SEQ ID NO: 2612248 - DNA, 25 bp, Homo sapien
ctgaaacaccaaggagtctgcctgc

SEQ ID NO: 2612249 - DNA, 25 bp, Homo sapien
tgaaacaccaaggagtctgcctgct

SEQ ID NO: 2612250 - DNA, 25 bp, Homo sapien
gaaacaccaaggagtctgcctgctt

SEQ ID NO: 2612251 - DNA, 25 bp, Homo sapien
aacaccaaggagtctgcctgctttg

SEQ ID NO: 2612252 - DNA, 25 bp, Homo sapien
gttaaattcactacctcaatgctgc

SEQ ID NO: 2612253 - DNA, 25 bp, Homo sapien
gctgctgccacattcacttccaaag

SEQ ID NO: 2612254 - DNA, 25 bp, Homo sapien
tctcagttaaattcactacctcaat

SEQ ID NO: 2612255 - DNA, 25 bp, Homo sapien
caaacatggtatggttctagctgct

SEQ ID NO: 2612256 - DNA, 25 bp, Homo sapien
caccttcgatatgtttccacagtaa

SEQ ID NO: 2612257 - DNA, 25 bp, Homo sapien
aaccaccttcgatatgtttccacag

SEQ ID NO: 2612258 - DNA, 25 bp, Homo sapien
tacttaaccaccttcgatatgtttc

SEQ ID NO: 2612259 - DNA, 25 bp, Homo sapien
tatgatcaatcatacttaaccacct

SEQ ID NO: 2612260 - DNA, 25 bp, Homo sapien
tcatggcccctttatacagaatctg

SEQ ID NO: 2612261 - DNA, 25 bp, Homo sapien
gaaagcaatctttcacgttcctttg

SEQ ID NO: 2612262 - DNA, 25 bp, Homo sapien
cctttgctatttaataggtaattca

SEQ ID NO: 2612263 - DNA, 25 bp, Homo sapien
ctatgttccaccatctgatagatat

SEQ ID NO: 2612264 - DNA, 25 bp, Homo sapien
taagggtctggttcacaacatcaga

SEQ ID NO: 2612265 - DNA, 25 bp, Homo sapien
gacaggaaagcattgcccttggaaa

SEQ ID NO: 2612266 - DNA, 25 bp, Homo sapien
tcaagtccttagacaaagatctggg

SEQ ID NO: 2612267 - DNA, 25 bp, Homo sapien
caacatcagatatgttcccaaagcc

SEQ ID NO: 2612268 - DNA, 25 bp, Homo sapien
atgaaagaaatagggacatcagtgt

SEQ ID NO: 2612269 - DNA, 25 bp, Homo sapien
tatgaaagaaatagggacatcagtg

SEQ ID NO: 2612270 - DNA, 25 bp, Homo sapien
gaaagaaatagggacatcagtgttt

SEQ ID NO: 2612271 - DNA, 25 bp, Homo sapien
tctccgtaacagcatagtagtgaac

SEQ ID NO: 2612272 - DNA, 25 bp, Homo sapien
tctctcgtagccatctccgtaacag

SEQ ID NO: 2612273 - DNA, 25 bp, Homo sapien
gtagtgaacatgactgacccactga

SEQ ID NO: 2612274 - DNA, 25 bp, Homo sapien
tggttccactctctcgtagccatct

SEQ ID NO: 2612275 - DNA, 25 bp, Homo sapien
agacttcaagctaaacatgctgtcc

SEQ ID NO: 2612276 - DNA, 25 bp, Homo sapien
gggagttctcacaacagtggtagct

SEQ ID NO: 2612277 - DNA, 25 bp, Homo sapien
caagctaaacatgctgtccacagta

SEQ ID NO: 2612278 - DNA, 25 bp, Homo sapien
tcacaacagtggtagctatgatggg

SEQ ID NO: 2612279 - DNA, 25 bp, Homo sapien
caaggaactgcgttgttaccagggt

SEQ ID NO: 2612280 - DNA, 25 bp, Homo sapien
taagtatgtcccacatatggcaacc

SEQ ID NO: 2612281 - DNA, 25 bp, Homo sapien
taatgctgcatgctgtaccagcaga

SEQ ID NO: 2612282 - DNA, 25 bp, Homo sapien
tatggcaaccctagtggtcagtgtt

SEQ ID NO: 2612283 - DNA, 25 bp, Homo sapien
cacaaaaatgtggatttggctttat

SEQ ID NO: 2612284 - DNA, 25 bp, Homo sapien
ggctttattattgtttgcacactgc

SEQ ID NO: 2612285 - DNA, 25 bp, Homo sapien
tgctcatcacaaatgaatacttcat

SEQ ID NO: 2612286 - DNA, 25 bp, Homo sapien
tattgtttgcacactgctcatcaca

SEQ ID NO: 2612287 - DNA, 25 bp, Homo sapien
tttaatacagcagcagtttgtcagg

SEQ ID NO: 2612288 - DNA, 25 bp, Homo sapien
tctttaatacagcagcagtttgtca

SEQ ID NO: 2612289 - DNA, 25 bp, Homo sapien
ttaatacagcagcagtttgtcagga

SEQ ID NO: 2612290 - DNA, 25 bp, Homo sapien
ctttaatacagcagcagtttgtcag

SEQ ID NO: 2612291 - DNA, 25 bp, Homo sapien
ctggtgaacctaataagagtgcgag

SEQ ID NO: 2612292 - DNA, 25 bp, Homo sapien
taagagtgcgagataatcatgcagc

SEQ ID NO: 2612293 - DNA, 25 bp, Homo sapien
tgaacctaataagagtgcgagataa

SEQ ID NO: 2612294 - DNA, 25 bp, Homo sapien
cctaataagagtgcgagataatcat

SEQ ID NO: 2612295 - DNA, 25 bp, Homo sapien
cagactatttgtaaagatagattcc

SEQ ID NO: 2612296 - DNA, 25 bp, Homo sapien
tcgatgatcaagaattgagacactt

SEQ ID NO: 2612297 - DNA, 25 bp, Homo sapien
gggtcgatgatcaagaattgagaca

SEQ ID NO: 2612298 - DNA, 25 bp, Homo sapien
gatcaagaattgagacactttgttg

SEQ ID NO: 2612299 - DNA, 25 bp, Homo sapien
aattgagacactttgttgtcatgca

SEQ ID NO: 2612300 - DNA, 25 bp, Homo sapien
ttaggacacttgcttctgatcagca

SEQ ID NO: 2612301 - DNA, 25 bp, Homo sapien
cctggacacaaaggcttgtccttac

SEQ ID NO: 2612302 - DNA, 25 bp, Homo sapien
acactgctctccacgtcagcctgga

SEQ ID NO: 2612303 - DNA, 25 bp, Homo sapien
gatcagcatctctcagaaactgcac

SEQ ID NO: 2612304 - DNA, 25 bp, Homo sapien
tatccatctcttttccacttcctgt

SEQ ID NO: 2612305 - DNA, 25 bp, Homo sapien
cttttccacttcctgtcctgcattg

SEQ ID NO: 2612306 - DNA, 25 bp, Homo sapien
ttccacttcctgtcctgcattgatt

SEQ ID NO: 2612307 - DNA, 25 bp, Homo sapien
ttatccatctcttttccacttcctg

SEQ ID NO: 2612308 - DNA, 25 bp, Homo sapien
ttgagagagttgttctggcagtgac

SEQ ID NO: 2612309 - DNA, 25 bp, Homo sapien
gctccctgctgagggtttcgttttg

SEQ ID NO: 2612310 - DNA, 25 bp, Homo sapien
gttctggcagtgacatcttccgaga

SEQ ID NO: 2612311 - DNA, 25 bp, Homo sapien
ctgctgagggtttcgttttgtttgt

SEQ ID NO: 2612312 - DNA, 25 bp, Homo sapien
tggttcattccatgccaagagggta

SEQ ID NO: 2612313 - DNA, 25 bp, Homo sapien
tagtcgccctattgtgttaccaaac

SEQ ID NO: 2612314 - DNA, 25 bp, Homo sapien
taccctgaggtaatgtattatctgc

SEQ ID NO: 2612315 - DNA, 25 bp, Homo sapien
tattatctgcatctagacacagtgg

SEQ ID NO: 2612316 - DNA, 25 bp, Homo sapien
gagaaaggaaacatgaccgctgccc

SEQ ID NO: 2612317 - DNA, 25 bp, Homo sapien
gaaaggaaacatgaccgctgcccat

SEQ ID NO: 2612318 - DNA, 25 bp, Homo sapien
ctggtggtaagctggccagttatcc

SEQ ID NO: 2612319 - DNA, 25 bp, Homo sapien
gctggccagttatcctgagaaagga

SEQ ID NO: 2612320 - DNA, 25 bp, Homo sapien
atcactgtcagtcatccgttttaca

SEQ ID NO: 2612321 - DNA, 25 bp, Homo sapien
ctgtcagtcatccgttttacagaca

SEQ ID NO: 2612322 - DNA, 25 bp, Homo sapien
tgggacagacatagaatcgacattc

SEQ ID NO: 2612323 - DNA, 25 bp, Homo sapien
tccaggcacacttgggcaggcgttg

SEQ ID NO: 2612324 - DNA, 25 bp, Homo sapien
ggtaggcctgctcctatgactctgc

SEQ ID NO: 2612325 - DNA, 25 bp, Homo sapien
tagtggctctactggtctatggtca

SEQ ID NO: 2612326 - DNA, 25 bp, Homo sapien
taattctgtaagagctccatcctca

SEQ ID NO: 2612327 - DNA, 25 bp, Homo sapien
gctgagggctacttcaagaatcttt

SEQ ID NO: 2612328 - DNA, 25 bp, Homo sapien
ttctcagtgctctcacatggtggaa

SEQ ID NO: 2612329 - DNA, 25 bp, Homo sapien
gatcttatgtctgtgaacctgttcc

SEQ ID NO: 2612330 - DNA, 25 bp, Homo sapien
tgcagcaatagcagaaaagggcaga

SEQ ID NO: 2612331 - DNA, 25 bp, Homo sapien
gaggacacttaatctggcttcaggc

SEQ ID NO: 2612332 - DNA, 25 bp, Homo sapien
ggagcaggaggacacttaatctggc

SEQ ID NO: 2612333 - DNA, 25 bp, Homo sapien
gcaatagcagaaaagggcagaagga

SEQ ID NO: 2612334 - DNA, 25 bp, Homo sapien
atgacggccttgccagaagtgtctg

SEQ ID NO: 2612335 - DNA, 25 bp, Homo sapien
catgacggccttgccagaagtgtct

SEQ ID NO: 2612336 - DNA, 25 bp, Homo sapien
tcatgacggccttgccagaagtgtc

SEQ ID NO: 2612337 - DNA, 25 bp, Homo sapien
ctctcagttgtagggaaaaatatga

SEQ ID NO: 2612338 - DNA, 25 bp, Homo sapien
tctcagttgtagggaaaaatatgaa

SEQ ID NO: 2612339 - DNA, 25 bp, Homo sapien
ttctctcagttgtagggaaaaatat

SEQ ID NO: 2612340 - DNA, 25 bp, Homo sapien
tctctcagttgtagggaaaaatatg

SEQ ID NO: 2612341 - DNA, 25 bp, Homo sapien
ttgtgacctcgaatgagaaaatgtt

SEQ ID NO: 2612342 - DNA, 25 bp, Homo sapien
ctacttcttagtgcctaactgggct

SEQ ID NO: 2612343 - DNA, 25 bp, Homo sapien
tgcctaactgggctttattcaactt

SEQ ID NO: 2612344 - DNA, 25 bp, Homo sapien
tcttttttgtgacctcgaatgagaa

SEQ ID NO: 2612345 - DNA, 25 bp, Homo sapien
tagagattaggtgcttgttgtaaca

SEQ ID NO: 2612346 - DNA, 25 bp, Homo sapien
tgtacactatagagattaggtgctt

SEQ ID NO: 2612347 - DNA, 25 bp, Homo sapien
ttggaaagcttttgtacactataga

SEQ ID NO: 2612348 - DNA, 25 bp, Homo sapien
ggtgcttgttgtaacaggattgtgc

SEQ ID NO: 2612349 - DNA, 25 bp, Homo sapien
gccttttgaatgtcttctaatcttg

SEQ ID NO: 2612350 - DNA, 25 bp, Homo sapien
aggtagatgttattgatgtgcttga

SEQ ID NO: 2612351 - DNA, 25 bp, Homo sapien
tgtgcttgaaagaagtttgcctttt

SEQ ID NO: 2612352 - DNA, 25 bp, Homo sapien
tttgaatgtcttctaatcttgttca

SEQ ID NO: 2612353 - DNA, 25 bp, Homo sapien
acgtctgtctcttcaaggggttgac

SEQ ID NO: 2612354 - DNA, 25 bp, Homo sapien
gtctgtctcttcaaggggttgacca

SEQ ID NO: 2612355 - DNA, 25 bp, Homo sapien
tctgtctcttcaaggggttgaccat

SEQ ID NO: 2612356 - DNA, 25 bp, Homo sapien
cgtctgtctcttcaaggggttgacc

SEQ ID NO: 2612357 - DNA, 25 bp, Homo sapien
gaaaagggcgttgctgtggagtcag

SEQ ID NO: 2612358 - DNA, 25 bp, Homo sapien
tcactgcccaccgggccagtgccca

SEQ ID NO: 2612359 - DNA, 25 bp, Homo sapien
aggaaaagggcgttgctgtggagtc

SEQ ID NO: 2612360 - DNA, 25 bp, Homo sapien
ggctcactgcccaccgggccagtgc

SEQ ID NO: 2612361 - DNA, 25 bp, Homo sapien
tgtctgtccactacagccagtgcag

SEQ ID NO: 2612362 - DNA, 25 bp, Homo sapien
tcgtgccacaacttgatgccctggg

SEQ ID NO: 2612363 - DNA, 25 bp, Homo sapien
ttcacaatgggtctctgcggctcgt

SEQ ID NO: 2612364 - DNA, 25 bp, Homo sapien
ggtgtgggcaatctaccaccatgca

SEQ ID NO: 2612365 - DNA, 25 bp, Homo sapien
agctggagtggcagcagttggtggg

SEQ ID NO: 2612366 - DNA, 25 bp, Homo sapien
ctggagtggcagcagttggtgggca

SEQ ID NO: 2612367 - DNA, 25 bp, Homo sapien
gctggagtggcagcagttggtgggc

SEQ ID NO: 2612368 - DNA, 25 bp, Homo sapien
tggagtggcagcagttggtgggcac

SEQ ID NO: 2612369 - DNA, 25 bp, Homo sapien
aggccccttgttgggagaggtagtg

SEQ ID NO: 2612370 - DNA, 25 bp, Homo sapien
gccccttgttgggagaggtagtgac

SEQ ID NO: 2612371 - DNA, 25 bp, Homo sapien
ggccccttgttgggagaggtagtga

SEQ ID NO: 2612372 - DNA, 25 bp, Homo sapien
caggccccttgttgggagaggtagt

SEQ ID NO: 2612373 - DNA, 25 bp, Homo sapien
tccaggaagactcttagcatgctca

SEQ ID NO: 2612374 - DNA, 25 bp, Homo sapien
tcgcaagaatgacctgcttccactg

SEQ ID NO: 2612375 - DNA, 25 bp, Homo sapien
gaattttgtggtcagtggctttccc

SEQ ID NO: 2612376 - DNA, 25 bp, Homo sapien
tagtccgtcttgacccatcgcaaga

SEQ ID NO: 2612377 - DNA, 25 bp, Homo sapien
gctctgaggacagatggatgggagt

SEQ ID NO: 2612378 - DNA, 25 bp, Homo sapien
ctgctctgaggacagatggatggga

SEQ ID NO: 2612379 - DNA, 25 bp, Homo sapien
tgctctgaggacagatggatgggag

SEQ ID NO: 2612380 - DNA, 25 bp, Homo sapien
agctccaagacctgcttggagttgg

SEQ ID NO: 2612381 - DNA, 25 bp, Homo sapien
ctatagctccaagacctgcttggag

SEQ ID NO: 2612382 - DNA, 25 bp, Homo sapien
ctccaagacctgcttggagttggca

SEQ ID NO: 2612383 - DNA, 25 bp, Homo sapien
ccaagacctgcttggagttggcaaa

SEQ ID NO: 2612384 - DNA, 25 bp, Homo sapien
agctttccttagagcgttgtacgtc

SEQ ID NO: 2612385 - DNA, 25 bp, Homo sapien
gagcgttgtacgtcctctaatttca

SEQ ID NO: 2612386 - DNA, 25 bp, Homo sapien
tgagacgatgcaactgagctttcct

SEQ ID NO: 2612387 - DNA, 25 bp, Homo sapien
atctttttgagacgatgcaactgag

SEQ ID NO: 2612388 - DNA, 25 bp, Homo sapien
aatactcgacactcgcattttcagg

SEQ ID NO: 2612389 - DNA, 25 bp, Homo sapien
gacactcgcattttcaggaactgcg

SEQ ID NO: 2612390 - DNA, 25 bp, Homo sapien
caggaactgcgttataatccttttc

SEQ ID NO: 2612391 - DNA, 25 bp, Homo sapien
tctgcttatctttgaatactcgaca

SEQ ID NO: 2612392 - DNA, 25 bp, Homo sapien
ctttcaaactgtcagggacagccat

SEQ ID NO: 2612393 - DNA, 25 bp, Homo sapien
acacagtggtggtgtgggcagaggt

SEQ ID NO: 2612394 - DNA, 25 bp, Homo sapien
gagctgaggaggaggcgcaagttca

SEQ ID NO: 2612395 - DNA, 25 bp, Homo sapien
ggaggaggcgcaagttcagagtcat

SEQ ID NO: 2612396 - DNA, 25 bp, Homo sapien
agccagaggccctgaaagacacagt

SEQ ID NO: 2612397 - DNA, 25 bp, Homo sapien
tagaaggaagagctcttatccccat

SEQ ID NO: 2612398 - DNA, 25 bp, Homo sapien
agaacaatagcactagaaggaagag

SEQ ID NO: 2612399 - DNA, 25 bp, Homo sapien
agatgaagaacaatagcactagaag

SEQ ID NO: 2612400 - DNA, 25 bp, Homo sapien
aacaagatgaagaacaatagcacta

SEQ ID NO: 2612401 - DNA, 25 bp, Homo sapien
tagaagaaagagctcttatccccat

SEQ ID NO: 2612402 - DNA, 25 bp, Homo sapien
cagcactagaagaaagagctcttat

SEQ ID NO: 2612403 - DNA, 25 bp, Homo sapien
aaacaagatgaagaacaacagcact

SEQ ID NO: 2612404 - DNA, 25 bp, Homo sapien
acaacagcactagaagaaagagctc

SEQ ID NO: 2612405 - DNA, 25 bp, Homo sapien
tcagacgctgtcttcatcttcttgc

SEQ ID NO: 2612406 - DNA, 25 bp, Homo sapien
gacgctgtcttcatcttcttgcctt

SEQ ID NO: 2612407 - DNA, 25 bp, Homo sapien
cgctgtcttcatcttcttgccttct

SEQ ID NO: 2612408 - DNA, 25 bp, Homo sapien
cagacgctgtcttcatcttcttgcc

SEQ ID NO: 2612409 - DNA, 25 bp, Homo sapien
atgtttactgagcttgccacacgct

SEQ ID NO: 2612410 - DNA, 25 bp, Homo sapien
tcccttcctttcataagtgcttaca

SEQ ID NO: 2612411 - DNA, 25 bp, Homo sapien
gctattggctcctaggcatgctccc

SEQ ID NO: 2612412 - DNA, 25 bp, Homo sapien
tatcagtgatgattatagctatgtt

SEQ ID NO: 2612413 - DNA, 25 bp, Homo sapien
agtacccgtagacaagctccaatgg

SEQ ID NO: 2612414 - DNA, 25 bp, Homo sapien
gagacttaatttcatctggtggttg

SEQ ID NO: 2612415 - DNA, 25 bp, Homo sapien
gttgttccgtggcagtacccgtaga

SEQ ID NO: 2612416 - DNA, 25 bp, Homo sapien
ttatcactggataaagggccactcg

SEQ ID NO: 2612417 - DNA, 25 bp, Homo sapien
tatccaatgtacttctaagctttgg

SEQ ID NO: 2612418 - DNA, 25 bp, Homo sapien
ccaatgtacttctaagctttggcat

SEQ ID NO: 2612419 - DNA, 25 bp, Homo sapien
tatatccaatgtacttctaagcttt

SEQ ID NO: 2612420 - DNA, 25 bp, Homo sapien
tttcttatatccaatgtacttctaa

SEQ ID NO: 2612421 - DNA, 25 bp, Homo sapien
tcacaggtcaccaatacctctgtgg

SEQ ID NO: 2612422 - DNA, 25 bp, Homo sapien
gtaacgtgaactacactggaggtca

SEQ ID NO: 2612423 - DNA, 25 bp, Homo sapien
tctgtgggagcttctaagagccagg

SEQ ID NO: 2612424 - DNA, 25 bp, Homo sapien
cagggagcgctcagtctcattgctt

SEQ ID NO: 2612425 - DNA, 25 bp, Homo sapien
tgttgtccttccatctccatctgac

SEQ ID NO: 2612426 - DNA, 25 bp, Homo sapien
gttgtccttccatctccatctgaca

SEQ ID NO: 2612427 - DNA, 25 bp, Homo sapien
ctgttgtccttccatctccatctga

SEQ ID NO: 2612428 - DNA, 25 bp, Homo sapien
ttgtccttccatctccatctgacat

SEQ ID NO: 2612429 - DNA, 25 bp, Homo sapien
tgaccctcagattaagcacatggcg

SEQ ID NO: 2612430 - DNA, 25 bp, Homo sapien
agaattagatccagctgactcttcg

SEQ ID NO: 2612431 - DNA, 25 bp, Homo sapien
ttgcccatggctggctgttcatcag

SEQ ID NO: 2612432 - DNA, 25 bp, Homo sapien
atcagagaaccagccgtgaccctca

SEQ ID NO: 2612433 - DNA, 25 bp, Homo sapien
gattcaacaccagggagactcatta

SEQ ID NO: 2612434 - DNA, 25 bp, Homo sapien
gtttagtgcttcaatcctcagggct

SEQ ID NO: 2612435 - DNA, 25 bp, Homo sapien
tcagggctcttattggtgagacaga

SEQ ID NO: 2612436 - DNA, 25 bp, Homo sapien
cattaaaatggagccttggtcctca

SEQ ID NO: 2612437 - DNA, 25 bp, Homo sapien
cagaaatgccttgtagacctctcct

SEQ ID NO: 2612438 - DNA, 25 bp, Homo sapien
acctctcctatcgtgtccggaattg

SEQ ID NO: 2612439 - DNA, 25 bp, Homo sapien
tctggctggtttcgtggtctggctg

SEQ ID NO: 2612440 - DNA, 25 bp, Homo sapien
tgccttgtagacctctcctatcgtg

SEQ ID NO: 2612441 - DNA, 25 bp, Homo sapien
gactatagggtgtttgactctgcaa

SEQ ID NO: 2612442 - DNA, 25 bp, Homo sapien
tacaacagattgctgtcttcccaca

SEQ ID NO: 2612443 - DNA, 25 bp, Homo sapien
ctgcaaatttcttctactgtggatt

SEQ ID NO: 2612444 - DNA, 25 bp, Homo sapien
actttttaatgttctgactataggg

SEQ ID NO: 2612445 - DNA, 25 bp, Homo sapien
tcacttcagtgtctcaaaaggtcta

SEQ ID NO: 2612446 - DNA, 25 bp, Homo sapien
taactgaataaacgtgatgcagcca

SEQ ID NO: 2612447 - DNA, 25 bp, Homo sapien
tactacaagtttgacacatcctctg

SEQ ID NO: 2612448 - DNA, 25 bp, Homo sapien
aaagcgcacttaacctttgacccag

SEQ ID NO: 2612449 - DNA, 25 bp, Homo sapien
ttctatagtcctctggttagcacag

SEQ ID NO: 2612450 - DNA, 25 bp, Homo sapien
tgtttggcagctctgtaagtcagtc

SEQ ID NO: 2612451 - DNA, 25 bp, Homo sapien
tttggcagctctgtaagtcagtcat

SEQ ID NO: 2612452 - DNA, 25 bp, Homo sapien
tcctctggttagcacaggctgtttg

SEQ ID NO: 2612453 - DNA, 25 bp, Homo sapien
gattctctggagtcgtcagtgaggc

SEQ ID NO: 2612454 - DNA, 25 bp, Homo sapien
gtgaagctgttctttccgaaacgta

SEQ ID NO: 2612455 - DNA, 25 bp, Homo sapien
gcgaccgatgccttcttacctcttg

SEQ ID NO: 2612456 - DNA, 25 bp, Homo sapien
catgagctgtgtgaacaatgggcaa

SEQ ID NO: 2612457 - DNA, 25 bp, Homo sapien
tcataagccagtttcataggtagtc

SEQ ID NO: 2612458 - DNA, 25 bp, Homo sapien
cataggtagtcagcacaggacagca

SEQ ID NO: 2612459 - DNA, 25 bp, Homo sapien
cagcaggtaggaagtctctgtgcct

SEQ ID NO: 2612460 - DNA, 25 bp, Homo sapien
gcacaggacagcaggtaggaagtct

SEQ ID NO: 2612461 - DNA, 25 bp, Homo sapien
tattggtctattcagcaattttaat

SEQ ID NO: 2612462 - DNA, 25 bp, Homo sapien
cttcctgggaggttgtatgtatcca

SEQ ID NO: 2612463 - DNA, 25 bp, Homo sapien
gaatatgttcagatggagttatatc

SEQ ID NO: 2612464 - DNA, 25 bp, Homo sapien
gttcagatggagttatatcagtttc

SEQ ID NO: 2612465 - DNA, 25 bp, Homo sapien
tcttgtacttgctgagcgcagggtc

SEQ ID NO: 2612466 - DNA, 25 bp, Homo sapien
gcaagcacagtggattgctgggtcc

SEQ ID NO: 2612467 - DNA, 25 bp, Homo sapien
tgggtcctgcagtgcctgaggggct

SEQ ID NO: 2612468 - DNA, 25 bp, Homo sapien
tttcttgtacttgctgagcgcaggg

SEQ ID NO: 2612469 - DNA, 25 bp, Homo sapien
ccagggatgcgggactacaagtaag

SEQ ID NO: 2612470 - DNA, 25 bp, Homo sapien
gctcttccagaaggtagtttgccca

SEQ ID NO: 2612471 - DNA, 25 bp, Homo sapien
aaagtactcttgcattctggccgct

SEQ ID NO: 2612472 - DNA, 25 bp, Homo sapien
ttttgacatgaggatcgtggacccc

SEQ ID NO: 2612473 - DNA, 25 bp, Homo sapien
ctgcccttcctgtcaggaaagttca

SEQ ID NO: 2612474 - DNA, 25 bp, Homo sapien
caggaaagttcacagttcctttctt

SEQ ID NO: 2612475 - DNA, 25 bp, Homo sapien
gcatgatttgctacactgcccttcc

SEQ ID NO: 2612476 - DNA, 25 bp, Homo sapien
gtttttgattttggctgatgttact

SEQ ID NO: 2612477 - DNA, 25 bp, Homo sapien
tcaactgcccattcgctgtgctggg

SEQ ID NO: 2612478 - DNA, 25 bp, Homo sapien
ctgcccattcgctgtgctgggtctc

SEQ ID NO: 2612479 - DNA, 25 bp, Homo sapien
ttctcaactgcccattcgctgtgct

SEQ ID NO: 2612480 - DNA, 25 bp, Homo sapien
tcatttctcaactgcccattcgctg

SEQ ID NO: 2612481 - DNA, 25 bp, Homo sapien
gcaggtgcactcaggggctggagcc

SEQ ID NO: 2612482 - DNA, 25 bp, Homo sapien
ctgcaggtgcactcaggggctggag

SEQ ID NO: 2612483 - DNA, 25 bp, Homo sapien
gcactcaggggctggagcctgtact

SEQ ID NO: 2612484 - DNA, 25 bp, Homo sapien
actcaggggctggagcctgtactgc

SEQ ID NO: 2612485 - DNA, 25 bp, Homo sapien
gatcctaaagggtatggcttgccaa

SEQ ID NO: 2612486 - DNA, 25 bp, Homo sapien
ggtgatttgttctacctacctagca

SEQ ID NO: 2612487 - DNA, 25 bp, Homo sapien
ggtttcgaatcatctgcttatgtag

SEQ ID NO: 2612488 - DNA, 25 bp, Homo sapien
taaggctttaaacatacttaggtga

SEQ ID NO: 2612489 - DNA, 25 bp, Homo sapien
catgcttagctcacatggtttttaa

SEQ ID NO: 2612490 - DNA, 25 bp, Homo sapien
agagactctctatgtaacgattatt

SEQ ID NO: 2612491 - DNA, 25 bp, Homo sapien
gacttaacgattctatagagactct

SEQ ID NO: 2612492 - DNA, 25 bp, Homo sapien
aacgattattttggatgttggaagg

SEQ ID NO: 2612493 - DNA, 25 bp, Homo sapien
tcttcttagtgtggtcagattccca

SEQ ID NO: 2612494 - DNA, 25 bp, Homo sapien
taaagggtgtatgctcagttgccag

SEQ ID NO: 2612495 - DNA, 25 bp, Homo sapien
gcctgagttgcattacacgaagacc

SEQ ID NO: 2612496 - DNA, 25 bp, Homo sapien
gacaactcatgcagctctagtcagt

SEQ ID NO: 2612497 - DNA, 25 bp, Homo sapien
tattttctggtctagcaggaagcaa

SEQ ID NO: 2612498 - DNA, 25 bp, Homo sapien
cctgacagggttactgtggacatca

SEQ ID NO: 2612499 - DNA, 25 bp, Homo sapien
tgggtttcaaaccaggagtcataca

SEQ ID NO: 2612500 - DNA, 25 bp, Homo sapien
tactgggtaagcaacacagttttcc

SEQ ID NO: 2612501 - DNA, 25 bp, Homo sapien
gagttagggtggaataagcctcatc

SEQ ID NO: 2612502 - DNA, 25 bp, Homo sapien
agttagggtggaataagcctcatcc

SEQ ID NO: 2612503 - DNA, 25 bp, Homo sapien
gccaggcagccgcaaatattcaaga

SEQ ID NO: 2612504 - DNA, 25 bp, Homo sapien
tagatctatgatcgaattctgtcaa

SEQ ID NO: 2612505 - DNA, 25 bp, Homo sapien
caggtttccaactaactgaatttct

SEQ ID NO: 2612506 - DNA, 25 bp, Homo sapien
ttggataaacctgtcatggcagagg

SEQ ID NO: 2612507 - DNA, 25 bp, Homo sapien
tgtagacccataaatgcccctgcat

SEQ ID NO: 2612508 - DNA, 25 bp, Homo sapien
taccaggtagtgttagtctcttcag

SEQ ID NO: 2612509 - DNA, 25 bp, Homo sapien
tgtgtatgcagaaaggcgactgtcc

SEQ ID NO: 2612510 - DNA, 25 bp, Homo sapien
gactgtcctaggagtatgaccaacc

SEQ ID NO: 2612511 - DNA, 25 bp, Homo sapien
agaagctctgcaggagggcagccat

SEQ ID NO: 2612512 - DNA, 25 bp, Homo sapien
ctctcccgccgagaagctctgcagg

SEQ ID NO: 2612513 - DNA, 25 bp, Homo sapien
ccctctcccgccgagaagctctgca

SEQ ID NO: 2612514 - DNA, 25 bp, Homo sapien
ctccctctcccgccgagaagctctg

SEQ ID NO: 2612515 - DNA, 25 bp, Homo sapien
ctcgagttttaacggtaaggtgctg

SEQ ID NO: 2612516 - DNA, 25 bp, Homo sapien
tgtgttttggattatcatctgtcac

SEQ ID NO: 2612517 - DNA, 25 bp, Homo sapien
ctggtgggcactccttcggtgtggt

SEQ ID NO: 2612518 - DNA, 25 bp, Homo sapien
ccaggtctcttgctggtgggcactc

SEQ ID NO: 2612519 - DNA, 25 bp, Homo sapien
tcagccatttctggaatgacttgaa

SEQ ID NO: 2612520 - DNA, 25 bp, Homo sapien
gaagactggctttgtttgtgtccat

SEQ ID NO: 2612521 - DNA, 25 bp, Homo sapien
tttctgaagactggctttgtttgtg

SEQ ID NO: 2612522 - DNA, 25 bp, Homo sapien
atgtgtctgcatcattcttgttcct

SEQ ID NO: 2612523 - DNA, 25 bp, Homo sapien
gactggctttgtttgtgtccatagt

SEQ ID NO: 2612524 - DNA, 25 bp, Homo sapien
tcacaagccactttatcacttcgtg

SEQ ID NO: 2612525 - DNA, 25 bp, Homo sapien
cttccgacctctgaggaggtctgct

SEQ ID NO: 2612526 - DNA, 25 bp, Homo sapien
gacctctgaggaggtctgctgtctt

SEQ ID NO: 2612527 - DNA, 25 bp, Homo sapien
cgtggaatttgagcaatgggttgca

SEQ ID NO: 2612528 - DNA, 25 bp, Homo sapien
gagacggattgtggcaatgaacaca

SEQ ID NO: 2612529 - DNA, 25 bp, Homo sapien
gaactcctggaacgggtcttctggc

SEQ ID NO: 2612530 - DNA, 25 bp, Homo sapien
tgtgacaagcttgccaccctgaact

SEQ ID NO: 2612531 - DNA, 25 bp, Homo sapien
gttcccagtgaacctaagcaggcga

SEQ ID NO: 2612532 - DNA, 25 bp, Homo sapien
gtgcatgagctctctaatgggctga

SEQ ID NO: 2612533 - DNA, 25 bp, Homo sapien
caaagggttggatcaccattgggct

SEQ ID NO: 2612534 - DNA, 25 bp, Homo sapien
tatagggtatgattggtgcctcagc

SEQ ID NO: 2612535 - DNA, 25 bp, Homo sapien
acatctgccttacacaatgtgctta

SEQ ID NO: 2612536 - DNA, 25 bp, Homo sapien
gacgtggacccaatccacccattgt

SEQ ID NO: 2612537 - DNA, 25 bp, Homo sapien
gctgaaaaggccattggttgtctgc

SEQ ID NO: 2612538 - DNA, 25 bp, Homo sapien
gggcaccccgaaatgcaaaacgcac

SEQ ID NO: 2612539 - DNA, 25 bp, Homo sapien
gcaaaacgcactaagttcagggact

SEQ ID NO: 2612540 - DNA, 25 bp, Homo sapien
tgaccagcaggaaaacggtgcctgc

SEQ ID NO: 2612541 - DNA, 25 bp, Homo sapien
cctgaagatgctacccatgggcttg

SEQ ID NO: 2612542 - DNA, 25 bp, Homo sapien
gagtgctgtccatcgtcagccacag

SEQ ID NO: 2612543 - DNA, 25 bp, Homo sapien
cttgtggaccacaatgaccagcagg

SEQ ID NO: 2612544 - DNA, 25 bp, Homo sapien
ccacccttacttgtgattcttccta

SEQ ID NO: 2612545 - DNA, 25 bp, Homo sapien
tgtgcatgtcgaagccaaggtctgc

SEQ ID NO: 2612546 - DNA, 25 bp, Homo sapien
catgtagaggcatgtgacaaggcct

SEQ ID NO: 2612547 - DNA, 25 bp, Homo sapien
ctttccttccgacaatttgaatgag

SEQ ID NO: 2612548 - DNA, 25 bp, Homo sapien
ctctcagacgtggatcagtattcat

SEQ ID NO: 2612549 - DNA, 25 bp, Homo sapien
tctctctctcagacgtggatcagta

SEQ ID NO: 2612550 - DNA, 25 bp, Homo sapien
tctctctcagacgtggatcagtatt

SEQ ID NO: 2612551 - DNA, 25 bp, Homo sapien
tttgtctctctctcagacgtggatc

SEQ ID NO: 2612552 - DNA, 25 bp, Homo sapien
tcctcaggcagctggtcctctgagc

SEQ ID NO: 2612553 - DNA, 25 bp, Homo sapien
ctcaggcagctggtcctctgagctg

SEQ ID NO: 2612554 - DNA, 25 bp, Homo sapien
tgtcctcaggcagctggtcctctga

SEQ ID NO: 2612555 - DNA, 25 bp, Homo sapien
caggcagctggtcctctgagctggc

SEQ ID NO: 2612556 - DNA, 25 bp, Homo sapien
cagaagtccctgagtaatccttctc

SEQ ID NO: 2612557 - DNA, 25 bp, Homo sapien
atttctcctctcatcagaagtccct

SEQ ID NO: 2612558 - DNA, 25 bp, Homo sapien
aagtccctgagtaatccttctccac

SEQ ID NO: 2612559 - DNA, 25 bp, Homo sapien
ttctcctctcatcagaagtccctga

SEQ ID NO: 2612560 - DNA, 25 bp, Homo sapien
ctgatcagggcaatgtctactttat

SEQ ID NO: 2612561 - DNA, 25 bp, Homo sapien
gtatgtcgctttccacttcttctgg

SEQ ID NO: 2612562 - DNA, 25 bp, Homo sapien
tggctgtcctcattagacttgccaa

SEQ ID NO: 2612563 - DNA, 25 bp, Homo sapien
catccaaaggcccacggataacctc

SEQ ID NO: 2612564 - DNA, 25 bp, Homo sapien
ttctcactaatccagccctgttgca

SEQ ID NO: 2612565 - DNA, 25 bp, Homo sapien
ctgtgtcacttcgatggcgtcttca

SEQ ID NO: 2612566 - DNA, 25 bp, Homo sapien
ctcactaatccagccctgttgcagg

SEQ ID NO: 2612567 - DNA, 25 bp, Homo sapien
tccctctgtgtcacttcgatggcgt

SEQ ID NO: 2612568 - DNA, 25 bp, Homo sapien
ttggcgaattagcattttcccagca

SEQ ID NO: 2612569 - DNA, 25 bp, Homo sapien
tagacttaataaccctagagaaggc

SEQ ID NO: 2612570 - DNA, 25 bp, Homo sapien
gcatggagtctcctataggcctgag

SEQ ID NO: 2612571 - DNA, 25 bp, Homo sapien
ttcccagcagtagacttaataaccc

SEQ ID NO: 2612572 - DNA, 25 bp, Homo sapien
ggcttccttgacctggaaccaacat

SEQ ID NO: 2612573 - DNA, 25 bp, Homo sapien
acatctccaacgctgtaccagtaat

SEQ ID NO: 2612574 - DNA, 25 bp, Homo sapien
caacgctgtaccagtaattaaaatc

SEQ ID NO: 2612575 - DNA, 25 bp, Homo sapien
ttagctacttggcttccttgacctg

SEQ ID NO: 2612576 - DNA, 25 bp, Homo sapien
gggatggtttgcaatctatggcctg

SEQ ID NO: 2612577 - DNA, 25 bp, Homo sapien
ggatggtttgcaatctatggcctgc

SEQ ID NO: 2612578 - DNA, 25 bp, Homo sapien
tgggatggtttgcaatctatggcct

SEQ ID NO: 2612579 - DNA, 25 bp, Homo sapien
caaggaccatgaaagataacggcac

SEQ ID NO: 2612580 - DNA, 25 bp, Homo sapien
gggcttccttttggctagcagccac

SEQ ID NO: 2612581 - DNA, 25 bp, Homo sapien
taacggcacacagtggtccggggct

SEQ ID NO: 2612582 - DNA, 25 bp, Homo sapien
cgcccttctcgtttctccccttgag

SEQ ID NO: 2612583 - DNA, 25 bp, Homo sapien
tggggatactagcatcaggggaccc

SEQ ID NO: 2612584 - DNA, 25 bp, Homo sapien
gaggactgaggtaccaaatgtcagg

SEQ ID NO: 2612585 - DNA, 25 bp, Homo sapien
caggctgtggggatactagcatcag

SEQ ID NO: 2612586 - DNA, 25 bp, Homo sapien
aggaaggaggactgaggtaccaaat

SEQ ID NO: 2612587 - DNA, 25 bp, Homo sapien
tctctgagttcctagtggccatggc

SEQ ID NO: 2612588 - DNA, 25 bp, Homo sapien
gccccgtcaatgggcgagctggctt

SEQ ID NO: 2612589 - DNA, 25 bp, Homo sapien
ggtctctgagttcctagtggccatg

SEQ ID NO: 2612590 - DNA, 25 bp, Homo sapien
gtctctgagttcctagtggccatgg

SEQ ID NO: 2612591 - DNA, 25 bp, Homo sapien
ccagatgagaagaagtcggtttgaa

SEQ ID NO: 2612592 - DNA, 25 bp, Homo sapien
gaatctcactgggagcgtggcaatg

SEQ ID NO: 2612593 - DNA, 25 bp, Homo sapien
ctctggagttccagacacagtgccc

SEQ ID NO: 2612594 - DNA, 25 bp, Homo sapien
ccctcttcagttggcccagatgaga

SEQ ID NO: 2612595 - DNA, 25 bp, Homo sapien
tggaataccaagatcagaagttggg

SEQ ID NO: 2612596 - DNA, 25 bp, Homo sapien
agttgggttgtaggccagggatagc

SEQ ID NO: 2612597 - DNA, 25 bp, Homo sapien
ctggaataccaagatcagaagttgg

SEQ ID NO: 2612598 - DNA, 25 bp, Homo sapien
agctgtgaatgcaggcccacggcca

SEQ ID NO: 2612599 - DNA, 25 bp, Homo sapien
gaaagcgtgtgctcaattttgaaca

SEQ ID NO: 2612600 - DNA, 25 bp, Homo sapien
aaatgataaggtgtccagctagaaa

SEQ ID NO: 2612601 - DNA, 25 bp, Homo sapien
tgtccagctagaaagcgtgtgctca

SEQ ID NO: 2612602 - DNA, 25 bp, Homo sapien
gaaaatgataaggtgtccagctaga

SEQ ID NO: 2612603 - DNA, 25 bp, Homo sapien
ggtttttgatgtgttgcagaaactg

SEQ ID NO: 2612604 - DNA, 25 bp, Homo sapien
tgaaggtttttgatgtgttgcagaa

SEQ ID NO: 2612605 - DNA, 25 bp, Homo sapien
gaaggtttttgatgtgttgcagaaa

SEQ ID NO: 2612606 - DNA, 25 bp, Homo sapien
atgtgaaggtttttgatgtgttgca

SEQ ID NO: 2612607 - DNA, 25 bp, Homo sapien
agccaaggagcaccccagtcccaca

SEQ ID NO: 2612608 - DNA, 25 bp, Homo sapien
ttctactgtctctgacataatctaa

SEQ ID NO: 2612609 - DNA, 25 bp, Homo sapien
taatctaattggcaccccctgatgg

SEQ ID NO: 2612610 - DNA, 25 bp, Homo sapien
ttcttgggcccctggttgtcttgca

SEQ ID NO: 2612611 - DNA, 25 bp, Homo sapien
tctgacataatctaattggcacccc

SEQ ID NO: 2612612 - DNA, 25 bp, Homo sapien
ctaaatgcagaagcgcacatgtgga

SEQ ID NO: 2612613 - DNA, 25 bp, Homo sapien
taaatgcagaagcgcacatgtggag

SEQ ID NO: 2612614 - DNA, 25 bp, Homo sapien
catctgggggttctatagctataag

SEQ ID NO: 2612615 - DNA, 25 bp, Homo sapien
tctgggggttctatagctataagca

SEQ ID NO: 2612616 - DNA, 25 bp, Homo sapien
atctgggggttctatagctataagc

SEQ ID NO: 2612617 - DNA, 25 bp, Homo sapien
tcatctgggggttctatagctataa

SEQ ID NO: 2612618 - DNA, 25 bp, Homo sapien
cggctcggcccaaggagcgcgccca

SEQ ID NO: 2612619 - DNA, 25 bp, Homo sapien
atagacgaggactccgcccggtagc

SEQ ID NO: 2612620 - DNA, 25 bp, Homo sapien
ctggcggcgccgagcacccagctgc

SEQ ID NO: 2612621 - DNA, 25 bp, Homo sapien
gagcgcgcccacatagacgaggact

SEQ ID NO: 2612622 - DNA, 25 bp, Homo sapien
agaaggccgcgatgtcggccaggtc

SEQ ID NO: 2612623 - DNA, 25 bp, Homo sapien
ggaagaaggccgcgatgtcggccag

SEQ ID NO: 2612624 - DNA, 25 bp, Homo sapien
cggatcggaagaaggccgcgatgtc

SEQ ID NO: 2612625 - DNA, 25 bp, Homo sapien
ggatcggaagaaggccgcgatgtcg

SEQ ID NO: 2612626 - DNA, 25 bp, Homo sapien
tcacagaagtgtagaccaaggccgg

SEQ ID NO: 2612627 - DNA, 25 bp, Homo sapien
gccccgtttcacagaagtgtagacc

SEQ ID NO: 2612628 - DNA, 25 bp, Homo sapien
tcccggtcctccgagcttcagctcg

SEQ ID NO: 2612629 - DNA, 25 bp, Homo sapien
gcagtgagtgccgtgactgccccgt

SEQ ID NO: 2612630 - DNA, 25 bp, Homo sapien
tcctccgctctccaacccggagtct

SEQ ID NO: 2612631 - DNA, 25 bp, Homo sapien
tccgctctccaacccggagtctgca

SEQ ID NO: 2612632 - DNA, 25 bp, Homo sapien
cgaggccgccaccagcacccccgcc

SEQ ID NO: 2612633 - DNA, 25 bp, Homo sapien
gaggccgccaccagcacccccgccc

SEQ ID NO: 2612634 - DNA, 25 bp, Homo sapien
gtgattttcaaagaggccacggaaa

SEQ ID NO: 2612635 - DNA, 25 bp, Homo sapien
gaggccacggaaaagcgtgaaccgc

SEQ ID NO: 2612636 - DNA, 25 bp, Homo sapien
gtgaaccgccgacctcccgcgcgtc

SEQ ID NO: 2612637 - DNA, 25 bp, Homo sapien
ttcaaagaggccacggaaaagcgtg

SEQ ID NO: 2612638 - DNA, 25 bp, Homo sapien
acccggattggggaactgatctcac

SEQ ID NO: 2612639 - DNA, 25 bp, Homo sapien
atcgccctcccgctgcaattgctcc

SEQ ID NO: 2612640 - DNA, 25 bp, Homo sapien
gctgcaattgctcctcgtgacccgg

SEQ ID NO: 2612641 - DNA, 25 bp, Homo sapien
aattgctcctcgtgacccggattgg

SEQ ID NO: 2612642 - DNA, 25 bp, Homo sapien
tctatctggccagtcgcaccaaaaa

SEQ ID NO: 2612643 - DNA, 25 bp, Homo sapien
caaatcttcggtgtcttttagggag

SEQ ID NO: 2612644 - DNA, 25 bp, Homo sapien
gaagagcctttctaacagagaggag

SEQ ID NO: 2612645 - DNA, 25 bp, Homo sapien
tcagggcatgaagggaatacgtccc

SEQ ID NO: 2612646 - DNA, 25 bp, Homo sapien
agcaaagccaagagcagacgacaac

SEQ ID NO: 2612647 - DNA, 25 bp, Homo sapien
caaagccaagagcagacgacaactc

SEQ ID NO: 2612648 - DNA, 25 bp, Homo sapien
taagcaaagccaagagcagacgaca

SEQ ID NO: 2612649 - DNA, 25 bp, Homo sapien
ctaagcaaagccaagagcagacgac

SEQ ID NO: 2612650 - DNA, 25 bp, Homo sapien
ctggttctgacccaaacggaacatg

SEQ ID NO: 2612651 - DNA, 25 bp, Homo sapien
ctgacccaaacggaacatgaacagg

SEQ ID NO: 2612652 - DNA, 25 bp, Homo sapien
gttctgacccaaacggaacatgaac

SEQ ID NO: 2612653 - DNA, 25 bp, Homo sapien
tgacccaaacggaacatgaacagga

SEQ ID NO: 2612654 - DNA, 25 bp, Homo sapien
aaatgaacagggagtgccaaggtcc

SEQ ID NO: 2612655 - DNA, 25 bp, Homo sapien
gcttcatgccaggtctataaatagg

SEQ ID NO: 2612656 - DNA, 25 bp, Homo sapien
ggtcctgagcagagaacggaatgac

SEQ ID NO: 2612657 - DNA, 25 bp, Homo sapien
gtttgaaattcactaacacctgcag

SEQ ID NO: 2612658 - DNA, 25 bp, Homo sapien
gaactaatgtaagcaacgtcctggc

SEQ ID NO: 2612659 - DNA, 25 bp, Homo sapien
taacgccaacctaaagcgtgccagg

SEQ ID NO: 2612660 - DNA, 25 bp, Homo sapien
tttattgccacgagaacagagcccc

SEQ ID NO: 2612661 - DNA, 25 bp, Homo sapien
gaccagggccctgactctaactcta

SEQ ID NO: 2612662 - DNA, 25 bp, Homo sapien
gaattttagaaatctccttgctttc

SEQ ID NO: 2612663 - DNA, 25 bp, Homo sapien
attttagaaatctccttgctttcct

SEQ ID NO: 2612664 - DNA, 25 bp, Homo sapien
ctccttgctttcctctaaaactgac

SEQ ID NO: 2612665 - DNA, 25 bp, Homo sapien
tgctttcctctaaaactgactgtgc

SEQ ID NO: 2612666 - DNA, 25 bp, Homo sapien
acagcagcacaaatcatgggagtgg

SEQ ID NO: 2612667 - DNA, 25 bp, Homo sapien
attttgaagcagcaaaaatggtaac

SEQ ID NO: 2612668 - DNA, 25 bp, Homo sapien
cacaaatcatgggagtgggaaattt

SEQ ID NO: 2612669 - DNA, 25 bp, Homo sapien
gagtgggaaattttgaagcagcaaa

SEQ ID NO: 2612670 - DNA, 25 bp, Homo sapien
gcatgggccacttgtcatcttcgat

SEQ ID NO: 2612671 - DNA, 25 bp, Homo sapien
caggaactgtgaggcgctgaagatc

SEQ ID NO: 2612672 - DNA, 25 bp, Homo sapien
tgaggcgctgaagatcatcctgcat

SEQ ID NO: 2612673 - DNA, 25 bp, Homo sapien
tcctgcatgggccacttgtcatctt

SEQ ID NO: 2612674 - DNA, 25 bp, Homo sapien
tcaatcttgcatgcctttcgaaggc

SEQ ID NO: 2612675 - DNA, 25 bp, Homo sapien
ctttggttcagtggacagcttccgt

SEQ ID NO: 2612676 - DNA, 25 bp, Homo sapien
caggttatcaccgaaaatctgtgtg

SEQ ID NO: 2612677 - DNA, 25 bp, Homo sapien
ctccatcgtccactctgcaggttat

SEQ ID NO: 2612678 - DNA, 25 bp, Homo sapien
ccttgtagaatgtactggatccctg

SEQ ID NO: 2612679 - DNA, 25 bp, Homo sapien
ggatccctgagaaaggtccgctcga

SEQ ID NO: 2612680 - DNA, 25 bp, Homo sapien
cctgagaaaggtccgctcgacccat

SEQ ID NO: 2612681 - DNA, 25 bp, Homo sapien
gaatgtactggatccctgagaaagg

SEQ ID NO: 2612682 - DNA, 25 bp, Homo sapien
agagagacagggagagagagggaga

SEQ ID NO: 2612683 - DNA, 25 bp, Homo sapien
gagagggagacagggagagagaggg

SEQ ID NO: 2612684 - DNA, 25 bp, Homo sapien
agggagacagggagagagagggaga

SEQ ID NO: 2612685 - DNA, 25 bp, Homo sapien
gggagacagggagagagagggagac

SEQ ID NO: 2612686 - DNA, 25 bp, Homo sapien
ctcagctaattttcatatttttagt

SEQ ID NO: 2612687 - DNA, 25 bp, Homo sapien
ggcggagtctcactctgccgccagg

SEQ ID NO: 2612688 - DNA, 25 bp, Homo sapien
ttcactgcaccctctgcctcccggg

SEQ ID NO: 2612689 - DNA, 25 bp, Homo sapien
ctgtagtgcagtggcgtgatctcag

SEQ ID NO: 2612690 - DNA, 25 bp, Homo sapien
taagctggagctagcccattctggg

SEQ ID NO: 2612691 - DNA, 25 bp, Homo sapien
gacatgtggctttacagaaccaaac

SEQ ID NO: 2612692 - DNA, 25 bp, Homo sapien
tgcaattcaatacccaggtaatctg

SEQ ID NO: 2612693 - DNA, 25 bp, Homo sapien
tcttgaacaaatactaccatcagtc

SEQ ID NO: 2612694 - DNA, 25 bp, Homo sapien
aggggacggctttgatccatttgat

SEQ ID NO: 2612695 - DNA, 25 bp, Homo sapien
gttcccaggagccttacgtgccatt

SEQ ID NO: 2612696 - DNA, 25 bp, Homo sapien
cctgagagtgcccttccttcctttg

SEQ ID NO: 2612697 - DNA, 25 bp, Homo sapien
gaccacctggcaagggccatctgtt

SEQ ID NO: 2612698 - DNA, 25 bp, Homo sapien
gatttggaatgctaaaacagagtca

SEQ ID NO: 2612699 - DNA, 25 bp, Homo sapien
tgtggtcatgcaaactgaagtgaca

SEQ ID NO: 2612700 - DNA, 25 bp, Homo sapien
tttcttgggcaagtcaggttcggct

SEQ ID NO: 2612701 - DNA, 25 bp, Homo sapien
ggttcggctggatcctctgaatgtt

SEQ ID NO: 2612702 - DNA, 25 bp, Homo sapien
ggtatttcaagagaacagccaagac

SEQ ID NO: 2612703 - DNA, 25 bp, Homo sapien
cataaatggacttgcagccgctggt

SEQ ID NO: 2612704 - DNA, 25 bp, Homo sapien
ttgcataaatggacttgcagccgct

SEQ ID NO: 2612705 - DNA, 25 bp, Homo sapien
taaatggacttgcagccgctggtgc

SEQ ID NO: 2612706 - DNA, 25 bp, Homo sapien
ccttgcataaatggacttgcagccg

SEQ ID NO: 2612707 - DNA, 25 bp, Homo sapien
tgaggctctgaaagcgtagggcaaa

SEQ ID NO: 2612708 - DNA, 25 bp, Homo sapien
tctgcatgctcctgctcaacatggg

SEQ ID NO: 2612709 - DNA, 25 bp, Homo sapien
tctgaaagcgtagggcaaactctgc

SEQ ID NO: 2612710 - DNA, 25 bp, Homo sapien
ctaagtgaggctctgaaagcgtagg

SEQ ID NO: 2612711 - DNA, 25 bp, Homo sapien
tgcggccagaacacaagattaacag

SEQ ID NO: 2612712 - DNA, 25 bp, Homo sapien
tcagtcagtaggtcgagtcatcaca

SEQ ID NO: 2612713 - DNA, 25 bp, Homo sapien
tacgcggtcagcttatcaagaaatg

SEQ ID NO: 2612714 - DNA, 25 bp, Homo sapien
taagagggttcctaacatgcggcca

SEQ ID NO: 2612715 - DNA, 25 bp, Homo sapien
tttcatatgcaaagatcagacactt

SEQ ID NO: 2612716 - DNA, 25 bp, Homo sapien
attttcatatgcaaagatcagacac

SEQ ID NO: 2612717 - DNA, 25 bp, Homo sapien
agatcagacacttctaacaacatgg

SEQ ID NO: 2612718 - DNA, 25 bp, Homo sapien
cagacacttctaacaacatggtctg

SEQ ID NO: 2612719 - DNA, 25 bp, Homo sapien
tctaccaaataggaggacgtgcact

SEQ ID NO: 2612720 - DNA, 25 bp, Homo sapien
tatcaaatcttcaggccacacagct

SEQ ID NO: 2612721 - DNA, 25 bp, Homo sapien
tcagcccggagtgtagaaactacca

SEQ ID NO: 2612722 - DNA, 25 bp, Homo sapien
gggcagccagcgttttcaggacact

SEQ ID NO: 2612723 - DNA, 25 bp, Homo sapien
gctgcagtaagttacgatcaggcca

SEQ ID NO: 2612724 - DNA, 25 bp, Homo sapien
gactcactgaatggctgtgccgcta

SEQ ID NO: 2612725 - DNA, 25 bp, Homo sapien
aaaaaaggtcaactgtctgtgccag

SEQ ID NO: 2612726 - DNA, 25 bp, Homo sapien
tgatctgaagatatgccgggcatgg

SEQ ID NO: 2612727 - DNA, 25 bp, Homo sapien
cagacccagccatgcaatgaacagg

SEQ ID NO: 2612728 - DNA, 25 bp, Homo sapien
tacctaatgcatgagggaaatcgga

SEQ ID NO: 2612729 - DNA, 25 bp, Homo sapien
gatagagtctagctatgctacccag

SEQ ID NO: 2612730 - DNA, 25 bp, Homo sapien
tatcagccttgacccactaggtagg

SEQ ID NO: 2612731 - DNA, 25 bp, Homo sapien
tcattattgccattgccattactaa

SEQ ID NO: 2612732 - DNA, 25 bp, Homo sapien
ccttggcgtccaagaagttgctggg

SEQ ID NO: 2612733 - DNA, 25 bp, Homo sapien
cattatctcctggatattagataca

SEQ ID NO: 2612734 - DNA, 25 bp, Homo sapien
agataatgtatatatggctcaatgc

SEQ ID NO: 2612735 - DNA, 25 bp, Homo sapien
ggcacacgaacacacagtaaacggt

SEQ ID NO: 2612736 - DNA, 25 bp, Homo sapien
gcagagtctgtaccaggcacacgaa

SEQ ID NO: 2612737 - DNA, 25 bp, Homo sapien
gctgagaatactgaaaaactaccgg

SEQ ID NO: 2612738 - DNA, 25 bp, Homo sapien
tttggacaggccacgacaactgctg

SEQ ID NO: 2612739 - DNA, 25 bp, Homo sapien
gtccccgaacctgaagaagactcac

SEQ ID NO: 2612740 - DNA, 25 bp, Homo sapien
tgtccccgaacctgaagaagactca

SEQ ID NO: 2612741 - DNA, 25 bp, Homo sapien
tatgtccccgaacctgaagaagact

SEQ ID NO: 2612742 - DNA, 25 bp, Homo sapien
ctatgtccccgaacctgaagaagac

SEQ ID NO: 2612743 - DNA, 25 bp, Homo sapien
ttctccacctcttcacctaatggag

SEQ ID NO: 2612744 - DNA, 25 bp, Homo sapien
tccacctcttcacctaatggagcac

SEQ ID NO: 2612745 - DNA, 25 bp, Homo sapien
caaatcaagtcctcaaatccttcac

SEQ ID NO: 2612746 - DNA, 25 bp, Homo sapien
aaaacaaatcaagtcctcaaatcct

SEQ ID NO: 2612747 - DNA, 25 bp, Homo sapien
gacaggaagcacctcgatacacact

SEQ ID NO: 2612748 - DNA, 25 bp, Homo sapien
gcctggacagggtaaagagcattct

SEQ ID NO: 2612749 - DNA, 25 bp, Homo sapien
aagttgttaatcatccagcatggcc

SEQ ID NO: 2612750 - DNA, 25 bp, Homo sapien
gaacaccaggcagtaatcacagcac

SEQ ID NO: 2612751 - DNA, 25 bp, Homo sapien
tgcagtccagtataagagattcggg

SEQ ID NO: 2612752 - DNA, 25 bp, Homo sapien
caaagggcaggtatgcttacagact

SEQ ID NO: 2612753 - DNA, 25 bp, Homo sapien
tgtgtgtgcacaactggccttctgc

SEQ ID NO: 2612754 - DNA, 25 bp, Homo sapien
aaaagcaggcatgcttgcagtccag

SEQ ID NO: 2612755 - DNA, 25 bp, Homo sapien
tcactatggacttgactgggcaaca

SEQ ID NO: 2612756 - DNA, 25 bp, Homo sapien
tgcctggaaatgaactatctacaag

SEQ ID NO: 2612757 - DNA, 25 bp, Homo sapien
ggcccttgaagttcagcccctacag

SEQ ID NO: 2612758 - DNA, 25 bp, Homo sapien
ggctataagcaaaagtggcccttga

SEQ ID NO: 2612759 - DNA, 25 bp, Homo sapien
aggaacgtggcacaacgcccggcta

SEQ ID NO: 2612760 - DNA, 25 bp, Homo sapien
caggaacgtggcacaacgcccggct

SEQ ID NO: 2612761 - DNA, 25 bp, Homo sapien
tacctctgcggtaaaaagacaggct

SEQ ID NO: 2612762 - DNA, 25 bp, Homo sapien
tggtccactcactcaaccatgggtg

SEQ ID NO: 2612763 - DNA, 25 bp, Homo sapien
tctgtgaccatcgaccaaggaaaag

SEQ ID NO: 2612764 - DNA, 25 bp, Homo sapien
taagctgcccacgatcataaagaca

SEQ ID NO: 2612765 - DNA, 25 bp, Homo sapien
gacaataaaatcctgtgccctcctg

SEQ ID NO: 2612766 - DNA, 25 bp, Homo sapien
tctgtctctactgcagccacggtgg

SEQ ID NO: 2612767 - DNA, 25 bp, Homo sapien
tgcagctgcagttacacaacgatgt

SEQ ID NO: 2612768 - DNA, 25 bp, Homo sapien
gaatccgtgggcacttccctttgca

SEQ ID NO: 2612769 - DNA, 25 bp, Homo sapien
ttgtgttaataacacagtagccaga

SEQ ID NO: 2612770 - DNA, 25 bp, Homo sapien
gtaagaaaccaactggcatcttctg

SEQ ID NO: 2612771 - DNA, 25 bp, Homo sapien
ggccaaggaacttcagatacaagat

SEQ ID NO: 2612772 - DNA, 25 bp, Homo sapien
gatacaagatagaccttcattttga

SEQ ID NO: 2612773 - DNA, 25 bp, Homo sapien
gacctcagaggcttactgggagaaa

SEQ ID NO: 2612774 - DNA, 25 bp, Homo sapien
catccggagaatctgaccacaagtt

SEQ ID NO: 2612775 - DNA, 25 bp, Homo sapien
ccacaagttgagttcagaggatgca

SEQ ID NO: 2612776 - DNA, 25 bp, Homo sapien
gatgcaaagtcctcaagacaagagc

SEQ ID NO: 2612777 - DNA, 25 bp, Homo sapien
atgctaggcccgcacacagggagct

SEQ ID NO: 2612778 - DNA, 25 bp, Homo sapien
tgcactcgctgccctagttgtggcc

SEQ ID NO: 2612779 - DNA, 25 bp, Homo sapien
ccacgctgcaagctggatgctaggc

SEQ ID NO: 2612780 - DNA, 25 bp, Homo sapien
gggctcctccagcaatcagggctcc

SEQ ID NO: 2612781 - DNA, 25 bp, Homo sapien
ccaaaggggccgaccgctcctccat

SEQ ID NO: 2612782 - DNA, 25 bp, Homo sapien
tgtattccttcaaaactcaaccaaa

SEQ ID NO: 2612783 - DNA, 25 bp, Homo sapien
aggggccgaccgctcctccatctga

SEQ ID NO: 2612784 - DNA, 25 bp, Homo sapien
gggccgaccgctcctccatctgact

SEQ ID NO: 2612785 - DNA, 25 bp, Homo sapien
tctgcacgtttgagcaggtatgtga

SEQ ID NO: 2612786 - DNA, 25 bp, Homo sapien
gagacatctgaggttcaatgaaagc

SEQ ID NO: 2612787 - DNA, 25 bp, Homo sapien
agaagttggctggagttccccgaag

SEQ ID NO: 2612788 - DNA, 25 bp, Homo sapien
gaggttcaatgaaagcagcatctgc

SEQ ID NO: 2612789 - DNA, 25 bp, Homo sapien
gacagcacgagggagaagaaaagct

SEQ ID NO: 2612790 - DNA, 25 bp, Homo sapien
actctcactctcctggggactagtg

SEQ ID NO: 2612791 - DNA, 25 bp, Homo sapien
tgcaggtgtagggatagcatttcct

SEQ ID NO: 2612792 - DNA, 25 bp, Homo sapien
ggactgagggcaagaaaggggccca

SEQ ID NO: 2612793 - DNA, 25 bp, Homo sapien
aggctgcagctgtcgtggctggcat

SEQ ID NO: 2612794 - DNA, 25 bp, Homo sapien
tcgtggctggcatgggaaagcccca

SEQ ID NO: 2612795 - DNA, 25 bp, Homo sapien
cagctgtcgtggctggcatgggaaa

SEQ ID NO: 2612796 - DNA, 25 bp, Homo sapien
gctggcatgggaaagccccagaatc

SEQ ID NO: 2612797 - DNA, 25 bp, Homo sapien
tgctgcgacaatcacacaccagagg

SEQ ID NO: 2612798 - DNA, 25 bp, Homo sapien
tgacaccgggaacaaagtgccagga

SEQ ID NO: 2612799 - DNA, 25 bp, Homo sapien
aaactttggactgattagtactggc

SEQ ID NO: 2612800 - DNA, 25 bp, Homo sapien
ttcatcctaacaacctgccaaaggg

SEQ ID NO: 2612801 - DNA, 25 bp, Homo sapien
cagtaagagccggagaagggttgct

SEQ ID NO: 2612802 - DNA, 25 bp, Homo sapien
agaagggttgctgccggcactgcca

SEQ ID NO: 2612803 - DNA, 25 bp, Homo sapien
ccggagaagggttgctgccggcact

SEQ ID NO: 2612804 - DNA, 25 bp, Homo sapien
taagagccggagaagggttgctgcc

SEQ ID NO: 2612805 - DNA, 25 bp, Homo sapien
gtctgatcaactggggcttcaggat

SEQ ID NO: 2612806 - DNA, 25 bp, Homo sapien
ccaagtctgatcaactggggcttca

SEQ ID NO: 2612807 - DNA, 25 bp, Homo sapien
tcaccaagtctgatcaactggggct

SEQ ID NO: 2612808 - DNA, 25 bp, Homo sapien
aagtctgatcaactggggcttcagg

SEQ ID NO: 2612809 - DNA, 25 bp, Homo sapien
tagggtcctcgcttcacatactttc

SEQ ID NO: 2612810 - DNA, 25 bp, Homo sapien
tgtgctcaccgagaacctcagactt

SEQ ID NO: 2612811 - DNA, 25 bp, Homo sapien
taacctgcagatgaggtagggtcct

SEQ ID NO: 2612812 - DNA, 25 bp, Homo sapien
ttacagactatgtcaccttcagtga

SEQ ID NO: 2612813 - DNA, 25 bp, Homo sapien
tttgcggctgttcccccggcaggga

SEQ ID NO: 2612814 - DNA, 25 bp, Homo sapien
ttctgtccattctgtgccccataaa

SEQ ID NO: 2612815 - DNA, 25 bp, Homo sapien
ccacaggctcacatgtttgcggctg

SEQ ID NO: 2612816 - DNA, 25 bp, Homo sapien
ccccggcagggaacagtctccaatt

SEQ ID NO: 2612817 - DNA, 25 bp, Homo sapien
caaaacacgagatgggctactgagt

SEQ ID NO: 2612818 - DNA, 25 bp, Homo sapien
tgtggcctccctgatggaatctgct

SEQ ID NO: 2612819 - DNA, 25 bp, Homo sapien
tatctgcttaaatccacatgtggcc

SEQ ID NO: 2612820 - DNA, 25 bp, Homo sapien
tcaacagcttttgcgcccaggaaat

SEQ ID NO: 2612821 - DNA, 25 bp, Homo sapien
aaccatcagagggtctggcctaaag

SEQ ID NO: 2612822 - DNA, 25 bp, Homo sapien
gaaacgactctatgcttccaaggca

SEQ ID NO: 2612823 - DNA, 25 bp, Homo sapien
tgagaatgaggctgagaaacgactc

SEQ ID NO: 2612824 - DNA, 25 bp, Homo sapien
tggcagcccctagcaatgaacgtgc

SEQ ID NO: 2612825 - DNA, 25 bp, Homo sapien
ctgcccttgcggagcttagagtcca

SEQ ID NO: 2612826 - DNA, 25 bp, Homo sapien
ggatacacacctcgctattagagcc

SEQ ID NO: 2612827 - DNA, 25 bp, Homo sapien
cgtaaccaagtataaagctgagcgt

SEQ ID NO: 2612828 - DNA, 25 bp, Homo sapien
taaatatgtacatccaccaggtgtc

SEQ ID NO: 2612829 - DNA, 25 bp, Homo sapien
gatcctatcacacacattcaagaag

SEQ ID NO: 2612830 - DNA, 25 bp, Homo sapien
gaactgcaagcactcccctgaataa

SEQ ID NO: 2612831 - DNA, 25 bp, Homo sapien
catttgaaaaccgtacactgatcct

SEQ ID NO: 2612832 - DNA, 25 bp, Homo sapien
cattttcaacaggtgcaaaggagct

SEQ ID NO: 2612833 - DNA, 25 bp, Homo sapien
cctaagaggttctactaatacaatc

SEQ ID NO: 2612834 - DNA, 25 bp, Homo sapien
tgacatgtagtagcacctgatcacc

SEQ ID NO: 2612835 - DNA, 25 bp, Homo sapien
ttaactgagagtccctagaggcata

SEQ ID NO: 2612836 - DNA, 25 bp, Homo sapien
ccattgtgttcctaagaggttctac

SEQ ID NO: 2612837 - DNA, 25 bp, Homo sapien
tgttgtagaatgtgagttcaacctg

SEQ ID NO: 2612838 - DNA, 25 bp, Homo sapien
gacctgttgtagaatgtgagttcaa

SEQ ID NO: 2612839 - DNA, 25 bp, Homo sapien
ccctcggggatccaggtaagacctg

SEQ ID NO: 2612840 - DNA, 25 bp, Homo sapien
gacacagatgaagtccctcggggat

SEQ ID NO: 2612841 - DNA, 25 bp, Homo sapien
cattgctggaatgcactaaccagac

SEQ ID NO: 2612842 - DNA, 25 bp, Homo sapien
cactaaccagacaaggcgatcatgg

SEQ ID NO: 2612843 - DNA, 25 bp, Homo sapien
atggcacattgctggaatgcactaa

SEQ ID NO: 2612844 - DNA, 25 bp, Homo sapien
tggaatgcactaaccagacaaggcg

SEQ ID NO: 2612845 - DNA, 25 bp, Homo sapien
acagcaggaggtcgccagaggcaca

SEQ ID NO: 2612846 - DNA, 25 bp, Homo sapien
gacagcaggaggtcgccagaggcac

SEQ ID NO: 2612847 - DNA, 25 bp, Homo sapien
gcccctggatctggtggaggtgcct

SEQ ID NO: 2612848 - DNA, 25 bp, Homo sapien
agcctgtctggtgtccagagggcaa

SEQ ID NO: 2612849 - DNA, 25 bp, Homo sapien
cagagggcaagagggcggaaagccg

SEQ ID NO: 2612850 - DNA, 25 bp, Homo sapien
cttgctagtggcccctggatctggt

SEQ ID NO: 2612851 - DNA, 25 bp, Homo sapien
gacaacaaaagcttcgattaacctg

SEQ ID NO: 2612852 - DNA, 25 bp, Homo sapien
tacttgtgctaagaattccgtgtct

SEQ ID NO: 2612853 - DNA, 25 bp, Homo sapien
ctctctcccaaatggtgacaacaaa

SEQ ID NO: 2612854 - DNA, 25 bp, Homo sapien
gattaacctgtctatctttctgcat

SEQ ID NO: 2612855 - DNA, 25 bp, Homo sapien
tgcacctacagcatcattccagtac

SEQ ID NO: 2612856 - DNA, 25 bp, Homo sapien
aactctctgcacctacagcatcatt

SEQ ID NO: 2612857 - DNA, 25 bp, Homo sapien
cggccaactctctgcacctacagca

SEQ ID NO: 2612858 - DNA, 25 bp, Homo sapien
ctgcacctacagcatcattccagta

SEQ ID NO: 2612859 - DNA, 25 bp, Homo sapien
atgctctgaggattcatccgatcag

SEQ ID NO: 2612860 - DNA, 25 bp, Homo sapien
ggattcatccgatcagaggccagcc

SEQ ID NO: 2612861 - DNA, 25 bp, Homo sapien
tctgaggattcatccgatcagaggc

SEQ ID NO: 2612862 - DNA, 25 bp, Homo sapien
tactttgctttgacagctttgttcc

SEQ ID NO: 2612863 - DNA, 25 bp, Homo sapien
cccctctactccagtattctgtgtt

SEQ ID NO: 2612864 - DNA, 25 bp, Homo sapien
tcccctctactccagtattctgtgt

SEQ ID NO: 2612865 - DNA, 25 bp, Homo sapien
cctctactccagtattctgtgttga

SEQ ID NO: 2612866 - DNA, 25 bp, Homo sapien
ccctctactccagtattctgtgttg

SEQ ID NO: 2612867 - DNA, 25 bp, Homo sapien
taaaagatctgtgcgaagtgtggaa

SEQ ID NO: 2612868 - DNA, 25 bp, Homo sapien
ccagagcgatgagaataggagaaga

SEQ ID NO: 2612869 - DNA, 25 bp, Homo sapien
tatttggtatggaaaaatcagggcc

SEQ ID NO: 2612870 - DNA, 25 bp, Homo sapien
ggagaagatgtcctatcaaataaaa

SEQ ID NO: 2612871 - DNA, 25 bp, Homo sapien
cgtggctgcccgatgtttgtgctat

SEQ ID NO: 2612872 - DNA, 25 bp, Homo sapien
tatcaagggttttagctgtgcacgc

SEQ ID NO: 2612873 - DNA, 25 bp, Homo sapien
tgcggagcccgcaggattatactct

SEQ ID NO: 2612874 - DNA, 25 bp, Homo sapien
ttatactctcagcacagggagcggc

SEQ ID NO: 2612875 - DNA, 25 bp, Homo sapien
tgaacagcagcaaatacaggctgcc

SEQ ID NO: 2612876 - DNA, 25 bp, Homo sapien
caaatacaggctgccctcggtggcc

SEQ ID NO: 2612877 - DNA, 25 bp, Homo sapien
agcaaatacaggctgccctcggtgg

SEQ ID NO: 2612878 - DNA, 25 bp, Homo sapien
cagcagcaaatacaggctgccctcg

SEQ ID NO: 2612879 - DNA, 25 bp, Homo sapien
cacacccacacgtcatggccaggac

SEQ ID NO: 2612880 - DNA, 25 bp, Homo sapien
cccacacgtcatggccaggacacag

SEQ ID NO: 2612881 - DNA, 25 bp, Homo sapien
acacccacacgtcatggccaggaca

SEQ ID NO: 2612882 - DNA, 25 bp, Homo sapien
acccacacgtcatggccaggacaca

SEQ ID NO: 2612883 - DNA, 25 bp, Homo sapien
caaagactgacttcatctgccgtgg

SEQ ID NO: 2612884 - DNA, 25 bp, Homo sapien
acttcatctgccgtggctgccgtgg

SEQ ID NO: 2612885 - DNA, 25 bp, Homo sapien
ctgcaaggcaaagaggactaaggct

SEQ ID NO: 2612886 - DNA, 25 bp, Homo sapien
tccccagcgaccctcaaagagacaa

SEQ ID NO: 2612887 - DNA, 25 bp, Homo sapien
tcaaaattggtaaaacatccatagc

SEQ ID NO: 2612888 - DNA, 25 bp, Homo sapien
catgacatgggtcctagttactcca

SEQ ID NO: 2612889 - DNA, 25 bp, Homo sapien
aatcaccagggcttcatcgtccatg

SEQ ID NO: 2612890 - DNA, 25 bp, Homo sapien
caaaggagcagatctcaaggagaag

SEQ ID NO: 2612891 - DNA, 25 bp, Homo sapien
ctacagggaaacagactcagctggt

SEQ ID NO: 2612892 - DNA, 25 bp, Homo sapien
cagctgctctctaggccagtctccc

SEQ ID NO: 2612893 - DNA, 25 bp, Homo sapien
acagctgctctctaggccagtctcc

SEQ ID NO: 2612894 - DNA, 25 bp, Homo sapien
gctgctctctaggccagtctccccc

SEQ ID NO: 2612895 - DNA, 25 bp, Homo sapien
cacagctgctctctaggccagtctc

SEQ ID NO: 2612896 - DNA, 25 bp, Homo sapien
gatcctcctgtcgtattctgtcatg

SEQ ID NO: 2612897 - DNA, 25 bp, Homo sapien
aatgggacctccacgtttatctctc

SEQ ID NO: 2612898 - DNA, 25 bp, Homo sapien
gataggaaatgagtctcctgagatc

SEQ ID NO: 2612899 - DNA, 25 bp, Homo sapien
gattgctgcgggccggaaacgttaa

SEQ ID NO: 2612900 - DNA, 25 bp, Homo sapien
gatcaccgtgaagccacgcttgcag

SEQ ID NO: 2612901 - DNA, 25 bp, Homo sapien
tgccaaaattagtcctctgtttctg

SEQ ID NO: 2612902 - DNA, 25 bp, Homo sapien
ttggacccacgcatgtccacgatca

SEQ ID NO: 2612903 - DNA, 25 bp, Homo sapien
ggcttgatgatcagggccacatgga

SEQ ID NO: 2612904 - DNA, 25 bp, Homo sapien
cctgtatgaattgtattgccagacc

SEQ ID NO: 2612905 - DNA, 25 bp, Homo sapien
tctgatggagtgtagtaaacctgag

SEQ ID NO: 2612906 - DNA, 25 bp, Homo sapien
aaactggtgcctttaagagccctga

SEQ ID NO: 2612907 - DNA, 25 bp, Homo sapien
gggagagatcaaaactggactggaa

SEQ ID NO: 2612908 - DNA, 25 bp, Homo sapien
actcctgatccagcacttatgccta

SEQ ID NO: 2612909 - DNA, 25 bp, Homo sapien
gagaaagagttgtgacctagaacca

SEQ ID NO: 2612910 - DNA, 25 bp, Homo sapien
tccggcgtgctggttggcaaaagaa

SEQ ID NO: 2612911 - DNA, 25 bp, Homo sapien
tatgcctacaatcctaccataggcc

SEQ ID NO: 2612912 - DNA, 25 bp, Homo sapien
ctggagtgtggcgatgattacatgc

SEQ ID NO: 2612913 - DNA, 25 bp, Homo sapien
tgagacatcgcacacgacctttttt

SEQ ID NO: 2612914 - DNA, 25 bp, Homo sapien
catgagacatcgcacacgacctttt

SEQ ID NO: 2612915 - DNA, 25 bp, Homo sapien
cgatgattacatgctgtaagcttaa

SEQ ID NO: 2612916 - DNA, 25 bp, Homo sapien
ctctgtggaggttttctactacttg

SEQ ID NO: 2612917 - DNA, 25 bp, Homo sapien
gaaactctgtggaggttttctacta

SEQ ID NO: 2612918 - DNA, 25 bp, Homo sapien
aactctgtggaggttttctactact

SEQ ID NO: 2612919 - DNA, 25 bp, Homo sapien
actctgtggaggttttctactactt

SEQ ID NO: 2612920 - DNA, 25 bp, Homo sapien
cttctccccattctttttcatccat

SEQ ID NO: 2612921 - DNA, 25 bp, Homo sapien
tcaatgcattcttctccccattctt

SEQ ID NO: 2612922 - DNA, 25 bp, Homo sapien
attcttctccccattctttttcatc

SEQ ID NO: 2612923 - DNA, 25 bp, Homo sapien
atcaatgcattcttctccccattct

SEQ ID NO: 2612924 - DNA, 25 bp, Homo sapien
ttcgtggttgtattccaggcagcca

SEQ ID NO: 2612925 - DNA, 25 bp, Homo sapien
ggccttctaaagagaccatatttgt

SEQ ID NO: 2612926 - DNA, 25 bp, Homo sapien
cagatgctgccgtgtcgagtgcagc

SEQ ID NO: 2612927 - DNA, 25 bp, Homo sapien
gaatgttcctcgatcatattccgag

SEQ ID NO: 2612928 - DNA, 25 bp, Homo sapien
ccactgaggcattagcctcccccgt

SEQ ID NO: 2612929 - DNA, 25 bp, Homo sapien
tgaggcattagcctcccccgtcttt

SEQ ID NO: 2612930 - DNA, 25 bp, Homo sapien
actgaggcattagcctcccccgtct

SEQ ID NO: 2612931 - DNA, 25 bp, Homo sapien
gaggcattagcctcccccgtcttta

SEQ ID NO: 2612932 - DNA, 25 bp, Homo sapien
tgagcacggccgaaatgttcactct

SEQ ID NO: 2612933 - DNA, 25 bp, Homo sapien
tatcattcctatcttacaggcatcc

SEQ ID NO: 2612934 - DNA, 25 bp, Homo sapien
ggcatcctagaccaaagaataagta

SEQ ID NO: 2612935 - DNA, 25 bp, Homo sapien
tgtattgcacaacgagtaaaaccgg

SEQ ID NO: 2612936 - DNA, 25 bp, Homo sapien
gatgactatcatcaattagcattgc

SEQ ID NO: 2612937 - DNA, 25 bp, Homo sapien
cttggacaaggatgtcaattaagac

SEQ ID NO: 2612938 - DNA, 25 bp, Homo sapien
taactatgacatctcccttaaggtt

SEQ ID NO: 2612939 - DNA, 25 bp, Homo sapien
tagcattgctaccatgacttgaacc

SEQ ID NO: 2612940 - DNA, 25 bp, Homo sapien
tgtgcagattgcaaaaacataaaat

SEQ ID NO: 2612941 - DNA, 25 bp, Homo sapien
gtgcagattgcaaaaacataaaatt

SEQ ID NO: 2612942 - DNA, 25 bp, Homo sapien
gcagattgcaaaaacataaaattta

SEQ ID NO: 2612943 - DNA, 25 bp, Homo sapien
ctgtgcagattgcaaaaacataaaa

SEQ ID NO: 2612944 - DNA, 25 bp, Homo sapien
cacagtgaggttcaattaaagaccc

SEQ ID NO: 2612945 - DNA, 25 bp, Homo sapien
caagcgctgtctgattctctcagaa

SEQ ID NO: 2612946 - DNA, 25 bp, Homo sapien
ttatgggtctctggatgggttctgc

SEQ ID NO: 2612947 - DNA, 25 bp, Homo sapien
gttctgaacttgcaggacctaccag

SEQ ID NO: 2612948 - DNA, 25 bp, Homo sapien
ggtggctggtcccaatctctgtgta

SEQ ID NO: 2612949 - DNA, 25 bp, Homo sapien
ctgtgtagctgtttagaaacaggcc

SEQ ID NO: 2612950 - DNA, 25 bp, Homo sapien
tgctgcgtctgaagctccatggcat

SEQ ID NO: 2612951 - DNA, 25 bp, Homo sapien
tgttgtgtgtgatccagtcaaacat

SEQ ID NO: 2612952 - DNA, 25 bp, Homo sapien
tgaaagccctagcatacaatttgcc

SEQ ID NO: 2612953 - DNA, 25 bp, Homo sapien
cagggtccagctgttccgagtgtct

SEQ ID NO: 2612954 - DNA, 25 bp, Homo sapien
catgtgaaggtcagctgctacaatc

SEQ ID NO: 2612955 - DNA, 25 bp, Homo sapien
gctacaatcaacagccactccgaag

SEQ ID NO: 2612956 - DNA, 25 bp, Homo sapien
gaagcttcacagactacagaggcaa

SEQ ID NO: 2612957 - DNA, 25 bp, Homo sapien
tcctcacaaggctggcttaaagtcc

SEQ ID NO: 2612958 - DNA, 25 bp, Homo sapien
tacaaggtttaagagtggacaatcc

SEQ ID NO: 2612959 - DNA, 25 bp, Homo sapien
gcccaggccggttcatattgcttta

SEQ ID NO: 2612960 - DNA, 25 bp, Homo sapien
gacatcgcatgtctggagtcgcaga

SEQ ID NO: 2612961 - DNA, 25 bp, Homo sapien
tagaatcagctaacagacatcgcat

SEQ ID NO: 2612962 - DNA, 25 bp, Homo sapien
agaacttggtggagttgcctctgtc

SEQ ID NO: 2612963 - DNA, 25 bp, Homo sapien
cagggttacatctccgggctgcatc

SEQ ID NO: 2612964 - DNA, 25 bp, Homo sapien
aaatctcccactgcctcgaacaagg

SEQ ID NO: 2612965 - DNA, 25 bp, Homo sapien
tcaacgttgccccaatctgatttcc

SEQ ID NO: 2612966 - DNA, 25 bp, Homo sapien
acacaacccctctgagcaaatctcc

SEQ ID NO: 2612967 - DNA, 25 bp, Homo sapien
aaatcgtagatacctctttggctcc

SEQ ID NO: 2612968 - DNA, 25 bp, Homo sapien
gacatgtccagcaaggtgctccgct

SEQ ID NO: 2612969 - DNA, 25 bp, Homo sapien
tctggtggaaaatggaggacatgtc

SEQ ID NO: 2612970 - DNA, 25 bp, Homo sapien
tgatctgctgcgaggcatagtggcc

SEQ ID NO: 2612971 - DNA, 25 bp, Homo sapien
cagacgattggccaccgacatgatg

SEQ ID NO: 2612972 - DNA, 25 bp, Homo sapien
gttacgcagcaaggactaaaagagc

SEQ ID NO: 2612973 - DNA, 25 bp, Homo sapien
tattctggttaccacctcgtgggct

SEQ ID NO: 2612974 - DNA, 25 bp, Homo sapien
cagggccaagtgacttcagagctca

SEQ ID NO: 2612975 - DNA, 25 bp, Homo sapien
ctcacatgcggagctcacagtatgt

SEQ ID NO: 2612976 - DNA, 25 bp, Homo sapien
caggatcatcaacggtcctgcggca

SEQ ID NO: 2612977 - DNA, 25 bp, Homo sapien
tggctcaatctcctccactgacacc

SEQ ID NO: 2612978 - DNA, 25 bp, Homo sapien
tccaggatcatcaacggtcctgcgg

SEQ ID NO: 2612979 - DNA, 25 bp, Homo sapien
atcatcaacagtcctgcggcagcca

SEQ ID NO: 2612980 - DNA, 25 bp, Homo sapien
atcccggctcaatctcctccactga

SEQ ID NO: 2612981 - DNA, 25 bp, Homo sapien
aatcccggctcaatctcctccactg

SEQ ID NO: 2612982 - DNA, 25 bp, Homo sapien
gcagccatcccaatcccggctcaat

SEQ ID NO: 2612983 - DNA, 25 bp, Homo sapien
tccaggatcatcaacggtcctgcgg

SEQ ID NO: 2612984 - DNA, 25 bp, Homo sapien
ggcagccatcccaatcctggctcaa

SEQ ID NO: 2612985 - DNA, 25 bp, Homo sapien
tggctcaatctcctccactgacacc

SEQ ID NO: 2612986 - DNA, 25 bp, Homo sapien
gatcatcaacagtcctgcggcagcc

SEQ ID NO: 2612987 - DNA, 25 bp, Homo sapien
atcatcaacagtcctgcggcagcca

SEQ ID NO: 2612988 - DNA, 25 bp, Homo sapien
accatgaatccacgttgctcatata

SEQ ID NO: 2612989 - DNA, 25 bp, Homo sapien
tctgagggaaggtctacctcaccgc

SEQ ID NO: 2612990 - DNA, 25 bp, Homo sapien
caccgcaagctttacaccatgaatc

SEQ ID NO: 2612991 - DNA, 25 bp, Homo sapien
tcatatattccctggtggtgatgaa

SEQ ID NO: 2612992 - DNA, 25 bp, Homo sapien
taagccctgaagtcacatgagatcc

SEQ ID NO: 2612993 - DNA, 25 bp, Homo sapien
tggaggtgccaaaagaggtgtccct

SEQ ID NO: 2612994 - DNA, 25 bp, Homo sapien
cacgggcaggtctaattaaagcaca

SEQ ID NO: 2612995 - DNA, 25 bp, Homo sapien
tcactgcagaactagggaaggcctc

SEQ ID NO: 2612996 - DNA, 25 bp, Homo sapien
gccatcacccactgatacagtgcct

SEQ ID NO: 2612997 - DNA, 25 bp, Homo sapien
acccactgatacagtgcctttaaac

SEQ ID NO: 2612998 - DNA, 25 bp, Homo sapien
tcacccactgatacagtgcctttaa

SEQ ID NO: 2612999 - DNA, 25 bp, Homo sapien
catcacccactgatacagtgccttt

SEQ ID NO: 2613000 - DNA, 25 bp, Homo sapien
acagcactgcatgtcgctacagcaa

SEQ ID NO: 2613001 - DNA, 25 bp, Homo sapien
gcaacactgcgatctttaatgaggc

SEQ ID NO: 2613002 - DNA, 25 bp, Homo sapien
aaaagaagtgactctaccgcaaggg

SEQ ID NO: 2613003 - DNA, 25 bp, Homo sapien
ggctgttggctctgatactatggca

SEQ ID NO: 2613004 - DNA, 25 bp, Homo sapien
cacacgaagcctgggaatgatttca

SEQ ID NO: 2613005 - DNA, 25 bp, Homo sapien
gctgaacttattctcatatcaaggt

SEQ ID NO: 2613006 - DNA, 25 bp, Homo sapien
tccacacgaagcctgggaatgattt

SEQ ID NO: 2613007 - DNA, 25 bp, Homo sapien
ctccaactcttgctgaacttattct

SEQ ID NO: 2613008 - DNA, 25 bp, Homo sapien
gctcgccatggcctgcaaagcacag

SEQ ID NO: 2613009 - DNA, 25 bp, Homo sapien
ttagctcgccatggcctgcaaagca

SEQ ID NO: 2613010 - DNA, 25 bp, Homo sapien
tcgccatggcctgcaaagcacagac

SEQ ID NO: 2613011 - DNA, 25 bp, Homo sapien
tagctcgccatggcctgcaaagcac

SEQ ID NO: 2613012 - DNA, 25 bp, Homo sapien
tatcaattaggtccaaacgcagtgt

SEQ ID NO: 2613013 - DNA, 25 bp, Homo sapien
tctggtactgggatctctacgtttc

SEQ ID NO: 2613014 - DNA, 25 bp, Homo sapien
acaagggatgaacgtggctctgacc

SEQ ID NO: 2613015 - DNA, 25 bp, Homo sapien
gaatattcttcacctgcacaaggga

SEQ ID NO: 2613016 - DNA, 25 bp, Homo sapien
gagcttgtcaaggagcgacttccca

SEQ ID NO: 2613017 - DNA, 25 bp, Homo sapien
ctgatgcagccggaccttgcggtgt

SEQ ID NO: 2613018 - DNA, 25 bp, Homo sapien
tgctgaacgtcctgctggaaaacac

SEQ ID NO: 2613019 - DNA, 25 bp, Homo sapien
atccaggacatggtgcacggccttg

SEQ ID NO: 2613020 - DNA, 25 bp, Homo sapien
tgcagaagggcatgaggcgaaactg

SEQ ID NO: 2613021 - DNA, 25 bp, Homo sapien
cagaagggcatgaggcgaaactgac

SEQ ID NO: 2613022 - DNA, 25 bp, Homo sapien
gcagaagggcatgaggcgaaactga

SEQ ID NO: 2613023 - DNA, 25 bp, Homo sapien
cacttgccgctccttggatgggtcc

SEQ ID NO: 2613024 - DNA, 25 bp, Homo sapien
tcttctgtcctactcttgctggaat

SEQ ID NO: 2613025 - DNA, 25 bp, Homo sapien
cactaggcacttgccgctccttgga

SEQ ID NO: 2613026 - DNA, 25 bp, Homo sapien
gcctcttctgtcctactcttgctgg

SEQ ID NO: 2613027 - DNA, 25 bp, Homo sapien
tcctaaaggactaaactcctctctc

SEQ ID NO: 2613028 - DNA, 25 bp, Homo sapien
catggtcacgggcaattgcagcttc

SEQ ID NO: 2613029 - DNA, 25 bp, Homo sapien
ccctgtgactaaaagcaccactcaa

SEQ ID NO: 2613030 - DNA, 25 bp, Homo sapien
tggtcatgggagctccttttccctt

SEQ ID NO: 2613031 - DNA, 25 bp, Homo sapien
gggagaccccagaccgcattattca

SEQ ID NO: 2613032 - DNA, 25 bp, Homo sapien
tctttcctagtgctctggcgtactt

SEQ ID NO: 2613033 - DNA, 25 bp, Homo sapien
gctctggcgtactttactcatgaaa

SEQ ID NO: 2613034 - DNA, 25 bp, Homo sapien
tactcatgaaatcactggtcttatt

SEQ ID NO: 2613035 - DNA, 25 bp, Homo sapien
cttcccagacagtcctgttatctat

SEQ ID NO: 2613036 - DNA, 25 bp, Homo sapien
gacagtcctgttatctatttgctct

SEQ ID NO: 2613037 - DNA, 25 bp, Homo sapien
cctgttatctatttgctctgtgtcc

SEQ ID NO: 2613038 - DNA, 25 bp, Homo sapien
cccagacagtcctgttatctatttg

SEQ ID NO: 2613039 - DNA, 25 bp, Homo sapien
cagagggtcctttctggtcaaggtc

SEQ ID NO: 2613040 - DNA, 25 bp, Homo sapien
tgcagaccttaacaaacctcttgtg

SEQ ID NO: 2613041 - DNA, 25 bp, Homo sapien
tacagacccttctagaactggcagg

SEQ ID NO: 2613042 - DNA, 25 bp, Homo sapien
tagtattacaggtaaattgcagacc

SEQ ID NO: 2613043 - DNA, 25 bp, Homo sapien
aaaatcttcatgacgtttctgcaat

SEQ ID NO: 2613044 - DNA, 25 bp, Homo sapien
aagagatttccccacacctgtatgt

SEQ ID NO: 2613045 - DNA, 25 bp, Homo sapien
ccgtggttctcgatccagtctagca

SEQ ID NO: 2613046 - DNA, 25 bp, Homo sapien
tgctctggcccgatgaagagatttc

SEQ ID NO: 2613047 - DNA, 25 bp, Homo sapien
catttgaccggacacacactgttgt

SEQ ID NO: 2613048 - DNA, 25 bp, Homo sapien
gatacaactccaacatcctctggtg

SEQ ID NO: 2613049 - DNA, 25 bp, Homo sapien
gcaggaagagccaagtctcattatt

SEQ ID NO: 2613050 - DNA, 25 bp, Homo sapien
cagcctctggccgtctttagtaaaa

SEQ ID NO: 2613051 - DNA, 25 bp, Homo sapien
agctgagcgtcacctcggaactcct

SEQ ID NO: 2613052 - DNA, 25 bp, Homo sapien
catgctgaatgaagctaacggtgta

SEQ ID NO: 2613053 - DNA, 25 bp, Homo sapien
tgcatctctatcatgggcacaacgg

SEQ ID NO: 2613054 - DNA, 25 bp, Homo sapien
gcgtcacctcggaactcctgtgtct

SEQ ID NO: 2613055 - DNA, 25 bp, Homo sapien
tgcggaggggtccacaggtgggagg

SEQ ID NO: 2613056 - DNA, 25 bp, Homo sapien
ctgcggaggggtccacaggtgggag

SEQ ID NO: 2613057 - DNA, 25 bp, Homo sapien
cttaattcctaataatctgaggctg

SEQ ID NO: 2613058 - DNA, 25 bp, Homo sapien
gaaggcatgcgagagccctgatgct

SEQ ID NO: 2613059 - DNA, 25 bp, Homo sapien
gctgtaagtgggttcctccaacagg

SEQ ID NO: 2613060 - DNA, 25 bp, Homo sapien
gccctgatgctgttacaggaagctg

SEQ ID NO: 2613061 - DNA, 25 bp, Homo sapien
ccagtaatttatccgcattggtgta

SEQ ID NO: 2613062 - DNA, 25 bp, Homo sapien
cacgccgaacgaaatcttgaatccg

SEQ ID NO: 2613063 - DNA, 25 bp, Homo sapien
taggatctttcgctgctcaacacgc

SEQ ID NO: 2613064 - DNA, 25 bp, Homo sapien
tgaatccggtcttccagctgatggg

SEQ ID NO: 2613065 - DNA, 25 bp, Homo sapien
gattaacaggtgcatgcctatgaca

SEQ ID NO: 2613066 - DNA, 25 bp, Homo sapien
tatatgatttctaccaagaataaca

SEQ ID NO: 2613067 - DNA, 25 bp, Homo sapien
gtacctacctatttttcacacacca

SEQ ID NO: 2613068 - DNA, 25 bp, Homo sapien
taatattattcgtaccaggttggct

SEQ ID NO: 2613069 - DNA, 25 bp, Homo sapien
aaaaacactgctgttacaaaagcca

SEQ ID NO: 2613070 - DNA, 25 bp, Homo sapien
ctgctgttacaaaagccaatgagcc

SEQ ID NO: 2613071 - DNA, 25 bp, Homo sapien
aacactgctgttacaaaagccaatg

SEQ ID NO: 2613072 - DNA, 25 bp, Homo sapien
gctgttacaaaagccaatgagccca

SEQ ID NO: 2613073 - DNA, 25 bp, Homo sapien
tcgttcatctgatatgcaaatacat

SEQ ID NO: 2613074 - DNA, 25 bp, Homo sapien
ttaagaagaacagactcagacaatg

SEQ ID NO: 2613075 - DNA, 25 bp, Homo sapien
tctaggcccatctagcttttcattt

SEQ ID NO: 2613076 - DNA, 25 bp, Homo sapien
taattgtatgatctgcttaagaaga

SEQ ID NO: 2613077 - DNA, 25 bp, Homo sapien
tatactcctggagcaaactcggtga

SEQ ID NO: 2613078 - DNA, 25 bp, Homo sapien
taccattgccttgagagaccctttg

SEQ ID NO: 2613079 - DNA, 25 bp, Homo sapien
tgcagaactagaaccaagaggcttc

SEQ ID NO: 2613080 - DNA, 25 bp, Homo sapien
gaaatctgggccctctaagcagtgg

SEQ ID NO: 2613081 - DNA, 25 bp, Homo sapien
tgtagagtaaaaagccacacctccc

SEQ ID NO: 2613082 - DNA, 25 bp, Homo sapien
cctgtttagtgacaggccctgcact

SEQ ID NO: 2613083 - DNA, 25 bp, Homo sapien
ctttgcacaagagatataaggcatc

SEQ ID NO: 2613084 - DNA, 25 bp, Homo sapien
aaggcttggaagctgggaaccaaat

SEQ ID NO: 2613085 - DNA, 25 bp, Homo sapien
ggacttacaacggttcagcctgtga

SEQ ID NO: 2613086 - DNA, 25 bp, Homo sapien
caaatggtcctcaacctaagatggc

SEQ ID NO: 2613087 - DNA, 25 bp, Homo sapien
actccatcacacatgtaagttgagg

SEQ ID NO: 2613088 - DNA, 25 bp, Homo sapien
aacttgacgatggacttatttgggc

SEQ ID NO: 2613089 - DNA, 25 bp, Homo sapien
tgagatgactggtccagcatcatcc

SEQ ID NO: 2613090 - DNA, 25 bp, Homo sapien
gatgactggtccagcatcatccacc

SEQ ID NO: 2613091 - DNA, 25 bp, Homo sapien
agatgactggtccagcatcatccac

SEQ ID NO: 2613092 - DNA, 25 bp, Homo sapien
atgactggtccagcatcatccacca

SEQ ID NO: 2613093 - DNA, 25 bp, Homo sapien
acatgcatatacacgcaggaaaaac

SEQ ID NO: 2613094 - DNA, 25 bp, Homo sapien
ggaaaaacacatcctcacgtgcatg

SEQ ID NO: 2613095 - DNA, 25 bp, Homo sapien
catatacacgcaggaaaaacatgct

SEQ ID NO: 2613096 - DNA, 25 bp, Homo sapien
gtgcatgtgcacgtacatacagaca

SEQ ID NO: 2613097 - DNA, 25 bp, Homo sapien
gaaggactcttccaatttgcactaa

SEQ ID NO: 2613098 - DNA, 25 bp, Homo sapien
catgaaggactcttccaatttgcac

SEQ ID NO: 2613099 - DNA, 25 bp, Homo sapien
aggactcttccaatttgcactaaca

SEQ ID NO: 2613100 - DNA, 25 bp, Homo sapien
agcatgaaggactcttccaatttgc

SEQ ID NO: 2613101 - DNA, 25 bp, Homo sapien
atcatcaataagatgctttcttgtt

SEQ ID NO: 2613102 - DNA, 25 bp, Homo sapien
atcaataagatgctttcttgttctt

SEQ ID NO: 2613103 - DNA, 25 bp, Homo sapien
tcaaatctgaactgatgctctgcac

SEQ ID NO: 2613104 - DNA, 25 bp, Homo sapien
catcaataagatgctttcttgttct

SEQ ID NO: 2613105 - DNA, 25 bp, Homo sapien
gcctccaccgactcggcatacacgt

SEQ ID NO: 2613106 - DNA, 25 bp, Homo sapien
ccaccgactcggcatacacgtcgtc

SEQ ID NO: 2613107 - DNA, 25 bp, Homo sapien
ccgactcggcatacacgtcgtccag

SEQ ID NO: 2613108 - DNA, 25 bp, Homo sapien
actcggcatacacgtcgtccagcag

SEQ ID NO: 2613109 - DNA, 25 bp, Homo sapien
caaagcgcttgatgaggtcctgcac

SEQ ID NO: 2613110 - DNA, 25 bp, Homo sapien
ccaaagcgcttgatgaggtcctgca

SEQ ID NO: 2613111 - DNA, 25 bp, Homo sapien
ccttccttgatcacgttgacagtca

SEQ ID NO: 2613112 - DNA, 25 bp, Homo sapien
tccccttccttgatcacgttgacag

SEQ ID NO: 2613113 - DNA, 25 bp, Homo sapien
gatcacgttgacagtcacctgcagg

SEQ ID NO: 2613114 - DNA, 25 bp, Homo sapien
ccttgatcacgttgacagtcacctg

SEQ ID NO: 2613115 - DNA, 25 bp, Homo sapien
tcctccatctgcgactgcgcctcgt

SEQ ID NO: 2613116 - DNA, 25 bp, Homo sapien
tcgatggcgtccctctcgaagatgc

SEQ ID NO: 2613117 - DNA, 25 bp, Homo sapien
cctctcgaagatgcgcagctgcagg

SEQ ID NO: 2613118 - DNA, 25 bp, Homo sapien
tgcagcaccgtctcaatgtggttga

SEQ ID NO: 2613119 - DNA, 25 bp, Homo sapien
gaaaaactgcaactaatgcttctgg

SEQ ID NO: 2613120 - DNA, 25 bp, Homo sapien
ccatgccacatgtttagggtttgac

SEQ ID NO: 2613121 - DNA, 25 bp, Homo sapien
caaaagcgagtcctttgaagtcaga

SEQ ID NO: 2613122 - DNA, 25 bp, Homo sapien
gcgtggctggcctcccgtttattct

SEQ ID NO: 2613123 - DNA, 25 bp, Homo sapien
cacatcaatccgaacacgctgggag

SEQ ID NO: 2613124 - DNA, 25 bp, Homo sapien
gggagtcgatgacaataagaaatga

SEQ ID NO: 2613125 - DNA, 25 bp, Homo sapien
tgaggcacccacatcaatccgaaca

SEQ ID NO: 2613126 - DNA, 25 bp, Homo sapien
gaacacgctgggagtcgatgacaat

SEQ ID NO: 2613127 - DNA, 25 bp, Homo sapien
ggacctcattgacatactgcagaag

SEQ ID NO: 2613128 - DNA, 25 bp, Homo sapien
gaggcgctgctctgcaatcgtgaga

SEQ ID NO: 2613129 - DNA, 25 bp, Homo sapien
ggtcaaggctttgtctgcatggtgc

SEQ ID NO: 2613130 - DNA, 25 bp, Homo sapien
cttgcccttggtggatgacgtcaaa

SEQ ID NO: 2613131 - DNA, 25 bp, Homo sapien
gacccgagttgccatgtctacatct

SEQ ID NO: 2613132 - DNA, 25 bp, Homo sapien
gctccaggtgtttccgatgctgctc

SEQ ID NO: 2613133 - DNA, 25 bp, Homo sapien
tctgcggctaaatccaattcctgct

SEQ ID NO: 2613134 - DNA, 25 bp, Homo sapien
gtttttcatgaagaaactccagcag

SEQ ID NO: 2613135 - DNA, 25 bp, Homo sapien
gagctggctgtgataagtccggcat

SEQ ID NO: 2613136 - DNA, 25 bp, Homo sapien
taacatggactctccgttgcggatc

SEQ ID NO: 2613137 - DNA, 25 bp, Homo sapien
tgctctgcctcttgtaacgagctgg

SEQ ID NO: 2613138 - DNA, 25 bp, Homo sapien
tcaatggcatgctggaactgctcgt

SEQ ID NO: 2613139 - DNA, 25 bp, Homo sapien
tgatatacacctggtcttgctgagc

SEQ ID NO: 2613140 - DNA, 25 bp, Homo sapien
gaggagttttgctgtcggcatcgtt

SEQ ID NO: 2613141 - DNA, 25 bp, Homo sapien
ttactgactgatagtgaattcatga

SEQ ID NO: 2613142 - DNA, 25 bp, Homo sapien
tgaggttggtaacatagcagaaatg

SEQ ID NO: 2613143 - DNA, 25 bp, Homo sapien
catgtcgtagtggttggcctgtagc

SEQ ID NO: 2613144 - DNA, 25 bp, Homo sapien
cgttgacgagcttgaggcgatcttc

SEQ ID NO: 2613145 - DNA, 25 bp, Homo sapien
tagaaagcgacagaggcgttgacga

SEQ ID NO: 2613146 - DNA, 25 bp, Homo sapien
gcagtcccggatcatgtccatgtcg

SEQ ID NO: 2613147 - DNA, 25 bp, Homo sapien
gctcagacttggcatctgccactgc

SEQ ID NO: 2613148 - DNA, 25 bp, Homo sapien
tgccactgccgactggtatccctgg

SEQ ID NO: 2613149 - DNA, 25 bp, Homo sapien
gaaagccctttcagtcgggctctgg

SEQ ID NO: 2613150 - DNA, 25 bp, Homo sapien
ggatgaagatgctgtcaggaggatc

SEQ ID NO: 2613151 - DNA, 25 bp, Homo sapien
ctctcttgtactcctgttccaggct

SEQ ID NO: 2613152 - DNA, 25 bp, Homo sapien
tcacgtggtccgtctcagagtttgg

SEQ ID NO: 2613153 - DNA, 25 bp, Homo sapien
tctgctccaggtgcttgctgatcat

SEQ ID NO: 2613154 - DNA, 25 bp, Homo sapien
agagtttgggcccagcttatccgcc

SEQ ID NO: 2613155 - DNA, 25 bp, Homo sapien
tgatcatgggcgtcacgtggtccgt

SEQ ID NO: 2613156 - DNA, 25 bp, Homo sapien
caggtatttcaggaagacgtctgca

SEQ ID NO: 2613157 - DNA, 25 bp, Homo sapien
tcaggagctttgatgtgcgtcacca

SEQ ID NO: 2613158 - DNA, 25 bp, Homo sapien
catgttcacgctgttcctgtgcagg

SEQ ID NO: 2613159 - DNA, 25 bp, Homo sapien
cattcctccgagcaagggtgcaagc

SEQ ID NO: 2613160 - DNA, 25 bp, Homo sapien
aaagaccacgtactgctgacactgg

SEQ ID NO: 2613161 - DNA, 25 bp, Homo sapien
cctgttctcccgttggaagagttca

SEQ ID NO: 2613162 - DNA, 25 bp, Homo sapien
ctcatggtccagtaatgcaataccc

SEQ ID NO: 2613163 - DNA, 25 bp, Homo sapien
tgcaataccctgttctcccgttgga

SEQ ID NO: 2613164 - DNA, 25 bp, Homo sapien
tgttccttaagtgggaaacctctgc

SEQ ID NO: 2613165 - DNA, 25 bp, Homo sapien
agctaaaaagcatgtatccaatgcc

SEQ ID NO: 2613166 - DNA, 25 bp, Homo sapien
tatccaatgcctgctctggatcagc

SEQ ID NO: 2613167 - DNA, 25 bp, Homo sapien
agtgggaaacctctgctaagaaagt

SEQ ID NO: 2613168 - DNA, 25 bp, Homo sapien
tggaaaggtagaactcgccattgtc

SEQ ID NO: 2613169 - DNA, 25 bp, Homo sapien
tgtgctgtatactggagcccgtgga

SEQ ID NO: 2613170 - DNA, 25 bp, Homo sapien
gaactcgccattgtcatggatccat

SEQ ID NO: 2613171 - DNA, 25 bp, Homo sapien
tggaactcctcgtgctctttcagga

SEQ ID NO: 2613172 - DNA, 25 bp, Homo sapien
ttgtgaggcaaatgaatccgactgc

SEQ ID NO: 2613173 - DNA, 25 bp, Homo sapien
gaaacctcaaacacagtggcgactt

SEQ ID NO: 2613174 - DNA, 25 bp, Homo sapien
cagaaacctcaaacacagtggcgac

SEQ ID NO: 2613175 - DNA, 25 bp, Homo sapien
tattgtgaggcaaatgaatccgact

SEQ ID NO: 2613176 - DNA, 25 bp, Homo sapien
ggtcctgtacttctccatccgcaga

SEQ ID NO: 2613177 - DNA, 25 bp, Homo sapien
catgggcatgccctttttcacaaaa

SEQ ID NO: 2613178 - DNA, 25 bp, Homo sapien
catcagccagctgtatcaatagctt

SEQ ID NO: 2613179 - DNA, 25 bp, Homo sapien
tgtacctcttatccacagcagtaac

SEQ ID NO: 2613180 - DNA, 25 bp, Homo sapien
ggaatgatatctagctggagacttt

SEQ ID NO: 2613181 - DNA, 25 bp, Homo sapien
tgcgggcagatttccgcttctcttc

SEQ ID NO: 2613182 - DNA, 25 bp, Homo sapien
ggctggaatgatatctagctggaga

SEQ ID NO: 2613183 - DNA, 25 bp, Homo sapien
ctttcctgcgggcagatttccgctt

SEQ ID NO: 2613184 - DNA, 25 bp, Homo sapien
gaatcctggtagattctgaaagact

SEQ ID NO: 2613185 - DNA, 25 bp, Homo sapien
gtccaaatgacattctcttcacttt

SEQ ID NO: 2613186 - DNA, 25 bp, Homo sapien
acacacagaagcatgtctgtccaaa

SEQ ID NO: 2613187 - DNA, 25 bp, Homo sapien
cacagaagcatgtctgtccaaatga

SEQ ID NO: 2613188 - DNA, 25 bp, Homo sapien
atacattcccggaggtctcttacat

SEQ ID NO: 2613189 - DNA, 25 bp, Homo sapien
catacattcccggaggtctcttaca

SEQ ID NO: 2613190 - DNA, 25 bp, Homo sapien
tccatacattcccggaggtctctta

SEQ ID NO: 2613191 - DNA, 25 bp, Homo sapien
atccatacattcccggaggtctctt

SEQ ID NO: 2613192 - DNA, 25 bp, Homo sapien
caatgccaggtggaatctcttccac

SEQ ID NO: 2613193 - DNA, 25 bp, Homo sapien
tgtttccgaagatgatgagttcttt

SEQ ID NO: 2613194 - DNA, 25 bp, Homo sapien
gaatctcttccacgccactggtcat

SEQ ID NO: 2613195 - DNA, 25 bp, Homo sapien
aattcgtagatttcttgcatgtttc

SEQ ID NO: 2613196 - DNA, 25 bp, Homo sapien
tcagaatacacttctgttgcttctt

SEQ ID NO: 2613197 - DNA, 25 bp, Homo sapien
atgcattttattttggtcagaatac

SEQ ID NO: 2613198 - DNA, 25 bp, Homo sapien
gcattttattttggtcagaatacac

SEQ ID NO: 2613199 - DNA, 25 bp, Homo sapien
tattttggtcagaatacacttctgt

SEQ ID NO: 2613200 - DNA, 25 bp, Homo sapien
tttttccagctcctttaggaatatg

SEQ ID NO: 2613201 - DNA, 25 bp, Homo sapien
agtaacaaaacaatgtccaacatcc

SEQ ID NO: 2613202 - DNA, 25 bp, Homo sapien
tgtccaacatcctctggcaactgtt

SEQ ID NO: 2613203 - DNA, 25 bp, Homo sapien
ggcaactgttcatatttttccagct

SEQ ID NO: 2613204 - DNA, 25 bp, Homo sapien
gaggtaaagtctatttctccgcaag

SEQ ID NO: 2613205 - DNA, 25 bp, Homo sapien
tgaagtatgcaattctttgaggtaa

SEQ ID NO: 2613206 - DNA, 25 bp, Homo sapien
aaatgaagaccatccctcctaactt

SEQ ID NO: 2613207 - DNA, 25 bp, Homo sapien
tccgcaagcatggatatgagcagaa

SEQ ID NO: 2613208 - DNA, 25 bp, Homo sapien
tccaatatcagctgagtagaatcag

SEQ ID NO: 2613209 - DNA, 25 bp, Homo sapien
tttgcaatatgtgacatacatctga

SEQ ID NO: 2613210 - DNA, 25 bp, Homo sapien
taggaccctgcatgttccaatatca

SEQ ID NO: 2613211 - DNA, 25 bp, Homo sapien
gtcaaaataggaccctgcatgttcc

SEQ ID NO: 2613212 - DNA, 25 bp, Homo sapien
cagaagacaatagaagaatagccca

SEQ ID NO: 2613213 - DNA, 25 bp, Homo sapien
taatgccgcattttatgtacacaac

SEQ ID NO: 2613214 - DNA, 25 bp, Homo sapien
gaatagcccaatagacatgatagac

SEQ ID NO: 2613215 - DNA, 25 bp, Homo sapien
cacaacttggaaaattatggtctct

SEQ ID NO: 2613216 - DNA, 25 bp, Homo sapien
tgtgtatcacgttctaaagctccat

SEQ ID NO: 2613217 - DNA, 25 bp, Homo sapien
tcacataagagctgatgatcccacc

SEQ ID NO: 2613218 - DNA, 25 bp, Homo sapien
ctcttttgtgctgaataagccgctg

SEQ ID NO: 2613219 - DNA, 25 bp, Homo sapien
ggcacatatttgaccaagttctgga

SEQ ID NO: 2613220 - DNA, 25 bp, Homo sapien
ggctaatccatgtcgctgctgtatc

SEQ ID NO: 2613221 - DNA, 25 bp, Homo sapien
gatacttcgttattcgctgaactgg

SEQ ID NO: 2613222 - DNA, 25 bp, Homo sapien
tttaaaaggagctgatacttcgtta

SEQ ID NO: 2613223 - DNA, 25 bp, Homo sapien
gaagaaatggaattggctaatccat

SEQ ID NO: 2613224 - DNA, 25 bp, Homo sapien
ttccttcctcacagcacgtcagcag

SEQ ID NO: 2613225 - DNA, 25 bp, Homo sapien
gctcgcttcggcacgctgagcatca

SEQ ID NO: 2613226 - DNA, 25 bp, Homo sapien
atcattggctcgcttcggcacgctg

SEQ ID NO: 2613227 - DNA, 25 bp, Homo sapien
tggcatcattggctcgcttcggcac

SEQ ID NO: 2613228 - DNA, 25 bp, Homo sapien
agcaatgacactgattctttaagaa

SEQ ID NO: 2613229 - DNA, 25 bp, Homo sapien
tcttaaccactaacatagagacata

SEQ ID NO: 2613230 - DNA, 25 bp, Homo sapien
agaaactgcatagatgcacactggg

SEQ ID NO: 2613231 - DNA, 25 bp, Homo sapien
agtgtcattagaaactgcatagatg

SEQ ID NO: 2613232 - DNA, 25 bp, Homo sapien
tcgtgctctggacttcactactgct

SEQ ID NO: 2613233 - DNA, 25 bp, Homo sapien
gacagtctgcatgtgaatcattcgt

SEQ ID NO: 2613234 - DNA, 25 bp, Homo sapien
tggacttcactactgctcctctctt

SEQ ID NO: 2613235 - DNA, 25 bp, Homo sapien
catgtgaatcattcgtgctctggac

SEQ ID NO: 2613236 - DNA, 25 bp, Homo sapien
gagatgccgttctcgaccctttcga

SEQ ID NO: 2613237 - DNA, 25 bp, Homo sapien
acttggaaggattcctgtaggatga

SEQ ID NO: 2613238 - DNA, 25 bp, Homo sapien
aaaggaagagatgccgttctcgacc

SEQ ID NO: 2613239 - DNA, 25 bp, Homo sapien
tgccgttctcgaccctttcgaatta

SEQ ID NO: 2613240 - DNA, 25 bp, Homo sapien
tagacttacaattctgaacgcctat

SEQ ID NO: 2613241 - DNA, 25 bp, Homo sapien
gacttacaattctgaacgcctatac

SEQ ID NO: 2613242 - DNA, 25 bp, Homo sapien
tacaattctgaacgcctatacttac

SEQ ID NO: 2613243 - DNA, 25 bp, Homo sapien
tttagacttacaattctgaacgcct

SEQ ID NO: 2613244 - DNA, 25 bp, Homo sapien
gaacatttcaggacagattgggagg

SEQ ID NO: 2613245 - DNA, 25 bp, Homo sapien
tataaactccagagcaccctctagt

SEQ ID NO: 2613246 - DNA, 25 bp, Homo sapien
gcacaccggagataaatgatttcac

SEQ ID NO: 2613247 - DNA, 25 bp, Homo sapien
gaagagcaagtttcctaagtctata

SEQ ID NO: 2613248 - DNA, 25 bp, Homo sapien
ttatctgaagttggtgttctcccca

SEQ ID NO: 2613249 - DNA, 25 bp, Homo sapien
cagtgcaaatttgcaagggtctcct

SEQ ID NO: 2613250 - DNA, 25 bp, Homo sapien
aacatgttctgtgacacccaactct

SEQ ID NO: 2613251 - DNA, 25 bp, Homo sapien
cccacccacagtgcaaatttgcaag

SEQ ID NO: 2613252 - DNA, 25 bp, Homo sapien
caaggtcctacctggctaagagagg

SEQ ID NO: 2613253 - DNA, 25 bp, Homo sapien
gaattgatcgttacacttagagagt

SEQ ID NO: 2613254 - DNA, 25 bp, Homo sapien
tgttttacaactatgaggacatcat

SEQ ID NO: 2613255 - DNA, 25 bp, Homo sapien
catttcataatctgggtagtcgcaa

SEQ ID NO: 2613256 - DNA, 25 bp, Homo sapien
gaggacctgtctttaacattactaa

SEQ ID NO: 2613257 - DNA, 25 bp, Homo sapien
ttctccggagtgacataggacagca

SEQ ID NO: 2613258 - DNA, 25 bp, Homo sapien
aacattactaacaggtagtgacagg

SEQ ID NO: 2613259 - DNA, 25 bp, Homo sapien
aaatgatgggtaaaggcagcctctt

SEQ ID NO: 2613260 - DNA, 25 bp, Homo sapien
tgcagttataattaacccgtcataa

SEQ ID NO: 2613261 - DNA, 25 bp, Homo sapien
taactcatcgtagatgaggtcacaa

SEQ ID NO: 2613262 - DNA, 25 bp, Homo sapien
tataagcataattccctgcagttat

SEQ ID NO: 2613263 - DNA, 25 bp, Homo sapien
cagcatttctcactgtgtatcctgt

SEQ ID NO: 2613264 - DNA, 25 bp, Homo sapien
cttagggatgtgaatgggctccttc

SEQ ID NO: 2613265 - DNA, 25 bp, Homo sapien
ccttctgtcttgtggcgggagcggt

SEQ ID NO: 2613266 - DNA, 25 bp, Homo sapien
cctggatgacttcgcggatatgctt

SEQ ID NO: 2613267 - DNA, 25 bp, Homo sapien
tcaggtggatcgtccgctcctggat

SEQ ID NO: 2613268 - DNA, 25 bp, Homo sapien
agacgtccgtgaggcgatggaaatc

SEQ ID NO: 2613269 - DNA, 25 bp, Homo sapien
tctccttggctgtccagatcctctc

SEQ ID NO: 2613270 - DNA, 25 bp, Homo sapien
gaaatcgtatcaggctggctgctgc

SEQ ID NO: 2613271 - DNA, 25 bp, Homo sapien
tgtccagcgtgttctgagacgtccg

SEQ ID NO: 2613272 - DNA, 25 bp, Homo sapien
actgttgccaattccagggcaggtt

SEQ ID NO: 2613273 - DNA, 25 bp, Homo sapien
agggcaggttttctatgttctgctg

SEQ ID NO: 2613274 - DNA, 25 bp, Homo sapien
gttgccaattccagggcaggttttc

SEQ ID NO: 2613275 - DNA, 25 bp, Homo sapien
catcactgttgccaattccagggca

SEQ ID NO: 2613276 - DNA, 25 bp, Homo sapien
cagagcagacccctaggagtttatc

SEQ ID NO: 2613277 - DNA, 25 bp, Homo sapien
ggaaatgccctgaatgcgggccact

SEQ ID NO: 2613278 - DNA, 25 bp, Homo sapien
caggtggcagcctcatggaaattca

SEQ ID NO: 2613279 - DNA, 25 bp, Homo sapien
gatctcaaatggtctggaaatgccc

SEQ ID NO: 2613280 - DNA, 25 bp, Homo sapien
tgtattcccagttcacgtaagccct

SEQ ID NO: 2613281 - DNA, 25 bp, Homo sapien
gcaggagataagtcgtggcaccagc

SEQ ID NO: 2613282 - DNA, 25 bp, Homo sapien
tccggaataatgaactggagactcc

SEQ ID NO: 2613283 - DNA, 25 bp, Homo sapien
gaggtgggtaccagccaaggaattc

SEQ ID NO: 2613284 - DNA, 25 bp, Homo sapien
accacgctcgactaattttttacat

SEQ ID NO: 2613285 - DNA, 25 bp, Homo sapien
ctgcccgccttggcctccctaagtg

SEQ ID NO: 2613286 - DNA, 25 bp, Homo sapien
tgcccgccttggcctccctaagtgc

SEQ ID NO: 2613287 - DNA, 25 bp, Homo sapien
ccacgctcgactaattttttacatt

SEQ ID NO: 2613288 - DNA, 25 bp, Homo sapien
tcttgcatgaaataataaggcctgg

SEQ ID NO: 2613289 - DNA, 25 bp, Homo sapien
gagaattactaacagccctagcaga

SEQ ID NO: 2613290 - DNA, 25 bp, Homo sapien
ggttaagtaccatggagatcagcaa

SEQ ID NO: 2613291 - DNA, 25 bp, Homo sapien
tctgctgacagtgctccctggaaag

SEQ ID NO: 2613292 - DNA, 25 bp, Homo sapien
catctccaactgtaacttcgatcat

SEQ ID NO: 2613293 - DNA, 25 bp, Homo sapien
ctgcttcgagtctgaaacataactt

SEQ ID NO: 2613294 - DNA, 25 bp, Homo sapien
tgcttcgagtctgaaacataacttt

SEQ ID NO: 2613295 - DNA, 25 bp, Homo sapien
gcttcgagtctgaaacataacttta

SEQ ID NO: 2613296 - DNA, 25 bp, Homo sapien
agcaagaaacttcttaggaccattt

SEQ ID NO: 2613297 - DNA, 25 bp, Homo sapien
tagcatatcccagtgagaaatgccg

SEQ ID NO: 2613298 - DNA, 25 bp, Homo sapien
cccagtgagaaatgccggaggtgcc

SEQ ID NO: 2613299 - DNA, 25 bp, Homo sapien
ggaggtgccgtgcaggccccacagg

SEQ ID NO: 2613300 - DNA, 25 bp, Homo sapien
cctgtggcgtggcaggtaaacgctt

SEQ ID NO: 2613301 - DNA, 25 bp, Homo sapien
gtcatacacatgaattggaatgaaa

SEQ ID NO: 2613302 - DNA, 25 bp, Homo sapien
tgatctcggaagacttgagtgtgtt

SEQ ID NO: 2613303 - DNA, 25 bp, Homo sapien
gtgaagattgatctcggaagacttg

SEQ ID NO: 2613304 - DNA, 25 bp, Homo sapien
gacttgagtgtgttgtcatacacat

SEQ ID NO: 2613305 - DNA, 25 bp, Homo sapien
tcttcgctgcaaacaattctacttc

SEQ ID NO: 2613306 - DNA, 25 bp, Homo sapien
gggtgatgcagtcagtcttcgctgc

SEQ ID NO: 2613307 - DNA, 25 bp, Homo sapien
gcagtcagtcttcgctgcaaacaat

SEQ ID NO: 2613308 - DNA, 25 bp, Homo sapien
tctctcggactggtgtggtgggtga

SEQ ID NO: 2613309 - DNA, 25 bp, Homo sapien
gggacttctcacactgcgagttgtc

SEQ ID NO: 2613310 - DNA, 25 bp, Homo sapien
cactgcgagttgtcacgtcttcctt

SEQ ID NO: 2613311 - DNA, 25 bp, Homo sapien
acttctcacactgcgagttgtcacg

SEQ ID NO: 2613312 - DNA, 25 bp, Homo sapien
acactgcgagttgtcacgtcttcct

SEQ ID NO: 2613313 - DNA, 25 bp, Homo sapien
gctgtgtgctgttgattatcctcct

SEQ ID NO: 2613314 - DNA, 25 bp, Homo sapien
atcctccgatggctcacactcccgc

SEQ ID NO: 2613315 - DNA, 25 bp, Homo sapien
tcacactcccgctgtgttctggggc

SEQ ID NO: 2613316 - DNA, 25 bp, Homo sapien
gattatcctcctgttgtaggagcct

SEQ ID NO: 2613317 - DNA, 25 bp, Homo sapien
tccgagaagtccctctcgtgcctgt

SEQ ID NO: 2613318 - DNA, 25 bp, Homo sapien
tctattctaagctccccactggctc

SEQ ID NO: 2613319 - DNA, 25 bp, Homo sapien
cacgtcccctctattctaagctccc

SEQ ID NO: 2613320 - DNA, 25 bp, Homo sapien
cccactggctccgagaagtccctct

SEQ ID NO: 2613321 - DNA, 25 bp, Homo sapien
aggttctccttccaagccatctaaa

SEQ ID NO: 2613322 - DNA, 25 bp, Homo sapien
cttttccctccaaatgctgtcgagc

SEQ ID NO: 2613323 - DNA, 25 bp, Homo sapien
tgttgcgcggctctccgatcacttc

SEQ ID NO: 2613324 - DNA, 25 bp, Homo sapien
aatgctgtcgagcagatgttgcgcg

SEQ ID NO: 2613325 - DNA, 25 bp, Homo sapien
tcaagtcactcaagctaaaaaaccc

SEQ ID NO: 2613326 - DNA, 25 bp, Homo sapien
atcaagtcactcaagctaaaaaacc

SEQ ID NO: 2613327 - DNA, 25 bp, Homo sapien
catcaagtcactcaagctaaaaaac

SEQ ID NO: 2613328 - DNA, 25 bp, Homo sapien
gagccatggtgccttcaggtacagc

SEQ ID NO: 2613329 - DNA, 25 bp, Homo sapien
aaactctgcttgaaggctatctggg

SEQ ID NO: 2613330 - DNA, 25 bp, Homo sapien
cacaagaacgggactgaacaggcaa

SEQ ID NO: 2613331 - DNA, 25 bp, Homo sapien
tatgaccctgaaaccgaagcaaagc

SEQ ID NO: 2613332 - DNA, 25 bp, Homo sapien
ctacttctggagtgggcgatgcaca

SEQ ID NO: 2613333 - DNA, 25 bp, Homo sapien
cagtcaggcttgtcatgcggccgct

SEQ ID NO: 2613334 - DNA, 25 bp, Homo sapien
cccgtcggatggtcagctcgttgct

SEQ ID NO: 2613335 - DNA, 25 bp, Homo sapien
gaagtcatggatcaccactgtcagc

SEQ ID NO: 2613336 - DNA, 25 bp, Homo sapien
tttctgagtcgtgggtgaaatcctc

SEQ ID NO: 2613337 - DNA, 25 bp, Homo sapien
cctcttcaggtgctgatggactgga

SEQ ID NO: 2613338 - DNA, 25 bp, Homo sapien
tgaccatgtgctgaaggcacagctg

SEQ ID NO: 2613339 - DNA, 25 bp, Homo sapien
ggaagctcatgcacattaacaggca

SEQ ID NO: 2613340 - DNA, 25 bp, Homo sapien
aatgcaaagcattctggcaacaggc

SEQ ID NO: 2613341 - DNA, 25 bp, Homo sapien
gaggcatgcttaagttcaccagggc

SEQ ID NO: 2613342 - DNA, 25 bp, Homo sapien
catttaggtcctgagaaatccggaa

SEQ ID NO: 2613343 - DNA, 25 bp, Homo sapien
gttttccggacgaagccaagtgtga

SEQ ID NO: 2613344 - DNA, 25 bp, Homo sapien
caccgggacatgcaagcttccaaag

SEQ ID NO: 2613345 - DNA, 25 bp, Homo sapien
ttattcaatcctgctatgcccggcg

SEQ ID NO: 2613346 - DNA, 25 bp, Homo sapien
gaaggcgccatcagacacgaaggct

SEQ ID NO: 2613347 - DNA, 25 bp, Homo sapien
aaagcaaacttcgtccacaaaacag

SEQ ID NO: 2613348 - DNA, 25 bp, Homo sapien
tgaaagcacaagcaaaaaggccacc

SEQ ID NO: 2613349 - DNA, 25 bp, Homo sapien
ggaagaacgcatcctccaagctcac

SEQ ID NO: 2613350 - DNA, 25 bp, Homo sapien
gcagatgactcatactctgaacttc

SEQ ID NO: 2613351 - DNA, 25 bp, Homo sapien
gcagttttgaatcggcctttgctca

SEQ ID NO: 2613352 - DNA, 25 bp, Homo sapien
ggagcctctgtgtggaaatacttgc

SEQ ID NO: 2613353 - DNA, 25 bp, Homo sapien
gctaactagaccaagatttattctg

SEQ ID NO: 2613354 - DNA, 25 bp, Homo sapien
tgtgggtcttcagcgttccttggag

SEQ ID NO: 2613355 - DNA, 25 bp, Homo sapien
tcctggacagttccttgtgggtctt

SEQ ID NO: 2613356 - DNA, 25 bp, Homo sapien
gagactcagattcacctttgcggca

SEQ ID NO: 2613357 - DNA, 25 bp, Homo sapien
gatagtgtcaatacctgctcgtgga

SEQ ID NO: 2613358 - DNA, 25 bp, Homo sapien
caaagaactggctgacatgggacct

SEQ ID NO: 2613359 - DNA, 25 bp, Homo sapien
tgtgatgtagatgaagctcccaacc

SEQ ID NO: 2613360 - DNA, 25 bp, Homo sapien
gagttaatcactaaggcacacgcac

SEQ ID NO: 2613361 - DNA, 25 bp, Homo sapien
cccgcagcgctgtatatatcagtga

SEQ ID NO: 2613362 - DNA, 25 bp, Homo sapien
cacatgtgagggtatctcccgcagc

SEQ ID NO: 2613363 - DNA, 25 bp, Homo sapien
cacgcaaatatcattacacgcaaag

SEQ ID NO: 2613364 - DNA, 25 bp, Homo sapien
tgctttctagcacagttgccaatcc

SEQ ID NO: 2613365 - DNA, 25 bp, Homo sapien
tccattcagcacaggagttcctgct

SEQ ID NO: 2613366 - DNA, 25 bp, Homo sapien
aaacccctgcttcttagggctccat

SEQ ID NO: 2613367 - DNA, 25 bp, Homo sapien
cctgctgctttctagcacagttgcc

SEQ ID NO: 2613368 - DNA, 25 bp, Homo sapien
ttccgctctgcacaatatgtccaca

SEQ ID NO: 2613369 - DNA, 25 bp, Homo sapien
gcaccaccaggattgagtctctcag

SEQ ID NO: 2613370 - DNA, 25 bp, Homo sapien
taccccatagataatacctcctgct

SEQ ID NO: 2613371 - DNA, 25 bp, Homo sapien
gggcccctgaaatgtcataccattt

SEQ ID NO: 2613372 - DNA, 25 bp, Homo sapien
aacgcggaaccagcggaaatgcgga

SEQ ID NO: 2613373 - DNA, 25 bp, Homo sapien
aataagttttgacgccaaggcctat

SEQ ID NO: 2613374 - DNA, 25 bp, Homo sapien
tgagccactagacagaaacgcggaa

SEQ ID NO: 2613375 - DNA, 25 bp, Homo sapien
tgaagggcgacaacctgagccacta

SEQ ID NO: 2613376 - DNA, 25 bp, Homo sapien
caagttcacatctgtcagaggtgta

SEQ ID NO: 2613377 - DNA, 25 bp, Homo sapien
tcagaggtgtagcatcgcacagatg

SEQ ID NO: 2613378 - DNA, 25 bp, Homo sapien
catctgtcagaggtgtagcatcgca

SEQ ID NO: 2613379 - DNA, 25 bp, Homo sapien
tgtagcatcgcacagatgagggagt

SEQ ID NO: 2613380 - DNA, 25 bp, Homo sapien
cagacgcggtggatttcattctacc

SEQ ID NO: 2613381 - DNA, 25 bp, Homo sapien
cgcgcgcgctgcagttgggtttcac

SEQ ID NO: 2613382 - DNA, 25 bp, Homo sapien
aatgtgaagtgacagttgccctccc

SEQ ID NO: 2613383 - DNA, 25 bp, Homo sapien
cacagactggcagcgtgttgctcag

SEQ ID NO: 2613384 - DNA, 25 bp, Homo sapien
ccactggcttcaatccgttgggcat

SEQ ID NO: 2613385 - DNA, 25 bp, Homo sapien
tgacagaggacagcgagtccagcgt

SEQ ID NO: 2613386 - DNA, 25 bp, Homo sapien
taggtcgaggatccagtacttgcag

SEQ ID NO: 2613387 - DNA, 25 bp, Homo sapien
gctgcccgccgctgcagtaggctga

SEQ ID NO: 2613388 - DNA, 25 bp, Homo sapien
tggtcaccacggaacacgtttcagg

SEQ ID NO: 2613389 - DNA, 25 bp, Homo sapien
catatggctgtagttctcatggaga

SEQ ID NO: 2613390 - DNA, 25 bp, Homo sapien
actgcgcagccactggaaagaaagc

SEQ ID NO: 2613391 - DNA, 25 bp, Homo sapien
gcagtccccagatattaaaaaggtc

SEQ ID NO: 2613392 - DNA, 25 bp, Homo sapien
tgcagctcagcgagattatcaagaa

SEQ ID NO: 2613393 - DNA, 25 bp, Homo sapien
gttcagtgttaaggagagtcaccag

SEQ ID NO: 2613394 - DNA, 25 bp, Homo sapien
gcagtggtgagaatccatattccta

SEQ ID NO: 2613395 - DNA, 25 bp, Homo sapien
cagggacaaactggcttctacagca

SEQ ID NO: 2613396 - DNA, 25 bp, Homo sapien
tgtccttggctgaatcagtgcccgt

SEQ ID NO: 2613397 - DNA, 25 bp, Homo sapien
tggtgtgatgaaaggcacggccaca

SEQ ID NO: 2613398 - DNA, 25 bp, Homo sapien
cacggccacagaccggaggcgacag

SEQ ID NO: 2613399 - DNA, 25 bp, Homo sapien
taacagcacggatcttgtccttggc

SEQ ID NO: 2613400 - DNA, 25 bp, Homo sapien
cagggtcctcttttcagtctgacag

SEQ ID NO: 2613401 - DNA, 25 bp, Homo sapien
gtgatgtcgcatcagccctcgtggg

SEQ ID NO: 2613402 - DNA, 25 bp, Homo sapien
ggggagatccggttccctgcacctc

SEQ ID NO: 2613403 - DNA, 25 bp, Homo sapien
ctgcccgcatcgagccccaatgtgg

SEQ ID NO: 2613404 - DNA, 25 bp, Homo sapien
ggagagttccggtgaacatctgtct

SEQ ID NO: 2613405 - DNA, 25 bp, Homo sapien
gctcaacagcaggagagttccggtg

SEQ ID NO: 2613406 - DNA, 25 bp, Homo sapien
gtcttgcattgcaaattctccacgc

SEQ ID NO: 2613407 - DNA, 25 bp, Homo sapien
tgcattgcaaattctccacgctgtc

SEQ ID NO: 2613408 - DNA, 25 bp, Homo sapien
gacgacgaatctaaggacaagcgcc

SEQ ID NO: 2613409 - DNA, 25 bp, Homo sapien
taacgtcagccaaacatgcacacat

SEQ ID NO: 2613410 - DNA, 25 bp, Homo sapien
gcacacatgtgggtctgctgccgat

SEQ ID NO: 2613411 - DNA, 25 bp, Homo sapien
agccagggcgtttccgatgagacag

SEQ ID NO: 2613412 - DNA, 25 bp, Homo sapien
agccaataaatcaacctcacagaca

SEQ ID NO: 2613413 - DNA, 25 bp, Homo sapien
caactagtaggacctcagccaataa

SEQ ID NO: 2613414 - DNA, 25 bp, Homo sapien
acatcacaactagtaggacctcagc

SEQ ID NO: 2613415 - DNA, 25 bp, Homo sapien
tagtaggacctcagccaataaatca

SEQ ID NO: 2613416 - DNA, 25 bp, Homo sapien
tcaacagtctaaagaaacagcaagc

SEQ ID NO: 2613417 - DNA, 25 bp, Homo sapien
gacaaggaactatgagtgtggcccg

SEQ ID NO: 2613418 - DNA, 25 bp, Homo sapien
tgggacctgaggtacttccagggct

SEQ ID NO: 2613419 - DNA, 25 bp, Homo sapien
gagacagcccggatgcctgagatgt

SEQ ID NO: 2613420 - DNA, 25 bp, Homo sapien
cagttcctagcctcaggaaggacaa

SEQ ID NO: 2613421 - DNA, 25 bp, Homo sapien
ggtggcagatttcagagtcacttac

SEQ ID NO: 2613422 - DNA, 25 bp, Homo sapien
cactggacagagataatgaacacct

SEQ ID NO: 2613423 - DNA, 25 bp, Homo sapien
aaattatcctgtactataggcgagg

SEQ ID NO: 2613424 - DNA, 25 bp, Homo sapien
ctgtaggggctgcactgcctctctg

SEQ ID NO: 2613425 - DNA, 25 bp, Homo sapien
aggggctgcactgcctctctggctc

SEQ ID NO: 2613426 - DNA, 25 bp, Homo sapien
gggctgcactgcctctctggctctg

SEQ ID NO: 2613427 - DNA, 25 bp, Homo sapien
gtaggggctgcactgcctctctggc

SEQ ID NO: 2613428 - DNA, 25 bp, Homo sapien
tctgaaatttgggtgacagcagaca

SEQ ID NO: 2613429 - DNA, 25 bp, Homo sapien
gtacaactcgcacaccagtgagcgt

SEQ ID NO: 2613430 - DNA, 25 bp, Homo sapien
tgtgtgacgtctactgtacaactcg

SEQ ID NO: 2613431 - DNA, 25 bp, Homo sapien
gagcgtgaaagctgctgggcccctt

SEQ ID NO: 2613432 - DNA, 25 bp, Homo sapien
caaagccggcgactggaaagtggca

SEQ ID NO: 2613433 - DNA, 25 bp, Homo sapien
tctttcctgttcacggccaggccac

SEQ ID NO: 2613434 - DNA, 25 bp, Homo sapien
aggccacggcggcacaccgggactt

SEQ ID NO: 2613435 - DNA, 25 bp, Homo sapien
caccgggactttgctcacagtcttg

SEQ ID NO: 2613436 - DNA, 25 bp, Homo sapien
tggatgcctcgtcagcgggctttgc

SEQ ID NO: 2613437 - DNA, 25 bp, Homo sapien
acagaccctccggtgtgaagaccat

SEQ ID NO: 2613438 - DNA, 25 bp, Homo sapien
gaagaccatgccattatcccgcagg

SEQ ID NO: 2613439 - DNA, 25 bp, Homo sapien
gcctggatgcctcgtcagcgggctt

SEQ ID NO: 2613440 - DNA, 25 bp, Homo sapien
acggatgcgggtggactggcgtcat

SEQ ID NO: 2613441 - DNA, 25 bp, Homo sapien
tgcgggtggactggcgtcattgctg

SEQ ID NO: 2613442 - DNA, 25 bp, Homo sapien
gactggcgtcattgctggagacgga

SEQ ID NO: 2613443 - DNA, 25 bp, Homo sapien
tcattgctggagacggagagcgagt

SEQ ID NO: 2613444 - DNA, 25 bp, Homo sapien
gcttcttcacgtgcccgtcggcctt

SEQ ID NO: 2613445 - DNA, 25 bp, Homo sapien
tcttgcggacctcgcggctcttctt

SEQ ID NO: 2613446 - DNA, 25 bp, Homo sapien
cacttgcgcagggtgttgcccggcc

SEQ ID NO: 2613447 - DNA, 25 bp, Homo sapien
tgtcgtcggagtccttctgcgagcc

SEQ ID NO: 2613448 - DNA, 25 bp, Homo sapien
tcatcctgtgagtctggctggagga

SEQ ID NO: 2613449 - DNA, 25 bp, Homo sapien
atggccatgggtggcggcaggggca

SEQ ID NO: 2613450 - DNA, 25 bp, Homo sapien
tggcggcaggggcacggcgtcggcc

SEQ ID NO: 2613451 - DNA, 25 bp, Homo sapien
atttggagagagtaccgctgctcag

SEQ ID NO: 2613452 - DNA, 25 bp, Homo sapien
cacgacgtgtttgcagattacttga

SEQ ID NO: 2613453 - DNA, 25 bp, Homo sapien
tcagtaattagcaaacacgacgtgt

SEQ ID NO: 2613454 - DNA, 25 bp, Homo sapien
cttcatattaaggacagcggcgagg

SEQ ID NO: 2613455 - DNA, 25 bp, Homo sapien
ggctcatacactcacaacaaggctt

SEQ ID NO: 2613456 - DNA, 25 bp, Homo sapien
atttccccatgattagtgcagagta

SEQ ID NO: 2613457 - DNA, 25 bp, Homo sapien
caaaacaggtactaagaaatggctt

SEQ ID NO: 2613458 - DNA, 25 bp, Homo sapien
gcttagggtctagtgagagaatcct

SEQ ID NO: 2613459 - DNA, 25 bp, Homo sapien
gaatagagaatctgacctacagcag

SEQ ID NO: 2613460 - DNA, 25 bp, Homo sapien
cgtaactttcgcaagtgctggcaag

SEQ ID NO: 2613461 - DNA, 25 bp, Homo sapien
aactttcgcaagtgctggcaaggct

SEQ ID NO: 2613462 - DNA, 25 bp, Homo sapien
ctttcgcaagtgctggcaaggctct

SEQ ID NO: 2613463 - DNA, 25 bp, Homo sapien
taactttcgcaagtgctggcaaggc

SEQ ID NO: 2613464 - DNA, 25 bp, Homo sapien
ttttttcaaagaggtgactaggcaa

SEQ ID NO: 2613465 - DNA, 25 bp, Homo sapien
tttgaatcgcagtcatgtaacatca

SEQ ID NO: 2613466 - DNA, 25 bp, Homo sapien
cctgtctgagatacatgtgggaagc

SEQ ID NO: 2613467 - DNA, 25 bp, Homo sapien
ggtgactaggcaagggaacgttcta

SEQ ID NO: 2613468 - DNA, 25 bp, Homo sapien
gctggtggggcggactaataaccga

SEQ ID NO: 2613469 - DNA, 25 bp, Homo sapien
tcggagctggtggggcggactaata

SEQ ID NO: 2613470 - DNA, 25 bp, Homo sapien
ggcggactaataaccgagaagaggc

SEQ ID NO: 2613471 - DNA, 25 bp, Homo sapien
tggggcggactaataaccgagaaga

SEQ ID NO: 2613472 - DNA, 25 bp, Homo sapien
cttgcttttcacgagttcctcaatt

SEQ ID NO: 2613473 - DNA, 25 bp, Homo sapien
aattgcactgacgagctcggctgca

SEQ ID NO: 2613474 - DNA, 25 bp, Homo sapien
gttcctcaattgcactgacgagctc

SEQ ID NO: 2613475 - DNA, 25 bp, Homo sapien
gcttttcacgagttcctcaattgca

SEQ ID NO: 2613476 - DNA, 25 bp, Homo sapien
tggccaactggcaacaaagagatca

SEQ ID NO: 2613477 - DNA, 25 bp, Homo sapien
tcaaatcagtgaacccgagggtggt

SEQ ID NO: 2613478 - DNA, 25 bp, Homo sapien
cggagagtctaactgtgggtaccac

SEQ ID NO: 2613479 - DNA, 25 bp, Homo sapien
gactcctgagatgtgccataagcca

SEQ ID NO: 2613480 - DNA, 25 bp, Homo sapien
actgggtcttctccggaacaccaca

SEQ ID NO: 2613481 - DNA, 25 bp, Homo sapien
caagcttcctgttcaaagttcactg

SEQ ID NO: 2613482 - DNA, 25 bp, Homo sapien
gggtcttctccggaacaccacacga

SEQ ID NO: 2613483 - DNA, 25 bp, Homo sapien
tcttctccggaacaccacacgatta

SEQ ID NO: 2613484 - DNA, 25 bp, Homo sapien
gacctgcaacaatggagtccccagg

SEQ ID NO: 2613485 - DNA, 25 bp, Homo sapien
ggctgcctgtcctagatctgatctt

SEQ ID NO: 2613486 - DNA, 25 bp, Homo sapien
gtcttccagctttctcgacctgcaa

SEQ ID NO: 2613487 - DNA, 25 bp, Homo sapien
cctcggctgcctgtcctagatctga

SEQ ID NO: 2613488 - DNA, 25 bp, Homo sapien
gcgaagggaggatgttctgtacccc

SEQ ID NO: 2613489 - DNA, 25 bp, Homo sapien
gcaatcttgttaaaacccatggagc

SEQ ID NO: 2613490 - DNA, 25 bp, Homo sapien
caaacattttgctgtgagtagcaga

SEQ ID NO: 2613491 - DNA, 25 bp, Homo sapien
tgaggacacaaagcatgtactgtac

SEQ ID NO: 2613492 - DNA, 25 bp, Homo sapien
aagaaattgacataatcaacaacac

SEQ ID NO: 2613493 - DNA, 25 bp, Homo sapien
tgcccacagcccatgattggctaaa

SEQ ID NO: 2613494 - DNA, 25 bp, Homo sapien
gcccacagcccatgattggctaaaa

SEQ ID NO: 2613495 - DNA, 25 bp, Homo sapien
aatcaacaacacttactgcccacag

SEQ ID NO: 2613496 - DNA, 25 bp, Homo sapien
catctcatcaatgggcgaggaggaa

SEQ ID NO: 2613497 - DNA, 25 bp, Homo sapien
tcttccatctcatcaatgggcgagg

SEQ ID NO: 2613498 - DNA, 25 bp, Homo sapien
ccctggtcaacaaggagtgagctgg

SEQ ID NO: 2613499 - DNA, 25 bp, Homo sapien
gggctgctactatctccctggtcaa

SEQ ID NO: 2613500 - DNA, 25 bp, Homo sapien
tcccgcacatagtcacgctctgtct

SEQ ID NO: 2613501 - DNA, 25 bp, Homo sapien
gtcccgcacatagtcacgctctgtc

SEQ ID NO: 2613502 - DNA, 25 bp, Homo sapien
aatctgatggatgttgccgaacaca

SEQ ID NO: 2613503 - DNA, 25 bp, Homo sapien
ggatgttgccgaacacaattttgtc

SEQ ID NO: 2613504 - DNA, 25 bp, Homo sapien
tctctgtgccagtcgtaaatctgat

SEQ ID NO: 2613505 - DNA, 25 bp, Homo sapien
tgccagtcgtaaatctgatggatgt

SEQ ID NO: 2613506 - DNA, 25 bp, Homo sapien
ccaccgtgcctggccaggtttacat

SEQ ID NO: 2613507 - DNA, 25 bp, Homo sapien
ttttggcatttttagcagatacaag

SEQ ID NO: 2613508 - DNA, 25 bp, Homo sapien
ttggcatttttagcagatacaaggt

SEQ ID NO: 2613509 - DNA, 25 bp, Homo sapien
ttttttggcatttttagcagataca

SEQ ID NO: 2613510 - DNA, 25 bp, Homo sapien
ggatcttcaaggcacttctctaact

SEQ ID NO: 2613511 - DNA, 25 bp, Homo sapien
ttttctggatcttcaaggcacttct

SEQ ID NO: 2613512 - DNA, 25 bp, Homo sapien
tcctagtttttctggatcttcaagg

SEQ ID NO: 2613513 - DNA, 25 bp, Homo sapien
ggcacttctctaactctcctaaaaa

SEQ ID NO: 2613514 - DNA, 25 bp, Homo sapien
tcctttaatctgacaaaccagtgac

SEQ ID NO: 2613515 - DNA, 25 bp, Homo sapien
caaagagatgggtggtcaagttcaa

SEQ ID NO: 2613516 - DNA, 25 bp, Homo sapien
tgtaatgaaacgtgtcaacctctgg

SEQ ID NO: 2613517 - DNA, 25 bp, Homo sapien
tatgtaaccgagttgtgagtggaac

SEQ ID NO: 2613518 - DNA, 25 bp, Homo sapien
tcatttcaaggcaaacaactggcag

SEQ ID NO: 2613519 - DNA, 25 bp, Homo sapien
tccaaaccctgccaacagtcctagt

SEQ ID NO: 2613520 - DNA, 25 bp, Homo sapien
acacctggccgcaacacccttctta

SEQ ID NO: 2613521 - DNA, 25 bp, Homo sapien
aaccctgccaacagtcctagtaagc

SEQ ID NO: 2613522 - DNA, 25 bp, Homo sapien
cacctggccgcaacacccttcttaa

SEQ ID NO: 2613523 - DNA, 25 bp, Homo sapien
agacaatgtgctcagactttggttt

SEQ ID NO: 2613524 - DNA, 25 bp, Homo sapien
attttgacaataagctatgtacatg

SEQ ID NO: 2613525 - DNA, 25 bp, Homo sapien
gacaatgtgctcagactttggttta

SEQ ID NO: 2613526 - DNA, 25 bp, Homo sapien
ttgacaataagctatgtacatgtgc

SEQ ID NO: 2613527 - DNA, 25 bp, Homo sapien
gactacaacactggcagtaaaagta

SEQ ID NO: 2613528 - DNA, 25 bp, Homo sapien
gagagaaaagatcgtatgggctgtt

SEQ ID NO: 2613529 - DNA, 25 bp, Homo sapien
tctttgtaattgtcagaaagactac

SEQ ID NO: 2613530 - DNA, 25 bp, Homo sapien
cgtatgggctgttcattaaagggca

SEQ ID NO: 2613531 - DNA, 25 bp, Homo sapien
cctgtggccaagacgctgctttaag

SEQ ID NO: 2613532 - DNA, 25 bp, Homo sapien
ctgtggccaagacgctgctttaagt

SEQ ID NO: 2613533 - DNA, 25 bp, Homo sapien
cactggtttgatcaacagatctgtg

SEQ ID NO: 2613534 - DNA, 25 bp, Homo sapien
tctctgcactggtttgatcaacaga

SEQ ID NO: 2613535 - DNA, 25 bp, Homo sapien
actcctgacaccagagtttgtcccg

SEQ ID NO: 2613536 - DNA, 25 bp, Homo sapien
agaaataatatacctgttacacaga

SEQ ID NO: 2613537 - DNA, 25 bp, Homo sapien
tgattcccctgtcctaccaaatcct

SEQ ID NO: 2613538 - DNA, 25 bp, Homo sapien
cttctttccccaactgagtcttatt

SEQ ID NO: 2613539 - DNA, 25 bp, Homo sapien
atttcaagctgcagtacacagagtc

SEQ ID NO: 2613540 - DNA, 25 bp, Homo sapien
ctattcaaaggagcaatcataagct

SEQ ID NO: 2613541 - DNA, 25 bp, Homo sapien
cacacctgtctggtgccttagttct

SEQ ID NO: 2613542 - DNA, 25 bp, Homo sapien
acaaaaaggcattcctacgtagatt

SEQ ID NO: 2613543 - DNA, 25 bp, Homo sapien
tggcctttttggaatacttgaggaa

SEQ ID NO: 2613544 - DNA, 25 bp, Homo sapien
ggctggcctttttggaatacttgag

SEQ ID NO: 2613545 - DNA, 25 bp, Homo sapien
gctggcctttttggaatacttgagg

SEQ ID NO: 2613546 - DNA, 25 bp, Homo sapien
ctggcctttttggaatacttgagga

SEQ ID NO: 2613547 - DNA, 25 bp, Homo sapien
gggtactatgcacatgacttccaca

SEQ ID NO: 2613548 - DNA, 25 bp, Homo sapien
catgtcgttgcaccgcctgggtact

SEQ ID NO: 2613549 - DNA, 25 bp, Homo sapien
gccccacgttcatcatgtcgttgca

SEQ ID NO: 2613550 - DNA, 25 bp, Homo sapien
cgcctgggtactatgcacatgactt

SEQ ID NO: 2613551 - DNA, 25 bp, Homo sapien
tggcgcctcaattacagtcacagat

SEQ ID NO: 2613552 - DNA, 25 bp, Homo sapien
tgtgtgcgtcagagagaaccatagc

SEQ ID NO: 2613553 - DNA, 25 bp, Homo sapien
accatggtcttaagtgctgaggaaa

SEQ ID NO: 2613554 - DNA, 25 bp, Homo sapien
tcagctcttacagtactgggcccaa

SEQ ID NO: 2613555 - DNA, 25 bp, Homo sapien
gaatatgacgatctgctcaaagagg

SEQ ID NO: 2613556 - DNA, 25 bp, Homo sapien
tctctgcagcgaggcagaagtcctg

SEQ ID NO: 2613557 - DNA, 25 bp, Homo sapien
gaatcccggcatggagaagcccttc

SEQ ID NO: 2613558 - DNA, 25 bp, Homo sapien
tgcaagagcagtttaccctgggcaa

SEQ ID NO: 2613559 - DNA, 25 bp, Homo sapien
ctgctggggacagccaacaaaagcc

SEQ ID NO: 2613560 - DNA, 25 bp, Homo sapien
caaaagcctgaacggagagtcggat

SEQ ID NO: 2613561 - DNA, 25 bp, Homo sapien
gccaacaaaagcctgaacggagagt

SEQ ID NO: 2613562 - DNA, 25 bp, Homo sapien
gggacagccaacaaaagcctgaacg

SEQ ID NO: 2613563 - DNA, 25 bp, Homo sapien
tcatggatccaagtttgccggacac

SEQ ID NO: 2613564 - DNA, 25 bp, Homo sapien
cacccgtcctcgatgtcagagcaaa

SEQ ID NO: 2613565 - DNA, 25 bp, Homo sapien
tgccggacacttggactagatgaat

SEQ ID NO: 2613566 - DNA, 25 bp, Homo sapien
atgaaggtctctaccacgtcacccg

SEQ ID NO: 2613567 - DNA, 25 bp, Homo sapien
tggaggcggtttcatagaccacctc

SEQ ID NO: 2613568 - DNA, 25 bp, Homo sapien
ggcggtttcatagaccacctctgct

SEQ ID NO: 2613569 - DNA, 25 bp, Homo sapien
gggctgccgtggaggcggtttcata

SEQ ID NO: 2613570 - DNA, 25 bp, Homo sapien
gccgtggaggcggtttcatagacca

SEQ ID NO: 2613571 - DNA, 25 bp, Homo sapien
tagaactcctccagctaccaactgg

SEQ ID NO: 2613572 - DNA, 25 bp, Homo sapien
cacatcccggactaagggccagtgt

SEQ ID NO: 2613573 - DNA, 25 bp, Homo sapien
taccaactggcttccgcaaaggtct

SEQ ID NO: 2613574 - DNA, 25 bp, Homo sapien
cttgccaaggtattgggatgccggc

SEQ ID NO: 2613575 - DNA, 25 bp, Homo sapien
ggttcctctggtactcgattggcga

SEQ ID NO: 2613576 - DNA, 25 bp, Homo sapien
tgtggttcctctggtactcgattgg

SEQ ID NO: 2613577 - DNA, 25 bp, Homo sapien
ggccggctcctgctcgtgctggggg

SEQ ID NO: 2613578 - DNA, 25 bp, Homo sapien
ttcctctggtactcgattggcgatg

SEQ ID NO: 2613579 - DNA, 25 bp, Homo sapien
ctgcctggctcgaggctgcagagga

SEQ ID NO: 2613580 - DNA, 25 bp, Homo sapien
agaggagaccagcacgggggggtgg

SEQ ID NO: 2613581 - DNA, 25 bp, Homo sapien
gcctctgcctggctcgaggctgcag

SEQ ID NO: 2613582 - DNA, 25 bp, Homo sapien
cagcacgggggggtggtgtcggaca

SEQ ID NO: 2613583 - DNA, 25 bp, Homo sapien
cttggggatcggctccgcttctcgc

SEQ ID NO: 2613584 - DNA, 25 bp, Homo sapien
ttctcgctcggacccctcggcgtcc

SEQ ID NO: 2613585 - DNA, 25 bp, Homo sapien
gggccgcgccagggggaggcaggga

SEQ ID NO: 2613586 - DNA, 25 bp, Homo sapien
ggatcggctccgcttctcgctcgga

SEQ ID NO: 2613587 - DNA, 25 bp, Homo sapien
gtctgggctcgaccccgaggcgttc

SEQ ID NO: 2613588 - DNA, 25 bp, Homo sapien
agggtgcccaggctagcgcgcgcgt

SEQ ID NO: 2613589 - DNA, 25 bp, Homo sapien
cgaggcgttcgcggcgcctttcctg

SEQ ID NO: 2613590 - DNA, 25 bp, Homo sapien
tggagagcggcgagttcagcggcga

SEQ ID NO: 2613591 - DNA, 25 bp, Homo sapien
ctccttgccgagagaagggaccgcg

SEQ ID NO: 2613592 - DNA, 25 bp, Homo sapien
ggaagggctccttgccgagagaagg

SEQ ID NO: 2613593 - DNA, 25 bp, Homo sapien
gggctccttgccgagagaagggacc

SEQ ID NO: 2613594 - DNA, 25 bp, Homo sapien
gaagggctccttgccgagagaaggg

SEQ ID NO: 2613595 - DNA, 25 bp, Homo sapien
cgctggccgaggagcacgtgctcat

SEQ ID NO: 2613596 - DNA, 25 bp, Homo sapien
tgccgctggagggagtcgctgtccc

SEQ ID NO: 2613597 - DNA, 25 bp, Homo sapien
aggagcacgtgctcatgcggtcagt

SEQ ID NO: 2613598 - DNA, 25 bp, Homo sapien
tggactgcacggactgctcgctggc

SEQ ID NO: 2613599 - DNA, 25 bp, Homo sapien
tggcgggacagaggcaggggggcgg

SEQ ID NO: 2613600 - DNA, 25 bp, Homo sapien
cagccgagttagtgagaacagccgc

SEQ ID NO: 2613601 - DNA, 25 bp, Homo sapien
aaagcaaggagtagttagtagcgcc

SEQ ID NO: 2613602 - DNA, 25 bp, Homo sapien
gacgtaaagcgttcccagtggacag

SEQ ID NO: 2613603 - DNA, 25 bp, Homo sapien
caacccttgtgcttgagacggcagc

SEQ ID NO: 2613604 - DNA, 25 bp, Homo sapien
gagagacacagacccttttagagaa

SEQ ID NO: 2613605 - DNA, 25 bp, Homo sapien
ccttcaggaaagtgttacgggccag

SEQ ID NO: 2613606 - DNA, 25 bp, Homo sapien
gaacagttctattcactcacgcatg

SEQ ID NO: 2613607 - DNA, 25 bp, Homo sapien
aggccatctgccctgtaggaaacag

SEQ ID NO: 2613608 - DNA, 25 bp, Homo sapien
gtttgggttgatccacatccatgtc

SEQ ID NO: 2613609 - DNA, 25 bp, Homo sapien
tgactccagtgtgcatgcactttta

SEQ ID NO: 2613610 - DNA, 25 bp, Homo sapien
gactccagtgtgcatgcacttttat

SEQ ID NO: 2613611 - DNA, 25 bp, Homo sapien
catggtttgggttgatccacatcca

SEQ ID NO: 2613612 - DNA, 25 bp, Homo sapien
cagtgggcgtggttatcagtctctc

SEQ ID NO: 2613613 - DNA, 25 bp, Homo sapien
agtggaaggtcagtgagctggcact

SEQ ID NO: 2613614 - DNA, 25 bp, Homo sapien
gtggttatcagtctctcagagtgga

SEQ ID NO: 2613615 - DNA, 25 bp, Homo sapien
caccaacccaccagtgggcgtggtt

SEQ ID NO: 2613616 - DNA, 25 bp, Homo sapien
tctagaaagcaatttagggacgctc

SEQ ID NO: 2613617 - DNA, 25 bp, Homo sapien
aatacgaacttgctaggtgtccctc

SEQ ID NO: 2613618 - DNA, 25 bp, Homo sapien
gatcactattctgctcatacggaga

SEQ ID NO: 2613619 - DNA, 25 bp, Homo sapien
catggaacccctgaacgtaaatcga

SEQ ID NO: 2613620 - DNA, 25 bp, Homo sapien
gcggctcggaacaccagaaacatgt

SEQ ID NO: 2613621 - DNA, 25 bp, Homo sapien
ttgctggccagaatttgaacgacct

SEQ ID NO: 2613622 - DNA, 25 bp, Homo sapien
gccgtgtaatcgtgtgtcaccaaca

SEQ ID NO: 2613623 - DNA, 25 bp, Homo sapien
acgatgactgcactggtgtggccca

SEQ ID NO: 2613624 - DNA, 25 bp, Homo sapien
aaccctgctgttgcactgtcaacta

SEQ ID NO: 2613625 - DNA, 25 bp, Homo sapien
gatgaggagattgcagctcttcagc

SEQ ID NO: 2613626 - DNA, 25 bp, Homo sapien
tttctctgcgcacccctaagaagca

SEQ ID NO: 2613627 - DNA, 25 bp, Homo sapien
catgtgacactgatagcattatacc

SEQ ID NO: 2613628 - DNA, 25 bp, Homo sapien
cttgttgctgagtccttcccgtgac

SEQ ID NO: 2613629 - DNA, 25 bp, Homo sapien
tccttaaacggagtgctgtgtgcca

SEQ ID NO: 2613630 - DNA, 25 bp, Homo sapien
cgtgacttccgataaccgttctcta

SEQ ID NO: 2613631 - DNA, 25 bp, Homo sapien
gataaccgttctctaacttgccttc

SEQ ID NO: 2613632 - DNA, 25 bp, Homo sapien
ttctctcatgctgggatgacacgga

SEQ ID NO: 2613633 - DNA, 25 bp, Homo sapien
agggaggtcataagcaagcccagct

SEQ ID NO: 2613634 - DNA, 25 bp, Homo sapien
gaggtcataagcaagcccagcttca

SEQ ID NO: 2613635 - DNA, 25 bp, Homo sapien
ggatgacacggactcctgaagaccc

SEQ ID NO: 2613636 - DNA, 25 bp, Homo sapien
ggccagcatagtgcccctaacaaga

SEQ ID NO: 2613637 - DNA, 25 bp, Homo sapien
cttgtaggacgcacccatccctgtg

SEQ ID NO: 2613638 - DNA, 25 bp, Homo sapien
tggccagcatagtgcccctaacaag

SEQ ID NO: 2613639 - DNA, 25 bp, Homo sapien
taggacgcacccatccctgtgctgg

SEQ ID NO: 2613640 - DNA, 25 bp, Homo sapien
ccgcaggtgtcaggcaatccgatta

SEQ ID NO: 2613641 - DNA, 25 bp, Homo sapien
gatttgcagaaactgacttgcctgg

SEQ ID NO: 2613642 - DNA, 25 bp, Homo sapien
gatgcgttcctaatgcagagccgcc

SEQ ID NO: 2613643 - DNA, 25 bp, Homo sapien
tattctttagaagccacatgtgcac

SEQ ID NO: 2613644 - DNA, 25 bp, Homo sapien
cgtcataaatgtagttgggattgag

SEQ ID NO: 2613645 - DNA, 25 bp, Homo sapien
tcataaatgtagttgggattgagaa

SEQ ID NO: 2613646 - DNA, 25 bp, Homo sapien
gtcataaatgtagttgggattgaga

SEQ ID NO: 2613647 - DNA, 25 bp, Homo sapien
tgaaacatgccccacaggtctagaa

SEQ ID NO: 2613648 - DNA, 25 bp, Homo sapien
taacctgctatgcacgcctagagcg

SEQ ID NO: 2613649 - DNA, 25 bp, Homo sapien
ccccgacagattgataggacctaac

SEQ ID NO: 2613650 - DNA, 25 bp, Homo sapien
gaaaggagtcggtaaaggcccatca

SEQ ID NO: 2613651 - DNA, 25 bp, Homo sapien
cagactcgacatctaagaacaacgg

SEQ ID NO: 2613652 - DNA, 25 bp, Homo sapien
gctgtagtgaccatcgttgttcaag

SEQ ID NO: 2613653 - DNA, 25 bp, Homo sapien
cacgtgacctcactcaatggaatga

SEQ ID NO: 2613654 - DNA, 25 bp, Homo sapien
ggtgttgtgttcagggcccttccag

SEQ ID NO: 2613655 - DNA, 25 bp, Homo sapien
catgtcattgacagcgatgcacgtg

SEQ ID NO: 2613656 - DNA, 25 bp, Homo sapien
gatgcacgtgtagatgccgtcatct

SEQ ID NO: 2613657 - DNA, 25 bp, Homo sapien
tggccgacgatgaggctgaacccat

SEQ ID NO: 2613658 - DNA, 25 bp, Homo sapien
gtggtcacgcccacaatcttcagcg

SEQ ID NO: 2613659 - DNA, 25 bp, Homo sapien
cgtagaatcctcgttgcacggtgct

SEQ ID NO: 2613660 - DNA, 25 bp, Homo sapien
ctttacataaggtgccgagaggtca

SEQ ID NO: 2613661 - DNA, 25 bp, Homo sapien
tgccccactgggtcacgtagaatcc

SEQ ID NO: 2613662 - DNA, 25 bp, Homo sapien
aaggagactcctgaaagacgtgccc

SEQ ID NO: 2613663 - DNA, 25 bp, Homo sapien
gattcagctgggtagctggatatga

SEQ ID NO: 2613664 - DNA, 25 bp, Homo sapien
gcaacaggagctccggtgtctcccc

SEQ ID NO: 2613665 - DNA, 25 bp, Homo sapien
gtactaggagcacggaaagcaccct

SEQ ID NO: 2613666 - DNA, 25 bp, Homo sapien
tgagtgttttgagtactaggagcac

SEQ ID NO: 2613667 - DNA, 25 bp, Homo sapien
tgcttttcccatgcacattctacat

SEQ ID NO: 2613668 - DNA, 25 bp, Homo sapien
ggcagatgcctcctagccagatgct

SEQ ID NO: 2613669 - DNA, 25 bp, Homo sapien
tctacatcaggcaactacaggacgt

SEQ ID NO: 2613670 - DNA, 25 bp, Homo sapien
cagaagggttgctgttagggtctca

SEQ ID NO: 2613671 - DNA, 25 bp, Homo sapien
gcctaagatattggttctgccccag

SEQ ID NO: 2613672 - DNA, 25 bp, Homo sapien
agctggactgagaataaggctttgt

SEQ ID NO: 2613673 - DNA, 25 bp, Homo sapien
aacatcccaggtggcaagtgatccc

SEQ ID NO: 2613674 - DNA, 25 bp, Homo sapien
cctgtgagtaatgaaccctgtgtac

SEQ ID NO: 2613675 - DNA, 25 bp, Homo sapien
tggtggctgcataaaggacacacag

SEQ ID NO: 2613676 - DNA, 25 bp, Homo sapien
actgtgattctaggcctccacggga

SEQ ID NO: 2613677 - DNA, 25 bp, Homo sapien
cagtatttacttaacgtccacaggg

SEQ ID NO: 2613678 - DNA, 25 bp, Homo sapien
gaacagcacctgcctgagcttgttt

SEQ ID NO: 2613679 - DNA, 25 bp, Homo sapien
cctgagcttgtttcccgtggagctt

SEQ ID NO: 2613680 - DNA, 25 bp, Homo sapien
agccacttcactgtagaaggagtca

SEQ ID NO: 2613681 - DNA, 25 bp, Homo sapien
ccaagctcagccacttcactgtaga

SEQ ID NO: 2613682 - DNA, 25 bp, Homo sapien
gctcagccacttcactgtagaagga

SEQ ID NO: 2613683 - DNA, 25 bp, Homo sapien
tccaggtcaccatgatcccatccat

SEQ ID NO: 2613684 - DNA, 25 bp, Homo sapien
taacactgcttagctttatccctgc

SEQ ID NO: 2613685 - DNA, 25 bp, Homo sapien
aaggcgttctgggttgtgcatcata

SEQ ID NO: 2613686 - DNA, 25 bp, Homo sapien
tgcactctctggtatgtcttcccca

SEQ ID NO: 2613687 - DNA, 25 bp, Homo sapien
caattgctggcaagataacactgct

SEQ ID NO: 2613688 - DNA, 25 bp, Homo sapien
atgggacacaacacctgaatgtgtg

SEQ ID NO: 2613689 - DNA, 25 bp, Homo sapien
gccacatgggacacaacacctgaat

SEQ ID NO: 2613690 - DNA, 25 bp, Homo sapien
acatgggacacaacacctgaatgtg

SEQ ID NO: 2613691 - DNA, 25 bp, Homo sapien
cacatgggacacaacacctgaatgt

SEQ ID NO: 2613692 - DNA, 25 bp, Homo sapien
tggtcgcgcttcatcaacttcttgt

SEQ ID NO: 2613693 - DNA, 25 bp, Homo sapien
tctgcaggatgccaagctcatgggt

SEQ ID NO: 2613694 - DNA, 25 bp, Homo sapien
aacttagtggccactgctcgcttgg

SEQ ID NO: 2613695 - DNA, 25 bp, Homo sapien
tctcaaaggtgtcgaggaggccgac

SEQ ID NO: 2613696 - DNA, 25 bp, Homo sapien
gatgagaaccgctcctgtgggacac

SEQ ID NO: 2613697 - DNA, 25 bp, Homo sapien
tcaggtgttccatcccagcagtgac

SEQ ID NO: 2613698 - DNA, 25 bp, Homo sapien
gaaggcttgaaaactgcgggctctg

SEQ ID NO: 2613699 - DNA, 25 bp, Homo sapien
catctccgggttggctgagcatatc

SEQ ID NO: 2613700 - DNA, 25 bp, Homo sapien
tattcttgaaagacgggctggaagc

SEQ ID NO: 2613701 - DNA, 25 bp, Homo sapien
gatcagctgcctgtctagcaatggg

SEQ ID NO: 2613702 - DNA, 25 bp, Homo sapien
gacaccagggtgagaaatgagccga

SEQ ID NO: 2613703 - DNA, 25 bp, Homo sapien
catcttaagagggaagccggtggta

SEQ ID NO: 2613704 - DNA, 25 bp, Homo sapien
tgcagttgtgcaggtaccggacagc

SEQ ID NO: 2613705 - DNA, 25 bp, Homo sapien
ttcccttcagtgaggcttccccatc

SEQ ID NO: 2613706 - DNA, 25 bp, Homo sapien
agtccaggaggcgaccctggtcagc

SEQ ID NO: 2613707 - DNA, 25 bp, Homo sapien
taggtccaggtgtgctatcctgcag

SEQ ID NO: 2613708 - DNA, 25 bp, Homo sapien
tcctgaccgtgtgcatcactgaacg

SEQ ID NO: 2613709 - DNA, 25 bp, Homo sapien
cactgaacgcaaacgcttagagaga

SEQ ID NO: 2613710 - DNA, 25 bp, Homo sapien
taagcttactcgtgatgatgggcgg

SEQ ID NO: 2613711 - DNA, 25 bp, Homo sapien
tctaggatgtcaactaggacaagcc

SEQ ID NO: 2613712 - DNA, 25 bp, Homo sapien
taagaagtacgtatgtgagcactcc

SEQ ID NO: 2613713 - DNA, 25 bp, Homo sapien
tcagtctggacgtgtcgaggacgcc

SEQ ID NO: 2613714 - DNA, 25 bp, Homo sapien
tgtttgcgccgctcaatgaaggaag

SEQ ID NO: 2613715 - DNA, 25 bp, Homo sapien
tctgggaagctaaagtctaagcggc

SEQ ID NO: 2613716 - DNA, 25 bp, Homo sapien
cgtttcagaagccacgtcgggcgtg

SEQ ID NO: 2613717 - DNA, 25 bp, Homo sapien
cacgatgaacataccggcagctgat

SEQ ID NO: 2613718 - DNA, 25 bp, Homo sapien
tctgagtcctagacaaggccatggg

SEQ ID NO: 2613719 - DNA, 25 bp, Homo sapien
catgtgatgggaagaccctcggacc

SEQ ID NO: 2613720 - DNA, 25 bp, Homo sapien
aaaccataaagctcaccatacgaag

SEQ ID NO: 2613721 - DNA, 25 bp, Homo sapien
aagtctctttgaaccgatggcacag

SEQ ID NO: 2613722 - DNA, 25 bp, Homo sapien
tctttgaaccgatggcacagggcta

SEQ ID NO: 2613723 - DNA, 25 bp, Homo sapien
tctctttgaaccgatggcacagggc

SEQ ID NO: 2613724 - DNA, 25 bp, Homo sapien
aaaagtctctttgaaccgatggcac

SEQ ID NO: 2613725 - DNA, 25 bp, Homo sapien
accagtgcgaatgctgccacagtga

SEQ ID NO: 2613726 - DNA, 25 bp, Homo sapien
tatgaggttacgaatacacatccag

SEQ ID NO: 2613727 - DNA, 25 bp, Homo sapien
gctgcaaagcttaactacgccagtt

SEQ ID NO: 2613728 - DNA, 25 bp, Homo sapien
cagtgactcgggcattgggtaccag

SEQ ID NO: 2613729 - DNA, 25 bp, Homo sapien
catttgggacgtccatgtagagcag

SEQ ID NO: 2613730 - DNA, 25 bp, Homo sapien
ggagaggcaagacgatggctactaa

SEQ ID NO: 2613731 - DNA, 25 bp, Homo sapien
cctagagctggatgaaaggcagaag

SEQ ID NO: 2613732 - DNA, 25 bp, Homo sapien
aagggagcccagtcagacgcttctg

SEQ ID NO: 2613733 - DNA, 25 bp, Homo sapien
gaacctgggagccattctgcacaaa

SEQ ID NO: 2613734 - DNA, 25 bp, Homo sapien
tagagtgccgctgggcatcaggaac

SEQ ID NO: 2613735 - DNA, 25 bp, Homo sapien
gagtttccataaggactagcggctt

SEQ ID NO: 2613736 - DNA, 25 bp, Homo sapien
caccgtggatttgcagacagacctg

SEQ ID NO: 2613737 - DNA, 25 bp, Homo sapien
tggtctgtcagacgcgacggccgcc

SEQ ID NO: 2613738 - DNA, 25 bp, Homo sapien
cccgtggtctgcagtggtctgtcag

SEQ ID NO: 2613739 - DNA, 25 bp, Homo sapien
cctcggcccgtggtctgcagtggtc

SEQ ID NO: 2613740 - DNA, 25 bp, Homo sapien
ctgcagtggtctgtcagacgcgacg

SEQ ID NO: 2613741 - DNA, 25 bp, Homo sapien
gcgccagaccgctcccgctcccttg

SEQ ID NO: 2613742 - DNA, 25 bp, Homo sapien
gctcccgctcccttgcccgcgtggg

SEQ ID NO: 2613743 - DNA, 25 bp, Homo sapien
cgggagcgccagaccgctcccgctc

SEQ ID NO: 2613744 - DNA, 25 bp, Homo sapien
accgctcccgctcccttgcccgcgt

SEQ ID NO: 2613745 - DNA, 25 bp, Homo sapien
ggcaggcgacctaagcagcttggcc

SEQ ID NO: 2613746 - DNA, 25 bp, Homo sapien
cagagtattctgtgttgttagcaag

SEQ ID NO: 2613747 - DNA, 25 bp, Homo sapien
tgttagcaagtctcgactgccgcga

SEQ ID NO: 2613748 - DNA, 25 bp, Homo sapien
actatgctggccagggtttcgctat

SEQ ID NO: 2613749 - DNA, 25 bp, Homo sapien
atggggaggaaaagggaatatcaag

SEQ ID NO: 2613750 - DNA, 25 bp, Homo sapien
ggaggaaaagggaatatcaaggaga

SEQ ID NO: 2613751 - DNA, 25 bp, Homo sapien
ggcctccatggtggtaatcagcttc

SEQ ID NO: 2613752 - DNA, 25 bp, Homo sapien
ccatggtggtaatcagcttcaaaaa

SEQ ID NO: 2613753 - DNA, 25 bp, Homo sapien
agagccttttccacaagggcctcca

SEQ ID NO: 2613754 - DNA, 25 bp, Homo sapien
gtggtaatcagcttcaaaaaggctg

SEQ ID NO: 2613755 - DNA, 25 bp, Homo sapien
gaagtttcacaagtccacaaggaag

SEQ ID NO: 2613756 - DNA, 25 bp, Homo sapien
cattaatgcatgttgggaccccgac

SEQ ID NO: 2613757 - DNA, 25 bp, Homo sapien
taggagcctcaggtccacagtgaag

SEQ ID NO: 2613758 - DNA, 25 bp, Homo sapien
cagcagtgaacatgtcctagaggaa

SEQ ID NO: 2613759 - DNA, 25 bp, Homo sapien
taggattagataaggccatcagcat

SEQ ID NO: 2613760 - DNA, 25 bp, Homo sapien
ggtggctgacctgcatgctaatacc

SEQ ID NO: 2613761 - DNA, 25 bp, Homo sapien
taattgcccaatgggactcggccag

SEQ ID NO: 2613762 - DNA, 25 bp, Homo sapien
gtccccaatgtgtcctacatgttag

SEQ ID NO: 2613763 - DNA, 25 bp, Homo sapien
cgcctggccaacaatagcaaatttt

SEQ ID NO: 2613764 - DNA, 25 bp, Homo sapien
gttaattagctattcaaatcattat

SEQ ID NO: 2613765 - DNA, 25 bp, Homo sapien
tattcttacctagacatttagtaaa

SEQ ID NO: 2613766 - DNA, 25 bp, Homo sapien
agtgcttatctgtttagaacagtta

SEQ ID NO: 2613767 - DNA, 25 bp, Homo sapien
ttggatcccatacacaattacaggg

SEQ ID NO: 2613768 - DNA, 25 bp, Homo sapien
tacagggattcaatccagacccaaa

SEQ ID NO: 2613769 - DNA, 25 bp, Homo sapien
tgatgtgtgactatggcaacctaac

SEQ ID NO: 2613770 - DNA, 25 bp, Homo sapien
cagacccaaatacactgcaggcagt

SEQ ID NO: 2613771 - DNA, 25 bp, Homo sapien
tctaaggcttggcttgtagctagca

SEQ ID NO: 2613772 - DNA, 25 bp, Homo sapien
tctccagacagtgtctaaggcttgg

SEQ ID NO: 2613773 - DNA, 25 bp, Homo sapien
gacagtgtctaaggcttggcttgta

SEQ ID NO: 2613774 - DNA, 25 bp, Homo sapien
ctaaggcttggcttgtagctagcat

SEQ ID NO: 2613775 - DNA, 25 bp, Homo sapien
tgaatataaatgtagcctccggaag

SEQ ID NO: 2613776 - DNA, 25 bp, Homo sapien
gcctccggaagtagcagatggcagc

SEQ ID NO: 2613777 - DNA, 25 bp, Homo sapien
gtgccctgaatataaatgtagcctc

SEQ ID NO: 2613778 - DNA, 25 bp, Homo sapien
cctccggaagtagcagatggcagcc

SEQ ID NO: 2613779 - DNA, 25 bp, Homo sapien
ttttgaattttctctgcagatatcc

SEQ ID NO: 2613780 - DNA, 25 bp, Homo sapien
gaattttctctgcagatatccaatc

SEQ ID NO: 2613781 - DNA, 25 bp, Homo sapien
ttttctctgcagatatccaatccac

SEQ ID NO: 2613782 - DNA, 25 bp, Homo sapien
tttgaattttctctgcagatatcca

SEQ ID NO: 2613783 - DNA, 25 bp, Homo sapien
ttcttctcccttcttgaaccctctc

SEQ ID NO: 2613784 - DNA, 25 bp, Homo sapien
ctcccttcttgaaccctctctgcac

SEQ ID NO: 2613785 - DNA, 25 bp, Homo sapien
cttctcccttcttgaaccctctctg

SEQ ID NO: 2613786 - DNA, 25 bp, Homo sapien
aagctgttaattctccctttcttct

SEQ ID NO: 2613787 - DNA, 25 bp, Homo sapien
taactgagtaaatcaacctctgcct

SEQ ID NO: 2613788 - DNA, 25 bp, Homo sapien
catcagcttgttacggggtgtctct

SEQ ID NO: 2613789 - DNA, 25 bp, Homo sapien
cctcatcagcttgttacggggtgtc

SEQ ID NO: 2613790 - DNA, 25 bp, Homo sapien
caataactgagtaaatcaacctctg

SEQ ID NO: 2613791 - DNA, 25 bp, Homo sapien
cactgatctgagagcatcatagtta

SEQ ID NO: 2613792 - DNA, 25 bp, Homo sapien
gagcatcatagttatctctccttac

SEQ ID NO: 2613793 - DNA, 25 bp, Homo sapien
tatctctccttacttgtcgaacaca

SEQ ID NO: 2613794 - DNA, 25 bp, Homo sapien
cgaacacatttaatgtgatgccgcc

SEQ ID NO: 2613795 - DNA, 25 bp, Homo sapien
tttgaaagagagagcgtaaaagttc

SEQ ID NO: 2613796 - DNA, 25 bp, Homo sapien
gagatttacggaactctgaacttga

SEQ ID NO: 2613797 - DNA, 25 bp, Homo sapien
tatttgcgtaactaatgagaagcca

SEQ ID NO: 2613798 - DNA, 25 bp, Homo sapien
tgtgcagcctcacaatgctatagga

SEQ ID NO: 2613799 - DNA, 25 bp, Homo sapien
aagaagcgttcccatgcacaggctc

SEQ ID NO: 2613800 - DNA, 25 bp, Homo sapien
aaaagaagcgttcccatgcacaggc

SEQ ID NO: 2613801 - DNA, 25 bp, Homo sapien
aaaaagaagcgttcccatgcacagg

SEQ ID NO: 2613802 - DNA, 25 bp, Homo sapien
ttaaaaagaagcgttcccatgcaca

SEQ ID NO: 2613803 - DNA, 25 bp, Homo sapien
ccaaaactgtactgctgaatccaat

SEQ ID NO: 2613804 - DNA, 25 bp, Homo sapien
gaatccaattacaaccttgtgaaaa

SEQ ID NO: 2613805 - DNA, 25 bp, Homo sapien
caataattccacatatttccgtagt

SEQ ID NO: 2613806 - DNA, 25 bp, Homo sapien
gagcctgtatacttctcaggaccaa

SEQ ID NO: 2613807 - DNA, 25 bp, Homo sapien
tcaaaggatcagaggatgtctccct

SEQ ID NO: 2613808 - DNA, 25 bp, Homo sapien
aaaagggtgttgcacatacttcctc

SEQ ID NO: 2613809 - DNA, 25 bp, Homo sapien
agaatggcatctgaaaaaagggtgt

SEQ ID NO: 2613810 - DNA, 25 bp, Homo sapien
tgtgtcgcctacagaattcaggtga

SEQ ID NO: 2613811 - DNA, 25 bp, Homo sapien
taatcaaatacaagcagttcttcct

SEQ ID NO: 2613812 - DNA, 25 bp, Homo sapien
ttaatcaaatacaagcagttcttcc

SEQ ID NO: 2613813 - DNA, 25 bp, Homo sapien
tggatgagatgaaagacaggtcaca

SEQ ID NO: 2613814 - DNA, 25 bp, Homo sapien
gggacgagcataggaacaactctgt

SEQ ID NO: 2613815 - DNA, 25 bp, Homo sapien
gggcacagagttcagaacaaatgct

SEQ ID NO: 2613816 - DNA, 25 bp, Homo sapien
tctgcttgttgacagacccacccat

SEQ ID NO: 2613817 - DNA, 25 bp, Homo sapien
tcctctgggtagcagacttcaaagt

SEQ ID NO: 2613818 - DNA, 25 bp, Homo sapien
agcagggagatctccggccagtccc

SEQ ID NO: 2613819 - DNA, 25 bp, Homo sapien
cttgaacagtctgaacacttttatc

SEQ ID NO: 2613820 - DNA, 25 bp, Homo sapien
tatctttacttcaagggagtatcca

SEQ ID NO: 2613821 - DNA, 25 bp, Homo sapien
gactttattgcaactgtgaccaccg

SEQ ID NO: 2613822 - DNA, 25 bp, Homo sapien
tttgtgctcttaaaggcccgccatc

SEQ ID NO: 2613823 - DNA, 25 bp, Homo sapien
tggccacgccccttatggacaaagt

SEQ ID NO: 2613824 - DNA, 25 bp, Homo sapien
tcactggtgagcactgctgttcggc

SEQ ID NO: 2613825 - DNA, 25 bp, Homo sapien
ggctgcctgcaactccctggcttat

SEQ ID NO: 2613826 - DNA, 25 bp, Homo sapien
tgcagattagaggtccaacacaggc

SEQ ID NO: 2613827 - DNA, 25 bp, Homo sapien
ttctgattacactgcgtccacctgg

SEQ ID NO: 2613828 - DNA, 25 bp, Homo sapien
agtctcaattctacaggctgcctgc

SEQ ID NO: 2613829 - DNA, 25 bp, Homo sapien
caaaatgacagtgggaacaagctac

SEQ ID NO: 2613830 - DNA, 25 bp, Homo sapien
tctataagtatcagccacagcagcc

SEQ ID NO: 2613831 - DNA, 25 bp, Homo sapien
tcaagaaattcaactcaccagggtg

SEQ ID NO: 2613832 - DNA, 25 bp, Homo sapien
cagagacatggtgtacacttcgggc

SEQ ID NO: 2613833 - DNA, 25 bp, Homo sapien
taaacagaacgagacaccagctagg

SEQ ID NO: 2613834 - DNA, 25 bp, Homo sapien
tcactggtctggtggcagcaaaatg

SEQ ID NO: 2613835 - DNA, 25 bp, Homo sapien
gacttaacaatctaagacctgatgg

SEQ ID NO: 2613836 - DNA, 25 bp, Homo sapien
gaccaatacgtcaattacatacaga

SEQ ID NO: 2613837 - DNA, 25 bp, Homo sapien
gcagcgatgacaagaaatgggccag

SEQ ID NO: 2613838 - DNA, 25 bp, Homo sapien
catgacctggcatggacttgaagca

SEQ ID NO: 2613839 - DNA, 25 bp, Homo sapien
ggttttacagcccatctagactacg

SEQ ID NO: 2613840 - DNA, 25 bp, Homo sapien
gctgacaaatgataaggcacaatgg

SEQ ID NO: 2613841 - DNA, 25 bp, Homo sapien
gagtcacagatgtgcctactaggaa

SEQ ID NO: 2613842 - DNA, 25 bp, Homo sapien
tcttagtccagcagaaaagccggca

SEQ ID NO: 2613843 - DNA, 25 bp, Homo sapien
tcgtcatcagtctgtaccagctgct

SEQ ID NO: 2613844 - DNA, 25 bp, Homo sapien
ttctggtcctctccttcgtcatcag

SEQ ID NO: 2613845 - DNA, 25 bp, Homo sapien
ggagcacttcattgttaccctgtga

SEQ ID NO: 2613846 - DNA, 25 bp, Homo sapien
ggaatggtctcaactgcaactacta

SEQ ID NO: 2613847 - DNA, 25 bp, Homo sapien
tgctgacagatgagttaaccaatag

SEQ ID NO: 2613848 - DNA, 25 bp, Homo sapien
aactggtctcacaagcagattggag

SEQ ID NO: 2613849 - DNA, 25 bp, Homo sapien
tgtaaagtagctatcagagggtcac

SEQ ID NO: 2613850 - DNA, 25 bp, Homo sapien
tgatgatcttcctggtccctgttgg

SEQ ID NO: 2613851 - DNA, 25 bp, Homo sapien
tactactaaggcatgggatgaccct

SEQ ID NO: 2613852 - DNA, 25 bp, Homo sapien
agagggtcactcattaatcacaaag

SEQ ID NO: 2613853 - DNA, 25 bp, Homo sapien
tctgagaaggtgcaaacaggagccc

SEQ ID NO: 2613854 - DNA, 25 bp, Homo sapien
acaggagcccttaacattttggaag

SEQ ID NO: 2613855 - DNA, 25 bp, Homo sapien
cagggtgaaaggcacacacttgacc

SEQ ID NO: 2613856 - DNA, 25 bp, Homo sapien
tcagagcacacgtccgtgggagtcc

SEQ ID NO: 2613857 - DNA, 25 bp, Homo sapien
cactccccagttgcctatgacgatt

SEQ ID NO: 2613858 - DNA, 25 bp, Homo sapien
cattggttcccaatgcagattggtg

SEQ ID NO: 2613859 - DNA, 25 bp, Homo sapien
agagaaggcctcatacattccagat

SEQ ID NO: 2613860 - DNA, 25 bp, Homo sapien
tttgcctcccatgtccaactgatca

SEQ ID NO: 2613861 - DNA, 25 bp, Homo sapien
tctgctaaattctcccagcataaac

SEQ ID NO: 2613862 - DNA, 25 bp, Homo sapien
attctcccagcataaacaaagtctt

SEQ ID NO: 2613863 - DNA, 25 bp, Homo sapien
taaattctcccagcataaacaaagt

SEQ ID NO: 2613864 - DNA, 25 bp, Homo sapien
tctctctctctgctaaattctccca

SEQ ID NO: 2613865 - DNA, 25 bp, Homo sapien
tcatcgttcagtgccctcttgactt

SEQ ID NO: 2613866 - DNA, 25 bp, Homo sapien
gccatcatcttatgttcttgccctg

SEQ ID NO: 2613867 - DNA, 25 bp, Homo sapien
cagctgggctttcggttctgcgcca

SEQ ID NO: 2613868 - DNA, 25 bp, Homo sapien
ccttccgcaagtcctgcagtgggtc

SEQ ID NO: 2613869 - DNA, 25 bp, Homo sapien
ggagaatgttttgtggaccactttg

SEQ ID NO: 2613870 - DNA, 25 bp, Homo sapien
aggagaatgttttgtggaccacttt

SEQ ID NO: 2613871 - DNA, 25 bp, Homo sapien
gccgaaggggttcagccggctccga

SEQ ID NO: 2613872 - DNA, 25 bp, Homo sapien
gttcagccggctccgaacgatccgg

SEQ ID NO: 2613873 - DNA, 25 bp, Homo sapien
gctccgaacgatccggagcccctcc

SEQ ID NO: 2613874 - DNA, 25 bp, Homo sapien
tcgctcgcggccgaaggggttcagc

SEQ ID NO: 2613875 - DNA, 25 bp, Homo sapien
ttcgggctggggcatagtcccccga

SEQ ID NO: 2613876 - DNA, 25 bp, Homo sapien
gcttcgggctggggcatagtccccc

SEQ ID NO: 2613877 - DNA, 25 bp, Homo sapien
cgggctggggcatagtcccccgact

SEQ ID NO: 2613878 - DNA, 25 bp, Homo sapien
ggctggggcatagtcccccgactca

SEQ ID NO: 2613879 - DNA, 25 bp, Homo sapien
tgctcggccgggcactgcatctcgg

SEQ ID NO: 2613880 - DNA, 25 bp, Homo sapien
gcgccggcgtctcggcgcagctcgc

SEQ ID NO: 2613881 - DNA, 25 bp, Homo sapien
cggcgtctcggcgcagctcgcgcct

SEQ ID NO: 2613882 - DNA, 25 bp, Homo sapien
ccggcgtctcggcgcagctcgcgcc

SEQ ID NO: 2613883 - DNA, 25 bp, Homo sapien
ctatttcatctgcagcacggtacat

SEQ ID NO: 2613884 - DNA, 25 bp, Homo sapien
tttcatgtataagcaattctttctc

SEQ ID NO: 2613885 - DNA, 25 bp, Homo sapien
tctttcatgtataagcaattctttc

SEQ ID NO: 2613886 - DNA, 25 bp, Homo sapien
ttctatttcatctgcagcacggtac

SEQ ID NO: 2613887 - DNA, 25 bp, Homo sapien
agtccatgatatccatttcaggagc

SEQ ID NO: 2613888 - DNA, 25 bp, Homo sapien
tccatgatatccatttcaggagcta

SEQ ID NO: 2613889 - DNA, 25 bp, Homo sapien
tcaggagctacgcttaatctcggtt

SEQ ID NO: 2613890 - DNA, 25 bp, Homo sapien
catttcaggagctacgcttaatctc

SEQ ID NO: 2613891 - DNA, 25 bp, Homo sapien
catacacgttgctttctgtgtattt

SEQ ID NO: 2613892 - DNA, 25 bp, Homo sapien
tcatacacgttgctttctgtgtatt

SEQ ID NO: 2613893 - DNA, 25 bp, Homo sapien
atacacgttgctttctgtgtatttc

SEQ ID NO: 2613894 - DNA, 25 bp, Homo sapien
gaattcaaaatggtcgttactgact

SEQ ID NO: 2613895 - DNA, 25 bp, Homo sapien
ggtatgaaagaattcaaaatggtcg

SEQ ID NO: 2613896 - DNA, 25 bp, Homo sapien
aatggtcgttactgacttgagatag

SEQ ID NO: 2613897 - DNA, 25 bp, Homo sapien
tgaaagaattcaaaatggtcgttac

SEQ ID NO: 2613898 - DNA, 25 bp, Homo sapien
gtatggaggtgaacttctgagaaac

SEQ ID NO: 2613899 - DNA, 25 bp, Homo sapien
agtaattatcaccacggactcgccg

SEQ ID NO: 2613900 - DNA, 25 bp, Homo sapien
cacggactcgccgtatggaggtgaa

SEQ ID NO: 2613901 - DNA, 25 bp, Homo sapien
tcgccgtatggaggtgaacttctga

SEQ ID NO: 2613902 - DNA, 25 bp, Homo sapien
cagcatgagctccgggtcctgcagc

SEQ ID NO: 2613903 - DNA, 25 bp, Homo sapien
agcatgagctccgggtcctgcagcc

SEQ ID NO: 2613904 - DNA, 25 bp, Homo sapien
tgtcaggacatgcagacacatgact

SEQ ID NO: 2613905 - DNA, 25 bp, Homo sapien
catttaaaacgctaaagagggccag

SEQ ID NO: 2613906 - DNA, 25 bp, Homo sapien
tatatgcctttatccgtgtcaggac

SEQ ID NO: 2613907 - DNA, 25 bp, Homo sapien
aatctcccacggctagcatttctgg

SEQ ID NO: 2613908 - DNA, 25 bp, Homo sapien
tgatccagttgtatttgcttatgag

SEQ ID NO: 2613909 - DNA, 25 bp, Homo sapien
atccagttgtatttgcttatgagtt

SEQ ID NO: 2613910 - DNA, 25 bp, Homo sapien
gatccagttgtatttgcttatgagt

SEQ ID NO: 2613911 - DNA, 25 bp, Homo sapien
tccagttgtatttgcttatgagttt

SEQ ID NO: 2613912 - DNA, 25 bp, Homo sapien
catggcatctgctctaagaatatat

SEQ ID NO: 2613913 - DNA, 25 bp, Homo sapien
cattatttgataccctagtacatgg

SEQ ID NO: 2613914 - DNA, 25 bp, Homo sapien
aaatccactgagtgaagactaaaaa

SEQ ID NO: 2613915 - DNA, 25 bp, Homo sapien
tttgcctaaaaatcagccaagagca

SEQ ID NO: 2613916 - DNA, 25 bp, Homo sapien
tggagcctggcatagaagtgttagt

SEQ ID NO: 2613917 - DNA, 25 bp, Homo sapien
caaaaactaggttccaagaagtcag

SEQ ID NO: 2613918 - DNA, 25 bp, Homo sapien
ctgtggttgcgctgaagggccctct

SEQ ID NO: 2613919 - DNA, 25 bp, Homo sapien
gcattctagtccaacaggtaacaag

SEQ ID NO: 2613920 - DNA, 25 bp, Homo sapien
tgaccatgggtcacttaccaatgct

SEQ ID NO: 2613921 - DNA, 25 bp, Homo sapien
tgttctaaaaatccctggtatagta

SEQ ID NO: 2613922 - DNA, 25 bp, Homo sapien
tccagattaacaaatggtacacttt

SEQ ID NO: 2613923 - DNA, 25 bp, Homo sapien
taccatactatgagcacaaaattat

SEQ ID NO: 2613924 - DNA, 25 bp, Homo sapien
gcttcatagaggctatattcctccg

SEQ ID NO: 2613925 - DNA, 25 bp, Homo sapien
tcctccgcctcatttgtgaatagtt

SEQ ID NO: 2613926 - DNA, 25 bp, Homo sapien
tgtcccgagcaaacagaagcacaga

SEQ ID NO: 2613927 - DNA, 25 bp, Homo sapien
tgttcaagaccaccagtgtgtccca

SEQ ID NO: 2613928 - DNA, 25 bp, Homo sapien
tttggggtaatacatgctcaaaagc

SEQ ID NO: 2613929 - DNA, 25 bp, Homo sapien
taatacatgctcaaaagcacaactt

SEQ ID NO: 2613930 - DNA, 25 bp, Homo sapien
gggtaatacatgctcaaaagcacaa

SEQ ID NO: 2613931 - DNA, 25 bp, Homo sapien
atacatgctcaaaagcacaacttac

SEQ ID NO: 2613932 - DNA, 25 bp, Homo sapien
aagagcaaacgggtattctgaggaa

SEQ ID NO: 2613933 - DNA, 25 bp, Homo sapien
caaacgggtattctgaggaagatca

SEQ ID NO: 2613934 - DNA, 25 bp, Homo sapien
ggaagaagagcaaacgggtattctg

SEQ ID NO: 2613935 - DNA, 25 bp, Homo sapien
gtggcttaacaccatgttccatcca

SEQ ID NO: 2613936 - DNA, 25 bp, Homo sapien
agcaatgagcgttaccactggccag

SEQ ID NO: 2613937 - DNA, 25 bp, Homo sapien
tgttatagtgccgatcgtcctcagc

SEQ ID NO: 2613938 - DNA, 25 bp, Homo sapien
tgtggcgcacagcataggcaagaag

SEQ ID NO: 2613939 - DNA, 25 bp, Homo sapien
cttggagagccggtacacctggatg

SEQ ID NO: 2613940 - DNA, 25 bp, Homo sapien
gaagatatggtttgcaccgtccaac

SEQ ID NO: 2613941 - DNA, 25 bp, Homo sapien
tatgccagtaacagatctatcccag

SEQ ID NO: 2613942 - DNA, 25 bp, Homo sapien
aaaaccaatcaagggcatacgcggc

SEQ ID NO: 2613943 - DNA, 25 bp, Homo sapien
catagtcacaaggagcaagaagttc

SEQ ID NO: 2613944 - DNA, 25 bp, Homo sapien
gaatcctaaagagtgatgtctccgg

SEQ ID NO: 2613945 - DNA, 25 bp, Homo sapien
tgggagaaagctaaagtaacagtct

SEQ ID NO: 2613946 - DNA, 25 bp, Homo sapien
gaaataccacctccacaaacgttga

SEQ ID NO: 2613947 - DNA, 25 bp, Homo sapien
aaacaaagctcagtacttcagggaa

SEQ ID NO: 2613948 - DNA, 25 bp, Homo sapien
taggtaaaacagcacatcgggaaga

SEQ ID NO: 2613949 - DNA, 25 bp, Homo sapien
cagattctgacaaggccttcggaca

SEQ ID NO: 2613950 - DNA, 25 bp, Homo sapien
gcaatgtccgttctccttaagcaaa

SEQ ID NO: 2613951 - DNA, 25 bp, Homo sapien
cagattcaatgtacctgaagggcac

SEQ ID NO: 2613952 - DNA, 25 bp, Homo sapien
tatgctgtgactgcagaccaacacg

SEQ ID NO: 2613953 - DNA, 25 bp, Homo sapien
actgctgagtcccaagctgcgagga

SEQ ID NO: 2613954 - DNA, 25 bp, Homo sapien
tctataacttaagcacaggaggtct

SEQ ID NO: 2613955 - DNA, 25 bp, Homo sapien
caatgcttaaacaaactggtggcca

SEQ ID NO: 2613956 - DNA, 25 bp, Homo sapien
tctttgcggcaaacacacagcaggg

SEQ ID NO: 2613957 - DNA, 25 bp, Homo sapien
gcaggtctggaggatcttcccctaa

SEQ ID NO: 2613958 - DNA, 25 bp, Homo sapien
ccttttagtgggcagcgggaatgct

SEQ ID NO: 2613959 - DNA, 25 bp, Homo sapien
ttgcgggtgccagaaagttagagcc

SEQ ID NO: 2613960 - DNA, 25 bp, Homo sapien
tcttgcaagactcccagactctagt

SEQ ID NO: 2613961 - DNA, 25 bp, Homo sapien
tgagcagagcatcgtaattcagaca

SEQ ID NO: 2613962 - DNA, 25 bp, Homo sapien
tagcactgccgtctaatggatgccc

SEQ ID NO: 2613963 - DNA, 25 bp, Homo sapien
tttctgctgcacatgaccgacttag

SEQ ID NO: 2613964 - DNA, 25 bp, Homo sapien
tgggaggcgacagcattagcacatc

SEQ ID NO: 2613965 - DNA, 25 bp, Homo sapien
gattcctgaaagtaccccatgagag

SEQ ID NO: 2613966 - DNA, 25 bp, Homo sapien
ggacaattcctatggagggctgaga

SEQ ID NO: 2613967 - DNA, 25 bp, Homo sapien
tatcactggcttcctacgagctgca

SEQ ID NO: 2613968 - DNA, 25 bp, Homo sapien
caaatacagcggtgatgcccaagtc

SEQ ID NO: 2613969 - DNA, 25 bp, Homo sapien
tgacacttaacacgggtgggcacca

SEQ ID NO: 2613970 - DNA, 25 bp, Homo sapien
agtaaataccatgctgactgcccag

SEQ ID NO: 2613971 - DNA, 25 bp, Homo sapien
tttttatcatgccagcaaggccacg

SEQ ID NO: 2613972 - DNA, 25 bp, Homo sapien
ctgagaaggacagagcccgacaatc

SEQ ID NO: 2613973 - DNA, 25 bp, Homo sapien
tcttcttagtctttatgggaaaagc

SEQ ID NO: 2613974 - DNA, 25 bp, Homo sapien
gcatctgtttactcaccgcaaagtt

SEQ ID NO: 2613975 - DNA, 25 bp, Homo sapien
caccttctcaaatgggaatgccaaa

SEQ ID NO: 2613976 - DNA, 25 bp, Homo sapien
gagtcattcctctacatgggctgtg

SEQ ID NO: 2613977 - DNA, 25 bp, Homo sapien
ggaagtgctctttatgtatctaaca

SEQ ID NO: 2613978 - DNA, 25 bp, Homo sapien
ctacagcggtcagtataaaatacat

SEQ ID NO: 2613979 - DNA, 25 bp, Homo sapien
tggctgtcagcccataggtttgtca

SEQ ID NO: 2613980 - DNA, 25 bp, Homo sapien
gcattctgtagacatcgccctcaca

SEQ ID NO: 2613981 - DNA, 25 bp, Homo sapien
taaagcactcaaaccgtaggaaagc

SEQ ID NO: 2613982 - DNA, 25 bp, Homo sapien
tgcattgcacattcagccggttcaa

SEQ ID NO: 2613983 - DNA, 25 bp, Homo sapien
gaaccaaaattgcagtggagtgtga

SEQ ID NO: 2613984 - DNA, 25 bp, Homo sapien
ccttcaaactgaagtgcgagtgtgc

SEQ ID NO: 2613985 - DNA, 25 bp, Homo sapien
taggaacacatcgatttgaagactc

SEQ ID NO: 2613986 - DNA, 25 bp, Homo sapien
ggtgagctgacttctaaacttagga

SEQ ID NO: 2613987 - DNA, 25 bp, Homo sapien
cagcatgtgccggttagtaccagct

SEQ ID NO: 2613988 - DNA, 25 bp, Homo sapien
ggcttgcgcttggaaagtcacggta

SEQ ID NO: 2613989 - DNA, 25 bp, Homo sapien
aaaaagaactagacgaggcttgcgc

SEQ ID NO: 2613990 - DNA, 25 bp, Homo sapien
tcacggtaggattggacctgccggc

SEQ ID NO: 2613991 - DNA, 25 bp, Homo sapien
tggcaaagggcgtcagtgagacaac

SEQ ID NO: 2613992 - DNA, 25 bp, Homo sapien
ggcaaaactgagaactggcatattc

SEQ ID NO: 2613993 - DNA, 25 bp, Homo sapien
gcgtttcttctaatcgagtcccatc

SEQ ID NO: 2613994 - DNA, 25 bp, Homo sapien
tcttcacttgggctgcttaagtcac

SEQ ID NO: 2613995 - DNA, 25 bp, Homo sapien
cacaatggagctgatttggcaggac

SEQ ID NO: 2613996 - DNA, 25 bp, Homo sapien
gaacattgtaccttattggcagcag

SEQ ID NO: 2613997 - DNA, 25 bp, Homo sapien
ttgtaccttattggcagcagtttta

SEQ ID NO: 2613998 - DNA, 25 bp, Homo sapien
aatgaacattgtaccttattggcag

SEQ ID NO: 2613999 - DNA, 25 bp, Homo sapien
tcaatgaacattgtaccttattggc

SEQ ID NO: 2614000 - DNA, 25 bp, Homo sapien
gacagacatgcctccgacagaggag

SEQ ID NO: 2614001 - DNA, 25 bp, Homo sapien
cattcgaaatccatgcagtgcagta

SEQ ID NO: 2614002 - DNA, 25 bp, Homo sapien
ttagagcgagtcacatggagcatcc

SEQ ID NO: 2614003 - DNA, 25 bp, Homo sapien
tcttggaaccaaaggactgcagctg

SEQ ID NO: 2614004 - DNA, 25 bp, Homo sapien
cactgttagaccaagaagacggcaa

SEQ ID NO: 2614005 - DNA, 25 bp, Homo sapien
tgtccacagggaggttaacaggccc

SEQ ID NO: 2614006 - DNA, 25 bp, Homo sapien
cacgggcttgaacgtatgctggaca

SEQ ID NO: 2614007 - DNA, 25 bp, Homo sapien
gaaggtgccaccatctagaagcagc

SEQ ID NO: 2614008 - DNA, 25 bp, Homo sapien
ctgctaacagtggttgcctgtggga

SEQ ID NO: 2614009 - DNA, 25 bp, Homo sapien
tcgtcatatggatgtgctaactgct

SEQ ID NO: 2614010 - DNA, 25 bp, Homo sapien
ttgtataagtaactcaccaagctgc

SEQ ID NO: 2614011 - DNA, 25 bp, Homo sapien
gcaaatatgtagcacgtgtatgtct

SEQ ID NO: 2614012 - DNA, 25 bp, Homo sapien
aaaggaagtagacctgaaaggatag

SEQ ID NO: 2614013 - DNA, 25 bp, Homo sapien
gcacctggcgtacaacttgttttta

SEQ ID NO: 2614014 - DNA, 25 bp, Homo sapien
aaacggccctctgtcttgattgtgg

SEQ ID NO: 2614015 - DNA, 25 bp, Homo sapien
gacaataaaacggccctctgtcttg

SEQ ID NO: 2614016 - DNA, 25 bp, Homo sapien
ctggaatgcagtagcacaatgtcgg

SEQ ID NO: 2614017 - DNA, 25 bp, Homo sapien
ggagacagagtttcattccgtcacc

SEQ ID NO: 2614018 - DNA, 25 bp, Homo sapien
tggagacagagtttcattccgtcac

SEQ ID NO: 2614019 - DNA, 25 bp, Homo sapien
gaatgcagtagcacaatgtcggctc

SEQ ID NO: 2614020 - DNA, 25 bp, Homo sapien
cagacatggctaatggaccagggcc

SEQ ID NO: 2614021 - DNA, 25 bp, Homo sapien
taaatgacccactcttggaggagcc

SEQ ID NO: 2614022 - DNA, 25 bp, Homo sapien
taactctccaaggattgtgccacac

SEQ ID NO: 2614023 - DNA, 25 bp, Homo sapien
catgtccacgtggaactggctgagc

SEQ ID NO: 2614024 - DNA, 25 bp, Homo sapien
ctgaagagccactttacaatgattt

SEQ ID NO: 2614025 - DNA, 25 bp, Homo sapien
tctctctgacgtgcaattacaccct

SEQ ID NO: 2614026 - DNA, 25 bp, Homo sapien
tcttgtaactgaagagccactttac

SEQ ID NO: 2614027 - DNA, 25 bp, Homo sapien
tgacgtgcaattacaccctcctttt

SEQ ID NO: 2614028 - DNA, 25 bp, Homo sapien
agctgctcagaggaacgactcttgt

SEQ ID NO: 2614029 - DNA, 25 bp, Homo sapien
tgctcagaggaacgactcttgttca

SEQ ID NO: 2614030 - DNA, 25 bp, Homo sapien
tgtgctggtttggaaaagtcaatgt

SEQ ID NO: 2614031 - DNA, 25 bp, Homo sapien
tgtgtgctggtttggaaaagtcaat

SEQ ID NO: 2614032 - DNA, 25 bp, Homo sapien
atgctttgaaaagagactcagattg

SEQ ID NO: 2614033 - DNA, 25 bp, Homo sapien
ttgaaaagagactcagattgtcccc

SEQ ID NO: 2614034 - DNA, 25 bp, Homo sapien
gctttgaaaagagactcagattgtc

SEQ ID NO: 2614035 - DNA, 25 bp, Homo sapien
caactggctgcttcatatcccggtt

SEQ ID NO: 2614036 - DNA, 25 bp, Homo sapien
tggcctggttggcatgtttctgagt

SEQ ID NO: 2614037 - DNA, 25 bp, Homo sapien
ctggttggcatgtttctgagttcac

SEQ ID NO: 2614038 - DNA, 25 bp, Homo sapien
cgtggcctggttggcatgtttctga

SEQ ID NO: 2614039 - DNA, 25 bp, Homo sapien
gcctggttggcatgtttctgagttc

SEQ ID NO: 2614040 - DNA, 25 bp, Homo sapien
ggtgacatccgtggatcacatttgg

SEQ ID NO: 2614041 - DNA, 25 bp, Homo sapien
aaactgcagtgctcgcaggctcggg

SEQ ID NO: 2614042 - DNA, 25 bp, Homo sapien
tggaaaagcggtttatgcaaactgc

SEQ ID NO: 2614043 - DNA, 25 bp, Homo sapien
cacatttggtgtgccggtgctggaa

SEQ ID NO: 2614044 - DNA, 25 bp, Homo sapien
cactgagcaagacgcggatgtggaa

SEQ ID NO: 2614045 - DNA, 25 bp, Homo sapien
tcctgtgaggttccctactttctcc

SEQ ID NO: 2614046 - DNA, 25 bp, Homo sapien
gtgctgtatcgggaacacgtggctt

SEQ ID NO: 2614047 - DNA, 25 bp, Homo sapien
atcatcccctcacgtgctgtatcgg

SEQ ID NO: 2614048 - DNA, 25 bp, Homo sapien
agtatttacagtgcccctcatccca

SEQ ID NO: 2614049 - DNA, 25 bp, Homo sapien
ttcagtatttacagtgcccctcatc

SEQ ID NO: 2614050 - DNA, 25 bp, Homo sapien
tttacagtgcccctcatcccagtgg

SEQ ID NO: 2614051 - DNA, 25 bp, Homo sapien
tacagtgcccctcatcccagtggaa

SEQ ID NO: 2614052 - DNA, 25 bp, Homo sapien
agtgtcccctcgctctgtgctttgc

SEQ ID NO: 2614053 - DNA, 25 bp, Homo sapien
ccggaggacgacatggcctttcacg

SEQ ID NO: 2614054 - DNA, 25 bp, Homo sapien
tcttggcaggcaggtgcttccttat

SEQ ID NO: 2614055 - DNA, 25 bp, Homo sapien
agagcctaccccaccattgcaaagt

SEQ ID NO: 2614056 - DNA, 25 bp, Homo sapien
gtgccacaaaagacatagtactcga

SEQ ID NO: 2614057 - DNA, 25 bp, Homo sapien
ctgacccgagttccacctcaaagag

SEQ ID NO: 2614058 - DNA, 25 bp, Homo sapien
catagtgttataaggtttcagtgcc

SEQ ID NO: 2614059 - DNA, 25 bp, Homo sapien
tgtggaagcagagctatcatagtgt

SEQ ID NO: 2614060 - DNA, 25 bp, Homo sapien
gggatattgacaccgtagctactga

SEQ ID NO: 2614061 - DNA, 25 bp, Homo sapien
tcaacaaggtctttgcagagtccag

SEQ ID NO: 2614062 - DNA, 25 bp, Homo sapien
tagctactgatagaagtaccaggac

SEQ ID NO: 2614063 - DNA, 25 bp, Homo sapien
gaataatgcagtgcccctcaacaag

SEQ ID NO: 2614064 - DNA, 25 bp, Homo sapien
catgtccacggaatcagcactggcc

SEQ ID NO: 2614065 - DNA, 25 bp, Homo sapien
atgtctccagccagagtgcctgcca

SEQ ID NO: 2614066 - DNA, 25 bp, Homo sapien
ggagcccttactgcgctgtcagcat

SEQ ID NO: 2614067 - DNA, 25 bp, Homo sapien
tcttgggtggctactgtaacacaca

SEQ ID NO: 2614068 - DNA, 25 bp, Homo sapien
tgtcatgcatgtcgtacatccttct

SEQ ID NO: 2614069 - DNA, 25 bp, Homo sapien
catccttcttgtttatcatatgagg

SEQ ID NO: 2614070 - DNA, 25 bp, Homo sapien
catgtcgtacatccttcttgtttat

SEQ ID NO: 2614071 - DNA, 25 bp, Homo sapien
ttgtttatcatatgaggaactgagg

SEQ ID NO: 2614072 - DNA, 25 bp, Homo sapien
ctttgccatctgctacgtcgggcat

SEQ ID NO: 2614073 - DNA, 25 bp, Homo sapien
cctttgccatctgctacgtcgggca

SEQ ID NO: 2614074 - DNA, 25 bp, Homo sapien
agctgcagcagtgaaggcgagaaca

SEQ ID NO: 2614075 - DNA, 25 bp, Homo sapien
caccattgagatttgcagccaccat

SEQ ID NO: 2614076 - DNA, 25 bp, Homo sapien
ggagctgcagcagtgaaggcgagaa

SEQ ID NO: 2614077 - DNA, 25 bp, Homo sapien
gcaccattgagatttgcagccacca

SEQ ID NO: 2614078 - DNA, 25 bp, Homo sapien
tgactaactgtgtaagtgcttaaaa

SEQ ID NO: 2614079 - DNA, 25 bp, Homo sapien
taactgtgtaagtgcttaaaatgga

SEQ ID NO: 2614080 - DNA, 25 bp, Homo sapien
gtgtaagtgcttaaaatggaataaa

SEQ ID NO: 2614081 - DNA, 25 bp, Homo sapien
ctccatgactaactgtgtaagtgct

SEQ ID NO: 2614082 - DNA, 25 bp, Homo sapien
aacacacacaggaactcgcctgctc

SEQ ID NO: 2614083 - DNA, 25 bp, Homo sapien
gttcccattagaagggcctccaaga

SEQ ID NO: 2614084 - DNA, 25 bp, Homo sapien
gccgcagccggttcccattagaagg

SEQ ID NO: 2614085 - DNA, 25 bp, Homo sapien
cagccggttcccattagaagggcct

SEQ ID NO: 2614086 - DNA, 25 bp, Homo sapien
gctggaagaatatggcacagatcat

SEQ ID NO: 2614087 - DNA, 25 bp, Homo sapien
ggagcaatggcaagaagcaacggag

SEQ ID NO: 2614088 - DNA, 25 bp, Homo sapien
atgagtttagcctcatgttgtaggg

SEQ ID NO: 2614089 - DNA, 25 bp, Homo sapien
agtccttaatgggttctgaagatgg

SEQ ID NO: 2614090 - DNA, 25 bp, Homo sapien
cggtgctggttaggagcaggtttaa

SEQ ID NO: 2614091 - DNA, 25 bp, Homo sapien
tgatttgagtactgaagcggtgctg

SEQ ID NO: 2614092 - DNA, 25 bp, Homo sapien
ttttgcctgaaggaacgaggtcagg

SEQ ID NO: 2614093 - DNA, 25 bp, Homo sapien
cttttatgtgaggcgattttgcctg

SEQ ID NO: 2614094 - DNA, 25 bp, Homo sapien
tctttcaatgagttcactggtgctc

SEQ ID NO: 2614095 - DNA, 25 bp, Homo sapien
ggacccgatatgtactgcaaatgtg

SEQ ID NO: 2614096 - DNA, 25 bp, Homo sapien
tccagacagagaaaagcgctttctt

SEQ ID NO: 2614097 - DNA, 25 bp, Homo sapien
ccccgtatatttgggaagatctcag

SEQ ID NO: 2614098 - DNA, 25 bp, Homo sapien
gtcgataagaatctacagtctcctc

SEQ ID NO: 2614099 - DNA, 25 bp, Homo sapien
cagtctcctcaataagatgggctga

SEQ ID NO: 2614100 - DNA, 25 bp, Homo sapien
ggtgggctgtcgataagaatctaca

SEQ ID NO: 2614101 - DNA, 25 bp, Homo sapien
tcagaggcactgaaaggtgggctgt

SEQ ID NO: 2614102 - DNA, 25 bp, Homo sapien
actggcccctgatccggttcttggt

SEQ ID NO: 2614103 - DNA, 25 bp, Homo sapien
tcgacttcggggagcaggtaagccc

SEQ ID NO: 2614104 - DNA, 25 bp, Homo sapien
tgggcatcaccaacatagccatcga

SEQ ID NO: 2614105 - DNA, 25 bp, Homo sapien
tatggtgaaattcccggcgctcacg

SEQ ID NO: 2614106 - DNA, 25 bp, Homo sapien
aaactgcagcagacaggtctgagcg

SEQ ID NO: 2614107 - DNA, 25 bp, Homo sapien
tgccctggcgcatgtcctccaggga

SEQ ID NO: 2614108 - DNA, 25 bp, Homo sapien
ggcgcatgtcctccagggacacggg

SEQ ID NO: 2614109 - DNA, 25 bp, Homo sapien
agcagacaggtctgagcgccccaga

SEQ ID NO: 2614110 - DNA, 25 bp, Homo sapien
agccttgccagacctgcggtttgca

SEQ ID NO: 2614111 - DNA, 25 bp, Homo sapien
tagtagttaccaatacacagtgcca

SEQ ID NO: 2614112 - DNA, 25 bp, Homo sapien
gaaagtcagctcgtggtggtgtcat

SEQ ID NO: 2614113 - DNA, 25 bp, Homo sapien
cagattacacagttgccctggcaag

SEQ ID NO: 2614114 - DNA, 25 bp, Homo sapien
tatgaagtttctccgtacagaccac

SEQ ID NO: 2614115 - DNA, 25 bp, Homo sapien
gagatggttgaattaggcattctgc

SEQ ID NO: 2614116 - DNA, 25 bp, Homo sapien
gatctagaaacactgatgagatggt

SEQ ID NO: 2614117 - DNA, 25 bp, Homo sapien
aatatgaagtttctccgtacagacc

SEQ ID NO: 2614118 - DNA, 25 bp, Homo sapien
catcgaaatcaacagtgactctggt

SEQ ID NO: 2614119 - DNA, 25 bp, Homo sapien
actgaacagccagaggaaaccttcc

SEQ ID NO: 2614120 - DNA, 25 bp, Homo sapien
ccagaggaaaccttccctaacatcg

SEQ ID NO: 2614121 - DNA, 25 bp, Homo sapien
tttcaacggattggtgtgtccattt

SEQ ID NO: 2614122 - DNA, 25 bp, Homo sapien
accataggtggtgatagggtcacca

SEQ ID NO: 2614123 - DNA, 25 bp, Homo sapien
ttccaaagcaatccctgtctcagtg

SEQ ID NO: 2614124 - DNA, 25 bp, Homo sapien
ggtcaccacctatcaagccagtagt

SEQ ID NO: 2614125 - DNA, 25 bp, Homo sapien
cctgtctcagtgcaccataggtggt

SEQ ID NO: 2614126 - DNA, 25 bp, Homo sapien
tgactggagccaatggggttagttt

SEQ ID NO: 2614127 - DNA, 25 bp, Homo sapien
caggtttaagccaaacgcccacctg

SEQ ID NO: 2614128 - DNA, 25 bp, Homo sapien
cagctctggtgactggagccaatgg

SEQ ID NO: 2614129 - DNA, 25 bp, Homo sapien
ctgttatgtgcagacagctctggtg

SEQ ID NO: 2614130 - DNA, 25 bp, Homo sapien
agccaccccaagataagagctgttg

SEQ ID NO: 2614131 - DNA, 25 bp, Homo sapien
tggaaaacactagagcaaggacacg

SEQ ID NO: 2614132 - DNA, 25 bp, Homo sapien
cttctgagatgaggcctccagcagt

SEQ ID NO: 2614133 - DNA, 25 bp, Homo sapien
gttggttggcaacatgcatggatac

SEQ ID NO: 2614134 - DNA, 25 bp, Homo sapien
ctttcactgccaagcccaatcttct

SEQ ID NO: 2614135 - DNA, 25 bp, Homo sapien
ccaagcccaatcttctccactggga

SEQ ID NO: 2614136 - DNA, 25 bp, Homo sapien
aagcccaatcttctccactgggact

SEQ ID NO: 2614137 - DNA, 25 bp, Homo sapien
cactgccaagcccaatcttctccac

SEQ ID NO: 2614138 - DNA, 25 bp, Homo sapien
acacatcctgcctttcgtcctggcc

SEQ ID NO: 2614139 - DNA, 25 bp, Homo sapien
tacacatcctgcctttcgtcctggc

SEQ ID NO: 2614140 - DNA, 25 bp, Homo sapien
ttacacatcctgcctttcgtcctgg

SEQ ID NO: 2614141 - DNA, 25 bp, Homo sapien
tcatcctgcaaacagaggtgaagtg

SEQ ID NO: 2614142 - DNA, 25 bp, Homo sapien
aaattcggcaggaatctatcatcct

SEQ ID NO: 2614143 - DNA, 25 bp, Homo sapien
ggtgaagtgggctaggcttcttccc

SEQ ID NO: 2614144 - DNA, 25 bp, Homo sapien
tctctggcctcatttcgaatcattc

SEQ ID NO: 2614145 - DNA, 25 bp, Homo sapien
tagagccattctctgcgctacccat

SEQ ID NO: 2614146 - DNA, 25 bp, Homo sapien
cattggcttagagccattctctgcg

SEQ ID NO: 2614147 - DNA, 25 bp, Homo sapien
ccgcaaggtcattggcttagagcca

SEQ ID NO: 2614148 - DNA, 25 bp, Homo sapien
ttctgcttccaaatgccgcaaggtc

SEQ ID NO: 2614149 - DNA, 25 bp, Homo sapien
ggatgaccactctgctaacacctgc

SEQ ID NO: 2614150 - DNA, 25 bp, Homo sapien
cagacaggatgaccactctgctaac

SEQ ID NO: 2614151 - DNA, 25 bp, Homo sapien
ggctaccagcaggtaggggtgacat

SEQ ID NO: 2614152 - DNA, 25 bp, Homo sapien
cactctgctaacacctgccattgaa

SEQ ID NO: 2614153 - DNA, 25 bp, Homo sapien
ctggactctttccaatgccctcttc

SEQ ID NO: 2614154 - DNA, 25 bp, Homo sapien
tggactctttccaatgccctcttct

SEQ ID NO: 2614155 - DNA, 25 bp, Homo sapien
aagacctggctgcccttgatcgtcc

SEQ ID NO: 2614156 - DNA, 25 bp, Homo sapien
ctggctgcccttgatcgtccactcc

SEQ ID NO: 2614157 - DNA, 25 bp, Homo sapien
cactgtaagtgactgcccgacagga

SEQ ID NO: 2614158 - DNA, 25 bp, Homo sapien
tcattataggcattcccctccggct

SEQ ID NO: 2614159 - DNA, 25 bp, Homo sapien
gaaaagttcagtccgaggatctcac

SEQ ID NO: 2614160 - DNA, 25 bp, Homo sapien
tttttgcctgccaagcgtagtctac

SEQ ID NO: 2614161 - DNA, 25 bp, Homo sapien
cgtgtgctgtcctgcttgatcactg

SEQ ID NO: 2614162 - DNA, 25 bp, Homo sapien
cttctcgtgtgctgtcctgcttgat

SEQ ID NO: 2614163 - DNA, 25 bp, Homo sapien
ggatttaagacatactcagatgtac

SEQ ID NO: 2614164 - DNA, 25 bp, Homo sapien
cccagaccagctgggattaattctc

SEQ ID NO: 2614165 - DNA, 25 bp, Homo sapien
tgcttttgtcgtctctcagccagct

SEQ ID NO: 2614166 - DNA, 25 bp, Homo sapien
cttttgtcgtctctcagccagctcc

SEQ ID NO: 2614167 - DNA, 25 bp, Homo sapien
gcttttgtcgtctctcagccagctc

SEQ ID NO: 2614168 - DNA, 25 bp, Homo sapien
accagagccaaagtctccttctacc

SEQ ID NO: 2614169 - DNA, 25 bp, Homo sapien
taccagagccaaagtctccttctac

SEQ ID NO: 2614170 - DNA, 25 bp, Homo sapien
aattgcagcaaatctctggggaagc

SEQ ID NO: 2614171 - DNA, 25 bp, Homo sapien
ggacaggtccggaagctgtcagcaa

SEQ ID NO: 2614172 - DNA, 25 bp, Homo sapien
cagaacaaggacaggtccggaagct

SEQ ID NO: 2614173 - DNA, 25 bp, Homo sapien
tcaggtgttactaccagaacaagga

SEQ ID NO: 2614174 - DNA, 25 bp, Homo sapien
aggccaaatggcttccattgtcatg

SEQ ID NO: 2614175 - DNA, 25 bp, Homo sapien
ggccaaatggcttccattgtcatgc

SEQ ID NO: 2614176 - DNA, 25 bp, Homo sapien
gccaaatggcttccattgtcatgca

SEQ ID NO: 2614177 - DNA, 25 bp, Homo sapien
gctgtgacttctgtccgctgtcgaa

SEQ ID NO: 2614178 - DNA, 25 bp, Homo sapien
gggacagattctcgggtaattctga

SEQ ID NO: 2614179 - DNA, 25 bp, Homo sapien
tgtctgttaaagatgctgtgacttc

SEQ ID NO: 2614180 - DNA, 25 bp, Homo sapien
gactgatatagtcaagagaccatgg

SEQ ID NO: 2614181 - DNA, 25 bp, Homo sapien
ttcgctcgacaaaggttccataccc

SEQ ID NO: 2614182 - DNA, 25 bp, Homo sapien
catttcgctcgacaaaggttccata

SEQ ID NO: 2614183 - DNA, 25 bp, Homo sapien
cgacaaaggttccataccctcagca

SEQ ID NO: 2614184 - DNA, 25 bp, Homo sapien
ttgtcatttcgctcgacaaaggttc

SEQ ID NO: 2614185 - DNA, 25 bp, Homo sapien
ctggcagtccacactagtagagttt

SEQ ID NO: 2614186 - DNA, 25 bp, Homo sapien
atttcattcaccacctgtacctggc

SEQ ID NO: 2614187 - DNA, 25 bp, Homo sapien
tgtacctggcagtccacactagtag

SEQ ID NO: 2614188 - DNA, 25 bp, Homo sapien
aacatagtcattagttctattgtaa

SEQ ID NO: 2614189 - DNA, 25 bp, Homo sapien
gaatcctggtcatgagtctctccag

SEQ ID NO: 2614190 - DNA, 25 bp, Homo sapien
aatcctggtcatgagtctctccagc

SEQ ID NO: 2614191 - DNA, 25 bp, Homo sapien
ttggaatcctggtcatgagtctctc

SEQ ID NO: 2614192 - DNA, 25 bp, Homo sapien
ggaatcctggtcatgagtctctcca

SEQ ID NO: 2614193 - DNA, 25 bp, Homo sapien
ggctgtgcaccttaaagccggccat

SEQ ID NO: 2614194 - DNA, 25 bp, Homo sapien
gggctgtgcaccttaaagccggcca

SEQ ID NO: 2614195 - DNA, 25 bp, Homo sapien
tggaaatgcaacatcgcctgcaggg

SEQ ID NO: 2614196 - DNA, 25 bp, Homo sapien
cagggctgtgcaccttaaagccggc

SEQ ID NO: 2614197 - DNA, 25 bp, Homo sapien
ttcttggtctgattgcaccttcggg

SEQ ID NO: 2614198 - DNA, 25 bp, Homo sapien
gggcaattcttggtctgattgcacc

SEQ ID NO: 2614199 - DNA, 25 bp, Homo sapien
ctgtggggcaattcttggtctgatt

SEQ ID NO: 2614200 - DNA, 25 bp, Homo sapien
caattcttggtctgattgcaccttc

SEQ ID NO: 2614201 - DNA, 25 bp, Homo sapien
ggtgaactcattgccaaccccaggc

SEQ ID NO: 2614202 - DNA, 25 bp, Homo sapien
taaggaagtaatgtggaggttgcct

SEQ ID NO: 2614203 - DNA, 25 bp, Homo sapien
gagtcccctcatagtgcagagactg

SEQ ID NO: 2614204 - DNA, 25 bp, Homo sapien
aggttgccttgttccggtgaactca

SEQ ID NO: 2614205 - DNA, 25 bp, Homo sapien
acttggccgacacaccacagtggca

SEQ ID NO: 2614206 - DNA, 25 bp, Homo sapien
tggccgacacaccacagtggcaact

SEQ ID NO: 2614207 - DNA, 25 bp, Homo sapien
tattaatgcacttggccgacacacc

SEQ ID NO: 2614208 - DNA, 25 bp, Homo sapien
atgcacttggccgacacaccacagt

SEQ ID NO: 2614209 - DNA, 25 bp, Homo sapien
cagcacatccccaatagcggcatta

SEQ ID NO: 2614210 - DNA, 25 bp, Homo sapien
taaatttgtgcattaatccagcagc

SEQ ID NO: 2614211 - DNA, 25 bp, Homo sapien
gccagatctacttcttctccaaaga

SEQ ID NO: 2614212 - DNA, 25 bp, Homo sapien
taagggtttggttaataccagcaca

SEQ ID NO: 2614213 - DNA, 25 bp, Homo sapien
tcctgaggtttcagctgaggttcct

SEQ ID NO: 2614214 - DNA, 25 bp, Homo sapien
caatgactggcagattgcaaatgac

SEQ ID NO: 2614215 - DNA, 25 bp, Homo sapien
ggttccttgaagaagcccaaactgc

SEQ ID NO: 2614216 - DNA, 25 bp, Homo sapien
cagccatcttggcaatgactggcag

SEQ ID NO: 2614217 - DNA, 25 bp, Homo sapien
gatcaaaggcttgctccagtagctc

SEQ ID NO: 2614218 - DNA, 25 bp, Homo sapien
ggaggagttcaatatggcagatcaa

SEQ ID NO: 2614219 - DNA, 25 bp, Homo sapien
cagtgtcactccagaaccgtttcat

SEQ ID NO: 2614220 - DNA, 25 bp, Homo sapien
tagtgcagtgaatccgcacagctgg

SEQ ID NO: 2614221 - DNA, 25 bp, Homo sapien
aaaaatctcttagatcaggtgagag

SEQ ID NO: 2614222 - DNA, 25 bp, Homo sapien
ttttacatggcttgcaaacaaattg

SEQ ID NO: 2614223 - DNA, 25 bp, Homo sapien
tcctgcttgccactagttacgtccg

SEQ ID NO: 2614224 - DNA, 25 bp, Homo sapien
gctgggtactcttgctgtctcaaaa

SEQ ID NO: 2614225 - DNA, 25 bp, Homo sapien
tgagcagatacggttgccatgcttg

SEQ ID NO: 2614226 - DNA, 25 bp, Homo sapien
ggagctgagcagatacggttgccat

SEQ ID NO: 2614227 - DNA, 25 bp, Homo sapien
gcagatacggttgccatgcttgtac

SEQ ID NO: 2614228 - DNA, 25 bp, Homo sapien
accatgatgaaaagcttcttgaggc

SEQ ID NO: 2614229 - DNA, 25 bp, Homo sapien
tgctaatgctgcctgatgacgtcaa

SEQ ID NO: 2614230 - DNA, 25 bp, Homo sapien
tacaactcatgtattgccagtgaga

SEQ ID NO: 2614231 - DNA, 25 bp, Homo sapien
tctgaggtgaggcttgaaaagtccc

SEQ ID NO: 2614232 - DNA, 25 bp, Homo sapien
aatgcagactcggatttagtaggtc

SEQ ID NO: 2614233 - DNA, 25 bp, Homo sapien
gcttgccacatagcctctgtgatga

SEQ ID NO: 2614234 - DNA, 25 bp, Homo sapien
tactgttgtcgttgcttcctgggaa

SEQ ID NO: 2614235 - DNA, 25 bp, Homo sapien
tctctgtcacagtctaaggactcag

SEQ ID NO: 2614236 - DNA, 25 bp, Homo sapien
tccaggattcttgttgcttgccaca

SEQ ID NO: 2614237 - DNA, 25 bp, Homo sapien
ttgcaaggtctgaggcccacctctc

SEQ ID NO: 2614238 - DNA, 25 bp, Homo sapien
gtctgaggcccacctctcccctcca

SEQ ID NO: 2614239 - DNA, 25 bp, Homo sapien
tctgaggcccacctctcccctccat

SEQ ID NO: 2614240 - DNA, 25 bp, Homo sapien
cctttgcaaggtctgaggcccacct

SEQ ID NO: 2614241 - DNA, 25 bp, Homo sapien
tttaaaggattcatcccatctgcag

SEQ ID NO: 2614242 - DNA, 25 bp, Homo sapien
tctgagcacctgctttcaatcttta

SEQ ID NO: 2614243 - DNA, 25 bp, Homo sapien
cccctcctgcacaccagtacctctt

SEQ ID NO: 2614244 - DNA, 25 bp, Homo sapien
ttcaatctttaaaggattcatccca

SEQ ID NO: 2614245 - DNA, 25 bp, Homo sapien
gtcctctggcaacgactgagtgtaa

SEQ ID NO: 2614246 - DNA, 25 bp, Homo sapien
tcctttgtaggtgtagaacaggaag

SEQ ID NO: 2614247 - DNA, 25 bp, Homo sapien
acgactgagtgtaaagagtcctttg

SEQ ID NO: 2614248 - DNA, 25 bp, Homo sapien
gagtgtaaagagtcctttgtaggtg

SEQ ID NO: 2614249 - DNA, 25 bp, Homo sapien
tttccatacacagtcagatgctggg

SEQ ID NO: 2614250 - DNA, 25 bp, Homo sapien
catacacagtcagatgctgggaagc

SEQ ID NO: 2614251 - DNA, 25 bp, Homo sapien
gtcctttccatacacagtcagatgc

SEQ ID NO: 2614252 - DNA, 25 bp, Homo sapien
gaagctgggattgatgttaattttt

SEQ ID NO: 2614253 - DNA, 25 bp, Homo sapien
tttgctttcgcagcagtggccagaa

SEQ ID NO: 2614254 - DNA, 25 bp, Homo sapien
tggccagaagtgctgacatcctgag

SEQ ID NO: 2614255 - DNA, 25 bp, Homo sapien
ccagacattactgagctgggagcca

SEQ ID NO: 2614256 - DNA, 25 bp, Homo sapien
tcatttcagaatgccgccaatggca

SEQ ID NO: 2614257 - DNA, 25 bp, Homo sapien
acctgaccctgggtcgcaaaccaca

SEQ ID NO: 2614258 - DNA, 25 bp, Homo sapien
ttcccaggataaatgttctcatcag

SEQ ID NO: 2614259 - DNA, 25 bp, Homo sapien
actcaccagatcgccctcggaggag

SEQ ID NO: 2614260 - DNA, 25 bp, Homo sapien
gagggacttgccctcatttgaggga

SEQ ID NO: 2614261 - DNA, 25 bp, Homo sapien
gaccagtccagtgataccatctcaa

SEQ ID NO: 2614262 - DNA, 25 bp, Homo sapien
gtccagtgataccatctcaatcaca

SEQ ID NO: 2614263 - DNA, 25 bp, Homo sapien
cagtccagtgataccatctcaatca

SEQ ID NO: 2614264 - DNA, 25 bp, Homo sapien
atcccatccagccaaccagaccagt

SEQ ID NO: 2614265 - DNA, 25 bp, Homo sapien
ttgaatcaaaccctggatgatgatg

SEQ ID NO: 2614266 - DNA, 25 bp, Homo sapien
aggttgaatcaaaccctggatgatg

SEQ ID NO: 2614267 - DNA, 25 bp, Homo sapien
ctggaggttgaatcaaaccctggat

SEQ ID NO: 2614268 - DNA, 25 bp, Homo sapien
aatcaaaccctggatgatgatgact

SEQ ID NO: 2614269 - DNA, 25 bp, Homo sapien
cctatggtcggctgcagctcaaaca

SEQ ID NO: 2614270 - DNA, 25 bp, Homo sapien
aggatcagggttcctcctatggtcg

SEQ ID NO: 2614271 - DNA, 25 bp, Homo sapien
tgtagccttattcctgtgctcttca

SEQ ID NO: 2614272 - DNA, 25 bp, Homo sapien
tcaaacacatccgaagacaacaggg

SEQ ID NO: 2614273 - DNA, 25 bp, Homo sapien
gaatggaccctttgttggctctcaa

SEQ ID NO: 2614274 - DNA, 25 bp, Homo sapien
tctcagcttagcaaagaagcgtgcc

SEQ ID NO: 2614275 - DNA, 25 bp, Homo sapien
ttcaaaatctgagcgcacaccaacg

SEQ ID NO: 2614276 - DNA, 25 bp, Homo sapien
gaagcagtcttcgaccgggaacatg

SEQ ID NO: 2614277 - DNA, 25 bp, Homo sapien
cagtcaaagcctgcgattgtgtttc

SEQ ID NO: 2614278 - DNA, 25 bp, Homo sapien
gctgtcgatgttttattctgccacc

SEQ ID NO: 2614279 - DNA, 25 bp, Homo sapien
caatagaaccattgatgccttctga

SEQ ID NO: 2614280 - DNA, 25 bp, Homo sapien
tagacttggctactccagtcaaagc

SEQ ID NO: 2614281 - DNA, 25 bp, Homo sapien
aaggtgacgttaggccattattgct

SEQ ID NO: 2614282 - DNA, 25 bp, Homo sapien
ctgtgtcccaaggtgacgttaggcc

SEQ ID NO: 2614283 - DNA, 25 bp, Homo sapien
ctgctgatgaggcagagtctgcctc

SEQ ID NO: 2614284 - DNA, 25 bp, Homo sapien
atccagttacccaaggctgtgtccc

SEQ ID NO: 2614285 - DNA, 25 bp, Homo sapien
cactagagttgctgctttgaaggca

SEQ ID NO: 2614286 - DNA, 25 bp, Homo sapien
tgactccgactgatgatccttttgg

SEQ ID NO: 2614287 - DNA, 25 bp, Homo sapien
tttggccttaaagatgccacaaggt

SEQ ID NO: 2614288 - DNA, 25 bp, Homo sapien
tcttcccaagaccagagtgttctga

SEQ ID NO: 2614289 - DNA, 25 bp, Homo sapien
caatgaatcatcttgggtgacatct

SEQ ID NO: 2614290 - DNA, 25 bp, Homo sapien
ggatataacataatctgcttccaca

SEQ ID NO: 2614291 - DNA, 25 bp, Homo sapien
aattccttgtaagtgcgttgggact

SEQ ID NO: 2614292 - DNA, 25 bp, Homo sapien
tggtttccccattgctgcttatcct

SEQ ID NO: 2614293 - DNA, 25 bp, Homo sapien
gcttatccttagaggcatgccagag

SEQ ID NO: 2614294 - DNA, 25 bp, Homo sapien
ttctggaatcatgcagagggagaga

SEQ ID NO: 2614295 - DNA, 25 bp, Homo sapien
ctttatcacttggtgttctggaatc

SEQ ID NO: 2614296 - DNA, 25 bp, Homo sapien
caatccatggtctgctgtactactt

SEQ ID NO: 2614297 - DNA, 25 bp, Homo sapien
aaaacaggcaatccatggtctgctg

SEQ ID NO: 2614298 - DNA, 25 bp, Homo sapien
ggcatgcaacactgtatggagacct

SEQ ID NO: 2614299 - DNA, 25 bp, Homo sapien
ctgggcatgcaacactgtatggaga

SEQ ID NO: 2614300 - DNA, 25 bp, Homo sapien
cactgtatggagacctgaagagagt

SEQ ID NO: 2614301 - DNA, 25 bp, Homo sapien
tgcaacactgtatggagacctgaag

SEQ ID NO: 2614302 - DNA, 25 bp, Homo sapien
cagtctctgtctgaaagacattaag

SEQ ID NO: 2614303 - DNA, 25 bp, Homo sapien
catgtaacacagatacagtctctgt

SEQ ID NO: 2614304 - DNA, 25 bp, Homo sapien
cattaagatctaagtaaaatgagct

SEQ ID NO: 2614305 - DNA, 25 bp, Homo sapien
gcaaagaatgatttatcactgccac

SEQ ID NO: 2614306 - DNA, 25 bp, Homo sapien
tgaggtatgtgaaaggttgcagaca

SEQ ID NO: 2614307 - DNA, 25 bp, Homo sapien
acaagtgagggttcatctgcctcca

SEQ ID NO: 2614308 - DNA, 25 bp, Homo sapien
tctaattacaagtgagggttcatct

SEQ ID NO: 2614309 - DNA, 25 bp, Homo sapien
ttcctctgtgaggtatgtgaaaggt

SEQ ID NO: 2614310 - DNA, 25 bp, Homo sapien
cttaagcaaaggtaaagagtattat

SEQ ID NO: 2614311 - DNA, 25 bp, Homo sapien
attctctatgttctctatgtctctg

SEQ ID NO: 2614312 - DNA, 25 bp, Homo sapien
tttctatgtctttatctggagcatg

SEQ ID NO: 2614313 - DNA, 25 bp, Homo sapien
tctttatctggagcatgctctttca

SEQ ID NO: 2614314 - DNA, 25 bp, Homo sapien
agtgagggttttcaacggtgcctgg

SEQ ID NO: 2614315 - DNA, 25 bp, Homo sapien
gcccagacaatccagggagtaggca

SEQ ID NO: 2614316 - DNA, 25 bp, Homo sapien
cagtgagggttttcaacggtgcctg

SEQ ID NO: 2614317 - DNA, 25 bp, Homo sapien
tagcccagacaatccagggagtagg

SEQ ID NO: 2614318 - DNA, 25 bp, Homo sapien
gtttccctgtgcaatcccagcaatg

SEQ ID NO: 2614319 - DNA, 25 bp, Homo sapien
atgtttccctgtgcaatcccagcaa

SEQ ID NO: 2614320 - DNA, 25 bp, Homo sapien
gctctattcatagaagccgtctgct

SEQ ID NO: 2614321 - DNA, 25 bp, Homo sapien
aagccgtctgcttgaccccattggg

SEQ ID NO: 2614322 - DNA, 25 bp, Homo sapien
ggcaggccagctctattcatagaag

SEQ ID NO: 2614323 - DNA, 25 bp, Homo sapien
tgggcaataaccacccatctccatg

SEQ ID NO: 2614324 - DNA, 25 bp, Homo sapien
gaagtgaagaatcctggtggtaatg

SEQ ID NO: 2614325 - DNA, 25 bp, Homo sapien
agaatggctgagcatacacgtgtca

SEQ ID NO: 2614326 - DNA, 25 bp, Homo sapien
agcatacacgtgtcagtgcaaagtg

SEQ ID NO: 2614327 - DNA, 25 bp, Homo sapien
aatggaggaagatgcttggatgtgt

SEQ ID NO: 2614328 - DNA, 25 bp, Homo sapien
ggaaaatgccatcccttccaacacg

SEQ ID NO: 2614329 - DNA, 25 bp, Homo sapien
caacacgtctaaggtcaggataagg

SEQ ID NO: 2614330 - DNA, 25 bp, Homo sapien
tttgtaatataggaaaatgccatcc

SEQ ID NO: 2614331 - DNA, 25 bp, Homo sapien
ggatgaaattggattgaaagctctt

SEQ ID NO: 2614332 - DNA, 25 bp, Homo sapien
caggaagagaaattaacacttctct

SEQ ID NO: 2614333 - DNA, 25 bp, Homo sapien
tcaggaagagaaattaacacttctc

SEQ ID NO: 2614334 - DNA, 25 bp, Homo sapien
cttcaggaagagaaattaacacttc

SEQ ID NO: 2614335 - DNA, 25 bp, Homo sapien
gaagagaaattaacacttctcttat

SEQ ID NO: 2614336 - DNA, 25 bp, Homo sapien
tgcacagcgttgaaggactttagca

SEQ ID NO: 2614337 - DNA, 25 bp, Homo sapien
tagcagctaagtggaaaaaatcaga

SEQ ID NO: 2614338 - DNA, 25 bp, Homo sapien
ctttagcagctaagtggaaaaaatc

SEQ ID NO: 2614339 - DNA, 25 bp, Homo sapien
tgtatctgcacagcgttgaaggact

SEQ ID NO: 2614340 - DNA, 25 bp, Homo sapien
catgggacctttacaagctttggat

SEQ ID NO: 2614341 - DNA, 25 bp, Homo sapien
gaaattcacttgctgccagaaatcg

SEQ ID NO: 2614342 - DNA, 25 bp, Homo sapien
gacatagccccgatacttaaggagc

SEQ ID NO: 2614343 - DNA, 25 bp, Homo sapien
gaaatcgtagctcaatatctcctgt

SEQ ID NO: 2614344 - DNA, 25 bp, Homo sapien
cagggcacccaggatggtcatggcc

SEQ ID NO: 2614345 - DNA, 25 bp, Homo sapien
caaatagaagatagtggaagagcac

SEQ ID NO: 2614346 - DNA, 25 bp, Homo sapien
catgctccaaatagaagatagtgga

SEQ ID NO: 2614347 - DNA, 25 bp, Homo sapien
tcatgctccaaatagaagatagtgg

SEQ ID NO: 2614348 - DNA, 25 bp, Homo sapien
aagatagtggaagagcacaaacagc

SEQ ID NO: 2614349 - DNA, 25 bp, Homo sapien
tggatttttaaactcttttggcaga

SEQ ID NO: 2614350 - DNA, 25 bp, Homo sapien
tggtgataggatggatttttaaact

SEQ ID NO: 2614351 - DNA, 25 bp, Homo sapien
ctgtggtgataggatggatttttaa

SEQ ID NO: 2614352 - DNA, 25 bp, Homo sapien
gatggatttttaaactcttttggca

SEQ ID NO: 2614353 - DNA, 25 bp, Homo sapien
tcagtctctttgtgagaagcggtgc

SEQ ID NO: 2614354 - DNA, 25 bp, Homo sapien
tctgtaggatcatcagtctgctgca

SEQ ID NO: 2614355 - DNA, 25 bp, Homo sapien
agcggtgctcgcttgctctgacagc

SEQ ID NO: 2614356 - DNA, 25 bp, Homo sapien
gttctctctgtaggatcatcagtct

SEQ ID NO: 2614357 - DNA, 25 bp, Homo sapien
tctggctctctaaaccaagatttag

SEQ ID NO: 2614358 - DNA, 25 bp, Homo sapien
ccacaaagttgacattcatgctcca

SEQ ID NO: 2614359 - DNA, 25 bp, Homo sapien
tactatagtagtaggttcccttgat

SEQ ID NO: 2614360 - DNA, 25 bp, Homo sapien
tttggctgccataggatctgtactt

SEQ ID NO: 2614361 - DNA, 25 bp, Homo sapien
gtgggccaaaggcatgaacagaccc

SEQ ID NO: 2614362 - DNA, 25 bp, Homo sapien
gagatactgtctcatacaattcaga

SEQ ID NO: 2614363 - DNA, 25 bp, Homo sapien
caaaggcatgaacagacccctctaa

SEQ ID NO: 2614364 - DNA, 25 bp, Homo sapien
atatccggaatctgtaaggaatgtg

SEQ ID NO: 2614365 - DNA, 25 bp, Homo sapien
taatccttaattttcacataagaga

SEQ ID NO: 2614366 - DNA, 25 bp, Homo sapien
ctaatccttaattttcacataagag

SEQ ID NO: 2614367 - DNA, 25 bp, Homo sapien
aatccttaattttcacataagagac

SEQ ID NO: 2614368 - DNA, 25 bp, Homo sapien
cagaccactgagagtatgtaacatt

SEQ ID NO: 2614369 - DNA, 25 bp, Homo sapien
gagttctagttctgggcaggtagca

SEQ ID NO: 2614370 - DNA, 25 bp, Homo sapien
taaaaatggactgtagagttctagt

SEQ ID NO: 2614371 - DNA, 25 bp, Homo sapien
tgtagatgcacttcccagagaaata

SEQ ID NO: 2614372 - DNA, 25 bp, Homo sapien
tgggccatgaaggtggatgactcca

SEQ ID NO: 2614373 - DNA, 25 bp, Homo sapien
gggccatgaaggtggatgactccaa

SEQ ID NO: 2614374 - DNA, 25 bp, Homo sapien
attttgggccatgaaggtggatgac

SEQ ID NO: 2614375 - DNA, 25 bp, Homo sapien
tttgggccatgaaggtggatgactc

SEQ ID NO: 2614376 - DNA, 25 bp, Homo sapien
aaggactaccagcatcattgaagtg

SEQ ID NO: 2614377 - DNA, 25 bp, Homo sapien
gtcaaatgcaataatgggaccaggg

SEQ ID NO: 2614378 - DNA, 25 bp, Homo sapien
taaaagacccatggcatgtcaaatg

SEQ ID NO: 2614379 - DNA, 25 bp, Homo sapien
tgaagtgaagatttgtatgcatgtc

SEQ ID NO: 2614380 - DNA, 25 bp, Homo sapien
ctgagcagacatagcctattttgtc

SEQ ID NO: 2614381 - DNA, 25 bp, Homo sapien
tatgccattttactgtttgatagtt

SEQ ID NO: 2614382 - DNA, 25 bp, Homo sapien
catgccaaaaagtctgccataacct

SEQ ID NO: 2614383 - DNA, 25 bp, Homo sapien
tcttgaaattcatgccaaaaagtct

SEQ ID NO: 2614384 - DNA, 25 bp, Homo sapien
ccatgagatctcaggtgggactgag

SEQ ID NO: 2614385 - DNA, 25 bp, Homo sapien
catgagatctcaggtgggactgaga

SEQ ID NO: 2614386 - DNA, 25 bp, Homo sapien
ttttgttctgtaaccctgtggacat

SEQ ID NO: 2614387 - DNA, 25 bp, Homo sapien
gttttgttctgtaaccctgtggaca

SEQ ID NO: 2614388 - DNA, 25 bp, Homo sapien
gatttctgttaggatgggtcagcca

SEQ ID NO: 2614389 - DNA, 25 bp, Homo sapien
tctgatacacattccaggcttaggg

SEQ ID NO: 2614390 - DNA, 25 bp, Homo sapien
aatactttcagtttccgatgcatca

SEQ ID NO: 2614391 - DNA, 25 bp, Homo sapien
tgtacagacaacatgacctcaccta

SEQ ID NO: 2614392 - DNA, 25 bp, Homo sapien
tgctcacagggtccaaggctatatt

SEQ ID NO: 2614393 - DNA, 25 bp, Homo sapien
cagggtccaaggctatattgtggca

SEQ ID NO: 2614394 - DNA, 25 bp, Homo sapien
cagtaaacaccagcttaattaattg

SEQ ID NO: 2614395 - DNA, 25 bp, Homo sapien
ccagcttaattaattgttgagtcat

SEQ ID NO: 2614396 - DNA, 25 bp, Homo sapien
caggctagaacatgcatatctgcaa

SEQ ID NO: 2614397 - DNA, 25 bp, Homo sapien
gaacatgcatatctgcaacgaacca

SEQ ID NO: 2614398 - DNA, 25 bp, Homo sapien
ggcaccaggctagaacatgcatatc

SEQ ID NO: 2614399 - DNA, 25 bp, Homo sapien
catgcatatctgcaacgaaccacca

SEQ ID NO: 2614400 - DNA, 25 bp, Homo sapien
tagccgtggggaattttagcctcag

SEQ ID NO: 2614401 - DNA, 25 bp, Homo sapien
gcctcaggggctaattctgctggtc

SEQ ID NO: 2614402 - DNA, 25 bp, Homo sapien
attgtagatcaacttggaggtgacc

SEQ ID NO: 2614403 - DNA, 25 bp, Homo sapien
tgtagatcaacttggaggtgaccct

SEQ ID NO: 2614404 - DNA, 25 bp, Homo sapien
gggagacctgagcatctccccttgg

SEQ ID NO: 2614405 - DNA, 25 bp, Homo sapien
gggtggtcttcggtctccatcggaa

SEQ ID NO: 2614406 - DNA, 25 bp, Homo sapien
taggttcatccaggtttcttctggc

SEQ ID NO: 2614407 - DNA, 25 bp, Homo sapien
ctctttttctattatcccctctgct

SEQ ID NO: 2614408 - DNA, 25 bp, Homo sapien
gctgcccaggcctcaagcccctaaa

SEQ ID NO: 2614409 - DNA, 25 bp, Homo sapien
gcctcaagcccctaaaggcctcctc

SEQ ID NO: 2614410 - DNA, 25 bp, Homo sapien
tgcccaggcctcaagcccctaaagg

SEQ ID NO: 2614411 - DNA, 25 bp, Homo sapien
cccctaaaggcctcctctgttggtg

SEQ ID NO: 2614412 - DNA, 25 bp, Homo sapien
tttgatcccctaagccctgtctctg

SEQ ID NO: 2614413 - DNA, 25 bp, Homo sapien
tctgcttcatcactttccgacttat

SEQ ID NO: 2614414 - DNA, 25 bp, Homo sapien
tctttttgctgccagcctctgttga

SEQ ID NO: 2614415 - DNA, 25 bp, Homo sapien
tctgttgacaccacattccttattt

SEQ ID NO: 2614416 - DNA, 25 bp, Homo sapien
taaccttggaccatccttgaagact

SEQ ID NO: 2614417 - DNA, 25 bp, Homo sapien
atgcttctgtgggatttccactctg

SEQ ID NO: 2614418 - DNA, 25 bp, Homo sapien
cttcccatcggttgacaccgtcatg

SEQ ID NO: 2614419 - DNA, 25 bp, Homo sapien
gaagactcagcttccatgtcagagc

SEQ ID NO: 2614420 - DNA, 25 bp, Homo sapien
aagtcaggattgtaatatcgttgcc

SEQ ID NO: 2614421 - DNA, 25 bp, Homo sapien
tgccagatgcgtagttcaaaagtca

SEQ ID NO: 2614422 - DNA, 25 bp, Homo sapien
tatcgttgcctaaagaattcccaac

SEQ ID NO: 2614423 - DNA, 25 bp, Homo sapien
gaatctcccaaagaatgctaaggcc

SEQ ID NO: 2614424 - DNA, 25 bp, Homo sapien
gccaaaagttgtgtgatcaggaccc

SEQ ID NO: 2614425 - DNA, 25 bp, Homo sapien
ctggatgggatcataagtgagagcc

SEQ ID NO: 2614426 - DNA, 25 bp, Homo sapien
tacacagaggtaactaagggaacat

SEQ ID NO: 2614427 - DNA, 25 bp, Homo sapien
tgtcttcaaatcgtccttatgtagt

SEQ ID NO: 2614428 - DNA, 25 bp, Homo sapien
tgcaaaaattgtagagctggcttca

SEQ ID NO: 2614429 - DNA, 25 bp, Homo sapien
tagctcctaagcaccaactgtcttt

SEQ ID NO: 2614430 - DNA, 25 bp, Homo sapien
aatcaaggctagctcctaagcacca

SEQ ID NO: 2614431 - DNA, 25 bp, Homo sapien
ccaagttcgtggaaaacattataca

SEQ ID NO: 2614432 - DNA, 25 bp, Homo sapien
ccttcacgtgctggtgccgggggca

SEQ ID NO: 2614433 - DNA, 25 bp, Homo sapien
agccattgtcaatgagtgccgccat

SEQ ID NO: 2614434 - DNA, 25 bp, Homo sapien
tcatgccccccttcacgtgctggtg

SEQ ID NO: 2614435 - DNA, 25 bp, Homo sapien
ctgggctttgtcattcacgtaggaa

SEQ ID NO: 2614436 - DNA, 25 bp, Homo sapien
gcagcaacatgtgctcctccagggc

SEQ ID NO: 2614437 - DNA, 25 bp, Homo sapien
cctcagtcagcagcaacatgtgctc

SEQ ID NO: 2614438 - DNA, 25 bp, Homo sapien
acagctccttgtagaaggtgtgatg

SEQ ID NO: 2614439 - DNA, 25 bp, Homo sapien
ccagggccatgcacagctccttgta

SEQ ID NO: 2614440 - DNA, 25 bp, Homo sapien
ctacagttcatgacaatgccagtgg

SEQ ID NO: 2614441 - DNA, 25 bp, Homo sapien
caatgccagtggtgtgcccagaggt

SEQ ID NO: 2614442 - DNA, 25 bp, Homo sapien
cccagaggtgttgagggacagcact

SEQ ID NO: 2614443 - DNA, 25 bp, Homo sapien
gtgtgcccagaggtgttgagggaca

SEQ ID NO: 2614444 - DNA, 25 bp, Homo sapien
ctcagccagctaggtccagaggcag

SEQ ID NO: 2614445 - DNA, 25 bp, Homo sapien
tctcagccagctaggtccagaggca

SEQ ID NO: 2614446 - DNA, 25 bp, Homo sapien
agtgggtcaggtctcagccagctag

SEQ ID NO: 2614447 - DNA, 25 bp, Homo sapien
tgaggtagtgggtcaggtctcagcc

SEQ ID NO: 2614448 - DNA, 25 bp, Homo sapien
tgcttggtggtgaagctgtagccgt

SEQ ID NO: 2614449 - DNA, 25 bp, Homo sapien
ctgtagccgtgcttggtggtgaagc

SEQ ID NO: 2614450 - DNA, 25 bp, Homo sapien
tagccgtgcttggtggtgaagctgt

SEQ ID NO: 2614451 - DNA, 25 bp, Homo sapien
gcttggtggtgaagctgtagccgtg

SEQ ID NO: 2614452 - DNA, 25 bp, Homo sapien
gtccaggttgcggtagcacagcttc

SEQ ID NO: 2614453 - DNA, 25 bp, Homo sapien
catgatctcccccttggcggtggtg

SEQ ID NO: 2614454 - DNA, 25 bp, Homo sapien
tccaggttgcggtagcacagcttct

SEQ ID NO: 2614455 - DNA, 25 bp, Homo sapien
gtatgcggtggtggccatatcctgc

SEQ ID NO: 2614456 - DNA, 25 bp, Homo sapien
ccaggaaggaaggctggaacagcac

SEQ ID NO: 2614457 - DNA, 25 bp, Homo sapien
ctgcccaggaaggaaggctggaaca

SEQ ID NO: 2614458 - DNA, 25 bp, Homo sapien
cccaggaaggaaggctggaacagca

SEQ ID NO: 2614459 - DNA, 25 bp, Homo sapien
tgcccaggaaggaaggctggaacag

SEQ ID NO: 2614460 - DNA, 25 bp, Homo sapien
atacaggtcttcgcagatgtccatg

SEQ ID NO: 2614461 - DNA, 25 bp, Homo sapien
ccgtgttggcatacaggtcttcgca

SEQ ID NO: 2614462 - DNA, 25 bp, Homo sapien
ttgtggtgctgctggacagcaccgt

SEQ ID NO: 2614463 - DNA, 25 bp, Homo sapien
gttggcatacaggtcttcgcagatg

SEQ ID NO: 2614464 - DNA, 25 bp, Homo sapien
cagggcgataatctccctctgcata

SEQ ID NO: 2614465 - DNA, 25 bp, Homo sapien
gcgtgggggtactgacttgtcatac

SEQ ID NO: 2614466 - DNA, 25 bp, Homo sapien
cgctcgctgtcgatttagaagcatt

SEQ ID NO: 2614467 - DNA, 25 bp, Homo sapien
ccatgcaacaaatgctacgaatcgc

SEQ ID NO: 2614468 - DNA, 25 bp, Homo sapien
aatgctacgaatcgctcgctgtcga

SEQ ID NO: 2614469 - DNA, 25 bp, Homo sapien
tgtgctctataatccagacctgagg

SEQ ID NO: 2614470 - DNA, 25 bp, Homo sapien
caagtacaattaactttgaacctgt

SEQ ID NO: 2614471 - DNA, 25 bp, Homo sapien
tatagaaggtctggccaactgctca

SEQ ID NO: 2614472 - DNA, 25 bp, Homo sapien
gcaatcttcagcttcgtttgtgctc

SEQ ID NO: 2614473 - DNA, 25 bp, Homo sapien
gcttggcgctagtgacagacaggct

SEQ ID NO: 2614474 - DNA, 25 bp, Homo sapien
ccattgatgaaaggaactggccatt

SEQ ID NO: 2614475 - DNA, 25 bp, Homo sapien
aagttaatgttctccgcttggcgct

SEQ ID NO: 2614476 - DNA, 25 bp, Homo sapien
ggcgcctgcaggagcacatcattaa

SEQ ID NO: 2614477 - DNA, 25 bp, Homo sapien
aatatcagaatggaagagacacagg

SEQ ID NO: 2614478 - DNA, 25 bp, Homo sapien
gatattaacaagaaccaaatgggca

SEQ ID NO: 2614479 - DNA, 25 bp, Homo sapien
gagcctcagggacatgtggaactat

SEQ ID NO: 2614480 - DNA, 25 bp, Homo sapien
gatctaacattcgtgtcatcagagt

SEQ ID NO: 2614481 - DNA, 25 bp, Homo sapien
cgcggcggccacttgttgcgggtcc

SEQ ID NO: 2614482 - DNA, 25 bp, Homo sapien
gggagggcgcggcggccacttgttg

SEQ ID NO: 2614483 - DNA, 25 bp, Homo sapien
cggctcgaccgcctccttcggctgc

SEQ ID NO: 2614484 - DNA, 25 bp, Homo sapien
ggcccctgggctccgcggctcgacc

SEQ ID NO: 2614485 - DNA, 25 bp, Homo sapien
ttacaatccgcgctgggggccggcg

SEQ ID NO: 2614486 - DNA, 25 bp, Homo sapien
agaggtccccgcactccagtgggag

SEQ ID NO: 2614487 - DNA, 25 bp, Homo sapien
ctggagaggtccccgcactccagtg

SEQ ID NO: 2614488 - DNA, 25 bp, Homo sapien
cggggccgacctccggcctggagag

SEQ ID NO: 2614489 - DNA, 25 bp, Homo sapien
gagaggtccccgcactccagtggga

SEQ ID NO: 2614490 - DNA, 25 bp, Homo sapien
gtcctgcgcgctcggcccgaggaaa

SEQ ID NO: 2614491 - DNA, 25 bp, Homo sapien
cctgtagccgtcatgcccgccgtct

SEQ ID NO: 2614492 - DNA, 25 bp, Homo sapien
atagctgcggcgcacgtcctgcgcg

SEQ ID NO: 2614493 - DNA, 25 bp, Homo sapien
tctcccgggacactccatagctgcg

SEQ ID NO: 2614494 - DNA, 25 bp, Homo sapien
cctcgcaggactgataggtgcttag

SEQ ID NO: 2614495 - DNA, 25 bp, Homo sapien
tgacaggcaatatttctgtgcaatt

SEQ ID NO: 2614496 - DNA, 25 bp, Homo sapien
ttccagccccacgtaacagatggtc

SEQ ID NO: 2614497 - DNA, 25 bp, Homo sapien
tccaagttcccacttgacaggcaat

SEQ ID NO: 2614498 - DNA, 25 bp, Homo sapien
cccaagggttgaaaattctgctgtt

SEQ ID NO: 2614499 - DNA, 25 bp, Homo sapien
aggaagtcgtcatataccacacact

SEQ ID NO: 2614500 - DNA, 25 bp, Homo sapien
ccacacactgcacaatacgagaatg

SEQ ID NO: 2614501 - DNA, 25 bp, Homo sapien
gggttgaaaattctgctgttcagac

SEQ ID NO: 2614502 - DNA, 25 bp, Homo sapien
tgtatgactggttgaatatggctgc

SEQ ID NO: 2614503 - DNA, 25 bp, Homo sapien
gtgtatgactggttgaatatggctg

SEQ ID NO: 2614504 - DNA, 25 bp, Homo sapien
gcagtgtatgactggttgaatatgg

SEQ ID NO: 2614505 - DNA, 25 bp, Homo sapien
cagtgtatgactggttgaatatggc

SEQ ID NO: 2614506 - DNA, 25 bp, Homo sapien
gaaattcctgaaatttttctctaga

SEQ ID NO: 2614507 - DNA, 25 bp, Homo sapien
aagggccaatccacaaatatcagag

SEQ ID NO: 2614508 - DNA, 25 bp, Homo sapien
tatcagagaaattcctgaaattttt

SEQ ID NO: 2614509 - DNA, 25 bp, Homo sapien
ttgcagcaaaagggccaatccacaa

SEQ ID NO: 2614510 - DNA, 25 bp, Homo sapien
gagggcagctccctccaaagaggaa

SEQ ID NO: 2614511 - DNA, 25 bp, Homo sapien
caatgctagtctacccatgggcaga

SEQ ID NO: 2614512 - DNA, 25 bp, Homo sapien
aatcaggtaagtactccaggccgtg

SEQ ID NO: 2614513 - DNA, 25 bp, Homo sapien
ccaagataagggtgcttcctgaggg

SEQ ID NO: 2614514 - DNA, 25 bp, Homo sapien
tattcataagccaactcactagttt

SEQ ID NO: 2614515 - DNA, 25 bp, Homo sapien
actggaccacatcgggagaatttaa

SEQ ID NO: 2614516 - DNA, 25 bp, Homo sapien
atatattcataagccaactcactag

SEQ ID NO: 2614517 - DNA, 25 bp, Homo sapien
aactcactagtttactggaccacat

SEQ ID NO: 2614518 - DNA, 25 bp, Homo sapien
tcccagacaaggtgtatgtgaatga

SEQ ID NO: 2614519 - DNA, 25 bp, Homo sapien
ctgacacagaatcctcaggagggtt

SEQ ID NO: 2614520 - DNA, 25 bp, Homo sapien
ttcttgttccccacaaacaggcact

SEQ ID NO: 2614521 - DNA, 25 bp, Homo sapien
ccgaaagacgcctttggaattcttg

SEQ ID NO: 2614522 - DNA, 25 bp, Homo sapien
tcattgctcccaggactggatgcta

SEQ ID NO: 2614523 - DNA, 25 bp, Homo sapien
cattgctcccaggactggatgctaa

SEQ ID NO: 2614524 - DNA, 25 bp, Homo sapien
attgctcccaggactggatgctaac

SEQ ID NO: 2614525 - DNA, 25 bp, Homo sapien
tactctcttgcctcaccaaccccat

SEQ ID NO: 2614526 - DNA, 25 bp, Homo sapien
atactctcttgcctcaccaacccca

SEQ ID NO: 2614527 - DNA, 25 bp, Homo sapien
tttgcacactgaagtagctagccag

SEQ ID NO: 2614528 - DNA, 25 bp, Homo sapien
gagatttatagctagggaataaacc

SEQ ID NO: 2614529 - DNA, 25 bp, Homo sapien
aacaatttgtcctgttggagccttc

SEQ ID NO: 2614530 - DNA, 25 bp, Homo sapien
gaataaaccccgtacttctatgagc

SEQ ID NO: 2614531 - DNA, 25 bp, Homo sapien
gactataggtgcgtgccatcacgcc

SEQ ID NO: 2614532 - DNA, 25 bp, Homo sapien
attataggcgtgagccatcgtacct

SEQ ID NO: 2614533 - DNA, 25 bp, Homo sapien
gggattataggcgtgagccatcgta

SEQ ID NO: 2614534 - DNA, 25 bp, Homo sapien
actataggtgcgtgccatcacgcct

SEQ ID NO: 2614535 - DNA, 25 bp, Homo sapien
ccctcagggcagactggatatggag

SEQ ID NO: 2614536 - DNA, 25 bp, Homo sapien
gggcagactggatatggagtgggtc

SEQ ID NO: 2614537 - DNA, 25 bp, Homo sapien
acaaatccattctcaagatgggaac

SEQ ID NO: 2614538 - DNA, 25 bp, Homo sapien
ccattctcaagatgggaaccaggag

SEQ ID NO: 2614539 - DNA, 25 bp, Homo sapien
tttacatgcatttgttcatattcct

SEQ ID NO: 2614540 - DNA, 25 bp, Homo sapien
ctaggcaccagatacttttacatgc

SEQ ID NO: 2614541 - DNA, 25 bp, Homo sapien
taggcaccagatacttttacatgca

SEQ ID NO: 2614542 - DNA, 25 bp, Homo sapien
gttcatattcctctgtatcaccttc

SEQ ID NO: 2614543 - DNA, 25 bp, Homo sapien
acacacccacactattagacagctg

SEQ ID NO: 2614544 - DNA, 25 bp, Homo sapien
cacacccacactattagacagctgt

SEQ ID NO: 2614545 - DNA, 25 bp, Homo sapien
tgttccacagttactggctttgatg

SEQ ID NO: 2614546 - DNA, 25 bp, Homo sapien
catgacaactgccagaactctggat

SEQ ID NO: 2614547 - DNA, 25 bp, Homo sapien
acaactgccagaactctggatgctt

SEQ ID NO: 2614548 - DNA, 25 bp, Homo sapien
ctgccagaactctggatgctttcat

SEQ ID NO: 2614549 - DNA, 25 bp, Homo sapien
tgacaactgccagaactctggatgc

SEQ ID NO: 2614550 - DNA, 25 bp, Homo sapien
gaatctcataatagacactccagag

SEQ ID NO: 2614551 - DNA, 25 bp, Homo sapien
aatcccatgaacactgccatttagt

SEQ ID NO: 2614552 - DNA, 25 bp, Homo sapien
cataattgtcctattcactcaactg

SEQ ID NO: 2614553 - DNA, 25 bp, Homo sapien
gctattgctaatattgggcgtgtat

SEQ ID NO: 2614554 - DNA, 25 bp, Homo sapien
tggcatccgggatactggaccagat

SEQ ID NO: 2614555 - DNA, 25 bp, Homo sapien
ggcatccgggatactggaccagatt

SEQ ID NO: 2614556 - DNA, 25 bp, Homo sapien
catccgggatactggaccagattca

SEQ ID NO: 2614557 - DNA, 25 bp, Homo sapien
tttggcatccgggatactggaccag

SEQ ID NO: 2614558 - DNA, 25 bp, Homo sapien
accctatttccacctgactatctta

SEQ ID NO: 2614559 - DNA, 25 bp, Homo sapien
ggctaccaactcatatgaatttaaa

SEQ ID NO: 2614560 - DNA, 25 bp, Homo sapien
cctgactatcttaaagcaaacacct

SEQ ID NO: 2614561 - DNA, 25 bp, Homo sapien
caggctaccaactcatatgaattta

SEQ ID NO: 2614562 - DNA, 25 bp, Homo sapien
catggcttttggatagacccaggag

SEQ ID NO: 2614563 - DNA, 25 bp, Homo sapien
gactatgccaaatatactcagatag

SEQ ID NO: 2614564 - DNA, 25 bp, Homo sapien
ctccatacctgagcatgatttatcc

SEQ ID NO: 2614565 - DNA, 25 bp, Homo sapien
gcatgatttatccttgcatgtaaca

SEQ ID NO: 2614566 - DNA, 25 bp, Homo sapien
tatgttgataggttccttgttcttt

SEQ ID NO: 2614567 - DNA, 25 bp, Homo sapien
tgttgataggttccttgttctttgt

SEQ ID NO: 2614568 - DNA, 25 bp, Homo sapien
atgttgataggttccttgttctttg

SEQ ID NO: 2614569 - DNA, 25 bp, Homo sapien
gttgataggttccttgttctttgtg

SEQ ID NO: 2614570 - DNA, 25 bp, Homo sapien
gtctaaaggcactgagtccaagaga

SEQ ID NO: 2614571 - DNA, 25 bp, Homo sapien
agtctaaaggcactgagtccaagag

SEQ ID NO: 2614572 - DNA, 25 bp, Homo sapien
ctgggcaactgagatagaccatgag

SEQ ID NO: 2614573 - DNA, 25 bp, Homo sapien
tgggcaactgagatagaccatgagc

SEQ ID NO: 2614574 - DNA, 25 bp, Homo sapien
ttacatcatctactttaaaataagc

SEQ ID NO: 2614575 - DNA, 25 bp, Homo sapien
gattcctaagttaatcatttttaca

SEQ ID NO: 2614576 - DNA, 25 bp, Homo sapien
ctccaggccttgtagtttcacatat

SEQ ID NO: 2614577 - DNA, 25 bp, Homo sapien
ggaagcttcctccaggaatagccat

SEQ ID NO: 2614578 - DNA, 25 bp, Homo sapien
cactgaagcatgtggacccatagtg

SEQ ID NO: 2614579 - DNA, 25 bp, Homo sapien
gcaacattcatgagctgcagagcag

SEQ ID NO: 2614580 - DNA, 25 bp, Homo sapien
cagaggatcaagtgaaggcaattat

SEQ ID NO: 2614581 - DNA, 25 bp, Homo sapien
tctgatgatgacattgaggacacgc

SEQ ID NO: 2614582 - DNA, 25 bp, Homo sapien
tatttcagaagcataccttagcccg

SEQ ID NO: 2614583 - DNA, 25 bp, Homo sapien
tctacctgctgagataggacccctg

SEQ ID NO: 2614584 - DNA, 25 bp, Homo sapien
gccctaatgagtgtgttctgcgatc

SEQ ID NO: 2614585 - DNA, 25 bp, Homo sapien
caagaggattaggactgcgatgtcc

SEQ ID NO: 2614586 - DNA, 25 bp, Homo sapien
tatcatataaattgcggtcataacc

SEQ ID NO: 2614587 - DNA, 25 bp, Homo sapien
attgcggtcataacctaagttaagg

SEQ ID NO: 2614588 - DNA, 25 bp, Homo sapien
atttacagcccttttatcatataaa

SEQ ID NO: 2614589 - DNA, 25 bp, Homo sapien
cataacctaagttaaggtttgcagc

SEQ ID NO: 2614590 - DNA, 25 bp, Homo sapien
gtcccctaagagcatcattattttc

SEQ ID NO: 2614591 - DNA, 25 bp, Homo sapien
gaaggactgtcccactcaataccac

SEQ ID NO: 2614592 - DNA, 25 bp, Homo sapien
caagcaaaacgaaaatgtgaaatgg

SEQ ID NO: 2614593 - DNA, 25 bp, Homo sapien
gaaattcctactttaacacatacag

SEQ ID NO: 2614594 - DNA, 25 bp, Homo sapien
gagagagccggaaggactgtcccac

SEQ ID NO: 2614595 - DNA, 25 bp, Homo sapien
tgcaaagcgcccctcttcaacagcc

SEQ ID NO: 2614596 - DNA, 25 bp, Homo sapien
tattgcctaaatggggactcatcac

SEQ ID NO: 2614597 - DNA, 25 bp, Homo sapien
tgggaaaggccagagctacagcctc

SEQ ID NO: 2614598 - DNA, 25 bp, Homo sapien
tgactaggggattccccttattgcc

SEQ ID NO: 2614599 - DNA, 25 bp, Homo sapien
cagctgaaatcagatccagctctgt

SEQ ID NO: 2614600 - DNA, 25 bp, Homo sapien
agctgaaatcagatccagctctgtg

SEQ ID NO: 2614601 - DNA, 25 bp, Homo sapien
gctgaaatcagatccagctctgtgg

SEQ ID NO: 2614602 - DNA, 25 bp, Homo sapien
gccttccactcggtcccacagcaag

SEQ ID NO: 2614603 - DNA, 25 bp, Homo sapien
ggaccatgccttccactcggtccca

SEQ ID NO: 2614604 - DNA, 25 bp, Homo sapien
agatttgtaatttcagacctggacc

SEQ ID NO: 2614605 - DNA, 25 bp, Homo sapien
ggaatgagcagcttttgagatttgt

SEQ ID NO: 2614606 - DNA, 25 bp, Homo sapien
gaactcacgtcagatgagatgctcg

SEQ ID NO: 2614607 - DNA, 25 bp, Homo sapien
ctgtacttgaactcacgtcagatga

SEQ ID NO: 2614608 - DNA, 25 bp, Homo sapien
gatgagatgctcgagctgcctttgc

SEQ ID NO: 2614609 - DNA, 25 bp, Homo sapien
gctttagtgggcgtgtgatctgtac

SEQ ID NO: 2614610 - DNA, 25 bp, Homo sapien
gagataatgaagaccagctgcctac

SEQ ID NO: 2614611 - DNA, 25 bp, Homo sapien
gagagataatgaagaccagctgcct

SEQ ID NO: 2614612 - DNA, 25 bp, Homo sapien
agaaagagagataatgaagaccagc

SEQ ID NO: 2614613 - DNA, 25 bp, Homo sapien
aagagagataatgaagaccagctgc

SEQ ID NO: 2614614 - DNA, 25 bp, Homo sapien
cagccttacgatgttgggaaaacgc

SEQ ID NO: 2614615 - DNA, 25 bp, Homo sapien
taattgaggcacctgaatcccgtca

SEQ ID NO: 2614616 - DNA, 25 bp, Homo sapien
taaaactggattgctacctggtgct

SEQ ID NO: 2614617 - DNA, 25 bp, Homo sapien
gactttaggaaagcaggcgctacac

SEQ ID NO: 2614618 - DNA, 25 bp, Homo sapien
gaatgggcagcatctttcataggga

SEQ ID NO: 2614619 - DNA, 25 bp, Homo sapien
taactgcaatgatttccactatggc

SEQ ID NO: 2614620 - DNA, 25 bp, Homo sapien
gcctgcacctcctcataagggaaag

SEQ ID NO: 2614621 - DNA, 25 bp, Homo sapien
tatggctcctaagaatgaaagcttc

SEQ ID NO: 2614622 - DNA, 25 bp, Homo sapien
aattcgatgtctttaccattagggt

SEQ ID NO: 2614623 - DNA, 25 bp, Homo sapien
gataaattcgatgtctttaccatta

SEQ ID NO: 2614624 - DNA, 25 bp, Homo sapien
gagtggataaattcgatgtctttac

SEQ ID NO: 2614625 - DNA, 25 bp, Homo sapien
tggagtggataaattcgatgtcttt

SEQ ID NO: 2614626 - DNA, 25 bp, Homo sapien
ctcctactgggaataatggtcttgg

SEQ ID NO: 2614627 - DNA, 25 bp, Homo sapien
tcttgggccaaaggatttgggctta

SEQ ID NO: 2614628 - DNA, 25 bp, Homo sapien
aacaacctctcccaaactattctga

SEQ ID NO: 2614629 - DNA, 25 bp, Homo sapien
tcagctctgcaaccagctcaaaaca

SEQ ID NO: 2614630 - DNA, 25 bp, Homo sapien
tctctgctgatttgttaattagtct

SEQ ID NO: 2614631 - DNA, 25 bp, Homo sapien
tgatttgttaattagtctaacaacc

SEQ ID NO: 2614632 - DNA, 25 bp, Homo sapien
agaagttatttcctagtcaaagagg

SEQ ID NO: 2614633 - DNA, 25 bp, Homo sapien
gagaagttatttcctagtcaaagag

SEQ ID NO: 2614634 - DNA, 25 bp, Homo sapien
ttttctatagcccacatctgaatat

SEQ ID NO: 2614635 - DNA, 25 bp, Homo sapien
ccttcttcttttgcagctcagaatc

SEQ ID NO: 2614636 - DNA, 25 bp, Homo sapien
accttcttcttttgcagctcagaat

SEQ ID NO: 2614637 - DNA, 25 bp, Homo sapien
aatatatctaaggtgggtctagagc

SEQ ID NO: 2614638 - DNA, 25 bp, Homo sapien
tgctctgaggacatgactgattctg

SEQ ID NO: 2614639 - DNA, 25 bp, Homo sapien
tctactaaaagaacccagatgctct

SEQ ID NO: 2614640 - DNA, 25 bp, Homo sapien
gaagcttaaaagttatccacagaag

SEQ ID NO: 2614641 - DNA, 25 bp, Homo sapien
tcagtgtccatatatgctaagtact

SEQ ID NO: 2614642 - DNA, 25 bp, Homo sapien
tatcctggacgtcctcacatgtaca

SEQ ID NO: 2614643 - DNA, 25 bp, Homo sapien
ctttgccatgggaatgaagtctact

SEQ ID NO: 2614644 - DNA, 25 bp, Homo sapien
taatatattttcacgacaccaagga

SEQ ID NO: 2614645 - DNA, 25 bp, Homo sapien
ggctgtgtcattcatagacttgata

SEQ ID NO: 2614646 - DNA, 25 bp, Homo sapien
cacaaaggatattctgctctatgat

SEQ ID NO: 2614647 - DNA, 25 bp, Homo sapien
tctgccaaaatacaaggctgtgtca

SEQ ID NO: 2614648 - DNA, 25 bp, Homo sapien
taatcagcgaccacatatgcaaaaa

SEQ ID NO: 2614649 - DNA, 25 bp, Homo sapien
cattacgtgaaaaccttggctgctc

SEQ ID NO: 2614650 - DNA, 25 bp, Homo sapien
tcagaaaactagaggagatccatcc

SEQ ID NO: 2614651 - DNA, 25 bp, Homo sapien
taaatccagggaagaccgagcatgg

SEQ ID NO: 2614652 - DNA, 25 bp, Homo sapien
aatgcatgcgcacgtctagctagga

SEQ ID NO: 2614653 - DNA, 25 bp, Homo sapien
tgctaaatatcagggtcagtcaaca

SEQ ID NO: 2614654 - DNA, 25 bp, Homo sapien
aaggcactatgaccaaccagggcac

SEQ ID NO: 2614655 - DNA, 25 bp, Homo sapien
ccatatcaaggtaggaaagtgtgtc

SEQ ID NO: 2614656 - DNA, 25 bp, Homo sapien
aaaccatacagtgaggagcgcctca

SEQ ID NO: 2614657 - DNA, 25 bp, Homo sapien
catgcaggtcctgtaaacccagaaa

SEQ ID NO: 2614658 - DNA, 25 bp, Homo sapien
caatcttcgacaggaaggctaggca

SEQ ID NO: 2614659 - DNA, 25 bp, Homo sapien
tttcaagtgaacaacacagccaagt

SEQ ID NO: 2614660 - DNA, 25 bp, Homo sapien
taagcctattgcaaagaggatgaag

SEQ ID NO: 2614661 - DNA, 25 bp, Homo sapien
tatcacatatgtgtgctggcggcaa

SEQ ID NO: 2614662 - DNA, 25 bp, Homo sapien
catggtagaatttggtgtcccttaa

SEQ ID NO: 2614663 - DNA, 25 bp, Homo sapien
ggtgtagtcacttccaactcacatg

SEQ ID NO: 2614664 - DNA, 25 bp, Homo sapien
gaagacaccatataagatccacgaa

SEQ ID NO: 2614665 - DNA, 25 bp, Homo sapien
actgaggtcttcaacacggcataag

SEQ ID NO: 2614666 - DNA, 25 bp, Homo sapien
ctgaggtcttcaacacggcataagg

SEQ ID NO: 2614667 - DNA, 25 bp, Homo sapien
gattttcagtgcatatgaagtagcc

SEQ ID NO: 2614668 - DNA, 25 bp, Homo sapien
ctagctaagaccaatgatgaagatg

SEQ ID NO: 2614669 - DNA, 25 bp, Homo sapien
gaagctaagggaggttggatcataa

SEQ ID NO: 2614670 - DNA, 25 bp, Homo sapien
agattgagagaagtgagaatgctgc

SEQ ID NO: 2614671 - DNA, 25 bp, Homo sapien
ttgaattccagccaattaataaccc

SEQ ID NO: 2614672 - DNA, 25 bp, Homo sapien
gcagccatcttagttctctctattg

SEQ ID NO: 2614673 - DNA, 25 bp, Homo sapien
tattgcctaagacacaccagtattg

SEQ ID NO: 2614674 - DNA, 25 bp, Homo sapien
cctatcatggcttctaagtattcaa

SEQ ID NO: 2614675 - DNA, 25 bp, Homo sapien
taggactctgtacatgccagggcaa

SEQ ID NO: 2614676 - DNA, 25 bp, Homo sapien
catagttcagtgctacaggaggcca

SEQ ID NO: 2614677 - DNA, 25 bp, Homo sapien
aactgtaacaaaggcaatccatggc

SEQ ID NO: 2614678 - DNA, 25 bp, Homo sapien
gaagttatgcacctttgccctagag

SEQ ID NO: 2614679 - DNA, 25 bp, Homo sapien
tatctcaatagacagggtaatggct

SEQ ID NO: 2614680 - DNA, 25 bp, Homo sapien
gatgtaaatggtacaaacaccccaa

SEQ ID NO: 2614681 - DNA, 25 bp, Homo sapien
tatgaggaaacaagtagccagttgg

SEQ ID NO: 2614682 - DNA, 25 bp, Homo sapien
taggcttcatcccaggaggccaggt

SEQ ID NO: 2614683 - DNA, 25 bp, Homo sapien
aaacgtatgtaagagcagtcctgca

SEQ ID NO: 2614684 - DNA, 25 bp, Homo sapien
taaatgcactgttgggtcagagcac

SEQ ID NO: 2614685 - DNA, 25 bp, Homo sapien
gagaaacttaccgtgacaggattag

SEQ ID NO: 2614686 - DNA, 25 bp, Homo sapien
tgatcaatcattggccacgctcagc

SEQ ID NO: 2614687 - DNA, 25 bp, Homo sapien
tatggtcattgctatcagtgccttt

SEQ ID NO: 2614688 - DNA, 25 bp, Homo sapien
tcattgctatcagtgcctttccttc

SEQ ID NO: 2614689 - DNA, 25 bp, Homo sapien
cagtaatagtcaggtctggcccttt

SEQ ID NO: 2614690 - DNA, 25 bp, Homo sapien
aaccttttgagcaatcagtaatagt

SEQ ID NO: 2614691 - DNA, 25 bp, Homo sapien
gccaatcggatatgacagcagaaaa

SEQ ID NO: 2614692 - DNA, 25 bp, Homo sapien
gacactggaggcagttaacacctaa

SEQ ID NO: 2614693 - DNA, 25 bp, Homo sapien
gagaactctacctacaatgaccctg

SEQ ID NO: 2614694 - DNA, 25 bp, Homo sapien
cacttccagacttcattgtagcggc

SEQ ID NO: 2614695 - DNA, 25 bp, Homo sapien
cagcagggttactggtgagatataa

SEQ ID NO: 2614696 - DNA, 25 bp, Homo sapien
tttggagtgttgctgcgatgcccag

SEQ ID NO: 2614697 - DNA, 25 bp, Homo sapien
taataagaacgatgatgattcagcc

SEQ ID NO: 2614698 - DNA, 25 bp, Homo sapien
catgttaacccgactggtctctaac

SEQ ID NO: 2614699 - DNA, 25 bp, Homo sapien
gccccagaagtacactgagcagcac

SEQ ID NO: 2614700 - DNA, 25 bp, Homo sapien
gaagtacactgagcagcacctagat

SEQ ID NO: 2614701 - DNA, 25 bp, Homo sapien
gtggagtaacctccaaagcaacagg

SEQ ID NO: 2614702 - DNA, 25 bp, Homo sapien
gcagcacctagatcctcttgggtgg

SEQ ID NO: 2614703 - DNA, 25 bp, Homo sapien
gaaggtaccattgactttccagact

SEQ ID NO: 2614704 - DNA, 25 bp, Homo sapien
tccaaatccagcgatgcgggagtcc

SEQ ID NO: 2614705 - DNA, 25 bp, Homo sapien
gaactgtgcttctaccatccaaatc

SEQ ID NO: 2614706 - DNA, 25 bp, Homo sapien
cgggagtccctgtgcataggttcca

SEQ ID NO: 2614707 - DNA, 25 bp, Homo sapien
catgagaaggcagttctagctctga

SEQ ID NO: 2614708 - DNA, 25 bp, Homo sapien
gctttttggcccaagtcacttgcca

SEQ ID NO: 2614709 - DNA, 25 bp, Homo sapien
tgtaagtctcgcatctggtggcatc

SEQ ID NO: 2614710 - DNA, 25 bp, Homo sapien
catcgttcctctgaccaagcttggc

SEQ ID NO: 2614711 - DNA, 25 bp, Homo sapien
ttttgagcaggtctgttgcctatgc

SEQ ID NO: 2614712 - DNA, 25 bp, Homo sapien
gaagttgggttagacactcaggcag

SEQ ID NO: 2614713 - DNA, 25 bp, Homo sapien
aatcaaaaccttactcggctgttct

SEQ ID NO: 2614714 - DNA, 25 bp, Homo sapien
gctgttcttctagctggcagtggaa

SEQ ID NO: 2614715 - DNA, 25 bp, Homo sapien
gattggcatgactccatttgctgag

SEQ ID NO: 2614716 - DNA, 25 bp, Homo sapien
cagagcatatggcaaactaaatgca

SEQ ID NO: 2614717 - DNA, 25 bp, Homo sapien
taattccactctatctgcaactcag

SEQ ID NO: 2614718 - DNA, 25 bp, Homo sapien
tcaccagggaagacaaatatactgc

SEQ ID NO: 2614719 - DNA, 25 bp, Homo sapien
gaagatttatgaagatcaagagtac

SEQ ID NO: 2614720 - DNA, 25 bp, Homo sapien
gatttatcatgttcccatgttggaa

SEQ ID NO: 2614721 - DNA, 25 bp, Homo sapien
cacctggctggagccatgtttcttc

SEQ ID NO: 2614722 - DNA, 25 bp, Homo sapien
gctgtcttccttaagttaatctggg

SEQ ID NO: 2614723 - DNA, 25 bp, Homo sapien
aagaaacgaaaatggcctgttactg

SEQ ID NO: 2614724 - DNA, 25 bp, Homo sapien
gaaacgaaaatggcctgttactgcc

SEQ ID NO: 2614725 - DNA, 25 bp, Homo sapien
aacgaaaatggcctgttactgcctt

SEQ ID NO: 2614726 - DNA, 25 bp, Homo sapien
agaaacgaaaatggcctgttactgc

SEQ ID NO: 2614727 - DNA, 25 bp, Homo sapien
cctgaaccactggaaggagcagaat

SEQ ID NO: 2614728 - DNA, 25 bp, Homo sapien
aaggagcagaatgagcagaaaccca

SEQ ID NO: 2614729 - DNA, 25 bp, Homo sapien
tgaaccactggaaggagcagaatga

SEQ ID NO: 2614730 - DNA, 25 bp, Homo sapien
ggagcagaatgagcagaaacccagg

SEQ ID NO: 2614731 - DNA, 25 bp, Homo sapien
tgacttgaagagtggcctgtgcact

SEQ ID NO: 2614732 - DNA, 25 bp, Homo sapien
agaatccctaagttgaatggtaaag

SEQ ID NO: 2614733 - DNA, 25 bp, Homo sapien
tgtgcactcatcgaaagctgctgtc

SEQ ID NO: 2614734 - DNA, 25 bp, Homo sapien
gaattattggatttgacatcaccac

SEQ ID NO: 2614735 - DNA, 25 bp, Homo sapien
catccagccttgtttgcaatagtat

SEQ ID NO: 2614736 - DNA, 25 bp, Homo sapien
atccagccttgtttgcaatagtatt

SEQ ID NO: 2614737 - DNA, 25 bp, Homo sapien
tccagccttgtttgcaatagtattt

SEQ ID NO: 2614738 - DNA, 25 bp, Homo sapien
aagttctccgtcattcctttgatga

SEQ ID NO: 2614739 - DNA, 25 bp, Homo sapien
ttacaaatctttccataactggcct

SEQ ID NO: 2614740 - DNA, 25 bp, Homo sapien
caaatctttccataactggccttct

SEQ ID NO: 2614741 - DNA, 25 bp, Homo sapien
ttaagttctccgtcattcctttgat

SEQ ID NO: 2614742 - DNA, 25 bp, Homo sapien
gaggttatgcccaaaatcagatgga

SEQ ID NO: 2614743 - DNA, 25 bp, Homo sapien
tacattctcacgtggtcaagcagga

SEQ ID NO: 2614744 - DNA, 25 bp, Homo sapien
cacaggccagatcaggaggttatgc

SEQ ID NO: 2614745 - DNA, 25 bp, Homo sapien
tgatcggataccaacctagccctgg

SEQ ID NO: 2614746 - DNA, 25 bp, Homo sapien
gagcccaggtcttatgtgtccacgg

SEQ ID NO: 2614747 - DNA, 25 bp, Homo sapien
cagagacccaacaatgtcatgcaag

SEQ ID NO: 2614748 - DNA, 25 bp, Homo sapien
gaactaaacggtgttcagagaccca

SEQ ID NO: 2614749 - DNA, 25 bp, Homo sapien
tgagctaccacacgctgtcaggatt

SEQ ID NO: 2614750 - DNA, 25 bp, Homo sapien
caggatcttcacaatagggtttacg

SEQ ID NO: 2614751 - DNA, 25 bp, Homo sapien
cctgaccacctgttatggattgaat

SEQ ID NO: 2614752 - DNA, 25 bp, Homo sapien
gaatgccacgcaatcatggaggccg

SEQ ID NO: 2614753 - DNA, 25 bp, Homo sapien
gaaggtgagctcttaatccaatatg

SEQ ID NO: 2614754 - DNA, 25 bp, Homo sapien
tacatgcacataaaaacattgaaac

SEQ ID NO: 2614755 - DNA, 25 bp, Homo sapien
tctgcaatttgctatcctatgtatt

SEQ ID NO: 2614756 - DNA, 25 bp, Homo sapien
cctctgtatatctgcttctgtgaaa

SEQ ID NO: 2614757 - DNA, 25 bp, Homo sapien
taacataagctctgggatctccggg

SEQ ID NO: 2614758 - DNA, 25 bp, Homo sapien
tgttagctagtatggtctcctgacc

SEQ ID NO: 2614759 - DNA, 25 bp, Homo sapien
gacccttgtgattaccttgtgtatt

SEQ ID NO: 2614760 - DNA, 25 bp, Homo sapien
taccttgtgtattccatattgtaca

SEQ ID NO: 2614761 - DNA, 25 bp, Homo sapien
cttgtgattaccttgtgtattccat

SEQ ID NO: 2614762 - DNA, 25 bp, Homo sapien
caaatagtgacatcccctgagctta

SEQ ID NO: 2614763 - DNA, 25 bp, Homo sapien
aaaactggccttccgataactgtag

SEQ ID NO: 2614764 - DNA, 25 bp, Homo sapien
tgtttaacaggcagatcccagattg

SEQ ID NO: 2614765 - DNA, 25 bp, Homo sapien
cagattgcaatgagaaagtgtagcc

SEQ ID NO: 2614766 - DNA, 25 bp, Homo sapien
ctaagtcatccgtgtcctctgccct

SEQ ID NO: 2614767 - DNA, 25 bp, Homo sapien
ctcctctaagcacactcggggattc

SEQ ID NO: 2614768 - DNA, 25 bp, Homo sapien
gtggaaagctgtgtgctcagcgcag

SEQ ID NO: 2614769 - DNA, 25 bp, Homo sapien
gcatttggacagcgccacggtgagg

SEQ ID NO: 2614770 - DNA, 25 bp, Homo sapien
agcatttggacagcgccacggtgag

SEQ ID NO: 2614771 - DNA, 25 bp, Homo sapien
aagcatttggacagcgccacggtga

SEQ ID NO: 2614772 - DNA, 25 bp, Homo sapien
agaagcatttggacagcgccacggt

SEQ ID NO: 2614773 - DNA, 25 bp, Homo sapien
tcccatagagaagagacggcgtaca

SEQ ID NO: 2614774 - DNA, 25 bp, Homo sapien
cccatagagaagagacggcgtacag

SEQ ID NO: 2614775 - DNA, 25 bp, Homo sapien
gtcccatagagaagagacggcgtac

SEQ ID NO: 2614776 - DNA, 25 bp, Homo sapien
ggtcccatagagaagagacggcgta

SEQ ID NO: 2614777 - DNA, 25 bp, Homo sapien
tggctaaaagtcagcagcaaggagt

SEQ ID NO: 2614778 - DNA, 25 bp, Homo sapien
aacgtgaagggcaagaggcatctga

SEQ ID NO: 2614779 - DNA, 25 bp, Homo sapien
gaaggacttgcaggcagctggtata

SEQ ID NO: 2614780 - DNA, 25 bp, Homo sapien
aagctgaagtggatgccaagatgct

SEQ ID NO: 2614781 - DNA, 25 bp, Homo sapien
cactgaggcactgcttaatggaact

SEQ ID NO: 2614782 - DNA, 25 bp, Homo sapien
gcagaggtgggtccctcacggaaaa

SEQ ID NO: 2614783 - DNA, 25 bp, Homo sapien
ggcaacgtgttcaagaagaagcaga

SEQ ID NO: 2614784 - DNA, 25 bp, Homo sapien
gatgtatgaaaacacccgatgtcca

SEQ ID NO: 2614785 - DNA, 25 bp, Homo sapien
ggatagctgattattcatttgccaa

SEQ ID NO: 2614786 - DNA, 25 bp, Homo sapien
agacacaaatggtctgctgaaagaa

SEQ ID NO: 2614787 - DNA, 25 bp, Homo sapien
taggagaattgaagcgctcattgaa

SEQ ID NO: 2614788 - DNA, 25 bp, Homo sapien
aatattccccttgatcgtccttgag

SEQ ID NO: 2614789 - DNA, 25 bp, Homo sapien
tgggagcagttgatgcaatacacac

SEQ ID NO: 2614790 - DNA, 25 bp, Homo sapien
aggcttcctcggctttgttgcccaa

SEQ ID NO: 2614791 - DNA, 25 bp, Homo sapien
taggcactggattgccacaaacgtc

SEQ ID NO: 2614792 - DNA, 25 bp, Homo sapien
caaggatatttctactggatgtgct

SEQ ID NO: 2614793 - DNA, 25 bp, Homo sapien
tcccatttacatgaaggtagaaaga

SEQ ID NO: 2614794 - DNA, 25 bp, Homo sapien
gctaacactgaaatgcttataagga

SEQ ID NO: 2614795 - DNA, 25 bp, Homo sapien
tgcaagtgccatagttactaatgag

SEQ ID NO: 2614796 - DNA, 25 bp, Homo sapien
gatatttccaaatggcggcaataga

SEQ ID NO: 2614797 - DNA, 25 bp, Homo sapien
ttgcaaagcctttattatccctggt

SEQ ID NO: 2614798 - DNA, 25 bp, Homo sapien
gatagtgacttcatgaccatttagg

SEQ ID NO: 2614799 - DNA, 25 bp, Homo sapien
cctaaaaatggtccggatagtgact

SEQ ID NO: 2614800 - DNA, 25 bp, Homo sapien
tacttgcatccaacagggacatcct

SEQ ID NO: 2614801 - DNA, 25 bp, Homo sapien
cattaaaaatgagccattcacactt

SEQ ID NO: 2614802 - DNA, 25 bp, Homo sapien
caagtggctgttggctagtcattaa

SEQ ID NO: 2614803 - DNA, 25 bp, Homo sapien
ggctgttggctagtcattaaaaatg

SEQ ID NO: 2614804 - DNA, 25 bp, Homo sapien
catcttttacaagtggctgttggct

SEQ ID NO: 2614805 - DNA, 25 bp, Homo sapien
gaaatgacaaggcagctattgctca

SEQ ID NO: 2614806 - DNA, 25 bp, Homo sapien
gcccaggtcttagagtctgtacagc

SEQ ID NO: 2614807 - DNA, 25 bp, Homo sapien
tatctgaagttcgagagcctcctag

SEQ ID NO: 2614808 - DNA, 25 bp, Homo sapien
caaaggaatgtaagtgcccaggtct

SEQ ID NO: 2614809 - DNA, 25 bp, Homo sapien
gactgagcctgcttgacgttggcat

SEQ ID NO: 2614810 - DNA, 25 bp, Homo sapien
tcctgcagctactggatgacagagc

SEQ ID NO: 2614811 - DNA, 25 bp, Homo sapien
tctatcctcaaaagaacggtcatgg

SEQ ID NO: 2614812 - DNA, 25 bp, Homo sapien
ggaggaaagggatatgccatacaga

SEQ ID NO: 2614813 - DNA, 25 bp, Homo sapien
accgtgaacgcgtgccaagacaaag

SEQ ID NO: 2614814 - DNA, 25 bp, Homo sapien
gaagggaaccatttgggctcatctg

SEQ ID NO: 2614815 - DNA, 25 bp, Homo sapien
ttatcgtaatttcaccgtgaacgcg

SEQ ID NO: 2614816 - DNA, 25 bp, Homo sapien
ctgtaaacgaaaataggaatcatct

SEQ ID NO: 2614817 - DNA, 25 bp, Homo sapien
ttttctgcctgccaactctacttgg

SEQ ID NO: 2614818 - DNA, 25 bp, Homo sapien
tctacttggctgtttgattccatgg

SEQ ID NO: 2614819 - DNA, 25 bp, Homo sapien
tgattccatggtgctacctgttatc

SEQ ID NO: 2614820 - DNA, 25 bp, Homo sapien
tccatggtgctacctgttatctccc

SEQ ID NO: 2614821 - DNA, 25 bp, Homo sapien
cctcatataagggtataccacagct

SEQ ID NO: 2614822 - DNA, 25 bp, Homo sapien
tgtgcacaatgggtataaaactctc

SEQ ID NO: 2614823 - DNA, 25 bp, Homo sapien
acagctgactcttaccccaataggg

SEQ ID NO: 2614824 - DNA, 25 bp, Homo sapien
aaacctgctttgtgactttctggac

SEQ ID NO: 2614825 - DNA, 25 bp, Homo sapien
caggataaaaaggtggttgtccaga

SEQ ID NO: 2614826 - DNA, 25 bp, Homo sapien
acaggataaaaaggtggttgtccag

SEQ ID NO: 2614827 - DNA, 25 bp, Homo sapien
tgggaacgaaccttgatttatctga

SEQ ID NO: 2614828 - DNA, 25 bp, Homo sapien
caggaagccgctgtacactgtaagc

SEQ ID NO: 2614829 - DNA, 25 bp, Homo sapien
caggtcccacagactatgggaacga

SEQ ID NO: 2614830 - DNA, 25 bp, Homo sapien
actgtaagcatggtcacgtgagaga

SEQ ID NO: 2614831 - DNA, 25 bp, Homo sapien
tctcaggttgttctgctcgtcacgg

SEQ ID NO: 2614832 - DNA, 25 bp, Homo sapien
tactagtggtgtgacaaggaaaacc

SEQ ID NO: 2614833 - DNA, 25 bp, Homo sapien
actagctgaagggttgatatgtgca

SEQ ID NO: 2614834 - DNA, 25 bp, Homo sapien
ccaaggctgcttagagtaaaaaact

SEQ ID NO: 2614835 - DNA, 25 bp, Homo sapien
gaagctcccctgtgttcaaagcaaa

SEQ ID NO: 2614836 - DNA, 25 bp, Homo sapien
actgttcaaaactgcgccatgtgga

SEQ ID NO: 2614837 - DNA, 25 bp, Homo sapien
tctgcatgcaagagtggtacgttca

SEQ ID NO: 2614838 - DNA, 25 bp, Homo sapien
ctagttgtaaaatggaggtgtgccc

SEQ ID NO: 2614839 - DNA, 25 bp, Homo sapien
tctgtgataacaccccggacatgcc

SEQ ID NO: 2614840 - DNA, 25 bp, Homo sapien
gacagaacgtgcgataggagtagcc

SEQ ID NO: 2614841 - DNA, 25 bp, Homo sapien
gacatgcctccatcaagtccagtgg

SEQ ID NO: 2614842 - DNA, 25 bp, Homo sapien
tccgaggtaactagccttatggcct

SEQ ID NO: 2614843 - DNA, 25 bp, Homo sapien
acaggtcatggatgggtactggtct

SEQ ID NO: 2614844 - DNA, 25 bp, Homo sapien
gacccctgatttaagctacctagtg

SEQ ID NO: 2614845 - DNA, 25 bp, Homo sapien
tcaccagtgctcacctactgtgcag

SEQ ID NO: 2614846 - DNA, 25 bp, Homo sapien
gagctcaggatacaatgctccctca

SEQ ID NO: 2614847 - DNA, 25 bp, Homo sapien
gctttgttgtggcagtctgagagac

SEQ ID NO: 2614848 - DNA, 25 bp, Homo sapien
tcatcttggacttttcgactccaga

SEQ ID NO: 2614849 - DNA, 25 bp, Homo sapien
tgggagaagaggaccatttccaagc

SEQ ID NO: 2614850 - DNA, 25 bp, Homo sapien
tattggctgaattgtaccccttccc

SEQ ID NO: 2614851 - DNA, 25 bp, Homo sapien
tggatgctgtggaagaaacccacaa

SEQ ID NO: 2614852 - DNA, 25 bp, Homo sapien
ctgaaattggatgctgtggaagaaa

SEQ ID NO: 2614853 - DNA, 25 bp, Homo sapien
aaattggatgctgtggaagaaaccc

SEQ ID NO: 2614854 - DNA, 25 bp, Homo sapien
aaacccacaaacatccaggagacaa

SEQ ID NO: 2614855 - DNA, 25 bp, Homo sapien
tgttacagcaacctaagattgggct

SEQ ID NO: 2614856 - DNA, 25 bp, Homo sapien
taataccgcagaccatgacactggg

SEQ ID NO: 2614857 - DNA, 25 bp, Homo sapien
catgtgtccgactctattcagtggg

SEQ ID NO: 2614858 - DNA, 25 bp, Homo sapien
aataagcggtatccttgccatcagg

SEQ ID NO: 2614859 - DNA, 25 bp, Homo sapien
gaataagagtgaatgaaggaacctg

SEQ ID NO: 2614860 - DNA, 25 bp, Homo sapien
tacaagaaccatgaaaggcagagac

SEQ ID NO: 2614861 - DNA, 25 bp, Homo sapien
tccgtcttccttcgttagagcccag

SEQ ID NO: 2614862 - DNA, 25 bp, Homo sapien
gacatcctcgacatctaggacagtg

SEQ ID NO: 2614863 - DNA, 25 bp, Homo sapien
tgctcctacagcatgtacttgaaag

SEQ ID NO: 2614864 - DNA, 25 bp, Homo sapien
caaggcacacttgaaggtttttcct

SEQ ID NO: 2614865 - DNA, 25 bp, Homo sapien
acattgtgacactttctccgaggaa

SEQ ID NO: 2614866 - DNA, 25 bp, Homo sapien
ttttattaagcagtcaccctgttgg

SEQ ID NO: 2614867 - DNA, 25 bp, Homo sapien
tgaaattatctgtggaacttgacaa

SEQ ID NO: 2614868 - DNA, 25 bp, Homo sapien
aaaatcccaatgaaattatctgtgg

SEQ ID NO: 2614869 - DNA, 25 bp, Homo sapien
tcccaatgaaattatctgtggaact

SEQ ID NO: 2614870 - DNA, 25 bp, Homo sapien
aaagagtaaagctaagctctattct

SEQ ID NO: 2614871 - DNA, 25 bp, Homo sapien
aatggccgggtgtgtgtatccttgc

SEQ ID NO: 2614872 - DNA, 25 bp, Homo sapien
tgattgtgaacggacctggcagcac

SEQ ID NO: 2614873 - DNA, 25 bp, Homo sapien
tgggagttcttacatgctggcgaca

SEQ ID NO: 2614874 - DNA, 25 bp, Homo sapien
cctatggttaggtgccgttgcgacc

SEQ ID NO: 2614875 - DNA, 25 bp, Homo sapien
acaggcttatatttatcctcagccc

SEQ ID NO: 2614876 - DNA, 25 bp, Homo sapien
cacaggcttatatttatcctcagcc

SEQ ID NO: 2614877 - DNA, 25 bp, Homo sapien
gaaagtacaaattaccggatgcctg

SEQ ID NO: 2614878 - DNA, 25 bp, Homo sapien
tgtataaccattgcccctcacagag

SEQ ID NO: 2614879 - DNA, 25 bp, Homo sapien
ccttgaagccattgacagggcatgc

SEQ ID NO: 2614880 - DNA, 25 bp, Homo sapien
gaggccacagggtagctacatatag

SEQ ID NO: 2614881 - DNA, 25 bp, Homo sapien
tggggtcggtttccccatgatactg

SEQ ID NO: 2614882 - DNA, 25 bp, Homo sapien
tggaagtatatgtccaatgaaacct

SEQ ID NO: 2614883 - DNA, 25 bp, Homo sapien
tctgataggccccagaatgtgcttt

SEQ ID NO: 2614884 - DNA, 25 bp, Homo sapien
gataggccccagaatgtgcttttcc

SEQ ID NO: 2614885 - DNA, 25 bp, Homo sapien
cacatcatccagctgcttcagtggc

SEQ ID NO: 2614886 - DNA, 25 bp, Homo sapien
tcaattcttagcttcatccgtgggt

SEQ ID NO: 2614887 - DNA, 25 bp, Homo sapien
gaaaaccgtgagattacatagcaac

SEQ ID NO: 2614888 - DNA, 25 bp, Homo sapien
cactatatccttaagctcctgggtt

SEQ ID NO: 2614889 - DNA, 25 bp, Homo sapien
tactcagtggcgtagttttaaacac

SEQ ID NO: 2614890 - DNA, 25 bp, Homo sapien
ggtgcaatcgcggatcactatatcc

SEQ ID NO: 2614891 - DNA, 25 bp, Homo sapien
gacttttctgatccgtgcatttgtt

SEQ ID NO: 2614892 - DNA, 25 bp, Homo sapien
gtatctaacctcatcctctctactg

SEQ ID NO: 2614893 - DNA, 25 bp, Homo sapien
aggagggacttttctgatccgtgca

SEQ ID NO: 2614894 - DNA, 25 bp, Homo sapien
ttccttccaggtgtatctaacctca

SEQ ID NO: 2614895 - DNA, 25 bp, Homo sapien
gatgattttggcctcataaaaaatg

SEQ ID NO: 2614896 - DNA, 25 bp, Homo sapien
ggtattctctgagagtactttgtat

SEQ ID NO: 2614897 - DNA, 25 bp, Homo sapien
tttctgcgggatcagtgatgatctc

SEQ ID NO: 2614898 - DNA, 25 bp, Homo sapien
ttttgttattaggatgattttggcc

SEQ ID NO: 2614899 - DNA, 25 bp, Homo sapien
gatggtggctgcctagaagccaaga

SEQ ID NO: 2614900 - DNA, 25 bp, Homo sapien
aaagaagattccctgatcccatagt

SEQ ID NO: 2614901 - DNA, 25 bp, Homo sapien
gaaacaggggagctcactctttctc

SEQ ID NO: 2614902 - DNA, 25 bp, Homo sapien
tagtattagtgtcctcctaagaaga

SEQ ID NO: 2614903 - DNA, 25 bp, Homo sapien
tctagcagtagatagccaatacatc

SEQ ID NO: 2614904 - DNA, 25 bp, Homo sapien
ggcgccaagcagtgccaattcctgg

SEQ ID NO: 2614905 - DNA, 25 bp, Homo sapien
tgactgcagtcccagacaacacctt

SEQ ID NO: 2614906 - DNA, 25 bp, Homo sapien
caccaactgcgtgagtgaggtcagg

SEQ ID NO: 2614907 - DNA, 25 bp, Homo sapien
tgttactagggtggtggaaggccat

SEQ ID NO: 2614908 - DNA, 25 bp, Homo sapien
tgcagttctttggtatagattgatg

SEQ ID NO: 2614909 - DNA, 25 bp, Homo sapien
cttggctagtggcaccacgaacaga

SEQ ID NO: 2614910 - DNA, 25 bp, Homo sapien
ggcaccacgaacagatccctacaga

SEQ ID NO: 2614911 - DNA, 25 bp, Homo sapien
ctgtaaacatcctgttccaatccaa

SEQ ID NO: 2614912 - DNA, 25 bp, Homo sapien
taactccgtagctgtaaacatcctg

SEQ ID NO: 2614913 - DNA, 25 bp, Homo sapien
aaacaaactaataactccgtagctg

SEQ ID NO: 2614914 - DNA, 25 bp, Homo sapien
gcttctgagccttctaaaggaaaca

SEQ ID NO: 2614915 - DNA, 25 bp, Homo sapien
gctcgaagcctgcatcattagcatc

SEQ ID NO: 2614916 - DNA, 25 bp, Homo sapien
tgctcgaagcctgcatcattagcat

SEQ ID NO: 2614917 - DNA, 25 bp, Homo sapien
catcattagcatcattgcaactttg

SEQ ID NO: 2614918 - DNA, 25 bp, Homo sapien
catcattgcaactttgccaagaggc

SEQ ID NO: 2614919 - DNA, 25 bp, Homo sapien
tagtcagtcccacggggcttgccct

SEQ ID NO: 2614920 - DNA, 25 bp, Homo sapien
ctagtcagtcccacggggcttgccc

SEQ ID NO: 2614921 - DNA, 25 bp, Homo sapien
ccctgctctgactgcctagacctac

SEQ ID NO: 2614922 - DNA, 25 bp, Homo sapien
ggcttgccctgctctgactgcctag

SEQ ID NO: 2614923 - DNA, 25 bp, Homo sapien
aagtcctcagtgacctacaaagaga

SEQ ID NO: 2614924 - DNA, 25 bp, Homo sapien
aagcaagtcctcagtgacctacaaa

SEQ ID NO: 2614925 - DNA, 25 bp, Homo sapien
agtcctcagtgacctacaaagagac

SEQ ID NO: 2614926 - DNA, 25 bp, Homo sapien
cataaagcaagtcctcagtgaccta

SEQ ID NO: 2614927 - DNA, 25 bp, Homo sapien
cacagcatttccagtccttgggtaa

SEQ ID NO: 2614928 - DNA, 25 bp, Homo sapien
tgttgaaaacagtgccccagacaag

SEQ ID NO: 2614929 - DNA, 25 bp, Homo sapien
tctgctagctcaggcattacacaca

SEQ ID NO: 2614930 - DNA, 25 bp, Homo sapien
gaaaggcctctgctagctcaggcat

SEQ ID NO: 2614931 - DNA, 25 bp, Homo sapien
gaaatcctgggagattcggtggaca

SEQ ID NO: 2614932 - DNA, 25 bp, Homo sapien
gagattcggtggacatatcagggct

SEQ ID NO: 2614933 - DNA, 25 bp, Homo sapien
ccgtctccccggtgatggaggacga

SEQ ID NO: 2614934 - DNA, 25 bp, Homo sapien
gtggacgagccccttccattctgaa

SEQ ID NO: 2614935 - DNA, 25 bp, Homo sapien
tacggtttccagcatgagacacacg

SEQ ID NO: 2614936 - DNA, 25 bp, Homo sapien
cagcactgggcgatggtgtacagcc

SEQ ID NO: 2614937 - DNA, 25 bp, Homo sapien
gagacttccagtcgcctcagttcgg

SEQ ID NO: 2614938 - DNA, 25 bp, Homo sapien
gagaagatctgcaccatggagtggt

SEQ ID NO: 2614939 - DNA, 25 bp, Homo sapien
ccagattagggcagagggacaccac

SEQ ID NO: 2614940 - DNA, 25 bp, Homo sapien
agattagggcagagggacaccacat

SEQ ID NO: 2614941 - DNA, 25 bp, Homo sapien
cagattagggcagagggacaccaca

SEQ ID NO: 2614942 - DNA, 25 bp, Homo sapien
tccagattagggcagagggacacca

SEQ ID NO: 2614943 - DNA, 25 bp, Homo sapien
agtcgtactaacctcaactcccagg

SEQ ID NO: 2614944 - DNA, 25 bp, Homo sapien
tcccgtaagaagtggagatacacct

SEQ ID NO: 2614945 - DNA, 25 bp, Homo sapien
tgtgagagttatgaagagtaaagac

SEQ ID NO: 2614946 - DNA, 25 bp, Homo sapien
tgcactatctatggttgctctgaag

SEQ ID NO: 2614947 - DNA, 25 bp, Homo sapien
tagatcaccaggtagcgcaggcctt

SEQ ID NO: 2614948 - DNA, 25 bp, Homo sapien
gaagcagtccgtcatgtccaggtag

SEQ ID NO: 2614949 - DNA, 25 bp, Homo sapien
gcgtttgacaaagcgcagggcctcc

SEQ ID NO: 2614950 - DNA, 25 bp, Homo sapien
gcagttcttggcgaggtactccaca

SEQ ID NO: 2614951 - DNA, 25 bp, Homo sapien
tctgaatgacaaagaaccgaggcat

SEQ ID NO: 2614952 - DNA, 25 bp, Homo sapien
tgcagccaaaggacatacaggaccc

SEQ ID NO: 2614953 - DNA, 25 bp, Homo sapien
gaaaacacgcagacagacatggagg

SEQ ID NO: 2614954 - DNA, 25 bp, Homo sapien
tgctcaaggaacagcgatcagcctg

SEQ ID NO: 2614955 - DNA, 25 bp, Homo sapien
tggagatgcagaggttctgcatttg

SEQ ID NO: 2614956 - DNA, 25 bp, Homo sapien
ccccacagaagacgacagtatgcac

SEQ ID NO: 2614957 - DNA, 25 bp, Homo sapien
aggagcctacagtaggagtgcagtt

SEQ ID NO: 2614958 - DNA, 25 bp, Homo sapien
cagttgtcaagggtgtctaagtttg

SEQ ID NO: 2614959 - DNA, 25 bp, Homo sapien
caccccaagggagaacagaatggat

SEQ ID NO: 2614960 - DNA, 25 bp, Homo sapien
tgatgtttgaaagaaacctcctggg

SEQ ID NO: 2614961 - DNA, 25 bp, Homo sapien
tctagattcatacagcacgcagtga

SEQ ID NO: 2614962 - DNA, 25 bp, Homo sapien
caagacggtatgtgctgggcaatca

SEQ ID NO: 2614963 - DNA, 25 bp, Homo sapien
gctctctaggtatgagtatgagccc

SEQ ID NO: 2614964 - DNA, 25 bp, Homo sapien
taagcatctttgtccctagaatcac

SEQ ID NO: 2614965 - DNA, 25 bp, Homo sapien
tagaatcacactcaggcaagtccat

SEQ ID NO: 2614966 - DNA, 25 bp, Homo sapien
cagaacttgtgctctctgatgtata

SEQ ID NO: 2614967 - DNA, 25 bp, Homo sapien
atggaaagcaggcttagagttttgg

SEQ ID NO: 2614968 - DNA, 25 bp, Homo sapien
ggttcttgccccatgtactcctctg

SEQ ID NO: 2614969 - DNA, 25 bp, Homo sapien
tgccccatgtactcctctgtatcat

SEQ ID NO: 2614970 - DNA, 25 bp, Homo sapien
tagagttttgggttcttgccccatg

SEQ ID NO: 2614971 - DNA, 25 bp, Homo sapien
tcctccagaggaaacaagtgttgtg

SEQ ID NO: 2614972 - DNA, 25 bp, Homo sapien
agcctgttcactgcttccaagatgg

SEQ ID NO: 2614973 - DNA, 25 bp, Homo sapien
caagaccagggcactagtgggtttg

SEQ ID NO: 2614974 - DNA, 25 bp, Homo sapien
caggcacacctctgagatactgtag

SEQ ID NO: 2614975 - DNA, 25 bp, Homo sapien
tccattaggtgatgccagatttcca

SEQ ID NO: 2614976 - DNA, 25 bp, Homo sapien
cagttggcctcagctaatagaaatc

SEQ ID NO: 2614977 - DNA, 25 bp, Homo sapien
ttgctgggcactttactcaaggcca

SEQ ID NO: 2614978 - DNA, 25 bp, Homo sapien
gcaacttgaggcataatcagatcca

SEQ ID NO: 2614979 - DNA, 25 bp, Homo sapien
agagagctgcaagtgggaacccgtc

SEQ ID NO: 2614980 - DNA, 25 bp, Homo sapien
gaggttgaaagtagccaggactctg

SEQ ID NO: 2614981 - DNA, 25 bp, Homo sapien
caattgccccacagttttacagcca

SEQ ID NO: 2614982 - DNA, 25 bp, Homo sapien
ccctgaggagagcttcagatcgagg

SEQ ID NO: 2614983 - DNA, 25 bp, Homo sapien
cagagcctctcctcgcattgttctt

SEQ ID NO: 2614984 - DNA, 25 bp, Homo sapien
agcctctcctcgcattgttctttct

SEQ ID NO: 2614985 - DNA, 25 bp, Homo sapien
ctctcctcgcattgttctttctcac

SEQ ID NO: 2614986 - DNA, 25 bp, Homo sapien
agagcctctcctcgcattgttcttt

SEQ ID NO: 2614987 - DNA, 25 bp, Homo sapien
taccccatgggccacataagagtca

SEQ ID NO: 2614988 - DNA, 25 bp, Homo sapien
ctattgattatttgtaccccatggg

SEQ ID NO: 2614989 - DNA, 25 bp, Homo sapien
ctacaagagcctattgattatttgt

SEQ ID NO: 2614990 - DNA, 25 bp, Homo sapien
cccatgggccacataagagtcaggg

SEQ ID NO: 2614991 - DNA, 25 bp, Homo sapien
caaagggcgtcacccactgttgttg

SEQ ID NO: 2614992 - DNA, 25 bp, Homo sapien
acccactgttgttgccggcagggtc

SEQ ID NO: 2614993 - DNA, 25 bp, Homo sapien
cccactgttgttgccggcagggtca

SEQ ID NO: 2614994 - DNA, 25 bp, Homo sapien
tgcctctccaaagggcgtcacccac

SEQ ID NO: 2614995 - DNA, 25 bp, Homo sapien
cctcatcagctgattgactccaatt

SEQ ID NO: 2614996 - DNA, 25 bp, Homo sapien
ggaaagagaagctgccatgacgtcg

SEQ ID NO: 2614997 - DNA, 25 bp, Homo sapien
tcagctgattgactccaattaagaa

SEQ ID NO: 2614998 - DNA, 25 bp, Homo sapien
gacgtcggtccacaaagcaggtcat

SEQ ID NO: 2614999 - DNA, 25 bp, Homo sapien
cactgcggtatccacctgatgtgca

SEQ ID NO: 2615000 - DNA, 25 bp, Homo sapien
cacctgatgtgcatcttttggtaca

SEQ ID NO: 2615001 - DNA, 25 bp, Homo sapien
actgcctgccaaaccactgcggtat

SEQ ID NO: 2615002 - DNA, 25 bp, Homo sapien
actctacctgcaacacccccactgc

SEQ ID NO: 2615003 - DNA, 25 bp, Homo sapien
gaatgtagctcctgaaaagggccac

SEQ ID NO: 2615004 - DNA, 25 bp, Homo sapien
ttgaatgtagctcctgaaaagggcc

SEQ ID NO: 2615005 - DNA, 25 bp, Homo sapien
tttgaatgtagctcctgaaaagggc

SEQ ID NO: 2615006 - DNA, 25 bp, Homo sapien
tgaatgtagctcctgaaaagggcca

SEQ ID NO: 2615007 - DNA, 25 bp, Homo sapien
tctcctggctgcataaagaacctct

SEQ ID NO: 2615008 - DNA, 25 bp, Homo sapien
ttcccctgatttttggctctcctgg

SEQ ID NO: 2615009 - DNA, 25 bp, Homo sapien
ctttccacatctggacttgagctct

SEQ ID NO: 2615010 - DNA, 25 bp, Homo sapien
gctgcataaagaacctctcagggtc

SEQ ID NO: 2615011 - DNA, 25 bp, Homo sapien
gaaagtggcccatgcattctggagg

SEQ ID NO: 2615012 - DNA, 25 bp, Homo sapien
ggatgtctctgagggactctgtccc

SEQ ID NO: 2615013 - DNA, 25 bp, Homo sapien
gcccctgtagatagccctctgagag

SEQ ID NO: 2615014 - DNA, 25 bp, Homo sapien
gagggactctgtcccctcttgcctg

SEQ ID NO: 2615015 - DNA, 25 bp, Homo sapien
gcccctttggattgggtttcatgga

SEQ ID NO: 2615016 - DNA, 25 bp, Homo sapien
ttttcccagcgtggatccttaaggc

SEQ ID NO: 2615017 - DNA, 25 bp, Homo sapien
aatatccttggttcttacttcgtgc

SEQ ID NO: 2615018 - DNA, 25 bp, Homo sapien
cagcgtggatccttaaggccccttt

SEQ ID NO: 2615019 - DNA, 25 bp, Homo sapien
ctctctgcttttctgttcgtggcat

SEQ ID NO: 2615020 - DNA, 25 bp, Homo sapien
tgtttccaaagacttggcacctggg

SEQ ID NO: 2615021 - DNA, 25 bp, Homo sapien
ttctgctgctctgatataccttcct

SEQ ID NO: 2615022 - DNA, 25 bp, Homo sapien
gattctggaaacaggattcaactcc

SEQ ID NO: 2615023 - DNA, 25 bp, Homo sapien
tcttgggtagacacttccctgtaag

SEQ ID NO: 2615024 - DNA, 25 bp, Homo sapien
acatctgacgttcatggggcaggtg

SEQ ID NO: 2615025 - DNA, 25 bp, Homo sapien
agccacatctgacgttcatggggca

SEQ ID NO: 2615026 - DNA, 25 bp, Homo sapien
cccagccacatctgacgttcatggg

SEQ ID NO: 2615027 - DNA, 25 bp, Homo sapien
ccacatctgacgttcatggggcagg

SEQ ID NO: 2615028 - DNA, 25 bp, Homo sapien
ctactggttgggctatcgagtgatt

SEQ ID NO: 2615029 - DNA, 25 bp, Homo sapien
ttacacacaggcagtggatcctctg

SEQ ID NO: 2615030 - DNA, 25 bp, Homo sapien
tcaacccttgttacacacaggcagt

SEQ ID NO: 2615031 - DNA, 25 bp, Homo sapien
ggatcctctgatcctactggttggg

SEQ ID NO: 2615032 - DNA, 25 bp, Homo sapien
caagtaccacatgaacaggaacttg

SEQ ID NO: 2615033 - DNA, 25 bp, Homo sapien
tagcatgcgtactccctttttgcca

SEQ ID NO: 2615034 - DNA, 25 bp, Homo sapien
gtttaataactgcatcttccaagta

SEQ ID NO: 2615035 - DNA, 25 bp, Homo sapien
tcacgatgtagagtagcatgcgtac

SEQ ID NO: 2615036 - DNA, 25 bp, Homo sapien
taaatttgtaagacacccgactcca

SEQ ID NO: 2615037 - DNA, 25 bp, Homo sapien
ctgtaaatatctttggacggtccca

SEQ ID NO: 2615038 - DNA, 25 bp, Homo sapien
gacacccgactccagagatgaaagc

SEQ ID NO: 2615039 - DNA, 25 bp, Homo sapien
gacggtcccaactgacaatgttaaa

SEQ ID NO: 2615040 - DNA, 25 bp, Homo sapien
caaggacatcgttcttccaaggaca

SEQ ID NO: 2615041 - DNA, 25 bp, Homo sapien
cctagagtagtgtatggccccacag

SEQ ID NO: 2615042 - DNA, 25 bp, Homo sapien
cacaaaataaatccggagtcccacg

SEQ ID NO: 2615043 - DNA, 25 bp, Homo sapien
caccttatgcgtcagatgtcagtca

SEQ ID NO: 2615044 - DNA, 25 bp, Homo sapien
tccttagggcaaaaccagcctgcat

SEQ ID NO: 2615045 - DNA, 25 bp, Homo sapien
tcgaaacctggatccagaacttgca

SEQ ID NO: 2615046 - DNA, 25 bp, Homo sapien
atactccctcgaaacctggatccag

SEQ ID NO: 2615047 - DNA, 25 bp, Homo sapien
gcaggtagtttgattccttagggca

SEQ ID NO: 2615048 - DNA, 25 bp, Homo sapien
gaaaatatcgacatccagtggcctg

SEQ ID NO: 2615049 - DNA, 25 bp, Homo sapien
caagggcacattccggctgaacagt

SEQ ID NO: 2615050 - DNA, 25 bp, Homo sapien
ccagcacctgggacacaatgaggag

SEQ ID NO: 2615051 - DNA, 25 bp, Homo sapien
ctgaattgccttggcccaacgggcc

SEQ ID NO: 2615052 - DNA, 25 bp, Homo sapien
attttaacctctcagtgtcccagtt

SEQ ID NO: 2615053 - DNA, 25 bp, Homo sapien
tgcgtcacggggttttgggagatta

SEQ ID NO: 2615054 - DNA, 25 bp, Homo sapien
ctctcagtgtcccagtttttttcag

SEQ ID NO: 2615055 - DNA, 25 bp, Homo sapien
cagtgtcccagtttttttcagctat

SEQ ID NO: 2615056 - DNA, 25 bp, Homo sapien
cttctgccattatggacaacttttt

SEQ ID NO: 2615057 - DNA, 25 bp, Homo sapien
tctgccattatggacaactttttat

SEQ ID NO: 2615058 - DNA, 25 bp, Homo sapien
gtgcttctgccattatggacaactt

SEQ ID NO: 2615059 - DNA, 25 bp, Homo sapien
tgcttctgccattatggacaacttt

SEQ ID NO: 2615060 - DNA, 25 bp, Homo sapien
gacacctgtacaatggatgtccctt

SEQ ID NO: 2615061 - DNA, 25 bp, Homo sapien
tccattgttgccttagtgtgccttt

SEQ ID NO: 2615062 - DNA, 25 bp, Homo sapien
cttttcggtatactgatttggtgca

SEQ ID NO: 2615063 - DNA, 25 bp, Homo sapien
gatgtcccttccttataacgataga

SEQ ID NO: 2615064 - DNA, 25 bp, Homo sapien
tttgtttgcccctccacacagcttc

SEQ ID NO: 2615065 - DNA, 25 bp, Homo sapien
tgtgctttgtttgcccctccacaca

SEQ ID NO: 2615066 - DNA, 25 bp, Homo sapien
gctttgtttgcccctccacacagct

SEQ ID NO: 2615067 - DNA, 25 bp, Homo sapien
gtgctttgtttgcccctccacacag

SEQ ID NO: 2615068 - DNA, 25 bp, Homo sapien
ctataggtgatacccttcaggactt

SEQ ID NO: 2615069 - DNA, 25 bp, Homo sapien
gaacagcccctgtcaggtgggtgca

SEQ ID NO: 2615070 - DNA, 25 bp, Homo sapien
ttgtttatgctttagaacagcccct

SEQ ID NO: 2615071 - DNA, 25 bp, Homo sapien
caggcagccatactttgtttatgct

SEQ ID NO: 2615072 - DNA, 25 bp, Homo sapien
aacagcccctgtcaggtgggtgcat

SEQ ID NO: 2615073 - DNA, 25 bp, Homo sapien
gccgcctccatcagagccgagccgg

SEQ ID NO: 2615074 - DNA, 25 bp, Homo sapien
ttcggcgccgcctccatcagagccg

SEQ ID NO: 2615075 - DNA, 25 bp, Homo sapien
gcgcagccgaattcggcgccgcctc

SEQ ID NO: 2615076 - DNA, 25 bp, Homo sapien
gaattcggcgccgcctccatcagag

SEQ ID NO: 2615077 - DNA, 25 bp, Homo sapien
cctggaagtggcggttacagtcccg

SEQ ID NO: 2615078 - DNA, 25 bp, Homo sapien
ctgttttaaggctctcgaggatccc

SEQ ID NO: 2615079 - DNA, 25 bp, Homo sapien
tgagagtgcccttgagggctccaag

SEQ ID NO: 2615080 - DNA, 25 bp, Homo sapien
acacagggattcgagggcgggacag

SEQ ID NO: 2615081 - DNA, 25 bp, Homo sapien
gattataagccacagaacgtggcgc

SEQ ID NO: 2615082 - DNA, 25 bp, Homo sapien
gatctttaccaacaacccgggatgc

SEQ ID NO: 2615083 - DNA, 25 bp, Homo sapien
tcctcatgcggcaacgacgaaagtg

SEQ ID NO: 2615084 - DNA, 25 bp, Homo sapien
catttcaggagacgaagctccgacc

SEQ ID NO: 2615085 - DNA, 25 bp, Homo sapien
gcagggaccctatagcagccaggat

SEQ ID NO: 2615086 - DNA, 25 bp, Homo sapien
ttgccgtaaacttggagctgcctcc

SEQ ID NO: 2615087 - DNA, 25 bp, Homo sapien
tggcggctagaggtcaaattccaag

SEQ ID NO: 2615088 - DNA, 25 bp, Homo sapien
gattttcagcgactgctcagcagct

SEQ ID NO: 2615089 - DNA, 25 bp, Homo sapien
ggacctgggtgcaggtgttaagagg

SEQ ID NO: 2615090 - DNA, 25 bp, Homo sapien
ctgagttgcatggcgtcagctggga

SEQ ID NO: 2615091 - DNA, 25 bp, Homo sapien
gagttgcatggcgtcagctgggata

SEQ ID NO: 2615092 - DNA, 25 bp, Homo sapien
tgcaggtgttaagagggtcgggccg

SEQ ID NO: 2615093 - DNA, 25 bp, Homo sapien
aggggacccgagctgcccccttctg

SEQ ID NO: 2615094 - DNA, 25 bp, Homo sapien
gggagatgacactctttacactggg

SEQ ID NO: 2615095 - DNA, 25 bp, Homo sapien
gaggggagatgacactctttacact

SEQ ID NO: 2615096 - DNA, 25 bp, Homo sapien
ttacactgggggtgagaccacattt

SEQ ID NO: 2615097 - DNA, 25 bp, Homo sapien
agttccaggtacgtaaccagttgtg

SEQ ID NO: 2615098 - DNA, 25 bp, Homo sapien
tacgtaaccagttgtggcatctatt

SEQ ID NO: 2615099 - DNA, 25 bp, Homo sapien
tcaagtagttccaggtacgtaacca

SEQ ID NO: 2615100 - DNA, 25 bp, Homo sapien
ctccccatccaagagaagccagatg

SEQ ID NO: 2615101 - DNA, 25 bp, Homo sapien
gaggctggcaatggtaggatgagga

SEQ ID NO: 2615102 - DNA, 25 bp, Homo sapien
gagtgtgcagcagtgaaagattctg

SEQ ID NO: 2615103 - DNA, 25 bp, Homo sapien
gtctaaagatagagcctggctagag

SEQ ID NO: 2615104 - DNA, 25 bp, Homo sapien
ctggcaatggtaggatgaggagagt

SEQ ID NO: 2615105 - DNA, 25 bp, Homo sapien
tggtaccacttggcacagttcggtg

SEQ ID NO: 2615106 - DNA, 25 bp, Homo sapien
tataccagattattagtgcatgttt

SEQ ID NO: 2615107 - DNA, 25 bp, Homo sapien
tctcttcgtggaagactttgcagct

SEQ ID NO: 2615108 - DNA, 25 bp, Homo sapien
gatcatcagcaactggatctaatcc

SEQ ID NO: 2615109 - DNA, 25 bp, Homo sapien
tggatgtggtgtagtagagactgca

SEQ ID NO: 2615110 - DNA, 25 bp, Homo sapien
ctgtacccctggcagttttctctgg

SEQ ID NO: 2615111 - DNA, 25 bp, Homo sapien
cactggtgaaggcttctgctctggt

SEQ ID NO: 2615112 - DNA, 25 bp, Homo sapien
gactgcactggtgaaggcttctgct

SEQ ID NO: 2615113 - DNA, 25 bp, Homo sapien
gtttgcagccaactttctgagtcta

SEQ ID NO: 2615114 - DNA, 25 bp, Homo sapien
gcggtgtttgcagccaactttctga

SEQ ID NO: 2615115 - DNA, 25 bp, Homo sapien
tggcggtgtttgcagccaactttct

SEQ ID NO: 2615116 - DNA, 25 bp, Homo sapien
ttgcagccaactttctgagtctatc

SEQ ID NO: 2615117 - DNA, 25 bp, Homo sapien
tatgcactgttttccagagagggcc

SEQ ID NO: 2615118 - DNA, 25 bp, Homo sapien
caccgtcattgtgtggccttagaaa

SEQ ID NO: 2615119 - DNA, 25 bp, Homo sapien
cttagaccctgtttgaagtctaact

SEQ ID NO: 2615120 - DNA, 25 bp, Homo sapien
ccttagaaatggtcctcctggatac

SEQ ID NO: 2615121 - DNA, 25 bp, Homo sapien
tcagaatgtctgatttgcagaaggg

SEQ ID NO: 2615122 - DNA, 25 bp, Homo sapien
gatttcatccaccagctattttctc

SEQ ID NO: 2615123 - DNA, 25 bp, Homo sapien
tcatctctgagggggctgaacctgg

SEQ ID NO: 2615124 - DNA, 25 bp, Homo sapien
gcttccttctcatcttctgatttca

SEQ ID NO: 2615125 - DNA, 25 bp, Homo sapien
caacaattccactacctgcaagggt

SEQ ID NO: 2615126 - DNA, 25 bp, Homo sapien
cctccagggtcgttcattaaaatct

SEQ ID NO: 2615127 - DNA, 25 bp, Homo sapien
gggtgaacaaactctccatgaatag

SEQ ID NO: 2615128 - DNA, 25 bp, Homo sapien
gcccatgcatgctgcttggcaatca

SEQ ID NO: 2615129 - DNA, 25 bp, Homo sapien
ccaaccagggtcttttgggcatctc

SEQ ID NO: 2615130 - DNA, 25 bp, Homo sapien
ggcagtagattttgctccaagaggt

SEQ ID NO: 2615131 - DNA, 25 bp, Homo sapien
tgatgctgctcccaataccaaccag

SEQ ID NO: 2615132 - DNA, 25 bp, Homo sapien
tctcaggagagatccactcatgctc

SEQ ID NO: 2615133 - DNA, 25 bp, Homo sapien
actttcttgaccaatagccacagta

SEQ ID NO: 2615134 - DNA, 25 bp, Homo sapien
tttcttgaccaatagccacagtaat

SEQ ID NO: 2615135 - DNA, 25 bp, Homo sapien
ctttcttgaccaatagccacagtaa

SEQ ID NO: 2615136 - DNA, 25 bp, Homo sapien
aggcagtatttgctctgattggctt

SEQ ID NO: 2615137 - DNA, 25 bp, Homo sapien
tttgctctgattggcttgttggtgt

SEQ ID NO: 2615138 - DNA, 25 bp, Homo sapien
gcagtatttgctctgattggcttgt

SEQ ID NO: 2615139 - DNA, 25 bp, Homo sapien
gtatttgctctgattggcttgttgg

SEQ ID NO: 2615140 - DNA, 25 bp, Homo sapien
ctgggtcttgctggacccctctgaa

SEQ ID NO: 2615141 - DNA, 25 bp, Homo sapien
tatcagtgtatggacctgggtgccc

SEQ ID NO: 2615142 - DNA, 25 bp, Homo sapien
aaacgttgatcggttcccaagcata

SEQ ID NO: 2615143 - DNA, 25 bp, Homo sapien
tgaactgtccttaggcccattttac

SEQ ID NO: 2615144 - DNA, 25 bp, Homo sapien
tcttcagggaaagcatctatccaac

SEQ ID NO: 2615145 - DNA, 25 bp, Homo sapien
gatatagtgcatgcccatagtcgag

SEQ ID NO: 2615146 - DNA, 25 bp, Homo sapien
tagtcgaggttagctatcagtcccc

SEQ ID NO: 2615147 - DNA, 25 bp, Homo sapien
aaagcatgccactgcaattgttgag

SEQ ID NO: 2615148 - DNA, 25 bp, Homo sapien
tataagacggactggcaccgctaca

SEQ ID NO: 2615149 - DNA, 25 bp, Homo sapien
ataacttgccgggtggcgttccgcg

SEQ ID NO: 2615150 - DNA, 25 bp, Homo sapien
atgcagcgggcccactataagacgg

SEQ ID NO: 2615151 - DNA, 25 bp, Homo sapien
ggcaatggcgacgtacacctgcata

SEQ ID NO: 2615152 - DNA, 25 bp, Homo sapien
gctgacccgaccattcattaatcgg

SEQ ID NO: 2615153 - DNA, 25 bp, Homo sapien
actgtgtgtctacagggagctcctc

SEQ ID NO: 2615154 - DNA, 25 bp, Homo sapien
gctgctattagaattacctacgtgg

SEQ ID NO: 2615155 - DNA, 25 bp, Homo sapien
tctgtgcactcaaattccgccggtg

SEQ ID NO: 2615156 - DNA, 25 bp, Homo sapien
ctttgctgtcctatatacatgaggg

SEQ ID NO: 2615157 - DNA, 25 bp, Homo sapien
gacttagaaccaacgacagagcgta

SEQ ID NO: 2615158 - DNA, 25 bp, Homo sapien
caggatgggctaaattaaacacatt

SEQ ID NO: 2615159 - DNA, 25 bp, Homo sapien
tggcacgggtctagtccaaattgag

SEQ ID NO: 2615160 - DNA, 25 bp, Homo sapien
tatgggcatcagacaactattcttg

SEQ ID NO: 2615161 - DNA, 25 bp, Homo sapien
tagacgcagatgactaacatgcagt

SEQ ID NO: 2615162 - DNA, 25 bp, Homo sapien
gatttcctgggatgcaggacttcca

SEQ ID NO: 2615163 - DNA, 25 bp, Homo sapien
tagtatggcggaggaaacaataccc

SEQ ID NO: 2615164 - DNA, 25 bp, Homo sapien
ttaaaaaccaaggtgccactgcgat

SEQ ID NO: 2615165 - DNA, 25 bp, Homo sapien
gaaaatctctcacaggacttaacgt

SEQ ID NO: 2615166 - DNA, 25 bp, Homo sapien
tccaagactgaaacaagaaccatgt

SEQ ID NO: 2615167 - DNA, 25 bp, Homo sapien
ccactgcgatataggaatgtgaaca

SEQ ID NO: 2615168 - DNA, 25 bp, Homo sapien
tgggttttggaggaatatacctgaa

SEQ ID NO: 2615169 - DNA, 25 bp, Homo sapien
tatcttgcccattttaatacaaatg

SEQ ID NO: 2615170 - DNA, 25 bp, Homo sapien
tgtgccttcattatcttgcccattt

SEQ ID NO: 2615171 - DNA, 25 bp, Homo sapien
gagcctgtgccttcattatcttgcc

SEQ ID NO: 2615172 - DNA, 25 bp, Homo sapien
gcctgtatagaggagaggaacttgc

SEQ ID NO: 2615173 - DNA, 25 bp, Homo sapien
tcaggtacagctggcattttggcag

SEQ ID NO: 2615174 - DNA, 25 bp, Homo sapien
aactttaagtgtcgagggaccatgc

SEQ ID NO: 2615175 - DNA, 25 bp, Homo sapien
gcatagagacatctgagaccctcag

SEQ ID NO: 2615176 - DNA, 25 bp, Homo sapien
tccctcctgcagtgaattaattgga

SEQ ID NO: 2615177 - DNA, 25 bp, Homo sapien
catctctagtcttgcagtgggtggt

SEQ ID NO: 2615178 - DNA, 25 bp, Homo sapien
taaagaagcatgctccattgactgc

SEQ ID NO: 2615179 - DNA, 25 bp, Homo sapien
taagtactctggatagactgaaacg

SEQ ID NO: 2615180 - DNA, 25 bp, Homo sapien
gaattgggacttacacaagaccagg

SEQ ID NO: 2615181 - DNA, 25 bp, Homo sapien
ccagttagagggtgtgcagcaagca

SEQ ID NO: 2615182 - DNA, 25 bp, Homo sapien
ggtttgcccactgagctcaagagaa

SEQ ID NO: 2615183 - DNA, 25 bp, Homo sapien
caaagagacgcaatcagcagctggt

SEQ ID NO: 2615184 - DNA, 25 bp, Homo sapien
tagtttaggactgattattctctgc

SEQ ID NO: 2615185 - DNA, 25 bp, Homo sapien
ccagagccgcatttagtttaggact

SEQ ID NO: 2615186 - DNA, 25 bp, Homo sapien
gacttgttaggaccagagccgcatt

SEQ ID NO: 2615187 - DNA, 25 bp, Homo sapien
taaggtctgcttttaagacttgtta

SEQ ID NO: 2615188 - DNA, 25 bp, Homo sapien
taattaccatcaggaatggccgcct

SEQ ID NO: 2615189 - DNA, 25 bp, Homo sapien
tcatacgccgcataaggacatggct

SEQ ID NO: 2615190 - DNA, 25 bp, Homo sapien
tctgactcgaagtgacatcgcctgg

SEQ ID NO: 2615191 - DNA, 25 bp, Homo sapien
tgtccctgggtaggccaaggctaat

SEQ ID NO: 2615192 - DNA, 25 bp, Homo sapien
gctttaacgcgcgtgaacattgata

SEQ ID NO: 2615193 - DNA, 25 bp, Homo sapien
ttaacgcgcgtgaacattgatatta

SEQ ID NO: 2615194 - DNA, 25 bp, Homo sapien
taacgcgcgtgaacattgatattat

SEQ ID NO: 2615195 - DNA, 25 bp, Homo sapien
tttaacgcgcgtgaacattgatatt

SEQ ID NO: 2615196 - DNA, 25 bp, Homo sapien
tcagagcactttgagtagggcagat

SEQ ID NO: 2615197 - DNA, 25 bp, Homo sapien
catgggcatcgggagagctctctag

SEQ ID NO: 2615198 - DNA, 25 bp, Homo sapien
ggcagattatcttccgcagtgtgaa

SEQ ID NO: 2615199 - DNA, 25 bp, Homo sapien
tgagccatttgatacccacagcaat

SEQ ID NO: 2615200 - DNA, 25 bp, Homo sapien
cccactttgtgaaggcaatgtgtac

SEQ ID NO: 2615201 - DNA, 25 bp, Homo sapien
tgagattagatcaggcaggtgcatg

SEQ ID NO: 2615202 - DNA, 25 bp, Homo sapien
aaaggcgcacgcatggaggaattcc

SEQ ID NO: 2615203 - DNA, 25 bp, Homo sapien
actctgcgaaggcagcatgcacgca

SEQ ID NO: 2615204 - DNA, 25 bp, Homo sapien
tcccaaggagataaaaggactggtc

SEQ ID NO: 2615205 - DNA, 25 bp, Homo sapien
ggatagaggtgttttcccaaggaga

SEQ ID NO: 2615206 - DNA, 25 bp, Homo sapien
ctcttccttcttggggtgggataga

SEQ ID NO: 2615207 - DNA, 25 bp, Homo sapien
actggtcagactcttgctttctctg

SEQ ID NO: 2615208 - DNA, 25 bp, Homo sapien
caggcatccgttgactttggcgcca

SEQ ID NO: 2615209 - DNA, 25 bp, Homo sapien
ttatcaacaccgtccagcttcagag

SEQ ID NO: 2615210 - DNA, 25 bp, Homo sapien
catattcacagacgtaaagtttggg

SEQ ID NO: 2615211 - DNA, 25 bp, Homo sapien
ttggcgccattgacaccttgcactg

SEQ ID NO: 2615212 - DNA, 25 bp, Homo sapien
tttcatgggcaggatgcagacttgc

SEQ ID NO: 2615213 - DNA, 25 bp, Homo sapien
cagacttgccaagagactcaggaga

SEQ ID NO: 2615214 - DNA, 25 bp, Homo sapien
gctggcataggctctggtaggcatt

SEQ ID NO: 2615215 - DNA, 25 bp, Homo sapien
taagaagagaaacgtgatccctggt

SEQ ID NO: 2615216 - DNA, 25 bp, Homo sapien
tgaatagttggcagcagtcccatct

SEQ ID NO: 2615217 - DNA, 25 bp, Homo sapien
cagtagagtctcttaggacaaaggc

SEQ ID NO: 2615218 - DNA, 25 bp, Homo sapien
atctcgcaggcctcctagcgcaggg

SEQ ID NO: 2615219 - DNA, 25 bp, Homo sapien
ggagccctgtgaatagttggcagca

SEQ ID NO: 2615220 - DNA, 25 bp, Homo sapien
caggactccagtaccgatcaatagc

SEQ ID NO: 2615221 - DNA, 25 bp, Homo sapien
tgacgtccagatagaacatgcatgg

SEQ ID NO: 2615222 - DNA, 25 bp, Homo sapien
ctgaagctggacaagagaacagatg

SEQ ID NO: 2615223 - DNA, 25 bp, Homo sapien
gatgtcaccactaaagtccataggt

SEQ ID NO: 2615224 - DNA, 25 bp, Homo sapien
gctaaaagaacgtgcatatggtgat

SEQ ID NO: 2615225 - DNA, 25 bp, Homo sapien
ccaaagtttgaaatacgcttttcag

SEQ ID NO: 2615226 - DNA, 25 bp, Homo sapien
agtatgtctttctatgacaaatggg

SEQ ID NO: 2615227 - DNA, 25 bp, Homo sapien
tccaatcgtagctaaaccacacagt

SEQ ID NO: 2615228 - DNA, 25 bp, Homo sapien
atgccatcaatctcagaactgtgga

SEQ ID NO: 2615229 - DNA, 25 bp, Homo sapien
agttctttgcatccttggttggagt

SEQ ID NO: 2615230 - DNA, 25 bp, Homo sapien
tctttgcatccttggttggagttgg

SEQ ID NO: 2615231 - DNA, 25 bp, Homo sapien
ctagttctttgcatccttggttgga

SEQ ID NO: 2615232 - DNA, 25 bp, Homo sapien
gcaaagctgcgtgctctgtaggcag

SEQ ID NO: 2615233 - DNA, 25 bp, Homo sapien
ccaccaggactgtgaccccctgcat

SEQ ID NO: 2615234 - DNA, 25 bp, Homo sapien
ctgcaaagctgcgtgctctgtaggc

SEQ ID NO: 2615235 - DNA, 25 bp, Homo sapien
ccactctgcaaagctgcgtgctctg

SEQ ID NO: 2615236 - DNA, 25 bp, Homo sapien
gttgagtttgaagtatggagttgca

SEQ ID NO: 2615237 - DNA, 25 bp, Homo sapien
cagccttgggaacgtgtgaaatttc

SEQ ID NO: 2615238 - DNA, 25 bp, Homo sapien
tccacgtgtcactacagtgacacag

SEQ ID NO: 2615239 - DNA, 25 bp, Homo sapien
gagttgcatgtgttggagtttagtc

SEQ ID NO: 2615240 - DNA, 25 bp, Homo sapien
gattgagagagtatgtcacagttcc

SEQ ID NO: 2615241 - DNA, 25 bp, Homo sapien
gctgatttggtgaatcgattgagag

SEQ ID NO: 2615242 - DNA, 25 bp, Homo sapien
ggtttaggagacacagctgatttgg

SEQ ID NO: 2615243 - DNA, 25 bp, Homo sapien
gagagcctacccactggtttaggag

SEQ ID NO: 2615244 - DNA, 25 bp, Homo sapien
ctgtgaatgagtgtctgctccctac

SEQ ID NO: 2615245 - DNA, 25 bp, Homo sapien
agtgtctgctccctacccagtgtgg

SEQ ID NO: 2615246 - DNA, 25 bp, Homo sapien
tgaatgagtgtctgctccctaccca

SEQ ID NO: 2615247 - DNA, 25 bp, Homo sapien
ctgctccctacccagtgtggtcaag

SEQ ID NO: 2615248 - DNA, 25 bp, Homo sapien
ctcttccccggctgagaaatcctgg

SEQ ID NO: 2615249 - DNA, 25 bp, Homo sapien
tgtctcgtttgcagatccttctggc

SEQ ID NO: 2615250 - DNA, 25 bp, Homo sapien
tccttctggccgggcttcagttcat

SEQ ID NO: 2615251 - DNA, 25 bp, Homo sapien
tgaaggccattgcttgattgtctcc

SEQ ID NO: 2615252 - DNA, 25 bp, Homo sapien
gtcttgggaactctaaagcactgta

SEQ ID NO: 2615253 - DNA, 25 bp, Homo sapien
tcttgggaactctaaagcactgtat

SEQ ID NO: 2615254 - DNA, 25 bp, Homo sapien
tgtcttgggaactctaaagcactgt

SEQ ID NO: 2615255 - DNA, 25 bp, Homo sapien
caggcatatttttaggtgaagtaca

SEQ ID NO: 2615256 - DNA, 25 bp, Homo sapien
ccctgatgagaaaacgggaggcaaa

SEQ ID NO: 2615257 - DNA, 25 bp, Homo sapien
acaagcaggtggagtatgcccagca

SEQ ID NO: 2615258 - DNA, 25 bp, Homo sapien
taggtttactgtgtttactccctga

SEQ ID NO: 2615259 - DNA, 25 bp, Homo sapien
gcttgccggagcaaacgtgcttgaa

SEQ ID NO: 2615260 - DNA, 25 bp, Homo sapien
tctggaccagattaggtacccgttc

SEQ ID NO: 2615261 - DNA, 25 bp, Homo sapien
tcatcagtcacctgagatgggccct

SEQ ID NO: 2615262 - DNA, 25 bp, Homo sapien
caggtgttcccatcgtgcttgaaaa

SEQ ID NO: 2615263 - DNA, 25 bp, Homo sapien
atgcgaggtggtcggccgaccctca

SEQ ID NO: 2615264 - DNA, 25 bp, Homo sapien
tcctccggacgcacgtccctgtgag

SEQ ID NO: 2615265 - DNA, 25 bp, Homo sapien
cagttgtcgttctccgtgtgcggat

SEQ ID NO: 2615266 - DNA, 25 bp, Homo sapien
gtgtgcggatccagcctcagatgcg

SEQ ID NO: 2615267 - DNA, 25 bp, Homo sapien
ctggtgagagcttgggcaaggtggg

SEQ ID NO: 2615268 - DNA, 25 bp, Homo sapien
tgagagcttgggcaaggtgggggcg

SEQ ID NO: 2615269 - DNA, 25 bp, Homo sapien
gtgagagcttgggcaaggtgggggc

SEQ ID NO: 2615270 - DNA, 25 bp, Homo sapien
tggtgagagcttgggcaaggtgggg

SEQ ID NO: 2615271 - DNA, 25 bp, Homo sapien
ggctgccgcgccgacgagctgctga

SEQ ID NO: 2615272 - DNA, 25 bp, Homo sapien
tgccgcgccgacgagctgctgagct

SEQ ID NO: 2615273 - DNA, 25 bp, Homo sapien
aggccgctgcggagcctgctcggct

SEQ ID NO: 2615274 - DNA, 25 bp, Homo sapien
ggcttcgtcgctgccaacctgctgt

SEQ ID NO: 2615275 - DNA, 25 bp, Homo sapien
tctctgggggctgaaatacgctgcc

SEQ ID NO: 2615276 - DNA, 25 bp, Homo sapien
aaatgtccaatctattttgcctgga

SEQ ID NO: 2615277 - DNA, 25 bp, Homo sapien
gagccttgggtctcttttggatacg

SEQ ID NO: 2615278 - DNA, 25 bp, Homo sapien
gtggctgctggttgggcgaccggtg

SEQ ID NO: 2615279 - DNA, 25 bp, Homo sapien
cagcacgttatttccaggatgccca

SEQ ID NO: 2615280 - DNA, 25 bp, Homo sapien
gcacgttatttccaggatgcccagg

SEQ ID NO: 2615281 - DNA, 25 bp, Homo sapien
cacgttatttccaggatgcccagga

SEQ ID NO: 2615282 - DNA, 25 bp, Homo sapien
acgttatttccaggatgcccaggac

SEQ ID NO: 2615283 - DNA, 25 bp, Homo sapien
tgacacgtgcaaagttccaatctct

SEQ ID NO: 2615284 - DNA, 25 bp, Homo sapien
tgatgcccgcttgtgacgcagagac

SEQ ID NO: 2615285 - DNA, 25 bp, Homo sapien
gcgggccaacgtgcacttctgagcc

SEQ ID NO: 2615286 - DNA, 25 bp, Homo sapien
tactgtcttcaaagcaggccaaacc

SEQ ID NO: 2615287 - DNA, 25 bp, Homo sapien
ttagcacttagcgaaggcttcttcg

SEQ ID NO: 2615288 - DNA, 25 bp, Homo sapien
gaatctcttagcacttagcgaaggc

SEQ ID NO: 2615289 - DNA, 25 bp, Homo sapien
tctcttagcacttagcgaaggcttc

SEQ ID NO: 2615290 - DNA, 25 bp, Homo sapien
tagcgaaggcttcttcgctgtggca

SEQ ID NO: 2615291 - DNA, 25 bp, Homo sapien
aatgtccactattccctttggtgag

SEQ ID NO: 2615292 - DNA, 25 bp, Homo sapien
tgttgaattcccaacagcagttatt

SEQ ID NO: 2615293 - DNA, 25 bp, Homo sapien
tcctgttactagagaccattcaatg

SEQ ID NO: 2615294 - DNA, 25 bp, Homo sapien
tgagttacttaaggaactgtgcgtc

SEQ ID NO: 2615295 - DNA, 25 bp, Homo sapien
tgctttttccttgacacccaggcca

SEQ ID NO: 2615296 - DNA, 25 bp, Homo sapien
cttatatggaagaaacctgaattgt

SEQ ID NO: 2615297 - DNA, 25 bp, Homo sapien
tttccatcgggttgtcaggatactc

SEQ ID NO: 2615298 - DNA, 25 bp, Homo sapien
acccaggccactttccatcgggttg

SEQ ID NO: 2615299 - DNA, 25 bp, Homo sapien
tttagaatagcaaaccctgggctgt

SEQ ID NO: 2615300 - DNA, 25 bp, Homo sapien
tgtatcaagcgccaaacaaaggcca

SEQ ID NO: 2615301 - DNA, 25 bp, Homo sapien
tcaaaaacttctccgctactgccaa

SEQ ID NO: 2615302 - DNA, 25 bp, Homo sapien
acttctccgctactgccaagaggga

SEQ ID NO: 2615303 - DNA, 25 bp, Homo sapien
tttctggtagcacatcagcactggt

SEQ ID NO: 2615304 - DNA, 25 bp, Homo sapien
gcaaacccatttctggtagcacatc

SEQ ID NO: 2615305 - DNA, 25 bp, Homo sapien
tttactacttcaacagatcctgaca

SEQ ID NO: 2615306 - DNA, 25 bp, Homo sapien
gaaggtgattaatcttgcaaaccca

SEQ ID NO: 2615307 - DNA, 25 bp, Homo sapien
ggatagacaggtaggcttccttggg

SEQ ID NO: 2615308 - DNA, 25 bp, Homo sapien
ccttgggggatatactcatgttgtc

SEQ ID NO: 2615309 - DNA, 25 bp, Homo sapien
tgtgacctccgttcttttcagttaa

SEQ ID NO: 2615310 - DNA, 25 bp, Homo sapien
catgttgtcatgtgacctccgttct

SEQ ID NO: 2615311 - DNA, 25 bp, Homo sapien
acagtgctttgtctgctggttcaga

SEQ ID NO: 2615312 - DNA, 25 bp, Homo sapien
gcaaggacccgacagtgctttgtct

SEQ ID NO: 2615313 - DNA, 25 bp, Homo sapien
ttgcagcaaggacccgacagtgctt

SEQ ID NO: 2615314 - DNA, 25 bp, Homo sapien
agaggttgcagcaaggacccgacag

SEQ ID NO: 2615315 - DNA, 25 bp, Homo sapien
ctggccagcgcctttgaactcttct

SEQ ID NO: 2615316 - DNA, 25 bp, Homo sapien
cctgctggtctctgagctgcagacc

SEQ ID NO: 2615317 - DNA, 25 bp, Homo sapien
tgcagtcgcatggaactggccagcg

SEQ ID NO: 2615318 - DNA, 25 bp, Homo sapien
tctgccaagttctcctacaggccat

SEQ ID NO: 2615319 - DNA, 25 bp, Homo sapien
aaggagacccattgagcctgtggga

SEQ ID NO: 2615320 - DNA, 25 bp, Homo sapien
tcttggagaccctcggatggacatg

SEQ ID NO: 2615321 - DNA, 25 bp, Homo sapien
gtcagcaggagaacagtctacaggt

SEQ ID NO: 2615322 - DNA, 25 bp, Homo sapien
ttataggataagagcaagaacaacc

SEQ ID NO: 2615323 - DNA, 25 bp, Homo sapien
tgggtgaaggaacagactttattgg

SEQ ID NO: 2615324 - DNA, 25 bp, Homo sapien
tatgggtgaaggaacagactttatt

SEQ ID NO: 2615325 - DNA, 25 bp, Homo sapien
atgggtgaaggaacagactttattg

SEQ ID NO: 2615326 - DNA, 25 bp, Homo sapien
tgaaggaacagactttattggggga

SEQ ID NO: 2615327 - DNA, 25 bp, Homo sapien
gattcaccatctagctgcagcgact

SEQ ID NO: 2615328 - DNA, 25 bp, Homo sapien
gagccgtcctcttacatcaccataa

SEQ ID NO: 2615329 - DNA, 25 bp, Homo sapien
tggaaaggagaaatcgctggcactg

SEQ ID NO: 2615330 - DNA, 25 bp, Homo sapien
taaagtaggcggctgtcatcatggc

SEQ ID NO: 2615331 - DNA, 25 bp, Homo sapien
tatgctcactgaggaggttccagcc

SEQ ID NO: 2615332 - DNA, 25 bp, Homo sapien
ccttgggacatgtgcttttggagcc

SEQ ID NO: 2615333 - DNA, 25 bp, Homo sapien
tgatactcctcccacgaaaaggtgg

SEQ ID NO: 2615334 - DNA, 25 bp, Homo sapien
tgatctacactcgaggaactacccg

SEQ ID NO: 2615335 - DNA, 25 bp, Homo sapien
caaggtcagtgaagtgcagtcgtcc

SEQ ID NO: 2615336 - DNA, 25 bp, Homo sapien
gcatcacagctgacaaagtaccgtt

SEQ ID NO: 2615337 - DNA, 25 bp, Homo sapien
agtaccgttgagcttcccctagcca

SEQ ID NO: 2615338 - DNA, 25 bp, Homo sapien
tgcaacagaacgtacagggaggcct

SEQ ID NO: 2615339 - DNA, 25 bp, Homo sapien
tctccgaggatccttttgcctgccg

SEQ ID NO: 2615340 - DNA, 25 bp, Homo sapien
tgtggaaccaacactaatcgaccgt

SEQ ID NO: 2615341 - DNA, 25 bp, Homo sapien
ggaagtgccttaacttgtggaacca

SEQ ID NO: 2615342 - DNA, 25 bp, Homo sapien
tgtgctactgaagggaactgccttt

SEQ ID NO: 2615343 - DNA, 25 bp, Homo sapien
ccaactcgtttgtgatcatcacggc

SEQ ID NO: 2615344 - DNA, 25 bp, Homo sapien
cggccaaccgggtgctgcactgcaa

SEQ ID NO: 2615345 - DNA, 25 bp, Homo sapien
gcaacgccgacacgccggaggagat

SEQ ID NO: 2615346 - DNA, 25 bp, Homo sapien
gccggaggagatgcaccactggata

SEQ ID NO: 2615347 - DNA, 25 bp, Homo sapien
atacagtctttcttagtgtgtattt

SEQ ID NO: 2615348 - DNA, 25 bp, Homo sapien
ttgtaattccccaatgacaggtgat

SEQ ID NO: 2615349 - DNA, 25 bp, Homo sapien
ttaatttgtaattccccaatgacag

SEQ ID NO: 2615350 - DNA, 25 bp, Homo sapien
gcttattagcctatcttctttggtg

SEQ ID NO: 2615351 - DNA, 25 bp, Homo sapien
cagctgatgctgcccctgttgacct

SEQ ID NO: 2615352 - DNA, 25 bp, Homo sapien
ggcttgaacttgacactgccccgtg

SEQ ID NO: 2615353 - DNA, 25 bp, Homo sapien
ttttggcatcccgtaccagctgatg

SEQ ID NO: 2615354 - DNA, 25 bp, Homo sapien
tgccccgtgatgtccctctggtttt

SEQ ID NO: 2615355 - DNA, 25 bp, Homo sapien
gggtaatgtccacgctttcctctct

SEQ ID NO: 2615356 - DNA, 25 bp, Homo sapien
ttgggtaatgtccacgctttcctct

SEQ ID NO: 2615357 - DNA, 25 bp, Homo sapien
taatgtccacgctttcctctctgtc

SEQ ID NO: 2615358 - DNA, 25 bp, Homo sapien
tggggcttcatgccctccacgctgt

SEQ ID NO: 2615359 - DNA, 25 bp, Homo sapien
tgatttttcagaacacgtctgaata

SEQ ID NO: 2615360 - DNA, 25 bp, Homo sapien
cacgtctgaataaaggagctgatga

SEQ ID NO: 2615361 - DNA, 25 bp, Homo sapien
ttaatgaccgatttgggcctccttg

SEQ ID NO: 2615362 - DNA, 25 bp, Homo sapien
aatgaccgatttgggcctccttggc

SEQ ID NO: 2615363 - DNA, 25 bp, Homo sapien
tctatagcaactggcctggatgcaa

SEQ ID NO: 2615364 - DNA, 25 bp, Homo sapien
gttccagcctgtcgctacaaagtag

SEQ ID NO: 2615365 - DNA, 25 bp, Homo sapien
gcaggttgggaatattcaaagactc

SEQ ID NO: 2615366 - DNA, 25 bp, Homo sapien
tggtaaatgtgtagtcgcgtatctg

SEQ ID NO: 2615367 - DNA, 25 bp, Homo sapien
gacctggtcgtgacatcatttgact

SEQ ID NO: 2615368 - DNA, 25 bp, Homo sapien
gcaggttggacctggtcgtgacatc

SEQ ID NO: 2615369 - DNA, 25 bp, Homo sapien
aagtggaagggcaggttggacctgg

SEQ ID NO: 2615370 - DNA, 25 bp, Homo sapien
catcatttgactgggatttccaggc

SEQ ID NO: 2615371 - DNA, 25 bp, Homo sapien
ccgcattgctgcttgcgagagggct

SEQ ID NO: 2615372 - DNA, 25 bp, Homo sapien
cggaaccgcattgctgcttgcgaga

SEQ ID NO: 2615373 - DNA, 25 bp, Homo sapien
ggtccggaaccgcattgctgcttgc

SEQ ID NO: 2615374 - DNA, 25 bp, Homo sapien
tcaggtccggaaccgcattgctgct

SEQ ID NO: 2615375 - DNA, 25 bp, Homo sapien
ttgagtcatatcattgaggagggac

SEQ ID NO: 2615376 - DNA, 25 bp, Homo sapien
gcagtgacatgatcgctgttccctg

SEQ ID NO: 2615377 - DNA, 25 bp, Homo sapien
ttataaaacattgctatgttgcaca

SEQ ID NO: 2615378 - DNA, 25 bp, Homo sapien
tatataatatataggactataggtg

SEQ ID NO: 2615379 - DNA, 25 bp, Homo sapien
aaatcgacctaatgtttgccaaatg

SEQ ID NO: 2615380 - DNA, 25 bp, Homo sapien
ttatacctgttggtgtgaaagtggc

SEQ ID NO: 2615381 - DNA, 25 bp, Homo sapien
ttttgcatgagctggcataatgtgc

SEQ ID NO: 2615382 - DNA, 25 bp, Homo sapien
caaagatccccttgtagatgaccag

SEQ ID NO: 2615383 - DNA, 25 bp, Homo sapien
catttttacttagtgtctgggtaga

SEQ ID NO: 2615384 - DNA, 25 bp, Homo sapien
aggcattggcttattgtcatcattt

SEQ ID NO: 2615385 - DNA, 25 bp, Homo sapien
gggtagacatctggttgtttggcat

SEQ ID NO: 2615386 - DNA, 25 bp, Homo sapien
ggcattggcttattgtcatcatttt

SEQ ID NO: 2615387 - DNA, 25 bp, Homo sapien
gaagggatctgggcttatgactgag

SEQ ID NO: 2615388 - DNA, 25 bp, Homo sapien
gggatctgggcttatgactgagaag

SEQ ID NO: 2615389 - DNA, 25 bp, Homo sapien
atgactgagaagacagggctccaaa

SEQ ID NO: 2615390 - DNA, 25 bp, Homo sapien
aagggatctgggcttatgactgaga

SEQ ID NO: 2615391 - DNA, 25 bp, Homo sapien
tcctcatcacggtgcaccaggaaat

SEQ ID NO: 2615392 - DNA, 25 bp, Homo sapien
catctacccacatgcagttccacgt

SEQ ID NO: 2615393 - DNA, 25 bp, Homo sapien
caggaaatcagccacttcggcatat

SEQ ID NO: 2615394 - DNA, 25 bp, Homo sapien
tgctattgtagacaccaggatttgc

SEQ ID NO: 2615395 - DNA, 25 bp, Homo sapien
tgaggtggagttgatggatgaagat

SEQ ID NO: 2615396 - DNA, 25 bp, Homo sapien
agaaaatgaggtggagttgatggat

SEQ ID NO: 2615397 - DNA, 25 bp, Homo sapien
aatgaggtggagttgatggatgaag

SEQ ID NO: 2615398 - DNA, 25 bp, Homo sapien
aaaatgaggtggagttgatggatga

SEQ ID NO: 2615399 - DNA, 25 bp, Homo sapien
ggctgtataccccttggtgcatgtc

SEQ ID NO: 2615400 - DNA, 25 bp, Homo sapien
gcatgtccgtcatattttcatcagt

SEQ ID NO: 2615401 - DNA, 25 bp, Homo sapien
catgtgtagtcattgagtttttgct

SEQ ID NO: 2615402 - DNA, 25 bp, Homo sapien
tcttgggcacatgtgtagtcattga

SEQ ID NO: 2615403 - DNA, 25 bp, Homo sapien
tgaccactgcaggtggctttgacat

SEQ ID NO: 2615404 - DNA, 25 bp, Homo sapien
tctgttgaagtaggtgagaggctgt

SEQ ID NO: 2615405 - DNA, 25 bp, Homo sapien
ttctgttgaagtaggtgagaggctg

SEQ ID NO: 2615406 - DNA, 25 bp, Homo sapien
ctgttgaagtaggtgagaggctgtc

SEQ ID NO: 2615407 - DNA, 25 bp, Homo sapien
gtagacagtgtggacccgctcttct

SEQ ID NO: 2615408 - DNA, 25 bp, Homo sapien
tagacagtgtggacccgctcttctc

SEQ ID NO: 2615409 - DNA, 25 bp, Homo sapien
agacagtgtggacccgctcttctct

SEQ ID NO: 2615410 - DNA, 25 bp, Homo sapien
gacagtgtggacccgctcttctctc

SEQ ID NO: 2615411 - DNA, 25 bp, Homo sapien
agacgagatcacgaaccttcaggat

SEQ ID NO: 2615412 - DNA, 25 bp, Homo sapien
cttcaggatagtaaggccgtagact

SEQ ID NO: 2615413 - DNA, 25 bp, Homo sapien
gaaccttcaggatagtaaggccgta

SEQ ID NO: 2615414 - DNA, 25 bp, Homo sapien
gatcacgaaccttcaggatagtaag

SEQ ID NO: 2615415 - DNA, 25 bp, Homo sapien
tttggatgttccctgttcgggacat

SEQ ID NO: 2615416 - DNA, 25 bp, Homo sapien
cgggacattatctgcaatggttaag

SEQ ID NO: 2615417 - DNA, 25 bp, Homo sapien
tgtagacttcagcatccactccctg

SEQ ID NO: 2615418 - DNA, 25 bp, Homo sapien
tttggaggtagcaccagcgagtgta

SEQ ID NO: 2615419 - DNA, 25 bp, Homo sapien
gccgtaaaggaatccttattgagca

SEQ ID NO: 2615420 - DNA, 25 bp, Homo sapien
ttcaactgctgctgccgtaaaggaa

SEQ ID NO: 2615421 - DNA, 25 bp, Homo sapien
ggaatccttattgagcagtattgtg

SEQ ID NO: 2615422 - DNA, 25 bp, Homo sapien
actgctgctgccgtaaaggaatcct

SEQ ID NO: 2615423 - DNA, 25 bp, Homo sapien
agagagaattggggcctgaaggaag

SEQ ID NO: 2615424 - DNA, 25 bp, Homo sapien
agagaattggggcctgaaggaaggg

SEQ ID NO: 2615425 - DNA, 25 bp, Homo sapien
gagagaattggggcctgaaggaagg

SEQ ID NO: 2615426 - DNA, 25 bp, Homo sapien
gagagagaattggggcctgaaggaa

SEQ ID NO: 2615427 - DNA, 25 bp, Homo sapien
tacttccagtcgagctacttcctgc

SEQ ID NO: 2615428 - DNA, 25 bp, Homo sapien
taaaacagaacccagtgattggccg

SEQ ID NO: 2615429 - DNA, 25 bp, Homo sapien
gcctttctgatggtataaatctcca

SEQ ID NO: 2615430 - DNA, 25 bp, Homo sapien
gagaaatcccactgataaagcagct

SEQ ID NO: 2615431 - DNA, 25 bp, Homo sapien
gaaattgccgtttctagaggccata

SEQ ID NO: 2615432 - DNA, 25 bp, Homo sapien
ggcaaagcgtatccctaaaatagtc

SEQ ID NO: 2615433 - DNA, 25 bp, Homo sapien
ttccgcagtccagttgagaggcaaa

SEQ ID NO: 2615434 - DNA, 25 bp, Homo sapien
cctaatagcaagttaatggccctcc

SEQ ID NO: 2615435 - DNA, 25 bp, Homo sapien
tttctctcaagaggaaagaaacagg

SEQ ID NO: 2615436 - DNA, 25 bp, Homo sapien
tttttctctcaagaggaaagaaaca

SEQ ID NO: 2615437 - DNA, 25 bp, Homo sapien
agaggaaagaaacaggaggtcattt

SEQ ID NO: 2615438 - DNA, 25 bp, Homo sapien
aggaaagaaacaggaggtcatttgc

SEQ ID NO: 2615439 - DNA, 25 bp, Homo sapien
tcttcatcataaagtggagacatct

SEQ ID NO: 2615440 - DNA, 25 bp, Homo sapien
ttcatcataaagtggagacatctta

SEQ ID NO: 2615441 - DNA, 25 bp, Homo sapien
tcatcataaagtggagacatcttac

SEQ ID NO: 2615442 - DNA, 25 bp, Homo sapien
cttcatcataaagtggagacatctt

SEQ ID NO: 2615443 - DNA, 25 bp, Homo sapien
tgcattccaggcttctcacgcaaag

SEQ ID NO: 2615444 - DNA, 25 bp, Homo sapien
gggtgcgcaggagcacggtcccact

SEQ ID NO: 2615445 - DNA, 25 bp, Homo sapien
actctttccttgtatgtggagcccg

SEQ ID NO: 2615446 - DNA, 25 bp, Homo sapien
aaagccagctgctgtgccaaggcag

SEQ ID NO: 2615447 - DNA, 25 bp, Homo sapien
cacttcaggtcccctgctgagggtg

SEQ ID NO: 2615448 - DNA, 25 bp, Homo sapien
gtctctgcaggggagaagtcttaga

SEQ ID NO: 2615449 - DNA, 25 bp, Homo sapien
acttcaggtcccctgctgagggtgg

SEQ ID NO: 2615450 - DNA, 25 bp, Homo sapien
gtcttagatttcaccttccccttca

SEQ ID NO: 2615451 - DNA, 25 bp, Homo sapien
tggtcagggtggagctttgacttgc

SEQ ID NO: 2615452 - DNA, 25 bp, Homo sapien
ttggtcagggtggagctttgacttg

SEQ ID NO: 2615453 - DNA, 25 bp, Homo sapien
ggtcagggtggagctttgacttgcc

SEQ ID NO: 2615454 - DNA, 25 bp, Homo sapien
gttggtcagggtggagctttgactt

SEQ ID NO: 2615455 - DNA, 25 bp, Homo sapien
gattagctctctgatgggcacggga

SEQ ID NO: 2615456 - DNA, 25 bp, Homo sapien
acgggacagttgttcttgcggttgc

SEQ ID NO: 2615457 - DNA, 25 bp, Homo sapien
aaattatgtcggaattctgaagcac

SEQ ID NO: 2615458 - DNA, 25 bp, Homo sapien
tctgaagcacaatgtcaggaacaca

SEQ ID NO: 2615459 - DNA, 25 bp, Homo sapien
aaagctgctattcctagtggtgaca

SEQ ID NO: 2615460 - DNA, 25 bp, Homo sapien
gaaggaatgtgggtgctattcgatc

SEQ ID NO: 2615461 - DNA, 25 bp, Homo sapien
ttcatgttatcctctggatgaaagc

SEQ ID NO: 2615462 - DNA, 25 bp, Homo sapien
ccttcccatccggtgcactagagag

SEQ ID NO: 2615463 - DNA, 25 bp, Homo sapien
gagccagtaggaactaggaggaact

SEQ ID NO: 2615464 - DNA, 25 bp, Homo sapien
ttctggtctagatggggcgtgtcat

SEQ ID NO: 2615465 - DNA, 25 bp, Homo sapien
tccttccttggcttcgggcctcaga

SEQ ID NO: 2615466 - DNA, 25 bp, Homo sapien
cattggtcctcaggaggtgagaggc

SEQ ID NO: 2615467 - DNA, 25 bp, Homo sapien
tgctcactgcaacctctgcctcctg

SEQ ID NO: 2615468 - DNA, 25 bp, Homo sapien
gagcgcagtgctgcgatctctgctc

SEQ ID NO: 2615469 - DNA, 25 bp, Homo sapien
ggagcgcagtgctgcgatctctgct

SEQ ID NO: 2615470 - DNA, 25 bp, Homo sapien
gacaaatacgctcttctggcaaagt

SEQ ID NO: 2615471 - DNA, 25 bp, Homo sapien
ctgggatggagagtagaaccagcac

SEQ ID NO: 2615472 - DNA, 25 bp, Homo sapien
ggagtttatactgaagttcaccagg

SEQ ID NO: 2615473 - DNA, 25 bp, Homo sapien
gtaatgtatgtgaatgccgaagcca

SEQ ID NO: 2615474 - DNA, 25 bp, Homo sapien
tccatatctccaaactggggaagat

SEQ ID NO: 2615475 - DNA, 25 bp, Homo sapien
gtctccatatctccaaactggggaa

SEQ ID NO: 2615476 - DNA, 25 bp, Homo sapien
ccttgtctccatatctccaaactgg

SEQ ID NO: 2615477 - DNA, 25 bp, Homo sapien
caaactggggaagattgatgagcat

SEQ ID NO: 2615478 - DNA, 25 bp, Homo sapien
tggtagaccttgagcccttctgtgt

SEQ ID NO: 2615479 - DNA, 25 bp, Homo sapien
catggccaccaattagtgtgagtcc

SEQ ID NO: 2615480 - DNA, 25 bp, Homo sapien
cagtgtgtacatgaataacagtgac

SEQ ID NO: 2615481 - DNA, 25 bp, Homo sapien
acagtgactaccacatggccaccaa

SEQ ID NO: 2615482 - DNA, 25 bp, Homo sapien
ttggctggtttcttcagagtcaagt

SEQ ID NO: 2615483 - DNA, 25 bp, Homo sapien
gacccacagttccaatattggctgg

SEQ ID NO: 2615484 - DNA, 25 bp, Homo sapien
aagtcaagccctgctgtattttcag

SEQ ID NO: 2615485 - DNA, 25 bp, Homo sapien
ttgactcagaataaggttaaacctg

SEQ ID NO: 2615486 - DNA, 25 bp, Homo sapien
agggaggcagcttggatagttctgg

SEQ ID NO: 2615487 - DNA, 25 bp, Homo sapien
agagcattagcagcgaaacagatgt

SEQ ID NO: 2615488 - DNA, 25 bp, Homo sapien
cagagcattagcagcgaaacagatg

SEQ ID NO: 2615489 - DNA, 25 bp, Homo sapien
gaggcagcttggatagttctggcag

SEQ ID NO: 2615490 - DNA, 25 bp, Homo sapien
tggtagttgcctttaagtatttgtc

SEQ ID NO: 2615491 - DNA, 25 bp, Homo sapien
gcctgggtaacatacagagatgtca

SEQ ID NO: 2615492 - DNA, 25 bp, Homo sapien
cctgggtaacatacagagatgtcat

SEQ ID NO: 2615493 - DNA, 25 bp, Homo sapien
cttcatgaggtttccacccaactga

SEQ ID NO: 2615494 - DNA, 25 bp, Homo sapien
catgaggtttccacccaactgattt

SEQ ID NO: 2615495 - DNA, 25 bp, Homo sapien
ctttcaaaccttagctcgtccttca

SEQ ID NO: 2615496 - DNA, 25 bp, Homo sapien
aaaccttagctcgtccttcatgagg

SEQ ID NO: 2615497 - DNA, 25 bp, Homo sapien
tgggttataacagtctctctcccag

SEQ ID NO: 2615498 - DNA, 25 bp, Homo sapien
ctgggttataacagtctctctccca

SEQ ID NO: 2615499 - DNA, 25 bp, Homo sapien
ggttataacagtctctctcccagca

SEQ ID NO: 2615500 - DNA, 25 bp, Homo sapien
gggttataacagtctctctcccagc

SEQ ID NO: 2615501 - DNA, 25 bp, Homo sapien
gacagctgtggatgtcgatgccaca

SEQ ID NO: 2615502 - DNA, 25 bp, Homo sapien
tccaagtggtcacagaattgtcagc

SEQ ID NO: 2615503 - DNA, 25 bp, Homo sapien
gatgccacatagtccaagtggtcac

SEQ ID NO: 2615504 - DNA, 25 bp, Homo sapien
aggacagggccagcaaccgacagct

SEQ ID NO: 2615505 - DNA, 25 bp, Homo sapien
ctggatttgattgcgctgtgatgac

SEQ ID NO: 2615506 - DNA, 25 bp, Homo sapien
tggatttgattgcgctgtgatgact

SEQ ID NO: 2615507 - DNA, 25 bp, Homo sapien
gatttgattgcgctgtgatgacttg

SEQ ID NO: 2615508 - DNA, 25 bp, Homo sapien
atttgattgcgctgtgatgacttgg

SEQ ID NO: 2615509 - DNA, 25 bp, Homo sapien
agcagagtatccacaggatatggag

SEQ ID NO: 2615510 - DNA, 25 bp, Homo sapien
gagtatccacaggatatggagtcat

SEQ ID NO: 2615511 - DNA, 25 bp, Homo sapien
cactagctctgaacaagggttggca

SEQ ID NO: 2615512 - DNA, 25 bp, Homo sapien
ctcattggctcccacccacattgtg

SEQ ID NO: 2615513 - DNA, 25 bp, Homo sapien
cagtaggaaagttctgtgatgagac

SEQ ID NO: 2615514 - DNA, 25 bp, Homo sapien
gactttttaccccagataacagcca

SEQ ID NO: 2615515 - DNA, 25 bp, Homo sapien
gagactgtgatgcttgatggtcaac

SEQ ID NO: 2615516 - DNA, 25 bp, Homo sapien
tcagcttgttggcttttaccccaga

SEQ ID NO: 2615517 - DNA, 25 bp, Homo sapien
tgtacgaggtacactgggagcacag

SEQ ID NO: 2615518 - DNA, 25 bp, Homo sapien
tgacattacgagatgagcaaggact

SEQ ID NO: 2615519 - DNA, 25 bp, Homo sapien
tgtacaaaacaagcagtcactgacc

SEQ ID NO: 2615520 - DNA, 25 bp, Homo sapien
caaaggtctagggaggatgtccagt

SEQ ID NO: 2615521 - DNA, 25 bp, Homo sapien
ccagcagtgattgtcccgatccatg

SEQ ID NO: 2615522 - DNA, 25 bp, Homo sapien
gatttacttgagagatcctcactgc

SEQ ID NO: 2615523 - DNA, 25 bp, Homo sapien
gaagaaatgaaggagcctccactcc

SEQ ID NO: 2615524 - DNA, 25 bp, Homo sapien
atccatgcgtggcaggaaacagtcc

SEQ ID NO: 2615525 - DNA, 25 bp, Homo sapien
tgtttcaatgtaatagagctgctgc

SEQ ID NO: 2615526 - DNA, 25 bp, Homo sapien
gtttcaatgtaatagagctgctgca

SEQ ID NO: 2615527 - DNA, 25 bp, Homo sapien
tttcacaccacacgacagtatgcag

SEQ ID NO: 2615528 - DNA, 25 bp, Homo sapien
ttgtcacaagatcgttcccaaagca

SEQ ID NO: 2615529 - DNA, 25 bp, Homo sapien
caccacacgacagtatgcaggacag

SEQ ID NO: 2615530 - DNA, 25 bp, Homo sapien
ttatcatcccctcattgtcacaaga

SEQ ID NO: 2615531 - DNA, 25 bp, Homo sapien
ggtgagacatgtcagcggaaaataa

SEQ ID NO: 2615532 - DNA, 25 bp, Homo sapien
gaagagtttttcagcctggcgtggt

SEQ ID NO: 2615533 - DNA, 25 bp, Homo sapien
gaggcttgagtctacccgttactca

SEQ ID NO: 2615534 - DNA, 25 bp, Homo sapien
tgtgaacacctgcagtggttggtcc

SEQ ID NO: 2615535 - DNA, 25 bp, Homo sapien
agctcgctgacttgggcatcctctg

SEQ ID NO: 2615536 - DNA, 25 bp, Homo sapien
gggatcaccatagagagccctcggt

SEQ ID NO: 2615537 - DNA, 25 bp, Homo sapien
tggctctacacgtccctgggacagg

SEQ ID NO: 2615538 - DNA, 25 bp, Homo sapien
cagaatgatgggaaagataaggcac

SEQ ID NO: 2615539 - DNA, 25 bp, Homo sapien
ttccattctgagaaagagccacttc

SEQ ID NO: 2615540 - DNA, 25 bp, Homo sapien
cattccattctgagaaagagccact

SEQ ID NO: 2615541 - DNA, 25 bp, Homo sapien
atgttctaattctccagtaaccaca

SEQ ID NO: 2615542 - DNA, 25 bp, Homo sapien
catgttctaattctccagtaaccac

SEQ ID NO: 2615543 - DNA, 25 bp, Homo sapien
gtgaggtgaggactttcacctgaac

SEQ ID NO: 2615544 - DNA, 25 bp, Homo sapien
aagtgaggtgaggactttcacctga

SEQ ID NO: 2615545 - DNA, 25 bp, Homo sapien
agtgaggtgaggactttcacctgaa

SEQ ID NO: 2615546 - DNA, 25 bp, Homo sapien
gaagtgaggtgaggactttcacctg

SEQ ID NO: 2615547 - DNA, 25 bp, Homo sapien
ctttcagaaccctccaaagctgggc

SEQ ID NO: 2615548 - DNA, 25 bp, Homo sapien
caaggagctttcagaaccctccaaa

SEQ ID NO: 2615549 - DNA, 25 bp, Homo sapien
aaagctgggccccacgtaagacaat

SEQ ID NO: 2615550 - DNA, 25 bp, Homo sapien
tgggccccacgtaagacaatcctgg

SEQ ID NO: 2615551 - DNA, 25 bp, Homo sapien
tattgtcctgtttcgcagtacacgt

SEQ ID NO: 2615552 - DNA, 25 bp, Homo sapien
tgtcctgtttcgcagtacacgtggc

SEQ ID NO: 2615553 - DNA, 25 bp, Homo sapien
tgtattgtcctgtttcgcagtacac

SEQ ID NO: 2615554 - DNA, 25 bp, Homo sapien
gtcctgtttcgcagtacacgtggct

SEQ ID NO: 2615555 - DNA, 25 bp, Homo sapien
ccacagactccacccattcagataa

SEQ ID NO: 2615556 - DNA, 25 bp, Homo sapien
acagactccacccattcagataatt

SEQ ID NO: 2615557 - DNA, 25 bp, Homo sapien
cacagactccacccattcagataat

SEQ ID NO: 2615558 - DNA, 25 bp, Homo sapien
gccaaactccacgagcttttcattc

SEQ ID NO: 2615559 - DNA, 25 bp, Homo sapien
tggttgttcttcccgccaaactcca

SEQ ID NO: 2615560 - DNA, 25 bp, Homo sapien
tgttcttcccgccaaactccacgag

SEQ ID NO: 2615561 - DNA, 25 bp, Homo sapien
tcccgccaaactccacgagcttttc

SEQ ID NO: 2615562 - DNA, 25 bp, Homo sapien
tatccgggttccagctcagcatctt

SEQ ID NO: 2615563 - DNA, 25 bp, Homo sapien
ccgggttccagctcagcatcttcac

SEQ ID NO: 2615564 - DNA, 25 bp, Homo sapien
ttatccgggttccagctcagcatct

SEQ ID NO: 2615565 - DNA, 25 bp, Homo sapien
tccgggttccagctcagcatcttca

SEQ ID NO: 2615566 - DNA, 25 bp, Homo sapien
gtattctcgtgggaccgcagaagga

SEQ ID NO: 2615567 - DNA, 25 bp, Homo sapien
ctcttaagtattctcgtgggaccgc

SEQ ID NO: 2615568 - DNA, 25 bp, Homo sapien
cgcagaaggatgtagggtaggatca

SEQ ID NO: 2615569 - DNA, 25 bp, Homo sapien
taagtattctcgtgggaccgcagaa

SEQ ID NO: 2615570 - DNA, 25 bp, Homo sapien
cttgcatgagatccaagaatcctcc

SEQ ID NO: 2615571 - DNA, 25 bp, Homo sapien
catgagatccaagaatcctcccttg

SEQ ID NO: 2615572 - DNA, 25 bp, Homo sapien
tgcatgagatccaagaatcctccct

SEQ ID NO: 2615573 - DNA, 25 bp, Homo sapien
agaatcctcccttggggtctggatt

SEQ ID NO: 2615574 - DNA, 25 bp, Homo sapien
cctttggaacttttatttgcggcat

SEQ ID NO: 2615575 - DNA, 25 bp, Homo sapien
aagccagttgacgcctttggaactt

SEQ ID NO: 2615576 - DNA, 25 bp, Homo sapien
ctggctgtgtttggatcgctttcat

SEQ ID NO: 2615577 - DNA, 25 bp, Homo sapien
ttgcggcattttggcgccctctggc

SEQ ID NO: 2615578 - DNA, 25 bp, Homo sapien
catcgttgacaacggtagctctttg

SEQ ID NO: 2615579 - DNA, 25 bp, Homo sapien
taacgtgacatcgttgacaacggta

SEQ ID NO: 2615580 - DNA, 25 bp, Homo sapien
aataacgtaacgtgacatcgttgac

SEQ ID NO: 2615581 - DNA, 25 bp, Homo sapien
acaacggtagctctttgattacaca

SEQ ID NO: 2615582 - DNA, 25 bp, Homo sapien
gggtaggaagatgcgttcactttgc

SEQ ID NO: 2615583 - DNA, 25 bp, Homo sapien
ccaccggggtaggaagatgcgttca

SEQ ID NO: 2615584 - DNA, 25 bp, Homo sapien
ccggggtaggaagatgcgttcactt

SEQ ID NO: 2615585 - DNA, 25 bp, Homo sapien
aggaagatgcgttcactttgcttac

SEQ ID NO: 2615586 - DNA, 25 bp, Homo sapien
acgctgctgcttgcgagcgctcgag

SEQ ID NO: 2615587 - DNA, 25 bp, Homo sapien
tttaatggaggccaccaatattgag

SEQ ID NO: 2615588 - DNA, 25 bp, Homo sapien
gtgctttaatggaggccaccaatat

SEQ ID NO: 2615589 - DNA, 25 bp, Homo sapien
aaagctagggccaaccgcggcttgt

SEQ ID NO: 2615590 - DNA, 25 bp, Homo sapien
ggtccagctggtggggcgagagacg

SEQ ID NO: 2615591 - DNA, 25 bp, Homo sapien
gggaggcgcggtcgccgaggtccag

SEQ ID NO: 2615592 - DNA, 25 bp, Homo sapien
cagccccgaaggctgcagcttcggg

SEQ ID NO: 2615593 - DNA, 25 bp, Homo sapien
agacgtcgcccctcggaggatgctc

SEQ ID NO: 2615594 - DNA, 25 bp, Homo sapien
cgcgtctgggctgcgccgctgcaaa

SEQ ID NO: 2615595 - DNA, 25 bp, Homo sapien
gctgcaaacgagttgcgcaccttgg

SEQ ID NO: 2615596 - DNA, 25 bp, Homo sapien
gctgcgccgctgcaaacgagttgcg

SEQ ID NO: 2615597 - DNA, 25 bp, Homo sapien
gttgcgcaccttgggcggctccgca

SEQ ID NO: 2615598 - DNA, 25 bp, Homo sapien
agttagcgcggtgccgccgagaggc

SEQ ID NO: 2615599 - DNA, 25 bp, Homo sapien
tcgctggcgtcgtctggctggtgcc

SEQ ID NO: 2615600 - DNA, 25 bp, Homo sapien
gctctctcccggctcgacggcggag

SEQ ID NO: 2615601 - DNA, 25 bp, Homo sapien
gcgaggagccagttggagcgctgcc

SEQ ID NO: 2615602 - DNA, 25 bp, Homo sapien
tgcgacggagccctcacagagggac

SEQ ID NO: 2615603 - DNA, 25 bp, Homo sapien
gggtttcgcattcggcaattcctcc

SEQ ID NO: 2615604 - DNA, 25 bp, Homo sapien
tccccgggactcaacgcactgaggg

SEQ ID NO: 2615605 - DNA, 25 bp, Homo sapien
taagggctccgatgacggaagcgct

SEQ ID NO: 2615606 - DNA, 25 bp, Homo sapien
tgcttctgagtgcacgtcgccgtgt

SEQ ID NO: 2615607 - DNA, 25 bp, Homo sapien
ggcgcctggcgcattcttggaacca

SEQ ID NO: 2615608 - DNA, 25 bp, Homo sapien
gcaattccgccactgacgaggctgg

SEQ ID NO: 2615609 - DNA, 25 bp, Homo sapien
cgtgtgaacctcgtattccttggcc

SEQ ID NO: 2615610 - DNA, 25 bp, Homo sapien
gcctggccaagcgttcgatgaatat

SEQ ID NO: 2615611 - DNA, 25 bp, Homo sapien
caagggctgtccaccgagttcgttt

SEQ ID NO: 2615612 - DNA, 25 bp, Homo sapien
ggacgcagataaggagcctggccaa

SEQ ID NO: 2615613 - DNA, 25 bp, Homo sapien
cattgtgcgtgcgatcggatccagg

SEQ ID NO: 2615614 - DNA, 25 bp, Homo sapien
ctgtgctaatttcagcagagtgaga

SEQ ID NO: 2615615 - DNA, 25 bp, Homo sapien
cagaggtgttgtcaacctgtacaag

SEQ ID NO: 2615616 - DNA, 25 bp, Homo sapien
aatgcacccatgtgtgctgtgctaa

SEQ ID NO: 2615617 - DNA, 25 bp, Homo sapien
cctgtacaaggtcctaaaaaatgca

SEQ ID NO: 2615618 - DNA, 25 bp, Homo sapien
gaggcaacgcccactgacagttttg

SEQ ID NO: 2615619 - DNA, 25 bp, Homo sapien
tggaggcaacgcccactgacagttt

SEQ ID NO: 2615620 - DNA, 25 bp, Homo sapien
ggaggcaacgcccactgacagtttt

SEQ ID NO: 2615621 - DNA, 25 bp, Homo sapien
aggcaacgcccactgacagttttga

SEQ ID NO: 2615622 - DNA, 25 bp, Homo sapien
gaaacaatgagttcggagtccagag

SEQ ID NO: 2615623 - DNA, 25 bp, Homo sapien
tgttcgaataaacgccaagatgtct

SEQ ID NO: 2615624 - DNA, 25 bp, Homo sapien
cagaaagggttaggatcccgacaag

SEQ ID NO: 2615625 - DNA, 25 bp, Homo sapien
agatgtcttaattttccccaggtgg

SEQ ID NO: 2615626 - DNA, 25 bp, Homo sapien
tttgtacgtgtgtcccaatctgcca

SEQ ID NO: 2615627 - DNA, 25 bp, Homo sapien
gagattcctggctagctcactgaag

SEQ ID NO: 2615628 - DNA, 25 bp, Homo sapien
cgtatgcttagccaatgcggatcaa

SEQ ID NO: 2615629 - DNA, 25 bp, Homo sapien
gaatcccgctttagtcgtatgctta

SEQ ID NO: 2615630 - DNA, 25 bp, Homo sapien
cacccacacttgttgagaatgcccc

SEQ ID NO: 2615631 - DNA, 25 bp, Homo sapien
ccacacccacacttgttgagaatgc

SEQ ID NO: 2615632 - DNA, 25 bp, Homo sapien
cacacccacacttgttgagaatgcc

SEQ ID NO: 2615633 - DNA, 25 bp, Homo sapien
acacccacacttgttgagaatgccc

SEQ ID NO: 2615634 - DNA, 25 bp, Homo sapien
aaatgcattcagttaagttgttcaa

SEQ ID NO: 2615635 - DNA, 25 bp, Homo sapien
gattgatccaaagcagaccaaaagc

SEQ ID NO: 2615636 - DNA, 25 bp, Homo sapien
ctgatgttcgcagcttcacaaaggc

SEQ ID NO: 2615637 - DNA, 25 bp, Homo sapien
gttgttcaataatgattgatccaaa

SEQ ID NO: 2615638 - DNA, 25 bp, Homo sapien
cctgaagtcgagaaatggtagactc

SEQ ID NO: 2615639 - DNA, 25 bp, Homo sapien
ggtagactctaaacatctaccaatc

SEQ ID NO: 2615640 - DNA, 25 bp, Homo sapien
gtgtatatcttgctcatccaatcca

SEQ ID NO: 2615641 - DNA, 25 bp, Homo sapien
cagttgaagtatgatgtgtgcctac

SEQ ID NO: 2615642 - DNA, 25 bp, Homo sapien
acctttctttacaatacctccatca

SEQ ID NO: 2615643 - DNA, 25 bp, Homo sapien
ctttctttacaatacctccatcaag

SEQ ID NO: 2615644 - DNA, 25 bp, Homo sapien
tttacaatacctccatcaagaattc

SEQ ID NO: 2615645 - DNA, 25 bp, Homo sapien
tctttacaatacctccatcaagaat

SEQ ID NO: 2615646 - DNA, 25 bp, Homo sapien
tagcagccatgttcatctctatatg

SEQ ID NO: 2615647 - DNA, 25 bp, Homo sapien
gccatgttcatctctatatggttcc

SEQ ID NO: 2615648 - DNA, 25 bp, Homo sapien
atttgcactgtcattcttgcatagc

SEQ ID NO: 2615649 - DNA, 25 bp, Homo sapien
tcattcttgcatagcagccatgttc

SEQ ID NO: 2615650 - DNA, 25 bp, Homo sapien
gctcttggttggagcttctgttttg

SEQ ID NO: 2615651 - DNA, 25 bp, Homo sapien
gacacagtgcagttcagtatctcgg

SEQ ID NO: 2615652 - DNA, 25 bp, Homo sapien
aaagccctgagtttgcgtgccagct

SEQ ID NO: 2615653 - DNA, 25 bp, Homo sapien
tgggacactcgcattttgtagagac

SEQ ID NO: 2615654 - DNA, 25 bp, Homo sapien
gtatctcggttgagagttccttcct

SEQ ID NO: 2615655 - DNA, 25 bp, Homo sapien
catattaaattgctgaggtaagagt

SEQ ID NO: 2615656 - DNA, 25 bp, Homo sapien
tggtattgatagatttggtctcctg

SEQ ID NO: 2615657 - DNA, 25 bp, Homo sapien
ggcatttagatttagcatttgtaag

SEQ ID NO: 2615658 - DNA, 25 bp, Homo sapien
tatttgacagccactacagggaaaa

SEQ ID NO: 2615659 - DNA, 25 bp, Homo sapien
tagtaatgccctactgtcccctagt

SEQ ID NO: 2615660 - DNA, 25 bp, Homo sapien
tatccacgcgttggtattattcgac

SEQ ID NO: 2615661 - DNA, 25 bp, Homo sapien
tgtcctttaaagaggccaagcccat

SEQ ID NO: 2615662 - DNA, 25 bp, Homo sapien
tctagaaaacatctaaccgtggtgt

SEQ ID NO: 2615663 - DNA, 25 bp, Homo sapien
aagaagcctgcatctagtcacagag

SEQ ID NO: 2615664 - DNA, 25 bp, Homo sapien
aaggcagggtgattctcaatggtca

SEQ ID NO: 2615665 - DNA, 25 bp, Homo sapien
gagccactgcaacggccaaatgact

SEQ ID NO: 2615666 - DNA, 25 bp, Homo sapien
aatggtcactgccaaagcgttcaga

SEQ ID NO: 2615667 - DNA, 25 bp, Homo sapien
gaagcgccagcacacggacacgaac

SEQ ID NO: 2615668 - DNA, 25 bp, Homo sapien
ccagcacacggacacgaacacactt

SEQ ID NO: 2615669 - DNA, 25 bp, Homo sapien
aagcgccagcacacggacacgaaca

SEQ ID NO: 2615670 - DNA, 25 bp, Homo sapien
gcacacggacacgaacacacttcat

SEQ ID NO: 2615671 - DNA, 25 bp, Homo sapien
gacaggcccaccatcaatgcaaggc

SEQ ID NO: 2615672 - DNA, 25 bp, Homo sapien
cagaaggccctgaatgttgcaatcc

SEQ ID NO: 2615673 - DNA, 25 bp, Homo sapien
gtagggatctaccacgcagaaggcc

SEQ ID NO: 2615674 - DNA, 25 bp, Homo sapien
gataaaaatcctgacttgctgctac

SEQ ID NO: 2615675 - DNA, 25 bp, Homo sapien
ctgaaatcgtctgtccaatgtggga

SEQ ID NO: 2615676 - DNA, 25 bp, Homo sapien
tcctttggtgtcaactgaaatcgtc

SEQ ID NO: 2615677 - DNA, 25 bp, Homo sapien
ctcttgcaataaggatatccaacat

SEQ ID NO: 2615678 - DNA, 25 bp, Homo sapien
caatgtgggatctcttgcaataagg

SEQ ID NO: 2615679 - DNA, 25 bp, Homo sapien
caagagtggtgagtgatgtgttaca

SEQ ID NO: 2615680 - DNA, 25 bp, Homo sapien
cctgtaacaccgtcaagagtggtga

SEQ ID NO: 2615681 - DNA, 25 bp, Homo sapien
tccaacgtggggcaagaggtttcaa

SEQ ID NO: 2615682 - DNA, 25 bp, Homo sapien
gcaacacttcctgatcgacaccagg

SEQ ID NO: 2615683 - DNA, 25 bp, Homo sapien
catttgtggactgttgaaccttcat

SEQ ID NO: 2615684 - DNA, 25 bp, Homo sapien
gaaagcaggcaaatcagagggaggc

SEQ ID NO: 2615685 - DNA, 25 bp, Homo sapien
tggaaagcaggcaaatcagagggag

SEQ ID NO: 2615686 - DNA, 25 bp, Homo sapien
ggaaagcaggcaaatcagagggagg

SEQ ID NO: 2615687 - DNA, 25 bp, Homo sapien
ctggaaagcaggcaaatcagaggga

SEQ ID NO: 2615688 - DNA, 25 bp, Homo sapien
agaagagagtgtgccattcgagcac

SEQ ID NO: 2615689 - DNA, 25 bp, Homo sapien
gccattcgagcactgtgagttgatc

SEQ ID NO: 2615690 - DNA, 25 bp, Homo sapien
aagagagtgtgccattcgagcactg

SEQ ID NO: 2615691 - DNA, 25 bp, Homo sapien
gagtgtgccattcgagcactgtgag

SEQ ID NO: 2615692 - DNA, 25 bp, Homo sapien
aatctctacttcttcgctctgaata

SEQ ID NO: 2615693 - DNA, 25 bp, Homo sapien
tagaacgagtattggagtgatcaga

SEQ ID NO: 2615694 - DNA, 25 bp, Homo sapien
tccattcctcccaattagaacgagt

SEQ ID NO: 2615695 - DNA, 25 bp, Homo sapien
cagttatctgttgtcaccatattgt

SEQ ID NO: 2615696 - DNA, 25 bp, Homo sapien
gtcgttcacattgtagcccttcttc

SEQ ID NO: 2615697 - DNA, 25 bp, Homo sapien
tcttcttgctgagcttgcctcccat

SEQ ID NO: 2615698 - DNA, 25 bp, Homo sapien
gcgccctcggccttcttgtctttct

SEQ ID NO: 2615699 - DNA, 25 bp, Homo sapien
ctccttggctttctcgtcgttcaca

SEQ ID NO: 2615700 - DNA, 25 bp, Homo sapien
agctgcgggcgcctcagtctttttg

SEQ ID NO: 2615701 - DNA, 25 bp, Homo sapien
tgcgggcgcctcagtctttttgggt

SEQ ID NO: 2615702 - DNA, 25 bp, Homo sapien
cggcgtcctggtcgggcttctcctt

SEQ ID NO: 2615703 - DNA, 25 bp, Homo sapien
tctgccgcgccctccgtcttctcgg

SEQ ID NO: 2615704 - DNA, 25 bp, Homo sapien
gcctccgagctgccgggttttgagt

SEQ ID NO: 2615705 - DNA, 25 bp, Homo sapien
agcctccgagctgccgggttttgag

SEQ ID NO: 2615706 - DNA, 25 bp, Homo sapien
cagcctccgagctgccgggttttga

SEQ ID NO: 2615707 - DNA, 25 bp, Homo sapien
ttacggtttggtcggaattagctgc

SEQ ID NO: 2615708 - DNA, 25 bp, Homo sapien
cggtttggtcggaattagctgccgg

SEQ ID NO: 2615709 - DNA, 25 bp, Homo sapien
gggtgtggaactaggcgcttccgtg

SEQ ID NO: 2615710 - DNA, 25 bp, Homo sapien
ggtgtggaactaggcgcttccgtgg

SEQ ID NO: 2615711 - DNA, 25 bp, Homo sapien
ccatgtggacaagctaagtgggctc

SEQ ID NO: 2615712 - DNA, 25 bp, Homo sapien
gatgtactgcactttcagacgcgga

SEQ ID NO: 2615713 - DNA, 25 bp, Homo sapien
tattcaactctcagcggtggaggag

SEQ ID NO: 2615714 - DNA, 25 bp, Homo sapien
catgtggcggcagtttcaggtacaa

SEQ ID NO: 2615715 - DNA, 25 bp, Homo sapien
accattaaatgggaccttgcctcag

SEQ ID NO: 2615716 - DNA, 25 bp, Homo sapien
cgaaatccggtcaccataaaggccg

SEQ ID NO: 2615717 - DNA, 25 bp, Homo sapien
tggaagagacatcccatcagtctgt

SEQ ID NO: 2615718 - DNA, 25 bp, Homo sapien
taaaacccatccaagtcactagtgg

SEQ ID NO: 2615719 - DNA, 25 bp, Homo sapien
ctttagccattaggcccagggctcg

SEQ ID NO: 2615720 - DNA, 25 bp, Homo sapien
gggactgcggaaatcgaatcttcat

SEQ ID NO: 2615721 - DNA, 25 bp, Homo sapien
cacgggactgcggaaatcgaatctt

SEQ ID NO: 2615722 - DNA, 25 bp, Homo sapien
agccattaggcccagggctcgccat

SEQ ID NO: 2615723 - DNA, 25 bp, Homo sapien
tcaaggaacaacacggagtcgttat

SEQ ID NO: 2615724 - DNA, 25 bp, Homo sapien
ctcaaggaacaacacggagtcgtta

SEQ ID NO: 2615725 - DNA, 25 bp, Homo sapien
gtatgctcctttcgggccctgctgg

SEQ ID NO: 2615726 - DNA, 25 bp, Homo sapien
ggttttcaggcatctatcgtgtcta

SEQ ID NO: 2615727 - DNA, 25 bp, Homo sapien
tgtctagaaactatcgccccagaac

SEQ ID NO: 2615728 - DNA, 25 bp, Homo sapien
cttgtctgctgatggggtgctcacg

SEQ ID NO: 2615729 - DNA, 25 bp, Homo sapien
cgggttgaagcttcctaatctagaa

SEQ ID NO: 2615730 - DNA, 25 bp, Homo sapien
ctagaagactgagaagatctcagtg

SEQ ID NO: 2615731 - DNA, 25 bp, Homo sapien
cagcctctgcagagaatttgggaaa

SEQ ID NO: 2615732 - DNA, 25 bp, Homo sapien
tgggcttctgtcactggcaacgggt

SEQ ID NO: 2615733 - DNA, 25 bp, Homo sapien
gtgagggcgaatcagagctagcgat

SEQ ID NO: 2615734 - DNA, 25 bp, Homo sapien
agggcgaatcagagctagcgatgaa

SEQ ID NO: 2615735 - DNA, 25 bp, Homo sapien
gaatcagagctagcgatgaaggaga

SEQ ID NO: 2615736 - DNA, 25 bp, Homo sapien
tagtgagggagtgtgagggcgaatc

SEQ ID NO: 2615737 - DNA, 25 bp, Homo sapien
gggtggggagcattccactgccagg

SEQ ID NO: 2615738 - DNA, 25 bp, Homo sapien
gagaagtcaggcgcaccaggagtat

SEQ ID NO: 2615739 - DNA, 25 bp, Homo sapien
aagtcaggcgcaccaggagtatggc

SEQ ID NO: 2615740 - DNA, 25 bp, Homo sapien
ctgagaagtcaggcgcaccaggagt

SEQ ID NO: 2615741 - DNA, 25 bp, Homo sapien
agaagtcaggcgcaccaggagtatg

SEQ ID NO: 2615742 - DNA, 25 bp, Homo sapien
gctgtgtgctgtaatggggcctgca

SEQ ID NO: 2615743 - DNA, 25 bp, Homo sapien
ggctgtgtgctgtaatggggcctgc

SEQ ID NO: 2615744 - DNA, 25 bp, Homo sapien
tgtgtgctgtaatggggcctgcagg

SEQ ID NO: 2615745 - DNA, 25 bp, Homo sapien
gcaggcatgcttgctcagcactcca

SEQ ID NO: 2615746 - DNA, 25 bp, Homo sapien
agcatctcctcgagctccagctggg

SEQ ID NO: 2615747 - DNA, 25 bp, Homo sapien
tccagggggctgatggacatcttcc

SEQ ID NO: 2615748 - DNA, 25 bp, Homo sapien
ttcctggggaccagcatctcctcga

SEQ ID NO: 2615749 - DNA, 25 bp, Homo sapien
gctgatggacatcttcctggggacc

SEQ ID NO: 2615750 - DNA, 25 bp, Homo sapien
tcagcacgtttttgctctgcatctg

SEQ ID NO: 2615751 - DNA, 25 bp, Homo sapien
catctggctagggagacactcatag

SEQ ID NO: 2615752 - DNA, 25 bp, Homo sapien
catctgagttgtatcccaggccttc

SEQ ID NO: 2615753 - DNA, 25 bp, Homo sapien
ctagggagacactcatagaattggg

SEQ ID NO: 2615754 - DNA, 25 bp, Homo sapien
ctctcttgagcttgatcggcttccg

SEQ ID NO: 2615755 - DNA, 25 bp, Homo sapien
cttcagacccgccttcacccagata

SEQ ID NO: 2615756 - DNA, 25 bp, Homo sapien
tcacccagatactcctcgggtctct

SEQ ID NO: 2615757 - DNA, 25 bp, Homo sapien
tgatcggcttccgtttcaggcgccc

SEQ ID NO: 2615758 - DNA, 25 bp, Homo sapien
gaagccagttgaaccttgatctttg

SEQ ID NO: 2615759 - DNA, 25 bp, Homo sapien
caaagaggagcagagttcttgcttg

SEQ ID NO: 2615760 - DNA, 25 bp, Homo sapien
acgtcaagtgtcttgaacgccacca

SEQ ID NO: 2615761 - DNA, 25 bp, Homo sapien
cattccaaagacttcagcaaacacg

SEQ ID NO: 2615762 - DNA, 25 bp, Homo sapien
cactcggctacactgagtcaaagcc

SEQ ID NO: 2615763 - DNA, 25 bp, Homo sapien
ctacactgagtcaaagcccagctgg

SEQ ID NO: 2615764 - DNA, 25 bp, Homo sapien
tcggctacactgagtcaaagcccag

SEQ ID NO: 2615765 - DNA, 25 bp, Homo sapien
cccactcggctacactgagtcaaag

SEQ ID NO: 2615766 - DNA, 25 bp, Homo sapien
agagacggggtttcatgatttagcc

SEQ ID NO: 2615767 - DNA, 25 bp, Homo sapien
cggggtttcatgatttagccaggat

SEQ ID NO: 2615768 - DNA, 25 bp, Homo sapien
gagacggggtttcatgatttagcca

SEQ ID NO: 2615769 - DNA, 25 bp, Homo sapien
tcagcacgtgcatggaagcgatatc

SEQ ID NO: 2615770 - DNA, 25 bp, Homo sapien
atcctgagacctgcgttttcagcac

SEQ ID NO: 2615771 - DNA, 25 bp, Homo sapien
gtgcatggaagcgatatctaagaga

SEQ ID NO: 2615772 - DNA, 25 bp, Homo sapien
attgtcttcagccactcgggaggaa

SEQ ID NO: 2615773 - DNA, 25 bp, Homo sapien
catcctttaatctgcctaagagtgt

SEQ ID NO: 2615774 - DNA, 25 bp, Homo sapien
taatctgcctaagagtgtaactttt

SEQ ID NO: 2615775 - DNA, 25 bp, Homo sapien
acatcctttaatctgcctaagagtg

SEQ ID NO: 2615776 - DNA, 25 bp, Homo sapien
cctttaatctgcctaagagtgtaac

SEQ ID NO: 2615777 - DNA, 25 bp, Homo sapien
tagaacttagtgagtaggcacagag

SEQ ID NO: 2615778 - DNA, 25 bp, Homo sapien
ctggacaaatagatcaccaagcttg

SEQ ID NO: 2615779 - DNA, 25 bp, Homo sapien
tttagtaattcacttcccatcccca

SEQ ID NO: 2615780 - DNA, 25 bp, Homo sapien
gatctataagcccatcttacaatgg

SEQ ID NO: 2615781 - DNA, 25 bp, Homo sapien
cacatgatagatctgttcccgtaat

SEQ ID NO: 2615782 - DNA, 25 bp, Homo sapien
gttcccgtaatagtggtccaaatgc

SEQ ID NO: 2615783 - DNA, 25 bp, Homo sapien
tgaactctccatgaggaaaggaatg

SEQ ID NO: 2615784 - DNA, 25 bp, Homo sapien
tatacttctttgaagtccgtgtggc

SEQ ID NO: 2615785 - DNA, 25 bp, Homo sapien
catgattcaaattctctcttaccac

SEQ ID NO: 2615786 - DNA, 25 bp, Homo sapien
tactgcttacataggggtggcaaga

SEQ ID NO: 2615787 - DNA, 25 bp, Homo sapien
taccacctccctccgacaacatgtg

SEQ ID NO: 2615788 - DNA, 25 bp, Homo sapien
ggaggtaaaaggtactgcttacata

SEQ ID NO: 2615789 - DNA, 25 bp, Homo sapien
gcagaatcaactctagcgatcgatg

SEQ ID NO: 2615790 - DNA, 25 bp, Homo sapien
gggacgcaggtggagtggtaacaga

SEQ ID NO: 2615791 - DNA, 25 bp, Homo sapien
caggtggagtggtaacagaggaagg

SEQ ID NO: 2615792 - DNA, 25 bp, Homo sapien
agaatcaactctagcgatcgatggg

SEQ ID NO: 2615793 - DNA, 25 bp, Homo sapien
atgcatgttggggtttcctttacct

SEQ ID NO: 2615794 - DNA, 25 bp, Homo sapien
ggtcaccaaggcagtgcatgcatgt

SEQ ID NO: 2615795 - DNA, 25 bp, Homo sapien
caccaaggcagtgcatgcatgttgg

SEQ ID NO: 2615796 - DNA, 25 bp, Homo sapien
tggtcaccaaggcagtgcatgcatg

SEQ ID NO: 2615797 - DNA, 25 bp, Homo sapien
actggccactgacaaaaatgacccc

SEQ ID NO: 2615798 - DNA, 25 bp, Homo sapien
aactggccactgacaaaaatgaccc

SEQ ID NO: 2615799 - DNA, 25 bp, Homo sapien
gcacaaactggccactgacaaaaat

SEQ ID NO: 2615800 - DNA, 25 bp, Homo sapien
caaactggccactgacaaaaatgac

SEQ ID NO: 2615801 - DNA, 25 bp, Homo sapien
gataacagactgcttcaacttagct

SEQ ID NO: 2615802 - DNA, 25 bp, Homo sapien
gatggacgttcttccacgagagtcg

SEQ ID NO: 2615803 - DNA, 25 bp, Homo sapien
taattctcagagcaggagtggtgga

SEQ ID NO: 2615804 - DNA, 25 bp, Homo sapien
caggactaccaccaggactaaaggc

SEQ ID NO: 2615805 - DNA, 25 bp, Homo sapien
ctgtttctcccaacacgtgctgcca

SEQ ID NO: 2615806 - DNA, 25 bp, Homo sapien
tcccttctgttctacccttgtgagg

SEQ ID NO: 2615807 - DNA, 25 bp, Homo sapien
tgttctacccttgtgaggcccagtt

SEQ ID NO: 2615808 - DNA, 25 bp, Homo sapien
tgtttctcccaacacgtgctgccag

SEQ ID NO: 2615809 - DNA, 25 bp, Homo sapien
tgaatggaaggagctccaagacctg

SEQ ID NO: 2615810 - DNA, 25 bp, Homo sapien
gaactgagaccgaagctggcaacat

SEQ ID NO: 2615811 - DNA, 25 bp, Homo sapien
aatggagcccataactgagatcagc

SEQ ID NO: 2615812 - DNA, 25 bp, Homo sapien
gatacccctccctgatgcaaacttt

SEQ ID NO: 2615813 - DNA, 25 bp, Homo sapien
ccaatttaaggtttgatgccattct

SEQ ID NO: 2615814 - DNA, 25 bp, Homo sapien
ccaaatagcagataaggaattgaca

SEQ ID NO: 2615815 - DNA, 25 bp, Homo sapien
aaactgcctccgatgatccaggctc

SEQ ID NO: 2615816 - DNA, 25 bp, Homo sapien
tgacagttgtagaaattggagctgg

SEQ ID NO: 2615817 - DNA, 25 bp, Homo sapien
cacattttggcccacgatgctttct

SEQ ID NO: 2615818 - DNA, 25 bp, Homo sapien
tttctctctgtgacccacccgagcg

SEQ ID NO: 2615819 - DNA, 25 bp, Homo sapien
attttggcccacgatgctttctctc

SEQ ID NO: 2615820 - DNA, 25 bp, Homo sapien
ctctgtgacccacccgagcgggcag

SEQ ID NO: 2615821 - DNA, 25 bp, Homo sapien
ctgaaaggcaggatggagaagattc

SEQ ID NO: 2615822 - DNA, 25 bp, Homo sapien
gagaagattcagcttccctctctcc

SEQ ID NO: 2615823 - DNA, 25 bp, Homo sapien
cctgagacaggaaacctgaaaggca

SEQ ID NO: 2615824 - DNA, 25 bp, Homo sapien
caggaatcctgagacaggaaacctg

SEQ ID NO: 2615825 - DNA, 25 bp, Homo sapien
tttatataactcctgggtacactcg

SEQ ID NO: 2615826 - DNA, 25 bp, Homo sapien
tccatgttccatctgtgcagtctgc

SEQ ID NO: 2615827 - DNA, 25 bp, Homo sapien
cggctttgagcttccaaagtggtgc

SEQ ID NO: 2615828 - DNA, 25 bp, Homo sapien
aaagactgtgtttccagtgcggctt

SEQ ID NO: 2615829 - DNA, 25 bp, Homo sapien
tcgtagtctcccctctcactccaag

SEQ ID NO: 2615830 - DNA, 25 bp, Homo sapien
cttatcactgcaggctcgtagtctc

SEQ ID NO: 2615831 - DNA, 25 bp, Homo sapien
ttcactgttgcattctcaatttaaa

SEQ ID NO: 2615832 - DNA, 25 bp, Homo sapien
tccatggcaactgtagggtgtggcc

SEQ ID NO: 2615833 - DNA, 25 bp, Homo sapien
aagcaagttctcttgaagggagagc

SEQ ID NO: 2615834 - DNA, 25 bp, Homo sapien
tctcttgaagggagagctgagcaag

SEQ ID NO: 2615835 - DNA, 25 bp, Homo sapien
cttgaagcaagttctcttgaaggga

SEQ ID NO: 2615836 - DNA, 25 bp, Homo sapien
gggagagctgagcaaggcgcctcat

SEQ ID NO: 2615837 - DNA, 25 bp, Homo sapien
ggatcttccactcccccgtccacaa

SEQ ID NO: 2615838 - DNA, 25 bp, Homo sapien
cctaattagcctatgttccaagatg

SEQ ID NO: 2615839 - DNA, 25 bp, Homo sapien
ccctaattagcctatgttccaagat

SEQ ID NO: 2615840 - DNA, 25 bp, Homo sapien
ccccgtccacaatatgatgagtcat

SEQ ID NO: 2615841 - DNA, 25 bp, Homo sapien
gagcaaggcaagatttctgcaagaa

SEQ ID NO: 2615842 - DNA, 25 bp, Homo sapien
accagtgctttccttgtggcgagaa

SEQ ID NO: 2615843 - DNA, 25 bp, Homo sapien
gcgagaaaagtcatgggctgggtgg

SEQ ID NO: 2615844 - DNA, 25 bp, Homo sapien
tctgaatcacctccttaaccagtgc

SEQ ID NO: 2615845 - DNA, 25 bp, Homo sapien
ctgagtcgctttcttatgcttgtcc

SEQ ID NO: 2615846 - DNA, 25 bp, Homo sapien
tgctctgtttactccgtactcctga

SEQ ID NO: 2615847 - DNA, 25 bp, Homo sapien
tccgtactcctgagtcgctttctta

SEQ ID NO: 2615848 - DNA, 25 bp, Homo sapien
aatgagcctgctctgtttactccgt

SEQ ID NO: 2615849 - DNA, 25 bp, Homo sapien
gagaaccagagcctttaacattcct

SEQ ID NO: 2615850 - DNA, 25 bp, Homo sapien
ggtcctgtgtcacgacagctggtca

SEQ ID NO: 2615851 - DNA, 25 bp, Homo sapien
ggacaggataacatgaaggccaaac

SEQ ID NO: 2615852 - DNA, 25 bp, Homo sapien
cagggcatatgcatggaagcaaaca

SEQ ID NO: 2615853 - DNA, 25 bp, Homo sapien
cagcagttagcagaacagtcccaac

SEQ ID NO: 2615854 - DNA, 25 bp, Homo sapien
gacagtaagttcacggctcagtgga

SEQ ID NO: 2615855 - DNA, 25 bp, Homo sapien
tcagtggacatatacccagatcgca

SEQ ID NO: 2615856 - DNA, 25 bp, Homo sapien
tgtttttctcaaggcacctaccgga

SEQ ID NO: 2615857 - DNA, 25 bp, Homo sapien
tatgcacaggcatatcccagtccca

SEQ ID NO: 2615858 - DNA, 25 bp, Homo sapien
cagagcagatgcgtgtatgcacagg

SEQ ID NO: 2615859 - DNA, 25 bp, Homo sapien
tatgtaagaaatgagcccagtgacc

SEQ ID NO: 2615860 - DNA, 25 bp, Homo sapien
ccgggagatgtcaggcctcagaaag

SEQ ID NO: 2615861 - DNA, 25 bp, Homo sapien
ggaggctccgtggactccctgtata

SEQ ID NO: 2615862 - DNA, 25 bp, Homo sapien
agtggactccacactcctgggcttg

SEQ ID NO: 2615863 - DNA, 25 bp, Homo sapien
gggcttgcatccagattatcatcga

SEQ ID NO: 2615864 - DNA, 25 bp, Homo sapien
agaacagccaattccttagatgcag

SEQ ID NO: 2615865 - DNA, 25 bp, Homo sapien
ctgcatttgtagctgggtaaccagg

SEQ ID NO: 2615866 - DNA, 25 bp, Homo sapien
tgcctgtcggcgtgctcttgttgac

SEQ ID NO: 2615867 - DNA, 25 bp, Homo sapien
tattgagaggaagtagctgtgagca

SEQ ID NO: 2615868 - DNA, 25 bp, Homo sapien
gagtgcctgcccttacctaggtctg

SEQ ID NO: 2615869 - DNA, 25 bp, Homo sapien
tatagctacgtgtattttcaaatgc

SEQ ID NO: 2615870 - DNA, 25 bp, Homo sapien
ttctctgttcccagcaacggtccga

SEQ ID NO: 2615871 - DNA, 25 bp, Homo sapien
gataaggagcatccttgctaaatga

SEQ ID NO: 2615872 - DNA, 25 bp, Homo sapien
tggaactgtcgtgttctctgttccc

SEQ ID NO: 2615873 - DNA, 25 bp, Homo sapien
tcatcatgtatgagatcacactatt

SEQ ID NO: 2615874 - DNA, 25 bp, Homo sapien
gctgttgcctgcttagctttcatca

SEQ ID NO: 2615875 - DNA, 25 bp, Homo sapien
ctttcatcatgtatgagatcacact

SEQ ID NO: 2615876 - DNA, 25 bp, Homo sapien
ctgttgcctgcttagctttcatcat

SEQ ID NO: 2615877 - DNA, 25 bp, Homo sapien
gctccaaatccctctcttcacagca

SEQ ID NO: 2615878 - DNA, 25 bp, Homo sapien
cttcacagcattgtcaattgaatct

SEQ ID NO: 2615879 - DNA, 25 bp, Homo sapien
tgcacaaggaagtcaacactacctc

SEQ ID NO: 2615880 - DNA, 25 bp, Homo sapien
tctcttcatccaatcttggaaacag

SEQ ID NO: 2615881 - DNA, 25 bp, Homo sapien
gagggagatctcacttttattgtaa

SEQ ID NO: 2615882 - DNA, 25 bp, Homo sapien
gcagaattctttaaaggtagctaca

SEQ ID NO: 2615883 - DNA, 25 bp, Homo sapien
atccagcataatttctctggaccag

SEQ ID NO: 2615884 - DNA, 25 bp, Homo sapien
aggtagctacattagcaatcagatc

SEQ ID NO: 2615885 - DNA, 25 bp, Homo sapien
ttgtacttgacacgccacaactcag

SEQ ID NO: 2615886 - DNA, 25 bp, Homo sapien
gactataggtctagactctgggttc

SEQ ID NO: 2615887 - DNA, 25 bp, Homo sapien
cctgtggcactaagcttggaatcaa

SEQ ID NO: 2615888 - DNA, 25 bp, Homo sapien
gctcaggccttgtcgaaattgcaca

SEQ ID NO: 2615889 - DNA, 25 bp, Homo sapien
agcagacacacctgcttgcctgcct

SEQ ID NO: 2615890 - DNA, 25 bp, Homo sapien
ctcagcagacacacctgcttgcctg

SEQ ID NO: 2615891 - DNA, 25 bp, Homo sapien
cacctgcttgcctgcctgtctccat

SEQ ID NO: 2615892 - DNA, 25 bp, Homo sapien
acacctgcttgcctgcctgtctcca

SEQ ID NO: 2615893 - DNA, 25 bp, Homo sapien
atcagagctgcaatgcgtgcttttg

SEQ ID NO: 2615894 - DNA, 25 bp, Homo sapien
tcagagctgcaatgcgtgcttttgg

SEQ ID NO: 2615895 - DNA, 25 bp, Homo sapien
cagagctgcaatgcgtgcttttggg

SEQ ID NO: 2615896 - DNA, 25 bp, Homo sapien
ctcagcagacacacctgtttgcctg

SEQ ID NO: 2615897 - DNA, 25 bp, Homo sapien
acacacctgtttgcctgcctgtctc

SEQ ID NO: 2615898 - DNA, 25 bp, Homo sapien
agcagacacacctgtttgcctgcct

SEQ ID NO: 2615899 - DNA, 25 bp, Homo sapien
cagacacacctgtttgcctgcctgt

SEQ ID NO: 2615900 - DNA, 25 bp, Homo sapien
tcagacccgcaatgcatgcttttgg

SEQ ID NO: 2615901 - DNA, 25 bp, Homo sapien
gacccgcaatgcatgcttttgggaa

SEQ ID NO: 2615902 - DNA, 25 bp, Homo sapien
cccgcaatgcatgcttttgggaaag

SEQ ID NO: 2615903 - DNA, 25 bp, Homo sapien
gcatcagacccgcaatgcatgcttt

SEQ ID NO: 2615904 - DNA, 25 bp, Homo sapien
cctcccttaaatgcttgggctgcag

SEQ ID NO: 2615905 - DNA, 25 bp, Homo sapien
gcctcccttaaatgcttgggctgca

SEQ ID NO: 2615906 - DNA, 25 bp, Homo sapien
tgtagttgctgttggggaagaggcc

SEQ ID NO: 2615907 - DNA, 25 bp, Homo sapien
gaacatgatttttttgtagttgctg

SEQ ID NO: 2615908 - DNA, 25 bp, Homo sapien
tgatttttttgtagttgctgttggg

SEQ ID NO: 2615909 - DNA, 25 bp, Homo sapien
tttttgtagttgctgttggggaaga

SEQ ID NO: 2615910 - DNA, 25 bp, Homo sapien
gagtgaccatttcggtttgcatctt

SEQ ID NO: 2615911 - DNA, 25 bp, Homo sapien
aggagtgaccatttcggtttgcatc

SEQ ID NO: 2615912 - DNA, 25 bp, Homo sapien
gagaaaaatgctcccagagcatccc

SEQ ID NO: 2615913 - DNA, 25 bp, Homo sapien
agaaaaatgctcccagagcatccct

SEQ ID NO: 2615914 - DNA, 25 bp, Homo sapien
cagacacacctgtttgcctgccggt

SEQ ID NO: 2615915 - DNA, 25 bp, Homo sapien
gacacacctgtttgcctgccggtct

SEQ ID NO: 2615916 - DNA, 25 bp, Homo sapien
acacctgtttgcctgccggtctcca

SEQ ID NO: 2615917 - DNA, 25 bp, Homo sapien
ctcagcagacacacctgtttgcctg

SEQ ID NO: 2615918 - DNA, 25 bp, Homo sapien
aacgcgtgctctcgggaacgctgac

SEQ ID NO: 2615919 - DNA, 25 bp, Homo sapien
gcaacgcgtgctctcgggaacgctg

SEQ ID NO: 2615920 - DNA, 25 bp, Homo sapien
acccgcaacgcgtgctctcgggaac

SEQ ID NO: 2615921 - DNA, 25 bp, Homo sapien
ccgcaacgcgtgctctcgggaacgc

SEQ ID NO: 2615922 - DNA, 25 bp, Homo sapien
cctcccttaaatgcttgggctgcag

SEQ ID NO: 2615923 - DNA, 25 bp, Homo sapien
gcctcccttaaatgcttgggctgca

SEQ ID NO: 2615924 - DNA, 25 bp, Homo sapien
tagaacatgattcttttgcagttgc

SEQ ID NO: 2615925 - DNA, 25 bp, Homo sapien
atgattcttttgcagttgctgttgg

SEQ ID NO: 2615926 - DNA, 25 bp, Homo sapien
aacatgattcttttgcagttgctgt

SEQ ID NO: 2615927 - DNA, 25 bp, Homo sapien
tgattcttttgcagttgctgttggg

SEQ ID NO: 2615928 - DNA, 25 bp, Homo sapien
ctcagcagacacacctgtttgcctg

SEQ ID NO: 2615929 - DNA, 25 bp, Homo sapien
cagacacacctgtttgcctgccggt

SEQ ID NO: 2615930 - DNA, 25 bp, Homo sapien
acacctgtttgcctgccggtctcca

SEQ ID NO: 2615931 - DNA, 25 bp, Homo sapien
gacacacctgtttgcctgccggtct

SEQ ID NO: 2615932 - DNA, 25 bp, Homo sapien
gcaacgcgtgctctcgggaacgctg

SEQ ID NO: 2615933 - DNA, 25 bp, Homo sapien
aacgcgtgctctcgggaacgctgac

SEQ ID NO: 2615934 - DNA, 25 bp, Homo sapien
acccgcaacgcgtgctctcgggaac

SEQ ID NO: 2615935 - DNA, 25 bp, Homo sapien
ccgcaacgcgtgctctcgggaacgc

SEQ ID NO: 2615936 - DNA, 25 bp, Homo sapien
cctcccttaaatgcttgggctgcag

SEQ ID NO: 2615937 - DNA, 25 bp, Homo sapien
gcctcccttaaatgcttgggctgca

SEQ ID NO: 2615938 - DNA, 25 bp, Homo sapien
tgattcttttgcagttgctgttggg

SEQ ID NO: 2615939 - DNA, 25 bp, Homo sapien
tagaacatgattcttttgcagttgc

SEQ ID NO: 2615940 - DNA, 25 bp, Homo sapien
atgattcttttgcagttgctgttgg

SEQ ID NO: 2615941 - DNA, 25 bp, Homo sapien
aacatgattcttttgcagttgctgt

SEQ ID NO: 2615942 - DNA, 25 bp, Homo sapien
acacctgtttgcctgccggtctcca

SEQ ID NO: 2615943 - DNA, 25 bp, Homo sapien
gacacacctgtttgcctgccggtct

SEQ ID NO: 2615944 - DNA, 25 bp, Homo sapien
ctcagcagacacacctgtttgcctg

SEQ ID NO: 2615945 - DNA, 25 bp, Homo sapien
cagacacacctgtttgcctgccggt

SEQ ID NO: 2615946 - DNA, 25 bp, Homo sapien
aacgcgtgctctcgggaacgctgac

SEQ ID NO: 2615947 - DNA, 25 bp, Homo sapien
gcaacgcgtgctctcgggaacgctg

SEQ ID NO: 2615948 - DNA, 25 bp, Homo sapien
ccgcaacgcgtgctctcgggaacgc

SEQ ID NO: 2615949 - DNA, 25 bp, Homo sapien
acccgcaacgcgtgctctcgggaac

SEQ ID NO: 2615950 - DNA, 25 bp, Homo sapien
cctcccttaaatgcttgggctgcag

SEQ ID NO: 2615951 - DNA, 25 bp, Homo sapien
gcctcccttaaatgcttgggctgca

SEQ ID NO: 2615952 - DNA, 25 bp, Homo sapien
tgattcttttgcagttgctgttggg

SEQ ID NO: 2615953 - DNA, 25 bp, Homo sapien
tagaacatgattcttttgcagttgc

SEQ ID NO: 2615954 - DNA, 25 bp, Homo sapien
atgattcttttgcagttgctgttgg

SEQ ID NO: 2615955 - DNA, 25 bp, Homo sapien
aacatgattcttttgcagttgctgt

SEQ ID NO: 2615956 - DNA, 25 bp, Homo sapien
acacctgtttgcctgccggtctcca

SEQ ID NO: 2615957 - DNA, 25 bp, Homo sapien
ctcagcagacacacctgtttgcctg

SEQ ID NO: 2615958 - DNA, 25 bp, Homo sapien
cagacacacctgtttgcctgccggt

SEQ ID NO: 2615959 - DNA, 25 bp, Homo sapien
gacacacctgtttgcctgccggtct

SEQ ID NO: 2615960 - DNA, 25 bp, Homo sapien
acccgcaacgcgtgctctcgggaac

SEQ ID NO: 2615961 - DNA, 25 bp, Homo sapien
aacgcgtgctctcgggaacgctgac

SEQ ID NO: 2615962 - DNA, 25 bp, Homo sapien
gcaacgcgtgctctcgggaacgctg

SEQ ID NO: 2615963 - DNA, 25 bp, Homo sapien
ccgcaacgcgtgctctcgggaacgc

SEQ ID NO: 2615964 - DNA, 25 bp, Homo sapien
cctcccttaaatgcttgggctgcag

SEQ ID NO: 2615965 - DNA, 25 bp, Homo sapien
gcctcccttaaatgcttgggctgca

SEQ ID NO: 2615966 - DNA, 25 bp, Homo sapien
tgattcttttgcagttgctgttggg

SEQ ID NO: 2615967 - DNA, 25 bp, Homo sapien
aacatgattcttttgcagttgctgt

SEQ ID NO: 2615968 - DNA, 25 bp, Homo sapien
tagaacatgattcttttgcagttgc

SEQ ID NO: 2615969 - DNA, 25 bp, Homo sapien
atgattcttttgcagttgctgttgg

SEQ ID NO: 2615970 - DNA, 25 bp, Homo sapien
attttacattggttacacccagatg

SEQ ID NO: 2615971 - DNA, 25 bp, Homo sapien
gcagcagcctgtttgatcatccctt

SEQ ID NO: 2615972 - DNA, 25 bp, Homo sapien
acattggttacacccagatgaaggc

SEQ ID NO: 2615973 - DNA, 25 bp, Homo sapien
cagcagcctgtttgatcatcccttt

SEQ ID NO: 2615974 - DNA, 25 bp, Homo sapien
ttgaggctgacgcttcattgtcacc

SEQ ID NO: 2615975 - DNA, 25 bp, Homo sapien
gggaacatctcagcagaggcatctc

SEQ ID NO: 2615976 - DNA, 25 bp, Homo sapien
gattccagtctgctccgtgacagca

SEQ ID NO: 2615977 - DNA, 25 bp, Homo sapien
cagaggcatctctttgcctgcctgt

SEQ ID NO: 2615978 - DNA, 25 bp, Homo sapien
caccacctctcccacaaagaccttg

SEQ ID NO: 2615979 - DNA, 25 bp, Homo sapien
caaagaccttggctattccagccat

SEQ ID NO: 2615980 - DNA, 25 bp, Homo sapien
tctcccacaaagaccttggctattc

SEQ ID NO: 2615981 - DNA, 25 bp, Homo sapien
cccacaaagaccttggctattccag

SEQ ID NO: 2615982 - DNA, 25 bp, Homo sapien
ggggcgtttctccccacatttcgca

SEQ ID NO: 2615983 - DNA, 25 bp, Homo sapien
ggcgtttctccccacatttcgcaca

SEQ ID NO: 2615984 - DNA, 25 bp, Homo sapien
gggcgtttctccccacatttcgcac

SEQ ID NO: 2615985 - DNA, 25 bp, Homo sapien
gaggggagaggctactgcccgcccc

SEQ ID NO: 2615986 - DNA, 25 bp, Homo sapien
gagaggggagaggctactgcccgcc

SEQ ID NO: 2615987 - DNA, 25 bp, Homo sapien
agaggggagaggctactgcccgccc

SEQ ID NO: 2615988 - DNA, 25 bp, Homo sapien
ccttgctctctgactccagcgccgc

SEQ ID NO: 2615989 - DNA, 25 bp, Homo sapien
agccccagtgcccttgctctctgac

SEQ ID NO: 2615990 - DNA, 25 bp, Homo sapien
gggctctctgaatcctgtccacagc

SEQ ID NO: 2615991 - DNA, 25 bp, Homo sapien
agtgcccttgctctctgactccagc

SEQ ID NO: 2615992 - DNA, 25 bp, Homo sapien
tcagcagctcagtgaactcagggct

SEQ ID NO: 2615993 - DNA, 25 bp, Homo sapien
ggcttcgcggggcttcatggcattt

SEQ ID NO: 2615994 - DNA, 25 bp, Homo sapien
actcatgaagccaatagtatgaagg

SEQ ID NO: 2615995 - DNA, 25 bp, Homo sapien
aaggtagctgctgagtcctcggttc

SEQ ID NO: 2615996 - DNA, 25 bp, Homo sapien
ccaagcattggagggagacctttct

SEQ ID NO: 2615997 - DNA, 25 bp, Homo sapien
gaagctcagcatcttgcaacgtggt

SEQ ID NO: 2615998 - DNA, 25 bp, Homo sapien
gagaagtccgatgcagtccatcccc

SEQ ID NO: 2615999 - DNA, 25 bp, Homo sapien
gaatgatacaggtcttggttaggga

SEQ ID NO: 2616000 - DNA, 25 bp, Homo sapien
gacacgcctgtttgcctgccggtct

SEQ ID NO: 2616001 - DNA, 25 bp, Homo sapien
agacacgcctgtttgcctgccggtc

SEQ ID NO: 2616002 - DNA, 25 bp, Homo sapien
agcagacacgcctgtttgcctgccg

SEQ ID NO: 2616003 - DNA, 25 bp, Homo sapien
ctcagcagacacgcctgtttgcctg

SEQ ID NO: 2616004 - DNA, 25 bp, Homo sapien
atgcgtgctcttgggaaagctgacc

SEQ ID NO: 2616005 - DNA, 25 bp, Homo sapien
cgcaatgcgtgctcttgggaaagct

SEQ ID NO: 2616006 - DNA, 25 bp, Homo sapien
aatgcgtgctcttgggaaagctgac

SEQ ID NO: 2616007 - DNA, 25 bp, Homo sapien
acccgcaatgcgtgctcttgggaaa

SEQ ID NO: 2616008 - DNA, 25 bp, Homo sapien
caaagaccttggctattccagccat

SEQ ID NO: 2616009 - DNA, 25 bp, Homo sapien
ccaccacctctccaacaaagacctt

SEQ ID NO: 2616010 - DNA, 25 bp, Homo sapien
cttccaccacctctccaacaaagac

SEQ ID NO: 2616011 - DNA, 25 bp, Homo sapien
tctccaacaaagaccttggctattc

SEQ ID NO: 2616012 - DNA, 25 bp, Homo sapien
ctgtgaacagcctcccttaaatgct

SEQ ID NO: 2616013 - DNA, 25 bp, Homo sapien
gtgaacagcctcccttaaatgcttg

SEQ ID NO: 2616014 - DNA, 25 bp, Homo sapien
agcctcccttaaatgcttgggctgc

SEQ ID NO: 2616015 - DNA, 25 bp, Homo sapien
aacagcctcccttaaatgcttgggc

SEQ ID NO: 2616016 - DNA, 25 bp, Homo sapien
gaacatgactcttttgtagttgctg

SEQ ID NO: 2616017 - DNA, 25 bp, Homo sapien
tagttgctgttggggaagaggccct

SEQ ID NO: 2616018 - DNA, 25 bp, Homo sapien
aacatgactcttttgtagttgctgt

SEQ ID NO: 2616019 - DNA, 25 bp, Homo sapien
ctagaacatgactcttttgtagttg

SEQ ID NO: 2616020 - DNA, 25 bp, Homo sapien
cagacacacctgtttgcctgccggt

SEQ ID NO: 2616021 - DNA, 25 bp, Homo sapien
ctcagcagacacacctgtttgcctg

SEQ ID NO: 2616022 - DNA, 25 bp, Homo sapien
gacacacctgtttgcctgccggtct

SEQ ID NO: 2616023 - DNA, 25 bp, Homo sapien
acacctgtttgcctgccggtctcca

SEQ ID NO: 2616024 - DNA, 25 bp, Homo sapien
cagacgtgcaacaagtgcttttggg

SEQ ID NO: 2616025 - DNA, 25 bp, Homo sapien
cacatcagacgtgcaacaagtgctt

SEQ ID NO: 2616026 - DNA, 25 bp, Homo sapien
agtgatagaccacatcagacgtgca

SEQ ID NO: 2616027 - DNA, 25 bp, Homo sapien
gaccacatcagacgtgcaacaagtg

SEQ ID NO: 2616028 - DNA, 25 bp, Homo sapien
ttaaatccatgggctgcaatggggg

SEQ ID NO: 2616029 - DNA, 25 bp, Homo sapien
ctcccttaaatccatgggctgcaat

SEQ ID NO: 2616030 - DNA, 25 bp, Homo sapien
tcccttaaatccatgggctgcaatg

SEQ ID NO: 2616031 - DNA, 25 bp, Homo sapien
ccttaaatccatgggctgcaatggg

SEQ ID NO: 2616032 - DNA, 25 bp, Homo sapien
tagaacatgacttttttatagttgt

SEQ ID NO: 2616033 - DNA, 25 bp, Homo sapien
ctagaacatgacttttttatagttg

SEQ ID NO: 2616034 - DNA, 25 bp, Homo sapien
gaacatgacttttttatagttgttg

SEQ ID NO: 2616035 - DNA, 25 bp, Homo sapien
acatgacttttttatagttgttggg

SEQ ID NO: 2616036 - DNA, 25 bp, Homo sapien
gggcgagatgcagatatggtccacg

SEQ ID NO: 2616037 - DNA, 25 bp, Homo sapien
gagatgcagatatggtccacggcag

SEQ ID NO: 2616038 - DNA, 25 bp, Homo sapien
gcgagatgcagatatggtccacggc

SEQ ID NO: 2616039 - DNA, 25 bp, Homo sapien
gatgcagatatggtccacggcagcg

SEQ ID NO: 2616040 - DNA, 25 bp, Homo sapien
gacacacctgtttgtctgcctgcca

SEQ ID NO: 2616041 - DNA, 25 bp, Homo sapien
acacacctgtttgtctgcctgccac

SEQ ID NO: 2616042 - DNA, 25 bp, Homo sapien
agcagacacacctgtttgtctgcct

SEQ ID NO: 2616043 - DNA, 25 bp, Homo sapien
cagacacacctgtttgtctgcctgc

SEQ ID NO: 2616044 - DNA, 25 bp, Homo sapien
tgagaaccaagatgtcctgactcct

SEQ ID NO: 2616045 - DNA, 25 bp, Homo sapien
ctgagaaccaagatgtcctgactcc

SEQ ID NO: 2616046 - DNA, 25 bp, Homo sapien
gagaaccaagatgtcctgactcctg

SEQ ID NO: 2616047 - DNA, 25 bp, Homo sapien
gaaccaagatgtcctgactcctgag

SEQ ID NO: 2616048 - DNA, 25 bp, Homo sapien
ttgcaccacctctccaaccaagacc

SEQ ID NO: 2616049 - DNA, 25 bp, Homo sapien
tcttgcaccacctctccaaccaaga

SEQ ID NO: 2616050 - DNA, 25 bp, Homo sapien
ccaagaccttggctattccagccat

SEQ ID NO: 2616051 - DNA, 25 bp, Homo sapien
aaccaagaccttggctattccagcc

SEQ ID NO: 2616052 - DNA, 25 bp, Homo sapien
cagcgggggcgtttctcccccatct

SEQ ID NO: 2616053 - DNA, 25 bp, Homo sapien
gcgggggcgtttctcccccatctca

SEQ ID NO: 2616054 - DNA, 25 bp, Homo sapien
tttttagtacaatgatcaactccat

SEQ ID NO: 2616055 - DNA, 25 bp, Homo sapien
cgtgattagccagagccaatctcag

SEQ ID NO: 2616056 - DNA, 25 bp, Homo sapien
ccaattattccagctcagggtcgtg

SEQ ID NO: 2616057 - DNA, 25 bp, Homo sapien
cagctcagggtcgtgattagccaga

SEQ ID NO: 2616058 - DNA, 25 bp, Homo sapien
cagggtcgtgattagccagagccaa

SEQ ID NO: 2616059 - DNA, 25 bp, Homo sapien
acccaaatctctttcctcgccccag

SEQ ID NO: 2616060 - DNA, 25 bp, Homo sapien
gtattcatgacctgttacttcatca

SEQ ID NO: 2616061 - DNA, 25 bp, Homo sapien
tcccatctcgtattcatgacctgtt

SEQ ID NO: 2616062 - DNA, 25 bp, Homo sapien
ctgtttcccatctcgtattcatgac

SEQ ID NO: 2616063 - DNA, 25 bp, Homo sapien
tctcgtattcatgacctgttacttc

SEQ ID NO: 2616064 - DNA, 25 bp, Homo sapien
tccttgaacactacccagctcctca

SEQ ID NO: 2616065 - DNA, 25 bp, Homo sapien
ctccttgaacactacccagctcctc

SEQ ID NO: 2616066 - DNA, 25 bp, Homo sapien
ccttgaacactacccagctcctcat

SEQ ID NO: 2616067 - DNA, 25 bp, Homo sapien
tgggaacctttaaatccacaagtga

SEQ ID NO: 2616068 - DNA, 25 bp, Homo sapien
cttccacagtgaccaagttatgctt

SEQ ID NO: 2616069 - DNA, 25 bp, Homo sapien
cacagtgaccaagttatgcttttct

SEQ ID NO: 2616070 - DNA, 25 bp, Homo sapien
ttcttttgcacaatgggaaccttta

SEQ ID NO: 2616071 - DNA, 25 bp, Homo sapien
tagccgctgagacttggaagatgga

SEQ ID NO: 2616072 - DNA, 25 bp, Homo sapien
caaggattttgcatgtgaactaaca

SEQ ID NO: 2616073 - DNA, 25 bp, Homo sapien
aacatctactaagcagatatagccg

SEQ ID NO: 2616074 - DNA, 25 bp, Homo sapien
gatggaagtcggcaccatgggcttc

SEQ ID NO: 2616075 - DNA, 25 bp, Homo sapien
aacatctactaagcagatatagccg

SEQ ID NO: 2616076 - DNA, 25 bp, Homo sapien
caaggattttgcatgtgaactaaca

SEQ ID NO: 2616077 - DNA, 25 bp, Homo sapien
gatggaagtcggcaccatgggcttc

SEQ ID NO: 2616078 - DNA, 25 bp, Homo sapien
tagccgctgagacttggaagatgga

SEQ ID NO: 2616079 - DNA, 25 bp, Homo sapien
tttgtaagctggacggagacaccct

SEQ ID NO: 2616080 - DNA, 25 bp, Homo sapien
tggacggagacaccctgaaaccagt

SEQ ID NO: 2616081 - DNA, 25 bp, Homo sapien
tatctttgtaagctggacggagaca

SEQ ID NO: 2616082 - DNA, 25 bp, Homo sapien
gctggacggagacaccctgaaacca

SEQ ID NO: 2616083 - DNA, 25 bp, Homo sapien
taatgactccatgtcaagccaggcc

SEQ ID NO: 2616084 - DNA, 25 bp, Homo sapien
aggttttctggcagaccagcgcagg

SEQ ID NO: 2616085 - DNA, 25 bp, Homo sapien
tcttaggcatgaactgatgacaact

SEQ ID NO: 2616086 - DNA, 25 bp, Homo sapien
tgaaaattgcatgcctattgaggcc

SEQ ID NO: 2616087 - DNA, 25 bp, Homo sapien
tctcagtttctacttttatggactc

SEQ ID NO: 2616088 - DNA, 25 bp, Homo sapien
tgcctggcttacaccactgtgttgc

SEQ ID NO: 2616089 - DNA, 25 bp, Homo sapien
gctgccattgacattgcctggctta

SEQ ID NO: 2616090 - DNA, 25 bp, Homo sapien
aggtctctcagtttctacttttatg

SEQ ID NO: 2616091 - DNA, 25 bp, Homo sapien
gtccacacagcaaccttgagacatg

SEQ ID NO: 2616092 - DNA, 25 bp, Homo sapien
caaccttgagacatgcctattatca

SEQ ID NO: 2616093 - DNA, 25 bp, Homo sapien
catagggctttagctggtccacaca

SEQ ID NO: 2616094 - DNA, 25 bp, Homo sapien
ctcttctgtatgtgaagtgctttct

SEQ ID NO: 2616095 - DNA, 25 bp, Homo sapien
cagagcttgccaatggctgaacagg

SEQ ID NO: 2616096 - DNA, 25 bp, Homo sapien
gagcttgccaatggctgaacaggat

SEQ ID NO: 2616097 - DNA, 25 bp, Homo sapien
cctggagccctgaggggctagaagt

SEQ ID NO: 2616098 - DNA, 25 bp, Homo sapien
cacagagcttgccaatggctgaaca

SEQ ID NO: 2616099 - DNA, 25 bp, Homo sapien
ttaggggtctggattggttccatgg

SEQ ID NO: 2616100 - DNA, 25 bp, Homo sapien
ctggattggttccatggtgagattc

SEQ ID NO: 2616101 - DNA, 25 bp, Homo sapien
ttggttccatggtgagattcaaaat

SEQ ID NO: 2616102 - DNA, 25 bp, Homo sapien
gattggttccatggtgagattcaaa

SEQ ID NO: 2616103 - DNA, 25 bp, Homo sapien
gggagcccatccctgtagtggagat

SEQ ID NO: 2616104 - DNA, 25 bp, Homo sapien
ggtagggcccagcatagttctgcca

SEQ ID NO: 2616105 - DNA, 25 bp, Homo sapien
tgagttacttgacagggtagggccc

SEQ ID NO: 2616106 - DNA, 25 bp, Homo sapien
ttcacttttaaaagcaagctgcggg

SEQ ID NO: 2616107 - DNA, 25 bp, Homo sapien
tgagcaattcgactgctctctgctt

SEQ ID NO: 2616108 - DNA, 25 bp, Homo sapien
tttagaggaacgctgagcaattcga

SEQ ID NO: 2616109 - DNA, 25 bp, Homo sapien
tggcatatgtaagggcatgtaacaa

SEQ ID NO: 2616110 - DNA, 25 bp, Homo sapien
tgaacatattcaagtcctggtcctt

SEQ ID NO: 2616111 - DNA, 25 bp, Homo sapien
tgctactcccagaaattcaagcttg

SEQ ID NO: 2616112 - DNA, 25 bp, Homo sapien
tcagttgcggtgttgtcatttacaa

SEQ ID NO: 2616113 - DNA, 25 bp, Homo sapien
caagcttgctttcagttgcggtgtt

SEQ ID NO: 2616114 - DNA, 25 bp, Homo sapien
gttgtcctcttttccgcagcagtag

SEQ ID NO: 2616115 - DNA, 25 bp, Homo sapien
gagcatttgctaggaagttcaggtc

SEQ ID NO: 2616116 - DNA, 25 bp, Homo sapien
tgaagtcttgccgttgtttccaaag

SEQ ID NO: 2616117 - DNA, 25 bp, Homo sapien
tatttctctattgatctgctttgaa

SEQ ID NO: 2616118 - DNA, 25 bp, Homo sapien
gctaggaagttcaggtcttggtatt

SEQ ID NO: 2616119 - DNA, 25 bp, Homo sapien
taggtaacaaggcaacccagtcagc

SEQ ID NO: 2616120 - DNA, 25 bp, Homo sapien
tagatgaggccaacaagctctagct

SEQ ID NO: 2616121 - DNA, 25 bp, Homo sapien
caaatgcaggctagaacaggtggct

SEQ ID NO: 2616122 - DNA, 25 bp, Homo sapien
aagaacttttatgatccaggcccag

SEQ ID NO: 2616123 - DNA, 25 bp, Homo sapien
tgtggcctctaatggtcatcaagca

SEQ ID NO: 2616124 - DNA, 25 bp, Homo sapien
ttccaatgttggtgggaagtgcccg

SEQ ID NO: 2616125 - DNA, 25 bp, Homo sapien
tgcccgcggacttcatgcctgtaag

SEQ ID NO: 2616126 - DNA, 25 bp, Homo sapien
gctctcctgattggtgctgtggcct

SEQ ID NO: 2616127 - DNA, 25 bp, Homo sapien
tgagtacaccaaaaggtcttcaaat

SEQ ID NO: 2616128 - DNA, 25 bp, Homo sapien
cttccctctggaggtttggtctgga

SEQ ID NO: 2616129 - DNA, 25 bp, Homo sapien
tgtgacttgagtacaccaaaaggtc

SEQ ID NO: 2616130 - DNA, 25 bp, Homo sapien
ttgtccacggtccaccaccaaatat

SEQ ID NO: 2616131 - DNA, 25 bp, Homo sapien
tagaaactggctcaaggaaatgagg

SEQ ID NO: 2616132 - DNA, 25 bp, Homo sapien
tcttcggccatggttgactgatcta

SEQ ID NO: 2616133 - DNA, 25 bp, Homo sapien
tggctggagagctcataatgatgct

SEQ ID NO: 2616134 - DNA, 25 bp, Homo sapien
taaaaccagtgtaattgcagagcac

SEQ ID NO: 2616135 - DNA, 25 bp, Homo sapien
gaactccatagtaggagagtcacta

SEQ ID NO: 2616136 - DNA, 25 bp, Homo sapien
gtcactatatgggaagccgtaggtc

SEQ ID NO: 2616137 - DNA, 25 bp, Homo sapien
tagtaggagagtcactatatgggaa

SEQ ID NO: 2616138 - DNA, 25 bp, Homo sapien
aagagaactccatagtaggagagtc

SEQ ID NO: 2616139 - DNA, 25 bp, Homo sapien
ttttgcctaggatctcattgaaaaa

SEQ ID NO: 2616140 - DNA, 25 bp, Homo sapien
tttgcctaggatctcattgaaaaac

SEQ ID NO: 2616141 - DNA, 25 bp, Homo sapien
ttgcctaggatctcattgaaaaact

SEQ ID NO: 2616142 - DNA, 25 bp, Homo sapien
cgctgttctttgctagagttaatca

SEQ ID NO: 2616143 - DNA, 25 bp, Homo sapien
tcgctgttctttgctagagttaatc

SEQ ID NO: 2616144 - DNA, 25 bp, Homo sapien
ttctcgctgttctttgctagagtta

SEQ ID NO: 2616145 - DNA, 25 bp, Homo sapien
aaatttgtctttttctcgctgttct

SEQ ID NO: 2616146 - DNA, 25 bp, Homo sapien
tctctgtgtgcttgttatggtctag

SEQ ID NO: 2616147 - DNA, 25 bp, Homo sapien
tttcatgttatatgcccaggccttc

SEQ ID NO: 2616148 - DNA, 25 bp, Homo sapien
ccaagttctatgtaagcacgggcct

SEQ ID NO: 2616149 - DNA, 25 bp, Homo sapien
caagggcactctgtctaattcagtc

SEQ ID NO: 2616150 - DNA, 25 bp, Homo sapien
ctattggcaaataaggtgacacagg

SEQ ID NO: 2616151 - DNA, 25 bp, Homo sapien
cagtgccttactgaggaggtcctca

SEQ ID NO: 2616152 - DNA, 25 bp, Homo sapien
catggctgtatagactcctggctca

SEQ ID NO: 2616153 - DNA, 25 bp, Homo sapien
tgctggcatggctgtatagactcct

SEQ ID NO: 2616154 - DNA, 25 bp, Homo sapien
tgcaaaggatggatctacaccctcc

SEQ ID NO: 2616155 - DNA, 25 bp, Homo sapien
tcctatttcgatagaatgctgaaca

SEQ ID NO: 2616156 - DNA, 25 bp, Homo sapien
cactaaaggtggcaaagtgcatggg

SEQ ID NO: 2616157 - DNA, 25 bp, Homo sapien
catgggtgacatttgagagtttaga

SEQ ID NO: 2616158 - DNA, 25 bp, Homo sapien
ccatcactaaggagccacagattct

SEQ ID NO: 2616159 - DNA, 25 bp, Homo sapien
cctcaggacaaacaaggccattaac

SEQ ID NO: 2616160 - DNA, 25 bp, Homo sapien
tgaaaaaaaagcctcaggacaaaca

SEQ ID NO: 2616161 - DNA, 25 bp, Homo sapien
aagcctcaggacaaacaaggccatt

SEQ ID NO: 2616162 - DNA, 25 bp, Homo sapien
ttcagagactgaaaaaaaagcctca

SEQ ID NO: 2616163 - DNA, 25 bp, Homo sapien
tcaataactggagccaaggagccac

SEQ ID NO: 2616164 - DNA, 25 bp, Homo sapien
tcacaagggtgaacaggggcatcca

SEQ ID NO: 2616165 - DNA, 25 bp, Homo sapien
cagagccaagtaggacagacaccaa

SEQ ID NO: 2616166 - DNA, 25 bp, Homo sapien
tcagaacctggtagaggcccaggtc

SEQ ID NO: 2616167 - DNA, 25 bp, Homo sapien
tctcctaggtggtcactacgtttag

SEQ ID NO: 2616168 - DNA, 25 bp, Homo sapien
gaagtttctcctaggtggtcactac

SEQ ID NO: 2616169 - DNA, 25 bp, Homo sapien
ctctcagtaaacaatcgaggtactc

SEQ ID NO: 2616170 - DNA, 25 bp, Homo sapien
caatcgaggtactctcttcagaaca

SEQ ID NO: 2616171 - DNA, 25 bp, Homo sapien
gcagtgaggatttctctggtgtcca

SEQ ID NO: 2616172 - DNA, 25 bp, Homo sapien
tcattggcggaagcagtgaggattt

SEQ ID NO: 2616173 - DNA, 25 bp, Homo sapien
tctggtgtccatgagggttactgag

SEQ ID NO: 2616174 - DNA, 25 bp, Homo sapien
catgagggttactgaggtcctcagc

SEQ ID NO: 2616175 - DNA, 25 bp, Homo sapien
acaggtttgcaataaacatcagaca

SEQ ID NO: 2616176 - DNA, 25 bp, Homo sapien
catttcactccaggatttatggacc

SEQ ID NO: 2616177 - DNA, 25 bp, Homo sapien
tttatggaccgtccaaaaggcttca

SEQ ID NO: 2616178 - DNA, 25 bp, Homo sapien
caggatttatggaccgtccaaaagg

SEQ ID NO: 2616179 - DNA, 25 bp, Homo sapien
cactccaggatttatggaccgtcca

SEQ ID NO: 2616180 - DNA, 25 bp, Homo sapien
catacatgctgaggtgaaaagccag

SEQ ID NO: 2616181 - DNA, 25 bp, Homo sapien
attagtttggcccatacatgctgag

SEQ ID NO: 2616182 - DNA, 25 bp, Homo sapien
tgttatattagtttggcccatacat

SEQ ID NO: 2616183 - DNA, 25 bp, Homo sapien
tttggcccatacatgctgaggtgaa

SEQ ID NO: 2616184 - DNA, 25 bp, Homo sapien
caatcagtagcacttccgttaactg

SEQ ID NO: 2616185 - DNA, 25 bp, Homo sapien
tcccacagcattgtttggctgcaag

SEQ ID NO: 2616186 - DNA, 25 bp, Homo sapien
caagacatggagcttggccgctgac

SEQ ID NO: 2616187 - DNA, 25 bp, Homo sapien
actgccaactgatacgtgagtgctg

SEQ ID NO: 2616188 - DNA, 25 bp, Homo sapien
agctccaagagttcagagggactgg

SEQ ID NO: 2616189 - DNA, 25 bp, Homo sapien
cctaaaattagtcctttggcagaag

SEQ ID NO: 2616190 - DNA, 25 bp, Homo sapien
gggtcttcatcgcattgatcagttt

SEQ ID NO: 2616191 - DNA, 25 bp, Homo sapien
gatcagtttattacccaacagtccc

SEQ ID NO: 2616192 - DNA, 25 bp, Homo sapien
tgttcatattagcactccaatctgt

SEQ ID NO: 2616193 - DNA, 25 bp, Homo sapien
caaaatgaagcagaagtacccttag

SEQ ID NO: 2616194 - DNA, 25 bp, Homo sapien
aagattgcagagtccagaattggca

SEQ ID NO: 2616195 - DNA, 25 bp, Homo sapien
gggagtagatcctccctaaccaatg

SEQ ID NO: 2616196 - DNA, 25 bp, Homo sapien
aagaggcaagatttctgaggaacac

SEQ ID NO: 2616197 - DNA, 25 bp, Homo sapien
tttaatataaagtggatagctttga

SEQ ID NO: 2616198 - DNA, 25 bp, Homo sapien
gctggcattcacttccgtttcattt

SEQ ID NO: 2616199 - DNA, 25 bp, Homo sapien
tataaagtggatagctttgagatgg

SEQ ID NO: 2616200 - DNA, 25 bp, Homo sapien
ttggatctcagctcaggtctatttg

SEQ ID NO: 2616201 - DNA, 25 bp, Homo sapien
taattgctaccatgtactaagtgcc

SEQ ID NO: 2616202 - DNA, 25 bp, Homo sapien
tcaaagatgacaccagacctctaac

SEQ ID NO: 2616203 - DNA, 25 bp, Homo sapien
tggacacttgaacttaaaaactctg

SEQ ID NO: 2616204 - DNA, 25 bp, Homo sapien
gcatttggcaatccagttatcccag

SEQ ID NO: 2616205 - DNA, 25 bp, Homo sapien
tccattcaacgggttgtttcttcac

SEQ ID NO: 2616206 - DNA, 25 bp, Homo sapien
ggttagataatgtgatatctccagg

SEQ ID NO: 2616207 - DNA, 25 bp, Homo sapien
gaggttgtttcatctccaatggata

SEQ ID NO: 2616208 - DNA, 25 bp, Homo sapien
aggaagcatgttgccaatgtcagcc

SEQ ID NO: 2616209 - DNA, 25 bp, Homo sapien
tgttccatcgttgttctgcagattg

SEQ ID NO: 2616210 - DNA, 25 bp, Homo sapien
gatgtcctcacgaagtttacaatca

SEQ ID NO: 2616211 - DNA, 25 bp, Homo sapien
cagcctttggtgatgtcctcacgaa

SEQ ID NO: 2616212 - DNA, 25 bp, Homo sapien
aaggatcagctgatcccattttgtc

SEQ ID NO: 2616213 - DNA, 25 bp, Homo sapien
ttaaggatcagctgatcccattttg

SEQ ID NO: 2616214 - DNA, 25 bp, Homo sapien
tcatcacgctttctgttaaatgagt

SEQ ID NO: 2616215 - DNA, 25 bp, Homo sapien
cttcatcacgctttctgttaaatga

SEQ ID NO: 2616216 - DNA, 25 bp, Homo sapien
gcctaggttcttactttctatccaa

SEQ ID NO: 2616217 - DNA, 25 bp, Homo sapien
gagtcatcctccaatacctgccata

SEQ ID NO: 2616218 - DNA, 25 bp, Homo sapien
caatttcaattgactgagaatacac

SEQ ID NO: 2616219 - DNA, 25 bp, Homo sapien
tgccatatagcagattgcatagagt

SEQ ID NO: 2616220 - DNA, 25 bp, Homo sapien
agcccatacgtatttttgatccact

SEQ ID NO: 2616221 - DNA, 25 bp, Homo sapien
aaatgagaagcccatacgtattttt

SEQ ID NO: 2616222 - DNA, 25 bp, Homo sapien
tgagaagcccatacgtatttttgat

SEQ ID NO: 2616223 - DNA, 25 bp, Homo sapien
gaagcccatacgtatttttgatcca

SEQ ID NO: 2616224 - DNA, 25 bp, Homo sapien
ttaggtggcttcatgggagatccct

SEQ ID NO: 2616225 - DNA, 25 bp, Homo sapien
gcttcatgggagatcccttgcattt

SEQ ID NO: 2616226 - DNA, 25 bp, Homo sapien
aggtggcttcatgggagatcccttg

SEQ ID NO: 2616227 - DNA, 25 bp, Homo sapien
gtggcttcatgggagatcccttgca

SEQ ID NO: 2616228 - DNA, 25 bp, Homo sapien
tcaaaatgcggacttagttgctcct

SEQ ID NO: 2616229 - DNA, 25 bp, Homo sapien
caaaatgcggacttagttgctcctt

SEQ ID NO: 2616230 - DNA, 25 bp, Homo sapien
aaatgcggacttagttgctccttca

SEQ ID NO: 2616231 - DNA, 25 bp, Homo sapien
ttcaaaatgcggacttagttgctcc

SEQ ID NO: 2616232 - DNA, 25 bp, Homo sapien
ctgcttcaattgtgacccctttaaa

SEQ ID NO: 2616233 - DNA, 25 bp, Homo sapien
tgcttcaattgtgacccctttaaaa

SEQ ID NO: 2616234 - DNA, 25 bp, Homo sapien
aagtaagtgtgtttagaactacgca

SEQ ID NO: 2616235 - DNA, 25 bp, Homo sapien
gaactacgcatttaattgaataccg

SEQ ID NO: 2616236 - DNA, 25 bp, Homo sapien
ataccgggcacgagatataggatgg

SEQ ID NO: 2616237 - DNA, 25 bp, Homo sapien
catttaattgaataccgggcacgag

SEQ ID NO: 2616238 - DNA, 25 bp, Homo sapien
catgatgagaacaagaaacggcatc

SEQ ID NO: 2616239 - DNA, 25 bp, Homo sapien
gaaacggcatcggagacccttgcct

SEQ ID NO: 2616240 - DNA, 25 bp, Homo sapien
gagaacaagaaacggcatcggagac

SEQ ID NO: 2616241 - DNA, 25 bp, Homo sapien
gttttgtctacatgatgagaacaag

SEQ ID NO: 2616242 - DNA, 25 bp, Homo sapien
ggctcaacacattgtccagccttag

SEQ ID NO: 2616243 - DNA, 25 bp, Homo sapien
tgcagttaggctcaacacattgtcc

SEQ ID NO: 2616244 - DNA, 25 bp, Homo sapien
cactctgcttccgatcatagtgcca

SEQ ID NO: 2616245 - DNA, 25 bp, Homo sapien
gcttccgatcatagtgccactttcc

SEQ ID NO: 2616246 - DNA, 25 bp, Homo sapien
tgcatctcttaatggccagcatcct

SEQ ID NO: 2616247 - DNA, 25 bp, Homo sapien
ctcttaatggccagcatcctcttgg

SEQ ID NO: 2616248 - DNA, 25 bp, Homo sapien
cttgcatctcttaatggccagcatc

SEQ ID NO: 2616249 - DNA, 25 bp, Homo sapien
cttaatggccagcatcctcttggat

SEQ ID NO: 2616250 - DNA, 25 bp, Homo sapien
caacattttctcttcaaaattagaa

SEQ ID NO: 2616251 - DNA, 25 bp, Homo sapien
ttccttcaggtaatttttctatggc

SEQ ID NO: 2616252 - DNA, 25 bp, Homo sapien
aggtaatttttctatggcttcaaca

SEQ ID NO: 2616253 - DNA, 25 bp, Homo sapien
tttttataagaatatcactgtattt

SEQ ID NO: 2616254 - DNA, 25 bp, Homo sapien
tgaacgtcccttcaaatgtaataat

SEQ ID NO: 2616255 - DNA, 25 bp, Homo sapien
ggcttgttctctcgtatgtaacaga

SEQ ID NO: 2616256 - DNA, 25 bp, Homo sapien
tatctacgtgtgtacctctggaagg

SEQ ID NO: 2616257 - DNA, 25 bp, Homo sapien
tcagattcatatttgaacgtccctt

SEQ ID NO: 2616258 - DNA, 25 bp, Homo sapien
tactttgatcgtagtttggctggac

SEQ ID NO: 2616259 - DNA, 25 bp, Homo sapien
gaattaaggcgactgagatccatcc

SEQ ID NO: 2616260 - DNA, 25 bp, Homo sapien
cctcttggcacactgcttttgtagc

SEQ ID NO: 2616261 - DNA, 25 bp, Homo sapien
tggacagtttgaagcaacaagtggg

SEQ ID NO: 2616262 - DNA, 25 bp, Homo sapien
ctgggccttgattagtttctacttt

SEQ ID NO: 2616263 - DNA, 25 bp, Homo sapien
tctgggccttgattagtttctactt

SEQ ID NO: 2616264 - DNA, 25 bp, Homo sapien
ttctgggccttgattagtttctact

SEQ ID NO: 2616265 - DNA, 25 bp, Homo sapien
ggtgatggatatgcttattgtcttg

SEQ ID NO: 2616266 - DNA, 25 bp, Homo sapien
gcattctaaatgaaacgagaagtcg

SEQ ID NO: 2616267 - DNA, 25 bp, Homo sapien
ccttgaagacctgttagaatatgta

SEQ ID NO: 2616268 - DNA, 25 bp, Homo sapien
tcttgatcatgagtgatggcttcac

SEQ ID NO: 2616269 - DNA, 25 bp, Homo sapien
tagatgttgcttggagcccagttcc

SEQ ID NO: 2616270 - DNA, 25 bp, Homo sapien
tatccggcaggcctgatgagacgca

SEQ ID NO: 2616271 - DNA, 25 bp, Homo sapien
gtgagccttgatccagtctgtttct

SEQ ID NO: 2616272 - DNA, 25 bp, Homo sapien
ttctccatcaaagtgacacagttag

SEQ ID NO: 2616273 - DNA, 25 bp, Homo sapien
cacttttatgtaatcaacactggca

SEQ ID NO: 2616274 - DNA, 25 bp, Homo sapien
tctttcttccttgtccacttttatg

SEQ ID NO: 2616275 - DNA, 25 bp, Homo sapien
tatgtaatcaacactggcaggaact

SEQ ID NO: 2616276 - DNA, 25 bp, Homo sapien
caacactggcaggaactttttcatc

SEQ ID NO: 2616277 - DNA, 25 bp, Homo sapien
taaatttgggctaaaggagcagaag

SEQ ID NO: 2616278 - DNA, 25 bp, Homo sapien
ggtcccatattgatatcaaccagca

SEQ ID NO: 2616279 - DNA, 25 bp, Homo sapien
ctactaggcttctggtctgaacact

SEQ ID NO: 2616280 - DNA, 25 bp, Homo sapien
gattcctggtccaactactttcaga

SEQ ID NO: 2616281 - DNA, 25 bp, Homo sapien
gcagtaggctttctgtatcacagct

SEQ ID NO: 2616282 - DNA, 25 bp, Homo sapien
gctttctgtatcacagctggggaca

SEQ ID NO: 2616283 - DNA, 25 bp, Homo sapien
gtaggctttctgtatcacagctggg

SEQ ID NO: 2616284 - DNA, 25 bp, Homo sapien
ggcagtaggctttctgtatcacagc

SEQ ID NO: 2616285 - DNA, 25 bp, Homo sapien
acatgattgcatagaaccatataaa

SEQ ID NO: 2616286 - DNA, 25 bp, Homo sapien
cattcctataaaatcggttgcaacg

SEQ ID NO: 2616287 - DNA, 25 bp, Homo sapien
aaaattgccaacattcaagtgtttt

SEQ ID NO: 2616288 - DNA, 25 bp, Homo sapien
cagtgaattctaaaaccacctacat

SEQ ID NO: 2616289 - DNA, 25 bp, Homo sapien
gccaagaacagaggccactccaact

SEQ ID NO: 2616290 - DNA, 25 bp, Homo sapien
aatgccaagaacagaggccactcca

SEQ ID NO: 2616291 - DNA, 25 bp, Homo sapien
ctgaaagctgactcaggtagaagaa

SEQ ID NO: 2616292 - DNA, 25 bp, Homo sapien
ccaaatgctgaaagctgactcaggt

SEQ ID NO: 2616293 - DNA, 25 bp, Homo sapien
tgcattggacctcagcagtcaaggg

SEQ ID NO: 2616294 - DNA, 25 bp, Homo sapien
gagaagagcaggtatcgtttctgca

SEQ ID NO: 2616295 - DNA, 25 bp, Homo sapien
ggtgagttgtacctcctctggtcaa

SEQ ID NO: 2616296 - DNA, 25 bp, Homo sapien
cagccagagggagtgtccgtgatct

SEQ ID NO: 2616297 - DNA, 25 bp, Homo sapien
tgcagatagcgggttcgggaggtga

SEQ ID NO: 2616298 - DNA, 25 bp, Homo sapien
agcctgccttcactcctgcagatag

SEQ ID NO: 2616299 - DNA, 25 bp, Homo sapien
tagcgggttcgggaggtgatgccat

SEQ ID NO: 2616300 - DNA, 25 bp, Homo sapien
tttagcctgccttcactcctgcaga

SEQ ID NO: 2616301 - DNA, 25 bp, Homo sapien
cactcatagttcttcctctcatttt

SEQ ID NO: 2616302 - DNA, 25 bp, Homo sapien
actcatagttcttcctctcattttc

SEQ ID NO: 2616303 - DNA, 25 bp, Homo sapien
tcactcatagttcttcctctcattt

SEQ ID NO: 2616304 - DNA, 25 bp, Homo sapien
ttcctcaaggctctttcttatgttt

SEQ ID NO: 2616305 - DNA, 25 bp, Homo sapien
ttcccacatttatgtgtcctgtctg

SEQ ID NO: 2616306 - DNA, 25 bp, Homo sapien
tcccacatttatgtgtcctgtctgc

SEQ ID NO: 2616307 - DNA, 25 bp, Homo sapien
tctttcctcaaggctctttcttatg

SEQ ID NO: 2616308 - DNA, 25 bp, Homo sapien
caacctatctccactaaggccgtga

SEQ ID NO: 2616309 - DNA, 25 bp, Homo sapien
tacatttcagcaatccaacctatct

SEQ ID NO: 2616310 - DNA, 25 bp, Homo sapien
caaaatagagtttaggatctttctc

SEQ ID NO: 2616311 - DNA, 25 bp, Homo sapien
taaggccgtgaaaccaggagcttgg

SEQ ID NO: 2616312 - DNA, 25 bp, Homo sapien
cccacgtcacagaggttaccatact

SEQ ID NO: 2616313 - DNA, 25 bp, Homo sapien
catttgattggcagagcatgctaca

SEQ ID NO: 2616314 - DNA, 25 bp, Homo sapien
gattgtcacaaaaattgacctgcta

SEQ ID NO: 2616315 - DNA, 25 bp, Homo sapien
gcagtgactatagacaggcataatc

SEQ ID NO: 2616316 - DNA, 25 bp, Homo sapien
taaccttggatataagctcctgttc

SEQ ID NO: 2616317 - DNA, 25 bp, Homo sapien
cctttattacaagcaggtagcaaag

SEQ ID NO: 2616318 - DNA, 25 bp, Homo sapien
taaactttgtcaacctaaaggcaga

SEQ ID NO: 2616319 - DNA, 25 bp, Homo sapien
tgatcagtgactggctacacattgt

SEQ ID NO: 2616320 - DNA, 25 bp, Homo sapien
gaccctaggtactattccatatgca

SEQ ID NO: 2616321 - DNA, 25 bp, Homo sapien
tatttgacactgtttgaccctaggt

SEQ ID NO: 2616322 - DNA, 25 bp, Homo sapien
tctctcaatgcataaggaagttaca

SEQ ID NO: 2616323 - DNA, 25 bp, Homo sapien
ggaagttacatgtatgagcctaaaa

SEQ ID NO: 2616324 - DNA, 25 bp, Homo sapien
aacattttcacagtgtattaactct

SEQ ID NO: 2616325 - DNA, 25 bp, Homo sapien
cgtaccagagaaaccgtacaatata

SEQ ID NO: 2616326 - DNA, 25 bp, Homo sapien
tcaacattttcacagtgtattaact

SEQ ID NO: 2616327 - DNA, 25 bp, Homo sapien
taccagagaaaccgtacaatatatt

SEQ ID NO: 2616328 - DNA, 25 bp, Homo sapien
atttagtgattctacaagtactcat

SEQ ID NO: 2616329 - DNA, 25 bp, Homo sapien
aatttagtgattctacaagtactca

SEQ ID NO: 2616330 - DNA, 25 bp, Homo sapien
gaatttagtgattctacaagtactc

SEQ ID NO: 2616331 - DNA, 25 bp, Homo sapien
gatacgtgagagtaaaaacaaggaa

SEQ ID NO: 2616332 - DNA, 25 bp, Homo sapien
caaggaaagagctctacgaaaggtg

SEQ ID NO: 2616333 - DNA, 25 bp, Homo sapien
gatagcagaccggtcagatacgtga

SEQ ID NO: 2616334 - DNA, 25 bp, Homo sapien
caagacattgatcccaaatgaaaaa

SEQ ID NO: 2616335 - DNA, 25 bp, Homo sapien
caaggtcattcatgcttatacaggc

SEQ ID NO: 2616336 - DNA, 25 bp, Homo sapien
tagagctcctgatactcagtctcat

SEQ ID NO: 2616337 - DNA, 25 bp, Homo sapien
gctttgcagggtgccacataatttc

SEQ ID NO: 2616338 - DNA, 25 bp, Homo sapien
aagagtcccatcaaatgctttgcag

SEQ ID NO: 2616339 - DNA, 25 bp, Homo sapien
tataataaacctttcatggcatcca

SEQ ID NO: 2616340 - DNA, 25 bp, Homo sapien
catttctgcaatggacagattatca

SEQ ID NO: 2616341 - DNA, 25 bp, Homo sapien
cttgaatgtatcagaaaagagccaa

SEQ ID NO: 2616342 - DNA, 25 bp, Homo sapien
caaggcctaagatttactatgagga

SEQ ID NO: 2616343 - DNA, 25 bp, Homo sapien
tatgcctggccgtaaactgctcatt

SEQ ID NO: 2616344 - DNA, 25 bp, Homo sapien
aactttttgtagagcatcagcaatt

SEQ ID NO: 2616345 - DNA, 25 bp, Homo sapien
gagcatcagcaattataccattctt

SEQ ID NO: 2616346 - DNA, 25 bp, Homo sapien
gcctggccgtaaactgctcatttct

SEQ ID NO: 2616347 - DNA, 25 bp, Homo sapien
tcaccacattgccacttcccctcga

SEQ ID NO: 2616348 - DNA, 25 bp, Homo sapien
tcctccattgagtccctttggtcat

SEQ ID NO: 2616349 - DNA, 25 bp, Homo sapien
gcccttaactttactcctccattga

SEQ ID NO: 2616350 - DNA, 25 bp, Homo sapien
acttcccctcgatgctgccagaagg

SEQ ID NO: 2616351 - DNA, 25 bp, Homo sapien
ccacatgacaacgagcaactaccat

SEQ ID NO: 2616352 - DNA, 25 bp, Homo sapien
atttgtggctcttcacgaagataaa

SEQ ID NO: 2616353 - DNA, 25 bp, Homo sapien
ggctcttcacgaagataaatattta

SEQ ID NO: 2616354 - DNA, 25 bp, Homo sapien
aaacttcccacatgacaacgagcaa

SEQ ID NO: 2616355 - DNA, 25 bp, Homo sapien
tatatgatcattcttgttcctcctg

SEQ ID NO: 2616356 - DNA, 25 bp, Homo sapien
gatttgacttgacagtgattgcgga

SEQ ID NO: 2616357 - DNA, 25 bp, Homo sapien
taaaatgggaatagaattaagttgc

SEQ ID NO: 2616358 - DNA, 25 bp, Homo sapien
cagctactgttgtgttaagagtatt

SEQ ID NO: 2616359 - DNA, 25 bp, Homo sapien
ccagtggcaaactgtaagatgtgcc

SEQ ID NO: 2616360 - DNA, 25 bp, Homo sapien
cttcttcagaccagccggcatacag

SEQ ID NO: 2616361 - DNA, 25 bp, Homo sapien
cgtgaagtgcttttaccctaagtct

SEQ ID NO: 2616362 - DNA, 25 bp, Homo sapien
tctgcttcagctgcgtgaagtgctt

SEQ ID NO: 2616363 - DNA, 25 bp, Homo sapien
taatagcatattgattccccctcat

SEQ ID NO: 2616364 - DNA, 25 bp, Homo sapien
gccctaatagcatattgattccccc

SEQ ID NO: 2616365 - DNA, 25 bp, Homo sapien
cctaatagcatattgattccccctc

SEQ ID NO: 2616366 - DNA, 25 bp, Homo sapien
tgccctaatagcatattgattcccc

SEQ ID NO: 2616367 - DNA, 25 bp, Homo sapien
actgttgactgaaatttgacttgct

SEQ ID NO: 2616368 - DNA, 25 bp, Homo sapien
tcttgaagcattcttgtataggtgc

SEQ ID NO: 2616369 - DNA, 25 bp, Homo sapien
gtataggtgctacaaatgtcctctt

SEQ ID NO: 2616370 - DNA, 25 bp, Homo sapien
gacacggccatgtgaaacatattcc

SEQ ID NO: 2616371 - DNA, 25 bp, Homo sapien
atggttgttaccattaagtaggtgt

SEQ ID NO: 2616372 - DNA, 25 bp, Homo sapien
ttcaatggttgttaccattaagtag

SEQ ID NO: 2616373 - DNA, 25 bp, Homo sapien
catttttcaatggttgttaccatta

SEQ ID NO: 2616374 - DNA, 25 bp, Homo sapien
caatggttgttaccattaagtaggt

SEQ ID NO: 2616375 - DNA, 25 bp, Homo sapien
acaggaaagtcgtccccattaatag

SEQ ID NO: 2616376 - DNA, 25 bp, Homo sapien
aggaaagtcgtccccattaatagag

SEQ ID NO: 2616377 - DNA, 25 bp, Homo sapien
gaaagtcgtccccattaatagagga

SEQ ID NO: 2616378 - DNA, 25 bp, Homo sapien
caggaaagtcgtccccattaataga

SEQ ID NO: 2616379 - DNA, 25 bp, Homo sapien
ctgcagaatacagcaaggcattcag

SEQ ID NO: 2616380 - DNA, 25 bp, Homo sapien
gagttgctgcagttaaatcagtatg

SEQ ID NO: 2616381 - DNA, 25 bp, Homo sapien
atcagtatgtgttatattttcctcc

SEQ ID NO: 2616382 - DNA, 25 bp, Homo sapien
gctgcagttaaatcagtatgtgtta

SEQ ID NO: 2616383 - DNA, 25 bp, Homo sapien
taggatcagtagatgtgtaggcttg

SEQ ID NO: 2616384 - DNA, 25 bp, Homo sapien
ctcttcatcacagagcgtcaagcac

SEQ ID NO: 2616385 - DNA, 25 bp, Homo sapien
cagagcgtcaagcactcctctgtac

SEQ ID NO: 2616386 - DNA, 25 bp, Homo sapien
tgatgtaggatcagtagatgtgtag

SEQ ID NO: 2616387 - DNA, 25 bp, Homo sapien
tttttcttgaaaaggcaccatagcg

SEQ ID NO: 2616388 - DNA, 25 bp, Homo sapien
ccatagcgagtcctggattcgttaa

SEQ ID NO: 2616389 - DNA, 25 bp, Homo sapien
tgaaaaggcaccatagcgagtcctg

SEQ ID NO: 2616390 - DNA, 25 bp, Homo sapien
ggcaccatagcgagtcctggattcg

SEQ ID NO: 2616391 - DNA, 25 bp, Homo sapien
atgaaatttgcatggatttgagatc

SEQ ID NO: 2616392 - DNA, 25 bp, Homo sapien
catgaaatttgcatggatttgagat

SEQ ID NO: 2616393 - DNA, 25 bp, Homo sapien
ccatgaaatttgcatggatttgaga

SEQ ID NO: 2616394 - DNA, 25 bp, Homo sapien
ccacctttattgagggatgcttcat

SEQ ID NO: 2616395 - DNA, 25 bp, Homo sapien
ctctgcaaccctgagagattggact

SEQ ID NO: 2616396 - DNA, 25 bp, Homo sapien
ccctgagagattggactttggtgag

SEQ ID NO: 2616397 - DNA, 25 bp, Homo sapien
tctcctccacctttattgagggatg

SEQ ID NO: 2616398 - DNA, 25 bp, Homo sapien
taatccttgatagtctgttcattat

SEQ ID NO: 2616399 - DNA, 25 bp, Homo sapien
agccataaatcttaggaccaagatc

SEQ ID NO: 2616400 - DNA, 25 bp, Homo sapien
ttaatccttgatagtctgttcatta

SEQ ID NO: 2616401 - DNA, 25 bp, Homo sapien
cacagccataaatcttaggaccaag

SEQ ID NO: 2616402 - DNA, 25 bp, Homo sapien
actattagttgggcttgtggaggac

SEQ ID NO: 2616403 - DNA, 25 bp, Homo sapien
tggaggacaggaacctgttatagtt

SEQ ID NO: 2616404 - DNA, 25 bp, Homo sapien
ctattagttgggcttgtggaggaca

SEQ ID NO: 2616405 - DNA, 25 bp, Homo sapien
gcttgtggaggacaggaacctgtta

SEQ ID NO: 2616406 - DNA, 25 bp, Homo sapien
ttccatgtggtggtcaatgaataat

SEQ ID NO: 2616407 - DNA, 25 bp, Homo sapien
atgtggtggtcaatgaataatgctt

SEQ ID NO: 2616408 - DNA, 25 bp, Homo sapien
ccatgtggtggtcaatgaataatgc

SEQ ID NO: 2616409 - DNA, 25 bp, Homo sapien
catgtggtggtcaatgaataatgct

SEQ ID NO: 2616410 - DNA, 25 bp, Homo sapien
tgtgcacgatgaaggcactggacag

SEQ ID NO: 2616411 - DNA, 25 bp, Homo sapien
gattttgagcgagcttgagtctgtt

SEQ ID NO: 2616412 - DNA, 25 bp, Homo sapien
ctagaacgtgtgcacgatgaaggca

SEQ ID NO: 2616413 - DNA, 25 bp, Homo sapien
aggattttgagcgagcttgagtctg

SEQ ID NO: 2616414 - DNA, 25 bp, Homo sapien
aaactgacagatgtgtctggagagc

SEQ ID NO: 2616415 - DNA, 25 bp, Homo sapien
tcagaaactgacagatgtgtctgga

SEQ ID NO: 2616416 - DNA, 25 bp, Homo sapien
cagaaactgacagatgtgtctggag

SEQ ID NO: 2616417 - DNA, 25 bp, Homo sapien
gaaactgacagatgtgtctggagag

SEQ ID NO: 2616418 - DNA, 25 bp, Homo sapien
aagaaaatgatagaagccttctgtt

SEQ ID NO: 2616419 - DNA, 25 bp, Homo sapien
tctttctttataatgatgttgaaga

SEQ ID NO: 2616420 - DNA, 25 bp, Homo sapien
ccaaggcacaatagtaatctttctt

SEQ ID NO: 2616421 - DNA, 25 bp, Homo sapien
tgccccaaggcacaatagtaatctt

SEQ ID NO: 2616422 - DNA, 25 bp, Homo sapien
ctgtatatcggctttctatcttcat

SEQ ID NO: 2616423 - DNA, 25 bp, Homo sapien
cattgtggagttctaatatgccgtt

SEQ ID NO: 2616424 - DNA, 25 bp, Homo sapien
tgtcattgtggagttctaatatgcc

SEQ ID NO: 2616425 - DNA, 25 bp, Homo sapien
tgtggagttctaatatgccgttttt

SEQ ID NO: 2616426 - DNA, 25 bp, Homo sapien
tggagttctaatatgccgtttttaa

SEQ ID NO: 2616427 - DNA, 25 bp, Homo sapien
gaggagtattgataatttcaagcat

SEQ ID NO: 2616428 - DNA, 25 bp, Homo sapien
aggaggagtattgataatttcaagc

SEQ ID NO: 2616429 - DNA, 25 bp, Homo sapien
gaaggaggagtattgataatttcaa

SEQ ID NO: 2616430 - DNA, 25 bp, Homo sapien
ggaggagtattgataatttcaagca

SEQ ID NO: 2616431 - DNA, 25 bp, Homo sapien
tgacaactgggatatcattactcat

SEQ ID NO: 2616432 - DNA, 25 bp, Homo sapien
ctgacaactgggatatcattactca

SEQ ID NO: 2616433 - DNA, 25 bp, Homo sapien
cttccagttggctgacaactgggat

SEQ ID NO: 2616434 - DNA, 25 bp, Homo sapien
atcttccagttggctgacaactggg

SEQ ID NO: 2616435 - DNA, 25 bp, Homo sapien
agagtggaacagtgccttcaacttt

SEQ ID NO: 2616436 - DNA, 25 bp, Homo sapien
actttgagggggatcacatttggca

SEQ ID NO: 2616437 - DNA, 25 bp, Homo sapien
gggatcacatttggcaatagaggca

SEQ ID NO: 2616438 - DNA, 25 bp, Homo sapien
ccttcaactttgagggggatcacat

SEQ ID NO: 2616439 - DNA, 25 bp, Homo sapien
gaccacaagagaggactaacgcaga

SEQ ID NO: 2616440 - DNA, 25 bp, Homo sapien
tgtgcgggcataattgtcaagtgtc

SEQ ID NO: 2616441 - DNA, 25 bp, Homo sapien
caaagaagtgcatggtgaattggcc

SEQ ID NO: 2616442 - DNA, 25 bp, Homo sapien
cgcagaaacgttggtccgagccatt

SEQ ID NO: 2616443 - DNA, 25 bp, Homo sapien
tttcagtgaagacgaatgaatacag

SEQ ID NO: 2616444 - DNA, 25 bp, Homo sapien
agacgaatgaatacaggccctttcc

SEQ ID NO: 2616445 - DNA, 25 bp, Homo sapien
caaagtactcatctaaacagcccat

SEQ ID NO: 2616446 - DNA, 25 bp, Homo sapien
acaaagtactcatctaaacagccca

SEQ ID NO: 2616447 - DNA, 25 bp, Homo sapien
gggattctatgggactatattcacc

SEQ ID NO: 2616448 - DNA, 25 bp, Homo sapien
cctattcgtgatattctcagtccct

SEQ ID NO: 2616449 - DNA, 25 bp, Homo sapien
gggactatattcacctattcgtgat

SEQ ID NO: 2616450 - DNA, 25 bp, Homo sapien
cacctattcgtgatattctcagtcc

SEQ ID NO: 2616451 - DNA, 25 bp, Homo sapien
ctttcccaggcctgttgagttttga

SEQ ID NO: 2616452 - DNA, 25 bp, Homo sapien
agttttgagcctttccaggcttcta

SEQ ID NO: 2616453 - DNA, 25 bp, Homo sapien
tgagcctttccaggcttctagaggc

SEQ ID NO: 2616454 - DNA, 25 bp, Homo sapien
tctagaggcctgaatttcttgtata

SEQ ID NO: 2616455 - DNA, 25 bp, Homo sapien
tgactttggatcagctggaggactg

SEQ ID NO: 2616456 - DNA, 25 bp, Homo sapien
agatctgagattgttgatttcgaat

SEQ ID NO: 2616457 - DNA, 25 bp, Homo sapien
ggaggactgaagtctcactaacatt

SEQ ID NO: 2616458 - DNA, 25 bp, Homo sapien
gttgatttcgaattcatagttcatg

SEQ ID NO: 2616459 - DNA, 25 bp, Homo sapien
tctgaggtgtcagtgcttgccaagt

SEQ ID NO: 2616460 - DNA, 25 bp, Homo sapien
gctgcaatgacggttgaagtcctca

SEQ ID NO: 2616461 - DNA, 25 bp, Homo sapien
tgtaggtagaatgactgaagctcca

SEQ ID NO: 2616462 - DNA, 25 bp, Homo sapien
ggtgtacagagcacctatgtgccca

SEQ ID NO: 2616463 - DNA, 25 bp, Homo sapien
ttttgtagtatgaattcctcaagtg

SEQ ID NO: 2616464 - DNA, 25 bp, Homo sapien
catttttctcctgctacattctcca

SEQ ID NO: 2616465 - DNA, 25 bp, Homo sapien
tttgttttgcctaggctaattcctc

SEQ ID NO: 2616466 - DNA, 25 bp, Homo sapien
tgctcctaggctatgaaataccaga

SEQ ID NO: 2616467 - DNA, 25 bp, Homo sapien
taagttaattgagtgtgccacaatc

SEQ ID NO: 2616468 - DNA, 25 bp, Homo sapien
cttctaagttaattgagtgtgccac

SEQ ID NO: 2616469 - DNA, 25 bp, Homo sapien
gttaattgagtgtgccacaatcact

SEQ ID NO: 2616470 - DNA, 25 bp, Homo sapien
tatcttctaagttaattgagtgtgc

SEQ ID NO: 2616471 - DNA, 25 bp, Homo sapien
gtctcctgatttccgctgaattagc

SEQ ID NO: 2616472 - DNA, 25 bp, Homo sapien
cctgatttccgctgaattagcactt

SEQ ID NO: 2616473 - DNA, 25 bp, Homo sapien
tctctttctttgacaatagggcatg

SEQ ID NO: 2616474 - DNA, 25 bp, Homo sapien
tctttgacaatagggcatgccagta

SEQ ID NO: 2616475 - DNA, 25 bp, Homo sapien
tccattatttactgtaatgacaccc

SEQ ID NO: 2616476 - DNA, 25 bp, Homo sapien
tttccattatttactgtaatgacac

SEQ ID NO: 2616477 - DNA, 25 bp, Homo sapien
ttccattatttactgtaatgacacc

SEQ ID NO: 2616478 - DNA, 25 bp, Homo sapien
gcatagcatcatcttctgtcgcaat

SEQ ID NO: 2616479 - DNA, 25 bp, Homo sapien
caatttcttctaagtcatgaggctc

SEQ ID NO: 2616480 - DNA, 25 bp, Homo sapien
ccagatttagggtgaacccctcttg

SEQ ID NO: 2616481 - DNA, 25 bp, Homo sapien
gagccttgccataattgccttttaa

SEQ ID NO: 2616482 - DNA, 25 bp, Homo sapien
atctaactggctgagtgtcttgaat

SEQ ID NO: 2616483 - DNA, 25 bp, Homo sapien
catctaactggctgagtgtcttgaa

SEQ ID NO: 2616484 - DNA, 25 bp, Homo sapien
tcattcagtgttatatatccttctg

SEQ ID NO: 2616485 - DNA, 25 bp, Homo sapien
agaaaatataggataggttgagagt

SEQ ID NO: 2616486 - DNA, 25 bp, Homo sapien
aaatgttaataagcggtcaaggtca

SEQ ID NO: 2616487 - DNA, 25 bp, Homo sapien
gttaataagcggtcaaggtcaagaa

SEQ ID NO: 2616488 - DNA, 25 bp, Homo sapien
aggttgagagttaaatctacagaag

SEQ ID NO: 2616489 - DNA, 25 bp, Homo sapien
ggtctcattgacagggcgcccattg

SEQ ID NO: 2616490 - DNA, 25 bp, Homo sapien
cattggtgcgtttatgatcccttag

SEQ ID NO: 2616491 - DNA, 25 bp, Homo sapien
tctgatgttcggatgggtttacgag

SEQ ID NO: 2616492 - DNA, 25 bp, Homo sapien
aagggacccgggctggttgccactg

SEQ ID NO: 2616493 - DNA, 25 bp, Homo sapien
ggactgtaggtgtcagatcccctgg

SEQ ID NO: 2616494 - DNA, 25 bp, Homo sapien
tataggactgtaggtgtcagatccc

SEQ ID NO: 2616495 - DNA, 25 bp, Homo sapien
ttataggactgtaggtgtcagatcc

SEQ ID NO: 2616496 - DNA, 25 bp, Homo sapien
taggactgtaggtgtcagatcccct

SEQ ID NO: 2616497 - DNA, 25 bp, Homo sapien
cgtgcagctgtgaagttaccagctg

SEQ ID NO: 2616498 - DNA, 25 bp, Homo sapien
gtgcagctgtgaagttaccagctgc

SEQ ID NO: 2616499 - DNA, 25 bp, Homo sapien
gcgtgcagctgtgaagttaccagct

SEQ ID NO: 2616500 - DNA, 25 bp, Homo sapien
tgcagctgtgaagttaccagctgca

SEQ ID NO: 2616501 - DNA, 25 bp, Homo sapien
gactctatctttattagtatctttc

SEQ ID NO: 2616502 - DNA, 25 bp, Homo sapien
agactgtgggccaccaaaaaactgg

SEQ ID NO: 2616503 - DNA, 25 bp, Homo sapien
ctgtgggccaccaaaaaactggatc

SEQ ID NO: 2616504 - DNA, 25 bp, Homo sapien
acatttatgactctatctttattag

SEQ ID NO: 2616505 - DNA, 25 bp, Homo sapien
gtcctcgaagccctacgctttcctc

SEQ ID NO: 2616506 - DNA, 25 bp, Homo sapien
agccctacgctttcctccagtaatt

SEQ ID NO: 2616507 - DNA, 25 bp, Homo sapien
catccaaggcgatgtgcttaaagag

SEQ ID NO: 2616508 - DNA, 25 bp, Homo sapien
atccaaggcgatgtgcttaaagaga

SEQ ID NO: 2616509 - DNA, 25 bp, Homo sapien
ttcatcatcgcctggagccggattc

SEQ ID NO: 2616510 - DNA, 25 bp, Homo sapien
tctcatcaatataccaagccccagt

SEQ ID NO: 2616511 - DNA, 25 bp, Homo sapien
tcatcaatataccaagccccagtaa

SEQ ID NO: 2616512 - DNA, 25 bp, Homo sapien
tcaatataccaagccccagtaatat

SEQ ID NO: 2616513 - DNA, 25 bp, Homo sapien
ggatagcttctggtgctattatata

SEQ ID NO: 2616514 - DNA, 25 bp, Homo sapien
gatgttagaccatcgtccatgcgct

SEQ ID NO: 2616515 - DNA, 25 bp, Homo sapien
tatataaagatgttagaccatcgtc

SEQ ID NO: 2616516 - DNA, 25 bp, Homo sapien
acttgctgtttaccatgaggtaggg

SEQ ID NO: 2616517 - DNA, 25 bp, Homo sapien
ccagtgaatcctaggatgaaatgtt

SEQ ID NO: 2616518 - DNA, 25 bp, Homo sapien
ctaaggtgactcttccattccagga

SEQ ID NO: 2616519 - DNA, 25 bp, Homo sapien
tgatatgctggccagtgaatcctag

SEQ ID NO: 2616520 - DNA, 25 bp, Homo sapien
taaggtgactcttccattccaggat

SEQ ID NO: 2616521 - DNA, 25 bp, Homo sapien
gaggagaaaatagaatctgaaggag

SEQ ID NO: 2616522 - DNA, 25 bp, Homo sapien
tctcaggtatccataagttgtggct

SEQ ID NO: 2616523 - DNA, 25 bp, Homo sapien
aatctgaaggagtggccaggttttc

SEQ ID NO: 2616524 - DNA, 25 bp, Homo sapien
tgtggctagaatggaggagaaaata

SEQ ID NO: 2616525 - DNA, 25 bp, Homo sapien
tttacagaggtaaattctccccaga

SEQ ID NO: 2616526 - DNA, 25 bp, Homo sapien
tgccattggctgtctcagtttcgga

SEQ ID NO: 2616527 - DNA, 25 bp, Homo sapien
cggattgagagaatgagtgaatacc

SEQ ID NO: 2616528 - DNA, 25 bp, Homo sapien
tccaagctgtggaaaggcatctcct

SEQ ID NO: 2616529 - DNA, 25 bp, Homo sapien
ggctaaataggtgctccagtgctca

SEQ ID NO: 2616530 - DNA, 25 bp, Homo sapien
gcttcatccatagcaaagtgacctt

SEQ ID NO: 2616531 - DNA, 25 bp, Homo sapien
tgcatggctaaataggtgctccagt

SEQ ID NO: 2616532 - DNA, 25 bp, Homo sapien
ggatttctttctattgaggttctgt

SEQ ID NO: 2616533 - DNA, 25 bp, Homo sapien
gtttctctatatgtcatgcactcca

SEQ ID NO: 2616534 - DNA, 25 bp, Homo sapien
tgtttctctatatgtcatgcactcc

SEQ ID NO: 2616535 - DNA, 25 bp, Homo sapien
aatggaccatagctgaaatattcca

SEQ ID NO: 2616536 - DNA, 25 bp, Homo sapien
catttgtgagttatgtttgtttctc

SEQ ID NO: 2616537 - DNA, 25 bp, Homo sapien
cagagaacggttcaggaattgtgaa

SEQ ID NO: 2616538 - DNA, 25 bp, Homo sapien
tcagacttatatgtctgctttggag

SEQ ID NO: 2616539 - DNA, 25 bp, Homo sapien
atacaaatcagagaacggttcagga

SEQ ID NO: 2616540 - DNA, 25 bp, Homo sapien
gaagtttcagacttatatgtctgct

SEQ ID NO: 2616541 - DNA, 25 bp, Homo sapien
tacaaacaagagcatggggtgatgc

SEQ ID NO: 2616542 - DNA, 25 bp, Homo sapien
attagtgacctcctccaagagtctg

SEQ ID NO: 2616543 - DNA, 25 bp, Homo sapien
tctgaaaacgatctttgcagccagc

SEQ ID NO: 2616544 - DNA, 25 bp, Homo sapien
cagcagctagttggagtatacaaac

SEQ ID NO: 2616545 - DNA, 25 bp, Homo sapien
tctatcccttcttctatctttgacc

SEQ ID NO: 2616546 - DNA, 25 bp, Homo sapien
tcttctatcccttcttctatctttg

SEQ ID NO: 2616547 - DNA, 25 bp, Homo sapien
ccttcttctatctttgaccattgca

SEQ ID NO: 2616548 - DNA, 25 bp, Homo sapien
tcccttcttctatctttgaccattg

SEQ ID NO: 2616549 - DNA, 25 bp, Homo sapien
acattagtatcaatgagaggttggg

SEQ ID NO: 2616550 - DNA, 25 bp, Homo sapien
tataaagatagatctattaatgaga

SEQ ID NO: 2616551 - DNA, 25 bp, Homo sapien
ttagtatcaatgagaggttgggtgc

SEQ ID NO: 2616552 - DNA, 25 bp, Homo sapien
tagtatcaatgagaggttgggtgca

SEQ ID NO: 2616553 - DNA, 25 bp, Homo sapien
tgatgtaacctaatactaagaatac

SEQ ID NO: 2616554 - DNA, 25 bp, Homo sapien
tctcatcaggtgaattttatccata

SEQ ID NO: 2616555 - DNA, 25 bp, Homo sapien
ctccattgtacacatgacttttctg

SEQ ID NO: 2616556 - DNA, 25 bp, Homo sapien
tcatatccagccaaggtaaatctag

SEQ ID NO: 2616557 - DNA, 25 bp, Homo sapien
tttcactatgggaaatgtgatagaa

SEQ ID NO: 2616558 - DNA, 25 bp, Homo sapien
ctttcactatgggaaatgtgataga

SEQ ID NO: 2616559 - DNA, 25 bp, Homo sapien
cctttcactatgggaaatgtgatag

SEQ ID NO: 2616560 - DNA, 25 bp, Homo sapien
ttcactatgggaaatgtgatagaaa

SEQ ID NO: 2616561 - DNA, 25 bp, Homo sapien
caatctctaaggccccaggctgttc

SEQ ID NO: 2616562 - DNA, 25 bp, Homo sapien
ggagcgctgatttagttctgccaaa

SEQ ID NO: 2616563 - DNA, 25 bp, Homo sapien
tgtttcttgctgcagagcaacaaga

SEQ ID NO: 2616564 - DNA, 25 bp, Homo sapien
tttattgtgcttcttgttggagcgc

SEQ ID NO: 2616565 - DNA, 25 bp, Homo sapien
tacacacttgtctgtaaagaagccc

SEQ ID NO: 2616566 - DNA, 25 bp, Homo sapien
tatgtagctgtgtataaccatgacc

SEQ ID NO: 2616567 - DNA, 25 bp, Homo sapien
tgaccaaattttacccactgggatg

SEQ ID NO: 2616568 - DNA, 25 bp, Homo sapien
gatgagagactgctagtcgtaccca

SEQ ID NO: 2616569 - DNA, 25 bp, Homo sapien
ggacaggcttcatctgggtgttttg

SEQ ID NO: 2616570 - DNA, 25 bp, Homo sapien
ttgaaggtggttggcaggctccggc

SEQ ID NO: 2616571 - DNA, 25 bp, Homo sapien
gcaggctccggcttgtattaaagga

SEQ ID NO: 2616572 - DNA, 25 bp, Homo sapien
taaaggactgatgagtaaagggcat

SEQ ID NO: 2616573 - DNA, 25 bp, Homo sapien
gaccgctgctcaacttgacatacat

SEQ ID NO: 2616574 - DNA, 25 bp, Homo sapien
tgaatcgtatgtttgtactaacaga

SEQ ID NO: 2616575 - DNA, 25 bp, Homo sapien
acagaagaccgctgctcaacttgac

SEQ ID NO: 2616576 - DNA, 25 bp, Homo sapien
ttctggtggctttgaatcgtatgtt

SEQ ID NO: 2616577 - DNA, 25 bp, Homo sapien
acccagctgcatgtaaagttgtaaa

SEQ ID NO: 2616578 - DNA, 25 bp, Homo sapien
tgcatgtaaagttgtaaaaacttct

SEQ ID NO: 2616579 - DNA, 25 bp, Homo sapien
aacccagctgcatgtaaagttgtaa

SEQ ID NO: 2616580 - DNA, 25 bp, Homo sapien
gcatccatatacatgagcttttccc

SEQ ID NO: 2616581 - DNA, 25 bp, Homo sapien
ctccttttgccagaataacacttcc

SEQ ID NO: 2616582 - DNA, 25 bp, Homo sapien
tctccttttgccagaataacacttc

SEQ ID NO: 2616583 - DNA, 25 bp, Homo sapien
ctctccttttgccagaataacactt

SEQ ID NO: 2616584 - DNA, 25 bp, Homo sapien
ctaaaaatgtgatctaacacttccc

SEQ ID NO: 2616585 - DNA, 25 bp, Homo sapien
tctaattttctggtagtagaaattc

SEQ ID NO: 2616586 - DNA, 25 bp, Homo sapien
ggaatactttgttatgatgtggaga

SEQ ID NO: 2616587 - DNA, 25 bp, Homo sapien
ggaggaaagaacactatttcaagtg

SEQ ID NO: 2616588 - DNA, 25 bp, Homo sapien
ggatacaaaaccaacctgcaagatt

SEQ ID NO: 2616589 - DNA, 25 bp, Homo sapien
tgcaatcaggttgtgctctacaagt

SEQ ID NO: 2616590 - DNA, 25 bp, Homo sapien
taagccactgttagaatttggaaca

SEQ ID NO: 2616591 - DNA, 25 bp, Homo sapien
tctaacttggaaatcggaatgcttg

SEQ ID NO: 2616592 - DNA, 25 bp, Homo sapien
cactttccatggaaggagttatcat

SEQ ID NO: 2616593 - DNA, 25 bp, Homo sapien
gaacttcactttccatggaaggagt

SEQ ID NO: 2616594 - DNA, 25 bp, Homo sapien
cttcactttccatggaaggagttat

SEQ ID NO: 2616595 - DNA, 25 bp, Homo sapien
ctgaacttcactttccatggaagga

SEQ ID NO: 2616596 - DNA, 25 bp, Homo sapien
tcacttcccgttttggccacagtta

SEQ ID NO: 2616597 - DNA, 25 bp, Homo sapien
gccacagttattgagccacattggg

SEQ ID NO: 2616598 - DNA, 25 bp, Homo sapien
agttattgagccacattggggctga

SEQ ID NO: 2616599 - DNA, 25 bp, Homo sapien
tggccacagttattgagccacattg

SEQ ID NO: 2616600 - DNA, 25 bp, Homo sapien
tctcagtttagagcttgcaatggct

SEQ ID NO: 2616601 - DNA, 25 bp, Homo sapien
tgagctctatcttgggattcatatg

SEQ ID NO: 2616602 - DNA, 25 bp, Homo sapien
gattcatatgtttggattccttcta

SEQ ID NO: 2616603 - DNA, 25 bp, Homo sapien
tcttgacaagattggttatttacaa

SEQ ID NO: 2616604 - DNA, 25 bp, Homo sapien
cataaaatgcgatgcaacacggaac

SEQ ID NO: 2616605 - DNA, 25 bp, Homo sapien
ggaagtccaaacattctccataaga

SEQ ID NO: 2616606 - DNA, 25 bp, Homo sapien
caccaatgacctgatgaagtgatgc

SEQ ID NO: 2616607 - DNA, 25 bp, Homo sapien
aagtgatgccacttcacactgctct

SEQ ID NO: 2616608 - DNA, 25 bp, Homo sapien
aataaatttgaagtacatcgtacat

SEQ ID NO: 2616609 - DNA, 25 bp, Homo sapien
ccaaggtttaagagatttcctgctg

SEQ ID NO: 2616610 - DNA, 25 bp, Homo sapien
tccaaggtttaagagatttcctgct

SEQ ID NO: 2616611 - DNA, 25 bp, Homo sapien
ttccaaggtttaagagatttcctgc

SEQ ID NO: 2616612 - DNA, 25 bp, Homo sapien
cgtttcagatgaggtgctctcgcca

SEQ ID NO: 2616613 - DNA, 25 bp, Homo sapien
cagatgaggtgctctcgccaacttc

SEQ ID NO: 2616614 - DNA, 25 bp, Homo sapien
gaatcaccgtttcagatgaggtgct

SEQ ID NO: 2616615 - DNA, 25 bp, Homo sapien
aagtatgaatcaccgtttcagatga

SEQ ID NO: 2616616 - DNA, 25 bp, Homo sapien
catgcgtgtctgatctgtaggccat

SEQ ID NO: 2616617 - DNA, 25 bp, Homo sapien
tgacatggattaacgcatcatgcgt

SEQ ID NO: 2616618 - DNA, 25 bp, Homo sapien
ggattaacgcatcatgcgtgtctga

SEQ ID NO: 2616619 - DNA, 25 bp, Homo sapien
cgcatcatgcgtgtctgatctgtag

SEQ ID NO: 2616620 - DNA, 25 bp, Homo sapien
tcttttgaatccatatatctgacac

SEQ ID NO: 2616621 - DNA, 25 bp, Homo sapien
aatccatatatctgacacagtgaag

SEQ ID NO: 2616622 - DNA, 25 bp, Homo sapien
ttttgaatccatatatctgacacag

SEQ ID NO: 2616623 - DNA, 25 bp, Homo sapien
tgaatccatatatctgacacagtga

SEQ ID NO: 2616624 - DNA, 25 bp, Homo sapien
ggcacattgcaataatgatggcatc

SEQ ID NO: 2616625 - DNA, 25 bp, Homo sapien
cattgcaataatgatggcatcagta

SEQ ID NO: 2616626 - DNA, 25 bp, Homo sapien
taatgatggcatcagtataagctgt

SEQ ID NO: 2616627 - DNA, 25 bp, Homo sapien
tgatggcatcagtataagctgtcat

SEQ ID NO: 2616628 - DNA, 25 bp, Homo sapien
gaatgctgccatagagcctatcgaa

SEQ ID NO: 2616629 - DNA, 25 bp, Homo sapien
tatgcaggaatgctgccatagagcc

SEQ ID NO: 2616630 - DNA, 25 bp, Homo sapien
tttatgtttatctgtgcctgtgctg

SEQ ID NO: 2616631 - DNA, 25 bp, Homo sapien
agcctatcgaatgcgagtctcagaa

SEQ ID NO: 2616632 - DNA, 25 bp, Homo sapien
tgtttagcaggctgtgacgactttg

SEQ ID NO: 2616633 - DNA, 25 bp, Homo sapien
ctttgcacgggaatatgaaaattta

SEQ ID NO: 2616634 - DNA, 25 bp, Homo sapien
tgatgaatgagccagcagttgaatg

SEQ ID NO: 2616635 - DNA, 25 bp, Homo sapien
cactgatgaatgagccagcagttga

SEQ ID NO: 2616636 - DNA, 25 bp, Homo sapien
gaattgttcactgttgcgttctcat

SEQ ID NO: 2616637 - DNA, 25 bp, Homo sapien
cctgggaattgttcactgttgcgtt

SEQ ID NO: 2616638 - DNA, 25 bp, Homo sapien
aaaggcaaattttgatcttccctgg

SEQ ID NO: 2616639 - DNA, 25 bp, Homo sapien
cataaaggcaaattttgatcttccc

SEQ ID NO: 2616640 - DNA, 25 bp, Homo sapien
cagaaatatagatgatgatgttgca

SEQ ID NO: 2616641 - DNA, 25 bp, Homo sapien
tatagatgatgatgttgcaatggag

SEQ ID NO: 2616642 - DNA, 25 bp, Homo sapien
tgttttcaaacagaggtgttattac

SEQ ID NO: 2616643 - DNA, 25 bp, Homo sapien
aaatatagatgatgatgttgcaatg

SEQ ID NO: 2616644 - DNA, 25 bp, Homo sapien
caatgcagtaagctgagcatgttca

SEQ ID NO: 2616645 - DNA, 25 bp, Homo sapien
gcagcccaatgcagtaagctgagca

SEQ ID NO: 2616646 - DNA, 25 bp, Homo sapien
cacacagcagcccaatgcagtaagc

SEQ ID NO: 2616647 - DNA, 25 bp, Homo sapien
gctgagcatgttcagtgtcttcact

SEQ ID NO: 2616648 - DNA, 25 bp, Homo sapien
tatctgtgcgatattgtacatgacc

SEQ ID NO: 2616649 - DNA, 25 bp, Homo sapien
tctttccacttgtaatatctgtgcg

SEQ ID NO: 2616650 - DNA, 25 bp, Homo sapien
tgcgatattgtacatgacccatcat

SEQ ID NO: 2616651 - DNA, 25 bp, Homo sapien
ctttttctgtatagtcttcagtctt

SEQ ID NO: 2616652 - DNA, 25 bp, Homo sapien
tcttctgaacgtttctcagacctct

SEQ ID NO: 2616653 - DNA, 25 bp, Homo sapien
cttgtgaagtccatttcagttgtta

SEQ ID NO: 2616654 - DNA, 25 bp, Homo sapien
gtttctcagacctctgtgttcttgt

SEQ ID NO: 2616655 - DNA, 25 bp, Homo sapien
tcccctcttctgaacgtttctcaga

SEQ ID NO: 2616656 - DNA, 25 bp, Homo sapien
agtttgaaacagcagatgcatgctt

SEQ ID NO: 2616657 - DNA, 25 bp, Homo sapien
tgaaacagcagatgcatgcttttct

SEQ ID NO: 2616658 - DNA, 25 bp, Homo sapien
gcagtttgaaacagcagatgcatgc

SEQ ID NO: 2616659 - DNA, 25 bp, Homo sapien
tttgaaacagcagatgcatgctttt

SEQ ID NO: 2616660 - DNA, 25 bp, Homo sapien
cagctgaatagcacgacaatttgtc

SEQ ID NO: 2616661 - DNA, 25 bp, Homo sapien
agcacgacaatttgtctggtcaaca

SEQ ID NO: 2616662 - DNA, 25 bp, Homo sapien
gctgaatagcacgacaatttgtctg

SEQ ID NO: 2616663 - DNA, 25 bp, Homo sapien
cttgttcagctgaatagcacgacaa

SEQ ID NO: 2616664 - DNA, 25 bp, Homo sapien
attgccaggtactttgtcaagcccc

SEQ ID NO: 2616665 - DNA, 25 bp, Homo sapien
cccggttgaaatgattctgaggtat

SEQ ID NO: 2616666 - DNA, 25 bp, Homo sapien
gtcaagcccccggttgaaatgattc

SEQ ID NO: 2616667 - DNA, 25 bp, Homo sapien
cattgccaggtactttgtcaagccc

SEQ ID NO: 2616668 - DNA, 25 bp, Homo sapien
tttatgcatacttccaagattttgt

SEQ ID NO: 2616669 - DNA, 25 bp, Homo sapien
tttgtatacgtgtattacctgcaag

SEQ ID NO: 2616670 - DNA, 25 bp, Homo sapien
cgtgtattacctgcaagatcaaata

SEQ ID NO: 2616671 - DNA, 25 bp, Homo sapien
tatacgtgtattacctgcaagatca

SEQ ID NO: 2616672 - DNA, 25 bp, Homo sapien
gcacagcttgtattagatgtaactg

SEQ ID NO: 2616673 - DNA, 25 bp, Homo sapien
atttctcagtaagaagactggtact

SEQ ID NO: 2616674 - DNA, 25 bp, Homo sapien
tgcttgtttgcagcgcgattctttc

SEQ ID NO: 2616675 - DNA, 25 bp, Homo sapien
agatggaaaggcatgctgtgcttgt

SEQ ID NO: 2616676 - DNA, 25 bp, Homo sapien
ctgaagttgggtgctgctgtaaaga

SEQ ID NO: 2616677 - DNA, 25 bp, Homo sapien
gtgctgctgtaaagagccttgctca

SEQ ID NO: 2616678 - DNA, 25 bp, Homo sapien
tgggtgctgctgtaaagagccttgc

SEQ ID NO: 2616679 - DNA, 25 bp, Homo sapien
ttgggtgctgctgtaaagagccttg

SEQ ID NO: 2616680 - DNA, 25 bp, Homo sapien
tttgtgcaaggaaactttctgtttc

SEQ ID NO: 2616681 - DNA, 25 bp, Homo sapien
cttcttgagtcgtaattgtcatgtc

SEQ ID NO: 2616682 - DNA, 25 bp, Homo sapien
cgtaattgtcatgtcaagggtattt

SEQ ID NO: 2616683 - DNA, 25 bp, Homo sapien
gccactgtggagtggtatttgtgca

SEQ ID NO: 2616684 - DNA, 25 bp, Homo sapien
tctcaatttacccacattcattgtc

SEQ ID NO: 2616685 - DNA, 25 bp, Homo sapien
tcaatttacccacattcattgtcat

SEQ ID NO: 2616686 - DNA, 25 bp, Homo sapien
tctctcaatttacccacattcattg

SEQ ID NO: 2616687 - DNA, 25 bp, Homo sapien
tgtctctcaatttacccacattcat

SEQ ID NO: 2616688 - DNA, 25 bp, Homo sapien
tcctgtgcaattgataaccatctgg

SEQ ID NO: 2616689 - DNA, 25 bp, Homo sapien
cttcctatcaaaatttgtccggttg

SEQ ID NO: 2616690 - DNA, 25 bp, Homo sapien
tgtctgctaagggtctactgccttt

SEQ ID NO: 2616691 - DNA, 25 bp, Homo sapien
caattgataaccatctggaaaagtg

SEQ ID NO: 2616692 - DNA, 25 bp, Homo sapien
ttgtagcatcctttgtgtgttcaac

SEQ ID NO: 2616693 - DNA, 25 bp, Homo sapien
tagcatcctttgtgtgttcaaccca

SEQ ID NO: 2616694 - DNA, 25 bp, Homo sapien
tgtagcatcctttgtgtgttcaacc

SEQ ID NO: 2616695 - DNA, 25 bp, Homo sapien
gtagcatcctttgtgtgttcaaccc

SEQ ID NO: 2616696 - DNA, 25 bp, Homo sapien
taggcccgaattgctgaaaacggtc

SEQ ID NO: 2616697 - DNA, 25 bp, Homo sapien
gaaaacggtcattcagtgatcatat

SEQ ID NO: 2616698 - DNA, 25 bp, Homo sapien
tcatggtgagaagtgaaatcttgtg

SEQ ID NO: 2616699 - DNA, 25 bp, Homo sapien
gtgagaagcgaagtcttggagggac

SEQ ID NO: 2616700 - DNA, 25 bp, Homo sapien
tgtcttcagtaccaaatacggttcc

SEQ ID NO: 2616701 - DNA, 25 bp, Homo sapien
gatgcgtcatcttgtcttcagtacc

SEQ ID NO: 2616702 - DNA, 25 bp, Homo sapien
tcttcagtaccaaatacggttccaa

SEQ ID NO: 2616703 - DNA, 25 bp, Homo sapien
tgctagatgcgtcatcttgtcttca

SEQ ID NO: 2616704 - DNA, 25 bp, Homo sapien
tatttcacaagcattggtacagggc

SEQ ID NO: 2616705 - DNA, 25 bp, Homo sapien
tggtacagggcctatgatgtcaggc

SEQ ID NO: 2616706 - DNA, 25 bp, Homo sapien
ttctagacacatatttcacaagcat

SEQ ID NO: 2616707 - DNA, 25 bp, Homo sapien
atgatgtcaggcctttttccaaagt

SEQ ID NO: 2616708 - DNA, 25 bp, Homo sapien
cagtagggaaggagtatatggatac

SEQ ID NO: 2616709 - DNA, 25 bp, Homo sapien
acctgaatgcttgtggcgtctctga

SEQ ID NO: 2616710 - DNA, 25 bp, Homo sapien
gacttttactcctatttcacctgaa

SEQ ID NO: 2616711 - DNA, 25 bp, Homo sapien
tggatactctatagggacttttact

SEQ ID NO: 2616712 - DNA, 25 bp, Homo sapien
tttcttagtactggctgtacaaacc

SEQ ID NO: 2616713 - DNA, 25 bp, Homo sapien
gcaatatcatctagaaagtccctga

SEQ ID NO: 2616714 - DNA, 25 bp, Homo sapien
tattaactgcattgtatctatcact

SEQ ID NO: 2616715 - DNA, 25 bp, Homo sapien
aattgattagctcttttgttcatgc

SEQ ID NO: 2616716 - DNA, 25 bp, Homo sapien
catgatcttgcatcaggaagcactg

SEQ ID NO: 2616717 - DNA, 25 bp, Homo sapien
aattgaaacatccatgcggttggcc

SEQ ID NO: 2616718 - DNA, 25 bp, Homo sapien
gcggttggcctattccagacagtgg

SEQ ID NO: 2616719 - DNA, 25 bp, Homo sapien
aacaatatcagatgtaggacctgcc

SEQ ID NO: 2616720 - DNA, 25 bp, Homo sapien
cagatatagattccatgccattttc

SEQ ID NO: 2616721 - DNA, 25 bp, Homo sapien
ccaccacctgcagacgtctgtttat

SEQ ID NO: 2616722 - DNA, 25 bp, Homo sapien
tgccattttcagctgtaagcgtgtc

SEQ ID NO: 2616723 - DNA, 25 bp, Homo sapien
gacgtctgtttatacctctctggtc

SEQ ID NO: 2616724 - DNA, 25 bp, Homo sapien
ttcataagtttactccctttctgca

SEQ ID NO: 2616725 - DNA, 25 bp, Homo sapien
tggtcattgttttggttaatcggaa

SEQ ID NO: 2616726 - DNA, 25 bp, Homo sapien
ttggtcattgttttggttaatcgga

SEQ ID NO: 2616727 - DNA, 25 bp, Homo sapien
tcataagtttactccctttctgcac

SEQ ID NO: 2616728 - DNA, 25 bp, Homo sapien
aaaatggaaaggctttgcttgttgc

SEQ ID NO: 2616729 - DNA, 25 bp, Homo sapien
aatggaaaggctttgcttgttgcac

SEQ ID NO: 2616730 - DNA, 25 bp, Homo sapien
ggacaaaatggaaaggctttgcttg

SEQ ID NO: 2616731 - DNA, 25 bp, Homo sapien
tagggacaaaatggaaaggctttgc

SEQ ID NO: 2616732 - DNA, 25 bp, Homo sapien
aactctagccctttcacatccttga

SEQ ID NO: 2616733 - DNA, 25 bp, Homo sapien
aaactctagccctttcacatccttg

SEQ ID NO: 2616734 - DNA, 25 bp, Homo sapien
caaactctagccctttcacatcctt

SEQ ID NO: 2616735 - DNA, 25 bp, Homo sapien
tcaatattctattccattcccaata

SEQ ID NO: 2616736 - DNA, 25 bp, Homo sapien
aaacagcacggcaaggctgcaagat

SEQ ID NO: 2616737 - DNA, 25 bp, Homo sapien
gcacggcaaggctgcaagattttat

SEQ ID NO: 2616738 - DNA, 25 bp, Homo sapien
agcacggcaaggctgcaagatttta

SEQ ID NO: 2616739 - DNA, 25 bp, Homo sapien
acagcacggcaaggctgcaagattt

SEQ ID NO: 2616740 - DNA, 25 bp, Homo sapien
cagaaaattagatcccttaacgtca

SEQ ID NO: 2616741 - DNA, 25 bp, Homo sapien
gatgtagcccgattatatttttctc

SEQ ID NO: 2616742 - DNA, 25 bp, Homo sapien
taattacctaacaaatttgtggcag

SEQ ID NO: 2616743 - DNA, 25 bp, Homo sapien
ttatccttaggatatgcacttccca

SEQ ID NO: 2616744 - DNA, 25 bp, Homo sapien
gcttacacaggatccataatttttc

SEQ ID NO: 2616745 - DNA, 25 bp, Homo sapien
cacgtgtcaggcagacatcttcctc

SEQ ID NO: 2616746 - DNA, 25 bp, Homo sapien
catcttcctcagtgtgcaattgctt

SEQ ID NO: 2616747 - DNA, 25 bp, Homo sapien
ttagtccattgaaacgccacgtgtc

SEQ ID NO: 2616748 - DNA, 25 bp, Homo sapien
gccatgagaagggacttctgaatac

SEQ ID NO: 2616749 - DNA, 25 bp, Homo sapien
ctgtcttagtaagggatttggctcc

SEQ ID NO: 2616750 - DNA, 25 bp, Homo sapien
gaatacgacggataaactgtcttag

SEQ ID NO: 2616751 - DNA, 25 bp, Homo sapien
gaaacactttccatactcttgctgc

SEQ ID NO: 2616752 - DNA, 25 bp, Homo sapien
tttagttttctgatttttcactagc

SEQ ID NO: 2616753 - DNA, 25 bp, Homo sapien
tagttttctgatttttcactagcgc

SEQ ID NO: 2616754 - DNA, 25 bp, Homo sapien
gttttctgatttttcactagcgcca

SEQ ID NO: 2616755 - DNA, 25 bp, Homo sapien
ttttctgatttttcactagcgccat

SEQ ID NO: 2616756 - DNA, 25 bp, Homo sapien
ttttcgccgatctctccacgcaatt

SEQ ID NO: 2616757 - DNA, 25 bp, Homo sapien
gccgatctctccacgcaattattgg

SEQ ID NO: 2616758 - DNA, 25 bp, Homo sapien
ttttttcgccgatctctccacgcaa

SEQ ID NO: 2616759 - DNA, 25 bp, Homo sapien
ctctccacgcaattattggttgaac

SEQ ID NO: 2616760 - DNA, 25 bp, Homo sapien
tagcagctgtttgttgcttggttca

SEQ ID NO: 2616761 - DNA, 25 bp, Homo sapien
tcactggagcatatgatgctgaacc

SEQ ID NO: 2616762 - DNA, 25 bp, Homo sapien
tgctgaaccaaaccatgggtcaata

SEQ ID NO: 2616763 - DNA, 25 bp, Homo sapien
cttggttcactggagcatatgatgc

SEQ ID NO: 2616764 - DNA, 25 bp, Homo sapien
gggaacttcgcgcatattaaatcct

SEQ ID NO: 2616765 - DNA, 25 bp, Homo sapien
atgggaacttcgcgcatattaaatc

SEQ ID NO: 2616766 - DNA, 25 bp, Homo sapien
atatatgggaacttcgcgcatatta

SEQ ID NO: 2616767 - DNA, 25 bp, Homo sapien
atatgggaacttcgcgcatattaaa

SEQ ID NO: 2616768 - DNA, 25 bp, Homo sapien
cagtgatgctacgtgcgggttaagc

SEQ ID NO: 2616769 - DNA, 25 bp, Homo sapien
tgtcagtgatgctacgtgcgggtta

SEQ ID NO: 2616770 - DNA, 25 bp, Homo sapien
catgtcagtgatgctacgtgcgggt

SEQ ID NO: 2616771 - DNA, 25 bp, Homo sapien
tcagtgatgctacgtgcgggttaag

SEQ ID NO: 2616772 - DNA, 25 bp, Homo sapien
aaagactcttgggactagcagtgga

SEQ ID NO: 2616773 - DNA, 25 bp, Homo sapien
agtggaatccttgctattgattggc

SEQ ID NO: 2616774 - DNA, 25 bp, Homo sapien
ttgtaccactcttggaaaagactct

SEQ ID NO: 2616775 - DNA, 25 bp, Homo sapien
tagcttcagacaggctagattgatt

SEQ ID NO: 2616776 - DNA, 25 bp, Homo sapien
ggaaggaacacttggctcatattct

SEQ ID NO: 2616777 - DNA, 25 bp, Homo sapien
ttccatggtcaattccaggtctcca

SEQ ID NO: 2616778 - DNA, 25 bp, Homo sapien
aagcagaggactcattgtctgattc

SEQ ID NO: 2616779 - DNA, 25 bp, Homo sapien
gccaggccataacatggaaggaaca

SEQ ID NO: 2616780 - DNA, 25 bp, Homo sapien
acatccatctgataactggattcca

SEQ ID NO: 2616781 - DNA, 25 bp, Homo sapien
catccatctgataactggattccag

SEQ ID NO: 2616782 - DNA, 25 bp, Homo sapien
cacatccatctgataactggattcc

SEQ ID NO: 2616783 - DNA, 25 bp, Homo sapien
tcacatccatctgataactggattc

SEQ ID NO: 2616784 - DNA, 25 bp, Homo sapien
gatatttgcatggtaaagtgtacaa

SEQ ID NO: 2616785 - DNA, 25 bp, Homo sapien
caaaacagtttagcttgggacaaga

SEQ ID NO: 2616786 - DNA, 25 bp, Homo sapien
gacatacacttttgactatagaggg

SEQ ID NO: 2616787 - DNA, 25 bp, Homo sapien
gggacaagacagtagaagacacaaa

SEQ ID NO: 2616788 - DNA, 25 bp, Homo sapien
tgcatccccagcttttgtcatgaga

SEQ ID NO: 2616789 - DNA, 25 bp, Homo sapien
ccagggatccccttctggacaaaga

SEQ ID NO: 2616790 - DNA, 25 bp, Homo sapien
ggatctgtatcctgaacaccaggga

SEQ ID NO: 2616791 - DNA, 25 bp, Homo sapien
cataaagtcatcaaggtacaagcct

SEQ ID NO: 2616792 - DNA, 25 bp, Homo sapien
ttgacaggattcaattccttctagc

SEQ ID NO: 2616793 - DNA, 25 bp, Homo sapien
attccttctagctatagggctgagg

SEQ ID NO: 2616794 - DNA, 25 bp, Homo sapien
gacaggattcaattccttctagcta

SEQ ID NO: 2616795 - DNA, 25 bp, Homo sapien
tatagggctgaggtcaccattttca

SEQ ID NO: 2616796 - DNA, 25 bp, Homo sapien
ctctgcggggacatagttaaatcgt

SEQ ID NO: 2616797 - DNA, 25 bp, Homo sapien
cctaagttctctgcggggacatagt

SEQ ID NO: 2616798 - DNA, 25 bp, Homo sapien
gattatctgttcttacataatccat

SEQ ID NO: 2616799 - DNA, 25 bp, Homo sapien
tagttaaatcgtggattatctgttc

SEQ ID NO: 2616800 - DNA, 25 bp, Homo sapien
tgtggggggttggaatatgcagcaa

SEQ ID NO: 2616801 - DNA, 25 bp, Homo sapien
gagctcgatattctgtatttatgta

SEQ ID NO: 2616802 - DNA, 25 bp, Homo sapien
gcaataggagctcgatattctgtat

SEQ ID NO: 2616803 - DNA, 25 bp, Homo sapien
tatgcagcaataggagctcgatatt

SEQ ID NO: 2616804 - DNA, 25 bp, Homo sapien
tgttacatcactcaggtatcaagcc

SEQ ID NO: 2616805 - DNA, 25 bp, Homo sapien
tttgttgcctaggtaaaccagtgtc

SEQ ID NO: 2616806 - DNA, 25 bp, Homo sapien
gagcagattgttacatcactcaggt

SEQ ID NO: 2616807 - DNA, 25 bp, Homo sapien
agtgtcatgaaggtttgttgagcag

SEQ ID NO: 2616808 - DNA, 25 bp, Homo sapien
gcacatgacgctgctccagaatgtc

SEQ ID NO: 2616809 - DNA, 25 bp, Homo sapien
gtaacatctgcagtgagtgatgagt

SEQ ID NO: 2616810 - DNA, 25 bp, Homo sapien
taaagtaacatctgcagtgagtgat

SEQ ID NO: 2616811 - DNA, 25 bp, Homo sapien
ctgcacatgacgctgctccagaatg

SEQ ID NO: 2616812 - DNA, 25 bp, Homo sapien
catagaaggctgagatgatactatt

SEQ ID NO: 2616813 - DNA, 25 bp, Homo sapien
atattgccttgatttcatagaaggc

SEQ ID NO: 2616814 - DNA, 25 bp, Homo sapien
aaggctgagatgatactattttctc

SEQ ID NO: 2616815 - DNA, 25 bp, Homo sapien
attgccttgatttcatagaaggctg

SEQ ID NO: 2616816 - DNA, 25 bp, Homo sapien
cttcagtatgaagcctgattccaca

SEQ ID NO: 2616817 - DNA, 25 bp, Homo sapien
cagtatgaagcctgattccacactt

SEQ ID NO: 2616818 - DNA, 25 bp, Homo sapien
tcagtatgaagcctgattccacact

SEQ ID NO: 2616819 - DNA, 25 bp, Homo sapien
gtatgaagcctgattccacacttct

SEQ ID NO: 2616820 - DNA, 25 bp, Homo sapien
ctaccagctggattttttcttatga

SEQ ID NO: 2616821 - DNA, 25 bp, Homo sapien
tcttatgactgtttttgactggtgg

SEQ ID NO: 2616822 - DNA, 25 bp, Homo sapien
tgactgtttttgactggtggccgag

SEQ ID NO: 2616823 - DNA, 25 bp, Homo sapien
ttttcttatgactgtttttgactgg

SEQ ID NO: 2616824 - DNA, 25 bp, Homo sapien
gctccgtggagcaaggtaaacatgt

SEQ ID NO: 2616825 - DNA, 25 bp, Homo sapien
tttttcacaactaggagagctctcc

SEQ ID NO: 2616826 - DNA, 25 bp, Homo sapien
ccagccagtaggttagcagctccgt

SEQ ID NO: 2616827 - DNA, 25 bp, Homo sapien
aaaaccattgttcctgtcatgcaga

SEQ ID NO: 2616828 - DNA, 25 bp, Homo sapien
caacccttgcaagcctcagatgaat

SEQ ID NO: 2616829 - DNA, 25 bp, Homo sapien
ggtagggcactgtccaacccttgca

SEQ ID NO: 2616830 - DNA, 25 bp, Homo sapien
gcctcagatgaatatggctctcgca

SEQ ID NO: 2616831 - DNA, 25 bp, Homo sapien
tatggctctcgcattaagttcacca

SEQ ID NO: 2616832 - DNA, 25 bp, Homo sapien
gcttggctacaatcatcaagattat

SEQ ID NO: 2616833 - DNA, 25 bp, Homo sapien
gaataattaaaatggcttgtggaag

SEQ ID NO: 2616834 - DNA, 25 bp, Homo sapien
atggcttgtggaagtacatttaggg

SEQ ID NO: 2616835 - DNA, 25 bp, Homo sapien
agcttggctacaatcatcaagatta

SEQ ID NO: 2616836 - DNA, 25 bp, Homo sapien
gatgcgtgtgcttccagtctgagcc

SEQ ID NO: 2616837 - DNA, 25 bp, Homo sapien
aatattgtttgggagatgcgtgtgc

SEQ ID NO: 2616838 - DNA, 25 bp, Homo sapien
tcctcagagtgaaccatgaggactc

SEQ ID NO: 2616839 - DNA, 25 bp, Homo sapien
tctaaagaatactgtcccattgtcc

SEQ ID NO: 2616840 - DNA, 25 bp, Homo sapien
cccgtcacgatgagaccaggagcaa

SEQ ID NO: 2616841 - DNA, 25 bp, Homo sapien
ggcaggaccaggcccgtcacgatga

SEQ ID NO: 2616842 - DNA, 25 bp, Homo sapien
agctttgcaagttaagcaagttaag

SEQ ID NO: 2616843 - DNA, 25 bp, Homo sapien
caagttaagcaagttaagtgtgagg

SEQ ID NO: 2616844 - DNA, 25 bp, Homo sapien
tgcaagttaagcaagttaagtgtga

SEQ ID NO: 2616845 - DNA, 25 bp, Homo sapien
ctttgcaagttaagcaagttaagtg

SEQ ID NO: 2616846 - DNA, 25 bp, Homo sapien
ccataagctaacttggtcgttttca

SEQ ID NO: 2616847 - DNA, 25 bp, Homo sapien
tctattaataacctgcgtctgaaac

SEQ ID NO: 2616848 - DNA, 25 bp, Homo sapien
tttcccaagtctattaataacctgc

SEQ ID NO: 2616849 - DNA, 25 bp, Homo sapien
caagtctattaataacctgcgtctg

SEQ ID NO: 2616850 - DNA, 25 bp, Homo sapien
tattaataacctgcgtctgaaacac

SEQ ID NO: 2616851 - DNA, 25 bp, Homo sapien
gacaacagtagttttctggccaggg

SEQ ID NO: 2616852 - DNA, 25 bp, Homo sapien
agtgacaacagtagttttctggcca

SEQ ID NO: 2616853 - DNA, 25 bp, Homo sapien
caacagtagttttctggccagggtc

SEQ ID NO: 2616854 - DNA, 25 bp, Homo sapien
cagtagttttctggccagggtcatg

SEQ ID NO: 2616855 - DNA, 25 bp, Homo sapien
gttcaggaattacaaaagcactcac

SEQ ID NO: 2616856 - DNA, 25 bp, Homo sapien
ttcaggaattacaaaagcactcact

SEQ ID NO: 2616857 - DNA, 25 bp, Homo sapien
ttgttcaggaattacaaaagcactc

SEQ ID NO: 2616858 - DNA, 25 bp, Homo sapien
tgttcaggaattacaaaagcactca

SEQ ID NO: 2616859 - DNA, 25 bp, Homo sapien
atttctttttgtcactgttggtctc

SEQ ID NO: 2616860 - DNA, 25 bp, Homo sapien
tctttttgtcactgttggtctccat

SEQ ID NO: 2616861 - DNA, 25 bp, Homo sapien
ttctacaggtaatttctttttgtca

SEQ ID NO: 2616862 - DNA, 25 bp, Homo sapien
tctacaggtaatttctttttgtcac

SEQ ID NO: 2616863 - DNA, 25 bp, Homo sapien
ttcctattcagtcatattgcccatg

SEQ ID NO: 2616864 - DNA, 25 bp, Homo sapien
gttcctattcagtcatattgcccat

SEQ ID NO: 2616865 - DNA, 25 bp, Homo sapien
tcctattcagtcatattgcccatga

SEQ ID NO: 2616866 - DNA, 25 bp, Homo sapien
tttattctgaccctatgtgtatctt

SEQ ID NO: 2616867 - DNA, 25 bp, Homo sapien
taaaagtctgcaatggaatcttttc

SEQ ID NO: 2616868 - DNA, 25 bp, Homo sapien
tcttaatgtcacaatgtactcaatt

SEQ ID NO: 2616869 - DNA, 25 bp, Homo sapien
cttaatgtcacaatgtactcaattt

SEQ ID NO: 2616870 - DNA, 25 bp, Homo sapien
ccccatatcgatgtcttaatgtcac

SEQ ID NO: 2616871 - DNA, 25 bp, Homo sapien
agtgcactattgtgctgctcatcga

SEQ ID NO: 2616872 - DNA, 25 bp, Homo sapien
tatcattcatgaacctgcctaaaaa

SEQ ID NO: 2616873 - DNA, 25 bp, Homo sapien
tgctcatcgattataagtgaagtag

SEQ ID NO: 2616874 - DNA, 25 bp, Homo sapien
aaagtaacttccgatggtggaatga

SEQ ID NO: 2616875 - DNA, 25 bp, Homo sapien
tcaccagaaaggtatgagtgtttct

SEQ ID NO: 2616876 - DNA, 25 bp, Homo sapien
aatgtacaaagttttattgtcacca

SEQ ID NO: 2616877 - DNA, 25 bp, Homo sapien
tattgtcaccagaaaggtatgagtg

SEQ ID NO: 2616878 - DNA, 25 bp, Homo sapien
gtttctgttggtctacatctttcat

SEQ ID NO: 2616879 - DNA, 25 bp, Homo sapien
cggaagagtaaaagcatatcttaca

SEQ ID NO: 2616880 - DNA, 25 bp, Homo sapien
gaaggcggaagagtaaaagcatatc

SEQ ID NO: 2616881 - DNA, 25 bp, Homo sapien
aaggcggaagagtaaaagcatatct

SEQ ID NO: 2616882 - DNA, 25 bp, Homo sapien
ggcggaagagtaaaagcatatctta

SEQ ID NO: 2616883 - DNA, 25 bp, Homo sapien
tatgtaatgttcctccttatgcccc

SEQ ID NO: 2616884 - DNA, 25 bp, Homo sapien
atgtaatgttcctccttatgcccca

SEQ ID NO: 2616885 - DNA, 25 bp, Homo sapien
tgtaatgttcctccttatgccccat

SEQ ID NO: 2616886 - DNA, 25 bp, Homo sapien
ctatgtaatgttcctccttatgccc

SEQ ID NO: 2616887 - DNA, 25 bp, Homo sapien
tgtaagcttcaagacctaggaaagc

SEQ ID NO: 2616888 - DNA, 25 bp, Homo sapien
gctgtctgtaagcttcaagacctag

SEQ ID NO: 2616889 - DNA, 25 bp, Homo sapien
tgattgattatggtgcctgagaagt

SEQ ID NO: 2616890 - DNA, 25 bp, Homo sapien
tataattcagtataagctcaaaggc

SEQ ID NO: 2616891 - DNA, 25 bp, Homo sapien
cctttgggtgagtaggcaagatcag

SEQ ID NO: 2616892 - DNA, 25 bp, Homo sapien
taaggagaattcataaagctaccac

SEQ ID NO: 2616893 - DNA, 25 bp, Homo sapien
caagttccgaatcattggatcattt

SEQ ID NO: 2616894 - DNA, 25 bp, Homo sapien
agctaccacttttcaagttccgaat

SEQ ID NO: 2616895 - DNA, 25 bp, Homo sapien
tcaagtgtattttacttccctgatt

SEQ ID NO: 2616896 - DNA, 25 bp, Homo sapien
ggctctgtgtctcttactagctgtt

SEQ ID NO: 2616897 - DNA, 25 bp, Homo sapien
tacttccctgatttctggctctgtg

SEQ ID NO: 2616898 - DNA, 25 bp, Homo sapien
tcttactagctgttcctttgatgct

SEQ ID NO: 2616899 - DNA, 25 bp, Homo sapien
cggaaacaggatgcacttcaatgct

SEQ ID NO: 2616900 - DNA, 25 bp, Homo sapien
caatgctttagtccagcgaatcacg

SEQ ID NO: 2616901 - DNA, 25 bp, Homo sapien
gaaagggactggctagaacagacca

SEQ ID NO: 2616902 - DNA, 25 bp, Homo sapien
tctactttaggcagctttccggagc

SEQ ID NO: 2616903 - DNA, 25 bp, Homo sapien
tctgcccactagacagaaccctttg

SEQ ID NO: 2616904 - DNA, 25 bp, Homo sapien
ttttgttgcattactctccttggcc

SEQ ID NO: 2616905 - DNA, 25 bp, Homo sapien
taggaactctggcttttaactctga

SEQ ID NO: 2616906 - DNA, 25 bp, Homo sapien
tgtccacggttctttaggaactctg

SEQ ID NO: 2616907 - DNA, 25 bp, Homo sapien
atacacataatgaatgcccccattc

SEQ ID NO: 2616908 - DNA, 25 bp, Homo sapien
tgcctctctctagcacgaggactga

SEQ ID NO: 2616909 - DNA, 25 bp, Homo sapien
caatttaaaaggtagattatctgcc

SEQ ID NO: 2616910 - DNA, 25 bp, Homo sapien
gactgaatatgcaatgatggagaag

SEQ ID NO: 2616911 - DNA, 25 bp, Homo sapien
tgtaggtgccatcagatccagatgt

SEQ ID NO: 2616912 - DNA, 25 bp, Homo sapien
tcgctcagagtccaagttctgtagg

SEQ ID NO: 2616913 - DNA, 25 bp, Homo sapien
tggtcactgattgtcgctcagagtc

SEQ ID NO: 2616914 - DNA, 25 bp, Homo sapien
gatgtgaccctctgtagttaggaga

SEQ ID NO: 2616915 - DNA, 25 bp, Homo sapien
tacgtaggcttatattctgccaatc

SEQ ID NO: 2616916 - DNA, 25 bp, Homo sapien
gcaaaataaggctgtgagatggtgt

SEQ ID NO: 2616917 - DNA, 25 bp, Homo sapien
tgccaatcagaattcattcctttgg

SEQ ID NO: 2616918 - DNA, 25 bp, Homo sapien
taatagagccttttggtcaccagac

SEQ ID NO: 2616919 - DNA, 25 bp, Homo sapien
ccattttgtagatgtaggttgggaa

SEQ ID NO: 2616920 - DNA, 25 bp, Homo sapien
tatcacagtctgattaaggttggct

SEQ ID NO: 2616921 - DNA, 25 bp, Homo sapien
gttttatttcctcatcatatcacag

SEQ ID NO: 2616922 - DNA, 25 bp, Homo sapien
ctgaaaacttgcgaatcagacccat

SEQ ID NO: 2616923 - DNA, 25 bp, Homo sapien
tcaagtgacatagaatattgtgcca

SEQ ID NO: 2616924 - DNA, 25 bp, Homo sapien
cctctcaagtgacatagaatattgt

SEQ ID NO: 2616925 - DNA, 25 bp, Homo sapien
caagtgacatagaatattgtgccat

SEQ ID NO: 2616926 - DNA, 25 bp, Homo sapien
ttgcctctcaagtgacatagaatat

SEQ ID NO: 2616927 - DNA, 25 bp, Homo sapien
cggcatccaaatctcgcagcatcat

SEQ ID NO: 2616928 - DNA, 25 bp, Homo sapien
gtaaacctctttagcacggcatcca

SEQ ID NO: 2616929 - DNA, 25 bp, Homo sapien
ttagcacggcatccaaatctcgcag

SEQ ID NO: 2616930 - DNA, 25 bp, Homo sapien
tctttagcacggcatccaaatctcg

SEQ ID NO: 2616931 - DNA, 25 bp, Homo sapien
gctctcgtaattcaggggacaagtg

SEQ ID NO: 2616932 - DNA, 25 bp, Homo sapien
aataagaggctctcgtaattcaggg

SEQ ID NO: 2616933 - DNA, 25 bp, Homo sapien
attcaggggacaagtgaaaccactt

SEQ ID NO: 2616934 - DNA, 25 bp, Homo sapien
caggggacaagtgaaaccacttcag

SEQ ID NO: 2616935 - DNA, 25 bp, Homo sapien
tgaaggagcatgaacaaggatagaa

SEQ ID NO: 2616936 - DNA, 25 bp, Homo sapien
gatagaatcagaaattcgaaggaag

SEQ ID NO: 2616937 - DNA, 25 bp, Homo sapien
ggcacaaactctaaacgaaacttca

SEQ ID NO: 2616938 - DNA, 25 bp, Homo sapien
cttcaaacctcggagaagaatggtg

SEQ ID NO: 2616939 - DNA, 25 bp, Homo sapien
gattgtcaaactggagtcatcacct

SEQ ID NO: 2616940 - DNA, 25 bp, Homo sapien
ctttgattgtcaaactggagtcatc

SEQ ID NO: 2616941 - DNA, 25 bp, Homo sapien
gaagccgtggatcatttctcatgtg

SEQ ID NO: 2616942 - DNA, 25 bp, Homo sapien
tcccaggtactgtaggaagccgtgg

SEQ ID NO: 2616943 - DNA, 25 bp, Homo sapien
gaattacaccccaaatagctgatta

SEQ ID NO: 2616944 - DNA, 25 bp, Homo sapien
gctgattattgccaaatacctgatg

SEQ ID NO: 2616945 - DNA, 25 bp, Homo sapien
tccggaattacaccccaaatagctg

SEQ ID NO: 2616946 - DNA, 25 bp, Homo sapien
cctgatgacgattggatggatttca

SEQ ID NO: 2616947 - DNA, 25 bp, Homo sapien
acactgacttgattcactgttgagt

SEQ ID NO: 2616948 - DNA, 25 bp, Homo sapien
actgacttgattcactgttgagttc

SEQ ID NO: 2616949 - DNA, 25 bp, Homo sapien
cactgacttgattcactgttgagtt

SEQ ID NO: 2616950 - DNA, 25 bp, Homo sapien
ctgacttgattcactgttgagttct

SEQ ID NO: 2616951 - DNA, 25 bp, Homo sapien
catgacagcaatgcaactggaaggt

SEQ ID NO: 2616952 - DNA, 25 bp, Homo sapien
gacccatggaatcggatgtagttgg

SEQ ID NO: 2616953 - DNA, 25 bp, Homo sapien
tggagataatgatgcagacccatgg

SEQ ID NO: 2616954 - DNA, 25 bp, Homo sapien
tctctttaacacaaacatgacagca

SEQ ID NO: 2616955 - DNA, 25 bp, Homo sapien
ctgatcgaactccttattacagaga

SEQ ID NO: 2616956 - DNA, 25 bp, Homo sapien
tcataccagtattaggccttctatt

SEQ ID NO: 2616957 - DNA, 25 bp, Homo sapien
ttctattccctgatcgaactcctta

SEQ ID NO: 2616958 - DNA, 25 bp, Homo sapien
ataccagtattaggccttctattcc

SEQ ID NO: 2616959 - DNA, 25 bp, Homo sapien
tagataaggacggtttcctgcagtc

SEQ ID NO: 2616960 - DNA, 25 bp, Homo sapien
gagatagtagataaggacggtttcc

SEQ ID NO: 2616961 - DNA, 25 bp, Homo sapien
aaggacggtttcctgcagtctcttg

SEQ ID NO: 2616962 - DNA, 25 bp, Homo sapien
ctgcatgtacgagatagtagataag

SEQ ID NO: 2616963 - DNA, 25 bp, Homo sapien
gatggcggccgtggagactttcttc

SEQ ID NO: 2616964 - DNA, 25 bp, Homo sapien
ggagactttcttccggtcatagtcc

SEQ ID NO: 2616965 - DNA, 25 bp, Homo sapien
ccagttcttttaatcctggccaaga

SEQ ID NO: 2616966 - DNA, 25 bp, Homo sapien
cttgtagcttccatctccagttctt

SEQ ID NO: 2616967 - DNA, 25 bp, Homo sapien
tcatccacgggatcaacctcacaaa

SEQ ID NO: 2616968 - DNA, 25 bp, Homo sapien
taataaggccttgaacacctcatcc

SEQ ID NO: 2616969 - DNA, 25 bp, Homo sapien
tctcactaataaggccttgaacacc

SEQ ID NO: 2616970 - DNA, 25 bp, Homo sapien
gatcaacctcacaaacagaagtcct

SEQ ID NO: 2616971 - DNA, 25 bp, Homo sapien
gtcagccactgacaaactacttcag

SEQ ID NO: 2616972 - DNA, 25 bp, Homo sapien
tcctcagcataagatggtatggagt

SEQ ID NO: 2616973 - DNA, 25 bp, Homo sapien
cttaataccaggtgagtcagccact

SEQ ID NO: 2616974 - DNA, 25 bp, Homo sapien
catgaaagctttattgatggcatgc

SEQ ID NO: 2616975 - DNA, 25 bp, Homo sapien
tcaatggtccacattgggtccatac

SEQ ID NO: 2616976 - DNA, 25 bp, Homo sapien
ccacattgggtccatacgtactgta

SEQ ID NO: 2616977 - DNA, 25 bp, Homo sapien
atggtccacattgggtccatacgta

SEQ ID NO: 2616978 - DNA, 25 bp, Homo sapien
ggtccacattgggtccatacgtact

SEQ ID NO: 2616979 - DNA, 25 bp, Homo sapien
tattcagcatagtcttgctcgtccc

SEQ ID NO: 2616980 - DNA, 25 bp, Homo sapien
tgtttatgccttcagtcacaaattg

SEQ ID NO: 2616981 - DNA, 25 bp, Homo sapien
gtcacaaattgatgccataactcaa

SEQ ID NO: 2616982 - DNA, 25 bp, Homo sapien
taacttccaaagatattgtaactat

SEQ ID NO: 2616983 - DNA, 25 bp, Homo sapien
gggtaggaacactgtcagtagagtc

SEQ ID NO: 2616984 - DNA, 25 bp, Homo sapien
agtagagtcttcatgcatgtctttt

SEQ ID NO: 2616985 - DNA, 25 bp, Homo sapien
taggaacactgtcagtagagtcttc

SEQ ID NO: 2616986 - DNA, 25 bp, Homo sapien
caccaccaggggtaggaacactgtc

SEQ ID NO: 2616987 - DNA, 25 bp, Homo sapien
actagtgagcccatataaaactaca

SEQ ID NO: 2616988 - DNA, 25 bp, Homo sapien
tattcatagtctgatatctgggtgc

SEQ ID NO: 2616989 - DNA, 25 bp, Homo sapien
ggagacaaactaggcactttgtgcc

SEQ ID NO: 2616990 - DNA, 25 bp, Homo sapien
gtaataaagcctgtacttgttcagg

SEQ ID NO: 2616991 - DNA, 25 bp, Homo sapien
gacctttaagcacaagaacaccttg

SEQ ID NO: 2616992 - DNA, 25 bp, Homo sapien
caattaaactgtgttgtctctgcag

SEQ ID NO: 2616993 - DNA, 25 bp, Homo sapien
tgcagtgcgttttatcacaagaaca

SEQ ID NO: 2616994 - DNA, 25 bp, Homo sapien
tgcctcagccaattaaactgtgttg

SEQ ID NO: 2616995 - DNA, 25 bp, Homo sapien
tccagctagacgtagtaagttctcc

SEQ ID NO: 2616996 - DNA, 25 bp, Homo sapien
cctccagctagacgtagtaagttct

SEQ ID NO: 2616997 - DNA, 25 bp, Homo sapien
atcctccagctagacgtagtaagtt

SEQ ID NO: 2616998 - DNA, 25 bp, Homo sapien
cagctagacgtagtaagttctccaa

SEQ ID NO: 2616999 - DNA, 25 bp, Homo sapien
ggcagaacttggcatgaggactaga

SEQ ID NO: 2617000 - DNA, 25 bp, Homo sapien
cagaacttggcatgaggactagaga

SEQ ID NO: 2617001 - DNA, 25 bp, Homo sapien
gccagcaatagagcatttcttaggg

SEQ ID NO: 2617002 - DNA, 25 bp, Homo sapien
cttggcttccaatatgccatggcca

SEQ ID NO: 2617003 - DNA, 25 bp, Homo sapien
acaatgaaacatctcctcatggagc

SEQ ID NO: 2617004 - DNA, 25 bp, Homo sapien
aacatctcctcatggagcttgagtt

SEQ ID NO: 2617005 - DNA, 25 bp, Homo sapien
gacaatgaaacatctcctcatggag

SEQ ID NO: 2617006 - DNA, 25 bp, Homo sapien
tgaaacatctcctcatggagcttga

SEQ ID NO: 2617007 - DNA, 25 bp, Homo sapien
cctccaacaaaataatgtaaacaca

SEQ ID NO: 2617008 - DNA, 25 bp, Homo sapien
ctccaacaaaataatgtaaacacat

SEQ ID NO: 2617009 - DNA, 25 bp, Homo sapien
ccccaacacctccaacaaaataatg

SEQ ID NO: 2617010 - DNA, 25 bp, Homo sapien
ccaacacctccaacaaaataatgta

SEQ ID NO: 2617011 - DNA, 25 bp, Homo sapien
tcgtgtgtccctcctactccttaga

SEQ ID NO: 2617012 - DNA, 25 bp, Homo sapien
tttaaaacctcaggcccacatatac

SEQ ID NO: 2617013 - DNA, 25 bp, Homo sapien
aaatttcctgtatatcttaggcctc

SEQ ID NO: 2617014 - DNA, 25 bp, Homo sapien
cactcaatgtaaccaacaggcaatc

SEQ ID NO: 2617015 - DNA, 25 bp, Homo sapien
aaaaggcagactagcaggagaaaga

SEQ ID NO: 2617016 - DNA, 25 bp, Homo sapien
gataggagcctaccttctgtgggat

SEQ ID NO: 2617017 - DNA, 25 bp, Homo sapien
tgtgacaaatggtactgctttaggg

SEQ ID NO: 2617018 - DNA, 25 bp, Homo sapien
tttacaggcgaagtaagactcttgc

SEQ ID NO: 2617019 - DNA, 25 bp, Homo sapien
tgcactccataacttgaaagtttct

SEQ ID NO: 2617020 - DNA, 25 bp, Homo sapien
tgcttcttcagcttaacctgaattt

SEQ ID NO: 2617021 - DNA, 25 bp, Homo sapien
gcactccataacttgaaagtttctc

SEQ ID NO: 2617022 - DNA, 25 bp, Homo sapien
ttcttcagcttaacctgaatttccc

SEQ ID NO: 2617023 - DNA, 25 bp, Homo sapien
aggacagcagccttgagtattacca

SEQ ID NO: 2617024 - DNA, 25 bp, Homo sapien
gacagcagccttgagtattaccatc

SEQ ID NO: 2617025 - DNA, 25 bp, Homo sapien
cagcagccttgagtattaccatcat

SEQ ID NO: 2617026 - DNA, 25 bp, Homo sapien
ggacagcagccttgagtattaccat

SEQ ID NO: 2617027 - DNA, 25 bp, Homo sapien
tcaataccgtttcataatacaggca

SEQ ID NO: 2617028 - DNA, 25 bp, Homo sapien
caaatttggcacatggtgttaaact

SEQ ID NO: 2617029 - DNA, 25 bp, Homo sapien
gatgaggaagagatacaacaactcc

SEQ ID NO: 2617030 - DNA, 25 bp, Homo sapien
ggtatacataccagacacgtctgtc

SEQ ID NO: 2617031 - DNA, 25 bp, Homo sapien
tcagtcctgcatatattaggcattt

SEQ ID NO: 2617032 - DNA, 25 bp, Homo sapien
ttcagtcctgcatatattaggcatt

SEQ ID NO: 2617033 - DNA, 25 bp, Homo sapien
cagtcctgcatatattaggcatttg

SEQ ID NO: 2617034 - DNA, 25 bp, Homo sapien
gtcctgcatatattaggcatttgtc

SEQ ID NO: 2617035 - DNA, 25 bp, Homo sapien
tgaaagcagcctatgaaatgcagaa

SEQ ID NO: 2617036 - DNA, 25 bp, Homo sapien
gaggcaggagtctcatctaacttga

SEQ ID NO: 2617037 - DNA, 25 bp, Homo sapien
gattcgagtcattcttaagcggttt

SEQ ID NO: 2617038 - DNA, 25 bp, Homo sapien
tgcctgaaggtgaccatgaccaatg

SEQ ID NO: 2617039 - DNA, 25 bp, Homo sapien
gggaacaatttgaattggcccacat

SEQ ID NO: 2617040 - DNA, 25 bp, Homo sapien
agggaacaatttgaattggcccaca

SEQ ID NO: 2617041 - DNA, 25 bp, Homo sapien
cgccgcgcaactcagaccactgaag

SEQ ID NO: 2617042 - DNA, 25 bp, Homo sapien
gagtagtatctggagtttctgtaac

SEQ ID NO: 2617043 - DNA, 25 bp, Homo sapien
ccggacaggcgggaaagcgccgcgc

SEQ ID NO: 2617044 - DNA, 25 bp, Homo sapien
cagaccactgaaggggagtagtatc

SEQ ID NO: 2617045 - DNA, 25 bp, Homo sapien
gcaaatgctggaggaagtaccgcct

SEQ ID NO: 2617046 - DNA, 25 bp, Homo sapien
aagtaccgcctccaagctacagcgg

SEQ ID NO: 2617047 - DNA, 25 bp, Homo sapien
aacttgccaataactcgcggcaaat

SEQ ID NO: 2617048 - DNA, 25 bp, Homo sapien
cgccgaagccaagagcggcgccttc

SEQ ID NO: 2617049 - DNA, 25 bp, Homo sapien
cttcgctgggcccagagcgctccat

SEQ ID NO: 2617050 - DNA, 25 bp, Homo sapien
cgaaccccgtgaagcccatggtgac

SEQ ID NO: 2617051 - DNA, 25 bp, Homo sapien
gaaccccgtgaagcccatggtgacc

SEQ ID NO: 2617052 - DNA, 25 bp, Homo sapien
tgttcaaacattgcttccaagtcaa

SEQ ID NO: 2617053 - DNA, 25 bp, Homo sapien
gttcaaacattgcttccaagtcaaa

SEQ ID NO: 2617054 - DNA, 25 bp, Homo sapien
tatacatagtacttaaaccaataaa

SEQ ID NO: 2617055 - DNA, 25 bp, Homo sapien
ggtatacatagtacttaaaccaata

SEQ ID NO: 2617056 - DNA, 25 bp, Homo sapien
atgaggtatacatagtacttaaacc

SEQ ID NO: 2617057 - DNA, 25 bp, Homo sapien
gaggtatacatagtacttaaaccaa

SEQ ID NO: 2617058 - DNA, 25 bp, Homo sapien
ttgtttcaggttcctgccacagagc

SEQ ID NO: 2617059 - DNA, 25 bp, Homo sapien
tctttgtttcaggttcctgccacag

SEQ ID NO: 2617060 - DNA, 25 bp, Homo sapien
gtttcaggttcctgccacagagctt

SEQ ID NO: 2617061 - DNA, 25 bp, Homo sapien
tttggtctttgtttcaggttcctgc

SEQ ID NO: 2617062 - DNA, 25 bp, Homo sapien
gtgtactatgaatacccagggaaag

SEQ ID NO: 2617063 - DNA, 25 bp, Homo sapien
gaaagactccaataccaagcatgag

SEQ ID NO: 2617064 - DNA, 25 bp, Homo sapien
taatttgctaggagagctcacaggg

SEQ ID NO: 2617065 - DNA, 25 bp, Homo sapien
aactgtctcacggtaggaaactagg

SEQ ID NO: 2617066 - DNA, 25 bp, Homo sapien
ggaatgacctgatgtcatagactga

SEQ ID NO: 2617067 - DNA, 25 bp, Homo sapien
tatagggcagaacccctccggaatg

SEQ ID NO: 2617068 - DNA, 25 bp, Homo sapien
tgctcaggttcagtgaagaatggac

SEQ ID NO: 2617069 - DNA, 25 bp, Homo sapien
cccacagtcagataaggtaggtcag

SEQ ID NO: 2617070 - DNA, 25 bp, Homo sapien
cctttacaaaggtgcatggtgggaa

SEQ ID NO: 2617071 - DNA, 25 bp, Homo sapien
gaaagatggtttcaaggccaggcat

SEQ ID NO: 2617072 - DNA, 25 bp, Homo sapien
gaaaggcagagacattccagctgta

SEQ ID NO: 2617073 - DNA, 25 bp, Homo sapien
cagaagccgcccctttacaaaggtg

SEQ ID NO: 2617074 - DNA, 25 bp, Homo sapien
ctggccctatcgtaagtttgtgtcc

SEQ ID NO: 2617075 - DNA, 25 bp, Homo sapien
gtttgtgtccatgttgcattcagtg

SEQ ID NO: 2617076 - DNA, 25 bp, Homo sapien
cacccatgattcattgacagaagag

SEQ ID NO: 2617077 - DNA, 25 bp, Homo sapien
tgttgcattcagtgcatgagacact

SEQ ID NO: 2617078 - DNA, 25 bp, Homo sapien
gcaatttccggtgctcacctcttgc

SEQ ID NO: 2617079 - DNA, 25 bp, Homo sapien
tgcaatttccggtgctcacctcttg

SEQ ID NO: 2617080 - DNA, 25 bp, Homo sapien
agctgtcaggatttggatttccacc

SEQ ID NO: 2617081 - DNA, 25 bp, Homo sapien
tgatcgcatgttccaacaatgcccc

SEQ ID NO: 2617082 - DNA, 25 bp, Homo sapien
tgctgaactgtccctaccacgtgtc

SEQ ID NO: 2617083 - DNA, 25 bp, Homo sapien
cagggccagtggacacttgtcccca

SEQ ID NO: 2617084 - DNA, 25 bp, Homo sapien
taatgaactatatttacatagtgta

SEQ ID NO: 2617085 - DNA, 25 bp, Homo sapien
caaacgccaaagaatgatttaatga

SEQ ID NO: 2617086 - DNA, 25 bp, Homo sapien
ataacacatataacataattacttt

SEQ ID NO: 2617087 - DNA, 25 bp, Homo sapien
gatttaatgaactatatttacatag

SEQ ID NO: 2617088 - DNA, 25 bp, Homo sapien
ctgctcggtatgtgctgttgtcatt

SEQ ID NO: 2617089 - DNA, 25 bp, Homo sapien
gccttccttgttgtgatgagccagt

SEQ ID NO: 2617090 - DNA, 25 bp, Homo sapien
cttgtataagccaaaccctccgagt

SEQ ID NO: 2617091 - DNA, 25 bp, Homo sapien
ggtcccagtggtgcacagccttcct

SEQ ID NO: 2617092 - DNA, 25 bp, Homo sapien
gttgatggcctcaactttgctgggc

SEQ ID NO: 2617093 - DNA, 25 bp, Homo sapien
ctgagtcccaaacttcaaaggtagg

SEQ ID NO: 2617094 - DNA, 25 bp, Homo sapien
cttcagtctgcggctagaggcctgg

SEQ ID NO: 2617095 - DNA, 25 bp, Homo sapien
ttcagtctgcggctagaggcctggg

SEQ ID NO: 2617096 - DNA, 25 bp, Homo sapien
ccttcagtctgcggctagaggcctg

SEQ ID NO: 2617097 - DNA, 25 bp, Homo sapien
ctggtcacaaacaaaaacaagaacg

SEQ ID NO: 2617098 - DNA, 25 bp, Homo sapien
aaatcaatacccctctgtaatctgg

SEQ ID NO: 2617099 - DNA, 25 bp, Homo sapien
tctgccttgatggactcctatggac

SEQ ID NO: 2617100 - DNA, 25 bp, Homo sapien
tgccttgatggactcctatggacac

SEQ ID NO: 2617101 - DNA, 25 bp, Homo sapien
gggcaaggcaaatcaatacccctct

SEQ ID NO: 2617102 - DNA, 25 bp, Homo sapien
aggatattgagtgggacatgcagcc

SEQ ID NO: 2617103 - DNA, 25 bp, Homo sapien
tattgagtgggacatgcagcctgga

SEQ ID NO: 2617104 - DNA, 25 bp, Homo sapien
gatattgagtgggacatgcagcctg

SEQ ID NO: 2617105 - DNA, 25 bp, Homo sapien
cagcctggaagagctggaagctgac

SEQ ID NO: 2617106 - DNA, 25 bp, Homo sapien
tatgcagccgcaggtaacaaacaca

SEQ ID NO: 2617107 - DNA, 25 bp, Homo sapien
acttgtgtaagaagggctgccgtcc

SEQ ID NO: 2617108 - DNA, 25 bp, Homo sapien
gaacttctgacctactgagagcgga

SEQ ID NO: 2617109 - DNA, 25 bp, Homo sapien
tgattgagccctgattgtagcctgc

SEQ ID NO: 2617110 - DNA, 25 bp, Homo sapien
gatcccagaccatacgtctgaagag

SEQ ID NO: 2617111 - DNA, 25 bp, Homo sapien
tagggcaacacagggatccatgtgc

SEQ ID NO: 2617112 - DNA, 25 bp, Homo sapien
gtcatcagtcccattgagcagcaga

SEQ ID NO: 2617113 - DNA, 25 bp, Homo sapien
cagggatccatgtgccccgttgagc

SEQ ID NO: 2617114 - DNA, 25 bp, Homo sapien
gagtatttagcaacgtccctaggct

SEQ ID NO: 2617115 - DNA, 25 bp, Homo sapien
ggctatacctaccagatgcctgtag

SEQ ID NO: 2617116 - DNA, 25 bp, Homo sapien
tctttgtggtcagagactgtcctcc

SEQ ID NO: 2617117 - DNA, 25 bp, Homo sapien
cagacttgtgcaaggttggagccag

SEQ ID NO: 2617118 - DNA, 25 bp, Homo sapien
cagtgctctgatcccgtgaattcct

SEQ ID NO: 2617119 - DNA, 25 bp, Homo sapien
aaagaactgtctacctatgaggcgc

SEQ ID NO: 2617120 - DNA, 25 bp, Homo sapien
tcagggcggtgaaccagaagcctct

SEQ ID NO: 2617121 - DNA, 25 bp, Homo sapien
ccgtagattctttgagaccagtgac

SEQ ID NO: 2617122 - DNA, 25 bp, Homo sapien
agagggcaggcttgtccattccaac

SEQ ID NO: 2617123 - DNA, 25 bp, Homo sapien
gggcaggcttgtccattccaacttc

SEQ ID NO: 2617124 - DNA, 25 bp, Homo sapien
gagggcaggcttgtccattccaact

SEQ ID NO: 2617125 - DNA, 25 bp, Homo sapien
ggcaggcttgtccattccaacttcc

SEQ ID NO: 2617126 - DNA, 25 bp, Homo sapien
tgtaaagcctgtgtcttggagacag

SEQ ID NO: 2617127 - DNA, 25 bp, Homo sapien
ggttccaccactaaggagtcttgtc

SEQ ID NO: 2617128 - DNA, 25 bp, Homo sapien
taaagctgtttatgtaaagcctgtg

SEQ ID NO: 2617129 - DNA, 25 bp, Homo sapien
tgaggttccaccactaaggagtctt

SEQ ID NO: 2617130 - DNA, 25 bp, Homo sapien
tgtggtgttcatatgatcagaaaaa

SEQ ID NO: 2617131 - DNA, 25 bp, Homo sapien
aaattatatttgtggtgttcatatg

SEQ ID NO: 2617132 - DNA, 25 bp, Homo sapien
tatttgtggtgttcatatgatcaga

SEQ ID NO: 2617133 - DNA, 25 bp, Homo sapien
tgttcatatgatcagaaaaaataca

SEQ ID NO: 2617134 - DNA, 25 bp, Homo sapien
ttcattcagtgagcgacagccatgc

SEQ ID NO: 2617135 - DNA, 25 bp, Homo sapien
cagaggccctggacgttgtatctca

SEQ ID NO: 2617136 - DNA, 25 bp, Homo sapien
gatgagacagatttctaccacagca

SEQ ID NO: 2617137 - DNA, 25 bp, Homo sapien
cagtcagcagcaccgagtatcttcc

SEQ ID NO: 2617138 - DNA, 25 bp, Homo sapien
atttgtaattgttaggacaaaatag

SEQ ID NO: 2617139 - DNA, 25 bp, Homo sapien
aacctatcagatttacatcaacaag

SEQ ID NO: 2617140 - DNA, 25 bp, Homo sapien
tatcagatttacatcaacaagtgta

SEQ ID NO: 2617141 - DNA, 25 bp, Homo sapien
cagatttacatcaacaagtgtaata

SEQ ID NO: 2617142 - DNA, 25 bp, Homo sapien
caccctagctatgggcacatgtcag

SEQ ID NO: 2617143 - DNA, 25 bp, Homo sapien
tataggctcgagaacaacaggatgc

SEQ ID NO: 2617144 - DNA, 25 bp, Homo sapien
ccaaaacacagtgtaggaggccaca

SEQ ID NO: 2617145 - DNA, 25 bp, Homo sapien
caggatgctttggtcctgtatcagc

SEQ ID NO: 2617146 - DNA, 25 bp, Homo sapien
taaatattaccaaatattggcaagc

SEQ ID NO: 2617147 - DNA, 25 bp, Homo sapien
ggtcacacccgctgtcaaaaggcag

SEQ ID NO: 2617148 - DNA, 25 bp, Homo sapien
ttagaaacgggcataagataggcgg

SEQ ID NO: 2617149 - DNA, 25 bp, Homo sapien
ggaaatggagtaaagtcactcttac

SEQ ID NO: 2617150 - DNA, 25 bp, Homo sapien
ggagactgggttgtagaaatttgca

SEQ ID NO: 2617151 - DNA, 25 bp, Homo sapien
ttttctcaggagactgggttgtaga

SEQ ID NO: 2617152 - DNA, 25 bp, Homo sapien
cttgcaaatttgagctggccctctg

SEQ ID NO: 2617153 - DNA, 25 bp, Homo sapien
ccataaaatggtgggatctacctcc

SEQ ID NO: 2617154 - DNA, 25 bp, Homo sapien
tccttcttgacctaaagcctagcat

SEQ ID NO: 2617155 - DNA, 25 bp, Homo sapien
ctataagtgtgtaccacagcatgtc

SEQ ID NO: 2617156 - DNA, 25 bp, Homo sapien
tgttagccatggacaaggtatgtgc

SEQ ID NO: 2617157 - DNA, 25 bp, Homo sapien
ggtatgtgctttggctgactgaatg

SEQ ID NO: 2617158 - DNA, 25 bp, Homo sapien
atcaatgttagccatggacaaggta

SEQ ID NO: 2617159 - DNA, 25 bp, Homo sapien
ccatggacaaggtatgtgctttggc

SEQ ID NO: 2617160 - DNA, 25 bp, Homo sapien
caaaacccgtcactcaagccaatga

SEQ ID NO: 2617161 - DNA, 25 bp, Homo sapien
caatgactacaattaagatatcagt

SEQ ID NO: 2617162 - DNA, 25 bp, Homo sapien
gtgtagtgctgcgatcctgactcac

SEQ ID NO: 2617163 - DNA, 25 bp, Homo sapien
gattagatatattattaacgaattg

SEQ ID NO: 2617164 - DNA, 25 bp, Homo sapien
acaggaatgccccacaatgaccact

SEQ ID NO: 2617165 - DNA, 25 bp, Homo sapien
gacctgggtcacacaaacaggaatg

SEQ ID NO: 2617166 - DNA, 25 bp, Homo sapien
cacaaacaggaatgccccacaatga

SEQ ID NO: 2617167 - DNA, 25 bp, Homo sapien
tcccaggcactctcatttgcttctg

SEQ ID NO: 2617168 - DNA, 25 bp, Homo sapien
ggaggcaagagagaccagggcttag

SEQ ID NO: 2617169 - DNA, 25 bp, Homo sapien
caagagagaccagggcttagggagg

SEQ ID NO: 2617170 - DNA, 25 bp, Homo sapien
ggcaagagagaccagggcttaggga

SEQ ID NO: 2617171 - DNA, 25 bp, Homo sapien
gagagaccagggcttagggagggac

SEQ ID NO: 2617172 - DNA, 25 bp, Homo sapien
ttgtccacgactttgttttctgatt

SEQ ID NO: 2617173 - DNA, 25 bp, Homo sapien
tgtccacgactttgttttctgattt

SEQ ID NO: 2617174 - DNA, 25 bp, Homo sapien
tccacgactttgttttctgatttca

SEQ ID NO: 2617175 - DNA, 25 bp, Homo sapien
cacgactttgttttctgatttcaaa

SEQ ID NO: 2617176 - DNA, 25 bp, Homo sapien
tcaggtacggccaccagaggttggc

SEQ ID NO: 2617177 - DNA, 25 bp, Homo sapien
acggccaccagaggttggcacccag

SEQ ID NO: 2617178 - DNA, 25 bp, Homo sapien
ccacgagtacaggtaggcggggtgt

SEQ ID NO: 2617179 - DNA, 25 bp, Homo sapien
ggtgttcgtgcatcaggtacggcca

SEQ ID NO: 2617180 - DNA, 25 bp, Homo sapien
ctcagaggaccacacctgcccgttc

SEQ ID NO: 2617181 - DNA, 25 bp, Homo sapien
aaagctcagaaaagctcagaggacc

SEQ ID NO: 2617182 - DNA, 25 bp, Homo sapien
gaggaccacacctgcccgttcacct

SEQ ID NO: 2617183 - DNA, 25 bp, Homo sapien
tcagaggaccacacctgcccgttca

SEQ ID NO: 2617184 - DNA, 25 bp, Homo sapien
aggtgtgagcgccccgacagcctga

SEQ ID NO: 2617185 - DNA, 25 bp, Homo sapien
ccaggtgtgagcgccccgacagcct

SEQ ID NO: 2617186 - DNA, 25 bp, Homo sapien
atgacagccaaagcgccaggtgtga

SEQ ID NO: 2617187 - DNA, 25 bp, Homo sapien
ctatgacagccaaagcgccaggtgt

SEQ ID NO: 2617188 - DNA, 25 bp, Homo sapien
gggcacagtgcggagccccacaggg

SEQ ID NO: 2617189 - DNA, 25 bp, Homo sapien
gtgacgggcacagtgcggagcccca

SEQ ID NO: 2617190 - DNA, 25 bp, Homo sapien
ctcggtgacgggcacagtgcggagc

SEQ ID NO: 2617191 - DNA, 25 bp, Homo sapien
tggctctcggtgacgggcacagtgc

SEQ ID NO: 2617192 - DNA, 25 bp, Homo sapien
aaatggcctttatgctgagtcaagt

SEQ ID NO: 2617193 - DNA, 25 bp, Homo sapien
tggtggcaggaattgggcactctat

SEQ ID NO: 2617194 - DNA, 25 bp, Homo sapien
gaaatgttgcgaatggaaatgacaa

SEQ ID NO: 2617195 - DNA, 25 bp, Homo sapien
gacaacagacacatccccgattgga

SEQ ID NO: 2617196 - DNA, 25 bp, Homo sapien
cccttgtctgctgcgtaggtggagt

SEQ ID NO: 2617197 - DNA, 25 bp, Homo sapien
ccccttgtctgctgcgtaggtggag

SEQ ID NO: 2617198 - DNA, 25 bp, Homo sapien
agtagtagctgttcacacggatcac

SEQ ID NO: 2617199 - DNA, 25 bp, Homo sapien
cacggatcacatccacatacagagc

SEQ ID NO: 2617200 - DNA, 25 bp, Homo sapien
tagttgcgataccaagagtagtagc

SEQ ID NO: 2617201 - DNA, 25 bp, Homo sapien
gaatcaactccaggtgcccgtagtt

SEQ ID NO: 2617202 - DNA, 25 bp, Homo sapien
aataatgggattgtgatgtcttaca

SEQ ID NO: 2617203 - DNA, 25 bp, Homo sapien
gaataatgggattgtgatgtcttac

SEQ ID NO: 2617204 - DNA, 25 bp, Homo sapien
ataatgggattgtgatgtcttacac

SEQ ID NO: 2617205 - DNA, 25 bp, Homo sapien
gcatctctgccaagagagaatacac

SEQ ID NO: 2617206 - DNA, 25 bp, Homo sapien
gagaatacacaagcagaaagttcaa

SEQ ID NO: 2617207 - DNA, 25 bp, Homo sapien
caagcagaaagttcaacaccgctta

SEQ ID NO: 2617208 - DNA, 25 bp, Homo sapien
ggtgggagaggcaagtggcatctct

SEQ ID NO: 2617209 - DNA, 25 bp, Homo sapien
tagtcatgaaatcggcaaaattcca

SEQ ID NO: 2617210 - DNA, 25 bp, Homo sapien
ctgcgtttttgattgagacccagat

SEQ ID NO: 2617211 - DNA, 25 bp, Homo sapien
attttctgcgtttttgattgagacc

SEQ ID NO: 2617212 - DNA, 25 bp, Homo sapien
gagacccagatggtactgctctagc

SEQ ID NO: 2617213 - DNA, 25 bp, Homo sapien
tacattatcccatgcgctaaactgc

SEQ ID NO: 2617214 - DNA, 25 bp, Homo sapien
cgggtacattatcccatgcgctaaa

SEQ ID NO: 2617215 - DNA, 25 bp, Homo sapien
ggtacattatcccatgcgctaaact

SEQ ID NO: 2617216 - DNA, 25 bp, Homo sapien
acgggtacattatcccatgcgctaa

SEQ ID NO: 2617217 - DNA, 25 bp, Homo sapien
tccaatattcttacagccaaaatgt

SEQ ID NO: 2617218 - DNA, 25 bp, Homo sapien
caatattcttacagccaaaatgtcc

SEQ ID NO: 2617219 - DNA, 25 bp, Homo sapien
tcttacagccaaaatgtccagaatg

SEQ ID NO: 2617220 - DNA, 25 bp, Homo sapien
tattcttacagccaaaatgtccaga

SEQ ID NO: 2617221 - DNA, 25 bp, Homo sapien
tagctctctcacagaattatagcaa

SEQ ID NO: 2617222 - DNA, 25 bp, Homo sapien
catatattatccattcttcacagca

SEQ ID NO: 2617223 - DNA, 25 bp, Homo sapien
tggctttgccgtggcaaattaaata

SEQ ID NO: 2617224 - DNA, 25 bp, Homo sapien
tgcctctgctattcacctgtgttat

SEQ ID NO: 2617225 - DNA, 25 bp, Homo sapien
gatataataccattgttgtagatgt

SEQ ID NO: 2617226 - DNA, 25 bp, Homo sapien
acctatattagaacttgactttgaa

SEQ ID NO: 2617227 - DNA, 25 bp, Homo sapien
gcatctgagttttgagcaaggagat

SEQ ID NO: 2617228 - DNA, 25 bp, Homo sapien
taaaccagatataataccattgttg

SEQ ID NO: 2617229 - DNA, 25 bp, Homo sapien
tgctttagaactagagaagcccgtt

SEQ ID NO: 2617230 - DNA, 25 bp, Homo sapien
gaacctatacgtctctaatatgccg

SEQ ID NO: 2617231 - DNA, 25 bp, Homo sapien
attttgatcacctctgtgttggtgc

SEQ ID NO: 2617232 - DNA, 25 bp, Homo sapien
tgttggtgctttagaactagagaag

SEQ ID NO: 2617233 - DNA, 25 bp, Homo sapien
cagtggtgtgatcttggctcactgc

SEQ ID NO: 2617234 - DNA, 25 bp, Homo sapien
gctggagtgcagtggtgtgatcttg

SEQ ID NO: 2617235 - DNA, 25 bp, Homo sapien
ctccaccacgcctggctaacttttg

SEQ ID NO: 2617236 - DNA, 25 bp, Homo sapien
tcggagtttttgctctgttgtccag

SEQ ID NO: 2617237 - DNA, 25 bp, Homo sapien
gatgaactcaaagtctacagggata

SEQ ID NO: 2617238 - DNA, 25 bp, Homo sapien
tccatggttcaaagatgtcaagatg

SEQ ID NO: 2617239 - DNA, 25 bp, Homo sapien
taatgttaccctaaatgagagaaga

SEQ ID NO: 2617240 - DNA, 25 bp, Homo sapien
taaatatcaggattcgagtccctca

SEQ ID NO: 2617241 - DNA, 25 bp, Homo sapien
cacactgactgaaaataagatcaag

SEQ ID NO: 2617242 - DNA, 25 bp, Homo sapien
tgtgctcgcaagatttacgcttctg

SEQ ID NO: 2617243 - DNA, 25 bp, Homo sapien
tgagattactgctcttggtataata

SEQ ID NO: 2617244 - DNA, 25 bp, Homo sapien
tgttcatcttccatacagaacacac

SEQ ID NO: 2617245 - DNA, 25 bp, Homo sapien
gaaattggacatttaacccagcaga

SEQ ID NO: 2617246 - DNA, 25 bp, Homo sapien
ctcttgtgttttgcggaaggtggaa

SEQ ID NO: 2617247 - DNA, 25 bp, Homo sapien
aattgatcatgagaagtgggagtgc

SEQ ID NO: 2617248 - DNA, 25 bp, Homo sapien
gccaattctcgtgagggctcggaaa

SEQ ID NO: 2617249 - DNA, 25 bp, Homo sapien
atctgaaagtgaacatattgatagt

SEQ ID NO: 2617250 - DNA, 25 bp, Homo sapien
gtccacagaaagtctgtatttcaga

SEQ ID NO: 2617251 - DNA, 25 bp, Homo sapien
tacacatatcatggcaggtagtcca

SEQ ID NO: 2617252 - DNA, 25 bp, Homo sapien
cagatattgtagatgtgggagtaga

SEQ ID NO: 2617253 - DNA, 25 bp, Homo sapien
taaagccaggggcaaaaattcaatc

SEQ ID NO: 2617254 - DNA, 25 bp, Homo sapien
gccaggggcaaaaattcaatcttca

SEQ ID NO: 2617255 - DNA, 25 bp, Homo sapien
aagccaggggcaaaaattcaatctt

SEQ ID NO: 2617256 - DNA, 25 bp, Homo sapien
gaataaagccaggggcaaaaattca

SEQ ID NO: 2617257 - DNA, 25 bp, Homo sapien
tggtggtgacaccagtgtttgtgac

SEQ ID NO: 2617258 - DNA, 25 bp, Homo sapien
ggtaacaatgtgtgaagcacaagtg

SEQ ID NO: 2617259 - DNA, 25 bp, Homo sapien
aaaggcctgaagagaccaagtttct

SEQ ID NO: 2617260 - DNA, 25 bp, Homo sapien
tttgtgacagacacacctgctgtga

SEQ ID NO: 2617261 - DNA, 25 bp, Homo sapien
tcaccttgaaaaagtcccattagca

SEQ ID NO: 2617262 - DNA, 25 bp, Homo sapien
gataaatccactggttgccttatag

SEQ ID NO: 2617263 - DNA, 25 bp, Homo sapien
gaaaggcatatccagtgatgatgac

SEQ ID NO: 2617264 - DNA, 25 bp, Homo sapien
gatgatgaccttcctcagctttatt

SEQ ID NO: 2617265 - DNA, 25 bp, Homo sapien
taagttcaagtatcaagcttttcct

SEQ ID NO: 2617266 - DNA, 25 bp, Homo sapien
taaatcaagctaagggacataacca

SEQ ID NO: 2617267 - DNA, 25 bp, Homo sapien
taacagctcctagtacttattggga

SEQ ID NO: 2617268 - DNA, 25 bp, Homo sapien
gatatactaagaactcagagagcaa

SEQ ID NO: 2617269 - DNA, 25 bp, Homo sapien
caggcatcaggtcttgattggcaca

SEQ ID NO: 2617270 - DNA, 25 bp, Homo sapien
caccacaacagccacactggcgatt

SEQ ID NO: 2617271 - DNA, 25 bp, Homo sapien
gattggcacatgtgatcacttctgc

SEQ ID NO: 2617272 - DNA, 25 bp, Homo sapien
cttacaacagcagctatagtggagt

SEQ ID NO: 2617273 - DNA, 25 bp, Homo sapien
ttctgtcaaggctcattgtcccagg

SEQ ID NO: 2617274 - DNA, 25 bp, Homo sapien
tactcaatataacatttcgacaatt

SEQ ID NO: 2617275 - DNA, 25 bp, Homo sapien
agctgttctagatgttattctgtca

SEQ ID NO: 2617276 - DNA, 25 bp, Homo sapien
aagttattgtgggttagctgttcta

SEQ ID NO: 2617277 - DNA, 25 bp, Homo sapien
ggtttaatattggaacatctatggc

SEQ ID NO: 2617278 - DNA, 25 bp, Homo sapien
gcatgtgcattagagcaagggaaaa

SEQ ID NO: 2617279 - DNA, 25 bp, Homo sapien
tagagattctagcatgtgcattaga

SEQ ID NO: 2617280 - DNA, 25 bp, Homo sapien
gctgtatttcaccattatactagag

SEQ ID NO: 2617281 - DNA, 25 bp, Homo sapien
tccacgtccacttaggcaacttgct

SEQ ID NO: 2617282 - DNA, 25 bp, Homo sapien
tgccctttgagggaactagttgcct

SEQ ID NO: 2617283 - DNA, 25 bp, Homo sapien
tgaatgatgatcctaacagttgtgt

SEQ ID NO: 2617284 - DNA, 25 bp, Homo sapien
gaaattttctatgggcttacctaca

SEQ ID NO: 2617285 - DNA, 25 bp, Homo sapien
aatgacagtgcttctatgccaggcc

SEQ ID NO: 2617286 - DNA, 25 bp, Homo sapien
caagtgtcacatagcctacataagc

SEQ ID NO: 2617287 - DNA, 25 bp, Homo sapien
gaggctccacctttctctagattag

SEQ ID NO: 2617288 - DNA, 25 bp, Homo sapien
tagattagtcatgagcttcaggccc

SEQ ID NO: 2617289 - DNA, 25 bp, Homo sapien
gaatccctctcttgcattaacgagg

SEQ ID NO: 2617290 - DNA, 25 bp, Homo sapien
gtagcagagctcatatggaccaaca

SEQ ID NO: 2617291 - DNA, 25 bp, Homo sapien
tttttacatgtggttcaaggtgcgc

SEQ ID NO: 2617292 - DNA, 25 bp, Homo sapien
tatagtgcttccatgagggaatccc

SEQ ID NO: 2617293 - DNA, 25 bp, Homo sapien
aaattccatagggaagacagctggc

SEQ ID NO: 2617294 - DNA, 25 bp, Homo sapien
ggaacttgacccacctgactttgta

SEQ ID NO: 2617295 - DNA, 25 bp, Homo sapien
tgggtctgacctcaaacataaggag

SEQ ID NO: 2617296 - DNA, 25 bp, Homo sapien
gatgatgcagcaatacacttcggga

SEQ ID NO: 2617297 - DNA, 25 bp, Homo sapien
cagtcttgtttccactatgttctca

SEQ ID NO: 2617298 - DNA, 25 bp, Homo sapien
aaaacattcagaatacatctctaaa

SEQ ID NO: 2617299 - DNA, 25 bp, Homo sapien
aataagctttagtgtacgcattgcc

SEQ ID NO: 2617300 - DNA, 25 bp, Homo sapien
caacctcaacaactcattgtcagtc

SEQ ID NO: 2617301 - DNA, 25 bp, Homo sapien
tgggctggttgcttgcaagacctgc

SEQ ID NO: 2617302 - DNA, 25 bp, Homo sapien
gcctgcgcttctctcaattagcatg

SEQ ID NO: 2617303 - DNA, 25 bp, Homo sapien
tcatttgttgtggtgcttttgtaca

SEQ ID NO: 2617304 - DNA, 25 bp, Homo sapien
aattagcatgatttcattgctgctg

SEQ ID NO: 2617305 - DNA, 25 bp, Homo sapien
tatggctcctatgagtgcaactccg

SEQ ID NO: 2617306 - DNA, 25 bp, Homo sapien
gctcctgtaacagcaagcccgtttg

SEQ ID NO: 2617307 - DNA, 25 bp, Homo sapien
ttactgtggacaaagatccgtgctg

SEQ ID NO: 2617308 - DNA, 25 bp, Homo sapien
catcggatccttcctagtggagaac

SEQ ID NO: 2617309 - DNA, 25 bp, Homo sapien
gcaagaagctcaagtcagagagaaa

SEQ ID NO: 2617310 - DNA, 25 bp, Homo sapien
atgttaaccttgcatgccgaaaggg

SEQ ID NO: 2617311 - DNA, 25 bp, Homo sapien
caaagagtggtaggttgcatgatgc

SEQ ID NO: 2617312 - DNA, 25 bp, Homo sapien
cacaaatgggcatggcctcatccct

SEQ ID NO: 2617313 - DNA, 25 bp, Homo sapien
agattgatggtcatacctttggaca

SEQ ID NO: 2617314 - DNA, 25 bp, Homo sapien
ttgagccagagaagtaaaagtgtgc

SEQ ID NO: 2617315 - DNA, 25 bp, Homo sapien
tgagatccacctggtaacagcacag

SEQ ID NO: 2617316 - DNA, 25 bp, Homo sapien
ggtatagcaatagctatcctgcagt

SEQ ID NO: 2617317 - DNA, 25 bp, Homo sapien
caaggtaacatcacctatcactggg

SEQ ID NO: 2617318 - DNA, 25 bp, Homo sapien
gaggatctagtcactatccaccagt

SEQ ID NO: 2617319 - DNA, 25 bp, Homo sapien
tcttgagccctgcatatcctgagga

SEQ ID NO: 2617320 - DNA, 25 bp, Homo sapien
cagtatctggttagggatgctgtct

SEQ ID NO: 2617321 - DNA, 25 bp, Homo sapien
gagataacacttacataactcaagt

SEQ ID NO: 2617322 - DNA, 25 bp, Homo sapien
tgctaaccacctagaggtttacaat

SEQ ID NO: 2617323 - DNA, 25 bp, Homo sapien
cttggcactgccctgttggtagata

SEQ ID NO: 2617324 - DNA, 25 bp, Homo sapien
cattccattcagctattccggtgtg

SEQ ID NO: 2617325 - DNA, 25 bp, Homo sapien
acagatcgaaaccatattaatagat

SEQ ID NO: 2617326 - DNA, 25 bp, Homo sapien
caaaggggaaatttgcttccatgat

SEQ ID NO: 2617327 - DNA, 25 bp, Homo sapien
attaatagatttacagattatccac

SEQ ID NO: 2617328 - DNA, 25 bp, Homo sapien
aatagatttacagattatccacaac

SEQ ID NO: 2617329 - DNA, 25 bp, Homo sapien
tgtaagtcagagattcccatgtccc

SEQ ID NO: 2617330 - DNA, 25 bp, Homo sapien
ggaggccttattacatacacatgac

SEQ ID NO: 2617331 - DNA, 25 bp, Homo sapien
tgtgcttcgggctgactggctgtaa

SEQ ID NO: 2617332 - DNA, 25 bp, Homo sapien
caagtgctcaccagcctagaagctc

SEQ ID NO: 2617333 - DNA, 25 bp, Homo sapien
gtgcttgtgtggttgagcggcggag

SEQ ID NO: 2617334 - DNA, 25 bp, Homo sapien
gggagattcatgtctctggtatgat

SEQ ID NO: 2617335 - DNA, 25 bp, Homo sapien
ggttgagcggcggagcattcacagt

SEQ ID NO: 2617336 - DNA, 25 bp, Homo sapien
agggagattcatgtctctggtatga

SEQ ID NO: 2617337 - DNA, 25 bp, Homo sapien
gcgaacttgggagaaagcctgttaa

SEQ ID NO: 2617338 - DNA, 25 bp, Homo sapien
gatacaggattcacatttcagaaca

SEQ ID NO: 2617339 - DNA, 25 bp, Homo sapien
ctttaaaatgtgtggcagcagtgcc

SEQ ID NO: 2617340 - DNA, 25 bp, Homo sapien
ggagattcatgcctattagctcaaa

SEQ ID NO: 2617341 - DNA, 25 bp, Homo sapien
caataggtttccatagtacaggtga

SEQ ID NO: 2617342 - DNA, 25 bp, Homo sapien
gtcaatatcttactcaagaagcaag

SEQ ID NO: 2617343 - DNA, 25 bp, Homo sapien
ctctgggaattatggatcatactac

SEQ ID NO: 2617344 - DNA, 25 bp, Homo sapien
caaggtaaattaacatggatctctg

SEQ ID NO: 2617345 - DNA, 25 bp, Homo sapien
cactattgttctgttagccttccaa

SEQ ID NO: 2617346 - DNA, 25 bp, Homo sapien
gcaacactgattccctagtctgcaa

SEQ ID NO: 2617347 - DNA, 25 bp, Homo sapien
gttttctactgagctgcaacactga

SEQ ID NO: 2617348 - DNA, 25 bp, Homo sapien
tgtccaaatcatgacacatcctagg

SEQ ID NO: 2617349 - DNA, 25 bp, Homo sapien
cactgccagattgacaaaagtagag

SEQ ID NO: 2617350 - DNA, 25 bp, Homo sapien
tgacccttgtcacaatgaaatcctc

SEQ ID NO: 2617351 - DNA, 25 bp, Homo sapien
tctgtttaaactgccatccataagt

SEQ ID NO: 2617352 - DNA, 25 bp, Homo sapien
tacttcctagtaattgctgctgtct

SEQ ID NO: 2617353 - DNA, 25 bp, Homo sapien
tagaccatctgcaaggtgaggagcc

SEQ ID NO: 2617354 - DNA, 25 bp, Homo sapien
ggaagccaatagtgcaaccttcagc

SEQ ID NO: 2617355 - DNA, 25 bp, Homo sapien
caagatgaggtcccacaatagacca

SEQ ID NO: 2617356 - DNA, 25 bp, Homo sapien
atgaggtcccacaatagaccatctg

SEQ ID NO: 2617357 - DNA, 25 bp, Homo sapien
ttatcagaaagtttcaacaggcaaa

SEQ ID NO: 2617358 - DNA, 25 bp, Homo sapien
aattatcagaaagtttcaacaggca

SEQ ID NO: 2617359 - DNA, 25 bp, Homo sapien
tatcagaaagtttcaacaggcaaat

SEQ ID NO: 2617360 - DNA, 25 bp, Homo sapien
atgtttctaggatttttgtgttact

SEQ ID NO: 2617361 - DNA, 25 bp, Homo sapien
tggaggtccaaataattttattaga

SEQ ID NO: 2617362 - DNA, 25 bp, Homo sapien
agacttctaataattcttttatgca

SEQ ID NO: 2617363 - DNA, 25 bp, Homo sapien
ttagacttctaataattcttttatg

SEQ ID NO: 2617364 - DNA, 25 bp, Homo sapien
caaataattttattagacttctaat

SEQ ID NO: 2617365 - DNA, 25 bp, Homo sapien
ttgatcacactagccagctgaacag

SEQ ID NO: 2617366 - DNA, 25 bp, Homo sapien
tcatattctaatgcctaagactgtc

SEQ ID NO: 2617367 - DNA, 25 bp, Homo sapien
gaaatggcacgatgattgaacaact

SEQ ID NO: 2617368 - DNA, 25 bp, Homo sapien
tgaacagggaatatcatcaccgtga

SEQ ID NO: 2617369 - DNA, 25 bp, Homo sapien
cgcgcggcgagacaggttgtcggcg

SEQ ID NO: 2617370 - DNA, 25 bp, Homo sapien
gcgcgcggcgagacaggttgtcggc

SEQ ID NO: 2617371 - DNA, 25 bp, Homo sapien
aagcatttctgtggggcggctgcag

SEQ ID NO: 2617372 - DNA, 25 bp, Homo sapien
ccagtaccctggacactggtctcat

SEQ ID NO: 2617373 - DNA, 25 bp, Homo sapien
gacactggtctcatctggcgaaaga

SEQ ID NO: 2617374 - DNA, 25 bp, Homo sapien
gcgaaagactgtgggtaaccgaagc

SEQ ID NO: 2617375 - DNA, 25 bp, Homo sapien
gctccattgtaacggccacagcatc

SEQ ID NO: 2617376 - DNA, 25 bp, Homo sapien
gctatagagcctgccagtacagtag

SEQ ID NO: 2617377 - DNA, 25 bp, Homo sapien
tccctttggctccattgtaacggcc

SEQ ID NO: 2617378 - DNA, 25 bp, Homo sapien
tggtagtgccatccccagattcttc

SEQ ID NO: 2617379 - DNA, 25 bp, Homo sapien
atttctaattcatcattcagtgttt

SEQ ID NO: 2617380 - DNA, 25 bp, Homo sapien
ctcaatcaaacttcatgccttcaat

SEQ ID NO: 2617381 - DNA, 25 bp, Homo sapien
cattcagtgtttttccatcctttac

SEQ ID NO: 2617382 - DNA, 25 bp, Homo sapien
caataatttctaattcatcattcag

SEQ ID NO: 2617383 - DNA, 25 bp, Homo sapien
cttttgatgtattaataaagtatgg

SEQ ID NO: 2617384 - DNA, 25 bp, Homo sapien
ttaataaagtatggagaaatatacc

SEQ ID NO: 2617385 - DNA, 25 bp, Homo sapien
tttgatgtattaataaagtatggag

SEQ ID NO: 2617386 - DNA, 25 bp, Homo sapien
tgatgtattaataaagtatggagaa

SEQ ID NO: 2617387 - DNA, 25 bp, Homo sapien
tcttcaagattcagggtcaacccct

SEQ ID NO: 2617388 - DNA, 25 bp, Homo sapien
ttgaatacgtttttcaagttgagcc

SEQ ID NO: 2617389 - DNA, 25 bp, Homo sapien
gcgattatcaccaaaggcttatggt

SEQ ID NO: 2617390 - DNA, 25 bp, Homo sapien
tcaacatcttcagcgattatcacca

SEQ ID NO: 2617391 - DNA, 25 bp, Homo sapien
taccatattcataaaatctccaacc

SEQ ID NO: 2617392 - DNA, 25 bp, Homo sapien
gctggaatgcatcgaaggagggcaa

SEQ ID NO: 2617393 - DNA, 25 bp, Homo sapien
ttcataaaatctccaaccatagcat

SEQ ID NO: 2617394 - DNA, 25 bp, Homo sapien
ggaatgcatcgaaggagggcaaaac

SEQ ID NO: 2617395 - DNA, 25 bp, Homo sapien
atggacaatgacagcagtaaaccat

SEQ ID NO: 2617396 - DNA, 25 bp, Homo sapien
cacaaaggttgtcacataattggat

SEQ ID NO: 2617397 - DNA, 25 bp, Homo sapien
tttttattacacaaaggttgtcaca

SEQ ID NO: 2617398 - DNA, 25 bp, Homo sapien
tttattacacaaaggttgtcacata

SEQ ID NO: 2617399 - DNA, 25 bp, Homo sapien
tacacaaaggttgtcacataattgg

SEQ ID NO: 2617400 - DNA, 25 bp, Homo sapien
cctctgggatctgagttattgagtc

SEQ ID NO: 2617401 - DNA, 25 bp, Homo sapien
gcaaacacttgaggactattaatgg

SEQ ID NO: 2617402 - DNA, 25 bp, Homo sapien
tgggatctgagttattgagtcctct

SEQ ID NO: 2617403 - DNA, 25 bp, Homo sapien
cacttgaggactattaatggcttct

SEQ ID NO: 2617404 - DNA, 25 bp, Homo sapien
ggtaagattaagagttatgtaagtc

SEQ ID NO: 2617405 - DNA, 25 bp, Homo sapien
tatgtaaggactttttgaagtgacc

SEQ ID NO: 2617406 - DNA, 25 bp, Homo sapien
ttgaagtgacctgactgaatgtaaa

SEQ ID NO: 2617407 - DNA, 25 bp, Homo sapien
gactgaatgtaaaggcgatgggtaa

SEQ ID NO: 2617408 - DNA, 25 bp, Homo sapien
cttccttcttatctaatgggtcaaa

SEQ ID NO: 2617409 - DNA, 25 bp, Homo sapien
taatgggtcaaaccttgcagttcgc

SEQ ID NO: 2617410 - DNA, 25 bp, Homo sapien
ggtcaaaccttgcagttcgcttcct

SEQ ID NO: 2617411 - DNA, 25 bp, Homo sapien
ttatctaatgggtcaaaccttgcag

SEQ ID NO: 2617412 - DNA, 25 bp, Homo sapien
tctgcatgtataatctacactctcc

SEQ ID NO: 2617413 - DNA, 25 bp, Homo sapien
gtgccttacacttattcctattatt

SEQ ID NO: 2617414 - DNA, 25 bp, Homo sapien
tataatctacactctccagtaccaa

SEQ ID NO: 2617415 - DNA, 25 bp, Homo sapien
tgtataatctacactctccagtacc

SEQ ID NO: 2617416 - DNA, 25 bp, Homo sapien
aagtaaggggtgtgcccctccactg

SEQ ID NO: 2617417 - DNA, 25 bp, Homo sapien
gcccctccactggttggtaggcttg

SEQ ID NO: 2617418 - DNA, 25 bp, Homo sapien
tccactggttggtaggcttggtatt

SEQ ID NO: 2617419 - DNA, 25 bp, Homo sapien
tccccatcccaagtaaggggtgtgc

SEQ ID NO: 2617420 - DNA, 25 bp, Homo sapien
actgcagaagtaaatcgtgttcttc

SEQ ID NO: 2617421 - DNA, 25 bp, Homo sapien
agaagtaaatcgtgttcttcctcct

SEQ ID NO: 2617422 - DNA, 25 bp, Homo sapien
tgcagaagtaaatcgtgttcttcct

SEQ ID NO: 2617423 - DNA, 25 bp, Homo sapien
ggagaaagggtgtttggtggagtga

SEQ ID NO: 2617424 - DNA, 25 bp, Homo sapien
cccaagtttggagggactggaagca

SEQ ID NO: 2617425 - DNA, 25 bp, Homo sapien
gcccaagtttggagggactggaagc

SEQ ID NO: 2617426 - DNA, 25 bp, Homo sapien
tggcctgcgaaaatgacagactgtg

SEQ ID NO: 2617427 - DNA, 25 bp, Homo sapien
tccgggaatcaagtctatctacagc

SEQ ID NO: 2617428 - DNA, 25 bp, Homo sapien
ggaaaatggctcagttgtgtaaaac

SEQ ID NO: 2617429 - DNA, 25 bp, Homo sapien
cataagtggaattgaaacgttaaca

SEQ ID NO: 2617430 - DNA, 25 bp, Homo sapien
tacagtttgagcactgatgacttca

SEQ ID NO: 2617431 - DNA, 25 bp, Homo sapien
aagtttgagtcagcaattgcattag

SEQ ID NO: 2617432 - DNA, 25 bp, Homo sapien
gcattagtggtgttgttacagtttg

SEQ ID NO: 2617433 - DNA, 25 bp, Homo sapien
gagtcagcaattgcattagtggtgt

SEQ ID NO: 2617434 - DNA, 25 bp, Homo sapien
tttctcccctagatatctatgttca

SEQ ID NO: 2617435 - DNA, 25 bp, Homo sapien
cctagatatctatgttcagatccat

SEQ ID NO: 2617436 - DNA, 25 bp, Homo sapien
gccatatataaatttctcccctaga

SEQ ID NO: 2617437 - DNA, 25 bp, Homo sapien
taaatttctcccctagatatctatg

SEQ ID NO: 2617438 - DNA, 25 bp, Homo sapien
actcataccacttggttgcttccaa

SEQ ID NO: 2617439 - DNA, 25 bp, Homo sapien
gagtaggggccaactcataccactt

SEQ ID NO: 2617440 - DNA, 25 bp, Homo sapien
caactcataccacttggttgcttcc

SEQ ID NO: 2617441 - DNA, 25 bp, Homo sapien
gggccaactcataccacttggttgc

SEQ ID NO: 2617442 - DNA, 25 bp, Homo sapien
atatctttgtttcctccaagtgaaa

SEQ ID NO: 2617443 - DNA, 25 bp, Homo sapien
ttacatatctttgtttcctccaagt

SEQ ID NO: 2617444 - DNA, 25 bp, Homo sapien
tacatatctttgtttcctccaagtg

SEQ ID NO: 2617445 - DNA, 25 bp, Homo sapien
catatctttgtttcctccaagtgaa

SEQ ID NO: 2617446 - DNA, 25 bp, Homo sapien
aggttagtatttgatatgtgtagat

SEQ ID NO: 2617447 - DNA, 25 bp, Homo sapien
ataggaaatcccagccagagtaatc

SEQ ID NO: 2617448 - DNA, 25 bp, Homo sapien
ggttagtatttgatatgtgtagatt

SEQ ID NO: 2617449 - DNA, 25 bp, Homo sapien
tatccctatttgaagctgacatgat

SEQ ID NO: 2617450 - DNA, 25 bp, Homo sapien
tttggcaccaatttcgtcaaaagct

SEQ ID NO: 2617451 - DNA, 25 bp, Homo sapien
tacctgagcagggttaacatctgca

SEQ ID NO: 2617452 - DNA, 25 bp, Homo sapien
cgtcaaaagctgctctatacctgag

SEQ ID NO: 2617453 - DNA, 25 bp, Homo sapien
acatctgcaagacctgctgaaagca

SEQ ID NO: 2617454 - DNA, 25 bp, Homo sapien
cttcagccctattcaagcattagca

SEQ ID NO: 2617455 - DNA, 25 bp, Homo sapien
tgtcttatataacaaaaagttcaag

SEQ ID NO: 2617456 - DNA, 25 bp, Homo sapien
tattataatctaatccttcagccct

SEQ ID NO: 2617457 - DNA, 25 bp, Homo sapien
caagcattagcacttgtctcaatag

SEQ ID NO: 2617458 - DNA, 25 bp, Homo sapien
cagagttggagccttcgtgtaagga

SEQ ID NO: 2617459 - DNA, 25 bp, Homo sapien
tcttgtgccaactataataactagg

SEQ ID NO: 2617460 - DNA, 25 bp, Homo sapien
tgccaactataataactagggctgc

SEQ ID NO: 2617461 - DNA, 25 bp, Homo sapien
cgtgtaaggagtttgcagatcatat

SEQ ID NO: 2617462 - DNA, 25 bp, Homo sapien
tccgacttagacaagggagagggca

SEQ ID NO: 2617463 - DNA, 25 bp, Homo sapien
tgctcaggctgtggacatagaaacc

SEQ ID NO: 2617464 - DNA, 25 bp, Homo sapien
caggagatggcgctggcaccgtttt

SEQ ID NO: 2617465 - DNA, 25 bp, Homo sapien
aaagcccctggagcctgaatcagaa

SEQ ID NO: 2617466 - DNA, 25 bp, Homo sapien
ccccttgcagtttggtataaattgt

SEQ ID NO: 2617467 - DNA, 25 bp, Homo sapien
gcagtttggtataaattgtaataca

SEQ ID NO: 2617468 - DNA, 25 bp, Homo sapien
ggtataaattgtaatacaatttcca

SEQ ID NO: 2617469 - DNA, 25 bp, Homo sapien
tggtataaattgtaatacaatttcc

SEQ ID NO: 2617470 - DNA, 25 bp, Homo sapien
taaccctttccctttctctagctgc

SEQ ID NO: 2617471 - DNA, 25 bp, Homo sapien
tcaatatttctctctaaccctttcc

SEQ ID NO: 2617472 - DNA, 25 bp, Homo sapien
tgtcaatatttctctctaacccttt

SEQ ID NO: 2617473 - DNA, 25 bp, Homo sapien
accctttccctttctctagctgcat

SEQ ID NO: 2617474 - DNA, 25 bp, Homo sapien
tgtgttaagagggaggagccaaatt

SEQ ID NO: 2617475 - DNA, 25 bp, Homo sapien
gcatcagtgacatgacataactgtg

SEQ ID NO: 2617476 - DNA, 25 bp, Homo sapien
tttggctctaacttgggttactaca

SEQ ID NO: 2617477 - DNA, 25 bp, Homo sapien
ggttactacaaggaagaatgctcta

SEQ ID NO: 2617478 - DNA, 25 bp, Homo sapien
gatcatgtctaaccagtttggcccc

SEQ ID NO: 2617479 - DNA, 25 bp, Homo sapien
gttcctttccactagggatcatgtc

SEQ ID NO: 2617480 - DNA, 25 bp, Homo sapien
gcagggtgtctgcagtccgtcttta

SEQ ID NO: 2617481 - DNA, 25 bp, Homo sapien
tgcagtccgtctttattagcacagc

SEQ ID NO: 2617482 - DNA, 25 bp, Homo sapien
caatatccatccacattacttttga

SEQ ID NO: 2617483 - DNA, 25 bp, Homo sapien
tcaatatccatccacattacttttg

SEQ ID NO: 2617484 - DNA, 25 bp, Homo sapien
cattcacccaactgtagggagttgt

SEQ ID NO: 2617485 - DNA, 25 bp, Homo sapien
cccaactgtagggagttgtttctag

SEQ ID NO: 2617486 - DNA, 25 bp, Homo sapien
gtcaatgccggctgcattcacccaa

SEQ ID NO: 2617487 - DNA, 25 bp, Homo sapien
ttatatgtcaatgccggctgcattc

SEQ ID NO: 2617488 - DNA, 25 bp, Homo sapien
gccagtgacatatttagctgctcca

SEQ ID NO: 2617489 - DNA, 25 bp, Homo sapien
agatgccagtgacatatttagctgc

SEQ ID NO: 2617490 - DNA, 25 bp, Homo sapien
ctgctccactgcctgtaagcaaata

SEQ ID NO: 2617491 - DNA, 25 bp, Homo sapien
tgcctgtaagcaaatagatcttcat

SEQ ID NO: 2617492 - DNA, 25 bp, Homo sapien
aattcttccttagcttcatagctgt

SEQ ID NO: 2617493 - DNA, 25 bp, Homo sapien
aaaaattcttccttagcttcatagc

SEQ ID NO: 2617494 - DNA, 25 bp, Homo sapien
gatcagagataattcctaaaaattc

SEQ ID NO: 2617495 - DNA, 25 bp, Homo sapien
ctgatcatgatcagagataattcct

SEQ ID NO: 2617496 - DNA, 25 bp, Homo sapien
ctgctgccaaataggttgaccttgc

SEQ ID NO: 2617497 - DNA, 25 bp, Homo sapien
gagaacctttgcagtgtattcaagt

SEQ ID NO: 2617498 - DNA, 25 bp, Homo sapien
caagtgtcctaaatcaaagctttgt

SEQ ID NO: 2617499 - DNA, 25 bp, Homo sapien
ccaaataggttgaccttgctgctca

SEQ ID NO: 2617500 - DNA, 25 bp, Homo sapien
gaatcaattttttgtgctggaagaa

SEQ ID NO: 2617501 - DNA, 25 bp, Homo sapien
ctggaagaatacgtgggctccgagc

SEQ ID NO: 2617502 - DNA, 25 bp, Homo sapien
ctcagtatgtgggaaaggtaatggc

SEQ ID NO: 2617503 - DNA, 25 bp, Homo sapien
cgtggctgggtatggaatcaatttt

SEQ ID NO: 2617504 - DNA, 25 bp, Homo sapien
atcaaaaggattaatgcctgcatca

SEQ ID NO: 2617505 - DNA, 25 bp, Homo sapien
catcaaaaggattaatgcctgcatc

SEQ ID NO: 2617506 - DNA, 25 bp, Homo sapien
aatataatacagcagaagccttttc

SEQ ID NO: 2617507 - DNA, 25 bp, Homo sapien
atataatacagcagaagccttttca

SEQ ID NO: 2617508 - DNA, 25 bp, Homo sapien
gcagatataatgagcgttgtgatga

SEQ ID NO: 2617509 - DNA, 25 bp, Homo sapien
tccttaaatgttggcagatataatg

SEQ ID NO: 2617510 - DNA, 25 bp, Homo sapien
tcatcatgcaatttcattaatttaa

SEQ ID NO: 2617511 - DNA, 25 bp, Homo sapien
gcgttgtgatgaatatcatcatgca

SEQ ID NO: 2617512 - DNA, 25 bp, Homo sapien
ttcatctgtgtaacggtttgcctct

SEQ ID NO: 2617513 - DNA, 25 bp, Homo sapien
gaaaattcatctgtgtaacggtttg

SEQ ID NO: 2617514 - DNA, 25 bp, Homo sapien
attcatctgtgtaacggtttgcctc

SEQ ID NO: 2617515 - DNA, 25 bp, Homo sapien
aaattcatctgtgtaacggtttgcc

SEQ ID NO: 2617516 - DNA, 25 bp, Homo sapien
gaaccaagcagacctcttctgtgga

SEQ ID NO: 2617517 - DNA, 25 bp, Homo sapien
gccacctgatgtcatattggaaaag

SEQ ID NO: 2617518 - DNA, 25 bp, Homo sapien
gaggccctccactgcttctgattgg

SEQ ID NO: 2617519 - DNA, 25 bp, Homo sapien
agatgccacctgatgtcatattgga

SEQ ID NO: 2617520 - DNA, 25 bp, Homo sapien
gattaccctgggatttattgactga

SEQ ID NO: 2617521 - DNA, 25 bp, Homo sapien
tgggtggttaaaagagaatgtagat

SEQ ID NO: 2617522 - DNA, 25 bp, Homo sapien
gggatttattgactgaaaccaagat

SEQ ID NO: 2617523 - DNA, 25 bp, Homo sapien
cctggattgttggcctcaagattgt

SEQ ID NO: 2617524 - DNA, 25 bp, Homo sapien
gcaggaaagtgccaagatagtttta

SEQ ID NO: 2617525 - DNA, 25 bp, Homo sapien
tgagacaggctttcaactgatggct

SEQ ID NO: 2617526 - DNA, 25 bp, Homo sapien
tgatggctctccagctcgaacgtga

SEQ ID NO: 2617527 - DNA, 25 bp, Homo sapien
tagttttattgcttagcaacttggc

SEQ ID NO: 2617528 - DNA, 25 bp, Homo sapien
tcggtatcctgaaccccattctcag

SEQ ID NO: 2617529 - DNA, 25 bp, Homo sapien
gtgttgattcggtatcctgaacccc

SEQ ID NO: 2617530 - DNA, 25 bp, Homo sapien
gttgattcggtatcctgaaccccat

SEQ ID NO: 2617531 - DNA, 25 bp, Homo sapien
gattcggtatcctgaaccccattct

SEQ ID NO: 2617532 - DNA, 25 bp, Homo sapien
tcagacttgccagcaagattggtag

SEQ ID NO: 2617533 - DNA, 25 bp, Homo sapien
gacttgccagcaagattggtagact

SEQ ID NO: 2617534 - DNA, 25 bp, Homo sapien
tgccagcaagattggtagactcttc

SEQ ID NO: 2617535 - DNA, 25 bp, Homo sapien
cagcaagattggtagactcttccca

SEQ ID NO: 2617536 - DNA, 25 bp, Homo sapien
aaagatgacatagaccaacaggtcc

SEQ ID NO: 2617537 - DNA, 25 bp, Homo sapien
gacatagaccaacaggtccatatca

SEQ ID NO: 2617538 - DNA, 25 bp, Homo sapien
agaccaacaggtccatatcaaaaaa

SEQ ID NO: 2617539 - DNA, 25 bp, Homo sapien
tgaaaagatgacatagaccaacagg

SEQ ID NO: 2617540 - DNA, 25 bp, Homo sapien
caatttactggttgactgcactctc

SEQ ID NO: 2617541 - DNA, 25 bp, Homo sapien
tatgcattaggacactgacgctatt

SEQ ID NO: 2617542 - DNA, 25 bp, Homo sapien
tacagtaacattatgggcttctcct

SEQ ID NO: 2617543 - DNA, 25 bp, Homo sapien
taaacaagaatataggctggactca

SEQ ID NO: 2617544 - DNA, 25 bp, Homo sapien
tcacagatttatgttttggtagaag

SEQ ID NO: 2617545 - DNA, 25 bp, Homo sapien
aaggactgactttcagagatcacaa

SEQ ID NO: 2617546 - DNA, 25 bp, Homo sapien
agtagataaaaggactgactttcag

SEQ ID NO: 2617547 - DNA, 25 bp, Homo sapien
ttgagtagataaaaggactgacttt

SEQ ID NO: 2617548 - DNA, 25 bp, Homo sapien
taaaaggactgactttcagagatca

SEQ ID NO: 2617549 - DNA, 25 bp, Homo sapien
gttctcttgttcatttagccactgc

SEQ ID NO: 2617550 - DNA, 25 bp, Homo sapien
cctttctatatacccatatttctac

SEQ ID NO: 2617551 - DNA, 25 bp, Homo sapien
tttagccactgctcaccgttagcct

SEQ ID NO: 2617552 - DNA, 25 bp, Homo sapien
ctgctcaccgttagccttgctttct

SEQ ID NO: 2617553 - DNA, 25 bp, Homo sapien
tcaaaagttgacattatcagatcag

SEQ ID NO: 2617554 - DNA, 25 bp, Homo sapien
tttcaaaagttgacattatcagatc

SEQ ID NO: 2617555 - DNA, 25 bp, Homo sapien
caaaagttgacattatcagatcagt

SEQ ID NO: 2617556 - DNA, 25 bp, Homo sapien
aaagttgacattatcagatcagtta

SEQ ID NO: 2617557 - DNA, 25 bp, Homo sapien
catttctcaacaagtgaaggtggtc

SEQ ID NO: 2617558 - DNA, 25 bp, Homo sapien
tttctcaacaagtgaaggtggtctc

SEQ ID NO: 2617559 - DNA, 25 bp, Homo sapien
ttcccccgagaacggaactgcactg

SEQ ID NO: 2617560 - DNA, 25 bp, Homo sapien
gtaccatttctcaacaagtgaaggt

SEQ ID NO: 2617561 - DNA, 25 bp, Homo sapien
tatgtctaatgttcagcatattgtc

SEQ ID NO: 2617562 - DNA, 25 bp, Homo sapien
gatttaattatgtctaatgttcagc

SEQ ID NO: 2617563 - DNA, 25 bp, Homo sapien
cagcatattgtctgccacaacataa

SEQ ID NO: 2617564 - DNA, 25 bp, Homo sapien
tctaatgttcagcatattgtctgcc

SEQ ID NO: 2617565 - DNA, 25 bp, Homo sapien
tctgttgtaggttgacctacataga

SEQ ID NO: 2617566 - DNA, 25 bp, Homo sapien
tgtaggttgacctacatagatacca

SEQ ID NO: 2617567 - DNA, 25 bp, Homo sapien
ggttgacctacatagataccaccta

SEQ ID NO: 2617568 - DNA, 25 bp, Homo sapien
tacatagataccacctatacagatt

SEQ ID NO: 2617569 - DNA, 25 bp, Homo sapien
cagcatctgtgcctaactgagaggc

SEQ ID NO: 2617570 - DNA, 25 bp, Homo sapien
tccagaacgcaaggctaatgttagg

SEQ ID NO: 2617571 - DNA, 25 bp, Homo sapien
tgttggcccaattagtccagaacgc

SEQ ID NO: 2617572 - DNA, 25 bp, Homo sapien
tctgttgccaagaggtgaagtgatg

SEQ ID NO: 2617573 - DNA, 25 bp, Homo sapien
gccagtggtcatcaccccagacatg

SEQ ID NO: 2617574 - DNA, 25 bp, Homo sapien
ggtataagccagtggtcatcacccc

SEQ ID NO: 2617575 - DNA, 25 bp, Homo sapien
ttgaattaggtataagccagtggtc

SEQ ID NO: 2617576 - DNA, 25 bp, Homo sapien
cctctatttgaattaggtataagcc

SEQ ID NO: 2617577 - DNA, 25 bp, Homo sapien
gaccagcaggttggtaacggcacat

SEQ ID NO: 2617578 - DNA, 25 bp, Homo sapien
tcattgtgagaggacagtcgtcagc

SEQ ID NO: 2617579 - DNA, 25 bp, Homo sapien
cagttatgtgaccttttccagagag

SEQ ID NO: 2617580 - DNA, 25 bp, Homo sapien
gaaatgccatatgtcccaagtgaga

SEQ ID NO: 2617581 - DNA, 25 bp, Homo sapien
ttgcatgaccaactacacattagag

SEQ ID NO: 2617582 - DNA, 25 bp, Homo sapien
cattagagccctggaatctatccca

SEQ ID NO: 2617583 - DNA, 25 bp, Homo sapien
gactagttggaaccctctcaggaga

SEQ ID NO: 2617584 - DNA, 25 bp, Homo sapien
catttacttcgatgtaagcagcctc

SEQ ID NO: 2617585 - DNA, 25 bp, Homo sapien
tactgtaccttaggagaatctctct

SEQ ID NO: 2617586 - DNA, 25 bp, Homo sapien
ggagaatctctctataaaacaccat

SEQ ID NO: 2617587 - DNA, 25 bp, Homo sapien
tgttcctgttgttcaaaaatactgt

SEQ ID NO: 2617588 - DNA, 25 bp, Homo sapien
tatagccatagcactgataaaatgc

SEQ ID NO: 2617589 - DNA, 25 bp, Homo sapien
gtccaaagtgtggtatccagagtga

SEQ ID NO: 2617590 - DNA, 25 bp, Homo sapien
tggattagtccaaagtgtggtatcc

SEQ ID NO: 2617591 - DNA, 25 bp, Homo sapien
tatttcattcattggattagtccaa

SEQ ID NO: 2617592 - DNA, 25 bp, Homo sapien
ttcattggattagtccaaagtgtgg

SEQ ID NO: 2617593 - DNA, 25 bp, Homo sapien
tcttgcccttccaatgtgactccag

SEQ ID NO: 2617594 - DNA, 25 bp, Homo sapien
gtccatcagtgtcagtagaagactg

SEQ ID NO: 2617595 - DNA, 25 bp, Homo sapien
tcagtgtcagtagaagactgtccat

SEQ ID NO: 2617596 - DNA, 25 bp, Homo sapien
tgtccatcagctgatccttcccctg

SEQ ID NO: 2617597 - DNA, 25 bp, Homo sapien
tcagggtgccttagtgtgaaagtgg

SEQ ID NO: 2617598 - DNA, 25 bp, Homo sapien
caggatcaaggtagtcgcagcaaag

SEQ ID NO: 2617599 - DNA, 25 bp, Homo sapien
tggacagaaatactaagaaagaaga

SEQ ID NO: 2617600 - DNA, 25 bp, Homo sapien
gaaggtggacagaaatactaagaaa

SEQ ID NO: 2617601 - DNA, 25 bp, Homo sapien
ttaaagacggcatgtactgtgtcct

SEQ ID NO: 2617602 - DNA, 25 bp, Homo sapien
ggaaaatgccaggaatacagctctt

SEQ ID NO: 2617603 - DNA, 25 bp, Homo sapien
gcatgtactgtgtccttgcaaatca

SEQ ID NO: 2617604 - DNA, 25 bp, Homo sapien
cttctgtatggccattggaattcag

SEQ ID NO: 2617605 - DNA, 25 bp, Homo sapien
tctctggatctgatttcctctaggg

SEQ ID NO: 2617606 - DNA, 25 bp, Homo sapien
ttctctggatctgatttcctctagg

SEQ ID NO: 2617607 - DNA, 25 bp, Homo sapien
ctctggatctgatttcctctagggt

SEQ ID NO: 2617608 - DNA, 25 bp, Homo sapien
tctctcatgggaatctccaacctgg

SEQ ID NO: 2617609 - DNA, 25 bp, Homo sapien
aatctccaacctggacagttctgta

SEQ ID NO: 2617610 - DNA, 25 bp, Homo sapien
tccaacctggacagttctgtaattc

SEQ ID NO: 2617611 - DNA, 25 bp, Homo sapien
tcatgggaatctccaacctggacag

SEQ ID NO: 2617612 - DNA, 25 bp, Homo sapien
caataagagtcaggctcatgacaac

SEQ ID NO: 2617613 - DNA, 25 bp, Homo sapien
ggagttgcagatctttgctatacag

SEQ ID NO: 2617614 - DNA, 25 bp, Homo sapien
gaaacacttagttcaacaggttcaa

SEQ ID NO: 2617615 - DNA, 25 bp, Homo sapien
tgtgtatggttgtcgccttgctctc

SEQ ID NO: 2617616 - DNA, 25 bp, Homo sapien
tctctatggcctctggatccttctt

SEQ ID NO: 2617617 - DNA, 25 bp, Homo sapien
ctttttcattgttctctatggcctc

SEQ ID NO: 2617618 - DNA, 25 bp, Homo sapien
tttcattgttctctatggcctctgg

SEQ ID NO: 2617619 - DNA, 25 bp, Homo sapien
cattgttctctatggcctctggatc

SEQ ID NO: 2617620 - DNA, 25 bp, Homo sapien
catgttacaccatctgttagtggct

SEQ ID NO: 2617621 - DNA, 25 bp, Homo sapien
tggctggatttactctctggcagga

SEQ ID NO: 2617622 - DNA, 25 bp, Homo sapien
ttagtggctggatttactctctggc

SEQ ID NO: 2617623 - DNA, 25 bp, Homo sapien
taattcatgttacaccatctgttag

SEQ ID NO: 2617624 - DNA, 25 bp, Homo sapien
ttgcaaagctatacctggcaaaagg

SEQ ID NO: 2617625 - DNA, 25 bp, Homo sapien
acctccactcgcttcccagtggtca

SEQ ID NO: 2617626 - DNA, 25 bp, Homo sapien
agctgcatgcacctccactcgcttc

SEQ ID NO: 2617627 - DNA, 25 bp, Homo sapien
ttttgcaaagctatacctggcaaaa

SEQ ID NO: 2617628 - DNA, 25 bp, Homo sapien
cctttgacatcccagaagattgttc

SEQ ID NO: 2617629 - DNA, 25 bp, Homo sapien
tgacatcccagaagattgttcatct

SEQ ID NO: 2617630 - DNA, 25 bp, Homo sapien
cagtagggttggtcctttctgggag

SEQ ID NO: 2617631 - DNA, 25 bp, Homo sapien
tctgggagaatgcagtccatgcctc

SEQ ID NO: 2617632 - DNA, 25 bp, Homo sapien
gagtggctccaagtctcttggtttc

SEQ ID NO: 2617633 - DNA, 25 bp, Homo sapien
ggagcacgagtttttctagactgga

SEQ ID NO: 2617634 - DNA, 25 bp, Homo sapien
tactctggagcacgagtttttctag

SEQ ID NO: 2617635 - DNA, 25 bp, Homo sapien
gatcccagttctgatctctcagagt

SEQ ID NO: 2617636 - DNA, 25 bp, Homo sapien
tcagttgcatagactttctggtggc

SEQ ID NO: 2617637 - DNA, 25 bp, Homo sapien
taactgggccatatagctctcacct

SEQ ID NO: 2617638 - DNA, 25 bp, Homo sapien
gcaaggcatagggaattcaaaacga

SEQ ID NO: 2617639 - DNA, 25 bp, Homo sapien
actgaagagtccgtgaagagggaac

SEQ ID NO: 2617640 - DNA, 25 bp, Homo sapien
taatgacgctgtgctacaggaactg

SEQ ID NO: 2617641 - DNA, 25 bp, Homo sapien
gatgcatttcagtacgacagggtaa

SEQ ID NO: 2617642 - DNA, 25 bp, Homo sapien
gaggccaatatcatggaatcctatg

SEQ ID NO: 2617643 - DNA, 25 bp, Homo sapien
agcacaccgccttcatataatgacg

SEQ ID NO: 2617644 - DNA, 25 bp, Homo sapien
ttttttgaaggcaactagaatattc

SEQ ID NO: 2617645 - DNA, 25 bp, Homo sapien
tattcggggggttcttgcctatcat

SEQ ID NO: 2617646 - DNA, 25 bp, Homo sapien
atattcggggggttcttgcctatca

SEQ ID NO: 2617647 - DNA, 25 bp, Homo sapien
tttgaaggcaactagaatattcggg

SEQ ID NO: 2617648 - DNA, 25 bp, Homo sapien
gattgcaatgcctctggtgttggac

SEQ ID NO: 2617649 - DNA, 25 bp, Homo sapien
gcaatgcctctggtgttggacccag

SEQ ID NO: 2617650 - DNA, 25 bp, Homo sapien
tcttcatctgctccgattgcaatgc

SEQ ID NO: 2617651 - DNA, 25 bp, Homo sapien
tctgctccgattgcaatgcctctgg

SEQ ID NO: 2617652 - DNA, 25 bp, Homo sapien
gtataccaacgttgatgagcataaa

SEQ ID NO: 2617653 - DNA, 25 bp, Homo sapien
cttcattgggaatagtataccaacg

SEQ ID NO: 2617654 - DNA, 25 bp, Homo sapien
tgagcataaataatgcgggaaagta

SEQ ID NO: 2617655 - DNA, 25 bp, Homo sapien
ataatgcgggaaagtagaaaccaat

SEQ ID NO: 2617656 - DNA, 25 bp, Homo sapien
gagtgtttggacacattgactttgg

SEQ ID NO: 2617657 - DNA, 25 bp, Homo sapien
caaggagagtgtttggacacattga

SEQ ID NO: 2617658 - DNA, 25 bp, Homo sapien
gtttggacacattgactttggtccc

SEQ ID NO: 2617659 - DNA, 25 bp, Homo sapien
ggagagtgtttggacacattgactt

SEQ ID NO: 2617660 - DNA, 25 bp, Homo sapien
cacttcactctctgacgaagtcatc

SEQ ID NO: 2617661 - DNA, 25 bp, Homo sapien
cttcactctctgacgaagtcatcag

SEQ ID NO: 2617662 - DNA, 25 bp, Homo sapien
gccacttcactctctgacgaagtca

SEQ ID NO: 2617663 - DNA, 25 bp, Homo sapien
cactctctgacgaagtcatcagcat

SEQ ID NO: 2617664 - DNA, 25 bp, Homo sapien
ttgttaccaagtaagtctatgtttc

SEQ ID NO: 2617665 - DNA, 25 bp, Homo sapien
agttgttaccaagtaagtctatgtt

SEQ ID NO: 2617666 - DNA, 25 bp, Homo sapien
tcacaagttgttaccaagtaagtct

SEQ ID NO: 2617667 - DNA, 25 bp, Homo sapien
caagttgttaccaagtaagtctatg

SEQ ID NO: 2617668 - DNA, 25 bp, Homo sapien
gaagatactgcttagtgcacaaaac

SEQ ID NO: 2617669 - DNA, 25 bp, Homo sapien
tgcttaacggcaatttcctccgatt

SEQ ID NO: 2617670 - DNA, 25 bp, Homo sapien
gcaatttcctccgattctagttctt

SEQ ID NO: 2617671 - DNA, 25 bp, Homo sapien
tagttctttcagtgttaaggctggg

SEQ ID NO: 2617672 - DNA, 25 bp, Homo sapien
gacttgtctgacacgcatgcagtcg

SEQ ID NO: 2617673 - DNA, 25 bp, Homo sapien
gatgctgtgcaagcaccacttgttt

SEQ ID NO: 2617674 - DNA, 25 bp, Homo sapien
caataagcttgacatcgacgacctc

SEQ ID NO: 2617675 - DNA, 25 bp, Homo sapien
catgcagtcgccaggtttgtcaagt

SEQ ID NO: 2617676 - DNA, 25 bp, Homo sapien
ggatgttactctgtgtccagtccac

SEQ ID NO: 2617677 - DNA, 25 bp, Homo sapien
ggatggatgttactctgtgtccagt

SEQ ID NO: 2617678 - DNA, 25 bp, Homo sapien
cacactctggatttcctatattctg

SEQ ID NO: 2617679 - DNA, 25 bp, Homo sapien
gtccacacactctggatttcctata

SEQ ID NO: 2617680 - DNA, 25 bp, Homo sapien
tgaaggggtgccctctagggtcaat

SEQ ID NO: 2617681 - DNA, 25 bp, Homo sapien
tggtgaaggggtgccctctagggtc

SEQ ID NO: 2617682 - DNA, 25 bp, Homo sapien
gggtgccctctagggtcaatggcca

SEQ ID NO: 2617683 - DNA, 25 bp, Homo sapien
aaggggtgccctctagggtcaatgg

SEQ ID NO: 2617684 - DNA, 25 bp, Homo sapien
aatcctgtgagtgtatgaccaggag

SEQ ID NO: 2617685 - DNA, 25 bp, Homo sapien
agcacatgatcaactgaatcctgtg

SEQ ID NO: 2617686 - DNA, 25 bp, Homo sapien
acatgatcaactgaatcctgtgagt

SEQ ID NO: 2617687 - DNA, 25 bp, Homo sapien
tgaatcctgtgagtgtatgaccagg

SEQ ID NO: 2617688 - DNA, 25 bp, Homo sapien
gtttcttttgatgggactcattgca

SEQ ID NO: 2617689 - DNA, 25 bp, Homo sapien
gcatatgtgttaatgtccatcttcc

SEQ ID NO: 2617690 - DNA, 25 bp, Homo sapien
tgttccgtatgactccttgactgca

SEQ ID NO: 2617691 - DNA, 25 bp, Homo sapien
caaagtgttggccaaaatctgttgc

SEQ ID NO: 2617692 - DNA, 25 bp, Homo sapien
ccccactgctctacacatcttagca

SEQ ID NO: 2617693 - DNA, 25 bp, Homo sapien
caacttctgcttgcacgttacaact

SEQ ID NO: 2617694 - DNA, 25 bp, Homo sapien
acttctgcttgcacgttacaactca

SEQ ID NO: 2617695 - DNA, 25 bp, Homo sapien
tcaacttctgcttgcacgttacaac

SEQ ID NO: 2617696 - DNA, 25 bp, Homo sapien
cttctgcttgcacgttacaactcat

SEQ ID NO: 2617697 - DNA, 25 bp, Homo sapien
tgtgctgtgctcatgctgttgctgc

SEQ ID NO: 2617698 - DNA, 25 bp, Homo sapien
tcagacaggtctctctttgaacctg

SEQ ID NO: 2617699 - DNA, 25 bp, Homo sapien
ctgcgcttcagacaggtctctcttt

SEQ ID NO: 2617700 - DNA, 25 bp, Homo sapien
tttgaacctgtttgcttcagggcca

SEQ ID NO: 2617701 - DNA, 25 bp, Homo sapien
gcatttaaatctgcaagtccatgaa

SEQ ID NO: 2617702 - DNA, 25 bp, Homo sapien
tagcatttaaatctgcaagtccatg

SEQ ID NO: 2617703 - DNA, 25 bp, Homo sapien
atttaaatctgcaagtccatgaaaa

SEQ ID NO: 2617704 - DNA, 25 bp, Homo sapien
catttaaatctgcaagtccatgaaa

SEQ ID NO: 2617705 - DNA, 25 bp, Homo sapien
aggacgcatgcaggttgtaggaggg

SEQ ID NO: 2617706 - DNA, 25 bp, Homo sapien
tatttacagtaggacgcatgcaggt

SEQ ID NO: 2617707 - DNA, 25 bp, Homo sapien
tttacagtaggacgcatgcaggttg

SEQ ID NO: 2617708 - DNA, 25 bp, Homo sapien
acagtaggacgcatgcaggttgtag

SEQ ID NO: 2617709 - DNA, 25 bp, Homo sapien
gagttcctcacacatgcctctattt

SEQ ID NO: 2617710 - DNA, 25 bp, Homo sapien
gttgagttcctcacacatgcctcta

SEQ ID NO: 2617711 - DNA, 25 bp, Homo sapien
ttcagttgagttcctcacacatgcc

SEQ ID NO: 2617712 - DNA, 25 bp, Homo sapien
tgcttcagttgagttcctcacacat

SEQ ID NO: 2617713 - DNA, 25 bp, Homo sapien
taccacatagttattggcctttggt

SEQ ID NO: 2617714 - DNA, 25 bp, Homo sapien
ataccacatagttattggcctttgg

SEQ ID NO: 2617715 - DNA, 25 bp, Homo sapien
accacatagttattggcctttggtt

SEQ ID NO: 2617716 - DNA, 25 bp, Homo sapien
ccacatagttattggcctttggttc

SEQ ID NO: 2617717 - DNA, 25 bp, Homo sapien
gcagggagaatgctaattcgatttt

SEQ ID NO: 2617718 - DNA, 25 bp, Homo sapien
cagggagaatgctaattcgatttta

SEQ ID NO: 2617719 - DNA, 25 bp, Homo sapien
gggagaatgctaattcgattttatg

SEQ ID NO: 2617720 - DNA, 25 bp, Homo sapien
cagcagggagaatgctaattcgatt

SEQ ID NO: 2617721 - DNA, 25 bp, Homo sapien
tctggtcagcaagagtaaggtcatt

SEQ ID NO: 2617722 - DNA, 25 bp, Homo sapien
ttgtctcaggctctggtcagcaaga

SEQ ID NO: 2617723 - DNA, 25 bp, Homo sapien
tgtggttccactgatgaagagtagc

SEQ ID NO: 2617724 - DNA, 25 bp, Homo sapien
tccactgatgaagagtagcctttgc

SEQ ID NO: 2617725 - DNA, 25 bp, Homo sapien
gtgaaaatgacacagtaggacaatc

SEQ ID NO: 2617726 - DNA, 25 bp, Homo sapien
gagatgattttggaactgatgagcc

SEQ ID NO: 2617727 - DNA, 25 bp, Homo sapien
taggacaatcacttccctgaaggag

SEQ ID NO: 2617728 - DNA, 25 bp, Homo sapien
cagggccatgccaagtatggaaaca

SEQ ID NO: 2617729 - DNA, 25 bp, Homo sapien
tgagaggttacgtgaaaagaggaag

SEQ ID NO: 2617730 - DNA, 25 bp, Homo sapien
gaccgtgagaggttacgtgaaaaga

SEQ ID NO: 2617731 - DNA, 25 bp, Homo sapien
aagaaatgttttaacctcaaatgca

SEQ ID NO: 2617732 - DNA, 25 bp, Homo sapien
ctcagaccgtgagaggttacgtgaa

SEQ ID NO: 2617733 - DNA, 25 bp, Homo sapien
tggcagctgaattaggagcttgtgc

SEQ ID NO: 2617734 - DNA, 25 bp, Homo sapien
cggtaagttctaaacaagtctctgg

SEQ ID NO: 2617735 - DNA, 25 bp, Homo sapien
gatgcctagcgtagtgagaagctga

SEQ ID NO: 2617736 - DNA, 25 bp, Homo sapien
gaacgaagctgcacacagatctggc

SEQ ID NO: 2617737 - DNA, 25 bp, Homo sapien
gatcgcttcagggtgcatgcacaga

SEQ ID NO: 2617738 - DNA, 25 bp, Homo sapien
tgttggcaccctgctgcggccgtcg

SEQ ID NO: 2617739 - DNA, 25 bp, Homo sapien
catcaggtaaggcttccgtttttga

SEQ ID NO: 2617740 - DNA, 25 bp, Homo sapien
tgattgggattgcaccgcgtgtgtg

SEQ ID NO: 2617741 - DNA, 25 bp, Homo sapien
tttgaatgaaaacggacaaaatgca

SEQ ID NO: 2617742 - DNA, 25 bp, Homo sapien
tggagaaccttctttgaatgaaaac

SEQ ID NO: 2617743 - DNA, 25 bp, Homo sapien
tgtgttggcacagtgatttggaaag

SEQ ID NO: 2617744 - DNA, 25 bp, Homo sapien
aagaaagtggtgtctactggctgcc

SEQ ID NO: 2617745 - DNA, 25 bp, Homo sapien
cagccgctccgagagcattattgat

SEQ ID NO: 2617746 - DNA, 25 bp, Homo sapien
tttgagggcggggagatgacaggag

SEQ ID NO: 2617747 - DNA, 25 bp, Homo sapien
tcaaaggcacgctgtgttttgtttt

SEQ ID NO: 2617748 - DNA, 25 bp, Homo sapien
gctcgccgctgcagttgagctccag

SEQ ID NO: 2617749 - DNA, 25 bp, Homo sapien
ctccacaggatgtatgtttgatttc

SEQ ID NO: 2617750 - DNA, 25 bp, Homo sapien
gacataatcgagagaggcttcttag

SEQ ID NO: 2617751 - DNA, 25 bp, Homo sapien
ccacaggatgtatgtttgatttcac

SEQ ID NO: 2617752 - DNA, 25 bp, Homo sapien
tagccaaagacataatcgagagagg

SEQ ID NO: 2617753 - DNA, 25 bp, Homo sapien
ttcttttctggagcaggttggtgtg

SEQ ID NO: 2617754 - DNA, 25 bp, Homo sapien
tcttttctggagcaggttggtgtgg

SEQ ID NO: 2617755 - DNA, 25 bp, Homo sapien
tttcttttctggagcaggttggtgt

SEQ ID NO: 2617756 - DNA, 25 bp, Homo sapien
ttttcttttctggagcaggttggtg

SEQ ID NO: 2617757 - DNA, 25 bp, Homo sapien
tgatggaatagtggagtgttcacat

SEQ ID NO: 2617758 - DNA, 25 bp, Homo sapien
tggaatagtggagtgttcacattca

SEQ ID NO: 2617759 - DNA, 25 bp, Homo sapien
tgggagaaacgtccaagtccagggc

SEQ ID NO: 2617760 - DNA, 25 bp, Homo sapien
ctctgttgggagaaacgtccaagtc

SEQ ID NO: 2617761 - DNA, 25 bp, Homo sapien
gaggcagggttctcaataacggcca

SEQ ID NO: 2617762 - DNA, 25 bp, Homo sapien
taacggccacttcattaagcagaaa

SEQ ID NO: 2617763 - DNA, 25 bp, Homo sapien
caggtctgatgccaactcaaggcga

SEQ ID NO: 2617764 - DNA, 25 bp, Homo sapien
cagccaaagggacattgttccgcca

SEQ ID NO: 2617765 - DNA, 25 bp, Homo sapien
caattatggtaactcttcctgactc

SEQ ID NO: 2617766 - DNA, 25 bp, Homo sapien
gcctttacttctcatgacctgtgca

SEQ ID NO: 2617767 - DNA, 25 bp, Homo sapien
cttggaaaaacagtggtgaaattgc

SEQ ID NO: 2617768 - DNA, 25 bp, Homo sapien
gactcttcacatattaaccttacat

SEQ ID NO: 2617769 - DNA, 25 bp, Homo sapien
ctctgaaaacattccactgacatcc

SEQ ID NO: 2617770 - DNA, 25 bp, Homo sapien
aaacattccactgacatccttttgt

SEQ ID NO: 2617771 - DNA, 25 bp, Homo sapien
tctgaaaacattccactgacatcct

SEQ ID NO: 2617772 - DNA, 25 bp, Homo sapien
tgaaaacattccactgacatccttt

SEQ ID NO: 2617773 - DNA, 25 bp, Homo sapien
gatctcccttaggttcttcaataga

SEQ ID NO: 2617774 - DNA, 25 bp, Homo sapien
taagatctcccttaggttcttcaat

SEQ ID NO: 2617775 - DNA, 25 bp, Homo sapien
tcccttaggttcttcaatagagaaa

SEQ ID NO: 2617776 - DNA, 25 bp, Homo sapien
attaagatctcccttaggttcttca

SEQ ID NO: 2617777 - DNA, 25 bp, Homo sapien
tcaagtgaccacgaagtacattaga

SEQ ID NO: 2617778 - DNA, 25 bp, Homo sapien
gaccacgaagtacattagaagaaac

SEQ ID NO: 2617779 - DNA, 25 bp, Homo sapien
tctctcaagtgaccacgaagtacat

SEQ ID NO: 2617780 - DNA, 25 bp, Homo sapien
tcttctctcaagtgaccacgaagta

SEQ ID NO: 2617781 - DNA, 25 bp, Homo sapien
gatgaaggtcagcaagctctatctc

SEQ ID NO: 2617782 - DNA, 25 bp, Homo sapien
tgatgaaggtcagcaagctctatct

SEQ ID NO: 2617783 - DNA, 25 bp, Homo sapien
cttgatgaaggtcagcaagctctat

SEQ ID NO: 2617784 - DNA, 25 bp, Homo sapien
atgaaggtcagcaagctctatctct

SEQ ID NO: 2617785 - DNA, 25 bp, Homo sapien
cttggatgaggttccgggcattaaa

SEQ ID NO: 2617786 - DNA, 25 bp, Homo sapien
tccacaactggtgaaacacagatca

SEQ ID NO: 2617787 - DNA, 25 bp, Homo sapien
ctctctatgggttccacaactggtg

SEQ ID NO: 2617788 - DNA, 25 bp, Homo sapien
tcactgcgactcttggatgaggttc

SEQ ID NO: 2617789 - DNA, 25 bp, Homo sapien
tgtccatttgggtaatagaaaattc

SEQ ID NO: 2617790 - DNA, 25 bp, Homo sapien
tccatttgggtaatagaaaattcaa

SEQ ID NO: 2617791 - DNA, 25 bp, Homo sapien
taatattgtccatttgggtaataga

SEQ ID NO: 2617792 - DNA, 25 bp, Homo sapien
tattgtccatttgggtaatagaaaa

SEQ ID NO: 2617793 - DNA, 25 bp, Homo sapien
tgggatatagacatgttactgattt

SEQ ID NO: 2617794 - DNA, 25 bp, Homo sapien
aataggaattgtattcaatttgtag

SEQ ID NO: 2617795 - DNA, 25 bp, Homo sapien
tcactgttgggatatagacatgtta

SEQ ID NO: 2617796 - DNA, 25 bp, Homo sapien
ctgttgggatatagacatgttactg

SEQ ID NO: 2617797 - DNA, 25 bp, Homo sapien
gaaagcctgctatactttcactctg

SEQ ID NO: 2617798 - DNA, 25 bp, Homo sapien
agatcactgtatcttgacagaggac

SEQ ID NO: 2617799 - DNA, 25 bp, Homo sapien
ttctggcaatcagatcactgtatct

SEQ ID NO: 2617800 - DNA, 25 bp, Homo sapien
gatcactgtatcttgacagaggaca

SEQ ID NO: 2617801 - DNA, 25 bp, Homo sapien
ttcctcttctggcaatcagatcact

SEQ ID NO: 2617802 - DNA, 25 bp, Homo sapien
aggtacatatcagtgctcccagaaa

SEQ ID NO: 2617803 - DNA, 25 bp, Homo sapien
taagaggtacatatcagtgctccca

SEQ ID NO: 2617804 - DNA, 25 bp, Homo sapien
tctcttaagaggtacatatcagtgc

SEQ ID NO: 2617805 - DNA, 25 bp, Homo sapien
gaaactctcttaagaggtacatatc

SEQ ID NO: 2617806 - DNA, 25 bp, Homo sapien
gactttactacttcagagctgtact

SEQ ID NO: 2617807 - DNA, 25 bp, Homo sapien
gtggactttactacttcagagctgt

SEQ ID NO: 2617808 - DNA, 25 bp, Homo sapien
gtcatctgtggactttactacttca

SEQ ID NO: 2617809 - DNA, 25 bp, Homo sapien
attctgaaggattcagcatggtcat

SEQ ID NO: 2617810 - DNA, 25 bp, Homo sapien
agaaccctattgcataggacaggaa

SEQ ID NO: 2617811 - DNA, 25 bp, Homo sapien
tcagaaccctattgcataggacagg

SEQ ID NO: 2617812 - DNA, 25 bp, Homo sapien
cagaaccctattgcataggacagga

SEQ ID NO: 2617813 - DNA, 25 bp, Homo sapien
aggaactccaagacaatcttcagtt

SEQ ID NO: 2617814 - DNA, 25 bp, Homo sapien
cacccttaacattgaggattatgag

SEQ ID NO: 2617815 - DNA, 25 bp, Homo sapien
tgatctctctacagtcttctgcctg

SEQ ID NO: 2617816 - DNA, 25 bp, Homo sapien
ggtcaagaggctaagtttgctgatc

SEQ ID NO: 2617817 - DNA, 25 bp, Homo sapien
caaaccatatcatgtacttacgaat

SEQ ID NO: 2617818 - DNA, 25 bp, Homo sapien
cacaacaatttccaggtaatagccc

SEQ ID NO: 2617819 - DNA, 25 bp, Homo sapien
caacaatttccaggtaatagcccat

SEQ ID NO: 2617820 - DNA, 25 bp, Homo sapien
tccacaacaatttccaggtaatagc

SEQ ID NO: 2617821 - DNA, 25 bp, Homo sapien
acaacaatttccaggtaatagccca

SEQ ID NO: 2617822 - DNA, 25 bp, Homo sapien
gagataatgcgttatctctggacaa

SEQ ID NO: 2617823 - DNA, 25 bp, Homo sapien
aacagaagttcgatctgtgactgtg

SEQ ID NO: 2617824 - DNA, 25 bp, Homo sapien
caattgagataatgcgttatctctg

SEQ ID NO: 2617825 - DNA, 25 bp, Homo sapien
tagaacagaagttcgatctgtgact

SEQ ID NO: 2617826 - DNA, 25 bp, Homo sapien
gaaaagcaaaggacgagtgaatctg

SEQ ID NO: 2617827 - DNA, 25 bp, Homo sapien
gagaaaagcaaaggacgagtgaatc

SEQ ID NO: 2617828 - DNA, 25 bp, Homo sapien
aaagcaaaggacgagtgaatctgaa

SEQ ID NO: 2617829 - DNA, 25 bp, Homo sapien
agcaaaggacgagtgaatctgaatg

SEQ ID NO: 2617830 - DNA, 25 bp, Homo sapien
gtttattgaatgcttccagttcttc

SEQ ID NO: 2617831 - DNA, 25 bp, Homo sapien
caaaagctgtattttgctgcactgt

SEQ ID NO: 2617832 - DNA, 25 bp, Homo sapien
caacatttttgaaggtgtcatagat

SEQ ID NO: 2617833 - DNA, 25 bp, Homo sapien
ttcaaaagctgtattttgctgcact

SEQ ID NO: 2617834 - DNA, 25 bp, Homo sapien
ggtgaataaaccagaagccctctcc

SEQ ID NO: 2617835 - DNA, 25 bp, Homo sapien
tgagccagcgatgcttgtttccttc

SEQ ID NO: 2617836 - DNA, 25 bp, Homo sapien
tatagacctcctcagtcgagtagag

SEQ ID NO: 2617837 - DNA, 25 bp, Homo sapien
tactcgctcagtcacagagagcaag

SEQ ID NO: 2617838 - DNA, 25 bp, Homo sapien
aacttcaagaagtagccattgtctc

SEQ ID NO: 2617839 - DNA, 25 bp, Homo sapien
caagaagtagccattgtctcttgtc

SEQ ID NO: 2617840 - DNA, 25 bp, Homo sapien
actaccaaacttcaagaagtagcca

SEQ ID NO: 2617841 - DNA, 25 bp, Homo sapien
cttcaagaagtagccattgtctctt

SEQ ID NO: 2617842 - DNA, 25 bp, Homo sapien
gtaaaggactgtaagccaaaacata

SEQ ID NO: 2617843 - DNA, 25 bp, Homo sapien
taaaggactgtaagccaaaacataa

SEQ ID NO: 2617844 - DNA, 25 bp, Homo sapien
tgttccatgtttctcgttctccaac

SEQ ID NO: 2617845 - DNA, 25 bp, Homo sapien
aggttctgctacagtctgcagatca

SEQ ID NO: 2617846 - DNA, 25 bp, Homo sapien
tgtggcttgtgatacaactgctatg

SEQ ID NO: 2617847 - DNA, 25 bp, Homo sapien
taactttgttccatgtttctcgttc

SEQ ID NO: 2617848 - DNA, 25 bp, Homo sapien
aagggtttcacgctgcacgacaaag

SEQ ID NO: 2617849 - DNA, 25 bp, Homo sapien
gtttcacgctgcacgacaaaggctc

SEQ ID NO: 2617850 - DNA, 25 bp, Homo sapien
gctccccatgctcttcacaatctcc

SEQ ID NO: 2617851 - DNA, 25 bp, Homo sapien
atctcccgtgctctcctgccgcggc

SEQ ID NO: 2617852 - DNA, 25 bp, Homo sapien
gggactgtctagaaggccctgctcc

SEQ ID NO: 2617853 - DNA, 25 bp, Homo sapien
gtctagaaggccctgctccaattct

SEQ ID NO: 2617854 - DNA, 25 bp, Homo sapien
ctgtctagaaggccctgctccaatt

SEQ ID NO: 2617855 - DNA, 25 bp, Homo sapien
gactgtctagaaggccctgctccaa

SEQ ID NO: 2617856 - DNA, 25 bp, Homo sapien
cattcctatagcgagttttctccca

SEQ ID NO: 2617857 - DNA, 25 bp, Homo sapien
cctatagcgagttttctcccagtct

SEQ ID NO: 2617858 - DNA, 25 bp, Homo sapien
cacattcctatagcgagttttctcc

SEQ ID NO: 2617859 - DNA, 25 bp, Homo sapien
tttcacattcctatagcgagttttc

SEQ ID NO: 2617860 - DNA, 25 bp, Homo sapien
cctgccttcggtgacacatgaaagc

SEQ ID NO: 2617861 - DNA, 25 bp, Homo sapien
catgaaagctggtcgagtggctctg

SEQ ID NO: 2617862 - DNA, 25 bp, Homo sapien
gagtttgatggcctgccttcggtga

SEQ ID NO: 2617863 - DNA, 25 bp, Homo sapien
cacatgaaagctggtcgagtggctc

SEQ ID NO: 2617864 - DNA, 25 bp, Homo sapien
caagattgcaccatccagcctggat

SEQ ID NO: 2617865 - DNA, 25 bp, Homo sapien
ccttggaaggccaagatgggtagat

SEQ ID NO: 2617866 - DNA, 25 bp, Homo sapien
gcaccttggaaggccaagatgggta

SEQ ID NO: 2617867 - DNA, 25 bp, Homo sapien
tgggcgtagtggtggatgcttgtaa

SEQ ID NO: 2617868 - DNA, 25 bp, Homo sapien
tggtgtttacgctgttccactctta

SEQ ID NO: 2617869 - DNA, 25 bp, Homo sapien
cttctggtgtttacgctgttccact

SEQ ID NO: 2617870 - DNA, 25 bp, Homo sapien
tgttccactcttaaggccatccaag

SEQ ID NO: 2617871 - DNA, 25 bp, Homo sapien
ttccactcttaaggccatccaagga

SEQ ID NO: 2617872 - DNA, 25 bp, Homo sapien
cattcagtaaatttgctgttcttga

SEQ ID NO: 2617873 - DNA, 25 bp, Homo sapien
ttcagtaaatttgctgttcttgaca

SEQ ID NO: 2617874 - DNA, 25 bp, Homo sapien
cagtaaatttgctgttcttgacaat

SEQ ID NO: 2617875 - DNA, 25 bp, Homo sapien
gtaaatttgctgttcttgacaattc

SEQ ID NO: 2617876 - DNA, 25 bp, Homo sapien
ctttcagtctccttcttcctgagtt

SEQ ID NO: 2617877 - DNA, 25 bp, Homo sapien
tctttcagtctccttcttcctgagt

SEQ ID NO: 2617878 - DNA, 25 bp, Homo sapien
tacatctttctttcagtctccttct

SEQ ID NO: 2617879 - DNA, 25 bp, Homo sapien
ctatacatctttctttcagtctcct

SEQ ID NO: 2617880 - DNA, 25 bp, Homo sapien
ctttgtatgcatgaccctttctttc

SEQ ID NO: 2617881 - DNA, 25 bp, Homo sapien
ctctttgtatgcatgaccctttctt

SEQ ID NO: 2617882 - DNA, 25 bp, Homo sapien
tctttgtatgcatgaccctttcttt

SEQ ID NO: 2617883 - DNA, 25 bp, Homo sapien
cagccaggagtatccattgttggct

SEQ ID NO: 2617884 - DNA, 25 bp, Homo sapien
ctgagtttcagaaaaacaaggcaaa

SEQ ID NO: 2617885 - DNA, 25 bp, Homo sapien
tgagtttcagaaaaacaaggcaaag

SEQ ID NO: 2617886 - DNA, 25 bp, Homo sapien
tccacatactcatagcagtttctcc

SEQ ID NO: 2617887 - DNA, 25 bp, Homo sapien
catactcatagcagtttctcccctt

SEQ ID NO: 2617888 - DNA, 25 bp, Homo sapien
tccatccacatactcatagcagttt

SEQ ID NO: 2617889 - DNA, 25 bp, Homo sapien
atcttttccatccacatactcatag

SEQ ID NO: 2617890 - DNA, 25 bp, Homo sapien
agcctggcctaatgactcggcaggt

SEQ ID NO: 2617891 - DNA, 25 bp, Homo sapien
cacttgctgccccacttgatgccca

SEQ ID NO: 2617892 - DNA, 25 bp, Homo sapien
tcggcaggttctatagaagatctgc

SEQ ID NO: 2617893 - DNA, 25 bp, Homo sapien
tcatccccataccagaccagcagtt

SEQ ID NO: 2617894 - DNA, 25 bp, Homo sapien
ctgtccttttaaaagagtaatagtg

SEQ ID NO: 2617895 - DNA, 25 bp, Homo sapien
ttaaaagagtaatagtgatgcctac

SEQ ID NO: 2617896 - DNA, 25 bp, Homo sapien
ctaggataattctttctttcctgtc

SEQ ID NO: 2617897 - DNA, 25 bp, Homo sapien
ccttttaaaagagtaatagtgatgc

SEQ ID NO: 2617898 - DNA, 25 bp, Homo sapien
cattacggctgtgtggatctggata

SEQ ID NO: 2617899 - DNA, 25 bp, Homo sapien
tacggctgtgtggatctggatattg

SEQ ID NO: 2617900 - DNA, 25 bp, Homo sapien
gtgtggatctggatattgctgctcc

SEQ ID NO: 2617901 - DNA, 25 bp, Homo sapien
ttgtcattacggctgtgtggatctg

SEQ ID NO: 2617902 - DNA, 25 bp, Homo sapien
gaggaggtttgacttatctctaaag

SEQ ID NO: 2617903 - DNA, 25 bp, Homo sapien
gaggtttgacttatctctaaagccc

SEQ ID NO: 2617904 - DNA, 25 bp, Homo sapien
gactgaggaggtttgacttatctct

SEQ ID NO: 2617905 - DNA, 25 bp, Homo sapien
gtgactgaggaggtttgacttatct

SEQ ID NO: 2617906 - DNA, 25 bp, Homo sapien
tgatagcagaggcttgacctatcgc

SEQ ID NO: 2617907 - DNA, 25 bp, Homo sapien
ggcttgacctatcgctaaagccccg

SEQ ID NO: 2617908 - DNA, 25 bp, Homo sapien
gcagaggcttgacctatcgctaaag

SEQ ID NO: 2617909 - DNA, 25 bp, Homo sapien
tctggtgatagcagaggcttgacct

SEQ ID NO: 2617910 - DNA, 25 bp, Homo sapien
tgtggtgaccacatttgtctttttg

SEQ ID NO: 2617911 - DNA, 25 bp, Homo sapien
tggctttcacatcttgggctacaga

SEQ ID NO: 2617912 - DNA, 25 bp, Homo sapien
cacgcgtgttcttgtctggctttca

SEQ ID NO: 2617913 - DNA, 25 bp, Homo sapien
cacagttacctacacggagggcaca

SEQ ID NO: 2617914 - DNA, 25 bp, Homo sapien
tcctgtggagtcttgagctgaacac

SEQ ID NO: 2617915 - DNA, 25 bp, Homo sapien
gcaccttatgctcctttaatgccac

SEQ ID NO: 2617916 - DNA, 25 bp, Homo sapien
ttatgctcctttaatgccacaaact

SEQ ID NO: 2617917 - DNA, 25 bp, Homo sapien
tcgtaagccagcaccttatgctcct

SEQ ID NO: 2617918 - DNA, 25 bp, Homo sapien
ttcttttagaagctcgtaagccagc

SEQ ID NO: 2617919 - DNA, 25 bp, Homo sapien
aatgatctgaagttcagctgtggct

SEQ ID NO: 2617920 - DNA, 25 bp, Homo sapien
gccacctcttgattaatccattcaa

SEQ ID NO: 2617921 - DNA, 25 bp, Homo sapien
aaagctaactgccacctcttgatta

SEQ ID NO: 2617922 - DNA, 25 bp, Homo sapien
ggcccccatttttcagggagatcag

SEQ ID NO: 2617923 - DNA, 25 bp, Homo sapien
gagatcagactgtcatgtgatggtg

SEQ ID NO: 2617924 - DNA, 25 bp, Homo sapien
tcagcggtgtgtggcttctgcgcac

SEQ ID NO: 2617925 - DNA, 25 bp, Homo sapien
ttggagaagcccattcacaggtgac

SEQ ID NO: 2617926 - DNA, 25 bp, Homo sapien
gaccaggtgtttatcatgtgacgca

SEQ ID NO: 2617927 - DNA, 25 bp, Homo sapien
gaccggtacatatagcatgtccaag

SEQ ID NO: 2617928 - DNA, 25 bp, Homo sapien
gcaaccaaaacttcatatttcctga

SEQ ID NO: 2617929 - DNA, 25 bp, Homo sapien
tggcaaccaaaacttcatatttcct

SEQ ID NO: 2617930 - DNA, 25 bp, Homo sapien
gactcttcaccctctacattagcca

SEQ ID NO: 2617931 - DNA, 25 bp, Homo sapien
cttggcaaccaaaacttcatatttc

SEQ ID NO: 2617932 - DNA, 25 bp, Homo sapien
gacagtttcgagtttagtgttctcc

SEQ ID NO: 2617933 - DNA, 25 bp, Homo sapien
tcacacatagatgggagcatggagg

SEQ ID NO: 2617934 - DNA, 25 bp, Homo sapien
ttcgagtttagtgttctccctgctg

SEQ ID NO: 2617935 - DNA, 25 bp, Homo sapien
gcaggtgtgattccgcagttggtga

SEQ ID NO: 2617936 - DNA, 25 bp, Homo sapien
tcagacaacacccaaccaagtcaaa

SEQ ID NO: 2617937 - DNA, 25 bp, Homo sapien
cacccaaccaagtcaaagagtcata

SEQ ID NO: 2617938 - DNA, 25 bp, Homo sapien
catcttccctgatacacctaattct

SEQ ID NO: 2617939 - DNA, 25 bp, Homo sapien
cttcatcttccctgatacacctaat

SEQ ID NO: 2617940 - DNA, 25 bp, Homo sapien
agaacagtgtattaaaactctgttg

SEQ ID NO: 2617941 - DNA, 25 bp, Homo sapien
gtgtattaaaactctgttgtgaagg

SEQ ID NO: 2617942 - DNA, 25 bp, Homo sapien
acagtgtattaaaactctgttgtga

SEQ ID NO: 2617943 - DNA, 25 bp, Homo sapien
gtattaaaactctgttgtgaaggct

SEQ ID NO: 2617944 - DNA, 25 bp, Homo sapien
gttcttccttgatcataattcatta

SEQ ID NO: 2617945 - DNA, 25 bp, Homo sapien
caatcagttcttccttgatcataat

SEQ ID NO: 2617946 - DNA, 25 bp, Homo sapien
tcttccttgatcataattcattatc

SEQ ID NO: 2617947 - DNA, 25 bp, Homo sapien
cagttcttccttgatcataattcat

SEQ ID NO: 2617948 - DNA, 25 bp, Homo sapien
tactttagcactatcaccaaggcca

SEQ ID NO: 2617949 - DNA, 25 bp, Homo sapien
gacacgtgtccccattcatatccag

SEQ ID NO: 2617950 - DNA, 25 bp, Homo sapien
gaagtattcaataagtcctggacac

SEQ ID NO: 2617951 - DNA, 25 bp, Homo sapien
tgccagatcagttccaaaaaagtct

SEQ ID NO: 2617952 - DNA, 25 bp, Homo sapien
caagaatgttgtggatgttggctga

SEQ ID NO: 2617953 - DNA, 25 bp, Homo sapien
ctgaagaaaggtccgtaacacactc

SEQ ID NO: 2617954 - DNA, 25 bp, Homo sapien
tagctgtttatctggagtcccgtgt

SEQ ID NO: 2617955 - DNA, 25 bp, Homo sapien
caaaataagatctccgacatagctg

SEQ ID NO: 2617956 - DNA, 25 bp, Homo sapien
ctcttggatttaattgtcataagct

SEQ ID NO: 2617957 - DNA, 25 bp, Homo sapien
caaatacatgatctcttggatttaa

SEQ ID NO: 2617958 - DNA, 25 bp, Homo sapien
tggatttaattgtcataagctctat

SEQ ID NO: 2617959 - DNA, 25 bp, Homo sapien
cttggatttaattgtcataagctct

SEQ ID NO: 2617960 - DNA, 25 bp, Homo sapien
ctatttgtactttcttcttcattct

SEQ ID NO: 2617961 - DNA, 25 bp, Homo sapien
ttgtactttcttcttcattcttcat

SEQ ID NO: 2617962 - DNA, 25 bp, Homo sapien
atttgtactttcttcttcattcttc

SEQ ID NO: 2617963 - DNA, 25 bp, Homo sapien
catctgatctatttgtactttcttc

SEQ ID NO: 2617964 - DNA, 25 bp, Homo sapien
gacttgttcttgactgaagtcagca

SEQ ID NO: 2617965 - DNA, 25 bp, Homo sapien
tgagcaccacatctaatatcacatg

SEQ ID NO: 2617966 - DNA, 25 bp, Homo sapien
ctgaagtcagcatgtagtgaaaaag

SEQ ID NO: 2617967 - DNA, 25 bp, Homo sapien
ctaatttctgggctcgtggggcaca

SEQ ID NO: 2617968 - DNA, 25 bp, Homo sapien
ttccaaaagctttccagtagtgttc

SEQ ID NO: 2617969 - DNA, 25 bp, Homo sapien
tgtagaaattccaaaagctttccag

SEQ ID NO: 2617970 - DNA, 25 bp, Homo sapien
aaagctttccagtagtgttctttct

SEQ ID NO: 2617971 - DNA, 25 bp, Homo sapien
caaaagctttccagtagtgttcttt

SEQ ID NO: 2617972 - DNA, 25 bp, Homo sapien
cattttacttgtattttagtggatt

SEQ ID NO: 2617973 - DNA, 25 bp, Homo sapien
ccacattttacttgtattttagtgg

SEQ ID NO: 2617974 - DNA, 25 bp, Homo sapien
tgtattttagtggattttagttcca

SEQ ID NO: 2617975 - DNA, 25 bp, Homo sapien
cataacttcccacattttacttgta

SEQ ID NO: 2617976 - DNA, 25 bp, Homo sapien
tatcctcgattgaatgctgttgctt

SEQ ID NO: 2617977 - DNA, 25 bp, Homo sapien
cacttgttggtatcctcgattgaat

SEQ ID NO: 2617978 - DNA, 25 bp, Homo sapien
ttcatccttgctgttaatgagaagc

SEQ ID NO: 2617979 - DNA, 25 bp, Homo sapien
acaagcatcacttgttggtatcctc

SEQ ID NO: 2617980 - DNA, 25 bp, Homo sapien
catgccaaactccaatactgagagt

SEQ ID NO: 2617981 - DNA, 25 bp, Homo sapien
aactccaatactgagagtgcaacca

SEQ ID NO: 2617982 - DNA, 25 bp, Homo sapien
gagcccattcggcttcatgccaaac

SEQ ID NO: 2617983 - DNA, 25 bp, Homo sapien
tgtagtgatattctattaaggagcc

SEQ ID NO: 2617984 - DNA, 25 bp, Homo sapien
agttttctcgtcctcttaggtctat

SEQ ID NO: 2617985 - DNA, 25 bp, Homo sapien
tcaaatcgactctggtagctctgct

SEQ ID NO: 2617986 - DNA, 25 bp, Homo sapien
tctgctgtcaaagagttttctcgtc

SEQ ID NO: 2617987 - DNA, 25 bp, Homo sapien
gagttttctcgtcctcttaggtcta

SEQ ID NO: 2617988 - DNA, 25 bp, Homo sapien
gaaacatgtcactaagtaggtgagc

SEQ ID NO: 2617989 - DNA, 25 bp, Homo sapien
tcatgactccccttacccaagtgtt

SEQ ID NO: 2617990 - DNA, 25 bp, Homo sapien
tacaagaatggctgtagtctggcca

SEQ ID NO: 2617991 - DNA, 25 bp, Homo sapien
ccaagtgttcatgctagtggtaata

SEQ ID NO: 2617992 - DNA, 25 bp, Homo sapien
atttggattcagagtcattttataa

SEQ ID NO: 2617993 - DNA, 25 bp, Homo sapien
cttgagatccttcatttgcttattt

SEQ ID NO: 2617994 - DNA, 25 bp, Homo sapien
ccttgtagtacagatttggattcag

SEQ ID NO: 2617995 - DNA, 25 bp, Homo sapien
tttggattcagagtcattttataac

SEQ ID NO: 2617996 - DNA, 25 bp, Homo sapien
ttcaggcattggtcataaatataga

SEQ ID NO: 2617997 - DNA, 25 bp, Homo sapien
tcccccgttacaccacattggttca

SEQ ID NO: 2617998 - DNA, 25 bp, Homo sapien
gtttcaggcattggtcataaatata

SEQ ID NO: 2617999 - DNA, 25 bp, Homo sapien
ggcattggtcataaatatagaatct

SEQ ID NO: 2618000 - DNA, 25 bp, Homo sapien
gttttataacagaagtagcaaacgc

SEQ ID NO: 2618001 - DNA, 25 bp, Homo sapien
tatctccacttttcaataagtcgtt

SEQ ID NO: 2618002 - DNA, 25 bp, Homo sapien
caataagtcgtttttcttgatgtta

SEQ ID NO: 2618003 - DNA, 25 bp, Homo sapien
tagcaaacgctttcatatctccact

SEQ ID NO: 2618004 - DNA, 25 bp, Homo sapien
gaatttatccatgacaagatcactg

SEQ ID NO: 2618005 - DNA, 25 bp, Homo sapien
gagatccacccacataaactatctt

SEQ ID NO: 2618006 - DNA, 25 bp, Homo sapien
tcgagatccacccacataaactatc

SEQ ID NO: 2618007 - DNA, 25 bp, Homo sapien
tatgaatttatccatgacaagatca

SEQ ID NO: 2618008 - DNA, 25 bp, Homo sapien
ctccacagtcgctggcccggagggt

SEQ ID NO: 2618009 - DNA, 25 bp, Homo sapien
tcgctggcccggagggtgtactcct

SEQ ID NO: 2618010 - DNA, 25 bp, Homo sapien
gcccggagggtgtactcctcattgc

SEQ ID NO: 2618011 - DNA, 25 bp, Homo sapien
ctcctcattgctcggccgcggcggg

SEQ ID NO: 2618012 - DNA, 25 bp, Homo sapien
tcatccgggaggctcgggcagcaca

SEQ ID NO: 2618013 - DNA, 25 bp, Homo sapien
ggcgctcatccgggaggctcgggca

SEQ ID NO: 2618014 - DNA, 25 bp, Homo sapien
cagcacaggagccaacggagggggt

SEQ ID NO: 2618015 - DNA, 25 bp, Homo sapien
gctcatccgggaggctcgggcagca

SEQ ID NO: 2618016 - DNA, 25 bp, Homo sapien
ggataatctcgctttgtgcatgcat

SEQ ID NO: 2618017 - DNA, 25 bp, Homo sapien
tgtagcgtttctgttcggtttccaa

SEQ ID NO: 2618018 - DNA, 25 bp, Homo sapien
caactacagagttgccattctctgg

SEQ ID NO: 2618019 - DNA, 25 bp, Homo sapien
tttcttggataatctcgctttgtgc

SEQ ID NO: 2618020 - DNA, 25 bp, Homo sapien
ggcactagtctaaccctatactgcc

SEQ ID NO: 2618021 - DNA, 25 bp, Homo sapien
ttttaggcactagtctaaccctata

SEQ ID NO: 2618022 - DNA, 25 bp, Homo sapien
taggcactagtctaaccctatactg

SEQ ID NO: 2618023 - DNA, 25 bp, Homo sapien
actagtctaaccctatactgcccaa

SEQ ID NO: 2618024 - DNA, 25 bp, Homo sapien
aagccaaaattttcatgtcccatac

SEQ ID NO: 2618025 - DNA, 25 bp, Homo sapien
tggcaagccaaaattttcatgtccc

SEQ ID NO: 2618026 - DNA, 25 bp, Homo sapien
ttatggcaagccaaaattttcatgt

SEQ ID NO: 2618027 - DNA, 25 bp, Homo sapien
gcaagccaaaattttcatgtcccat

SEQ ID NO: 2618028 - DNA, 25 bp, Homo sapien
tgcttacttattcactaagttgctt

SEQ ID NO: 2618029 - DNA, 25 bp, Homo sapien
tactacaaatacttaaagctacaaa

SEQ ID NO: 2618030 - DNA, 25 bp, Homo sapien
cccatactattctcagggtaataaa

SEQ ID NO: 2618031 - DNA, 25 bp, Homo sapien
atttcctacattttgatatgaggta

SEQ ID NO: 2618032 - DNA, 25 bp, Homo sapien
taaagcaagtgcctacggactgcaa

SEQ ID NO: 2618033 - DNA, 25 bp, Homo sapien
gaagtactgaaggtaattcttcacg

SEQ ID NO: 2618034 - DNA, 25 bp, Homo sapien
ttcacggttaaagcaagtgcctacg

SEQ ID NO: 2618035 - DNA, 25 bp, Homo sapien
taattcttcacggttaaagcaagtg

SEQ ID NO: 2618036 - DNA, 25 bp, Homo sapien
gttacctggtcaccgcagtatgtga

SEQ ID NO: 2618037 - DNA, 25 bp, Homo sapien
cctggtcaccgcagtatgtgagctt

SEQ ID NO: 2618038 - DNA, 25 bp, Homo sapien
cagagttacctggtcaccgcagtat

SEQ ID NO: 2618039 - DNA, 25 bp, Homo sapien
tgtcacactggtggctcccaattcc

SEQ ID NO: 2618040 - DNA, 25 bp, Homo sapien
ccctcctcagaagatagtatttgac

SEQ ID NO: 2618041 - DNA, 25 bp, Homo sapien
cttccctcctcagaagatagtattt

SEQ ID NO: 2618042 - DNA, 25 bp, Homo sapien
tcagaagatagtatttgactgaggg

SEQ ID NO: 2618043 - DNA, 25 bp, Homo sapien
tcctcagaagatagtatttgactga

SEQ ID NO: 2618044 - DNA, 25 bp, Homo sapien
gggagtgtatccaagtcatgcagta

SEQ ID NO: 2618045 - DNA, 25 bp, Homo sapien
cccagaggtttaatatgttttgtca

SEQ ID NO: 2618046 - DNA, 25 bp, Homo sapien
tcatgcagtatgaaagtgtgttagc

SEQ ID NO: 2618047 - DNA, 25 bp, Homo sapien
gaatttaggctgtctgtttgcactc

SEQ ID NO: 2618048 - DNA, 25 bp, Homo sapien
tgtgattcgaacttcattagccttt

SEQ ID NO: 2618049 - DNA, 25 bp, Homo sapien
ttgtgattcgaacttcattagcctt

SEQ ID NO: 2618050 - DNA, 25 bp, Homo sapien
gtaacttcctcgccaacgctttcca

SEQ ID NO: 2618051 - DNA, 25 bp, Homo sapien
aacttcctcgccaacgctttccaca

SEQ ID NO: 2618052 - DNA, 25 bp, Homo sapien
tcctcgccaacgctttccacaattc

SEQ ID NO: 2618053 - DNA, 25 bp, Homo sapien
cttcctcgccaacgctttccacaat

SEQ ID NO: 2618054 - DNA, 25 bp, Homo sapien
ctagtactcagaacgataccaagct

SEQ ID NO: 2618055 - DNA, 25 bp, Homo sapien
actcagaacgataccaagctgtatc

SEQ ID NO: 2618056 - DNA, 25 bp, Homo sapien
gtactcagaacgataccaagctgta

SEQ ID NO: 2618057 - DNA, 25 bp, Homo sapien
tagtactcagaacgataccaagctg

SEQ ID NO: 2618058 - DNA, 25 bp, Homo sapien
tctactagccatctgaggttcaata

SEQ ID NO: 2618059 - DNA, 25 bp, Homo sapien
cctaatagtttcttaattctcagag

SEQ ID NO: 2618060 - DNA, 25 bp, Homo sapien
catttgatttataatctctatgacc

SEQ ID NO: 2618061 - DNA, 25 bp, Homo sapien
ccctacatactgatgagatttactc

SEQ ID NO: 2618062 - DNA, 25 bp, Homo sapien
ggaatatgctgagctcattatatta

SEQ ID NO: 2618063 - DNA, 25 bp, Homo sapien
tatgctgagctcattatattacact

SEQ ID NO: 2618064 - DNA, 25 bp, Homo sapien
acagtggattggtcagtggaatgag

SEQ ID NO: 2618065 - DNA, 25 bp, Homo sapien
tattacacttgaaacaccaacagga

SEQ ID NO: 2618066 - DNA, 25 bp, Homo sapien
tcattccagagcatattaatttcca

SEQ ID NO: 2618067 - DNA, 25 bp, Homo sapien
cagattatgtctgacgtttctttga

SEQ ID NO: 2618068 - DNA, 25 bp, Homo sapien
actggtcattccagagcatattaat

SEQ ID NO: 2618069 - DNA, 25 bp, Homo sapien
ttacattgtagtctaagaagatact

SEQ ID NO: 2618070 - DNA, 25 bp, Homo sapien
tagctttgctaacttgcatccctac

SEQ ID NO: 2618071 - DNA, 25 bp, Homo sapien
ttgcatccctaccagtagcgtaggg

SEQ ID NO: 2618072 - DNA, 25 bp, Homo sapien
ttctccatagtagctttgctaactt

SEQ ID NO: 2618073 - DNA, 25 bp, Homo sapien
cttgcatccctaccagtagcgtagg

SEQ ID NO: 2618074 - DNA, 25 bp, Homo sapien
atgttaccaacaattcaattcttct

SEQ ID NO: 2618075 - DNA, 25 bp, Homo sapien
acacttttgtacctattagccatcc

SEQ ID NO: 2618076 - DNA, 25 bp, Homo sapien
tttgtacctattagccatcctcaca

SEQ ID NO: 2618077 - DNA, 25 bp, Homo sapien
caccctgccatgctatcaaattcta

SEQ ID NO: 2618078 - DNA, 25 bp, Homo sapien
tgaacacatgggttttctagatcag

SEQ ID NO: 2618079 - DNA, 25 bp, Homo sapien
gatgaaagtagtgcccagagcagcc

SEQ ID NO: 2618080 - DNA, 25 bp, Homo sapien
tgctgccccacaggatggatgtttt

SEQ ID NO: 2618081 - DNA, 25 bp, Homo sapien
gcctggattccaacattgtgcagat

SEQ ID NO: 2618082 - DNA, 25 bp, Homo sapien
tcaagatcaagtctttggcagattt

SEQ ID NO: 2618083 - DNA, 25 bp, Homo sapien
gatgtctggtaaggttatgcttcct

SEQ ID NO: 2618084 - DNA, 25 bp, Homo sapien
caaaataccatagacgtagtaactt

SEQ ID NO: 2618085 - DNA, 25 bp, Homo sapien
tctcaaagttctagggtctgggaat

SEQ ID NO: 2618086 - DNA, 25 bp, Homo sapien
tgtatgtttacctctatagtctctg

SEQ ID NO: 2618087 - DNA, 25 bp, Homo sapien
tccaaaatcaattgaccctatgtgt

SEQ ID NO: 2618088 - DNA, 25 bp, Homo sapien
caccttgaattatagtaatccttac

SEQ ID NO: 2618089 - DNA, 25 bp, Homo sapien
ccccaaaactgttcacgtagtggtg

SEQ ID NO: 2618090 - DNA, 25 bp, Homo sapien
gttgattctataatcccttctaagt

SEQ ID NO: 2618091 - DNA, 25 bp, Homo sapien
ggtactcactaggtaatgaggttct

SEQ ID NO: 2618092 - DNA, 25 bp, Homo sapien
gttaattttgtatggtactcactag

SEQ ID NO: 2618093 - DNA, 25 bp, Homo sapien
gttcccttagctgaggcttgccttt

SEQ ID NO: 2618094 - DNA, 25 bp, Homo sapien
tctggtgggccaaggaaatacttaa

SEQ ID NO: 2618095 - DNA, 25 bp, Homo sapien
tactacaatactggatcaggaaact

SEQ ID NO: 2618096 - DNA, 25 bp, Homo sapien
tgagatggtgtacaagcaacacaag

SEQ ID NO: 2618097 - DNA, 25 bp, Homo sapien
ggccttccctttgaacacatgttaa

SEQ ID NO: 2618098 - DNA, 25 bp, Homo sapien
cagctcctaaaccaatgatagtttt

SEQ ID NO: 2618099 - DNA, 25 bp, Homo sapien
ctcctaaaccaatgatagttttatt

SEQ ID NO: 2618100 - DNA, 25 bp, Homo sapien
gctcctaaaccaatgatagttttat

SEQ ID NO: 2618101 - DNA, 25 bp, Homo sapien
cccagctcctaaaccaatgatagtt

SEQ ID NO: 2618102 - DNA, 25 bp, Homo sapien
tacagtgatgatagtggctattgtg

SEQ ID NO: 2618103 - DNA, 25 bp, Homo sapien
acagtgatgatagtggctattgtgt

SEQ ID NO: 2618104 - DNA, 25 bp, Homo sapien
gtacagtgatgatagtggctattgt

SEQ ID NO: 2618105 - DNA, 25 bp, Homo sapien
gaggcaacctgagaatactactgaa

SEQ ID NO: 2618106 - DNA, 25 bp, Homo sapien
tgcttcaaaggcctacaaatattta

SEQ ID NO: 2618107 - DNA, 25 bp, Homo sapien
caatgtcgggaatgtaacatatctc

SEQ ID NO: 2618108 - DNA, 25 bp, Homo sapien
aaaaataccgtgtttcatctgcttc

SEQ ID NO: 2618109 - DNA, 25 bp, Homo sapien
ctgccaagcgctgtcgcggcccaac

SEQ ID NO: 2618110 - DNA, 25 bp, Homo sapien
gctgtcgcggcccaacagcatctcc

SEQ ID NO: 2618111 - DNA, 25 bp, Homo sapien
aagcgctgtcgcggcccaacagcat

SEQ ID NO: 2618112 - DNA, 25 bp, Homo sapien
tgtcgcggcccaacagcatctccgg

SEQ ID NO: 2618113 - DNA, 25 bp, Homo sapien
cacgtcccctgttaatgtcttctct

SEQ ID NO: 2618114 - DNA, 25 bp, Homo sapien
tgtaggcttagttatgggcaaagca

SEQ ID NO: 2618115 - DNA, 25 bp, Homo sapien
tctttggtgcagttcgtggaggact

SEQ ID NO: 2618116 - DNA, 25 bp, Homo sapien
ggcaaagcatttttgggaatagaag

SEQ ID NO: 2618117 - DNA, 25 bp, Homo sapien
aggacgcatgcgtgccatttgttga

SEQ ID NO: 2618118 - DNA, 25 bp, Homo sapien
cacatagacgcctggtagcttctgc

SEQ ID NO: 2618119 - DNA, 25 bp, Homo sapien
ccaggtagaagggtccataggacgc

SEQ ID NO: 2618120 - DNA, 25 bp, Homo sapien
gagcgataagatggctgcacataga

SEQ ID NO: 2618121 - DNA, 25 bp, Homo sapien
tcagggatgtaaactgtaaacttaa

SEQ ID NO: 2618122 - DNA, 25 bp, Homo sapien
aactgtaaacttaaatacgccatct

SEQ ID NO: 2618123 - DNA, 25 bp, Homo sapien
taaacttaaatacgccatcttggta

SEQ ID NO: 2618124 - DNA, 25 bp, Homo sapien
atcagggatgtaaactgtaaactta

SEQ ID NO: 2618125 - DNA, 25 bp, Homo sapien
agacaggaatatcgaacaccaagcg

SEQ ID NO: 2618126 - DNA, 25 bp, Homo sapien
aagacaggaatatcgaacaccaagc

SEQ ID NO: 2618127 - DNA, 25 bp, Homo sapien
aaagacaggaatatcgaacaccaag

SEQ ID NO: 2618128 - DNA, 25 bp, Homo sapien
ccattttgcaaatgctctcttcacg

SEQ ID NO: 2618129 - DNA, 25 bp, Homo sapien
tttgcaaatgctctcttcacgtcca

SEQ ID NO: 2618130 - DNA, 25 bp, Homo sapien
aaatgctctcttcacgtccagctca

SEQ ID NO: 2618131 - DNA, 25 bp, Homo sapien
gcaaatgctctcttcacgtccagct

SEQ ID NO: 2618132 - DNA, 25 bp, Homo sapien
gtatcaatcttgtagaaaactctcc

SEQ ID NO: 2618133 - DNA, 25 bp, Homo sapien
tatcaatcttgtagaaaactctcct

SEQ ID NO: 2618134 - DNA, 25 bp, Homo sapien
gctgtatcaatcttgtagaaaactc

SEQ ID NO: 2618135 - DNA, 25 bp, Homo sapien
tgtatcaatcttgtagaaaactctc

SEQ ID NO: 2618136 - DNA, 25 bp, Homo sapien
gcacaccttaacactgtcaacaact

SEQ ID NO: 2618137 - DNA, 25 bp, Homo sapien
agtgcacaccttaacactgtcaaca

SEQ ID NO: 2618138 - DNA, 25 bp, Homo sapien
ccttaacactgtcaacaactttact

SEQ ID NO: 2618139 - DNA, 25 bp, Homo sapien
caccttaacactgtcaacaacttta

SEQ ID NO: 2618140 - DNA, 25 bp, Homo sapien
cttcatcatgtacagaaggattcca

SEQ ID NO: 2618141 - DNA, 25 bp, Homo sapien
gcttcatcatgtacagaaggattcc

SEQ ID NO: 2618142 - DNA, 25 bp, Homo sapien
taagtagtgctgaattctgtctgct

SEQ ID NO: 2618143 - DNA, 25 bp, Homo sapien
tacttaagcctcaaggtccccaata

SEQ ID NO: 2618144 - DNA, 25 bp, Homo sapien
ccacttaaaagtgctgagctatgga

SEQ ID NO: 2618145 - DNA, 25 bp, Homo sapien
gagtactgaactagataaccaccct

SEQ ID NO: 2618146 - DNA, 25 bp, Homo sapien
tgttcaattagaatagtgttctgca

SEQ ID NO: 2618147 - DNA, 25 bp, Homo sapien
tttattaatcactattgttccagca

SEQ ID NO: 2618148 - DNA, 25 bp, Homo sapien
tcagtataaacaaagttactaggta

SEQ ID NO: 2618149 - DNA, 25 bp, Homo sapien
tccagcagttttcaagtcaaattaa

SEQ ID NO: 2618150 - DNA, 25 bp, Homo sapien
tggctgaatccaagctagacatctg

SEQ ID NO: 2618151 - DNA, 25 bp, Homo sapien
ggaattcttcgactctccactgtga

SEQ ID NO: 2618152 - DNA, 25 bp, Homo sapien
tctctctttattgaatcccattggc

SEQ ID NO: 2618153 - DNA, 25 bp, Homo sapien
tagacatctgcttgaaagtgattcc

SEQ ID NO: 2618154 - DNA, 25 bp, Homo sapien
tgttaactagcctcagagatctaaa

SEQ ID NO: 2618155 - DNA, 25 bp, Homo sapien
tctcccttgtaaagttgcatttgta

SEQ ID NO: 2618156 - DNA, 25 bp, Homo sapien
ctcaaagcgggtgattcacaggaac

SEQ ID NO: 2618157 - DNA, 25 bp, Homo sapien
cctgcaatggcactagttgcttgaa

SEQ ID NO: 2618158 - DNA, 25 bp, Homo sapien
gatgtgatattttccatcagttgtt

SEQ ID NO: 2618159 - DNA, 25 bp, Homo sapien
cttagatgtgatattttccatcagt

SEQ ID NO: 2618160 - DNA, 25 bp, Homo sapien
attttccatcagttgttttcttaca

SEQ ID NO: 2618161 - DNA, 25 bp, Homo sapien
gtgatattttccatcagttgttttc

SEQ ID NO: 2618162 - DNA, 25 bp, Homo sapien
ctgaaagcagaattgttgatgtggc

SEQ ID NO: 2618163 - DNA, 25 bp, Homo sapien
gacatgggcctctttcagcgtgaga

SEQ ID NO: 2618164 - DNA, 25 bp, Homo sapien
cagcgtgagagcttttgtgaacata

SEQ ID NO: 2618165 - DNA, 25 bp, Homo sapien
tgtgaacatagaagctgatgtcttc

SEQ ID NO: 2618166 - DNA, 25 bp, Homo sapien
tcagagaatttgacatgggcctctt

SEQ ID NO: 2618167 - DNA, 25 bp, Homo sapien
tatgggtgtcatcagatccaattct

SEQ ID NO: 2618168 - DNA, 25 bp, Homo sapien
catttcatctatactcactggcaag

SEQ ID NO: 2618169 - DNA, 25 bp, Homo sapien
tgcacgtaattttgctgaaaggcct

SEQ ID NO: 2618170 - DNA, 25 bp, Homo sapien
ccttctggaagtgtatgacgttaac

SEQ ID NO: 2618171 - DNA, 25 bp, Homo sapien
ttctagaggcctatgaggagagcag

SEQ ID NO: 2618172 - DNA, 25 bp, Homo sapien
tgcgctggcactagaccctttggac

SEQ ID NO: 2618173 - DNA, 25 bp, Homo sapien
tggactctgtattggatggcatgca

SEQ ID NO: 2618174 - DNA, 25 bp, Homo sapien
gcagtagccccatgcagggttctca

SEQ ID NO: 2618175 - DNA, 25 bp, Homo sapien
tagtaggttcttcgtttttgcctca

SEQ ID NO: 2618176 - DNA, 25 bp, Homo sapien
ctttattagtatagtttgcagtgta

SEQ ID NO: 2618177 - DNA, 25 bp, Homo sapien
cagaggtattcctaatattatctga

SEQ ID NO: 2618178 - DNA, 25 bp, Homo sapien
taattgtgttcattgggtcttctct

SEQ ID NO: 2618179 - DNA, 25 bp, Homo sapien
tatgatggattacggcctgcacctt

SEQ ID NO: 2618180 - DNA, 25 bp, Homo sapien
taatccagcctactgttgatgacaa

SEQ ID NO: 2618181 - DNA, 25 bp, Homo sapien
gacaatttatgttgattccctgact

SEQ ID NO: 2618182 - DNA, 25 bp, Homo sapien
gctacttaaaagtgagactatgcaa

SEQ ID NO: 2618183 - DNA, 25 bp, Homo sapien
catgggcctctaagcatgcagctaa

SEQ ID NO: 2618184 - DNA, 25 bp, Homo sapien
tctttgagtagctctgtggtgccaa

SEQ ID NO: 2618185 - DNA, 25 bp, Homo sapien
tgttctcaatcatgggcgacaggag

SEQ ID NO: 2618186 - DNA, 25 bp, Homo sapien
gagaaaatgtgcaccgcatgatacg

SEQ ID NO: 2618187 - DNA, 25 bp, Homo sapien
gcagtttatcaatcctgtctctttg

SEQ ID NO: 2618188 - DNA, 25 bp, Homo sapien
tctaagcttagaaccacttgtggca

SEQ ID NO: 2618189 - DNA, 25 bp, Homo sapien
gatggtgtccgtgtggtcagagtct

SEQ ID NO: 2618190 - DNA, 25 bp, Homo sapien
tatgcgtctgttctccctggtgatg

SEQ ID NO: 2618191 - DNA, 25 bp, Homo sapien
gggctgtccatgaacagaatgttat

SEQ ID NO: 2618192 - DNA, 25 bp, Homo sapien
gaacagaatgttatgtagaatgtca

SEQ ID NO: 2618193 - DNA, 25 bp, Homo sapien
aagacagggctgtccatgaacagaa

SEQ ID NO: 2618194 - DNA, 25 bp, Homo sapien
tgtccatgaacagaatgttatgtag

SEQ ID NO: 2618195 - DNA, 25 bp, Homo sapien
tcatcctggagatgtgtggaccatc

SEQ ID NO: 2618196 - DNA, 25 bp, Homo sapien
ctaagcttgccgtgtgaggaacctc

SEQ ID NO: 2618197 - DNA, 25 bp, Homo sapien
ccatcacgtagcttttctgtataga

SEQ ID NO: 2618198 - DNA, 25 bp, Homo sapien
tctgtatagatgatagcaaatgtta

SEQ ID NO: 2618199 - DNA, 25 bp, Homo sapien
tgtagagcagtgtgtatctacccat

SEQ ID NO: 2618200 - DNA, 25 bp, Homo sapien
tcaaagtaaccgcacagtatgagca

SEQ ID NO: 2618201 - DNA, 25 bp, Homo sapien
accgcacagtatgagcaggcatttg

SEQ ID NO: 2618202 - DNA, 25 bp, Homo sapien
ttctgtagagcagtgtgtatctacc

SEQ ID NO: 2618203 - DNA, 25 bp, Homo sapien
aatcagaccaggtctgctgttacca

SEQ ID NO: 2618204 - DNA, 25 bp, Homo sapien
tgaagtacaatcagaccaggtctgc

SEQ ID NO: 2618205 - DNA, 25 bp, Homo sapien
ctggatctgttggagctgaagtaca

SEQ ID NO: 2618206 - DNA, 25 bp, Homo sapien
tgttggagctgaagtacaatcagac

SEQ ID NO: 2618207 - DNA, 25 bp, Homo sapien
tctgcaaatagatgagatcaggagt

SEQ ID NO: 2618208 - DNA, 25 bp, Homo sapien
cttctgcaaatagatgagatcagga

SEQ ID NO: 2618209 - DNA, 25 bp, Homo sapien
ttctgcaaatagatgagatcaggag

SEQ ID NO: 2618210 - DNA, 25 bp, Homo sapien
acacctggtgccacaagcttccagg

SEQ ID NO: 2618211 - DNA, 25 bp, Homo sapien
ctctggcctgttcatcccacacctg

SEQ ID NO: 2618212 - DNA, 25 bp, Homo sapien
caggggatactggattgagaatgtt

SEQ ID NO: 2618213 - DNA, 25 bp, Homo sapien
agaatgtttcctctggcctgttcat

SEQ ID NO: 2618214 - DNA, 25 bp, Homo sapien
gctttccactaacctgcctattgca

SEQ ID NO: 2618215 - DNA, 25 bp, Homo sapien
tgatttgcacacaaaatatttcaca

SEQ ID NO: 2618216 - DNA, 25 bp, Homo sapien
tttttgcttctagttgagaatccac

SEQ ID NO: 2618217 - DNA, 25 bp, Homo sapien
ccattagtagaggttgtagctagat

SEQ ID NO: 2618218 - DNA, 25 bp, Homo sapien
catgccagtaagtattcatttcttc

SEQ ID NO: 2618219 - DNA, 25 bp, Homo sapien
tgttcaggacccatgccagtaagta

SEQ ID NO: 2618220 - DNA, 25 bp, Homo sapien
ctccataatgttcaggacccatgcc

SEQ ID NO: 2618221 - DNA, 25 bp, Homo sapien
gccagtgcccccgaaatagttgaaa

SEQ ID NO: 2618222 - DNA, 25 bp, Homo sapien
tcaattttctcccagctggacaaca

SEQ ID NO: 2618223 - DNA, 25 bp, Homo sapien
caattttctcccagctggacaacac

SEQ ID NO: 2618224 - DNA, 25 bp, Homo sapien
tggagattcctccaatttccaaagg

SEQ ID NO: 2618225 - DNA, 25 bp, Homo sapien
aagtgacaccacttgcatgaatagt

SEQ ID NO: 2618226 - DNA, 25 bp, Homo sapien
tcccaagtgacaccacttgcatgaa

SEQ ID NO: 2618227 - DNA, 25 bp, Homo sapien
gacaccacttgcatgaatagtggag

SEQ ID NO: 2618228 - DNA, 25 bp, Homo sapien
gtgacaccacttgcatgaatagtgg

SEQ ID NO: 2618229 - DNA, 25 bp, Homo sapien
ttcttagcctctgacactcacccat

SEQ ID NO: 2618230 - DNA, 25 bp, Homo sapien
ggttttgctgttaggggaacatgaa

SEQ ID NO: 2618231 - DNA, 25 bp, Homo sapien
tgaaggctctctgtccgctccctgg

SEQ ID NO: 2618232 - DNA, 25 bp, Homo sapien
aacatgaaggctctctgtccgctcc

SEQ ID NO: 2618233 - DNA, 25 bp, Homo sapien
ggaacatgaaggctctctgtccgct

SEQ ID NO: 2618234 - DNA, 25 bp, Homo sapien
tcctgggagcactggaccttgtaac

SEQ ID NO: 2618235 - DNA, 25 bp, Homo sapien
gaagaagccacgatattgggaagcc

SEQ ID NO: 2618236 - DNA, 25 bp, Homo sapien
gaacttcattggaatactagaagct

SEQ ID NO: 2618237 - DNA, 25 bp, Homo sapien
taaccttgtgtgaacttcattggaa

SEQ ID NO: 2618238 - DNA, 25 bp, Homo sapien
ctttcctcggaagagcttaaccatc

SEQ ID NO: 2618239 - DNA, 25 bp, Homo sapien
tcctcggaagagcttaaccatcctc

SEQ ID NO: 2618240 - DNA, 25 bp, Homo sapien
cttaaccatcctcagtatttcagtg

SEQ ID NO: 2618241 - DNA, 25 bp, Homo sapien
ggaagagcttaaccatcctcagtat

SEQ ID NO: 2618242 - DNA, 25 bp, Homo sapien
ttggaactgttcttgtgggatggca

SEQ ID NO: 2618243 - DNA, 25 bp, Homo sapien
atgaccaggacaacctcagtctcag

SEQ ID NO: 2618244 - DNA, 25 bp, Homo sapien
tctgataaatggtatgaccaggaca

SEQ ID NO: 2618245 - DNA, 25 bp, Homo sapien
ggcagtatctcctatatctgataaa

SEQ ID NO: 2618246 - DNA, 25 bp, Homo sapien
gtcccttgattttggctcagaaact

SEQ ID NO: 2618247 - DNA, 25 bp, Homo sapien
taagcaacctcacaaacaagccgct

SEQ ID NO: 2618248 - DNA, 25 bp, Homo sapien
ggaaatacagtgttgtccatcttag

SEQ ID NO: 2618249 - DNA, 25 bp, Homo sapien
gatatgcaacctggtatacagacat

SEQ ID NO: 2618250 - DNA, 25 bp, Homo sapien
gaaacatgaacaggatagttctccc

SEQ ID NO: 2618251 - DNA, 25 bp, Homo sapien
cagggagtggtagtacaagtgttca

SEQ ID NO: 2618252 - DNA, 25 bp, Homo sapien
aactcagggagtggtagtacaagtg

SEQ ID NO: 2618253 - DNA, 25 bp, Homo sapien
ggtaactcagggagtggtagtacaa

SEQ ID NO: 2618254 - DNA, 25 bp, Homo sapien
agtggtagtacaagtgttcaagttc

SEQ ID NO: 2618255 - DNA, 25 bp, Homo sapien
cagccagacaactggatagcgtcca

SEQ ID NO: 2618256 - DNA, 25 bp, Homo sapien
tctggtagcagccagacaactggat

SEQ ID NO: 2618257 - DNA, 25 bp, Homo sapien
tggtagcagccagacaactggatag

SEQ ID NO: 2618258 - DNA, 25 bp, Homo sapien
tagcagccagacaactggatagcgt

SEQ ID NO: 2618259 - DNA, 25 bp, Homo sapien
agtaattgttagattcagcagggag

SEQ ID NO: 2618260 - DNA, 25 bp, Homo sapien
gttagattcagcagggaggatttta

SEQ ID NO: 2618261 - DNA, 25 bp, Homo sapien
tggaacatcgtaatacaatcagttg

SEQ ID NO: 2618262 - DNA, 25 bp, Homo sapien
tattggaacatcgtaatacaatcag

SEQ ID NO: 2618263 - DNA, 25 bp, Homo sapien
ggcaggaattactagatgaagtatc

SEQ ID NO: 2618264 - DNA, 25 bp, Homo sapien
tccagcatgaggtttcaaaacctgg

SEQ ID NO: 2618265 - DNA, 25 bp, Homo sapien
gactggcccagtgagaggatcagat

SEQ ID NO: 2618266 - DNA, 25 bp, Homo sapien
cagccttgcacaggagggtccagca

SEQ ID NO: 2618267 - DNA, 25 bp, Homo sapien
catcttgtattttctagcccagtga

SEQ ID NO: 2618268 - DNA, 25 bp, Homo sapien
tgctaaaaggtgatataaagtatta

SEQ ID NO: 2618269 - DNA, 25 bp, Homo sapien
cccagtgatcgaataagacatttca

SEQ ID NO: 2618270 - DNA, 25 bp, Homo sapien
ttctaaagcacgtggctctaagttg

SEQ ID NO: 2618271 - DNA, 25 bp, Homo sapien
ccaagcctcaaggatgttgactaga

SEQ ID NO: 2618272 - DNA, 25 bp, Homo sapien
aactatcgttccaccaagcctcaag

SEQ ID NO: 2618273 - DNA, 25 bp, Homo sapien
tactttccacgcagcctgtgcttct

SEQ ID NO: 2618274 - DNA, 25 bp, Homo sapien
aaccaggactcaatagcttgaccct

SEQ ID NO: 2618275 - DNA, 25 bp, Homo sapien
tctgacgggtgcctgatcatcgatg

SEQ ID NO: 2618276 - DNA, 25 bp, Homo sapien
tgcctgatcatcgatgcgaagccag

SEQ ID NO: 2618277 - DNA, 25 bp, Homo sapien
gacgggtgcctgatcatcgatgcga

SEQ ID NO: 2618278 - DNA, 25 bp, Homo sapien
cgggtgcctgatcatcgatgcgaag

SEQ ID NO: 2618279 - DNA, 25 bp, Homo sapien
gcttgcacgttgtaatggtgaccag

SEQ ID NO: 2618280 - DNA, 25 bp, Homo sapien
ggcagtgagcagcacgattagtcat

SEQ ID NO: 2618281 - DNA, 25 bp, Homo sapien
gatgaacatccgacaggcagtgagc

SEQ ID NO: 2618282 - DNA, 25 bp, Homo sapien
gatgctgtagcgtgaattctgtgaa

SEQ ID NO: 2618283 - DNA, 25 bp, Homo sapien
caattgttacagtcttaggaggaca

SEQ ID NO: 2618284 - DNA, 25 bp, Homo sapien
tattgtaccttgtagccttcagtga

SEQ ID NO: 2618285 - DNA, 25 bp, Homo sapien
tcataattccattcggtagagcagt

SEQ ID NO: 2618286 - DNA, 25 bp, Homo sapien
taggaggacatcagttaaaggtgca

SEQ ID NO: 2618287 - DNA, 25 bp, Homo sapien
gcctgtacatcgtcatctgctactg

SEQ ID NO: 2618288 - DNA, 25 bp, Homo sapien
gatgctcctggtgcttgactcctgc

SEQ ID NO: 2618289 - DNA, 25 bp, Homo sapien
gggtaaaaccagagcctgtacatcg

SEQ ID NO: 2618290 - DNA, 25 bp, Homo sapien
gacaacagaatatgtagatgctcct

SEQ ID NO: 2618291 - DNA, 25 bp, Homo sapien
ccaagtgtagaatctatattcagtg

SEQ ID NO: 2618292 - DNA, 25 bp, Homo sapien
aatccgacccccaagtgtagaatct

SEQ ID NO: 2618293 - DNA, 25 bp, Homo sapien
cgacccccaagtgtagaatctatat

SEQ ID NO: 2618294 - DNA, 25 bp, Homo sapien
ccccaagtgtagaatctatattcag

SEQ ID NO: 2618295 - DNA, 25 bp, Homo sapien
gaggcacactaagggctctcatgac

SEQ ID NO: 2618296 - DNA, 25 bp, Homo sapien
gaattaaactgcatcaggcctacca

SEQ ID NO: 2618297 - DNA, 25 bp, Homo sapien
gatgtccttgaggagacagccgatg

SEQ ID NO: 2618298 - DNA, 25 bp, Homo sapien
cagagtgagcgctcttagaggcaca

SEQ ID NO: 2618299 - DNA, 25 bp, Homo sapien
gccaccttgtggtcatgttgagaat

SEQ ID NO: 2618300 - DNA, 25 bp, Homo sapien
gacgtttttccaagtgaacattgca

SEQ ID NO: 2618301 - DNA, 25 bp, Homo sapien
cacttgtccagagggaaaataacat

SEQ ID NO: 2618302 - DNA, 25 bp, Homo sapien
aacatatttcggtgttgagagccac

SEQ ID NO: 2618303 - DNA, 25 bp, Homo sapien
tatgaatgacgaagtcggagattca

SEQ ID NO: 2618304 - DNA, 25 bp, Homo sapien
gaagaggagtggcattccactgagc

SEQ ID NO: 2618305 - DNA, 25 bp, Homo sapien
gaggagtggcattccactgagcttg

SEQ ID NO: 2618306 - DNA, 25 bp, Homo sapien
gagattcactgtctagagtgggaag

SEQ ID NO: 2618307 - DNA, 25 bp, Homo sapien
tattgtctagttgctctagctagga

SEQ ID NO: 2618308 - DNA, 25 bp, Homo sapien
cttgctttgtttcagatcttggaga

SEQ ID NO: 2618309 - DNA, 25 bp, Homo sapien
caccgataaaatcatatgatctgca

SEQ ID NO: 2618310 - DNA, 25 bp, Homo sapien
tattatgttgtggtatgtttcttcc

SEQ ID NO: 2618311 - DNA, 25 bp, Homo sapien
gctcttaagaacatctggtaccagc

SEQ ID NO: 2618312 - DNA, 25 bp, Homo sapien
gacacagttagaaagagatctatga

SEQ ID NO: 2618313 - DNA, 25 bp, Homo sapien
tctgctaagtcaaaattgctcttaa

SEQ ID NO: 2618314 - DNA, 25 bp, Homo sapien
taagttgcaagtcatcagatcctga

SEQ ID NO: 2618315 - DNA, 25 bp, Homo sapien
gaagttggggtgattcaaaagccac

SEQ ID NO: 2618316 - DNA, 25 bp, Homo sapien
atctggtgccgggtccgaggtccct

SEQ ID NO: 2618317 - DNA, 25 bp, Homo sapien
caatctggtgccgggtccgaggtcc

SEQ ID NO: 2618318 - DNA, 25 bp, Homo sapien
ccttcaatctggtgccgggtccgag

SEQ ID NO: 2618319 - DNA, 25 bp, Homo sapien
ttcaatctggtgccgggtccgaggt

SEQ ID NO: 2618320 - DNA, 25 bp, Homo sapien
catgtttatggatcccatcagggcc

SEQ ID NO: 2618321 - DNA, 25 bp, Homo sapien
ggaatccaggttgtaagtttagcat

SEQ ID NO: 2618322 - DNA, 25 bp, Homo sapien
gggaatccaggttgtaagtttagca

SEQ ID NO: 2618323 - DNA, 25 bp, Homo sapien
gtttatggatcccatcagggcctgc

SEQ ID NO: 2618324 - DNA, 25 bp, Homo sapien
tgttccagttctaattcaggtctct

SEQ ID NO: 2618325 - DNA, 25 bp, Homo sapien
ccttggctcgtacttcaaaaatctg

SEQ ID NO: 2618326 - DNA, 25 bp, Homo sapien
caggtctctgacaacttggaagtga

SEQ ID NO: 2618327 - DNA, 25 bp, Homo sapien
tatccctcctgtcaaggcaatggct

SEQ ID NO: 2618328 - DNA, 25 bp, Homo sapien
ctagtgggttgtctctcggttttct

SEQ ID NO: 2618329 - DNA, 25 bp, Homo sapien
tgatcatgctgacatataaaattca

SEQ ID NO: 2618330 - DNA, 25 bp, Homo sapien
atgatcatgctgacatataaaattc

SEQ ID NO: 2618331 - DNA, 25 bp, Homo sapien
attcaagttgcttgacacctgtgtc

SEQ ID NO: 2618332 - DNA, 25 bp, Homo sapien
ataaaattcaagttgcttgacacct

SEQ ID NO: 2618333 - DNA, 25 bp, Homo sapien
gattgacaataagagacatcagaga

SEQ ID NO: 2618334 - DNA, 25 bp, Homo sapien
gtaaaggtcactcagaggtggcttc

SEQ ID NO: 2618335 - DNA, 25 bp, Homo sapien
tgagagggggtcaagattgacaata

SEQ ID NO: 2618336 - DNA, 25 bp, Homo sapien
tgtaaaggtcactcagaggtggctt

SEQ ID NO: 2618337 - DNA, 25 bp, Homo sapien
cagcaactctctgagtatgaaagta

SEQ ID NO: 2618338 - DNA, 25 bp, Homo sapien
caactctctgagtatgaaagtattt

SEQ ID NO: 2618339 - DNA, 25 bp, Homo sapien
gcaactctctgagtatgaaagtatt

SEQ ID NO: 2618340 - DNA, 25 bp, Homo sapien
agcaactctctgagtatgaaagtat

SEQ ID NO: 2618341 - DNA, 25 bp, Homo sapien
aaaggctagtagaatgaaacagtgg

SEQ ID NO: 2618342 - DNA, 25 bp, Homo sapien
tgaaacagtgggaatagaaaaagaa

SEQ ID NO: 2618343 - DNA, 25 bp, Homo sapien
ggctagtagaatgaaacagtgggaa

SEQ ID NO: 2618344 - DNA, 25 bp, Homo sapien
tagaatgaaacagtgggaatagaaa

SEQ ID NO: 2618345 - DNA, 25 bp, Homo sapien
tcagacctacgatggttgatccagg

SEQ ID NO: 2618346 - DNA, 25 bp, Homo sapien
cgatggttgatccaggtcagtgtca

SEQ ID NO: 2618347 - DNA, 25 bp, Homo sapien
ctttcagacctacgatggttgatcc

SEQ ID NO: 2618348 - DNA, 25 bp, Homo sapien
cctacgatggttgatccaggtcagt

SEQ ID NO: 2618349 - DNA, 25 bp, Homo sapien
agactgttaacggttgtgacaacca

SEQ ID NO: 2618350 - DNA, 25 bp, Homo sapien
tacatagacataagactgttaacgg

SEQ ID NO: 2618351 - DNA, 25 bp, Homo sapien
gggtggctgttgatgcttccataca

SEQ ID NO: 2618352 - DNA, 25 bp, Homo sapien
gttgatgcttccatacatagacata

SEQ ID NO: 2618353 - DNA, 25 bp, Homo sapien
cacccaccaactgagtagaactttt

SEQ ID NO: 2618354 - DNA, 25 bp, Homo sapien
gatccacccaccaactgagtagaac

SEQ ID NO: 2618355 - DNA, 25 bp, Homo sapien
tccacccaccaactgagtagaactt

SEQ ID NO: 2618356 - DNA, 25 bp, Homo sapien
caccaactgagtagaacttttaagt

SEQ ID NO: 2618357 - DNA, 25 bp, Homo sapien
ctcgtttggcattattctgactcat

SEQ ID NO: 2618358 - DNA, 25 bp, Homo sapien
actgttaagtgatcctaagtttact

SEQ ID NO: 2618359 - DNA, 25 bp, Homo sapien
aagtgatcctaagtttactctaagg

SEQ ID NO: 2618360 - DNA, 25 bp, Homo sapien
ttttctctcgtttggcattattctg

SEQ ID NO: 2618361 - DNA, 25 bp, Homo sapien
agagccgccaggacgcagcgccttt

SEQ ID NO: 2618362 - DNA, 25 bp, Homo sapien
aagtatggcggccgctcgaacgccg

SEQ ID NO: 2618363 - DNA, 25 bp, Homo sapien
ccgggtctcccgacccaagcctgct

SEQ ID NO: 2618364 - DNA, 25 bp, Homo sapien
cgggcgtggtgggccgggaagtatg

SEQ ID NO: 2618365 - DNA, 25 bp, Homo sapien
tgactgatggcggccgtggcgtctc

SEQ ID NO: 2618366 - DNA, 25 bp, Homo sapien
tgatggcggccgtggcgtctcccag

SEQ ID NO: 2618367 - DNA, 25 bp, Homo sapien
ctgatggcggccgtggcgtctccca

SEQ ID NO: 2618368 - DNA, 25 bp, Homo sapien
gtgactgatggcggccgtggcgtct

SEQ ID NO: 2618369 - DNA, 25 bp, Homo sapien
tgaagccgcagcgaacctctctttc

SEQ ID NO: 2618370 - DNA, 25 bp, Homo sapien
ccactggctgtgctcagaccttgaa

SEQ ID NO: 2618371 - DNA, 25 bp, Homo sapien
agaaaatggtctggtcttagttccg

SEQ ID NO: 2618372 - DNA, 25 bp, Homo sapien
cttagttccggtccggcagagatcg

SEQ ID NO: 2618373 - DNA, 25 bp, Homo sapien
agaggcagtttggaaaagctgtccc

SEQ ID NO: 2618374 - DNA, 25 bp, Homo sapien
tgtagaacccactcataggaaagat

SEQ ID NO: 2618375 - DNA, 25 bp, Homo sapien
taggaaagatgtaagtgacccaatg

SEQ ID NO: 2618376 - DNA, 25 bp, Homo sapien
gggaactagaaagtatggaagcttc

SEQ ID NO: 2618377 - DNA, 25 bp, Homo sapien
tgtgagtcctccatgagccttgagt

SEQ ID NO: 2618378 - DNA, 25 bp, Homo sapien
cacgaagcaataggactggacaacc

SEQ ID NO: 2618379 - DNA, 25 bp, Homo sapien
gagaggtattcagcaacacgaagca

SEQ ID NO: 2618380 - DNA, 25 bp, Homo sapien
tatacttgagtttgtgccacgttgc

SEQ ID NO: 2618381 - DNA, 25 bp, Homo sapien
ttgaccttgccagtcttaacagtag

SEQ ID NO: 2618382 - DNA, 25 bp, Homo sapien
taggcccgttgtcttgccctttgac

SEQ ID NO: 2618383 - DNA, 25 bp, Homo sapien
aatctttgtcagttaggcccgttgt

SEQ ID NO: 2618384 - DNA, 25 bp, Homo sapien
tagttgcagcctcctggcagttaag

SEQ ID NO: 2618385 - DNA, 25 bp, Homo sapien
tgtttgatttcagaagcctaatttt

SEQ ID NO: 2618386 - DNA, 25 bp, Homo sapien
aaagcaacaatgacttcttatgttt

SEQ ID NO: 2618387 - DNA, 25 bp, Homo sapien
agcagaataaccaagcaggtcatcc

SEQ ID NO: 2618388 - DNA, 25 bp, Homo sapien
gcaacaatgacttcttatgtttgat

SEQ ID NO: 2618389 - DNA, 25 bp, Homo sapien
taaaatttaatgagcacttcaagac

SEQ ID NO: 2618390 - DNA, 25 bp, Homo sapien
tgcagcagacagatatttgagccca

SEQ ID NO: 2618391 - DNA, 25 bp, Homo sapien
taagatttaaccttggttgaggctg

SEQ ID NO: 2618392 - DNA, 25 bp, Homo sapien
cttcaagactataacgttaatgtat

SEQ ID NO: 2618393 - DNA, 25 bp, Homo sapien
gaagtagacgaagctgatctccctg

SEQ ID NO: 2618394 - DNA, 25 bp, Homo sapien
gaacgtttatatagccatccagtga

SEQ ID NO: 2618395 - DNA, 25 bp, Homo sapien
gtaacagtcaggcagggaatcaccc

SEQ ID NO: 2618396 - DNA, 25 bp, Homo sapien
gaaacagcttctacacgaggtaatc

SEQ ID NO: 2618397 - DNA, 25 bp, Homo sapien
gtcctgggtgtgcaacctcgagcaa

SEQ ID NO: 2618398 - DNA, 25 bp, Homo sapien
gactgttgggaacatcaagctcggt

SEQ ID NO: 2618399 - DNA, 25 bp, Homo sapien
caagctcggtggtcacgtggatgca

SEQ ID NO: 2618400 - DNA, 25 bp, Homo sapien
ggtgcaggaatgtggctcagctggt

SEQ ID NO: 2618401 - DNA, 25 bp, Homo sapien
ggaggtcctgaatcacataaacaag

SEQ ID NO: 2618402 - DNA, 25 bp, Homo sapien
ttggtgtcatgaaatcgaagaagga

SEQ ID NO: 2618403 - DNA, 25 bp, Homo sapien
aatgaaggtctttactgatagaagc

SEQ ID NO: 2618404 - DNA, 25 bp, Homo sapien
gctccctttgctgtgaaatatagaa

SEQ ID NO: 2618405 - DNA, 25 bp, Homo sapien
ttttttgccatatagactacaagat

SEQ ID NO: 2618406 - DNA, 25 bp, Homo sapien
tctacactacttgtggaataactca

SEQ ID NO: 2618407 - DNA, 25 bp, Homo sapien
tcacttgtaactttactgatgatct

SEQ ID NO: 2618408 - DNA, 25 bp, Homo sapien
gccatatagactacaagatattcca

SEQ ID NO: 2618409 - DNA, 25 bp, Homo sapien
taacattctcactagtgcctggcag

SEQ ID NO: 2618410 - DNA, 25 bp, Homo sapien
caatctgtatgactggaaccttaac

SEQ ID NO: 2618411 - DNA, 25 bp, Homo sapien
tttgccctagcaacaatctgtatga

SEQ ID NO: 2618412 - DNA, 25 bp, Homo sapien
aaaactggatctttgccctagcaac

SEQ ID NO: 2618413 - DNA, 25 bp, Homo sapien
ctgaaacttcctgacaaatgaggaa

SEQ ID NO: 2618414 - DNA, 25 bp, Homo sapien
gaaaccatggactagctctgaaact

SEQ ID NO: 2618415 - DNA, 25 bp, Homo sapien
attggcatacgctttcaatattgca

SEQ ID NO: 2618416 - DNA, 25 bp, Homo sapien
ttcctgacaaatgaggaaggtcact

SEQ ID NO: 2618417 - DNA, 25 bp, Homo sapien
tgtgggttagcatagcactctgctc

SEQ ID NO: 2618418 - DNA, 25 bp, Homo sapien
caaatttctgatactgacgaagatt

SEQ ID NO: 2618419 - DNA, 25 bp, Homo sapien
ttctgatactgacgaagattcccat

SEQ ID NO: 2618420 - DNA, 25 bp, Homo sapien
gggttagcatagcactctgctccaa

SEQ ID NO: 2618421 - DNA, 25 bp, Homo sapien
tcacatctcatatcctgtgcgtgtg

SEQ ID NO: 2618422 - DNA, 25 bp, Homo sapien
gtctagagtcttaggagttaaacca

SEQ ID NO: 2618423 - DNA, 25 bp, Homo sapien
catgatagaatgtagcgtattggaa

SEQ ID NO: 2618424 - DNA, 25 bp, Homo sapien
tgcctggacgcagaagtactggtct

SEQ ID NO: 2618425 - DNA, 25 bp, Homo sapien
gacatttctttttgacgctgctgga

SEQ ID NO: 2618426 - DNA, 25 bp, Homo sapien
gaaggcccttttcctagtatgaaga

SEQ ID NO: 2618427 - DNA, 25 bp, Homo sapien
tcttgtaaagccactaatgccatgg

SEQ ID NO: 2618428 - DNA, 25 bp, Homo sapien
ttgatggaacacaaacgtacagtcc

SEQ ID NO: 2618429 - DNA, 25 bp, Homo sapien
catttgtcaaaagggtttataattg

SEQ ID NO: 2618430 - DNA, 25 bp, Homo sapien
taaccgagtaaggtaatgtcaggcc

SEQ ID NO: 2618431 - DNA, 25 bp, Homo sapien
ctgaaacatgcctttacagtgaggt

SEQ ID NO: 2618432 - DNA, 25 bp, Homo sapien
ctcatggtctcctttgaaaaaactg

SEQ ID NO: 2618433 - DNA, 25 bp, Homo sapien
gtaacagtgatgagtggatattcct

SEQ ID NO: 2618434 - DNA, 25 bp, Homo sapien
ttctgtgtagtcgtatcatctgcaa

SEQ ID NO: 2618435 - DNA, 25 bp, Homo sapien
gcaatttgttcagctttcaacacag

SEQ ID NO: 2618436 - DNA, 25 bp, Homo sapien
tgcaaatactctttcagcccaactc

SEQ ID NO: 2618437 - DNA, 25 bp, Homo sapien
tattccatctacactagcattttgc

SEQ ID NO: 2618438 - DNA, 25 bp, Homo sapien
ttacacgtcactgctagcccatatt

SEQ ID NO: 2618439 - DNA, 25 bp, Homo sapien
tcactgctagcccatattccatcta

SEQ ID NO: 2618440 - DNA, 25 bp, Homo sapien
tacactagcattttgcactccaatg

SEQ ID NO: 2618441 - DNA, 25 bp, Homo sapien
tgaatgaatattcaagcacatctct

SEQ ID NO: 2618442 - DNA, 25 bp, Homo sapien
tcatctttatggaacggtgaatggt

SEQ ID NO: 2618443 - DNA, 25 bp, Homo sapien
tagtcaatttatctattagccagtg

SEQ ID NO: 2618444 - DNA, 25 bp, Homo sapien
taagtgaggcactgaatctgaattt

SEQ ID NO: 2618445 - DNA, 25 bp, Homo sapien
ctttcccataagccaaaataagtca

SEQ ID NO: 2618446 - DNA, 25 bp, Homo sapien
gctttcccataagccaaaataagtc

SEQ ID NO: 2618447 - DNA, 25 bp, Homo sapien
tgcgtatgtctgatcctgcgtgtct

SEQ ID NO: 2618448 - DNA, 25 bp, Homo sapien
ttctggctcaatgtgtgtgcgtatg

SEQ ID NO: 2618449 - DNA, 25 bp, Homo sapien
tatgtctgatcctgcgtgtctgaac

SEQ ID NO: 2618450 - DNA, 25 bp, Homo sapien
tcttctggctcaatgtgtgtgcgta

SEQ ID NO: 2618451 - DNA, 25 bp, Homo sapien
gggttggtacttaggctgcttttca

SEQ ID NO: 2618452 - DNA, 25 bp, Homo sapien
ttttcattatggcacgggtagtctc

SEQ ID NO: 2618453 - DNA, 25 bp, Homo sapien
ggtacttaggctgcttttcattatg

SEQ ID NO: 2618454 - DNA, 25 bp, Homo sapien
tggcacgggtagtctccctttctca

SEQ ID NO: 2618455 - DNA, 25 bp, Homo sapien
cccagaagctggaatagaaagcctt

SEQ ID NO: 2618456 - DNA, 25 bp, Homo sapien
agaagctggaatagaaagcctttca

SEQ ID NO: 2618457 - DNA, 25 bp, Homo sapien
ctcccagaagctggaatagaaagcc

SEQ ID NO: 2618458 - DNA, 25 bp, Homo sapien
cagaagctggaatagaaagcctttc

SEQ ID NO: 2618459 - DNA, 25 bp, Homo sapien
tggccagaggtaacctgcaccttcc

SEQ ID NO: 2618460 - DNA, 25 bp, Homo sapien
caagtctgtggacaacaagccctca

SEQ ID NO: 2618461 - DNA, 25 bp, Homo sapien
tctagtgaatttagccagtgctttc

SEQ ID NO: 2618462 - DNA, 25 bp, Homo sapien
gctcaggattcccagaagctttcta

SEQ ID NO: 2618463 - DNA, 25 bp, Homo sapien
tcagtactcctcaatactccgtgtt

SEQ ID NO: 2618464 - DNA, 25 bp, Homo sapien
aggtccccagagattgttgtcttca

SEQ ID NO: 2618465 - DNA, 25 bp, Homo sapien
tcaggtccccagagattgttgtctt

SEQ ID NO: 2618466 - DNA, 25 bp, Homo sapien
caggtccccagagattgttgtcttc

SEQ ID NO: 2618467 - DNA, 25 bp, Homo sapien
tagccctgataagtcaattctttta

SEQ ID NO: 2618468 - DNA, 25 bp, Homo sapien
gtagccctgataagtcaattctttt

SEQ ID NO: 2618469 - DNA, 25 bp, Homo sapien
agccctgataagtcaattcttttat

SEQ ID NO: 2618470 - DNA, 25 bp, Homo sapien
gccctgataagtcaattcttttatc

SEQ ID NO: 2618471 - DNA, 25 bp, Homo sapien
caagattagttttagtagtggggat

SEQ ID NO: 2618472 - DNA, 25 bp, Homo sapien
gagttggccttggtgcattccttgt

SEQ ID NO: 2618473 - DNA, 25 bp, Homo sapien
agttggccttggtgcattccttgtg

SEQ ID NO: 2618474 - DNA, 25 bp, Homo sapien
acagaacaagattagttttagtagt

SEQ ID NO: 2618475 - DNA, 25 bp, Homo sapien
tgtcgctactgagacccttctggag

SEQ ID NO: 2618476 - DNA, 25 bp, Homo sapien
gctctgggagtcattactgttgaat

SEQ ID NO: 2618477 - DNA, 25 bp, Homo sapien
tagtttcttggaattgtcgctactg

SEQ ID NO: 2618478 - DNA, 25 bp, Homo sapien
cagctctgggagtcattactgttga

SEQ ID NO: 2618479 - DNA, 25 bp, Homo sapien
tcctgatgtgtttgcatctactgac

SEQ ID NO: 2618480 - DNA, 25 bp, Homo sapien
tctactgacaagattctgactggta

SEQ ID NO: 2618481 - DNA, 25 bp, Homo sapien
gccactttgggacactttagagata

SEQ ID NO: 2618482 - DNA, 25 bp, Homo sapien
tagagaggcagaattctcctaatac

SEQ ID NO: 2618483 - DNA, 25 bp, Homo sapien
ttgtacttttggtacgcatgcgttc

SEQ ID NO: 2618484 - DNA, 25 bp, Homo sapien
gccatgtgacgaatttctccacacc

SEQ ID NO: 2618485 - DNA, 25 bp, Homo sapien
cttttggtacgcatgcgttctttga

SEQ ID NO: 2618486 - DNA, 25 bp, Homo sapien
ggtacgcatgcgttctttgacaatg

SEQ ID NO: 2618487 - DNA, 25 bp, Homo sapien
acctggcggattcttccatgggagc

SEQ ID NO: 2618488 - DNA, 25 bp, Homo sapien
gcagtattgtgctcgctaccaaggg

SEQ ID NO: 2618489 - DNA, 25 bp, Homo sapien
gagctgggacaggtaacatttctcc

SEQ ID NO: 2618490 - DNA, 25 bp, Homo sapien
cagtctcttctggtttgcggacgcc

SEQ ID NO: 2618491 - DNA, 25 bp, Homo sapien
tggctggatgagtatgagttagcac

SEQ ID NO: 2618492 - DNA, 25 bp, Homo sapien
tgttgaaaccatatccagaagctgt

SEQ ID NO: 2618493 - DNA, 25 bp, Homo sapien
ttagcacatttggatgtatctgctc

SEQ ID NO: 2618494 - DNA, 25 bp, Homo sapien
tacaaccatattgccctcagaatga

SEQ ID NO: 2618495 - DNA, 25 bp, Homo sapien
tgtaacagcaacttggtcagaccaa

SEQ ID NO: 2618496 - DNA, 25 bp, Homo sapien
gaacactgataaaccactgtgtgtg

SEQ ID NO: 2618497 - DNA, 25 bp, Homo sapien
tatttacaggaacataatgaacact

SEQ ID NO: 2618498 - DNA, 25 bp, Homo sapien
ccgcaaacatggctaaaactttaga

SEQ ID NO: 2618499 - DNA, 25 bp, Homo sapien
gcaggaggatcagatgaagtggcat

SEQ ID NO: 2618500 - DNA, 25 bp, Homo sapien
tgccactgaactctgctatgggaaa

SEQ ID NO: 2618501 - DNA, 25 bp, Homo sapien
aggagttcaaagttatggtgaacta

SEQ ID NO: 2618502 - DNA, 25 bp, Homo sapien
ctttggaagttgaggccagaggatc

SEQ ID NO: 2618503 - DNA, 25 bp, Homo sapien
aagtcacctttaacttgtcctacat

SEQ ID NO: 2618504 - DNA, 25 bp, Homo sapien
agtcacctttaacttgtcctacatt

SEQ ID NO: 2618505 - DNA, 25 bp, Homo sapien
actcagaaaagtcacctttaacttg

SEQ ID NO: 2618506 - DNA, 25 bp, Homo sapien
ctcagaaaagtcacctttaacttgt

SEQ ID NO: 2618507 - DNA, 25 bp, Homo sapien
tagtgccaggacagtgacttgagtc

SEQ ID NO: 2618508 - DNA, 25 bp, Homo sapien
tgagcagtctcctgacctagcaagc

SEQ ID NO: 2618509 - DNA, 25 bp, Homo sapien
aaattccttggcagttaatagtgcc

SEQ ID NO: 2618510 - DNA, 25 bp, Homo sapien
tgggcttccgtgagaaagttcaaag

SEQ ID NO: 2618511 - DNA, 25 bp, Homo sapien
tcagtcaagtttaccggagatgcca

SEQ ID NO: 2618512 - DNA, 25 bp, Homo sapien
gccaaccaaattgatagccttcgat

SEQ ID NO: 2618513 - DNA, 25 bp, Homo sapien
caagtttaccggagatgccaaccaa

SEQ ID NO: 2618514 - DNA, 25 bp, Homo sapien
taccggagatgccaaccaaattgat

SEQ ID NO: 2618515 - DNA, 25 bp, Homo sapien
gcaagctgttctggtcttctggtcc

SEQ ID NO: 2618516 - DNA, 25 bp, Homo sapien
tgaaagaatgacgtccccataacct

SEQ ID NO: 2618517 - DNA, 25 bp, Homo sapien
tggtcctactctggcaagtatgata

SEQ ID NO: 2618518 - DNA, 25 bp, Homo sapien
ctttgaaagaatgacgtccccataa

SEQ ID NO: 2618519 - DNA, 25 bp, Homo sapien
gacatatttactctggaggaggatt

SEQ ID NO: 2618520 - DNA, 25 bp, Homo sapien
tatttgccaagtattataatttctt

SEQ ID NO: 2618521 - DNA, 25 bp, Homo sapien
tcttgacatatttactctggaggag

SEQ ID NO: 2618522 - DNA, 25 bp, Homo sapien
ctgttcctggtaccatatatttgcc

SEQ ID NO: 2618523 - DNA, 25 bp, Homo sapien
ctctgttgagccgcccgctccttta

SEQ ID NO: 2618524 - DNA, 25 bp, Homo sapien
ttacgtggcccggcttccgcgccgc

SEQ ID NO: 2618525 - DNA, 25 bp, Homo sapien
ttgagccgcccgctcctttacgtgg

SEQ ID NO: 2618526 - DNA, 25 bp, Homo sapien
tacgtggcccggcttccgcgccgct

SEQ ID NO: 2618527 - DNA, 25 bp, Homo sapien
tcggggcgactgttaggcttcctgc

SEQ ID NO: 2618528 - DNA, 25 bp, Homo sapien
gggactcagattgggtccctcacta

SEQ ID NO: 2618529 - DNA, 25 bp, Homo sapien
gaagtttagctaggactgtcgggca

SEQ ID NO: 2618530 - DNA, 25 bp, Homo sapien
tgctaacgggccacgacttcacaaa

SEQ ID NO: 2618531 - DNA, 25 bp, Homo sapien
aaatagctgcttcccggtggtgttg

SEQ ID NO: 2618532 - DNA, 25 bp, Homo sapien
ctggtcaaatagctgcttcccggtg

SEQ ID NO: 2618533 - DNA, 25 bp, Homo sapien
tccatggtggtcacacgcacactga

SEQ ID NO: 2618534 - DNA, 25 bp, Homo sapien
ccatggtggtcacacgcacactgat

SEQ ID NO: 2618535 - DNA, 25 bp, Homo sapien
ttccctcaagccaatagttttcacc

SEQ ID NO: 2618536 - DNA, 25 bp, Homo sapien
gtgtcctggtactgcagaccaaaga

SEQ ID NO: 2618537 - DNA, 25 bp, Homo sapien
tgtcctggtactgcagaccaaagaa

SEQ ID NO: 2618538 - DNA, 25 bp, Homo sapien
acttccctcaagccaatagttttca

SEQ ID NO: 2618539 - DNA, 25 bp, Homo sapien
aattgagtttcagccaggtggagaa

SEQ ID NO: 2618540 - DNA, 25 bp, Homo sapien
ttgagtttcagccaggtggagaaac

SEQ ID NO: 2618541 - DNA, 25 bp, Homo sapien
taattgagtttcagccaggtggaga

SEQ ID NO: 2618542 - DNA, 25 bp, Homo sapien
cttaattgagtttcagccaggtgga

SEQ ID NO: 2618543 - DNA, 25 bp, Homo sapien
ggctttccttccgcacttcctgggc

SEQ ID NO: 2618544 - DNA, 25 bp, Homo sapien
gcagggggctttccttccgcacttc

SEQ ID NO: 2618545 - DNA, 25 bp, Homo sapien
tttccttccgcacttcctgggcagt

SEQ ID NO: 2618546 - DNA, 25 bp, Homo sapien
gagcagggggctttccttccgcact

SEQ ID NO: 2618547 - DNA, 25 bp, Homo sapien
ctgaatcaattcctcggtcggacac

SEQ ID NO: 2618548 - DNA, 25 bp, Homo sapien
cagaaggaacagacgctgagtggtg

SEQ ID NO: 2618549 - DNA, 25 bp, Homo sapien
tgcagaaggaacagacgctgagtgg

SEQ ID NO: 2618550 - DNA, 25 bp, Homo sapien
gcagaaggaacagacgctgagtggt

SEQ ID NO: 2618551 - DNA, 25 bp, Homo sapien
gaaggaacagacgctgagtggtgtc

SEQ ID NO: 2618552 - DNA, 25 bp, Homo sapien
agtaaatatcatcactgagaatgcc

SEQ ID NO: 2618553 - DNA, 25 bp, Homo sapien
gtctcaggccggcagtaaatatcat

SEQ ID NO: 2618554 - DNA, 25 bp, Homo sapien
gcagtaaatatcatcactgagaatg

SEQ ID NO: 2618555 - DNA, 25 bp, Homo sapien
tcaggccggcagtaaatatcatcac

SEQ ID NO: 2618556 - DNA, 25 bp, Homo sapien
ccttactgaagttcccatacttaga

SEQ ID NO: 2618557 - DNA, 25 bp, Homo sapien
acttatgcacctccttactgaagtt

SEQ ID NO: 2618558 - DNA, 25 bp, Homo sapien
aggactctctgtgggagcaactcgt

SEQ ID NO: 2618559 - DNA, 25 bp, Homo sapien
tgcagccagggagcatagaagacaa

SEQ ID NO: 2618560 - DNA, 25 bp, Homo sapien
gagccttcttagtctgttcctcgat

SEQ ID NO: 2618561 - DNA, 25 bp, Homo sapien
tgctgagccttcttagtctgttcct

SEQ ID NO: 2618562 - DNA, 25 bp, Homo sapien
agtctgttcctcgatctgcttcagc

SEQ ID NO: 2618563 - DNA, 25 bp, Homo sapien
tcttagtctgttcctcgatctgctt

SEQ ID NO: 2618564 - DNA, 25 bp, Homo sapien
tgggcatgcttccgttccttcccaa

SEQ ID NO: 2618565 - DNA, 25 bp, Homo sapien
ctgggcatgcttccgttccttccca

SEQ ID NO: 2618566 - DNA, 25 bp, Homo sapien
tggtcccgggaggcctgcagcaaga

SEQ ID NO: 2618567 - DNA, 25 bp, Homo sapien
ggtcccgggaggcctgcagcaagac

SEQ ID NO: 2618568 - DNA, 25 bp, Homo sapien
ctgagtctttttctggtcccgggag

SEQ ID NO: 2618569 - DNA, 25 bp, Homo sapien
ctattcctgagtctttttctggtcc

SEQ ID NO: 2618570 - DNA, 25 bp, Homo sapien
agctcagcacgggtcttctccaagt

SEQ ID NO: 2618571 - DNA, 25 bp, Homo sapien
gcccgtaggtcagcactagcctctg

SEQ ID NO: 2618572 - DNA, 25 bp, Homo sapien
ggtccttggccatagcatcagcccg

SEQ ID NO: 2618573 - DNA, 25 bp, Homo sapien
atggcagtcttcagctcagcacggg

SEQ ID NO: 2618574 - DNA, 25 bp, Homo sapien
atggatcatgtcattggcagtcttc

SEQ ID NO: 2618575 - DNA, 25 bp, Homo sapien
agcatggatcatgtcattggcagtc

SEQ ID NO: 2618576 - DNA, 25 bp, Homo sapien
gcatggatcatgtcattggcagtct

SEQ ID NO: 2618577 - DNA, 25 bp, Homo sapien
cagcatggatcatgtcattggcagt

SEQ ID NO: 2618578 - DNA, 25 bp, Homo sapien
ggtaagttactgactttaaggcagc

SEQ ID NO: 2618579 - DNA, 25 bp, Homo sapien
ggattgagcataaacccctccaaaa

SEQ ID NO: 2618580 - DNA, 25 bp, Homo sapien
actgaaatagaacatggattgagca

SEQ ID NO: 2618581 - DNA, 25 bp, Homo sapien
gcagctattaatagattgccccaca

SEQ ID NO: 2618582 - DNA, 25 bp, Homo sapien
tcacactgggagtagggacacctgt

SEQ ID NO: 2618583 - DNA, 25 bp, Homo sapien
ctcacactgggagtagggacacctg

SEQ ID NO: 2618584 - DNA, 25 bp, Homo sapien
atattacattagaactctcagtgat

SEQ ID NO: 2618585 - DNA, 25 bp, Homo sapien
gtatattacattagaactctcagtg

SEQ ID NO: 2618586 - DNA, 25 bp, Homo sapien
cattagaactctcagtgatttgtga

SEQ ID NO: 2618587 - DNA, 25 bp, Homo sapien
tacattagaactctcagtgatttgt

SEQ ID NO: 2618588 - DNA, 25 bp, Homo sapien
tgataatactctgccaggatggctg

SEQ ID NO: 2618589 - DNA, 25 bp, Homo sapien
gctaagcttgatggtcaagcactga

SEQ ID NO: 2618590 - DNA, 25 bp, Homo sapien
gcatcttttctgagcgctaagcttg

SEQ ID NO: 2618591 - DNA, 25 bp, Homo sapien
caagcactgataatactctgccagg

SEQ ID NO: 2618592 - DNA, 25 bp, Homo sapien
tggctttagccagcagatcagagct

SEQ ID NO: 2618593 - DNA, 25 bp, Homo sapien
gagcttggaatggataccatttcag

SEQ ID NO: 2618594 - DNA, 25 bp, Homo sapien
tatgtttggataagcaagtgttttt

SEQ ID NO: 2618595 - DNA, 25 bp, Homo sapien
tagaatttttgctactgctctggct

SEQ ID NO: 2618596 - DNA, 25 bp, Homo sapien
taaccctatgacttgtttagcactc

SEQ ID NO: 2618597 - DNA, 25 bp, Homo sapien
tgaacagaggttcttataacaaagc

SEQ ID NO: 2618598 - DNA, 25 bp, Homo sapien
tgactattgctctaaaacacgagaa

SEQ ID NO: 2618599 - DNA, 25 bp, Homo sapien
ggaaacctcacaatcttgaacagag

SEQ ID NO: 2618600 - DNA, 25 bp, Homo sapien
ttggcaaaaactgatgtccatatgc

SEQ ID NO: 2618601 - DNA, 25 bp, Homo sapien
taaaaacagacatagaaccatgtgg

SEQ ID NO: 2618602 - DNA, 25 bp, Homo sapien
gaaccatgtggaacataattgagaa

SEQ ID NO: 2618603 - DNA, 25 bp, Homo sapien
tcaaccagtctttgacaatgacacc

SEQ ID NO: 2618604 - DNA, 25 bp, Homo sapien
tgctatccctcacccctacccctac

SEQ ID NO: 2618605 - DNA, 25 bp, Homo sapien
tgcacaacgtgtaggtttgttatgt

SEQ ID NO: 2618606 - DNA, 25 bp, Homo sapien
aacgtgtaggtttgttatgtatgta

SEQ ID NO: 2618607 - DNA, 25 bp, Homo sapien
cacaacgtgtaggtttgttatgtat

SEQ ID NO: 2618608 - DNA, 25 bp, Homo sapien
tatgtggaccttaatgtaacactgg

SEQ ID NO: 2618609 - DNA, 25 bp, Homo sapien
ccagattgccattcgatttatgtgg

SEQ ID NO: 2618610 - DNA, 25 bp, Homo sapien
tgtttctacaggctggacaggaaac

SEQ ID NO: 2618611 - DNA, 25 bp, Homo sapien
aaaaatatgatatcaccagattgcc

SEQ ID NO: 2618612 - DNA, 25 bp, Homo sapien
tcacttcttgaataaacctctagct

SEQ ID NO: 2618613 - DNA, 25 bp, Homo sapien
tctagctataatactgccaatgtgc

SEQ ID NO: 2618614 - DNA, 25 bp, Homo sapien
ttaccaatgttgattatattacaag

SEQ ID NO: 2618615 - DNA, 25 bp, Homo sapien
caagtcatcgtggtgaggtaacagg

SEQ ID NO: 2618616 - DNA, 25 bp, Homo sapien
gacacttggtctgatctggcccatg

SEQ ID NO: 2618617 - DNA, 25 bp, Homo sapien
tagcgctgacacttggtctgatctg

SEQ ID NO: 2618618 - DNA, 25 bp, Homo sapien
ttggtctgatctggcccatgcattc

SEQ ID NO: 2618619 - DNA, 25 bp, Homo sapien
cgctgacacttggtctgatctggcc

SEQ ID NO: 2618620 - DNA, 25 bp, Homo sapien
ttctaataacagcttggtgtctggc

SEQ ID NO: 2618621 - DNA, 25 bp, Homo sapien
gcaggtaactgaaatttgcacagta

SEQ ID NO: 2618622 - DNA, 25 bp, Homo sapien
ggtaactgaaatttgcacagtaaat

SEQ ID NO: 2618623 - DNA, 25 bp, Homo sapien
cactgcatgtctgccacttctaata

SEQ ID NO: 2618624 - DNA, 25 bp, Homo sapien
tatgtggattggtgcaattggccat

SEQ ID NO: 2618625 - DNA, 25 bp, Homo sapien
tctttggtggaatagatttatgtgg

SEQ ID NO: 2618626 - DNA, 25 bp, Homo sapien
aatagatttatgtggattggtgcaa

SEQ ID NO: 2618627 - DNA, 25 bp, Homo sapien
atttatgtggattggtgcaattggc

SEQ ID NO: 2618628 - DNA, 25 bp, Homo sapien
gaacaatgaatgtacgaatagcatc

SEQ ID NO: 2618629 - DNA, 25 bp, Homo sapien
catgttgcctaggatattgacatca

SEQ ID NO: 2618630 - DNA, 25 bp, Homo sapien
tataaccctctgctgaaaattactc

SEQ ID NO: 2618631 - DNA, 25 bp, Homo sapien
tacagcaatgtgataacaatacagt

SEQ ID NO: 2618632 - DNA, 25 bp, Homo sapien
caaagaagatccgagctttttgatc

SEQ ID NO: 2618633 - DNA, 25 bp, Homo sapien
gatggagactttgaaatatggttcc

SEQ ID NO: 2618634 - DNA, 25 bp, Homo sapien
tactccaataacttcaagctgcttg

SEQ ID NO: 2618635 - DNA, 25 bp, Homo sapien
ctttttgatctagcagatggagact

SEQ ID NO: 2618636 - DNA, 25 bp, Homo sapien
catttgacggtacagtagcaaattt

SEQ ID NO: 2618637 - DNA, 25 bp, Homo sapien
taccatttgacggtacagtagcaaa

SEQ ID NO: 2618638 - DNA, 25 bp, Homo sapien
ccatttgacggtacagtagcaaatt

SEQ ID NO: 2618639 - DNA, 25 bp, Homo sapien
ctaccatttgacggtacagtagcaa

SEQ ID NO: 2618640 - DNA, 25 bp, Homo sapien
aatgccacttgatgttttgctacca

SEQ ID NO: 2618641 - DNA, 25 bp, Homo sapien
cagaaatgccacttgatgttttgct

SEQ ID NO: 2618642 - DNA, 25 bp, Homo sapien
atgccacttgatgttttgctaccat

SEQ ID NO: 2618643 - DNA, 25 bp, Homo sapien
gaaatgccacttgatgttttgctac

SEQ ID NO: 2618644 - DNA, 25 bp, Homo sapien
taatatcagcattgaattttgtgaa

SEQ ID NO: 2618645 - DNA, 25 bp, Homo sapien
tctaatatcagcattgaattttgtg

SEQ ID NO: 2618646 - DNA, 25 bp, Homo sapien
ctaatatcagcattgaattttgtga

SEQ ID NO: 2618647 - DNA, 25 bp, Homo sapien
gatgcagccactaagacagaatttc

SEQ ID NO: 2618648 - DNA, 25 bp, Homo sapien
tagccttttcctgcggggccatatg

SEQ ID NO: 2618649 - DNA, 25 bp, Homo sapien
gttagagatgcagccactaagacag

SEQ ID NO: 2618650 - DNA, 25 bp, Homo sapien
cctgcggggccatatgacaattgtt

SEQ ID NO: 2618651 - DNA, 25 bp, Homo sapien
tggactgttattcgatgggtcaact

SEQ ID NO: 2618652 - DNA, 25 bp, Homo sapien
ttttggactgttattcgatgggtca

SEQ ID NO: 2618653 - DNA, 25 bp, Homo sapien
catcttgtttgtagtaaactctttt

SEQ ID NO: 2618654 - DNA, 25 bp, Homo sapien
ttattcgatgggtcaactttagtgg

SEQ ID NO: 2618655 - DNA, 25 bp, Homo sapien
tcatcctcctatggtatcgtccccc

SEQ ID NO: 2618656 - DNA, 25 bp, Homo sapien
cctatggtatcgtcccccagaatgt

SEQ ID NO: 2618657 - DNA, 25 bp, Homo sapien
cctcctatggtatcgtcccccagaa

SEQ ID NO: 2618658 - DNA, 25 bp, Homo sapien
atcctcctatggtatcgtcccccag

SEQ ID NO: 2618659 - DNA, 25 bp, Homo sapien
tgtcaaccaactcatatttccacag

SEQ ID NO: 2618660 - DNA, 25 bp, Homo sapien
tatcccattatgctttggtcatcta

SEQ ID NO: 2618661 - DNA, 25 bp, Homo sapien
accaacatcagtgcctaagaattta

SEQ ID NO: 2618662 - DNA, 25 bp, Homo sapien
gtcatctatatgattgtcaaccaac

SEQ ID NO: 2618663 - DNA, 25 bp, Homo sapien
tgctttgcaggtaaccattactgtc

SEQ ID NO: 2618664 - DNA, 25 bp, Homo sapien
aaccattactgtctgaaagaacaca

SEQ ID NO: 2618665 - DNA, 25 bp, Homo sapien
ctgctttgcaggtaaccattactgt

SEQ ID NO: 2618666 - DNA, 25 bp, Homo sapien
taaccattactgtctgaaagaacac

SEQ ID NO: 2618667 - DNA, 25 bp, Homo sapien
tgtgatggtgcagcctttcatctct

SEQ ID NO: 2618668 - DNA, 25 bp, Homo sapien
gttcatggagctaaacatgcagctg

SEQ ID NO: 2618669 - DNA, 25 bp, Homo sapien
tgtctcacgtgatagaaagaccctg

SEQ ID NO: 2618670 - DNA, 25 bp, Homo sapien
cctaagcaagttaagtctgggagct

SEQ ID NO: 2618671 - DNA, 25 bp, Homo sapien
ggagcttgtcagtccttgtggtcaa

SEQ ID NO: 2618672 - DNA, 25 bp, Homo sapien
agccgggctggtgttctagtttgaa

SEQ ID NO: 2618673 - DNA, 25 bp, Homo sapien
ctgtggttcaagtctgagggtccca

SEQ ID NO: 2618674 - DNA, 25 bp, Homo sapien
ttaggttttggagccggagacctgc

SEQ ID NO: 2618675 - DNA, 25 bp, Homo sapien
cccccaggaggagtttgtactgcca

SEQ ID NO: 2618676 - DNA, 25 bp, Homo sapien
tattataagtgtcctgcagctagag

SEQ ID NO: 2618677 - DNA, 25 bp, Homo sapien
gacccgggtaggagctcatcttcta

SEQ ID NO: 2618678 - DNA, 25 bp, Homo sapien
tttcgtgcagcttgagacccagaga

SEQ ID NO: 2618679 - DNA, 25 bp, Homo sapien
gccgtgcagctttagaacctgggag

SEQ ID NO: 2618680 - DNA, 25 bp, Homo sapien
ggggctgaagacccgggcaggagct

SEQ ID NO: 2618681 - DNA, 25 bp, Homo sapien
cgtggggctgaagacccgggcagga

SEQ ID NO: 2618682 - DNA, 25 bp, Homo sapien
tcagagggtcgtggggctgaagacc

SEQ ID NO: 2618683 - DNA, 25 bp, Homo sapien
ggtcgtggggctgaagacccgggca

SEQ ID NO: 2618684 - DNA, 25 bp, Homo sapien
cctccttgttttatcaatgccacaa

SEQ ID NO: 2618685 - DNA, 25 bp, Homo sapien
ttgttttatcaatgccacaagtcat

SEQ ID NO: 2618686 - DNA, 25 bp, Homo sapien
tgcctccttgttttatcaatgccac

SEQ ID NO: 2618687 - DNA, 25 bp, Homo sapien
ccttgttttatcaatgccacaagtc

SEQ ID NO: 2618688 - DNA, 25 bp, Homo sapien
atcacctggaacaatcatgctattg

SEQ ID NO: 2618689 - DNA, 25 bp, Homo sapien
aatcacctggaacaatcatgctatt

SEQ ID NO: 2618690 - DNA, 25 bp, Homo sapien
gaatcacctggaacaatcatgctat

SEQ ID NO: 2618691 - DNA, 25 bp, Homo sapien
gactcctctacattgtgtgcgtgcg

SEQ ID NO: 2618692 - DNA, 25 bp, Homo sapien
tcttttgactcctctacattgtgtg

SEQ ID NO: 2618693 - DNA, 25 bp, Homo sapien
ttgactcctctacattgtgtgcgtg

SEQ ID NO: 2618694 - DNA, 25 bp, Homo sapien
ttttgactcctctacattgtgtgcg

SEQ ID NO: 2618695 - DNA, 25 bp, Homo sapien
aaactgcacactgtctacagtgggc

SEQ ID NO: 2618696 - DNA, 25 bp, Homo sapien
gatttttctgcacacttcgtaatac

SEQ ID NO: 2618697 - DNA, 25 bp, Homo sapien
tactgtctgccagctttcaaactgc

SEQ ID NO: 2618698 - DNA, 25 bp, Homo sapien
ccctggagttgcagcatagttatgg

SEQ ID NO: 2618699 - DNA, 25 bp, Homo sapien
gatgttcaggattccagcttgtgga

SEQ ID NO: 2618700 - DNA, 25 bp, Homo sapien
tatcagtcagaaggataggaaacat

SEQ ID NO: 2618701 - DNA, 25 bp, Homo sapien
gaacttaggagcaaattggcatggg

SEQ ID NO: 2618702 - DNA, 25 bp, Homo sapien
gagtctcactattgatatcagtcag

SEQ ID NO: 2618703 - DNA, 25 bp, Homo sapien
gaaagccagagatagacatctatat

SEQ ID NO: 2618704 - DNA, 25 bp, Homo sapien
gaaatagctctaaaagacaatggag

SEQ ID NO: 2618705 - DNA, 25 bp, Homo sapien
ggacagatccttgcatggtaccatt

SEQ ID NO: 2618706 - DNA, 25 bp, Homo sapien
ggtaccatttgttgttctattccat

SEQ ID NO: 2618707 - DNA, 25 bp, Homo sapien
ctgtgactctatggtgttataatga

SEQ ID NO: 2618708 - DNA, 25 bp, Homo sapien
actctatggtgttataatgagactg

SEQ ID NO: 2618709 - DNA, 25 bp, Homo sapien
tgtgactctatggtgttataatgag

SEQ ID NO: 2618710 - DNA, 25 bp, Homo sapien
tgactctatggtgttataatgagac

SEQ ID NO: 2618711 - DNA, 25 bp, Homo sapien
gataaaggcgagagcttggacttct

SEQ ID NO: 2618712 - DNA, 25 bp, Homo sapien
taacacggcatccaacaggactttg

SEQ ID NO: 2618713 - DNA, 25 bp, Homo sapien
cttctgcagtgggtgctaacacggc

SEQ ID NO: 2618714 - DNA, 25 bp, Homo sapien
caggactttgtaatagtagccacac

SEQ ID NO: 2618715 - DNA, 25 bp, Homo sapien
gaattaaacataagtgtacacaaga

SEQ ID NO: 2618716 - DNA, 25 bp, Homo sapien
cattccaagggcagtatgagatttg

SEQ ID NO: 2618717 - DNA, 25 bp, Homo sapien
gttaccacttaacctgagaagaaca

SEQ ID NO: 2618718 - DNA, 25 bp, Homo sapien
tattctctgccagaaagttaccact

SEQ ID NO: 2618719 - DNA, 25 bp, Homo sapien
cctcatatccttcacagaccttatg

SEQ ID NO: 2618720 - DNA, 25 bp, Homo sapien
gtcctcatatccttcacagacctta

SEQ ID NO: 2618721 - DNA, 25 bp, Homo sapien
aacatcgtcctcatatccttcacag

SEQ ID NO: 2618722 - DNA, 25 bp, Homo sapien
ttttgtaaacatcgtcctcatatcc

SEQ ID NO: 2618723 - DNA, 25 bp, Homo sapien
cgatcttggtttttaagactccaca

SEQ ID NO: 2618724 - DNA, 25 bp, Homo sapien
gaaaggaactttgctggtacctcga

SEQ ID NO: 2618725 - DNA, 25 bp, Homo sapien
aatagcccggcatttcttggctcca

SEQ ID NO: 2618726 - DNA, 25 bp, Homo sapien
tattatgacagcttgagaagactaa

SEQ ID NO: 2618727 - DNA, 25 bp, Homo sapien
atatcagtgcattaattagaaaagc

SEQ ID NO: 2618728 - DNA, 25 bp, Homo sapien
ttctggttctaaattccatatcagt

SEQ ID NO: 2618729 - DNA, 25 bp, Homo sapien
ggttctaaattccatatcagtgcat

SEQ ID NO: 2618730 - DNA, 25 bp, Homo sapien
ccatatcagtgcattaattagaaaa

SEQ ID NO: 2618731 - DNA, 25 bp, Homo sapien
aaatcgaagacacaaagtcataagt

SEQ ID NO: 2618732 - DNA, 25 bp, Homo sapien
ctagaaaatcgaagacacaaagtca

SEQ ID NO: 2618733 - DNA, 25 bp, Homo sapien
gaaaatcgaagacacaaagtcataa

SEQ ID NO: 2618734 - DNA, 25 bp, Homo sapien
atcgaagacacaaagtcataagtac

SEQ ID NO: 2618735 - DNA, 25 bp, Homo sapien
gagtagccaggaaaagtacccaata

SEQ ID NO: 2618736 - DNA, 25 bp, Homo sapien
tgcatgcatccaacccactaatgtt

SEQ ID NO: 2618737 - DNA, 25 bp, Homo sapien
tgagaatgcctctctgaacaacacg

SEQ ID NO: 2618738 - DNA, 25 bp, Homo sapien
caatagaagcgtagttcaacaaggg

SEQ ID NO: 2618739 - DNA, 25 bp, Homo sapien
cacgaattgtagcaggaccatggcc

SEQ ID NO: 2618740 - DNA, 25 bp, Homo sapien
tggccatgcagcctaagacttgcct

SEQ ID NO: 2618741 - DNA, 25 bp, Homo sapien
tctggctctgtgattgagttcctgc

SEQ ID NO: 2618742 - DNA, 25 bp, Homo sapien
tgaacaacgtttttgcaaatgagga

SEQ ID NO: 2618743 - DNA, 25 bp, Homo sapien
gcctgataaagccatgattccctgt

SEQ ID NO: 2618744 - DNA, 25 bp, Homo sapien
ggtcctgggcttatcgatcttacac

SEQ ID NO: 2618745 - DNA, 25 bp, Homo sapien
tttctggtccaatcagacggaggcc

SEQ ID NO: 2618746 - DNA, 25 bp, Homo sapien
taaaggatccagtactctttctgcc

SEQ ID NO: 2618747 - DNA, 25 bp, Homo sapien
gctaagtgctcatggtcgacgtcaa

SEQ ID NO: 2618748 - DNA, 25 bp, Homo sapien
caactacgactttgtgttgttgaca

SEQ ID NO: 2618749 - DNA, 25 bp, Homo sapien
tcctgctaagtgctcatggtcgacg

SEQ ID NO: 2618750 - DNA, 25 bp, Homo sapien
agcgtgacacctcgggacggccgca

SEQ ID NO: 2618751 - DNA, 25 bp, Homo sapien
atggatacatgcaagttacaatatt

SEQ ID NO: 2618752 - DNA, 25 bp, Homo sapien
tatggatacatgcaagttacaatat

SEQ ID NO: 2618753 - DNA, 25 bp, Homo sapien
tggatacatgcaagttacaatatta

SEQ ID NO: 2618754 - DNA, 25 bp, Homo sapien
gtatggatacatgcaagttacaata

SEQ ID NO: 2618755 - DNA, 25 bp, Homo sapien
tactataaataacgtataagacact

SEQ ID NO: 2618756 - DNA, 25 bp, Homo sapien
cattgcaatatgaatgtcactacta

SEQ ID NO: 2618757 - DNA, 25 bp, Homo sapien
aaataagcctgtactataaatcaac

SEQ ID NO: 2618758 - DNA, 25 bp, Homo sapien
taatagtttaaacattgcaatatga

SEQ ID NO: 2618759 - DNA, 25 bp, Homo sapien
taattctcttggcaccctcatttta

SEQ ID NO: 2618760 - DNA, 25 bp, Homo sapien
attttatcattgtctatcttatcta

SEQ ID NO: 2618761 - DNA, 25 bp, Homo sapien
ttaattctcttggcaccctcatttt

SEQ ID NO: 2618762 - DNA, 25 bp, Homo sapien
tgtctatcttatctatgtaacccat

SEQ ID NO: 2618763 - DNA, 25 bp, Homo sapien
tctaggctttcaatgatatcctatt

SEQ ID NO: 2618764 - DNA, 25 bp, Homo sapien
acagatttgatatgtttgatgatat

SEQ ID NO: 2618765 - DNA, 25 bp, Homo sapien
catctttcgcatttggagatccaat

SEQ ID NO: 2618766 - DNA, 25 bp, Homo sapien
tgatctataagatcaacagatttga

SEQ ID NO: 2618767 - DNA, 25 bp, Homo sapien
tctttaagagactacagatggctgt

SEQ ID NO: 2618768 - DNA, 25 bp, Homo sapien
tggctgtataggatgtagctgctcc

SEQ ID NO: 2618769 - DNA, 25 bp, Homo sapien
cagagtgtttaactgtcagtggtac

SEQ ID NO: 2618770 - DNA, 25 bp, Homo sapien
taattgactagcactgagaagccag

SEQ ID NO: 2618771 - DNA, 25 bp, Homo sapien
aaacagaaataacgattgaaattct

SEQ ID NO: 2618772 - DNA, 25 bp, Homo sapien
agaaagcattaaaagaagaattcca

SEQ ID NO: 2618773 - DNA, 25 bp, Homo sapien
cagaaataacgattgaaattctgac

SEQ ID NO: 2618774 - DNA, 25 bp, Homo sapien
caaaacagaaataacgattgaaatt

SEQ ID NO: 2618775 - DNA, 25 bp, Homo sapien
cataatataaatgcgaagggtatca

SEQ ID NO: 2618776 - DNA, 25 bp, Homo sapien
ccttccttaatatcgtcataatata

SEQ ID NO: 2618777 - DNA, 25 bp, Homo sapien
gtcataatataaatgcgaagggtat

SEQ ID NO: 2618778 - DNA, 25 bp, Homo sapien
tcttccttccttaatatcgtcataa

SEQ ID NO: 2618779 - DNA, 25 bp, Homo sapien
tctcggtgattaacgatttggtcac

SEQ ID NO: 2618780 - DNA, 25 bp, Homo sapien
caggaaaggccacaacaggtgcctt

SEQ ID NO: 2618781 - DNA, 25 bp, Homo sapien
taattatctcggtgattaacgattt

SEQ ID NO: 2618782 - DNA, 25 bp, Homo sapien
taacgatttggtcactctctttccc

SEQ ID NO: 2618783 - DNA, 25 bp, Homo sapien
tattaggtacatccatcataaagag

SEQ ID NO: 2618784 - DNA, 25 bp, Homo sapien
taatctgaggagcaatcaaatgaag

SEQ ID NO: 2618785 - DNA, 25 bp, Homo sapien
gcagcagttaagtctaattccaaga

SEQ ID NO: 2618786 - DNA, 25 bp, Homo sapien
gagaacagcctggaatttaagaaca

SEQ ID NO: 2618787 - DNA, 25 bp, Homo sapien
ccattggtcattgtcagatctgaga

SEQ ID NO: 2618788 - DNA, 25 bp, Homo sapien
ggccagtggtgatcaagtcatcata

SEQ ID NO: 2618789 - DNA, 25 bp, Homo sapien
tgttaacaagcaagactttttcatc

SEQ ID NO: 2618790 - DNA, 25 bp, Homo sapien
tcagtcctactcagtatccaagatg

SEQ ID NO: 2618791 - DNA, 25 bp, Homo sapien
cgctgaacttcagctttgtgtgcct

SEQ ID NO: 2618792 - DNA, 25 bp, Homo sapien
tgaacttcagctttgtgtgccttaa

SEQ ID NO: 2618793 - DNA, 25 bp, Homo sapien
acttcagctttgtgtgccttaaagg

SEQ ID NO: 2618794 - DNA, 25 bp, Homo sapien
ttcagctttgtgtgccttaaaggtg

SEQ ID NO: 2618795 - DNA, 25 bp, Homo sapien
ttttaaatgccatggacagtctcca

SEQ ID NO: 2618796 - DNA, 25 bp, Homo sapien
catgcttctcatacttctggggatt

SEQ ID NO: 2618797 - DNA, 25 bp, Homo sapien
taaatgccatggacagtctccaccc

SEQ ID NO: 2618798 - DNA, 25 bp, Homo sapien
gcttctcatacttctggggattttc

SEQ ID NO: 2618799 - DNA, 25 bp, Homo sapien
gagatataatatgaccgatgagtga

SEQ ID NO: 2618800 - DNA, 25 bp, Homo sapien
ctgactttctggtcaaggctagaag

SEQ ID NO: 2618801 - DNA, 25 bp, Homo sapien
gaagtagaggctcccattttagctt

SEQ ID NO: 2618802 - DNA, 25 bp, Homo sapien
ggtaatgcgtgcttcatcttgacca

SEQ ID NO: 2618803 - DNA, 25 bp, Homo sapien
gccaattttagggtcacctcctctg

SEQ ID NO: 2618804 - DNA, 25 bp, Homo sapien
tcagtttaggtgtcatgcatgtgta

SEQ ID NO: 2618805 - DNA, 25 bp, Homo sapien
tgtgtacatgttcagtttaggtgtc

SEQ ID NO: 2618806 - DNA, 25 bp, Homo sapien
catgcatgtgtatgccaattttagg

SEQ ID NO: 2618807 - DNA, 25 bp, Homo sapien
tcatggttacaattggtttatctgt

SEQ ID NO: 2618808 - DNA, 25 bp, Homo sapien
ccttcatggttacaattggtttatc

SEQ ID NO: 2618809 - DNA, 25 bp, Homo sapien
tgccttcatggttacaattggttta

SEQ ID NO: 2618810 - DNA, 25 bp, Homo sapien
tggttacaattggtttatctgttac

SEQ ID NO: 2618811 - DNA, 25 bp, Homo sapien
tactgaattcatagatgcttggtcc

SEQ ID NO: 2618812 - DNA, 25 bp, Homo sapien
gcttggtccaacattgggtttctgg

SEQ ID NO: 2618813 - DNA, 25 bp, Homo sapien
catagatgcttggtccaacattggg

SEQ ID NO: 2618814 - DNA, 25 bp, Homo sapien
ttcccattactgaattcatagatgc

SEQ ID NO: 2618815 - DNA, 25 bp, Homo sapien
tccaacccaaacacaaactggatca

SEQ ID NO: 2618816 - DNA, 25 bp, Homo sapien
tatggcttgtgagctgcctttcttg

SEQ ID NO: 2618817 - DNA, 25 bp, Homo sapien
caaacacaaactggatcaatgtata

SEQ ID NO: 2618818 - DNA, 25 bp, Homo sapien
taacaatcctggatatggcttgtga

SEQ ID NO: 2618819 - DNA, 25 bp, Homo sapien
tgcagaacactctgcttaaactgtg

SEQ ID NO: 2618820 - DNA, 25 bp, Homo sapien
cactctgcttaaactgtgcagtcaa

SEQ ID NO: 2618821 - DNA, 25 bp, Homo sapien
aactgtgcagtcaagacagtcacat

SEQ ID NO: 2618822 - DNA, 25 bp, Homo sapien
tgcagtcaagacagtcacatctggc

SEQ ID NO: 2618823 - DNA, 25 bp, Homo sapien
atattgcctaaattttcccacatgg

SEQ ID NO: 2618824 - DNA, 25 bp, Homo sapien
ctctgtgttggtgaccggtttagca

SEQ ID NO: 2618825 - DNA, 25 bp, Homo sapien
gacttccatattgcctaaattttcc

SEQ ID NO: 2618826 - DNA, 25 bp, Homo sapien
gaccggtttagcaccagaactgagt

SEQ ID NO: 2618827 - DNA, 25 bp, Homo sapien
cagaaacgctgaatggaaaccaatc

SEQ ID NO: 2618828 - DNA, 25 bp, Homo sapien
tgcagcgccatcagcggcaatatct

SEQ ID NO: 2618829 - DNA, 25 bp, Homo sapien
cctgcctgtctgagttaaaagtgat

SEQ ID NO: 2618830 - DNA, 25 bp, Homo sapien
tgctcgaagagaaagccacactgag

SEQ ID NO: 2618831 - DNA, 25 bp, Homo sapien
tctcccaattgcaaacagattaagg

SEQ ID NO: 2618832 - DNA, 25 bp, Homo sapien
ggagagctgattaaccgagactaaa

SEQ ID NO: 2618833 - DNA, 25 bp, Homo sapien
acactgggtcgttttctcttatggg

SEQ ID NO: 2618834 - DNA, 25 bp, Homo sapien
cattcgcttgcaaatcattgtgccc

SEQ ID NO: 2618835 - DNA, 25 bp, Homo sapien
caattgcattatctggtaaaaagca

SEQ ID NO: 2618836 - DNA, 25 bp, Homo sapien
tggtaaaaagcaaagtcgttctaga

SEQ ID NO: 2618837 - DNA, 25 bp, Homo sapien
tctggtaaaaagcaaagtcgttcta

SEQ ID NO: 2618838 - DNA, 25 bp, Homo sapien
tcattcaattgcattatctggtaaa

SEQ ID NO: 2618839 - DNA, 25 bp, Homo sapien
tatatatgtactactaaagtgagca

SEQ ID NO: 2618840 - DNA, 25 bp, Homo sapien
ttttatatatgtactactaaagtga

SEQ ID NO: 2618841 - DNA, 25 bp, Homo sapien
ttatatatgtactactaaagtgagc

SEQ ID NO: 2618842 - DNA, 25 bp, Homo sapien
aattttatatatgtactactaaagt

SEQ ID NO: 2618843 - DNA, 25 bp, Homo sapien
atgatgtatgtgttcagcaactgac

SEQ ID NO: 2618844 - DNA, 25 bp, Homo sapien
tttcatgatgtatgtgttcagcaac

SEQ ID NO: 2618845 - DNA, 25 bp, Homo sapien
gcagatgcaaagaccctctgcagac

SEQ ID NO: 2618846 - DNA, 25 bp, Homo sapien
tcatggtgtggtgcaagtgatgctt

SEQ ID NO: 2618847 - DNA, 25 bp, Homo sapien
gatgcaaagaccctctgcagaccta

SEQ ID NO: 2618848 - DNA, 25 bp, Homo sapien
atgcaaagaccctctgcagacctag

SEQ ID NO: 2618849 - DNA, 25 bp, Homo sapien
tggctgcagccgtacatcagccgta

SEQ ID NO: 2618850 - DNA, 25 bp, Homo sapien
cgtacatcagccgtacagtagagta

SEQ ID NO: 2618851 - DNA, 25 bp, Homo sapien
tagagtattttaagacgcagagtac

SEQ ID NO: 2618852 - DNA, 25 bp, Homo sapien
cagccgtacagtagagtattttaag

SEQ ID NO: 2618853 - DNA, 25 bp, Homo sapien
ccttctcttctcaattttattgtca

SEQ ID NO: 2618854 - DNA, 25 bp, Homo sapien
tctcaattttattgtcatacatcat

SEQ ID NO: 2618855 - DNA, 25 bp, Homo sapien
tctcttctcaattttattgtcatac

SEQ ID NO: 2618856 - DNA, 25 bp, Homo sapien
tgccttctcttctcaattttattgt

SEQ ID NO: 2618857 - DNA, 25 bp, Homo sapien
actgccaagattctgttaaactgtg

SEQ ID NO: 2618858 - DNA, 25 bp, Homo sapien
tgaagactctgtggcataagtatga

SEQ ID NO: 2618859 - DNA, 25 bp, Homo sapien
tatatgacagtactctgggctacat

SEQ ID NO: 2618860 - DNA, 25 bp, Homo sapien
ttaactatgcttgtaggactggaaa

SEQ ID NO: 2618861 - DNA, 25 bp, Homo sapien
agcttacttcttgtacttagaacat

SEQ ID NO: 2618862 - DNA, 25 bp, Homo sapien
tagcttacttcttgtacttagaaca

SEQ ID NO: 2618863 - DNA, 25 bp, Homo sapien
acttagaacatcagaatggcatctt

SEQ ID NO: 2618864 - DNA, 25 bp, Homo sapien
tgtacttagaacatcagaatggcat

SEQ ID NO: 2618865 - DNA, 25 bp, Homo sapien
gccaaggcttcactggcatctttgt

SEQ ID NO: 2618866 - DNA, 25 bp, Homo sapien
gaggtagtacagtctgtgtaccaca

SEQ ID NO: 2618867 - DNA, 25 bp, Homo sapien
cacatgctgaaatgccaaggcttca

SEQ ID NO: 2618868 - DNA, 25 bp, Homo sapien
tacagtctgtgtaccacatgctgaa

SEQ ID NO: 2618869 - DNA, 25 bp, Homo sapien
aagcccaaaggctagaactggactc

SEQ ID NO: 2618870 - DNA, 25 bp, Homo sapien
aaagcccaaaggctagaactggact

SEQ ID NO: 2618871 - DNA, 25 bp, Homo sapien
ggctagacattgtactctcaagtgc

SEQ ID NO: 2618872 - DNA, 25 bp, Homo sapien
ctgcttaactcaaaggggctagaca

SEQ ID NO: 2618873 - DNA, 25 bp, Homo sapien
gaagacactttcattttcttttgcc

SEQ ID NO: 2618874 - DNA, 25 bp, Homo sapien
cagaagacactttcattttcttttg

SEQ ID NO: 2618875 - DNA, 25 bp, Homo sapien
aagacactttcattttcttttgcca

SEQ ID NO: 2618876 - DNA, 25 bp, Homo sapien
agacactttcattttcttttgccat

SEQ ID NO: 2618877 - DNA, 25 bp, Homo sapien
cccactagattgaggctgccagctt

SEQ ID NO: 2618878 - DNA, 25 bp, Homo sapien
tgtccccatcgtggcccactagatt

SEQ ID NO: 2618879 - DNA, 25 bp, Homo sapien
cagcttggtgtaagctggtcattta

SEQ ID NO: 2618880 - DNA, 25 bp, Homo sapien
aggaagtacgcttcctcacagctgg

SEQ ID NO: 2618881 - DNA, 25 bp, Homo sapien
attgctcccaaattttgtgaattca

SEQ ID NO: 2618882 - DNA, 25 bp, Homo sapien
ctctaaaggaaattgctcccaaatt

SEQ ID NO: 2618883 - DNA, 25 bp, Homo sapien
aaggaaattgctcccaaattttgtg

SEQ ID NO: 2618884 - DNA, 25 bp, Homo sapien
gaaattgctcccaaattttgtgaat

SEQ ID NO: 2618885 - DNA, 25 bp, Homo sapien
ttccacatccaaagctttaggaatt

SEQ ID NO: 2618886 - DNA, 25 bp, Homo sapien
cttccacatccaaagctttaggaat

SEQ ID NO: 2618887 - DNA, 25 bp, Homo sapien
gcttccacatccaaagctttaggaa

SEQ ID NO: 2618888 - DNA, 25 bp, Homo sapien
ctgaatgcaagaatgaatgagtaaa

SEQ ID NO: 2618889 - DNA, 25 bp, Homo sapien
atgagtaaatgatctgctgtcacat

SEQ ID NO: 2618890 - DNA, 25 bp, Homo sapien
tgactgctgaatgcaagaatgaatg

SEQ ID NO: 2618891 - DNA, 25 bp, Homo sapien
tgaatgagtaaatgatctgctgtca

SEQ ID NO: 2618892 - DNA, 25 bp, Homo sapien
taagtttaataacctgtctcctcaa

SEQ ID NO: 2618893 - DNA, 25 bp, Homo sapien
cctgcctgggttgataaactattaa

SEQ ID NO: 2618894 - DNA, 25 bp, Homo sapien
gggcccaagtcaatgctaacataga

SEQ ID NO: 2618895 - DNA, 25 bp, Homo sapien
ttttagagataagctgtctgggtgg

SEQ ID NO: 2618896 - DNA, 25 bp, Homo sapien
tatttaggcacacgggcacattgaa

SEQ ID NO: 2618897 - DNA, 25 bp, Homo sapien
tctcaagccccgtgtttgggtgcca

SEQ ID NO: 2618898 - DNA, 25 bp, Homo sapien
gagcagggctctattgggcaaaaag

SEQ ID NO: 2618899 - DNA, 25 bp, Homo sapien
ttcacacgaccaggaatatttaggc

SEQ ID NO: 2618900 - DNA, 25 bp, Homo sapien
gttaagaaccctgtatgtggactgt

SEQ ID NO: 2618901 - DNA, 25 bp, Homo sapien
gacaaacatttgaggccagttttcc

SEQ ID NO: 2618902 - DNA, 25 bp, Homo sapien
cacatttccaatcaacgcctggtaa

SEQ ID NO: 2618903 - DNA, 25 bp, Homo sapien
catcagttctgcaagttgagcttga

SEQ ID NO: 2618904 - DNA, 25 bp, Homo sapien
aattatttctacgtaggccctctag

SEQ ID NO: 2618905 - DNA, 25 bp, Homo sapien
ccaagagcatatgatatctgggcct

SEQ ID NO: 2618906 - DNA, 25 bp, Homo sapien
ggccctctagattggctttcatgaa

SEQ ID NO: 2618907 - DNA, 25 bp, Homo sapien
cataataggagtgtgttgcttgcaa

SEQ ID NO: 2618908 - DNA, 25 bp, Homo sapien
agagattgttggttggttcacaggc

SEQ ID NO: 2618909 - DNA, 25 bp, Homo sapien
ttctcttttgtcctttctgagctgc

SEQ ID NO: 2618910 - DNA, 25 bp, Homo sapien
ccattctcttttgtcctttctgagc

SEQ ID NO: 2618911 - DNA, 25 bp, Homo sapien
cattctcttttgtcctttctgagct

SEQ ID NO: 2618912 - DNA, 25 bp, Homo sapien
aggtacacctttttatctgcctagg

SEQ ID NO: 2618913 - DNA, 25 bp, Homo sapien
tgtgtgacgggttggaaattttcca

SEQ ID NO: 2618914 - DNA, 25 bp, Homo sapien
tgtaaacacttgtgtgacgggttgg

SEQ ID NO: 2618915 - DNA, 25 bp, Homo sapien
aattgcttcctattgtcagggaagc

SEQ ID NO: 2618916 - DNA, 25 bp, Homo sapien
tccactgtgggcatacccagacaag

SEQ ID NO: 2618917 - DNA, 25 bp, Homo sapien
tgacatccacgtggctccatccact

SEQ ID NO: 2618918 - DNA, 25 bp, Homo sapien
agatcgattcccacattaccacagg

SEQ ID NO: 2618919 - DNA, 25 bp, Homo sapien
ggctcctcccctgcataaggcatga

SEQ ID NO: 2618920 - DNA, 25 bp, Homo sapien
aaaacctaggttctcgtcacatgac

SEQ ID NO: 2618921 - DNA, 25 bp, Homo sapien
aaatttaggaatgcagacatattga

SEQ ID NO: 2618922 - DNA, 25 bp, Homo sapien
tctctagggctgtgaagactttttc

SEQ ID NO: 2618923 - DNA, 25 bp, Homo sapien
tctagtcatggtttctgacaatcca

SEQ ID NO: 2618924 - DNA, 25 bp, Homo sapien
cataaagcagtacttatgcttttcc

SEQ ID NO: 2618925 - DNA, 25 bp, Homo sapien
taaagcagtacttatgcttttcctc

SEQ ID NO: 2618926 - DNA, 25 bp, Homo sapien
aagcataaagcagtacttatgcttt

SEQ ID NO: 2618927 - DNA, 25 bp, Homo sapien
aaaagcataaagcagtacttatgct

SEQ ID NO: 2618928 - DNA, 25 bp, Homo sapien
cataatttactgatatttgtagact

SEQ ID NO: 2618929 - DNA, 25 bp, Homo sapien
taccattagaccgttttttctcata

SEQ ID NO: 2618930 - DNA, 25 bp, Homo sapien
ccttagcagtctactttgaatcagt

SEQ ID NO: 2618931 - DNA, 25 bp, Homo sapien
tgtagactcttattacttattgtcc

SEQ ID NO: 2618932 - DNA, 25 bp, Homo sapien
gatgtctcggaataggctaggaagc

SEQ ID NO: 2618933 - DNA, 25 bp, Homo sapien
tttccagctgcataaaggcattgtc

SEQ ID NO: 2618934 - DNA, 25 bp, Homo sapien
tgcactctaaaacaagatgtctcgg

SEQ ID NO: 2618935 - DNA, 25 bp, Homo sapien
ggctacaggatacctaccctctgag

SEQ ID NO: 2618936 - DNA, 25 bp, Homo sapien
ctggcgcaatttcccaaagttgtgg

SEQ ID NO: 2618937 - DNA, 25 bp, Homo sapien
gagagtatataaatgccagggcaaa

SEQ ID NO: 2618938 - DNA, 25 bp, Homo sapien
catgcatgtttctatgatgtttgag

SEQ ID NO: 2618939 - DNA, 25 bp, Homo sapien
ttgctctaagagaggtagaagagtg

SEQ ID NO: 2618940 - DNA, 25 bp, Homo sapien
gattggcactcactcagattcacta

SEQ ID NO: 2618941 - DNA, 25 bp, Homo sapien
tctaccgtggtgttgatgaaaattc

SEQ ID NO: 2618942 - DNA, 25 bp, Homo sapien
tagctcgaggactatgttaactctc

SEQ ID NO: 2618943 - DNA, 25 bp, Homo sapien
tgtctgacatagtccaaagagactg

SEQ ID NO: 2618944 - DNA, 25 bp, Homo sapien
caaaatagccggatagttaaatatg

SEQ ID NO: 2618945 - DNA, 25 bp, Homo sapien
gaatagaaatgacagatgtgtgaga

SEQ ID NO: 2618946 - DNA, 25 bp, Homo sapien
atctccaaaatagccggatagttaa

SEQ ID NO: 2618947 - DNA, 25 bp, Homo sapien
caatctccaaaatagccggatagtt

SEQ ID NO: 2618948 - DNA, 25 bp, Homo sapien
tcatgtgctaatttacttcttccag

SEQ ID NO: 2618949 - DNA, 25 bp, Homo sapien
ctttaagagttggtaagtatcagtg

SEQ ID NO: 2618950 - DNA, 25 bp, Homo sapien
tggactccaggaattgcacaaataa

SEQ ID NO: 2618951 - DNA, 25 bp, Homo sapien
ggataccctagatctaagctttaag

SEQ ID NO: 2618952 - DNA, 25 bp, Homo sapien
acactagccatctctagtaaatata

SEQ ID NO: 2618953 - DNA, 25 bp, Homo sapien
attcacgtaggcctaaattcacaaa

SEQ ID NO: 2618954 - DNA, 25 bp, Homo sapien
gaataataattagaggatgctggcc

SEQ ID NO: 2618955 - DNA, 25 bp, Homo sapien
ggttggtagatagtaacatcatagt

SEQ ID NO: 2618956 - DNA, 25 bp, Homo sapien
gagtgatacacttcagcgtggaatg

SEQ ID NO: 2618957 - DNA, 25 bp, Homo sapien
gatgtgtgcccaccaagtgtgtgca

SEQ ID NO: 2618958 - DNA, 25 bp, Homo sapien
ctttggtgactaagttgaagggagt

SEQ ID NO: 2618959 - DNA, 25 bp, Homo sapien
gttcctcttgttgcaactccacagg

SEQ ID NO: 2618960 - DNA, 25 bp, Homo sapien
taatggaggctgactttcctcatgc

SEQ ID NO: 2618961 - DNA, 25 bp, Homo sapien
tctcaaaatgccatccccacatgag

SEQ ID NO: 2618962 - DNA, 25 bp, Homo sapien
gttctcaccagatcttatggtctaa

SEQ ID NO: 2618963 - DNA, 25 bp, Homo sapien
gagaggacctcaatatgttccttta

SEQ ID NO: 2618964 - DNA, 25 bp, Homo sapien
tatgtgtagatgctggactttgtca

SEQ ID NO: 2618965 - DNA, 25 bp, Homo sapien
ccatgctagaacctccaatgcaaga

SEQ ID NO: 2618966 - DNA, 25 bp, Homo sapien
tttcttactcaattgcccatgctag

SEQ ID NO: 2618967 - DNA, 25 bp, Homo sapien
agcagtgggtttttagtagatggcc

SEQ ID NO: 2618968 - DNA, 25 bp, Homo sapien
gactgtttcagggtcaacacaactg

SEQ ID NO: 2618969 - DNA, 25 bp, Homo sapien
tctcagttgtaaagaaggatcttcc

SEQ ID NO: 2618970 - DNA, 25 bp, Homo sapien
gaatgcaagcaccattggaaactgg

SEQ ID NO: 2618971 - DNA, 25 bp, Homo sapien
gacacagagccatgtgaatgcaagc

SEQ ID NO: 2618972 - DNA, 25 bp, Homo sapien
ccacagctttctggtcaatctgaag

SEQ ID NO: 2618973 - DNA, 25 bp, Homo sapien
tgtgctcttgggtagatcccacagc

SEQ ID NO: 2618974 - DNA, 25 bp, Homo sapien
gagtatatattctctgctagtccca

SEQ ID NO: 2618975 - DNA, 25 bp, Homo sapien
cagactttgaatgtgaaggtcaccc

SEQ ID NO: 2618976 - DNA, 25 bp, Homo sapien
gggcaacaattgctcattagaatgg

SEQ ID NO: 2618977 - DNA, 25 bp, Homo sapien
gatcgtactgtctgaaaagcccaac

SEQ ID NO: 2618978 - DNA, 25 bp, Homo sapien
ttggtgtatttctgcccagctaggt

SEQ ID NO: 2618979 - DNA, 25 bp, Homo sapien
ccagctaggttatgtcttgcaggtg

SEQ ID NO: 2618980 - DNA, 25 bp, Homo sapien
tcagtagaaagtcaccactcataca

SEQ ID NO: 2618981 - DNA, 25 bp, Homo sapien
ggccctgactcaatcagtagaaagt

SEQ ID NO: 2618982 - DNA, 25 bp, Homo sapien
aaggttgaaaccaggccctgactca

SEQ ID NO: 2618983 - DNA, 25 bp, Homo sapien
gaaagtcaccactcatacaaggtga

SEQ ID NO: 2618984 - DNA, 25 bp, Homo sapien
gccgataaggcgtccgctccttctt

SEQ ID NO: 2618985 - DNA, 25 bp, Homo sapien
cttcttccctgctactttgcgtgca

SEQ ID NO: 2618986 - DNA, 25 bp, Homo sapien
ttccctgctactttgcgtgcaggcc

SEQ ID NO: 2618987 - DNA, 25 bp, Homo sapien
ggatgtagcaatagtgcagagccga

SEQ ID NO: 2618988 - DNA, 25 bp, Homo sapien
tcaaactcaaggtctatagtccact

SEQ ID NO: 2618989 - DNA, 25 bp, Homo sapien
tatcaattcttacggtgcaggtgac

SEQ ID NO: 2618990 - DNA, 25 bp, Homo sapien
gagaaattgaacgtgaaatacccca

SEQ ID NO: 2618991 - DNA, 25 bp, Homo sapien
cttattcatcgatgtggaaggagaa

SEQ ID NO: 2618992 - DNA, 25 bp, Homo sapien
ttgagtgtcttatgatgaaatggcc

SEQ ID NO: 2618993 - DNA, 25 bp, Homo sapien
tctgagtttccacaatgaagggagg

SEQ ID NO: 2618994 - DNA, 25 bp, Homo sapien
cattaactagacagcaaatcacacc

SEQ ID NO: 2618995 - DNA, 25 bp, Homo sapien
aaatcacaccagttgatgaggctag

SEQ ID NO: 2618996 - DNA, 25 bp, Homo sapien
aaagaattacaaatcccaaatatat

SEQ ID NO: 2618997 - DNA, 25 bp, Homo sapien
tggaggacaaagaattacaaatccc

SEQ ID NO: 2618998 - DNA, 25 bp, Homo sapien
cttggaggacaaagaattacaaatc

SEQ ID NO: 2618999 - DNA, 25 bp, Homo sapien
gaggacaaagaattacaaatcccaa

SEQ ID NO: 2619000 - DNA, 25 bp, Homo sapien
tccagaacagcttgtattttcccct

SEQ ID NO: 2619001 - DNA, 25 bp, Homo sapien
ctgctttctttcaaccgctccagaa

SEQ ID NO: 2619002 - DNA, 25 bp, Homo sapien
aatgttcatttaactcaagcttctc

SEQ ID NO: 2619003 - DNA, 25 bp, Homo sapien
tattttcccctcactgcattggata

SEQ ID NO: 2619004 - DNA, 25 bp, Homo sapien
tgtatccttttgtactgtatctgtt

SEQ ID NO: 2619005 - DNA, 25 bp, Homo sapien
tttaagtcactttcagtgtttcctg

SEQ ID NO: 2619006 - DNA, 25 bp, Homo sapien
gtatctgtttaagtcactttcagtg

SEQ ID NO: 2619007 - DNA, 25 bp, Homo sapien
tttgtactgtatctgtttaagtcac

SEQ ID NO: 2619008 - DNA, 25 bp, Homo sapien
gacacacggtatgattttcctcagc

SEQ ID NO: 2619009 - DNA, 25 bp, Homo sapien
aattgaaattccaagagactgaggc

SEQ ID NO: 2619010 - DNA, 25 bp, Homo sapien
gttccctgctatctgcatagggcca

SEQ ID NO: 2619011 - DNA, 25 bp, Homo sapien
gaagggagagaactgcccagcatac

SEQ ID NO: 2619012 - DNA, 25 bp, Homo sapien
ggaaagctggctaatcacttcaagc

SEQ ID NO: 2619013 - DNA, 25 bp, Homo sapien
tggaaagctggctaatcacttcaag

SEQ ID NO: 2619014 - DNA, 25 bp, Homo sapien
ctggaaagctggctaatcacttcaa

SEQ ID NO: 2619015 - DNA, 25 bp, Homo sapien
gaaagctggctaatcacttcaagca

SEQ ID NO: 2619016 - DNA, 25 bp, Homo sapien
ggtgattctctaggttttatccctg

SEQ ID NO: 2619017 - DNA, 25 bp, Homo sapien
gattctctaggttttatccctgaag

SEQ ID NO: 2619018 - DNA, 25 bp, Homo sapien
ctgctgctggctagcctgagtgtag

SEQ ID NO: 2619019 - DNA, 25 bp, Homo sapien
gcctgagtgtaggttatgacaacct

SEQ ID NO: 2619020 - DNA, 25 bp, Homo sapien
atgaagactccatgtgaagaatccc

SEQ ID NO: 2619021 - DNA, 25 bp, Homo sapien
gaagactccatgtgaagaatcccaa

SEQ ID NO: 2619022 - DNA, 25 bp, Homo sapien
agactccatgtgaagaatcccaaac

SEQ ID NO: 2619023 - DNA, 25 bp, Homo sapien
tggaatgaagactccatgtgaagaa

SEQ ID NO: 2619024 - DNA, 25 bp, Homo sapien
tgtccttgtagtcacacccatgtgt

SEQ ID NO: 2619025 - DNA, 25 bp, Homo sapien
cagcaaaagcttgaaaggtgtggcc

SEQ ID NO: 2619026 - DNA, 25 bp, Homo sapien
tgtagattgttacagaagtagcccc

SEQ ID NO: 2619027 - DNA, 25 bp, Homo sapien
cctcggtgattgagatattggcaga

SEQ ID NO: 2619028 - DNA, 25 bp, Homo sapien
tattaaaagttctctgtcattctca

SEQ ID NO: 2619029 - DNA, 25 bp, Homo sapien
ttatattaaaagttctctgtcattc

SEQ ID NO: 2619030 - DNA, 25 bp, Homo sapien
tatattaaaagttctctgtcattct

SEQ ID NO: 2619031 - DNA, 25 bp, Homo sapien
attaaaagttctctgtcattctcac

SEQ ID NO: 2619032 - DNA, 25 bp, Homo sapien
tgtgcccatatctgggataaagcag

SEQ ID NO: 2619033 - DNA, 25 bp, Homo sapien
gaaagcttgggcattacttagctca

SEQ ID NO: 2619034 - DNA, 25 bp, Homo sapien
ggccacagctcctcaactctgaaat

SEQ ID NO: 2619035 - DNA, 25 bp, Homo sapien
taaaaatgaatattcaccccacagc

SEQ ID NO: 2619036 - DNA, 25 bp, Homo sapien
aacactgacacccatacatattggg

SEQ ID NO: 2619037 - DNA, 25 bp, Homo sapien
caagtgttcaatacttgtatctagt

SEQ ID NO: 2619038 - DNA, 25 bp, Homo sapien
aaatggtactaccatctgaatttcc

SEQ ID NO: 2619039 - DNA, 25 bp, Homo sapien
attagttttatggtcttatcaaggc

SEQ ID NO: 2619040 - DNA, 25 bp, Homo sapien
aggcagccaatgtggtactaaagca

SEQ ID NO: 2619041 - DNA, 25 bp, Homo sapien
catggtgtgatggagtagcttcatc

SEQ ID NO: 2619042 - DNA, 25 bp, Homo sapien
tctatatcatgttgattctcactca

SEQ ID NO: 2619043 - DNA, 25 bp, Homo sapien
gcattttccatctatatcatgttga

SEQ ID NO: 2619044 - DNA, 25 bp, Homo sapien
gacctgcagttactcttgttttcaa

SEQ ID NO: 2619045 - DNA, 25 bp, Homo sapien
cacatctttacgtagtaccatctga

SEQ ID NO: 2619046 - DNA, 25 bp, Homo sapien
tgcggaaaagtccactgtcccctta

SEQ ID NO: 2619047 - DNA, 25 bp, Homo sapien
catattttggtccttaacttgcgga

SEQ ID NO: 2619048 - DNA, 25 bp, Homo sapien
tatttctggtggacgagtggccatg

SEQ ID NO: 2619049 - DNA, 25 bp, Homo sapien
tttctggtggacgagtggccatgca

SEQ ID NO: 2619050 - DNA, 25 bp, Homo sapien
agttttatttctggtggacgagtgg

SEQ ID NO: 2619051 - DNA, 25 bp, Homo sapien
ctaggaataggtgttgagttttatt

SEQ ID NO: 2619052 - DNA, 25 bp, Homo sapien
gtggctgaggggtcctcacaatcaa

SEQ ID NO: 2619053 - DNA, 25 bp, Homo sapien
tcccacaatgggttacttcagatcc

SEQ ID NO: 2619054 - DNA, 25 bp, Homo sapien
tggctaatcaagtccatctctcctt

SEQ ID NO: 2619055 - DNA, 25 bp, Homo sapien
atgggttacttcagatcctgcagga

SEQ ID NO: 2619056 - DNA, 25 bp, Homo sapien
aaacattgtcccacaatgggttact

SEQ ID NO: 2619057 - DNA, 25 bp, Homo sapien
tttgaagtctcacaacagagtgtct

SEQ ID NO: 2619058 - DNA, 25 bp, Homo sapien
tgttaaccaccacacatatcaagcg

SEQ ID NO: 2619059 - DNA, 25 bp, Homo sapien
tacagcttgcagtctatggacaaag

SEQ ID NO: 2619060 - DNA, 25 bp, Homo sapien
cagagtgtctgtaagctcaggagga

SEQ ID NO: 2619061 - DNA, 25 bp, Homo sapien
ttttcacagactctttagggttctc

SEQ ID NO: 2619062 - DNA, 25 bp, Homo sapien
ggttctctgggtacagaatcatatc

SEQ ID NO: 2619063 - DNA, 25 bp, Homo sapien
acattactgaagttatcggtcccag

SEQ ID NO: 2619064 - DNA, 25 bp, Homo sapien
gattctttaattcacgagcatggaa

SEQ ID NO: 2619065 - DNA, 25 bp, Homo sapien
gaagccaacttgttcataagggatg

SEQ ID NO: 2619066 - DNA, 25 bp, Homo sapien
gctatcagaataatgctggccccac

SEQ ID NO: 2619067 - DNA, 25 bp, Homo sapien
gaattttaccaaagatcttttctgc

SEQ ID NO: 2619068 - DNA, 25 bp, Homo sapien
ttcaaggaaattggcctgatgtttt

SEQ ID NO: 2619069 - DNA, 25 bp, Homo sapien
tgtagatgttgtatttgagcataga

SEQ ID NO: 2619070 - DNA, 25 bp, Homo sapien
ctgtagatgttgtatttgagcatag

SEQ ID NO: 2619071 - DNA, 25 bp, Homo sapien
ttccatagcataaaatgtagtaagg

SEQ ID NO: 2619072 - DNA, 25 bp, Homo sapien
catagcataaaatgtagtaagggtg

SEQ ID NO: 2619073 - DNA, 25 bp, Homo sapien
cttgttcttttttgagacattttca

SEQ ID NO: 2619074 - DNA, 25 bp, Homo sapien
cttttttgagacattttcaaaatgt

SEQ ID NO: 2619075 - DNA, 25 bp, Homo sapien
tttcaaaatgttttttcacctgcat

SEQ ID NO: 2619076 - DNA, 25 bp, Homo sapien
tgttcttttttgagacattttcaaa

SEQ ID NO: 2619077 - DNA, 25 bp, Homo sapien
tccaggggctggatgtggtaacagt

SEQ ID NO: 2619078 - DNA, 25 bp, Homo sapien
aatgccgactttcctgtgcttgtac

SEQ ID NO: 2619079 - DNA, 25 bp, Homo sapien
gccgactttcctgtgcttgtaccca

SEQ ID NO: 2619080 - DNA, 25 bp, Homo sapien
ctaatgccgactttcctgtgcttgt

SEQ ID NO: 2619081 - DNA, 25 bp, Homo sapien
ggaataagacctgtccatattgagt

SEQ ID NO: 2619082 - DNA, 25 bp, Homo sapien
cataccctttcgtaccttttgagag

SEQ ID NO: 2619083 - DNA, 25 bp, Homo sapien
aagggatccaaatcctctgatgtaa

SEQ ID NO: 2619084 - DNA, 25 bp, Homo sapien
tgtgactttaacgtatctgtccaaa

SEQ ID NO: 2619085 - DNA, 25 bp, Homo sapien
cctgaactttcacatctggagtatg

SEQ ID NO: 2619086 - DNA, 25 bp, Homo sapien
caaagaatagggtaatcctgaactt

SEQ ID NO: 2619087 - DNA, 25 bp, Homo sapien
ctggagtatgattcccgaaaactga

SEQ ID NO: 2619088 - DNA, 25 bp, Homo sapien
aaaactgagtctggactctgagctc

SEQ ID NO: 2619089 - DNA, 25 bp, Homo sapien
gaaaggtacaggtccagctttaatc

SEQ ID NO: 2619090 - DNA, 25 bp, Homo sapien
ttcattctataggttatctgtttgc

SEQ ID NO: 2619091 - DNA, 25 bp, Homo sapien
caaaaattgtttgccaaggccaaca

SEQ ID NO: 2619092 - DNA, 25 bp, Homo sapien
caaagtccattgaatatatacacca

SEQ ID NO: 2619093 - DNA, 25 bp, Homo sapien
gcatagtctggtatcaaccctctct

SEQ ID NO: 2619094 - DNA, 25 bp, Homo sapien
taggtcttgccagtagctgtctgct

SEQ ID NO: 2619095 - DNA, 25 bp, Homo sapien
aaccctctcttctggctactcacca

SEQ ID NO: 2619096 - DNA, 25 bp, Homo sapien
acctttctttatatgcatagtctgg

SEQ ID NO: 2619097 - DNA, 25 bp, Homo sapien
cacttgccaggtgaaactttcttct

SEQ ID NO: 2619098 - DNA, 25 bp, Homo sapien
tcacttgccaggtgaaactttcttc

SEQ ID NO: 2619099 - DNA, 25 bp, Homo sapien
acttgccaggtgaaactttcttctc

SEQ ID NO: 2619100 - DNA, 25 bp, Homo sapien
ttgccaggtgaaactttcttctcct

SEQ ID NO: 2619101 - DNA, 25 bp, Homo sapien
tgcatattgtgcctgatactccatt

SEQ ID NO: 2619102 - DNA, 25 bp, Homo sapien
gtgcatattgtgcctgatactccat

SEQ ID NO: 2619103 - DNA, 25 bp, Homo sapien
tggaaatgcagcgaggcatatagtt

SEQ ID NO: 2619104 - DNA, 25 bp, Homo sapien
agcaggtttcccggtggtaattgtg

SEQ ID NO: 2619105 - DNA, 25 bp, Homo sapien
cagcgaggcatatagtttgagtgac

SEQ ID NO: 2619106 - DNA, 25 bp, Homo sapien
gaggcatatagtttgagtgacccat

SEQ ID NO: 2619107 - DNA, 25 bp, Homo sapien
tctgccagttaagttctgccaccaa

SEQ ID NO: 2619108 - DNA, 25 bp, Homo sapien
aaaatatatgtttctgccagttaag

SEQ ID NO: 2619109 - DNA, 25 bp, Homo sapien
taagttctgccaccaaattgttgtt

SEQ ID NO: 2619110 - DNA, 25 bp, Homo sapien
tgccaccaaattgttgtttaaacca

SEQ ID NO: 2619111 - DNA, 25 bp, Homo sapien
ggcaatttccgtcttgccagcctca

SEQ ID NO: 2619112 - DNA, 25 bp, Homo sapien
ggaatgttagtgaactcctccacta

SEQ ID NO: 2619113 - DNA, 25 bp, Homo sapien
gccagcctcaccctgtggaatgtta

SEQ ID NO: 2619114 - DNA, 25 bp, Homo sapien
cctgtttcctttacaccagaggagg

SEQ ID NO: 2619115 - DNA, 25 bp, Homo sapien
taagtgtatgctagccagcttccca

SEQ ID NO: 2619116 - DNA, 25 bp, Homo sapien
ttaagtgtatgctagccagcttccc

SEQ ID NO: 2619117 - DNA, 25 bp, Homo sapien
agcagcacgttggctttgtcatcca

SEQ ID NO: 2619118 - DNA, 25 bp, Homo sapien
gcagcacgttggctttgtcatccat

SEQ ID NO: 2619119 - DNA, 25 bp, Homo sapien
cagcagcacgttggctttgtcatcc

SEQ ID NO: 2619120 - DNA, 25 bp, Homo sapien
caggcaagtggcatcctaaattgat

SEQ ID NO: 2619121 - DNA, 25 bp, Homo sapien
tctggatgctgggaatctggtttgc

SEQ ID NO: 2619122 - DNA, 25 bp, Homo sapien
tctggtttgcccacataatgcatac

SEQ ID NO: 2619123 - DNA, 25 bp, Homo sapien
tcttggcatcaagcactctgcatat

SEQ ID NO: 2619124 - DNA, 25 bp, Homo sapien
cagtgaggagggtagccccaagcat

SEQ ID NO: 2619125 - DNA, 25 bp, Homo sapien
caagttgcaggccaacagtgaggag

SEQ ID NO: 2619126 - DNA, 25 bp, Homo sapien
caacagtgaggagggtagccccaag

SEQ ID NO: 2619127 - DNA, 25 bp, Homo sapien
gccaacagtgaggagggtagcccca

SEQ ID NO: 2619128 - DNA, 25 bp, Homo sapien
tcctgtgggcctttgaaattccttg

SEQ ID NO: 2619129 - DNA, 25 bp, Homo sapien
tcttgggtagcgaattggagttata

SEQ ID NO: 2619130 - DNA, 25 bp, Homo sapien
tctccacatttattcgcatctcagg

SEQ ID NO: 2619131 - DNA, 25 bp, Homo sapien
cattgaaaggagttgatagtagttc

SEQ ID NO: 2619132 - DNA, 25 bp, Homo sapien
tttgcttgagaaatatgaatagacg

SEQ ID NO: 2619133 - DNA, 25 bp, Homo sapien
gcttctctccactattgcgatagtc

SEQ ID NO: 2619134 - DNA, 25 bp, Homo sapien
tgcgatagtcctaatacagttacct

SEQ ID NO: 2619135 - DNA, 25 bp, Homo sapien
aatacagttacctttgtccagtgca

SEQ ID NO: 2619136 - DNA, 25 bp, Homo sapien
tattgctagttggattcctcttggt

SEQ ID NO: 2619137 - DNA, 25 bp, Homo sapien
ctgcttctctcggcgtctctggttt

SEQ ID NO: 2619138 - DNA, 25 bp, Homo sapien
tgctagttggattcctcttggtttc

SEQ ID NO: 2619139 - DNA, 25 bp, Homo sapien
tggttttgacagtgacaataccaga

SEQ ID NO: 2619140 - DNA, 25 bp, Homo sapien
ggcattgcatatgcgaaacagcagg

SEQ ID NO: 2619141 - DNA, 25 bp, Homo sapien
gggttcttgattgactttggggcta

SEQ ID NO: 2619142 - DNA, 25 bp, Homo sapien
tgactttggggctaataccaggaaa

SEQ ID NO: 2619143 - DNA, 25 bp, Homo sapien
cactttggcattgcatatgcgaaac

SEQ ID NO: 2619144 - DNA, 25 bp, Homo sapien
ggatctcttgttctatgtagatcct

SEQ ID NO: 2619145 - DNA, 25 bp, Homo sapien
ggtacttgttcctcttacgtggctg

SEQ ID NO: 2619146 - DNA, 25 bp, Homo sapien
taaggatcttaaaactagccagtgc

SEQ ID NO: 2619147 - DNA, 25 bp, Homo sapien
tgccataaggccagtagtgttactt

SEQ ID NO: 2619148 - DNA, 25 bp, Homo sapien
tacttgtcttcttacagattaaggc

SEQ ID NO: 2619149 - DNA, 25 bp, Homo sapien
cctttgtgctgaatttgacctgtta

SEQ ID NO: 2619150 - DNA, 25 bp, Homo sapien
gacctgttacactgataaacacaat

SEQ ID NO: 2619151 - DNA, 25 bp, Homo sapien
agagactctattcccttaatgtgca

SEQ ID NO: 2619152 - DNA, 25 bp, Homo sapien
tttttccattcccatacctttgtgc

SEQ ID NO: 2619153 - DNA, 25 bp, Homo sapien
gcatattcaatttctcgatggtgtc

SEQ ID NO: 2619154 - DNA, 25 bp, Homo sapien
ttatttctgtggttactagtgcttt

SEQ ID NO: 2619155 - DNA, 25 bp, Homo sapien
attatttctgtggttactagtgctt

SEQ ID NO: 2619156 - DNA, 25 bp, Homo sapien
atttgcaaacattgtacattgcata

SEQ ID NO: 2619157 - DNA, 25 bp, Homo sapien
ttaaactgaatttctccacttctat

SEQ ID NO: 2619158 - DNA, 25 bp, Homo sapien
taaactgaatttctccacttctata

SEQ ID NO: 2619159 - DNA, 25 bp, Homo sapien
aataactctaacaaattctattagg

SEQ ID NO: 2619160 - DNA, 25 bp, Homo sapien
tcttgatactccaaaaattccaagg

SEQ ID NO: 2619161 - DNA, 25 bp, Homo sapien
tccagattcttgatactccaaaaat

SEQ ID NO: 2619162 - DNA, 25 bp, Homo sapien
ctctaacaaattctattaggatatc

SEQ ID NO: 2619163 - DNA, 25 bp, Homo sapien
tggaccccatggaagttagctgaat

SEQ ID NO: 2619164 - DNA, 25 bp, Homo sapien
cataaaggacttgaagtggttacca

SEQ ID NO: 2619165 - DNA, 25 bp, Homo sapien
tgaagtggttaccagtgataagagg

SEQ ID NO: 2619166 - DNA, 25 bp, Homo sapien
ctcaagactcaggtggaccccatgg

SEQ ID NO: 2619167 - DNA, 25 bp, Homo sapien
ctggatggtgggctcaagaagctaa

SEQ ID NO: 2619168 - DNA, 25 bp, Homo sapien
tatgatattctttgctctcaggaga

SEQ ID NO: 2619169 - DNA, 25 bp, Homo sapien
tggttgccaccatctaaaactctgg

SEQ ID NO: 2619170 - DNA, 25 bp, Homo sapien
gaattaacaggtagagtcctctaag

SEQ ID NO: 2619171 - DNA, 25 bp, Homo sapien
tctgttggggaatccttaaggacat

SEQ ID NO: 2619172 - DNA, 25 bp, Homo sapien
ccttaaggacataagtgttgtagga

SEQ ID NO: 2619173 - DNA, 25 bp, Homo sapien
ctggagttgtatctgttggggaatc

SEQ ID NO: 2619174 - DNA, 25 bp, Homo sapien
atccttaaggacataagtgttgtag

SEQ ID NO: 2619175 - DNA, 25 bp, Homo sapien
tgcacaccctgtgatctttccgggc

SEQ ID NO: 2619176 - DNA, 25 bp, Homo sapien
taatgtttctccgtcattctgtgaa

SEQ ID NO: 2619177 - DNA, 25 bp, Homo sapien
taatttccccttctatgttagtgct

SEQ ID NO: 2619178 - DNA, 25 bp, Homo sapien
tgaatagtcgtagtttcctgtccct

SEQ ID NO: 2619179 - DNA, 25 bp, Homo sapien
gaaatttatccctcataattctcca

SEQ ID NO: 2619180 - DNA, 25 bp, Homo sapien
gtcctgttgggcagctttaacaaaa

SEQ ID NO: 2619181 - DNA, 25 bp, Homo sapien
tgggaagtccaactttggggcacca

SEQ ID NO: 2619182 - DNA, 25 bp, Homo sapien
tgtctttcattccttagtgtatgtc

SEQ ID NO: 2619183 - DNA, 25 bp, Homo sapien
tcaaaactaaccaaatccatcgcag

SEQ ID NO: 2619184 - DNA, 25 bp, Homo sapien
actcagtcaaaactaaccaaatcca

SEQ ID NO: 2619185 - DNA, 25 bp, Homo sapien
tccatcgcagtttctgccaggagca

SEQ ID NO: 2619186 - DNA, 25 bp, Homo sapien
taaccaaatccatcgcagtttctgc

SEQ ID NO: 2619187 - DNA, 25 bp, Homo sapien
gcctttgattaggtcttcaaatatt

SEQ ID NO: 2619188 - DNA, 25 bp, Homo sapien
agagcctttgattaggtcttcaaat

SEQ ID NO: 2619189 - DNA, 25 bp, Homo sapien
gtctttaggtttgttggagttgagc

SEQ ID NO: 2619190 - DNA, 25 bp, Homo sapien
cacttctaaagcagagcctttgatt

SEQ ID NO: 2619191 - DNA, 25 bp, Homo sapien
agaattctcttaatatacttcctct

SEQ ID NO: 2619192 - DNA, 25 bp, Homo sapien
cagaattctcttaatatacttcctc

SEQ ID NO: 2619193 - DNA, 25 bp, Homo sapien
cagcgggtcagttaatcttccctgt

SEQ ID NO: 2619194 - DNA, 25 bp, Homo sapien
catcttcgtgcagcgggtcagttaa

SEQ ID NO: 2619195 - DNA, 25 bp, Homo sapien
tcgtgcagcgggtcagttaatcttc

SEQ ID NO: 2619196 - DNA, 25 bp, Homo sapien
gtcatcttcgtgcagcgggtcagtt

SEQ ID NO: 2619197 - DNA, 25 bp, Homo sapien
tgtctgcatagaaatttgataattg

SEQ ID NO: 2619198 - DNA, 25 bp, Homo sapien
ttgaaaattggtcattgtctgcata

SEQ ID NO: 2619199 - DNA, 25 bp, Homo sapien
ccaaaattagcttccaaagtgattc

SEQ ID NO: 2619200 - DNA, 25 bp, Homo sapien
caaaattagcttccaaagtgattct

SEQ ID NO: 2619201 - DNA, 25 bp, Homo sapien
tggttataagtctaccctcatggta

SEQ ID NO: 2619202 - DNA, 25 bp, Homo sapien
taaaggagctatcactcccaagata

SEQ ID NO: 2619203 - DNA, 25 bp, Homo sapien
ggtacataacactatgccaagggaa

SEQ ID NO: 2619204 - DNA, 25 bp, Homo sapien
taccacagcagtatagattacccat

SEQ ID NO: 2619205 - DNA, 25 bp, Homo sapien
tatctccatctttaggcaagccttt

SEQ ID NO: 2619206 - DNA, 25 bp, Homo sapien
atctttaggcaagccttttttcact

SEQ ID NO: 2619207 - DNA, 25 bp, Homo sapien
ggcaagccttttttcactacctgta

SEQ ID NO: 2619208 - DNA, 25 bp, Homo sapien
cctgctatctccatctttaggcaag

SEQ ID NO: 2619209 - DNA, 25 bp, Homo sapien
catagcaaatgaaactggtaaccac

SEQ ID NO: 2619210 - DNA, 25 bp, Homo sapien
gtagtaaatgatcaacataccttag

SEQ ID NO: 2619211 - DNA, 25 bp, Homo sapien
caaacagtaaggatttcatagcaaa

SEQ ID NO: 2619212 - DNA, 25 bp, Homo sapien
tgtgaagaagaatagcacagtgatg

SEQ ID NO: 2619213 - DNA, 25 bp, Homo sapien
aagtacctcatcagtatgtgaagca

SEQ ID NO: 2619214 - DNA, 25 bp, Homo sapien
tatgtgaagcaaaccttctattttc

SEQ ID NO: 2619215 - DNA, 25 bp, Homo sapien
tctattttctgtcagttccatagat

SEQ ID NO: 2619216 - DNA, 25 bp, Homo sapien
ctttggatgcaaagtacctcatcag

SEQ ID NO: 2619217 - DNA, 25 bp, Homo sapien
taaagattcggttccaaagtgagcc

SEQ ID NO: 2619218 - DNA, 25 bp, Homo sapien
taatggaggcttgttgacatgagca

SEQ ID NO: 2619219 - DNA, 25 bp, Homo sapien
cagaagatatcaggtagggtagcac

SEQ ID NO: 2619220 - DNA, 25 bp, Homo sapien
gggtagcacagttattacagaaacg

SEQ ID NO: 2619221 - DNA, 25 bp, Homo sapien
catggcaaaagtgagaacaacgtgg

SEQ ID NO: 2619222 - DNA, 25 bp, Homo sapien
taacagcttgcgttgaactccgtgt

SEQ ID NO: 2619223 - DNA, 25 bp, Homo sapien
ttgggcataccaacaacagaaggac

SEQ ID NO: 2619224 - DNA, 25 bp, Homo sapien
cagaaggacctatggcagaaatggc

SEQ ID NO: 2619225 - DNA, 25 bp, Homo sapien
gccgcttccaatatagttaaatcaa

SEQ ID NO: 2619226 - DNA, 25 bp, Homo sapien
tagttaaatcaattggccttatggc

SEQ ID NO: 2619227 - DNA, 25 bp, Homo sapien
caattggccttatggctgctgtgct

SEQ ID NO: 2619228 - DNA, 25 bp, Homo sapien
ttctgccgcttccaatatagttaaa

SEQ ID NO: 2619229 - DNA, 25 bp, Homo sapien
accttcacactttatgctgcctcta

SEQ ID NO: 2619230 - DNA, 25 bp, Homo sapien
gtatacaccttcacactttatgctg

SEQ ID NO: 2619231 - DNA, 25 bp, Homo sapien
tacaccttcacactttatgctgcct

SEQ ID NO: 2619232 - DNA, 25 bp, Homo sapien
tcacactttatgctgcctctaccca

SEQ ID NO: 2619233 - DNA, 25 bp, Homo sapien
gatacatgcatgaggtaaaagcggg

SEQ ID NO: 2619234 - DNA, 25 bp, Homo sapien
tttgatacatgcatgaggtaaaagc

SEQ ID NO: 2619235 - DNA, 25 bp, Homo sapien
gtccacttatttgatacatgcatga

SEQ ID NO: 2619236 - DNA, 25 bp, Homo sapien
tttcttaatagcttgcttggttttc

SEQ ID NO: 2619237 - DNA, 25 bp, Homo sapien
ttgcgttggagaacacagtggcccc

SEQ ID NO: 2619238 - DNA, 25 bp, Homo sapien
ccagggtttccgcaggcagagtgta

SEQ ID NO: 2619239 - DNA, 25 bp, Homo sapien
tgatccagaacttgacgaccggacg

SEQ ID NO: 2619240 - DNA, 25 bp, Homo sapien
cagaaggctttagagatcgagggac

SEQ ID NO: 2619241 - DNA, 25 bp, Homo sapien
agatccttggggcacctagccggca

SEQ ID NO: 2619242 - DNA, 25 bp, Homo sapien
gtgcgacaaggcgtcccagcagccg

SEQ ID NO: 2619243 - DNA, 25 bp, Homo sapien
cggtgtggacgaaactcagtaaaag

SEQ ID NO: 2619244 - DNA, 25 bp, Homo sapien
tgcaaagctatgtccggcggtgtgg

SEQ ID NO: 2619245 - DNA, 25 bp, Homo sapien
cttctgaactgtgggacccaagact

SEQ ID NO: 2619246 - DNA, 25 bp, Homo sapien
cagaagccgtagactcttctgaact

SEQ ID NO: 2619247 - DNA, 25 bp, Homo sapien
ggacccaagactgccgggtacgcag

SEQ ID NO: 2619248 - DNA, 25 bp, Homo sapien
tcccatagccgccagaagccgtaga

SEQ ID NO: 2619249 - DNA, 25 bp, Homo sapien
ctcgtgttaaactggaaacgagaag

SEQ ID NO: 2619250 - DNA, 25 bp, Homo sapien
cgagaaggagggcagaatatgggta

SEQ ID NO: 2619251 - DNA, 25 bp, Homo sapien
ggagggcagaatatgggtagacaag

SEQ ID NO: 2619252 - DNA, 25 bp, Homo sapien
tggaaacgagaaggagggcagaata

SEQ ID NO: 2619253 - DNA, 25 bp, Homo sapien
acagggctggtaagaacgaatatga

SEQ ID NO: 2619254 - DNA, 25 bp, Homo sapien
cacagggctggtaagaacgaatatg

SEQ ID NO: 2619255 - DNA, 25 bp, Homo sapien
cagggctggtaagaacgaatatgac

SEQ ID NO: 2619256 - DNA, 25 bp, Homo sapien
acccgtatgggagccgcagagaagc

SEQ ID NO: 2619257 - DNA, 25 bp, Homo sapien
gaaagaggacccgtatgggagccgc

SEQ ID NO: 2619258 - DNA, 25 bp, Homo sapien
agagaagcacctagaaccctggggc

SEQ ID NO: 2619259 - DNA, 25 bp, Homo sapien
gagaagcacctagaaccctggggcc

SEQ ID NO: 2619260 - DNA, 25 bp, Homo sapien
tcactcaagcactcaagagtttttt

SEQ ID NO: 2619261 - DNA, 25 bp, Homo sapien
cattttcccactgaagtcctggcgt

SEQ ID NO: 2619262 - DNA, 25 bp, Homo sapien
cagatcctcactcaagcactcaaga

SEQ ID NO: 2619263 - DNA, 25 bp, Homo sapien
cgttttggcgctgacagcgttaact

SEQ ID NO: 2619264 - DNA, 25 bp, Homo sapien
gttcaaagcatcttacaggtcaaag

SEQ ID NO: 2619265 - DNA, 25 bp, Homo sapien
tgcaggcaattacctctacaaacac

SEQ ID NO: 2619266 - DNA, 25 bp, Homo sapien
ctacaaacacctcccttcattagaa

SEQ ID NO: 2619267 - DNA, 25 bp, Homo sapien
ttaatttgcaggcaattacctctac

SEQ ID NO: 2619268 - DNA, 25 bp, Homo sapien
tagctgataggcgaagactggttag

SEQ ID NO: 2619269 - DNA, 25 bp, Homo sapien
caactactgtggattagaaatttct

SEQ ID NO: 2619270 - DNA, 25 bp, Homo sapien
cagagttagcagattatgtgggacg

SEQ ID NO: 2619271 - DNA, 25 bp, Homo sapien
gagtcactaatagactcccatgagt

SEQ ID NO: 2619272 - DNA, 25 bp, Homo sapien
ccagtttcattattgctctgaattt

SEQ ID NO: 2619273 - DNA, 25 bp, Homo sapien
aattataccagtttcattattgctc

SEQ ID NO: 2619274 - DNA, 25 bp, Homo sapien
tataccagtttcattattgctctga

SEQ ID NO: 2619275 - DNA, 25 bp, Homo sapien
ggtcttaattataccagtttcatta

SEQ ID NO: 2619276 - DNA, 25 bp, Homo sapien
tgctttgcactggcctcctgaaagt

SEQ ID NO: 2619277 - DNA, 25 bp, Homo sapien
ctgctttgcactggcctcctgaaag

SEQ ID NO: 2619278 - DNA, 25 bp, Homo sapien
ctttgcactggcctcctgaaagtcc

SEQ ID NO: 2619279 - DNA, 25 bp, Homo sapien
ttgcactggcctcctgaaagtccat

SEQ ID NO: 2619280 - DNA, 25 bp, Homo sapien
cagggagtgtttgtgttctatcagg

SEQ ID NO: 2619281 - DNA, 25 bp, Homo sapien
tcagggaaagtgttgtgtgtactct

SEQ ID NO: 2619282 - DNA, 25 bp, Homo sapien
ttgtgttctatcagggaaagtgttg

SEQ ID NO: 2619283 - DNA, 25 bp, Homo sapien
tgttcttcaaagtattcagggagtg

SEQ ID NO: 2619284 - DNA, 25 bp, Homo sapien
taggttctgacacacctgaagtggc

SEQ ID NO: 2619285 - DNA, 25 bp, Homo sapien
tctagataggaaagcatggaaccac

SEQ ID NO: 2619286 - DNA, 25 bp, Homo sapien
tatcataagcggaaaactaccacca

SEQ ID NO: 2619287 - DNA, 25 bp, Homo sapien
tcataatatatagggctgagctcct

SEQ ID NO: 2619288 - DNA, 25 bp, Homo sapien
gactgatcatatggtctgccttgga

SEQ ID NO: 2619289 - DNA, 25 bp, Homo sapien
gaatcttggcactcctgtgttaggt

SEQ ID NO: 2619290 - DNA, 25 bp, Homo sapien
attgaggaggattgtttaccttcca

SEQ ID NO: 2619291 - DNA, 25 bp, Homo sapien
ctagagctgtcagtagagtggtgaa

SEQ ID NO: 2619292 - DNA, 25 bp, Homo sapien
tgatgagaagtcagtgatgcttcaa

SEQ ID NO: 2619293 - DNA, 25 bp, Homo sapien
tcagtgatgcttcaaatcattcttc

SEQ ID NO: 2619294 - DNA, 25 bp, Homo sapien
aagtcagtgatgcttcaaatcattc

SEQ ID NO: 2619295 - DNA, 25 bp, Homo sapien
agaagtcagtgatgcttcaaatcat

SEQ ID NO: 2619296 - DNA, 25 bp, Homo sapien
gcagtaaaagaagacttccgtgtgt

SEQ ID NO: 2619297 - DNA, 25 bp, Homo sapien
ttacacttactctatatattcaaga

SEQ ID NO: 2619298 - DNA, 25 bp, Homo sapien
aaatgcccagagaatatgtgtaaaa

SEQ ID NO: 2619299 - DNA, 25 bp, Homo sapien
tttgaattgcagtaaaagaagactt

SEQ ID NO: 2619300 - DNA, 25 bp, Homo sapien
tggggcttattgaagtaacaattag

SEQ ID NO: 2619301 - DNA, 25 bp, Homo sapien
tatgtcttagtggtaaaaatgtgca

SEQ ID NO: 2619302 - DNA, 25 bp, Homo sapien
gaagtaacaattagtatgtcttagt

SEQ ID NO: 2619303 - DNA, 25 bp, Homo sapien
caattagtatgtcttagtggtaaaa

SEQ ID NO: 2619304 - DNA, 25 bp, Homo sapien
ctttccccaggatttgctattttga

SEQ ID NO: 2619305 - DNA, 25 bp, Homo sapien
taatggactaactctggcaatgagg

SEQ ID NO: 2619306 - DNA, 25 bp, Homo sapien
tcttcctagaaatgacgtatggatc

SEQ ID NO: 2619307 - DNA, 25 bp, Homo sapien
aaacacaggaattcagagcttccca

SEQ ID NO: 2619308 - DNA, 25 bp, Homo sapien
ctttcttctcaatgttaataatcat

SEQ ID NO: 2619309 - DNA, 25 bp, Homo sapien
tgttaataatcattaaatcagtcat

SEQ ID NO: 2619310 - DNA, 25 bp, Homo sapien
attaaatcagtcataaaagcagaca

SEQ ID NO: 2619311 - DNA, 25 bp, Homo sapien
ttaaatcagtcataaaagcagacat

SEQ ID NO: 2619312 - DNA, 25 bp, Homo sapien
gttcctcgtatattctgaaactgca

SEQ ID NO: 2619313 - DNA, 25 bp, Homo sapien
gatactgtgactagattcaggcaac

SEQ ID NO: 2619314 - DNA, 25 bp, Homo sapien
ccatttgggtacaatttctccagag

SEQ ID NO: 2619315 - DNA, 25 bp, Homo sapien
tgaaactgcatgtcagatactgtga

SEQ ID NO: 2619316 - DNA, 25 bp, Homo sapien
ttccaatatatgtcgttgtccactc

SEQ ID NO: 2619317 - DNA, 25 bp, Homo sapien
gaattgttccaatatatgtcgttgt

SEQ ID NO: 2619318 - DNA, 25 bp, Homo sapien
tgttccaatatatgtcgttgtccac

SEQ ID NO: 2619319 - DNA, 25 bp, Homo sapien
ccaatatatgtcgttgtccactcat

SEQ ID NO: 2619320 - DNA, 25 bp, Homo sapien
gctgggcagctctatggaggcctgg

SEQ ID NO: 2619321 - DNA, 25 bp, Homo sapien
tgggcagctctatggaggcctggcg

SEQ ID NO: 2619322 - DNA, 25 bp, Homo sapien
ggcagctctatggaggcctggcggg

SEQ ID NO: 2619323 - DNA, 25 bp, Homo sapien
cagctctatggaggcctggcgggct

SEQ ID NO: 2619324 - DNA, 25 bp, Homo sapien
tctgatcatcctcacgagatccttc

SEQ ID NO: 2619325 - DNA, 25 bp, Homo sapien
atctgggccgtaattgttgatgagg

SEQ ID NO: 2619326 - DNA, 25 bp, Homo sapien
ctgatcatcctcacgagatccttct

SEQ ID NO: 2619327 - DNA, 25 bp, Homo sapien
caatctgggccgtaattgttgatga

SEQ ID NO: 2619328 - DNA, 25 bp, Homo sapien
cttcatcagaatcatagcttggagg

SEQ ID NO: 2619329 - DNA, 25 bp, Homo sapien
tagcttggaggcttcatagctccct

SEQ ID NO: 2619330 - DNA, 25 bp, Homo sapien
catagctccctgattcaattctgtc

SEQ ID NO: 2619331 - DNA, 25 bp, Homo sapien
cccatatttcaacttgtggtatttg

SEQ ID NO: 2619332 - DNA, 25 bp, Homo sapien
gttttgttgtggctgcacttctgtt

SEQ ID NO: 2619333 - DNA, 25 bp, Homo sapien
ttttgttgtggctgcacttctgttt

SEQ ID NO: 2619334 - DNA, 25 bp, Homo sapien
ggatacaatttgcagcagacgagta

SEQ ID NO: 2619335 - DNA, 25 bp, Homo sapien
gcttgtgctccgacggcttctcatt

SEQ ID NO: 2619336 - DNA, 25 bp, Homo sapien
tatggaagactaccagccggagtgg

SEQ ID NO: 2619337 - DNA, 25 bp, Homo sapien
ggagagttcccaggatacaatttgc

SEQ ID NO: 2619338 - DNA, 25 bp, Homo sapien
cggagatccccgaaggcgagctgaa

SEQ ID NO: 2619339 - DNA, 25 bp, Homo sapien
cttcggaggcggagatccccgaagg

SEQ ID NO: 2619340 - DNA, 25 bp, Homo sapien
gagatccccgaaggcgagctgaaat

SEQ ID NO: 2619341 - DNA, 25 bp, Homo sapien
ggaggcggagatccccgaaggcgag

SEQ ID NO: 2619342 - DNA, 25 bp, Homo sapien
tgcaaaggtccgtggacggaccgca

SEQ ID NO: 2619343 - DNA, 25 bp, Homo sapien
aaaggtccgtggacggaccgcattg

SEQ ID NO: 2619344 - DNA, 25 bp, Homo sapien
tatgtgcaaaggtccgtggacggac

SEQ ID NO: 2619345 - DNA, 25 bp, Homo sapien
atgtgcaaaggtccgtggacggacc

SEQ ID NO: 2619346 - DNA, 25 bp, Homo sapien
gggcagggcgcgccttgcgctccag

SEQ ID NO: 2619347 - DNA, 25 bp, Homo sapien
gcgcgccttgcgctccagggagccc

SEQ ID NO: 2619348 - DNA, 25 bp, Homo sapien
gccctggggcagggcgcgccttgcg

SEQ ID NO: 2619349 - DNA, 25 bp, Homo sapien
agggcgcgccttgcgctccagggag

SEQ ID NO: 2619350 - DNA, 25 bp, Homo sapien
ccgggggcgacgcagtggcgaagtc

SEQ ID NO: 2619351 - DNA, 25 bp, Homo sapien
cgacgcagtggcgaagtcgggctgt

SEQ ID NO: 2619352 - DNA, 25 bp, Homo sapien
cagtggcgaagtcgggctgtgggcc

SEQ ID NO: 2619353 - DNA, 25 bp, Homo sapien
gggcgacgcagtggcgaagtcgggc

SEQ ID NO: 2619354 - DNA, 25 bp, Homo sapien
gcggcgccatgaggaacgagaacct

SEQ ID NO: 2619355 - DNA, 25 bp, Homo sapien
cccagcggcgccatgaggaacgaga

SEQ ID NO: 2619356 - DNA, 25 bp, Homo sapien
gccatgaggaacgagaacctgcgct

SEQ ID NO: 2619357 - DNA, 25 bp, Homo sapien
aggaacgagaacctgcgctcagcct

SEQ ID NO: 2619358 - DNA, 25 bp, Homo sapien
ggctctctcggacaccacgggttta

SEQ ID NO: 2619359 - DNA, 25 bp, Homo sapien
tctctcggacaccacgggtttatcc

SEQ ID NO: 2619360 - DNA, 25 bp, Homo sapien
ccaaatttgtaagccttccgagaga

SEQ ID NO: 2619361 - DNA, 25 bp, Homo sapien
cttccaaatttgtaagccttccgag

SEQ ID NO: 2619362 - DNA, 25 bp, Homo sapien
ccagcgccatggctaggttcttaat

SEQ ID NO: 2619363 - DNA, 25 bp, Homo sapien
tcctgagtgagcaaaaaagggccag

SEQ ID NO: 2619364 - DNA, 25 bp, Homo sapien
cagagtatcatgacagctgctctca

SEQ ID NO: 2619365 - DNA, 25 bp, Homo sapien
gattccctgtgattaggccagcatg

SEQ ID NO: 2619366 - DNA, 25 bp, Homo sapien
tgacctctgctttaatgcatatctc

SEQ ID NO: 2619367 - DNA, 25 bp, Homo sapien
tttatatggttgtattgacctctgc

SEQ ID NO: 2619368 - DNA, 25 bp, Homo sapien
cctgcactcagccaaggtttacttt

SEQ ID NO: 2619369 - DNA, 25 bp, Homo sapien
cttaacaggcatacaataatctgat

SEQ ID NO: 2619370 - DNA, 25 bp, Homo sapien
cagcagcaccagtgatttcagaatt

SEQ ID NO: 2619371 - DNA, 25 bp, Homo sapien
cacagcagcaccagtgatttcagaa

SEQ ID NO: 2619372 - DNA, 25 bp, Homo sapien
ccacagcagcaccagtgatttcaga

SEQ ID NO: 2619373 - DNA, 25 bp, Homo sapien
acagcagcaccagtgatttcagaat

SEQ ID NO: 2619374 - DNA, 25 bp, Homo sapien
tataagcctatttaatttgcaggca

SEQ ID NO: 2619375 - DNA, 25 bp, Homo sapien
aagaatatcccatagacatttttca

SEQ ID NO: 2619376 - DNA, 25 bp, Homo sapien
caggcatggaaagcaaatgactagt

SEQ ID NO: 2619377 - DNA, 25 bp, Homo sapien
taaagtaattttgcaagcatgaaag

SEQ ID NO: 2619378 - DNA, 25 bp, Homo sapien
ctgcagcacaactgtgagcccgtct

SEQ ID NO: 2619379 - DNA, 25 bp, Homo sapien
gcacaactgtgagcccgtctgactg

SEQ ID NO: 2619380 - DNA, 25 bp, Homo sapien
aactgtgagcccgtctgactgacat

SEQ ID NO: 2619381 - DNA, 25 bp, Homo sapien
gcagcacaactgtgagcccgtctga

SEQ ID NO: 2619382 - DNA, 25 bp, Homo sapien
agaatcaccaggtaagtttttctgg

SEQ ID NO: 2619383 - DNA, 25 bp, Homo sapien
gaatcaccaggtaagtttttctgga

SEQ ID NO: 2619384 - DNA, 25 bp, Homo sapien
taaccatcagcttgttgactttcac

SEQ ID NO: 2619385 - DNA, 25 bp, Homo sapien
tctgaatttgtagcagccacctctt

SEQ ID NO: 2619386 - DNA, 25 bp, Homo sapien
aattctgaatttgtagcagccacct

SEQ ID NO: 2619387 - DNA, 25 bp, Homo sapien
ctgaatttgtagcagccacctcttc

SEQ ID NO: 2619388 - DNA, 25 bp, Homo sapien
ttctgaatttgtagcagccacctct

SEQ ID NO: 2619389 - DNA, 25 bp, Homo sapien
caaaaggattcactatcacctgagt

SEQ ID NO: 2619390 - DNA, 25 bp, Homo sapien
cgattccaagatgttgactggcttc

SEQ ID NO: 2619391 - DNA, 25 bp, Homo sapien
cacctccacgattccaagatgttga

SEQ ID NO: 2619392 - DNA, 25 bp, Homo sapien
tccacgattccaagatgttgactgg

SEQ ID NO: 2619393 - DNA, 25 bp, Homo sapien
ttacaacacctccacgattccaaga

SEQ ID NO: 2619394 - DNA, 25 bp, Homo sapien
aatgatagcacagtggacgatacta

SEQ ID NO: 2619395 - DNA, 25 bp, Homo sapien
tcaaccttaggatcaactgcgagca

SEQ ID NO: 2619396 - DNA, 25 bp, Homo sapien
tcaactgcgagcaatgtgaatgctt

SEQ ID NO: 2619397 - DNA, 25 bp, Homo sapien
tagcacagtggacgatactaccaaa

SEQ ID NO: 2619398 - DNA, 25 bp, Homo sapien
cttgaacattggttcattccagagc

SEQ ID NO: 2619399 - DNA, 25 bp, Homo sapien
cctcttgaacattggttcattccag

SEQ ID NO: 2619400 - DNA, 25 bp, Homo sapien
ggcctcttgaacattggttcattcc

SEQ ID NO: 2619401 - DNA, 25 bp, Homo sapien
gagtatgttctgggcctcttgaaca

SEQ ID NO: 2619402 - DNA, 25 bp, Homo sapien
gccttcttgggctgatataatgggg

SEQ ID NO: 2619403 - DNA, 25 bp, Homo sapien
ggctgatataatggggagtccactg

SEQ ID NO: 2619404 - DNA, 25 bp, Homo sapien
tgggctgatataatggggagtccac

SEQ ID NO: 2619405 - DNA, 25 bp, Homo sapien
tcttgggctgatataatggggagtc

SEQ ID NO: 2619406 - DNA, 25 bp, Homo sapien
tatcatgaacataacacttaatgtg

SEQ ID NO: 2619407 - DNA, 25 bp, Homo sapien
cacttaatgtgatgcttcaaaacat

SEQ ID NO: 2619408 - DNA, 25 bp, Homo sapien
cataacacttaatgtgatgcttcaa

SEQ ID NO: 2619409 - DNA, 25 bp, Homo sapien
cttccatttatcatgaacataacac

SEQ ID NO: 2619410 - DNA, 25 bp, Homo sapien
gcaagtgtactaggagattctgaag

SEQ ID NO: 2619411 - DNA, 25 bp, Homo sapien
attttgcaagtgtactaggagattc

SEQ ID NO: 2619412 - DNA, 25 bp, Homo sapien
tctgaagtgcctttataagtagtca

SEQ ID NO: 2619413 - DNA, 25 bp, Homo sapien
tgcctttataagtagtcacagataa

SEQ ID NO: 2619414 - DNA, 25 bp, Homo sapien
gataatttggctgtcactgccaggg

SEQ ID NO: 2619415 - DNA, 25 bp, Homo sapien
agataccaggaagaagtaactcccg

SEQ ID NO: 2619416 - DNA, 25 bp, Homo sapien
tagaaattctttaatgcaggcaacc

SEQ ID NO: 2619417 - DNA, 25 bp, Homo sapien
gatttgacagttatcgcgttgcctc

SEQ ID NO: 2619418 - DNA, 25 bp, Homo sapien
tgctttcttaaaccattcacgtaac

SEQ ID NO: 2619419 - DNA, 25 bp, Homo sapien
gatatttctattaaaggtcatgggc

SEQ ID NO: 2619420 - DNA, 25 bp, Homo sapien
aaaggtcatgggctcttctgaagtt

SEQ ID NO: 2619421 - DNA, 25 bp, Homo sapien
taaataaacgaacatagatatttct

SEQ ID NO: 2619422 - DNA, 25 bp, Homo sapien
tcaatgggacattagagagcgtcac

SEQ ID NO: 2619423 - DNA, 25 bp, Homo sapien
ggcttgcactgtacacccggaaaat

SEQ ID NO: 2619424 - DNA, 25 bp, Homo sapien
caaattggctgacacgggcttttac

SEQ ID NO: 2619425 - DNA, 25 bp, Homo sapien
tctaagctgcatagagcagggagcc

SEQ ID NO: 2619426 - DNA, 25 bp, Homo sapien
ccacatatttaaccatagtcctgtg

SEQ ID NO: 2619427 - DNA, 25 bp, Homo sapien
catatttaaccatagtcctgtgggt

SEQ ID NO: 2619428 - DNA, 25 bp, Homo sapien
ttcccacatatttaaccatagtcct

SEQ ID NO: 2619429 - DNA, 25 bp, Homo sapien
acatatttaaccatagtcctgtggg

SEQ ID NO: 2619430 - DNA, 25 bp, Homo sapien
tgagtttgttggtactcccaatatc

SEQ ID NO: 2619431 - DNA, 25 bp, Homo sapien
ttggtactcccaatatccatgtagt

SEQ ID NO: 2619432 - DNA, 25 bp, Homo sapien
tttgttggtactcccaatatccatg

SEQ ID NO: 2619433 - DNA, 25 bp, Homo sapien
acaaattattctatggtcttctaca

SEQ ID NO: 2619434 - DNA, 25 bp, Homo sapien
ctctgctgaaattaatacaaccttt

SEQ ID NO: 2619435 - DNA, 25 bp, Homo sapien
caaacaatatgtccaaatccttcca

SEQ ID NO: 2619436 - DNA, 25 bp, Homo sapien
tgtcattgtcaagttcccgtatcat

SEQ ID NO: 2619437 - DNA, 25 bp, Homo sapien
taacattaaaggcaatgtcattgtc

SEQ ID NO: 2619438 - DNA, 25 bp, Homo sapien
tctgattttgtatctcatatgacag

SEQ ID NO: 2619439 - DNA, 25 bp, Homo sapien
ctgattttgtatctcatatgacagt

SEQ ID NO: 2619440 - DNA, 25 bp, Homo sapien
gattttgtatctcatatgacagtac

SEQ ID NO: 2619441 - DNA, 25 bp, Homo sapien
tgattttgtatctcatatgacagta

SEQ ID NO: 2619442 - DNA, 25 bp, Homo sapien
gcacattttcttcaggtgataactt

SEQ ID NO: 2619443 - DNA, 25 bp, Homo sapien
cctgcacattttcttcaggtgataa

SEQ ID NO: 2619444 - DNA, 25 bp, Homo sapien
cattttcttcaggtgataacttctc

SEQ ID NO: 2619445 - DNA, 25 bp, Homo sapien
tcttcaggtgataacttctctccat

SEQ ID NO: 2619446 - DNA, 25 bp, Homo sapien
tccaccacacgagtgggaatgtttc

SEQ ID NO: 2619447 - DNA, 25 bp, Homo sapien
caagttgtagctctattggtggtga

SEQ ID NO: 2619448 - DNA, 25 bp, Homo sapien
gaggatgtcggttgcatttccatat

SEQ ID NO: 2619449 - DNA, 25 bp, Homo sapien
ctccactgaagagatggtgaatggc

SEQ ID NO: 2619450 - DNA, 25 bp, Homo sapien
gaatgattatatcgtgagctactgg

SEQ ID NO: 2619451 - DNA, 25 bp, Homo sapien
gagtttccatgcctctataggtgtg

SEQ ID NO: 2619452 - DNA, 25 bp, Homo sapien
taggtgtggcattctttagagggtc

SEQ ID NO: 2619453 - DNA, 25 bp, Homo sapien
tctgtgagcccaccaagagttgctt

SEQ ID NO: 2619454 - DNA, 25 bp, Homo sapien
caatcttgagaactaggttatcacc

SEQ ID NO: 2619455 - DNA, 25 bp, Homo sapien
ccacaagattgacccaacttcagac

SEQ ID NO: 2619456 - DNA, 25 bp, Homo sapien
ttgactgaccaactataaatgggag

SEQ ID NO: 2619457 - DNA, 25 bp, Homo sapien
taaatgggaggtttccaagacagcc

SEQ ID NO: 2619458 - DNA, 25 bp, Homo sapien
ggctgtccatagttaatctgcagga

SEQ ID NO: 2619459 - DNA, 25 bp, Homo sapien
gaattaacaccatatcaggcatagc

SEQ ID NO: 2619460 - DNA, 25 bp, Homo sapien
cactttactcaatatttggctgtcc

SEQ ID NO: 2619461 - DNA, 25 bp, Homo sapien
tgctgttgtagacatcactttactc

SEQ ID NO: 2619462 - DNA, 25 bp, Homo sapien
ctttgtggataggaagtaagacact

SEQ ID NO: 2619463 - DNA, 25 bp, Homo sapien
gacactatccagacagggtacacga

SEQ ID NO: 2619464 - DNA, 25 bp, Homo sapien
taatgatcaacacagcaatggctct

SEQ ID NO: 2619465 - DNA, 25 bp, Homo sapien
actctagggttgtttaggttgccat

SEQ ID NO: 2619466 - DNA, 25 bp, Homo sapien
tacgttaaagaccagcttctcaggc

SEQ ID NO: 2619467 - DNA, 25 bp, Homo sapien
gaaatctgaataggctcttttgccg

SEQ ID NO: 2619468 - DNA, 25 bp, Homo sapien
aattcttctgcctctagcttgggag

SEQ ID NO: 2619469 - DNA, 25 bp, Homo sapien
tcagttgcccatccggaggaagaat

SEQ ID NO: 2619470 - DNA, 25 bp, Homo sapien
aggaaggtcgaccagggaggcatct

SEQ ID NO: 2619471 - DNA, 25 bp, Homo sapien
catattacatggctgtcgttaggaa

SEQ ID NO: 2619472 - DNA, 25 bp, Homo sapien
tgataagttcttcaataacagtgtg

SEQ ID NO: 2619473 - DNA, 25 bp, Homo sapien
tgagtatttgtgtggaagatgtgac

SEQ ID NO: 2619474 - DNA, 25 bp, Homo sapien
tagtccagaacaacacaggagtaag

SEQ ID NO: 2619475 - DNA, 25 bp, Homo sapien
tacaagactgaggtacatcaactgt

SEQ ID NO: 2619476 - DNA, 25 bp, Homo sapien
tattacaacttcacctcagagagag

SEQ ID NO: 2619477 - DNA, 25 bp, Homo sapien
tatgtgtggcagtctatagtccaga

SEQ ID NO: 2619478 - DNA, 25 bp, Homo sapien
ataattccttttgtcctagctgtgg

SEQ ID NO: 2619479 - DNA, 25 bp, Homo sapien
gctgtggtgctggataagtgtttct

SEQ ID NO: 2619480 - DNA, 25 bp, Homo sapien
gagtatgttgacatatcaggcttca

SEQ ID NO: 2619481 - DNA, 25 bp, Homo sapien
aggcttcaattcaccaaacgcaagg

SEQ ID NO: 2619482 - DNA, 25 bp, Homo sapien
cgcttttcacgtattgatacttcag

SEQ ID NO: 2619483 - DNA, 25 bp, Homo sapien
caataccaaaagaacgcttttcacg

SEQ ID NO: 2619484 - DNA, 25 bp, Homo sapien
tgatacttcagtttccagatttgtt

SEQ ID NO: 2619485 - DNA, 25 bp, Homo sapien
gtttagtcacaattgggtacatacc

SEQ ID NO: 2619486 - DNA, 25 bp, Homo sapien
tacggagaagtagttcatgaaacaa

SEQ ID NO: 2619487 - DNA, 25 bp, Homo sapien
attacggagaagtagttcatgaaac

SEQ ID NO: 2619488 - DNA, 25 bp, Homo sapien
gctattacggagaagtagttcatga

SEQ ID NO: 2619489 - DNA, 25 bp, Homo sapien
cggagaagtagttcatgaaacaaag

SEQ ID NO: 2619490 - DNA, 25 bp, Homo sapien
acacttctgtttaagtcgctaagtg

SEQ ID NO: 2619491 - DNA, 25 bp, Homo sapien
tatcttgagataacacttctgttta

SEQ ID NO: 2619492 - DNA, 25 bp, Homo sapien
cttctgtttaagtcgctaagtgaaa

SEQ ID NO: 2619493 - DNA, 25 bp, Homo sapien
tttaagtcgctaagtgaaattctca

SEQ ID NO: 2619494 - DNA, 25 bp, Homo sapien
ccactcctctgctcgcagatggtgg

SEQ ID NO: 2619495 - DNA, 25 bp, Homo sapien
tgctcgcagatggtggctttctccc

SEQ ID NO: 2619496 - DNA, 25 bp, Homo sapien
aatttattttatccgagttctgagg

SEQ ID NO: 2619497 - DNA, 25 bp, Homo sapien
gaggccccactcctctgctcgcaga

SEQ ID NO: 2619498 - DNA, 25 bp, Homo sapien
ctgtttatcctggggatgctgtttt

SEQ ID NO: 2619499 - DNA, 25 bp, Homo sapien
tgtttatcctggggatgctgtttta

SEQ ID NO: 2619500 - DNA, 25 bp, Homo sapien
gtttatcctggggatgctgttttac

SEQ ID NO: 2619501 - DNA, 25 bp, Homo sapien
ttgcttcctagttgcagcaagcagg

SEQ ID NO: 2619502 - DNA, 25 bp, Homo sapien
gcttgttataggattcctttccaac

SEQ ID NO: 2619503 - DNA, 25 bp, Homo sapien
ggcacttgcttcctagttgcagcaa

SEQ ID NO: 2619504 - DNA, 25 bp, Homo sapien
ctagcttgttataggattcctttcc

SEQ ID NO: 2619505 - DNA, 25 bp, Homo sapien
ttatttaaggaagagtgtagtattc

SEQ ID NO: 2619506 - DNA, 25 bp, Homo sapien
cacgcccagccgcagtttttgttat

SEQ ID NO: 2619507 - DNA, 25 bp, Homo sapien
cagccgcagtttttgttatttaagg

SEQ ID NO: 2619508 - DNA, 25 bp, Homo sapien
tgttatttaaggaagagtgtagtat

SEQ ID NO: 2619509 - DNA, 25 bp, Homo sapien
tcggaggcgaccacatataggactt

SEQ ID NO: 2619510 - DNA, 25 bp, Homo sapien
tacacagtccacgagaggtgagaag

SEQ ID NO: 2619511 - DNA, 25 bp, Homo sapien
tcctttgagggtcactaagccaagc

SEQ ID NO: 2619512 - DNA, 25 bp, Homo sapien
tgtatacggcagatatcggaggcga

SEQ ID NO: 2619513 - DNA, 25 bp, Homo sapien
aaaggggatctagtaatgtgcaagc

SEQ ID NO: 2619514 - DNA, 25 bp, Homo sapien
ctctgatcatttggaactctccatt

SEQ ID NO: 2619515 - DNA, 25 bp, Homo sapien
gtgcaagctctgatcatttggaact

SEQ ID NO: 2619516 - DNA, 25 bp, Homo sapien
aagctctgatcatttggaactctcc

SEQ ID NO: 2619517 - DNA, 25 bp, Homo sapien
tgaggatgacaacttcaattgatcg

SEQ ID NO: 2619518 - DNA, 25 bp, Homo sapien
tattttaagaccaagaatgtgcatt

SEQ ID NO: 2619519 - DNA, 25 bp, Homo sapien
tatcttacaaagctagtagcaggga

SEQ ID NO: 2619520 - DNA, 25 bp, Homo sapien
tagatgaagacaaattgcccaagta

SEQ ID NO: 2619521 - DNA, 25 bp, Homo sapien
gctttgtggagtatggtcacttgaa

SEQ ID NO: 2619522 - DNA, 25 bp, Homo sapien
ggcagaatctttaggattgtcagca

SEQ ID NO: 2619523 - DNA, 25 bp, Homo sapien
agtagacatccctgttttgtcccag

SEQ ID NO: 2619524 - DNA, 25 bp, Homo sapien
taatgtggtgccttctactttgtct

SEQ ID NO: 2619525 - DNA, 25 bp, Homo sapien
tggtccaggtctttctgaccctcct

SEQ ID NO: 2619526 - DNA, 25 bp, Homo sapien
ctcttggtccaggtctttctgaccc

SEQ ID NO: 2619527 - DNA, 25 bp, Homo sapien
tttctgaccctccttttagactgat

SEQ ID NO: 2619528 - DNA, 25 bp, Homo sapien
caggtctttctgaccctccttttag

SEQ ID NO: 2619529 - DNA, 25 bp, Homo sapien
gatttatgcatactcaaaaccagtt

SEQ ID NO: 2619530 - DNA, 25 bp, Homo sapien
catacatgcgtggttaattctgtgg

SEQ ID NO: 2619531 - DNA, 25 bp, Homo sapien
ttaacagaagggcaatcatcgaact

SEQ ID NO: 2619532 - DNA, 25 bp, Homo sapien
actgtatagttatgtgtgacctttg

SEQ ID NO: 2619533 - DNA, 25 bp, Homo sapien
ttagctttgtcagttactgctatta

SEQ ID NO: 2619534 - DNA, 25 bp, Homo sapien
tttttagctttgtcagttactgcta

SEQ ID NO: 2619535 - DNA, 25 bp, Homo sapien
ttatctgcaaactgcaataatggca

SEQ ID NO: 2619536 - DNA, 25 bp, Homo sapien
gcaaactgcaataatggcaatcaga

SEQ ID NO: 2619537 - DNA, 25 bp, Homo sapien
caactctgatcttatatttgaagtc

SEQ ID NO: 2619538 - DNA, 25 bp, Homo sapien
gacaaaaccagagtctaattgactt

SEQ ID NO: 2619539 - DNA, 25 bp, Homo sapien
ctctgatcttatatttgaagtcccc

SEQ ID NO: 2619540 - DNA, 25 bp, Homo sapien
tgacaaaaccagagtctaattgact

SEQ ID NO: 2619541 - DNA, 25 bp, Homo sapien
gcatgaccatagatgaaccctacca

SEQ ID NO: 2619542 - DNA, 25 bp, Homo sapien
cacgattggttgtggcatgaccata

SEQ ID NO: 2619543 - DNA, 25 bp, Homo sapien
tattcatgtcacgattggttgtggc

SEQ ID NO: 2619544 - DNA, 25 bp, Homo sapien
ggttgtggcatgaccatagatgaac

SEQ ID NO: 2619545 - DNA, 25 bp, Homo sapien
tgcagctgtttgaactattaaggcc

SEQ ID NO: 2619546 - DNA, 25 bp, Homo sapien
gcagctgtttgaactattaaggcca

SEQ ID NO: 2619547 - DNA, 25 bp, Homo sapien
tcaacaagggctctattgattcttg

SEQ ID NO: 2619548 - DNA, 25 bp, Homo sapien
tgaaagctgtcaatactgacgacaa

SEQ ID NO: 2619549 - DNA, 25 bp, Homo sapien
aatactgacgacaaatggaggcagc

SEQ ID NO: 2619550 - DNA, 25 bp, Homo sapien
gggctctattgattcttgtcataac

SEQ ID NO: 2619551 - DNA, 25 bp, Homo sapien
caggtagtgagagatctagtcccaa

SEQ ID NO: 2619552 - DNA, 25 bp, Homo sapien
tagtgagagatctagtcccaaatcc

SEQ ID NO: 2619553 - DNA, 25 bp, Homo sapien
tgagagatctagtcccaaatccaca

SEQ ID NO: 2619554 - DNA, 25 bp, Homo sapien
gtcaggtagtgagagatctagtccc

SEQ ID NO: 2619555 - DNA, 25 bp, Homo sapien
ttctttgaagtccagatcttgcagc

SEQ ID NO: 2619556 - DNA, 25 bp, Homo sapien
tgaagtccagatcttgcagctgcat

SEQ ID NO: 2619557 - DNA, 25 bp, Homo sapien
tcccaactaacttctttgaagtcca

SEQ ID NO: 2619558 - DNA, 25 bp, Homo sapien
acttctttgaagtccagatcttgca

SEQ ID NO: 2619559 - DNA, 25 bp, Homo sapien
tgaatgatgcaaagcaccggtgaca

SEQ ID NO: 2619560 - DNA, 25 bp, Homo sapien
gaatgatgcaaagcaccggtgacat

SEQ ID NO: 2619561 - DNA, 25 bp, Homo sapien
ctgaatgatgcaaagcaccggtgac

SEQ ID NO: 2619562 - DNA, 25 bp, Homo sapien
tattgaatcttcgtgcagacaacaa

SEQ ID NO: 2619563 - DNA, 25 bp, Homo sapien
ttattgaatcttcgtgcagacaaca

SEQ ID NO: 2619564 - DNA, 25 bp, Homo sapien
tgaatcttcgtgcagacaacaatct

SEQ ID NO: 2619565 - DNA, 25 bp, Homo sapien
gacaacaatcttggtgcaaattaaa

SEQ ID NO: 2619566 - DNA, 25 bp, Homo sapien
tcatggggtgctttgcagacagcat

SEQ ID NO: 2619567 - DNA, 25 bp, Homo sapien
ttcatggggtgctttgcagacagca

SEQ ID NO: 2619568 - DNA, 25 bp, Homo sapien
attcatggggtgctttgcagacagc

SEQ ID NO: 2619569 - DNA, 25 bp, Homo sapien
atggggtgctttgcagacagcatgt

SEQ ID NO: 2619570 - DNA, 25 bp, Homo sapien
catgcctgaaagtttactcacagtt

SEQ ID NO: 2619571 - DNA, 25 bp, Homo sapien
gtcatgcctgaaagtttactcacag

SEQ ID NO: 2619572 - DNA, 25 bp, Homo sapien
gactctaagcatgtcatgcctgaaa

SEQ ID NO: 2619573 - DNA, 25 bp, Homo sapien
ctatgactgactctaagcatgtcat

SEQ ID NO: 2619574 - DNA, 25 bp, Homo sapien
gctcctctgagcatcatttctgtcc

SEQ ID NO: 2619575 - DNA, 25 bp, Homo sapien
ctgtcctttgaaatcagaatggagg

SEQ ID NO: 2619576 - DNA, 25 bp, Homo sapien
ttgaaatcagaatggaggcaaccat

SEQ ID NO: 2619577 - DNA, 25 bp, Homo sapien
agggcttcactggatggccctccca

SEQ ID NO: 2619578 - DNA, 25 bp, Homo sapien
tgtggtcttgtctccgttctattaa

SEQ ID NO: 2619579 - DNA, 25 bp, Homo sapien
tgatcctcgttattgtaagaaagta

SEQ ID NO: 2619580 - DNA, 25 bp, Homo sapien
ttctattaaaacaacgttgtagaga

SEQ ID NO: 2619581 - DNA, 25 bp, Homo sapien
tagagattagtactgagtctttcca

SEQ ID NO: 2619582 - DNA, 25 bp, Homo sapien
tgtacagatgtgttacttgtgtgtt

SEQ ID NO: 2619583 - DNA, 25 bp, Homo sapien
tagctgtcgctgtcaatcttgtata

SEQ ID NO: 2619584 - DNA, 25 bp, Homo sapien
ccatagaggagttcatattagtctc

SEQ ID NO: 2619585 - DNA, 25 bp, Homo sapien
tctgattgctcttatttgggttttc

SEQ ID NO: 2619586 - DNA, 25 bp, Homo sapien
cgaggtgcttctggtgtagcaatat

SEQ ID NO: 2619587 - DNA, 25 bp, Homo sapien
gtgcttctggtgtagcaatatccat

SEQ ID NO: 2619588 - DNA, 25 bp, Homo sapien
aggtgcttctggtgtagcaatatcc

SEQ ID NO: 2619589 - DNA, 25 bp, Homo sapien
ggtgcttctggtgtagcaatatcca

SEQ ID NO: 2619590 - DNA, 25 bp, Homo sapien
aatagaactgtagcattccataggc

SEQ ID NO: 2619591 - DNA, 25 bp, Homo sapien
actgtagcattccataggcatattc

SEQ ID NO: 2619592 - DNA, 25 bp, Homo sapien
gtagcattccataggcatattccat

SEQ ID NO: 2619593 - DNA, 25 bp, Homo sapien
tagaactgtagcattccataggcat

SEQ ID NO: 2619594 - DNA, 25 bp, Homo sapien
gaagcagcccacttggacctgttga

SEQ ID NO: 2619595 - DNA, 25 bp, Homo sapien
gggctggagtcacaacctctgcagt

SEQ ID NO: 2619596 - DNA, 25 bp, Homo sapien
gatatcaaagatgtaagccagctct

SEQ ID NO: 2619597 - DNA, 25 bp, Homo sapien
tgactgagtgctctagctgcccagc

SEQ ID NO: 2619598 - DNA, 25 bp, Homo sapien
tcaactgagaattttgtatccagcc

SEQ ID NO: 2619599 - DNA, 25 bp, Homo sapien
caactgagaattttgtatccagcca

SEQ ID NO: 2619600 - DNA, 25 bp, Homo sapien
aactgagaattttgtatccagccaa

SEQ ID NO: 2619601 - DNA, 25 bp, Homo sapien
gctgcttgactgtcattccaagata

SEQ ID NO: 2619602 - DNA, 25 bp, Homo sapien
gggaatcctctcgtaatatgacttc

SEQ ID NO: 2619603 - DNA, 25 bp, Homo sapien
gcttgactgtcattccaagataaaa

SEQ ID NO: 2619604 - DNA, 25 bp, Homo sapien
agaaaagggaatcctctcgtaatat

SEQ ID NO: 2619605 - DNA, 25 bp, Homo sapien
tcttcttgaagtttacaaaagagaa

SEQ ID NO: 2619606 - DNA, 25 bp, Homo sapien
agagaaaccagttggcttttccagc

SEQ ID NO: 2619607 - DNA, 25 bp, Homo sapien
tcttcttcttgaagtttacaaaaga

SEQ ID NO: 2619608 - DNA, 25 bp, Homo sapien
aagagaaaccagttggcttttccag

SEQ ID NO: 2619609 - DNA, 25 bp, Homo sapien
tatagtgtcctatgtttatcttgcc

SEQ ID NO: 2619610 - DNA, 25 bp, Homo sapien
ccagcgtctataaggaacataaaaa

SEQ ID NO: 2619611 - DNA, 25 bp, Homo sapien
taacaacagtagtccttcagaaaga

SEQ ID NO: 2619612 - DNA, 25 bp, Homo sapien
ccaacaaaggtaatatccagcgtct

SEQ ID NO: 2619613 - DNA, 25 bp, Homo sapien
tttctgcattaaggcataagagtga

SEQ ID NO: 2619614 - DNA, 25 bp, Homo sapien
ttaaatttctgcattaaggcataag

SEQ ID NO: 2619615 - DNA, 25 bp, Homo sapien
ctagtcagaacctcagtgttgtcac

SEQ ID NO: 2619616 - DNA, 25 bp, Homo sapien
gcataagagtgatctagtcagaacc

SEQ ID NO: 2619617 - DNA, 25 bp, Homo sapien
tgccgattcttcttattttgccaca

SEQ ID NO: 2619618 - DNA, 25 bp, Homo sapien
tgctgggtgaaagtcgttgagaaaa

SEQ ID NO: 2619619 - DNA, 25 bp, Homo sapien
cagtactttcataagtgctgggtga

SEQ ID NO: 2619620 - DNA, 25 bp, Homo sapien
ttttgccacatcttactgccagtac

SEQ ID NO: 2619621 - DNA, 25 bp, Homo sapien
ccaccactccggtgttgcactggga

SEQ ID NO: 2619622 - DNA, 25 bp, Homo sapien
cactgggatttccagtccaatgaca

SEQ ID NO: 2619623 - DNA, 25 bp, Homo sapien
cactccggtgttgcactgggatttc

SEQ ID NO: 2619624 - DNA, 25 bp, Homo sapien
gatttccagtccaatgacatttcca

SEQ ID NO: 2619625 - DNA, 25 bp, Homo sapien
gggaagttccatgtgaaacactcta

SEQ ID NO: 2619626 - DNA, 25 bp, Homo sapien
gaatgtggaaaagccctactatgtc

SEQ ID NO: 2619627 - DNA, 25 bp, Homo sapien
tgatgaatgaactagattaaaactt

SEQ ID NO: 2619628 - DNA, 25 bp, Homo sapien
tgaatttactgctttggacaggaaa

SEQ ID NO: 2619629 - DNA, 25 bp, Homo sapien
tttctgtggagccatccttgtgatt

SEQ ID NO: 2619630 - DNA, 25 bp, Homo sapien
gtggagccatccttgtgattttctg

SEQ ID NO: 2619631 - DNA, 25 bp, Homo sapien
tctgtggagccatccttgtgatttt

SEQ ID NO: 2619632 - DNA, 25 bp, Homo sapien
ctgtggagccatccttgtgattttc

SEQ ID NO: 2619633 - DNA, 25 bp, Homo sapien
ttgaataataggcaggggatgaagt

SEQ ID NO: 2619634 - DNA, 25 bp, Homo sapien
gaataataggcaggggatgaagtga

SEQ ID NO: 2619635 - DNA, 25 bp, Homo sapien
cttgaataataggcaggggatgaag

SEQ ID NO: 2619636 - DNA, 25 bp, Homo sapien
ataataggcaggggatgaagtgaag

SEQ ID NO: 2619637 - DNA, 25 bp, Homo sapien
taattgctgtgtatgaaactgaaag

SEQ ID NO: 2619638 - DNA, 25 bp, Homo sapien
aatgccacagattctaagtagaagt

SEQ ID NO: 2619639 - DNA, 25 bp, Homo sapien
aagcctccacgtcagtcagctttct

SEQ ID NO: 2619640 - DNA, 25 bp, Homo sapien
actgaaagagttcaccagggctgcc

SEQ ID NO: 2619641 - DNA, 25 bp, Homo sapien
ctggtgttttaggctaaacttccag

SEQ ID NO: 2619642 - DNA, 25 bp, Homo sapien
attcattaagtaattcagtctccat

SEQ ID NO: 2619643 - DNA, 25 bp, Homo sapien
tagtgaattactgagctttgcagga

SEQ ID NO: 2619644 - DNA, 25 bp, Homo sapien
tgcaggagtattagagccaggtcac

SEQ ID NO: 2619645 - DNA, 25 bp, Homo sapien
tcctccagaatactcccagctagtg

SEQ ID NO: 2619646 - DNA, 25 bp, Homo sapien
tgagacattcatactgaggccacac

SEQ ID NO: 2619647 - DNA, 25 bp, Homo sapien
aaattttaaaaagttgatctcatcg

SEQ ID NO: 2619648 - DNA, 25 bp, Homo sapien
gctttcagccgtatcagggtaaaaa

SEQ ID NO: 2619649 - DNA, 25 bp, Homo sapien
tagtgagggacttacacacaccctg

SEQ ID NO: 2619650 - DNA, 25 bp, Homo sapien
gatcgcattaacaaagccccactgg

SEQ ID NO: 2619651 - DNA, 25 bp, Homo sapien
tggaacatcaggcaacaggtacagt

SEQ ID NO: 2619652 - DNA, 25 bp, Homo sapien
caacggcatttctttcggaagcacc

SEQ ID NO: 2619653 - DNA, 25 bp, Homo sapien
cattcactctcatagggtactggat

SEQ ID NO: 2619654 - DNA, 25 bp, Homo sapien
ggaagcacctgctgttacacatcag

SEQ ID NO: 2619655 - DNA, 25 bp, Homo sapien
ggccagcctttacaagtgccaacgg

SEQ ID NO: 2619656 - DNA, 25 bp, Homo sapien
gacgcagcttcatgataaacatttt

SEQ ID NO: 2619657 - DNA, 25 bp, Homo sapien
tcccacttacaagatttcggacaag

SEQ ID NO: 2619658 - DNA, 25 bp, Homo sapien
gacaagatgtgacgcagcttcatga

SEQ ID NO: 2619659 - DNA, 25 bp, Homo sapien
cagattccagatgcttacatgtgtc

SEQ ID NO: 2619660 - DNA, 25 bp, Homo sapien
gtattttcctagggagcatgtccat

SEQ ID NO: 2619661 - DNA, 25 bp, Homo sapien
tgtgattaattttagcgttgaaaac

SEQ ID NO: 2619662 - DNA, 25 bp, Homo sapien
tgattaattttagcgttgaaaacaa

SEQ ID NO: 2619663 - DNA, 25 bp, Homo sapien
gtgattaattttagcgttgaaaaca

SEQ ID NO: 2619664 - DNA, 25 bp, Homo sapien
atccatacttcttcaaaactgccat

SEQ ID NO: 2619665 - DNA, 25 bp, Homo sapien
acgtgggcaagatctaaggaagatg

SEQ ID NO: 2619666 - DNA, 25 bp, Homo sapien
ctacgtgggcaagatctaaggaaga

SEQ ID NO: 2619667 - DNA, 25 bp, Homo sapien
ctcctacgtgggcaagatctaagga

SEQ ID NO: 2619668 - DNA, 25 bp, Homo sapien
cctacgtgggcaagatctaaggaag

SEQ ID NO: 2619669 - DNA, 25 bp, Homo sapien
aatttgacacaaagcccctgcttct

SEQ ID NO: 2619670 - DNA, 25 bp, Homo sapien
accaaaggcaatgagtcttcaaact

SEQ ID NO: 2619671 - DNA, 25 bp, Homo sapien
ataaatttgacacaaagcccctgct

SEQ ID NO: 2619672 - DNA, 25 bp, Homo sapien
tctggaaccaaaggcaatgagtctt

SEQ ID NO: 2619673 - DNA, 25 bp, Homo sapien
gaagctttacacgtataaaatagcc

SEQ ID NO: 2619674 - DNA, 25 bp, Homo sapien
tcatgtggagaagctttacacgtat

SEQ ID NO: 2619675 - DNA, 25 bp, Homo sapien
cacgtataaaatagccaagtagcca

SEQ ID NO: 2619676 - DNA, 25 bp, Homo sapien
attcatgtggagaagctttacacgt

SEQ ID NO: 2619677 - DNA, 25 bp, Homo sapien
cgcgtgtgcagcttcatgaaggaca

SEQ ID NO: 2619678 - DNA, 25 bp, Homo sapien
caaccgcgtgtgcagcttcatgaag

SEQ ID NO: 2619679 - DNA, 25 bp, Homo sapien
ttcaaccgcgtgtgcagcttcatga

SEQ ID NO: 2619680 - DNA, 25 bp, Homo sapien
accgcgtgtgcagcttcatgaagga

SEQ ID NO: 2619681 - DNA, 25 bp, Homo sapien
tggactcttgtagcacttttggaaa

SEQ ID NO: 2619682 - DNA, 25 bp, Homo sapien
cagtttagtccccacagagttagtt

SEQ ID NO: 2619683 - DNA, 25 bp, Homo sapien
taggtcctgagaagattgcactgat

SEQ ID NO: 2619684 - DNA, 25 bp, Homo sapien
aatgccatctgcctagcaaggtgct

SEQ ID NO: 2619685 - DNA, 25 bp, Homo sapien
tagccggagcagaataagacagctt

SEQ ID NO: 2619686 - DNA, 25 bp, Homo sapien
aatgagctcataaaggtagacgttc

SEQ ID NO: 2619687 - DNA, 25 bp, Homo sapien
ctaagaactaaactggctggcacct

SEQ ID NO: 2619688 - DNA, 25 bp, Homo sapien
gccatgggctattgtgtcacccaaa

SEQ ID NO: 2619689 - DNA, 25 bp, Homo sapien
tctcagcacataatacagcttcagc

SEQ ID NO: 2619690 - DNA, 25 bp, Homo sapien
tggaagacagcaacgaagacactac

SEQ ID NO: 2619691 - DNA, 25 bp, Homo sapien
gcttcagctgattggtgtcactggc

SEQ ID NO: 2619692 - DNA, 25 bp, Homo sapien
cagtgttccacatttgaactgaatg

SEQ ID NO: 2619693 - DNA, 25 bp, Homo sapien
ccgatattgtgtcaacaattataca

SEQ ID NO: 2619694 - DNA, 25 bp, Homo sapien
tcatccgatattgtgtcaacaatta

SEQ ID NO: 2619695 - DNA, 25 bp, Homo sapien
cagaattcatccgatattgtgtcaa

SEQ ID NO: 2619696 - DNA, 25 bp, Homo sapien
aattcatccgatattgtgtcaacaa

SEQ ID NO: 2619697 - DNA, 25 bp, Homo sapien
tctctcgtagtggacttgaactgtg

SEQ ID NO: 2619698 - DNA, 25 bp, Homo sapien
acggttctctcgtagtggacttgaa

SEQ ID NO: 2619699 - DNA, 25 bp, Homo sapien
tacggttctctcgtagtggacttga

SEQ ID NO: 2619700 - DNA, 25 bp, Homo sapien
ggttctctcgtagtggacttgaact

SEQ ID NO: 2619701 - DNA, 25 bp, Homo sapien
actgctttgggatgggcctgcactc

SEQ ID NO: 2619702 - DNA, 25 bp, Homo sapien
ctgctttgggatgggcctgcactcc

SEQ ID NO: 2619703 - DNA, 25 bp, Homo sapien
tgctttgggatgggcctgcactccc

SEQ ID NO: 2619704 - DNA, 25 bp, Homo sapien
ctgccacggcagaatgttgtgtctt

SEQ ID NO: 2619705 - DNA, 25 bp, Homo sapien
tttgtcaagaacaatccagttggag

SEQ ID NO: 2619706 - DNA, 25 bp, Homo sapien
tcctggtgtgggaaataatcaagtt

SEQ ID NO: 2619707 - DNA, 25 bp, Homo sapien
taatcaagttgcatatctgccacgg

SEQ ID NO: 2619708 - DNA, 25 bp, Homo sapien
caacaatgagggcaatggaaatgct

SEQ ID NO: 2619709 - DNA, 25 bp, Homo sapien
aacaatgagggcaatggaaatgcta

SEQ ID NO: 2619710 - DNA, 25 bp, Homo sapien
acaatgagggcaatggaaatgctac

SEQ ID NO: 2619711 - DNA, 25 bp, Homo sapien
cagttgattctttaaaggggcccat

SEQ ID NO: 2619712 - DNA, 25 bp, Homo sapien
aaaactgggatgttaacttctcact

SEQ ID NO: 2619713 - DNA, 25 bp, Homo sapien
ggctgacagagaggagatacaatga

SEQ ID NO: 2619714 - DNA, 25 bp, Homo sapien
gatacaatgagtggataggccagcc

SEQ ID NO: 2619715 - DNA, 25 bp, Homo sapien
tccctgtcgttgaccaaatgggaga

SEQ ID NO: 2619716 - DNA, 25 bp, Homo sapien
tattgctgttggacgtggctctcag

SEQ ID NO: 2619717 - DNA, 25 bp, Homo sapien
tcttcttgaaatttacaccgtcgag

SEQ ID NO: 2619718 - DNA, 25 bp, Homo sapien
ctgaagtaaggcacttctctctgat

SEQ ID NO: 2619719 - DNA, 25 bp, Homo sapien
ttcacgggcacaagatgagggcatg

SEQ ID NO: 2619720 - DNA, 25 bp, Homo sapien
gaactgtcacagtactcttttagct

SEQ ID NO: 2619721 - DNA, 25 bp, Homo sapien
tgccctctgtggatggcttaagtgt

SEQ ID NO: 2619722 - DNA, 25 bp, Homo sapien
ataaggcggctaccttctgccagcg

SEQ ID NO: 2619723 - DNA, 25 bp, Homo sapien
tgcacctgagctgttgtcaagcatc

SEQ ID NO: 2619724 - DNA, 25 bp, Homo sapien
caaaagctagtctggagtcactgaa

SEQ ID NO: 2619725 - DNA, 25 bp, Homo sapien
gcccttgaagaaactcgttgaacag

SEQ ID NO: 2619726 - DNA, 25 bp, Homo sapien
ttgtatgatttcgaagaaggcagca

SEQ ID NO: 2619727 - DNA, 25 bp, Homo sapien
ttccttgataggcaatatgaagcca

SEQ ID NO: 2619728 - DNA, 25 bp, Homo sapien
tagtcccttcatagtttccaagatg

SEQ ID NO: 2619729 - DNA, 25 bp, Homo sapien
tggcgatagtcccttcatagtttcc

SEQ ID NO: 2619730 - DNA, 25 bp, Homo sapien
ccttcatagtttccaagatgtgtcc

SEQ ID NO: 2619731 - DNA, 25 bp, Homo sapien
cacttggcgatagtcccttcatagt

SEQ ID NO: 2619732 - DNA, 25 bp, Homo sapien
cagagcagatctctctaggccagcc

SEQ ID NO: 2619733 - DNA, 25 bp, Homo sapien
ggtcagtgggtcagtccagtggtcc

SEQ ID NO: 2619734 - DNA, 25 bp, Homo sapien
ccacagtagaaattgttagtagagc

SEQ ID NO: 2619735 - DNA, 25 bp, Homo sapien
ggaagtccggctggcttcatcgctc

SEQ ID NO: 2619736 - DNA, 25 bp, Homo sapien
cagagcactgattggagcactttac

SEQ ID NO: 2619737 - DNA, 25 bp, Homo sapien
ctctagctagccacagagcgctgat

SEQ ID NO: 2619738 - DNA, 25 bp, Homo sapien
gcactgattggagcactttacaaac

SEQ ID NO: 2619739 - DNA, 25 bp, Homo sapien
ctagctagccacagagcgctgattg

SEQ ID NO: 2619740 - DNA, 25 bp, Homo sapien
gggacccgagtggcttaccactgct

SEQ ID NO: 2619741 - DNA, 25 bp, Homo sapien
gacccgagtggcttaccactgctgg

SEQ ID NO: 2619742 - DNA, 25 bp, Homo sapien
attccctcatttgtccctgcccaca

SEQ ID NO: 2619743 - DNA, 25 bp, Homo sapien
aggggacccgagtggcttaccactg

SEQ ID NO: 2619744 - DNA, 25 bp, Homo sapien
cagtcgttgctcacaaaagaaggaa

SEQ ID NO: 2619745 - DNA, 25 bp, Homo sapien
atgaaagagattgtccagggcagag

SEQ ID NO: 2619746 - DNA, 25 bp, Homo sapien
tattgagtaagcctacataacccac

SEQ ID NO: 2619747 - DNA, 25 bp, Homo sapien
cagagagttaggtataggctaaaac

SEQ ID NO: 2619748 - DNA, 25 bp, Homo sapien
ctgactgaacaatattaatagtgat

SEQ ID NO: 2619749 - DNA, 25 bp, Homo sapien
caatattaatagtgattgattccaa

SEQ ID NO: 2619750 - DNA, 25 bp, Homo sapien
gattccaagtacacctcacagaaca

SEQ ID NO: 2619751 - DNA, 25 bp, Homo sapien
gtgattgattccaagtacacctcac

SEQ ID NO: 2619752 - DNA, 25 bp, Homo sapien
tgatttaattccctccaatcgggtc

SEQ ID NO: 2619753 - DNA, 25 bp, Homo sapien
ggcaaaagtctagcaaaggcacatc

SEQ ID NO: 2619754 - DNA, 25 bp, Homo sapien
tcgggtctcttctatgacacatggg

SEQ ID NO: 2619755 - DNA, 25 bp, Homo sapien
tactcaaagacctaccatgtcatgg

SEQ ID NO: 2619756 - DNA, 25 bp, Homo sapien
tgctcggcctccttctgacaacaaa

SEQ ID NO: 2619757 - DNA, 25 bp, Homo sapien
cactagaatcaatattcacctgtat

SEQ ID NO: 2619758 - DNA, 25 bp, Homo sapien
cagtgtccagtctaacatctttgga

SEQ ID NO: 2619759 - DNA, 25 bp, Homo sapien
gcctgcctgtcacatcgtattcagc

SEQ ID NO: 2619760 - DNA, 25 bp, Homo sapien
gtcctccatcctacaagaaaactgg

SEQ ID NO: 2619761 - DNA, 25 bp, Homo sapien
tttttaaccaagtcatgttgtattc

SEQ ID NO: 2619762 - DNA, 25 bp, Homo sapien
tcatgctacatcgtcctccatccta

SEQ ID NO: 2619763 - DNA, 25 bp, Homo sapien
cactggagccttgcacaactggatt

SEQ ID NO: 2619764 - DNA, 25 bp, Homo sapien
ggtctcttgatcagatgtcactgag

SEQ ID NO: 2619765 - DNA, 25 bp, Homo sapien
gttatgtgggtctcttgatcagatg

SEQ ID NO: 2619766 - DNA, 25 bp, Homo sapien
tccgtagtgggcacatttagtggca

SEQ ID NO: 2619767 - DNA, 25 bp, Homo sapien
gggcacatttagtggcatccttttc

SEQ ID NO: 2619768 - DNA, 25 bp, Homo sapien
tcgcctaccacggtaaagtctctgc

SEQ ID NO: 2619769 - DNA, 25 bp, Homo sapien
gcctaccacggtaaagtctctgctt

SEQ ID NO: 2619770 - DNA, 25 bp, Homo sapien
tgaagaaggaatttcgcctaccacg

SEQ ID NO: 2619771 - DNA, 25 bp, Homo sapien
catgaagaaggaatttcgcctacca

SEQ ID NO: 2619772 - DNA, 25 bp, Homo sapien
ctatggagggtaatcaagcaggata

SEQ ID NO: 2619773 - DNA, 25 bp, Homo sapien
tctatgatgttattggtgtcatcaa

SEQ ID NO: 2619774 - DNA, 25 bp, Homo sapien
cttaggtctatgatgttattggtgt

SEQ ID NO: 2619775 - DNA, 25 bp, Homo sapien
ggtaatcaagcaggatatatctgtt

SEQ ID NO: 2619776 - DNA, 25 bp, Homo sapien
tacagtctattcatttgcctcctgg

SEQ ID NO: 2619777 - DNA, 25 bp, Homo sapien
ggctcactagagtattcttgactgg

SEQ ID NO: 2619778 - DNA, 25 bp, Homo sapien
gactggtggcgacctatagaccact

SEQ ID NO: 2619779 - DNA, 25 bp, Homo sapien
ggacagaatctgtttgaacactact

SEQ ID NO: 2619780 - DNA, 25 bp, Homo sapien
gaacctgtctaaagatgcacagcaa

SEQ ID NO: 2619781 - DNA, 25 bp, Homo sapien
gaatttagatcggtacatggtagac

SEQ ID NO: 2619782 - DNA, 25 bp, Homo sapien
tatcatggatatagaatttagatcg

SEQ ID NO: 2619783 - DNA, 25 bp, Homo sapien
aacataggaacctgtctaaagatgc

SEQ ID NO: 2619784 - DNA, 25 bp, Homo sapien
tccagccgctcgtgctccaagctcc

SEQ ID NO: 2619785 - DNA, 25 bp, Homo sapien
ctttggtcctgcatcctcagcgagg

SEQ ID NO: 2619786 - DNA, 25 bp, Homo sapien
tcagcgaggtctccagccgctcgtg

SEQ ID NO: 2619787 - DNA, 25 bp, Homo sapien
ttggtcctgcatcctcagcgaggtc

SEQ ID NO: 2619788 - DNA, 25 bp, Homo sapien
ctggtaaacacgtggccccttgctt

SEQ ID NO: 2619789 - DNA, 25 bp, Homo sapien
gacctctccaccgaggtcaccctct

SEQ ID NO: 2619790 - DNA, 25 bp, Homo sapien
gaggtcaccctcttcacacagagtg

SEQ ID NO: 2619791 - DNA, 25 bp, Homo sapien
ctgctttggttctggtaaacacgtg

SEQ ID NO: 2619792 - DNA, 25 bp, Homo sapien
tctgctcatgaaagcgggatctcca

SEQ ID NO: 2619793 - DNA, 25 bp, Homo sapien
gggatctccatggatgaaatgcaca

SEQ ID NO: 2619794 - DNA, 25 bp, Homo sapien
gaaagcgggatctccatggatgaaa

SEQ ID NO: 2619795 - DNA, 25 bp, Homo sapien
ctggtctgctcatgaaagcgggatc

SEQ ID NO: 2619796 - DNA, 25 bp, Homo sapien
cagaataacctgtagtccaaaagtt

SEQ ID NO: 2619797 - DNA, 25 bp, Homo sapien
aataacctgtagtccaaaagttcat

SEQ ID NO: 2619798 - DNA, 25 bp, Homo sapien
gaataacctgtagtccaaaagttca

SEQ ID NO: 2619799 - DNA, 25 bp, Homo sapien
cactgatattctctaatctccacag

SEQ ID NO: 2619800 - DNA, 25 bp, Homo sapien
ctcctgatctattagctcaatgcag

SEQ ID NO: 2619801 - DNA, 25 bp, Homo sapien
ctctaatctccacagctgagtactg

SEQ ID NO: 2619802 - DNA, 25 bp, Homo sapien
agtcctcctgatctattagctcaat

SEQ ID NO: 2619803 - DNA, 25 bp, Homo sapien
aaaaatgcgtacagagcccacgtta

SEQ ID NO: 2619804 - DNA, 25 bp, Homo sapien
gagcccacgttatactcccatgcat

SEQ ID NO: 2619805 - DNA, 25 bp, Homo sapien
gcgtacagagcccacgttatactcc

SEQ ID NO: 2619806 - DNA, 25 bp, Homo sapien
acagagcccacgttatactcccatg

SEQ ID NO: 2619807 - DNA, 25 bp, Homo sapien
tacatttactattaccacatcatcc

SEQ ID NO: 2619808 - DNA, 25 bp, Homo sapien
ccatcatatgtgaatatgtgcactg

SEQ ID NO: 2619809 - DNA, 25 bp, Homo sapien
tattaccacatcatccatcatatgt

SEQ ID NO: 2619810 - DNA, 25 bp, Homo sapien
cactgtgtatatgatgcaacatctg

SEQ ID NO: 2619811 - DNA, 25 bp, Homo sapien
tgtgagcaacacgaatcctgaactc

SEQ ID NO: 2619812 - DNA, 25 bp, Homo sapien
gggtaatgagtgcttagtacccaga

SEQ ID NO: 2619813 - DNA, 25 bp, Homo sapien
taatgagtgcttagtacccagaagt

SEQ ID NO: 2619814 - DNA, 25 bp, Homo sapien
tgggctttgggtgaaagaccatagt

SEQ ID NO: 2619815 - DNA, 25 bp, Homo sapien
tgttcgtgtataagttattctttct

SEQ ID NO: 2619816 - DNA, 25 bp, Homo sapien
ttgtgttcgtgtataagttattctt

SEQ ID NO: 2619817 - DNA, 25 bp, Homo sapien
tgtgttcgtgtataagttattcttt

SEQ ID NO: 2619818 - DNA, 25 bp, Homo sapien
gtgttcgtgtataagttattctttc

SEQ ID NO: 2619819 - DNA, 25 bp, Homo sapien
gatctcagaggcaatatccacagac

SEQ ID NO: 2619820 - DNA, 25 bp, Homo sapien
ctgagtgaatttacaccgaatgccg

SEQ ID NO: 2619821 - DNA, 25 bp, Homo sapien
agtgaatttacaccgaatgccgtca

SEQ ID NO: 2619822 - DNA, 25 bp, Homo sapien
tgagtgaatttacaccgaatgccgt

SEQ ID NO: 2619823 - DNA, 25 bp, Homo sapien
ctactgagtgaatttacaccgaatg

SEQ ID NO: 2619824 - DNA, 25 bp, Homo sapien
tgagttcttagaaccccactcccaa

SEQ ID NO: 2619825 - DNA, 25 bp, Homo sapien
tctatgtgagttcttagaaccccac

SEQ ID NO: 2619826 - DNA, 25 bp, Homo sapien
actcccaacaattgcaacccgctga

SEQ ID NO: 2619827 - DNA, 25 bp, Homo sapien
ttctctatgtgagttcttagaaccc

SEQ ID NO: 2619828 - DNA, 25 bp, Homo sapien
aaatacaccgtgcagtttcccaatt

SEQ ID NO: 2619829 - DNA, 25 bp, Homo sapien
ggcaatgaaatacaccgtgcagttt

SEQ ID NO: 2619830 - DNA, 25 bp, Homo sapien
tcaatcatctggcaatgaaatacac

SEQ ID NO: 2619831 - DNA, 25 bp, Homo sapien
tcatctggcaatgaaatacaccgtg

SEQ ID NO: 2619832 - DNA, 25 bp, Homo sapien
cagcccctcgtaatcactgttgaaa

SEQ ID NO: 2619833 - DNA, 25 bp, Homo sapien
tcagcccctcgtaatcactgttgaa

SEQ ID NO: 2619834 - DNA, 25 bp, Homo sapien
ctgtttcagcccctcgtaatcactg

SEQ ID NO: 2619835 - DNA, 25 bp, Homo sapien
tttcagcccctcgtaatcactgttg

SEQ ID NO: 2619836 - DNA, 25 bp, Homo sapien
gacagcagacttagcagtccctttg

SEQ ID NO: 2619837 - DNA, 25 bp, Homo sapien
caggatcttttatgtttagaggcca

SEQ ID NO: 2619838 - DNA, 25 bp, Homo sapien
cagcgatgtgtaaaaagccatgtat

SEQ ID NO: 2619839 - DNA, 25 bp, Homo sapien
tgaagcctgacaaattgtggtgagt

SEQ ID NO: 2619840 - DNA, 25 bp, Homo sapien
ctcggtcaggttcgaagcccttcat

SEQ ID NO: 2619841 - DNA, 25 bp, Homo sapien
caggtctcggtcaggttcgaagccc

SEQ ID NO: 2619842 - DNA, 25 bp, Homo sapien
tattgacaggtctcggtcaggttcg

SEQ ID NO: 2619843 - DNA, 25 bp, Homo sapien
agttgtattgacaggtctcggtcag

SEQ ID NO: 2619844 - DNA, 25 bp, Homo sapien
aaggagatcttccgcatctgtattt

SEQ ID NO: 2619845 - DNA, 25 bp, Homo sapien
ggagatcttccgcatctgtatttct

SEQ ID NO: 2619846 - DNA, 25 bp, Homo sapien
tctgtataaccaagagagtaagtag

SEQ ID NO: 2619847 - DNA, 25 bp, Homo sapien
gaaaggagatcttccgcatctgtat

SEQ ID NO: 2619848 - DNA, 25 bp, Homo sapien
aacttcttggcatttggccagctca

SEQ ID NO: 2619849 - DNA, 25 bp, Homo sapien
ttcctcaacaccacaaacttcttgg

SEQ ID NO: 2619850 - DNA, 25 bp, Homo sapien
taccaggaatgtggctatatccaca

SEQ ID NO: 2619851 - DNA, 25 bp, Homo sapien
cttggctaccaggaatgtggctata

SEQ ID NO: 2619852 - DNA, 25 bp, Homo sapien
aaatcccgttatcaatattagtggc

SEQ ID NO: 2619853 - DNA, 25 bp, Homo sapien
tgagcgcgatgcaaccatgagtggt

SEQ ID NO: 2619854 - DNA, 25 bp, Homo sapien
tcacattgttgagcgcgatgcaacc

SEQ ID NO: 2619855 - DNA, 25 bp, Homo sapien
catgagtggtccataattgagattc

SEQ ID NO: 2619856 - DNA, 25 bp, Homo sapien
cagaattcagatccacgtggtggtc

SEQ ID NO: 2619857 - DNA, 25 bp, Homo sapien
tgttcagctttctagaggctccttg

SEQ ID NO: 2619858 - DNA, 25 bp, Homo sapien
taccttggcgagtggccttgttcca

SEQ ID NO: 2619859 - DNA, 25 bp, Homo sapien
caaattcatgcaagttgttcacaga

SEQ ID NO: 2619860 - DNA, 25 bp, Homo sapien
gaagttctccagagcttatctattt

SEQ ID NO: 2619861 - DNA, 25 bp, Homo sapien
tttgaagttctccagagcttatcta

SEQ ID NO: 2619862 - DNA, 25 bp, Homo sapien
gagtcacgtcaaggtaattaacagt

SEQ ID NO: 2619863 - DNA, 25 bp, Homo sapien
taaaattcacaatacgagtcacgtc

SEQ ID NO: 2619864 - DNA, 25 bp, Homo sapien
catggaacgctctacatttttcaca

SEQ ID NO: 2619865 - DNA, 25 bp, Homo sapien
gaacaatgacctagaactgctggtc

SEQ ID NO: 2619866 - DNA, 25 bp, Homo sapien
cttgttcccaagcatggaacgctct

SEQ ID NO: 2619867 - DNA, 25 bp, Homo sapien
cttcacacttgaggagacaccatcc

SEQ ID NO: 2619868 - DNA, 25 bp, Homo sapien
ctggcttcagtgatgacagaggcta

SEQ ID NO: 2619869 - DNA, 25 bp, Homo sapien
gaggctattcctgtgtcaaacacac

SEQ ID NO: 2619870 - DNA, 25 bp, Homo sapien
tcagtgatgacagaggctattcctg

SEQ ID NO: 2619871 - DNA, 25 bp, Homo sapien
gcttcagtgatgacagaggctattc

SEQ ID NO: 2619872 - DNA, 25 bp, Homo sapien
catttgaacactcaggaggaaactg

SEQ ID NO: 2619873 - DNA, 25 bp, Homo sapien
tttaacagcaattaggtcacaagca

SEQ ID NO: 2619874 - DNA, 25 bp, Homo sapien
tgcacgttacaagggcttctttctc

SEQ ID NO: 2619875 - DNA, 25 bp, Homo sapien
gaggaaactgtaaaatgcacgttac

SEQ ID NO: 2619876 - DNA, 25 bp, Homo sapien
cattgggcctttggaaacctgttgg

SEQ ID NO: 2619877 - DNA, 25 bp, Homo sapien
gtgtcatcattgggcctttggaaac

SEQ ID NO: 2619878 - DNA, 25 bp, Homo sapien
tcattgggcctttggaaacctgttg

SEQ ID NO: 2619879 - DNA, 25 bp, Homo sapien
tcatcattgggcctttggaaacctg

SEQ ID NO: 2619880 - DNA, 25 bp, Homo sapien
tcaataagaggaggagtcagtaact

SEQ ID NO: 2619881 - DNA, 25 bp, Homo sapien
gaggaggagtcagtaactcccctga

SEQ ID NO: 2619882 - DNA, 25 bp, Homo sapien
gaacatcaataagaggaggagtcag

SEQ ID NO: 2619883 - DNA, 25 bp, Homo sapien
ggccagaagaacatcaataagagga

SEQ ID NO: 2619884 - DNA, 25 bp, Homo sapien
ttggggtttgggacaaagcatgtaa

SEQ ID NO: 2619885 - DNA, 25 bp, Homo sapien
aatttgccgctcacacagagacctg

SEQ ID NO: 2619886 - DNA, 25 bp, Homo sapien
tcttctgttggaaatttgccgctca

SEQ ID NO: 2619887 - DNA, 25 bp, Homo sapien
ggaaatttgccgctcacacagagac

SEQ ID NO: 2619888 - DNA, 25 bp, Homo sapien
tgttggaaatttgccgctcacacag

SEQ ID NO: 2619889 - DNA, 25 bp, Homo sapien
atcttgaaagaaagccgactttgtc

SEQ ID NO: 2619890 - DNA, 25 bp, Homo sapien
caataacagtattacctttcaaaca

SEQ ID NO: 2619891 - DNA, 25 bp, Homo sapien
tcttgaaagaaagccgactttgtct

SEQ ID NO: 2619892 - DNA, 25 bp, Homo sapien
aacagtattacctttcaaacaatct

SEQ ID NO: 2619893 - DNA, 25 bp, Homo sapien
taaagaaagtgtaatcagagcctgg

SEQ ID NO: 2619894 - DNA, 25 bp, Homo sapien
gggccagacctgtgggctacaaaat

SEQ ID NO: 2619895 - DNA, 25 bp, Homo sapien
aactcttgcctgcagtaacttggaa

SEQ ID NO: 2619896 - DNA, 25 bp, Homo sapien
taaagtgctagatgctcctcaacgt

SEQ ID NO: 2619897 - DNA, 25 bp, Homo sapien
attttctgttatactgatgccaata

SEQ ID NO: 2619898 - DNA, 25 bp, Homo sapien
ttctgttatactgatgccaatatta

SEQ ID NO: 2619899 - DNA, 25 bp, Homo sapien
tttcttcatggtcaatttgataatt

SEQ ID NO: 2619900 - DNA, 25 bp, Homo sapien
tactgatgccaatattaatgtcagt

SEQ ID NO: 2619901 - DNA, 25 bp, Homo sapien
aaagtctctcttgaagttctgcaac

SEQ ID NO: 2619902 - DNA, 25 bp, Homo sapien
tttgcatctgggcacagacaggact

SEQ ID NO: 2619903 - DNA, 25 bp, Homo sapien
cagtattgcttgtttggcagaagct

SEQ ID NO: 2619904 - DNA, 25 bp, Homo sapien
tgtctctctttctatgctgctttgg

SEQ ID NO: 2619905 - DNA, 25 bp, Homo sapien
ccaattacttctgggtagttggaat

SEQ ID NO: 2619906 - DNA, 25 bp, Homo sapien
agtataaccaattacttctgggtag

SEQ ID NO: 2619907 - DNA, 25 bp, Homo sapien
tctgggtagttggaatgcaactcag

SEQ ID NO: 2619908 - DNA, 25 bp, Homo sapien
tattttagaagactatccaagaatg

SEQ ID NO: 2619909 - DNA, 25 bp, Homo sapien
ctcagtagcattttgtccatatgga

SEQ ID NO: 2619910 - DNA, 25 bp, Homo sapien
gaaaagcatctgtaactacgcacag

SEQ ID NO: 2619911 - DNA, 25 bp, Homo sapien
ttatgttgtagtcccctcagtagca

SEQ ID NO: 2619912 - DNA, 25 bp, Homo sapien
tatgacatatttctcctacaacgtg

SEQ ID NO: 2619913 - DNA, 25 bp, Homo sapien
tgtgcagttctgcttacccacgttc

SEQ ID NO: 2619914 - DNA, 25 bp, Homo sapien
gacaaccatgtttctgctgtgcagt

SEQ ID NO: 2619915 - DNA, 25 bp, Homo sapien
tatcagcagtgcctcttatttctgc

SEQ ID NO: 2619916 - DNA, 25 bp, Homo sapien
tgctccccaagtataggctctagac

SEQ ID NO: 2619917 - DNA, 25 bp, Homo sapien
agctttcaggggcaactggagctgc

SEQ ID NO: 2619918 - DNA, 25 bp, Homo sapien
tacattatctgccaaaagcgtgctc

SEQ ID NO: 2619919 - DNA, 25 bp, Homo sapien
tgctcctgtgcttcttaaggcagta

SEQ ID NO: 2619920 - DNA, 25 bp, Homo sapien
tgccaaaagcgtgctcctgtgcttc

SEQ ID NO: 2619921 - DNA, 25 bp, Homo sapien
attcagtaaggacgatccaatatta

SEQ ID NO: 2619922 - DNA, 25 bp, Homo sapien
aacatactgagtttaaggtataaga

SEQ ID NO: 2619923 - DNA, 25 bp, Homo sapien
tattaaacatactgagtttaaggta

SEQ ID NO: 2619924 - DNA, 25 bp, Homo sapien
ttcagtaaggacgatccaatattaa

SEQ ID NO: 2619925 - DNA, 25 bp, Homo sapien
gatagatctggacaagagggtagcc

SEQ ID NO: 2619926 - DNA, 25 bp, Homo sapien
gagcggactctatagaagactcgcc

SEQ ID NO: 2619927 - DNA, 25 bp, Homo sapien
gtagccaattaggtaatggcctcca

SEQ ID NO: 2619928 - DNA, 25 bp, Homo sapien
aagactcgcctttgaactgtgtgga

SEQ ID NO: 2619929 - DNA, 25 bp, Homo sapien
cctcatctgaataagccgtacgttg

SEQ ID NO: 2619930 - DNA, 25 bp, Homo sapien
tttcccatttgcactcagccagtga

SEQ ID NO: 2619931 - DNA, 25 bp, Homo sapien
gttgtttgctgatgctcactgctgc

SEQ ID NO: 2619932 - DNA, 25 bp, Homo sapien
tatgtatgattcctgactgttcctc

SEQ ID NO: 2619933 - DNA, 25 bp, Homo sapien
taggggtcatcaggctagagacaga

SEQ ID NO: 2619934 - DNA, 25 bp, Homo sapien
ttgatgaaactaggggtcatcaggc

SEQ ID NO: 2619935 - DNA, 25 bp, Homo sapien
tgtccttgcctttcacagtgttgat

SEQ ID NO: 2619936 - DNA, 25 bp, Homo sapien
cacagtgttgatgaaactaggggtc

SEQ ID NO: 2619937 - DNA, 25 bp, Homo sapien
tgggaggcactttcatgggaaacga

SEQ ID NO: 2619938 - DNA, 25 bp, Homo sapien
ctgctatagtgacctgaatgaccaa

SEQ ID NO: 2619939 - DNA, 25 bp, Homo sapien
atagtgacctgaatgaccaatttgg

SEQ ID NO: 2619940 - DNA, 25 bp, Homo sapien
gaggcactttcatgggaaacgacat

SEQ ID NO: 2619941 - DNA, 25 bp, Homo sapien
cggtttcaaaggtgtcctcatctgc

SEQ ID NO: 2619942 - DNA, 25 bp, Homo sapien
gacggtttcaaaggtgtcctcatct

SEQ ID NO: 2619943 - DNA, 25 bp, Homo sapien
tcaatatgacggtttcaaaggtgtc

SEQ ID NO: 2619944 - DNA, 25 bp, Homo sapien
tatgacggtttcaaaggtgtcctca

SEQ ID NO: 2619945 - DNA, 25 bp, Homo sapien
gtaagtcaggagtacttgccttcat

SEQ ID NO: 2619946 - DNA, 25 bp, Homo sapien
ggtaagtcaggagtacttgccttca

SEQ ID NO: 2619947 - DNA, 25 bp, Homo sapien
tttagaaattgatctcgtcttgttt

SEQ ID NO: 2619948 - DNA, 25 bp, Homo sapien
gattccaacaatcacctttatctct

SEQ ID NO: 2619949 - DNA, 25 bp, Homo sapien
aattgatctcgtcttgtttttatac

SEQ ID NO: 2619950 - DNA, 25 bp, Homo sapien
tgttgattccaacaatcacctttat

SEQ ID NO: 2619951 - DNA, 25 bp, Homo sapien
ataacatgagctttaggagcagtaa

SEQ ID NO: 2619952 - DNA, 25 bp, Homo sapien
ctattgacataacatgagctttagg

SEQ ID NO: 2619953 - DNA, 25 bp, Homo sapien
cataacatgagctttaggagcagta

SEQ ID NO: 2619954 - DNA, 25 bp, Homo sapien
gacgaatacattgcaaactgacaag

SEQ ID NO: 2619955 - DNA, 25 bp, Homo sapien
tccatcttgctgagactcagaccac

SEQ ID NO: 2619956 - DNA, 25 bp, Homo sapien
accttgactgaatgctccagcagca

SEQ ID NO: 2619957 - DNA, 25 bp, Homo sapien
caagagaaggtatttgataaccggg

SEQ ID NO: 2619958 - DNA, 25 bp, Homo sapien
tggagcaggttaattggagccacca

SEQ ID NO: 2619959 - DNA, 25 bp, Homo sapien
caggttaattggagccaccacatcc

SEQ ID NO: 2619960 - DNA, 25 bp, Homo sapien
taatctctttggcccgacttcgcta

SEQ ID NO: 2619961 - DNA, 25 bp, Homo sapien
gagcaggttaattggagccaccaca

SEQ ID NO: 2619962 - DNA, 25 bp, Homo sapien
ccacctttgccacttattttgccat

SEQ ID NO: 2619963 - DNA, 25 bp, Homo sapien
cacctttgccacttattttgccatt

SEQ ID NO: 2619964 - DNA, 25 bp, Homo sapien
caggcaaccttcttgataaaatgga

SEQ ID NO: 2619965 - DNA, 25 bp, Homo sapien
aggcaaccttcttgataaaatggaa

SEQ ID NO: 2619966 - DNA, 25 bp, Homo sapien
cacgatcatcaaagtgcttatgcta

SEQ ID NO: 2619967 - DNA, 25 bp, Homo sapien
tgtcacgatcatcaaagtgcttatg

SEQ ID NO: 2619968 - DNA, 25 bp, Homo sapien
atgctaatatttcccagatttgaac

SEQ ID NO: 2619969 - DNA, 25 bp, Homo sapien
tatttcccagatttgaactttggga

SEQ ID NO: 2619970 - DNA, 25 bp, Homo sapien
gaggccctagagtccatttggcaga

SEQ ID NO: 2619971 - DNA, 25 bp, Homo sapien
cgaagtgtgagatcgccgtcagcga

SEQ ID NO: 2619972 - DNA, 25 bp, Homo sapien
tcagcgatgggtaatgtgtgaacgc

SEQ ID NO: 2619973 - DNA, 25 bp, Homo sapien
tgtgaacgctgccagtgtgtgttga

SEQ ID NO: 2619974 - DNA, 25 bp, Homo sapien
tgtactgtccccattcttgcttctc

SEQ ID NO: 2619975 - DNA, 25 bp, Homo sapien
ttttgtcctagtgacagcacatggc

SEQ ID NO: 2619976 - DNA, 25 bp, Homo sapien
tagatcttccaaaggtacagcatcc

SEQ ID NO: 2619977 - DNA, 25 bp, Homo sapien
gggctcttcacactagatcttccaa

SEQ ID NO: 2619978 - DNA, 25 bp, Homo sapien
gagtctgttgaggtaaaacccactg

SEQ ID NO: 2619979 - DNA, 25 bp, Homo sapien
gaaaataagagacacaacggcaacc

SEQ ID NO: 2619980 - DNA, 25 bp, Homo sapien
taaatttaggatttggagcccagga

SEQ ID NO: 2619981 - DNA, 25 bp, Homo sapien
ggcaaccaagggtgcatccttccca

SEQ ID NO: 2619982 - DNA, 25 bp, Homo sapien
tctctctggctagaccatctctggt

SEQ ID NO: 2619983 - DNA, 25 bp, Homo sapien
tgcagctggcgtgtttctgtcaacc

SEQ ID NO: 2619984 - DNA, 25 bp, Homo sapien
caccagtcgtgtcctaattgtgaga

SEQ ID NO: 2619985 - DNA, 25 bp, Homo sapien
agcataacgcagacagcaacacagg

SEQ ID NO: 2619986 - DNA, 25 bp, Homo sapien
gtgtctctgactggtacagcaggcg

SEQ ID NO: 2619987 - DNA, 25 bp, Homo sapien
tcatcttattaacatcacagtaggg

SEQ ID NO: 2619988 - DNA, 25 bp, Homo sapien
tcacagtagggaggtgtctctgact

SEQ ID NO: 2619989 - DNA, 25 bp, Homo sapien
tgctccttctcgtgaactttgccat

SEQ ID NO: 2619990 - DNA, 25 bp, Homo sapien
tgggggagaatttggcagagcaaca

SEQ ID NO: 2619991 - DNA, 25 bp, Homo sapien
taagagtggcccggtatggatttcc

SEQ ID NO: 2619992 - DNA, 25 bp, Homo sapien
tgttgtaagagtggcccggtatgga

SEQ ID NO: 2619993 - DNA, 25 bp, Homo sapien
gtggcccggtatggatttccctcca

SEQ ID NO: 2619994 - DNA, 25 bp, Homo sapien
cagccgacacagaatcctcgttctc

SEQ ID NO: 2619995 - DNA, 25 bp, Homo sapien
gccgacacagaatcctcgttctcct

SEQ ID NO: 2619996 - DNA, 25 bp, Homo sapien
agcagccgacacagaatcctcgttc

SEQ ID NO: 2619997 - DNA, 25 bp, Homo sapien
gcagccgacacagaatcctcgttct

SEQ ID NO: 2619998 - DNA, 25 bp, Homo sapien
tatggaaatacaatccacaaagtgc

SEQ ID NO: 2619999 - DNA, 25 bp, Homo sapien
gatccatcctgtgcatagtgacata

SEQ ID NO: 2620000 - DNA, 25 bp, Homo sapien
catagtgacatagagtgtattttct

SEQ ID NO: 2620001 - DNA, 25 bp, Homo sapien
tccgtctgccagagttagttggcag

SEQ ID NO: 2620002 - DNA, 25 bp, Homo sapien
cctctccccagtccaccatagttca

SEQ ID NO: 2620003 - DNA, 25 bp, Homo sapien
tctcccgcttatctttttctccttc

SEQ ID NO: 2620004 - DNA, 25 bp, Homo sapien
ctctccccagtccaccatagttcat

SEQ ID NO: 2620005 - DNA, 25 bp, Homo sapien
tgctgattttactttctcccgctta

SEQ ID NO: 2620006 - DNA, 25 bp, Homo sapien
gtgaactttggaagctctatgggtg

SEQ ID NO: 2620007 - DNA, 25 bp, Homo sapien
aactttggaagctctatgggtgtgg

SEQ ID NO: 2620008 - DNA, 25 bp, Homo sapien
gaactttggaagctctatgggtgtg

SEQ ID NO: 2620009 - DNA, 25 bp, Homo sapien
actttggaagctctatgggtgtggg

SEQ ID NO: 2620010 - DNA, 25 bp, Homo sapien
aggctccagcaaggaccagtgaagg

SEQ ID NO: 2620011 - DNA, 25 bp, Homo sapien
aggaccagtgaaggtctagttacca

SEQ ID NO: 2620012 - DNA, 25 bp, Homo sapien
tctccctatctcctcatatgctttg

SEQ ID NO: 2620013 - DNA, 25 bp, Homo sapien
tatctcctcatatgctttggtgcca

SEQ ID NO: 2620014 - DNA, 25 bp, Homo sapien
gaaccagagccaagtcggtagctgc

SEQ ID NO: 2620015 - DNA, 25 bp, Homo sapien
aaattaccaggtcattcactagaga

SEQ ID NO: 2620016 - DNA, 25 bp, Homo sapien
tagctgccggtggtaggatattcac

SEQ ID NO: 2620017 - DNA, 25 bp, Homo sapien
tcaaactcttgtgaggaaccagagc

SEQ ID NO: 2620018 - DNA, 25 bp, Homo sapien
gtgtctgccactcttgtctcatact

SEQ ID NO: 2620019 - DNA, 25 bp, Homo sapien
tgtctgccactcttgtctcatactc

SEQ ID NO: 2620020 - DNA, 25 bp, Homo sapien
tcacatagttggtgaaggagctggg

SEQ ID NO: 2620021 - DNA, 25 bp, Homo sapien
agtgtctgccactcttgtctcatac

SEQ ID NO: 2620022 - DNA, 25 bp, Homo sapien
cagttctacaaaagcccaggcaatg

SEQ ID NO: 2620023 - DNA, 25 bp, Homo sapien
tctgctgccaggaatatctgatgac

SEQ ID NO: 2620024 - DNA, 25 bp, Homo sapien
tatcaaggtttgcactagagtccgt

SEQ ID NO: 2620025 - DNA, 25 bp, Homo sapien
gatcttaagcacacaactcagtggc

SEQ ID NO: 2620026 - DNA, 25 bp, Homo sapien
gaatcatccgaatgcctctttctcg

SEQ ID NO: 2620027 - DNA, 25 bp, Homo sapien
aatgcctctttctcggtatattcca

SEQ ID NO: 2620028 - DNA, 25 bp, Homo sapien
tttctcggtatattccatggtgtcc

SEQ ID NO: 2620029 - DNA, 25 bp, Homo sapien
ctgaggaatcatccgaatgcctctt

SEQ ID NO: 2620030 - DNA, 25 bp, Homo sapien
tgggcagacgattgccttgcacaaa

SEQ ID NO: 2620031 - DNA, 25 bp, Homo sapien
accctgctgttgtgggcagacgatt

SEQ ID NO: 2620032 - DNA, 25 bp, Homo sapien
tccgcaatcatagacagtcaccctg

SEQ ID NO: 2620033 - DNA, 25 bp, Homo sapien
cctttctggtgccattggaagtgac

SEQ ID NO: 2620034 - DNA, 25 bp, Homo sapien
cagaacagaagccattgtatggtcc

SEQ ID NO: 2620035 - DNA, 25 bp, Homo sapien
agaacagaagccattgtatggtcct

SEQ ID NO: 2620036 - DNA, 25 bp, Homo sapien
tcaaccagttgttctcctgtccttt

SEQ ID NO: 2620037 - DNA, 25 bp, Homo sapien
gtggctgaatttccttaatgaccaa

SEQ ID NO: 2620038 - DNA, 25 bp, Homo sapien
tcaagcatgacacccaaaacgctgt

SEQ ID NO: 2620039 - DNA, 25 bp, Homo sapien
cttaatgaccaattcattgtgtgtc

SEQ ID NO: 2620040 - DNA, 25 bp, Homo sapien
actgaaagacgtttagggaggtgca

SEQ ID NO: 2620041 - DNA, 25 bp, Homo sapien
ggaggtgcaatacctctccactgct

SEQ ID NO: 2620042 - DNA, 25 bp, Homo sapien
tgaaagacgtttagggaggtgcaat

SEQ ID NO: 2620043 - DNA, 25 bp, Homo sapien
tagggaggtgcaatacctctccact

SEQ ID NO: 2620044 - DNA, 25 bp, Homo sapien
tgaatatgctcggtccaaggaagct

SEQ ID NO: 2620045 - DNA, 25 bp, Homo sapien
gcagagatgtctctgttcgcagcaa

SEQ ID NO: 2620046 - DNA, 25 bp, Homo sapien
caaggaagctatcatgggatggaaa

SEQ ID NO: 2620047 - DNA, 25 bp, Homo sapien
ggctgcatagcgctggacttgaata

SEQ ID NO: 2620048 - DNA, 25 bp, Homo sapien
ccttcatgtccagcttgtgccttgt

SEQ ID NO: 2620049 - DNA, 25 bp, Homo sapien
gacctctgctaaaccataatcaact

SEQ ID NO: 2620050 - DNA, 25 bp, Homo sapien
tgtgtagctgtatgctcagagagcc

SEQ ID NO: 2620051 - DNA, 25 bp, Homo sapien
cttgttggccagctgttttctgtgt

SEQ ID NO: 2620052 - DNA, 25 bp, Homo sapien
tggtgtgaatcttggtttgcaattt

SEQ ID NO: 2620053 - DNA, 25 bp, Homo sapien
acagctgaaagttatagtaatagca

SEQ ID NO: 2620054 - DNA, 25 bp, Homo sapien
gatgttggtgtgaatcttggtttgc

SEQ ID NO: 2620055 - DNA, 25 bp, Homo sapien
cacaacagctgaaagttatagtaat

SEQ ID NO: 2620056 - DNA, 25 bp, Homo sapien
tactggaggagatttcaggccccat

SEQ ID NO: 2620057 - DNA, 25 bp, Homo sapien
tgcatttgagctagaatcctcagaa

SEQ ID NO: 2620058 - DNA, 25 bp, Homo sapien
aatggctttactggaggagatttca

SEQ ID NO: 2620059 - DNA, 25 bp, Homo sapien
ctgcatttgagctagaatcctcaga

SEQ ID NO: 2620060 - DNA, 25 bp, Homo sapien
ctcctcttccaactccctgaccctt

SEQ ID NO: 2620061 - DNA, 25 bp, Homo sapien
ctgacccttctttccatgtttcttt

SEQ ID NO: 2620062 - DNA, 25 bp, Homo sapien
ccaactccctgacccttctttccat

SEQ ID NO: 2620063 - DNA, 25 bp, Homo sapien
cctcttccaactccctgacccttct

SEQ ID NO: 2620064 - DNA, 25 bp, Homo sapien
tttaagaaagtggaagtatcgcatg

SEQ ID NO: 2620065 - DNA, 25 bp, Homo sapien
gcagatgtcttatgtaatgttgcct

SEQ ID NO: 2620066 - DNA, 25 bp, Homo sapien
tgcagatgtcttatgtaatgttgcc

SEQ ID NO: 2620067 - DNA, 25 bp, Homo sapien
agaaagtggaagtatcgcatgtcat

SEQ ID NO: 2620068 - DNA, 25 bp, Homo sapien
tatggccgagctatgcacacttcag

SEQ ID NO: 2620069 - DNA, 25 bp, Homo sapien
ctatgcacacttcagaggtcatgct

SEQ ID NO: 2620070 - DNA, 25 bp, Homo sapien
tgaatatggccgagctatgcacact

SEQ ID NO: 2620071 - DNA, 25 bp, Homo sapien
cgagctatgcacacttcagaggtca

SEQ ID NO: 2620072 - DNA, 25 bp, Homo sapien
tcaggtccaaacgacatttgtgaga

SEQ ID NO: 2620073 - DNA, 25 bp, Homo sapien
caggtccaaacgacatttgtgagat

SEQ ID NO: 2620074 - DNA, 25 bp, Homo sapien
aggtccaaacgacatttgtgagatc

SEQ ID NO: 2620075 - DNA, 25 bp, Homo sapien
gcccggtgactccatttgactggcc

SEQ ID NO: 2620076 - DNA, 25 bp, Homo sapien
ggtgactccatttgactggcctggc

SEQ ID NO: 2620077 - DNA, 25 bp, Homo sapien
ccggtgactccatttgactggcctg

SEQ ID NO: 2620078 - DNA, 25 bp, Homo sapien
ttatttgttgccgcccggtgactcc

SEQ ID NO: 2620079 - DNA, 25 bp, Homo sapien
aaaccactgttgttgagtggaatac

SEQ ID NO: 2620080 - DNA, 25 bp, Homo sapien
cttctgactttgtagtgaaaaccac

SEQ ID NO: 2620081 - DNA, 25 bp, Homo sapien
gaatacaggtcgctagtttctctgc

SEQ ID NO: 2620082 - DNA, 25 bp, Homo sapien
ttgatcctcttctgactttgtagtg

SEQ ID NO: 2620083 - DNA, 25 bp, Homo sapien
aacctaaaagttacagtgacttcag

SEQ ID NO: 2620084 - DNA, 25 bp, Homo sapien
acctaaaagttacagtgacttcagt

SEQ ID NO: 2620085 - DNA, 25 bp, Homo sapien
gcatggaatggttttagcacagatg

SEQ ID NO: 2620086 - DNA, 25 bp, Homo sapien
ggcagccagtgcttcaaagaagtgt

SEQ ID NO: 2620087 - DNA, 25 bp, Homo sapien
catggaatggttttagcacagatgt

SEQ ID NO: 2620088 - DNA, 25 bp, Homo sapien
atggaatggttttagcacagatgtt

SEQ ID NO: 2620089 - DNA, 25 bp, Homo sapien
agctggctcttgtgggcacacactg

SEQ ID NO: 2620090 - DNA, 25 bp, Homo sapien
cagctcttgggatgcgaaggttacg

SEQ ID NO: 2620091 - DNA, 25 bp, Homo sapien
gaaggttacgggctcgggagagctg

SEQ ID NO: 2620092 - DNA, 25 bp, Homo sapien
aaactgcagctcttgggatgcgaag

SEQ ID NO: 2620093 - DNA, 25 bp, Homo sapien
cgccgcggtcgccggctctgccgtt

SEQ ID NO: 2620094 - DNA, 25 bp, Homo sapien
ggctctgccgttcttgctgtcgcgg

SEQ ID NO: 2620095 - DNA, 25 bp, Homo sapien
ctctgctcgccttcctgcgcccgcg

SEQ ID NO: 2620096 - DNA, 25 bp, Homo sapien
cggctctgccgttcttgctgtcgcg

SEQ ID NO: 2620097 - DNA, 25 bp, Homo sapien
ggaggcggaggagcggtgcccaggc

SEQ ID NO: 2620098 - DNA, 25 bp, Homo sapien
aggaggcggaggagcggtgcccagg

SEQ ID NO: 2620099 - DNA, 25 bp, Homo sapien
caggaggcggaggagcggtgcccag

SEQ ID NO: 2620100 - DNA, 25 bp, Homo sapien
gaaaggcagcgggttcttctgcggc

SEQ ID NO: 2620101 - DNA, 25 bp, Homo sapien
gggttcttctgcggcggcccgcttc

SEQ ID NO: 2620102 - DNA, 25 bp, Homo sapien
gcctctgccggcgtagagaaaggca

SEQ ID NO: 2620103 - DNA, 25 bp, Homo sapien
ggtaattgaccagccaactttgcaa

SEQ ID NO: 2620104 - DNA, 25 bp, Homo sapien
ggcaggtggagataaatcaagcccc

SEQ ID NO: 2620105 - DNA, 25 bp, Homo sapien
atcaagccccaaacggctcggcggg

SEQ ID NO: 2620106 - DNA, 25 bp, Homo sapien
aagcagtcaccacgcagacccttat

SEQ ID NO: 2620107 - DNA, 25 bp, Homo sapien
gaaatgtaactcagcccaagcagtc

SEQ ID NO: 2620108 - DNA, 25 bp, Homo sapien
tggactttccttgcaacctaagcat

SEQ ID NO: 2620109 - DNA, 25 bp, Homo sapien
ccattttcggagtccagtgttggac

SEQ ID NO: 2620110 - DNA, 25 bp, Homo sapien
gcgaactgcgccttccatatgactt

SEQ ID NO: 2620111 - DNA, 25 bp, Homo sapien
agatttgagcctggccagccgtgga

SEQ ID NO: 2620112 - DNA, 25 bp, Homo sapien
tttcctttcagctagttaagcctca

SEQ ID NO: 2620113 - DNA, 25 bp, Homo sapien
taagaagcacttcagaacatactca

SEQ ID NO: 2620114 - DNA, 25 bp, Homo sapien
tggaaagtgctcacatagcctgatg

SEQ ID NO: 2620115 - DNA, 25 bp, Homo sapien
tactcataaagttgaagcccaagcc

SEQ ID NO: 2620116 - DNA, 25 bp, Homo sapien
ggctgtttctatggtgccaatgggc

SEQ ID NO: 2620117 - DNA, 25 bp, Homo sapien
tagaaaaatggcctgcagaatttaa

SEQ ID NO: 2620118 - DNA, 25 bp, Homo sapien
gaaaaatggcctgcagaatttaatt

SEQ ID NO: 2620119 - DNA, 25 bp, Homo sapien
gatgtagaaaaatggcctgcagaat

SEQ ID NO: 2620120 - DNA, 25 bp, Homo sapien
ttaggatgtagaaaaatggcctgca

SEQ ID NO: 2620121 - DNA, 25 bp, Homo sapien
aaatagtaatggttgcaagaacata

SEQ ID NO: 2620122 - DNA, 25 bp, Homo sapien
tgcctaattgcttcattggataata

SEQ ID NO: 2620123 - DNA, 25 bp, Homo sapien
tcaacttggtatttccatgatttta

SEQ ID NO: 2620124 - DNA, 25 bp, Homo sapien
taacttaatagactttaatgacaat

SEQ ID NO: 2620125 - DNA, 25 bp, Homo sapien
taaaagatcaagtgcaagatggcac

SEQ ID NO: 2620126 - DNA, 25 bp, Homo sapien
gcttgttagcttgtgcaaattgtga

SEQ ID NO: 2620127 - DNA, 25 bp, Homo sapien
gacgaatgtgcctaagcttgttagc

SEQ ID NO: 2620128 - DNA, 25 bp, Homo sapien
acatttgcattgattaactgacgaa

SEQ ID NO: 2620129 - DNA, 25 bp, Homo sapien
gggaactaagacgatcggagagaaa

SEQ ID NO: 2620130 - DNA, 25 bp, Homo sapien
caccttggggaactaagacgatcgg

SEQ ID NO: 2620131 - DNA, 25 bp, Homo sapien
gacgatcggagagaaatgtgcctcc

SEQ ID NO: 2620132 - DNA, 25 bp, Homo sapien
taagacgatcggagagaaatgtgcc

SEQ ID NO: 2620133 - DNA, 25 bp, Homo sapien
ctatgcctttgccttgtcagattct

SEQ ID NO: 2620134 - DNA, 25 bp, Homo sapien
tttgccttgtcagattcttcacttt

SEQ ID NO: 2620135 - DNA, 25 bp, Homo sapien
acttttcatcacatgcgcccccttt

SEQ ID NO: 2620136 - DNA, 25 bp, Homo sapien
ttttcatcacatgcgccccctttaa

SEQ ID NO: 2620137 - DNA, 25 bp, Homo sapien
gattgttctcgggatcaaaccatga

SEQ ID NO: 2620138 - DNA, 25 bp, Homo sapien
gctgcgtgaagtgttggtccaatcc

SEQ ID NO: 2620139 - DNA, 25 bp, Homo sapien
ggtcctcggaagaaagctgcgtgaa

SEQ ID NO: 2620140 - DNA, 25 bp, Homo sapien
tcagtgtggaaaacctacagcagct

SEQ ID NO: 2620141 - DNA, 25 bp, Homo sapien
cctggcatcttccttggtgtggggg

SEQ ID NO: 2620142 - DNA, 25 bp, Homo sapien
gatgtgtcttgctgaccagttccct

SEQ ID NO: 2620143 - DNA, 25 bp, Homo sapien
caggcattgacctaaaagggtgggt

SEQ ID NO: 2620144 - DNA, 25 bp, Homo sapien
gctccagctggccatttgacatcac

SEQ ID NO: 2620145 - DNA, 25 bp, Homo sapien
ttgctcgagtggctgagatggctct

SEQ ID NO: 2620146 - DNA, 25 bp, Homo sapien
gaggtctgcatcacatcaggcagag

SEQ ID NO: 2620147 - DNA, 25 bp, Homo sapien
tcccaaagctgacaccctggtgagg

SEQ ID NO: 2620148 - DNA, 25 bp, Homo sapien
tcaggcagagcatcaaattcttcct

SEQ ID NO: 2620149 - DNA, 25 bp, Homo sapien
tgacaccctggtgaggtctgcatca

SEQ ID NO: 2620150 - DNA, 25 bp, Homo sapien
ttttctcgcattggtcttgctgcca

SEQ ID NO: 2620151 - DNA, 25 bp, Homo sapien
gcagtagagagctttgcaacaatca

SEQ ID NO: 2620152 - DNA, 25 bp, Homo sapien
catataggccattaagtgagaggag

SEQ ID NO: 2620153 - DNA, 25 bp, Homo sapien
aagcgcctcccacaagactgagtca

SEQ ID NO: 2620154 - DNA, 25 bp, Homo sapien
ccatttgcaactctcagagctgaga

SEQ ID NO: 2620155 - DNA, 25 bp, Homo sapien
gaatcagttcccaagaggtgggtag

SEQ ID NO: 2620156 - DNA, 25 bp, Homo sapien
aaactggtcatgaagcctactcggg

SEQ ID NO: 2620157 - DNA, 25 bp, Homo sapien
tgtatagtccagactgcccaagcgg

SEQ ID NO: 2620158 - DNA, 25 bp, Homo sapien
ataaaaacgaacatgtggccaggcg

SEQ ID NO: 2620159 - DNA, 25 bp, Homo sapien
taatgactataaaaacgaacatgtg

SEQ ID NO: 2620160 - DNA, 25 bp, Homo sapien
aacaaacaaacatgcgaatacttca

SEQ ID NO: 2620161 - DNA, 25 bp, Homo sapien
catgcgaatacttcacagcacttgg

SEQ ID NO: 2620162 - DNA, 25 bp, Homo sapien
ttgctgagaataatgatttccagcg

SEQ ID NO: 2620163 - DNA, 25 bp, Homo sapien
tcccctagcccctcacccacaaaca

SEQ ID NO: 2620164 - DNA, 25 bp, Homo sapien
ctcacccacaaacaggccccggtgt

SEQ ID NO: 2620165 - DNA, 25 bp, Homo sapien
cctagcccctcacccacaaacaggc

SEQ ID NO: 2620166 - DNA, 25 bp, Homo sapien
tggccctttgggcacgtggaccctg

SEQ ID NO: 2620167 - DNA, 25 bp, Homo sapien
gcctggctcttgatggccctttggg

SEQ ID NO: 2620168 - DNA, 25 bp, Homo sapien
gatggccctttgggcacgtggaccc

SEQ ID NO: 2620169 - DNA, 25 bp, Homo sapien
tgcctggctcttgatggccctttgg

SEQ ID NO: 2620170 - DNA, 25 bp, Homo sapien
ctgccacggtccccactgtccttcc

SEQ ID NO: 2620171 - DNA, 25 bp, Homo sapien
ccactggggttttcctagacctgct

SEQ ID NO: 2620172 - DNA, 25 bp, Homo sapien
ggctgccacggtccccactgtcctt

SEQ ID NO: 2620173 - DNA, 25 bp, Homo sapien
ctggggccttatgttcaaatgccat

SEQ ID NO: 2620174 - DNA, 25 bp, Homo sapien
tttcactgcaccgtatccagcctca

SEQ ID NO: 2620175 - DNA, 25 bp, Homo sapien
cgagtctgtgcgtagtgagtgcccc

SEQ ID NO: 2620176 - DNA, 25 bp, Homo sapien
gctgatggcaccgtcgagtctgtgc

SEQ ID NO: 2620177 - DNA, 25 bp, Homo sapien
caccgtcgagtctgtgcgtagtgag

SEQ ID NO: 2620178 - DNA, 25 bp, Homo sapien
gataatcggatcctgtgtattcctc

SEQ ID NO: 2620179 - DNA, 25 bp, Homo sapien
ctttgctgggaaaccactagtcctc

SEQ ID NO: 2620180 - DNA, 25 bp, Homo sapien
cagcaagaagtagcggtaagttctc

SEQ ID NO: 2620181 - DNA, 25 bp, Homo sapien
gctcctttttgaacggttcagctca

SEQ ID NO: 2620182 - DNA, 25 bp, Homo sapien
tgtctttagtagtcacacagagtgt

SEQ ID NO: 2620183 - DNA, 25 bp, Homo sapien
gggatctgtgttgacgttcacccct

SEQ ID NO: 2620184 - DNA, 25 bp, Homo sapien
tttacaaccatcacctgattcacct

SEQ ID NO: 2620185 - DNA, 25 bp, Homo sapien
gaaatggagtgaagtacgagtagct

SEQ ID NO: 2620186 - DNA, 25 bp, Homo sapien
aaatggcatcacaattggagaggaa

SEQ ID NO: 2620187 - DNA, 25 bp, Homo sapien
gaatatgtggcattatagatgtaaa

SEQ ID NO: 2620188 - DNA, 25 bp, Homo sapien
gatgtaaaatggcatcacaattgga

SEQ ID NO: 2620189 - DNA, 25 bp, Homo sapien
aagaatatgtggcattatagatgta

SEQ ID NO: 2620190 - DNA, 25 bp, Homo sapien
tatgatcaaggccagacattctaac

SEQ ID NO: 2620191 - DNA, 25 bp, Homo sapien
atgatcaaggccagacattctaact

SEQ ID NO: 2620192 - DNA, 25 bp, Homo sapien
tgatcaaggccagacattctaactt

SEQ ID NO: 2620193 - DNA, 25 bp, Homo sapien
ccttctactggaccatctattggat

SEQ ID NO: 2620194 - DNA, 25 bp, Homo sapien
tggcatcacatactgccctcgaggt

SEQ ID NO: 2620195 - DNA, 25 bp, Homo sapien
atactgccctcgaggtctggctatg

SEQ ID NO: 2620196 - DNA, 25 bp, Homo sapien
tctttgtcacccttagcacatgtag

SEQ ID NO: 2620197 - DNA, 25 bp, Homo sapien
gtgaatttagggaagcttggcaacc

SEQ ID NO: 2620198 - DNA, 25 bp, Homo sapien
atttagggaagcttggcaacctcct

SEQ ID NO: 2620199 - DNA, 25 bp, Homo sapien
cttggtgaatttagggaagcttggc

SEQ ID NO: 2620200 - DNA, 25 bp, Homo sapien
gaatttagggaagcttggcaacctc

SEQ ID NO: 2620201 - DNA, 25 bp, Homo sapien
ttaagtgatccatctcctctatcct

SEQ ID NO: 2620202 - DNA, 25 bp, Homo sapien
ctcctctatcctggtctgaatgtaa

SEQ ID NO: 2620203 - DNA, 25 bp, Homo sapien
tgatccatctcctctatcctggtct

SEQ ID NO: 2620204 - DNA, 25 bp, Homo sapien
gaaaggatatatttaagtgatccat

SEQ ID NO: 2620205 - DNA, 25 bp, Homo sapien
ggctgtgtaaacctccttggtgaat

SEQ ID NO: 2620206 - DNA, 25 bp, Homo sapien
catttcagggacagtggctgtgtaa

SEQ ID NO: 2620207 - DNA, 25 bp, Homo sapien
tgagctcgaaggatgtaaacgggtt

SEQ ID NO: 2620208 - DNA, 25 bp, Homo sapien
cttggtggcctgtatgtcgcctgtg

SEQ ID NO: 2620209 - DNA, 25 bp, Homo sapien
tagcatctaaattcatgcagttcag

SEQ ID NO: 2620210 - DNA, 25 bp, Homo sapien
tcagtactttgagctcgtgggattc

SEQ ID NO: 2620211 - DNA, 25 bp, Homo sapien
cgtgggattccttactcagtggatg

SEQ ID NO: 2620212 - DNA, 25 bp, Homo sapien
cagttcagtactttgagctcgtggg

SEQ ID NO: 2620213 - DNA, 25 bp, Homo sapien
caactgaaaaatagggctgtccctg

SEQ ID NO: 2620214 - DNA, 25 bp, Homo sapien
tggatcatctgcatccgtcgcagtg

SEQ ID NO: 2620215 - DNA, 25 bp, Homo sapien
tcgcagtgacttggacaacaaatgt

SEQ ID NO: 2620216 - DNA, 25 bp, Homo sapien
tagcactgttcccatatgttggatc

SEQ ID NO: 2620217 - DNA, 25 bp, Homo sapien
tatccttggcttgaatcaccacttg

SEQ ID NO: 2620218 - DNA, 25 bp, Homo sapien
ttgagcaaagctgtcttgataatac

SEQ ID NO: 2620219 - DNA, 25 bp, Homo sapien
cctgttttctcgatccatgttgagc

SEQ ID NO: 2620220 - DNA, 25 bp, Homo sapien
gatgttcacggtggtggtcccagat

SEQ ID NO: 2620221 - DNA, 25 bp, Homo sapien
gtttcctggtcggtgatgacatcaa

SEQ ID NO: 2620222 - DNA, 25 bp, Homo sapien
catcagcgtcgctggctttgattct

SEQ ID NO: 2620223 - DNA, 25 bp, Homo sapien
tgtccccggtggagaagattcagga

SEQ ID NO: 2620224 - DNA, 25 bp, Homo sapien
ttgattctgccaattggtgtccccg

SEQ ID NO: 2620225 - DNA, 25 bp, Homo sapien
tatggtgtttaagaagcggcattac

SEQ ID NO: 2620226 - DNA, 25 bp, Homo sapien
atgggttcactctgtatggtgttta

SEQ ID NO: 2620227 - DNA, 25 bp, Homo sapien
tgcccctggtaacttaggaactgga

SEQ ID NO: 2620228 - DNA, 25 bp, Homo sapien
tgtttatgtgagatataattgcccc

SEQ ID NO: 2620229 - DNA, 25 bp, Homo sapien
cacagaaagccaagacacgaaacat

SEQ ID NO: 2620230 - DNA, 25 bp, Homo sapien
tttggtgtaaaccactgataaatga

SEQ ID NO: 2620231 - DNA, 25 bp, Homo sapien
ccactgataaatgaatgcgatcata

SEQ ID NO: 2620232 - DNA, 25 bp, Homo sapien
cagaaagccaagacacgaaacattt

SEQ ID NO: 2620233 - DNA, 25 bp, Homo sapien
tagagaaatcgtggctcaacataag

SEQ ID NO: 2620234 - DNA, 25 bp, Homo sapien
ggctgaatctttgaaaggccccaag

SEQ ID NO: 2620235 - DNA, 25 bp, Homo sapien
cacaattctaaccgtggctgaatct

SEQ ID NO: 2620236 - DNA, 25 bp, Homo sapien
caacataaggattggaggcttccac

SEQ ID NO: 2620237 - DNA, 25 bp, Homo sapien
ttgtggtgtttatctgagcatcttc

SEQ ID NO: 2620238 - DNA, 25 bp, Homo sapien
gatgtaggccagtttgctgaagaca

SEQ ID NO: 2620239 - DNA, 25 bp, Homo sapien
gtggtgtttatctgagcatcttctc

SEQ ID NO: 2620240 - DNA, 25 bp, Homo sapien
ttctcttatttgtaagatgtaggcc

SEQ ID NO: 2620241 - DNA, 25 bp, Homo sapien
tctggatcttgggctgtgacggagc

SEQ ID NO: 2620242 - DNA, 25 bp, Homo sapien
atctggatcttgggctgtgacggag

SEQ ID NO: 2620243 - DNA, 25 bp, Homo sapien
catctggatcttgggctgtgacgga

SEQ ID NO: 2620244 - DNA, 25 bp, Homo sapien
tccatatctgtgtgtcgatctacag

SEQ ID NO: 2620245 - DNA, 25 bp, Homo sapien
cactgtaatgttgtgccatagcagt

SEQ ID NO: 2620246 - DNA, 25 bp, Homo sapien
catagcagtgtttctcggtcaagaa

SEQ ID NO: 2620247 - DNA, 25 bp, Homo sapien
gatctctgttgctatcactgtaatg

SEQ ID NO: 2620248 - DNA, 25 bp, Homo sapien
gaggtactcgactactttgctttgg

SEQ ID NO: 2620249 - DNA, 25 bp, Homo sapien
tgacatctagaactttaatatatag

SEQ ID NO: 2620250 - DNA, 25 bp, Homo sapien
tttcatagaactcagcaaattctgg

SEQ ID NO: 2620251 - DNA, 25 bp, Homo sapien
ctttaatatatagaggtactcgact

SEQ ID NO: 2620252 - DNA, 25 bp, Homo sapien
aacgaaaattggtgtccactataag

SEQ ID NO: 2620253 - DNA, 25 bp, Homo sapien
aaattggtgtccactataagggtca

SEQ ID NO: 2620254 - DNA, 25 bp, Homo sapien
ggtgtccactataagggtcatcctt

SEQ ID NO: 2620255 - DNA, 25 bp, Homo sapien
cgaaaattggtgtccactataaggg

SEQ ID NO: 2620256 - DNA, 25 bp, Homo sapien
tgttcccgtggtggtcacatgcaca

SEQ ID NO: 2620257 - DNA, 25 bp, Homo sapien
gatcacgatgcacagaaggatggca

SEQ ID NO: 2620258 - DNA, 25 bp, Homo sapien
ccgagttaagattcccgccgtgttg

SEQ ID NO: 2620259 - DNA, 25 bp, Homo sapien
tgagcgcctccgcatggcaggattg

SEQ ID NO: 2620260 - DNA, 25 bp, Homo sapien
tggggagataggaggcagggagaac

SEQ ID NO: 2620261 - DNA, 25 bp, Homo sapien
gggagataggaggcagggagaacca

SEQ ID NO: 2620262 - DNA, 25 bp, Homo sapien
catggggagataggaggcagggaga

SEQ ID NO: 2620263 - DNA, 25 bp, Homo sapien
gagataggaggcagggagaaccagt

SEQ ID NO: 2620264 - DNA, 25 bp, Homo sapien
tctagagtgtcacagtaacagtgtg

SEQ ID NO: 2620265 - DNA, 25 bp, Homo sapien
gtcacagtaacagtgtgagcccctc

SEQ ID NO: 2620266 - DNA, 25 bp, Homo sapien
tagatcaggctgtatgccttaatgg

SEQ ID NO: 2620267 - DNA, 25 bp, Homo sapien
ggcagataaatctagagtgtcacag

SEQ ID NO: 2620268 - DNA, 25 bp, Homo sapien
tgagttcacatcgtacagcacagat

SEQ ID NO: 2620269 - DNA, 25 bp, Homo sapien
ttcctgggcaagcaaagacacgagc

SEQ ID NO: 2620270 - DNA, 25 bp, Homo sapien
agaaagggccctcatcatacactcc

SEQ ID NO: 2620271 - DNA, 25 bp, Homo sapien
caagagattctttgcttcctgggca

SEQ ID NO: 2620272 - DNA, 25 bp, Homo sapien
tttgggcccccatactgatttcctc

SEQ ID NO: 2620273 - DNA, 25 bp, Homo sapien
tttcctcaatcacagaagttattta

SEQ ID NO: 2620274 - DNA, 25 bp, Homo sapien
ttcatttgaatcattgttagaccct

SEQ ID NO: 2620275 - DNA, 25 bp, Homo sapien
cctcaatcacagaagttatttattg

SEQ ID NO: 2620276 - DNA, 25 bp, Homo sapien
gagaaatctgagctcgacttgtagg

SEQ ID NO: 2620277 - DNA, 25 bp, Homo sapien
tataggcaagctttacaaatcttgc

SEQ ID NO: 2620278 - DNA, 25 bp, Homo sapien
tgatttcttagttcacagtcaagga

SEQ ID NO: 2620279 - DNA, 25 bp, Homo sapien
cagtcaaggacctgttgagaaatct

SEQ ID NO: 2620280 - DNA, 25 bp, Homo sapien
tcaaggcttctgttatagttagcag

SEQ ID NO: 2620281 - DNA, 25 bp, Homo sapien
gacaaagagaatcgcagttctgtag

SEQ ID NO: 2620282 - DNA, 25 bp, Homo sapien
aaggagcgctagagcagggatccct

SEQ ID NO: 2620283 - DNA, 25 bp, Homo sapien
tgttcttggtgaaatgcgggttctc

SEQ ID NO: 2620284 - DNA, 25 bp, Homo sapien
tgggtacagccctaccaatccaagg

SEQ ID NO: 2620285 - DNA, 25 bp, Homo sapien
caatccaaggcttctaaaaaatcac

SEQ ID NO: 2620286 - DNA, 25 bp, Homo sapien
gattaaacaagatgtgggaggcact

SEQ ID NO: 2620287 - DNA, 25 bp, Homo sapien
gaggccaattacaagtcatgaggag

SEQ ID NO: 2620288 - DNA, 25 bp, Homo sapien
cataggcgtaagtggccaaggagtc

SEQ ID NO: 2620289 - DNA, 25 bp, Homo sapien
caagctttttgaatcgaggtcccca

SEQ ID NO: 2620290 - DNA, 25 bp, Homo sapien
ttgtcgcgagctgttggagtccgtc

SEQ ID NO: 2620291 - DNA, 25 bp, Homo sapien
tagtcttgatctgcatccgtggtca

SEQ ID NO: 2620292 - DNA, 25 bp, Homo sapien
tctttgtgagccgatatgccctcat

SEQ ID NO: 2620293 - DNA, 25 bp, Homo sapien
tggatccacacggactgcagccatt

SEQ ID NO: 2620294 - DNA, 25 bp, Homo sapien
gggcacgctgccctgagaacaagtg

SEQ ID NO: 2620295 - DNA, 25 bp, Homo sapien
ggctgacttggttaactggatgcac

SEQ ID NO: 2620296 - DNA, 25 bp, Homo sapien
tcttccaagggtcttccaaacatgg

SEQ ID NO: 2620297 - DNA, 25 bp, Homo sapien
caagtgacccgtgatacatgtggtg

SEQ ID NO: 2620298 - DNA, 25 bp, Homo sapien
tccagatgtcaagggcagggtatta

SEQ ID NO: 2620299 - DNA, 25 bp, Homo sapien
tattaggttcaagtgtggctggctc

SEQ ID NO: 2620300 - DNA, 25 bp, Homo sapien
tagggcagtccattataaaatcgga

SEQ ID NO: 2620301 - DNA, 25 bp, Homo sapien
taagtgccattagaacagcgtgtga

SEQ ID NO: 2620302 - DNA, 25 bp, Homo sapien
gattagttcagttcagttgggtcct

SEQ ID NO: 2620303 - DNA, 25 bp, Homo sapien
tcattagttcaaagtcaaggatggc

SEQ ID NO: 2620304 - DNA, 25 bp, Homo sapien
tattaggagaactcagatcttacct

SEQ ID NO: 2620305 - DNA, 25 bp, Homo sapien
gaaactgctagtgtcaatcctcaac

SEQ ID NO: 2620306 - DNA, 25 bp, Homo sapien
gagtgaagacctcatatagcctttt

SEQ ID NO: 2620307 - DNA, 25 bp, Homo sapien
cagggagggataaaataccttgcca

SEQ ID NO: 2620308 - DNA, 25 bp, Homo sapien
aaaaaacctgcgcatgcaatgatgt

SEQ ID NO: 2620309 - DNA, 25 bp, Homo sapien
gacgaagctggagaatgatggaact

SEQ ID NO: 2620310 - DNA, 25 bp, Homo sapien
ggttccacgatgtcaaagagtctga

SEQ ID NO: 2620311 - DNA, 25 bp, Homo sapien
tctgaattataggaaaacgtcactc

SEQ ID NO: 2620312 - DNA, 25 bp, Homo sapien
ttctgcacaactctttgggagctga

SEQ ID NO: 2620313 - DNA, 25 bp, Homo sapien
gcctttcagaagtaagtggccagga

SEQ ID NO: 2620314 - DNA, 25 bp, Homo sapien
ttatggacacaaactgtaaaggcag

SEQ ID NO: 2620315 - DNA, 25 bp, Homo sapien
gaaacatctatttactgtgcccaca

SEQ ID NO: 2620316 - DNA, 25 bp, Homo sapien
tccaggcaaagcatttgatgtgaga

SEQ ID NO: 2620317 - DNA, 25 bp, Homo sapien
cagtgggatatctatttccaggcaa

SEQ ID NO: 2620318 - DNA, 25 bp, Homo sapien
taaaatttggatggcctaagctaca

SEQ ID NO: 2620319 - DNA, 25 bp, Homo sapien
tgtgagatattgttcagccaatcag

SEQ ID NO: 2620320 - DNA, 25 bp, Homo sapien
taaaagcttagagaaggtgcctcca

SEQ ID NO: 2620321 - DNA, 25 bp, Homo sapien
tggaactactgaagacgcacatagc

SEQ ID NO: 2620322 - DNA, 25 bp, Homo sapien
taggcagttcactctcaaagcaatg

SEQ ID NO: 2620323 - DNA, 25 bp, Homo sapien
tacgtttcttccgagcaggtcagtt

SEQ ID NO: 2620324 - DNA, 25 bp, Homo sapien
catttgactgcaacaaaaggcccgg

SEQ ID NO: 2620325 - DNA, 25 bp, Homo sapien
aaacgacaagagtgagcattcccgc

SEQ ID NO: 2620326 - DNA, 25 bp, Homo sapien
gtaaatcttcaagggtggcatccgt

SEQ ID NO: 2620327 - DNA, 25 bp, Homo sapien
catttcaaggagtgcgtatttgcca

SEQ ID NO: 2620328 - DNA, 25 bp, Homo sapien
ctattgtacagagctttcgtgagag

SEQ ID NO: 2620329 - DNA, 25 bp, Homo sapien
ggattggactatgcattcaaaggga

SEQ ID NO: 2620330 - DNA, 25 bp, Homo sapien
tcgatggcagatcgcagagtctgag

SEQ ID NO: 2620331 - DNA, 25 bp, Homo sapien
gaggaatatctttgaggctgcagcc

SEQ ID NO: 2620332 - DNA, 25 bp, Homo sapien
tcctcagaggaaccagggtttaaca

SEQ ID NO: 2620333 - DNA, 25 bp, Homo sapien
taatatcagtgatgactgtggaaag

SEQ ID NO: 2620334 - DNA, 25 bp, Homo sapien
aaagaaaccctgtatgactcaagtt

SEQ ID NO: 2620335 - DNA, 25 bp, Homo sapien
gaaaccctgtatgactcaagttgag

SEQ ID NO: 2620336 - DNA, 25 bp, Homo sapien
tagcagattagctctaagctttgac

SEQ ID NO: 2620337 - DNA, 25 bp, Homo sapien
tagtggcattctgagataactgtca

SEQ ID NO: 2620338 - DNA, 25 bp, Homo sapien
tgacatcaccttagtcccttagaac

SEQ ID NO: 2620339 - DNA, 25 bp, Homo sapien
tgaatctctgccaaaaccataagtc

SEQ ID NO: 2620340 - DNA, 25 bp, Homo sapien
ttattggactccgattcctggctct

SEQ ID NO: 2620341 - DNA, 25 bp, Homo sapien
tcttgttcatcgttcttgcagcctc

SEQ ID NO: 2620342 - DNA, 25 bp, Homo sapien
ttctcttcggagacacattgacttc

SEQ ID NO: 2620343 - DNA, 25 bp, Homo sapien
cctggctcttgttcatcgttcttgc

SEQ ID NO: 2620344 - DNA, 25 bp, Homo sapien
gagtcatctttgatcagtaaatcca

SEQ ID NO: 2620345 - DNA, 25 bp, Homo sapien
tatggagtcatctttgatcagtaaa

SEQ ID NO: 2620346 - DNA, 25 bp, Homo sapien
tttctgctctggatatggagtcatc

SEQ ID NO: 2620347 - DNA, 25 bp, Homo sapien
catttctgctctggatatggagtca

SEQ ID NO: 2620348 - DNA, 25 bp, Homo sapien
actaattctacatcctgccctgagg

SEQ ID NO: 2620349 - DNA, 25 bp, Homo sapien
cagtaggtggcacagctccaaaggg

SEQ ID NO: 2620350 - DNA, 25 bp, Homo sapien
tgcagagttctccaacagtaggtgg

SEQ ID NO: 2620351 - DNA, 25 bp, Homo sapien
tccagttgtcccttactgggaatca

SEQ ID NO: 2620352 - DNA, 25 bp, Homo sapien
gagttcatagatgctttagtggtaa

SEQ ID NO: 2620353 - DNA, 25 bp, Homo sapien
tatgactggtaggttcgctatttga

SEQ ID NO: 2620354 - DNA, 25 bp, Homo sapien
tttaaaagatcacagtcatcattgt

SEQ ID NO: 2620355 - DNA, 25 bp, Homo sapien
ggtaggttcgctatttgagataaat

SEQ ID NO: 2620356 - DNA, 25 bp, Homo sapien
tgaagtcgataagctcccactcggt

SEQ ID NO: 2620357 - DNA, 25 bp, Homo sapien
taaacttggttgagagtgcgtcctg

SEQ ID NO: 2620358 - DNA, 25 bp, Homo sapien
ggtggcagtcaagttcccctcaaag

SEQ ID NO: 2620359 - DNA, 25 bp, Homo sapien
gaagagggtagaggatcagtcccca

SEQ ID NO: 2620360 - DNA, 25 bp, Homo sapien
atgctgcccaactgccaccagaggt

SEQ ID NO: 2620361 - DNA, 25 bp, Homo sapien
agccacactctttgtcttcagcagc

SEQ ID NO: 2620362 - DNA, 25 bp, Homo sapien
cagcccttgccaatgctgcccaact

SEQ ID NO: 2620363 - DNA, 25 bp, Homo sapien
aactgccaccagaggtgcccacaaa

SEQ ID NO: 2620364 - DNA, 25 bp, Homo sapien
aatggcaagacccaagaatgtgcgt

SEQ ID NO: 2620365 - DNA, 25 bp, Homo sapien
gatatacagcggcattctgtgtacc

SEQ ID NO: 2620366 - DNA, 25 bp, Homo sapien
gcttaaaggtctaggtctcttactc

SEQ ID NO: 2620367 - DNA, 25 bp, Homo sapien
tagcccttagctaaatgcagtttgg

SEQ ID NO: 2620368 - DNA, 25 bp, Homo sapien
gcagagtgaagattagaggggtcaa

SEQ ID NO: 2620369 - DNA, 25 bp, Homo sapien
gtaaagcagagtgaagattagaggg

SEQ ID NO: 2620370 - DNA, 25 bp, Homo sapien
cagagtgaagattagaggggtcaaa

SEQ ID NO: 2620371 - DNA, 25 bp, Homo sapien
aagcagagtgaagattagaggggtc

SEQ ID NO: 2620372 - DNA, 25 bp, Homo sapien
taggtgactccataatgcaactggt

SEQ ID NO: 2620373 - DNA, 25 bp, Homo sapien
caaagaaaagtcttggacctgtttg

SEQ ID NO: 2620374 - DNA, 25 bp, Homo sapien
catgaaggacacttaactgtgagtt

SEQ ID NO: 2620375 - DNA, 25 bp, Homo sapien
gctcttcagcttctgaccaggcagt

SEQ ID NO: 2620376 - DNA, 25 bp, Homo sapien
atgtagctcttttatattgtctctt

SEQ ID NO: 2620377 - DNA, 25 bp, Homo sapien
ttatgtagctcttttatattgtctc

SEQ ID NO: 2620378 - DNA, 25 bp, Homo sapien
tatgtagctcttttatattgtctct

SEQ ID NO: 2620379 - DNA, 25 bp, Homo sapien
ctgacttggagaaatatgcccctag

SEQ ID NO: 2620380 - DNA, 25 bp, Homo sapien
aaaacattatagattggtggcttag

SEQ ID NO: 2620381 - DNA, 25 bp, Homo sapien
tcgattgaactgtactaacaaaaac

SEQ ID NO: 2620382 - DNA, 25 bp, Homo sapien
cctagctatgtgtcttcgattgaac

SEQ ID NO: 2620383 - DNA, 25 bp, Homo sapien
gctctgcctcaactttttctagatg

SEQ ID NO: 2620384 - DNA, 25 bp, Homo sapien
tgaactcagttgatccacgctgctc

SEQ ID NO: 2620385 - DNA, 25 bp, Homo sapien
actcagttgatccacgctgctcagc

SEQ ID NO: 2620386 - DNA, 25 bp, Homo sapien
ttttctagatgacctggaaaattcc

SEQ ID NO: 2620387 - DNA, 25 bp, Homo sapien
taaaatccattacactctgaccagc

SEQ ID NO: 2620388 - DNA, 25 bp, Homo sapien
tgtaaaatccattacactctgacca

SEQ ID NO: 2620389 - DNA, 25 bp, Homo sapien
gtaaaatccattacactctgaccag

SEQ ID NO: 2620390 - DNA, 25 bp, Homo sapien
tgtacttaccttcgttgtcttgtgg

SEQ ID NO: 2620391 - DNA, 25 bp, Homo sapien
tctgttgtcaagctaattacggtgc

SEQ ID NO: 2620392 - DNA, 25 bp, Homo sapien
taaaagtgtttgagctccccagacc

SEQ ID NO: 2620393 - DNA, 25 bp, Homo sapien
ggagggtgtgagtctgttatcccaa

SEQ ID NO: 2620394 - DNA, 25 bp, Homo sapien
gatccactcacctcggcctccttaa

SEQ ID NO: 2620395 - DNA, 25 bp, Homo sapien
cactcacctcggcctccttaagtgt

SEQ ID NO: 2620396 - DNA, 25 bp, Homo sapien
tccactcacctcggcctccttaagt

SEQ ID NO: 2620397 - DNA, 25 bp, Homo sapien
actcacctcggcctccttaagtgtt

SEQ ID NO: 2620398 - DNA, 25 bp, Homo sapien
tatccaggcggaacatcatgatgca

SEQ ID NO: 2620399 - DNA, 25 bp, Homo sapien
cacaatacaatagagggccatgccc

SEQ ID NO: 2620400 - DNA, 25 bp, Homo sapien
gaagccagaccagaacagttaatag

SEQ ID NO: 2620401 - DNA, 25 bp, Homo sapien
tgacagcgcttgcagttccgaggtg

SEQ ID NO: 2620402 - DNA, 25 bp, Homo sapien
gtttttgcgcccgtcagttttgcag

SEQ ID NO: 2620403 - DNA, 25 bp, Homo sapien
cgtcagttttgcagtaaagcggtgg

SEQ ID NO: 2620404 - DNA, 25 bp, Homo sapien
gcgcccgtcagttttgcagtaaagc

SEQ ID NO: 2620405 - DNA, 25 bp, Homo sapien
ttttgcagtaaagcggtggcagctg

SEQ ID NO: 2620406 - DNA, 25 bp, Homo sapien
cgcgccctcccgcggagtcactcat

SEQ ID NO: 2620407 - DNA, 25 bp, Homo sapien
gagcttggggtaacgccggagacca

SEQ ID NO: 2620408 - DNA, 25 bp, Homo sapien
tggggtaacgccggagaccagcgcg

SEQ ID NO: 2620409 - DNA, 25 bp, Homo sapien
gcgcgccctcccgcggagtcactca

SEQ ID NO: 2620410 - DNA, 25 bp, Homo sapien
aaaacttacattactggcaggaaga

SEQ ID NO: 2620411 - DNA, 25 bp, Homo sapien
tttccttatcaaacacggtgtctgc

SEQ ID NO: 2620412 - DNA, 25 bp, Homo sapien
tatggcccggtatataaagggtaga

SEQ ID NO: 2620413 - DNA, 25 bp, Homo sapien
gaagatgctttgagcctatggcccg

SEQ ID NO: 2620414 - DNA, 25 bp, Homo sapien
aaacccatgagtttagcaaagtcta

SEQ ID NO: 2620415 - DNA, 25 bp, Homo sapien
tagcaaagtctatttcctataattg

SEQ ID NO: 2620416 - DNA, 25 bp, Homo sapien
ctactgcaaattgtacttcaaacac

SEQ ID NO: 2620417 - DNA, 25 bp, Homo sapien
attatctactgcaaattgtacttca

SEQ ID NO: 2620418 - DNA, 25 bp, Homo sapien
atccacaacattttaagaccacagg

SEQ ID NO: 2620419 - DNA, 25 bp, Homo sapien
tttcccaagtgtaattttatccaca

SEQ ID NO: 2620420 - DNA, 25 bp, Homo sapien
cccaagtgtaattttatccacaaca

SEQ ID NO: 2620421 - DNA, 25 bp, Homo sapien
taagaccacaggtctcaaagtgtgg

SEQ ID NO: 2620422 - DNA, 25 bp, Homo sapien
ctttgcctactaaaaagtggtgtct

SEQ ID NO: 2620423 - DNA, 25 bp, Homo sapien
aaactgcaggcataatccaattttc

SEQ ID NO: 2620424 - DNA, 25 bp, Homo sapien
ggccagcataaactgcaggcataat

SEQ ID NO: 2620425 - DNA, 25 bp, Homo sapien
gtgggatgaaaccatattacatgtg

SEQ ID NO: 2620426 - DNA, 25 bp, Homo sapien
gaagaatgggcaaatcagttgacat

SEQ ID NO: 2620427 - DNA, 25 bp, Homo sapien
aagaagaatgggcaaatcagttgac

SEQ ID NO: 2620428 - DNA, 25 bp, Homo sapien
gaatgggcaaatcagttgacatttc

SEQ ID NO: 2620429 - DNA, 25 bp, Homo sapien
tttttaagaagaatgggcaaatcag

SEQ ID NO: 2620430 - DNA, 25 bp, Homo sapien
ggtacatacagaccatcacttagga

SEQ ID NO: 2620431 - DNA, 25 bp, Homo sapien
ttcttagcagaagacactgcatcgt

SEQ ID NO: 2620432 - DNA, 25 bp, Homo sapien
gtagaggcagtgttttccgaatctt

SEQ ID NO: 2620433 - DNA, 25 bp, Homo sapien
agaagagtcacagttagtagaggca

SEQ ID NO: 2620434 - DNA, 25 bp, Homo sapien
ttctctgtgttgctgtgtccttttc

SEQ ID NO: 2620435 - DNA, 25 bp, Homo sapien
tgtgttgctgtgtccttttccagtc

SEQ ID NO: 2620436 - DNA, 25 bp, Homo sapien
tctgtgttgctgtgtccttttccag

SEQ ID NO: 2620437 - DNA, 25 bp, Homo sapien
tctctgtgttgctgtgtccttttcc

SEQ ID NO: 2620438 - DNA, 25 bp, Homo sapien
gatggttctaggcaagtctggtcac

SEQ ID NO: 2620439 - DNA, 25 bp, Homo sapien
tgaacatgatggttctaggcaagtc

SEQ ID NO: 2620440 - DNA, 25 bp, Homo sapien
aacatgatggttctaggcaagtctg

SEQ ID NO: 2620441 - DNA, 25 bp, Homo sapien
catgatggttctaggcaagtctggt

SEQ ID NO: 2620442 - DNA, 25 bp, Homo sapien
ctgagtgaacatttctttgaaggga

SEQ ID NO: 2620443 - DNA, 25 bp, Homo sapien
tccaagtcaatatctaaaacaaatg

SEQ ID NO: 2620444 - DNA, 25 bp, Homo sapien
tttctttgaagggattcttgactga

SEQ ID NO: 2620445 - DNA, 25 bp, Homo sapien
tcaatatctaaaacaaatgccttcc

SEQ ID NO: 2620446 - DNA, 25 bp, Homo sapien
taaattggtacagctcttgtaagat

SEQ ID NO: 2620447 - DNA, 25 bp, Homo sapien
attggtacagctcttgtaagatttt

SEQ ID NO: 2620448 - DNA, 25 bp, Homo sapien
ttaaattggtacagctcttgtaaga

SEQ ID NO: 2620449 - DNA, 25 bp, Homo sapien
aaattggtacagctcttgtaagatt

SEQ ID NO: 2620450 - DNA, 25 bp, Homo sapien
atgaattcgagtatcaacaatatct

SEQ ID NO: 2620451 - DNA, 25 bp, Homo sapien
gggtttgaagcccatctctgtaccg

SEQ ID NO: 2620452 - DNA, 25 bp, Homo sapien
ggcttctaaatcctctaattgatga

SEQ ID NO: 2620453 - DNA, 25 bp, Homo sapien
catcacacaaatcagcgaaagtggc

SEQ ID NO: 2620454 - DNA, 25 bp, Homo sapien
gtgctcagattacagaggtgagcca

SEQ ID NO: 2620455 - DNA, 25 bp, Homo sapien
aagtagctggggccgcaggtgcatg

SEQ ID NO: 2620456 - DNA, 25 bp, Homo sapien
aaagtgctcagattacagaggtgag

SEQ ID NO: 2620457 - DNA, 25 bp, Homo sapien
atgccaccatgcctggctaattttt

SEQ ID NO: 2620458 - DNA, 25 bp, Homo sapien
agctctgattggctaatgcttctag

SEQ ID NO: 2620459 - DNA, 25 bp, Homo sapien
ctctgattggctaatgcttctagtg

SEQ ID NO: 2620460 - DNA, 25 bp, Homo sapien
ggaagctctgattggctaatgcttc

SEQ ID NO: 2620461 - DNA, 25 bp, Homo sapien
tcctccacaaatattcacgaatttg

SEQ ID NO: 2620462 - DNA, 25 bp, Homo sapien
tctgtacaaggggaactagtgattc

SEQ ID NO: 2620463 - DNA, 25 bp, Homo sapien
tctggtacttccatccgttttttca

SEQ ID NO: 2620464 - DNA, 25 bp, Homo sapien
tttcatagtctggtacttccatccg

SEQ ID NO: 2620465 - DNA, 25 bp, Homo sapien
tacaaggggaactagtgattccatt

SEQ ID NO: 2620466 - DNA, 25 bp, Homo sapien
gaaatgttggacagtttggaacttc

SEQ ID NO: 2620467 - DNA, 25 bp, Homo sapien
ttgctttgctcattatatggtttgg

SEQ ID NO: 2620468 - DNA, 25 bp, Homo sapien
gcaatttgaatatatgctcccaggg

SEQ ID NO: 2620469 - DNA, 25 bp, Homo sapien
aagtgtaagtcttggaagtgtttat

SEQ ID NO: 2620470 - DNA, 25 bp, Homo sapien
tcaaaccttaagtatcttataacga

SEQ ID NO: 2620471 - DNA, 25 bp, Homo sapien
tctgaagtgttggtagaactcgcct

SEQ ID NO: 2620472 - DNA, 25 bp, Homo sapien
taactacttcattgggcttgggtca

SEQ ID NO: 2620473 - DNA, 25 bp, Homo sapien
gaactcgcctatatgcctgtctggg

SEQ ID NO: 2620474 - DNA, 25 bp, Homo sapien
tctagattctaaaaagttgaggcca

SEQ ID NO: 2620475 - DNA, 25 bp, Homo sapien
tgtcacaagagtaggatttggtaaa

SEQ ID NO: 2620476 - DNA, 25 bp, Homo sapien
gaagttctgaataatcgcaggttaa

SEQ ID NO: 2620477 - DNA, 25 bp, Homo sapien
tgcacagattgaataagacactcta

SEQ ID NO: 2620478 - DNA, 25 bp, Homo sapien
tgttctgtgctgatatggtgaggaa

SEQ ID NO: 2620479 - DNA, 25 bp, Homo sapien
tgctgctgccagttacaactggatt

SEQ ID NO: 2620480 - DNA, 25 bp, Homo sapien
tcctggttccggataagggtgaata

SEQ ID NO: 2620481 - DNA, 25 bp, Homo sapien
gcaacctgagttgcactgggcagtt

SEQ ID NO: 2620482 - DNA, 25 bp, Homo sapien
aactggattaaccagtgtctcctgg

SEQ ID NO: 2620483 - DNA, 25 bp, Homo sapien
agtgtcaacttggtcagaaggacag

SEQ ID NO: 2620484 - DNA, 25 bp, Homo sapien
aggacagtaatcatccagacttgac

SEQ ID NO: 2620485 - DNA, 25 bp, Homo sapien
cacgtagcatattgaggaccttttc

SEQ ID NO: 2620486 - DNA, 25 bp, Homo sapien
gatttccatagagggcacgtagcat

SEQ ID NO: 2620487 - DNA, 25 bp, Homo sapien
atggaggagactctgctgcatacac

SEQ ID NO: 2620488 - DNA, 25 bp, Homo sapien
aagatggaggagactctgctgcata

SEQ ID NO: 2620489 - DNA, 25 bp, Homo sapien
tcaagatggaggagactctgctgca

SEQ ID NO: 2620490 - DNA, 25 bp, Homo sapien
gatggaggagactctgctgcataca

SEQ ID NO: 2620491 - DNA, 25 bp, Homo sapien
gaatgaatctcatacagctcaacag

SEQ ID NO: 2620492 - DNA, 25 bp, Homo sapien
taaaccaagatacaacaggagccta

SEQ ID NO: 2620493 - DNA, 25 bp, Homo sapien
taaggaagacagataagcaacagtt

SEQ ID NO: 2620494 - DNA, 25 bp, Homo sapien
taccctaagtactaagacatgtctg

SEQ ID NO: 2620495 - DNA, 25 bp, Homo sapien
gcaactctataggaacacatgtggg

SEQ ID NO: 2620496 - DNA, 25 bp, Homo sapien
cgttattagcacaaagttaggcagc

SEQ ID NO: 2620497 - DNA, 25 bp, Homo sapien
gatatctacaatgacctcctggatg

SEQ ID NO: 2620498 - DNA, 25 bp, Homo sapien
tctagacttggcaataaagtggcac

SEQ ID NO: 2620499 - DNA, 25 bp, Homo sapien
ttcttttcaactattagggactgaa

SEQ ID NO: 2620500 - DNA, 25 bp, Homo sapien
gagatgatcacagaacatgagaatt

SEQ ID NO: 2620501 - DNA, 25 bp, Homo sapien
caactattagggactgaattttatt

SEQ ID NO: 2620502 - DNA, 25 bp, Homo sapien
cttttcaactattagggactgaatt

SEQ ID NO: 2620503 - DNA, 25 bp, Homo sapien
ccttcctatttggaatgtgcaagac

SEQ ID NO: 2620504 - DNA, 25 bp, Homo sapien
cacatcttgataaagtaaatacctt

SEQ ID NO: 2620505 - DNA, 25 bp, Homo sapien
cggtatcccctcactggtactcaga

SEQ ID NO: 2620506 - DNA, 25 bp, Homo sapien
ttcaaaacactgtaccacggtatcc

SEQ ID NO: 2620507 - DNA, 25 bp, Homo sapien
ttccttccttatgggcaagaaccca

SEQ ID NO: 2620508 - DNA, 25 bp, Homo sapien
ttaaattatcagtaactgcctaaag

SEQ ID NO: 2620509 - DNA, 25 bp, Homo sapien
aattatcagtaactgcctaaagtga

SEQ ID NO: 2620510 - DNA, 25 bp, Homo sapien
ttatcagtaactgcctaaagtgatc

SEQ ID NO: 2620511 - DNA, 25 bp, Homo sapien
tgaatcgtgcctaaatcaagggact

SEQ ID NO: 2620512 - DNA, 25 bp, Homo sapien
tatacaacttgtaacgggcagagga

SEQ ID NO: 2620513 - DNA, 25 bp, Homo sapien
tgtataaggatgcactcaaggagct

SEQ ID NO: 2620514 - DNA, 25 bp, Homo sapien
taatgtgctctcaaagacggcatgt

SEQ ID NO: 2620515 - DNA, 25 bp, Homo sapien
tgtttgctcatttcggtcacatgct

SEQ ID NO: 2620516 - DNA, 25 bp, Homo sapien
acatgctctgtgtcggctgtgcaaa

SEQ ID NO: 2620517 - DNA, 25 bp, Homo sapien
tcggctgtgcaaaatactgtttcca

SEQ ID NO: 2620518 - DNA, 25 bp, Homo sapien
tttcggtcacatgctctgtgtcggc

SEQ ID NO: 2620519 - DNA, 25 bp, Homo sapien
ctatggtaaggggacatcagtatta

SEQ ID NO: 2620520 - DNA, 25 bp, Homo sapien
tatggtaaggggacatcagtattat

SEQ ID NO: 2620521 - DNA, 25 bp, Homo sapien
ttgtaacttggaatcgatgaacagg

SEQ ID NO: 2620522 - DNA, 25 bp, Homo sapien
ttggaatcgatgaacaggaagagaa

SEQ ID NO: 2620523 - DNA, 25 bp, Homo sapien
acttggaatcgatgaacaggaagag

SEQ ID NO: 2620524 - DNA, 25 bp, Homo sapien
tctctgtccctatttgtaacttgga

SEQ ID NO: 2620525 - DNA, 25 bp, Homo sapien
agtcttatagatgccccagtgttag

SEQ ID NO: 2620526 - DNA, 25 bp, Homo sapien
ttaagagtcttatagatgccccagt

SEQ ID NO: 2620527 - DNA, 25 bp, Homo sapien
gagtcttatagatgccccagtgtta

SEQ ID NO: 2620528 - DNA, 25 bp, Homo sapien
aagagtcttatagatgccccagtgt

SEQ ID NO: 2620529 - DNA, 25 bp, Homo sapien
tccttcccatctctagatcttcatc

SEQ ID NO: 2620530 - DNA, 25 bp, Homo sapien
ccatctctagatcttcatccttcaa

SEQ ID NO: 2620531 - DNA, 25 bp, Homo sapien
ccttcccatctctagatcttcatcc

SEQ ID NO: 2620532 - DNA, 25 bp, Homo sapien
tctctagatcttcatccttcaatga

SEQ ID NO: 2620533 - DNA, 25 bp, Homo sapien
cctggccactaactcttccattcat

SEQ ID NO: 2620534 - DNA, 25 bp, Homo sapien
aattcctggccactaactcttccat

SEQ ID NO: 2620535 - DNA, 25 bp, Homo sapien
attcctggccactaactcttccatt

SEQ ID NO: 2620536 - DNA, 25 bp, Homo sapien
ttccacaaattcctggccactaact

SEQ ID NO: 2620537 - DNA, 25 bp, Homo sapien
cttttataattaccaggccattgag

SEQ ID NO: 2620538 - DNA, 25 bp, Homo sapien
tcaatgcttgcacaaatccaagcat

SEQ ID NO: 2620539 - DNA, 25 bp, Homo sapien
aaatccaagcatcgtatatgacaag

SEQ ID NO: 2620540 - DNA, 25 bp, Homo sapien
ttttataattaccaggccattgaga

SEQ ID NO: 2620541 - DNA, 25 bp, Homo sapien
ggacagcgctgtcccaccacaccag

SEQ ID NO: 2620542 - DNA, 25 bp, Homo sapien
accggacagcgctgtcccaccacac

SEQ ID NO: 2620543 - DNA, 25 bp, Homo sapien
caccacaccagagaccagagtgggc

SEQ ID NO: 2620544 - DNA, 25 bp, Homo sapien
agaccggacagcgctgtcccaccac

SEQ ID NO: 2620545 - DNA, 25 bp, Homo sapien
tgctccgaatctccatacaggcggg

SEQ ID NO: 2620546 - DNA, 25 bp, Homo sapien
agtcctggtgcgcccgcttcagaaa

SEQ ID NO: 2620547 - DNA, 25 bp, Homo sapien
catctaggtggaacagagcgagcta

SEQ ID NO: 2620548 - DNA, 25 bp, Homo sapien
ggacgtgaagttgcctctgcatagc

SEQ ID NO: 2620549 - DNA, 25 bp, Homo sapien
agcctccaggatgggcggggattcc

SEQ ID NO: 2620550 - DNA, 25 bp, Homo sapien
attccctccccctggttgattcgag

SEQ ID NO: 2620551 - DNA, 25 bp, Homo sapien
ctcccttccccgagtgacagggacg

SEQ ID NO: 2620552 - DNA, 25 bp, Homo sapien
ggggtccgctcctcgcctcgctgcg

SEQ ID NO: 2620553 - DNA, 25 bp, Homo sapien
ctgctcgcggcttggccgaggctcc

SEQ ID NO: 2620554 - DNA, 25 bp, Homo sapien
gccgaggacagcttctggcaaactc

SEQ ID NO: 2620555 - DNA, 25 bp, Homo sapien
caaactcctgccaggggtcctggac

SEQ ID NO: 2620556 - DNA, 25 bp, Homo sapien
ctggcaaactcctgccaggggtcct

SEQ ID NO: 2620557 - DNA, 25 bp, Homo sapien
ctgccgaggacagcttctggcaaac

SEQ ID NO: 2620558 - DNA, 25 bp, Homo sapien
gacagactcagactcagctccatcc

SEQ ID NO: 2620559 - DNA, 25 bp, Homo sapien
ctggaatgccctcgtgcctgccatt

SEQ ID NO: 2620560 - DNA, 25 bp, Homo sapien
ccactccagtgtcccttatcaaggt

SEQ ID NO: 2620561 - DNA, 25 bp, Homo sapien
gaggcaagaggttaggccagctgca

SEQ ID NO: 2620562 - DNA, 25 bp, Homo sapien
ccacaacaccctacagtatgatcag

SEQ ID NO: 2620563 - DNA, 25 bp, Homo sapien
cacaacaccctacagtatgatcagc

SEQ ID NO: 2620564 - DNA, 25 bp, Homo sapien
acaccctacagtatgatcagccggg

SEQ ID NO: 2620565 - DNA, 25 bp, Homo sapien
caacaccctacagtatgatcagccg

SEQ ID NO: 2620566 - DNA, 25 bp, Homo sapien
catagctcttcctgtccttgaaact

SEQ ID NO: 2620567 - DNA, 25 bp, Homo sapien
ctctctcatgggcttgtctgcatag

SEQ ID NO: 2620568 - DNA, 25 bp, Homo sapien
catgggcttgtctgcatagctcttc

SEQ ID NO: 2620569 - DNA, 25 bp, Homo sapien
gaaactcaactctgacctcagcatc

SEQ ID NO: 2620570 - DNA, 25 bp, Homo sapien
ggacactcggagcacattttctgga

SEQ ID NO: 2620571 - DNA, 25 bp, Homo sapien
ttcctctccttgtgccatctcactg

SEQ ID NO: 2620572 - DNA, 25 bp, Homo sapien
gctgtcccttctttcggcctaatga

SEQ ID NO: 2620573 - DNA, 25 bp, Homo sapien
tctcttgggaatccacgctgatggg

SEQ ID NO: 2620574 - DNA, 25 bp, Homo sapien
aagatgagcagtaagtccagagagg

SEQ ID NO: 2620575 - DNA, 25 bp, Homo sapien
taaagatgagcagtaagtccagaga

SEQ ID NO: 2620576 - DNA, 25 bp, Homo sapien
agatgagcagtaagtccagagagga

SEQ ID NO: 2620577 - DNA, 25 bp, Homo sapien
ttttaaagatgagcagtaagtccag

SEQ ID NO: 2620578 - DNA, 25 bp, Homo sapien
gctgagctttcatagtttccagtgg

SEQ ID NO: 2620579 - DNA, 25 bp, Homo sapien
tctatgtggcatgtgctaaataaac

SEQ ID NO: 2620580 - DNA, 25 bp, Homo sapien
tctggtccggaagacagccaaacaa

SEQ ID NO: 2620581 - DNA, 25 bp, Homo sapien
caaagtataagcactcggaaagaaa

SEQ ID NO: 2620582 - DNA, 25 bp, Homo sapien
ttctctctggatgaacacctgtccg

SEQ ID NO: 2620583 - DNA, 25 bp, Homo sapien
tctggatgaacacctgtccgccatc

SEQ ID NO: 2620584 - DNA, 25 bp, Homo sapien
catgctgctactgtccagtccacat

SEQ ID NO: 2620585 - DNA, 25 bp, Homo sapien
atcaccacatgctgctactgtccag

SEQ ID NO: 2620586 - DNA, 25 bp, Homo sapien
gatgcgtatctgctgttttaatcag

SEQ ID NO: 2620587 - DNA, 25 bp, Homo sapien
ggtgactgtcccaagctgattcctc

SEQ ID NO: 2620588 - DNA, 25 bp, Homo sapien
tatctgcaagttgagtctctacagc

SEQ ID NO: 2620589 - DNA, 25 bp, Homo sapien
gattcctccctgttttgatgcgtat

SEQ ID NO: 2620590 - DNA, 25 bp, Homo sapien
ttcatagtgtagactccttgcgggc

SEQ ID NO: 2620591 - DNA, 25 bp, Homo sapien
gaggacgtgaggtgtttcactccaa

SEQ ID NO: 2620592 - DNA, 25 bp, Homo sapien
gaagtagatgcaccttctcgccacc

SEQ ID NO: 2620593 - DNA, 25 bp, Homo sapien
ctttgcatctgagcagggctatttg

SEQ ID NO: 2620594 - DNA, 25 bp, Homo sapien
actacgccttcaggagtgagctgtt

SEQ ID NO: 2620595 - DNA, 25 bp, Homo sapien
gactacgccttcaggagtgagctgt

SEQ ID NO: 2620596 - DNA, 25 bp, Homo sapien
gccttcaggagtgagctgttgaggg

SEQ ID NO: 2620597 - DNA, 25 bp, Homo sapien
tacgccttcaggagtgagctgttga

SEQ ID NO: 2620598 - DNA, 25 bp, Homo sapien
gcctcctgccttctggtgagcaggg

SEQ ID NO: 2620599 - DNA, 25 bp, Homo sapien
actgcctcctgccttctggtgagca

SEQ ID NO: 2620600 - DNA, 25 bp, Homo sapien
ccttctggtgagcaggggtcaggga

SEQ ID NO: 2620601 - DNA, 25 bp, Homo sapien
tgagcagggcccagcaacattgccc

SEQ ID NO: 2620602 - DNA, 25 bp, Homo sapien
gtaagattggaaagcagacctccat

SEQ ID NO: 2620603 - DNA, 25 bp, Homo sapien
aagccagacacttgcccggtggtgg

SEQ ID NO: 2620604 - DNA, 25 bp, Homo sapien
tggtttggtcttccaccaacttcca

SEQ ID NO: 2620605 - DNA, 25 bp, Homo sapien
ccacaaggctgtttgtgttcatcaa

SEQ ID NO: 2620606 - DNA, 25 bp, Homo sapien
tgggcagccccgtggttctaaggaa

SEQ ID NO: 2620607 - DNA, 25 bp, Homo sapien
tccaacgtagggacatagagccttg

SEQ ID NO: 2620608 - DNA, 25 bp, Homo sapien
gaagtagcaccacaaggctctcagg

SEQ ID NO: 2620609 - DNA, 25 bp, Homo sapien
gatctcagatcacaactctcaaggg

SEQ ID NO: 2620610 - DNA, 25 bp, Homo sapien
tgccctagggaaatgctcgctgacc

SEQ ID NO: 2620611 - DNA, 25 bp, Homo sapien
taagggccgaatgcaaattactagc

SEQ ID NO: 2620612 - DNA, 25 bp, Homo sapien
gaaatggagcgtcttggtctacgta

SEQ ID NO: 2620613 - DNA, 25 bp, Homo sapien
ccaaggagggtgtttaatgagcaaa

SEQ ID NO: 2620614 - DNA, 25 bp, Homo sapien
gcctgtacccaaagccaagctgtaa

SEQ ID NO: 2620615 - DNA, 25 bp, Homo sapien
ctgaagttgaactgggtaggaacca

SEQ ID NO: 2620616 - DNA, 25 bp, Homo sapien
gaagtgctacattctgctctcaaga

SEQ ID NO: 2620617 - DNA, 25 bp, Homo sapien
ccaaggagacccaatcagatcttta

SEQ ID NO: 2620618 - DNA, 25 bp, Homo sapien
gaagacgttatgcacctctgtctcc

SEQ ID NO: 2620619 - DNA, 25 bp, Homo sapien
gcagccagtgactggttcagattta

SEQ ID NO: 2620620 - DNA, 25 bp, Homo sapien
gcaggcctgctgcagataaccctcg

SEQ ID NO: 2620621 - DNA, 25 bp, Homo sapien
cagtgactggttcagatttacaaag

SEQ ID NO: 2620622 - DNA, 25 bp, Homo sapien
tccagccacgggcaatcgtggatcg

SEQ ID NO: 2620623 - DNA, 25 bp, Homo sapien
gtccaacccgaatcagggacctgca

SEQ ID NO: 2620624 - DNA, 25 bp, Homo sapien
acgtccaacccgaatcagggacctg

SEQ ID NO: 2620625 - DNA, 25 bp, Homo sapien
ccaacccgaatcagggacctgcatc

SEQ ID NO: 2620626 - DNA, 25 bp, Homo sapien
cacgtccaacccgaatcagggacct

SEQ ID NO: 2620627 - DNA, 25 bp, Homo sapien
aaggaggcagacctctaaggccagg

SEQ ID NO: 2620628 - DNA, 25 bp, Homo sapien
caggcagtcgctgagaaggaagcca

SEQ ID NO: 2620629 - DNA, 25 bp, Homo sapien
tcgtccagcagagcgtagagaagga

SEQ ID NO: 2620630 - DNA, 25 bp, Homo sapien
ggttatagaaatccagaagctaggg

SEQ ID NO: 2620631 - DNA, 25 bp, Homo sapien
gaatggggacgtcccactctaacca

SEQ ID NO: 2620632 - DNA, 25 bp, Homo sapien
tgagttagtgctcaggctctgcgtg

SEQ ID NO: 2620633 - DNA, 25 bp, Homo sapien
tgcgtggcacagaggacaacggaat

SEQ ID NO: 2620634 - DNA, 25 bp, Homo sapien
tctaaccaggcctctaggaggggct

SEQ ID NO: 2620635 - DNA, 25 bp, Homo sapien
ggagcctgcagactcagaccatgca

SEQ ID NO: 2620636 - DNA, 25 bp, Homo sapien
ggagcttctggctaccaaaccttct

SEQ ID NO: 2620637 - DNA, 25 bp, Homo sapien
agaccatgcaacctggactggagct

SEQ ID NO: 2620638 - DNA, 25 bp, Homo sapien
catgcaacctggactggagcttctg

SEQ ID NO: 2620639 - DNA, 25 bp, Homo sapien
tatttggctacagtgagaacggtct

SEQ ID NO: 2620640 - DNA, 25 bp, Homo sapien
caagatgatgttgagctcgagcaga

SEQ ID NO: 2620641 - DNA, 25 bp, Homo sapien
cagacagggcttgctgatggatagc

SEQ ID NO: 2620642 - DNA, 25 bp, Homo sapien
taagagcaatgggaaaccagcactg

SEQ ID NO: 2620643 - DNA, 25 bp, Homo sapien
cagatgcatttaggttcagggtgga

SEQ ID NO: 2620644 - DNA, 25 bp, Homo sapien
tacaacactgactggccagatgcat

SEQ ID NO: 2620645 - DNA, 25 bp, Homo sapien
tcatggacagctaccaatttgtggt

SEQ ID NO: 2620646 - DNA, 25 bp, Homo sapien
tagaaccgctaacctagaaatgtag

SEQ ID NO: 2620647 - DNA, 25 bp, Homo sapien
cagttccaactgacctgaccgagaa

SEQ ID NO: 2620648 - DNA, 25 bp, Homo sapien
tgaagccaagggatagcaaccattc

SEQ ID NO: 2620649 - DNA, 25 bp, Homo sapien
caaaaatagtgcgtgagctgtgcga

SEQ ID NO: 2620650 - DNA, 25 bp, Homo sapien
gagggttcaacgctgggcaagtata

SEQ ID NO: 2620651 - DNA, 25 bp, Homo sapien
ctttcagtttcttccgtggggcatg

SEQ ID NO: 2620652 - DNA, 25 bp, Homo sapien
ttccgtggggcatgtttcttccatt

SEQ ID NO: 2620653 - DNA, 25 bp, Homo sapien
cagtttcttccgtggggcatgtttc

SEQ ID NO: 2620654 - DNA, 25 bp, Homo sapien
tcttccgtggggcatgtttcttcca

SEQ ID NO: 2620655 - DNA, 25 bp, Homo sapien
tcagagcagggttaaatcaacaacc

SEQ ID NO: 2620656 - DNA, 25 bp, Homo sapien
gtaaatatacgcaaggcaaagtccc

SEQ ID NO: 2620657 - DNA, 25 bp, Homo sapien
cctagtaaggatgtgacagacctgc

SEQ ID NO: 2620658 - DNA, 25 bp, Homo sapien
taccagctgtgaaagaacggacttt

SEQ ID NO: 2620659 - DNA, 25 bp, Homo sapien
catgctccgtcaacaggtctatggg

SEQ ID NO: 2620660 - DNA, 25 bp, Homo sapien
gcaattcacaccacagggagtggga

SEQ ID NO: 2620661 - DNA, 25 bp, Homo sapien
gtctatgggccatgcttgagcactc

SEQ ID NO: 2620662 - DNA, 25 bp, Homo sapien
aggtccagtggcacagcaattcaca

SEQ ID NO: 2620663 - DNA, 25 bp, Homo sapien
catctccagaaatcctgattccgca

SEQ ID NO: 2620664 - DNA, 25 bp, Homo sapien
tggatggccccaggtttcggagcca

SEQ ID NO: 2620665 - DNA, 25 bp, Homo sapien
ctgattccgcagtcctggatggccc

SEQ ID NO: 2620666 - DNA, 25 bp, Homo sapien
tttcggagccactgtacagaggacc

SEQ ID NO: 2620667 - DNA, 25 bp, Homo sapien
tggcccatgtgaccctaaagtcagt

SEQ ID NO: 2620668 - DNA, 25 bp, Homo sapien
tgatgaagttggacaagaagggcag

SEQ ID NO: 2620669 - DNA, 25 bp, Homo sapien
taaagtcagttcctggggattcctg

SEQ ID NO: 2620670 - DNA, 25 bp, Homo sapien
ctgtgggcttcaaagggctgattgt

SEQ ID NO: 2620671 - DNA, 25 bp, Homo sapien
gcagttctgcagcttgtcttccaga

SEQ ID NO: 2620672 - DNA, 25 bp, Homo sapien
catgagaaatgatgggctgatgccg

SEQ ID NO: 2620673 - DNA, 25 bp, Homo sapien
tgagtccccgagttcctcctgagca

SEQ ID NO: 2620674 - DNA, 25 bp, Homo sapien
gatggaagcgtgtaaaaagtttcag

SEQ ID NO: 2620675 - DNA, 25 bp, Homo sapien
agtttttggacatctgatctagagg

SEQ ID NO: 2620676 - DNA, 25 bp, Homo sapien
ctacttcttagaggcaaatattcca

SEQ ID NO: 2620677 - DNA, 25 bp, Homo sapien
ttttggacatctgatctagaggcaa

SEQ ID NO: 2620678 - DNA, 25 bp, Homo sapien
gacatctgatctagaggcaaatcct

SEQ ID NO: 2620679 - DNA, 25 bp, Homo sapien
ctgctccagtgccgctagaaatctc

SEQ ID NO: 2620680 - DNA, 25 bp, Homo sapien
ccgctagaaatctctggtgcaatca

SEQ ID NO: 2620681 - DNA, 25 bp, Homo sapien
cagtgccgctagaaatctctggtgc

SEQ ID NO: 2620682 - DNA, 25 bp, Homo sapien
gctccagtgccgctagaaatctctg

SEQ ID NO: 2620683 - DNA, 25 bp, Homo sapien
aaaaatcactgtgtcccagtggggc

SEQ ID NO: 2620684 - DNA, 25 bp, Homo sapien
tgcatctgccctcggcaatgcaggg

SEQ ID NO: 2620685 - DNA, 25 bp, Homo sapien
gtctcccctgcaaaccgaattccat

SEQ ID NO: 2620686 - DNA, 25 bp, Homo sapien
agcgtcctgagcatcgtctcccctg

SEQ ID NO: 2620687 - DNA, 25 bp, Homo sapien
agttcccgttgtctggcagtatctc

SEQ ID NO: 2620688 - DNA, 25 bp, Homo sapien
cgtcagttcccgttgtctggcagta

SEQ ID NO: 2620689 - DNA, 25 bp, Homo sapien
tggttccgtcagttcccgttgtctg

SEQ ID NO: 2620690 - DNA, 25 bp, Homo sapien
caattggttccgtcagttcccgttg

SEQ ID NO: 2620691 - DNA, 25 bp, Homo sapien
taaaaaagtgtggatccactcccca

SEQ ID NO: 2620692 - DNA, 25 bp, Homo sapien
gacagtatttacaatcggttccaga

SEQ ID NO: 2620693 - DNA, 25 bp, Homo sapien
cagcacactaaggagtatgatccct

SEQ ID NO: 2620694 - DNA, 25 bp, Homo sapien
caaaatgtagttggcagcctgctgg

SEQ ID NO: 2620695 - DNA, 25 bp, Homo sapien
gactccaaaccagacttcttgcctt

SEQ ID NO: 2620696 - DNA, 25 bp, Homo sapien
tgttccattggctagcttcagacct

SEQ ID NO: 2620697 - DNA, 25 bp, Homo sapien
cctagtgggaatggccaaggctttc

SEQ ID NO: 2620698 - DNA, 25 bp, Homo sapien
tggcactcttgtcaggactccaaac

SEQ ID NO: 2620699 - DNA, 25 bp, Homo sapien
caagaaaaagcacaaggtgtttgaa

SEQ ID NO: 2620700 - DNA, 25 bp, Homo sapien
tcctccttctggcaaaacctccata

SEQ ID NO: 2620701 - DNA, 25 bp, Homo sapien
tctggcaaaacctccatatttaaac

SEQ ID NO: 2620702 - DNA, 25 bp, Homo sapien
agaaaaagcacaaggtgtttgaact

SEQ ID NO: 2620703 - DNA, 25 bp, Homo sapien
ttcagtatcaatctctttgtgatgc

SEQ ID NO: 2620704 - DNA, 25 bp, Homo sapien
gaagcatttccaacatactttaagc

SEQ ID NO: 2620705 - DNA, 25 bp, Homo sapien
cctggttggacgactccaagttcag

SEQ ID NO: 2620706 - DNA, 25 bp, Homo sapien
tccaacatactttaagcaccctggt

SEQ ID NO: 2620707 - DNA, 25 bp, Homo sapien
tatgctctgaatttccagacagctc

SEQ ID NO: 2620708 - DNA, 25 bp, Homo sapien
agtcagagcactatgtgtccatgac

SEQ ID NO: 2620709 - DNA, 25 bp, Homo sapien
catgacgtcactcggcaaaaactcc

SEQ ID NO: 2620710 - DNA, 25 bp, Homo sapien
gaggagccttatgctctgaatttcc

SEQ ID NO: 2620711 - DNA, 25 bp, Homo sapien
tgtccatgtggtatggatcgggcag

SEQ ID NO: 2620712 - DNA, 25 bp, Homo sapien
atgatactaccaacccactcattca

SEQ ID NO: 2620713 - DNA, 25 bp, Homo sapien
tagatcacatcatccacatatagca

SEQ ID NO: 2620714 - DNA, 25 bp, Homo sapien
cattcacaacccagtagatcacatc

SEQ ID NO: 2620715 - DNA, 25 bp, Homo sapien
cctccagccttcaattttatagatg

SEQ ID NO: 2620716 - DNA, 25 bp, Homo sapien
gaaaaggtgtccttcctgtgcccat

SEQ ID NO: 2620717 - DNA, 25 bp, Homo sapien
ctgtgcccatcacaaaagtggccat

SEQ ID NO: 2620718 - DNA, 25 bp, Homo sapien
aactgacaccaacaagtaaggcttc

SEQ ID NO: 2620719 - DNA, 25 bp, Homo sapien
ctgcaactgacaccaacaagtaagg

SEQ ID NO: 2620720 - DNA, 25 bp, Homo sapien
cttgggttcaagcaattctcctgcc

SEQ ID NO: 2620721 - DNA, 25 bp, Homo sapien
accacacttggctaattttgtattt

SEQ ID NO: 2620722 - DNA, 25 bp, Homo sapien
ctcaccatagcctccacctcttggg

SEQ ID NO: 2620723 - DNA, 25 bp, Homo sapien
ggctcaccatagcctccacctcttg

SEQ ID NO: 2620724 - DNA, 25 bp, Homo sapien
gctctctacctgatattcattctct

SEQ ID NO: 2620725 - DNA, 25 bp, Homo sapien
gtgtggctctctacctgatattcat

SEQ ID NO: 2620726 - DNA, 25 bp, Homo sapien
tctctacctgatattcattctctct

SEQ ID NO: 2620727 - DNA, 25 bp, Homo sapien
agcgtgtggctctctacctgatatt

SEQ ID NO: 2620728 - DNA, 25 bp, Homo sapien
tgttggaaatacacggacaccctca

SEQ ID NO: 2620729 - DNA, 25 bp, Homo sapien
tagaagcatcaatatccactcgcga

SEQ ID NO: 2620730 - DNA, 25 bp, Homo sapien
tattcttaggtgtccatgggctaca

SEQ ID NO: 2620731 - DNA, 25 bp, Homo sapien
tcagggcgtaagaaaagacagagat

SEQ ID NO: 2620732 - DNA, 25 bp, Homo sapien
tcagctcggatctgatgtccaatca

SEQ ID NO: 2620733 - DNA, 25 bp, Homo sapien
caggatagcaacagggccactgaga

SEQ ID NO: 2620734 - DNA, 25 bp, Homo sapien
gggccacaggatagcaacagggcca

SEQ ID NO: 2620735 - DNA, 25 bp, Homo sapien
tgatgtccaatcactgttggccaag

SEQ ID NO: 2620736 - DNA, 25 bp, Homo sapien
gcagaagcgcaggaccgggagagag

SEQ ID NO: 2620737 - DNA, 25 bp, Homo sapien
ggagagagcgcccctgggttcccca

SEQ ID NO: 2620738 - DNA, 25 bp, Homo sapien
tcatcctgctaagaaatagagaagt

SEQ ID NO: 2620739 - DNA, 25 bp, Homo sapien
ctcactttccgccatcctggacggg

SEQ ID NO: 2620740 - DNA, 25 bp, Homo sapien
tagggacacctactcgagactatgc

SEQ ID NO: 2620741 - DNA, 25 bp, Homo sapien
gaaggaagtgtctaacaagtccctg

SEQ ID NO: 2620742 - DNA, 25 bp, Homo sapien
ccttggcaggaggaagctaggaccc

SEQ ID NO: 2620743 - DNA, 25 bp, Homo sapien
tgacacaggaatggaggatccctcc

SEQ ID NO: 2620744 - DNA, 25 bp, Homo sapien
aaagttcagctggatgtactcctgc

SEQ ID NO: 2620745 - DNA, 25 bp, Homo sapien
tgatcaggtgggaccgtactctcat

SEQ ID NO: 2620746 - DNA, 25 bp, Homo sapien
cagctgcccattcagtgagaggatc

SEQ ID NO: 2620747 - DNA, 25 bp, Homo sapien
ggatgttcccaaaactcaggcccac

SEQ ID NO: 2620748 - DNA, 25 bp, Homo sapien
ctaaggtgatatgggataggcagat

SEQ ID NO: 2620749 - DNA, 25 bp, Homo sapien
ctttggtgctccagttgaagatgtg

SEQ ID NO: 2620750 - DNA, 25 bp, Homo sapien
aaacacatccaagacccaacctttg

SEQ ID NO: 2620751 - DNA, 25 bp, Homo sapien
ggttgctgggactaaggtgatatgg

SEQ ID NO: 2620752 - DNA, 25 bp, Homo sapien
acacacacggctgcttcaacacaga

SEQ ID NO: 2620753 - DNA, 25 bp, Homo sapien
aaagtcatgactgctgaccactaaa

SEQ ID NO: 2620754 - DNA, 25 bp, Homo sapien
ttttcatcgtctagcacacacacgg

SEQ ID NO: 2620755 - DNA, 25 bp, Homo sapien
gactgctgaccactaaacaagattt

SEQ ID NO: 2620756 - DNA, 25 bp, Homo sapien
agtggcttcaggatacaccctcttt

SEQ ID NO: 2620757 - DNA, 25 bp, Homo sapien
cagtggcttcaggatacaccctctt

SEQ ID NO: 2620758 - DNA, 25 bp, Homo sapien
gtggcttcaggatacaccctctttc

SEQ ID NO: 2620759 - DNA, 25 bp, Homo sapien
cagtgctctaaagtgtccagtgtcg

SEQ ID NO: 2620760 - DNA, 25 bp, Homo sapien
acagttaacacacacatggttctca

SEQ ID NO: 2620761 - DNA, 25 bp, Homo sapien
cagtgtcggggaggaaatcatccga

SEQ ID NO: 2620762 - DNA, 25 bp, Homo sapien
tggttctcagagtgtcctcatcaaa

SEQ ID NO: 2620763 - DNA, 25 bp, Homo sapien
aaagctgctaacactcaaaagaatg

SEQ ID NO: 2620764 - DNA, 25 bp, Homo sapien
gaatgaaggcttcctaggattacta

SEQ ID NO: 2620765 - DNA, 25 bp, Homo sapien
gaaagttctctagaagttcccacca

SEQ ID NO: 2620766 - DNA, 25 bp, Homo sapien
ggattactaggcatcaggagtgcca

SEQ ID NO: 2620767 - DNA, 25 bp, Homo sapien
ggaccccagtgtctggaccaaagat

SEQ ID NO: 2620768 - DNA, 25 bp, Homo sapien
gggacccggttcttgcatccgccag

SEQ ID NO: 2620769 - DNA, 25 bp, Homo sapien
tgccacgccactcgctcaatattgg

SEQ ID NO: 2620770 - DNA, 25 bp, Homo sapien
cagcatcccttccaaatgggggtcc

SEQ ID NO: 2620771 - DNA, 25 bp, Homo sapien
tgaggacttcacaggagtggatatc

SEQ ID NO: 2620772 - DNA, 25 bp, Homo sapien
tcttacgcatggatcttttcaggct

SEQ ID NO: 2620773 - DNA, 25 bp, Homo sapien
cagacttgccatggaatttaacaga

SEQ ID NO: 2620774 - DNA, 25 bp, Homo sapien
tgagtcagggaaaaacccagacttg

SEQ ID NO: 2620775 - DNA, 25 bp, Homo sapien
tggtatttagataatcagatagtaa

SEQ ID NO: 2620776 - DNA, 25 bp, Homo sapien
tacatggtatttagataatcagata

SEQ ID NO: 2620777 - DNA, 25 bp, Homo sapien
ggtatttagataatcagatagtaat

SEQ ID NO: 2620778 - DNA, 25 bp, Homo sapien
catggtatttagataatcagatagt

SEQ ID NO: 2620779 - DNA, 25 bp, Homo sapien
acacccagtcatcatactcacgaac

SEQ ID NO: 2620780 - DNA, 25 bp, Homo sapien
ggttagacaggtaatgcactgacat

SEQ ID NO: 2620781 - DNA, 25 bp, Homo sapien
tgcactgacattgcaacaaggtttg

SEQ ID NO: 2620782 - DNA, 25 bp, Homo sapien
caggtaatgcactgacattgcaaca

SEQ ID NO: 2620783 - DNA, 25 bp, Homo sapien
tataggtgatgccaaagcaagcacc

SEQ ID NO: 2620784 - DNA, 25 bp, Homo sapien
atccttgagcaggagccatgttcat

SEQ ID NO: 2620785 - DNA, 25 bp, Homo sapien
ttgagcaggagccatgttcatcttc

SEQ ID NO: 2620786 - DNA, 25 bp, Homo sapien
ccttgagcaggagccatgttcatct

SEQ ID NO: 2620787 - DNA, 25 bp, Homo sapien
gtagatacagggtttactagtccat

SEQ ID NO: 2620788 - DNA, 25 bp, Homo sapien
gaagcctatcagaaaggtacctggg

SEQ ID NO: 2620789 - DNA, 25 bp, Homo sapien
tgtagcccacgcattcttgtagatg

SEQ ID NO: 2620790 - DNA, 25 bp, Homo sapien
gagacacccagtatgttctccaggc

SEQ ID NO: 2620791 - DNA, 25 bp, Homo sapien
tataatgagtggaaccgccatcctc

SEQ ID NO: 2620792 - DNA, 25 bp, Homo sapien
cgtttcttagcatagtaatcggttt

SEQ ID NO: 2620793 - DNA, 25 bp, Homo sapien
gatatctctgttacgcgaactctca

SEQ ID NO: 2620794 - DNA, 25 bp, Homo sapien
ctgttacgcgaactctcatcctgta

SEQ ID NO: 2620795 - DNA, 25 bp, Homo sapien
tctctgttacgcgaactctcatcct

SEQ ID NO: 2620796 - DNA, 25 bp, Homo sapien
tgatatctctgttacgcgaactctc

SEQ ID NO: 2620797 - DNA, 25 bp, Homo sapien
ctgcaagggatagacaagcctccat

SEQ ID NO: 2620798 - DNA, 25 bp, Homo sapien
cgtgatgtgcttccaatgcattaac

SEQ ID NO: 2620799 - DNA, 25 bp, Homo sapien
gcattaacttctgcattaagttcct

SEQ ID NO: 2620800 - DNA, 25 bp, Homo sapien
gatgtgcttccaatgcattaacttc

SEQ ID NO: 2620801 - DNA, 25 bp, Homo sapien
ctgacacgtgatgtgcttccaatgc

SEQ ID NO: 2620802 - DNA, 25 bp, Homo sapien
tgagccttcttatacatccccatca

SEQ ID NO: 2620803 - DNA, 25 bp, Homo sapien
atgagccttcttatacatccccatc

SEQ ID NO: 2620804 - DNA, 25 bp, Homo sapien
tgcatagcagcatgagccttcttat

SEQ ID NO: 2620805 - DNA, 25 bp, Homo sapien
tctgggcaagggacattttgggata

SEQ ID NO: 2620806 - DNA, 25 bp, Homo sapien
tgatctttcttctgggcaagggaca

SEQ ID NO: 2620807 - DNA, 25 bp, Homo sapien
tcttctgggcaagggacattttggg

SEQ ID NO: 2620808 - DNA, 25 bp, Homo sapien
ctgatctttcttctgggcaagggac

SEQ ID NO: 2620809 - DNA, 25 bp, Homo sapien
cggagggttcctctccggagctcct

SEQ ID NO: 2620810 - DNA, 25 bp, Homo sapien
cagttctgaagtcaccttcggaggg

SEQ ID NO: 2620811 - DNA, 25 bp, Homo sapien
tgaagtcaccttcggagggttcctc

SEQ ID NO: 2620812 - DNA, 25 bp, Homo sapien
ttcggagggttcctctccggagctc

SEQ ID NO: 2620813 - DNA, 25 bp, Homo sapien
cattcaatggccagattagcagctg

SEQ ID NO: 2620814 - DNA, 25 bp, Homo sapien
ggttagcattcaatggccagattag

SEQ ID NO: 2620815 - DNA, 25 bp, Homo sapien
cagctggggacgagatgaggccctt

SEQ ID NO: 2620816 - DNA, 25 bp, Homo sapien
ctacaggttagcattcaatggccag

SEQ ID NO: 2620817 - DNA, 25 bp, Homo sapien
tcttttgtttgtggcccgctctgag

SEQ ID NO: 2620818 - DNA, 25 bp, Homo sapien
tcttccttaagacctgacacaggcc

SEQ ID NO: 2620819 - DNA, 25 bp, Homo sapien
tgggtgggtcccgtatcctctcaac

SEQ ID NO: 2620820 - DNA, 25 bp, Homo sapien
gggccttgggtttgactgaagatcc

SEQ ID NO: 2620821 - DNA, 25 bp, Homo sapien
cactctagataagagggaggctggc

SEQ ID NO: 2620822 - DNA, 25 bp, Homo sapien
ggcaattacacccagcaatgcaggc

SEQ ID NO: 2620823 - DNA, 25 bp, Homo sapien
gattagcaggaacagaggctcaagg

SEQ ID NO: 2620824 - DNA, 25 bp, Homo sapien
ggctcaagggaagcgctactacgtg

SEQ ID NO: 2620825 - DNA, 25 bp, Homo sapien
cacttggccaaacctctgggaaaca

SEQ ID NO: 2620826 - DNA, 25 bp, Homo sapien
taagcgaccttgatgtcccaggaaa

SEQ ID NO: 2620827 - DNA, 25 bp, Homo sapien
gggcagagcaacaagcacttggcca

SEQ ID NO: 2620828 - DNA, 25 bp, Homo sapien
ggaaacagtgcaatggactcaccat

SEQ ID NO: 2620829 - DNA, 25 bp, Homo sapien
gattccggaatgaaaatccagtaaa

SEQ ID NO: 2620830 - DNA, 25 bp, Homo sapien
gctataagtctgattccggaatgaa

SEQ ID NO: 2620831 - DNA, 25 bp, Homo sapien
agtctgattccggaatgaaaatcca

SEQ ID NO: 2620832 - DNA, 25 bp, Homo sapien
tctgattccggaatgaaaatccagt

SEQ ID NO: 2620833 - DNA, 25 bp, Homo sapien
taaaacacacgggatgctacatgag

SEQ ID NO: 2620834 - DNA, 25 bp, Homo sapien
gacccagtgggcagtatgtacttgc

SEQ ID NO: 2620835 - DNA, 25 bp, Homo sapien
taacagtgagaggagaccccacaat

SEQ ID NO: 2620836 - DNA, 25 bp, Homo sapien
aatgatggatgtgcaactggcctca

SEQ ID NO: 2620837 - DNA, 25 bp, Homo sapien
tggccctaggtaccaagtgaaggct

SEQ ID NO: 2620838 - DNA, 25 bp, Homo sapien
caatgagctaatcctacagcagagg

SEQ ID NO: 2620839 - DNA, 25 bp, Homo sapien
aaattcgagagtcaatccatgcggg

SEQ ID NO: 2620840 - DNA, 25 bp, Homo sapien
gatttatgccctagagcgcctctgg

SEQ ID NO: 2620841 - DNA, 25 bp, Homo sapien
ctgaaatgtggccccgagtgggcac

SEQ ID NO: 2620842 - DNA, 25 bp, Homo sapien
caccattcttcagcggctggttttt

SEQ ID NO: 2620843 - DNA, 25 bp, Homo sapien
agccaccattcttcagcggctggtt

SEQ ID NO: 2620844 - DNA, 25 bp, Homo sapien
gccaccattcttcagcggctggttt

SEQ ID NO: 2620845 - DNA, 25 bp, Homo sapien
gaatcagaagaggaatcgggcagct

SEQ ID NO: 2620846 - DNA, 25 bp, Homo sapien
caatactccgtacagaagcagcagc

SEQ ID NO: 2620847 - DNA, 25 bp, Homo sapien
aaatctgagtgagcccacggtctgc

SEQ ID NO: 2620848 - DNA, 25 bp, Homo sapien
cagtttacacagcaacacagggaga

SEQ ID NO: 2620849 - DNA, 25 bp, Homo sapien
ccgatctccgtgtagcagcaaaggc

SEQ ID NO: 2620850 - DNA, 25 bp, Homo sapien
agaagcagcaccgatctccgtgtag

SEQ ID NO: 2620851 - DNA, 25 bp, Homo sapien
tccttgaactaaatatagacccgtg

SEQ ID NO: 2620852 - DNA, 25 bp, Homo sapien
tgaactaaatatagacccgtgaagg

SEQ ID NO: 2620853 - DNA, 25 bp, Homo sapien
gaatccaacttgaagctgtagattt

SEQ ID NO: 2620854 - DNA, 25 bp, Homo sapien
caacttgaagctgtagatttagtgg

SEQ ID NO: 2620855 - DNA, 25 bp, Homo sapien
ttgctttgcgtctcttcattaagga

SEQ ID NO: 2620856 - DNA, 25 bp, Homo sapien
tcagcttgctctcaggcagtctaat

SEQ ID NO: 2620857 - DNA, 25 bp, Homo sapien
aagatggggatttgcctctttctct

SEQ ID NO: 2620858 - DNA, 25 bp, Homo sapien
gaagatacagacaaagcatgtctgg

SEQ ID NO: 2620859 - DNA, 25 bp, Homo sapien
gaagaggaagcccaagcggtgaggg

SEQ ID NO: 2620860 - DNA, 25 bp, Homo sapien
taatttttgtatgcagccaatacat

SEQ ID NO: 2620861 - DNA, 25 bp, Homo sapien
ccagcctctcaccagtagaagtaaa

SEQ ID NO: 2620862 - DNA, 25 bp, Homo sapien
ggagcgtggctggaatttacctaca

SEQ ID NO: 2620863 - DNA, 25 bp, Homo sapien
ttgtggtatgatgcctttaagggtg

SEQ ID NO: 2620864 - DNA, 25 bp, Homo sapien
gggcacgaatcctcccagacgccat

SEQ ID NO: 2620865 - DNA, 25 bp, Homo sapien
gggtggtgggagagtatcgccggag

SEQ ID NO: 2620866 - DNA, 25 bp, Homo sapien
gtgggagagtatcgccggagaggct

SEQ ID NO: 2620867 - DNA, 25 bp, Homo sapien
cagtggctttctgtcttccctttct

SEQ ID NO: 2620868 - DNA, 25 bp, Homo sapien
agtggctttctgtcttccctttctc

SEQ ID NO: 2620869 - DNA, 25 bp, Homo sapien
tcagtggctttctgtcttccctttc

SEQ ID NO: 2620870 - DNA, 25 bp, Homo sapien
gactgaggtcatttcaaggtaatgt

SEQ ID NO: 2620871 - DNA, 25 bp, Homo sapien
aacctgacacttgctactgtgaggt

SEQ ID NO: 2620872 - DNA, 25 bp, Homo sapien
cagatgctctgggatattactagat

SEQ ID NO: 2620873 - DNA, 25 bp, Homo sapien
gacctctaaagcatccaaaccagca

SEQ ID NO: 2620874 - DNA, 25 bp, Homo sapien
tacaggtgatcctctactatcccaa

SEQ ID NO: 2620875 - DNA, 25 bp, Homo sapien
gatctaaggtattaagagtaacgca

SEQ ID NO: 2620876 - DNA, 25 bp, Homo sapien
taaagtctacagtggcattggcatt

SEQ ID NO: 2620877 - DNA, 25 bp, Homo sapien
tatcccaattaggtgacagctgaaa

SEQ ID NO: 2620878 - DNA, 25 bp, Homo sapien
gaagcaatgattcaagatgacaata

SEQ ID NO: 2620879 - DNA, 25 bp, Homo sapien
agcaatgattcaagatgacaatata

SEQ ID NO: 2620880 - DNA, 25 bp, Homo sapien
atgaaggtatggaagcaatgattca

SEQ ID NO: 2620881 - DNA, 25 bp, Homo sapien
aagcaatgattcaagatgacaatat

SEQ ID NO: 2620882 - DNA, 25 bp, Homo sapien
tattttggcttgactgttgcaaatg

SEQ ID NO: 2620883 - DNA, 25 bp, Homo sapien
ttggcttgactgttgcaaatgatga

SEQ ID NO: 2620884 - DNA, 25 bp, Homo sapien
ggcttgactgttgcaaatgatgaaa

SEQ ID NO: 2620885 - DNA, 25 bp, Homo sapien
ttttggcttgactgttgcaaatgat

SEQ ID NO: 2620886 - DNA, 25 bp, Homo sapien
ccttaatctgctcaacacaactcca

SEQ ID NO: 2620887 - DNA, 25 bp, Homo sapien
cccttttcctagtgtagatcccttg

SEQ ID NO: 2620888 - DNA, 25 bp, Homo sapien
tgactcccaaagataagttggtacc

SEQ ID NO: 2620889 - DNA, 25 bp, Homo sapien
tccaaataccacacatgccctgata

SEQ ID NO: 2620890 - DNA, 25 bp, Homo sapien
gctttctagggaatgcatgtccaca

SEQ ID NO: 2620891 - DNA, 25 bp, Homo sapien
tgtccacactcccatggaggcagat

SEQ ID NO: 2620892 - DNA, 25 bp, Homo sapien
gagatggagcactctctagactgcc

SEQ ID NO: 2620893 - DNA, 25 bp, Homo sapien
caagttgaccgaccctgagatggag

SEQ ID NO: 2620894 - DNA, 25 bp, Homo sapien
gcttggcacatagcctgactccaga

SEQ ID NO: 2620895 - DNA, 25 bp, Homo sapien
tttcatctttatgtcgcttggcaca

SEQ ID NO: 2620896 - DNA, 25 bp, Homo sapien
caatgccctgtgttatattatactc

SEQ ID NO: 2620897 - DNA, 25 bp, Homo sapien
tatactcagggaaatttatgtaatt

SEQ ID NO: 2620898 - DNA, 25 bp, Homo sapien
tcaatgtcctggtccaactgctgat

SEQ ID NO: 2620899 - DNA, 25 bp, Homo sapien
gatccacctacatggttggacagtg

SEQ ID NO: 2620900 - DNA, 25 bp, Homo sapien
gtgccgtgtctatgcagttagttag

SEQ ID NO: 2620901 - DNA, 25 bp, Homo sapien
gacagtgccgtgtctatgcagttag

SEQ ID NO: 2620902 - DNA, 25 bp, Homo sapien
atttagtacagagctatgaatgccc

SEQ ID NO: 2620903 - DNA, 25 bp, Homo sapien
tagtacagagctatgaatgcccaac

SEQ ID NO: 2620904 - DNA, 25 bp, Homo sapien
tttagtacagagctatgaatgccca

SEQ ID NO: 2620905 - DNA, 25 bp, Homo sapien
gtacagagctatgaatgcccaacag

SEQ ID NO: 2620906 - DNA, 25 bp, Homo sapien
tctggtgaagctagtttcctgaaag

SEQ ID NO: 2620907 - DNA, 25 bp, Homo sapien
tgacagtatcaacaccagccattac

SEQ ID NO: 2620908 - DNA, 25 bp, Homo sapien
attactgtgctttccgtgccctcgc

SEQ ID NO: 2620909 - DNA, 25 bp, Homo sapien
agatctcccggatctcgtgaacaca

SEQ ID NO: 2620910 - DNA, 25 bp, Homo sapien
gatgtgcttgacatgattgcaaggg

SEQ ID NO: 2620911 - DNA, 25 bp, Homo sapien
ttcaagtttgtctttgatatcacgt

SEQ ID NO: 2620912 - DNA, 25 bp, Homo sapien
ggatgtgcttgacatgattgcaagg

SEQ ID NO: 2620913 - DNA, 25 bp, Homo sapien
aagtttgtctttgatatcacgtaac

SEQ ID NO: 2620914 - DNA, 25 bp, Homo sapien
acatatggagtcacaccatccttcc

SEQ ID NO: 2620915 - DNA, 25 bp, Homo sapien
cacatatggagtcacaccatccttc

SEQ ID NO: 2620916 - DNA, 25 bp, Homo sapien
tgccacctggattcatggtttcccc

SEQ ID NO: 2620917 - DNA, 25 bp, Homo sapien
catgccacctggattcatggtttcc

SEQ ID NO: 2620918 - DNA, 25 bp, Homo sapien
ttagtcccactgttagccatatcgg

SEQ ID NO: 2620919 - DNA, 25 bp, Homo sapien
gttagtcccactgttagccatatcg

SEQ ID NO: 2620920 - DNA, 25 bp, Homo sapien
gggctaaacttagcattcctgctca

SEQ ID NO: 2620921 - DNA, 25 bp, Homo sapien
cactagccatatgaataataactga

SEQ ID NO: 2620922 - DNA, 25 bp, Homo sapien
gacaagacaatgagcttcagttaaa

SEQ ID NO: 2620923 - DNA, 25 bp, Homo sapien
tcgtaccgccgcactctagcctagg

SEQ ID NO: 2620924 - DNA, 25 bp, Homo sapien
ttttacctgtacaaccatttgagca

SEQ ID NO: 2620925 - DNA, 25 bp, Homo sapien
tttcagcgtgcccacagaaggctaa

SEQ ID NO: 2620926 - DNA, 25 bp, Homo sapien
cacccggccttaagagcttcaagtt

SEQ ID NO: 2620927 - DNA, 25 bp, Homo sapien
ccatttgagcatagttcacacatga

SEQ ID NO: 2620928 - DNA, 25 bp, Homo sapien
gtggtggctcaggggctataatgcc

SEQ ID NO: 2620929 - DNA, 25 bp, Homo sapien
tggctcaggggctataatgccagca

SEQ ID NO: 2620930 - DNA, 25 bp, Homo sapien
gggctagtgaagagctgggcgtggt

SEQ ID NO: 2620931 - DNA, 25 bp, Homo sapien
tgaagggctagtgaagagctgggcg

SEQ ID NO: 2620932 - DNA, 25 bp, Homo sapien
cttacagcaaccaccgcatcgggaa

SEQ ID NO: 2620933 - DNA, 25 bp, Homo sapien
caccgcatcgggaatccgaaaggga

SEQ ID NO: 2620934 - DNA, 25 bp, Homo sapien
caaccaccgcatcgggaatccgaaa

SEQ ID NO: 2620935 - DNA, 25 bp, Homo sapien
catcgggaatccgaaagggagaagt

SEQ ID NO: 2620936 - DNA, 25 bp, Homo sapien
ggcgatggccgtgtggcacagggag

SEQ ID NO: 2620937 - DNA, 25 bp, Homo sapien
cgatggccgtgtggcacagggagga

SEQ ID NO: 2620938 - DNA, 25 bp, Homo sapien
tggccgtgtggcacagggaggaccc

SEQ ID NO: 2620939 - DNA, 25 bp, Homo sapien
atggccgtgtggcacagggaggacc

SEQ ID NO: 2620940 - DNA, 25 bp, Homo sapien
tggatggcaaactggcccccgttga

SEQ ID NO: 2620941 - DNA, 25 bp, Homo sapien
agagggataaagcccaagtggatgg

SEQ ID NO: 2620942 - DNA, 25 bp, Homo sapien
ggatggcaaactggcccccgttgaa

SEQ ID NO: 2620943 - DNA, 25 bp, Homo sapien
gggataaagcccaagtggatggcaa

SEQ ID NO: 2620944 - DNA, 25 bp, Homo sapien
ccccaaagtaggctcagaacagttg

SEQ ID NO: 2620945 - DNA, 25 bp, Homo sapien
tgcacccctcttaaatcccaggtaa

SEQ ID NO: 2620946 - DNA, 25 bp, Homo sapien
taggctcagaacagttggttcagac

SEQ ID NO: 2620947 - DNA, 25 bp, Homo sapien
gaacagttggttcagacattccagg

SEQ ID NO: 2620948 - DNA, 25 bp, Homo sapien
tacaggttcatctgtgaagagcctt

SEQ ID NO: 2620949 - DNA, 25 bp, Homo sapien
tccactctgctacaggttcatctgt

SEQ ID NO: 2620950 - DNA, 25 bp, Homo sapien
gctacaggttcatctgtgaagagcc

SEQ ID NO: 2620951 - DNA, 25 bp, Homo sapien
tctgctacaggttcatctgtgaaga

SEQ ID NO: 2620952 - DNA, 25 bp, Homo sapien
agacctttgttggaaacagagtttg

SEQ ID NO: 2620953 - DNA, 25 bp, Homo sapien
cctgctcacagttcaagctaaggag

SEQ ID NO: 2620954 - DNA, 25 bp, Homo sapien
tagttcctagtctccaaacaccagc

SEQ ID NO: 2620955 - DNA, 25 bp, Homo sapien
caagaggcctgaaagttgatcgtgt

SEQ ID NO: 2620956 - DNA, 25 bp, Homo sapien
tatatgatgtttccctggtgcggca

SEQ ID NO: 2620957 - DNA, 25 bp, Homo sapien
tcaggtgagcgtgctctgctgtgct

SEQ ID NO: 2620958 - DNA, 25 bp, Homo sapien
caaaaatacaagctgcgccatgcgt

SEQ ID NO: 2620959 - DNA, 25 bp, Homo sapien
ctgctttatgagctggtcaggtgag

SEQ ID NO: 2620960 - DNA, 25 bp, Homo sapien
taaagtcctgggttattaactatca

SEQ ID NO: 2620961 - DNA, 25 bp, Homo sapien
cttggaagacctgtaagttgtgttc

SEQ ID NO: 2620962 - DNA, 25 bp, Homo sapien
gaagacctgtaagttgtgttcagag

SEQ ID NO: 2620963 - DNA, 25 bp, Homo sapien
acccttggaagacctgtaagttgtg

SEQ ID NO: 2620964 - DNA, 25 bp, Homo sapien
ttcaccactcaggtctcccgtccta

SEQ ID NO: 2620965 - DNA, 25 bp, Homo sapien
ctgcaatggacaaaaagctacttac

SEQ ID NO: 2620966 - DNA, 25 bp, Homo sapien
agctacttacacaagatggctccat

SEQ ID NO: 2620967 - DNA, 25 bp, Homo sapien
tgcaatggacaaaaagctacttaca

SEQ ID NO: 2620968 - DNA, 25 bp, Homo sapien
acaaaaagctacttacacaagatgg

SEQ ID NO: 2620969 - DNA, 25 bp, Homo sapien
agatggttgaaatgtcccggtagta

SEQ ID NO: 2620970 - DNA, 25 bp, Homo sapien
acaatctcctgtgagatgctttcct

SEQ ID NO: 2620971 - DNA, 25 bp, Homo sapien
tagtaaacaacaatctcctgtgaga

SEQ ID NO: 2620972 - DNA, 25 bp, Homo sapien
tgtcccggtagtaaacaacaatctc

SEQ ID NO: 2620973 - DNA, 25 bp, Homo sapien
ggcacccatgtgcttaacgaaggca

SEQ ID NO: 2620974 - DNA, 25 bp, Homo sapien
taacgaaggcaatctgggcagatgg

SEQ ID NO: 2620975 - DNA, 25 bp, Homo sapien
ccatctgtggagtcacagtgtggct

SEQ ID NO: 2620976 - DNA, 25 bp, Homo sapien
tggctatccagtgaggcacccatgt

SEQ ID NO: 2620977 - DNA, 25 bp, Homo sapien
acgtgcacacgctgccaccccaccc

SEQ ID NO: 2620978 - DNA, 25 bp, Homo sapien
cgtgcacacgctgccaccccaccct

SEQ ID NO: 2620979 - DNA, 25 bp, Homo sapien
ccagggaatgcacaccatgagagag

SEQ ID NO: 2620980 - DNA, 25 bp, Homo sapien
aggaagcggcccctccaaggcgcag

SEQ ID NO: 2620981 - DNA, 25 bp, Homo sapien
ggaatgcacaccatgagagagtcac

SEQ ID NO: 2620982 - DNA, 25 bp, Homo sapien
tgcacatgggccatgaggccaggaa

SEQ ID NO: 2620983 - DNA, 25 bp, Homo sapien
ggagattctctcaagcaaaccaagt

SEQ ID NO: 2620984 - DNA, 25 bp, Homo sapien
aaaccaagttaacagcgtagaatgc

SEQ ID NO: 2620985 - DNA, 25 bp, Homo sapien
cgtagaatgctagtgccaggatcat

SEQ ID NO: 2620986 - DNA, 25 bp, Homo sapien
cagggccatggggagattctctcaa

SEQ ID NO: 2620987 - DNA, 25 bp, Homo sapien
gtccatgtatctcagaaggcacttg

SEQ ID NO: 2620988 - DNA, 25 bp, Homo sapien
ggcacttgatgctcctcacacacaa

SEQ ID NO: 2620989 - DNA, 25 bp, Homo sapien
attcccgtgggtccatgtatctcag

SEQ ID NO: 2620990 - DNA, 25 bp, Homo sapien
ctaaaagaaggcagattcccgtggg

SEQ ID NO: 2620991 - DNA, 25 bp, Homo sapien
gcccgcatagtgcagcatccaaaag

SEQ ID NO: 2620992 - DNA, 25 bp, Homo sapien
gccaaatccaacaggtcacaacggg

SEQ ID NO: 2620993 - DNA, 25 bp, Homo sapien
aacaggtcacaacgggccagtaagt

SEQ ID NO: 2620994 - DNA, 25 bp, Homo sapien
tgatctaagggctgagttgcacact

SEQ ID NO: 2620995 - DNA, 25 bp, Homo sapien
aaagcgttttacagcacccatacac

SEQ ID NO: 2620996 - DNA, 25 bp, Homo sapien
ctcaaaggttttcatgcacctcctt

SEQ ID NO: 2620997 - DNA, 25 bp, Homo sapien
gaatcaataaaagcgttttacagca

SEQ ID NO: 2620998 - DNA, 25 bp, Homo sapien
ttatgaatcaataaaagcgttttac

SEQ ID NO: 2620999 - DNA, 25 bp, Homo sapien
aattccacctcttggcactcattgg

SEQ ID NO: 2621000 - DNA, 25 bp, Homo sapien
ccattagctgcaatatccctctgtg

SEQ ID NO: 2621001 - DNA, 25 bp, Homo sapien
tttttctgtttactgctaagagctc

SEQ ID NO: 2621002 - DNA, 25 bp, Homo sapien
ctgtgctgaagcagaggtagttctt

SEQ ID NO: 2621003 - DNA, 25 bp, Homo sapien
acctttcctgaagataatcgatttc

SEQ ID NO: 2621004 - DNA, 25 bp, Homo sapien
gtgtgctcataatacctttcctgaa

SEQ ID NO: 2621005 - DNA, 25 bp, Homo sapien
cctttcctgaagataatcgatttct

SEQ ID NO: 2621006 - DNA, 25 bp, Homo sapien
ttcctgaagataatcgatttctttg

SEQ ID NO: 2621007 - DNA, 25 bp, Homo sapien
gaaagttttgagcaactcctctgtt

SEQ ID NO: 2621008 - DNA, 25 bp, Homo sapien
tttcccgcaaaaggtgccttatctc

SEQ ID NO: 2621009 - DNA, 25 bp, Homo sapien
tgatgctctatcataattctggagt

SEQ ID NO: 2621010 - DNA, 25 bp, Homo sapien
aaaaggtgccttatctcaaagaaag

SEQ ID NO: 2621011 - DNA, 25 bp, Homo sapien
gataaagccgccattccagcactgc

SEQ ID NO: 2621012 - DNA, 25 bp, Homo sapien
agataaagccgccattccagcactg

SEQ ID NO: 2621013 - DNA, 25 bp, Homo sapien
tagataaagccgccattccagcact

SEQ ID NO: 2621014 - DNA, 25 bp, Homo sapien
tttttcgcagttcggtcacccagct

SEQ ID NO: 2621015 - DNA, 25 bp, Homo sapien
tttctagctgaaagacatggccgtt

SEQ ID NO: 2621016 - DNA, 25 bp, Homo sapien
tcttcccaccttttgagaagcggcg

SEQ ID NO: 2621017 - DNA, 25 bp, Homo sapien
caggcagtcactcgattggaagtcc

SEQ ID NO: 2621018 - DNA, 25 bp, Homo sapien
cagcttgtatttcccgcatgggctg

SEQ ID NO: 2621019 - DNA, 25 bp, Homo sapien
gcccagcttgtatttcccgcatggg

SEQ ID NO: 2621020 - DNA, 25 bp, Homo sapien
ccagcttgtatttcccgcatgggct

SEQ ID NO: 2621021 - DNA, 25 bp, Homo sapien
agcccagcttgtatttcccgcatgg

SEQ ID NO: 2621022 - DNA, 25 bp, Homo sapien
ttgccaaccctatcaatcctgggca

SEQ ID NO: 2621023 - DNA, 25 bp, Homo sapien
tgggcaaatgcacctaataaagata

SEQ ID NO: 2621024 - DNA, 25 bp, Homo sapien
tgagaaaatgtgtggtccattctga

SEQ ID NO: 2621025 - DNA, 25 bp, Homo sapien
ggtgctaaaatattcgaggctgaga

SEQ ID NO: 2621026 - DNA, 25 bp, Homo sapien
acttttagaagtaggacatgtgaca

SEQ ID NO: 2621027 - DNA, 25 bp, Homo sapien
caacaaggaccattcttagagtcca

SEQ ID NO: 2621028 - DNA, 25 bp, Homo sapien
gaaaatctatttgggttttagcgca

SEQ ID NO: 2621029 - DNA, 25 bp, Homo sapien
tgcaaaacgatgttcatgggaatac

SEQ ID NO: 2621030 - DNA, 25 bp, Homo sapien
ggtgagcgctttgatcctcggcctc

SEQ ID NO: 2621031 - DNA, 25 bp, Homo sapien
acaacgatagcgtgaggtgagcgct

SEQ ID NO: 2621032 - DNA, 25 bp, Homo sapien
ccttccttcacttgagtgacaacga

SEQ ID NO: 2621033 - DNA, 25 bp, Homo sapien
ttcccagcccatccgattctttgag

SEQ ID NO: 2621034 - DNA, 25 bp, Homo sapien
agggcatgtgccattgtcttttcta

SEQ ID NO: 2621035 - DNA, 25 bp, Homo sapien
tgaatttgggctttaacaggagaca

SEQ ID NO: 2621036 - DNA, 25 bp, Homo sapien
tttctatgaatttgggctttaacag

SEQ ID NO: 2621037 - DNA, 25 bp, Homo sapien
gtctccttcctctagggcatgtgcc

SEQ ID NO: 2621038 - DNA, 25 bp, Homo sapien
tgggcctgagaagggccattttctg

SEQ ID NO: 2621039 - DNA, 25 bp, Homo sapien
agggagatgggaaaaagatcccttg

SEQ ID NO: 2621040 - DNA, 25 bp, Homo sapien
ggagatgggaaaaagatcccttgtc

SEQ ID NO: 2621041 - DNA, 25 bp, Homo sapien
agatgggaaaaagatcccttgtcaa

SEQ ID NO: 2621042 - DNA, 25 bp, Homo sapien
tgggagagcccgaccagtaaatgac

SEQ ID NO: 2621043 - DNA, 25 bp, Homo sapien
taaatgaccattgattaccagcagc

SEQ ID NO: 2621044 - DNA, 25 bp, Homo sapien
tggccactgcttcctcgtgggagag

SEQ ID NO: 2621045 - DNA, 25 bp, Homo sapien
aagctgcaccattcccgtggcggag

SEQ ID NO: 2621046 - DNA, 25 bp, Homo sapien
tgaatcctatattgttaggccttat

SEQ ID NO: 2621047 - DNA, 25 bp, Homo sapien
tgtgaatcctatattgttaggcctt

SEQ ID NO: 2621048 - DNA, 25 bp, Homo sapien
tgaatcagtaattgtgaatcctata

SEQ ID NO: 2621049 - DNA, 25 bp, Homo sapien
gtaattgtgaatcctatattgttag

SEQ ID NO: 2621050 - DNA, 25 bp, Homo sapien
ccctccggggaaatgccgcagcaca

SEQ ID NO: 2621051 - DNA, 25 bp, Homo sapien
gctggggctctagagcgaatccatg

SEQ ID NO: 2621052 - DNA, 25 bp, Homo sapien
ctccggggaaatgccgcagcacatg

SEQ ID NO: 2621053 - DNA, 25 bp, Homo sapien
tggggctctagagcgaatccatggc

SEQ ID NO: 2621054 - DNA, 25 bp, Homo sapien
cacccttcctttcacgactgaggcc

SEQ ID NO: 2621055 - DNA, 25 bp, Homo sapien
ggcccacgcgggcaaggcttgaaca

SEQ ID NO: 2621056 - DNA, 25 bp, Homo sapien
catccccttgcagtgtgtctacttg

SEQ ID NO: 2621057 - DNA, 25 bp, Homo sapien
gggcaaggcttgaacacctctcctt

SEQ ID NO: 2621058 - DNA, 25 bp, Homo sapien
ggcccatccatgaattactccccag

SEQ ID NO: 2621059 - DNA, 25 bp, Homo sapien
taaaggcccatccatgaattactcc

SEQ ID NO: 2621060 - DNA, 25 bp, Homo sapien
cccatccatgaattactccccagaa

SEQ ID NO: 2621061 - DNA, 25 bp, Homo sapien
aaaggcccatccatgaattactccc

SEQ ID NO: 2621062 - DNA, 25 bp, Homo sapien
gaggacacatcttctaccgagctgg

SEQ ID NO: 2621063 - DNA, 25 bp, Homo sapien
tctctggacagaagagctggttcct

SEQ ID NO: 2621064 - DNA, 25 bp, Homo sapien
tcttcgttatcagtccaggaggaca

SEQ ID NO: 2621065 - DNA, 25 bp, Homo sapien
accgagctggtcagatctggcaagc

SEQ ID NO: 2621066 - DNA, 25 bp, Homo sapien
agccccctgggttgcttatcttgtt

SEQ ID NO: 2621067 - DNA, 25 bp, Homo sapien
gagattccgagaaaaacatagaaag

SEQ ID NO: 2621068 - DNA, 25 bp, Homo sapien
agcatttatcccctaatcctggcgc

SEQ ID NO: 2621069 - DNA, 25 bp, Homo sapien
ggtctctatcatactatctcaagca

SEQ ID NO: 2621070 - DNA, 25 bp, Homo sapien
tgagatcctgctcagtagggatgag

SEQ ID NO: 2621071 - DNA, 25 bp, Homo sapien
tgtctccgggcacaactgctgagca

SEQ ID NO: 2621072 - DNA, 25 bp, Homo sapien
tgagcaatgagatcctgctcagtag

SEQ ID NO: 2621073 - DNA, 25 bp, Homo sapien
aagctggctgagatgtctccgggca

SEQ ID NO: 2621074 - DNA, 25 bp, Homo sapien
ctgtcctcgccgcagacccagggct

SEQ ID NO: 2621075 - DNA, 25 bp, Homo sapien
gggggtgcagacgtgctgcagggct

SEQ ID NO: 2621076 - DNA, 25 bp, Homo sapien
cagcagagggggtgcagacgtgctg

SEQ ID NO: 2621077 - DNA, 25 bp, Homo sapien
gtcctcgccgcagacccagggctta

SEQ ID NO: 2621078 - DNA, 25 bp, Homo sapien
tccttctaaaacctgaatcgcccaa

SEQ ID NO: 2621079 - DNA, 25 bp, Homo sapien
ttccttctaaaacctgaatcgccca

SEQ ID NO: 2621080 - DNA, 25 bp, Homo sapien
gaatcgcccaaaagttctccaagat

SEQ ID NO: 2621081 - DNA, 25 bp, Homo sapien
acctgaatcgcccaaaagttctcca

SEQ ID NO: 2621082 - DNA, 25 bp, Homo sapien
catagaagcagcctaagtggtaacc

SEQ ID NO: 2621083 - DNA, 25 bp, Homo sapien
gaagggcagactgttcttgacccag

SEQ ID NO: 2621084 - DNA, 25 bp, Homo sapien
gaagaacatgcgctccccatagatg

SEQ ID NO: 2621085 - DNA, 25 bp, Homo sapien
ccttactgcccggacacatttggaa

SEQ ID NO: 2621086 - DNA, 25 bp, Homo sapien
cttagaggctcagcgaagctcataa

SEQ ID NO: 2621087 - DNA, 25 bp, Homo sapien
gaggctcagcgaagctcataaacag

SEQ ID NO: 2621088 - DNA, 25 bp, Homo sapien
aagctcataaacagagttatcctga

SEQ ID NO: 2621089 - DNA, 25 bp, Homo sapien
cataaacagagttatcctgagatac

SEQ ID NO: 2621090 - DNA, 25 bp, Homo sapien
caaggcaagcaaacagtaacggtag

SEQ ID NO: 2621091 - DNA, 25 bp, Homo sapien
ttgtgaaatttctgccctggattcc

SEQ ID NO: 2621092 - DNA, 25 bp, Homo sapien
gaggagtttgtcctaaatcgctcca

SEQ ID NO: 2621093 - DNA, 25 bp, Homo sapien
ctcaggctgtgtgctaccatgttgc

SEQ ID NO: 2621094 - DNA, 25 bp, Homo sapien
tatgaactactgcagttgtatctgg

SEQ ID NO: 2621095 - DNA, 25 bp, Homo sapien
tactgcagttgtatctggtatcagc

SEQ ID NO: 2621096 - DNA, 25 bp, Homo sapien
tatctggtatcagcaggaagagtgc

SEQ ID NO: 2621097 - DNA, 25 bp, Homo sapien
ctgcagggtcatgttatgaactact

SEQ ID NO: 2621098 - DNA, 25 bp, Homo sapien
gaaaagttgcactagacaatgtggc

SEQ ID NO: 2621099 - DNA, 25 bp, Homo sapien
ggatgagaaataccacagggactga

SEQ ID NO: 2621100 - DNA, 25 bp, Homo sapien
tgtcgcaatcctgagtatccgctgt

SEQ ID NO: 2621101 - DNA, 25 bp, Homo sapien
cactgtgactaatagcatgtcgcaa

SEQ ID NO: 2621102 - DNA, 25 bp, Homo sapien
tgatactattgagggtccacttact

SEQ ID NO: 2621103 - DNA, 25 bp, Homo sapien
ttcttggagctggaaaaaactgtat

SEQ ID NO: 2621104 - DNA, 25 bp, Homo sapien
ggctgcagatgctgaaaaacacaat

SEQ ID NO: 2621105 - DNA, 25 bp, Homo sapien
gaacaaaatcttgcctaggacaact

SEQ ID NO: 2621106 - DNA, 25 bp, Homo sapien
gtcctcctcagcacacgtctcactg

SEQ ID NO: 2621107 - DNA, 25 bp, Homo sapien
ctcctcagcacacgtctcactgcgc

SEQ ID NO: 2621108 - DNA, 25 bp, Homo sapien
ctcagcacacgtctcactgcgcagc

SEQ ID NO: 2621109 - DNA, 25 bp, Homo sapien
cagcacacgtctcactgcgcagcat

SEQ ID NO: 2621110 - DNA, 25 bp, Homo sapien
gcaccgcacacatcttggggttcat

SEQ ID NO: 2621111 - DNA, 25 bp, Homo sapien
gcgactcttgagcttgattttattg

SEQ ID NO: 2621112 - DNA, 25 bp, Homo sapien
ttggattcctcagcaccgcacacat

SEQ ID NO: 2621113 - DNA, 25 bp, Homo sapien
ctgaaaggcgactcttgagcttgat

SEQ ID NO: 2621114 - DNA, 25 bp, Homo sapien
gagttggaacctctacaggagctct

SEQ ID NO: 2621115 - DNA, 25 bp, Homo sapien
cagtctgggcaaaaccttagtggaa

SEQ ID NO: 2621116 - DNA, 25 bp, Homo sapien
tctgttggactgaagcattgcgact

SEQ ID NO: 2621117 - DNA, 25 bp, Homo sapien
ggaggcacttgtcatcaacagaaga

SEQ ID NO: 2621118 - DNA, 25 bp, Homo sapien
gcatttctagcttgtgagccctaca

SEQ ID NO: 2621119 - DNA, 25 bp, Homo sapien
tacaaacaaagctgtggactagagc

SEQ ID NO: 2621120 - DNA, 25 bp, Homo sapien
cctaggagtggagtctctgggctac

SEQ ID NO: 2621121 - DNA, 25 bp, Homo sapien
tctgggctacactacaagcatctgt

SEQ ID NO: 2621122 - DNA, 25 bp, Homo sapien
gagacctccaacatccggatccggg

SEQ ID NO: 2621123 - DNA, 25 bp, Homo sapien
tgtttccggccatctcgggagacct

SEQ ID NO: 2621124 - DNA, 25 bp, Homo sapien
ggcactggaagagtccagcagctgc

SEQ ID NO: 2621125 - DNA, 25 bp, Homo sapien
caactgactcaaggcggtgtacacc

SEQ ID NO: 2621126 - DNA, 25 bp, Homo sapien
tactgtgtaacaggtaggactccag

SEQ ID NO: 2621127 - DNA, 25 bp, Homo sapien
tgtagcctctctgggtagacctcac

SEQ ID NO: 2621128 - DNA, 25 bp, Homo sapien
taatcgagcagtgctggttcaccac

SEQ ID NO: 2621129 - DNA, 25 bp, Homo sapien
ccatggatgcatgtacaggcacaca

SEQ ID NO: 2621130 - DNA, 25 bp, Homo sapien
cagggctgtggagtccggatctcag

SEQ ID NO: 2621131 - DNA, 25 bp, Homo sapien
gtccggatctcagacgggagcaggt

SEQ ID NO: 2621132 - DNA, 25 bp, Homo sapien
tcatgcagggctgtggagtccggat

SEQ ID NO: 2621133 - DNA, 25 bp, Homo sapien
tgtggagtccggatctcagacggga

SEQ ID NO: 2621134 - DNA, 25 bp, Homo sapien
taggagaccacctgaccggtttcta

SEQ ID NO: 2621135 - DNA, 25 bp, Homo sapien
ccttggttagtggtgccaggactca

SEQ ID NO: 2621136 - DNA, 25 bp, Homo sapien
gggactgagcctgccttagccttgg

SEQ ID NO: 2621137 - DNA, 25 bp, Homo sapien
taccccacaggtttctcagggactg

SEQ ID NO: 2621138 - DNA, 25 bp, Homo sapien
tttctgggctacaaatgctgtcggg

SEQ ID NO: 2621139 - DNA, 25 bp, Homo sapien
aaagtaagggcctgcctcagatgcc

SEQ ID NO: 2621140 - DNA, 25 bp, Homo sapien
ggctgatgagcaattgtccctgaaa

SEQ ID NO: 2621141 - DNA, 25 bp, Homo sapien
gacaagtttgactggtcccatgcca

SEQ ID NO: 2621142 - DNA, 25 bp, Homo sapien
ttccacataaaacatcccgctgaga

SEQ ID NO: 2621143 - DNA, 25 bp, Homo sapien
ccagacaactgttattccacataaa

SEQ ID NO: 2621144 - DNA, 25 bp, Homo sapien
ataaaacatcccgctgagagacggc

SEQ ID NO: 2621145 - DNA, 25 bp, Homo sapien
taaaacatcccgctgagagacggca

SEQ ID NO: 2621146 - DNA, 25 bp, Homo sapien
ttgctctttccttgacctcattcca

SEQ ID NO: 2621147 - DNA, 25 bp, Homo sapien
gtgttgctctttccttgacctcatt

SEQ ID NO: 2621148 - DNA, 25 bp, Homo sapien
ttgtgttgctctttccttgacctca

SEQ ID NO: 2621149 - DNA, 25 bp, Homo sapien
ctttccttgacctcattccacagat

SEQ ID NO: 2621150 - DNA, 25 bp, Homo sapien
ttcccccacataaagaactgcttgg

SEQ ID NO: 2621151 - DNA, 25 bp, Homo sapien
aacagattgccatgacttcttcccc

SEQ ID NO: 2621152 - DNA, 25 bp, Homo sapien
tacaacagattgccatgacttcttc

SEQ ID NO: 2621153 - DNA, 25 bp, Homo sapien
tcccccacataaagaactgcttggg

SEQ ID NO: 2621154 - DNA, 25 bp, Homo sapien
tacactcagactttgaaaatcttag

SEQ ID NO: 2621155 - DNA, 25 bp, Homo sapien
taaaagtcagcacacggcaaggtca

SEQ ID NO: 2621156 - DNA, 25 bp, Homo sapien
tgttctattgtggtatctggcagaa

SEQ ID NO: 2621157 - DNA, 25 bp, Homo sapien
aatactatcgcaggtgctgggcacc

SEQ ID NO: 2621158 - DNA, 25 bp, Homo sapien
caaggagattccacctgagtcgtgc

SEQ ID NO: 2621159 - DNA, 25 bp, Homo sapien
gatggccgaatgagcctccaaggag

SEQ ID NO: 2621160 - DNA, 25 bp, Homo sapien
cttaaggagcgggtagacttcttca

SEQ ID NO: 2621161 - DNA, 25 bp, Homo sapien
caatgatcgagatgacggatggccg

SEQ ID NO: 2621162 - DNA, 25 bp, Homo sapien
cttacatcgtaggagcaaagagggc

SEQ ID NO: 2621163 - DNA, 25 bp, Homo sapien
agggcatggccatctcacactgaga

SEQ ID NO: 2621164 - DNA, 25 bp, Homo sapien
gacctatggtacagaatgccaggga

SEQ ID NO: 2621165 - DNA, 25 bp, Homo sapien
tacagaggccactttagcggtcctt

SEQ ID NO: 2621166 - DNA, 25 bp, Homo sapien
gaagatggtcttgacaaaaatcccc

SEQ ID NO: 2621167 - DNA, 25 bp, Homo sapien
catctgtccacgaatgcagtctcga

SEQ ID NO: 2621168 - DNA, 25 bp, Homo sapien
gcagtctcgacctccagcaatacta

SEQ ID NO: 2621169 - DNA, 25 bp, Homo sapien
ttaagtcttccgtcctctgcagctg

SEQ ID NO: 2621170 - DNA, 25 bp, Homo sapien
taaatatccactaatgaccaggcgc

SEQ ID NO: 2621171 - DNA, 25 bp, Homo sapien
gattccgccgaggtctactaggtac

SEQ ID NO: 2621172 - DNA, 25 bp, Homo sapien
tagacactaaagaccccaacagaag

SEQ ID NO: 2621173 - DNA, 25 bp, Homo sapien
tctcatgggatcaaagtcactgtca

SEQ ID NO: 2621174 - DNA, 25 bp, Homo sapien
tttttaactctaaggcggcacagtc

SEQ ID NO: 2621175 - DNA, 25 bp, Homo sapien
tacagggttcgatggttgctctgcc

SEQ ID NO: 2621176 - DNA, 25 bp, Homo sapien
tgcaggaatatgctcgcacatggcc

SEQ ID NO: 2621177 - DNA, 25 bp, Homo sapien
tacaaaaatgtagctgtgccccatg

SEQ ID NO: 2621178 - DNA, 25 bp, Homo sapien
gtcaagccctttattggtattccat

SEQ ID NO: 2621179 - DNA, 25 bp, Homo sapien
tattggtattccatttacatctagg

SEQ ID NO: 2621180 - DNA, 25 bp, Homo sapien
tggtattccatttacatctaggatt

SEQ ID NO: 2621181 - DNA, 25 bp, Homo sapien
tcttgaaatgtcaagccctttattg

SEQ ID NO: 2621182 - DNA, 25 bp, Homo sapien
tgaggaaaggtgggctgaaacattt

SEQ ID NO: 2621183 - DNA, 25 bp, Homo sapien
gaatgtccttatatcaaagggttaa

SEQ ID NO: 2621184 - DNA, 25 bp, Homo sapien
aactcaccaaacccaagccagaagg

SEQ ID NO: 2621185 - DNA, 25 bp, Homo sapien
taggataaaggagatcaataagaat

SEQ ID NO: 2621186 - DNA, 25 bp, Homo sapien
gaagaactgccttcatcggaacctc

SEQ ID NO: 2621187 - DNA, 25 bp, Homo sapien
tgacgatcctgtccttgggcccagg

SEQ ID NO: 2621188 - DNA, 25 bp, Homo sapien
aaacaaataatccactccggatttg

SEQ ID NO: 2621189 - DNA, 25 bp, Homo sapien
tcaccaactttgtgcgtaccgttaa

SEQ ID NO: 2621190 - DNA, 25 bp, Homo sapien
tgtcccatgcagagaccacgtgttg

SEQ ID NO: 2621191 - DNA, 25 bp, Homo sapien
catgctactggtaacttcccttcac

SEQ ID NO: 2621192 - DNA, 25 bp, Homo sapien
cgtgttgttgatagaagattgtacc

SEQ ID NO: 2621193 - DNA, 25 bp, Homo sapien
gagagcttagagagctccatgctac

SEQ ID NO: 2621194 - DNA, 25 bp, Homo sapien
taatatctattcagaccaataacca

SEQ ID NO: 2621195 - DNA, 25 bp, Homo sapien
gaattaatatctattcagaccaata

SEQ ID NO: 2621196 - DNA, 25 bp, Homo sapien
tatctattcagaccaataaccattt

SEQ ID NO: 2621197 - DNA, 25 bp, Homo sapien
tgaaacagaattaatatctattcag

SEQ ID NO: 2621198 - DNA, 25 bp, Homo sapien
ggcaccaatgcctaatccaactctt

SEQ ID NO: 2621199 - DNA, 25 bp, Homo sapien
tgtgaatgtagatgccaggaggact

SEQ ID NO: 2621200 - DNA, 25 bp, Homo sapien
tagatgccaggaggactgttttcca

SEQ ID NO: 2621201 - DNA, 25 bp, Homo sapien
ccaatgcctaatccaactcttggct

SEQ ID NO: 2621202 - DNA, 25 bp, Homo sapien
tcaaagcttcaacatccctcaaagg

SEQ ID NO: 2621203 - DNA, 25 bp, Homo sapien
aagcttcaacatccctcaaagggaa

SEQ ID NO: 2621204 - DNA, 25 bp, Homo sapien
aaagcttcaacatccctcaaaggga

SEQ ID NO: 2621205 - DNA, 25 bp, Homo sapien
tttcatatttatgaacactccagaa

SEQ ID NO: 2621206 - DNA, 25 bp, Homo sapien
gatggcgtggactttgcttaaagca

SEQ ID NO: 2621207 - DNA, 25 bp, Homo sapien
gcatttactcaagatggcgtggact

SEQ ID NO: 2621208 - DNA, 25 bp, Homo sapien
catggcggacgttgacggagttcac

SEQ ID NO: 2621209 - DNA, 25 bp, Homo sapien
cacttccaggatttgatccccgcgg

SEQ ID NO: 2621210 - DNA, 25 bp, Homo sapien
ctttggattagggtgccggccgatg

SEQ ID NO: 2621211 - DNA, 25 bp, Homo sapien
ttggattagggtgccggccgatgac

SEQ ID NO: 2621212 - DNA, 25 bp, Homo sapien
ggtgccggccgatgacaaggcgaac

SEQ ID NO: 2621213 - DNA, 25 bp, Homo sapien
agggtgccggccgatgacaaggcga

SEQ ID NO: 2621214 - DNA, 25 bp, Homo sapien
tactatgtccgttggctcaaggccc

SEQ ID NO: 2621215 - DNA, 25 bp, Homo sapien
ccatgtggttcctctggtctcccgt

SEQ ID NO: 2621216 - DNA, 25 bp, Homo sapien
gtagttaatgaaaaggatcctggca

SEQ ID NO: 2621217 - DNA, 25 bp, Homo sapien
gctgcttaggtagattacagaacaa

SEQ ID NO: 2621218 - DNA, 25 bp, Homo sapien
tgtagttcgtaatgtcctggtaaag

SEQ ID NO: 2621219 - DNA, 25 bp, Homo sapien
tctattcccacatttgtgtagttcg

SEQ ID NO: 2621220 - DNA, 25 bp, Homo sapien
gctattgattccgtccacaattgca

SEQ ID NO: 2621221 - DNA, 25 bp, Homo sapien
actgagaatttgatagaagctattg

SEQ ID NO: 2621222 - DNA, 25 bp, Homo sapien
cctcgcaggtacaagtgatttctcc

SEQ ID NO: 2621223 - DNA, 25 bp, Homo sapien
tacaaggaataccaaggtatgccca

SEQ ID NO: 2621224 - DNA, 25 bp, Homo sapien
ccttcctcagcactggagtagctag

SEQ ID NO: 2621225 - DNA, 25 bp, Homo sapien
ggtatgcccatatgacaggcatggg

SEQ ID NO: 2621226 - DNA, 25 bp, Homo sapien
tggcatagacttcttactcttaaag

SEQ ID NO: 2621227 - DNA, 25 bp, Homo sapien
tatggcacatagagggacccacaag

SEQ ID NO: 2621228 - DNA, 25 bp, Homo sapien
gtggtgtaccagtccatcaagcaca

SEQ ID NO: 2621229 - DNA, 25 bp, Homo sapien
gacccacaaggtctcttggcataga

SEQ ID NO: 2621230 - DNA, 25 bp, Homo sapien
caaaaaactctggatgcaagacctt

SEQ ID NO: 2621231 - DNA, 25 bp, Homo sapien
gaaaagcagagttgcctttgcatta

SEQ ID NO: 2621232 - DNA, 25 bp, Homo sapien
ttagtctaacggcaattttgtccca

SEQ ID NO: 2621233 - DNA, 25 bp, Homo sapien
tgcatatagggaacacaatctgaag

SEQ ID NO: 2621234 - DNA, 25 bp, Homo sapien
agtgctgcgtgctatgacttcatcc

SEQ ID NO: 2621235 - DNA, 25 bp, Homo sapien
cctgataagtgctgcgtgctatgac

SEQ ID NO: 2621236 - DNA, 25 bp, Homo sapien
gctgcgtgctatgacttcatccatt

SEQ ID NO: 2621237 - DNA, 25 bp, Homo sapien
tgctctcctgataagtgctgcgtgc

SEQ ID NO: 2621238 - DNA, 25 bp, Homo sapien
ctgcgtacctgatcctcatccccat

SEQ ID NO: 2621239 - DNA, 25 bp, Homo sapien
cctgatcctcatccccatcccatct

SEQ ID NO: 2621240 - DNA, 25 bp, Homo sapien
atcctcatccccatcccatctgcca

SEQ ID NO: 2621241 - DNA, 25 bp, Homo sapien
tgcgtacctgatcctcatccccatc

SEQ ID NO: 2621242 - DNA, 25 bp, Homo sapien
ttgcaagagagggactcttcaaggg

SEQ ID NO: 2621243 - DNA, 25 bp, Homo sapien
ttttgcaagagagggactcttcaag

SEQ ID NO: 2621244 - DNA, 25 bp, Homo sapien
tttgcaagagagggactcttcaagg

SEQ ID NO: 2621245 - DNA, 25 bp, Homo sapien
tgttgaagaagaaaacatccgataa

SEQ ID NO: 2621246 - DNA, 25 bp, Homo sapien
ctgttgaagaagaaaacatccgata

SEQ ID NO: 2621247 - DNA, 25 bp, Homo sapien
aaccggccaccatgaagtctgacaa

SEQ ID NO: 2621248 - DNA, 25 bp, Homo sapien
ccagggacatcgtgggcaaagtact

SEQ ID NO: 2621249 - DNA, 25 bp, Homo sapien
gtgatcctcgtcctcagaaccggcc

SEQ ID NO: 2621250 - DNA, 25 bp, Homo sapien
agtactgggagagttcagattcaga

SEQ ID NO: 2621251 - DNA, 25 bp, Homo sapien
ggctcccaagagtcacgaggctgtt

SEQ ID NO: 2621252 - DNA, 25 bp, Homo sapien
ggaaattgagacacgcctcgggtca

SEQ ID NO: 2621253 - DNA, 25 bp, Homo sapien
taagtccactgagctaccaagaaga

SEQ ID NO: 2621254 - DNA, 25 bp, Homo sapien
cacctgcttgtggaagagcccagaa

SEQ ID NO: 2621255 - DNA, 25 bp, Homo sapien
tcactttgacagaagtggcctggac

SEQ ID NO: 2621256 - DNA, 25 bp, Homo sapien
tccagatcgcatggatcattggctc

SEQ ID NO: 2621257 - DNA, 25 bp, Homo sapien
gaagtggcctggactctcgagtcca

SEQ ID NO: 2621258 - DNA, 25 bp, Homo sapien
ctcagcctcggatctcttgcagtgg

SEQ ID NO: 2621259 - DNA, 25 bp, Homo sapien
gaaagaacaggtaagtattggtacc

SEQ ID NO: 2621260 - DNA, 25 bp, Homo sapien
ggtaccaatacttacctgttctttc

SEQ ID NO: 2621261 - DNA, 25 bp, Homo sapien
accacaagccacttgaaataacttt

SEQ ID NO: 2621262 - DNA, 25 bp, Homo sapien
ccacaagccacttgaaataactttc

SEQ ID NO: 2621263 - DNA, 25 bp, Homo sapien
aaccacaagccacttgaaataactt

SEQ ID NO: 2621264 - DNA, 25 bp, Homo sapien
gcactggctagttcacagctggtag

SEQ ID NO: 2621265 - DNA, 25 bp, Homo sapien
cacagctggtagagacacaagcatc

SEQ ID NO: 2621266 - DNA, 25 bp, Homo sapien
gggacagagcactggctagttcaca

SEQ ID NO: 2621267 - DNA, 25 bp, Homo sapien
gcatccagatgggacagagcactgg

SEQ ID NO: 2621268 - DNA, 25 bp, Homo sapien
taacaaccagccgacagttgcggag

SEQ ID NO: 2621269 - DNA, 25 bp, Homo sapien
caggcgctgagacagtaacaaccag

SEQ ID NO: 2621270 - DNA, 25 bp, Homo sapien
cacagagctcgacaagtgggatcac

SEQ ID NO: 2621271 - DNA, 25 bp, Homo sapien
ttgcggaggactgccgggactccca

SEQ ID NO: 2621272 - DNA, 25 bp, Homo sapien
tgactcgttacagcacatccgtggg

SEQ ID NO: 2621273 - DNA, 25 bp, Homo sapien
aacgttcgaaatgcccaatcatggg

SEQ ID NO: 2621274 - DNA, 25 bp, Homo sapien
catctgagggagacgaggttacact

SEQ ID NO: 2621275 - DNA, 25 bp, Homo sapien
caatcatgggaggaaggttgactcg

SEQ ID NO: 2621276 - DNA, 25 bp, Homo sapien
ctggggaagagatgaggtctgagga

SEQ ID NO: 2621277 - DNA, 25 bp, Homo sapien
gctgggattctctggccgactgact

SEQ ID NO: 2621278 - DNA, 25 bp, Homo sapien
tactgtggttacctggagctccctg

SEQ ID NO: 2621279 - DNA, 25 bp, Homo sapien
gagacctggccttgcacttggtgac

SEQ ID NO: 2621280 - DNA, 25 bp, Homo sapien
gaagctgtcaatgtccgtcacaggg

SEQ ID NO: 2621281 - DNA, 25 bp, Homo sapien
tttctagagtagttgctcagaaagt

SEQ ID NO: 2621282 - DNA, 25 bp, Homo sapien
actcagggtcagaagaagaatcctc

SEQ ID NO: 2621283 - DNA, 25 bp, Homo sapien
atggatgacagagacggctccgtgc

SEQ ID NO: 2621284 - DNA, 25 bp, Homo sapien
cagtaaaatgtttgtcgggattaat

SEQ ID NO: 2621285 - DNA, 25 bp, Homo sapien
cagggtttcgtcatctagcaggtca

SEQ ID NO: 2621286 - DNA, 25 bp, Homo sapien
ttagggacatccacactgaaggagg

SEQ ID NO: 2621287 - DNA, 25 bp, Homo sapien
cctgaagtgtatgagcctggcaagc

SEQ ID NO: 2621288 - DNA, 25 bp, Homo sapien
tgcaaagacacacgggaacgaggag

SEQ ID NO: 2621289 - DNA, 25 bp, Homo sapien
gctatgaggcacagtaacgcccttt

SEQ ID NO: 2621290 - DNA, 25 bp, Homo sapien
tctggcaggcattagaggttgttcc

SEQ ID NO: 2621291 - DNA, 25 bp, Homo sapien
gagccgctgtgacactgccttagaa

SEQ ID NO: 2621292 - DNA, 25 bp, Homo sapien
agccttcacagcattcgcagcaggg

SEQ ID NO: 2621293 - DNA, 25 bp, Homo sapien
tgtggatgattctgcgacctggcga

SEQ ID NO: 2621294 - DNA, 25 bp, Homo sapien
gaggaggacgccagttttgccatgc

SEQ ID NO: 2621295 - DNA, 25 bp, Homo sapien
tcgaggcgatcgctggccattatgt

SEQ ID NO: 2621296 - DNA, 25 bp, Homo sapien
gacctggcgatagagcctgatttca

SEQ ID NO: 2621297 - DNA, 25 bp, Homo sapien
tgaagtagagatggtcctcccccga

SEQ ID NO: 2621298 - DNA, 25 bp, Homo sapien
cgggagtctgacatcaggcttgatt

SEQ ID NO: 2621299 - DNA, 25 bp, Homo sapien
aaaatggcttgagaactgggctggc

SEQ ID NO: 2621300 - DNA, 25 bp, Homo sapien
tggagtaggtcctggtcgctggcct

SEQ ID NO: 2621301 - DNA, 25 bp, Homo sapien
tgatatccccttcatctgtggctgg

SEQ ID NO: 2621302 - DNA, 25 bp, Homo sapien
cagcagcggctttacactatatatg

SEQ ID NO: 2621303 - DNA, 25 bp, Homo sapien
ctgtccattagccaggctgggaaga

SEQ ID NO: 2621304 - DNA, 25 bp, Homo sapien
gaagattcctcgatgtgtccagcag

SEQ ID NO: 2621305 - DNA, 25 bp, Homo sapien
catgattgagggagacttggccatc

SEQ ID NO: 2621306 - DNA, 25 bp, Homo sapien
cagttttgaagagcacggcgctcgg

SEQ ID NO: 2621307 - DNA, 25 bp, Homo sapien
tgctgagtaatcctcgctgcagagc

SEQ ID NO: 2621308 - DNA, 25 bp, Homo sapien
gaggcttggagctcaccgacaaaaa

SEQ ID NO: 2621309 - DNA, 25 bp, Homo sapien
gacacgaaacgcctccagcaggagg

SEQ ID NO: 2621310 - DNA, 25 bp, Homo sapien
tgttcccgcccttctcgggacacga

SEQ ID NO: 2621311 - DNA, 25 bp, Homo sapien
gcactggttttagggccacttcctc

SEQ ID NO: 2621312 - DNA, 25 bp, Homo sapien
ctcagcagcactggttttagggcca

SEQ ID NO: 2621313 - DNA, 25 bp, Homo sapien
tcttctaaaaggcagatcctgggca

SEQ ID NO: 2621314 - DNA, 25 bp, Homo sapien
tcccccgctgagactagaagttgat

SEQ ID NO: 2621315 - DNA, 25 bp, Homo sapien
cccgctgagactagaagttgatcca

SEQ ID NO: 2621316 - DNA, 25 bp, Homo sapien
ccccgctgagactagaagttgatcc

SEQ ID NO: 2621317 - DNA, 25 bp, Homo sapien
ccgctgagactagaagttgatccaa

SEQ ID NO: 2621318 - DNA, 25 bp, Homo sapien
tctgattgtgctttcgcttcctgaa

SEQ ID NO: 2621319 - DNA, 25 bp, Homo sapien
ttaggatggtagatttcgatcccac

SEQ ID NO: 2621320 - DNA, 25 bp, Homo sapien
tcgatcccactgacgataaaacaga

SEQ ID NO: 2621321 - DNA, 25 bp, Homo sapien
cctgaatgagagttaggatggtaga

SEQ ID NO: 2621322 - DNA, 25 bp, Homo sapien
cggccgcaattcatgttcctgagct

SEQ ID NO: 2621323 - DNA, 25 bp, Homo sapien
gcggccgcaattcatgttcctgagc

SEQ ID NO: 2621324 - DNA, 25 bp, Homo sapien
ggccgcaattcatgttcctgagctt

SEQ ID NO: 2621325 - DNA, 25 bp, Homo sapien
tactcattggaaaaagcaaggcagg

SEQ ID NO: 2621326 - DNA, 25 bp, Homo sapien
gaggatggcagagtaaggatagccc

SEQ ID NO: 2621327 - DNA, 25 bp, Homo sapien
ggaagcttctagactgaggatggca

SEQ ID NO: 2621328 - DNA, 25 bp, Homo sapien
ggatagccctgctcaacgctcctct

SEQ ID NO: 2621329 - DNA, 25 bp, Homo sapien
caagactatgaagcaaacatcttct

SEQ ID NO: 2621330 - DNA, 25 bp, Homo sapien
ttctattcaagactatgaagcaaac

SEQ ID NO: 2621331 - DNA, 25 bp, Homo sapien
tattcaagactatgaagcaaacatc

SEQ ID NO: 2621332 - DNA, 25 bp, Homo sapien
tgtccctcctgccacactgaatccc

SEQ ID NO: 2621333 - DNA, 25 bp, Homo sapien
tgaccacgagggcatctttgtgcag

SEQ ID NO: 2621334 - DNA, 25 bp, Homo sapien
tccatccctttcttgatgaccacga

SEQ ID NO: 2621335 - DNA, 25 bp, Homo sapien
agtgaggcgccgttgactgacagaa

SEQ ID NO: 2621336 - DNA, 25 bp, Homo sapien
ggttcatagtcccttcctgagaagc

SEQ ID NO: 2621337 - DNA, 25 bp, Homo sapien
ctggttgttgaaatgatcatcttac

SEQ ID NO: 2621338 - DNA, 25 bp, Homo sapien
cagcctgctggttgttgaaatgatc

SEQ ID NO: 2621339 - DNA, 25 bp, Homo sapien
cctgctggttgttgaaatgatcatc

SEQ ID NO: 2621340 - DNA, 25 bp, Homo sapien
tcacagcctgctggttgttgaaatg

SEQ ID NO: 2621341 - DNA, 25 bp, Homo sapien
aaatgggtctattgcagtggctcga

SEQ ID NO: 2621342 - DNA, 25 bp, Homo sapien
cacacttagttaattgggaggcaga

SEQ ID NO: 2621343 - DNA, 25 bp, Homo sapien
gacgtcacccctgaatgccaagatg

SEQ ID NO: 2621344 - DNA, 25 bp, Homo sapien
tataactgcataggaccgggtagac

SEQ ID NO: 2621345 - DNA, 25 bp, Homo sapien
tttccatggtgatgccggctctgtg

SEQ ID NO: 2621346 - DNA, 25 bp, Homo sapien
ttccatggtgatgccggctctgtgt

SEQ ID NO: 2621347 - DNA, 25 bp, Homo sapien
tccatggtgatgccggctctgtgtg

SEQ ID NO: 2621348 - DNA, 25 bp, Homo sapien
gtttccatggtgatgccggctctgt

SEQ ID NO: 2621349 - DNA, 25 bp, Homo sapien
aaccctgcccctggctatggctgtc

SEQ ID NO: 2621350 - DNA, 25 bp, Homo sapien
actcgctgcctctactggcatcttg

SEQ ID NO: 2621351 - DNA, 25 bp, Homo sapien
catgtgagactgttagaatggactc

SEQ ID NO: 2621352 - DNA, 25 bp, Homo sapien
gcagcagatcatcctctggtaccaa

SEQ ID NO: 2621353 - DNA, 25 bp, Homo sapien
tgctcttgttaagccccccacaccg

SEQ ID NO: 2621354 - DNA, 25 bp, Homo sapien
ctgcaagcattggcaaatgctttta

SEQ ID NO: 2621355 - DNA, 25 bp, Homo sapien
ccacaccggctgtgcacttctcagt

SEQ ID NO: 2621356 - DNA, 25 bp, Homo sapien
tgcttttatgcccaagcagaaatcc

SEQ ID NO: 2621357 - DNA, 25 bp, Homo sapien
tgtacttgcatcctttgttctgtgt

SEQ ID NO: 2621358 - DNA, 25 bp, Homo sapien
gctgctgtacttgcatcctttgttc

SEQ ID NO: 2621359 - DNA, 25 bp, Homo sapien
tgagcccagtagcactgttggcctc

SEQ ID NO: 2621360 - DNA, 25 bp, Homo sapien
acttgagcccagtagcactgttggc

SEQ ID NO: 2621361 - DNA, 25 bp, Homo sapien
tgtacactcttttaatgaccaaggg

SEQ ID NO: 2621362 - DNA, 25 bp, Homo sapien
agcccagccgaggtcttcagcactt

SEQ ID NO: 2621363 - DNA, 25 bp, Homo sapien
tctcccgtcaccgatgattttcccc

SEQ ID NO: 2621364 - DNA, 25 bp, Homo sapien
aacacacagagcatcgtgtacagcc

SEQ ID NO: 2621365 - DNA, 25 bp, Homo sapien
atggatgttgccctgtacccttcgt

SEQ ID NO: 2621366 - DNA, 25 bp, Homo sapien
tcttcggtcctgtttcatgggtaac

SEQ ID NO: 2621367 - DNA, 25 bp, Homo sapien
tgtcctgtttttcgggtctgctggc

SEQ ID NO: 2621368 - DNA, 25 bp, Homo sapien
tacccttcgtctgagagctttctgt

SEQ ID NO: 2621369 - DNA, 25 bp, Homo sapien
tcacacgcttttttgggttgtgtcc

SEQ ID NO: 2621370 - DNA, 25 bp, Homo sapien
ttagtcagcgtctgccctggtcctt

SEQ ID NO: 2621371 - DNA, 25 bp, Homo sapien
ctttggactgcagaggctacgtgtc

SEQ ID NO: 2621372 - DNA, 25 bp, Homo sapien
cctggtccttcggttcgcaggctca

SEQ ID NO: 2621373 - DNA, 25 bp, Homo sapien
ggtgtcacacagtgcacaatctgca

SEQ ID NO: 2621374 - DNA, 25 bp, Homo sapien
gtgtcacacagtgcacaatctgcat

SEQ ID NO: 2621375 - DNA, 25 bp, Homo sapien
ccttcagagtagctgctaccacagg

SEQ ID NO: 2621376 - DNA, 25 bp, Homo sapien
gcatacaccaccatgcacagctttt

SEQ ID NO: 2621377 - DNA, 25 bp, Homo sapien
gtagctgctaccacaggcatacacc

SEQ ID NO: 2621378 - DNA, 25 bp, Homo sapien
catacaccaccatgcacagcttttt

SEQ ID NO: 2621379 - DNA, 25 bp, Homo sapien
tcccattaatagcaagaatttcatc

SEQ ID NO: 2621380 - DNA, 25 bp, Homo sapien
tattccagcttgttcagccgcacca

SEQ ID NO: 2621381 - DNA, 25 bp, Homo sapien
gaggtttcccattaatagcaagaat

SEQ ID NO: 2621382 - DNA, 25 bp, Homo sapien
ttattccagcttgttcagccgcacc

SEQ ID NO: 2621383 - DNA, 25 bp, Homo sapien
cttcataatattccaggcatcaaag

SEQ ID NO: 2621384 - DNA, 25 bp, Homo sapien
atattccaggcatcaaagtgcatga

SEQ ID NO: 2621385 - DNA, 25 bp, Homo sapien
aataactgcacaggtccttctggga

SEQ ID NO: 2621386 - DNA, 25 bp, Homo sapien
taataactgcacaggtccttctggg

SEQ ID NO: 2621387 - DNA, 25 bp, Homo sapien
tcaaataaagaagggtgtgtcacat

SEQ ID NO: 2621388 - DNA, 25 bp, Homo sapien
tgcacatacagttaagtcaggcttc

SEQ ID NO: 2621389 - DNA, 25 bp, Homo sapien
tccgtgtctgtaccagtgttggcca

SEQ ID NO: 2621390 - DNA, 25 bp, Homo sapien
tcatgtgtaagcacaagcttggaga

SEQ ID NO: 2621391 - DNA, 25 bp, Homo sapien
atcaccaggattgggtatgttggga

SEQ ID NO: 2621392 - DNA, 25 bp, Homo sapien
atttgtgtccccctcagacttttag

SEQ ID NO: 2621393 - DNA, 25 bp, Homo sapien
gattgtcctcttaggtgtgacattt

SEQ ID NO: 2621394 - DNA, 25 bp, Homo sapien
aatcatacaaaatgattgattgtcc

SEQ ID NO: 2621395 - DNA, 25 bp, Homo sapien
gaaaagccagctatgtgacgacgaa

SEQ ID NO: 2621396 - DNA, 25 bp, Homo sapien
gaaatggaaacccagtgactgactg

SEQ ID NO: 2621397 - DNA, 25 bp, Homo sapien
gtttcccaagtagcgtgagtcacga

SEQ ID NO: 2621398 - DNA, 25 bp, Homo sapien
tatccaatcggaatagctactggga

SEQ ID NO: 2621399 - DNA, 25 bp, Homo sapien
tttatgacccgatgagagtttggaa

SEQ ID NO: 2621400 - DNA, 25 bp, Homo sapien
ctttatgacccgatgagagtttgga

SEQ ID NO: 2621401 - DNA, 25 bp, Homo sapien
ctctttatgacccgatgagagtttg

SEQ ID NO: 2621402 - DNA, 25 bp, Homo sapien
ctcctctttatgacccgatgagagt

SEQ ID NO: 2621403 - DNA, 25 bp, Homo sapien
gctaaagcccctccatgaatctggg

SEQ ID NO: 2621404 - DNA, 25 bp, Homo sapien
tgttggcgagggaaaccttctggca

SEQ ID NO: 2621405 - DNA, 25 bp, Homo sapien
tctgaaggacctctctaggccgact

SEQ ID NO: 2621406 - DNA, 25 bp, Homo sapien
tgtacaaagctgatggctaaagccc

SEQ ID NO: 2621407 - DNA, 25 bp, Homo sapien
tgaaaagacctgtatctgctcccct

SEQ ID NO: 2621408 - DNA, 25 bp, Homo sapien
cacacttgcccactaggagaagatg

SEQ ID NO: 2621409 - DNA, 25 bp, Homo sapien
gagttggagtagcttaactttagcc

SEQ ID NO: 2621410 - DNA, 25 bp, Homo sapien
ttgagagttcatagcccgcatcagc

SEQ ID NO: 2621411 - DNA, 25 bp, Homo sapien
cctgagttttaatacctgatttctg

SEQ ID NO: 2621412 - DNA, 25 bp, Homo sapien
tttctctgaaggcattattgtggtt

SEQ ID NO: 2621413 - DNA, 25 bp, Homo sapien
ggaaatgatctttccacatgactca

SEQ ID NO: 2621414 - DNA, 25 bp, Homo sapien
ctggtttcggtttatattattcata

SEQ ID NO: 2621415 - DNA, 25 bp, Homo sapien
gggaagaggcttgtgaccagtacca

SEQ ID NO: 2621416 - DNA, 25 bp, Homo sapien
gccatttatggtactctttgcctat

SEQ ID NO: 2621417 - DNA, 25 bp, Homo sapien
gaaatgtcatttatctactcacaca

SEQ ID NO: 2621418 - DNA, 25 bp, Homo sapien
tttgcctatgcatccccttgttaga

SEQ ID NO: 2621419 - DNA, 25 bp, Homo sapien
taagcagcgcctcatcaagaaagta

SEQ ID NO: 2621420 - DNA, 25 bp, Homo sapien
tcatgcctcggacgtcctggagaat

SEQ ID NO: 2621421 - DNA, 25 bp, Homo sapien
gagtgcggcagcttctcgacttaga

SEQ ID NO: 2621422 - DNA, 25 bp, Homo sapien
caggattctgctggtacgagaggcc

SEQ ID NO: 2621423 - DNA, 25 bp, Homo sapien
aagtatcaagataccagcttgctga

SEQ ID NO: 2621424 - DNA, 25 bp, Homo sapien
cagttctttggctagcttgctgatt

SEQ ID NO: 2621425 - DNA, 25 bp, Homo sapien
tattgcaccaataatgacatatgtg

SEQ ID NO: 2621426 - DNA, 25 bp, Homo sapien
gtatcaaacaccagttattgcacca

SEQ ID NO: 2621427 - DNA, 25 bp, Homo sapien
tagctgtaaataactgctgtacttg

SEQ ID NO: 2621428 - DNA, 25 bp, Homo sapien
aaaatctaacttgtgatcagttagc

SEQ ID NO: 2621429 - DNA, 25 bp, Homo sapien
taaataactgctgtacttggaccag

SEQ ID NO: 2621430 - DNA, 25 bp, Homo sapien
ctaacttgtgatcagttagctgtaa

SEQ ID NO: 2621431 - DNA, 25 bp, Homo sapien
gctggtactacaggcgtgtgctgcc

SEQ ID NO: 2621432 - DNA, 25 bp, Homo sapien
tagctggtactacaggcgtgtgctg

SEQ ID NO: 2621433 - DNA, 25 bp, Homo sapien
tggtactacaggcgtgtgctgccac

SEQ ID NO: 2621434 - DNA, 25 bp, Homo sapien
ggtactacaggcgtgtgctgccaca

SEQ ID NO: 2621435 - DNA, 25 bp, Homo sapien
tgctgtcaaatgtaagcctccaggt

SEQ ID NO: 2621436 - DNA, 25 bp, Homo sapien
tttgcaggctgtagggctgttcacg

SEQ ID NO: 2621437 - DNA, 25 bp, Homo sapien
catgtgtctttcagcgatgatgcct

SEQ ID NO: 2621438 - DNA, 25 bp, Homo sapien
gccattactctaggagcaattgaga

SEQ ID NO: 2621439 - DNA, 25 bp, Homo sapien
ttcatcctggtccatttagatttgg

SEQ ID NO: 2621440 - DNA, 25 bp, Homo sapien
atcctggtccatttagatttggcaa

SEQ ID NO: 2621441 - DNA, 25 bp, Homo sapien
catcctggtccatttagatttggca

SEQ ID NO: 2621442 - DNA, 25 bp, Homo sapien
tcatcctggtccatttagatttggc

SEQ ID NO: 2621443 - DNA, 25 bp, Homo sapien
tctctgcatttgtacccaatggcca

SEQ ID NO: 2621444 - DNA, 25 bp, Homo sapien
aatggccagtagcttctgaatccac

SEQ ID NO: 2621445 - DNA, 25 bp, Homo sapien
attctctgcatttgtacccaatggc

SEQ ID NO: 2621446 - DNA, 25 bp, Homo sapien
ccagtagcttctgaatccacacagc

SEQ ID NO: 2621447 - DNA, 25 bp, Homo sapien
tattccgtgtatgtgcctgtctgcc

SEQ ID NO: 2621448 - DNA, 25 bp, Homo sapien
caacaaacatgctattccgtgtatg

SEQ ID NO: 2621449 - DNA, 25 bp, Homo sapien
ttggtttgcctcacattgcatcctc

SEQ ID NO: 2621450 - DNA, 25 bp, Homo sapien
gtcttggtttgcctcacattgcatc

SEQ ID NO: 2621451 - DNA, 25 bp, Homo sapien
aacagttcttatatctgtagatacc

SEQ ID NO: 2621452 - DNA, 25 bp, Homo sapien
gctctgagatatgattcatatgcca

SEQ ID NO: 2621453 - DNA, 25 bp, Homo sapien
tgcttttacctgaagtcaccttcat

SEQ ID NO: 2621454 - DNA, 25 bp, Homo sapien
aaagaaagctcatcccctttagcca

SEQ ID NO: 2621455 - DNA, 25 bp, Homo sapien
gtaacttgtatagctccagggaaaa

SEQ ID NO: 2621456 - DNA, 25 bp, Homo sapien
tcatataggttttgccatggtattt

SEQ ID NO: 2621457 - DNA, 25 bp, Homo sapien
taggaagaactaataataatgctga

SEQ ID NO: 2621458 - DNA, 25 bp, Homo sapien
tatccaacaatatcaccagcaaatg

SEQ ID NO: 2621459 - DNA, 25 bp, Homo sapien
aataaccatatgcatatactgttgc

SEQ ID NO: 2621460 - DNA, 25 bp, Homo sapien
ccattatgtggtagatatatctttg

SEQ ID NO: 2621461 - DNA, 25 bp, Homo sapien
caaatttccctcagtaaaagtggtg

SEQ ID NO: 2621462 - DNA, 25 bp, Homo sapien
cagtcccttattgatggatttatgg

SEQ ID NO: 2621463 - DNA, 25 bp, Homo sapien
taggtcccatccctaaggtatctca

SEQ ID NO: 2621464 - DNA, 25 bp, Homo sapien
ctgaaaggaagcacacctagatcat

SEQ ID NO: 2621465 - DNA, 25 bp, Homo sapien
cacttcgggtcccaagtacagggat

SEQ ID NO: 2621466 - DNA, 25 bp, Homo sapien
gctgacatgatatcacaagtggaag

SEQ ID NO: 2621467 - DNA, 25 bp, Homo sapien
tcggcgggagccatgacctcgctga

SEQ ID NO: 2621468 - DNA, 25 bp, Homo sapien
gcgactccaaggaaacgcggctgac

SEQ ID NO: 2621469 - DNA, 25 bp, Homo sapien
caggacgacgacgacaagggcgact

SEQ ID NO: 2621470 - DNA, 25 bp, Homo sapien
cctgctgggcctcaaggaccgcgag

SEQ ID NO: 2621471 - DNA, 25 bp, Homo sapien
tgcagaccccggagtccaaatggga

SEQ ID NO: 2621472 - DNA, 25 bp, Homo sapien
aaagtccttcctgccgatcctgcag

SEQ ID NO: 2621473 - DNA, 25 bp, Homo sapien
ccaaagaaaagacaagcaccgaggg

SEQ ID NO: 2621474 - DNA, 25 bp, Homo sapien
agggagtcccggcagatagcgtacc

SEQ ID NO: 2621475 - DNA, 25 bp, Homo sapien
tccactttcaaaccatttggacgca

SEQ ID NO: 2621476 - DNA, 25 bp, Homo sapien
caataaaggtccactttcaaaccat

SEQ ID NO: 2621477 - DNA, 25 bp, Homo sapien
gtccactttcaaaccatttggacgc

SEQ ID NO: 2621478 - DNA, 25 bp, Homo sapien
ccactttcaaaccatttggacgcac

SEQ ID NO: 2621479 - DNA, 25 bp, Homo sapien
taactgtactcactacgccctggtc

SEQ ID NO: 2621480 - DNA, 25 bp, Homo sapien
cactttatagcacaagtccgaggca

SEQ ID NO: 2621481 - DNA, 25 bp, Homo sapien
tataaaaagatcgttaaggtcgagc

SEQ ID NO: 2621482 - DNA, 25 bp, Homo sapien
ctaacgtgtgcggtactaactgtac

SEQ ID NO: 2621483 - DNA, 25 bp, Homo sapien
tcacctagtaactacacggagagac

SEQ ID NO: 2621484 - DNA, 25 bp, Homo sapien
catccgatgcgtacaaagacgtggc

SEQ ID NO: 2621485 - DNA, 25 bp, Homo sapien
catgaaacgctgcaggtttattgtc

SEQ ID NO: 2621486 - DNA, 25 bp, Homo sapien
caaagacgtggcatgaaacgctgca

SEQ ID NO: 2621487 - DNA, 25 bp, Homo sapien
cctaatttgcgcacgccaagaggat

SEQ ID NO: 2621488 - DNA, 25 bp, Homo sapien
tacattgtttaatacaggatggcac

SEQ ID NO: 2621489 - DNA, 25 bp, Homo sapien
gctttgctgttgttccactctgtcc

SEQ ID NO: 2621490 - DNA, 25 bp, Homo sapien
tgtttcacttaacaagcgccaccct

SEQ ID NO: 2621491 - DNA, 25 bp, Homo sapien
gagatcgtttgatgcgttcaatccc

SEQ ID NO: 2621492 - DNA, 25 bp, Homo sapien
tctgagcttgtatacttgagtagct

SEQ ID NO: 2621493 - DNA, 25 bp, Homo sapien
gactgaatttatgatgatttgctga

SEQ ID NO: 2621494 - DNA, 25 bp, Homo sapien
ctccttgtgtgaatagctccttggc

SEQ ID NO: 2621495 - DNA, 25 bp, Homo sapien
gaatcatggcgcactgacatggcgg

SEQ ID NO: 2621496 - DNA, 25 bp, Homo sapien
gggcagaatcatggcgcactgacat

SEQ ID NO: 2621497 - DNA, 25 bp, Homo sapien
tgcacacgggcagaatcatggcgca

SEQ ID NO: 2621498 - DNA, 25 bp, Homo sapien
cacgggcagaatcatggcgcactga

SEQ ID NO: 2621499 - DNA, 25 bp, Homo sapien
ctttgcgtccagcgtagcctccagc

SEQ ID NO: 2621500 - DNA, 25 bp, Homo sapien
ggctttgcgtccagcgtagcctcca

SEQ ID NO: 2621501 - DNA, 25 bp, Homo sapien
tggctttgcgtccagcgtagcctcc

SEQ ID NO: 2621502 - DNA, 25 bp, Homo sapien
gctttgcgtccagcgtagcctccag

SEQ ID NO: 2621503 - DNA, 25 bp, Homo sapien
ttggcttctcgtggggccttgcgtt

SEQ ID NO: 2621504 - DNA, 25 bp, Homo sapien
ttgaccttggcttctcgtggggcct

SEQ ID NO: 2621505 - DNA, 25 bp, Homo sapien
ccttggcttctcgtggggccttgcg

SEQ ID NO: 2621506 - DNA, 25 bp, Homo sapien
gaccttggcttctcgtggggccttg

SEQ ID NO: 2621507 - DNA, 25 bp, Homo sapien
atttttaatgaccaaaacaaagcat

SEQ ID NO: 2621508 - DNA, 25 bp, Homo sapien
gggccaaacacatgttccgtcttga

SEQ ID NO: 2621509 - DNA, 25 bp, Homo sapien
gattgccttaagagttactagcgag

SEQ ID NO: 2621510 - DNA, 25 bp, Homo sapien
tactagcgaggtcagtgttaggctt

SEQ ID NO: 2621511 - DNA, 25 bp, Homo sapien
caagacctcgtctcagaaaattgga

SEQ ID NO: 2621512 - DNA, 25 bp, Homo sapien
agataatttatccagtcattgggaa

SEQ ID NO: 2621513 - DNA, 25 bp, Homo sapien
gcccacaatggccagtttactacca

SEQ ID NO: 2621514 - DNA, 25 bp, Homo sapien
tctcaattatagaagcaagttcagc

SEQ ID NO: 2621515 - DNA, 25 bp, Homo sapien
gatagaggtattaagatgtgtggca

SEQ ID NO: 2621516 - DNA, 25 bp, Homo sapien
cagaagcccaaatcctaggtggtgg

SEQ ID NO: 2621517 - DNA, 25 bp, Homo sapien
tgtgtcacgctacagctcatgctgg

SEQ ID NO: 2621518 - DNA, 25 bp, Homo sapien
ttcgagagttctatgacagctggca

SEQ ID NO: 2621519 - DNA, 25 bp, Homo sapien
gcgctacctacgttggattccagaa

SEQ ID NO: 2621520 - DNA, 25 bp, Homo sapien
tcatggtatgctgggtggacgaact

SEQ ID NO: 2621521 - DNA, 25 bp, Homo sapien
taaagatctctttttgaccaccaca

SEQ ID NO: 2621522 - DNA, 25 bp, Homo sapien
gacccttaggcttccgtggcatcag

SEQ ID NO: 2621523 - DNA, 25 bp, Homo sapien
tcgacctacaggatgaaccatggct

SEQ ID NO: 2621524 - DNA, 25 bp, Homo sapien
tccagtgctccagtggttatatagg

SEQ ID NO: 2621525 - DNA, 25 bp, Homo sapien
tagcaacttgatctactgtcaacaa

SEQ ID NO: 2621526 - DNA, 25 bp, Homo sapien
gtgtggcaccttaaattccagtgct

SEQ ID NO: 2621527 - DNA, 25 bp, Homo sapien
cccagcctgatgctcgtgatgattg

SEQ ID NO: 2621528 - DNA, 25 bp, Homo sapien
aagcaagaattgctcaggcatacat

SEQ ID NO: 2621529 - DNA, 25 bp, Homo sapien
gaagcaagaattgctcaggcataca

SEQ ID NO: 2621530 - DNA, 25 bp, Homo sapien
ggaagcaagaattgctcaggcatac

SEQ ID NO: 2621531 - DNA, 25 bp, Homo sapien
tcttaatgagcagatactctcttcc

SEQ ID NO: 2621532 - DNA, 25 bp, Homo sapien
cagagtgaggaatttagtttgcatc

SEQ ID NO: 2621533 - DNA, 25 bp, Homo sapien
taaatgagtaatgctttcactgcac

SEQ ID NO: 2621534 - DNA, 25 bp, Homo sapien
ggtgagagtgatccttgctaagaat

SEQ ID NO: 2621535 - DNA, 25 bp, Homo sapien
cagccttctgctgaacgcggccttc

SEQ ID NO: 2621536 - DNA, 25 bp, Homo sapien
gccttctgctgaacgcggccttcat

SEQ ID NO: 2621537 - DNA, 25 bp, Homo sapien
cttcccactgctccccgtctgcacc

SEQ ID NO: 2621538 - DNA, 25 bp, Homo sapien
cacagccagccttctgctgaacgcg

SEQ ID NO: 2621539 - DNA, 25 bp, Homo sapien
ctgcagatggagcctcagaaagcat

SEQ ID NO: 2621540 - DNA, 25 bp, Homo sapien
gcagcatctccctgagtcttatcca

SEQ ID NO: 2621541 - DNA, 25 bp, Homo sapien
gtctctccagagatggtcactttct

SEQ ID NO: 2621542 - DNA, 25 bp, Homo sapien
tttcttagctgtggctttagcccga

SEQ ID NO: 2621543 - DNA, 25 bp, Homo sapien
tagcccgatgatctgtccaaagctt

SEQ ID NO: 2621544 - DNA, 25 bp, Homo sapien
ttgagcgtggaggtcattggtaggc

SEQ ID NO: 2621545 - DNA, 25 bp, Homo sapien
gagcgtggaggtcattggtaggcca

SEQ ID NO: 2621546 - DNA, 25 bp, Homo sapien
tttgagcgtggaggtcattggtagg

SEQ ID NO: 2621547 - DNA, 25 bp, Homo sapien
tgagcgtggaggtcattggtaggcc

SEQ ID NO: 2621548 - DNA, 25 bp, Homo sapien
tatatgtgatgctgaagcgagcact

SEQ ID NO: 2621549 - DNA, 25 bp, Homo sapien
gaaagaaatctttggatacaggcat

SEQ ID NO: 2621550 - DNA, 25 bp, Homo sapien
aagaaagaaatctttggatacaggc

SEQ ID NO: 2621551 - DNA, 25 bp, Homo sapien
catacaatgcatgaatggggtatcc

SEQ ID NO: 2621552 - DNA, 25 bp, Homo sapien
gaaatctttggatacaggcatacaa

SEQ ID NO: 2621553 - DNA, 25 bp, Homo sapien
tctttttcctcctcgcaaaggtggc

SEQ ID NO: 2621554 - DNA, 25 bp, Homo sapien
ccgagacttgaagatacgagaggtc

SEQ ID NO: 2621555 - DNA, 25 bp, Homo sapien
tctgagagaagagtcgtccaggtag

SEQ ID NO: 2621556 - DNA, 25 bp, Homo sapien
aattatacggtgtagtaggaggtga

SEQ ID NO: 2621557 - DNA, 25 bp, Homo sapien
cttgggaattctccgctgtcgcttc

SEQ ID NO: 2621558 - DNA, 25 bp, Homo sapien
ccttgggaattctccgctgtcgctt

SEQ ID NO: 2621559 - DNA, 25 bp, Homo sapien
aattctccgctgtcgcttctttctc

SEQ ID NO: 2621560 - DNA, 25 bp, Homo sapien
gggaattctccgctgtcgcttcttt

SEQ ID NO: 2621561 - DNA, 25 bp, Homo sapien
cccaagccctccttcgtgtcgtacg

SEQ ID NO: 2621562 - DNA, 25 bp, Homo sapien
gtggcggcggcaccaaggcccccaa

SEQ ID NO: 2621563 - DNA, 25 bp, Homo sapien
agccctccttcgtgtcgtacgtacg

SEQ ID NO: 2621564 - DNA, 25 bp, Homo sapien
gaaaggagtagtcggcggtggcggc

SEQ ID NO: 2621565 - DNA, 25 bp, Homo sapien
gtccgcgcgtcgctgcttcccaggg

SEQ ID NO: 2621566 - DNA, 25 bp, Homo sapien
gtgtcagcggcggagccggatgcgg

SEQ ID NO: 2621567 - DNA, 25 bp, Homo sapien
tgcgggcggcatcgcggcggtcgcg

SEQ ID NO: 2621568 - DNA, 25 bp, Homo sapien
ggcggagccccagccgctagtgctg

SEQ ID NO: 2621569 - DNA, 25 bp, Homo sapien
gggtcaaactctcctgacgtgatgg

SEQ ID NO: 2621570 - DNA, 25 bp, Homo sapien
tctccaagtgcactcaagaatgggt

SEQ ID NO: 2621571 - DNA, 25 bp, Homo sapien
ttggaaagtccggagagaacgctct

SEQ ID NO: 2621572 - DNA, 25 bp, Homo sapien
cattggacgacggttttatcctcgc

SEQ ID NO: 2621573 - DNA, 25 bp, Homo sapien
cgcggctcccatggttcagtcaagt

SEQ ID NO: 2621574 - DNA, 25 bp, Homo sapien
cactgaggacggcactttgggaaca

SEQ ID NO: 2621575 - DNA, 25 bp, Homo sapien
tcttgccaccacttttgaaatcgtc

SEQ ID NO: 2621576 - DNA, 25 bp, Homo sapien
tttgaaatcgtcctgtagagggcac

SEQ ID NO: 2621577 - DNA, 25 bp, Homo sapien
agaaaggacttagctgcatctctga

SEQ ID NO: 2621578 - DNA, 25 bp, Homo sapien
tcaaggacatggcataagccagcca

SEQ ID NO: 2621579 - DNA, 25 bp, Homo sapien
gccagccaaagggtgagaaaggact

SEQ ID NO: 2621580 - DNA, 25 bp, Homo sapien
aagggtgagaaaggacttagctgca

SEQ ID NO: 2621581 - DNA, 25 bp, Homo sapien
ttaataatttgagacatcaacaagc

SEQ ID NO: 2621582 - DNA, 25 bp, Homo sapien
taagtcagatgcctgaacttgacct

SEQ ID NO: 2621583 - DNA, 25 bp, Homo sapien
ctggatggagatcatccctaagtca

SEQ ID NO: 2621584 - DNA, 25 bp, Homo sapien
atttgagacatcaacaagcttcttc

SEQ ID NO: 2621585 - DNA, 25 bp, Homo sapien
gagactccttgcattccgccagata

SEQ ID NO: 2621586 - DNA, 25 bp, Homo sapien
tccattaccgcaaatgagccaacgt

SEQ ID NO: 2621587 - DNA, 25 bp, Homo sapien
cacaaagttctaggcatggatccat

SEQ ID NO: 2621588 - DNA, 25 bp, Homo sapien
ggtgtggccatcttacctgcttatg

SEQ ID NO: 2621589 - DNA, 25 bp, Homo sapien
cctgtaagtggtaatggatgggcaa

SEQ ID NO: 2621590 - DNA, 25 bp, Homo sapien
gaaaaccagacatatccaggagaaa

SEQ ID NO: 2621591 - DNA, 25 bp, Homo sapien
gattcctagttgacagaaaagcaca

SEQ ID NO: 2621592 - DNA, 25 bp, Homo sapien
tactgggcagtcctacaaacgtcct

SEQ ID NO: 2621593 - DNA, 25 bp, Homo sapien
tcaactgtctttcaccctgtggtgg

SEQ ID NO: 2621594 - DNA, 25 bp, Homo sapien
tataatgaacaagtactctgtgggc

SEQ ID NO: 2621595 - DNA, 25 bp, Homo sapien
tactggttaaagctgtgcctatcag

SEQ ID NO: 2621596 - DNA, 25 bp, Homo sapien
tcttgtagaatgtcccatatctgga

SEQ ID NO: 2621597 - DNA, 25 bp, Homo sapien
gtgattatttatgcccagagacaga

SEQ ID NO: 2621598 - DNA, 25 bp, Homo sapien
taggcaggttactaaatgaaattcc

SEQ ID NO: 2621599 - DNA, 25 bp, Homo sapien
cctctttacttcatggactgccaga

SEQ ID NO: 2621600 - DNA, 25 bp, Homo sapien
tgtgaaacccagtgttttctgggcc

SEQ ID NO: 2621601 - DNA, 25 bp, Homo sapien
aggattgcggtggtgcagttgtagc

SEQ ID NO: 2621602 - DNA, 25 bp, Homo sapien
cacccaggctacatcccaggcaaca

SEQ ID NO: 2621603 - DNA, 25 bp, Homo sapien
aggcaacatcacccaggattgcggt

SEQ ID NO: 2621604 - DNA, 25 bp, Homo sapien
ccaggattgcggtggtgcagttgta

SEQ ID NO: 2621605 - DNA, 25 bp, Homo sapien
cctgtttatgtatagccaccaaatc

SEQ ID NO: 2621606 - DNA, 25 bp, Homo sapien
ccaccaaatctattaagtaagcagg

SEQ ID NO: 2621607 - DNA, 25 bp, Homo sapien
caataggataaaaaagtcataaaag

SEQ ID NO: 2621608 - DNA, 25 bp, Homo sapien
aagtattcaaaacactttgaagaga

SEQ ID NO: 2621609 - DNA, 25 bp, Homo sapien
tcactgcagccttgaacccctgagc

SEQ ID NO: 2621610 - DNA, 25 bp, Homo sapien
cacccaggctgcagtgtagtggtga

SEQ ID NO: 2621611 - DNA, 25 bp, Homo sapien
ttttaaagacatggtctcgctctct

SEQ ID NO: 2621612 - DNA, 25 bp, Homo sapien
gctgcagtgtagtggtgatcatagc

SEQ ID NO: 2621613 - DNA, 25 bp, Homo sapien
gacgctccatcgctagcgagtcctg

SEQ ID NO: 2621614 - DNA, 25 bp, Homo sapien
cgtgtcgcaggtccactggcttctc

SEQ ID NO: 2621615 - DNA, 25 bp, Homo sapien
cccggagcccagataacgtgtcgtt

SEQ ID NO: 2621616 - DNA, 25 bp, Homo sapien
ctgcgtcgtcgcctggtgcttcaac

SEQ ID NO: 2621617 - DNA, 25 bp, Homo sapien
actcaaaggtgtgacggaagacaac

SEQ ID NO: 2621618 - DNA, 25 bp, Homo sapien
tagctagtatgatgtcctttctggc

SEQ ID NO: 2621619 - DNA, 25 bp, Homo sapien
ggtgtgtccagctttagagtccttg

SEQ ID NO: 2621620 - DNA, 25 bp, Homo sapien
tatcaaggtctttcaggataccaca

SEQ ID NO: 2621621 - DNA, 25 bp, Homo sapien
atgattcactccatgcccctcctgg

SEQ ID NO: 2621622 - DNA, 25 bp, Homo sapien
agggcagctggagtaaagcagggct

SEQ ID NO: 2621623 - DNA, 25 bp, Homo sapien
ctgtgcacaagtggaggagtctgga

SEQ ID NO: 2621624 - DNA, 25 bp, Homo sapien
ggctctgcctcatacagaggatgat

SEQ ID NO: 2621625 - DNA, 25 bp, Homo sapien
cagctgtgcttaaaagcacagttct

SEQ ID NO: 2621626 - DNA, 25 bp, Homo sapien
tgagcagctgtgcttaaaagcacag

SEQ ID NO: 2621627 - DNA, 25 bp, Homo sapien
aagcacagttctttctggcccaatt

SEQ ID NO: 2621628 - DNA, 25 bp, Homo sapien
gagcagctgtgcttaaaagcacagt

SEQ ID NO: 2621629 - DNA, 25 bp, Homo sapien
gtcaaacattagttgggtactttga

SEQ ID NO: 2621630 - DNA, 25 bp, Homo sapien
cattagttgggtactttgatacttc

SEQ ID NO: 2621631 - DNA, 25 bp, Homo sapien
agttgggtactttgatacttcacaa

SEQ ID NO: 2621632 - DNA, 25 bp, Homo sapien
caaacattagttgggtactttgata

SEQ ID NO: 2621633 - DNA, 25 bp, Homo sapien
ttccattggacacccagacagagct

SEQ ID NO: 2621634 - DNA, 25 bp, Homo sapien
taatagtgtcctcgctctggtggca

SEQ ID NO: 2621635 - DNA, 25 bp, Homo sapien
tgcatttcaccgctcttccattgga

SEQ ID NO: 2621636 - DNA, 25 bp, Homo sapien
aatccatgcgccctctcgtggtgga

SEQ ID NO: 2621637 - DNA, 25 bp, Homo sapien
gccatatttgcagaaggctgatgat

SEQ ID NO: 2621638 - DNA, 25 bp, Homo sapien
tttgccatatttgcagaaggctgat

SEQ ID NO: 2621639 - DNA, 25 bp, Homo sapien
gaggacaaatgataccctcctctcc

SEQ ID NO: 2621640 - DNA, 25 bp, Homo sapien
catatttgcagaaggctgatgatgt

SEQ ID NO: 2621641 - DNA, 25 bp, Homo sapien
caagagcagcatcgaggcaatgata

SEQ ID NO: 2621642 - DNA, 25 bp, Homo sapien
ggcaatgatagatagctgccctcat

SEQ ID NO: 2621643 - DNA, 25 bp, Homo sapien
cagaggcagctgtgtactcagagtc

SEQ ID NO: 2621644 - DNA, 25 bp, Homo sapien
gagagcactgctgtacaataacaca

SEQ ID NO: 2621645 - DNA, 25 bp, Homo sapien
tctgcccacattgacgtccagactg

SEQ ID NO: 2621646 - DNA, 25 bp, Homo sapien
ccaaaccagctgcacctagagtgtc

SEQ ID NO: 2621647 - DNA, 25 bp, Homo sapien
ggcccaaaccagctgcacctagagt

SEQ ID NO: 2621648 - DNA, 25 bp, Homo sapien
ccagctgcacctagagtgtcctcaa

SEQ ID NO: 2621649 - DNA, 25 bp, Homo sapien
gatgatctcattaccacggatgcca

SEQ ID NO: 2621650 - DNA, 25 bp, Homo sapien
gagcctaatgtaaccgtgcccatgt

SEQ ID NO: 2621651 - DNA, 25 bp, Homo sapien
tcttggaggatcagacccttgtcaa

SEQ ID NO: 2621652 - DNA, 25 bp, Homo sapien
cggatgccatagcagagatcttgga

SEQ ID NO: 2621653 - DNA, 25 bp, Homo sapien
tatcagtggggttacctataataaa

SEQ ID NO: 2621654 - DNA, 25 bp, Homo sapien
attaactgatagattgacttcattt

SEQ ID NO: 2621655 - DNA, 25 bp, Homo sapien
tcaaaactctgtatagaaagaatgt

SEQ ID NO: 2621656 - DNA, 25 bp, Homo sapien
tttgaatgaaaggaggtacgggcca

SEQ ID NO: 2621657 - DNA, 25 bp, Homo sapien
gcgaccgtatcggggcgaggcctgc

SEQ ID NO: 2621658 - DNA, 25 bp, Homo sapien
cgaccgtatcggggcgaggcctgcc

SEQ ID NO: 2621659 - DNA, 25 bp, Homo sapien
gtcacttgtccagagcaggcgtcgt

SEQ ID NO: 2621660 - DNA, 25 bp, Homo sapien
cgctggatccgagttggcgtaatcc

SEQ ID NO: 2621661 - DNA, 25 bp, Homo sapien
tggcgtaatccacctcagtcacttg

SEQ ID NO: 2621662 - DNA, 25 bp, Homo sapien
cctcagtcacttgtccagagcaggc

SEQ ID NO: 2621663 - DNA, 25 bp, Homo sapien
tgctgaacagcgttggctaaggctt

SEQ ID NO: 2621664 - DNA, 25 bp, Homo sapien
gctgaacagcgttggctaaggcttt

SEQ ID NO: 2621665 - DNA, 25 bp, Homo sapien
ctgctgaacagcgttggctaaggct

SEQ ID NO: 2621666 - DNA, 25 bp, Homo sapien
gagaggcttccaagccacaaagaga

SEQ ID NO: 2621667 - DNA, 25 bp, Homo sapien
gccccagaaagagcttcctctgcag

SEQ ID NO: 2621668 - DNA, 25 bp, Homo sapien
cctctgcaggaacctgagaggcttc

SEQ ID NO: 2621669 - DNA, 25 bp, Homo sapien
cgctgtcgatgatgtcacagggctc

SEQ ID NO: 2621670 - DNA, 25 bp, Homo sapien
agttctctcacagatgctttcctcc

SEQ ID NO: 2621671 - DNA, 25 bp, Homo sapien
acagttctctcacagatgctttcct

SEQ ID NO: 2621672 - DNA, 25 bp, Homo sapien
tttcctcctgggcatcgtctcatca

SEQ ID NO: 2621673 - DNA, 25 bp, Homo sapien
tctctcacagatgctttcctcctgg

SEQ ID NO: 2621674 - DNA, 25 bp, Homo sapien
aatgtcctcaggacagatataggag

SEQ ID NO: 2621675 - DNA, 25 bp, Homo sapien
gacagatataggaggccagcaatag

SEQ ID NO: 2621676 - DNA, 25 bp, Homo sapien
aaatatccatgggatactcttctcc

SEQ ID NO: 2621677 - DNA, 25 bp, Homo sapien
gtccagttcttctttgtgcctcttg

SEQ ID NO: 2621678 - DNA, 25 bp, Homo sapien
cagtgcaagtgacagtccgagcatt

SEQ ID NO: 2621679 - DNA, 25 bp, Homo sapien
cttgtccaaaaggcagcagtgcaag

SEQ ID NO: 2621680 - DNA, 25 bp, Homo sapien
cagcagtgcaagtgacagtccgagc

SEQ ID NO: 2621681 - DNA, 25 bp, Homo sapien
ggcagcagtgcaagtgacagtccga

SEQ ID NO: 2621682 - DNA, 25 bp, Homo sapien
tcggatcacacaagcccggagacag

SEQ ID NO: 2621683 - DNA, 25 bp, Homo sapien
gactctggtcgcagacgcaaaggca

SEQ ID NO: 2621684 - DNA, 25 bp, Homo sapien
ctccattgactctggtcgcagacgc

SEQ ID NO: 2621685 - DNA, 25 bp, Homo sapien
agagatcggatcacacaagcccgga

SEQ ID NO: 2621686 - DNA, 25 bp, Homo sapien
gtgctgggggtgcttggattcttgg

SEQ ID NO: 2621687 - DNA, 25 bp, Homo sapien
tggagattggagcagcaaatggctc

SEQ ID NO: 2621688 - DNA, 25 bp, Homo sapien
gctgggggtgcttggattcttggag

SEQ ID NO: 2621689 - DNA, 25 bp, Homo sapien
ggattcttggagattggagcagcaa

SEQ ID NO: 2621690 - DNA, 25 bp, Homo sapien
aatgatgccgtatgtccttgctcac

SEQ ID NO: 2621691 - DNA, 25 bp, Homo sapien
caatgatgccgtatgtccttgctca

SEQ ID NO: 2621692 - DNA, 25 bp, Homo sapien
tcaatgatgccgtatgtccttgctc

SEQ ID NO: 2621693 - DNA, 25 bp, Homo sapien
gcagtatcttcctgatgtaatgtct

SEQ ID NO: 2621694 - DNA, 25 bp, Homo sapien
tgaatgagatggagtagaatatctc

SEQ ID NO: 2621695 - DNA, 25 bp, Homo sapien
tggagtagaatatctctgcagtatc

SEQ ID NO: 2621696 - DNA, 25 bp, Homo sapien
tctgactcctgcacgccgttttgaa

SEQ ID NO: 2621697 - DNA, 25 bp, Homo sapien
agtgagttgttaggcttggcacagt

SEQ ID NO: 2621698 - DNA, 25 bp, Homo sapien
atctcctgcgggactttcaaaagtg

SEQ ID NO: 2621699 - DNA, 25 bp, Homo sapien
caaaagtgagttgttaggcttggca

SEQ ID NO: 2621700 - DNA, 25 bp, Homo sapien
aaagtgagttgttaggcttggcaca

SEQ ID NO: 2621701 - DNA, 25 bp, Homo sapien
gttcttgtccactggtaatttgtct

SEQ ID NO: 2621702 - DNA, 25 bp, Homo sapien
cctaatgaatgcaccaggcctattg

SEQ ID NO: 2621703 - DNA, 25 bp, Homo sapien
aatgaatgcaccaggcctattggac

SEQ ID NO: 2621704 - DNA, 25 bp, Homo sapien
ccactggtaatttgtctccttcagg

SEQ ID NO: 2621705 - DNA, 25 bp, Homo sapien
agtggcacagatgtgtcagtgacag

SEQ ID NO: 2621706 - DNA, 25 bp, Homo sapien
ctctttggccaagagtggcacagat

SEQ ID NO: 2621707 - DNA, 25 bp, Homo sapien
gccccagggtactgcagcattcagg

SEQ ID NO: 2621708 - DNA, 25 bp, Homo sapien
gatgccccagggtactgcagcattc

SEQ ID NO: 2621709 - DNA, 25 bp, Homo sapien
gattattgcaactgtgaaagggagg

SEQ ID NO: 2621710 - DNA, 25 bp, Homo sapien
atgaggcccctcttcagtgtctaag

SEQ ID NO: 2621711 - DNA, 25 bp, Homo sapien
tgtctaaggagtagagaagtagttc

SEQ ID NO: 2621712 - DNA, 25 bp, Homo sapien
ccactcgcctgtagagattattgca

SEQ ID NO: 2621713 - DNA, 25 bp, Homo sapien
gaacaccctcttggtcgttcgctcg

SEQ ID NO: 2621714 - DNA, 25 bp, Homo sapien
cagtcgaacaccctcttggtcgttc

SEQ ID NO: 2621715 - DNA, 25 bp, Homo sapien
tcgttcgctcgcgactgacagagaa

SEQ ID NO: 2621716 - DNA, 25 bp, Homo sapien
ctcttggtcgttcgctcgcgactga

SEQ ID NO: 2621717 - DNA, 25 bp, Homo sapien
gcccacagcgcgtcaggcgtggagt

SEQ ID NO: 2621718 - DNA, 25 bp, Homo sapien
ggacaggagtctaccgcggaagggc

SEQ ID NO: 2621719 - DNA, 25 bp, Homo sapien
gggaggtaaggcagagccgccattt

SEQ ID NO: 2621720 - DNA, 25 bp, Homo sapien
gcgtggagtcagaaacggagaaggg

SEQ ID NO: 2621721 - DNA, 25 bp, Homo sapien
tgtagaatttatacaaaacgcaact

SEQ ID NO: 2621722 - DNA, 25 bp, Homo sapien
actgaaaccactattgtagaattta

SEQ ID NO: 2621723 - DNA, 25 bp, Homo sapien
gcagcttgtaattcaagtaactgat

SEQ ID NO: 2621724 - DNA, 25 bp, Homo sapien
aaaagagaaacgaaatcttcagcct

SEQ ID NO: 2621725 - DNA, 25 bp, Homo sapien
tcaacctcactgtcagaatcactgc

SEQ ID NO: 2621726 - DNA, 25 bp, Homo sapien
acctcactgtcagaatcactgccag

SEQ ID NO: 2621727 - DNA, 25 bp, Homo sapien
gaaacaagttcctttgatttaggca

SEQ ID NO: 2621728 - DNA, 25 bp, Homo sapien
tgtcaacctcactgtcagaatcact

SEQ ID NO: 2621729 - DNA, 25 bp, Homo sapien
tggagcaacttgctttttcctcttt

SEQ ID NO: 2621730 - DNA, 25 bp, Homo sapien
gagcaacttgctttttcctctttaa

SEQ ID NO: 2621731 - DNA, 25 bp, Homo sapien
ggagcaacttgctttttcctcttta

SEQ ID NO: 2621732 - DNA, 25 bp, Homo sapien
ctggagcaacttgctttttcctctt

SEQ ID NO: 2621733 - DNA, 25 bp, Homo sapien
gctgctctgtttagaagatgacagg

SEQ ID NO: 2621734 - DNA, 25 bp, Homo sapien
gctgctgctctgtttagaagatgac

SEQ ID NO: 2621735 - DNA, 25 bp, Homo sapien
gatgacagggctctcgaagtctcac

SEQ ID NO: 2621736 - DNA, 25 bp, Homo sapien
ttagaagatgacagggctctcgaag

SEQ ID NO: 2621737 - DNA, 25 bp, Homo sapien
ctacactactagatccatgaaagcc

SEQ ID NO: 2621738 - DNA, 25 bp, Homo sapien
ctctgaaaataaggcctaggctggg

SEQ ID NO: 2621739 - DNA, 25 bp, Homo sapien
tagagaactgcttatgtattgatgt

SEQ ID NO: 2621740 - DNA, 25 bp, Homo sapien
tattatttcataatgcctacactac

SEQ ID NO: 2621741 - DNA, 25 bp, Homo sapien
gaccctttgtgcctaactctgaaga

SEQ ID NO: 2621742 - DNA, 25 bp, Homo sapien
aaaaacaattctatggactcctgcc

SEQ ID NO: 2621743 - DNA, 25 bp, Homo sapien
ctattctgacctttcaagacacagg

SEQ ID NO: 2621744 - DNA, 25 bp, Homo sapien
ggtagactacatccctatggaagaa

SEQ ID NO: 2621745 - DNA, 25 bp, Homo sapien
cctcctgtgcaggagggacccctgt

SEQ ID NO: 2621746 - DNA, 25 bp, Homo sapien
gggaaaggtgatcgtttcaggataa

SEQ ID NO: 2621747 - DNA, 25 bp, Homo sapien
gaaaggtgatcgtttcaggataaaa

SEQ ID NO: 2621748 - DNA, 25 bp, Homo sapien
gtgcaggagggacccctgtgataaa

SEQ ID NO: 2621749 - DNA, 25 bp, Homo sapien
tatgtaccacggactgaaatctgca

SEQ ID NO: 2621750 - DNA, 25 bp, Homo sapien
tggtctggccacaaaggcgtgtaca

SEQ ID NO: 2621751 - DNA, 25 bp, Homo sapien
caaagtgcccctagtgatgctgaaa

SEQ ID NO: 2621752 - DNA, 25 bp, Homo sapien
gaactgaccagaatccgtgaggacc

SEQ ID NO: 2621753 - DNA, 25 bp, Homo sapien
aaatcgcgaacactaacgtacctca

SEQ ID NO: 2621754 - DNA, 25 bp, Homo sapien
tgcctttaaaatcgcgaacactaac

SEQ ID NO: 2621755 - DNA, 25 bp, Homo sapien
atcgcgaacactaacgtacctcatt

SEQ ID NO: 2621756 - DNA, 25 bp, Homo sapien
tttgcctttaaaatcgcgaacacta

SEQ ID NO: 2621757 - DNA, 25 bp, Homo sapien
tatacccgggtaactgcactctagg

SEQ ID NO: 2621758 - DNA, 25 bp, Homo sapien
cctttcaaactaacaggcaggcaga

SEQ ID NO: 2621759 - DNA, 25 bp, Homo sapien
aattcccaggacgtgattcatacag

SEQ ID NO: 2621760 - DNA, 25 bp, Homo sapien
tgcatgaagcaaacaagtggtacct

SEQ ID NO: 2621761 - DNA, 25 bp, Homo sapien
atcatcaatgtcagaaatctgttcc

SEQ ID NO: 2621762 - DNA, 25 bp, Homo sapien
catcaatgtcagaaatctgttcctt

SEQ ID NO: 2621763 - DNA, 25 bp, Homo sapien
tgcatcatcaatgtcagaaatctgt

SEQ ID NO: 2621764 - DNA, 25 bp, Homo sapien
tcaatgtcagaaatctgttccttca

SEQ ID NO: 2621765 - DNA, 25 bp, Homo sapien
acagtacaggttttatttatatggc

SEQ ID NO: 2621766 - DNA, 25 bp, Homo sapien
attaaaacaactagaacagtacagg

SEQ ID NO: 2621767 - DNA, 25 bp, Homo sapien
aattcttctgcaatccaaacataca

SEQ ID NO: 2621768 - DNA, 25 bp, Homo sapien
tacaatagcttggagaacatttaga

SEQ ID NO: 2621769 - DNA, 25 bp, Homo sapien
gcagacaaagtaatccttaataaag

SEQ ID NO: 2621770 - DNA, 25 bp, Homo sapien
tttattttacactaggtggtgggca

SEQ ID NO: 2621771 - DNA, 25 bp, Homo sapien
tgattttattttacactaggtggtg

SEQ ID NO: 2621772 - DNA, 25 bp, Homo sapien
gtgggcagacaaagtaatccttaat

SEQ ID NO: 2621773 - DNA, 25 bp, Homo sapien
aataactacacagaacactatgggt

SEQ ID NO: 2621774 - DNA, 25 bp, Homo sapien
cactatgggtaaacaaacacctgct

SEQ ID NO: 2621775 - DNA, 25 bp, Homo sapien
tcagttttcacacaagccatgttgt

SEQ ID NO: 2621776 - DNA, 25 bp, Homo sapien
ggtggaagtcaaacaagcctagaca

SEQ ID NO: 2621777 - DNA, 25 bp, Homo sapien
gcaaaggccaaaatacacaagcatg

SEQ ID NO: 2621778 - DNA, 25 bp, Homo sapien
taaaatctgtgcctcaatctgtctg

SEQ ID NO: 2621779 - DNA, 25 bp, Homo sapien
agtaaagcttaatgacatctctggc

SEQ ID NO: 2621780 - DNA, 25 bp, Homo sapien
gaatgccattggtctgttctactgg

SEQ ID NO: 2621781 - DNA, 25 bp, Homo sapien
cattgtaaggtaaggtatctacgcc

SEQ ID NO: 2621782 - DNA, 25 bp, Homo sapien
gatttgatcgtcacagcatcttgag

SEQ ID NO: 2621783 - DNA, 25 bp, Homo sapien
aaattgataactatgtggcctggca

SEQ ID NO: 2621784 - DNA, 25 bp, Homo sapien
taatatggcagaccttaatagcagg

SEQ ID NO: 2621785 - DNA, 25 bp, Homo sapien
tcaggtagatggaaaggacggaccc

SEQ ID NO: 2621786 - DNA, 25 bp, Homo sapien
ccaagggcaaaatagggacttcata

SEQ ID NO: 2621787 - DNA, 25 bp, Homo sapien
ggctgtgtacacctaagtgtttgca

SEQ ID NO: 2621788 - DNA, 25 bp, Homo sapien
ggacggacccaagactaatccacat

SEQ ID NO: 2621789 - DNA, 25 bp, Homo sapien
cagcgtccagtagggtagccactaa

SEQ ID NO: 2621790 - DNA, 25 bp, Homo sapien
tttcctcgggatcagaataggcacc

SEQ ID NO: 2621791 - DNA, 25 bp, Homo sapien
tccatagagtgggagttgcccgagc

SEQ ID NO: 2621792 - DNA, 25 bp, Homo sapien
tataggacggttctggtctggacca

SEQ ID NO: 2621793 - DNA, 25 bp, Homo sapien
tcagcctgtgtgtagattgaagatc

SEQ ID NO: 2621794 - DNA, 25 bp, Homo sapien
taccactgctctctatcagcctgtg

SEQ ID NO: 2621795 - DNA, 25 bp, Homo sapien
tgctctctatcagcctgtgtgtaga

SEQ ID NO: 2621796 - DNA, 25 bp, Homo sapien
gattgaagatctcttgactttgact

SEQ ID NO: 2621797 - DNA, 25 bp, Homo sapien
cctgtacctaattcgggctccttca

SEQ ID NO: 2621798 - DNA, 25 bp, Homo sapien
ggaagaatcatagcacaaccgtgaa

SEQ ID NO: 2621799 - DNA, 25 bp, Homo sapien
caaccgtgaaatgatgacacgctga

SEQ ID NO: 2621800 - DNA, 25 bp, Homo sapien
cacgctgaaacgtaagaccactggg

SEQ ID NO: 2621801 - DNA, 25 bp, Homo sapien
ccataaacagggaagatttgtccaa

SEQ ID NO: 2621802 - DNA, 25 bp, Homo sapien
atcagtaagtctctgcctttggtca

SEQ ID NO: 2621803 - DNA, 25 bp, Homo sapien
catcagtaagtctctgcctttggtc

SEQ ID NO: 2621804 - DNA, 25 bp, Homo sapien
tcgatggtacaaggtagtgatgact

SEQ ID NO: 2621805 - DNA, 25 bp, Homo sapien
cccttagccacatcgatggtacaag

SEQ ID NO: 2621806 - DNA, 25 bp, Homo sapien
ccacatcgatggtacaaggtagtga

SEQ ID NO: 2621807 - DNA, 25 bp, Homo sapien
tcatgttactaaatgtccagggaca

SEQ ID NO: 2621808 - DNA, 25 bp, Homo sapien
cagagagtgggtctaagttcttcaa

SEQ ID NO: 2621809 - DNA, 25 bp, Homo sapien
agagtgggtctaagttcttcaaagg

SEQ ID NO: 2621810 - DNA, 25 bp, Homo sapien
tcagagagtgggtctaagttcttca

SEQ ID NO: 2621811 - DNA, 25 bp, Homo sapien
gagagtgggtctaagttcttcaaag

SEQ ID NO: 2621812 - DNA, 25 bp, Homo sapien
tccatcttccgagctaagattttgg

SEQ ID NO: 2621813 - DNA, 25 bp, Homo sapien
gagtagctgatgaagagtgtctgtc

SEQ ID NO: 2621814 - DNA, 25 bp, Homo sapien
gctatcaagtgacaggacacattca

SEQ ID NO: 2621815 - DNA, 25 bp, Homo sapien
gacacattcagactggctcctacac

SEQ ID NO: 2621816 - DNA, 25 bp, Homo sapien
tcctggcgcctggagtcctgagtag

SEQ ID NO: 2621817 - DNA, 25 bp, Homo sapien
ctgcgcacagagctggctaacacaa

SEQ ID NO: 2621818 - DNA, 25 bp, Homo sapien
gcgcacagagctggctaacacaaag

SEQ ID NO: 2621819 - DNA, 25 bp, Homo sapien
cgatcctgcgcacagagctggctaa

SEQ ID NO: 2621820 - DNA, 25 bp, Homo sapien
atcctgcgcacagagctggctaaca

SEQ ID NO: 2621821 - DNA, 25 bp, Homo sapien
ccatgggcgagtgtgagaaatgact

SEQ ID NO: 2621822 - DNA, 25 bp, Homo sapien
gaccccacttgaagagacacacgga

SEQ ID NO: 2621823 - DNA, 25 bp, Homo sapien
gacacacggacccagaggaagtaaa

SEQ ID NO: 2621824 - DNA, 25 bp, Homo sapien
gcgtcatatttgaaaccatgggcga

SEQ ID NO: 2621825 - DNA, 25 bp, Homo sapien
cagtaccctcggagcaagggggaca

SEQ ID NO: 2621826 - DNA, 25 bp, Homo sapien
cccagcaaggggtgtcagtaccctc

SEQ ID NO: 2621827 - DNA, 25 bp, Homo sapien
ggtgtcagtaccctcggagcaaggg

SEQ ID NO: 2621828 - DNA, 25 bp, Homo sapien
caagggtaagaaggaggtctttgtg

SEQ ID NO: 2621829 - DNA, 25 bp, Homo sapien
ctgccggaaagtgccagatgggacg

SEQ ID NO: 2621830 - DNA, 25 bp, Homo sapien
cttctcaaaccattcagtcctaaag

SEQ ID NO: 2621831 - DNA, 25 bp, Homo sapien
ttcaccaggagacgaaagagccctg

SEQ ID NO: 2621832 - DNA, 25 bp, Homo sapien
agtgaggtgcgtcaaagccccagca

SEQ ID NO: 2621833 - DNA, 25 bp, Homo sapien
gtgcagagcccaacaagaacagcgt

SEQ ID NO: 2621834 - DNA, 25 bp, Homo sapien
tcaacactgatcagcgtcataactc

SEQ ID NO: 2621835 - DNA, 25 bp, Homo sapien
ggctttgtacctctccatctgggct

SEQ ID NO: 2621836 - DNA, 25 bp, Homo sapien
tctctctccaaccaccaggctttgt

SEQ ID NO: 2621837 - DNA, 25 bp, Homo sapien
taactctgcgcataggctctctctc

SEQ ID NO: 2621838 - DNA, 25 bp, Homo sapien
ccaggttccgtacacagcacatccc

SEQ ID NO: 2621839 - DNA, 25 bp, Homo sapien
gggccaggttccgtacacagcacat

SEQ ID NO: 2621840 - DNA, 25 bp, Homo sapien
cagggccaggttccgtacacagcac

SEQ ID NO: 2621841 - DNA, 25 bp, Homo sapien
ggccaggttccgtacacagcacatc

SEQ ID NO: 2621842 - DNA, 25 bp, Homo sapien
ggagaatacccggggtggtcagctg

SEQ ID NO: 2621843 - DNA, 25 bp, Homo sapien
cggggtggtcagctggaacatctca

SEQ ID NO: 2621844 - DNA, 25 bp, Homo sapien
atgtctggagaatacccggggtggt

SEQ ID NO: 2621845 - DNA, 25 bp, Homo sapien
gtctggagaatacccggggtggtca

SEQ ID NO: 2621846 - DNA, 25 bp, Homo sapien
agggtggtatactgtgttaagatca

SEQ ID NO: 2621847 - DNA, 25 bp, Homo sapien
tcttgtaatggcctcagaaatgatc

SEQ ID NO: 2621848 - DNA, 25 bp, Homo sapien
gtgttaagatcatgcatttagaagc

SEQ ID NO: 2621849 - DNA, 25 bp, Homo sapien
tgtgatcacaccaaattgtatttcc

SEQ ID NO: 2621850 - DNA, 25 bp, Homo sapien
ggcttccgacgagggcctcagcaag

SEQ ID NO: 2621851 - DNA, 25 bp, Homo sapien
catgctgagacagagtgcagggttg

SEQ ID NO: 2621852 - DNA, 25 bp, Homo sapien
cccgccactgacattggggattaca

SEQ ID NO: 2621853 - DNA, 25 bp, Homo sapien
tggcaccagaatctgctcggcttcc

SEQ ID NO: 2621854 - DNA, 25 bp, Homo sapien
tgcgcttaagtaagggtgagtgccc

SEQ ID NO: 2621855 - DNA, 25 bp, Homo sapien
gcttttggacaagagctctcgactt

SEQ ID NO: 2621856 - DNA, 25 bp, Homo sapien
tcaacagcagggcagtgcgcttaag

SEQ ID NO: 2621857 - DNA, 25 bp, Homo sapien
gtgagtgcccgtagcctctccgcag

SEQ ID NO: 2621858 - DNA, 25 bp, Homo sapien
cgatatgattctgccgcgtgtggtg

SEQ ID NO: 2621859 - DNA, 25 bp, Homo sapien
ggaacaccagccaatggcgatatga

SEQ ID NO: 2621860 - DNA, 25 bp, Homo sapien
tactctgcggtatgccctgtgtctg

SEQ ID NO: 2621861 - DNA, 25 bp, Homo sapien
gtttcagtggcaccggtgtgaacgc

SEQ ID NO: 2621862 - DNA, 25 bp, Homo sapien
ttccgcgactccaagaaaggtcctg

SEQ ID NO: 2621863 - DNA, 25 bp, Homo sapien
aagtccgtgaccagaggagcatcgc

SEQ ID NO: 2621864 - DNA, 25 bp, Homo sapien
tccttctctggagcgctcgaggcac

SEQ ID NO: 2621865 - DNA, 25 bp, Homo sapien
ctgagtgctcaaagatccaaccgct

SEQ ID NO: 2621866 - DNA, 25 bp, Homo sapien
ccacgcaggtttgcgctggaatcgc

SEQ ID NO: 2621867 - DNA, 25 bp, Homo sapien
agcaggaaagtgaaacttgttgctc

SEQ ID NO: 2621868 - DNA, 25 bp, Homo sapien
gtgccgaggtcacagtgtcccagct

SEQ ID NO: 2621869 - DNA, 25 bp, Homo sapien
tctgtcagcgcactgagagcaggaa

SEQ ID NO: 2621870 - DNA, 25 bp, Homo sapien
tcagggaacaaggaccaaggtccca

SEQ ID NO: 2621871 - DNA, 25 bp, Homo sapien
ctttctcgttctggccacattccct

SEQ ID NO: 2621872 - DNA, 25 bp, Homo sapien
tccctcggcgcaaggtcagggaaca

SEQ ID NO: 2621873 - DNA, 25 bp, Homo sapien
gacgcggggcgagcacctgaccttc

SEQ ID NO: 2621874 - DNA, 25 bp, Homo sapien
tcaccgggtgtaaacctgtgcgtct

SEQ ID NO: 2621875 - DNA, 25 bp, Homo sapien
ctaatgcgccaaaagatagagagga

SEQ ID NO: 2621876 - DNA, 25 bp, Homo sapien
gagaggaagcgtccttctctgcaat

SEQ ID NO: 2621877 - DNA, 25 bp, Homo sapien
tatacttgtatatattcgccctccg

SEQ ID NO: 2621878 - DNA, 25 bp, Homo sapien
gccagcaacgcccagccgagtagta

SEQ ID NO: 2621879 - DNA, 25 bp, Homo sapien
cgcccagccgagtagtacgcacggg

SEQ ID NO: 2621880 - DNA, 25 bp, Homo sapien
aacgcccagccgagtagtacgcacg

SEQ ID NO: 2621881 - DNA, 25 bp, Homo sapien
gtacgcacggggagaaagtgagcac

SEQ ID NO: 2621882 - DNA, 25 bp, Homo sapien
tgtagatggacgtgtgcaaaccctc

SEQ ID NO: 2621883 - DNA, 25 bp, Homo sapien
tcactggcctggatattgcgcacga

SEQ ID NO: 2621884 - DNA, 25 bp, Homo sapien
gtctgaatcctcgtaagccacctgg

SEQ ID NO: 2621885 - DNA, 25 bp, Homo sapien
gaaaacaagtacgagtcatcctggg

SEQ ID NO: 2621886 - DNA, 25 bp, Homo sapien
agccgcggagagcggttgggttagg

SEQ ID NO: 2621887 - DNA, 25 bp, Homo sapien
tgcagagtggacgagtgtgcaggga

SEQ ID NO: 2621888 - DNA, 25 bp, Homo sapien
ctgcagagtggacgagtgtgcaggg

SEQ ID NO: 2621889 - DNA, 25 bp, Homo sapien
gagccgcggagagcggttgggttag

SEQ ID NO: 2621890 - DNA, 25 bp, Homo sapien
atacctgaacgagtgcccgcgcgca

SEQ ID NO: 2621891 - DNA, 25 bp, Homo sapien
tgggaccctctacgtacaccgcgat

SEQ ID NO: 2621892 - DNA, 25 bp, Homo sapien
gtacaccgcgatgggcggtcgtcaa

SEQ ID NO: 2621893 - DNA, 25 bp, Homo sapien
ggttgtcgcagccacacggcgcata

SEQ ID NO: 2621894 - DNA, 25 bp, Homo sapien
ctgggcacgcaggagctacagacgc

SEQ ID NO: 2621895 - DNA, 25 bp, Homo sapien
gcaggagctacagacgccctctcct

SEQ ID NO: 2621896 - DNA, 25 bp, Homo sapien
ggcacgcaggagctacagacgccct

SEQ ID NO: 2621897 - DNA, 25 bp, Homo sapien
aggagctacagacgccctctcctcc

SEQ ID NO: 2621898 - DNA, 25 bp, Homo sapien
gaagaaaaaacatcgaagtgtttga

SEQ ID NO: 2621899 - DNA, 25 bp, Homo sapien
gcccggcgctggcaaagtggaaact

SEQ ID NO: 2621900 - DNA, 25 bp, Homo sapien
aaaacatcgaagtgtttgacagcac

SEQ ID NO: 2621901 - DNA, 25 bp, Homo sapien
cccggcgctggcaaagtggaaactg

SEQ ID NO: 2621902 - DNA, 25 bp, Homo sapien
agctaagtggcgacgcctcgctgcg

SEQ ID NO: 2621903 - DNA, 25 bp, Homo sapien
aacaacagtcagagaaaccccaaga

SEQ ID NO: 2621904 - DNA, 25 bp, Homo sapien
gagtgagtcaacaagcctttaaaag

SEQ ID NO: 2621905 - DNA, 25 bp, Homo sapien
tccgcggacgcttccgcactaagtg

SEQ ID NO: 2621906 - DNA, 25 bp, Homo sapien
tttggtggaaaccacagaagctcgt

SEQ ID NO: 2621907 - DNA, 25 bp, Homo sapien
agtgagtgtcgccagaattcagaca

SEQ ID NO: 2621908 - DNA, 25 bp, Homo sapien
ggagaagtgagtgtcgccagaattc

SEQ ID NO: 2621909 - DNA, 25 bp, Homo sapien
aaccacagaagctcgtttataaggg

SEQ ID NO: 2621910 - DNA, 25 bp, Homo sapien
gtggaaagaaggttcagcgctcgtt

SEQ ID NO: 2621911 - DNA, 25 bp, Homo sapien
ttcttcaaaaggcactcccgcaaag

SEQ ID NO: 2621912 - DNA, 25 bp, Homo sapien
cccgcaaagcttagctctgggcgca

SEQ ID NO: 2621913 - DNA, 25 bp, Homo sapien
ggttcagcgctcgtttcttcaaaag

SEQ ID NO: 2621914 - DNA, 25 bp, Homo sapien
caacacccaaagacccatggagaaa

SEQ ID NO: 2621915 - DNA, 25 bp, Homo sapien
tcagcctcgagctctttgtccagtt

SEQ ID NO: 2621916 - DNA, 25 bp, Homo sapien
cctcgagctctttgtccagtttggg

SEQ ID NO: 2621917 - DNA, 25 bp, Homo sapien
ttattccaacacccaaagacccatg

SEQ ID NO: 2621918 - DNA, 25 bp, Homo sapien
gctccccgaagccatagccaccatc

SEQ ID NO: 2621919 - DNA, 25 bp, Homo sapien
cgctccccgaagccatagccaccat

SEQ ID NO: 2621920 - DNA, 25 bp, Homo sapien
cccgctccccgaagccatagccacc

SEQ ID NO: 2621921 - DNA, 25 bp, Homo sapien
ccgctccccgaagccatagccacca

SEQ ID NO: 2621922 - DNA, 25 bp, Homo sapien
gccaagttgtggactagcccggcgc

SEQ ID NO: 2621923 - DNA, 25 bp, Homo sapien
acgggattccctcatcgcagtgctc

SEQ ID NO: 2621924 - DNA, 25 bp, Homo sapien
cctaatccctgactagagggaggag

SEQ ID NO: 2621925 - DNA, 25 bp, Homo sapien
ctaccgtaaaatgggccacactggc

SEQ ID NO: 2621926 - DNA, 25 bp, Homo sapien
aggttgcgctgtcccctacgaccag

SEQ ID NO: 2621927 - DNA, 25 bp, Homo sapien
gccttcggcctcaggttgcgctgtc

SEQ ID NO: 2621928 - DNA, 25 bp, Homo sapien
cctggggccttcggcctcaggttgc

SEQ ID NO: 2621929 - DNA, 25 bp, Homo sapien
ctacgaccagcgcccaggtgctcgg

SEQ ID NO: 2621930 - DNA, 25 bp, Homo sapien
ttacggacgagtcagcaaaccgcgg

SEQ ID NO: 2621931 - DNA, 25 bp, Homo sapien
gcttggctggtaggaattcggcaca

SEQ ID NO: 2621932 - DNA, 25 bp, Homo sapien
tttcataatcggcaaagcctgcgcc

SEQ ID NO: 2621933 - DNA, 25 bp, Homo sapien
tacagggtagtgacattacggacga

SEQ ID NO: 2621934 - DNA, 25 bp, Homo sapien
ttttgtatcccaggccacgtgcgcc

SEQ ID NO: 2621935 - DNA, 25 bp, Homo sapien
ccccggggccgcgatctgccctcct

SEQ ID NO: 2621936 - DNA, 25 bp, Homo sapien
ttgtatcccaggccacgtgcgccgg

SEQ ID NO: 2621937 - DNA, 25 bp, Homo sapien
ggttttgtatcccaggccacgtgcg

SEQ ID NO: 2621938 - DNA, 25 bp, Homo sapien
aaagcaaagagacttcggaacgtct

SEQ ID NO: 2621939 - DNA, 25 bp, Homo sapien
cggaacgtctatgaggcttttggaa

SEQ ID NO: 2621940 - DNA, 25 bp, Homo sapien
aaatatacaggtcagttaagcaaac

SEQ ID NO: 2621941 - DNA, 25 bp, Homo sapien
ctgccaggtcactgttggaaatact

SEQ ID NO: 2621942 - DNA, 25 bp, Homo sapien
gaaagcttgcatgtgtggttaacag

SEQ ID NO: 2621943 - DNA, 25 bp, Homo sapien
caaccatattggaaagatgactgga

SEQ ID NO: 2621944 - DNA, 25 bp, Homo sapien
tcttccactgggattccaacagata

SEQ ID NO: 2621945 - DNA, 25 bp, Homo sapien
tggttaacaggcagtagaatgatca

SEQ ID NO: 2621946 - DNA, 25 bp, Homo sapien
tcaccaggttgggtcccctaagatg

SEQ ID NO: 2621947 - DNA, 25 bp, Homo sapien
tatgattagataaggtcaccaggtt

SEQ ID NO: 2621948 - DNA, 25 bp, Homo sapien
gcctttcatagtgttatgacacagc

SEQ ID NO: 2621949 - DNA, 25 bp, Homo sapien
gggcctttggtagatacttatgatt

SEQ ID NO: 2621950 - DNA, 25 bp, Homo sapien
tcaatgttgaagaaggcgtagtctc

SEQ ID NO: 2621951 - DNA, 25 bp, Homo sapien
gaaggcgtagtctccactggtcatg

SEQ ID NO: 2621952 - DNA, 25 bp, Homo sapien
ggatggtgtcactgctcgcacacat

SEQ ID NO: 2621953 - DNA, 25 bp, Homo sapien
atgcctgtgcgccaccagcatgatg

SEQ ID NO: 2621954 - DNA, 25 bp, Homo sapien
tcgccagacatgaaatacagtgcag

SEQ ID NO: 2621955 - DNA, 25 bp, Homo sapien
tgctactccgaagccaaaaagagga

SEQ ID NO: 2621956 - DNA, 25 bp, Homo sapien
gcactgtgcgtgaggaatctcaaga

SEQ ID NO: 2621957 - DNA, 25 bp, Homo sapien
catgtcacagatgacgccaaagaga

SEQ ID NO: 2621958 - DNA, 25 bp, Homo sapien
gcgcccccgcatgttacttttggca

SEQ ID NO: 2621959 - DNA, 25 bp, Homo sapien
gaggcgcccccgcatgttacttttg

SEQ ID NO: 2621960 - DNA, 25 bp, Homo sapien
ccgcatgttacttttggcaaccagg

SEQ ID NO: 2621961 - DNA, 25 bp, Homo sapien
ttcacaactgtgaggcgcccccgca

SEQ ID NO: 2621962 - DNA, 25 bp, Homo sapien
gtaatcctccatattgagcccttgt

SEQ ID NO: 2621963 - DNA, 25 bp, Homo sapien
tcctcagtagagtgactgtctggag

SEQ ID NO: 2621964 - DNA, 25 bp, Homo sapien
catggaaaacttctcaaactcaggt

SEQ ID NO: 2621965 - DNA, 25 bp, Homo sapien
tctggagggacgagtatgcttgctt

SEQ ID NO: 2621966 - DNA, 25 bp, Homo sapien
attctactcagcaccaccacaagtg

SEQ ID NO: 2621967 - DNA, 25 bp, Homo sapien
ttagtcaaatacgtgatggaagtct

SEQ ID NO: 2621968 - DNA, 25 bp, Homo sapien
gtcaaatacgtgatggaagtctaca

SEQ ID NO: 2621969 - DNA, 25 bp, Homo sapien
tgaagggtagagatgatagtgggta

SEQ ID NO: 2621970 - DNA, 25 bp, Homo sapien
aattattccacatagagatatctgg

SEQ ID NO: 2621971 - DNA, 25 bp, Homo sapien
tttaagatagggtataaacacagct

SEQ ID NO: 2621972 - DNA, 25 bp, Homo sapien
tctctttaagatagggtataaacac

SEQ ID NO: 2621973 - DNA, 25 bp, Homo sapien
ctttaagatagggtataaacacagc

SEQ ID NO: 2621974 - DNA, 25 bp, Homo sapien
tagtggaacatgagctgatgaccct

SEQ ID NO: 2621975 - DNA, 25 bp, Homo sapien
gattctgctgtctatacaatgctga

SEQ ID NO: 2621976 - DNA, 25 bp, Homo sapien
gctacaatcatgagcagtccagttg

SEQ ID NO: 2621977 - DNA, 25 bp, Homo sapien
aaaatgaaccgcagacattgctgtc

SEQ ID NO: 2621978 - DNA, 25 bp, Homo sapien
gaaggagcatgtaattctaatttct

SEQ ID NO: 2621979 - DNA, 25 bp, Homo sapien
tctgatcgtccaaaatcagaaggag

SEQ ID NO: 2621980 - DNA, 25 bp, Homo sapien
tcgtccaaaatcagaaggagcatgt

SEQ ID NO: 2621981 - DNA, 25 bp, Homo sapien
caaaatcagaaggagcatgtaattc

SEQ ID NO: 2621982 - DNA, 25 bp, Homo sapien
aattaacttggaccttcctgaggtg

SEQ ID NO: 2621983 - DNA, 25 bp, Homo sapien
gcactgggctggcaaattaacttgg

SEQ ID NO: 2621984 - DNA, 25 bp, Homo sapien
tgggctggcaaattaacttggacct

SEQ ID NO: 2621985 - DNA, 25 bp, Homo sapien
ggcaaattaacttggaccttcctga

SEQ ID NO: 2621986 - DNA, 25 bp, Homo sapien
gaatccctcaatgcctgtgttccaa

SEQ ID NO: 2621987 - DNA, 25 bp, Homo sapien
aaccgtggcagcgagccacgtcgct

SEQ ID NO: 2621988 - DNA, 25 bp, Homo sapien
ttctttctggagacacaaattcata

SEQ ID NO: 2621989 - DNA, 25 bp, Homo sapien
aagtcagcatagaacgctgccggcc

SEQ ID NO: 2621990 - DNA, 25 bp, Homo sapien
gccaatggtcccttttggacaagtc

SEQ ID NO: 2621991 - DNA, 25 bp, Homo sapien
gcctctatctcaagcttatgtgaat

SEQ ID NO: 2621992 - DNA, 25 bp, Homo sapien
tatgtgaattcagcttcccccttga

SEQ ID NO: 2621993 - DNA, 25 bp, Homo sapien
tgccaatggtcccttttggacaagt

SEQ ID NO: 2621994 - DNA, 25 bp, Homo sapien
gaataagatgagcaatccaaagcgt

SEQ ID NO: 2621995 - DNA, 25 bp, Homo sapien
caagtgactcatgccaggaataaga

SEQ ID NO: 2621996 - DNA, 25 bp, Homo sapien
agcgttaacaagttagacttcaggt

SEQ ID NO: 2621997 - DNA, 25 bp, Homo sapien
caatccaaagcgttaacaagttaga

SEQ ID NO: 2621998 - DNA, 25 bp, Homo sapien
ccagctctgagtacttcatgtagag

SEQ ID NO: 2621999 - DNA, 25 bp, Homo sapien
aagtctgctgtataattttccctcc

SEQ ID NO: 2622000 - DNA, 25 bp, Homo sapien
ctgttccaagtctgctgtataattt

SEQ ID NO: 2622001 - DNA, 25 bp, Homo sapien
ccaagacgtagaggaggatggcatc

SEQ ID NO: 2622002 - DNA, 25 bp, Homo sapien
caaatttgtcaaatcacagtcagag

SEQ ID NO: 2622003 - DNA, 25 bp, Homo sapien
aatttgtcaaatcacagtcagagta

SEQ ID NO: 2622004 - DNA, 25 bp, Homo sapien
atgagagttgatcacaggtttcatg

SEQ ID NO: 2622005 - DNA, 25 bp, Homo sapien
tgaaatgagagttgatcacaggttt

SEQ ID NO: 2622006 - DNA, 25 bp, Homo sapien
atctatggacacctgcccggcgata

SEQ ID NO: 2622007 - DNA, 25 bp, Homo sapien
tatcggtctccgttggcatctatgg

SEQ ID NO: 2622008 - DNA, 25 bp, Homo sapien
gaaatccccatatcggtctccgttg

SEQ ID NO: 2622009 - DNA, 25 bp, Homo sapien
tcatggcaatcacagagaaatcccc

SEQ ID NO: 2622010 - DNA, 25 bp, Homo sapien
cacgttcctcggttgtccacactga

SEQ ID NO: 2622011 - DNA, 25 bp, Homo sapien
ggcaaggacagcaagtgcttcagaa

SEQ ID NO: 2622012 - DNA, 25 bp, Homo sapien
tcaagatttgaagtcgctgatggtg

SEQ ID NO: 2622013 - DNA, 25 bp, Homo sapien
tcagaaaagcgtggtacattgggca

SEQ ID NO: 2622014 - DNA, 25 bp, Homo sapien
gctgtttgtatgctctacaattcgg

SEQ ID NO: 2622015 - DNA, 25 bp, Homo sapien
gggagagctgtttgtatgctctaca

SEQ ID NO: 2622016 - DNA, 25 bp, Homo sapien
cggccgcatttcaaaacgaccttct

SEQ ID NO: 2622017 - DNA, 25 bp, Homo sapien
taaagggccccaaggatatttgaca

SEQ ID NO: 2622018 - DNA, 25 bp, Homo sapien
agtaaagcccccacgacaattcctg

SEQ ID NO: 2622019 - DNA, 25 bp, Homo sapien
tgtcactgccgattcttctaggcca

SEQ ID NO: 2622020 - DNA, 25 bp, Homo sapien
aagtagaaggccattagcaagccag

SEQ ID NO: 2622021 - DNA, 25 bp, Homo sapien
tagcaagccagctcctagtaaagcc

SEQ ID NO: 2622022 - DNA, 25 bp, Homo sapien
caaatgagcatgtgggctctccaga

SEQ ID NO: 2622023 - DNA, 25 bp, Homo sapien
gatactgagcacagatcagcctgag

SEQ ID NO: 2622024 - DNA, 25 bp, Homo sapien
gagcatgggctacgcaaagctccct

SEQ ID NO: 2622025 - DNA, 25 bp, Homo sapien
ccttggagcttaaccacagtggcaa

SEQ ID NO: 2622026 - DNA, 25 bp, Homo sapien
tcttcttgctgggttcgcctctcaa

SEQ ID NO: 2622027 - DNA, 25 bp, Homo sapien
gcctctcaatggttattctgtattt

SEQ ID NO: 2622028 - DNA, 25 bp, Homo sapien
taagctactgaaaaatgggatctga

SEQ ID NO: 2622029 - DNA, 25 bp, Homo sapien
tggaatcttcccgtaattcccgatg

SEQ ID NO: 2622030 - DNA, 25 bp, Homo sapien
gaattcttcaagaacgccccttctg

SEQ ID NO: 2622031 - DNA, 25 bp, Homo sapien
tatgaacatttaacagagtgacacg

SEQ ID NO: 2622032 - DNA, 25 bp, Homo sapien
cctggaggcagatggtgattaatca

SEQ ID NO: 2622033 - DNA, 25 bp, Homo sapien
tatccttgtgtgaaatgctcccaaa

SEQ ID NO: 2622034 - DNA, 25 bp, Homo sapien
agaagtcctcaaccacaaacctgtc

SEQ ID NO: 2622035 - DNA, 25 bp, Homo sapien
cagaacctgaatgtagacatcggac

SEQ ID NO: 2622036 - DNA, 25 bp, Homo sapien
taaaatgttagtgcgaaatagggct

SEQ ID NO: 2622037 - DNA, 25 bp, Homo sapien
caatccagagtagcgtttatgagac

SEQ ID NO: 2622038 - DNA, 25 bp, Homo sapien
ggagtgtcaccctaaaataacttgc

SEQ ID NO: 2622039 - DNA, 25 bp, Homo sapien
gtagtaactctcaacaaagttgttc

SEQ ID NO: 2622040 - DNA, 25 bp, Homo sapien
tgaaactcatgatctggccagaact

SEQ ID NO: 2622041 - DNA, 25 bp, Homo sapien
catttctgtgcttgctgtcaagtag

SEQ ID NO: 2622042 - DNA, 25 bp, Homo sapien
ggtgcactctcatgacagcttccca

SEQ ID NO: 2622043 - DNA, 25 bp, Homo sapien
tcaaaatgttattgaggaaagaccc

SEQ ID NO: 2622044 - DNA, 25 bp, Homo sapien
gtataagtgaaagtagtaacctgag

SEQ ID NO: 2622045 - DNA, 25 bp, Homo sapien
gaccccagttatgtaattccaagac

SEQ ID NO: 2622046 - DNA, 25 bp, Homo sapien
gcctccactgttacttgtgtgaact

SEQ ID NO: 2622047 - DNA, 25 bp, Homo sapien
ccagcatctgggacaggcagcttgc

SEQ ID NO: 2622048 - DNA, 25 bp, Homo sapien
acatgggccagcatctgggacaggc

SEQ ID NO: 2622049 - DNA, 25 bp, Homo sapien
gggccagcatctgggacaggcagct

SEQ ID NO: 2622050 - DNA, 25 bp, Homo sapien
agcatctgggacaggcagcttgcgc

SEQ ID NO: 2622051 - DNA, 25 bp, Homo sapien
catagttgtttcagttgatcacact

SEQ ID NO: 2622052 - DNA, 25 bp, Homo sapien
taattcttttatcacgccctctcag

SEQ ID NO: 2622053 - DNA, 25 bp, Homo sapien
tgactcaggtgggagcaacagaagc

SEQ ID NO: 2622054 - DNA, 25 bp, Homo sapien
tgggagcaacagaagcggacttctc

SEQ ID NO: 2622055 - DNA, 25 bp, Homo sapien
agtggtacaacgctttgcttgcctg

SEQ ID NO: 2622056 - DNA, 25 bp, Homo sapien
tggtacaacgctttgcttgcctgga

SEQ ID NO: 2622057 - DNA, 25 bp, Homo sapien
ggtacaacgctttgcttgcctggat

SEQ ID NO: 2622058 - DNA, 25 bp, Homo sapien
ccaagtggtacaacgctttgcttgc

SEQ ID NO: 2622059 - DNA, 25 bp, Homo sapien
cagagtttttgtaacccatatgcag

SEQ ID NO: 2622060 - DNA, 25 bp, Homo sapien
caatgatgaccataagacagacact

SEQ ID NO: 2622061 - DNA, 25 bp, Homo sapien
taaattggtatagcatccagaaacc

SEQ ID NO: 2622062 - DNA, 25 bp, Homo sapien
aaagcatctacgcattttgacctgt

SEQ ID NO: 2622063 - DNA, 25 bp, Homo sapien
tgagggagagatggactctatacaa

SEQ ID NO: 2622064 - DNA, 25 bp, Homo sapien
gggagagatggactctatacaaaaa

SEQ ID NO: 2622065 - DNA, 25 bp, Homo sapien
gatggactctatacaaaaaattctt

SEQ ID NO: 2622066 - DNA, 25 bp, Homo sapien
gagatggactctatacaaaaaattc

SEQ ID NO: 2622067 - DNA, 25 bp, Homo sapien
aatagggagaagtgagggcattcca

SEQ ID NO: 2622068 - DNA, 25 bp, Homo sapien
tagggtctgtagaaccattcctgtg

SEQ ID NO: 2622069 - DNA, 25 bp, Homo sapien
gcaatggccttcatctcattgttga

SEQ ID NO: 2622070 - DNA, 25 bp, Homo sapien
cattgttgactgcatgtcttacaca

SEQ ID NO: 2622071 - DNA, 25 bp, Homo sapien
acttccccgagagcaagtgtggtca

SEQ ID NO: 2622072 - DNA, 25 bp, Homo sapien
cttacaagaaggtagtgacgccact

SEQ ID NO: 2622073 - DNA, 25 bp, Homo sapien
cacaaatttctacctgcatgggcaa

SEQ ID NO: 2622074 - DNA, 25 bp, Homo sapien
catgcacagggaacaaagctcagat

SEQ ID NO: 2622075 - DNA, 25 bp, Homo sapien
ccatggttgtagtaatgaaggaaac

SEQ ID NO: 2622076 - DNA, 25 bp, Homo sapien
gtttgtgctcaccatggttgtagta

SEQ ID NO: 2622077 - DNA, 25 bp, Homo sapien
atgtcacttaacaagttgtccttga

SEQ ID NO: 2622078 - DNA, 25 bp, Homo sapien
ttcaataacagtgatgtcacttaac

SEQ ID NO: 2622079 - DNA, 25 bp, Homo sapien
tataaagttgcctgaggtacacagg

SEQ ID NO: 2622080 - DNA, 25 bp, Homo sapien
caagttgctataagtccccaaggaa

SEQ ID NO: 2622081 - DNA, 25 bp, Homo sapien
cacaggtctgtatagtgtagtgaga

SEQ ID NO: 2622082 - DNA, 25 bp, Homo sapien
tcttacaagcctaatccatgaataa

SEQ ID NO: 2622083 - DNA, 25 bp, Homo sapien
gattgattcttcgaacagtgacctt

SEQ ID NO: 2622084 - DNA, 25 bp, Homo sapien
cagcgtgtctttgggaacagggtta

SEQ ID NO: 2622085 - DNA, 25 bp, Homo sapien
tatttcaccttgagcctatcttggc

SEQ ID NO: 2622086 - DNA, 25 bp, Homo sapien
tgctttgcaatactactactggctc

SEQ ID NO: 2622087 - DNA, 25 bp, Homo sapien
ccaaagagactgccgtggtgcccat

SEQ ID NO: 2622088 - DNA, 25 bp, Homo sapien
cccccaaagagactgccgtggtgcc

SEQ ID NO: 2622089 - DNA, 25 bp, Homo sapien
ccccaaagagactgccgtggtgccc

SEQ ID NO: 2622090 - DNA, 25 bp, Homo sapien
cccaaagagactgccgtggtgccca

SEQ ID NO: 2622091 - DNA, 25 bp, Homo sapien
tcagtagtcttcggcatttctttgg

SEQ ID NO: 2622092 - DNA, 25 bp, Homo sapien
tagtcttcggcatttctttggggga

SEQ ID NO: 2622093 - DNA, 25 bp, Homo sapien
agtagtcttcggcatttctttgggg

SEQ ID NO: 2622094 - DNA, 25 bp, Homo sapien
gtcttcggcatttctttgggggatg

SEQ ID NO: 2622095 - DNA, 25 bp, Homo sapien
ttctctggaccatctaactcctttt

SEQ ID NO: 2622096 - DNA, 25 bp, Homo sapien
tgtcttaatgtgacggtggttaacc

SEQ ID NO: 2622097 - DNA, 25 bp, Homo sapien
agattgtcctgtcttaatgtgacgg

SEQ ID NO: 2622098 - DNA, 25 bp, Homo sapien
tgtgacggtggttaaccttggaaca

SEQ ID NO: 2622099 - DNA, 25 bp, Homo sapien
tgtcctgtcttaatgtgacggtggt

SEQ ID NO: 2622100 - DNA, 25 bp, Homo sapien
gacatcaatttctgtgaatgtaaaa

SEQ ID NO: 2622101 - DNA, 25 bp, Homo sapien
cttctagattccaggacatcaattt

SEQ ID NO: 2622102 - DNA, 25 bp, Homo sapien
ttctagattccaggacatcaatttc

SEQ ID NO: 2622103 - DNA, 25 bp, Homo sapien
tagcaaagagtggaacagaggtctg

SEQ ID NO: 2622104 - DNA, 25 bp, Homo sapien
caaagagtggaacagaggtctggaa

SEQ ID NO: 2622105 - DNA, 25 bp, Homo sapien
agagtggaacagaggtctggaatga

SEQ ID NO: 2622106 - DNA, 25 bp, Homo sapien
ctagcaaagagtggaacagaggtct

SEQ ID NO: 2622107 - DNA, 25 bp, Homo sapien
gggactgggtgtacactttgcatga

SEQ ID NO: 2622108 - DNA, 25 bp, Homo sapien
cactttgcatgaaatggtgctgggt

SEQ ID NO: 2622109 - DNA, 25 bp, Homo sapien
aatggtgctgggttatggcaatatc

SEQ ID NO: 2622110 - DNA, 25 bp, Homo sapien
ggtgctgggttatggcaatatcctg

SEQ ID NO: 2622111 - DNA, 25 bp, Homo sapien
ttccaagcaatagcacaattaaaat

SEQ ID NO: 2622112 - DNA, 25 bp, Homo sapien
taatatttggaagggcagaaagcac

SEQ ID NO: 2622113 - DNA, 25 bp, Homo sapien
caagcaatagcacaattaaaattaa

SEQ ID NO: 2622114 - DNA, 25 bp, Homo sapien
atttggaagggcagaaagcacagtg

SEQ ID NO: 2622115 - DNA, 25 bp, Homo sapien
cagtgccaaacactctccagcttct

SEQ ID NO: 2622116 - DNA, 25 bp, Homo sapien
agtgccaaacactctccagcttctt

SEQ ID NO: 2622117 - DNA, 25 bp, Homo sapien
aacactctccagcttcttcttcgtc

SEQ ID NO: 2622118 - DNA, 25 bp, Homo sapien
ccaaacactctccagcttcttcttc

SEQ ID NO: 2622119 - DNA, 25 bp, Homo sapien
gttcccgtgtgactgtgtctgctgc

SEQ ID NO: 2622120 - DNA, 25 bp, Homo sapien
cacatttagagcagatgttcccgtg

SEQ ID NO: 2622121 - DNA, 25 bp, Homo sapien
tagagcagatgttcccgtgtgactg

SEQ ID NO: 2622122 - DNA, 25 bp, Homo sapien
gggcccacatttagagcagatgttc

SEQ ID NO: 2622123 - DNA, 25 bp, Homo sapien
gttatggtagcgaatatcacttgcc

SEQ ID NO: 2622124 - DNA, 25 bp, Homo sapien
ggtcttggaagaagtcggagccaca

SEQ ID NO: 2622125 - DNA, 25 bp, Homo sapien
tccaggccaggctcgtgaaatcctt

SEQ ID NO: 2622126 - DNA, 25 bp, Homo sapien
tggaaagtgactagagcagaaacaa

SEQ ID NO: 2622127 - DNA, 25 bp, Homo sapien
tcaggactctgtgctaggcgttgga

SEQ ID NO: 2622128 - DNA, 25 bp, Homo sapien
tcaattagcctcatatatcttcaag

SEQ ID NO: 2622129 - DNA, 25 bp, Homo sapien
taggcgttggagatgcagtgatgaa

SEQ ID NO: 2622130 - DNA, 25 bp, Homo sapien
aatagttattgagcctgtaattcag

SEQ ID NO: 2622131 - DNA, 25 bp, Homo sapien
aatattatcacaagctctactgagc

SEQ ID NO: 2622132 - DNA, 25 bp, Homo sapien
agttagtttggcaggtagtcttctc

SEQ ID NO: 2622133 - DNA, 25 bp, Homo sapien
ttcatgggcccctcgttcctcctta

SEQ ID NO: 2622134 - DNA, 25 bp, Homo sapien
cttactttggctagttgtttcttga

SEQ ID NO: 2622135 - DNA, 25 bp, Homo sapien
tgggcacgacgatttcaaccagaaa

SEQ ID NO: 2622136 - DNA, 25 bp, Homo sapien
ggtggagtaggctttgatgtattca

SEQ ID NO: 2622137 - DNA, 25 bp, Homo sapien
aacctggtggaatgttgggcacgac

SEQ ID NO: 2622138 - DNA, 25 bp, Homo sapien
cagatgggtggagtaggctttgatg

SEQ ID NO: 2622139 - DNA, 25 bp, Homo sapien
ttcaccttctgctcaagcagaggag

SEQ ID NO: 2622140 - DNA, 25 bp, Homo sapien
gaggagggcatatggagacaggtct

SEQ ID NO: 2622141 - DNA, 25 bp, Homo sapien
tgagtgcaattggaaaacacagtga

SEQ ID NO: 2622142 - DNA, 25 bp, Homo sapien
ctttcaccttctgctcaagcagagg

SEQ ID NO: 2622143 - DNA, 25 bp, Homo sapien
gaaatgaaccgtcatgaacacgtgg

SEQ ID NO: 2622144 - DNA, 25 bp, Homo sapien
gaagaaccagccagacctttgtgga

SEQ ID NO: 2622145 - DNA, 25 bp, Homo sapien
tgtgccccagttatcatggccagga

SEQ ID NO: 2622146 - DNA, 25 bp, Homo sapien
ggtccaaaggtctcgagaaagctct

SEQ ID NO: 2622147 - DNA, 25 bp, Homo sapien
cagaagaagaggagcggtactgagt

SEQ ID NO: 2622148 - DNA, 25 bp, Homo sapien
ggtactgagtactgagaacctggga

SEQ ID NO: 2622149 - DNA, 25 bp, Homo sapien
tcctgactgtgacccagggaaacct

SEQ ID NO: 2622150 - DNA, 25 bp, Homo sapien
gagaacctgggaatctccttgacct

SEQ ID NO: 2622151 - DNA, 25 bp, Homo sapien
cgctattgttgctgttatgtcttgc

SEQ ID NO: 2622152 - DNA, 25 bp, Homo sapien
tgccaatagaatactttcgggggaa

SEQ ID NO: 2622153 - DNA, 25 bp, Homo sapien
ttagcaattgttgctactgccgcta

SEQ ID NO: 2622154 - DNA, 25 bp, Homo sapien
gctactgccgctattgttgctgtta

SEQ ID NO: 2622155 - DNA, 25 bp, Homo sapien
ctgtaaggaacagagactggccaga

SEQ ID NO: 2622156 - DNA, 25 bp, Homo sapien
acagagactggccagagggaatgag

SEQ ID NO: 2622157 - DNA, 25 bp, Homo sapien
tgtaaggaacagagactggccagag

SEQ ID NO: 2622158 - DNA, 25 bp, Homo sapien
ggaacagagactggccagagggaat

SEQ ID NO: 2622159 - DNA, 25 bp, Homo sapien
gctgtgcatgcaaagcaaagtggag

SEQ ID NO: 2622160 - DNA, 25 bp, Homo sapien
taatatgaagggactggactctcca

SEQ ID NO: 2622161 - DNA, 25 bp, Homo sapien
gtggcaaacacgctgctctgcgttg

SEQ ID NO: 2622162 - DNA, 25 bp, Homo sapien
tgtctttgtctatactcgccggttg

SEQ ID NO: 2622163 - DNA, 25 bp, Homo sapien
ctttcccaggagtaaatgcgttttg

SEQ ID NO: 2622164 - DNA, 25 bp, Homo sapien
cgctccctggtgatgtcataatgct

SEQ ID NO: 2622165 - DNA, 25 bp, Homo sapien
taaacctgctgctgtgcgtgaggta

SEQ ID NO: 2622166 - DNA, 25 bp, Homo sapien
tggttaaccacaatggcaaacttag

SEQ ID NO: 2622167 - DNA, 25 bp, Homo sapien
tagggctacaccctcatgagtggaa

SEQ ID NO: 2622168 - DNA, 25 bp, Homo sapien
catgtgactctcatagcagaaggcc

SEQ ID NO: 2622169 - DNA, 25 bp, Homo sapien
gcagaaggccctcataagattccag

SEQ ID NO: 2622170 - DNA, 25 bp, Homo sapien
gcaatttgtcagtgtaacagaagta

SEQ ID NO: 2622171 - DNA, 25 bp, Homo sapien
tctaaagactttggaatggcaatcc

SEQ ID NO: 2622172 - DNA, 25 bp, Homo sapien
cagttaccagcatgtttcctccggg

SEQ ID NO: 2622173 - DNA, 25 bp, Homo sapien
gaaggaaacgcagctgagagccact

SEQ ID NO: 2622174 - DNA, 25 bp, Homo sapien
gaatgatacacagtcacgcagccct

SEQ ID NO: 2622175 - DNA, 25 bp, Homo sapien
tcatggtctcttgtactcggcattt

SEQ ID NO: 2622176 - DNA, 25 bp, Homo sapien
cagaagactgatattgtgggtggtc

SEQ ID NO: 2622177 - DNA, 25 bp, Homo sapien
ggtggtctgccatactgaattttgg

SEQ ID NO: 2622178 - DNA, 25 bp, Homo sapien
tttcctgagggttgtcagaagactg

SEQ ID NO: 2622179 - DNA, 25 bp, Homo sapien
taaggttgaaacgtagatgctatct

SEQ ID NO: 2622180 - DNA, 25 bp, Homo sapien
gatgctatctatacccagagcagcc

SEQ ID NO: 2622181 - DNA, 25 bp, Homo sapien
gatttgacatcatataggttacaga

SEQ ID NO: 2622182 - DNA, 25 bp, Homo sapien
tgtgttgtctctatcttatggcctg

SEQ ID NO: 2622183 - DNA, 25 bp, Homo sapien
tcagcagccaaatctatagctgttt

SEQ ID NO: 2622184 - DNA, 25 bp, Homo sapien
ccaaatctatagctgtttcaacttg

SEQ ID NO: 2622185 - DNA, 25 bp, Homo sapien
cagcagccaaatctatagctgtttc

SEQ ID NO: 2622186 - DNA, 25 bp, Homo sapien
cagccaaatctatagctgtttcaac

SEQ ID NO: 2622187 - DNA, 25 bp, Homo sapien
ccagtgtgtttttgttcacccccat

SEQ ID NO: 2622188 - DNA, 25 bp, Homo sapien
aactttccactttctcaccagtgtg

SEQ ID NO: 2622189 - DNA, 25 bp, Homo sapien
ttctcaccagtgtgtttttgttcac

SEQ ID NO: 2622190 - DNA, 25 bp, Homo sapien
attgcccaactttccactttctcac

SEQ ID NO: 2622191 - DNA, 25 bp, Homo sapien
cttggaagatgcgatgggcaccttt

SEQ ID NO: 2622192 - DNA, 25 bp, Homo sapien
tattcttggaagatgcgatgggcac

SEQ ID NO: 2622193 - DNA, 25 bp, Homo sapien
catattcttggaagatgcgatgggc

SEQ ID NO: 2622194 - DNA, 25 bp, Homo sapien
ggaagatgcgatgggcacctttttc

SEQ ID NO: 2622195 - DNA, 25 bp, Homo sapien
ggttttgcggcgctggtgccagttg

SEQ ID NO: 2622196 - DNA, 25 bp, Homo sapien
gctggtgccagttgtcccgagagat

SEQ ID NO: 2622197 - DNA, 25 bp, Homo sapien
cagctgggcgctccaactcatactt

SEQ ID NO: 2622198 - DNA, 25 bp, Homo sapien
tcttgcccccggttttgcggcgctg

SEQ ID NO: 2622199 - DNA, 25 bp, Homo sapien
ctcagggcacggtatttcttgttac

SEQ ID NO: 2622200 - DNA, 25 bp, Homo sapien
tctgagccccaggagaaattccccc

SEQ ID NO: 2622201 - DNA, 25 bp, Homo sapien
tgagccccaggagaaattcccccac

SEQ ID NO: 2622202 - DNA, 25 bp, Homo sapien
ctctgagccccaggagaaattcccc

SEQ ID NO: 2622203 - DNA, 25 bp, Homo sapien
ctgagccccaggagaaattccccca

SEQ ID NO: 2622204 - DNA, 25 bp, Homo sapien
cagctcattattagatgcattgtag

SEQ ID NO: 2622205 - DNA, 25 bp, Homo sapien
cttggtacgaaccagctcattatta

SEQ ID NO: 2622206 - DNA, 25 bp, Homo sapien
tcgatgatccttgttttacgagtac

SEQ ID NO: 2622207 - DNA, 25 bp, Homo sapien
catcgatgatccttgttttacgagt

SEQ ID NO: 2622208 - DNA, 25 bp, Homo sapien
ggcagcacgtagtgggacatcttac

SEQ ID NO: 2622209 - DNA, 25 bp, Homo sapien
gggcagcacgtagtgggacatctta

SEQ ID NO: 2622210 - DNA, 25 bp, Homo sapien
aggggcagcacgtagtgggacatct

SEQ ID NO: 2622211 - DNA, 25 bp, Homo sapien
ggggcagcacgtagtgggacatctt

SEQ ID NO: 2622212 - DNA, 25 bp, Homo sapien
taagatagaactccaaccctttgcc

SEQ ID NO: 2622213 - DNA, 25 bp, Homo sapien
ttgaagcgatgcatgcaagaagctt

SEQ ID NO: 2622214 - DNA, 25 bp, Homo sapien
tcttccaggagactgctgattttgg

SEQ ID NO: 2622215 - DNA, 25 bp, Homo sapien
acactgtcccggccttgaagcgatg

SEQ ID NO: 2622216 - DNA, 25 bp, Homo sapien
aacaataaacacctttattacatgg

SEQ ID NO: 2622217 - DNA, 25 bp, Homo sapien
acaataaacacctttattacatggg

SEQ ID NO: 2622218 - DNA, 25 bp, Homo sapien
aaacaataaacacctttattacatg

SEQ ID NO: 2622219 - DNA, 25 bp, Homo sapien
ccagaggtgcctcttgctccagttt

SEQ ID NO: 2622220 - DNA, 25 bp, Homo sapien
cttggtcccagtagtgcactcagtg

SEQ ID NO: 2622221 - DNA, 25 bp, Homo sapien
tagtgcactcagtgcatccagaggt

SEQ ID NO: 2622222 - DNA, 25 bp, Homo sapien
cagaggtgcctcttgctccagtttt

SEQ ID NO: 2622223 - DNA, 25 bp, Homo sapien
gatacaagctttgggagtgcaattt

SEQ ID NO: 2622224 - DNA, 25 bp, Homo sapien
tgataaattgatacaagctttggga

SEQ ID NO: 2622225 - DNA, 25 bp, Homo sapien
caagctttgggagtgcaatttcaca

SEQ ID NO: 2622226 - DNA, 25 bp, Homo sapien
aattgatacaagctttgggagtgca

SEQ ID NO: 2622227 - DNA, 25 bp, Homo sapien
cgggacatgcagaggcttcagccta

SEQ ID NO: 2622228 - DNA, 25 bp, Homo sapien
ggacatgcagaggcttcagcctaac

SEQ ID NO: 2622229 - DNA, 25 bp, Homo sapien
gggacatgcagaggcttcagcctaa

SEQ ID NO: 2622230 - DNA, 25 bp, Homo sapien
tgacttctgtctgggtagaaaggat

SEQ ID NO: 2622231 - DNA, 25 bp, Homo sapien
gtgtgacttctgtctgggtagaaag

SEQ ID NO: 2622232 - DNA, 25 bp, Homo sapien
gacaggctacatagtgtgacttctg

SEQ ID NO: 2622233 - DNA, 25 bp, Homo sapien
aagaggacaggctacatagtgtgac

SEQ ID NO: 2622234 - DNA, 25 bp, Homo sapien
tgtgaacattgctttggccagcctt

SEQ ID NO: 2622235 - DNA, 25 bp, Homo sapien
gatgtctcttggaatctggcccgca

SEQ ID NO: 2622236 - DNA, 25 bp, Homo sapien
cttctgggatctaattatgatgtct

SEQ ID NO: 2622237 - DNA, 25 bp, Homo sapien
cctttcctccatatattccacaggg

SEQ ID NO: 2622238 - DNA, 25 bp, Homo sapien
tggctttagaacaagtcttggtttg

SEQ ID NO: 2622239 - DNA, 25 bp, Homo sapien
taaaattcatggatcacagcacagc

SEQ ID NO: 2622240 - DNA, 25 bp, Homo sapien
tttaaaattcatggatcacagcaca

SEQ ID NO: 2622241 - DNA, 25 bp, Homo sapien
gaaagcatcaatttcgttgttattg

SEQ ID NO: 2622242 - DNA, 25 bp, Homo sapien
gcaagctgttcattgccaaaactct

SEQ ID NO: 2622243 - DNA, 25 bp, Homo sapien
ctgcaagctgttcattgccaaaact

SEQ ID NO: 2622244 - DNA, 25 bp, Homo sapien
gatggggaaaattagtagttcagtc

SEQ ID NO: 2622245 - DNA, 25 bp, Homo sapien
aagctgttcattgccaaaactcttc

SEQ ID NO: 2622246 - DNA, 25 bp, Homo sapien
cctgttgaacagctgtgcttctgat

SEQ ID NO: 2622247 - DNA, 25 bp, Homo sapien
tcctgttgaacagctgtgcttctga

SEQ ID NO: 2622248 - DNA, 25 bp, Homo sapien
cagctgtgcttctgattagttttct

SEQ ID NO: 2622249 - DNA, 25 bp, Homo sapien
gaacagctgtgcttctgattagttt

SEQ ID NO: 2622250 - DNA, 25 bp, Homo sapien
cactttcaagcagtactctattgga

SEQ ID NO: 2622251 - DNA, 25 bp, Homo sapien
tgtcacaagaaacatgaggcattca

SEQ ID NO: 2622252 - DNA, 25 bp, Homo sapien
gtacaccaaatgttcctggcccact

SEQ ID NO: 2622253 - DNA, 25 bp, Homo sapien
catcaatgtcgttacatctttgtgg

SEQ ID NO: 2622254 - DNA, 25 bp, Homo sapien
tagtgtttctagtgaggaatccacc

SEQ ID NO: 2622255 - DNA, 25 bp, Homo sapien
gatggtcgtgggtcattctcccagg

SEQ ID NO: 2622256 - DNA, 25 bp, Homo sapien
ttggagtggccccataccgagtgtt

SEQ ID NO: 2622257 - DNA, 25 bp, Homo sapien
gcccaataacgtgtgggccacaaag

SEQ ID NO: 2622258 - DNA, 25 bp, Homo sapien
ggcttaatcaccgttagccagagaa

SEQ ID NO: 2622259 - DNA, 25 bp, Homo sapien
taatcaccgttagccagagaatgtt

SEQ ID NO: 2622260 - DNA, 25 bp, Homo sapien
atcaccgttagccagagaatgttat

SEQ ID NO: 2622261 - DNA, 25 bp, Homo sapien
ttcctggggcttaatcaccgttagc

SEQ ID NO: 2622262 - DNA, 25 bp, Homo sapien
acataaaagttgtgcattcagcttc

SEQ ID NO: 2622263 - DNA, 25 bp, Homo sapien
taaacataaaagttgtgcattcagc

SEQ ID NO: 2622264 - DNA, 25 bp, Homo sapien
taaaagttgtgcattcagcttcatc

SEQ ID NO: 2622265 - DNA, 25 bp, Homo sapien
aaagttgtgcattcagcttcatcca

SEQ ID NO: 2622266 - DNA, 25 bp, Homo sapien
tcaggggctagtgacattgaatccg

SEQ ID NO: 2622267 - DNA, 25 bp, Homo sapien
gctagtgacattgaatccgttttct

SEQ ID NO: 2622268 - DNA, 25 bp, Homo sapien
gttggggaacagcaatacaagtgtg

SEQ ID NO: 2622269 - DNA, 25 bp, Homo sapien
catttctgacaatgcctttgttggg

SEQ ID NO: 2622270 - DNA, 25 bp, Homo sapien
gttctatctgtattatttcccatga

SEQ ID NO: 2622271 - DNA, 25 bp, Homo sapien
atctgtattatttcccatgaagcca

SEQ ID NO: 2622272 - DNA, 25 bp, Homo sapien
tatctgtattatttcccatgaagcc

SEQ ID NO: 2622273 - DNA, 25 bp, Homo sapien
tctatctgtattatttcccatgaag

SEQ ID NO: 2622274 - DNA, 25 bp, Homo sapien
catgtcgagcaaacttgtgtgtgga

SEQ ID NO: 2622275 - DNA, 25 bp, Homo sapien
atgtcgagcaaacttgtgtgtggat

SEQ ID NO: 2622276 - DNA, 25 bp, Homo sapien
tgtcgagcaaacttgtgtgtggatt

SEQ ID NO: 2622277 - DNA, 25 bp, Homo sapien
tgtgtgtggatttactggtttcttc

SEQ ID NO: 2622278 - DNA, 25 bp, Homo sapien
catgtattgtcaacactgtttggaa

SEQ ID NO: 2622279 - DNA, 25 bp, Homo sapien
gggaggtaagaaggcatctctaaca

SEQ ID NO: 2622280 - DNA, 25 bp, Homo sapien
tagttatcatacttggcatcaggga

SEQ ID NO: 2622281 - DNA, 25 bp, Homo sapien
acaattgaattctggacccaggatt

SEQ ID NO: 2622282 - DNA, 25 bp, Homo sapien
gaagtacttgagtgaacacagcaca

SEQ ID NO: 2622283 - DNA, 25 bp, Homo sapien
tttctccactttggaagtacttgag

SEQ ID NO: 2622284 - DNA, 25 bp, Homo sapien
gtggaaagaagcccttatatttctg

SEQ ID NO: 2622285 - DNA, 25 bp, Homo sapien
ttcttgcttcgaatatccagtggaa

SEQ ID NO: 2622286 - DNA, 25 bp, Homo sapien
tcatggttcttccctttctttcacc

SEQ ID NO: 2622287 - DNA, 25 bp, Homo sapien
catggttcttccctttctttcacct

SEQ ID NO: 2622288 - DNA, 25 bp, Homo sapien
tgttatcctttgtggctttatcctg

SEQ ID NO: 2622289 - DNA, 25 bp, Homo sapien
ttactgctattgtagtgaacatgct

SEQ ID NO: 2622290 - DNA, 25 bp, Homo sapien
atcatctccctacgggcatcttttg

SEQ ID NO: 2622291 - DNA, 25 bp, Homo sapien
gtgaacatgctgcttgctaggctct

SEQ ID NO: 2622292 - DNA, 25 bp, Homo sapien
ccttgccattgtgtaaagggcatta

SEQ ID NO: 2622293 - DNA, 25 bp, Homo sapien
gaaggacagattaaagaccacattg

SEQ ID NO: 2622294 - DNA, 25 bp, Homo sapien
gtgccgaatggctcatgtgtttaca

SEQ ID NO: 2622295 - DNA, 25 bp, Homo sapien
tttccttgccattgtgtaaagggca

SEQ ID NO: 2622296 - DNA, 25 bp, Homo sapien
gattcgtgaccgcaagttggcttgg

SEQ ID NO: 2622297 - DNA, 25 bp, Homo sapien
ggttcgactcatgcaaagcagtctg

SEQ ID NO: 2622298 - DNA, 25 bp, Homo sapien
tcagctgcacaaggatatgattgga

SEQ ID NO: 2622299 - DNA, 25 bp, Homo sapien
gaagattcgtcaaagatgttcagct

SEQ ID NO: 2622300 - DNA, 25 bp, Homo sapien
aggccagatcccagggttttagagt

SEQ ID NO: 2622301 - DNA, 25 bp, Homo sapien
tctgctgtgaaaaaacccagctatt

SEQ ID NO: 2622302 - DNA, 25 bp, Homo sapien
ggttttagagtgaaaactctctctg

SEQ ID NO: 2622303 - DNA, 25 bp, Homo sapien
tctctctgctgtgaaaaaacccagc

SEQ ID NO: 2622304 - DNA, 25 bp, Homo sapien
ccctttctcgtggagattctcccca

SEQ ID NO: 2622305 - DNA, 25 bp, Homo sapien
tttctcgtggagattctccccacac

SEQ ID NO: 2622306 - DNA, 25 bp, Homo sapien
ctttctcgtggagattctccccaca

SEQ ID NO: 2622307 - DNA, 25 bp, Homo sapien
tcccctttctcgtggagattctccc

SEQ ID NO: 2622308 - DNA, 25 bp, Homo sapien
gcaactccggtcactccacatttga

SEQ ID NO: 2622309 - DNA, 25 bp, Homo sapien
tgttgataattataactcctctcta

SEQ ID NO: 2622310 - DNA, 25 bp, Homo sapien
cagtacttaaggcaactccggtcac

SEQ ID NO: 2622311 - DNA, 25 bp, Homo sapien
agcaattgctctggtgattacaccg

SEQ ID NO: 2622312 - DNA, 25 bp, Homo sapien
gcaggttttgagtgtcttggtgaat

SEQ ID NO: 2622313 - DNA, 25 bp, Homo sapien
ttgagtgtcttggtgaatgctattg

SEQ ID NO: 2622314 - DNA, 25 bp, Homo sapien
acagttcagggtctcgtggatcagg

SEQ ID NO: 2622315 - DNA, 25 bp, Homo sapien
acccctgggtctgcacagttcaggg

SEQ ID NO: 2622316 - DNA, 25 bp, Homo sapien
ctgaagacttggggatgcctttcac

SEQ ID NO: 2622317 - DNA, 25 bp, Homo sapien
gaagacttggggatgcctttcacct

SEQ ID NO: 2622318 - DNA, 25 bp, Homo sapien
tgaagacttggggatgcctttcacc

SEQ ID NO: 2622319 - DNA, 25 bp, Homo sapien
cctaggactttgaagtgtggtttca

SEQ ID NO: 2622320 - DNA, 25 bp, Homo sapien
tatcccttgatacagaaggaaaatt

SEQ ID NO: 2622321 - DNA, 25 bp, Homo sapien
ggaaaatttaacttatgcaagacaa

SEQ ID NO: 2622322 - DNA, 25 bp, Homo sapien
atctgaaccataaagtcgatgtgtt

SEQ ID NO: 2622323 - DNA, 25 bp, Homo sapien
ttttctgatgtttgactatacttgt

SEQ ID NO: 2622324 - DNA, 25 bp, Homo sapien
cttggtaatacggataatttgcttt

SEQ ID NO: 2622325 - DNA, 25 bp, Homo sapien
ttctgatgtttgactatacttgttc

SEQ ID NO: 2622326 - DNA, 25 bp, Homo sapien
aatttagcttggtaatacggataat

SEQ ID NO: 2622327 - DNA, 25 bp, Homo sapien
gtgccacattcatgctttcccctag

SEQ ID NO: 2622328 - DNA, 25 bp, Homo sapien
ggtgccacattcatgctttccccta

SEQ ID NO: 2622329 - DNA, 25 bp, Homo sapien
cacattcatgctttcccctagccat

SEQ ID NO: 2622330 - DNA, 25 bp, Homo sapien
gccacattcatgctttcccctagcc

SEQ ID NO: 2622331 - DNA, 25 bp, Homo sapien
gattacaagaggacaaatgggtttc

SEQ ID NO: 2622332 - DNA, 25 bp, Homo sapien
caatagctctgccttgagaagtgaa

SEQ ID NO: 2622333 - DNA, 25 bp, Homo sapien
tggcctaagagtacaccctatgtgg

SEQ ID NO: 2622334 - DNA, 25 bp, Homo sapien
tttgaagaaactaatccctgaggga

SEQ ID NO: 2622335 - DNA, 25 bp, Homo sapien
tgctttgttgcccagctagtctcaa

SEQ ID NO: 2622336 - DNA, 25 bp, Homo sapien
actcctggcctcaaatgatcctctc

SEQ ID NO: 2622337 - DNA, 25 bp, Homo sapien
atcctctcaccttggcctctcatgc

SEQ ID NO: 2622338 - DNA, 25 bp, Homo sapien
ctctcaccttggcctctcatgctgg

SEQ ID NO: 2622339 - DNA, 25 bp, Homo sapien
ggtgaatcgaccttcctcatggcag

SEQ ID NO: 2622340 - DNA, 25 bp, Homo sapien
gaagttttcggcgacctggatacca

SEQ ID NO: 2622341 - DNA, 25 bp, Homo sapien
gaacgttcttcactacgagccgctg

SEQ ID NO: 2622342 - DNA, 25 bp, Homo sapien
cccggacaccgtagataataagtag

SEQ ID NO: 2622343 - DNA, 25 bp, Homo sapien
aaatcttttcgggtgacagagccct

SEQ ID NO: 2622344 - DNA, 25 bp, Homo sapien
ccgggacttggcctcggctggacca

SEQ ID NO: 2622345 - DNA, 25 bp, Homo sapien
ctgatgcaatcgaaaggcgccctaa

SEQ ID NO: 2622346 - DNA, 25 bp, Homo sapien
gcggaacgagcagccaatggataac

SEQ ID NO: 2622347 - DNA, 25 bp, Homo sapien
gaacgacgaagcgatgagagaaccc

SEQ ID NO: 2622348 - DNA, 25 bp, Homo sapien
gacgaagcgatgagagaacccgaaa

SEQ ID NO: 2622349 - DNA, 25 bp, Homo sapien
gcgaacgacgaagcgatgagagaac

SEQ ID NO: 2622350 - DNA, 25 bp, Homo sapien
gcgatgagagaacccgaaagcgacg

SEQ ID NO: 2622351 - DNA, 25 bp, Homo sapien
ttccctgaaggactgctggccttct

SEQ ID NO: 2622352 - DNA, 25 bp, Homo sapien
tccctgaaggactgctggccttctc

SEQ ID NO: 2622353 - DNA, 25 bp, Homo sapien
cttccctgaaggactgctggccttc

SEQ ID NO: 2622354 - DNA, 25 bp, Homo sapien
tctgggtcccaccaagtttgctcac

SEQ ID NO: 2622355 - DNA, 25 bp, Homo sapien
gcgagcgtagcgtctgcacccacta

SEQ ID NO: 2622356 - DNA, 25 bp, Homo sapien
agcgtagcgtctgcacccactagag

SEQ ID NO: 2622357 - DNA, 25 bp, Homo sapien
gctcccgccgcgagcgtagcgtctg

SEQ ID NO: 2622358 - DNA, 25 bp, Homo sapien
ccataaacgcaagtttggaagcctc

SEQ ID NO: 2622359 - DNA, 25 bp, Homo sapien
tcagatctcgggcactcggttttcc

SEQ ID NO: 2622360 - DNA, 25 bp, Homo sapien
cagtgccgggcaaaatgtatactta

SEQ ID NO: 2622361 - DNA, 25 bp, Homo sapien
ccccgcaggatcttaggagattgat

SEQ ID NO: 2622362 - DNA, 25 bp, Homo sapien
cttttgcttctcttcaccagcacca

SEQ ID NO: 2622363 - DNA, 25 bp, Homo sapien
tcagctcgacctccatctccagatc

SEQ ID NO: 2622364 - DNA, 25 bp, Homo sapien
agctcgacctccatctccagatcct

SEQ ID NO: 2622365 - DNA, 25 bp, Homo sapien
tttgcttctcttcaccagcaccaat

SEQ ID NO: 2622366 - DNA, 25 bp, Homo sapien
ttaactgcagtttatcatcatagcc

SEQ ID NO: 2622367 - DNA, 25 bp, Homo sapien
cgtgtcaaaatctcttcaacattca

SEQ ID NO: 2622368 - DNA, 25 bp, Homo sapien
tcagcagataccctctgtgtcagtc

SEQ ID NO: 2622369 - DNA, 25 bp, Homo sapien
tctctgtgattgcagagatgaataa

SEQ ID NO: 2622370 - DNA, 25 bp, Homo sapien
aatcaggaaataaatgatcagtaaa

SEQ ID NO: 2622371 - DNA, 25 bp, Homo sapien
atcaggaaataaatgatcagtaaat

SEQ ID NO: 2622372 - DNA, 25 bp, Homo sapien
gaaataaatgatcagtaaatattgc

SEQ ID NO: 2622373 - DNA, 25 bp, Homo sapien
agttttccaagattccgcatcaacc

SEQ ID NO: 2622374 - DNA, 25 bp, Homo sapien
tgtttaccatcaggcaaagtgactt

SEQ ID NO: 2622375 - DNA, 25 bp, Homo sapien
gcttttagtatattatacatctcaa

SEQ ID NO: 2622376 - DNA, 25 bp, Homo sapien
ctcaagacgtgtgtaaatatattca

SEQ ID NO: 2622377 - DNA, 25 bp, Homo sapien
tactttagcaataacggtgttgtcg

SEQ ID NO: 2622378 - DNA, 25 bp, Homo sapien
aatcttcttccagagggcggtccag

SEQ ID NO: 2622379 - DNA, 25 bp, Homo sapien
ttgagaagctccaaggtacaatctt

SEQ ID NO: 2622380 - DNA, 25 bp, Homo sapien
gcaataacggtgttgtcggccaggc

SEQ ID NO: 2622381 - DNA, 25 bp, Homo sapien
tatgtgagcactagagtgccaatac

SEQ ID NO: 2622382 - DNA, 25 bp, Homo sapien
tggcttcacccattatgtgagcact

SEQ ID NO: 2622383 - DNA, 25 bp, Homo sapien
tggcggaccgtagcataaacatcca

SEQ ID NO: 2622384 - DNA, 25 bp, Homo sapien
gaatccattttctattggcggaccg

SEQ ID NO: 2622385 - DNA, 25 bp, Homo sapien
agagaaatcattgctagacacaccc

SEQ ID NO: 2622386 - DNA, 25 bp, Homo sapien
gagaagagaaatcattgctagacac

SEQ ID NO: 2622387 - DNA, 25 bp, Homo sapien
aagagaaatcattgctagacacacc

SEQ ID NO: 2622388 - DNA, 25 bp, Homo sapien
gaagagaaatcattgctagacacac

SEQ ID NO: 2622389 - DNA, 25 bp, Homo sapien
ttcaatatccggcatttgaacttgt

SEQ ID NO: 2622390 - DNA, 25 bp, Homo sapien
ctatagactgtggtagttggagtat

SEQ ID NO: 2622391 - DNA, 25 bp, Homo sapien
caatatccggcatttgaacttgttg

SEQ ID NO: 2622392 - DNA, 25 bp, Homo sapien
gttggagtattcaccttttcattca

SEQ ID NO: 2622393 - DNA, 25 bp, Homo sapien
gcccgtgtgtctaacatgaggaccc

SEQ ID NO: 2622394 - DNA, 25 bp, Homo sapien
aagccttaattttgcccgtgtgtct

SEQ ID NO: 2622395 - DNA, 25 bp, Homo sapien
tgtgtctaacatgaggaccccggca

SEQ ID NO: 2622396 - DNA, 25 bp, Homo sapien
ggaccccggcagagatctatcaaag

SEQ ID NO: 2622397 - DNA, 25 bp, Homo sapien
tgccttcccagtacgtggaggaatt

SEQ ID NO: 2622398 - DNA, 25 bp, Homo sapien
ttgccttcccagtacgtggaggaat

SEQ ID NO: 2622399 - DNA, 25 bp, Homo sapien
cctatgatctcggtttttagcttcc

SEQ ID NO: 2622400 - DNA, 25 bp, Homo sapien
ttttcctatgatctcggtttttagc

SEQ ID NO: 2622401 - DNA, 25 bp, Homo sapien
ttcatgaaagaaatatagttcttgg

SEQ ID NO: 2622402 - DNA, 25 bp, Homo sapien
tcatgaaagaaatatagttcttggt

SEQ ID NO: 2622403 - DNA, 25 bp, Homo sapien
catgaaagaaatatagttcttggtc

SEQ ID NO: 2622404 - DNA, 25 bp, Homo sapien
atgtttggggtgactacctcctgga

SEQ ID NO: 2622405 - DNA, 25 bp, Homo sapien
aagatgtttggggtgactacctcct

SEQ ID NO: 2622406 - DNA, 25 bp, Homo sapien
tgtagtgctgccagtggcccgaggt

SEQ ID NO: 2622407 - DNA, 25 bp, Homo sapien
ccagagtcggctgttgaagatgttt

SEQ ID NO: 2622408 - DNA, 25 bp, Homo sapien
gagggaagaacccaggatgaattgt

SEQ ID NO: 2622409 - DNA, 25 bp, Homo sapien
gcatgtgaaaatcttcagtagaaat

SEQ ID NO: 2622410 - DNA, 25 bp, Homo sapien
acccaggatgaattgtagcatgtga

SEQ ID NO: 2622411 - DNA, 25 bp, Homo sapien
tgtagcatgtgaaaatcttcagtag

SEQ ID NO: 2622412 - DNA, 25 bp, Homo sapien
gaaaggttgtcaaaaagccactgat

SEQ ID NO: 2622413 - DNA, 25 bp, Homo sapien
tataactcaatgaaccacagtgaag

SEQ ID NO: 2622414 - DNA, 25 bp, Homo sapien
ggttggtcccctagcctataataca

SEQ ID NO: 2622415 - DNA, 25 bp, Homo sapien
tacatacagcagtaaaagcacttgc

SEQ ID NO: 2622416 - DNA, 25 bp, Homo sapien
cagacagctcgttcctatgaagtac

SEQ ID NO: 2622417 - DNA, 25 bp, Homo sapien
tggaatcttcgtacccgggtgagtc

SEQ ID NO: 2622418 - DNA, 25 bp, Homo sapien
ggtgagtcctgtgagtgctccagac

SEQ ID NO: 2622419 - DNA, 25 bp, Homo sapien
gaagtaccccaaaatcagctagccg

SEQ ID NO: 2622420 - DNA, 25 bp, Homo sapien
gatcccatacttcgatatctccaag

SEQ ID NO: 2622421 - DNA, 25 bp, Homo sapien
gaaaatccaaatacgctatataccg

SEQ ID NO: 2622422 - DNA, 25 bp, Homo sapien
catacttcgatatctccaaggaatt

SEQ ID NO: 2622423 - DNA, 25 bp, Homo sapien
tatataccgtacgtagaaaatccaa

SEQ ID NO: 2622424 - DNA, 25 bp, Homo sapien
tccagagtttaactcccacttttca

SEQ ID NO: 2622425 - DNA, 25 bp, Homo sapien
tttgggccatagaaagctccatctc

SEQ ID NO: 2622426 - DNA, 25 bp, Homo sapien
ctttgggccatagaaagctccatct

SEQ ID NO: 2622427 - DNA, 25 bp, Homo sapien
agctccatctccagagtttaactcc

SEQ ID NO: 2622428 - DNA, 25 bp, Homo sapien
cgcccaatcgcatctttaatctgta

SEQ ID NO: 2622429 - DNA, 25 bp, Homo sapien
tggaaatccagctggatggttgcac

SEQ ID NO: 2622430 - DNA, 25 bp, Homo sapien
atggttgcacactggtggtaccgcc

SEQ ID NO: 2622431 - DNA, 25 bp, Homo sapien
cataagtaagattaaatctgatggg

SEQ ID NO: 2622432 - DNA, 25 bp, Homo sapien
gatggctcgatgaacaatcactggc

SEQ ID NO: 2622433 - DNA, 25 bp, Homo sapien
tcgatgaacaatcactggccttttc

SEQ ID NO: 2622434 - DNA, 25 bp, Homo sapien
atcccaagatggctcgatgaacaat

SEQ ID NO: 2622435 - DNA, 25 bp, Homo sapien
caagatggctcgatgaacaatcact

SEQ ID NO: 2622436 - DNA, 25 bp, Homo sapien
tggaactaccattacctggcgaggg

SEQ ID NO: 2622437 - DNA, 25 bp, Homo sapien
ctggaactaccattacctggcgagg

SEQ ID NO: 2622438 - DNA, 25 bp, Homo sapien
cttttgggcatattcatcacaggtt

SEQ ID NO: 2622439 - DNA, 25 bp, Homo sapien
ggcatattcatcacaggttggtccc

SEQ ID NO: 2622440 - DNA, 25 bp, Homo sapien
taagacaaagtgcactcaaccatgg

SEQ ID NO: 2622441 - DNA, 25 bp, Homo sapien
gttattaggtatcaggagtactgcc

SEQ ID NO: 2622442 - DNA, 25 bp, Homo sapien
tgagtgcagtaacaggaatagtctg

SEQ ID NO: 2622443 - DNA, 25 bp, Homo sapien
tgctgtctccagttgagaactcagt

SEQ ID NO: 2622444 - DNA, 25 bp, Homo sapien
tatcctctttttgtagacgcagaag

SEQ ID NO: 2622445 - DNA, 25 bp, Homo sapien
gctttcacgcaaagccatgtgagca

SEQ ID NO: 2622446 - DNA, 25 bp, Homo sapien
gagacagtaccattgggctttcacg

SEQ ID NO: 2622447 - DNA, 25 bp, Homo sapien
catgtgagcagtgacggcctatcct

SEQ ID NO: 2622448 - DNA, 25 bp, Homo sapien
tttctgttcagcctgctatgagagt

SEQ ID NO: 2622449 - DNA, 25 bp, Homo sapien
tgttcagcctgctatgagagttggg

SEQ ID NO: 2622450 - DNA, 25 bp, Homo sapien
cagcctgctatgagagttgggcatt

SEQ ID NO: 2622451 - DNA, 25 bp, Homo sapien
ttcaaatcaccccacacgtggcaga

SEQ ID NO: 2622452 - DNA, 25 bp, Homo sapien
tgatctcacatgattttactgaaca

SEQ ID NO: 2622453 - DNA, 25 bp, Homo sapien
gaatttgtcagatctaaaatcagaa

SEQ ID NO: 2622454 - DNA, 25 bp, Homo sapien
gaattatattttgatctcacatgat

SEQ ID NO: 2622455 - DNA, 25 bp, Homo sapien
attttgatctcacatgattttactg

SEQ ID NO: 2622456 - DNA, 25 bp, Homo sapien
tggcatcgtggaattgttgtcgtac

SEQ ID NO: 2622457 - DNA, 25 bp, Homo sapien
ccatgaatttggcatcgtggaattg

SEQ ID NO: 2622458 - DNA, 25 bp, Homo sapien
tggatccagatcaatgtctgccatg

SEQ ID NO: 2622459 - DNA, 25 bp, Homo sapien
tatactgtgctaactgtgcatttcg

SEQ ID NO: 2622460 - DNA, 25 bp, Homo sapien
caaagctttgtcagacttaatctaa

SEQ ID NO: 2622461 - DNA, 25 bp, Homo sapien
gctttgtcagacttaatctaaagat

SEQ ID NO: 2622462 - DNA, 25 bp, Homo sapien
tcagacttaatctaaagatatggaa

SEQ ID NO: 2622463 - DNA, 25 bp, Homo sapien
cacacaaagctttgtcagacttaat

SEQ ID NO: 2622464 - DNA, 25 bp, Homo sapien
tgtagccgctcgatagtttcagaaa

SEQ ID NO: 2622465 - DNA, 25 bp, Homo sapien
ttcagaaatggtgcgttccccgtgg

SEQ ID NO: 2622466 - DNA, 25 bp, Homo sapien
tgcggatattaacagtgccactgat

SEQ ID NO: 2622467 - DNA, 25 bp, Homo sapien
gctgcggaactctttgagctgctgt

SEQ ID NO: 2622468 - DNA, 25 bp, Homo sapien
caaagtcaattttacggaaacgctg

SEQ ID NO: 2622469 - DNA, 25 bp, Homo sapien
ggttgacctattcagactttgccaa

SEQ ID NO: 2622470 - DNA, 25 bp, Homo sapien
cttttccatggagccaatctgggta

SEQ ID NO: 2622471 - DNA, 25 bp, Homo sapien
ggtcaaaaatagttacgcctgcagg

SEQ ID NO: 2622472 - DNA, 25 bp, Homo sapien
tacactaaagcattcctcatgtttc

SEQ ID NO: 2622473 - DNA, 25 bp, Homo sapien
cataatccaattctagttatcttaa

SEQ ID NO: 2622474 - DNA, 25 bp, Homo sapien
ttctcccacattacactaaagcatt

SEQ ID NO: 2622475 - DNA, 25 bp, Homo sapien
ttttacaccataatccaattctagt

SEQ ID NO: 2622476 - DNA, 25 bp, Homo sapien
ccaagtgattctatggtccagaaca

SEQ ID NO: 2622477 - DNA, 25 bp, Homo sapien
gaaaaggtgtccatccaacattaag

SEQ ID NO: 2622478 - DNA, 25 bp, Homo sapien
gcattatgatgctgcagacctaccc

SEQ ID NO: 2622479 - DNA, 25 bp, Homo sapien
catgtgagggacagagcagtcttga

SEQ ID NO: 2622480 - DNA, 25 bp, Homo sapien
cacccagaaacaataaaggcatcct

SEQ ID NO: 2622481 - DNA, 25 bp, Homo sapien
acccgctttgttctagctgcactgg

SEQ ID NO: 2622482 - DNA, 25 bp, Homo sapien
gaagactcagcaagccaacttaatc

SEQ ID NO: 2622483 - DNA, 25 bp, Homo sapien
gtggttcagtccgagtccaagcctc

SEQ ID NO: 2622484 - DNA, 25 bp, Homo sapien
tgtttctcaacatcaactgggagct

SEQ ID NO: 2622485 - DNA, 25 bp, Homo sapien
gcattttaacgccatctcctggtga

SEQ ID NO: 2622486 - DNA, 25 bp, Homo sapien
tcagagtgggaatgacggccttcta

SEQ ID NO: 2622487 - DNA, 25 bp, Homo sapien
gataaggtgcaggtgtctatcgctg

SEQ ID NO: 2622488 - DNA, 25 bp, Homo sapien
ttttgcgtagagacgaggaatcacc

SEQ ID NO: 2622489 - DNA, 25 bp, Homo sapien
tattttgcgtagagacgaggaatca

SEQ ID NO: 2622490 - DNA, 25 bp, Homo sapien
ttgcgtagagacgaggaatcaccac

SEQ ID NO: 2622491 - DNA, 25 bp, Homo sapien
tttgcgtagagacgaggaatcacca

SEQ ID NO: 2622492 - DNA, 25 bp, Homo sapien
taaggactgtgcttgcaatggctgg

SEQ ID NO: 2622493 - DNA, 25 bp, Homo sapien
ttttcctggcggaagcacgtctctg

SEQ ID NO: 2622494 - DNA, 25 bp, Homo sapien
gattccccagggagcataacacctt

SEQ ID NO: 2622495 - DNA, 25 bp, Homo sapien
gagacaggcgggcagtgattcttcc

SEQ ID NO: 2622496 - DNA, 25 bp, Homo sapien
gaagcactgacttattacagagctc

SEQ ID NO: 2622497 - DNA, 25 bp, Homo sapien
ggcacactgcgtcggacctagaagt

SEQ ID NO: 2622498 - DNA, 25 bp, Homo sapien
ggagttcaggaacttacccatgtcc

SEQ ID NO: 2622499 - DNA, 25 bp, Homo sapien
tgtcactgtaaaagctcataggaag

SEQ ID NO: 2622500 - DNA, 25 bp, Homo sapien
gggtcaatgctctcaagttacgatc

SEQ ID NO: 2622501 - DNA, 25 bp, Homo sapien
taaaacgctggaagttaccatccag

SEQ ID NO: 2622502 - DNA, 25 bp, Homo sapien
ttgacattccatcctaaacagtgtg

SEQ ID NO: 2622503 - DNA, 25 bp, Homo sapien
taaggctggcttatgaactatacca

SEQ ID NO: 2622504 - DNA, 25 bp, Homo sapien
cagcaggcaccagaggaatctggga

SEQ ID NO: 2622505 - DNA, 25 bp, Homo sapien
atctgggaacagattttactatctt

SEQ ID NO: 2622506 - DNA, 25 bp, Homo sapien
gaacagattttactatcttcccaca

SEQ ID NO: 2622507 - DNA, 25 bp, Homo sapien
agaggaatctgggaacagattttac

SEQ ID NO: 2622508 - DNA, 25 bp, Homo sapien
gcggcgcctgctccgggcctgtcct

SEQ ID NO: 2622509 - DNA, 25 bp, Homo sapien
ctgctccgggcctgtcctgcctcat

SEQ ID NO: 2622510 - DNA, 25 bp, Homo sapien
ggcggcgcctgctccgggcctgtcc

SEQ ID NO: 2622511 - DNA, 25 bp, Homo sapien
gcgcctgctccgggcctgtcctgcc

SEQ ID NO: 2622512 - DNA, 25 bp, Homo sapien
cccagcaaactaccgcccggctcag

SEQ ID NO: 2622513 - DNA, 25 bp, Homo sapien
cagcaaactaccgcccggctcaggg

SEQ ID NO: 2622514 - DNA, 25 bp, Homo sapien
gccccagcaaactaccgcccggctc

SEQ ID NO: 2622515 - DNA, 25 bp, Homo sapien
ccccagcaaactaccgcccggctca

SEQ ID NO: 2622516 - DNA, 25 bp, Homo sapien
ccacgagggccggcacaggtggtgg

SEQ ID NO: 2622517 - DNA, 25 bp, Homo sapien
tcccacgagggccggcacaggtggt

SEQ ID NO: 2622518 - DNA, 25 bp, Homo sapien
cacgagggccggcacaggtggtggc

SEQ ID NO: 2622519 - DNA, 25 bp, Homo sapien
cagtcccacgagggccggcacaggt

SEQ ID NO: 2622520 - DNA, 25 bp, Homo sapien
aaacctcgacccacactggtcctgg

SEQ ID NO: 2622521 - DNA, 25 bp, Homo sapien
tgcagcactggcggttgcagctccg

SEQ ID NO: 2622522 - DNA, 25 bp, Homo sapien
ggtccgctccaaacctcgacccaca

SEQ ID NO: 2622523 - DNA, 25 bp, Homo sapien
tgcagctccgggggtccgctccaaa

SEQ ID NO: 2622524 - DNA, 25 bp, Homo sapien
aacgctttgttctctgtgaacttga

SEQ ID NO: 2622525 - DNA, 25 bp, Homo sapien
gctttgttctctgtgaacttgacac

SEQ ID NO: 2622526 - DNA, 25 bp, Homo sapien
acaacgctttgttctctgtgaactt

SEQ ID NO: 2622527 - DNA, 25 bp, Homo sapien
cgctttgttctctgtgaacttgaca

SEQ ID NO: 2622528 - DNA, 25 bp, Homo sapien
ctgagggttactgtgtggttcacct

SEQ ID NO: 2622529 - DNA, 25 bp, Homo sapien
agggttactgtgtggttcacctgaa

SEQ ID NO: 2622530 - DNA, 25 bp, Homo sapien
tgtgtggttcacctgaaaatgctta

SEQ ID NO: 2622531 - DNA, 25 bp, Homo sapien
gtgtggttcacctgaaaatgcttac

SEQ ID NO: 2622532 - DNA, 25 bp, Homo sapien
accaaaatggtggttggactccctg

SEQ ID NO: 2622533 - DNA, 25 bp, Homo sapien
ccaaaatggtggttggactccctga

SEQ ID NO: 2622534 - DNA, 25 bp, Homo sapien
tgctttgtccccatatacttgacac

SEQ ID NO: 2622535 - DNA, 25 bp, Homo sapien
catatacttgacaccaaaatggtgg

SEQ ID NO: 2622536 - DNA, 25 bp, Homo sapien
aatgacctgagcattgaggctgcca

SEQ ID NO: 2622537 - DNA, 25 bp, Homo sapien
catgtcacccaccagtacagggaat

SEQ ID NO: 2622538 - DNA, 25 bp, Homo sapien
agtacagggaatgcctctgtgggac

SEQ ID NO: 2622539 - DNA, 25 bp, Homo sapien
tgagcattgaggctgccactgttgt

SEQ ID NO: 2622540 - DNA, 25 bp, Homo sapien
ctgggtctggatggccatcttggac

SEQ ID NO: 2622541 - DNA, 25 bp, Homo sapien
ggttccacagggtgacgtccactgt

SEQ ID NO: 2622542 - DNA, 25 bp, Homo sapien
ccatcaagacgtctgggttccacag

SEQ ID NO: 2622543 - DNA, 25 bp, Homo sapien
cagggtgacgtccactgtgaagtca

SEQ ID NO: 2622544 - DNA, 25 bp, Homo sapien
tcctgaacccatcaagacgtctggg

SEQ ID NO: 2622545 - DNA, 25 bp, Homo sapien
tgccaaccagttgttcaatgtgtat

SEQ ID NO: 2622546 - DNA, 25 bp, Homo sapien
ccaaccagttgttcaatgtgtattt

SEQ ID NO: 2622547 - DNA, 25 bp, Homo sapien
gttgccaaccagttgttcaatgtgt

SEQ ID NO: 2622548 - DNA, 25 bp, Homo sapien
cgttgccaaccagttgttcaatgtg

SEQ ID NO: 2622549 - DNA, 25 bp, Homo sapien
caaagccactccgtaacttgttctt

SEQ ID NO: 2622550 - DNA, 25 bp, Homo sapien
gccactccgtaacttgttcttgcgg

SEQ ID NO: 2622551 - DNA, 25 bp, Homo sapien
aagccactccgtaacttgttcttgc

SEQ ID NO: 2622552 - DNA, 25 bp, Homo sapien
gccaaagccactccgtaacttgttc

SEQ ID NO: 2622553 - DNA, 25 bp, Homo sapien
agtacatgaagtgcctgctactccc

SEQ ID NO: 2622554 - DNA, 25 bp, Homo sapien
gctctgggccactagctagagtttt

SEQ ID NO: 2622555 - DNA, 25 bp, Homo sapien
agtgcctgctactcccaggctctga

SEQ ID NO: 2622556 - DNA, 25 bp, Homo sapien
ttcccctgcctagttcttgagtaca

SEQ ID NO: 2622557 - DNA, 25 bp, Homo sapien
gtgcggattcgcagtgtcacatgtg

SEQ ID NO: 2622558 - DNA, 25 bp, Homo sapien
tgtgccaagaaccatgatgaacctt

SEQ ID NO: 2622559 - DNA, 25 bp, Homo sapien
ttgcgatgtgacaaggaaacccaac

SEQ ID NO: 2622560 - DNA, 25 bp, Homo sapien
aacagccgagctctgtgtggcctcc

SEQ ID NO: 2622561 - DNA, 25 bp, Homo sapien
gttttgcaactccctctgacacttt

SEQ ID NO: 2622562 - DNA, 25 bp, Homo sapien
tgttttgcaactccctctgacactt

SEQ ID NO: 2622563 - DNA, 25 bp, Homo sapien
ttttgcaactccctctgacactttt

SEQ ID NO: 2622564 - DNA, 25 bp, Homo sapien
accgacatctgttagttgggaaagc

SEQ ID NO: 2622565 - DNA, 25 bp, Homo sapien
tattccaccgacatctgttagttgg

SEQ ID NO: 2622566 - DNA, 25 bp, Homo sapien
gcttctctgatgtcaatgatccgag

SEQ ID NO: 2622567 - DNA, 25 bp, Homo sapien
gatccgagtctctattccaccgaca

SEQ ID NO: 2622568 - DNA, 25 bp, Homo sapien
gccaaaccacccaagctttaatgaa

SEQ ID NO: 2622569 - DNA, 25 bp, Homo sapien
tacaagccttttcggaatgtttcca

SEQ ID NO: 2622570 - DNA, 25 bp, Homo sapien
cctgttacagtcatctgacggtcct

SEQ ID NO: 2622571 - DNA, 25 bp, Homo sapien
tttgctattcgtgcacagatacaag

SEQ ID NO: 2622572 - DNA, 25 bp, Homo sapien
tgttaacccatgagagctgtgaggc

SEQ ID NO: 2622573 - DNA, 25 bp, Homo sapien
cccatgagagctgtgaggcattgta

SEQ ID NO: 2622574 - DNA, 25 bp, Homo sapien
tggagctttgccttgctcggtgtgc

SEQ ID NO: 2622575 - DNA, 25 bp, Homo sapien
ccttgctcggtgtgctctgtggaat

SEQ ID NO: 2622576 - DNA, 25 bp, Homo sapien
agtgatcttgattctgcgttttggg

SEQ ID NO: 2622577 - DNA, 25 bp, Homo sapien
tcacttctgaacgtgacctttgcca

SEQ ID NO: 2622578 - DNA, 25 bp, Homo sapien
gtgatcttgattctgcgttttgggg

SEQ ID NO: 2622579 - DNA, 25 bp, Homo sapien
cttctgaacgtgacctttgccattt

SEQ ID NO: 2622580 - DNA, 25 bp, Homo sapien
cctgcagttgcacgtgaaaaggtgg

SEQ ID NO: 2622581 - DNA, 25 bp, Homo sapien
cagttgcacgtgaaaaggtgggttc

SEQ ID NO: 2622582 - DNA, 25 bp, Homo sapien
tgttcctgcagttgcacgtgaaaag

SEQ ID NO: 2622583 - DNA, 25 bp, Homo sapien
gttgcacgtgaaaaggtgggttcat

SEQ ID NO: 2622584 - DNA, 25 bp, Homo sapien
aattggatttcctccatcagatccg

SEQ ID NO: 2622585 - DNA, 25 bp, Homo sapien
tggatttcctccatcagatccgagg

SEQ ID NO: 2622586 - DNA, 25 bp, Homo sapien
gtttcccttggctgcttttcaattg

SEQ ID NO: 2622587 - DNA, 25 bp, Homo sapien
tcaattggatttcctccatcagatc

SEQ ID NO: 2622588 - DNA, 25 bp, Homo sapien
ttccttaaccaattccttattgctg

SEQ ID NO: 2622589 - DNA, 25 bp, Homo sapien
tccttaaccaattccttattgctgt

SEQ ID NO: 2622590 - DNA, 25 bp, Homo sapien
cttaaccaattccttattgctgttc

SEQ ID NO: 2622591 - DNA, 25 bp, Homo sapien
ccttaaccaattccttattgctgtt

SEQ ID NO: 2622592 - DNA, 25 bp, Homo sapien
cactgtttgtttgagtgagggcgaa

SEQ ID NO: 2622593 - DNA, 25 bp, Homo sapien
ctgtttgtttgagtgagggcgaatc

SEQ ID NO: 2622594 - DNA, 25 bp, Homo sapien
tgtttgtttgagtgagggcgaatct

SEQ ID NO: 2622595 - DNA, 25 bp, Homo sapien
ttgtttgagtgagggcgaatcttac

SEQ ID NO: 2622596 - DNA, 25 bp, Homo sapien
tcaccagctgtgacactatccctga

SEQ ID NO: 2622597 - DNA, 25 bp, Homo sapien
gcttttcctggaaagccagctgcat

SEQ ID NO: 2622598 - DNA, 25 bp, Homo sapien
ttgcttttcctggaaagccagctgc

SEQ ID NO: 2622599 - DNA, 25 bp, Homo sapien
ctttgcttttcctggaaagccagct

SEQ ID NO: 2622600 - DNA, 25 bp, Homo sapien
tcctttgcttttcctggaaagccag

SEQ ID NO: 2622601 - DNA, 25 bp, Homo sapien
tcaaaaagccagacgttcattcttc

SEQ ID NO: 2622602 - DNA, 25 bp, Homo sapien
aaaaagccagacgttcattcttctc

SEQ ID NO: 2622603 - DNA, 25 bp, Homo sapien
aaagccagacgttcattcttctctc

SEQ ID NO: 2622604 - DNA, 25 bp, Homo sapien
acacctttgttcatcctgcttactc

SEQ ID NO: 2622605 - DNA, 25 bp, Homo sapien
caagtttgaggagtggggtatcatc

SEQ ID NO: 2622606 - DNA, 25 bp, Homo sapien
ttcaagtttgaggagtggggtatca

SEQ ID NO: 2622607 - DNA, 25 bp, Homo sapien
ggggtatcatcaaggtgctccccac

SEQ ID NO: 2622608 - DNA, 25 bp, Homo sapien
tattcaagtttgaggagtggggtat

SEQ ID NO: 2622609 - DNA, 25 bp, Homo sapien
gctgaaagttgttattggaatcttc

SEQ ID NO: 2622610 - DNA, 25 bp, Homo sapien
tgtgagttctgtgtaaaaggcattg

SEQ ID NO: 2622611 - DNA, 25 bp, Homo sapien
cattgttgaggtcccgagctggtga

SEQ ID NO: 2622612 - DNA, 25 bp, Homo sapien
tcccgagctggtgataaagctggtc

SEQ ID NO: 2622613 - DNA, 25 bp, Homo sapien
tccaaactgatagagtcataactct

SEQ ID NO: 2622614 - DNA, 25 bp, Homo sapien
cagcttccaaactgatagagtcata

SEQ ID NO: 2622615 - DNA, 25 bp, Homo sapien
tctatagggtaggatcaaaattgtt

SEQ ID NO: 2622616 - DNA, 25 bp, Homo sapien
tagagtcataactctatagggtagg

SEQ ID NO: 2622617 - DNA, 25 bp, Homo sapien
gataagtcatgcaaatccgtcacga

SEQ ID NO: 2622618 - DNA, 25 bp, Homo sapien
ttcagtgaggaaagataagtcatgc

SEQ ID NO: 2622619 - DNA, 25 bp, Homo sapien
cgtcacgatgctaggacatgggaca

SEQ ID NO: 2622620 - DNA, 25 bp, Homo sapien
cgaggactgagcttttcagtgagga

SEQ ID NO: 2622621 - DNA, 25 bp, Homo sapien
ctgatgcttcctggcgtttaacaca

SEQ ID NO: 2622622 - DNA, 25 bp, Homo sapien
tagaataagcgttttgctgactgac

SEQ ID NO: 2622623 - DNA, 25 bp, Homo sapien
gatctccggtgttcaagccaatcat

SEQ ID NO: 2622624 - DNA, 25 bp, Homo sapien
cacaacatagtgtagaataagcgtt

SEQ ID NO: 2622625 - DNA, 25 bp, Homo sapien
ttgagtttctggatagcttcaatca

SEQ ID NO: 2622626 - DNA, 25 bp, Homo sapien
gatagcttcaatcatggatgtctgg

SEQ ID NO: 2622627 - DNA, 25 bp, Homo sapien
tcaatcatggatgtctggatgtttt

SEQ ID NO: 2622628 - DNA, 25 bp, Homo sapien
cagtggaatgagaattggtcacaat

SEQ ID NO: 2622629 - DNA, 25 bp, Homo sapien
tttacccttccagctaaagatcgtc

SEQ ID NO: 2622630 - DNA, 25 bp, Homo sapien
tagagtagatgttccctgtgtagtc

SEQ ID NO: 2622631 - DNA, 25 bp, Homo sapien
gagaattactcttggtccattcccc

SEQ ID NO: 2622632 - DNA, 25 bp, Homo sapien
cccttggtttgttggtagagtagat

SEQ ID NO: 2622633 - DNA, 25 bp, Homo sapien
tgccttgacccctgatcctgaactg

SEQ ID NO: 2622634 - DNA, 25 bp, Homo sapien
tcatccaggtatgaatgacaggaga

SEQ ID NO: 2622635 - DNA, 25 bp, Homo sapien
atccatcagggccacagcactgtcc

SEQ ID NO: 2622636 - DNA, 25 bp, Homo sapien
ggagaggctgagctttcaaagccat

SEQ ID NO: 2622637 - DNA, 25 bp, Homo sapien
tgagggcttcctcgccgatgtgtct

SEQ ID NO: 2622638 - DNA, 25 bp, Homo sapien
gatgtgtctggcaaggccattccca

SEQ ID NO: 2622639 - DNA, 25 bp, Homo sapien
agttgtgcccaagtcccggttctgt

SEQ ID NO: 2622640 - DNA, 25 bp, Homo sapien
gattgcaaacttcacaacgtgaggg

SEQ ID NO: 2622641 - DNA, 25 bp, Homo sapien
agtgacagcccatgactagaggcca

SEQ ID NO: 2622642 - DNA, 25 bp, Homo sapien
ccagtgacagcccatgactagaggc

SEQ ID NO: 2622643 - DNA, 25 bp, Homo sapien
cagtgacagcccatgactagaggcc

SEQ ID NO: 2622644 - DNA, 25 bp, Homo sapien
tttccctccctgaggagaggtgagg

SEQ ID NO: 2622645 - DNA, 25 bp, Homo sapien
tggtcgcctgagcctgaggccagaa

SEQ ID NO: 2622646 - DNA, 25 bp, Homo sapien
ctaaggtgttttgtggaagaggctg

SEQ ID NO: 2622647 - DNA, 25 bp, Homo sapien
gaggccagaaggaacactgtctttc

SEQ ID NO: 2622648 - DNA, 25 bp, Homo sapien
cagatcacagtatggagaccggttc

SEQ ID NO: 2622649 - DNA, 25 bp, Homo sapien
acagtatggagaccggttctgagtc

SEQ ID NO: 2622650 - DNA, 25 bp, Homo sapien
cacagtatggagaccggttctgagt

SEQ ID NO: 2622651 - DNA, 25 bp, Homo sapien
agtatggagaccggttctgagtcat

SEQ ID NO: 2622652 - DNA, 25 bp, Homo sapien
catagcgagtttcccatggcactga

SEQ ID NO: 2622653 - DNA, 25 bp, Homo sapien
caaatgcaggtctgttaggaagatc

SEQ ID NO: 2622654 - DNA, 25 bp, Homo sapien
tcaaagacattgcacgggaaaccag

SEQ ID NO: 2622655 - DNA, 25 bp, Homo sapien
cagtatctgcaagtagggaacattc

SEQ ID NO: 2622656 - DNA, 25 bp, Homo sapien
cctgcaaaggcctgagagagcctct

SEQ ID NO: 2622657 - DNA, 25 bp, Homo sapien
gagagagcctctgagctttccaccc

SEQ ID NO: 2622658 - DNA, 25 bp, Homo sapien
ctttccacccctcacccatagagtc

SEQ ID NO: 2622659 - DNA, 25 bp, Homo sapien
ttccacccctcacccatagagtcat

SEQ ID NO: 2622660 - DNA, 25 bp, Homo sapien
ccttcatcacttcaggtgtctgggt

SEQ ID NO: 2622661 - DNA, 25 bp, Homo sapien
aaacacaacatctgcttgtcttatc

SEQ ID NO: 2622662 - DNA, 25 bp, Homo sapien
ataaggagacggctctccaggaaac

SEQ ID NO: 2622663 - DNA, 25 bp, Homo sapien
tctgggtttccatgccccaataagg

SEQ ID NO: 2622664 - DNA, 25 bp, Homo sapien
gtcttataatcactgaattggaaag

SEQ ID NO: 2622665 - DNA, 25 bp, Homo sapien
gagctaaaggacttttcagccatag

SEQ ID NO: 2622666 - DNA, 25 bp, Homo sapien
atagtcttataatcactgaattgga

SEQ ID NO: 2622667 - DNA, 25 bp, Homo sapien
tcaggttggggggtatagtcttata

SEQ ID NO: 2622668 - DNA, 25 bp, Homo sapien
taaagtcctcatagtcgccttcttc

SEQ ID NO: 2622669 - DNA, 25 bp, Homo sapien
catatacttggcaactaaagtcctc

SEQ ID NO: 2622670 - DNA, 25 bp, Homo sapien
ggagcatggctccaatcgctgatgt

SEQ ID NO: 2622671 - DNA, 25 bp, Homo sapien
ttctctcaagaaacatgttctcgtg

SEQ ID NO: 2622672 - DNA, 25 bp, Homo sapien
gtgtgtgtgagagacctttctgtcc

SEQ ID NO: 2622673 - DNA, 25 bp, Homo sapien
acagcagccgtcaggctctctcctt

SEQ ID NO: 2622674 - DNA, 25 bp, Homo sapien
agtgtgtgtgagagacctttctgtc

SEQ ID NO: 2622675 - DNA, 25 bp, Homo sapien
tgggacacagcagccgtcaggctct

SEQ ID NO: 2622676 - DNA, 25 bp, Homo sapien
tgatttacttaattgagtggcagag

SEQ ID NO: 2622677 - DNA, 25 bp, Homo sapien
cagcagacagtgcatatttgattta

SEQ ID NO: 2622678 - DNA, 25 bp, Homo sapien
ttgatttacttaattgagtggcaga

SEQ ID NO: 2622679 - DNA, 25 bp, Homo sapien
tgacagagacgaagaatggctccca

SEQ ID NO: 2622680 - DNA, 25 bp, Homo sapien
taaggttgttcgtatgaaatgagac

SEQ ID NO: 2622681 - DNA, 25 bp, Homo sapien
ccacattgggagtatagccagagct

SEQ ID NO: 2622682 - DNA, 25 bp, Homo sapien
agtccctttgtgcttctgaatgaca

SEQ ID NO: 2622683 - DNA, 25 bp, Homo sapien
taaggaatgcgaacatagtctagag

SEQ ID NO: 2622684 - DNA, 25 bp, Homo sapien
ggtcaatctcgctgtgtccctctgg

SEQ ID NO: 2622685 - DNA, 25 bp, Homo sapien
tcagccatggtcaactcagggtcaa

SEQ ID NO: 2622686 - DNA, 25 bp, Homo sapien
agctcactttggcttctgcgctcag

SEQ ID NO: 2622687 - DNA, 25 bp, Homo sapien
catcctgtggagcagtggcatcttt

SEQ ID NO: 2622688 - DNA, 25 bp, Homo sapien
actactgtgacattgtgggtggtgt

SEQ ID NO: 2622689 - DNA, 25 bp, Homo sapien
tgtgggtggtgtcatcttgtttgac

SEQ ID NO: 2622690 - DNA, 25 bp, Homo sapien
tggcatctttgatgatgagcaccac

SEQ ID NO: 2622691 - DNA, 25 bp, Homo sapien
cagccactgccacattacaagtctg

SEQ ID NO: 2622692 - DNA, 25 bp, Homo sapien
aatgtgatcaattgctggatgtgga

SEQ ID NO: 2622693 - DNA, 25 bp, Homo sapien
gcagtcagtgatcctcctaatgtga

SEQ ID NO: 2622694 - DNA, 25 bp, Homo sapien
cactccattaggatggtctgcagat

SEQ ID NO: 2622695 - DNA, 25 bp, Homo sapien
cacaggtacccaatgatataggcgc

SEQ ID NO: 2622696 - DNA, 25 bp, Homo sapien
caagtttcatttgcgcttgcccagg

SEQ ID NO: 2622697 - DNA, 25 bp, Homo sapien
ggtcatttgactaagatctcgcagc

SEQ ID NO: 2622698 - DNA, 25 bp, Homo sapien
ccaactcgttgtcagataactgcac

SEQ ID NO: 2622699 - DNA, 25 bp, Homo sapien
cctgagaggcccacacttactagct

SEQ ID NO: 2622700 - DNA, 25 bp, Homo sapien
aacagtttgccccatctctttcttt

SEQ ID NO: 2622701 - DNA, 25 bp, Homo sapien
gaaatttcctgagaggcccacactt

SEQ ID NO: 2622702 - DNA, 25 bp, Homo sapien
aatttcctgagaggcccacacttac

SEQ ID NO: 2622703 - DNA, 25 bp, Homo sapien
ccgtgtcctctactgctaacttcat

SEQ ID NO: 2622704 - DNA, 25 bp, Homo sapien
attttcaccgtgtcctctactgcta

SEQ ID NO: 2622705 - DNA, 25 bp, Homo sapien
accgtgtcctctactgctaacttca

SEQ ID NO: 2622706 - DNA, 25 bp, Homo sapien
ttcattttcaccgtgtcctctactg

SEQ ID NO: 2622707 - DNA, 25 bp, Homo sapien
ttcccttgagcctttgatcccgttg

SEQ ID NO: 2622708 - DNA, 25 bp, Homo sapien
gaagtccttctttctgtacgcggct

SEQ ID NO: 2622709 - DNA, 25 bp, Homo sapien
tgtacgcggctcgtgctttcccttc

SEQ ID NO: 2622710 - DNA, 25 bp, Homo sapien
tgactacaccgaagagaagtccttc

SEQ ID NO: 2622711 - DNA, 25 bp, Homo sapien
ggctccaaggccagtacttttcctg

SEQ ID NO: 2622712 - DNA, 25 bp, Homo sapien
tgcagaaactagtgcgtagagtcca

SEQ ID NO: 2622713 - DNA, 25 bp, Homo sapien
cagggccaagacttatattttggtc

SEQ ID NO: 2622714 - DNA, 25 bp, Homo sapien
gtagagtccaagatcacgagcaggg

SEQ ID NO: 2622715 - DNA, 25 bp, Homo sapien
catcctcagttgatgtacccccaga

SEQ ID NO: 2622716 - DNA, 25 bp, Homo sapien
tcctcagttgatgtacccccagaca

SEQ ID NO: 2622717 - DNA, 25 bp, Homo sapien
tcagttgatgtacccccagacaccc

SEQ ID NO: 2622718 - DNA, 25 bp, Homo sapien
cctcagttgatgtacccccagacac

SEQ ID NO: 2622719 - DNA, 25 bp, Homo sapien
gaggatggagaatattccttttccc

SEQ ID NO: 2622720 - DNA, 25 bp, Homo sapien
gagatggccaacttttagctcccca

SEQ ID NO: 2622721 - DNA, 25 bp, Homo sapien
ggcttgcatgtgtccttcaacagca

SEQ ID NO: 2622722 - DNA, 25 bp, Homo sapien
ccaacaatacctagaagggcttgca

SEQ ID NO: 2622723 - DNA, 25 bp, Homo sapien
ctgggtcaggctcaagctgtgtgac

SEQ ID NO: 2622724 - DNA, 25 bp, Homo sapien
ttctgttcccgtcttctggcaggtg

SEQ ID NO: 2622725 - DNA, 25 bp, Homo sapien
tggcttcacgggaaggtagcataga

SEQ ID NO: 2622726 - DNA, 25 bp, Homo sapien
cttcaagggcattcgaggcccacag

SEQ ID NO: 2622727 - DNA, 25 bp, Homo sapien
tcacgggaaggtagcatagaagtct

SEQ ID NO: 2622728 - DNA, 25 bp, Homo sapien
ctccacaaagagaccttcttaatag

SEQ ID NO: 2622729 - DNA, 25 bp, Homo sapien
tcttaatagtaagctctttgcagag

SEQ ID NO: 2622730 - DNA, 25 bp, Homo sapien
gcatgggtgaaaccgctgtagtttt

SEQ ID NO: 2622731 - DNA, 25 bp, Homo sapien
tctttgcataagcatgggtgaaacc

SEQ ID NO: 2622732 - DNA, 25 bp, Homo sapien
agctttcatcttggagagctggtca

SEQ ID NO: 2622733 - DNA, 25 bp, Homo sapien
ttgagaggacctccccacttctagc

SEQ ID NO: 2622734 - DNA, 25 bp, Homo sapien
gagctggtcatttatcatggcaata

SEQ ID NO: 2622735 - DNA, 25 bp, Homo sapien
gctttctaggcgtcaggagtccttg

SEQ ID NO: 2622736 - DNA, 25 bp, Homo sapien
ttccctctgccttcacatcatcacc

SEQ ID NO: 2622737 - DNA, 25 bp, Homo sapien
tccctctgccttcacatcatcacca

SEQ ID NO: 2622738 - DNA, 25 bp, Homo sapien
cctccagtggggattcatagagaag

SEQ ID NO: 2622739 - DNA, 25 bp, Homo sapien
tatgtgtatgggatggtggttaaga

SEQ ID NO: 2622740 - DNA, 25 bp, Homo sapien
ttaagagggattgacctgactttgg

SEQ ID NO: 2622741 - DNA, 25 bp, Homo sapien
aacttgggtgaaaggtatgtgtatg

SEQ ID NO: 2622742 - DNA, 25 bp, Homo sapien
ccagcacttctacagaatggacttt

SEQ ID NO: 2622743 - DNA, 25 bp, Homo sapien
tgctgtaatggaagtgcccccagag

SEQ ID NO: 2622744 - DNA, 25 bp, Homo sapien
cacttctacagaatggactttgtgc

SEQ ID NO: 2622745 - DNA, 25 bp, Homo sapien
tgttgccttggtcccgttgtctgcc

SEQ ID NO: 2622746 - DNA, 25 bp, Homo sapien
tgcaggccgaggattcctcctatcc

SEQ ID NO: 2622747 - DNA, 25 bp, Homo sapien
gggatccagggtctcatatgccaga

SEQ ID NO: 2622748 - DNA, 25 bp, Homo sapien
gaatactgttagtacagcttcccat

SEQ ID NO: 2622749 - DNA, 25 bp, Homo sapien
gggcatagagctgaatactgttagt

SEQ ID NO: 2622750 - DNA, 25 bp, Homo sapien
tggattagggcttcactctcagttc

SEQ ID NO: 2622751 - DNA, 25 bp, Homo sapien
tctggacatgggtagaaatgcttgt

SEQ ID NO: 2622752 - DNA, 25 bp, Homo sapien
gaagatccacatatctctgagatag

SEQ ID NO: 2622753 - DNA, 25 bp, Homo sapien
tggaacttgatcagaggcagctggt

SEQ ID NO: 2622754 - DNA, 25 bp, Homo sapien
ctccaatacagattggagcagacat

SEQ ID NO: 2622755 - DNA, 25 bp, Homo sapien
tggaaggtcctccaatacagattgg

SEQ ID NO: 2622756 - DNA, 25 bp, Homo sapien
tctctctttggtaggtctagacctg

SEQ ID NO: 2622757 - DNA, 25 bp, Homo sapien
taggtctagacctggaaggtcctcc

SEQ ID NO: 2622758 - DNA, 25 bp, Homo sapien
gagtgaaggggatgtcagcgatcat

SEQ ID NO: 2622759 - DNA, 25 bp, Homo sapien
ctgattttcatgacgtgggatggga

SEQ ID NO: 2622760 - DNA, 25 bp, Homo sapien
ttttcatgacgtgggatgggagtga

SEQ ID NO: 2622761 - DNA, 25 bp, Homo sapien
gcctgattttcatgacgtgggatgg

SEQ ID NO: 2622762 - DNA, 25 bp, Homo sapien
tattgacaacccgccttgacatctg

SEQ ID NO: 2622763 - DNA, 25 bp, Homo sapien
catctgtgctaggtgacagaccctg

SEQ ID NO: 2622764 - DNA, 25 bp, Homo sapien
aaaaatcctcatccctcactgttgt

SEQ ID NO: 2622765 - DNA, 25 bp, Homo sapien
tccgattgcccaggaaaaaatcctc

SEQ ID NO: 2622766 - DNA, 25 bp, Homo sapien
tgtaagggaattcagcttggtgtga

SEQ ID NO: 2622767 - DNA, 25 bp, Homo sapien
tttgtaagggaattcagcttggtgt

SEQ ID NO: 2622768 - DNA, 25 bp, Homo sapien
taagggaattcagcttggtgtgaag

SEQ ID NO: 2622769 - DNA, 25 bp, Homo sapien
ttgtaagggaattcagcttggtgtg

SEQ ID NO: 2622770 - DNA, 25 bp, Homo sapien
gaactcatgttattgtaggaagcat

SEQ ID NO: 2622771 - DNA, 25 bp, Homo sapien
tcctgtcctgtctcactgaccacag

SEQ ID NO: 2622772 - DNA, 25 bp, Homo sapien
agtcagcagtttattggacttggaa

SEQ ID NO: 2622773 - DNA, 25 bp, Homo sapien
tggaagcgttctggtggacaatttg

SEQ ID NO: 2622774 - DNA, 25 bp, Homo sapien
ccgccgaaagcggacactgtcagct

SEQ ID NO: 2622775 - DNA, 25 bp, Homo sapien
cccgccgaaagcggacactgtcagc

SEQ ID NO: 2622776 - DNA, 25 bp, Homo sapien
gccgaaagcggacactgtcagctga

SEQ ID NO: 2622777 - DNA, 25 bp, Homo sapien
ccgaaagcggacactgtcagctgaa

SEQ ID NO: 2622778 - DNA, 25 bp, Homo sapien
ttttccagtggaagagaatcccaga

SEQ ID NO: 2622779 - DNA, 25 bp, Homo sapien
agtcttgatagagcgatgttgggaa

SEQ ID NO: 2622780 - DNA, 25 bp, Homo sapien
ttagcgcagcccatttccctttgtg

SEQ ID NO: 2622781 - DNA, 25 bp, Homo sapien
ccctttgtgtgacttggcaaagaga

SEQ ID NO: 2622782 - DNA, 25 bp, Homo sapien
tcttcaatgcccttgcaaatgcagg

SEQ ID NO: 2622783 - DNA, 25 bp, Homo sapien
gcttgctattaaaaggagcagcagg

SEQ ID NO: 2622784 - DNA, 25 bp, Homo sapien
ggtcatcatgcctgtgttatctgaa

SEQ ID NO: 2622785 - DNA, 25 bp, Homo sapien
gaattctagcccaaagttgttcttc

SEQ ID NO: 2622786 - DNA, 25 bp, Homo sapien
gctattcagagatatatcaccactc

SEQ ID NO: 2622787 - DNA, 25 bp, Homo sapien
tctgccttacatagtaacctgtgta

SEQ ID NO: 2622788 - DNA, 25 bp, Homo sapien
tagctttcaaagactgcatcaggct

SEQ ID NO: 2622789 - DNA, 25 bp, Homo sapien
tacttggtggcatcactcgtttttg

SEQ ID NO: 2622790 - DNA, 25 bp, Homo sapien
agcagctactgaagagagagcccag

SEQ ID NO: 2622791 - DNA, 25 bp, Homo sapien
caggaactgggtactaagcgcgtcc

SEQ ID NO: 2622792 - DNA, 25 bp, Homo sapien
ggttctcaggccaagctcggagtcc

SEQ ID NO: 2622793 - DNA, 25 bp, Homo sapien
cctaggtccttatgtacaacgcaga

SEQ ID NO: 2622794 - DNA, 25 bp, Homo sapien
gaagagttctgctagcttgtccccg

SEQ ID NO: 2622795 - DNA, 25 bp, Homo sapien
agtacaccacgctgatgagaatccg

SEQ ID NO: 2622796 - DNA, 25 bp, Homo sapien
tattcatggtggctatcgtggctgc

SEQ ID NO: 2622797 - DNA, 25 bp, Homo sapien
aatggtagcgcgtcacactcatggc

SEQ ID NO: 2622798 - DNA, 25 bp, Homo sapien
ctgcgagtggtagaggcccagccag

SEQ ID NO: 2622799 - DNA, 25 bp, Homo sapien
gcccagcaacttgtccgggaaacgc

SEQ ID NO: 2622800 - DNA, 25 bp, Homo sapien
agtggtagaggcccagccagaactg

SEQ ID NO: 2622801 - DNA, 25 bp, Homo sapien
agaactgcctgtcgcggcccagcaa

SEQ ID NO: 2622802 - DNA, 25 bp, Homo sapien
ggcaccgcgttgaacttgatgagga

SEQ ID NO: 2622803 - DNA, 25 bp, Homo sapien
gaaggacaggacaacgatggtcact

SEQ ID NO: 2622804 - DNA, 25 bp, Homo sapien
gataatgatgcccagcggcagcacg

SEQ ID NO: 2622805 - DNA, 25 bp, Homo sapien
tggtgaccttcgacagtctccgggc

SEQ ID NO: 2622806 - DNA, 25 bp, Homo sapien
cagctgttggagtgcgctaggcaca

SEQ ID NO: 2622807 - DNA, 25 bp, Homo sapien
gcgctaggcacacgctcacagggaa

SEQ ID NO: 2622808 - DNA, 25 bp, Homo sapien
cacacgctcacagggaacgcgtata

SEQ ID NO: 2622809 - DNA, 25 bp, Homo sapien
ttggagtgcgctaggcacacgctca

SEQ ID NO: 2622810 - DNA, 25 bp, Homo sapien
cgatgcgccacagcaggctcttgag

SEQ ID NO: 2622811 - DNA, 25 bp, Homo sapien
gatcctcgtgctccggcttggtagt

SEQ ID NO: 2622812 - DNA, 25 bp, Homo sapien
tgatcgaaggagacgcgatgcgcca

SEQ ID NO: 2622813 - DNA, 25 bp, Homo sapien
tcttgagcgccttgcggaactcgcg

SEQ ID NO: 2622814 - DNA, 25 bp, Homo sapien
gacgccaggtgggtagtagagcagg

SEQ ID NO: 2622815 - DNA, 25 bp, Homo sapien
cgccaggtgggtagtagagcaggtc

SEQ ID NO: 2622816 - DNA, 25 bp, Homo sapien
cacgacgccaggtgggtagtagagc

SEQ ID NO: 2622817 - DNA, 25 bp, Homo sapien
caggtgggtagtagagcaggtccgg

SEQ ID NO: 2622818 - DNA, 25 bp, Homo sapien
ctgctgggcagcaggtcgtagcgcc

SEQ ID NO: 2622819 - DNA, 25 bp, Homo sapien
tcagtaggcagagctgctgggcagc

SEQ ID NO: 2622820 - DNA, 25 bp, Homo sapien
agctgctgggcagcaggtcgtagcg

SEQ ID NO: 2622821 - DNA, 25 bp, Homo sapien
gctgggcagcaggtcgtagcgcccc

SEQ ID NO: 2622822 - DNA, 25 bp, Homo sapien
ttgccccgacggcgcgccctgggcc

SEQ ID NO: 2622823 - DNA, 25 bp, Homo sapien
gccccgacggcgcgccctgggcctg

SEQ ID NO: 2622824 - DNA, 25 bp, Homo sapien
tgccccgacggcgcgccctgggcct

SEQ ID NO: 2622825 - DNA, 25 bp, Homo sapien
ccccgacggcgcgccctgggcctga

SEQ ID NO: 2622826 - DNA, 25 bp, Homo sapien
ccccagccctccttcatcctttcac

SEQ ID NO: 2622827 - DNA, 25 bp, Homo sapien
ctccttcatcctttcacctctttac

SEQ ID NO: 2622828 - DNA, 25 bp, Homo sapien
ccagccctccttcatcctttcacct

SEQ ID NO: 2622829 - DNA, 25 bp, Homo sapien
ccctccttcatcctttcacctcttt

SEQ ID NO: 2622830 - DNA, 25 bp, Homo sapien
gctccccgtgccaatttctctacat

SEQ ID NO: 2622831 - DNA, 25 bp, Homo sapien
ggaataaacgggcacaattgtctgt

SEQ ID NO: 2622832 - DNA, 25 bp, Homo sapien
tctacatttttgctgcttgtcttcg

SEQ ID NO: 2622833 - DNA, 25 bp, Homo sapien
tgtgcatcatttggctaagccccgc

SEQ ID NO: 2622834 - DNA, 25 bp, Homo sapien
caagctggtgacaggtgttatcccc

SEQ ID NO: 2622835 - DNA, 25 bp, Homo sapien
agagaatggctctcccaagctggtg

SEQ ID NO: 2622836 - DNA, 25 bp, Homo sapien
cgctggcccagtccggaatgataat

SEQ ID NO: 2622837 - DNA, 25 bp, Homo sapien
gctgctgcagtctcgtttgccaaga

SEQ ID NO: 2622838 - DNA, 25 bp, Homo sapien
aacagacctgtttttacgaatggct

SEQ ID NO: 2622839 - DNA, 25 bp, Homo sapien
ctaaaagagctgacttcacaagact

SEQ ID NO: 2622840 - DNA, 25 bp, Homo sapien
aagactgctcagaatcgcgactggc

SEQ ID NO: 2622841 - DNA, 25 bp, Homo sapien
caataattgttcttcccaaagggtg

SEQ ID NO: 2622842 - DNA, 25 bp, Homo sapien
gacccagacaacagcgtgagaggga

SEQ ID NO: 2622843 - DNA, 25 bp, Homo sapien
ttgagtagttatgaccagggctgta

SEQ ID NO: 2622844 - DNA, 25 bp, Homo sapien
ctcagatcctggtcggaggtggcct

SEQ ID NO: 2622845 - DNA, 25 bp, Homo sapien
gctttctggtcaacacagccgggac

SEQ ID NO: 2622846 - DNA, 25 bp, Homo sapien
gatcccgtgtatttggtctgttgta

SEQ ID NO: 2622847 - DNA, 25 bp, Homo sapien
gatggtccctggcataattaaacat

SEQ ID NO: 2622848 - DNA, 25 bp, Homo sapien
aagcaagatcccgtgtatttggtct

SEQ ID NO: 2622849 - DNA, 25 bp, Homo sapien
tgcatggtggatggtccctggcata

SEQ ID NO: 2622850 - DNA, 25 bp, Homo sapien
tttcatattctagccttcagtcttg

SEQ ID NO: 2622851 - DNA, 25 bp, Homo sapien
tcatattctagccttcagtcttgtt

SEQ ID NO: 2622852 - DNA, 25 bp, Homo sapien
atattctagccttcagtcttgttct

SEQ ID NO: 2622853 - DNA, 25 bp, Homo sapien
ccttcagtcttgttcttcaaccatt

SEQ ID NO: 2622854 - DNA, 25 bp, Homo sapien
cacctggaatgagattggacactgc

SEQ ID NO: 2622855 - DNA, 25 bp, Homo sapien
tgtgaggtcactctaatgccctggg

SEQ ID NO: 2622856 - DNA, 25 bp, Homo sapien
tggcctggaaaacccagtctcacaa

SEQ ID NO: 2622857 - DNA, 25 bp, Homo sapien
tagttcacgtgatgtctgacagatg

SEQ ID NO: 2622858 - DNA, 25 bp, Homo sapien
tctgaagtgtgtaccagcagcaggg

SEQ ID NO: 2622859 - DNA, 25 bp, Homo sapien
tccctgagggagacgtgctactatc

SEQ ID NO: 2622860 - DNA, 25 bp, Homo sapien
taaagcagatgacgggaaagggtcc

SEQ ID NO: 2622861 - DNA, 25 bp, Homo sapien
tagcagcaccggatttataccagta

SEQ ID NO: 2622862 - DNA, 25 bp, Homo sapien
ggtctaccgtcatcaacgagggctg

SEQ ID NO: 2622863 - DNA, 25 bp, Homo sapien
tagagaaggctctgcttccgtgctc

SEQ ID NO: 2622864 - DNA, 25 bp, Homo sapien
cgtgctccctagtgttgctggcaaa

SEQ ID NO: 2622865 - DNA, 25 bp, Homo sapien
tcagaagctctcacaggtctaccgt

SEQ ID NO: 2622866 - DNA, 25 bp, Homo sapien
tcagcttagcctttgaccctttcct

SEQ ID NO: 2622867 - DNA, 25 bp, Homo sapien
tcggatgtagtgatatgacagggct

SEQ ID NO: 2622868 - DNA, 25 bp, Homo sapien
tagtgccctccgtgttcagcttagc

SEQ ID NO: 2622869 - DNA, 25 bp, Homo sapien
cctctgacgcaggttggaaatattt

SEQ ID NO: 2622870 - DNA, 25 bp, Homo sapien
cattccaggtaaggatgagcaagac

SEQ ID NO: 2622871 - DNA, 25 bp, Homo sapien
tcatggagactacagctttcgaggc

SEQ ID NO: 2622872 - DNA, 25 bp, Homo sapien
cagactgcagtaagtgttgtcatgg

SEQ ID NO: 2622873 - DNA, 25 bp, Homo sapien
taattgcagcctgagctaaagtagg

SEQ ID NO: 2622874 - DNA, 25 bp, Homo sapien
gatcaagcaagcttttgtcctgctc

SEQ ID NO: 2622875 - DNA, 25 bp, Homo sapien
agcaagcttttgtcctgctctgcag

SEQ ID NO: 2622876 - DNA, 25 bp, Homo sapien
gctcttccaatacgtctttcttaaa

SEQ ID NO: 2622877 - DNA, 25 bp, Homo sapien
ctgtgatagctcttccaatacgtct

SEQ ID NO: 2622878 - DNA, 25 bp, Homo sapien
taaagataaatatgcctgagctccc

SEQ ID NO: 2622879 - DNA, 25 bp, Homo sapien
ggtatccttcttggccaacagatgg

SEQ ID NO: 2622880 - DNA, 25 bp, Homo sapien
caactcctctaccaacggctatgga

SEQ ID NO: 2622881 - DNA, 25 bp, Homo sapien
tccaaaccatcctgaagggctgtag

SEQ ID NO: 2622882 - DNA, 25 bp, Homo sapien
acaagatagtacatgtgtagactcc

SEQ ID NO: 2622883 - DNA, 25 bp, Homo sapien
tctactgggtctggagtgtttttgt

SEQ ID NO: 2622884 - DNA, 25 bp, Homo sapien
tgtagactccagacctctactgggt

SEQ ID NO: 2622885 - DNA, 25 bp, Homo sapien
gtcatctctgcgtgtacaagatagt

SEQ ID NO: 2622886 - DNA, 25 bp, Homo sapien
ttcgtgctgtaacaacagagtgtct

SEQ ID NO: 2622887 - DNA, 25 bp, Homo sapien
tcttacagaacaggacaaacttctt

SEQ ID NO: 2622888 - DNA, 25 bp, Homo sapien
gcagatggagccctcttacagaaca

SEQ ID NO: 2622889 - DNA, 25 bp, Homo sapien
tgtggtagatacgtgcttgtgcaga

SEQ ID NO: 2622890 - DNA, 25 bp, Homo sapien
tgactagctcgtaacctgagagtgc

SEQ ID NO: 2622891 - DNA, 25 bp, Homo sapien
gcccaatatgattgggatgtgtcat

SEQ ID NO: 2622892 - DNA, 25 bp, Homo sapien
tcaggaccaactatgccaaggtcaa

SEQ ID NO: 2622893 - DNA, 25 bp, Homo sapien
ggtcaacacgggaatgcccaatatg

SEQ ID NO: 2622894 - DNA, 25 bp, Homo sapien
gactgatggtgtcaattgtccacac

SEQ ID NO: 2622895 - DNA, 25 bp, Homo sapien
agcgtattgaccatttgatctccag

SEQ ID NO: 2622896 - DNA, 25 bp, Homo sapien
gatctccagtttgggtgtcaacaaa

SEQ ID NO: 2622897 - DNA, 25 bp, Homo sapien
catgttgatgtcagcacattctgtc

SEQ ID NO: 2622898 - DNA, 25 bp, Homo sapien
tgtccggccaccagctgaagttttt

SEQ ID NO: 2622899 - DNA, 25 bp, Homo sapien
gaaactatccagcattagatatgaa

SEQ ID NO: 2622900 - DNA, 25 bp, Homo sapien
cagaattggcggaagatgtccgtcc

SEQ ID NO: 2622901 - DNA, 25 bp, Homo sapien
attaatgacactatttttgatggcc

SEQ ID NO: 2622902 - DNA, 25 bp, Homo sapien
caggtcttcacgtcccaaggctgca

SEQ ID NO: 2622903 - DNA, 25 bp, Homo sapien
aggtcttcacgtcccaaggctgcac

SEQ ID NO: 2622904 - DNA, 25 bp, Homo sapien
tagcttccattgtgacagtgtgccc

SEQ ID NO: 2622905 - DNA, 25 bp, Homo sapien
tcaactctccgctgagtcataggta

SEQ ID NO: 2622906 - DNA, 25 bp, Homo sapien
tcacaacttcaatggctatagcttc

SEQ ID NO: 2622907 - DNA, 25 bp, Homo sapien
cagtgtgccctgaattctttgttga

SEQ ID NO: 2622908 - DNA, 25 bp, Homo sapien
tcttactactgctttagctacatcc

SEQ ID NO: 2622909 - DNA, 25 bp, Homo sapien
cttactactgctttagctacatccc

SEQ ID NO: 2622910 - DNA, 25 bp, Homo sapien
ctcttactactgctttagctacatc

SEQ ID NO: 2622911 - DNA, 25 bp, Homo sapien
ttactactgctttagctacatccca

SEQ ID NO: 2622912 - DNA, 25 bp, Homo sapien
ttttgagacaaggacacagggtaac

SEQ ID NO: 2622913 - DNA, 25 bp, Homo sapien
gctgagaaacgctgatctagatgag

SEQ ID NO: 2622914 - DNA, 25 bp, Homo sapien
tgttcatgcccagagatagttcact

SEQ ID NO: 2622915 - DNA, 25 bp, Homo sapien
tgatacaaatttgcagctaaggctg

SEQ ID NO: 2622916 - DNA, 25 bp, Homo sapien
ggttctcaactgtccatcagactaa

SEQ ID NO: 2622917 - DNA, 25 bp, Homo sapien
taaattgattagcattgcttcatgc

SEQ ID NO: 2622918 - DNA, 25 bp, Homo sapien
ctaagctggcaagattgttaatagt

SEQ ID NO: 2622919 - DNA, 25 bp, Homo sapien
tgcttcatgcatacaccagtggttc

SEQ ID NO: 2622920 - DNA, 25 bp, Homo sapien
tcttgatgattatagccaagctcta

SEQ ID NO: 2622921 - DNA, 25 bp, Homo sapien
aatcccctgaatgtacttccacaag

SEQ ID NO: 2622922 - DNA, 25 bp, Homo sapien
tattacacagccaattataggacca

SEQ ID NO: 2622923 - DNA, 25 bp, Homo sapien
tctcatgatatctgcggtaggtagg

SEQ ID NO: 2622924 - DNA, 25 bp, Homo sapien
aaggaatccgattggttctgtgtct

SEQ ID NO: 2622925 - DNA, 25 bp, Homo sapien
aatcatggcttatatgtactttctc

SEQ ID NO: 2622926 - DNA, 25 bp, Homo sapien
tgtagtcatccatatagaaaggtga

SEQ ID NO: 2622927 - DNA, 25 bp, Homo sapien
ggtattctcagacttatgtagtcat

SEQ ID NO: 2622928 - DNA, 25 bp, Homo sapien
cgcatgtgtgtcttcttttgaagtg

SEQ ID NO: 2622929 - DNA, 25 bp, Homo sapien
ccaccatgcccggcgttgacttttt

SEQ ID NO: 2622930 - DNA, 25 bp, Homo sapien
cttttgaagtgtctgtttatgtcct

SEQ ID NO: 2622931 - DNA, 25 bp, Homo sapien
catgcccggcgttgactttttaata

SEQ ID NO: 2622932 - DNA, 25 bp, Homo sapien
ctgatctctagcaggaggaactgca

SEQ ID NO: 2622933 - DNA, 25 bp, Homo sapien
tgatctctagcaggaggaactgcat

SEQ ID NO: 2622934 - DNA, 25 bp, Homo sapien
ggagggagagacgtgggcacaaagg

SEQ ID NO: 2622935 - DNA, 25 bp, Homo sapien
agggagagacgtgggcacaaaggtc

SEQ ID NO: 2622936 - DNA, 25 bp, Homo sapien
gagggagagacgtgggcacaaaggt

SEQ ID NO: 2622937 - DNA, 25 bp, Homo sapien
tggagggagagacgtgggcacaaag

SEQ ID NO: 2622938 - DNA, 25 bp, Homo sapien
tggaattcggagcacacagcactgg

SEQ ID NO: 2622939 - DNA, 25 bp, Homo sapien
acacagcactggcttactgtggtac

SEQ ID NO: 2622940 - DNA, 25 bp, Homo sapien
agcacacagcactggcttactgtgg

SEQ ID NO: 2622941 - DNA, 25 bp, Homo sapien
ctggaattcggagcacacagcactg

SEQ ID NO: 2622942 - DNA, 25 bp, Homo sapien
acagagtccttgtgctgagtgtagt

SEQ ID NO: 2622943 - DNA, 25 bp, Homo sapien
cagagtccttgtgctgagtgtagtg

SEQ ID NO: 2622944 - DNA, 25 bp, Homo sapien
ggagcccaaaggggtgactacctgc

SEQ ID NO: 2622945 - DNA, 25 bp, Homo sapien
ttgaggagcccaaaggggtgactac

SEQ ID NO: 2622946 - DNA, 25 bp, Homo sapien
gagtttgtccggctgtgcatccata

SEQ ID NO: 2622947 - DNA, 25 bp, Homo sapien
tgccttttcacagcgggtgtcacgc

SEQ ID NO: 2622948 - DNA, 25 bp, Homo sapien
acttgagtttgtccggctgtgcatc

SEQ ID NO: 2622949 - DNA, 25 bp, Homo sapien
tctgatggaattgaagtcatgaggc

SEQ ID NO: 2622950 - DNA, 25 bp, Homo sapien
ctgatggaattgaagtcatgaggca

SEQ ID NO: 2622951 - DNA, 25 bp, Homo sapien
actctgatggaattgaagtcatgag

SEQ ID NO: 2622952 - DNA, 25 bp, Homo sapien
gatggaattgaagtcatgaggcagc

SEQ ID NO: 2622953 - DNA, 25 bp, Homo sapien
tgggactctgacatgtgcccatagc

SEQ ID NO: 2622954 - DNA, 25 bp, Homo sapien
ctgacatgtgcccatagctagggtg

SEQ ID NO: 2622955 - DNA, 25 bp, Homo sapien
gactctgacatgtgcccatagctag

SEQ ID NO: 2622956 - DNA, 25 bp, Homo sapien
ttacatgggactctgacatgtgccc

SEQ ID NO: 2622957 - DNA, 25 bp, Homo sapien
ggtagcttaaacagtagatattttg

SEQ ID NO: 2622958 - DNA, 25 bp, Homo sapien
ggctaacataagggatagcacagat

SEQ ID NO: 2622959 - DNA, 25 bp, Homo sapien
catttcctcgtcatataaagttcta

SEQ ID NO: 2622960 - DNA, 25 bp, Homo sapien
tattggatagtgctggtctgtagct

SEQ ID NO: 2622961 - DNA, 25 bp, Homo sapien
tgttgattctggcaagtgaaatcat

SEQ ID NO: 2622962 - DNA, 25 bp, Homo sapien
tgtcttgctattgttgattctggca

SEQ ID NO: 2622963 - DNA, 25 bp, Homo sapien
gaagagatcaaagcctgtcttgcta

SEQ ID NO: 2622964 - DNA, 25 bp, Homo sapien
cgattgtttgcatatgaatcagact

SEQ ID NO: 2622965 - DNA, 25 bp, Homo sapien
aagaaggcctatttattgcattcat

SEQ ID NO: 2622966 - DNA, 25 bp, Homo sapien
cagttgattttgaagtaagaaggcc

SEQ ID NO: 2622967 - DNA, 25 bp, Homo sapien
aagtaagaaggcctatttattgcat

SEQ ID NO: 2622968 - DNA, 25 bp, Homo sapien
ttgaagtaagaaggcctatttattg

SEQ ID NO: 2622969 - DNA, 25 bp, Homo sapien
tatgtgtatgcagatgcccctctgg

SEQ ID NO: 2622970 - DNA, 25 bp, Homo sapien
tctgtgttatgcctgcaaatgtacc

SEQ ID NO: 2622971 - DNA, 25 bp, Homo sapien
tcctatataggacccggataacaca

SEQ ID NO: 2622972 - DNA, 25 bp, Homo sapien
gaccacagggacattccagttttta

SEQ ID NO: 2622973 - DNA, 25 bp, Homo sapien
tcagtgttatcgtgaataaagagac

SEQ ID NO: 2622974 - DNA, 25 bp, Homo sapien
gaaaaggctcaatagacattctctt

SEQ ID NO: 2622975 - DNA, 25 bp, Homo sapien
taaagagacttgaccatagaaatgt

SEQ ID NO: 2622976 - DNA, 25 bp, Homo sapien
catgatattggctgagaaatagtct

SEQ ID NO: 2622977 - DNA, 25 bp, Homo sapien
aaatctccaggtaattgttcttgtc

SEQ ID NO: 2622978 - DNA, 25 bp, Homo sapien
taatcaactgatactgggaagcatg

SEQ ID NO: 2622979 - DNA, 25 bp, Homo sapien
taacttttcgaagaaactaatgatc

SEQ ID NO: 2622980 - DNA, 25 bp, Homo sapien
gaaataaaaattgctgtgctaatca

SEQ ID NO: 2622981 - DNA, 25 bp, Homo sapien
tgagcgacaatcagtgaccaggtgt

SEQ ID NO: 2622982 - DNA, 25 bp, Homo sapien
tattcagtcctcgtgctagagagag

SEQ ID NO: 2622983 - DNA, 25 bp, Homo sapien
tataggtctcctaactacagagggt

SEQ ID NO: 2622984 - DNA, 25 bp, Homo sapien
gaaggtgcttactgcactcccagca

SEQ ID NO: 2622985 - DNA, 25 bp, Homo sapien
taagactgaacgctcacacacaagt

SEQ ID NO: 2622986 - DNA, 25 bp, Homo sapien
ttttcccaaggctccggaaagctgc

SEQ ID NO: 2622987 - DNA, 25 bp, Homo sapien
tacactccagaggaacgtgattcgc

SEQ ID NO: 2622988 - DNA, 25 bp, Homo sapien
tgaaggatccggtaaagcagcctgc

SEQ ID NO: 2622989 - DNA, 25 bp, Homo sapien
taaaaccacgtagatttatggactc

SEQ ID NO: 2622990 - DNA, 25 bp, Homo sapien
tggcctctgttacttgatccaccat

SEQ ID NO: 2622991 - DNA, 25 bp, Homo sapien
gttggcctctgttacttgatccacc

SEQ ID NO: 2622992 - DNA, 25 bp, Homo sapien
gagttggcctctgttacttgatcca

SEQ ID NO: 2622993 - DNA, 25 bp, Homo sapien
agagttggcctctgttacttgatcc

SEQ ID NO: 2622994 - DNA, 25 bp, Homo sapien
ctcagagaggtaaaaccccaccagg

SEQ ID NO: 2622995 - DNA, 25 bp, Homo sapien
cggagagacctcgatctcagagagg

SEQ ID NO: 2622996 - DNA, 25 bp, Homo sapien
ggtcccaggtgatgaatcatacttt

SEQ ID NO: 2622997 - DNA, 25 bp, Homo sapien
aattccattgcattcgggaaatgcc

SEQ ID NO: 2622998 - DNA, 25 bp, Homo sapien
gggacgaagtggttcaatataagag

SEQ ID NO: 2622999 - DNA, 25 bp, Homo sapien
tgtttctactagatcacggattaca

SEQ ID NO: 2623000 - DNA, 25 bp, Homo sapien
gaagtggttcaatataagagggagc

SEQ ID NO: 2623001 - DNA, 25 bp, Homo sapien
ttacaattttggtcagcatatgatg

SEQ ID NO: 2623002 - DNA, 25 bp, Homo sapien
cagcgaatactgtttctcctagggt

SEQ ID NO: 2623003 - DNA, 25 bp, Homo sapien
tcctagggtagcgatgaagatttac

SEQ ID NO: 2623004 - DNA, 25 bp, Homo sapien
taaagacaaaaacagcgaatactgt

SEQ ID NO: 2623005 - DNA, 25 bp, Homo sapien
tagcgatgaagatttactactacag

SEQ ID NO: 2623006 - DNA, 25 bp, Homo sapien
gtttgcctcacgctggacatcatgg

SEQ ID NO: 2623007 - DNA, 25 bp, Homo sapien
ctttcgataggcttggcattgatcc

SEQ ID NO: 2623008 - DNA, 25 bp, Homo sapien
ggccaattcacaggatcccttagac

SEQ ID NO: 2623009 - DNA, 25 bp, Homo sapien
cacttataggttggctgtcagatcc

SEQ ID NO: 2623010 - DNA, 25 bp, Homo sapien
gaagtcagtttatagatgggcggca

SEQ ID NO: 2623011 - DNA, 25 bp, Homo sapien
aacttgtccgagtccaatgagtcag

SEQ ID NO: 2623012 - DNA, 25 bp, Homo sapien
gaaaagctgcctgggttagacggaa

SEQ ID NO: 2623013 - DNA, 25 bp, Homo sapien
tatgtaactcgatagtcagcaggac

SEQ ID NO: 2623014 - DNA, 25 bp, Homo sapien
tatgctacctccactggtgatatcc

SEQ ID NO: 2623015 - DNA, 25 bp, Homo sapien
tttgctgttatgctacctccactgg

SEQ ID NO: 2623016 - DNA, 25 bp, Homo sapien
gctacctccactggtgatatccagg

SEQ ID NO: 2623017 - DNA, 25 bp, Homo sapien
gctgttatgctacctccactggtga

SEQ ID NO: 2623018 - DNA, 25 bp, Homo sapien
ccagtagtgtaccaagagccttttt

SEQ ID NO: 2623019 - DNA, 25 bp, Homo sapien
ggcctctcaatgttccattctcagg

SEQ ID NO: 2623020 - DNA, 25 bp, Homo sapien
gtccagtagtgtaccaagagccttt

SEQ ID NO: 2623021 - DNA, 25 bp, Homo sapien
ttttttgaacggtgttcaactctca

SEQ ID NO: 2623022 - DNA, 25 bp, Homo sapien
ttttgaacagacaactgctcagcat

SEQ ID NO: 2623023 - DNA, 25 bp, Homo sapien
agaggttttgaacagacaactgctc

SEQ ID NO: 2623024 - DNA, 25 bp, Homo sapien
ggttttgaacagacaactgctcagc

SEQ ID NO: 2623025 - DNA, 25 bp, Homo sapien
gaggttttgaacagacaactgctca

SEQ ID NO: 2623026 - DNA, 25 bp, Homo sapien
ttccttgtgttggaatgttggactc

SEQ ID NO: 2623027 - DNA, 25 bp, Homo sapien
gttggaatgttggactcaagtaaaa

SEQ ID NO: 2623028 - DNA, 25 bp, Homo sapien
ccttgtgttggaatgttggactcaa

SEQ ID NO: 2623029 - DNA, 25 bp, Homo sapien
tgtgttggaatgttggactcaagta

SEQ ID NO: 2623030 - DNA, 25 bp, Homo sapien
gaaccccgtacagggattgtgtaca

SEQ ID NO: 2623031 - DNA, 25 bp, Homo sapien
cagaaagtgggggacaacttcaagc

SEQ ID NO: 2623032 - DNA, 25 bp, Homo sapien
cagaaagtcctgatgacatatgcca

SEQ ID NO: 2623033 - DNA, 25 bp, Homo sapien
ctgatgacatatgccaaaggtagtt

SEQ ID NO: 2623034 - DNA, 25 bp, Homo sapien
atgccaaaggtagttagggcacagc

SEQ ID NO: 2623035 - DNA, 25 bp, Homo sapien
tgaatacatcggctctccatgagaa

SEQ ID NO: 2623036 - DNA, 25 bp, Homo sapien
gttcagcccatgtaactaactcctg

SEQ ID NO: 2623037 - DNA, 25 bp, Homo sapien
gaagccgtaaaagattaactcagtc

SEQ ID NO: 2623038 - DNA, 25 bp, Homo sapien
tattcctgtggcacaatctctcaat

SEQ ID NO: 2623039 - DNA, 25 bp, Homo sapien
aggcgagtggcccactgagtgggag

SEQ ID NO: 2623040 - DNA, 25 bp, Homo sapien
gcttctgttggaggcgagtggccca

SEQ ID NO: 2623041 - DNA, 25 bp, Homo sapien
tgggattgaggactcccagagttcc

SEQ ID NO: 2623042 - DNA, 25 bp, Homo sapien
ggattgaggactcccagagttcctt

SEQ ID NO: 2623043 - DNA, 25 bp, Homo sapien
ggaagacgacgtgtcccaagacagc

SEQ ID NO: 2623044 - DNA, 25 bp, Homo sapien
ggatattgtagcgaggcagacagct

SEQ ID NO: 2623045 - DNA, 25 bp, Homo sapien
gacttccgcaagcttcttgaaactg

SEQ ID NO: 2623046 - DNA, 25 bp, Homo sapien
tctcctcgggaaaggagggatattg

SEQ ID NO: 2623047 - DNA, 25 bp, Homo sapien
cctctgcagcgtgagcgctggacaa

SEQ ID NO: 2623048 - DNA, 25 bp, Homo sapien
cgtgagcgctggacaatttcctgtg

SEQ ID NO: 2623049 - DNA, 25 bp, Homo sapien
aagcccagtcaaatagacctcgatc

SEQ ID NO: 2623050 - DNA, 25 bp, Homo sapien
aatagacctcgatcaccctggctgg

SEQ ID NO: 2623051 - DNA, 25 bp, Homo sapien
taacagacactatatgctcatgagg

SEQ ID NO: 2623052 - DNA, 25 bp, Homo sapien
agagccatgtagtgtttaacagaca

SEQ ID NO: 2623053 - DNA, 25 bp, Homo sapien
gatttctcaaagaatagtacgggaa

SEQ ID NO: 2623054 - DNA, 25 bp, Homo sapien
tatgaacatatatatctggccctgg

SEQ ID NO: 2623055 - DNA, 25 bp, Homo sapien
gcctgcgatgtcttcggttattgaa

SEQ ID NO: 2623056 - DNA, 25 bp, Homo sapien
ttactcaggcctgcgatgtcttcgg

SEQ ID NO: 2623057 - DNA, 25 bp, Homo sapien
ggccagttactcaggcctgcgatgt

SEQ ID NO: 2623058 - DNA, 25 bp, Homo sapien
ggaaggccagttactcaggcctgcg

SEQ ID NO: 2623059 - DNA, 25 bp, Homo sapien
ttggggccatgattttgacgaatca

SEQ ID NO: 2623060 - DNA, 25 bp, Homo sapien
gtagctgcttggggccatgattttg

SEQ ID NO: 2623061 - DNA, 25 bp, Homo sapien
gctgcttggggccatgattttgacg

SEQ ID NO: 2623062 - DNA, 25 bp, Homo sapien
tgcttggggccatgattttgacgaa

SEQ ID NO: 2623063 - DNA, 25 bp, Homo sapien
caaatgagggaccaagttcttcggg

SEQ ID NO: 2623064 - DNA, 25 bp, Homo sapien
cttccagttctgacattggcaggtc

SEQ ID NO: 2623065 - DNA, 25 bp, Homo sapien
tgttggaactaaatctgggaatctg

SEQ ID NO: 2623066 - DNA, 25 bp, Homo sapien
gtcttcttgattgttgctgttccca

SEQ ID NO: 2623067 - DNA, 25 bp, Homo sapien
atcttgacctccttgacaccgggct

SEQ ID NO: 2623068 - DNA, 25 bp, Homo sapien
ggccaatttcacatccaagaatgaa

SEQ ID NO: 2623069 - DNA, 25 bp, Homo sapien
gctgtggcccaatcttgacctcctt

SEQ ID NO: 2623070 - DNA, 25 bp, Homo sapien
tccagtctactggtggttgaacacg

SEQ ID NO: 2623071 - DNA, 25 bp, Homo sapien
cagagagctctagtatttcctgagc

SEQ ID NO: 2623072 - DNA, 25 bp, Homo sapien
aacagagagctctagtatttcctga

SEQ ID NO: 2623073 - DNA, 25 bp, Homo sapien
aaaacagagagctctagtatttcct

SEQ ID NO: 2623074 - DNA, 25 bp, Homo sapien
gagagctctagtatttcctgagctt

SEQ ID NO: 2623075 - DNA, 25 bp, Homo sapien
ggatctggtactttgccatggctaa

SEQ ID NO: 2623076 - DNA, 25 bp, Homo sapien
catggctaatcacccacactggctt

SEQ ID NO: 2623077 - DNA, 25 bp, Homo sapien
gataaggtggctgataaactggatc

SEQ ID NO: 2623078 - DNA, 25 bp, Homo sapien
gcatctcctccaaatggaggcagag

SEQ ID NO: 2623079 - DNA, 25 bp, Homo sapien
cgtagttttagcagaagatttggcc

SEQ ID NO: 2623080 - DNA, 25 bp, Homo sapien
gaaactcgtagttttagcagaagat

SEQ ID NO: 2623081 - DNA, 25 bp, Homo sapien
tcagaaactcgtagttttagcagaa

SEQ ID NO: 2623082 - DNA, 25 bp, Homo sapien
ttttagcagaagatttggccatgga

SEQ ID NO: 2623083 - DNA, 25 bp, Homo sapien
tttatgcagggtgctgatgctctcc

SEQ ID NO: 2623084 - DNA, 25 bp, Homo sapien
tgtcaggctgaagacacccactgtc

SEQ ID NO: 2623085 - DNA, 25 bp, Homo sapien
gagtaggatatcacgtgtcaggctg

SEQ ID NO: 2623086 - DNA, 25 bp, Homo sapien
gaatgaatggttagacactgctgat

SEQ ID NO: 2623087 - DNA, 25 bp, Homo sapien
actgaggtagacaggcatgtcaaca

SEQ ID NO: 2623088 - DNA, 25 bp, Homo sapien
cactgaggtagacaggcatgtcaac

SEQ ID NO: 2623089 - DNA, 25 bp, Homo sapien
ctgaggtagacaggcatgtcaacat

SEQ ID NO: 2623090 - DNA, 25 bp, Homo sapien
gcagttcttgagtcctgtttttgcc

SEQ ID NO: 2623091 - DNA, 25 bp, Homo sapien
tggcagttcttgagtcctgtttttg

SEQ ID NO: 2623092 - DNA, 25 bp, Homo sapien
gtggagcaggaacctggcagttctt

SEQ ID NO: 2623093 - DNA, 25 bp, Homo sapien
gttcttgagtcctgtttttgccttc

SEQ ID NO: 2623094 - DNA, 25 bp, Homo sapien
ctgtgatgggtagagatggagcccc

SEQ ID NO: 2623095 - DNA, 25 bp, Homo sapien
tgggtagagatggagcccctctccc

SEQ ID NO: 2623096 - DNA, 25 bp, Homo sapien
tgatgggtagagatggagcccctct

SEQ ID NO: 2623097 - DNA, 25 bp, Homo sapien
gatgggtagagatggagcccctctc

SEQ ID NO: 2623098 - DNA, 25 bp, Homo sapien
agggagggagccacgatttgggaag

SEQ ID NO: 2623099 - DNA, 25 bp, Homo sapien
gtaactgttgatcagtgctgatttc

SEQ ID NO: 2623100 - DNA, 25 bp, Homo sapien
aaggtttggaggtaactgttgatca

SEQ ID NO: 2623101 - DNA, 25 bp, Homo sapien
gagccacgatttgggaaggtttgga

SEQ ID NO: 2623102 - DNA, 25 bp, Homo sapien
tccattggccaagggtaatgggagc

SEQ ID NO: 2623103 - DNA, 25 bp, Homo sapien
gctgacagtgcactggtttttggtg

SEQ ID NO: 2623104 - DNA, 25 bp, Homo sapien
tttggtgtccattggccaagggtaa

SEQ ID NO: 2623105 - DNA, 25 bp, Homo sapien
atggttctggctgacagtgcactgg

SEQ ID NO: 2623106 - DNA, 25 bp, Homo sapien
ggcacctagtttattgtcctcagac

SEQ ID NO: 2623107 - DNA, 25 bp, Homo sapien
tatttggcacctagtttattgtcct

SEQ ID NO: 2623108 - DNA, 25 bp, Homo sapien
gggcatatttggcacctagtttatt

SEQ ID NO: 2623109 - DNA, 25 bp, Homo sapien
ttaagatatgggcatatttggcacc

SEQ ID NO: 2623110 - DNA, 25 bp, Homo sapien
cttgtgtagatgatccaacagctcc

SEQ ID NO: 2623111 - DNA, 25 bp, Homo sapien
gagggtagatttggccttatagcca

SEQ ID NO: 2623112 - DNA, 25 bp, Homo sapien
aagtggctgttggatgccatgatga

SEQ ID NO: 2623113 - DNA, 25 bp, Homo sapien
tagccactcagcacgtcttgtgtag

SEQ ID NO: 2623114 - DNA, 25 bp, Homo sapien
aactcgtctgttactgcatggagga

SEQ ID NO: 2623115 - DNA, 25 bp, Homo sapien
ggaggaacatgtgcagcagatcgac

SEQ ID NO: 2623116 - DNA, 25 bp, Homo sapien
tctttggcctccaaggaatgcttta

SEQ ID NO: 2623117 - DNA, 25 bp, Homo sapien
ctggctcaaagtatgcaggaagaac

SEQ ID NO: 2623118 - DNA, 25 bp, Homo sapien
agacacaaactgaggcacaacatca

SEQ ID NO: 2623119 - DNA, 25 bp, Homo sapien
gcagacacaaactgaggcacaacat

SEQ ID NO: 2623120 - DNA, 25 bp, Homo sapien
atcatcctcgaagttgtcgttgtca

SEQ ID NO: 2623121 - DNA, 25 bp, Homo sapien
aggcacaacatcatcctcgaagttg

SEQ ID NO: 2623122 - DNA, 25 bp, Homo sapien
tgtccttgttttcccgcaggccctg

SEQ ID NO: 2623123 - DNA, 25 bp, Homo sapien
tcatctggttcgtatatttaggcca

SEQ ID NO: 2623124 - DNA, 25 bp, Homo sapien
gaagccctttggataactggccacc

SEQ ID NO: 2623125 - DNA, 25 bp, Homo sapien
tgttctgttgtcagccaggttctga

SEQ ID NO: 2623126 - DNA, 25 bp, Homo sapien
cttgcgtgatggatggtggaacagc

SEQ ID NO: 2623127 - DNA, 25 bp, Homo sapien
tgatggatggtggaacagcttcccg

SEQ ID NO: 2623128 - DNA, 25 bp, Homo sapien
aacagcttcccgagtcagcaggagg

SEQ ID NO: 2623129 - DNA, 25 bp, Homo sapien
tcagcaggaggtgaataagagctcc

SEQ ID NO: 2623130 - DNA, 25 bp, Homo sapien
gtctgaactggggtgagcaaaaacc

SEQ ID NO: 2623131 - DNA, 25 bp, Homo sapien
ccttgtactccggttaggagtctga

SEQ ID NO: 2623132 - DNA, 25 bp, Homo sapien
cgccttgtactccggttaggagtct

SEQ ID NO: 2623133 - DNA, 25 bp, Homo sapien
tactccggttaggagtctgaactgg

SEQ ID NO: 2623134 - DNA, 25 bp, Homo sapien
ctttctgcactaggtttgtggagcc

SEQ ID NO: 2623135 - DNA, 25 bp, Homo sapien
tctgcactaggtttgtggagcctac

SEQ ID NO: 2623136 - DNA, 25 bp, Homo sapien
tttctgcactaggtttgtggagcct

SEQ ID NO: 2623137 - DNA, 25 bp, Homo sapien
ttctgcactaggtttgtggagccta

SEQ ID NO: 2623138 - DNA, 25 bp, Homo sapien
caagaaacaacaggcacgtgaagta

SEQ ID NO: 2623139 - DNA, 25 bp, Homo sapien
taaaacgttgccctagacgcagagc

SEQ ID NO: 2623140 - DNA, 25 bp, Homo sapien
gagcaaaattctggttcctccacat

SEQ ID NO: 2623141 - DNA, 25 bp, Homo sapien
gacttaatggacactcatcgggatg

SEQ ID NO: 2623142 - DNA, 25 bp, Homo sapien
acaacctagaccagcgaaggccagg

SEQ ID NO: 2623143 - DNA, 25 bp, Homo sapien
tcactgggcacacaacctagaccag

SEQ ID NO: 2623144 - DNA, 25 bp, Homo sapien
acctagaccagcgaaggccaggatg

SEQ ID NO: 2623145 - DNA, 25 bp, Homo sapien
caacctagaccagcgaaggccagga

SEQ ID NO: 2623146 - DNA, 25 bp, Homo sapien
ttgatgttggatgtcacaggaggca

SEQ ID NO: 2623147 - DNA, 25 bp, Homo sapien
cgagaggaagtatctctggaactca

SEQ ID NO: 2623148 - DNA, 25 bp, Homo sapien
agccgggtcccctcttggtgcttct

SEQ ID NO: 2623149 - DNA, 25 bp, Homo sapien
gtatggtgaacggacaactacagca

SEQ ID NO: 2623150 - DNA, 25 bp, Homo sapien
tgtattcagttgcattagaacatca

SEQ ID NO: 2623151 - DNA, 25 bp, Homo sapien
gtattcagttgcattagaacatcaa

SEQ ID NO: 2623152 - DNA, 25 bp, Homo sapien
tttgtattcagttgcattagaacat

SEQ ID NO: 2623153 - DNA, 25 bp, Homo sapien
attcagttgcattagaacatcaaag

SEQ ID NO: 2623154 - DNA, 25 bp, Homo sapien
ctgaggatataggaacttgggagtt

SEQ ID NO: 2623155 - DNA, 25 bp, Homo sapien
tgggagttgtggagtggattgtctt

SEQ ID NO: 2623156 - DNA, 25 bp, Homo sapien
gtagcctctgcagatcatttgaact

SEQ ID NO: 2623157 - DNA, 25 bp, Homo sapien
tctctcctggaaatttggaattgga

SEQ ID NO: 2623158 - DNA, 25 bp, Homo sapien
attttggtgatgagtgtgcactgag

SEQ ID NO: 2623159 - DNA, 25 bp, Homo sapien
gaaagtttgtcaaggtgtgatgcct

SEQ ID NO: 2623160 - DNA, 25 bp, Homo sapien
gaagtttaatctcgtcagtgtctag

SEQ ID NO: 2623161 - DNA, 25 bp, Homo sapien
ggagtaacaaggtttatcatgaaag

SEQ ID NO: 2623162 - DNA, 25 bp, Homo sapien
tgtgatgcctggactagtggtgaaa

SEQ ID NO: 2623163 - DNA, 25 bp, Homo sapien
catcatggacagatttagttgtttc

SEQ ID NO: 2623164 - DNA, 25 bp, Homo sapien
caggtttcaaaatgttgatggtagc

SEQ ID NO: 2623165 - DNA, 25 bp, Homo sapien
ctgtgtagcctcatcatggacagat

SEQ ID NO: 2623166 - DNA, 25 bp, Homo sapien
tcttttgatactaccttggataccc

SEQ ID NO: 2623167 - DNA, 25 bp, Homo sapien
tttcccagctgtgccgtgacctctg

SEQ ID NO: 2623168 - DNA, 25 bp, Homo sapien
tatccatgccccagatgtttacttt

SEQ ID NO: 2623169 - DNA, 25 bp, Homo sapien
taagaacagaagacgaattttccca

SEQ ID NO: 2623170 - DNA, 25 bp, Homo sapien
ccagactccctaagaacagaagacg

SEQ ID NO: 2623171 - DNA, 25 bp, Homo sapien
caatcctactctccgagaaaacagg

SEQ ID NO: 2623172 - DNA, 25 bp, Homo sapien
tcctactctccgagaaaacaggctt

SEQ ID NO: 2623173 - DNA, 25 bp, Homo sapien
ctactctccgagaaaacaggcttta

SEQ ID NO: 2623174 - DNA, 25 bp, Homo sapien
tactctccgagaaaacaggctttaa

SEQ ID NO: 2623175 - DNA, 25 bp, Homo sapien
tacattccgaagacctgcatcagtg

SEQ ID NO: 2623176 - DNA, 25 bp, Homo sapien
gaaggctgtaagactctctggtcca

SEQ ID NO: 2623177 - DNA, 25 bp, Homo sapien
tggcaataaatacattccgaagacc

SEQ ID NO: 2623178 - DNA, 25 bp, Homo sapien
ctgccgaggaaacgaggctaagatc

SEQ ID NO: 2623179 - DNA, 25 bp, Homo sapien
gccaaaaagtcattctccactttat

SEQ ID NO: 2623180 - DNA, 25 bp, Homo sapien
ccaaaaagtcattctccactttatt

SEQ ID NO: 2623181 - DNA, 25 bp, Homo sapien
caaaaagtcattctccactttattt

SEQ ID NO: 2623182 - DNA, 25 bp, Homo sapien
agccaaaaagtcattctccacttta

SEQ ID NO: 2623183 - DNA, 25 bp, Homo sapien
tgcccaagtctgaggaaccaaagct

SEQ ID NO: 2623184 - DNA, 25 bp, Homo sapien
caatactggttcttcttagattatg

SEQ ID NO: 2623185 - DNA, 25 bp, Homo sapien
tatgagtatcttgattgcccaagtc

SEQ ID NO: 2623186 - DNA, 25 bp, Homo sapien
aagctaagacttgttgggataacaa

SEQ ID NO: 2623187 - DNA, 25 bp, Homo sapien
tgtcatttcatgacgaaacattgtt

SEQ ID NO: 2623188 - DNA, 25 bp, Homo sapien
tattctcttagtttgtagacccttc

SEQ ID NO: 2623189 - DNA, 25 bp, Homo sapien
tctgacatcctaaacctattctctt

SEQ ID NO: 2623190 - DNA, 25 bp, Homo sapien
cttcataagcaaaactgccctgtca

SEQ ID NO: 2623191 - DNA, 25 bp, Homo sapien
tagtctgtagactgagcatggcagc

SEQ ID NO: 2623192 - DNA, 25 bp, Homo sapien
taactctggatgagggatcgttgtg

SEQ ID NO: 2623193 - DNA, 25 bp, Homo sapien
ttgggctgtgccaagatccttttcc

SEQ ID NO: 2623194 - DNA, 25 bp, Homo sapien
taaagtcagcaagtctaactctgga

SEQ ID NO: 2623195 - DNA, 25 bp, Homo sapien
cggcggcgctccccggacccagctg

SEQ ID NO: 2623196 - DNA, 25 bp, Homo sapien
gctcggcttcctgcgccgcagtccc

SEQ ID NO: 2623197 - DNA, 25 bp, Homo sapien
ccgggctcgcttcctgctcggcttc

SEQ ID NO: 2623198 - DNA, 25 bp, Homo sapien
gcggcggcgctccccggacccagct

SEQ ID NO: 2623199 - DNA, 25 bp, Homo sapien
cacaaaggcggggacacgagcccgg

SEQ ID NO: 2623200 - DNA, 25 bp, Homo sapien
agatctgctctccgcagacagtggg

SEQ ID NO: 2623201 - DNA, 25 bp, Homo sapien
cagatctgctctccgcagacagtgg

SEQ ID NO: 2623202 - DNA, 25 bp, Homo sapien
ccagatctgctctccgcagacagtg

SEQ ID NO: 2623203 - DNA, 25 bp, Homo sapien
ccgggaggcggattgggctcagcag

SEQ ID NO: 2623204 - DNA, 25 bp, Homo sapien
aaacaggtgggacccggcgcagact

SEQ ID NO: 2623205 - DNA, 25 bp, Homo sapien
ggcgaaacaggtgggacccggcgca

SEQ ID NO: 2623206 - DNA, 25 bp, Homo sapien
aagttcagccgggaggcggattggg

SEQ ID NO: 2623207 - DNA, 25 bp, Homo sapien
cggccccgagtctgccccaactcca

SEQ ID NO: 2623208 - DNA, 25 bp, Homo sapien
gatggcgggcgcctttctggtggct

SEQ ID NO: 2623209 - DNA, 25 bp, Homo sapien
cggcggccccgagtctgccccaact

SEQ ID NO: 2623210 - DNA, 25 bp, Homo sapien
caactccagcatccgttctccccga

SEQ ID NO: 2623211 - DNA, 25 bp, Homo sapien
ctgcccaagaaggcagcgaaggtgg

SEQ ID NO: 2623212 - DNA, 25 bp, Homo sapien
gcccaagaaggcagcgaaggtggtt

SEQ ID NO: 2623213 - DNA, 25 bp, Homo sapien
caagaaggcagcgaaggtggttgag

SEQ ID NO: 2623214 - DNA, 25 bp, Homo sapien
agaaggcagcgaaggtggttgagga

SEQ ID NO: 2623215 - DNA, 25 bp, Homo sapien
tgcaaaccgcagaaactaaaccgac

SEQ ID NO: 2623216 - DNA, 25 bp, Homo sapien
gcaaaccgcagaaactaaaccgaca

SEQ ID NO: 2623217 - DNA, 25 bp, Homo sapien
ctgcaaaccgcagaaactaaaccga

SEQ ID NO: 2623218 - DNA, 25 bp, Homo sapien
taattccccgtctgttgcttctcca

SEQ ID NO: 2623219 - DNA, 25 bp, Homo sapien
ctggcaaataaagaggagcctggaa

SEQ ID NO: 2623220 - DNA, 25 bp, Homo sapien
cttcggacccctccacgctgtgctg

SEQ ID NO: 2623221 - DNA, 25 bp, Homo sapien
caaaagggggatgcgaaactcaaag

SEQ ID NO: 2623222 - DNA, 25 bp, Homo sapien
cgaggggcctcgagtccgcagattc

SEQ ID NO: 2623223 - DNA, 25 bp, Homo sapien
tcgagtccgcagattcccctcaaca

SEQ ID NO: 2623224 - DNA, 25 bp, Homo sapien
tctgggagtaaagttgggcttagct

SEQ ID NO: 2623225 - DNA, 25 bp, Homo sapien
ttcccctcaacatttctgggagtaa

SEQ ID NO: 2623226 - DNA, 25 bp, Homo sapien
gtagtgccagctccagggaggctaa

SEQ ID NO: 2623227 - DNA, 25 bp, Homo sapien
gccagctccagggaggctaaggtgg

SEQ ID NO: 2623228 - DNA, 25 bp, Homo sapien
tagtgccagctccagggaggctaag

SEQ ID NO: 2623229 - DNA, 25 bp, Homo sapien
gtgccagctccagggaggctaaggt

SEQ ID NO: 2623230 - DNA, 25 bp, Homo sapien
tttctggtctgtcaaatccacgact

SEQ ID NO: 2623231 - DNA, 25 bp, Homo sapien
agcactactttctggtctgtcaaat

SEQ ID NO: 2623232 - DNA, 25 bp, Homo sapien
actgacacaaaattggctgtggttc

SEQ ID NO: 2623233 - DNA, 25 bp, Homo sapien
tccacgactcacatgctccaataag

SEQ ID NO: 2623234 - DNA, 25 bp, Homo sapien
tgagctctctgacacgggttagcgt

SEQ ID NO: 2623235 - DNA, 25 bp, Homo sapien
aaggctctcgtggatcccaggtgta

SEQ ID NO: 2623236 - DNA, 25 bp, Homo sapien
agctctctgacacgggttagcgtca

SEQ ID NO: 2623237 - DNA, 25 bp, Homo sapien
gcaaggctctcgtggatcccaggtg

SEQ ID NO: 2623238 - DNA, 25 bp, Homo sapien
catccaaactcctcccagtgggtgg

SEQ ID NO: 2623239 - DNA, 25 bp, Homo sapien
gcttatatgagtaggcccagaggac

SEQ ID NO: 2623240 - DNA, 25 bp, Homo sapien
tgcctctcagacaagggctatgctg

SEQ ID NO: 2623241 - DNA, 25 bp, Homo sapien
ggactccaaactaactgaggatatg

SEQ ID NO: 2623242 - DNA, 25 bp, Homo sapien
caaagctgaattagctgcacaacag

SEQ ID NO: 2623243 - DNA, 25 bp, Homo sapien
tgcacaacagcctaattcgagtatg

SEQ ID NO: 2623244 - DNA, 25 bp, Homo sapien
tctatcaggttagcaaggccacact

SEQ ID NO: 2623245 - DNA, 25 bp, Homo sapien
gcacacctacccactgagcagaaat

SEQ ID NO: 2623246 - DNA, 25 bp, Homo sapien
gaagccatggctggcggaaagtaat

SEQ ID NO: 2623247 - DNA, 25 bp, Homo sapien
tggtattcatgaaaggatctaacac

SEQ ID NO: 2623248 - DNA, 25 bp, Homo sapien
tgaatcatgagtaaacggactcgcc

SEQ ID NO: 2623249 - DNA, 25 bp, Homo sapien
gaataacgccaggtgccagctgtct

SEQ ID NO: 2623250 - DNA, 25 bp, Homo sapien
tctagaagcatgaactgtagctggg

SEQ ID NO: 2623251 - DNA, 25 bp, Homo sapien
tgagtgtcttcctagagtccgtggc

SEQ ID NO: 2623252 - DNA, 25 bp, Homo sapien
gaagttctggaaatccacacaatgg

SEQ ID NO: 2623253 - DNA, 25 bp, Homo sapien
ggattaaccgccaaactgagtgtct

SEQ ID NO: 2623254 - DNA, 25 bp, Homo sapien
tgatgtaggcggaacaggaacacac

SEQ ID NO: 2623255 - DNA, 25 bp, Homo sapien
cagatattccccaactgtcgctggc

SEQ ID NO: 2623256 - DNA, 25 bp, Homo sapien
tgtcgctggctaactgtcgctggct

SEQ ID NO: 2623257 - DNA, 25 bp, Homo sapien
tgggccagggtttctacgccaactg

SEQ ID NO: 2623258 - DNA, 25 bp, Homo sapien
agtcacccagtgactctctagcttc

SEQ ID NO: 2623259 - DNA, 25 bp, Homo sapien
acccagtgactctctagcttccaat

SEQ ID NO: 2623260 - DNA, 25 bp, Homo sapien
ccagtgactctctagcttccaatgt

SEQ ID NO: 2623261 - DNA, 25 bp, Homo sapien
tcacccagtgactctctagcttcca

SEQ ID NO: 2623262 - DNA, 25 bp, Homo sapien
ggagtgcaagccactgaatgccttc

SEQ ID NO: 2623263 - DNA, 25 bp, Homo sapien
gtggggagtgcaagccactgaatgc

SEQ ID NO: 2623264 - DNA, 25 bp, Homo sapien
tgggtggggagtgcaagccactgaa

SEQ ID NO: 2623265 - DNA, 25 bp, Homo sapien
ggatgggtggggagtgcaagccact

SEQ ID NO: 2623266 - DNA, 25 bp, Homo sapien
gtacaagatgtgaaaacttcgcatg

SEQ ID NO: 2623267 - DNA, 25 bp, Homo sapien
caagatgtgaaaacttcgcatgtag

SEQ ID NO: 2623268 - DNA, 25 bp, Homo sapien
aaatgtacaagatgtgaaaacttcg

SEQ ID NO: 2623269 - DNA, 25 bp, Homo sapien
aatgtacaagatgtgaaaacttcgc

SEQ ID NO: 2623270 - DNA, 25 bp, Homo sapien
gtttagtgcattcagccttccaaag

SEQ ID NO: 2623271 - DNA, 25 bp, Homo sapien
tttagtgcattcagccttccaaagc

SEQ ID NO: 2623272 - DNA, 25 bp, Homo sapien
ttagtgcattcagccttccaaagct

SEQ ID NO: 2623273 - DNA, 25 bp, Homo sapien
gtcactcttcctgaacttcgctttc

SEQ ID NO: 2623274 - DNA, 25 bp, Homo sapien
tcctgaacttcgctttcaagctctt

SEQ ID NO: 2623275 - DNA, 25 bp, Homo sapien
tcttcctgaacttcgctttcaagct

SEQ ID NO: 2623276 - DNA, 25 bp, Homo sapien
tgaacttcgctttcaagctcttcat

SEQ ID NO: 2623277 - DNA, 25 bp, Homo sapien
tacaagactgggatcatagaagggt

SEQ ID NO: 2623278 - DNA, 25 bp, Homo sapien
tatcgtgtacaacccctctgctatg

SEQ ID NO: 2623279 - DNA, 25 bp, Homo sapien
tgctcaaagtatctggaatgcagct

SEQ ID NO: 2623280 - DNA, 25 bp, Homo sapien
tggaatgcagctaatacaagactgg

SEQ ID NO: 2623281 - DNA, 25 bp, Homo sapien
caggactttcactctggccaacagc

SEQ ID NO: 2623282 - DNA, 25 bp, Homo sapien
ctgtctttgtcgaagtctctttgca

SEQ ID NO: 2623283 - DNA, 25 bp, Homo sapien
cgaagtctctttgcactctatgagt

SEQ ID NO: 2623284 - DNA, 25 bp, Homo sapien
tctcggaagtcggatgaccaggact

SEQ ID NO: 2623285 - DNA, 25 bp, Homo sapien
ttctccttagctgaaagccacggga

SEQ ID NO: 2623286 - DNA, 25 bp, Homo sapien
gccacgggagatatgtaggctgcat

SEQ ID NO: 2623287 - DNA, 25 bp, Homo sapien
ccttagctgaaagccacgggagata

SEQ ID NO: 2623288 - DNA, 25 bp, Homo sapien
tgaaagccacgggagatatgtaggc

SEQ ID NO: 2623289 - DNA, 25 bp, Homo sapien
tgaattgggcaacattttccattta

SEQ ID NO: 2623290 - DNA, 25 bp, Homo sapien
cacaaaatttagaaacccctatctg

SEQ ID NO: 2623291 - DNA, 25 bp, Homo sapien
tgatgactgagaactctgcgctcgc

SEQ ID NO: 2623292 - DNA, 25 bp, Homo sapien
gccactttttcaagctatggtcata

SEQ ID NO: 2623293 - DNA, 25 bp, Homo sapien
tgtggaaccacatactagctgctgc

SEQ ID NO: 2623294 - DNA, 25 bp, Homo sapien
tttattagcaaagggaaatcccagc

SEQ ID NO: 2623295 - DNA, 25 bp, Homo sapien
tctcagttcccaatttgcgctttgg

SEQ ID NO: 2623296 - DNA, 25 bp, Homo sapien
ccaatttgcgctttgggcctcttct

SEQ ID NO: 2623297 - DNA, 25 bp, Homo sapien
caagtctgaccgctttgatttccat

SEQ ID NO: 2623298 - DNA, 25 bp, Homo sapien
ctcaaaacaagtctgaccgctttga

SEQ ID NO: 2623299 - DNA, 25 bp, Homo sapien
cctaaagccacttgttcaccatggg

SEQ ID NO: 2623300 - DNA, 25 bp, Homo sapien
cacttgccacctaaagccacttgtt

SEQ ID NO: 2623301 - DNA, 25 bp, Homo sapien
ctactgtgtccaagactgccacttg

SEQ ID NO: 2623302 - DNA, 25 bp, Homo sapien
tgtgtccaagactgccacttgccac

SEQ ID NO: 2623303 - DNA, 25 bp, Homo sapien
gaatttgaggttaactaatcaacca

SEQ ID NO: 2623304 - DNA, 25 bp, Homo sapien
gataaggaaacagaacgtcagcggg

SEQ ID NO: 2623305 - DNA, 25 bp, Homo sapien
aacactgtccagctattcagtcaag

SEQ ID NO: 2623306 - DNA, 25 bp, Homo sapien
taaggatactgactatctggaggag

SEQ ID NO: 2623307 - DNA, 25 bp, Homo sapien
gactcagttattgcctcttgttaag

SEQ ID NO: 2623308 - DNA, 25 bp, Homo sapien
tagggcaagagctgcaagttttgat

SEQ ID NO: 2623309 - DNA, 25 bp, Homo sapien
cagtaaaatgttgagctgacgtctt

SEQ ID NO: 2623310 - DNA, 25 bp, Homo sapien
tcaatatgctgcaatttgatgcggg

SEQ ID NO: 2623311 - DNA, 25 bp, Homo sapien
tgttttaactaatggctccaggcag

SEQ ID NO: 2623312 - DNA, 25 bp, Homo sapien
agccaccatggctgcccagttctat

SEQ ID NO: 2623313 - DNA, 25 bp, Homo sapien
tcccgcctagctagcacaataggca

SEQ ID NO: 2623314 - DNA, 25 bp, Homo sapien
accatgcccagttatcttctaaagt

SEQ ID NO: 2623315 - DNA, 25 bp, Homo sapien
gagacactaaaggtacaatgtgact

SEQ ID NO: 2623316 - DNA, 25 bp, Homo sapien
tgcacgtgtcaactgaaagctccct

SEQ ID NO: 2623317 - DNA, 25 bp, Homo sapien
tcccattgagacttgttccaatcat

SEQ ID NO: 2623318 - DNA, 25 bp, Homo sapien
gacttgacctgttcctcccattgag

SEQ ID NO: 2623319 - DNA, 25 bp, Homo sapien
tgttgttcccatcgggcactggcca

SEQ ID NO: 2623320 - DNA, 25 bp, Homo sapien
ggcagccacaattcactaatttgct

SEQ ID NO: 2623321 - DNA, 25 bp, Homo sapien
tttaggatgtcctactgagtaaaca

SEQ ID NO: 2623322 - DNA, 25 bp, Homo sapien
tttgctagctgttgttcccatcggg

SEQ ID NO: 2623323 - DNA, 25 bp, Homo sapien
tttctctgcttgtcaccacatcaca

SEQ ID NO: 2623324 - DNA, 25 bp, Homo sapien
gcctggcagagattaagtttgtatt

SEQ ID NO: 2623325 - DNA, 25 bp, Homo sapien
tgtatttctctgcttgtcaccacat

SEQ ID NO: 2623326 - DNA, 25 bp, Homo sapien
cacatcacacaacaatgctttacaa

SEQ ID NO: 2623327 - DNA, 25 bp, Homo sapien
ccgaatagttgaagaccaaaagact

SEQ ID NO: 2623328 - DNA, 25 bp, Homo sapien
gctgccctacagattccgattctgc

SEQ ID NO: 2623329 - DNA, 25 bp, Homo sapien
caccttccataatgtacgtgggctt

SEQ ID NO: 2623330 - DNA, 25 bp, Homo sapien
ttagatctcacacaaaaaaggtatt

SEQ ID NO: 2623331 - DNA, 25 bp, Homo sapien
tacttaaggcaaaaagtcacaccaa

SEQ ID NO: 2623332 - DNA, 25 bp, Homo sapien
tccacagcctatatcacacgtaatg

SEQ ID NO: 2623333 - DNA, 25 bp, Homo sapien
tcctagcatgagtattgaaattttg

SEQ ID NO: 2623334 - DNA, 25 bp, Homo sapien
ggcaaaaaagcatagaccaagcaat

SEQ ID NO: 2623335 - DNA, 25 bp, Homo sapien
ttggatttctcggtccacttgccag

SEQ ID NO: 2623336 - DNA, 25 bp, Homo sapien
ggatttctcggtccacttgccagtt

SEQ ID NO: 2623337 - DNA, 25 bp, Homo sapien
attctcatggcttggatttctcggt

SEQ ID NO: 2623338 - DNA, 25 bp, Homo sapien
gatttctcggtccacttgccagttt

SEQ ID NO: 2623339 - DNA, 25 bp, Homo sapien
aagactggtagccattttggctaca

SEQ ID NO: 2623340 - DNA, 25 bp, Homo sapien
aaagactggtagccattttggctac

SEQ ID NO: 2623341 - DNA, 25 bp, Homo sapien
taaagaggggaagaccaacatcact

SEQ ID NO: 2623342 - DNA, 25 bp, Homo sapien
ctaaggcagtaggttgctgatttct

SEQ ID NO: 2623343 - DNA, 25 bp, Homo sapien
actggtggggtcatcaacggaatca

SEQ ID NO: 2623344 - DNA, 25 bp, Homo sapien
tcaacggaatcacacagagaccagg

SEQ ID NO: 2623345 - DNA, 25 bp, Homo sapien
gacatttgtcagcaatctgcagttt

SEQ ID NO: 2623346 - DNA, 25 bp, Homo sapien
cttgtgctatggattcaggccttaa

SEQ ID NO: 2623347 - DNA, 25 bp, Homo sapien
gcaggaaaattcgactcaagtaata

SEQ ID NO: 2623348 - DNA, 25 bp, Homo sapien
ggaactctagcgtgtggtcttgtgc

SEQ ID NO: 2623349 - DNA, 25 bp, Homo sapien
gaaaccatttggtaaggtcacatga

SEQ ID NO: 2623350 - DNA, 25 bp, Homo sapien
gcagttggcttgatctatcatggga

SEQ ID NO: 2623351 - DNA, 25 bp, Homo sapien
gcagcatttgtaactccatagagaa

SEQ ID NO: 2623352 - DNA, 25 bp, Homo sapien
gaacagctccaaaggtccagctggg

SEQ ID NO: 2623353 - DNA, 25 bp, Homo sapien
ggagccttcagacttctgagaagag

SEQ ID NO: 2623354 - DNA, 25 bp, Homo sapien
taagcctaaaataggtgaagccaat

SEQ ID NO: 2623355 - DNA, 25 bp, Homo sapien
tcagtcctatgaaagcccaaagagg

SEQ ID NO: 2623356 - DNA, 25 bp, Homo sapien
gctagactagtgctgtggactcagt

SEQ ID NO: 2623357 - DNA, 25 bp, Homo sapien
tatatagttgcagagatcaaatacg

SEQ ID NO: 2623358 - DNA, 25 bp, Homo sapien
aattttctatatagttgcagagatc

SEQ ID NO: 2623359 - DNA, 25 bp, Homo sapien
tagttgcagagatcaaatacggtaa

SEQ ID NO: 2623360 - DNA, 25 bp, Homo sapien
taggcatgaggctcccaaattttct

SEQ ID NO: 2623361 - DNA, 25 bp, Homo sapien
ccatctggaggaatctatctgagat

SEQ ID NO: 2623362 - DNA, 25 bp, Homo sapien
tcttgctccagttttcggtgaggag

SEQ ID NO: 2623363 - DNA, 25 bp, Homo sapien
tggaggaatctatctgagattatct

SEQ ID NO: 2623364 - DNA, 25 bp, Homo sapien
tcggtgaggagactgttttgccaat

SEQ ID NO: 2623365 - DNA, 25 bp, Homo sapien
tctcttgaagcttggcctttttgaa

SEQ ID NO: 2623366 - DNA, 25 bp, Homo sapien
tttctcttgaagcttggcctttttg

SEQ ID NO: 2623367 - DNA, 25 bp, Homo sapien
ttctcttgaagcttggcctttttga

SEQ ID NO: 2623368 - DNA, 25 bp, Homo sapien
tagctccctgaaggccctgagaaca

SEQ ID NO: 2623369 - DNA, 25 bp, Homo sapien
ttctcctgtgtttagctccctgaag

SEQ ID NO: 2623370 - DNA, 25 bp, Homo sapien
tgtttagctccctgaaggccctgag

SEQ ID NO: 2623371 - DNA, 25 bp, Homo sapien
ctgtgtttagctccctgaaggccct

SEQ ID NO: 2623372 - DNA, 25 bp, Homo sapien
tcctggtttttgttcgagagcttac

SEQ ID NO: 2623373 - DNA, 25 bp, Homo sapien
agtctagacttgatgaaatatcgca

SEQ ID NO: 2623374 - DNA, 25 bp, Homo sapien
tatcgcatcctggtttttgttcgag

SEQ ID NO: 2623375 - DNA, 25 bp, Homo sapien
gacttgatgaaatatcgcatcctgg

SEQ ID NO: 2623376 - DNA, 25 bp, Homo sapien
tcccttcccaaagctttctatagac

SEQ ID NO: 2623377 - DNA, 25 bp, Homo sapien
cgtattaacagctttacgatcgacc

SEQ ID NO: 2623378 - DNA, 25 bp, Homo sapien
ggatgaacctccaggtatttcgtat

SEQ ID NO: 2623379 - DNA, 25 bp, Homo sapien
cttcccaaagctttctatagactct

SEQ ID NO: 2623380 - DNA, 25 bp, Homo sapien
tgcagtagccggtcatcattcttgt

SEQ ID NO: 2623381 - DNA, 25 bp, Homo sapien
attctccacggcctgcagtagccgg

SEQ ID NO: 2623382 - DNA, 25 bp, Homo sapien
ccttcttgccgagcagtgaggccac

SEQ ID NO: 2623383 - DNA, 25 bp, Homo sapien
tgtcgtgtttggtggcactggcccc

SEQ ID NO: 2623384 - DNA, 25 bp, Homo sapien
aattatggcaaggaagagtactaca

SEQ ID NO: 2623385 - DNA, 25 bp, Homo sapien
gggaacatgtatacccattcaaggt

SEQ ID NO: 2623386 - DNA, 25 bp, Homo sapien
gagcacgtgtgaaattcccctatgg

SEQ ID NO: 2623387 - DNA, 25 bp, Homo sapien
tcaaggtagagctccatatgtgact

SEQ ID NO: 2623388 - DNA, 25 bp, Homo sapien
attaatagaatcagcagtactactt

SEQ ID NO: 2623389 - DNA, 25 bp, Homo sapien
ctaattaatagaatcagcagtacta

SEQ ID NO: 2623390 - DNA, 25 bp, Homo sapien
aattaatagaatcagcagtactact

SEQ ID NO: 2623391 - DNA, 25 bp, Homo sapien
taattaatagaatcagcagtactac

SEQ ID NO: 2623392 - DNA, 25 bp, Homo sapien
agctgtctacgcttttgaggtctta

SEQ ID NO: 2623393 - DNA, 25 bp, Homo sapien
tgatatttgtatatagggagagagg

SEQ ID NO: 2623394 - DNA, 25 bp, Homo sapien
tattgaagagggtcacaccatcgtt

SEQ ID NO: 2623395 - DNA, 25 bp, Homo sapien
cacaccatcgttttttgccaaggca

SEQ ID NO: 2623396 - DNA, 25 bp, Homo sapien
tgtggctagtgtaaatagaattact

SEQ ID NO: 2623397 - DNA, 25 bp, Homo sapien
tatttgtggctagtgtaaatagaat

SEQ ID NO: 2623398 - DNA, 25 bp, Homo sapien
tttatttgtggctagtgtaaataga

SEQ ID NO: 2623399 - DNA, 25 bp, Homo sapien
tttgtggctagtgtaaatagaatta

SEQ ID NO: 2623400 - DNA, 25 bp, Homo sapien
aaataagtgagaataggcagtttgt

SEQ ID NO: 2623401 - DNA, 25 bp, Homo sapien
tctgtggtgctatcaaatacgagat

SEQ ID NO: 2623402 - DNA, 25 bp, Homo sapien
ttattgttgactatactcattctgt

SEQ ID NO: 2623403 - DNA, 25 bp, Homo sapien
tatactcattctgtggtgctatcaa

SEQ ID NO: 2623404 - DNA, 25 bp, Homo sapien
tccaccagcatggaacgttcttcca

SEQ ID NO: 2623405 - DNA, 25 bp, Homo sapien
cctatccaccagcatggaacgttct

SEQ ID NO: 2623406 - DNA, 25 bp, Homo sapien
tcctatccaccagcatggaacgttc

SEQ ID NO: 2623407 - DNA, 25 bp, Homo sapien
tatccaccagcatggaacgttcttc

SEQ ID NO: 2623408 - DNA, 25 bp, Homo sapien
catgtgtaatcatgaccctgaggca

SEQ ID NO: 2623409 - DNA, 25 bp, Homo sapien
gaccctgaggcattccacgtgtcct

SEQ ID NO: 2623410 - DNA, 25 bp, Homo sapien
gcattccacgtgtccttttgcagca

SEQ ID NO: 2623411 - DNA, 25 bp, Homo sapien
tcatgaccctgaggcattccacgtg

SEQ ID NO: 2623412 - DNA, 25 bp, Homo sapien
tttgatacctaatctggtgctggcc

SEQ ID NO: 2623413 - DNA, 25 bp, Homo sapien
tctggtgctggcctgctgacttaag

SEQ ID NO: 2623414 - DNA, 25 bp, Homo sapien
atctggtgctggcctgctgacttaa

SEQ ID NO: 2623415 - DNA, 25 bp, Homo sapien
aatcatgggaagaagctggtacctc

SEQ ID NO: 2623416 - DNA, 25 bp, Homo sapien
tcagtctgcaggaagtgggcactgc

SEQ ID NO: 2623417 - DNA, 25 bp, Homo sapien
ttatgaggccaccaagaactatgct

SEQ ID NO: 2623418 - DNA, 25 bp, Homo sapien
caatttcaattggttcccactggcg

SEQ ID NO: 2623419 - DNA, 25 bp, Homo sapien
ggcgtgttcagggtggtatggccgt

SEQ ID NO: 2623420 - DNA, 25 bp, Homo sapien
cgtgttcagggtggtatggccgtag

SEQ ID NO: 2623421 - DNA, 25 bp, Homo sapien
tgttcagggtggtatggccgtagat

SEQ ID NO: 2623422 - DNA, 25 bp, Homo sapien
cagacgagatcgggcgtgttcaggg

SEQ ID NO: 2623423 - DNA, 25 bp, Homo sapien
caggctagacacttgcggtggattc

SEQ ID NO: 2623424 - DNA, 25 bp, Homo sapien
tgaggaatccagtgaaggcaaccca

SEQ ID NO: 2623425 - DNA, 25 bp, Homo sapien
gattcatgataatgcagctcagcag

SEQ ID NO: 2623426 - DNA, 25 bp, Homo sapien
cagccctgaatggaaattacctgga

SEQ ID NO: 2623427 - DNA, 25 bp, Homo sapien
gcttcctgatgcattcatggtggct

SEQ ID NO: 2623428 - DNA, 25 bp, Homo sapien
ggtggctgttcttggctgcgagatg

SEQ ID NO: 2623429 - DNA, 25 bp, Homo sapien
ctgttcttggctgcgagatgtaagg

SEQ ID NO: 2623430 - DNA, 25 bp, Homo sapien
tcttggctgcgagatgtaaggcgct

SEQ ID NO: 2623431 - DNA, 25 bp, Homo sapien
tgtgtgatcaacagcacaggacaag

SEQ ID NO: 2623432 - DNA, 25 bp, Homo sapien
aactggatgttaccgtatggatggc

SEQ ID NO: 2623433 - DNA, 25 bp, Homo sapien
cattcttggaactggcaatagcttg

SEQ ID NO: 2623434 - DNA, 25 bp, Homo sapien
gctgggtcccaaatagtgcttgtga

SEQ ID NO: 2623435 - DNA, 25 bp, Homo sapien
taccacgctagtgaaatgtctgccc

SEQ ID NO: 2623436 - DNA, 25 bp, Homo sapien
tggctccagcagacgggcaataaga

SEQ ID NO: 2623437 - DNA, 25 bp, Homo sapien
gagagcctgggctactgagacaaga

SEQ ID NO: 2623438 - DNA, 25 bp, Homo sapien
gaactttaccttggtagccactgga

SEQ ID NO: 2623439 - DNA, 25 bp, Homo sapien
taatgtaaagctgttttcccagagc

SEQ ID NO: 2623440 - DNA, 25 bp, Homo sapien
gagctgtcgacactttcggctgggc

SEQ ID NO: 2623441 - DNA, 25 bp, Homo sapien
gcataatgtaaagctgttttcccag

SEQ ID NO: 2623442 - DNA, 25 bp, Homo sapien
ttcccagagctgtcgacactttcgg

SEQ ID NO: 2623443 - DNA, 25 bp, Homo sapien
cagccaatcacacagttattcacaa

SEQ ID NO: 2623444 - DNA, 25 bp, Homo sapien
aatataaataccacagccaatcaca

SEQ ID NO: 2623445 - DNA, 25 bp, Homo sapien
aaataccacagccaatcacacagtt

SEQ ID NO: 2623446 - DNA, 25 bp, Homo sapien
atcacacagttattcacaaccaggg

SEQ ID NO: 2623447 - DNA, 25 bp, Homo sapien
caaatctttgaggtttatggggctc

SEQ ID NO: 2623448 - DNA, 25 bp, Homo sapien
aggtttatggggctcttgtgttcgc

SEQ ID NO: 2623449 - DNA, 25 bp, Homo sapien
tgtgttcgcagagaatctgcacagc

SEQ ID NO: 2623450 - DNA, 25 bp, Homo sapien
tatggggctcttgtgttcgcagaga

SEQ ID NO: 2623451 - DNA, 25 bp, Homo sapien
tgtatccccaaacgccactggtgag

SEQ ID NO: 2623452 - DNA, 25 bp, Homo sapien
tatcttgaggtaaatgctgtatccc

SEQ ID NO: 2623453 - DNA, 25 bp, Homo sapien
ttttcagtggtcgagaattactaca

SEQ ID NO: 2623454 - DNA, 25 bp, Homo sapien
cagccaagatctctttgagaacgat

SEQ ID NO: 2623455 - DNA, 25 bp, Homo sapien
gtgacagatctcactgtgaccattt

SEQ ID NO: 2623456 - DNA, 25 bp, Homo sapien
gaaagtgacagatctcactgtgacc

SEQ ID NO: 2623457 - DNA, 25 bp, Homo sapien
caagaagcagcggtatattcccatc

SEQ ID NO: 2623458 - DNA, 25 bp, Homo sapien
tttgtacagcaagaagcagcggtat

SEQ ID NO: 2623459 - DNA, 25 bp, Homo sapien
gcttccacagcgttagagctgccaa

SEQ ID NO: 2623460 - DNA, 25 bp, Homo sapien
taatgtaaggcattgtatccaagag

SEQ ID NO: 2623461 - DNA, 25 bp, Homo sapien
gcatcctgagagatttttgataata

SEQ ID NO: 2623462 - DNA, 25 bp, Homo sapien
gagaatctacaaggtttaggtctgc

SEQ ID NO: 2623463 - DNA, 25 bp, Homo sapien
taggaagtatgagttagtacatttc

SEQ ID NO: 2623464 - DNA, 25 bp, Homo sapien
tggctgaagctctgtagctcatgtg

SEQ ID NO: 2623465 - DNA, 25 bp, Homo sapien
tattcagtcacagagtttaagccac

SEQ ID NO: 2623466 - DNA, 25 bp, Homo sapien
aagtagcaagtttaaagttacatgc

SEQ ID NO: 2623467 - DNA, 25 bp, Homo sapien
atcacagtccaaagaatggaggtgg

SEQ ID NO: 2623468 - DNA, 25 bp, Homo sapien
gttatcacagtccaaagaatggagg

SEQ ID NO: 2623469 - DNA, 25 bp, Homo sapien
caaagaatggaggtgggttagtttg

SEQ ID NO: 2623470 - DNA, 25 bp, Homo sapien
ctgaaagttatcacagtccaaagaa

SEQ ID NO: 2623471 - DNA, 25 bp, Homo sapien
ctgagcttattttagagacttggtc

SEQ ID NO: 2623472 - DNA, 25 bp, Homo sapien
ttctgagcttattttagagacttgg

SEQ ID NO: 2623473 - DNA, 25 bp, Homo sapien
tctgagcttattttagagacttggt

SEQ ID NO: 2623474 - DNA, 25 bp, Homo sapien
tgagcttattttagagacttggtca

SEQ ID NO: 2623475 - DNA, 25 bp, Homo sapien
tggagtcgaagttattgatcttggg

SEQ ID NO: 2623476 - DNA, 25 bp, Homo sapien
taccgattcctttcccgatagtgga

SEQ ID NO: 2623477 - DNA, 25 bp, Homo sapien
tcctttcccgatagtggagtcgaag

SEQ ID NO: 2623478 - DNA, 25 bp, Homo sapien
tcccgatagtggagtcgaagttatt

SEQ ID NO: 2623479 - DNA, 25 bp, Homo sapien
ttatggatacaaactagctgtacac

SEQ ID NO: 2623480 - DNA, 25 bp, Homo sapien
tacttcatggtgaaaaggttgtgaa

SEQ ID NO: 2623481 - DNA, 25 bp, Homo sapien
ttatggggtccatgccagaaaaaat

SEQ ID NO: 2623482 - DNA, 25 bp, Homo sapien
ggttgtgaaccaatgattcagaagt

SEQ ID NO: 2623483 - DNA, 25 bp, Homo sapien
tgtcacttagtctgtctttgttttc

SEQ ID NO: 2623484 - DNA, 25 bp, Homo sapien
tagtctgtctttgttttctcgtata

SEQ ID NO: 2623485 - DNA, 25 bp, Homo sapien
ctgtctttgttttctcgtatagaac

SEQ ID NO: 2623486 - DNA, 25 bp, Homo sapien
ctttgttttctcgtatagaactgat

SEQ ID NO: 2623487 - DNA, 25 bp, Homo sapien
aatatttctaagttctgcaaattaa

SEQ ID NO: 2623488 - DNA, 25 bp, Homo sapien
aaaatatttctaagttctgcaaatt

SEQ ID NO: 2623489 - DNA, 25 bp, Homo sapien
aaatatttctaagttctgcaaatta

SEQ ID NO: 2623490 - DNA, 25 bp, Homo sapien
aaaaatatttctaagttctgcaaat

SEQ ID NO: 2623491 - DNA, 25 bp, Homo sapien
tatcttgtaactccttattgtgtaa

SEQ ID NO: 2623492 - DNA, 25 bp, Homo sapien
gagagagaagatcttgttggtcagc

SEQ ID NO: 2623493 - DNA, 25 bp, Homo sapien
cttttgcttgcaatagagagagaag

SEQ ID NO: 2623494 - DNA, 25 bp, Homo sapien
tattgtgtaaggtaagggaagcaac

SEQ ID NO: 2623495 - DNA, 25 bp, Homo sapien
ggtggaatggtatgagtcaaagctt

SEQ ID NO: 2623496 - DNA, 25 bp, Homo sapien
tttgggtggaatggtatgagtcaaa

SEQ ID NO: 2623497 - DNA, 25 bp, Homo sapien
aaagcttaggtctgcttccgcctcc

SEQ ID NO: 2623498 - DNA, 25 bp, Homo sapien
ggtatgagtcaaagcttaggtctgc

SEQ ID NO: 2623499 - DNA, 25 bp, Homo sapien
gattggagttcgacctgtagctgtt

SEQ ID NO: 2623500 - DNA, 25 bp, Homo sapien
cagttctgcccttcgggattggagt

SEQ ID NO: 2623501 - DNA, 25 bp, Homo sapien
tctgcccttcgggattggagttcga

SEQ ID NO: 2623502 - DNA, 25 bp, Homo sapien
ccttcgggattggagttcgacctgt

SEQ ID NO: 2623503 - DNA, 25 bp, Homo sapien
aaatctcagtgttgtttaagcatac

SEQ ID NO: 2623504 - DNA, 25 bp, Homo sapien
ttctttaagtttctggctgaggtca

SEQ ID NO: 2623505 - DNA, 25 bp, Homo sapien
tagcctcctcgtatttgctctgagt

SEQ ID NO: 2623506 - DNA, 25 bp, Homo sapien
gctgaggtcagagctgttctctgaa

SEQ ID NO: 2623507 - DNA, 25 bp, Homo sapien
ttatttcctcttccgtgaccctcag

SEQ ID NO: 2623508 - DNA, 25 bp, Homo sapien
tgaccctcagctcgtggaaatgtga

SEQ ID NO: 2623509 - DNA, 25 bp, Homo sapien
tatccatgctttcaggtgagacaag

SEQ ID NO: 2623510 - DNA, 25 bp, Homo sapien
tctgcagatcctgctttagcacatt

SEQ ID NO: 2623511 - DNA, 25 bp, Homo sapien
cgtactcttccacaggtggcttaat

SEQ ID NO: 2623512 - DNA, 25 bp, Homo sapien
tcgtactcttccacaggtggcttaa

SEQ ID NO: 2623513 - DNA, 25 bp, Homo sapien
ctcgtactcttccacaggtggctta

SEQ ID NO: 2623514 - DNA, 25 bp, Homo sapien
tactcttccacaggtggcttaatca

SEQ ID NO: 2623515 - DNA, 25 bp, Homo sapien
gctttagccctggacacgtttgtca

SEQ ID NO: 2623516 - DNA, 25 bp, Homo sapien
tgggcttctttgtacagctgtgaca

SEQ ID NO: 2623517 - DNA, 25 bp, Homo sapien
caccagttgtttgagctgggtcaac

SEQ ID NO: 2623518 - DNA, 25 bp, Homo sapien
cagagttctctttttgtgcatccac

SEQ ID NO: 2623519 - DNA, 25 bp, Homo sapien
ttttcataggaagaccgaggtacca

SEQ ID NO: 2623520 - DNA, 25 bp, Homo sapien
tctggacaacctctgaatggacctt

SEQ ID NO: 2623521 - DNA, 25 bp, Homo sapien
cagtccgcagcgtggttatcacttg

SEQ ID NO: 2623522 - DNA, 25 bp, Homo sapien
gagacctcacttctaatctggacaa

SEQ ID NO: 2623523 - DNA, 25 bp, Homo sapien
tgttcccctggatgataaagctctt

SEQ ID NO: 2623524 - DNA, 25 bp, Homo sapien
cagagccgattgaggcgtggaacca

SEQ ID NO: 2623525 - DNA, 25 bp, Homo sapien
gctattcggaacctccgagacaggg

SEQ ID NO: 2623526 - DNA, 25 bp, Homo sapien
gtccagcgccatctcaaattgccgg

SEQ ID NO: 2623527 - DNA, 25 bp, Homo sapien
agcttgttgagtaggagagctggga

SEQ ID NO: 2623528 - DNA, 25 bp, Homo sapien
tttggtgacttccttcgacatctca

SEQ ID NO: 2623529 - DNA, 25 bp, Homo sapien
ccttttggatgagcttgttgagtag

SEQ ID NO: 2623530 - DNA, 25 bp, Homo sapien
gaggctgttcaaggcctccttcaat

SEQ ID NO: 2623531 - DNA, 25 bp, Homo sapien
tattgattacccactatatggccag

SEQ ID NO: 2623532 - DNA, 25 bp, Homo sapien
tctcagtggctgtttcaagggtctt

SEQ ID NO: 2623533 - DNA, 25 bp, Homo sapien
tatggccagcattgtataatccttg

SEQ ID NO: 2623534 - DNA, 25 bp, Homo sapien
tggttcctcaatacagccgctgatg

SEQ ID NO: 2623535 - DNA, 25 bp, Homo sapien
tatgacctcctggtgttgtttcttg

SEQ ID NO: 2623536 - DNA, 25 bp, Homo sapien
aaactgatatgacctcctggtgttg

SEQ ID NO: 2623537 - DNA, 25 bp, Homo sapien
gatatgacctcctggtgttgtttct

SEQ ID NO: 2623538 - DNA, 25 bp, Homo sapien
actgatatgacctcctggtgttgtt

SEQ ID NO: 2623539 - DNA, 25 bp, Homo sapien
atttctttaggatgtccagatactt

SEQ ID NO: 2623540 - DNA, 25 bp, Homo sapien
ccagatacttcaaggggcataacca

SEQ ID NO: 2623541 - DNA, 25 bp, Homo sapien
tatttctttaggatgtccagatact

SEQ ID NO: 2623542 - DNA, 25 bp, Homo sapien
tgtccagatacttcaaggggcataa

SEQ ID NO: 2623543 - DNA, 25 bp, Homo sapien
tttttacacatggtaaggatttgct

SEQ ID NO: 2623544 - DNA, 25 bp, Homo sapien
tttacacatggtaaggatttgcttc

SEQ ID NO: 2623545 - DNA, 25 bp, Homo sapien
gtttttacacatggtaaggatttgc

SEQ ID NO: 2623546 - DNA, 25 bp, Homo sapien
tacacatggtaaggatttgcttcag

SEQ ID NO: 2623547 - DNA, 25 bp, Homo sapien
gataaaaggctacacctcgtcaggc

SEQ ID NO: 2623548 - DNA, 25 bp, Homo sapien
gaaggagcattcactgcaggaggcc

SEQ ID NO: 2623549 - DNA, 25 bp, Homo sapien
gaagaagctacgctaggccacagtg

SEQ ID NO: 2623550 - DNA, 25 bp, Homo sapien
gaatgagaacaatggcagcggctgc

SEQ ID NO: 2623551 - DNA, 25 bp, Homo sapien
aaatctgtactttcgagctccatag

SEQ ID NO: 2623552 - DNA, 25 bp, Homo sapien
cccaattttcttgcctatacggtga

SEQ ID NO: 2623553 - DNA, 25 bp, Homo sapien
tcagcatggaacaatgatgacagca

SEQ ID NO: 2623554 - DNA, 25 bp, Homo sapien
gagtcacggccagtgggtcccaatt

SEQ ID NO: 2623555 - DNA, 25 bp, Homo sapien
tccctgttgtctggcgcctacagca

SEQ ID NO: 2623556 - DNA, 25 bp, Homo sapien
gcacttccggttcggagagtccctg

SEQ ID NO: 2623557 - DNA, 25 bp, Homo sapien
tcccttccccgcaggttagacgcgc

SEQ ID NO: 2623558 - DNA, 25 bp, Homo sapien
tcggagagtccctgttgtctggcgc

SEQ ID NO: 2623559 - DNA, 25 bp, Homo sapien
gagacaataccgttgccatgggaac

SEQ ID NO: 2623560 - DNA, 25 bp, Homo sapien
gtgcctcgcgaaagctgcacagcct

SEQ ID NO: 2623561 - DNA, 25 bp, Homo sapien
cgcagcccaggtccggccaaggaga

SEQ ID NO: 2623562 - DNA, 25 bp, Homo sapien
gaacggaacgctacgggttctgctg

SEQ ID NO: 2623563 - DNA, 25 bp, Homo sapien
ctgagcccctcaaggacgaatcgct

SEQ ID NO: 2623564 - DNA, 25 bp, Homo sapien
tctgttcctatgacgttccgcacgg

SEQ ID NO: 2623565 - DNA, 25 bp, Homo sapien
gtctgtaagccctgacgccgcaggt

SEQ ID NO: 2623566 - DNA, 25 bp, Homo sapien
gccgcaggtcgagctctgagagcct

SEQ ID NO: 2623567 - DNA, 25 bp, Homo sapien
gaatgttaacatccaccaagtcgcc

SEQ ID NO: 2623568 - DNA, 25 bp, Homo sapien
ggctccagagcatccattatccgaa

SEQ ID NO: 2623569 - DNA, 25 bp, Homo sapien
gctgttagatgataggagaaacctc

SEQ ID NO: 2623570 - DNA, 25 bp, Homo sapien
caactctcaaggaaggctatgccag

SEQ ID NO: 2623571 - DNA, 25 bp, Homo sapien
tcccagtcgatgtcattgctaacag

SEQ ID NO: 2623572 - DNA, 25 bp, Homo sapien
atatggaagcagaaatcccagtcga

SEQ ID NO: 2623573 - DNA, 25 bp, Homo sapien
gcagaaatcccagtcgatgtcattg

SEQ ID NO: 2623574 - DNA, 25 bp, Homo sapien
tcgatgtcattgctaacagttggga

SEQ ID NO: 2623575 - DNA, 25 bp, Homo sapien
gctgagctactttcttctgggattg

SEQ ID NO: 2623576 - DNA, 25 bp, Homo sapien
gacatacagtctatggccttctcct

SEQ ID NO: 2623577 - DNA, 25 bp, Homo sapien
ccagtgggatacaactcatctgttt

SEQ ID NO: 2623578 - DNA, 25 bp, Homo sapien
agctgggatctcggtttgctgtgac

SEQ ID NO: 2623579 - DNA, 25 bp, Homo sapien
catgcatggaaccagaaggtgggct

SEQ ID NO: 2623580 - DNA, 25 bp, Homo sapien
ggaacagacaatgaaccatgcatgg

SEQ ID NO: 2623581 - DNA, 25 bp, Homo sapien
tgttactcacgctggcctcaagaga

SEQ ID NO: 2623582 - DNA, 25 bp, Homo sapien
agttgcacaatcacgggctccctgt

SEQ ID NO: 2623583 - DNA, 25 bp, Homo sapien
aatagaagataagtcccttgaggac

SEQ ID NO: 2623584 - DNA, 25 bp, Homo sapien
ctctacccctatagaaatgacaggt

SEQ ID NO: 2623585 - DNA, 25 bp, Homo sapien
gaacgagtcgatagggtcaggcatt

SEQ ID NO: 2623586 - DNA, 25 bp, Homo sapien
tagagctctctaagaaatcaccgaa

SEQ ID NO: 2623587 - DNA, 25 bp, Homo sapien
taattgtgatcaaatagcttgttat

SEQ ID NO: 2623588 - DNA, 25 bp, Homo sapien
tcactagcatcctctaattgtgatc

SEQ ID NO: 2623589 - DNA, 25 bp, Homo sapien
ggttacccaatagtacagttcatgt

SEQ ID NO: 2623590 - DNA, 25 bp, Homo sapien
tattattattagaaacttatggatt

SEQ ID NO: 2623591 - DNA, 25 bp, Homo sapien
gccagagctcgtgcacatttccagt

SEQ ID NO: 2623592 - DNA, 25 bp, Homo sapien
taatccgagaaaggatgacacatcg

SEQ ID NO: 2623593 - DNA, 25 bp, Homo sapien
gatggtccccaaaaataatccgaga

SEQ ID NO: 2623594 - DNA, 25 bp, Homo sapien
ccataagctaggttggccagagctc

SEQ ID NO: 2623595 - DNA, 25 bp, Homo sapien
tagttatgtccccaggtagttcacc

SEQ ID NO: 2623596 - DNA, 25 bp, Homo sapien
gttcaccttccacactaagttgtaa

SEQ ID NO: 2623597 - DNA, 25 bp, Homo sapien
catggcatttcacatatacaagttt

SEQ ID NO: 2623598 - DNA, 25 bp, Homo sapien
cctttgagggcttctttatgttaca

SEQ ID NO: 2623599 - DNA, 25 bp, Homo sapien
tatctgtcgttcgtagactcttgaa

SEQ ID NO: 2623600 - DNA, 25 bp, Homo sapien
ttccctagaaggatatagagattcc

SEQ ID NO: 2623601 - DNA, 25 bp, Homo sapien
tataaacaccatactgcattgtgca

SEQ ID NO: 2623602 - DNA, 25 bp, Homo sapien
aaaactccatatatcccactgtgtg

SEQ ID NO: 2623603 - DNA, 25 bp, Homo sapien
cttttagtgataagggagctgtctc

SEQ ID NO: 2623604 - DNA, 25 bp, Homo sapien
gtctcttgagtttggagaccactgg

SEQ ID NO: 2623605 - DNA, 25 bp, Homo sapien
aagtctaagtacgtcctctttcatg

SEQ ID NO: 2623606 - DNA, 25 bp, Homo sapien
caaggcttcctccacttgtgataat

SEQ ID NO: 2623607 - DNA, 25 bp, Homo sapien
agattatgtcttccctctttccaaa

SEQ ID NO: 2623608 - DNA, 25 bp, Homo sapien
aagattatgtcttccctctttccaa

SEQ ID NO: 2623609 - DNA, 25 bp, Homo sapien
attatgtcttccctctttccaaaga

SEQ ID NO: 2623610 - DNA, 25 bp, Homo sapien
ttatgtcttccctctttccaaagag

SEQ ID NO: 2623611 - DNA, 25 bp, Homo sapien
atatgcattgcatgaagggtgaaag

SEQ ID NO: 2623612 - DNA, 25 bp, Homo sapien
cctcaaatatgcattgcatgaaggg

SEQ ID NO: 2623613 - DNA, 25 bp, Homo sapien
ttcccctcaaatatgcattgcatga

SEQ ID NO: 2623614 - DNA, 25 bp, Homo sapien
aagcaggttatctaatgatttagca

SEQ ID NO: 2623615 - DNA, 25 bp, Homo sapien
aaaaggcatgcttcagtcaaaaaca

SEQ ID NO: 2623616 - DNA, 25 bp, Homo sapien
aagacagacattaaaaaggcatgct

SEQ ID NO: 2623617 - DNA, 25 bp, Homo sapien
ggagttagagggtgaggagcaagaa

SEQ ID NO: 2623618 - DNA, 25 bp, Homo sapien
tagagggtgaggagcaagaagacag

SEQ ID NO: 2623619 - DNA, 25 bp, Homo sapien
tatttgaggtcgtatttgccttcca

SEQ ID NO: 2623620 - DNA, 25 bp, Homo sapien
cagcttgaccagagcttccaggatt

SEQ ID NO: 2623621 - DNA, 25 bp, Homo sapien
ccaggtcaacagtgtattcttggct

SEQ ID NO: 2623622 - DNA, 25 bp, Homo sapien
caggccacgcccagagtgtagtaca

SEQ ID NO: 2623623 - DNA, 25 bp, Homo sapien
taaacgcagctaggaatggaaggat

SEQ ID NO: 2623624 - DNA, 25 bp, Homo sapien
aacgcagctaggaatggaaggatat

SEQ ID NO: 2623625 - DNA, 25 bp, Homo sapien
ctaaacgcagctaggaatggaagga

SEQ ID NO: 2623626 - DNA, 25 bp, Homo sapien
aaacgcagctaggaatggaaggata

SEQ ID NO: 2623627 - DNA, 25 bp, Homo sapien
tctgccttctgcaggttgaaatagg

SEQ ID NO: 2623628 - DNA, 25 bp, Homo sapien
tctctctgccttctgcaggttgaaa

SEQ ID NO: 2623629 - DNA, 25 bp, Homo sapien
tgccttctgcaggttgaaataggct

SEQ ID NO: 2623630 - DNA, 25 bp, Homo sapien
ccttctgcaggttgaaataggcttc

SEQ ID NO: 2623631 - DNA, 25 bp, Homo sapien
gacttgtaattcacaaacacctcct

SEQ ID NO: 2623632 - DNA, 25 bp, Homo sapien
caagtgttaggtcgttctcagagac

SEQ ID NO: 2623633 - DNA, 25 bp, Homo sapien
tctcagagacttgtaattcacaaac

SEQ ID NO: 2623634 - DNA, 25 bp, Homo sapien
ctgcccaaagcaagtgttaggtcgt

SEQ ID NO: 2623635 - DNA, 25 bp, Homo sapien
taggttcagtctgtggatggccaag

SEQ ID NO: 2623636 - DNA, 25 bp, Homo sapien
agatctgacgtcctatcacccttgg

SEQ ID NO: 2623637 - DNA, 25 bp, Homo sapien
tcacccttggcagcaataacatcgc

SEQ ID NO: 2623638 - DNA, 25 bp, Homo sapien
caaagtatgccagagctaggttcag

SEQ ID NO: 2623639 - DNA, 25 bp, Homo sapien
gacaaggtaagcacccaatgacagt

SEQ ID NO: 2623640 - DNA, 25 bp, Homo sapien
tgctcatcacgtggtaagttctcaa

SEQ ID NO: 2623641 - DNA, 25 bp, Homo sapien
tcactgtgggagatacctgaagcca

SEQ ID NO: 2623642 - DNA, 25 bp, Homo sapien
gagaaaaacattgagtccacaccca

SEQ ID NO: 2623643 - DNA, 25 bp, Homo sapien
cttcagtgaacaaagaaacacagac

SEQ ID NO: 2623644 - DNA, 25 bp, Homo sapien
ttcagtgaacaaagaaacacagaca

SEQ ID NO: 2623645 - DNA, 25 bp, Homo sapien
acaaagaaacacagacagaatgagc

SEQ ID NO: 2623646 - DNA, 25 bp, Homo sapien
tgaacaaagaaacacagacagaatg

SEQ ID NO: 2623647 - DNA, 25 bp, Homo sapien
cagacatggcataagctttggccag

SEQ ID NO: 2623648 - DNA, 25 bp, Homo sapien
cctctccagacatggcataagcttt

SEQ ID NO: 2623649 - DNA, 25 bp, Homo sapien
gctttggccagtaacgcactcattt

SEQ ID NO: 2623650 - DNA, 25 bp, Homo sapien
gccagtaacgcactcatttctgcag

SEQ ID NO: 2623651 - DNA, 25 bp, Homo sapien
agaatcttagataggctgtttgcca

SEQ ID NO: 2623652 - DNA, 25 bp, Homo sapien
tgattttgtatgagactgtgaccca

SEQ ID NO: 2623653 - DNA, 25 bp, Homo sapien
ttatcaaccgatactgcacaggcca

SEQ ID NO: 2623654 - DNA, 25 bp, Homo sapien
cctcatgtgactgggaaataacttc

SEQ ID NO: 2623655 - DNA, 25 bp, Homo sapien
tacaattataatcagtgacacagtg

SEQ ID NO: 2623656 - DNA, 25 bp, Homo sapien
aattataatcagtgacacagtgaac

SEQ ID NO: 2623657 - DNA, 25 bp, Homo sapien
gatattatcaaattagactccaaat

SEQ ID NO: 2623658 - DNA, 25 bp, Homo sapien
taatcagtgacacagtgaacatctt

SEQ ID NO: 2623659 - DNA, 25 bp, Homo sapien
tttctccattttggacaagccattt

SEQ ID NO: 2623660 - DNA, 25 bp, Homo sapien
gttgctcgatatgcattgatacttc

SEQ ID NO: 2623661 - DNA, 25 bp, Homo sapien
ctctgagcccaatgttgctcgatat

SEQ ID NO: 2623662 - DNA, 25 bp, Homo sapien
tccattttggacaagccatttgcaa

SEQ ID NO: 2623663 - DNA, 25 bp, Homo sapien
gattatcaggcattggtactggtgg

SEQ ID NO: 2623664 - DNA, 25 bp, Homo sapien
aagtacttggttagaagtggaggat

SEQ ID NO: 2623665 - DNA, 25 bp, Homo sapien
gcttggtatactagaaagtacttgg

SEQ ID NO: 2623666 - DNA, 25 bp, Homo sapien
ggtttgtcacaaccaaggtcatggt

SEQ ID NO: 2623667 - DNA, 25 bp, Homo sapien
caaaaatcttgggttgacaacacca

SEQ ID NO: 2623668 - DNA, 25 bp, Homo sapien
tctctcagtcttgccatggtaacac

SEQ ID NO: 2623669 - DNA, 25 bp, Homo sapien
cagcttgctggataacaatgtaggc

SEQ ID NO: 2623670 - DNA, 25 bp, Homo sapien
tttgcatgtatgtgaccagaggaac

SEQ ID NO: 2623671 - DNA, 25 bp, Homo sapien
tgtgatcagggctcatgtagccttg

SEQ ID NO: 2623672 - DNA, 25 bp, Homo sapien
tatagttgtgcactactctgctcag

SEQ ID NO: 2623673 - DNA, 25 bp, Homo sapien
tatggccaccactaaatacttaagc

SEQ ID NO: 2623674 - DNA, 25 bp, Homo sapien
gaaatcttacatcaatacaacagcg

SEQ ID NO: 2623675 - DNA, 25 bp, Homo sapien
tcttgccccagatcatagagcctat

SEQ ID NO: 2623676 - DNA, 25 bp, Homo sapien
gagcctatgattagcagtgtcagaa

SEQ ID NO: 2623677 - DNA, 25 bp, Homo sapien
ttcatggctgccctacaagagagga

SEQ ID NO: 2623678 - DNA, 25 bp, Homo sapien
taataacagctaaggatcttgcccc

SEQ ID NO: 2623679 - DNA, 25 bp, Homo sapien
caggatcagtccgttgtgatgtgtc

SEQ ID NO: 2623680 - DNA, 25 bp, Homo sapien
ccctgagctctatggagaaggcatt

SEQ ID NO: 2623681 - DNA, 25 bp, Homo sapien
tcagcctggcaattccgaaggagca

SEQ ID NO: 2623682 - DNA, 25 bp, Homo sapien
caacaatgacataacccaccaggat

SEQ ID NO: 2623683 - DNA, 25 bp, Homo sapien
tgtaacgaaaccagccaaaagtcgc

SEQ ID NO: 2623684 - DNA, 25 bp, Homo sapien
cagatcctgcccgtattatgaaaag

SEQ ID NO: 2623685 - DNA, 25 bp, Homo sapien
tgaagcctttagcagtctgtaagcc

SEQ ID NO: 2623686 - DNA, 25 bp, Homo sapien
ctatagtcactgtagctgaatacct

SEQ ID NO: 2623687 - DNA, 25 bp, Homo sapien
ctgccacagcaaagtccttaaaaga

SEQ ID NO: 2623688 - DNA, 25 bp, Homo sapien
tctgccacagcaaagtccttaaaag

SEQ ID NO: 2623689 - DNA, 25 bp, Homo sapien
tgccacagcaaagtccttaaaagac

SEQ ID NO: 2623690 - DNA, 25 bp, Homo sapien
gacatctggctttggcagttacccc

SEQ ID NO: 2623691 - DNA, 25 bp, Homo sapien
gagacagcaatcgttgtaccaggtt

SEQ ID NO: 2623692 - DNA, 25 bp, Homo sapien
caggagagtacatcggaaaactagc

SEQ ID NO: 2623693 - DNA, 25 bp, Homo sapien
gggattgattactccagcaagatgc

SEQ ID NO: 2623694 - DNA, 25 bp, Homo sapien
tgccctctgtcatgcttctgtgcct

SEQ ID NO: 2623695 - DNA, 25 bp, Homo sapien
actgccctctgtcatgcttctgtgc

SEQ ID NO: 2623696 - DNA, 25 bp, Homo sapien
atacactgccctctgtcatgcttct

SEQ ID NO: 2623697 - DNA, 25 bp, Homo sapien
ctttgtatgtagagttccttcttcc

SEQ ID NO: 2623698 - DNA, 25 bp, Homo sapien
tcaggacatgctgccctgtacaaca

SEQ ID NO: 2623699 - DNA, 25 bp, Homo sapien
agagaactggcacacatcccttgga

SEQ ID NO: 2623700 - DNA, 25 bp, Homo sapien
tcagcatttcttgcagcccctttca

SEQ ID NO: 2623701 - DNA, 25 bp, Homo sapien
gaactggcacacatcccttggaatc

SEQ ID NO: 2623702 - DNA, 25 bp, Homo sapien
tattgttggctatcctgtatagagg

SEQ ID NO: 2623703 - DNA, 25 bp, Homo sapien
ggctatcctgtatagaggttttcaa

SEQ ID NO: 2623704 - DNA, 25 bp, Homo sapien
ttgtctttattgttggctatcctgt

SEQ ID NO: 2623705 - DNA, 25 bp, Homo sapien
ttggctatcctgtatagaggttttc

SEQ ID NO: 2623706 - DNA, 25 bp, Homo sapien
agattgaggtctgtggctgtggatg

SEQ ID NO: 2623707 - DNA, 25 bp, Homo sapien
tgctggaagtgttctcaagaagtag

SEQ ID NO: 2623708 - DNA, 25 bp, Homo sapien
tgtggatgcccctcatttcagtccc

SEQ ID NO: 2623709 - DNA, 25 bp, Homo sapien
cagacaatgtaaacttaacggaatc

SEQ ID NO: 2623710 - DNA, 25 bp, Homo sapien
caactggagtacgtactgtactgca

SEQ ID NO: 2623711 - DNA, 25 bp, Homo sapien
gcagtgcgcgcagatgttgtgaata

SEQ ID NO: 2623712 - DNA, 25 bp, Homo sapien
catatacagtacatggtgccattca

SEQ ID NO: 2623713 - DNA, 25 bp, Homo sapien
gaatatccactcaaaacgctatgtg

SEQ ID NO: 2623714 - DNA, 25 bp, Homo sapien
cagagcaggcgacactttggtgcca

SEQ ID NO: 2623715 - DNA, 25 bp, Homo sapien
tccaccgagaattgatgaaatgctt

SEQ ID NO: 2623716 - DNA, 25 bp, Homo sapien
cattcgatgatgtagtgcttccacc

SEQ ID NO: 2623717 - DNA, 25 bp, Homo sapien
tatttgtgttctaattgacccagga

SEQ ID NO: 2623718 - DNA, 25 bp, Homo sapien
gccggtctgaagagtggcgggactg

SEQ ID NO: 2623719 - DNA, 25 bp, Homo sapien
atggttcggcggctctaagcgctca

SEQ ID NO: 2623720 - DNA, 25 bp, Homo sapien
gtgccgcctccttccggtctcggtg

SEQ ID NO: 2623721 - DNA, 25 bp, Homo sapien
cgcaaaggtagggtttccgcactcg

SEQ ID NO: 2623722 - DNA, 25 bp, Homo sapien
ttggcctcctttccggcgctgccgc

SEQ ID NO: 2623723 - DNA, 25 bp, Homo sapien
gctgccgctcgctcctatttccgat

SEQ ID NO: 2623724 - DNA, 25 bp, Homo sapien
tggcctcctttccggcgctgccgct

SEQ ID NO: 2623725 - DNA, 25 bp, Homo sapien
tgccgctcgctcctatttccgatct

SEQ ID NO: 2623726 - DNA, 25 bp, Homo sapien
gaactgcaaagcctccacgccgttt

SEQ ID NO: 2623727 - DNA, 25 bp, Homo sapien
tgccgcttagctggcggctccgcat

SEQ ID NO: 2623728 - DNA, 25 bp, Homo sapien
ggcggctccgcatctatttcgtttc

SEQ ID NO: 2623729 - DNA, 25 bp, Homo sapien
ctcctctgctgtggcgtgccgctta

SEQ ID NO: 2623730 - DNA, 25 bp, Homo sapien
gaggcatcaacattctcaagtcctg

SEQ ID NO: 2623731 - DNA, 25 bp, Homo sapien
tcaagtcctgcattaaatgtcttgt

SEQ ID NO: 2623732 - DNA, 25 bp, Homo sapien
gaaaagatgagaatccgttccttat

SEQ ID NO: 2623733 - DNA, 25 bp, Homo sapien
gtcctgcattaaatgtcttgttcta

SEQ ID NO: 2623734 - DNA, 25 bp, Homo sapien
aaactgactttatgcccgtgtaaca

SEQ ID NO: 2623735 - DNA, 25 bp, Homo sapien
agcacctctcaacataagcacaaca

SEQ ID NO: 2623736 - DNA, 25 bp, Homo sapien
actttatgcccgtgtaacaaacctg

SEQ ID NO: 2623737 - DNA, 25 bp, Homo sapien
aagcacctctcaacataagcacaac

SEQ ID NO: 2623738 - DNA, 25 bp, Homo sapien
caaatagcttatccttacgatccat

SEQ ID NO: 2623739 - DNA, 25 bp, Homo sapien
gcttatccttacgatccattttagt

SEQ ID NO: 2623740 - DNA, 25 bp, Homo sapien
taatcacaaatagcttatccttacg

SEQ ID NO: 2623741 - DNA, 25 bp, Homo sapien
ctcgttaatcacaaatagcttatcc

SEQ ID NO: 2623742 - DNA, 25 bp, Homo sapien
tagccgggatattacaggcctgtgc

SEQ ID NO: 2623743 - DNA, 25 bp, Homo sapien
ccgaggtaggtgaattgtctgagca

SEQ ID NO: 2623744 - DNA, 25 bp, Homo sapien
ggtttttccggtgtagcctcagctg

SEQ ID NO: 2623745 - DNA, 25 bp, Homo sapien
cactaagggattgggtgaaaagcct

SEQ ID NO: 2623746 - DNA, 25 bp, Homo sapien
cacatatagagatcctgttttttct

SEQ ID NO: 2623747 - DNA, 25 bp, Homo sapien
tcaaaatagatgcatttattacagt

SEQ ID NO: 2623748 - DNA, 25 bp, Homo sapien
atagatgcatttattacagttcttc

SEQ ID NO: 2623749 - DNA, 25 bp, Homo sapien
tcttagcttcaaaatagatgcattt

SEQ ID NO: 2623750 - DNA, 25 bp, Homo sapien
tgtagtcaatgcttaccacctattc

SEQ ID NO: 2623751 - DNA, 25 bp, Homo sapien
ctcaacccttaacatgaaacactag

SEQ ID NO: 2623752 - DNA, 25 bp, Homo sapien
tctttaaaggtatcaagtttcgtga

SEQ ID NO: 2623753 - DNA, 25 bp, Homo sapien
gaaacactaggagtctataacataa

SEQ ID NO: 2623754 - DNA, 25 bp, Homo sapien
gaaagatatggagtaagctttttca

SEQ ID NO: 2623755 - DNA, 25 bp, Homo sapien
aacaaggaatttagcagatggtccg

SEQ ID NO: 2623756 - DNA, 25 bp, Homo sapien
ttagcagatggtccgtgaggtgaat

SEQ ID NO: 2623757 - DNA, 25 bp, Homo sapien
cagatggtccgtgaggtgaatttga

SEQ ID NO: 2623758 - DNA, 25 bp, Homo sapien
gaatttagcagatggtccgtgaggt

SEQ ID NO: 2623759 - DNA, 25 bp, Homo sapien
aaatagttgtaacttttgcacaact

SEQ ID NO: 2623760 - DNA, 25 bp, Homo sapien
aatagttgtaacttttgcacaacta

SEQ ID NO: 2623761 - DNA, 25 bp, Homo sapien
tccagtcatcttcagttcagcgagg

SEQ ID NO: 2623762 - DNA, 25 bp, Homo sapien
cagtcatcttcagttcagcgagggt

SEQ ID NO: 2623763 - DNA, 25 bp, Homo sapien
tcaaacagtttccagtcatcttcag

SEQ ID NO: 2623764 - DNA, 25 bp, Homo sapien
catcttcagttcagcgagggtatga

SEQ ID NO: 2623765 - DNA, 25 bp, Homo sapien
gaataacacaactatatctactaaa

SEQ ID NO: 2623766 - DNA, 25 bp, Homo sapien
tatttaacagtagactgccttgttt

SEQ ID NO: 2623767 - DNA, 25 bp, Homo sapien
attgataatccataaaaccaaggtg

SEQ ID NO: 2623768 - DNA, 25 bp, Homo sapien
gtttctataacttggctataacctc

SEQ ID NO: 2623769 - DNA, 25 bp, Homo sapien
tcttttaacaaagcataatgtggta

SEQ ID NO: 2623770 - DNA, 25 bp, Homo sapien
caaagcataatgtggtaattcatca

SEQ ID NO: 2623771 - DNA, 25 bp, Homo sapien
attaagagttcttttaacaaagcat

SEQ ID NO: 2623772 - DNA, 25 bp, Homo sapien
gagttcttttaacaaagcataatgt

SEQ ID NO: 2623773 - DNA, 25 bp, Homo sapien
gttccttattccaagatatatcatg

SEQ ID NO: 2623774 - DNA, 25 bp, Homo sapien
gtatgttagttccttattccaagat

SEQ ID NO: 2623775 - DNA, 25 bp, Homo sapien
tgttagttccttattccaagatata

SEQ ID NO: 2623776 - DNA, 25 bp, Homo sapien
ccttattccaagatatatcatgtat

SEQ ID NO: 2623777 - DNA, 25 bp, Homo sapien
ctgaaagttccgaaaccatatccta

SEQ ID NO: 2623778 - DNA, 25 bp, Homo sapien
tgaaagttccgaaaccatatcctat

SEQ ID NO: 2623779 - DNA, 25 bp, Homo sapien
taaacacgtggtccacaaatggttg

SEQ ID NO: 2623780 - DNA, 25 bp, Homo sapien
aggagactgagggagcagaagcttg

SEQ ID NO: 2623781 - DNA, 25 bp, Homo sapien
aggcgtgatgatgggtgcttgtaat

SEQ ID NO: 2623782 - DNA, 25 bp, Homo sapien
ctgagggagcagaagcttgaacccg

SEQ ID NO: 2623783 - DNA, 25 bp, Homo sapien
agactgagggagcagaagcttgaac

SEQ ID NO: 2623784 - DNA, 25 bp, Homo sapien
taccctcagaggttaggatgatgtg

SEQ ID NO: 2623785 - DNA, 25 bp, Homo sapien
ggttcacatcttgcttgtcacaatg

SEQ ID NO: 2623786 - DNA, 25 bp, Homo sapien
tcccaaaaggtatactggctataac

SEQ ID NO: 2623787 - DNA, 25 bp, Homo sapien
tagttcaggcatgtctaccctcaga

SEQ ID NO: 2623788 - DNA, 25 bp, Homo sapien
aacttccctggaaaatctttatgag

SEQ ID NO: 2623789 - DNA, 25 bp, Homo sapien
tgtttggtgactggtagtgaggatt

SEQ ID NO: 2623790 - DNA, 25 bp, Homo sapien
gactggtagtgaggattttcatata

SEQ ID NO: 2623791 - DNA, 25 bp, Homo sapien
ttggtgactggtagtgaggattttc

SEQ ID NO: 2623792 - DNA, 25 bp, Homo sapien
tgaagactactgaatgacacaaccg

SEQ ID NO: 2623793 - DNA, 25 bp, Homo sapien
caaagggttctggtacattgaagac

SEQ ID NO: 2623794 - DNA, 25 bp, Homo sapien
gaaccatatatcctttcagccagtg

SEQ ID NO: 2623795 - DNA, 25 bp, Homo sapien
ccaaattcagtttcacaggtaataa

SEQ ID NO: 2623796 - DNA, 25 bp, Homo sapien
gaagaagagtcttcggctctttctt

SEQ ID NO: 2623797 - DNA, 25 bp, Homo sapien
catgtggaagaagagtcttcggctc

SEQ ID NO: 2623798 - DNA, 25 bp, Homo sapien
tgtggaagaagagtcttcggctctt

SEQ ID NO: 2623799 - DNA, 25 bp, Homo sapien
aagagtcttcggctctttctttctc

SEQ ID NO: 2623800 - DNA, 25 bp, Homo sapien
cactaattagacgtaagatagtatt

SEQ ID NO: 2623801 - DNA, 25 bp, Homo sapien
ttcttgtaaatgctacactaattag

SEQ ID NO: 2623802 - DNA, 25 bp, Homo sapien
gctacactaattagacgtaagatag

SEQ ID NO: 2623803 - DNA, 25 bp, Homo sapien
tagacgtaagatagtattagataat

SEQ ID NO: 2623804 - DNA, 25 bp, Homo sapien
tccacaaccgatgctcttgaagtgt

SEQ ID NO: 2623805 - DNA, 25 bp, Homo sapien
gaaccctctaatagcctctagtgag

SEQ ID NO: 2623806 - DNA, 25 bp, Homo sapien
cataagatcttaagcctagtgcccc

SEQ ID NO: 2623807 - DNA, 25 bp, Homo sapien
aataagtatgtcatttggccgggca

SEQ ID NO: 2623808 - DNA, 25 bp, Homo sapien
ctctccggcgggagtccgccgcccg

SEQ ID NO: 2623809 - DNA, 25 bp, Homo sapien
gcgcggtggcggcagacgacgcagg

SEQ ID NO: 2623810 - DNA, 25 bp, Homo sapien
gcggcggcggtggtgtaggtcagtg

SEQ ID NO: 2623811 - DNA, 25 bp, Homo sapien
agacgacgcaggctgcggcaagcgg

SEQ ID NO: 2623812 - DNA, 25 bp, Homo sapien
gccagcttccgataggccttcttga

SEQ ID NO: 2623813 - DNA, 25 bp, Homo sapien
gaggttgttggactgcagttttccc

SEQ ID NO: 2623814 - DNA, 25 bp, Homo sapien
gggcagagcgcttcgcccaccgaga

SEQ ID NO: 2623815 - DNA, 25 bp, Homo sapien
ttttccccctacagtggcgatgcgg

SEQ ID NO: 2623816 - DNA, 25 bp, Homo sapien
gcaaggagctcctaggccgccaggt

SEQ ID NO: 2623817 - DNA, 25 bp, Homo sapien
tatcctccatactgttgagttcact

SEQ ID NO: 2623818 - DNA, 25 bp, Homo sapien
tttgtcctccaccatgctatcctcc

SEQ ID NO: 2623819 - DNA, 25 bp, Homo sapien
ccggaacatcttttgtcctccacca

SEQ ID NO: 2623820 - DNA, 25 bp, Homo sapien
gcattcctctacgatccagtccaaa

SEQ ID NO: 2623821 - DNA, 25 bp, Homo sapien
cagccctcttcaatccactaagttg

SEQ ID NO: 2623822 - DNA, 25 bp, Homo sapien
taagttgccttcatagtactctccc

SEQ ID NO: 2623823 - DNA, 25 bp, Homo sapien
ccatggcagcttaataaaaccagcc

SEQ ID NO: 2623824 - DNA, 25 bp, Homo sapien
actgcggactctccctaacttctgt

SEQ ID NO: 2623825 - DNA, 25 bp, Homo sapien
gagggtcactcaacacatcatatgc

SEQ ID NO: 2623826 - DNA, 25 bp, Homo sapien
atatgctgcttggattaatttaaat

SEQ ID NO: 2623827 - DNA, 25 bp, Homo sapien
gtcactcaacacatcatatgctgct

SEQ ID NO: 2623828 - DNA, 25 bp, Homo sapien
gctgcttggattaatttaaattgtt

SEQ ID NO: 2623829 - DNA, 25 bp, Homo sapien
cataaccagaataacaggtaacggt

SEQ ID NO: 2623830 - DNA, 25 bp, Homo sapien
aagtagggcctctctatgattatca

SEQ ID NO: 2623831 - DNA, 25 bp, Homo sapien
cgccatcaaacccacctttaagtag

SEQ ID NO: 2623832 - DNA, 25 bp, Homo sapien
gaaatagcgtagcaaatctaagctg

SEQ ID NO: 2623833 - DNA, 25 bp, Homo sapien
aacattacgatacaccgtgtaaaat

SEQ ID NO: 2623834 - DNA, 25 bp, Homo sapien
ttcaaaaacattacgatacaccgtg

SEQ ID NO: 2623835 - DNA, 25 bp, Homo sapien
caaaaacattacgatacaccgtgta

SEQ ID NO: 2623836 - DNA, 25 bp, Homo sapien
cattacgatacaccgtgtaaaatcc

SEQ ID NO: 2623837 - DNA, 25 bp, Homo sapien
tcaacctcttcctctaacacagatt

SEQ ID NO: 2623838 - DNA, 25 bp, Homo sapien
aaagttgggaaatcatcaacctctt

SEQ ID NO: 2623839 - DNA, 25 bp, Homo sapien
caaaagttgggaaatcatcaacctc

SEQ ID NO: 2623840 - DNA, 25 bp, Homo sapien
ccaaaagttgggaaatcatcaacct

SEQ ID NO: 2623841 - DNA, 25 bp, Homo sapien
taccagctgacggacaagctcattc

SEQ ID NO: 2623842 - DNA, 25 bp, Homo sapien
ttttacgaatgaaagctaccagctg

SEQ ID NO: 2623843 - DNA, 25 bp, Homo sapien
tttcccagcggtttgaagcctgtcg

SEQ ID NO: 2623844 - DNA, 25 bp, Homo sapien
ccacaagttttcgatgcgcctgcac

SEQ ID NO: 2623845 - DNA, 25 bp, Homo sapien
tgacccccaccgatactgagaagag

SEQ ID NO: 2623846 - DNA, 25 bp, Homo sapien
aagagggccccacgcacgctacgca

SEQ ID NO: 2623847 - DNA, 25 bp, Homo sapien
ccccaccgatactgagaagagggcc

SEQ ID NO: 2623848 - DNA, 25 bp, Homo sapien
caccgatactgagaagagggcccca

SEQ ID NO: 2623849 - DNA, 25 bp, Homo sapien
tgctctggacacaatgcatttacag

SEQ ID NO: 2623850 - DNA, 25 bp, Homo sapien
caaagtcacttaaacctgttacctg

SEQ ID NO: 2623851 - DNA, 25 bp, Homo sapien
taattttaattgctccagtagtaga

SEQ ID NO: 2623852 - DNA, 25 bp, Homo sapien
taagtcatgtaggtaaagtgttaat

SEQ ID NO: 2623853 - DNA, 25 bp, Homo sapien
ctctttctccaaattggccatagtc

SEQ ID NO: 2623854 - DNA, 25 bp, Homo sapien
attggccatagtcatccagctctgt

SEQ ID NO: 2623855 - DNA, 25 bp, Homo sapien
caaattggccatagtcatccagctc

SEQ ID NO: 2623856 - DNA, 25 bp, Homo sapien
ctccaaattggccatagtcatccag

SEQ ID NO: 2623857 - DNA, 25 bp, Homo sapien
tcatccgatccatctccaaactcct

SEQ ID NO: 2623858 - DNA, 25 bp, Homo sapien
gagttcatgttcttccatttcattt

SEQ ID NO: 2623859 - DNA, 25 bp, Homo sapien
catcctcctcatctttgagttcatg

SEQ ID NO: 2623860 - DNA, 25 bp, Homo sapien
tcatctttgagttcatgttcttcca

SEQ ID NO: 2623861 - DNA, 25 bp, Homo sapien
ctcatctttgagttcatgttcttcc

SEQ ID NO: 2623862 - DNA, 25 bp, Homo sapien
tctgtcttgaacgatttgtcacatg

SEQ ID NO: 2623863 - DNA, 25 bp, Homo sapien
tcctcggcctcatcactgtctttac

SEQ ID NO: 2623864 - DNA, 25 bp, Homo sapien
gagctcagcgtcctcggcctcatca

SEQ ID NO: 2623865 - DNA, 25 bp, Homo sapien
ttgtcacatgctgggcagtaaaggt

SEQ ID NO: 2623866 - DNA, 25 bp, Homo sapien
agcatactggaagctcgtggccaca

SEQ ID NO: 2623867 - DNA, 25 bp, Homo sapien
gtgttcaaaaccctgctggcaatgt

SEQ ID NO: 2623868 - DNA, 25 bp, Homo sapien
cagacttggagggatcactgggaaa

SEQ ID NO: 2623869 - DNA, 25 bp, Homo sapien
tcaggattccttggcagtgagcata

SEQ ID NO: 2623870 - DNA, 25 bp, Homo sapien
tagttcacgtgtccagataatgttg

SEQ ID NO: 2623871 - DNA, 25 bp, Homo sapien
ctaaaattagttcacgtgtccagat

SEQ ID NO: 2623872 - DNA, 25 bp, Homo sapien
aattagttcacgtgtccagataatg

SEQ ID NO: 2623873 - DNA, 25 bp, Homo sapien
ttcacgtgtccagataatgttgctg

SEQ ID NO: 2623874 - DNA, 25 bp, Homo sapien
gagcaatctgacgtgagcagctgcg

SEQ ID NO: 2623875 - DNA, 25 bp, Homo sapien
gaaagagcaatctgacgtgagcagc

SEQ ID NO: 2623876 - DNA, 25 bp, Homo sapien
aagagcaatctgacgtgagcagctg

SEQ ID NO: 2623877 - DNA, 25 bp, Homo sapien
ctgaaagagcaatctgacgtgagca

SEQ ID NO: 2623878 - DNA, 25 bp, Homo sapien
accatttcccgatgcttctttgact

SEQ ID NO: 2623879 - DNA, 25 bp, Homo sapien
agctgttgttttagcaaggccacca

SEQ ID NO: 2623880 - DNA, 25 bp, Homo sapien
cagaattgtcatctaatggattttc

SEQ ID NO: 2623881 - DNA, 25 bp, Homo sapien
tctttgacttctcgtgattcttcat

SEQ ID NO: 2623882 - DNA, 25 bp, Homo sapien
ctaagagcaaatataaatcgaaatg

SEQ ID NO: 2623883 - DNA, 25 bp, Homo sapien
gcaaatataaatcgaaatgtcaaat

SEQ ID NO: 2623884 - DNA, 25 bp, Homo sapien
taaatcgaaatgtcaaatacttgac

SEQ ID NO: 2623885 - DNA, 25 bp, Homo sapien
tataaatcgaaatgtcaaatacttg

SEQ ID NO: 2623886 - DNA, 25 bp, Homo sapien
tgtgctggtttctgtttctttttct

SEQ ID NO: 2623887 - DNA, 25 bp, Homo sapien
tgctggtttctgtttctttttcttc

SEQ ID NO: 2623888 - DNA, 25 bp, Homo sapien
ctggtttctgtttctttttcttctg

SEQ ID NO: 2623889 - DNA, 25 bp, Homo sapien
ctgtgctggtttctgtttctttttc

SEQ ID NO: 2623890 - DNA, 25 bp, Homo sapien
tctgttacacaacccacattcaaat

SEQ ID NO: 2623891 - DNA, 25 bp, Homo sapien
gctaatattatctgttacacaaccc

SEQ ID NO: 2623892 - DNA, 25 bp, Homo sapien
taatattatctgttacacaacccac

SEQ ID NO: 2623893 - DNA, 25 bp, Homo sapien
tattatctgttacacaacccacatt

SEQ ID NO: 2623894 - DNA, 25 bp, Homo sapien
tttggcacatttgtgctcgctctct

SEQ ID NO: 2623895 - DNA, 25 bp, Homo sapien
ttttggcacatttgtgctcgctctc

SEQ ID NO: 2623896 - DNA, 25 bp, Homo sapien
caggcagatatgaatctttgccagg

SEQ ID NO: 2623897 - DNA, 25 bp, Homo sapien
cattataaaagaaagacgcctggca

SEQ ID NO: 2623898 - DNA, 25 bp, Homo sapien
tcttctacagtcacaaacaatggca

SEQ ID NO: 2623899 - DNA, 25 bp, Homo sapien
cctggcaaacatatcctaagcgtac

SEQ ID NO: 2623900 - DNA, 25 bp, Homo sapien
tattccaaatgataagcaatgagca

SEQ ID NO: 2623901 - DNA, 25 bp, Homo sapien
cttgatttaagttagtatcttctgg

SEQ ID NO: 2623902 - DNA, 25 bp, Homo sapien
tcctggggactatcttccaattctt

SEQ ID NO: 2623903 - DNA, 25 bp, Homo sapien
cttcactttttggatcatcacatgg

SEQ ID NO: 2623904 - DNA, 25 bp, Homo sapien
tatcttctggatcaacctttactcc

SEQ ID NO: 2623905 - DNA, 25 bp, Homo sapien
ttagtgacactccagggacgcagca

SEQ ID NO: 2623906 - DNA, 25 bp, Homo sapien
catattgtgtaggattcagccagct

SEQ ID NO: 2623907 - DNA, 25 bp, Homo sapien
tatactattcttcaagcagaggcca

SEQ ID NO: 2623908 - DNA, 25 bp, Homo sapien
gactggctacctcccttgggtgaga

SEQ ID NO: 2623909 - DNA, 25 bp, Homo sapien
aaagcacttaatactccatttaaag

SEQ ID NO: 2623910 - DNA, 25 bp, Homo sapien
catttaaaggagcaaaccatcttca

SEQ ID NO: 2623911 - DNA, 25 bp, Homo sapien
catgaagtgtggttccccaaaaaca

SEQ ID NO: 2623912 - DNA, 25 bp, Homo sapien
atctgacatgaagtgtggttcccca

SEQ ID NO: 2623913 - DNA, 25 bp, Homo sapien
cagtgtttaatacagtgttttatac

SEQ ID NO: 2623914 - DNA, 25 bp, Homo sapien
tgctctctagaacactcaaaaaagt

SEQ ID NO: 2623915 - DNA, 25 bp, Homo sapien
aataatctttacatcttaaatgaac

SEQ ID NO: 2623916 - DNA, 25 bp, Homo sapien
ttgaatatcaaatttggcacaaaaa

SEQ ID NO: 2623917 - DNA, 25 bp, Homo sapien
tgtttgtggttcagcaggtactctg

SEQ ID NO: 2623918 - DNA, 25 bp, Homo sapien
ttgtttgtggttcagcaggtactct

SEQ ID NO: 2623919 - DNA, 25 bp, Homo sapien
gtttgtggttcagcaggtactctga

SEQ ID NO: 2623920 - DNA, 25 bp, Homo sapien
tttgtggttcagcaggtactctgac

SEQ ID NO: 2623921 - DNA, 25 bp, Homo sapien
gggtcctgagactttcaatagcatg

SEQ ID NO: 2623922 - DNA, 25 bp, Homo sapien
gatgttcttggaggttaaatcccac

SEQ ID NO: 2623923 - DNA, 25 bp, Homo sapien
taataaacacgttcaacaaaggcag

SEQ ID NO: 2623924 - DNA, 25 bp, Homo sapien
gctctttgcggaatggctcaccaaa

SEQ ID NO: 2623925 - DNA, 25 bp, Homo sapien
ctgagaagggcaaaaaatcataaat

SEQ ID NO: 2623926 - DNA, 25 bp, Homo sapien
gagaagggcaaaaaatcataaataa

SEQ ID NO: 2623927 - DNA, 25 bp, Homo sapien
tgagaagggcaaaaaatcataaata

SEQ ID NO: 2623928 - DNA, 25 bp, Homo sapien
agtttattccgagatggaaattcac

SEQ ID NO: 2623929 - DNA, 25 bp, Homo sapien
tcttgctttgactacttgttgcgct

SEQ ID NO: 2623930 - DNA, 25 bp, Homo sapien
gttgcgctgtttaaagacgatgatg

SEQ ID NO: 2623931 - DNA, 25 bp, Homo sapien
tgtggcctttagatggtcaaaaagt

SEQ ID NO: 2623932 - DNA, 25 bp, Homo sapien
taagatcagtgtaagatgcatgccc

SEQ ID NO: 2623933 - DNA, 25 bp, Homo sapien
gaaggcctactgagttgggagtcca

SEQ ID NO: 2623934 - DNA, 25 bp, Homo sapien
tcaagatgggtacttagcactgacc

SEQ ID NO: 2623935 - DNA, 25 bp, Homo sapien
tgcctagggaggacatgccatgtaa

SEQ ID NO: 2623936 - DNA, 25 bp, Homo sapien
cactgatacctctccagattactcc

SEQ ID NO: 2623937 - DNA, 25 bp, Homo sapien
tttcccaagtagcacggtggcatgc

SEQ ID NO: 2623938 - DNA, 25 bp, Homo sapien
tcccaagtagcacggtggcatgcct

SEQ ID NO: 2623939 - DNA, 25 bp, Homo sapien
aaatttcccaagtagcacggtggca

SEQ ID NO: 2623940 - DNA, 25 bp, Homo sapien
acaaaagtgtcttgaacaggatgga

SEQ ID NO: 2623941 - DNA, 25 bp, Homo sapien
caaaagtgtcttgaacaggatggag

SEQ ID NO: 2623942 - DNA, 25 bp, Homo sapien
aaagtgtcttgaacaggatggagac

SEQ ID NO: 2623943 - DNA, 25 bp, Homo sapien
tggctggtattgtcacttacaaaag

SEQ ID NO: 2623944 - DNA, 25 bp, Homo sapien
caccctgtgatgaaattcgtaaatg

SEQ ID NO: 2623945 - DNA, 25 bp, Homo sapien
tcccccatctagtagttttcagtgt

SEQ ID NO: 2623946 - DNA, 25 bp, Homo sapien
catgtgtacccaatgattacattgt

SEQ ID NO: 2623947 - DNA, 25 bp, Homo sapien
aatgccaggtgctaatgataaatga

SEQ ID NO: 2623948 - DNA, 25 bp, Homo sapien
cactgtgccaggtatgcagttagca

SEQ ID NO: 2623949 - DNA, 25 bp, Homo sapien
tagcagtacggatgtgctctccagc

SEQ ID NO: 2623950 - DNA, 25 bp, Homo sapien
caataattccgatgagacatgttca

SEQ ID NO: 2623951 - DNA, 25 bp, Homo sapien
taagggttacagtatctgagccgca

SEQ ID NO: 2623952 - DNA, 25 bp, Homo sapien
taagtaggcactatgtcctgggatg

SEQ ID NO: 2623953 - DNA, 25 bp, Homo sapien
gattgtgtgacaacgcttcagagaa

SEQ ID NO: 2623954 - DNA, 25 bp, Homo sapien
agtcttttaaactctggccatcagg

SEQ ID NO: 2623955 - DNA, 25 bp, Homo sapien
cagtgtccctggtgcagtgcaagaa

SEQ ID NO: 2623956 - DNA, 25 bp, Homo sapien
catgatttggcatgggacagacgga

SEQ ID NO: 2623957 - DNA, 25 bp, Homo sapien
gattacctggatcccgcatgtttta

SEQ ID NO: 2623958 - DNA, 25 bp, Homo sapien
catcaagcaagtgcaggctccagct

SEQ ID NO: 2623959 - DNA, 25 bp, Homo sapien
cactgcttagtattcttgagggaca

SEQ ID NO: 2623960 - DNA, 25 bp, Homo sapien
gatggcatagactgtgaacatgagt

SEQ ID NO: 2623961 - DNA, 25 bp, Homo sapien
tggaaagccccacggctgttgcacc

SEQ ID NO: 2623962 - DNA, 25 bp, Homo sapien
tcttggtggagtgatggcatagact

SEQ ID NO: 2623963 - DNA, 25 bp, Homo sapien
cagtcttggtggagtgatggcatag

SEQ ID NO: 2623964 - DNA, 25 bp, Homo sapien
ggcagcaccaacagatgcacagatc

SEQ ID NO: 2623965 - DNA, 25 bp, Homo sapien
gccttggcagcaccaacagatgcac

SEQ ID NO: 2623966 - DNA, 25 bp, Homo sapien
ttggcagcaccaacagatgcacaga

SEQ ID NO: 2623967 - DNA, 25 bp, Homo sapien
cagcaccaacagatgcacagatcat

SEQ ID NO: 2623968 - DNA, 25 bp, Homo sapien
aaatcataaaagaagtgcccacgga

SEQ ID NO: 2623969 - DNA, 25 bp, Homo sapien
cgtataaccctgcagcctatgaagg

SEQ ID NO: 2623970 - DNA, 25 bp, Homo sapien
gaactctcgtataaccctgcagcct

SEQ ID NO: 2623971 - DNA, 25 bp, Homo sapien
agtgcccacggaactctcgtataac

SEQ ID NO: 2623972 - DNA, 25 bp, Homo sapien
gttaaagtcagaggagacagcctgg

SEQ ID NO: 2623973 - DNA, 25 bp, Homo sapien
tgttaaagtcagaggagacagcctg

SEQ ID NO: 2623974 - DNA, 25 bp, Homo sapien
ctgttaaagtcagaggagacagcct

SEQ ID NO: 2623975 - DNA, 25 bp, Homo sapien
taaagtcagaggagacagcctggtg

SEQ ID NO: 2623976 - DNA, 25 bp, Homo sapien
cactcttgctcttgtgtgctcactg

SEQ ID NO: 2623977 - DNA, 25 bp, Homo sapien
cagcctaattcactgtcataccagg

SEQ ID NO: 2623978 - DNA, 25 bp, Homo sapien
tgagggcgatgccagccccaaaagt

SEQ ID NO: 2623979 - DNA, 25 bp, Homo sapien
tgccagccccaaaagtagaagaggg

SEQ ID NO: 2623980 - DNA, 25 bp, Homo sapien
cttctctgtctctttttcccttcct

SEQ ID NO: 2623981 - DNA, 25 bp, Homo sapien
ctctgtctctttttcccttcctcat

SEQ ID NO: 2623982 - DNA, 25 bp, Homo sapien
tccttctctgtctctttttcccttc

SEQ ID NO: 2623983 - DNA, 25 bp, Homo sapien
tctctgtctctttttcccttcctca

SEQ ID NO: 2623984 - DNA, 25 bp, Homo sapien
ccaacgcgtacacgctgagtggaga

SEQ ID NO: 2623985 - DNA, 25 bp, Homo sapien
gaagtcgagaagcaggacaggaggc

SEQ ID NO: 2623986 - DNA, 25 bp, Homo sapien
caagacagtgggacatgcgtgtgct

SEQ ID NO: 2623987 - DNA, 25 bp, Homo sapien
gatctggtttgtgtcttgtgccctg

SEQ ID NO: 2623988 - DNA, 25 bp, Homo sapien
cattgctgctttcttatcgtggcca

SEQ ID NO: 2623989 - DNA, 25 bp, Homo sapien
attgctgctttcttatcgtggccat

SEQ ID NO: 2623990 - DNA, 25 bp, Homo sapien
tctaggaacgctggacctttctggt

SEQ ID NO: 2623991 - DNA, 25 bp, Homo sapien
ggtaccctttcagctcctcttatct

SEQ ID NO: 2623992 - DNA, 25 bp, Homo sapien
tggatttctaggaacgctggacctt

SEQ ID NO: 2623993 - DNA, 25 bp, Homo sapien
ttctggtaccctttcagctcctctt

SEQ ID NO: 2623994 - DNA, 25 bp, Homo sapien
ccttgaggatgagggtctaaatctc

SEQ ID NO: 2623995 - DNA, 25 bp, Homo sapien
ttgtgaggaataaggccttgaggat

SEQ ID NO: 2623996 - DNA, 25 bp, Homo sapien
ttacatatggcttttgtgaggaata

SEQ ID NO: 2623997 - DNA, 25 bp, Homo sapien
tctctggcccacagatctggacagg

SEQ ID NO: 2623998 - DNA, 25 bp, Homo sapien
tcattagccgatccaaaaagacagt

SEQ ID NO: 2623999 - DNA, 25 bp, Homo sapien
tttccaacgtgtatctgggctgcca

SEQ ID NO: 2624000 - DNA, 25 bp, Homo sapien
gctctagccagatcttcattagccg

SEQ ID NO: 2624001 - DNA, 25 bp, Homo sapien
tatccagataatgcaagccaacact

SEQ ID NO: 2624002 - DNA, 25 bp, Homo sapien
caaacttttcaaccatatgtttata

SEQ ID NO: 2624003 - DNA, 25 bp, Homo sapien
taagacaaataagactatccctggc

SEQ ID NO: 2624004 - DNA, 25 bp, Homo sapien
ctgaaatagtcatggaacagtattg

SEQ ID NO: 2624005 - DNA, 25 bp, Homo sapien
ccataagaattagcctcttctgtaa

SEQ ID NO: 2624006 - DNA, 25 bp, Homo sapien
cgttcaccagcagaattcagttctg

SEQ ID NO: 2624007 - DNA, 25 bp, Homo sapien
caagtccaaggcaatggggctctct

SEQ ID NO: 2624008 - DNA, 25 bp, Homo sapien
tccctcttgcctcttgaattcctgc

SEQ ID NO: 2624009 - DNA, 25 bp, Homo sapien
ctccaagtccaaggcaatggggctc

SEQ ID NO: 2624010 - DNA, 25 bp, Homo sapien
cctcttgcctcttgaattcctgcat

SEQ ID NO: 2624011 - DNA, 25 bp, Homo sapien
caagtccaaggcaatggggctctct

SEQ ID NO: 2624012 - DNA, 25 bp, Homo sapien
ctccaagtccaaggcaatggggctc

SEQ ID NO: 2624013 - DNA, 25 bp, Homo sapien
tccctcttgcctcttgaattcctgc

SEQ ID NO: 2624014 - DNA, 25 bp, Homo sapien
cctcttgcctcttgaattcctgcat

SEQ ID NO: 2624015 - DNA, 25 bp, Homo sapien
cactggtgggtacttttcagccata

SEQ ID NO: 2624016 - DNA, 25 bp, Homo sapien
tagacattggagcacatttaaatat

SEQ ID NO: 2624017 - DNA, 25 bp, Homo sapien
cacgctttctttctacccacactgg

SEQ ID NO: 2624018 - DNA, 25 bp, Homo sapien
ttttcagccatagacattggagcac

SEQ ID NO: 2624019 - DNA, 25 bp, Homo sapien
ctcctgagccaggaattcaccactt

SEQ ID NO: 2624020 - DNA, 25 bp, Homo sapien
cttgggagatgctccgtggacagaa

SEQ ID NO: 2624021 - DNA, 25 bp, Homo sapien
gctccgtggacagaaccagagccgt

SEQ ID NO: 2624022 - DNA, 25 bp, Homo sapien
gagccaggaattcaccactttgcca

SEQ ID NO: 2624023 - DNA, 25 bp, Homo sapien
taaaaggatgactgcgtagagccac

SEQ ID NO: 2624024 - DNA, 25 bp, Homo sapien
gaggatttacctccggcacttgcct

SEQ ID NO: 2624025 - DNA, 25 bp, Homo sapien
tctaagacacctaataaagatgagg

SEQ ID NO: 2624026 - DNA, 25 bp, Homo sapien
ccttgtcagtgtaggaaatgcagag

SEQ ID NO: 2624027 - DNA, 25 bp, Homo sapien
taaaagagattgaagggctggactg

SEQ ID NO: 2624028 - DNA, 25 bp, Homo sapien
tattgtaaaagagattgaagggctg

SEQ ID NO: 2624029 - DNA, 25 bp, Homo sapien
tgccatcggcatccatgccacaata

SEQ ID NO: 2624030 - DNA, 25 bp, Homo sapien
tgtaaaagagattgaagggctggac

SEQ ID NO: 2624031 - DNA, 25 bp, Homo sapien
gtgtcagcagtgttagcaaatggct

SEQ ID NO: 2624032 - DNA, 25 bp, Homo sapien
agcagcattgcagtcggagcggcac

SEQ ID NO: 2624033 - DNA, 25 bp, Homo sapien
cactgaggtgtcaacaaaaggatga

SEQ ID NO: 2624034 - DNA, 25 bp, Homo sapien
atggctgaagtagaacggagctgcc

SEQ ID NO: 2624035 - DNA, 25 bp, Homo sapien
gcactgctggagtaggaaaagggag

SEQ ID NO: 2624036 - DNA, 25 bp, Homo sapien
ctgctggagtaggaaaagggagact

SEQ ID NO: 2624037 - DNA, 25 bp, Homo sapien
agcactgctggagtaggaaaaggga

SEQ ID NO: 2624038 - DNA, 25 bp, Homo sapien
agtaaagattcccttccagaatagg

SEQ ID NO: 2624039 - DNA, 25 bp, Homo sapien
gttggtattggtgagtaaagattcc

SEQ ID NO: 2624040 - DNA, 25 bp, Homo sapien
tcccttccagaataggtttgataaa

SEQ ID NO: 2624041 - DNA, 25 bp, Homo sapien
taaattgccaagtctgaaactgaaa

SEQ ID NO: 2624042 - DNA, 25 bp, Homo sapien
ctctgtttaggaattccatagacat

SEQ ID NO: 2624043 - DNA, 25 bp, Homo sapien
tctgtttaggaattccatagacata

SEQ ID NO: 2624044 - DNA, 25 bp, Homo sapien
ctgtttaggaattccatagacataa

SEQ ID NO: 2624045 - DNA, 25 bp, Homo sapien
tgtttaggaattccatagacataat

SEQ ID NO: 2624046 - DNA, 25 bp, Homo sapien
tggaaggccaaacaattacaaaagc

SEQ ID NO: 2624047 - DNA, 25 bp, Homo sapien
gcatacctgtttccatttgtgagag

SEQ ID NO: 2624048 - DNA, 25 bp, Homo sapien
tcagacttgagtagctgtgtgccac

SEQ ID NO: 2624049 - DNA, 25 bp, Homo sapien
ggccccaggcactgaggactgaaaa

SEQ ID NO: 2624050 - DNA, 25 bp, Homo sapien
tatttggatggttcgagcagtgcgt

SEQ ID NO: 2624051 - DNA, 25 bp, Homo sapien
tgtacattcacccacaaatggcaca

SEQ ID NO: 2624052 - DNA, 25 bp, Homo sapien
tagttgatcctcaatgcgtttgccc

SEQ ID NO: 2624053 - DNA, 25 bp, Homo sapien
tatctgaagagctaggttatgagcc

SEQ ID NO: 2624054 - DNA, 25 bp, Homo sapien
tatccttgagcatgagtttcggcgt

SEQ ID NO: 2624055 - DNA, 25 bp, Homo sapien
tttcggcgttgattgtgggattctc

SEQ ID NO: 2624056 - DNA, 25 bp, Homo sapien
gatgtgatgaaagccggactcgaga

SEQ ID NO: 2624057 - DNA, 25 bp, Homo sapien
ttaaggtgctttgcctccaccactg

SEQ ID NO: 2624058 - DNA, 25 bp, Homo sapien
cctcgtgcaggaagtactcatcgac

SEQ ID NO: 2624059 - DNA, 25 bp, Homo sapien
tccacacaatggagcttcatgtcct

SEQ ID NO: 2624060 - DNA, 25 bp, Homo sapien
tactcatcgactgatgtggcagact

SEQ ID NO: 2624061 - DNA, 25 bp, Homo sapien
cgttcgcgaaacagctttccacaca

SEQ ID NO: 2624062 - DNA, 25 bp, Homo sapien
cacactagaagtttgcgctttgggt

SEQ ID NO: 2624063 - DNA, 25 bp, Homo sapien
agaaatttgacacggagacactcca

SEQ ID NO: 2624064 - DNA, 25 bp, Homo sapien
gggctatttaggcaccgccaatgtt

SEQ ID NO: 2624065 - DNA, 25 bp, Homo sapien
ggctgcctggaaaaatatcatcttt

SEQ ID NO: 2624066 - DNA, 25 bp, Homo sapien
gtagaagttgtaggttgagataaag

SEQ ID NO: 2624067 - DNA, 25 bp, Homo sapien
aaagccatcaaaagggtcaaagaag

SEQ ID NO: 2624068 - DNA, 25 bp, Homo sapien
aactgtaaagccatcaaaagggtca

SEQ ID NO: 2624069 - DNA, 25 bp, Homo sapien
tcaaagaagatgtagaagttgtagg

SEQ ID NO: 2624070 - DNA, 25 bp, Homo sapien
gccgtgaactgtgctttccgatcca

SEQ ID NO: 2624071 - DNA, 25 bp, Homo sapien
agctctgcccttcggccagtttcag

SEQ ID NO: 2624072 - DNA, 25 bp, Homo sapien
gaactgtgctttccgatccagctct

SEQ ID NO: 2624073 - DNA, 25 bp, Homo sapien
cgtgaactgtgctttccgatccagc

SEQ ID NO: 2624074 - DNA, 25 bp, Homo sapien
taggttccacttcatgtttattcat

SEQ ID NO: 2624075 - DNA, 25 bp, Homo sapien
cattaggttccacttcatgtttatt

SEQ ID NO: 2624076 - DNA, 25 bp, Homo sapien
ctcattaggttccacttcatgttta

SEQ ID NO: 2624077 - DNA, 25 bp, Homo sapien
ttaggttccacttcatgtttattca

SEQ ID NO: 2624078 - DNA, 25 bp, Homo sapien
tggtctgtgacccagatcttcaagg

SEQ ID NO: 2624079 - DNA, 25 bp, Homo sapien
tcatggtggcaattggtctgtgacc

SEQ ID NO: 2624080 - DNA, 25 bp, Homo sapien
cttcaaggtgctgataagtgacata

SEQ ID NO: 2624081 - DNA, 25 bp, Homo sapien
cattttctaggcgatgaatcatcat

SEQ ID NO: 2624082 - DNA, 25 bp, Homo sapien
tcaaaataagaagtgcttggcagcc

SEQ ID NO: 2624083 - DNA, 25 bp, Homo sapien
caatcgcaggactgttcaggtaggg

SEQ ID NO: 2624084 - DNA, 25 bp, Homo sapien
ttagggagggattcataaagctttc

SEQ ID NO: 2624085 - DNA, 25 bp, Homo sapien
aaatggccacttctcagtagaaaga

SEQ ID NO: 2624086 - DNA, 25 bp, Homo sapien
ggcctgtcttgtttaccactatatc

SEQ ID NO: 2624087 - DNA, 25 bp, Homo sapien
caggcttaggacacagttgagattc

SEQ ID NO: 2624088 - DNA, 25 bp, Homo sapien
tataagtaaactcctgaaatcagtg

SEQ ID NO: 2624089 - DNA, 25 bp, Homo sapien
actatatccctgatgtgtagcacag

SEQ ID NO: 2624090 - DNA, 25 bp, Homo sapien
acctctgtgacactcaggaaaaaac

SEQ ID NO: 2624091 - DNA, 25 bp, Homo sapien
cctctgtgacactcaggaaaaaact

SEQ ID NO: 2624092 - DNA, 25 bp, Homo sapien
ctctgtgacactcaggaaaaaactc

SEQ ID NO: 2624093 - DNA, 25 bp, Homo sapien
tgaaacctgataactgaatgtgact

SEQ ID NO: 2624094 - DNA, 25 bp, Homo sapien
tgctgttaccatgcacagggaaagc

SEQ ID NO: 2624095 - DNA, 25 bp, Homo sapien
aggatgaaacctgataactgaatgt

SEQ ID NO: 2624096 - DNA, 25 bp, Homo sapien
ctgctgttaccatgcacagggaaag

SEQ ID NO: 2624097 - DNA, 25 bp, Homo sapien
ctctcctgtgtaaactcctcttata

SEQ ID NO: 2624098 - DNA, 25 bp, Homo sapien
cactggtggcatgctctctttggtt

SEQ ID NO: 2624099 - DNA, 25 bp, Homo sapien
ctgtgccttcactggtggcatgctc

SEQ ID NO: 2624100 - DNA, 25 bp, Homo sapien
aactcctcttataagaatcttccct

SEQ ID NO: 2624101 - DNA, 25 bp, Homo sapien
ggtatttgtacaacacaggaggaat

SEQ ID NO: 2624102 - DNA, 25 bp, Homo sapien
cagcaggtatttgtacaacacagga

SEQ ID NO: 2624103 - DNA, 25 bp, Homo sapien
caggtatttgtacaacacaggagga

SEQ ID NO: 2624104 - DNA, 25 bp, Homo sapien
agctgctgccagcaacctttgcaaa

SEQ ID NO: 2624105 - DNA, 25 bp, Homo sapien
gagagtgcctctgtgtacgatgaca

SEQ ID NO: 2624106 - DNA, 25 bp, Homo sapien
gaaaggtctcgctgtttgatcatca

SEQ ID NO: 2624107 - DNA, 25 bp, Homo sapien
tgttctgtcttggatgagagtgcct

SEQ ID NO: 2624108 - DNA, 25 bp, Homo sapien
gaaatggccacacaatgccatggcc

SEQ ID NO: 2624109 - DNA, 25 bp, Homo sapien
ttgtaaagactaccaacatgatgaa

SEQ ID NO: 2624110 - DNA, 25 bp, Homo sapien
aattgtaaagactaccaacatgatg

SEQ ID NO: 2624111 - DNA, 25 bp, Homo sapien
attgtaaagactaccaacatgatga

SEQ ID NO: 2624112 - DNA, 25 bp, Homo sapien
gaatcttcctagctcaggttcgctg

SEQ ID NO: 2624113 - DNA, 25 bp, Homo sapien
actggctggcaagagaaccgggtca

SEQ ID NO: 2624114 - DNA, 25 bp, Homo sapien
gactgattcagtaatctggcaatta

SEQ ID NO: 2624115 - DNA, 25 bp, Homo sapien
tggcaattactcaccctgataccct

SEQ ID NO: 2624116 - DNA, 25 bp, Homo sapien
gaaagtttttccatcagaaggatca

SEQ ID NO: 2624117 - DNA, 25 bp, Homo sapien
cgttgaacactgttatgggcatttt

SEQ ID NO: 2624118 - DNA, 25 bp, Homo sapien
cagttagcacatgttcgttgaacac

SEQ ID NO: 2624119 - DNA, 25 bp, Homo sapien
ttcatcccatgaacatgtagttgag

SEQ ID NO: 2624120 - DNA, 25 bp, Homo sapien
acatgtagttgaggcaagctggaaa

SEQ ID NO: 2624121 - DNA, 25 bp, Homo sapien
cagtatgtggtcagttttggaatag

SEQ ID NO: 2624122 - DNA, 25 bp, Homo sapien
acttcccagtatgtggtcagttttg

SEQ ID NO: 2624123 - DNA, 25 bp, Homo sapien
ctttacttcccagtatgtggtcagt

SEQ ID NO: 2624124 - DNA, 25 bp, Homo sapien
tacttcccagtatgtggtcagtttt

SEQ ID NO: 2624125 - DNA, 25 bp, Homo sapien
tgtttatcacgtctccagctgctca

SEQ ID NO: 2624126 - DNA, 25 bp, Homo sapien
gtaaagctgctgatacaagcttttt

SEQ ID NO: 2624127 - DNA, 25 bp, Homo sapien
tcagctgaggcttattgcagggcat

SEQ ID NO: 2624128 - DNA, 25 bp, Homo sapien
tgaagccaggtgtttatcacgtctc

SEQ ID NO: 2624129 - DNA, 25 bp, Homo sapien
tgaaagttcacaccccctttatcca

SEQ ID NO: 2624130 - DNA, 25 bp, Homo sapien
tctattgcctcacatatgttttggt

SEQ ID NO: 2624131 - DNA, 25 bp, Homo sapien
tccatttaactgaaagttcacaccc

SEQ ID NO: 2624132 - DNA, 25 bp, Homo sapien
attaacatatctattgcctcacata

SEQ ID NO: 2624133 - DNA, 25 bp, Homo sapien
caattcgatcagtttggacataggc

SEQ ID NO: 2624134 - DNA, 25 bp, Homo sapien
aatcatcaccgcaaagtaatacaca

SEQ ID NO: 2624135 - DNA, 25 bp, Homo sapien
tttgttgctgtgagaacacttaaca

SEQ ID NO: 2624136 - DNA, 25 bp, Homo sapien
aaaagctgcacgtttaatagataca

SEQ ID NO: 2624137 - DNA, 25 bp, Homo sapien
ttgccagtgttctacacgttcaggg

SEQ ID NO: 2624138 - DNA, 25 bp, Homo sapien
atgtcctcctcatggttgccagtgt

SEQ ID NO: 2624139 - DNA, 25 bp, Homo sapien
tggttgccagtgttctacacgttca

SEQ ID NO: 2624140 - DNA, 25 bp, Homo sapien
ctcatggttgccagtgttctacacg

SEQ ID NO: 2624141 - DNA, 25 bp, Homo sapien
caatgttgcaagctggaaagatgct

SEQ ID NO: 2624142 - DNA, 25 bp, Homo sapien
gtggttctgtttctacatgtcagac

SEQ ID NO: 2624143 - DNA, 25 bp, Homo sapien
aagatgcttcacaactaaatttcct

SEQ ID NO: 2624144 - DNA, 25 bp, Homo sapien
cttgcaggtccacacctactgtggt

SEQ ID NO: 2624145 - DNA, 25 bp, Homo sapien
ccatgtccggccccattttgacttt

SEQ ID NO: 2624146 - DNA, 25 bp, Homo sapien
gagctcaagtaatcgcctaactcag

SEQ ID NO: 2624147 - DNA, 25 bp, Homo sapien
ccattttgactttaggtaacctgat

SEQ ID NO: 2624148 - DNA, 25 bp, Homo sapien
tgagctcaagtaatcgcctaactca

SEQ ID NO: 2624149 - DNA, 25 bp, Homo sapien
ttattctcgttttctcacactccat

SEQ ID NO: 2624150 - DNA, 25 bp, Homo sapien
ggttattctcgttttctcacactcc

SEQ ID NO: 2624151 - DNA, 25 bp, Homo sapien
tggttattctcgttttctcacactc

SEQ ID NO: 2624152 - DNA, 25 bp, Homo sapien
gttattctcgttttctcacactcca

SEQ ID NO: 2624153 - DNA, 25 bp, Homo sapien
tcctgaaattgttgcagcggttgcc

SEQ ID NO: 2624154 - DNA, 25 bp, Homo sapien
gaggcctgcgtgacatctcctgaaa

SEQ ID NO: 2624155 - DNA, 25 bp, Homo sapien
tggatgaagagctttaccctgcccc

SEQ ID NO: 2624156 - DNA, 25 bp, Homo sapien
gtatgaccctcgcttgttctctgga

SEQ ID NO: 2624157 - DNA, 25 bp, Homo sapien
caaaccatacctctccactggatat

SEQ ID NO: 2624158 - DNA, 25 bp, Homo sapien
taagttgcatttaggagaattagag

SEQ ID NO: 2624159 - DNA, 25 bp, Homo sapien
cctccggtgcatactgaggttgtct

SEQ ID NO: 2624160 - DNA, 25 bp, Homo sapien
tgccatgatcagtgcggattgacct

SEQ ID NO: 2624161 - DNA, 25 bp, Homo sapien
gcttcacagtaatgtactgaatgaa

SEQ ID NO: 2624162 - DNA, 25 bp, Homo sapien
ttatatcctatttccacgtctccac

SEQ ID NO: 2624163 - DNA, 25 bp, Homo sapien
actggtgcttcacagtaatgtactg

SEQ ID NO: 2624164 - DNA, 25 bp, Homo sapien
tatttccacgtctccactggtgctt

SEQ ID NO: 2624165 - DNA, 25 bp, Homo sapien
cctcaggaagatgatcaactgcatt

SEQ ID NO: 2624166 - DNA, 25 bp, Homo sapien
gcattggtaggtgcctcaggaagat

SEQ ID NO: 2624167 - DNA, 25 bp, Homo sapien
tgtgcctgggtcatccctagcttcc

SEQ ID NO: 2624168 - DNA, 25 bp, Homo sapien
tgcattgtatgataggcaggagtgt

SEQ ID NO: 2624169 - DNA, 25 bp, Homo sapien
gtgccccattcagaaaaggcctggg

SEQ ID NO: 2624170 - DNA, 25 bp, Homo sapien
tctcctttgtgtgatcgtcatggac

SEQ ID NO: 2624171 - DNA, 25 bp, Homo sapien
gtgtgtgattgcaaaaaatctcctt

SEQ ID NO: 2624172 - DNA, 25 bp, Homo sapien
tgtgtgtgattgcaaaaaatctcct

SEQ ID NO: 2624173 - DNA, 25 bp, Homo sapien
aaatctcctttgtgtgatcgtcatg

SEQ ID NO: 2624174 - DNA, 25 bp, Homo sapien
aaacaagagctcttcagtttctcag

SEQ ID NO: 2624175 - DNA, 25 bp, Homo sapien
tcaagaaaaacaagagctcttcagt

SEQ ID NO: 2624176 - DNA, 25 bp, Homo sapien
gtttctcagacattccatcatcctc

SEQ ID NO: 2624177 - DNA, 25 bp, Homo sapien
agacattccatcatcctcctcctgt

SEQ ID NO: 2624178 - DNA, 25 bp, Homo sapien
gagctgaaaatcaaggctcgagaac

SEQ ID NO: 2624179 - DNA, 25 bp, Homo sapien
tcaaattactctgagctagggagga

SEQ ID NO: 2624180 - DNA, 25 bp, Homo sapien
aaatcaaggctcgagaactacgtga

SEQ ID NO: 2624181 - DNA, 25 bp, Homo sapien
ctctgagctagggaggacattcaaa

SEQ ID NO: 2624182 - DNA, 25 bp, Homo sapien
atgcacatcaccttcaacagaagta

SEQ ID NO: 2624183 - DNA, 25 bp, Homo sapien
gcccacaagcagaagtatgtaacac

SEQ ID NO: 2624184 - DNA, 25 bp, Homo sapien
acaagcagaagtatgtaacactcac

SEQ ID NO: 2624185 - DNA, 25 bp, Homo sapien
gaagcccacaagcagaagtatgtaa

SEQ ID NO: 2624186 - DNA, 25 bp, Homo sapien
cccacaagcagaagtatgtaacact

SEQ ID NO: 2624187 - DNA, 25 bp, Homo sapien
ggtagggggtgcaggaactcgtaga

SEQ ID NO: 2624188 - DNA, 25 bp, Homo sapien
ggggtgcaggaactcgtagatcgaa

SEQ ID NO: 2624189 - DNA, 25 bp, Homo sapien
tagggggtgcaggaactcgtagatc

SEQ ID NO: 2624190 - DNA, 25 bp, Homo sapien
gtgcaggaactcgtagatcgaagag

SEQ ID NO: 2624191 - DNA, 25 bp, Homo sapien
gcacaaatatgtcagctttcttcct

SEQ ID NO: 2624192 - DNA, 25 bp, Homo sapien
aaatagtgcacaaatatgtcagctt

SEQ ID NO: 2624193 - DNA, 25 bp, Homo sapien
ctggggaagttttttgactgtggct

SEQ ID NO: 2624194 - DNA, 25 bp, Homo sapien
tgtggcttaaagaagtagacaccaa

SEQ ID NO: 2624195 - DNA, 25 bp, Homo sapien
taacaagggctgtggagttacaagc

SEQ ID NO: 2624196 - DNA, 25 bp, Homo sapien
tcagtgagtcatgccggaatccttc

SEQ ID NO: 2624197 - DNA, 25 bp, Homo sapien
ttaaactcagaagggcctgtccaga

SEQ ID NO: 2624198 - DNA, 25 bp, Homo sapien
tagtatgtcctgtgcaatggttcca

SEQ ID NO: 2624199 - DNA, 25 bp, Homo sapien
ggttcagccggtgcctcagaccgca

SEQ ID NO: 2624200 - DNA, 25 bp, Homo sapien
gctatggaagcgtatccaggctgga

SEQ ID NO: 2624201 - DNA, 25 bp, Homo sapien
tagaaactcgccaggaaccaagcct

SEQ ID NO: 2624202 - DNA, 25 bp, Homo sapien
ctcctgtagccaagggcaacccttt

SEQ ID NO: 2624203 - DNA, 25 bp, Homo sapien
ccttgttgagccactggcacaggat

SEQ ID NO: 2624204 - DNA, 25 bp, Homo sapien
cagttaagtgtgttcccaaagacct

SEQ ID NO: 2624205 - DNA, 25 bp, Homo sapien
tcaggagcacagacgccaggaattt

SEQ ID NO: 2624206 - DNA, 25 bp, Homo sapien
aagcagaatactccattagaacggg

SEQ ID NO: 2624207 - DNA, 25 bp, Homo sapien
tggaatctggttacctcctcaagga

SEQ ID NO: 2624208 - DNA, 25 bp, Homo sapien
agcaactgaaatccaaagggttcct

SEQ ID NO: 2624209 - DNA, 25 bp, Homo sapien
acagaccccaaagctctcgttgcca

SEQ ID NO: 2624210 - DNA, 25 bp, Homo sapien
ggttccttctgctccaatgggcaaa

SEQ ID NO: 2624211 - DNA, 25 bp, Homo sapien
tcagtagtctttaaagcaactgaaa

SEQ ID NO: 2624212 - DNA, 25 bp, Homo sapien
gttcaaacttgtgtagaacttctcc

SEQ ID NO: 2624213 - DNA, 25 bp, Homo sapien
atcatcctgaagttcaaacttgtgt

SEQ ID NO: 2624214 - DNA, 25 bp, Homo sapien
acttgtgtagaacttctccaagtag

SEQ ID NO: 2624215 - DNA, 25 bp, Homo sapien
cctgaagttcaaacttgtgtagaac

SEQ ID NO: 2624216 - DNA, 25 bp, Homo sapien
tgcacacccagaaggttaagtgttg

SEQ ID NO: 2624217 - DNA, 25 bp, Homo sapien
gaaggttaagtgttggctccaagcg

SEQ ID NO: 2624218 - DNA, 25 bp, Homo sapien
tggctccaagcgagaaaaattatta

SEQ ID NO: 2624219 - DNA, 25 bp, Homo sapien
cccagaaggttaagtgttggctcca

SEQ ID NO: 2624220 - DNA, 25 bp, Homo sapien
tgccatgggccacattctgatcaaa

SEQ ID NO: 2624221 - DNA, 25 bp, Homo sapien
cttaaatttgtcagacgttgcatgg

SEQ ID NO: 2624222 - DNA, 25 bp, Homo sapien
ataacagctttgttgccaccccagg

SEQ ID NO: 2624223 - DNA, 25 bp, Homo sapien
agacgttgcatggtttgcatctcca

SEQ ID NO: 2624224 - DNA, 25 bp, Homo sapien
taatccgcatcagattgaaatcagt

SEQ ID NO: 2624225 - DNA, 25 bp, Homo sapien
tcttgaaacctgtatgtaatccgca

SEQ ID NO: 2624226 - DNA, 25 bp, Homo sapien
aagatcttctttcacgtgtttatat

SEQ ID NO: 2624227 - DNA, 25 bp, Homo sapien
gaaatcagtttgacgtggtatcatg

SEQ ID NO: 2624228 - DNA, 25 bp, Homo sapien
ttcaattctgaactctgaggcaggt

SEQ ID NO: 2624229 - DNA, 25 bp, Homo sapien
aatcctttatttaccctctggcaag

SEQ ID NO: 2624230 - DNA, 25 bp, Homo sapien
tggcactaatagacaggctggttcc

SEQ ID NO: 2624231 - DNA, 25 bp, Homo sapien
gagactgtctgcattaggcttggca

SEQ ID NO: 2624232 - DNA, 25 bp, Homo sapien
gagactaggtgtcacaactgtgtaa

SEQ ID NO: 2624233 - DNA, 25 bp, Homo sapien
ccagcaattagccaagagactaggt

SEQ ID NO: 2624234 - DNA, 25 bp, Homo sapien
gatcatctcttctgtatgtaggcag

SEQ ID NO: 2624235 - DNA, 25 bp, Homo sapien
gagggctcctgcgaaacccaataaa

SEQ ID NO: 2624236 - DNA, 25 bp, Homo sapien
cattttgtcgtcttctgtttaagta

SEQ ID NO: 2624237 - DNA, 25 bp, Homo sapien
gtttaggaatctgtataatagctgc

SEQ ID NO: 2624238 - DNA, 25 bp, Homo sapien
tttcatcattttttgggcctcgagt

SEQ ID NO: 2624239 - DNA, 25 bp, Homo sapien
agtacgatttgatgcaggtttagga

SEQ ID NO: 2624240 - DNA, 25 bp, Homo sapien
tgggcctcgagtgctttcaaagtac

SEQ ID NO: 2624241 - DNA, 25 bp, Homo sapien
aagcctctgtaggtggtaattttag

SEQ ID NO: 2624242 - DNA, 25 bp, Homo sapien
tccacagcttgacatacagcacatg

SEQ ID NO: 2624243 - DNA, 25 bp, Homo sapien
agataatgtgaagtgcccaatccac

SEQ ID NO: 2624244 - DNA, 25 bp, Homo sapien
caatctctgctttactaccactggg

SEQ ID NO: 2624245 - DNA, 25 bp, Homo sapien
tttaaagaaaattcatcatcagttc

SEQ ID NO: 2624246 - DNA, 25 bp, Homo sapien
ctttaaagaaaattcatcatcagtt

SEQ ID NO: 2624247 - DNA, 25 bp, Homo sapien
ttaaagaaaattcatcatcagttct

SEQ ID NO: 2624248 - DNA, 25 bp, Homo sapien
agatccttttttattaatgcttcga

SEQ ID NO: 2624249 - DNA, 25 bp, Homo sapien
gagatccttttttattaatgcttcg

SEQ ID NO: 2624250 - DNA, 25 bp, Homo sapien
gatccttttttattaatgcttcgaa

SEQ ID NO: 2624251 - DNA, 25 bp, Homo sapien
ggagatccttttttattaatgcttc

SEQ ID NO: 2624252 - DNA, 25 bp, Homo sapien
aacgaactttgtgcaacacactgga

SEQ ID NO: 2624253 - DNA, 25 bp, Homo sapien
caagttgggagactgtattgccttc

SEQ ID NO: 2624254 - DNA, 25 bp, Homo sapien
tgaaaagtttgctctaggccagcac

SEQ ID NO: 2624255 - DNA, 25 bp, Homo sapien
ctcctgctgtaagtgagggtgtcaa

SEQ ID NO: 2624256 - DNA, 25 bp, Homo sapien
gacctcccctgttttgagtcaacaa

SEQ ID NO: 2624257 - DNA, 25 bp, Homo sapien
tcgcaacagcagaccaggcacatta

SEQ ID NO: 2624258 - DNA, 25 bp, Homo sapien
gcttagaacagtcgctgaacactta

SEQ ID NO: 2624259 - DNA, 25 bp, Homo sapien
gcacattaatgccaggtcactagaa

SEQ ID NO: 2624260 - DNA, 25 bp, Homo sapien
tcgtcatctgagtaagtatttaaca

SEQ ID NO: 2624261 - DNA, 25 bp, Homo sapien
tggtccattaacaatttccgccgtc

SEQ ID NO: 2624262 - DNA, 25 bp, Homo sapien
ctcttgtgcttcgtgggctattaac

SEQ ID NO: 2624263 - DNA, 25 bp, Homo sapien
ttaacaaatcggtggttgtctggcc

SEQ ID NO: 2624264 - DNA, 25 bp, Homo sapien
aaacttccttttcatgccgaacatg

SEQ ID NO: 2624265 - DNA, 25 bp, Homo sapien
ccgcatcagccggttaatcagctgt

SEQ ID NO: 2624266 - DNA, 25 bp, Homo sapien
ccgaacatgcatgagctgcacggca

SEQ ID NO: 2624267 - DNA, 25 bp, Homo sapien
gaaatctttaagtcgtctttcctca

SEQ ID NO: 2624268 - DNA, 25 bp, Homo sapien
aagatttctaaggaagatggtattt

SEQ ID NO: 2624269 - DNA, 25 bp, Homo sapien
agaaagatttctaaggaagatggta

SEQ ID NO: 2624270 - DNA, 25 bp, Homo sapien
ttagaaagatttctaaggaagatgg

SEQ ID NO: 2624271 - DNA, 25 bp, Homo sapien
gatttctaaggaagatggtatttac

SEQ ID NO: 2624272 - DNA, 25 bp, Homo sapien
tgcttttcataacgagcttgagctc

SEQ ID NO: 2624273 - DNA, 25 bp, Homo sapien
tatttgtcaacattcgatagtctgc

SEQ ID NO: 2624274 - DNA, 25 bp, Homo sapien
aatttctgcacatactgaataatgc

SEQ ID NO: 2624275 - DNA, 25 bp, Homo sapien
gatagtctgccactttagtggacaa

SEQ ID NO: 2624276 - DNA, 25 bp, Homo sapien
tcttcataatcattggtatctagca

SEQ ID NO: 2624277 - DNA, 25 bp, Homo sapien
cattggtatctagcaagtccctttt

SEQ ID NO: 2624278 - DNA, 25 bp, Homo sapien
ggttagcaggtagtgtcttaacaga

SEQ ID NO: 2624279 - DNA, 25 bp, Homo sapien
catgcatcaacttatacggaatcag

SEQ ID NO: 2624280 - DNA, 25 bp, Homo sapien
tctaaaaatcacagttggcacccga

SEQ ID NO: 2624281 - DNA, 25 bp, Homo sapien
catccaacatgaagtgcactcagct

SEQ ID NO: 2624282 - DNA, 25 bp, Homo sapien
tgaagtaggtatagtagcattccct

SEQ ID NO: 2624283 - DNA, 25 bp, Homo sapien
tgttgcacttactgaccttccggga

SEQ ID NO: 2624284 - DNA, 25 bp, Homo sapien
tagaggtcagctgtattcctccata

SEQ ID NO: 2624285 - DNA, 25 bp, Homo sapien
agaggtcagctgtattcctccatat

SEQ ID NO: 2624286 - DNA, 25 bp, Homo sapien
gcgcctgtaggcctgtagtcctggc

SEQ ID NO: 2624287 - DNA, 25 bp, Homo sapien
gctattccatagacacaagtcccag

SEQ ID NO: 2624288 - DNA, 25 bp, Homo sapien
cggacctagggcaaatagagccctc

SEQ ID NO: 2624289 - DNA, 25 bp, Homo sapien
aatccttggcctacaacaattagaa

SEQ ID NO: 2624290 - DNA, 25 bp, Homo sapien
cactgctaagattgatacctcaaag

SEQ ID NO: 2624291 - DNA, 25 bp, Homo sapien
tcaaagactactataggcccactgt

SEQ ID NO: 2624292 - DNA, 25 bp, Homo sapien
ggctaagtcctgacaccggacaggg

SEQ ID NO: 2624293 - DNA, 25 bp, Homo sapien
tcagtcctacatatctgagccaaat

SEQ ID NO: 2624294 - DNA, 25 bp, Homo sapien
aggaaatttacactggccacggtca

SEQ ID NO: 2624295 - DNA, 25 bp, Homo sapien
tggccacggtcaatactcagcgtgt

SEQ ID NO: 2624296 - DNA, 25 bp, Homo sapien
caatactcagcgtgtgacaatggtc

SEQ ID NO: 2624297 - DNA, 25 bp, Homo sapien
tggtcactgtcaaggcctgtaggcc

SEQ ID NO: 2624298 - DNA, 25 bp, Homo sapien
ggtttcttgaacactgtatgggacc

SEQ ID NO: 2624299 - DNA, 25 bp, Homo sapien
ggaaaagattgatgctgccacatac

SEQ ID NO: 2624300 - DNA, 25 bp, Homo sapien
tgggacctgtttgatagccaggtga

SEQ ID NO: 2624301 - DNA, 25 bp, Homo sapien
gcagccccacagggtttcttgaaca

SEQ ID NO: 2624302 - DNA, 25 bp, Homo sapien
ttgaattctgaattcctggaaccat

SEQ ID NO: 2624303 - DNA, 25 bp, Homo sapien
gaattcctggaaccatagtatccac

SEQ ID NO: 2624304 - DNA, 25 bp, Homo sapien
ttctgaattcctggaaccatagtat

SEQ ID NO: 2624305 - DNA, 25 bp, Homo sapien
ttcctggaaccatagtatccaccat

SEQ ID NO: 2624306 - DNA, 25 bp, Homo sapien
gataaaggatttggtggaacacact

SEQ ID NO: 2624307 - DNA, 25 bp, Homo sapien
tggaacacactgagcagaatcactg

SEQ ID NO: 2624308 - DNA, 25 bp, Homo sapien
tgagataagcagataaaggatttgg

SEQ ID NO: 2624309 - DNA, 25 bp, Homo sapien
cactgagcagaatcactgtcaaaat

SEQ ID NO: 2624310 - DNA, 25 bp, Homo sapien
tgtggccaaacacaatggaatagga

SEQ ID NO: 2624311 - DNA, 25 bp, Homo sapien
cacaaaaaatccgaatagacctctt

SEQ ID NO: 2624312 - DNA, 25 bp, Homo sapien
aatagacctcttccatcactagctg

SEQ ID NO: 2624313 - DNA, 25 bp, Homo sapien
tggccaaacacaatggaataggatg

SEQ ID NO: 2624314 - DNA, 25 bp, Homo sapien
ttcttctggtaaggcccactctcca

SEQ ID NO: 2624315 - DNA, 25 bp, Homo sapien
tgtgaagaatatggcccagtatgca

SEQ ID NO: 2624316 - DNA, 25 bp, Homo sapien
tgttgattccgctcgaggaggaaga

SEQ ID NO: 2624317 - DNA, 25 bp, Homo sapien
gatttttcagctagcctgtgaagaa

SEQ ID NO: 2624318 - DNA, 25 bp, Homo sapien
tctgaattggtagaacctcactgac

SEQ ID NO: 2624319 - DNA, 25 bp, Homo sapien
cctcttgcagaactggtagagcatc

SEQ ID NO: 2624320 - DNA, 25 bp, Homo sapien
gaaatgcttggatagcttcttggac

SEQ ID NO: 2624321 - DNA, 25 bp, Homo sapien
caagagtgtcaatagaaagtatctg

SEQ ID NO: 2624322 - DNA, 25 bp, Homo sapien
ttctggtaatacttcatctgaaact

SEQ ID NO: 2624323 - DNA, 25 bp, Homo sapien
tttctggtaatacttcatctgaaac

SEQ ID NO: 2624324 - DNA, 25 bp, Homo sapien
gtttctggtaatacttcatctgaaa

SEQ ID NO: 2624325 - DNA, 25 bp, Homo sapien
tctggtaatacttcatctgaaactg

SEQ ID NO: 2624326 - DNA, 25 bp, Homo sapien
tatttacacctaacaaccaaagcag

SEQ ID NO: 2624327 - DNA, 25 bp, Homo sapien
caaagcagtatttgaccatctatgg

SEQ ID NO: 2624328 - DNA, 25 bp, Homo sapien
tagcaataggaaaagtggtaagaac

SEQ ID NO: 2624329 - DNA, 25 bp, Homo sapien
ttttggacataagggttatcagatc

SEQ ID NO: 2624330 - DNA, 25 bp, Homo sapien
aactatcacttgatttgacttcttc

SEQ ID NO: 2624331 - DNA, 25 bp, Homo sapien
gaaactatcacttgatttgacttct

SEQ ID NO: 2624332 - DNA, 25 bp, Homo sapien
aaactatcacttgatttgacttctt

SEQ ID NO: 2624333 - DNA, 25 bp, Homo sapien
agaaactatcacttgatttgacttc

SEQ ID NO: 2624334 - DNA, 25 bp, Homo sapien
gcaccaagctgagcacgtgtagtga

SEQ ID NO: 2624335 - DNA, 25 bp, Homo sapien
gcatttactatgatgtcaacaagca

SEQ ID NO: 2624336 - DNA, 25 bp, Homo sapien
caccaagctgagcacgtgtagtgag

SEQ ID NO: 2624337 - DNA, 25 bp, Homo sapien
ttaatagcatttactatgatgtcaa

SEQ ID NO: 2624338 - DNA, 25 bp, Homo sapien
gacatgtaactggagcacctcactg

SEQ ID NO: 2624339 - DNA, 25 bp, Homo sapien
cccaagcctgtgtagagtcatagta

SEQ ID NO: 2624340 - DNA, 25 bp, Homo sapien
tataggacgctgaagtgcaattggg

SEQ ID NO: 2624341 - DNA, 25 bp, Homo sapien
tacaactattagagtgaggcccctc

SEQ ID NO: 2624342 - DNA, 25 bp, Homo sapien
cgcaggatcaatagccaatgtggat

SEQ ID NO: 2624343 - DNA, 25 bp, Homo sapien
tttggaagtcgcaggatcaatagcc

SEQ ID NO: 2624344 - DNA, 25 bp, Homo sapien
tctattgcagcctgtaagagcttct

SEQ ID NO: 2624345 - DNA, 25 bp, Homo sapien
gaaaaccatctaggatacagtcttg

SEQ ID NO: 2624346 - DNA, 25 bp, Homo sapien
ctataatatcattcatgcgactcat

SEQ ID NO: 2624347 - DNA, 25 bp, Homo sapien
tatctgaaacatctaataatatgac

SEQ ID NO: 2624348 - DNA, 25 bp, Homo sapien
ctaataatatgacaaaatcaaatgc

SEQ ID NO: 2624349 - DNA, 25 bp, Homo sapien
ttcatgcgactcattgaggaagtat

SEQ ID NO: 2624350 - DNA, 25 bp, Homo sapien
gtatctggtctcttaaattttggtc

SEQ ID NO: 2624351 - DNA, 25 bp, Homo sapien
cgtgagcagttttataggacaattc

SEQ ID NO: 2624352 - DNA, 25 bp, Homo sapien
tgactgatatcttcgtgagcagttt

SEQ ID NO: 2624353 - DNA, 25 bp, Homo sapien
gttttcagcagctacacgttgactg

SEQ ID NO: 2624354 - DNA, 25 bp, Homo sapien
caataaaggccagttgtccaagaag

SEQ ID NO: 2624355 - DNA, 25 bp, Homo sapien
attgctccaataaaggccagttgtc

SEQ ID NO: 2624356 - DNA, 25 bp, Homo sapien
ccagttgtccaagaagcctataatt

SEQ ID NO: 2624357 - DNA, 25 bp, Homo sapien
ggccagttgtccaagaagcctataa

SEQ ID NO: 2624358 - DNA, 25 bp, Homo sapien
ttgctatttcagtcgtaagaatttc

SEQ ID NO: 2624359 - DNA, 25 bp, Homo sapien
gctatttcagtcgtaagaatttctt

SEQ ID NO: 2624360 - DNA, 25 bp, Homo sapien
ttttgctatttcagtcgtaagaatt

SEQ ID NO: 2624361 - DNA, 25 bp, Homo sapien
tttcacataaagattccttatctat

SEQ ID NO: 2624362 - DNA, 25 bp, Homo sapien
tgcagtaggagtttttgaagccaca

SEQ ID NO: 2624363 - DNA, 25 bp, Homo sapien
ttgcagtaggagtttttgaagccac

SEQ ID NO: 2624364 - DNA, 25 bp, Homo sapien
cagtaggagtttttgaagccacatg

SEQ ID NO: 2624365 - DNA, 25 bp, Homo sapien
gcagtaggagtttttgaagccacat

SEQ ID NO: 2624366 - DNA, 25 bp, Homo sapien
ccatagcggttaaggatctagaaca

SEQ ID NO: 2624367 - DNA, 25 bp, Homo sapien
tactcttgactggagcaagctgagg

SEQ ID NO: 2624368 - DNA, 25 bp, Homo sapien
tacgcttttagctactccgagggct

SEQ ID NO: 2624369 - DNA, 25 bp, Homo sapien
tcctacatggcaaagaagttgggct

SEQ ID NO: 2624370 - DNA, 25 bp, Homo sapien
gattcttgcttaccatgcggggctt

SEQ ID NO: 2624371 - DNA, 25 bp, Homo sapien
tgaagagattcttgcttaccatgcg

SEQ ID NO: 2624372 - DNA, 25 bp, Homo sapien
aagagattcttgcttaccatgcggg

SEQ ID NO: 2624373 - DNA, 25 bp, Homo sapien
cctgaagagattcttgcttaccatg

SEQ ID NO: 2624374 - DNA, 25 bp, Homo sapien
tgacgaccttgcatattgtgccaca

SEQ ID NO: 2624375 - DNA, 25 bp, Homo sapien
taaggagtcatcacaataagcattg

SEQ ID NO: 2624376 - DNA, 25 bp, Homo sapien
gctaccagaaccgtgatcaatcata

SEQ ID NO: 2624377 - DNA, 25 bp, Homo sapien
aatcatcttgtgtagtgcctggtac

SEQ ID NO: 2624378 - DNA, 25 bp, Homo sapien
ctgtagagtcagcaggtgatttctt

SEQ ID NO: 2624379 - DNA, 25 bp, Homo sapien
ggtacttttcctcctgatgattttc

SEQ ID NO: 2624380 - DNA, 25 bp, Homo sapien
tgtagagtcagcaggtgatttcttt

SEQ ID NO: 2624381 - DNA, 25 bp, Homo sapien
tctttactggtacttttcctcctga

SEQ ID NO: 2624382 - DNA, 25 bp, Homo sapien
gctgtggcactattgcaacaggtga

SEQ ID NO: 2624383 - DNA, 25 bp, Homo sapien
tgtggcactattgcaacaggtgatg

SEQ ID NO: 2624384 - DNA, 25 bp, Homo sapien
ggcactattgcaacaggtgatgtat

SEQ ID NO: 2624385 - DNA, 25 bp, Homo sapien
ggtggctgtggcactattgcaacag

SEQ ID NO: 2624386 - DNA, 25 bp, Homo sapien
ttcattcacatagacccattcttct

SEQ ID NO: 2624387 - DNA, 25 bp, Homo sapien
cattcacatagacccattcttctga

SEQ ID NO: 2624388 - DNA, 25 bp, Homo sapien
tcattcacatagacccattcttctg

SEQ ID NO: 2624389 - DNA, 25 bp, Homo sapien
gttcattcacatagacccattcttc

SEQ ID NO: 2624390 - DNA, 25 bp, Homo sapien
aggccttcaggatgttgcaaatgac

SEQ ID NO: 2624391 - DNA, 25 bp, Homo sapien
gcaaatgacagtgtgaatcttacta

SEQ ID NO: 2624392 - DNA, 25 bp, Homo sapien
ttactatatgcaggagaaagaatga

SEQ ID NO: 2624393 - DNA, 25 bp, Homo sapien
aaggccttcaggatgttgcaaatga

SEQ ID NO: 2624394 - DNA, 25 bp, Homo sapien
tcatcatttacttgtctatactcat

SEQ ID NO: 2624395 - DNA, 25 bp, Homo sapien
aacactgatgacgttaattgtaaca

SEQ ID NO: 2624396 - DNA, 25 bp, Homo sapien
catcatttacttgtctatactcatc

SEQ ID NO: 2624397 - DNA, 25 bp, Homo sapien
atcataacactgatgacgttaattg

SEQ ID NO: 2624398 - DNA, 25 bp, Homo sapien
taatctcatataagtaagcaagcac

SEQ ID NO: 2624399 - DNA, 25 bp, Homo sapien
agatgcctgagtactgttttgatgg

SEQ ID NO: 2624400 - DNA, 25 bp, Homo sapien
tgatggtgtttatataggaattttc

SEQ ID NO: 2624401 - DNA, 25 bp, Homo sapien
caagcacagtatgctggtcttccct

SEQ ID NO: 2624402 - DNA, 25 bp, Homo sapien
gaagggagttgaaatcagcctgcca

SEQ ID NO: 2624403 - DNA, 25 bp, Homo sapien
aaatcttgcttgtgatccggacgct

SEQ ID NO: 2624404 - DNA, 25 bp, Homo sapien
tgtttcctcatcatcccacaggtca

SEQ ID NO: 2624405 - DNA, 25 bp, Homo sapien
ttcactcgttgatgtagttcagcct

SEQ ID NO: 2624406 - DNA, 25 bp, Homo sapien
tcattaatgatgtcaagccgctcct

SEQ ID NO: 2624407 - DNA, 25 bp, Homo sapien
cattccaagagtgtcctgtaaccag

SEQ ID NO: 2624408 - DNA, 25 bp, Homo sapien
aaatgtcccacaggcggtctcgcag

SEQ ID NO: 2624409 - DNA, 25 bp, Homo sapien
ttccttccgggcatcacaaatgtcc

SEQ ID NO: 2624410 - DNA, 25 bp, Homo sapien
caaagggattcgagtaaatctcttg

SEQ ID NO: 2624411 - DNA, 25 bp, Homo sapien
tctctttgtatcttggaaacggttc

SEQ ID NO: 2624412 - DNA, 25 bp, Homo sapien
ttgtctttactatccagttggacca

SEQ ID NO: 2624413 - DNA, 25 bp, Homo sapien
gtatcttggaaacggttcagctctg

SEQ ID NO: 2624414 - DNA, 25 bp, Homo sapien
ctggcggaggttcataatttcttac

SEQ ID NO: 2624415 - DNA, 25 bp, Homo sapien
cgcctggcggaggttcataatttct

SEQ ID NO: 2624416 - DNA, 25 bp, Homo sapien
cataaaagtgttagaggttcataat

SEQ ID NO: 2624417 - DNA, 25 bp, Homo sapien
cgcgcctggcggaggttcataattt

SEQ ID NO: 2624418 - DNA, 25 bp, Homo sapien
aaatggatattcgaggaactagagg

SEQ ID NO: 2624419 - DNA, 25 bp, Homo sapien
cttcagtactgattttgtttttggt

SEQ ID NO: 2624420 - DNA, 25 bp, Homo sapien
ggatattcgaggaactagaggaatt

SEQ ID NO: 2624421 - DNA, 25 bp, Homo sapien
atggatattcgaggaactagaggaa

SEQ ID NO: 2624422 - DNA, 25 bp, Homo sapien
tttcatcggcctcaaagttggactc

SEQ ID NO: 2624423 - DNA, 25 bp, Homo sapien
tgtgagatactgctaaagaagcctg

SEQ ID NO: 2624424 - DNA, 25 bp, Homo sapien
caaagttggactcaacgttttctag

SEQ ID NO: 2624425 - DNA, 25 bp, Homo sapien
tttctagggagttatccatcttgcc

SEQ ID NO: 2624426 - DNA, 25 bp, Homo sapien
tatatttcaagtacacatgtaacac

SEQ ID NO: 2624427 - DNA, 25 bp, Homo sapien
aaacaatgaagtgcaatatgtacac

SEQ ID NO: 2624428 - DNA, 25 bp, Homo sapien
gatgaagctaaagtaagccacagag

SEQ ID NO: 2624429 - DNA, 25 bp, Homo sapien
caaaaattgaccataaggcaacttc

SEQ ID NO: 2624430 - DNA, 25 bp, Homo sapien
tcttcttccataagcctctgatgaa

SEQ ID NO: 2624431 - DNA, 25 bp, Homo sapien
ccatctgaggagatttttctttggg

SEQ ID NO: 2624432 - DNA, 25 bp, Homo sapien
tccataagcctctgatgaatttcag

SEQ ID NO: 2624433 - DNA, 25 bp, Homo sapien
cttttttatttgcacccatctgagg

SEQ ID NO: 2624434 - DNA, 25 bp, Homo sapien
ttgttactatgacaggagttgcttc

SEQ ID NO: 2624435 - DNA, 25 bp, Homo sapien
gcttctgccataggtggtgatttac

SEQ ID NO: 2624436 - DNA, 25 bp, Homo sapien
tttcctctgttgttactatgacagg

SEQ ID NO: 2624437 - DNA, 25 bp, Homo sapien
caggagttgcttctgccataggtgg

SEQ ID NO: 2624438 - DNA, 25 bp, Homo sapien
tatcagttcaagtcgaaattgcgtg

SEQ ID NO: 2624439 - DNA, 25 bp, Homo sapien
tacatcaaccacctttgttactaaa

SEQ ID NO: 2624440 - DNA, 25 bp, Homo sapien
gccatttttccatgagtttatatac

SEQ ID NO: 2624441 - DNA, 25 bp, Homo sapien
ttcattcaaatacctctcaccaagc

SEQ ID NO: 2624442 - DNA, 25 bp, Homo sapien
tgtttcaatgtgatagcgagctacg

SEQ ID NO: 2624443 - DNA, 25 bp, Homo sapien
ccttttctacaggtggaggacgtat

SEQ ID NO: 2624444 - DNA, 25 bp, Homo sapien
gctgttcaatggtcagggtaccatc

SEQ ID NO: 2624445 - DNA, 25 bp, Homo sapien
tgatctcgaagactgtcaagctgtt

SEQ ID NO: 2624446 - DNA, 25 bp, Homo sapien
ctctattcacaccatccgaaggatt

SEQ ID NO: 2624447 - DNA, 25 bp, Homo sapien
tattcacaccatccgaaggattcct

SEQ ID NO: 2624448 - DNA, 25 bp, Homo sapien
tctattcacaccatccgaaggattc

SEQ ID NO: 2624449 - DNA, 25 bp, Homo sapien
ttcacaccatccgaaggattcctgc

SEQ ID NO: 2624450 - DNA, 25 bp, Homo sapien
gataatggtcaagcttctgcggcct

SEQ ID NO: 2624451 - DNA, 25 bp, Homo sapien
cataagatttaatagctcatcatat

SEQ ID NO: 2624452 - DNA, 25 bp, Homo sapien
gacacaaggcgcagaacataagatt

SEQ ID NO: 2624453 - DNA, 25 bp, Homo sapien
cctgacttcactccatgcttacgac

SEQ ID NO: 2624454 - DNA, 25 bp, Homo sapien
actggagagctacttgttgcttcca

SEQ ID NO: 2624455 - DNA, 25 bp, Homo sapien
tgttgcttccattaatgaggccttg

SEQ ID NO: 2624456 - DNA, 25 bp, Homo sapien
ctcgctgagatgatgtgcattgaga

SEQ ID NO: 2624457 - DNA, 25 bp, Homo sapien
tgagatgatgtgcattgagaaattc

SEQ ID NO: 2624458 - DNA, 25 bp, Homo sapien
gacgtccggtcttggcaatagcatg

SEQ ID NO: 2624459 - DNA, 25 bp, Homo sapien
taatagtagggccacctcgttgttc

SEQ ID NO: 2624460 - DNA, 25 bp, Homo sapien
gcccagtcttggctcgacagtctaa

SEQ ID NO: 2624461 - DNA, 25 bp, Homo sapien
aataagttctctactctcccgaggg

SEQ ID NO: 2624462 - DNA, 25 bp, Homo sapien
acaggtcgaaggtgaaggcctttga

SEQ ID NO: 2624463 - DNA, 25 bp, Homo sapien
caggtcgaaggtgaaggcctttgaa

SEQ ID NO: 2624464 - DNA, 25 bp, Homo sapien
cacaggtcgaaggtgaaggcctttg

SEQ ID NO: 2624465 - DNA, 25 bp, Homo sapien
agtgcagttgccgaacaattgcagg

SEQ ID NO: 2624466 - DNA, 25 bp, Homo sapien
ggatatcccttgagaaagttctgga

SEQ ID NO: 2624467 - DNA, 25 bp, Homo sapien
tcctgtctcctatttgagaaggcat

SEQ ID NO: 2624468 - DNA, 25 bp, Homo sapien
tggagggctgcctgtaatccatgaa

SEQ ID NO: 2624469 - DNA, 25 bp, Homo sapien
gaagtgggcaaatttaacaatgtca

SEQ ID NO: 2624470 - DNA, 25 bp, Homo sapien
tctattcttattgacacaggacaga

SEQ ID NO: 2624471 - DNA, 25 bp, Homo sapien
ttgactggtgtcacttttgcctctg

SEQ ID NO: 2624472 - DNA, 25 bp, Homo sapien
tcatgacatccaacaagaagtgggc

SEQ ID NO: 2624473 - DNA, 25 bp, Homo sapien
ggctggcatctctgaaacagccttg

SEQ ID NO: 2624474 - DNA, 25 bp, Homo sapien
aaacttccaatcacggtagccctca

SEQ ID NO: 2624475 - DNA, 25 bp, Homo sapien
tgaggcagttaccatgaaagtgtgt

SEQ ID NO: 2624476 - DNA, 25 bp, Homo sapien
tgaatccaccatgcgttcttttggc

SEQ ID NO: 2624477 - DNA, 25 bp, Homo sapien
ggcagcttctaatactggttcataa

SEQ ID NO: 2624478 - DNA, 25 bp, Homo sapien
agtcaggatggatacctctttttct

SEQ ID NO: 2624479 - DNA, 25 bp, Homo sapien
tcaacatgctccattcagtatccac

SEQ ID NO: 2624480 - DNA, 25 bp, Homo sapien
aaatctctaatttcaacatgctcca

SEQ ID NO: 2624481 - DNA, 25 bp, Homo sapien
tttggatacttgtgtaagtaaatgg

SEQ ID NO: 2624482 - DNA, 25 bp, Homo sapien
gactagtgtcaggatatttggatac

SEQ ID NO: 2624483 - DNA, 25 bp, Homo sapien
ggaagggtcaacactaggtcgacta

SEQ ID NO: 2624484 - DNA, 25 bp, Homo sapien
taaatggaattcacaaaatcccagg

SEQ ID NO: 2624485 - DNA, 25 bp, Homo sapien
tcaactgaataattaggacatccgt

SEQ ID NO: 2624486 - DNA, 25 bp, Homo sapien
attcaactgaataattaggacatcc

SEQ ID NO: 2624487 - DNA, 25 bp, Homo sapien
tgaataattaggacatccgtcatac

SEQ ID NO: 2624488 - DNA, 25 bp, Homo sapien
aactgaataattaggacatccgtca

SEQ ID NO: 2624489 - DNA, 25 bp, Homo sapien
cagttgaagacggtgttcttgcatt

SEQ ID NO: 2624490 - DNA, 25 bp, Homo sapien
gatgagcaatctgaattagatcttg

SEQ ID NO: 2624491 - DNA, 25 bp, Homo sapien
cattttctgagtttgatgagcaatc

SEQ ID NO: 2624492 - DNA, 25 bp, Homo sapien
tctgagtttgatgagcaatctgaat

SEQ ID NO: 2624493 - DNA, 25 bp, Homo sapien
caatctgaattagatcttgtgtcac

SEQ ID NO: 2624494 - DNA, 25 bp, Homo sapien
taatgaattgtatgccaggcctaag

SEQ ID NO: 2624495 - DNA, 25 bp, Homo sapien
taatcatagtctggtcacccttagg

SEQ ID NO: 2624496 - DNA, 25 bp, Homo sapien
caggcctaagggaactcagaccgta

SEQ ID NO: 2624497 - DNA, 25 bp, Homo sapien
cattgtgtagcagcatacagctcca

SEQ ID NO: 2624498 - DNA, 25 bp, Homo sapien
ggttgggtaaggtgcatccaattac

SEQ ID NO: 2624499 - DNA, 25 bp, Homo sapien
tgtgccaaggttcagggtcaccaaa

SEQ ID NO: 2624500 - DNA, 25 bp, Homo sapien
caattactaggaaagttgtttgtgc

SEQ ID NO: 2624501 - DNA, 25 bp, Homo sapien
cgatcagaatgtcagtaaatgcttt

SEQ ID NO: 2624502 - DNA, 25 bp, Homo sapien
cgccagtccacgaactcggagttga

SEQ ID NO: 2624503 - DNA, 25 bp, Homo sapien
tgaggttactaacaggaacttccgc

SEQ ID NO: 2624504 - DNA, 25 bp, Homo sapien
tatactgctcaaaagtgatggtgcc

SEQ ID NO: 2624505 - DNA, 25 bp, Homo sapien
ctcctccaagggaatgggccaaggc

SEQ ID NO: 2624506 - DNA, 25 bp, Homo sapien
ctctataagatgctcctgcctatta

SEQ ID NO: 2624507 - DNA, 25 bp, Homo sapien
tcatctcctgtaaaccacagaccag

SEQ ID NO: 2624508 - DNA, 25 bp, Homo sapien
ctattaaatggaaggggttcaagag

SEQ ID NO: 2624509 - DNA, 25 bp, Homo sapien
tatatcttcatctcctgtaaaccac

SEQ ID NO: 2624510 - DNA, 25 bp, Homo sapien
gcagcatgaggagttagtgcctggg

SEQ ID NO: 2624511 - DNA, 25 bp, Homo sapien
ttctcactctgaatgcctgagctga

SEQ ID NO: 2624512 - DNA, 25 bp, Homo sapien
tttctcactctgaatgcctgagctg

SEQ ID NO: 2624513 - DNA, 25 bp, Homo sapien
gagttagtgcctgggagtcaaatat

SEQ ID NO: 2624514 - DNA, 25 bp, Homo sapien
ccacggtgtctgggtggcaagcaaa

SEQ ID NO: 2624515 - DNA, 25 bp, Homo sapien
atgagttccaacagccacactgagg

SEQ ID NO: 2624516 - DNA, 25 bp, Homo sapien
gaagctttgacttgttggaagacat

SEQ ID NO: 2624517 - DNA, 25 bp, Homo sapien
gaatggaagctttgacttgttggaa

SEQ ID NO: 2624518 - DNA, 25 bp, Homo sapien
taggtggctggcaaatctattggag

SEQ ID NO: 2624519 - DNA, 25 bp, Homo sapien
actttgagtagtgtttccatggaca

SEQ ID NO: 2624520 - DNA, 25 bp, Homo sapien
aatgttctctatctttaggtggctg

SEQ ID NO: 2624521 - DNA, 25 bp, Homo sapien
ctattggagtcctgtgcttcacttc

SEQ ID NO: 2624522 - DNA, 25 bp, Homo sapien
taaaaggatgcttcaagagaacagc

SEQ ID NO: 2624523 - DNA, 25 bp, Homo sapien
gcgacttcaattggctccaggttct

SEQ ID NO: 2624524 - DNA, 25 bp, Homo sapien
tcttggcacctaggtcttgaaatgt

SEQ ID NO: 2624525 - DNA, 25 bp, Homo sapien
aggttcttggcacctaggtcttgaa

SEQ ID NO: 2624526 - DNA, 25 bp, Homo sapien
tcacaggagtcaaacagggagactt

SEQ ID NO: 2624527 - DNA, 25 bp, Homo sapien
gggactcgccatagtggatgcacat

SEQ ID NO: 2624528 - DNA, 25 bp, Homo sapien
gaagtggtgcccaaccttttgcaca

SEQ ID NO: 2624529 - DNA, 25 bp, Homo sapien
caaaaacgtttaggcacacaggaag

SEQ ID NO: 2624530 - DNA, 25 bp, Homo sapien
atagtacttcagttaacattgctag

SEQ ID NO: 2624531 - DNA, 25 bp, Homo sapien
gaaatgttaggtattctgccacact

SEQ ID NO: 2624532 - DNA, 25 bp, Homo sapien
gttatcctcaaagaggaactgtgct

SEQ ID NO: 2624533 - DNA, 25 bp, Homo sapien
tgtgctgctccaaatgccaatagta

SEQ ID NO: 2624534 - DNA, 25 bp, Homo sapien
ccatcacttccttgtacatgttcac

SEQ ID NO: 2624535 - DNA, 25 bp, Homo sapien
tacatgttcactcctttggagaatt

SEQ ID NO: 2624536 - DNA, 25 bp, Homo sapien
aatttttggaagatttattgcagaa

SEQ ID NO: 2624537 - DNA, 25 bp, Homo sapien
tattgcagaattaaaaaaatcacac

SEQ ID NO: 2624538 - DNA, 25 bp, Homo sapien
gcagaattaaaaaaatcacactctt

SEQ ID NO: 2624539 - DNA, 25 bp, Homo sapien
tttaatttttggaagatttattgca

SEQ ID NO: 2624540 - DNA, 25 bp, Homo sapien
agctctggggaatgtctggtgtgga

SEQ ID NO: 2624541 - DNA, 25 bp, Homo sapien
gaagacagagaagcttagatctagg

SEQ ID NO: 2624542 - DNA, 25 bp, Homo sapien
tgagccagtgtgtatgaaatgaatg

SEQ ID NO: 2624543 - DNA, 25 bp, Homo sapien
aagacagagaagcttagatctaggg

SEQ ID NO: 2624544 - DNA, 25 bp, Homo sapien
tgtgagccagtgtgtatgaaatgaa

SEQ ID NO: 2624545 - DNA, 25 bp, Homo sapien
aaaccatgccaaaagttgtacctag

SEQ ID NO: 2624546 - DNA, 25 bp, Homo sapien
ctttctccagaaacgacttgaagta

SEQ ID NO: 2624547 - DNA, 25 bp, Homo sapien
tttctccagaaacgacttgaagtaa

SEQ ID NO: 2624548 - DNA, 25 bp, Homo sapien
actttctccagaaacgacttgaagt

SEQ ID NO: 2624549 - DNA, 25 bp, Homo sapien
aactggctatagcatgagaatgagt

SEQ ID NO: 2624550 - DNA, 25 bp, Homo sapien
caactggctatagcatgagaatgag

SEQ ID NO: 2624551 - DNA, 25 bp, Homo sapien
attccagattggtgatgttgacatc

SEQ ID NO: 2624552 - DNA, 25 bp, Homo sapien
gatgttgacatctgggtcctcaaaa

SEQ ID NO: 2624553 - DNA, 25 bp, Homo sapien
gattggtgatgttgacatctgggtc

SEQ ID NO: 2624554 - DNA, 25 bp, Homo sapien
tttcaaattccagattggtgatgtt

SEQ ID NO: 2624555 - DNA, 25 bp, Homo sapien
taaaaaggggatatgtcttgattca

SEQ ID NO: 2624556 - DNA, 25 bp, Homo sapien
aaaaaggggatatgtcttgattcag

SEQ ID NO: 2624557 - DNA, 25 bp, Homo sapien
ataaaaaggggatatgtcttgattc

SEQ ID NO: 2624558 - DNA, 25 bp, Homo sapien
gaataaaaaggggatatgtcttgat

SEQ ID NO: 2624559 - DNA, 25 bp, Homo sapien
tctttgtctcgatgaaatatatctc

SEQ ID NO: 2624560 - DNA, 25 bp, Homo sapien
tctccaaccttcacacatatattgc

SEQ ID NO: 2624561 - DNA, 25 bp, Homo sapien
tttgcaggttagactcttttctcca

SEQ ID NO: 2624562 - DNA, 25 bp, Homo sapien
agtggttaggtctatttttttgcag

SEQ ID NO: 2624563 - DNA, 25 bp, Homo sapien
gaatttaggctcaatactgcactct

SEQ ID NO: 2624564 - DNA, 25 bp, Homo sapien
gcatcacctcatcagtagaaggcct

SEQ ID NO: 2624565 - DNA, 25 bp, Homo sapien
gagtttcttgccctgcggaatttag

SEQ ID NO: 2624566 - DNA, 25 bp, Homo sapien
tccctgaagaagaagcaagtctgtc

SEQ ID NO: 2624567 - DNA, 25 bp, Homo sapien
ccttgccgttcggaggaggcatgtc

SEQ ID NO: 2624568 - DNA, 25 bp, Homo sapien
tcccccttgccgttcggaggaggca

SEQ ID NO: 2624569 - DNA, 25 bp, Homo sapien
tggagactgcaagtgcattgagcat

SEQ ID NO: 2624570 - DNA, 25 bp, Homo sapien
gggatggagactgcaagtgcattga

SEQ ID NO: 2624571 - DNA, 25 bp, Homo sapien
tcatccttttcctggcggtaagcta

SEQ ID NO: 2624572 - DNA, 25 bp, Homo sapien
tcccgatagacgacactcaggtcaa

SEQ ID NO: 2624573 - DNA, 25 bp, Homo sapien
gctacatcgtgcattaaaactttta

SEQ ID NO: 2624574 - DNA, 25 bp, Homo sapien
tggctccttcccgatagacgacact

SEQ ID NO: 2624575 - DNA, 25 bp, Homo sapien
cttttcaattggtgcaattttcaga

SEQ ID NO: 2624576 - DNA, 25 bp, Homo sapien
gtggcatcttgcatcacactgcaaa

SEQ ID NO: 2624577 - DNA, 25 bp, Homo sapien
tgcttttcaattggtgcaattttca

SEQ ID NO: 2624578 - DNA, 25 bp, Homo sapien
gaaagatggcaggatcaagggtggg

SEQ ID NO: 2624579 - DNA, 25 bp, Homo sapien
gctttgtgctggataaattcacatg

SEQ ID NO: 2624580 - DNA, 25 bp, Homo sapien
cagctttgtgctggataaattcaca

SEQ ID NO: 2624581 - DNA, 25 bp, Homo sapien
gtgtcagctttgtgctggataaatt

SEQ ID NO: 2624582 - DNA, 25 bp, Homo sapien
gtcagctttgtgctggataaattca

SEQ ID NO: 2624583 - DNA, 25 bp, Homo sapien
taaaatagtgatcagggatggatcg

SEQ ID NO: 2624584 - DNA, 25 bp, Homo sapien
tctcatacattgctgccggttggag

SEQ ID NO: 2624585 - DNA, 25 bp, Homo sapien
gatggatcgaactttaatctcatac

SEQ ID NO: 2624586 - DNA, 25 bp, Homo sapien
acattgctgccggttggagctttct

SEQ ID NO: 2624587 - DNA, 25 bp, Homo sapien
agctattattgatctctggagttct

SEQ ID NO: 2624588 - DNA, 25 bp, Homo sapien
atctctggagttctgaagtaataac

SEQ ID NO: 2624589 - DNA, 25 bp, Homo sapien
ctgagctattattgatctctggagt

SEQ ID NO: 2624590 - DNA, 25 bp, Homo sapien
tattattgatctctggagttctgaa

SEQ ID NO: 2624591 - DNA, 25 bp, Homo sapien
taagagtgccctccaagggtgtcct

SEQ ID NO: 2624592 - DNA, 25 bp, Homo sapien
ttgttcttcacaaaaggcgcaaaga

SEQ ID NO: 2624593 - DNA, 25 bp, Homo sapien
tctccaaagaaagtgtaagagtgcc

SEQ ID NO: 2624594 - DNA, 25 bp, Homo sapien
ggcgcaaagacagcaggcaagtcat

SEQ ID NO: 2624595 - DNA, 25 bp, Homo sapien
aaggggccttagagacagcagccat

SEQ ID NO: 2624596 - DNA, 25 bp, Homo sapien
cttcttaaaggggccttagagacag

SEQ ID NO: 2624597 - DNA, 25 bp, Homo sapien
gacaccaataaaggtgcttcttaaa

SEQ ID NO: 2624598 - DNA, 25 bp, Homo sapien
ctgacaccaataaaggtgcttctta

SEQ ID NO: 2624599 - DNA, 25 bp, Homo sapien
ctttttttccataacacacaggcca

SEQ ID NO: 2624600 - DNA, 25 bp, Homo sapien
ccaacagagcgacagagaaaaaact

SEQ ID NO: 2624601 - DNA, 25 bp, Homo sapien
gctgatggttagtaagataggatcc

SEQ ID NO: 2624602 - DNA, 25 bp, Homo sapien
ggccaagatgaccaacagagcgaca

SEQ ID NO: 2624603 - DNA, 25 bp, Homo sapien
actgggccatacgataggcttaatc

SEQ ID NO: 2624604 - DNA, 25 bp, Homo sapien
agagtcttcttatgatcggggagac

SEQ ID NO: 2624605 - DNA, 25 bp, Homo sapien
gagactgggccatacgataggctta

SEQ ID NO: 2624606 - DNA, 25 bp, Homo sapien
tcttcttatgatcggggagactggg

SEQ ID NO: 2624607 - DNA, 25 bp, Homo sapien
caactgggttcaatgtcaggattcc

SEQ ID NO: 2624608 - DNA, 25 bp, Homo sapien
tgggctgaccctgagcaactgggtt

SEQ ID NO: 2624609 - DNA, 25 bp, Homo sapien
caccctatgaatctggcagtccagg

SEQ ID NO: 2624610 - DNA, 25 bp, Homo sapien
ggcagcgtgctgtttgtagtcccaa

SEQ ID NO: 2624611 - DNA, 25 bp, Homo sapien
tcgtcaaacgtacccatgtccaggg

SEQ ID NO: 2624612 - DNA, 25 bp, Homo sapien
taggcacaccctgttactagtgacg

SEQ ID NO: 2624613 - DNA, 25 bp, Homo sapien
taaatcatctttgtcgctcacggta

SEQ ID NO: 2624614 - DNA, 25 bp, Homo sapien
ggtgtgcacctctgaacagcccata

SEQ ID NO: 2624615 - DNA, 25 bp, Homo sapien
ctgatgtggcatcccctaagcgggc

SEQ ID NO: 2624616 - DNA, 25 bp, Homo sapien
gacctgatgtggcatcccctaagcg

SEQ ID NO: 2624617 - DNA, 25 bp, Homo sapien
ccctaagcgggcatagaggtcacaa

SEQ ID NO: 2624618 - DNA, 25 bp, Homo sapien
gcatagaggtcacaaaagtccatct

SEQ ID NO: 2624619 - DNA, 25 bp, Homo sapien
atgacaatccgcaacccgagagagc

SEQ ID NO: 2624620 - DNA, 25 bp, Homo sapien
aatgcttaggcgacatgtggaactg

SEQ ID NO: 2624621 - DNA, 25 bp, Homo sapien
cagagcctgctattgacttgggaac

SEQ ID NO: 2624622 - DNA, 25 bp, Homo sapien
ctgctattgacttgggaacatcttg

SEQ ID NO: 2624623 - DNA, 25 bp, Homo sapien
agttttgatgctgttctagaaacca

SEQ ID NO: 2624624 - DNA, 25 bp, Homo sapien
ctagaaaccaaaccattgccagcaa

SEQ ID NO: 2624625 - DNA, 25 bp, Homo sapien
caaaccattgccagcaaaacttctg

SEQ ID NO: 2624626 - DNA, 25 bp, Homo sapien
cttacaaaacatgggagacaagttt

SEQ ID NO: 2624627 - DNA, 25 bp, Homo sapien
caaacttactctccagtaggtggct

SEQ ID NO: 2624628 - DNA, 25 bp, Homo sapien
tatttgacacaacctggaggcagac

SEQ ID NO: 2624629 - DNA, 25 bp, Homo sapien
gcgtgatatcttgtgggttaaacca

SEQ ID NO: 2624630 - DNA, 25 bp, Homo sapien
gcagactattgagggcttgcacggt

SEQ ID NO: 2624631 - DNA, 25 bp, Homo sapien
catcaatagcccatatcttttcttt

SEQ ID NO: 2624632 - DNA, 25 bp, Homo sapien
tatcttccttagtgtaacaccaaac

SEQ ID NO: 2624633 - DNA, 25 bp, Homo sapien
cctctctgatagctggtgttcatga

SEQ ID NO: 2624634 - DNA, 25 bp, Homo sapien
taacaccaaactacctctctgatag

SEQ ID NO: 2624635 - DNA, 25 bp, Homo sapien
tgtgccgctgaccgtttttaaggga

SEQ ID NO: 2624636 - DNA, 25 bp, Homo sapien
ctgtgccgctgaccgtttttaaggg

SEQ ID NO: 2624637 - DNA, 25 bp, Homo sapien
caatcattacaacatagtcatgagg

SEQ ID NO: 2624638 - DNA, 25 bp, Homo sapien
ttttgtcgaaaagtcccagcaagag

SEQ ID NO: 2624639 - DNA, 25 bp, Homo sapien
catgagggattttgtcgaaaagtcc

SEQ ID NO: 2624640 - DNA, 25 bp, Homo sapien
aagagagtggctggattaagatcac

SEQ ID NO: 2624641 - DNA, 25 bp, Homo sapien
acatggacttctggggccgagtgaa

SEQ ID NO: 2624642 - DNA, 25 bp, Homo sapien
cttctggggccgagtgaagaatttt

SEQ ID NO: 2624643 - DNA, 25 bp, Homo sapien
tcacatggacttctggggccgagtg

SEQ ID NO: 2624644 - DNA, 25 bp, Homo sapien
gacttctggggccgagtgaagaatt

SEQ ID NO: 2624645 - DNA, 25 bp, Homo sapien
cctggattgatcactactgacttca

SEQ ID NO: 2624646 - DNA, 25 bp, Homo sapien
tcctctcctggattgatcactactg

SEQ ID NO: 2624647 - DNA, 25 bp, Homo sapien
agacactgtattctcatcattccag

SEQ ID NO: 2624648 - DNA, 25 bp, Homo sapien
tactgacttcagacactgtattctc

SEQ ID NO: 2624649 - DNA, 25 bp, Homo sapien
cagagaacagcgcttgatcagagtc

SEQ ID NO: 2624650 - DNA, 25 bp, Homo sapien
tatctacagtaggtgagtgcttggc

SEQ ID NO: 2624651 - DNA, 25 bp, Homo sapien
gatccgcggcttccgtagaagtgag

SEQ ID NO: 2624652 - DNA, 25 bp, Homo sapien
agtgcttggccggagaattcccaga

SEQ ID NO: 2624653 - DNA, 25 bp, Homo sapien
tttggtagagcgaggatagattatc

SEQ ID NO: 2624654 - DNA, 25 bp, Homo sapien
ttatccaatggagcacgagggagga

SEQ ID NO: 2624655 - DNA, 25 bp, Homo sapien
gaagactggcaggatccttactcct

SEQ ID NO: 2624656 - DNA, 25 bp, Homo sapien
tactgactgctggtagtttggtaga

SEQ ID NO: 2624657 - DNA, 25 bp, Homo sapien
tctcccgcatattctcttcaatgtt

SEQ ID NO: 2624658 - DNA, 25 bp, Homo sapien
ctgtgcttgagagtacaaggctgga

SEQ ID NO: 2624659 - DNA, 25 bp, Homo sapien
ttctcccgcatattctcttcaatgt

SEQ ID NO: 2624660 - DNA, 25 bp, Homo sapien
gcttgagagtacaaggctggacaca

SEQ ID NO: 2624661 - DNA, 25 bp, Homo sapien
caaattcatccttactagctcctgc

SEQ ID NO: 2624662 - DNA, 25 bp, Homo sapien
ggtgcgtttgttgggcagtgtcacc

SEQ ID NO: 2624663 - DNA, 25 bp, Homo sapien
aaccctgttctctacatcatctctg

SEQ ID NO: 2624664 - DNA, 25 bp, Homo sapien
attttgctacaaattcatccttact

SEQ ID NO: 2624665 - DNA, 25 bp, Homo sapien
tatgtagctttgtggaaagctgctg

SEQ ID NO: 2624666 - DNA, 25 bp, Homo sapien
cactctgggcactatgtagctttgt

SEQ ID NO: 2624667 - DNA, 25 bp, Homo sapien
gagcagaacctgctcgacgtctttg

SEQ ID NO: 2624668 - DNA, 25 bp, Homo sapien
ggccggtgggctgaatcgactacat

SEQ ID NO: 2624669 - DNA, 25 bp, Homo sapien
caggtgctcccaaaccctgagccca

SEQ ID NO: 2624670 - DNA, 25 bp, Homo sapien
tcaggtgctcccaaaccctgagccc

SEQ ID NO: 2624671 - DNA, 25 bp, Homo sapien
aggtgctcccaaaccctgagcccac

SEQ ID NO: 2624672 - DNA, 25 bp, Homo sapien
caactgatgcttggctttcccttga

SEQ ID NO: 2624673 - DNA, 25 bp, Homo sapien
gtctccctaccacagctgaaaggtc

SEQ ID NO: 2624674 - DNA, 25 bp, Homo sapien
tacagcgtaaagacttgtgagcacc

SEQ ID NO: 2624675 - DNA, 25 bp, Homo sapien
tcctgcaggtaactgactgactgtg

SEQ ID NO: 2624676 - DNA, 25 bp, Homo sapien
gttctgcccagacctatttccttag

SEQ ID NO: 2624677 - DNA, 25 bp, Homo sapien
tagttagccattgccacctgatatg

SEQ ID NO: 2624678 - DNA, 25 bp, Homo sapien
taaagttcagtagtccagtgtgagc

SEQ ID NO: 2624679 - DNA, 25 bp, Homo sapien
tatgcatagtgttcgctcagtttgg

SEQ ID NO: 2624680 - DNA, 25 bp, Homo sapien
tctgtatgaggtacttctttccaac

SEQ ID NO: 2624681 - DNA, 25 bp, Homo sapien
caggccgtagtcctgctctgtctta

SEQ ID NO: 2624682 - DNA, 25 bp, Homo sapien
aggagcaatttcctccagtagggca

SEQ ID NO: 2624683 - DNA, 25 bp, Homo sapien
gcaggaacatgtcctcgcctctgat

SEQ ID NO: 2624684 - DNA, 25 bp, Homo sapien
tgcttgtaggttattactaaataaa

SEQ ID NO: 2624685 - DNA, 25 bp, Homo sapien
atgcagtcatatgcaagatcaggag

SEQ ID NO: 2624686 - DNA, 25 bp, Homo sapien
cttttatgcagtcatatgcaagatc

SEQ ID NO: 2624687 - DNA, 25 bp, Homo sapien
tatgcagtcatatgcaagatcagga

SEQ ID NO: 2624688 - DNA, 25 bp, Homo sapien
tttatgcagtcatatgcaagatcag

SEQ ID NO: 2624689 - DNA, 25 bp, Homo sapien
catagacttgtgattattggaacac

SEQ ID NO: 2624690 - DNA, 25 bp, Homo sapien
tatttctgcttcatcgatatggaga

SEQ ID NO: 2624691 - DNA, 25 bp, Homo sapien
taatgagtggtgcagctttgggact

SEQ ID NO: 2624692 - DNA, 25 bp, Homo sapien
tggaacactgcttgcttggtatctc

SEQ ID NO: 2624693 - DNA, 25 bp, Homo sapien
tgaagctacgtcctttccctgaaga

SEQ ID NO: 2624694 - DNA, 25 bp, Homo sapien
tgtttgaagctacgtcctttccctg

SEQ ID NO: 2624695 - DNA, 25 bp, Homo sapien
ttgcctttgtttgaagctacgtcct

SEQ ID NO: 2624696 - DNA, 25 bp, Homo sapien
tgcctttgtttgaagctacgtcctt

SEQ ID NO: 2624697 - DNA, 25 bp, Homo sapien
agcttggtccttagcttgaaaagta

SEQ ID NO: 2624698 - DNA, 25 bp, Homo sapien
tgcttgtttcaagcttggtccttag

SEQ ID NO: 2624699 - DNA, 25 bp, Homo sapien
caggtatatgcttgtttcaagcttg

SEQ ID NO: 2624700 - DNA, 25 bp, Homo sapien
ctcccttgtgcaggtatatgcttgt

SEQ ID NO: 2624701 - DNA, 25 bp, Homo sapien
gaaaaaatgattcgctctgtagtga

SEQ ID NO: 2624702 - DNA, 25 bp, Homo sapien
aaaaatgattcgctctgtagtgaaa

SEQ ID NO: 2624703 - DNA, 25 bp, Homo sapien
aatgattcgctctgtagtgaaatta

SEQ ID NO: 2624704 - DNA, 25 bp, Homo sapien
tccttgaaaaaatgattcgctctgt

SEQ ID NO: 2624705 - DNA, 25 bp, Homo sapien
tgcttgctgtcgctcagctggctac

SEQ ID NO: 2624706 - DNA, 25 bp, Homo sapien
ttggttgcttgctgtcgctcagctg

SEQ ID NO: 2624707 - DNA, 25 bp, Homo sapien
ggttgcttgctgtcgctcagctggc

SEQ ID NO: 2624708 - DNA, 25 bp, Homo sapien
gttgcttgctgtcgctcagctggct

SEQ ID NO: 2624709 - DNA, 25 bp, Homo sapien
gtgcacgcagggggcctccagcaaa

SEQ ID NO: 2624710 - DNA, 25 bp, Homo sapien
ccgtgcacgcagggggcctccagca

SEQ ID NO: 2624711 - DNA, 25 bp, Homo sapien
cgtgcacgcagggggcctccagcaa

SEQ ID NO: 2624712 - DNA, 25 bp, Homo sapien
tgcacgcagggggcctccagcaaag

SEQ ID NO: 2624713 - DNA, 25 bp, Homo sapien
gactgtattttgcaacgagctttac

SEQ ID NO: 2624714 - DNA, 25 bp, Homo sapien
ggactgtattttgcaacgagcttta

SEQ ID NO: 2624715 - DNA, 25 bp, Homo sapien
cttgacaggtctcataaatagcaac

SEQ ID NO: 2624716 - DNA, 25 bp, Homo sapien
aggactgtattttgcaacgagcttt

SEQ ID NO: 2624717 - DNA, 25 bp, Homo sapien
gggaaggctgcgcatgcccttgcag

SEQ ID NO: 2624718 - DNA, 25 bp, Homo sapien
tgggaaggctgcgcatgcccttgca

SEQ ID NO: 2624719 - DNA, 25 bp, Homo sapien
ggaaggctgcgcatgcccttgcagc

SEQ ID NO: 2624720 - DNA, 25 bp, Homo sapien
ggtgggaaggctgcgcatgcccttg

SEQ ID NO: 2624721 - DNA, 25 bp, Homo sapien
tgttcgtccttttgccaggaagctt

SEQ ID NO: 2624722 - DNA, 25 bp, Homo sapien
aacagctaaacacgccgttggaacg

SEQ ID NO: 2624723 - DNA, 25 bp, Homo sapien
tgggtctgtggacgggatccttcct

SEQ ID NO: 2624724 - DNA, 25 bp, Homo sapien
tatctgtaaaataacgcacaacagc

SEQ ID NO: 2624725 - DNA, 25 bp, Homo sapien
gggccgagagcaggcggaaagagag

SEQ ID NO: 2624726 - DNA, 25 bp, Homo sapien
gacccggcagaccccgagtggccgc

SEQ ID NO: 2624727 - DNA, 25 bp, Homo sapien
cgctgcggggcccaagtccttggct

SEQ ID NO: 2624728 - DNA, 25 bp, Homo sapien
gaggcgcttttgagtctggggtccg

SEQ ID NO: 2624729 - DNA, 25 bp, Homo sapien
gattttcctttctcgggagcccgca

SEQ ID NO: 2624730 - DNA, 25 bp, Homo sapien
tgtcagccgctggactgtagacgga

SEQ ID NO: 2624731 - DNA, 25 bp, Homo sapien
gcgctacggctgactgggaaatgtc

SEQ ID NO: 2624732 - DNA, 25 bp, Homo sapien
tctgagcgtggatcccagaacctgg

SEQ ID NO: 2624733 - DNA, 25 bp, Homo sapien
cagattcccgctttggcgcgcggcg

SEQ ID NO: 2624734 - DNA, 25 bp, Homo sapien
gcctcccagattcccgctttggcgc

SEQ ID NO: 2624735 - DNA, 25 bp, Homo sapien
ttaactgcagagctgctcgcctccc

SEQ ID NO: 2624736 - DNA, 25 bp, Homo sapien
cggcggctccgagcgtgctgctcgg

SEQ ID NO: 2624737 - DNA, 25 bp, Homo sapien
cagaagtgcacaatacccccggttc

SEQ ID NO: 2624738 - DNA, 25 bp, Homo sapien
cccacgtgaagctggtggcaacgtt

SEQ ID NO: 2624739 - DNA, 25 bp, Homo sapien
tggtggcaacgttgctactcaggtc

SEQ ID NO: 2624740 - DNA, 25 bp, Homo sapien
caacgttgctactcaggtctggaat

SEQ ID NO: 2624741 - DNA, 25 bp, Homo sapien
atcccatccccacgtgaagctggtg

SEQ ID NO: 2624742 - DNA, 25 bp, Homo sapien
cgatttagcttaggcctgcggacaa

SEQ ID NO: 2624743 - DNA, 25 bp, Homo sapien
taggcctgcggacaatcacaaagtc

SEQ ID NO: 2624744 - DNA, 25 bp, Homo sapien
ttctctcgatttagcttaggcctgc

SEQ ID NO: 2624745 - DNA, 25 bp, Homo sapien
gatgttctcactgtcgggctcctct

SEQ ID NO: 2624746 - DNA, 25 bp, Homo sapien
tcaatccattctagttcgggggata

SEQ ID NO: 2624747 - DNA, 25 bp, Homo sapien
agtcaatccattctagttcggggga

SEQ ID NO: 2624748 - DNA, 25 bp, Homo sapien
aatccattctagttcgggggataga

SEQ ID NO: 2624749 - DNA, 25 bp, Homo sapien
tcagtcaatccattctagttcgggg

SEQ ID NO: 2624750 - DNA, 25 bp, Homo sapien
aagtggaatgcatctcgaatccgca

SEQ ID NO: 2624751 - DNA, 25 bp, Homo sapien
gtatttccagtttcagtatatgtgc

SEQ ID NO: 2624752 - DNA, 25 bp, Homo sapien
tgcatctcgaatccgcatgtcttcc

SEQ ID NO: 2624753 - DNA, 25 bp, Homo sapien
gaatccgcatgtcttcctgcgcagg

SEQ ID NO: 2624754 - DNA, 25 bp, Homo sapien
cagacactggacaaggtctgcatgg

SEQ ID NO: 2624755 - DNA, 25 bp, Homo sapien
tgacttaccaaaaccccgtatctgc

SEQ ID NO: 2624756 - DNA, 25 bp, Homo sapien
gctctgaattttcacccatgggcag

SEQ ID NO: 2624757 - DNA, 25 bp, Homo sapien
gagtaaatgaggtacaagaaaagat

SEQ ID NO: 2624758 - DNA, 25 bp, Homo sapien
ggaaaacaagtgtttgccatcacca

SEQ ID NO: 2624759 - DNA, 25 bp, Homo sapien
gaaaacaagtgtttgccatcaccat

SEQ ID NO: 2624760 - DNA, 25 bp, Homo sapien
agggaaaacaagtgtttgccatcac

SEQ ID NO: 2624761 - DNA, 25 bp, Homo sapien
tggagggaaaacaagtgtttgccat

SEQ ID NO: 2624762 - DNA, 25 bp, Homo sapien
gcacagacaggaaaagattcccaag

SEQ ID NO: 2624763 - DNA, 25 bp, Homo sapien
ggcacagacaggaaaagattcccaa

SEQ ID NO: 2624764 - DNA, 25 bp, Homo sapien
cacagacaggaaaagattcccaaga

SEQ ID NO: 2624765 - DNA, 25 bp, Homo sapien
taaggtctgccatagagactcatca

SEQ ID NO: 2624766 - DNA, 25 bp, Homo sapien
gaaatgttcagccaatggttggtcc

SEQ ID NO: 2624767 - DNA, 25 bp, Homo sapien
ccataaatgatcgtgggcagcggaa

SEQ ID NO: 2624768 - DNA, 25 bp, Homo sapien
gaccagtcacatccgggtgcagatt

SEQ ID NO: 2624769 - DNA, 25 bp, Homo sapien
gaacactgagacagtatgccgtgga

SEQ ID NO: 2624770 - DNA, 25 bp, Homo sapien
ttgacaatgggatccgaaagccgca

SEQ ID NO: 2624771 - DNA, 25 bp, Homo sapien
taggtccatgtgctgtacacgaaaa

SEQ ID NO: 2624772 - DNA, 25 bp, Homo sapien
tataactgagttcgataggtccatg

SEQ ID NO: 2624773 - DNA, 25 bp, Homo sapien
tcagagaatccagaacacccagaaa

SEQ ID NO: 2624774 - DNA, 25 bp, Homo sapien
cagaaaggttaagtcgcactaaatt

SEQ ID NO: 2624775 - DNA, 25 bp, Homo sapien
ctggaacagctgcttagcaaagtct

SEQ ID NO: 2624776 - DNA, 25 bp, Homo sapien
tctgcagggcaaattcagagaatcc

SEQ ID NO: 2624777 - DNA, 25 bp, Homo sapien
tgacacatgcgcaacagccacctgt

SEQ ID NO: 2624778 - DNA, 25 bp, Homo sapien
ttctgtagccgctaagattcagctg

SEQ ID NO: 2624779 - DNA, 25 bp, Homo sapien
tctggagattctttctgtagccgct

SEQ ID NO: 2624780 - DNA, 25 bp, Homo sapien
cacctgtacatgcttttcagtgaaa

SEQ ID NO: 2624781 - DNA, 25 bp, Homo sapien
tatttctgccaaaactcggtaaaca

SEQ ID NO: 2624782 - DNA, 25 bp, Homo sapien
caaaactcggtaaacaggctctctg

SEQ ID NO: 2624783 - DNA, 25 bp, Homo sapien
tgccaaaactcggtaaacaggctct

SEQ ID NO: 2624784 - DNA, 25 bp, Homo sapien
aactcggtaaacaggctctctgttc

SEQ ID NO: 2624785 - DNA, 25 bp, Homo sapien
agatggacaagattggggcatcttc

SEQ ID NO: 2624786 - DNA, 25 bp, Homo sapien
tagatggacaagattggggcatctt

SEQ ID NO: 2624787 - DNA, 25 bp, Homo sapien
ctagatggacaagattggggcatct

SEQ ID NO: 2624788 - DNA, 25 bp, Homo sapien
aagaaaagatattgaaaatcacaca

SEQ ID NO: 2624789 - DNA, 25 bp, Homo sapien
aaagatattgaaaatcacacattga

SEQ ID NO: 2624790 - DNA, 25 bp, Homo sapien
agatattgaaaatcacacattgatc

SEQ ID NO: 2624791 - DNA, 25 bp, Homo sapien
gaaaagatattgaaaatcacacatt

SEQ ID NO: 2624792 - DNA, 25 bp, Homo sapien
agcaccgactgagtgataggtgttg

SEQ ID NO: 2624793 - DNA, 25 bp, Homo sapien
gtcattctttagcatgacactatca

SEQ ID NO: 2624794 - DNA, 25 bp, Homo sapien
aaaaattcctgaaagcagtcattct

SEQ ID NO: 2624795 - DNA, 25 bp, Homo sapien
catagcaccgactgagtgataggtg

SEQ ID NO: 2624796 - DNA, 25 bp, Homo sapien
tttagatccaggtcagccaccaact

SEQ ID NO: 2624797 - DNA, 25 bp, Homo sapien
cattcaagacatgttgggcacctga

SEQ ID NO: 2624798 - DNA, 25 bp, Homo sapien
atgagtccagcagccgcattcaaga

SEQ ID NO: 2624799 - DNA, 25 bp, Homo sapien
aacaagatatgattcccaggatgag

SEQ ID NO: 2624800 - DNA, 25 bp, Homo sapien
ctgcagagaaggaacaaaagcaaga

SEQ ID NO: 2624801 - DNA, 25 bp, Homo sapien
attagccaaattgtgagccattctg

SEQ ID NO: 2624802 - DNA, 25 bp, Homo sapien
tagccaaattgtgagccattctgca

SEQ ID NO: 2624803 - DNA, 25 bp, Homo sapien
aaattagccaaattgtgagccattc

SEQ ID NO: 2624804 - DNA, 25 bp, Homo sapien
ttagccaaattgtgagccattctgc

SEQ ID NO: 2624805 - DNA, 25 bp, Homo sapien
tgtaattactatgagaattctggtt

SEQ ID NO: 2624806 - DNA, 25 bp, Homo sapien
gtaattactatgagaattctggttc

SEQ ID NO: 2624807 - DNA, 25 bp, Homo sapien
ttgtaattactatgagaattctggt

SEQ ID NO: 2624808 - DNA, 25 bp, Homo sapien
gaaacactgtcgaagtaagatcaca

SEQ ID NO: 2624809 - DNA, 25 bp, Homo sapien
gatgcttcccttgtgtttacagaac

SEQ ID NO: 2624810 - DNA, 25 bp, Homo sapien
tgaagaccttccgtgtttaacctgc

SEQ ID NO: 2624811 - DNA, 25 bp, Homo sapien
caaggtgtcttaaaccccacaaatg

SEQ ID NO: 2624812 - DNA, 25 bp, Homo sapien
taactcagatctatgtgcctagaaa

SEQ ID NO: 2624813 - DNA, 25 bp, Homo sapien
ccttcttaactcagatctatgtgcc

SEQ ID NO: 2624814 - DNA, 25 bp, Homo sapien
aaatactgtttggtgttggtaatga

SEQ ID NO: 2624815 - DNA, 25 bp, Homo sapien
gaaattcaaccctgttaacagtgaa

SEQ ID NO: 2624816 - DNA, 25 bp, Homo sapien
caccctttataggaggtaatagcca

SEQ ID NO: 2624817 - DNA, 25 bp, Homo sapien
cacagaccatatagcttgagcaaca

SEQ ID NO: 2624818 - DNA, 25 bp, Homo sapien
agcaaatgttttactgcggcaccag

SEQ ID NO: 2624819 - DNA, 25 bp, Homo sapien
tatacagttgggtacaggtagagac

SEQ ID NO: 2624820 - DNA, 25 bp, Homo sapien
agttggcctggcaatggtggtgaaa

SEQ ID NO: 2624821 - DNA, 25 bp, Homo sapien
tcggcatttgatgccccatatctcc

SEQ ID NO: 2624822 - DNA, 25 bp, Homo sapien
catctggcacgattccaaaaacttg

SEQ ID NO: 2624823 - DNA, 25 bp, Homo sapien
aactgggcttttgcagtgtcagtcg

SEQ ID NO: 2624824 - DNA, 25 bp, Homo sapien
gtctgctgggccttcaaatcctata

SEQ ID NO: 2624825 - DNA, 25 bp, Homo sapien
aagtaaccttaagaacctcagcgct

SEQ ID NO: 2624826 - DNA, 25 bp, Homo sapien
tagctaagtactccagcaattgggc

SEQ ID NO: 2624827 - DNA, 25 bp, Homo sapien
aaatggctccctagtatacttgcag

SEQ ID NO: 2624828 - DNA, 25 bp, Homo sapien
ctgtatgtttgagggcatccgatgt

SEQ ID NO: 2624829 - DNA, 25 bp, Homo sapien
gtatgtttgagggcatccgatgtca

SEQ ID NO: 2624830 - DNA, 25 bp, Homo sapien
tgtatgtttgagggcatccgatgtc

SEQ ID NO: 2624831 - DNA, 25 bp, Homo sapien
ttcaccaggataggacacaagcgct

SEQ ID NO: 2624832 - DNA, 25 bp, Homo sapien
taaagttttgcacttggccagtgtc

SEQ ID NO: 2624833 - DNA, 25 bp, Homo sapien
tctggagcactgacactattgacat

SEQ ID NO: 2624834 - DNA, 25 bp, Homo sapien
caagagcaggtaaagtgacagcagt

SEQ ID NO: 2624835 - DNA, 25 bp, Homo sapien
aagtcagtgagaaggcttattaagt

SEQ ID NO: 2624836 - DNA, 25 bp, Homo sapien
gaaaatcactgactacatgagctaa

SEQ ID NO: 2624837 - DNA, 25 bp, Homo sapien
cacttgagttgaaaaagttgtcaaa

SEQ ID NO: 2624838 - DNA, 25 bp, Homo sapien
gacaattatgcagaaaagatcccag

SEQ ID NO: 2624839 - DNA, 25 bp, Homo sapien
taacatattaataggtaacttgctg

SEQ ID NO: 2624840 - DNA, 25 bp, Homo sapien
accttttaatcgcaaccctatgtga

SEQ ID NO: 2624841 - DNA, 25 bp, Homo sapien
caaaggaatgttagcatagcaaaaa

SEQ ID NO: 2624842 - DNA, 25 bp, Homo sapien
aacttgctgtgtaaaattataagcc

SEQ ID NO: 2624843 - DNA, 25 bp, Homo sapien
gacggatagtcgaattgagtgctct

SEQ ID NO: 2624844 - DNA, 25 bp, Homo sapien
tattctcgtgccgttgttcaaagtc

SEQ ID NO: 2624845 - DNA, 25 bp, Homo sapien
gccaaaagatcctgtcgttgcataa

SEQ ID NO: 2624846 - DNA, 25 bp, Homo sapien
tgtaaaactatgtcaggtgctggat

SEQ ID NO: 2624847 - DNA, 25 bp, Homo sapien
tgcttacaattggtaaccaagagtg

SEQ ID NO: 2624848 - DNA, 25 bp, Homo sapien
aatcctgacattgacctaattgaca

SEQ ID NO: 2624849 - DNA, 25 bp, Homo sapien
gatggactgaaccaattagaattga

SEQ ID NO: 2624850 - DNA, 25 bp, Homo sapien
cctcctaattgtgggattgtcagaa

SEQ ID NO: 2624851 - DNA, 25 bp, Homo sapien
tcaacagcaaaacgacaaggaaatt

SEQ ID NO: 2624852 - DNA, 25 bp, Homo sapien
cactaacagtttagttctgtttcag

SEQ ID NO: 2624853 - DNA, 25 bp, Homo sapien
ggggggctactgtttatttatgata

SEQ ID NO: 2624854 - DNA, 25 bp, Homo sapien
aattggtagagaaaggtcagtgaca

SEQ ID NO: 2624855 - DNA, 25 bp, Homo sapien
aatgctgaaaccttggatactacca

SEQ ID NO: 2624856 - DNA, 25 bp, Homo sapien
tcaatattaacagggttgcaactca

SEQ ID NO: 2624857 - DNA, 25 bp, Homo sapien
caaaacagctattggagtagtcccc

SEQ ID NO: 2624858 - DNA, 25 bp, Homo sapien
ctgcaatatctctgttcccatcaat

SEQ ID NO: 2624859 - DNA, 25 bp, Homo sapien
tggcttgagatctctcctgaggata

SEQ ID NO: 2624860 - DNA, 25 bp, Homo sapien
cagcttggtctgtaggcatctgaag

SEQ ID NO: 2624861 - DNA, 25 bp, Homo sapien
gcatgtcggagttcaggagcagttt

SEQ ID NO: 2624862 - DNA, 25 bp, Homo sapien
tctatagccactctaccgagcctgg

SEQ ID NO: 2624863 - DNA, 25 bp, Homo sapien
tctattttctagctagaagaacagg

SEQ ID NO: 2624864 - DNA, 25 bp, Homo sapien
gcctccaggcagatatgttaaattg

SEQ ID NO: 2624865 - DNA, 25 bp, Homo sapien
tgaagctggcaagcaattgttaata

SEQ ID NO: 2624866 - DNA, 25 bp, Homo sapien
cactttagtgatcatatgttacaca

SEQ ID NO: 2624867 - DNA, 25 bp, Homo sapien
ttatcacaccatggcttcgaagtga

SEQ ID NO: 2624868 - DNA, 25 bp, Homo sapien
tcgaagtgactttgattgtgacccc

SEQ ID NO: 2624869 - DNA, 25 bp, Homo sapien
caacatatttggaatgagggcgtaa

SEQ ID NO: 2624870 - DNA, 25 bp, Homo sapien
tgtgacccctaagcaattatctgat

SEQ ID NO: 2624871 - DNA, 25 bp, Homo sapien
caattgaactgcgaaagctgtgatg

SEQ ID NO: 2624872 - DNA, 25 bp, Homo sapien
aatgagctcagcatatccacaaagc

SEQ ID NO: 2624873 - DNA, 25 bp, Homo sapien
ggccagtgcccaagatacagcatat

SEQ ID NO: 2624874 - DNA, 25 bp, Homo sapien
tgtcaatcaagctgaaagcctgtca

SEQ ID NO: 2624875 - DNA, 25 bp, Homo sapien
cttggactctgccgacctccagagg

SEQ ID NO: 2624876 - DNA, 25 bp, Homo sapien
ctctgccgacctccagagggagccc

SEQ ID NO: 2624877 - DNA, 25 bp, Homo sapien
tggactctgccgacctccagaggga

SEQ ID NO: 2624878 - DNA, 25 bp, Homo sapien
gactctgccgacctccagagggagc

SEQ ID NO: 2624879 - DNA, 25 bp, Homo sapien
ggtttcttaaccatggaaacagcag

SEQ ID NO: 2624880 - DNA, 25 bp, Homo sapien
tggtttcttaaccatggaaacagca

SEQ ID NO: 2624881 - DNA, 25 bp, Homo sapien
aaggctggctgtctctcagtcacaa

SEQ ID NO: 2624882 - DNA, 25 bp, Homo sapien
aaaggctggctgtctctcagtcaca

SEQ ID NO: 2624883 - DNA, 25 bp, Homo sapien
aggctggctgtctctcagtcacaaa

SEQ ID NO: 2624884 - DNA, 25 bp, Homo sapien
tacacagacttttttggaacgtgat

SEQ ID NO: 2624885 - DNA, 25 bp, Homo sapien
actgaggtaatcacttctttcgtga

SEQ ID NO: 2624886 - DNA, 25 bp, Homo sapien
cagacttttttggaacgtgatagct

SEQ ID NO: 2624887 - DNA, 25 bp, Homo sapien
acttttttggaacgtgatagctcac

SEQ ID NO: 2624888 - DNA, 25 bp, Homo sapien
atcaccacctttggcaggtaggagg

SEQ ID NO: 2624889 - DNA, 25 bp, Homo sapien
gaatgactctaatatcccaagatgt

SEQ ID NO: 2624890 - DNA, 25 bp, Homo sapien
cctttctcaaggagcgagggtgtga

SEQ ID NO: 2624891 - DNA, 25 bp, Homo sapien
gatgtcttcaagaagtctccccagt

SEQ ID NO: 2624892 - DNA, 25 bp, Homo sapien
tatttctagtcagggagtcttccag

SEQ ID NO: 2624893 - DNA, 25 bp, Homo sapien
tccaggctcgacttgggttcttccc

SEQ ID NO: 2624894 - DNA, 25 bp, Homo sapien
gatcttcagatatcttgcctggtag

SEQ ID NO: 2624895 - DNA, 25 bp, Homo sapien
tcaaagggagttacagatcttcaga

SEQ ID NO: 2624896 - DNA, 25 bp, Homo sapien
tctaccaaatgccttatgaaacatg

SEQ ID NO: 2624897 - DNA, 25 bp, Homo sapien
tctgagtattctaccaaatgcctta

SEQ ID NO: 2624898 - DNA, 25 bp, Homo sapien
tttattaaatgggacgagagcagtc

SEQ ID NO: 2624899 - DNA, 25 bp, Homo sapien
gcagtcctcgtattacagggctaat

SEQ ID NO: 2624900 - DNA, 25 bp, Homo sapien
ggcaatgcatctacagaaccatgaa

SEQ ID NO: 2624901 - DNA, 25 bp, Homo sapien
acaattaaagaatggcttggcaaat

SEQ ID NO: 2624902 - DNA, 25 bp, Homo sapien
tcagtgctgagaggcattaaacatg

SEQ ID NO: 2624903 - DNA, 25 bp, Homo sapien
aagaaaaggctagaatgcaaaggtg

SEQ ID NO: 2624904 - DNA, 25 bp, Homo sapien
ctctatcttccagaatgcttccttc

SEQ ID NO: 2624905 - DNA, 25 bp, Homo sapien
cagctctatcttccagaatgcttcc

SEQ ID NO: 2624906 - DNA, 25 bp, Homo sapien
gctctatcttccagaatgcttcctt

SEQ ID NO: 2624907 - DNA, 25 bp, Homo sapien
agctctatcttccagaatgcttcct

SEQ ID NO: 2624908 - DNA, 25 bp, Homo sapien
agcttttcagaggattcaagatgag

SEQ ID NO: 2624909 - DNA, 25 bp, Homo sapien
tttcagaggattcaagatgagaaat

SEQ ID NO: 2624910 - DNA, 25 bp, Homo sapien
agctgtactggctgacaccagcttt

SEQ ID NO: 2624911 - DNA, 25 bp, Homo sapien
cagctgtactggctgacaccagctt

SEQ ID NO: 2624912 - DNA, 25 bp, Homo sapien
tcagaaagtccctgaacgtttccca

SEQ ID NO: 2624913 - DNA, 25 bp, Homo sapien
gaacgtttcccacttgtgctctccg

SEQ ID NO: 2624914 - DNA, 25 bp, Homo sapien
agtccctgaacgtttcccacttgtg

SEQ ID NO: 2624915 - DNA, 25 bp, Homo sapien
ttgtgctctccgtatactggctgac

SEQ ID NO: 2624916 - DNA, 25 bp, Homo sapien
caaagacaatagaaccctgatgtgg

SEQ ID NO: 2624917 - DNA, 25 bp, Homo sapien
agagtgactgtggttcagggtaggg

SEQ ID NO: 2624918 - DNA, 25 bp, Homo sapien
cacactgaccagtaccgggatctgg

SEQ ID NO: 2624919 - DNA, 25 bp, Homo sapien
caggcagcacactgaccagtaccgg

SEQ ID NO: 2624920 - DNA, 25 bp, Homo sapien
cagacatgaactggacagtctcaca

SEQ ID NO: 2624921 - DNA, 25 bp, Homo sapien
catcctctggacaagttcagacatg

SEQ ID NO: 2624922 - DNA, 25 bp, Homo sapien
ggtcatcctctggacaagttcagac

SEQ ID NO: 2624923 - DNA, 25 bp, Homo sapien
gtctcacattcaaggaggtgcagct

SEQ ID NO: 2624924 - DNA, 25 bp, Homo sapien
cttggtagtgaaggaggctgggaga

SEQ ID NO: 2624925 - DNA, 25 bp, Homo sapien
tagtgaaggaggctgggagagggct

SEQ ID NO: 2624926 - DNA, 25 bp, Homo sapien
ttggtagtgaaggaggctgggagag

SEQ ID NO: 2624927 - DNA, 25 bp, Homo sapien
ggtagtgaaggaggctgggagaggg

SEQ ID NO: 2624928 - DNA, 25 bp, Homo sapien
tcggtagcaaccctcacacccttcc

SEQ ID NO: 2624929 - DNA, 25 bp, Homo sapien
aatgctctccttgttaggaatgtgg

SEQ ID NO: 2624930 - DNA, 25 bp, Homo sapien
atgctctccttgttaggaatgtgga

SEQ ID NO: 2624931 - DNA, 25 bp, Homo sapien
aaatcctctcggtagcaaccctcac

SEQ ID NO: 2624932 - DNA, 25 bp, Homo sapien
cctgcaaagcattggtaagggcttt

SEQ ID NO: 2624933 - DNA, 25 bp, Homo sapien
catggggggactgggtcacctgcaa

SEQ ID NO: 2624934 - DNA, 25 bp, Homo sapien
catttggtgcatggggggactgggt

SEQ ID NO: 2624935 - DNA, 25 bp, Homo sapien
tcacctgcaaagcattggtaagggc

SEQ ID NO: 2624936 - DNA, 25 bp, Homo sapien
catgctgcttaagagagcaggactg

SEQ ID NO: 2624937 - DNA, 25 bp, Homo sapien
aaaaacatgctgcttaagagagcag

SEQ ID NO: 2624938 - DNA, 25 bp, Homo sapien
gacatgcctgtgtagacagacagct

SEQ ID NO: 2624939 - DNA, 25 bp, Homo sapien
aagattctgacatgcctgtgtagac

SEQ ID NO: 2624940 - DNA, 25 bp, Homo sapien
ggtttcagtgaaagccccataggag

SEQ ID NO: 2624941 - DNA, 25 bp, Homo sapien
agtttggcagagactactttgtccc

SEQ ID NO: 2624942 - DNA, 25 bp, Homo sapien
gaaatccttcagagacaccgaggac

SEQ ID NO: 2624943 - DNA, 25 bp, Homo sapien
tcaacacagccctcagatgggtcca

SEQ ID NO: 2624944 - DNA, 25 bp, Homo sapien
ctgtttctctgtaaagactgatcat

SEQ ID NO: 2624945 - DNA, 25 bp, Homo sapien
tacagtttttgagataagcatcttt

SEQ ID NO: 2624946 - DNA, 25 bp, Homo sapien
tctttttgaataattgtcatcccaa

SEQ ID NO: 2624947 - DNA, 25 bp, Homo sapien
caggtctctagtgacaacattggag

SEQ ID NO: 2624948 - DNA, 25 bp, Homo sapien
cattggagatctgtttaacatgaaa

SEQ ID NO: 2624949 - DNA, 25 bp, Homo sapien
catgggttctccttgagaccctaaa

SEQ ID NO: 2624950 - DNA, 25 bp, Homo sapien
aggctgctggcttcaaaggcccaga

SEQ ID NO: 2624951 - DNA, 25 bp, Homo sapien
ggctgctgggcaggattcatggcca

SEQ ID NO: 2624952 - DNA, 25 bp, Homo sapien
cctgcaagcgcctctgatgtgaaca

SEQ ID NO: 2624953 - DNA, 25 bp, Homo sapien
ggagtcaagactttgaggaaacttc

SEQ ID NO: 2624954 - DNA, 25 bp, Homo sapien
tgatgttggtaaaacgctttgaagg

SEQ ID NO: 2624955 - DNA, 25 bp, Homo sapien
gatcaagctctccactacattgtga

SEQ ID NO: 2624956 - DNA, 25 bp, Homo sapien
tacattgtgaaaatcaattacttga

SEQ ID NO: 2624957 - DNA, 25 bp, Homo sapien
gagcctgttcagacctgtatgctgt

SEQ ID NO: 2624958 - DNA, 25 bp, Homo sapien
ttatacaggatggaagccagatatt

SEQ ID NO: 2624959 - DNA, 25 bp, Homo sapien
ctttgtttaacaaccacacttgctg

SEQ ID NO: 2624960 - DNA, 25 bp, Homo sapien
tttgtttaacaaccacacttgctgt

SEQ ID NO: 2624961 - DNA, 25 bp, Homo sapien
cagtttggatataagcctctgtttc

SEQ ID NO: 2624962 - DNA, 25 bp, Homo sapien
tgtccagtttggatataagcctctg

SEQ ID NO: 2624963 - DNA, 25 bp, Homo sapien
ttcagattcagcaaaaacggcattc

SEQ ID NO: 2624964 - DNA, 25 bp, Homo sapien
caaaaacggcattcagtagatcaag

SEQ ID NO: 2624965 - DNA, 25 bp, Homo sapien
cagtagatcaagatactgcctgttc

SEQ ID NO: 2624966 - DNA, 25 bp, Homo sapien
aacttcagattcagcaaaaacggca

SEQ ID NO: 2624967 - DNA, 25 bp, Homo sapien
gtaatgaccttccatgcctccaatg

SEQ ID NO: 2624968 - DNA, 25 bp, Homo sapien
gctgagaccctgagtagggcttcca

SEQ ID NO: 2624969 - DNA, 25 bp, Homo sapien
gcttccagtctgtgatgagttcagc

SEQ ID NO: 2624970 - DNA, 25 bp, Homo sapien
gctgtgagcagtggagccttcattc

SEQ ID NO: 2624971 - DNA, 25 bp, Homo sapien
gctcctgctagaagggaaacttcag

SEQ ID NO: 2624972 - DNA, 25 bp, Homo sapien
tcaaataggtcagatacaatccggc

SEQ ID NO: 2624973 - DNA, 25 bp, Homo sapien
ccaaagtatgctccaaagtggctgc

SEQ ID NO: 2624974 - DNA, 25 bp, Homo sapien
caatccggcagcttcatattactgg

SEQ ID NO: 2624975 - DNA, 25 bp, Homo sapien
ccaacagtcctgaagcttcttttga

SEQ ID NO: 2624976 - DNA, 25 bp, Homo sapien
tgaagcttcttttgagggcctcccc

SEQ ID NO: 2624977 - DNA, 25 bp, Homo sapien
ccccaacagtcctgaagcttctttt

SEQ ID NO: 2624978 - DNA, 25 bp, Homo sapien
ttcttttgagggcctcccccatatc

SEQ ID NO: 2624979 - DNA, 25 bp, Homo sapien
tttgccattgagtcctgtttggtac

SEQ ID NO: 2624980 - DNA, 25 bp, Homo sapien
cctgtttggtactctgcaaacctac

SEQ ID NO: 2624981 - DNA, 25 bp, Homo sapien
ttatttgccattgagtcctgtttgg

SEQ ID NO: 2624982 - DNA, 25 bp, Homo sapien
attgagtcctgtttggtactctgca

SEQ ID NO: 2624983 - DNA, 25 bp, Homo sapien
ttcccatagatctcatggtgacata

SEQ ID NO: 2624984 - DNA, 25 bp, Homo sapien
tcccatagatctcatggtgacatac

SEQ ID NO: 2624985 - DNA, 25 bp, Homo sapien
ggaccaggtgcaatgtacttcagct

SEQ ID NO: 2624986 - DNA, 25 bp, Homo sapien
ctatatgccatcaagacctggtggg

SEQ ID NO: 2624987 - DNA, 25 bp, Homo sapien
cagtctcttcactatatgccatcaa

SEQ ID NO: 2624988 - DNA, 25 bp, Homo sapien
gggcacttcctggactgtacgttta

SEQ ID NO: 2624989 - DNA, 25 bp, Homo sapien
ggggagtgtggcattttcagaaaca

SEQ ID NO: 2624990 - DNA, 25 bp, Homo sapien
ctgtctgctggttatttctaagttt

SEQ ID NO: 2624991 - DNA, 25 bp, Homo sapien
tctaagtttggggagtgtggcattt

SEQ ID NO: 2624992 - DNA, 25 bp, Homo sapien
tttggggagtgtggcattttcagaa

SEQ ID NO: 2624993 - DNA, 25 bp, Homo sapien
cagacgagatcaggctcattaaggg

SEQ ID NO: 2624994 - DNA, 25 bp, Homo sapien
gacgagatcaggctcattaagggtg

SEQ ID NO: 2624995 - DNA, 25 bp, Homo sapien
cgagatcaggctcattaagggtggt

SEQ ID NO: 2624996 - DNA, 25 bp, Homo sapien
gagatcaggctcattaagggtggta

SEQ ID NO: 2624997 - DNA, 25 bp, Homo sapien
gtctttgtcagttggcatcaagtga

SEQ ID NO: 2624998 - DNA, 25 bp, Homo sapien
cagtctttgtcagttggcatcaagt

SEQ ID NO: 2624999 - DNA, 25 bp, Homo sapien
tctttgtcagttggcatcaagtgat

SEQ ID NO: 2625000 - DNA, 25 bp, Homo sapien
gccagtctttgtcagttggcatcaa

SEQ ID NO: 2625001 - DNA, 25 bp, Homo sapien
cctggcatcttgccacgttgtgctg

SEQ ID NO: 2625002 - DNA, 25 bp, Homo sapien
ccctggcatcttgccacgttgtgct

SEQ ID NO: 2625003 - DNA, 25 bp, Homo sapien
gatcatgagctttttgcagacgtag

SEQ ID NO: 2625004 - DNA, 25 bp, Homo sapien
ggaacccacatcctgagtgactgct

SEQ ID NO: 2625005 - DNA, 25 bp, Homo sapien
gacgtagttatttctacctcaactg

SEQ ID NO: 2625006 - DNA, 25 bp, Homo sapien
ctcaactgaactcgataggcaatct

SEQ ID NO: 2625007 - DNA, 25 bp, Homo sapien
cagtggaaaccacaggaatcctggg

SEQ ID NO: 2625008 - DNA, 25 bp, Homo sapien
aaaactgctttttggcaacgtgaca

SEQ ID NO: 2625009 - DNA, 25 bp, Homo sapien
cagaaagtaatcatgaaaactgctt

SEQ ID NO: 2625010 - DNA, 25 bp, Homo sapien
gcaacgtgacatgggtcagctctct

SEQ ID NO: 2625011 - DNA, 25 bp, Homo sapien
acagggtgtcgtggggtatgcatgt

SEQ ID NO: 2625012 - DNA, 25 bp, Homo sapien
agtcaaagcgtgtcctgtgatacac

SEQ ID NO: 2625013 - DNA, 25 bp, Homo sapien
tcaaagcgtgtcctgtgatacacac

SEQ ID NO: 2625014 - DNA, 25 bp, Homo sapien
ctgtgatacacacagggtgtcgtgg

SEQ ID NO: 2625015 - DNA, 25 bp, Homo sapien
tcccagtgaggtcttctgtaacccc

SEQ ID NO: 2625016 - DNA, 25 bp, Homo sapien
aatcctgcagtatggttgcccttga

SEQ ID NO: 2625017 - DNA, 25 bp, Homo sapien
aggaacttccctggcctgctgtggt

SEQ ID NO: 2625018 - DNA, 25 bp, Homo sapien
acttctgctaatctaacttccttgg

SEQ ID NO: 2625019 - DNA, 25 bp, Homo sapien
gagggtgcagagcaatgaaagaatc

SEQ ID NO: 2625020 - DNA, 25 bp, Homo sapien
gggaaaacacattctctaatctctt

SEQ ID NO: 2625021 - DNA, 25 bp, Homo sapien
aagaatcagtaggagggaaaacaca

SEQ ID NO: 2625022 - DNA, 25 bp, Homo sapien
ctaggtacgagggtggaaggagcag

SEQ ID NO: 2625023 - DNA, 25 bp, Homo sapien
aaacacttggagcaatatgtgcagc

SEQ ID NO: 2625024 - DNA, 25 bp, Homo sapien
gaaggtttcattgcgttggcctgca

SEQ ID NO: 2625025 - DNA, 25 bp, Homo sapien
aacttattaggatccagagacggca

SEQ ID NO: 2625026 - DNA, 25 bp, Homo sapien
gagacggcatggaattgctggcact

SEQ ID NO: 2625027 - DNA, 25 bp, Homo sapien
atcttcctccagtagcaaacgggct

SEQ ID NO: 2625028 - DNA, 25 bp, Homo sapien
tccagtagcaaacgggcttgtgtag

SEQ ID NO: 2625029 - DNA, 25 bp, Homo sapien
caaacgggcttgtgtagattcagtg

SEQ ID NO: 2625030 - DNA, 25 bp, Homo sapien
caagtcccccaacgactatattcat

SEQ ID NO: 2625031 - DNA, 25 bp, Homo sapien
agagcctggcattcttcagtgaatg

SEQ ID NO: 2625032 - DNA, 25 bp, Homo sapien
ctagagcctggcattcttcagtgaa

SEQ ID NO: 2625033 - DNA, 25 bp, Homo sapien
tgcactagagcctggcattcttcag

SEQ ID NO: 2625034 - DNA, 25 bp, Homo sapien
gcactagagcctggcattcttcagt

SEQ ID NO: 2625035 - DNA, 25 bp, Homo sapien
gagtctcggtttacacaccctgaaa

SEQ ID NO: 2625036 - DNA, 25 bp, Homo sapien
ccctgaaagtgtgaatagcgtctct

SEQ ID NO: 2625037 - DNA, 25 bp, Homo sapien
taaagctggagtctgttacacactg

SEQ ID NO: 2625038 - DNA, 25 bp, Homo sapien
taacatgtaacggaggcatctggcg

SEQ ID NO: 2625039 - DNA, 25 bp, Homo sapien
gggtcctgagttgggaatgttctta

SEQ ID NO: 2625040 - DNA, 25 bp, Homo sapien
ggtactgcaagacaagcagctcctg

SEQ ID NO: 2625041 - DNA, 25 bp, Homo sapien
ctcctgtcttgctactctgggtcct

SEQ ID NO: 2625042 - DNA, 25 bp, Homo sapien
cgatggttggtactgcaagacaagc

SEQ ID NO: 2625043 - DNA, 25 bp, Homo sapien
gaatgtctggtcttcccaattcctc

SEQ ID NO: 2625044 - DNA, 25 bp, Homo sapien
atgtctggtcttcccaattcctcat

SEQ ID NO: 2625045 - DNA, 25 bp, Homo sapien
aatgtctggtcttcccaattcctca

SEQ ID NO: 2625046 - DNA, 25 bp, Homo sapien
tggtaatcctggagcttcctctctg

SEQ ID NO: 2625047 - DNA, 25 bp, Homo sapien
gagcttcctctctggcatttccttt

SEQ ID NO: 2625048 - DNA, 25 bp, Homo sapien
cctggagcttcctctctggcatttc

SEQ ID NO: 2625049 - DNA, 25 bp, Homo sapien
tcctctctggcatttcctttaccca

SEQ ID NO: 2625050 - DNA, 25 bp, Homo sapien
tgtattccaagttgttggggcaaga

SEQ ID NO: 2625051 - DNA, 25 bp, Homo sapien
gcatctggaccctgagtgtattcca

SEQ ID NO: 2625052 - DNA, 25 bp, Homo sapien
tcaaagtactcaaattctaagaatg

SEQ ID NO: 2625053 - DNA, 25 bp, Homo sapien
tgaaattcccataaactggaataac

SEQ ID NO: 2625054 - DNA, 25 bp, Homo sapien
taatcttggcacaccagaagcaggc

SEQ ID NO: 2625055 - DNA, 25 bp, Homo sapien
gaaactgcaagttactatcagggca

SEQ ID NO: 2625056 - DNA, 25 bp, Homo sapien
ccagcaggtacaacggagcaacaat

SEQ ID NO: 2625057 - DNA, 25 bp, Homo sapien
gaagatatcaagcagtaacgaggtg

SEQ ID NO: 2625058 - DNA, 25 bp, Homo sapien
ctggaaaccaaaggactcctcgcaa

SEQ ID NO: 2625059 - DNA, 25 bp, Homo sapien
actggaaaccaaaggactcctcgca

SEQ ID NO: 2625060 - DNA, 25 bp, Homo sapien
tggaaaccaaaggactcctcgcaaa

SEQ ID NO: 2625061 - DNA, 25 bp, Homo sapien
ggatgtgtgtcgctgccaacgcaag

SEQ ID NO: 2625062 - DNA, 25 bp, Homo sapien
catggatgtgtgtcgctgccaacgc

SEQ ID NO: 2625063 - DNA, 25 bp, Homo sapien
atgtgtgtcgctgccaacgcaagca

SEQ ID NO: 2625064 - DNA, 25 bp, Homo sapien
gtgtcgctgccaacgcaagcagcca

SEQ ID NO: 2625065 - DNA, 25 bp, Homo sapien
tcttccgaggaaactatcgctgact

SEQ ID NO: 2625066 - DNA, 25 bp, Homo sapien
tcaatccgagtgaaaaccagccgta

SEQ ID NO: 2625067 - DNA, 25 bp, Homo sapien
tacaggagctctaatccatagccct

SEQ ID NO: 2625068 - DNA, 25 bp, Homo sapien
taaaaagaacacaagtgcccacagt

SEQ ID NO: 2625069 - DNA, 25 bp, Homo sapien
ttctaggagggtctcttctttgcac

SEQ ID NO: 2625070 - DNA, 25 bp, Homo sapien
ggtctcttctttgcacttcagtgtc

SEQ ID NO: 2625071 - DNA, 25 bp, Homo sapien
tcctctttggtattagaaaacacaa

SEQ ID NO: 2625072 - DNA, 25 bp, Homo sapien
ttcagtgtctgggaatcacccacag

SEQ ID NO: 2625073 - DNA, 25 bp, Homo sapien
ggctcttctccattgcttttagtca

SEQ ID NO: 2625074 - DNA, 25 bp, Homo sapien
tgggctcttctccattgcttttagt

SEQ ID NO: 2625075 - DNA, 25 bp, Homo sapien
gctcttctccattgcttttagtcat

SEQ ID NO: 2625076 - DNA, 25 bp, Homo sapien
cttgggctcttctccattgctttta

SEQ ID NO: 2625077 - DNA, 25 bp, Homo sapien
gcacaaaagcattccgaaacaggta

SEQ ID NO: 2625078 - DNA, 25 bp, Homo sapien
tttcttcttggccaaaagtgtgcgt

SEQ ID NO: 2625079 - DNA, 25 bp, Homo sapien
aaagtgtgcgtttacggactccctg

SEQ ID NO: 2625080 - DNA, 25 bp, Homo sapien
ggactccctgctggaatctctccat

SEQ ID NO: 2625081 - DNA, 25 bp, Homo sapien
tctgataatattccccgggcagcca

SEQ ID NO: 2625082 - DNA, 25 bp, Homo sapien
cattttgatacctacaactagttca

SEQ ID NO: 2625083 - DNA, 25 bp, Homo sapien
tgtgtttactatatattgctccaaa

SEQ ID NO: 2625084 - DNA, 25 bp, Homo sapien
taatgcctaatgatgcctaatgatg

SEQ ID NO: 2625085 - DNA, 25 bp, Homo sapien
aatattcggtctctgtgcctaagcg

SEQ ID NO: 2625086 - DNA, 25 bp, Homo sapien
tactcagcttcaagtcagcaccagt

SEQ ID NO: 2625087 - DNA, 25 bp, Homo sapien
tatagctggttatggcaggctctgc

SEQ ID NO: 2625088 - DNA, 25 bp, Homo sapien
ttttggccaaatctagcatgcttgc

SEQ ID NO: 2625089 - DNA, 25 bp, Homo sapien
tgctagctaactggccttcatcaac

SEQ ID NO: 2625090 - DNA, 25 bp, Homo sapien
gctgtgtgaatgcactgctagctaa

SEQ ID NO: 2625091 - DNA, 25 bp, Homo sapien
gatgtcaactagcagcagagcagag

SEQ ID NO: 2625092 - DNA, 25 bp, Homo sapien
aagagaatggcctccggtgctagac

SEQ ID NO: 2625093 - DNA, 25 bp, Homo sapien
tcaacccagtacataggttttccca

SEQ ID NO: 2625094 - DNA, 25 bp, Homo sapien
gaatatatggattcacatgtcttta

SEQ ID NO: 2625095 - DNA, 25 bp, Homo sapien
ccacttctacacattaaatcatata

SEQ ID NO: 2625096 - DNA, 25 bp, Homo sapien
tgaatatatggattcacatgtcttt

SEQ ID NO: 2625097 - DNA, 25 bp, Homo sapien
tcaattgccaagtctcaccagtggg

SEQ ID NO: 2625098 - DNA, 25 bp, Homo sapien
aaagcgggccattggtctgcagtcc

SEQ ID NO: 2625099 - DNA, 25 bp, Homo sapien
aagccagaatgggtgttatagcacc

SEQ ID NO: 2625100 - DNA, 25 bp, Homo sapien
ggcagaccctcagcaaattgctgga

SEQ ID NO: 2625101 - DNA, 25 bp, Homo sapien
tgtggcatcatcagccactctgcca

SEQ ID NO: 2625102 - DNA, 25 bp, Homo sapien
caaatgtggcatcatcagccactct

SEQ ID NO: 2625103 - DNA, 25 bp, Homo sapien
cttcaaatgtggcatcatcagccac

SEQ ID NO: 2625104 - DNA, 25 bp, Homo sapien
gtggcatcatcagccactctgccac

SEQ ID NO: 2625105 - DNA, 25 bp, Homo sapien
caaggccccagtctttctcctgtat

SEQ ID NO: 2625106 - DNA, 25 bp, Homo sapien
gccccagtctttctcctgtatccta

SEQ ID NO: 2625107 - DNA, 25 bp, Homo sapien
cccaaggccccagtctttctcctgt

SEQ ID NO: 2625108 - DNA, 25 bp, Homo sapien
aggccccagtctttctcctgtatcc

SEQ ID NO: 2625109 - DNA, 25 bp, Homo sapien
cacaaactcaacaggtccaaactga

SEQ ID NO: 2625110 - DNA, 25 bp, Homo sapien
cctagagttacggaaactgttctga

SEQ ID NO: 2625111 - DNA, 25 bp, Homo sapien
tatgcagtaggatagcccgattcac

SEQ ID NO: 2625112 - DNA, 25 bp, Homo sapien
ccattgtatatgcacctcggtggca

SEQ ID NO: 2625113 - DNA, 25 bp, Homo sapien
aactattaaggctcttcctacaact

SEQ ID NO: 2625114 - DNA, 25 bp, Homo sapien
ctgcatctaaaagcccgttacaact

SEQ ID NO: 2625115 - DNA, 25 bp, Homo sapien
ttacaactattaaggctcttcctac

SEQ ID NO: 2625116 - DNA, 25 bp, Homo sapien
agcccgttacaactattaaggctct

SEQ ID NO: 2625117 - DNA, 25 bp, Homo sapien
cttagaacaacattaagacttctac

SEQ ID NO: 2625118 - DNA, 25 bp, Homo sapien
cacttagaacaacattaagacttct

SEQ ID NO: 2625119 - DNA, 25 bp, Homo sapien
acacttagaacaacattaagacttc

SEQ ID NO: 2625120 - DNA, 25 bp, Homo sapien
acttagaacaacattaagacttcta

SEQ ID NO: 2625121 - DNA, 25 bp, Homo sapien
atttgaaattgcctgctctgtttcc

SEQ ID NO: 2625122 - DNA, 25 bp, Homo sapien
attgcctgctctgtttcctcaatat

SEQ ID NO: 2625123 - DNA, 25 bp, Homo sapien
gaaagagaaatttgaaattgcctgc

SEQ ID NO: 2625124 - DNA, 25 bp, Homo sapien
ttgaaagagaaatttgaaattgcct

SEQ ID NO: 2625125 - DNA, 25 bp, Homo sapien
tacgtgctacagagagtgcaacaga

SEQ ID NO: 2625126 - DNA, 25 bp, Homo sapien
cctgtacccaggatctttagactct

SEQ ID NO: 2625127 - DNA, 25 bp, Homo sapien
tagctgcgtcccagacatttgcaga

SEQ ID NO: 2625128 - DNA, 25 bp, Homo sapien
ttagttgatggagccgggcctgtac

SEQ ID NO: 2625129 - DNA, 25 bp, Homo sapien
ctggaaacattgttggagaactgga

SEQ ID NO: 2625130 - DNA, 25 bp, Homo sapien
gaaacattgttggagaactggagaa

SEQ ID NO: 2625131 - DNA, 25 bp, Homo sapien
aacattgttggagaactggagaagt

SEQ ID NO: 2625132 - DNA, 25 bp, Homo sapien
ggaaacattgttggagaactggaga

SEQ ID NO: 2625133 - DNA, 25 bp, Homo sapien
agtctctcgctaacagccggctgtc

SEQ ID NO: 2625134 - DNA, 25 bp, Homo sapien
tctcattagggataaacgagcctca

SEQ ID NO: 2625135 - DNA, 25 bp, Homo sapien
gagcctcatcatacaaggttctgaa

SEQ ID NO: 2625136 - DNA, 25 bp, Homo sapien
ggttctgaataagaagtctctcgct

SEQ ID NO: 2625137 - DNA, 25 bp, Homo sapien
tgtgtataaaagaagggaccatctt

SEQ ID NO: 2625138 - DNA, 25 bp, Homo sapien
ctagacaagcacaagaaacccgggc

SEQ ID NO: 2625139 - DNA, 25 bp, Homo sapien
gaaagatgatatttcaagtaatgcg

SEQ ID NO: 2625140 - DNA, 25 bp, Homo sapien
gggaccatctttgcagggtatattt

SEQ ID NO: 2625141 - DNA, 25 bp, Homo sapien
agtttctccatagactcataatttc

SEQ ID NO: 2625142 - DNA, 25 bp, Homo sapien
tttctccatagactcataatttcct

SEQ ID NO: 2625143 - DNA, 25 bp, Homo sapien
gagtttctccatagactcataattt

SEQ ID NO: 2625144 - DNA, 25 bp, Homo sapien
gtttctccatagactcataatttcc

SEQ ID NO: 2625145 - DNA, 25 bp, Homo sapien
cacacggtgtgtgactcttagagac

SEQ ID NO: 2625146 - DNA, 25 bp, Homo sapien
gacacggacttatgtgcacacggtg

SEQ ID NO: 2625147 - DNA, 25 bp, Homo sapien
gaccaagtagagtggagacacggac

SEQ ID NO: 2625148 - DNA, 25 bp, Homo sapien
gccctgggtgactgatgaccaagta

SEQ ID NO: 2625149 - DNA, 25 bp, Homo sapien
tcggagggtaaatccaaggattgta

SEQ ID NO: 2625150 - DNA, 25 bp, Homo sapien
gtggtaagaccagcatctgtaacat

SEQ ID NO: 2625151 - DNA, 25 bp, Homo sapien
gagaagtacttgacttcccggtagc

SEQ ID NO: 2625152 - DNA, 25 bp, Homo sapien
tgacaagactggagatgataagtgg

SEQ ID NO: 2625153 - DNA, 25 bp, Homo sapien
aagtacttgacttcccggtagctca

SEQ ID NO: 2625154 - DNA, 25 bp, Homo sapien
tcctcttgtgattggtaaaatacga

SEQ ID NO: 2625155 - DNA, 25 bp, Homo sapien
agcagaaacctaaagcactggcttt

SEQ ID NO: 2625156 - DNA, 25 bp, Homo sapien
tgtgaggcgaaccagattacgtggc

SEQ ID NO: 2625157 - DNA, 25 bp, Homo sapien
tttctagaacagagcatgcatccag

SEQ ID NO: 2625158 - DNA, 25 bp, Homo sapien
tcaactacatcactgtggtcagaga

SEQ ID NO: 2625159 - DNA, 25 bp, Homo sapien
gctgttgtcaactacatcactgtgg

SEQ ID NO: 2625160 - DNA, 25 bp, Homo sapien
tgtacgctgttgtcaactacatcac

SEQ ID NO: 2625161 - DNA, 25 bp, Homo sapien
tgttgtcaactacatcactgtggtc

SEQ ID NO: 2625162 - DNA, 25 bp, Homo sapien
catcaatagctaataggctgtccaa

SEQ ID NO: 2625163 - DNA, 25 bp, Homo sapien
tctgagaacaagcattcttgcatca

SEQ ID NO: 2625164 - DNA, 25 bp, Homo sapien
cttccaagaaggctcccgctcaagt

SEQ ID NO: 2625165 - DNA, 25 bp, Homo sapien
taataggctgtccaaccagatgtta

SEQ ID NO: 2625166 - DNA, 25 bp, Homo sapien
gattcaccaatcacatagacaaatg

SEQ ID NO: 2625167 - DNA, 25 bp, Homo sapien
tctcccactagcataaaaggtaacg

SEQ ID NO: 2625168 - DNA, 25 bp, Homo sapien
tagaatcctatcctgcaaagcttcc

SEQ ID NO: 2625169 - DNA, 25 bp, Homo sapien
aaatgaaatcatgcgggtacaccag

SEQ ID NO: 2625170 - DNA, 25 bp, Homo sapien
ctcgggcagtgtctatggaaattcc

SEQ ID NO: 2625171 - DNA, 25 bp, Homo sapien
caaggtggtgatcaactgggactgc

SEQ ID NO: 2625172 - DNA, 25 bp, Homo sapien
gtaacatttcccagtatacacaggg

SEQ ID NO: 2625173 - DNA, 25 bp, Homo sapien
caactccaggactgttttatgggca

SEQ ID NO: 2625174 - DNA, 25 bp, Homo sapien
ccctgggacaactgaacttaggaga

SEQ ID NO: 2625175 - DNA, 25 bp, Homo sapien
ccagaatggctactacacaatgcag

SEQ ID NO: 2625176 - DNA, 25 bp, Homo sapien
gagccacaactcataaacacggatg

SEQ ID NO: 2625177 - DNA, 25 bp, Homo sapien
tatcagttaagctttggcacaggac

SEQ ID NO: 2625178 - DNA, 25 bp, Homo sapien
ggcaggtggtgaaatctacagctcc

SEQ ID NO: 2625179 - DNA, 25 bp, Homo sapien
aatgctcagagtattcaaacaggcc

SEQ ID NO: 2625180 - DNA, 25 bp, Homo sapien
gatttcgactcattttgcaagccct

SEQ ID NO: 2625181 - DNA, 25 bp, Homo sapien
catctctctgaagccaaaggaccgt

SEQ ID NO: 2625182 - DNA, 25 bp, Homo sapien
ggtgcatcgttccttccctaagttg

SEQ ID NO: 2625183 - DNA, 25 bp, Homo sapien
gacgttgaacgccttgagggcagaa

SEQ ID NO: 2625184 - DNA, 25 bp, Homo sapien
gagatgatactacccatgtcactga

SEQ ID NO: 2625185 - DNA, 25 bp, Homo sapien
gagtccatctcccaaccagacgttg

SEQ ID NO: 2625186 - DNA, 25 bp, Homo sapien
caaaatctctggctcacttgaagct

SEQ ID NO: 2625187 - DNA, 25 bp, Homo sapien
tccaaacgagaactgatcaaaatct

SEQ ID NO: 2625188 - DNA, 25 bp, Homo sapien
tgatcaaaatctctggctcacttga

SEQ ID NO: 2625189 - DNA, 25 bp, Homo sapien
aaatttcttccaaacgagaactgat

SEQ ID NO: 2625190 - DNA, 25 bp, Homo sapien
taaccaggtaactcactctcttgga

SEQ ID NO: 2625191 - DNA, 25 bp, Homo sapien
aaaccatgatatcagcagaagaaac

SEQ ID NO: 2625192 - DNA, 25 bp, Homo sapien
cagaattaaccaggtaactcactct

SEQ ID NO: 2625193 - DNA, 25 bp, Homo sapien
gaagaaacctgcagttccacagcat

SEQ ID NO: 2625194 - DNA, 25 bp, Homo sapien
gggcggctgaggaatgtcttgactt

SEQ ID NO: 2625195 - DNA, 25 bp, Homo sapien
catcctggttaacttgagtatctgt

SEQ ID NO: 2625196 - DNA, 25 bp, Homo sapien
ggagatacctgatcactgacccaca

SEQ ID NO: 2625197 - DNA, 25 bp, Homo sapien
tgacccacagactaacatcctggtt

SEQ ID NO: 2625198 - DNA, 25 bp, Homo sapien
ccttgcagatactcaagtgcagtta

SEQ ID NO: 2625199 - DNA, 25 bp, Homo sapien
tgacgccgccccataaattgagata

SEQ ID NO: 2625200 - DNA, 25 bp, Homo sapien
taatccagaggtcctcctgttgcag

SEQ ID NO: 2625201 - DNA, 25 bp, Homo sapien
gacctacacagaactttcagcaatg

SEQ ID NO: 2625202 - DNA, 25 bp, Homo sapien
gagccaccaaaagcaaatcacaggg

SEQ ID NO: 2625203 - DNA, 25 bp, Homo sapien
tgagccaccaaaagcaaatcacagg

SEQ ID NO: 2625204 - DNA, 25 bp, Homo sapien
ctgagccaccaaaagcaaatcacag

SEQ ID NO: 2625205 - DNA, 25 bp, Homo sapien
agacgcactgtctgccttcatggag

SEQ ID NO: 2625206 - DNA, 25 bp, Homo sapien
ggaccttgactgcaagccttcatca

SEQ ID NO: 2625207 - DNA, 25 bp, Homo sapien
ccttcatcaaaatggagacgcactg

SEQ ID NO: 2625208 - DNA, 25 bp, Homo sapien
gactgcaagccttcatcaaaatgga

SEQ ID NO: 2625209 - DNA, 25 bp, Homo sapien
tagatacatcttggctagtgacacc

SEQ ID NO: 2625210 - DNA, 25 bp, Homo sapien
tgttgagtactcacaggacttgaag

SEQ ID NO: 2625211 - DNA, 25 bp, Homo sapien
gtttcgatgagaaacatcccacagg

SEQ ID NO: 2625212 - DNA, 25 bp, Homo sapien
cactctttgtactccactgaggcag

SEQ ID NO: 2625213 - DNA, 25 bp, Homo sapien
tttgaatgtttcttgattgaacatc

SEQ ID NO: 2625214 - DNA, 25 bp, Homo sapien
gcccagagtggtacagtcttgccta

SEQ ID NO: 2625215 - DNA, 25 bp, Homo sapien
aaacttaagtttgttgcccagagtg

SEQ ID NO: 2625216 - DNA, 25 bp, Homo sapien
caaggtctgacttattatggaggca

SEQ ID NO: 2625217 - DNA, 25 bp, Homo sapien
aagggacagcatgaaacgtgggaca

SEQ ID NO: 2625218 - DNA, 25 bp, Homo sapien
gagagctagccttcaaacttaacag

SEQ ID NO: 2625219 - DNA, 25 bp, Homo sapien
gctatgggttacaaaggatcttcaa

SEQ ID NO: 2625220 - DNA, 25 bp, Homo sapien
caattgcattgccaaaggctggccc

SEQ ID NO: 2625221 - DNA, 25 bp, Homo sapien
ggacacaggcttagaatcatgaggc

SEQ ID NO: 2625222 - DNA, 25 bp, Homo sapien
tattgtatgccactctcaggagctc

SEQ ID NO: 2625223 - DNA, 25 bp, Homo sapien
ccagattcgactttgagagccaaga

SEQ ID NO: 2625224 - DNA, 25 bp, Homo sapien
ttttagtgccaagtcagatctgccc

SEQ ID NO: 2625225 - DNA, 25 bp, Homo sapien
tgcccatgcgtgtttaccagattcg

SEQ ID NO: 2625226 - DNA, 25 bp, Homo sapien
tctgcagcacgagaacatttccatt

SEQ ID NO: 2625227 - DNA, 25 bp, Homo sapien
gtgtaagaacccctcagatgtggat

SEQ ID NO: 2625228 - DNA, 25 bp, Homo sapien
ttgggatatcgatgagcagggactc

SEQ ID NO: 2625229 - DNA, 25 bp, Homo sapien
actgtgtttcctaacagcccctgga

SEQ ID NO: 2625230 - DNA, 25 bp, Homo sapien
taaacaagccctgaatgccaaagtg

SEQ ID NO: 2625231 - DNA, 25 bp, Homo sapien
taaatgcagccagagcgaatgtccc

SEQ ID NO: 2625232 - DNA, 25 bp, Homo sapien
cctcttgagaagtgtatcggcatcc

SEQ ID NO: 2625233 - DNA, 25 bp, Homo sapien
catcatttgaccaagccgaggctga

SEQ ID NO: 2625234 - DNA, 25 bp, Homo sapien
taacatgcaacacgatctctgaaac

SEQ ID NO: 2625235 - DNA, 25 bp, Homo sapien
gtaacatgcaacacgatctctgaaa

SEQ ID NO: 2625236 - DNA, 25 bp, Homo sapien
acatgcaacacgatctctgaaactg

SEQ ID NO: 2625237 - DNA, 25 bp, Homo sapien
agtaacatgcaacacgatctctgaa

SEQ ID NO: 2625238 - DNA, 25 bp, Homo sapien
tctaaggtaagtcttcaccatgggc

SEQ ID NO: 2625239 - DNA, 25 bp, Homo sapien
taatccctagaatgcccaggccagt

SEQ ID NO: 2625240 - DNA, 25 bp, Homo sapien
ttctctgagtcccaccacaatggtg

SEQ ID NO: 2625241 - DNA, 25 bp, Homo sapien
ccccaactctgtttagagtgtcagt

SEQ ID NO: 2625242 - DNA, 25 bp, Homo sapien
tttggattgtgtttcttgttagcga

SEQ ID NO: 2625243 - DNA, 25 bp, Homo sapien
tgtgtttcttgttagcgaaaagacc

SEQ ID NO: 2625244 - DNA, 25 bp, Homo sapien
tgttagcgaaaagaccttcccgcat

SEQ ID NO: 2625245 - DNA, 25 bp, Homo sapien
ttgttagcgaaaagaccttcccgca

SEQ ID NO: 2625246 - DNA, 25 bp, Homo sapien
tgatggtggcgggaaaagtaggtga

SEQ ID NO: 2625247 - DNA, 25 bp, Homo sapien
ctctatcacgtggaaagccctgtct

SEQ ID NO: 2625248 - DNA, 25 bp, Homo sapien
tctatcacgtggaaagccctgtctc

SEQ ID NO: 2625249 - DNA, 25 bp, Homo sapien
taggtgaatttacgcacagaaagag

SEQ ID NO: 2625250 - DNA, 25 bp, Homo sapien
gatcttgggctgtccaccataccca

SEQ ID NO: 2625251 - DNA, 25 bp, Homo sapien
gtccaccatacccaagaacttgctt

SEQ ID NO: 2625252 - DNA, 25 bp, Homo sapien
ccatacccaagaacttgcttcatct

SEQ ID NO: 2625253 - DNA, 25 bp, Homo sapien
ttgggctgtccaccatacccaagaa

SEQ ID NO: 2625254 - DNA, 25 bp, Homo sapien
tattactcaccaccatggaatgggc

SEQ ID NO: 2625255 - DNA, 25 bp, Homo sapien
agcggcacccggagtttcatttcca

SEQ ID NO: 2625256 - DNA, 25 bp, Homo sapien
atgagttcccggcaaggtggcccta

SEQ ID NO: 2625257 - DNA, 25 bp, Homo sapien
gaaagagtgtcaatgcaaacccagc

SEQ ID NO: 2625258 - DNA, 25 bp, Homo sapien
taaataaccacttatcaagcaagca

SEQ ID NO: 2625259 - DNA, 25 bp, Homo sapien
tcaaacacctgagtattttaggcag

SEQ ID NO: 2625260 - DNA, 25 bp, Homo sapien
taggcagtaatcacatggaagagag

SEQ ID NO: 2625261 - DNA, 25 bp, Homo sapien
caaatatgcaccaaattcatgggat

SEQ ID NO: 2625262 - DNA, 25 bp, Homo sapien
tggtcaccagaaggactagctagag

SEQ ID NO: 2625263 - DNA, 25 bp, Homo sapien
ttttatggacaagccaggagtcacc

SEQ ID NO: 2625264 - DNA, 25 bp, Homo sapien
taattgctaagatgagccacttggc

SEQ ID NO: 2625265 - DNA, 25 bp, Homo sapien
tatgtggtccaaagactcactcgct

SEQ ID NO: 2625266 - DNA, 25 bp, Homo sapien
gagtgtgttacgacagccatgcatt

SEQ ID NO: 2625267 - DNA, 25 bp, Homo sapien
cacaatggccttaatactggtggca

SEQ ID NO: 2625268 - DNA, 25 bp, Homo sapien
gagacgaacctttttacaccagaga

SEQ ID NO: 2625269 - DNA, 25 bp, Homo sapien
ggaggatcgaagtcccacacagagt

SEQ ID NO: 2625270 - DNA, 25 bp, Homo sapien
tacagctattcggagagagtgctaa

SEQ ID NO: 2625271 - DNA, 25 bp, Homo sapien
cactggaaaccaaagtggcaaacaa

SEQ ID NO: 2625272 - DNA, 25 bp, Homo sapien
aatacccacggctacagggctgtcg

SEQ ID NO: 2625273 - DNA, 25 bp, Homo sapien
gatgaggtttaatgtcccttctcac

SEQ ID NO: 2625274 - DNA, 25 bp, Homo sapien
tgtggtgctgttccgttctcacgcc

SEQ ID NO: 2625275 - DNA, 25 bp, Homo sapien
ttctcacgccaactcttctctgatg

SEQ ID NO: 2625276 - DNA, 25 bp, Homo sapien
cagggagtaccaggcggcagtattt

SEQ ID NO: 2625277 - DNA, 25 bp, Homo sapien
ttctctgatgctcctgcccactatt

SEQ ID NO: 2625278 - DNA, 25 bp, Homo sapien
gaaccggcgagtagtgtaagcacaa

SEQ ID NO: 2625279 - DNA, 25 bp, Homo sapien
tgtaagcacaatacgccggatatct

SEQ ID NO: 2625280 - DNA, 25 bp, Homo sapien
tctccctgtggaaccggcgagtagt

SEQ ID NO: 2625281 - DNA, 25 bp, Homo sapien
caaagcctgcaattcttccggctct

SEQ ID NO: 2625282 - DNA, 25 bp, Homo sapien
gcttggctgtgctcaaaatgatttc

SEQ ID NO: 2625283 - DNA, 25 bp, Homo sapien
aatgatttctctcagaaaggggccc

SEQ ID NO: 2625284 - DNA, 25 bp, Homo sapien
ctcaaaatgatttctctcagaaagg

SEQ ID NO: 2625285 - DNA, 25 bp, Homo sapien
tcaaaatatcttggcttggctgtgc

SEQ ID NO: 2625286 - DNA, 25 bp, Homo sapien
tattcatttgttaggatggcaccac

SEQ ID NO: 2625287 - DNA, 25 bp, Homo sapien
tgaactcgggtcttatgtaactagg

SEQ ID NO: 2625288 - DNA, 25 bp, Homo sapien
tctgcctctgagaaaaccaactgca

SEQ ID NO: 2625289 - DNA, 25 bp, Homo sapien
aatgggctaatctgttcccaaccga

SEQ ID NO: 2625290 - DNA, 25 bp, Homo sapien
gaagccatgaccttcaatttataat

SEQ ID NO: 2625291 - DNA, 25 bp, Homo sapien
ttgctcaaaaatcttaatacaaagg

SEQ ID NO: 2625292 - DNA, 25 bp, Homo sapien
cagataactggttgggtttgctcaa

SEQ ID NO: 2625293 - DNA, 25 bp, Homo sapien
gattaaaatggtgtctacgattgcc

SEQ ID NO: 2625294 - DNA, 25 bp, Homo sapien
agtggccctgttcacatgaacatat

SEQ ID NO: 2625295 - DNA, 25 bp, Homo sapien
cctgttcacatgaacatatttagag

SEQ ID NO: 2625296 - DNA, 25 bp, Homo sapien
ctgttcacatgaacatatttagagt

SEQ ID NO: 2625297 - DNA, 25 bp, Homo sapien
ggccctgttcacatgaacatattta

SEQ ID NO: 2625298 - DNA, 25 bp, Homo sapien
agctattattctgatcacctggtga

SEQ ID NO: 2625299 - DNA, 25 bp, Homo sapien
cctggtgatctatcttcaatttgca

SEQ ID NO: 2625300 - DNA, 25 bp, Homo sapien
tgatcacctggtgatctatcttcaa

SEQ ID NO: 2625301 - DNA, 25 bp, Homo sapien
aagctattattctgatcacctggtg

SEQ ID NO: 2625302 - DNA, 25 bp, Homo sapien
catggccaaatcaatactgttctct

SEQ ID NO: 2625303 - DNA, 25 bp, Homo sapien
agattgtttcctaggttactgttag

SEQ ID NO: 2625304 - DNA, 25 bp, Homo sapien
ctctaatggtccaaaagtgcaatca

SEQ ID NO: 2625305 - DNA, 25 bp, Homo sapien
cccaagagttgatttcacatggcca

SEQ ID NO: 2625306 - DNA, 25 bp, Homo sapien
ggaacagcatttcctttatactccc

SEQ ID NO: 2625307 - DNA, 25 bp, Homo sapien
ctacccttatcccacccagccatgg

SEQ ID NO: 2625308 - DNA, 25 bp, Homo sapien
ccacccagccatgggatttcgtaca

SEQ ID NO: 2625309 - DNA, 25 bp, Homo sapien
acagcatttcctttatactccccta

SEQ ID NO: 2625310 - DNA, 25 bp, Homo sapien
agaagattttcaggaagtcagtcca

SEQ ID NO: 2625311 - DNA, 25 bp, Homo sapien
cagaagattttcaggaagtcagtcc

SEQ ID NO: 2625312 - DNA, 25 bp, Homo sapien
tataatagactacagctcgcattcc

SEQ ID NO: 2625313 - DNA, 25 bp, Homo sapien
tgcagctgtcactcgtacaattttg

SEQ ID NO: 2625314 - DNA, 25 bp, Homo sapien
cagcaatgatggtggtagtcatata

SEQ ID NO: 2625315 - DNA, 25 bp, Homo sapien
gatgccttactatctagcgccgcca

SEQ ID NO: 2625316 - DNA, 25 bp, Homo sapien
tacaccccaaaggacgggcttgcaa

SEQ ID NO: 2625317 - DNA, 25 bp, Homo sapien
taaccagtaagagggtctggatggc

SEQ ID NO: 2625318 - DNA, 25 bp, Homo sapien
ggtctggatggcgaaaatacacccc

SEQ ID NO: 2625319 - DNA, 25 bp, Homo sapien
aaaggacgggcttgcaaggacatac

SEQ ID NO: 2625320 - DNA, 25 bp, Homo sapien
aggtaaagatatatgaccttcattt

SEQ ID NO: 2625321 - DNA, 25 bp, Homo sapien
ggtaaagatatatgaccttcatttc

SEQ ID NO: 2625322 - DNA, 25 bp, Homo sapien
tttcgcctctctcatacaagatcag

SEQ ID NO: 2625323 - DNA, 25 bp, Homo sapien
tctgaatccgaaaagcaaggctctc

SEQ ID NO: 2625324 - DNA, 25 bp, Homo sapien
catagttgagagaggtcagtgacca

SEQ ID NO: 2625325 - DNA, 25 bp, Homo sapien
aaaattccaaggtgagctgcatagt

SEQ ID NO: 2625326 - DNA, 25 bp, Homo sapien
ccttgggacaggtttgacaagatga

SEQ ID NO: 2625327 - DNA, 25 bp, Homo sapien
catagtgggcaatgatactgatcac

SEQ ID NO: 2625328 - DNA, 25 bp, Homo sapien
gggtccaaagaatagggcatacttg

SEQ ID NO: 2625329 - DNA, 25 bp, Homo sapien
tgatctctaaagtccctctggaacc

SEQ ID NO: 2625330 - DNA, 25 bp, Homo sapien
tttgacagattttgtggcagctccc

SEQ ID NO: 2625331 - DNA, 25 bp, Homo sapien
ttcttactgttagggctttgaggcc

SEQ ID NO: 2625332 - DNA, 25 bp, Homo sapien
gcagagggagtctatattctcccag

SEQ ID NO: 2625333 - DNA, 25 bp, Homo sapien
cctttagagtatgtggtatgcttcc

SEQ ID NO: 2625334 - DNA, 25 bp, Homo sapien
ggaatgggccctttagacaggtatc

SEQ ID NO: 2625335 - DNA, 25 bp, Homo sapien
caggtatctataattggcagcccaa

SEQ ID NO: 2625336 - DNA, 25 bp, Homo sapien
aagatcaatggggaatgggcccttt

SEQ ID NO: 2625337 - DNA, 25 bp, Homo sapien
tgggccctttagacaggtatctata

SEQ ID NO: 2625338 - DNA, 25 bp, Homo sapien
tccaagtaataagtttgctccttaa

SEQ ID NO: 2625339 - DNA, 25 bp, Homo sapien
cctccctaagtgtggcccatgtagt

SEQ ID NO: 2625340 - DNA, 25 bp, Homo sapien
tgtgtgtaaggtaaagattgcattg

SEQ ID NO: 2625341 - DNA, 25 bp, Homo sapien
gattgcattgaaccaagcaacaaat

SEQ ID NO: 2625342 - DNA, 25 bp, Homo sapien
ttctaccagatttggagggaacatg

SEQ ID NO: 2625343 - DNA, 25 bp, Homo sapien
aggcttctaccagatttggagggaa

SEQ ID NO: 2625344 - DNA, 25 bp, Homo sapien
tgtttaaagcaggcttctaccagat

SEQ ID NO: 2625345 - DNA, 25 bp, Homo sapien
ctgtttaaagcaggcttctaccaga

SEQ ID NO: 2625346 - DNA, 25 bp, Homo sapien
acagcacccacaagcgtttcgttgg

SEQ ID NO: 2625347 - DNA, 25 bp, Homo sapien
gcctggatgggcactttaaagcttc

SEQ ID NO: 2625348 - DNA, 25 bp, Homo sapien
acaagcgtttcgttggcctggatgg

SEQ ID NO: 2625349 - DNA, 25 bp, Homo sapien
gcctcagacacattgtttatcacag

SEQ ID NO: 2625350 - DNA, 25 bp, Homo sapien
gagaagacaactagacccagggcat

SEQ ID NO: 2625351 - DNA, 25 bp, Homo sapien
tctgtgattcgggtaagagtctcca

SEQ ID NO: 2625352 - DNA, 25 bp, Homo sapien
ccagggcattgactccattcacaga

SEQ ID NO: 2625353 - DNA, 25 bp, Homo sapien
tcacaaaaccgaagcacatggagaa

SEQ ID NO: 2625354 - DNA, 25 bp, Homo sapien
cctgcccaggataccattaggactt

SEQ ID NO: 2625355 - DNA, 25 bp, Homo sapien
ggaaaagagagttgactgccaaact

SEQ ID NO: 2625356 - DNA, 25 bp, Homo sapien
cccctgattcttgcagaatcgggct

SEQ ID NO: 2625357 - DNA, 25 bp, Homo sapien
tgtaaatataaatttcccctgattc

SEQ ID NO: 2625358 - DNA, 25 bp, Homo sapien
caccagcacggttggagtctggttt

SEQ ID NO: 2625359 - DNA, 25 bp, Homo sapien
aacaccagcacggttggagtctggt

SEQ ID NO: 2625360 - DNA, 25 bp, Homo sapien
accagcacggttggagtctggtttc

SEQ ID NO: 2625361 - DNA, 25 bp, Homo sapien
caacaccagcacggttggagtctgg

SEQ ID NO: 2625362 - DNA, 25 bp, Homo sapien
gagtaagccaacaatgacagtcacg

SEQ ID NO: 2625363 - DNA, 25 bp, Homo sapien
acagtcacggtgtacatggcaagct

SEQ ID NO: 2625364 - DNA, 25 bp, Homo sapien
cgatgactgcgtgaatgagtaagcc

SEQ ID NO: 2625365 - DNA, 25 bp, Homo sapien
cccagagcggtgatgagtgcttgca

SEQ ID NO: 2625366 - DNA, 25 bp, Homo sapien
ggccctggttcaaggtaacatttca

SEQ ID NO: 2625367 - DNA, 25 bp, Homo sapien
ttctcctacaccctacttgaggggc

SEQ ID NO: 2625368 - DNA, 25 bp, Homo sapien
aaggtaacatttcagactcattttc

SEQ ID NO: 2625369 - DNA, 25 bp, Homo sapien
tgaggggccctggttcaaggtaaca

SEQ ID NO: 2625370 - DNA, 25 bp, Homo sapien
gaaatagggcacatcagctgagtgt

SEQ ID NO: 2625371 - DNA, 25 bp, Homo sapien
gaacagtgaaatagggcacatcagc

SEQ ID NO: 2625372 - DNA, 25 bp, Homo sapien
aacagtgaaatagggcacatcagct

SEQ ID NO: 2625373 - DNA, 25 bp, Homo sapien
agtgaaatagggcacatcagctgag

SEQ ID NO: 2625374 - DNA, 25 bp, Homo sapien
gagcacgaatctggtgacgcgcttg

SEQ ID NO: 2625375 - DNA, 25 bp, Homo sapien
tgtccacgccattgttctcttccag

SEQ ID NO: 2625376 - DNA, 25 bp, Homo sapien
cagccaaagcctcatagagggcagt

SEQ ID NO: 2625377 - DNA, 25 bp, Homo sapien
aatttgtccgaagttcagttcaaag

SEQ ID NO: 2625378 - DNA, 25 bp, Homo sapien
catgcacatgcgtatgcctggcgta

SEQ ID NO: 2625379 - DNA, 25 bp, Homo sapien
tagtaattcccctatccaagtggag

SEQ ID NO: 2625380 - DNA, 25 bp, Homo sapien
cattataactactttgggcctgagg

SEQ ID NO: 2625381 - DNA, 25 bp, Homo sapien
tgcctggcccgtaaatgagattaaa

SEQ ID NO: 2625382 - DNA, 25 bp, Homo sapien
aagctccccacgtagagcatatacg

SEQ ID NO: 2625383 - DNA, 25 bp, Homo sapien
cacttttacaaagctccccacgtag

SEQ ID NO: 2625384 - DNA, 25 bp, Homo sapien
tacaaagctccccacgtagagcata

SEQ ID NO: 2625385 - DNA, 25 bp, Homo sapien
aacagaagtaccagaacagaaaaca

SEQ ID NO: 2625386 - DNA, 25 bp, Homo sapien
catagtgaccaggcccgcctgagga

SEQ ID NO: 2625387 - DNA, 25 bp, Homo sapien
ggccgacagatgtcagcacaatgac

SEQ ID NO: 2625388 - DNA, 25 bp, Homo sapien
tgaccaggcccgcctgaggaattcc

SEQ ID NO: 2625389 - DNA, 25 bp, Homo sapien
tgatgtcgtcagtgggcaggccgac

SEQ ID NO: 2625390 - DNA, 25 bp, Homo sapien
caacttacgttaggaactggccagc

SEQ ID NO: 2625391 - DNA, 25 bp, Homo sapien
taacattcagttcgccgtatctacc

SEQ ID NO: 2625392 - DNA, 25 bp, Homo sapien
tgatgtcacaactcactgaagcagt

SEQ ID NO: 2625393 - DNA, 25 bp, Homo sapien
gaaaaacgaggctcccgtgagcatc

SEQ ID NO: 2625394 - DNA, 25 bp, Homo sapien
tgacaagtgctccacaatcccagct

SEQ ID NO: 2625395 - DNA, 25 bp, Homo sapien
cagggagtctcccagtacgttggtg

SEQ ID NO: 2625396 - DNA, 25 bp, Homo sapien
ggtttcactgtcgatgggtttctca

SEQ ID NO: 2625397 - DNA, 25 bp, Homo sapien
tgttcttcagttcatgtcgtgacaa

SEQ ID NO: 2625398 - DNA, 25 bp, Homo sapien
cacatttataggattgtgtgccaca

SEQ ID NO: 2625399 - DNA, 25 bp, Homo sapien
cacctggtgctcaagaaagtgtttc

SEQ ID NO: 2625400 - DNA, 25 bp, Homo sapien
tcttactgtccaactgataaccggt

SEQ ID NO: 2625401 - DNA, 25 bp, Homo sapien
gcttgctggagcgaatgagctgtaa

SEQ ID NO: 2625402 - DNA, 25 bp, Homo sapien
tgcactttgctcacaggacctggtg

SEQ ID NO: 2625403 - DNA, 25 bp, Homo sapien
gtgtgaccacaagcacccttgctag

SEQ ID NO: 2625404 - DNA, 25 bp, Homo sapien
tgcctggcgacttgcataacctgca

SEQ ID NO: 2625405 - DNA, 25 bp, Homo sapien
tctatcatcagttgaggagtggcag

SEQ ID NO: 2625406 - DNA, 25 bp, Homo sapien
tctactagtgtcttaagaggacagc

SEQ ID NO: 2625407 - DNA, 25 bp, Homo sapien
taatctctaaacctgggagctgcct

SEQ ID NO: 2625408 - DNA, 25 bp, Homo sapien
gaggacagccacgtactttaacatt

SEQ ID NO: 2625409 - DNA, 25 bp, Homo sapien
tgttttggtaagcagacttcacggg

SEQ ID NO: 2625410 - DNA, 25 bp, Homo sapien
tggtggccactatgaggctcgctcc

SEQ ID NO: 2625411 - DNA, 25 bp, Homo sapien
gctttccctctaggacgctgcccat

SEQ ID NO: 2625412 - DNA, 25 bp, Homo sapien
cgcggatctcgtagatttctcatct

SEQ ID NO: 2625413 - DNA, 25 bp, Homo sapien
aggtgagctccgcattccccctggt

SEQ ID NO: 2625414 - DNA, 25 bp, Homo sapien
agccctgaagattgctttcaaagtc

SEQ ID NO: 2625415 - DNA, 25 bp, Homo sapien
cctgggactggcacatggtccaccg

SEQ ID NO: 2625416 - DNA, 25 bp, Homo sapien
ttcccaggtaaagccctgaagattg

SEQ ID NO: 2625417 - DNA, 25 bp, Homo sapien
tgtgtacagagttctccagagttct

SEQ ID NO: 2625418 - DNA, 25 bp, Homo sapien
ttgactggaaactagtaatctgtat

SEQ ID NO: 2625419 - DNA, 25 bp, Homo sapien
tggaaactagtaatctgtatttccc

SEQ ID NO: 2625420 - DNA, 25 bp, Homo sapien
tacgcactgagttcttgactggaaa

SEQ ID NO: 2625421 - DNA, 25 bp, Homo sapien
tcaggctccctacgcactgagttct

SEQ ID NO: 2625422 - DNA, 25 bp, Homo sapien
ctcgctgatctgatctcaagagcat

SEQ ID NO: 2625423 - DNA, 25 bp, Homo sapien
cactcgctgatctgatctcaagagc

SEQ ID NO: 2625424 - DNA, 25 bp, Homo sapien
ctcaagagcatctggatctgcctta

SEQ ID NO: 2625425 - DNA, 25 bp, Homo sapien
gccactcgctgatctgatctcaaga

SEQ ID NO: 2625426 - DNA, 25 bp, Homo sapien
tttccatgccaagaatatcagagcc

SEQ ID NO: 2625427 - DNA, 25 bp, Homo sapien
tagaatgctgcaagcttagccttca

SEQ ID NO: 2625428 - DNA, 25 bp, Homo sapien
tatcagagccatgacccatggtata

SEQ ID NO: 2625429 - DNA, 25 bp, Homo sapien
tgctgtatgactggtaagacgcgac

SEQ ID NO: 2625430 - DNA, 25 bp, Homo sapien
gtatttctgagacttttttttgtga

SEQ ID NO: 2625431 - DNA, 25 bp, Homo sapien
atgagggtatttctgagactttttt

SEQ ID NO: 2625432 - DNA, 25 bp, Homo sapien
tatttctgagacttttttttgtgac

SEQ ID NO: 2625433 - DNA, 25 bp, Homo sapien
tcatgagggtatttctgagactttt

SEQ ID NO: 2625434 - DNA, 25 bp, Homo sapien
tccatcagtgaactttttggattgt

SEQ ID NO: 2625435 - DNA, 25 bp, Homo sapien
tgtcatagtctatttttgggtcaat

SEQ ID NO: 2625436 - DNA, 25 bp, Homo sapien
tccttctcatagtccatcagtgaac

SEQ ID NO: 2625437 - DNA, 25 bp, Homo sapien
caatttccttctcatagtccatcag

SEQ ID NO: 2625438 - DNA, 25 bp, Homo sapien
tgggccaccttcatgttcgtactca

SEQ ID NO: 2625439 - DNA, 25 bp, Homo sapien
ctccttaacagcctgaaagggagcc

SEQ ID NO: 2625440 - DNA, 25 bp, Homo sapien
tgctgggcttacggcagcctccctg

SEQ ID NO: 2625441 - DNA, 25 bp, Homo sapien
ttaacagcctgaaagggagcctgct

SEQ ID NO: 2625442 - DNA, 25 bp, Homo sapien
ggagggtaagtagactctggagggc

SEQ ID NO: 2625443 - DNA, 25 bp, Homo sapien
ttaggagggtaagtagactctggag

SEQ ID NO: 2625444 - DNA, 25 bp, Homo sapien
ggtaagtagactctggagggcactt

SEQ ID NO: 2625445 - DNA, 25 bp, Homo sapien
gggtaagtagactctggagggcact

SEQ ID NO: 2625446 - DNA, 25 bp, Homo sapien
cccgtgaggcctctatatttgattt

SEQ ID NO: 2625447 - DNA, 25 bp, Homo sapien
ggcccgtgaggcctctatatttgat

SEQ ID NO: 2625448 - DNA, 25 bp, Homo sapien
gtggcctggcccgtgaggcctctat

SEQ ID NO: 2625449 - DNA, 25 bp, Homo sapien
gcctggcccgtgaggcctctatatt

SEQ ID NO: 2625450 - DNA, 25 bp, Homo sapien
taaagaacaattgctgcccttcaga

SEQ ID NO: 2625451 - DNA, 25 bp, Homo sapien
ggtcagagcaacctgtgccgatatg

SEQ ID NO: 2625452 - DNA, 25 bp, Homo sapien
tccatgtgccttcagtctttcgaaa

SEQ ID NO: 2625453 - DNA, 25 bp, Homo sapien
ttttaactgcccataggtcagagca

SEQ ID NO: 2625454 - DNA, 25 bp, Homo sapien
atgactatgttggaagtactcaaca

SEQ ID NO: 2625455 - DNA, 25 bp, Homo sapien
caaagcagtgagatttgttcccagt

SEQ ID NO: 2625456 - DNA, 25 bp, Homo sapien
gagatttgttcccagtcctgttgag

SEQ ID NO: 2625457 - DNA, 25 bp, Homo sapien
tggaagtactcaacaaagcagtgag

SEQ ID NO: 2625458 - DNA, 25 bp, Homo sapien
actgtagatctgtgccaagaaactg

SEQ ID NO: 2625459 - DNA, 25 bp, Homo sapien
ccacctggatctgggggccttctat

SEQ ID NO: 2625460 - DNA, 25 bp, Homo sapien
gccttctatcgccttccgggaacag

SEQ ID NO: 2625461 - DNA, 25 bp, Homo sapien
tcgccttccgggaacaggaagcagg

SEQ ID NO: 2625462 - DNA, 25 bp, Homo sapien
tcaccagagggagaagtgtggcatc

SEQ ID NO: 2625463 - DNA, 25 bp, Homo sapien
ctaacaaaggactcggaaacacagg

SEQ ID NO: 2625464 - DNA, 25 bp, Homo sapien
tctctagagatttttagggcaagag

SEQ ID NO: 2625465 - DNA, 25 bp, Homo sapien
ttattggctgattgactaacaaagg

SEQ ID NO: 2625466 - DNA, 25 bp, Homo sapien
taggttgttctctagctccctcctc

SEQ ID NO: 2625467 - DNA, 25 bp, Homo sapien
tgttctctagctccctcctctggga

SEQ ID NO: 2625468 - DNA, 25 bp, Homo sapien
ttctctagctccctcctctgggagc

SEQ ID NO: 2625469 - DNA, 25 bp, Homo sapien
gttgttctctagctccctcctctgg

SEQ ID NO: 2625470 - DNA, 25 bp, Homo sapien
ccagcccctcattatctggatctgt

SEQ ID NO: 2625471 - DNA, 25 bp, Homo sapien
ctggatctgttctgggtggtagtta

SEQ ID NO: 2625472 - DNA, 25 bp, Homo sapien
aggtctgtctcccagcccctcatta

SEQ ID NO: 2625473 - DNA, 25 bp, Homo sapien
tgggtggtagttagtcgtcatcaga

SEQ ID NO: 2625474 - DNA, 25 bp, Homo sapien
gtccagtagcccattggaaacgtgg

SEQ ID NO: 2625475 - DNA, 25 bp, Homo sapien
tccagtagcccattggaaacgtgga

SEQ ID NO: 2625476 - DNA, 25 bp, Homo sapien
ccagtagcccattggaaacgtggaa

SEQ ID NO: 2625477 - DNA, 25 bp, Homo sapien
tggataataatgaccagaggagatg

SEQ ID NO: 2625478 - DNA, 25 bp, Homo sapien
cagaggagatgtagtaaccatcagc

SEQ ID NO: 2625479 - DNA, 25 bp, Homo sapien
tcagtggtctggataataatgacca

SEQ ID NO: 2625480 - DNA, 25 bp, Homo sapien
aatgaccagaggagatgtagtaacc

SEQ ID NO: 2625481 - DNA, 25 bp, Homo sapien
tggatctgttctgggtgatagttag

SEQ ID NO: 2625482 - DNA, 25 bp, Homo sapien
ttttaagaaacgctacagttggatg

SEQ ID NO: 2625483 - DNA, 25 bp, Homo sapien
acagcagctggtcgagcacgggctc

SEQ ID NO: 2625484 - DNA, 25 bp, Homo sapien
tcccaaagccgcagaaagcaaatcc

SEQ ID NO: 2625485 - DNA, 25 bp, Homo sapien
acgggctccagcgacgtgtgtgaaa

SEQ ID NO: 2625486 - DNA, 25 bp, Homo sapien
tctactcattttaacccaaaggaca

SEQ ID NO: 2625487 - DNA, 25 bp, Homo sapien
aggagtggcaggtctactctcacat

SEQ ID NO: 2625488 - DNA, 25 bp, Homo sapien
acccaaaggacatgaagttgcagga

SEQ ID NO: 2625489 - DNA, 25 bp, Homo sapien
ggcaggtctactctcacattctctg

SEQ ID NO: 2625490 - DNA, 25 bp, Homo sapien
agaagaaaggcagggttaagtgtct

SEQ ID NO: 2625491 - DNA, 25 bp, Homo sapien
gacagcttagtgagaagaaaggcag

SEQ ID NO: 2625492 - DNA, 25 bp, Homo sapien
cctttgttcgtagagtgtggacagc

SEQ ID NO: 2625493 - DNA, 25 bp, Homo sapien
ttaagtgtctggtaactggctgcgc

SEQ ID NO: 2625494 - DNA, 25 bp, Homo sapien
taattccttgttgattcctccaggg

SEQ ID NO: 2625495 - DNA, 25 bp, Homo sapien
tccagggcactcaactctgggttca

SEQ ID NO: 2625496 - DNA, 25 bp, Homo sapien
catttcaggtgcaagctgacagccc

SEQ ID NO: 2625497 - DNA, 25 bp, Homo sapien
gaagcaatccatgatctccaagttg

SEQ ID NO: 2625498 - DNA, 25 bp, Homo sapien
ttctgaatgtcagtcttgacttacc

SEQ ID NO: 2625499 - DNA, 25 bp, Homo sapien
gaggttttgatacaagccctgactt

SEQ ID NO: 2625500 - DNA, 25 bp, Homo sapien
caagccctgacttcgtttcgtgcat

SEQ ID NO: 2625501 - DNA, 25 bp, Homo sapien
gacttaccaacttggacatgaggtt

SEQ ID NO: 2625502 - DNA, 25 bp, Homo sapien
catgtctccactagttcctgccaaa

SEQ ID NO: 2625503 - DNA, 25 bp, Homo sapien
gcattgttgggacccattactgtcc

SEQ ID NO: 2625504 - DNA, 25 bp, Homo sapien
taaattggttgaggcaaaagcagcg

SEQ ID NO: 2625505 - DNA, 25 bp, Homo sapien
aactctatactgcatcccaaggcca

SEQ ID NO: 2625506 - DNA, 25 bp, Homo sapien
tgcctggcatctctggcctgccttg

SEQ ID NO: 2625507 - DNA, 25 bp, Homo sapien
ggctgcctggcatctctggcctgcc

SEQ ID NO: 2625508 - DNA, 25 bp, Homo sapien
ctatttggctgcctggcatctctgg

SEQ ID NO: 2625509 - DNA, 25 bp, Homo sapien
gcctggcatctctggcctgccttga

SEQ ID NO: 2625510 - DNA, 25 bp, Homo sapien
tctggtactgaagatcaagtaccat

SEQ ID NO: 2625511 - DNA, 25 bp, Homo sapien
tatcttcattgggaatcttattttc

SEQ ID NO: 2625512 - DNA, 25 bp, Homo sapien
ttctctaacagttttggcattgaca

SEQ ID NO: 2625513 - DNA, 25 bp, Homo sapien
tttcatcattacaagtttatcttca

SEQ ID NO: 2625514 - DNA, 25 bp, Homo sapien
tctaacagttttggcattgacacca

SEQ ID NO: 2625515 - DNA, 25 bp, Homo sapien
cagagcatctggagtgctacattca

SEQ ID NO: 2625516 - DNA, 25 bp, Homo sapien
ttctcagagcatctggagtgctaca

SEQ ID NO: 2625517 - DNA, 25 bp, Homo sapien
tctcagagcatctggagtgctacat

SEQ ID NO: 2625518 - DNA, 25 bp, Homo sapien
gagcatctggagtgctacattcact

SEQ ID NO: 2625519 - DNA, 25 bp, Homo sapien
gggaattcttggctagtaatctcgg

SEQ ID NO: 2625520 - DNA, 25 bp, Homo sapien
tcttggctagtaatctcggaaactc

SEQ ID NO: 2625521 - DNA, 25 bp, Homo sapien
tggctagtaatctcggaaactccct

SEQ ID NO: 2625522 - DNA, 25 bp, Homo sapien
cggtcatcagttttaggggaattct

SEQ ID NO: 2625523 - DNA, 25 bp, Homo sapien
ttgtttgttaaatccatgaagcagg

SEQ ID NO: 2625524 - DNA, 25 bp, Homo sapien
ttttgtttgttaaatccatgaagca

SEQ ID NO: 2625525 - DNA, 25 bp, Homo sapien
tgatagcctgggatggcacctcaca

SEQ ID NO: 2625526 - DNA, 25 bp, Homo sapien
cagtacttctggattagacatgtca

SEQ ID NO: 2625527 - DNA, 25 bp, Homo sapien
tgttgggctgcttgaaagtatcaga

SEQ ID NO: 2625528 - DNA, 25 bp, Homo sapien
gacatgtcacttttactgggtgttg

SEQ ID NO: 2625529 - DNA, 25 bp, Homo sapien
gcaactccaatgcaacccacgcttg

SEQ ID NO: 2625530 - DNA, 25 bp, Homo sapien
aactccaatgcaacccacgcttgct

SEQ ID NO: 2625531 - DNA, 25 bp, Homo sapien
ccaatgcaacccacgcttgctgacc

SEQ ID NO: 2625532 - DNA, 25 bp, Homo sapien
tccaatgcaacccacgcttgctgac

SEQ ID NO: 2625533 - DNA, 25 bp, Homo sapien
cagagtaaggagtggtgacagatta

SEQ ID NO: 2625534 - DNA, 25 bp, Homo sapien
ccagagtaaggagtggtgacagatt

SEQ ID NO: 2625535 - DNA, 25 bp, Homo sapien
ttccagagtaaggagtggtgacaga

SEQ ID NO: 2625536 - DNA, 25 bp, Homo sapien
gagtaaggagtggtgacagattagg

SEQ ID NO: 2625537 - DNA, 25 bp, Homo sapien
tttctggaaatacgcggtctccgct

SEQ ID NO: 2625538 - DNA, 25 bp, Homo sapien
gataaaggcctgtaggcgacgctgc

SEQ ID NO: 2625539 - DNA, 25 bp, Homo sapien
ttctctaacggtcaggataaaggcc

SEQ ID NO: 2625540 - DNA, 25 bp, Homo sapien
cgactgtcggctggattgaattgga

SEQ ID NO: 2625541 - DNA, 25 bp, Homo sapien
gatggatggatcgtacaccttgcct

SEQ ID NO: 2625542 - DNA, 25 bp, Homo sapien
tgtcccaggtcgtcgttagctttag

SEQ ID NO: 2625543 - DNA, 25 bp, Homo sapien
tagctttagggagccgatctccggg

SEQ ID NO: 2625544 - DNA, 25 bp, Homo sapien
gcccgactgcgtgttatttctgcga

SEQ ID NO: 2625545 - DNA, 25 bp, Homo sapien
ggcccgagttcggtggtggtcgtga

SEQ ID NO: 2625546 - DNA, 25 bp, Homo sapien
ggtcgtgagcgtggggggcactcag

SEQ ID NO: 2625547 - DNA, 25 bp, Homo sapien
cccgagttcggtggtggtcgtgagc

SEQ ID NO: 2625548 - DNA, 25 bp, Homo sapien
agttcggtggtggtcgtgagcgtgg

SEQ ID NO: 2625549 - DNA, 25 bp, Homo sapien
gacgtttgccctgcgacacaggcgg

SEQ ID NO: 2625550 - DNA, 25 bp, Homo sapien
tttgccctgcgacacaggcgggccg

SEQ ID NO: 2625551 - DNA, 25 bp, Homo sapien
agagcgacgtttgccctgcgacaca

SEQ ID NO: 2625552 - DNA, 25 bp, Homo sapien
tcagagcgacgtttgccctgcgaca

SEQ ID NO: 2625553 - DNA, 25 bp, Homo sapien
gcatcgccgcgggcccgggaaccaa

SEQ ID NO: 2625554 - DNA, 25 bp, Homo sapien
ggcatcgccgcgggcccgggaacca

SEQ ID NO: 2625555 - DNA, 25 bp, Homo sapien
catcgccgcgggcccgggaaccaat

SEQ ID NO: 2625556 - DNA, 25 bp, Homo sapien
gggagaccagccgagaagacaaatc

SEQ ID NO: 2625557 - DNA, 25 bp, Homo sapien
cagccgagaagacaaatcgttgctt

SEQ ID NO: 2625558 - DNA, 25 bp, Homo sapien
ctcagtgcggggaacatgtagagcc

SEQ ID NO: 2625559 - DNA, 25 bp, Homo sapien
gggtggctacggctcctcttccgtc

SEQ ID NO: 2625560 - DNA, 25 bp, Homo sapien
gcgaatcggcgtctgaatccaaggg

SEQ ID NO: 2625561 - DNA, 25 bp, Homo sapien
ctgggcgaatcggcgtctgaatcca

SEQ ID NO: 2625562 - DNA, 25 bp, Homo sapien
cgtctgaatccaaggggaggccgag

SEQ ID NO: 2625563 - DNA, 25 bp, Homo sapien
gggcgaatcggcgtctgaatccaag

SEQ ID NO: 2625564 - DNA, 25 bp, Homo sapien
ccactcccgggcgaggcctgtcacc

SEQ ID NO: 2625565 - DNA, 25 bp, Homo sapien
gaccagcagtcgctccgctcagccc

SEQ ID NO: 2625566 - DNA, 25 bp, Homo sapien
gcgaggcctgtcaccgaccagcagt

SEQ ID NO: 2625567 - DNA, 25 bp, Homo sapien
gcccggagctctcctaatccccgag

SEQ ID NO: 2625568 - DNA, 25 bp, Homo sapien
ctaggattataaggttactggaaca

SEQ ID NO: 2625569 - DNA, 25 bp, Homo sapien
gcagaacactctacactctttaggg

SEQ ID NO: 2625570 - DNA, 25 bp, Homo sapien
ctagtgaatattccaaccaacagag

SEQ ID NO: 2625571 - DNA, 25 bp, Homo sapien
gttaagagaaacaataagcgacatt

SEQ ID NO: 2625572 - DNA, 25 bp, Homo sapien
acaggacacggagatccgcgaacca

SEQ ID NO: 2625573 - DNA, 25 bp, Homo sapien
tggaacaggacacggagatccgcga

SEQ ID NO: 2625574 - DNA, 25 bp, Homo sapien
ggtggaacaggacacggagatccgc

SEQ ID NO: 2625575 - DNA, 25 bp, Homo sapien
gaacaggacacggagatccgcgaac

SEQ ID NO: 2625576 - DNA, 25 bp, Homo sapien
cctggaccccaagccgccgcggaag

SEQ ID NO: 2625577 - DNA, 25 bp, Homo sapien
gccagaccctgggccatccacttgg

SEQ ID NO: 2625578 - DNA, 25 bp, Homo sapien
ccatccacttggccaggcccctgga

SEQ ID NO: 2625579 - DNA, 25 bp, Homo sapien
cagaccctgggccatccacttggcc

SEQ ID NO: 2625580 - DNA, 25 bp, Homo sapien
ttcaggctttggagggtctccttgt

SEQ ID NO: 2625581 - DNA, 25 bp, Homo sapien
tctctggttcttggtctctaggctc

SEQ ID NO: 2625582 - DNA, 25 bp, Homo sapien
ggctttggagggtctccttgttctg

SEQ ID NO: 2625583 - DNA, 25 bp, Homo sapien
gtgctcccgggtgttgctctccagt

SEQ ID NO: 2625584 - DNA, 25 bp, Homo sapien
tctaaagccatcagcagcaaggtag

SEQ ID NO: 2625585 - DNA, 25 bp, Homo sapien
aaagccatcagcagcaaggtaggca

SEQ ID NO: 2625586 - DNA, 25 bp, Homo sapien
taaagccatcagcagcaaggtaggc

SEQ ID NO: 2625587 - DNA, 25 bp, Homo sapien
agccatcagcagcaaggtaggcatt

SEQ ID NO: 2625588 - DNA, 25 bp, Homo sapien
cttgcagagcccacggatgtcgttc

SEQ ID NO: 2625589 - DNA, 25 bp, Homo sapien
agagcccacggatgtcgttctctac

SEQ ID NO: 2625590 - DNA, 25 bp, Homo sapien
gcagagcccacggatgtcgttctct

SEQ ID NO: 2625591 - DNA, 25 bp, Homo sapien
ttgcagagcccacggatgtcgttct

SEQ ID NO: 2625592 - DNA, 25 bp, Homo sapien
tccctgagagcctcgatgtctgtct

SEQ ID NO: 2625593 - DNA, 25 bp, Homo sapien
tccttcattaagagcagctcctccc

SEQ ID NO: 2625594 - DNA, 25 bp, Homo sapien
tcaacccagagctggtgagctgggc

SEQ ID NO: 2625595 - DNA, 25 bp, Homo sapien
agctggtgagctgggcttgtaggcc

SEQ ID NO: 2625596 - DNA, 25 bp, Homo sapien
ttggttcttctgagctagctcgtcg

SEQ ID NO: 2625597 - DNA, 25 bp, Homo sapien
tgagctagctcgtcgtattgggcct

SEQ ID NO: 2625598 - DNA, 25 bp, Homo sapien
gctagctcgtcgtattgggcctgta

SEQ ID NO: 2625599 - DNA, 25 bp, Homo sapien
tagctcgtcgtattgggcctgtatg

SEQ ID NO: 2625600 - DNA, 25 bp, Homo sapien
cgtatgtctcagctccgtgagtgtc

SEQ ID NO: 2625601 - DNA, 25 bp, Homo sapien
tgagtgtcatctcagcagctccgac

SEQ ID NO: 2625602 - DNA, 25 bp, Homo sapien
cgtgagtgtcatctcagcagctccg

SEQ ID NO: 2625603 - DNA, 25 bp, Homo sapien
tccgtgagtgtcatctcagcagctc

SEQ ID NO: 2625604 - DNA, 25 bp, Homo sapien
ctgcagggcatagcaggtctccacc

SEQ ID NO: 2625605 - DNA, 25 bp, Homo sapien
gctgttctccagaagctggccttca

SEQ ID NO: 2625606 - DNA, 25 bp, Homo sapien
ttctccagaagctggccttcagatt

SEQ ID NO: 2625607 - DNA, 25 bp, Homo sapien
caggctgttctccagaagctggcct

SEQ ID NO: 2625608 - DNA, 25 bp, Homo sapien
gcatcatcaagactgaagttcttgc

SEQ ID NO: 2625609 - DNA, 25 bp, Homo sapien
gcaggattctgttgagctgctctac

SEQ ID NO: 2625610 - DNA, 25 bp, Homo sapien
ttgccatcttcaagcaggcggtggc

SEQ ID NO: 2625611 - DNA, 25 bp, Homo sapien
tcatcaagactgaagttcttgccat

SEQ ID NO: 2625612 - DNA, 25 bp, Homo sapien
tatctaccactgttcaaagtactat

SEQ ID NO: 2625613 - DNA, 25 bp, Homo sapien
aactgattacaaagggatacatggg

SEQ ID NO: 2625614 - DNA, 25 bp, Homo sapien
ttcgtaagagcttcaccaaagttaa

SEQ ID NO: 2625615 - DNA, 25 bp, Homo sapien
gatctagttgcctcgggctgcagta

SEQ ID NO: 2625616 - DNA, 25 bp, Homo sapien
cctgggccatatagcgagagtttgt

SEQ ID NO: 2625617 - DNA, 25 bp, Homo sapien
aatacgacccctatcaaaattgcag

SEQ ID NO: 2625618 - DNA, 25 bp, Homo sapien
aaaggcaatactccccaaactcatc

SEQ ID NO: 2625619 - DNA, 25 bp, Homo sapien
ggaacgtcttcccatgcccttggat

SEQ ID NO: 2625620 - DNA, 25 bp, Homo sapien
tccataccctagcagtgaacaatct

SEQ ID NO: 2625621 - DNA, 25 bp, Homo sapien
ccataccctagcagtgaacaatctg

SEQ ID NO: 2625622 - DNA, 25 bp, Homo sapien
ataccctagcagtgaacaatctgga

SEQ ID NO: 2625623 - DNA, 25 bp, Homo sapien
cataccctagcagtgaacaatctgg

SEQ ID NO: 2625624 - DNA, 25 bp, Homo sapien
tatatacacattgttagcaggcatt

SEQ ID NO: 2625625 - DNA, 25 bp, Homo sapien
cacttactgactagtggagtaaaga

SEQ ID NO: 2625626 - DNA, 25 bp, Homo sapien
gatgcctcactattggcaaagctta

SEQ ID NO: 2625627 - DNA, 25 bp, Homo sapien
tttaatcctatgttacagccagagc

SEQ ID NO: 2625628 - DNA, 25 bp, Homo sapien
cctaaaggtcactgataagaacaac

SEQ ID NO: 2625629 - DNA, 25 bp, Homo sapien
ggcaggattacactacccttctcta

SEQ ID NO: 2625630 - DNA, 25 bp, Homo sapien
cctcttgtttcaagctgtgtaagct

SEQ ID NO: 2625631 - DNA, 25 bp, Homo sapien
ctaactgctagtaagtttgggcatc

SEQ ID NO: 2625632 - DNA, 25 bp, Homo sapien
actggccatcattgctattaatata

SEQ ID NO: 2625633 - DNA, 25 bp, Homo sapien
aatatgaagggctgattatacctca

SEQ ID NO: 2625634 - DNA, 25 bp, Homo sapien
catcatcactaagaataaggctatt

SEQ ID NO: 2625635 - DNA, 25 bp, Homo sapien
aggctttagcgaagactttttctat

SEQ ID NO: 2625636 - DNA, 25 bp, Homo sapien
cacctttgggtttgttagaaatgca

SEQ ID NO: 2625637 - DNA, 25 bp, Homo sapien
gatgataaattatgtaaccccagca

SEQ ID NO: 2625638 - DNA, 25 bp, Homo sapien
aaaacttggctatatattcacccgg

SEQ ID NO: 2625639 - DNA, 25 bp, Homo sapien
cagatctactggttcacaatcgcca

SEQ ID NO: 2625640 - DNA, 25 bp, Homo sapien
ttatgccctccaagattcctacagg

SEQ ID NO: 2625641 - DNA, 25 bp, Homo sapien
tctcaacagaaggtacttgctcacc

SEQ ID NO: 2625642 - DNA, 25 bp, Homo sapien
tcaaacagtagtgcaaaattaccct

SEQ ID NO: 2625643 - DNA, 25 bp, Homo sapien
agagctacctagcattcttcaaagg

SEQ ID NO: 2625644 - DNA, 25 bp, Homo sapien
tacgcacctattgctactggtatag

SEQ ID NO: 2625645 - DNA, 25 bp, Homo sapien
gaaatggttatccacaaggaaggta

SEQ ID NO: 2625646 - DNA, 25 bp, Homo sapien
tctgagctacacacagttatgggtc

SEQ ID NO: 2625647 - DNA, 25 bp, Homo sapien
aatataactttgacctctgagctac

SEQ ID NO: 2625648 - DNA, 25 bp, Homo sapien
tgtgactcattacctacagcaacct

SEQ ID NO: 2625649 - DNA, 25 bp, Homo sapien
gaaaaagaagctatcaatggagaaa

SEQ ID NO: 2625650 - DNA, 25 bp, Homo sapien
tgctggatttcaaggcgttagccac

SEQ ID NO: 2625651 - DNA, 25 bp, Homo sapien
tggacccctgcactacatgacaagt

SEQ ID NO: 2625652 - DNA, 25 bp, Homo sapien
ccaaaaggctagcattctggttcct

SEQ ID NO: 2625653 - DNA, 25 bp, Homo sapien
catagttagtagtcacatcaagcac

SEQ ID NO: 2625654 - DNA, 25 bp, Homo sapien
taaagtaagcatccatagaatcatc

SEQ ID NO: 2625655 - DNA, 25 bp, Homo sapien
tttctagcagaagcccactgaaagg

SEQ ID NO: 2625656 - DNA, 25 bp, Homo sapien
taaaagtacttagttcaggtgccag

SEQ ID NO: 2625657 - DNA, 25 bp, Homo sapien
acttagttcaggtgccagctgtcat

SEQ ID NO: 2625658 - DNA, 25 bp, Homo sapien
aaaagtacttagttcaggtgccagc

SEQ ID NO: 2625659 - DNA, 25 bp, Homo sapien
aagtacttagttcaggtgccagctg

SEQ ID NO: 2625660 - DNA, 25 bp, Homo sapien
ctagcaatccccgcaagagtagtaa

SEQ ID NO: 2625661 - DNA, 25 bp, Homo sapien
agcaatccccgcaagagtagtaatg

SEQ ID NO: 2625662 - DNA, 25 bp, Homo sapien
agactagcaatccccgcaagagtag

SEQ ID NO: 2625663 - DNA, 25 bp, Homo sapien
gactagcaatccccgcaagagtagt

SEQ ID NO: 2625664 - DNA, 25 bp, Homo sapien
tgtgatctgttgatacctggttgag

SEQ ID NO: 2625665 - DNA, 25 bp, Homo sapien
gaggctatggacaagctgtgaaacc

SEQ ID NO: 2625666 - DNA, 25 bp, Homo sapien
gccaaaaggcagttcacctcttctg

SEQ ID NO: 2625667 - DNA, 25 bp, Homo sapien
gaaaccaaattgtcatccctacaag

SEQ ID NO: 2625668 - DNA, 25 bp, Homo sapien
taagtatgtacaagcataagaagtg

SEQ ID NO: 2625669 - DNA, 25 bp, Homo sapien
tatgtacaagcataagaagtgattt

SEQ ID NO: 2625670 - DNA, 25 bp, Homo sapien
ataagaagtgatttagaggctgggc

SEQ ID NO: 2625671 - DNA, 25 bp, Homo sapien
actactgaataagtatgtacaagca

SEQ ID NO: 2625672 - DNA, 25 bp, Homo sapien
gctgacccaacagttatgaattttc

SEQ ID NO: 2625673 - DNA, 25 bp, Homo sapien
ccactgtggctgacccaacagttat

SEQ ID NO: 2625674 - DNA, 25 bp, Homo sapien
tgctatccctgggagaaatataatt

SEQ ID NO: 2625675 - DNA, 25 bp, Homo sapien
ttcaaatatgctatccctgggagaa

SEQ ID NO: 2625676 - DNA, 25 bp, Homo sapien
aatcacactggtatggccaacaata

SEQ ID NO: 2625677 - DNA, 25 bp, Homo sapien
tcacactggtatggccaacaatatg

SEQ ID NO: 2625678 - DNA, 25 bp, Homo sapien
cacactggtatggccaacaatatga

SEQ ID NO: 2625679 - DNA, 25 bp, Homo sapien
atcacactggtatggccaacaatat

SEQ ID NO: 2625680 - DNA, 25 bp, Homo sapien
caagactggtatgtcaccttctggg

SEQ ID NO: 2625681 - DNA, 25 bp, Homo sapien
cactttgtacatatctgttctgcat

SEQ ID NO: 2625682 - DNA, 25 bp, Homo sapien
gacggcctgcaacaagactggtatg

SEQ ID NO: 2625683 - DNA, 25 bp, Homo sapien
ggactccttgccaggacggcctgca

SEQ ID NO: 2625684 - DNA, 25 bp, Homo sapien
aaacaagtttgatatgggaattcag

SEQ ID NO: 2625685 - DNA, 25 bp, Homo sapien
aaaacaagtttgatatgggaattca

SEQ ID NO: 2625686 - DNA, 25 bp, Homo sapien
tcttgttcttggcttgactgaaggc

SEQ ID NO: 2625687 - DNA, 25 bp, Homo sapien
actgaaggcataaacatcgcattcc

SEQ ID NO: 2625688 - DNA, 25 bp, Homo sapien
aaacatcgcattcctgataggccag

SEQ ID NO: 2625689 - DNA, 25 bp, Homo sapien
tgttcttggcttgactgaaggcata

SEQ ID NO: 2625690 - DNA, 25 bp, Homo sapien
taagctgagtaaactgatatattcc

SEQ ID NO: 2625691 - DNA, 25 bp, Homo sapien
aaagctttgtctaattctcaaggaa

SEQ ID NO: 2625692 - DNA, 25 bp, Homo sapien
cacttaaagctttgtctaattctca

SEQ ID NO: 2625693 - DNA, 25 bp, Homo sapien
tgagtaaactgatatattccaacat

SEQ ID NO: 2625694 - DNA, 25 bp, Homo sapien
aatcaattactagaaaaccatgaat

SEQ ID NO: 2625695 - DNA, 25 bp, Homo sapien
aaatcaattactagaaaaccatgaa

SEQ ID NO: 2625696 - DNA, 25 bp, Homo sapien
taaatcaattactagaaaaccatga

SEQ ID NO: 2625697 - DNA, 25 bp, Homo sapien
cataatgcctggctagttgttgtat

SEQ ID NO: 2625698 - DNA, 25 bp, Homo sapien
catgcccggctgataaaattcttaa

SEQ ID NO: 2625699 - DNA, 25 bp, Homo sapien
ccatgcccggctgataaaattctta

SEQ ID NO: 2625700 - DNA, 25 bp, Homo sapien
gcgcacaccataatgcctggctagt

SEQ ID NO: 2625701 - DNA, 25 bp, Homo sapien
tgaacactcaatgagacaggagtta

SEQ ID NO: 2625702 - DNA, 25 bp, Homo sapien
taggtttcaaaatcgcctctaagtc

SEQ ID NO: 2625703 - DNA, 25 bp, Homo sapien
cctctaagtctaccattgaagggtg

SEQ ID NO: 2625704 - DNA, 25 bp, Homo sapien
gaattactagtttgaaagcaatggc

SEQ ID NO: 2625705 - DNA, 25 bp, Homo sapien
gcaggactactgtgcatggaattct

SEQ ID NO: 2625706 - DNA, 25 bp, Homo sapien
gctatgtgagatagtggtttgttga

SEQ ID NO: 2625707 - DNA, 25 bp, Homo sapien
ggtttgttgataattggaagatgca

SEQ ID NO: 2625708 - DNA, 25 bp, Homo sapien
tctgagaaagtttatactgagacat

SEQ ID NO: 2625709 - DNA, 25 bp, Homo sapien
taacttgaaggatgggaatatggca

SEQ ID NO: 2625710 - DNA, 25 bp, Homo sapien
ctttgtggggcgtatggactaggca

SEQ ID NO: 2625711 - DNA, 25 bp, Homo sapien
aatatggcatgtatcctgcagggct

SEQ ID NO: 2625712 - DNA, 25 bp, Homo sapien
tgtggatgtgttgtgtaacttgaag

SEQ ID NO: 2625713 - DNA, 25 bp, Homo sapien
taattgtcccttggcttagtgctaa

SEQ ID NO: 2625714 - DNA, 25 bp, Homo sapien
gattggttccaataccttctgtgga

SEQ ID NO: 2625715 - DNA, 25 bp, Homo sapien
gaaaacatgtctgtacgtgttcact

SEQ ID NO: 2625716 - DNA, 25 bp, Homo sapien
tagccctatgcactatacagtactt

SEQ ID NO: 2625717 - DNA, 25 bp, Homo sapien
ttcataatctggttttgggaaacca

SEQ ID NO: 2625718 - DNA, 25 bp, Homo sapien
atatttcataatctggttttgggaa

SEQ ID NO: 2625719 - DNA, 25 bp, Homo sapien
ccttgagttcgtgtgtaaaaaagct

SEQ ID NO: 2625720 - DNA, 25 bp, Homo sapien
tctccttgagttcgtgtgtaaaaaa

SEQ ID NO: 2625721 - DNA, 25 bp, Homo sapien
ttaatatctgggtgaggctaatccc

SEQ ID NO: 2625722 - DNA, 25 bp, Homo sapien
gtattttgcacagaccaacatcctg

SEQ ID NO: 2625723 - DNA, 25 bp, Homo sapien
acagaaagtattttgcacagaccaa

SEQ ID NO: 2625724 - DNA, 25 bp, Homo sapien
cctttgtcaaaagtaagttgcctgt

SEQ ID NO: 2625725 - DNA, 25 bp, Homo sapien
taaagattgcatcagtgtaattcag

SEQ ID NO: 2625726 - DNA, 25 bp, Homo sapien
gataatagaggcacgtatttctggg

SEQ ID NO: 2625727 - DNA, 25 bp, Homo sapien
tgtaattcagatatccaccacctta

SEQ ID NO: 2625728 - DNA, 25 bp, Homo sapien
actgagctattaaacactgtgtgtt

SEQ ID NO: 2625729 - DNA, 25 bp, Homo sapien
tgccagacaacggaccagaaacttt

SEQ ID NO: 2625730 - DNA, 25 bp, Homo sapien
taggtagtcctcacttgaaccatgt

SEQ ID NO: 2625731 - DNA, 25 bp, Homo sapien
gcaacaatgggacttgataccgatg

SEQ ID NO: 2625732 - DNA, 25 bp, Homo sapien
tacttagcctgtgcaccatgtgtag

SEQ ID NO: 2625733 - DNA, 25 bp, Homo sapien
attctcactttgtggttcaggctac

SEQ ID NO: 2625734 - DNA, 25 bp, Homo sapien
ttgaccaatcctgctctagactaag

SEQ ID NO: 2625735 - DNA, 25 bp, Homo sapien
tacggtaggtatcattcaaattttg

SEQ ID NO: 2625736 - DNA, 25 bp, Homo sapien
gcaggagccatgttgtactcagtac

SEQ ID NO: 2625737 - DNA, 25 bp, Homo sapien
agggaaaagatgcagcattcctcat

SEQ ID NO: 2625738 - DNA, 25 bp, Homo sapien
aagggaaaagatgcagcattcctca

SEQ ID NO: 2625739 - DNA, 25 bp, Homo sapien
tccagcaggggagcatactggctgt

SEQ ID NO: 2625740 - DNA, 25 bp, Homo sapien
tggctgtggagatctcaagggaaaa

SEQ ID NO: 2625741 - DNA, 25 bp, Homo sapien
gattgtaggattaaaggtggtcttg

SEQ ID NO: 2625742 - DNA, 25 bp, Homo sapien
ctgagattgtaggattaaaggtggt

SEQ ID NO: 2625743 - DNA, 25 bp, Homo sapien
gagattgtaggattaaaggtggtct

SEQ ID NO: 2625744 - DNA, 25 bp, Homo sapien
tgtaggattaaaggtggtcttgagc

SEQ ID NO: 2625745 - DNA, 25 bp, Homo sapien
tatctggtggaacatctcgaggtga

SEQ ID NO: 2625746 - DNA, 25 bp, Homo sapien
tctgtcctgggtactgcacattaaa

SEQ ID NO: 2625747 - DNA, 25 bp, Homo sapien
gagaagcgctccctttcaatagctg

SEQ ID NO: 2625748 - DNA, 25 bp, Homo sapien
tctgaagaccttacacgagaaagtc

SEQ ID NO: 2625749 - DNA, 25 bp, Homo sapien
tgtgatacgtgactataaatccacg

SEQ ID NO: 2625750 - DNA, 25 bp, Homo sapien
caaaaaattcagttatcagggcaac

SEQ ID NO: 2625751 - DNA, 25 bp, Homo sapien
tccacgaaataagaggaaagtggct

SEQ ID NO: 2625752 - DNA, 25 bp, Homo sapien
taatcctcaggttatcaccgcatac

SEQ ID NO: 2625753 - DNA, 25 bp, Homo sapien
aatgctggccttgacccatttcccg

SEQ ID NO: 2625754 - DNA, 25 bp, Homo sapien
tgagaagctggtctattacctcctg

SEQ ID NO: 2625755 - DNA, 25 bp, Homo sapien
cgtagaacccgtctcctgagaagct

SEQ ID NO: 2625756 - DNA, 25 bp, Homo sapien
tcctgtgggtaagaatcttgttttc

SEQ ID NO: 2625757 - DNA, 25 bp, Homo sapien
tttaggctcaactatggtgctctcg

SEQ ID NO: 2625758 - DNA, 25 bp, Homo sapien
tgaatcctgagttatagaagcctga

SEQ ID NO: 2625759 - DNA, 25 bp, Homo sapien
tcctgcctgatgaagatcaatgcta

SEQ ID NO: 2625760 - DNA, 25 bp, Homo sapien
acttgattttgtctccaccaatcgg

SEQ ID NO: 2625761 - DNA, 25 bp, Homo sapien
tttcaggccttgattttgttgtttc

SEQ ID NO: 2625762 - DNA, 25 bp, Homo sapien
tgttgtttctgatctgccattattt

SEQ ID NO: 2625763 - DNA, 25 bp, Homo sapien
ttgttgtcatttggttttgtgtcag

SEQ ID NO: 2625764 - DNA, 25 bp, Homo sapien
tgtttgttgtcatttggttttgtgt

SEQ ID NO: 2625765 - DNA, 25 bp, Homo sapien
ttagtgactcagaaacagatcgccc

SEQ ID NO: 2625766 - DNA, 25 bp, Homo sapien
tgtttaacacgaggactgtcaggtc

SEQ ID NO: 2625767 - DNA, 25 bp, Homo sapien
tgctttggagtttcagggcggctct

SEQ ID NO: 2625768 - DNA, 25 bp, Homo sapien
tttggagtctcaggccggctttcac

SEQ ID NO: 2625769 - DNA, 25 bp, Homo sapien
tatttaactaaccatctccccaaca

SEQ ID NO: 2625770 - DNA, 25 bp, Homo sapien
cattcataactaccttgagtagtgg

SEQ ID NO: 2625771 - DNA, 25 bp, Homo sapien
caggtctgtaagaatgtagtattgt

SEQ ID NO: 2625772 - DNA, 25 bp, Homo sapien
tagcagtaacattcataactacctt

SEQ ID NO: 2625773 - DNA, 25 bp, Homo sapien
tttagactgtatggacacggtggct

SEQ ID NO: 2625774 - DNA, 25 bp, Homo sapien
aatggttaccctcttggccaatgca

SEQ ID NO: 2625775 - DNA, 25 bp, Homo sapien
caaatattagcgactcagaaggcaa

SEQ ID NO: 2625776 - DNA, 25 bp, Homo sapien
tgaatgttgacgaagaccaagcaag

SEQ ID NO: 2625777 - DNA, 25 bp, Homo sapien
taatccaaaagatagctacacggca

SEQ ID NO: 2625778 - DNA, 25 bp, Homo sapien
ccagtatatactacaaagggtcagt

SEQ ID NO: 2625779 - DNA, 25 bp, Homo sapien
taggcagacacccagatagcttact

SEQ ID NO: 2625780 - DNA, 25 bp, Homo sapien
ggatacagatatagtgccacagaaa

SEQ ID NO: 2625781 - DNA, 25 bp, Homo sapien
tgaaagcactgagtccacacaatgg

SEQ ID NO: 2625782 - DNA, 25 bp, Homo sapien
gataactgaagtgcgatcactgtcg

SEQ ID NO: 2625783 - DNA, 25 bp, Homo sapien
gagaatacctccagcaaactttagt

SEQ ID NO: 2625784 - DNA, 25 bp, Homo sapien
tcactgtcgctagtaaggcctgcaa

SEQ ID NO: 2625785 - DNA, 25 bp, Homo sapien
caaaaggatcctgatctggataact

SEQ ID NO: 2625786 - DNA, 25 bp, Homo sapien
tatattagcaccaccgtacttcagc

SEQ ID NO: 2625787 - DNA, 25 bp, Homo sapien
catcaaggatctggataactcagcc

SEQ ID NO: 2625788 - DNA, 25 bp, Homo sapien
tcagcatgtctgaattcccataaaa

SEQ ID NO: 2625789 - DNA, 25 bp, Homo sapien
caatggattatgttcccagagcaag

SEQ ID NO: 2625790 - DNA, 25 bp, Homo sapien
tagattaagttcacatcacagacac

SEQ ID NO: 2625791 - DNA, 25 bp, Homo sapien
ggcctttcatccatcacgggatttt

SEQ ID NO: 2625792 - DNA, 25 bp, Homo sapien
agcaggtatcaacatttatcaacag

SEQ ID NO: 2625793 - DNA, 25 bp, Homo sapien
taatgttacccctcaatacaagtga

SEQ ID NO: 2625794 - DNA, 25 bp, Homo sapien
gagattcactgacattagcaagtgg

SEQ ID NO: 2625795 - DNA, 25 bp, Homo sapien
gaggtacacttgacattcttggtag

SEQ ID NO: 2625796 - DNA, 25 bp, Homo sapien
caagtggatttgtggtaagaggtac

SEQ ID NO: 2625797 - DNA, 25 bp, Homo sapien
tcattttcacacgttcacaaagtgg

SEQ ID NO: 2625798 - DNA, 25 bp, Homo sapien
ggcttttcattaactgtgctacgct

SEQ ID NO: 2625799 - DNA, 25 bp, Homo sapien
gctacgcttgcgtttgttcattttc

SEQ ID NO: 2625800 - DNA, 25 bp, Homo sapien
cacaaagtggcatggtggactcaat

SEQ ID NO: 2625801 - DNA, 25 bp, Homo sapien
agaattaaggtgactgtgcttttgc

SEQ ID NO: 2625802 - DNA, 25 bp, Homo sapien
aattaaggtgactgtgcttttgcta

SEQ ID NO: 2625803 - DNA, 25 bp, Homo sapien
aacacatcaacctgcttttaaactc

SEQ ID NO: 2625804 - DNA, 25 bp, Homo sapien
acacatcaacctgcttttaaactct

SEQ ID NO: 2625805 - DNA, 25 bp, Homo sapien
acagtgaaacaagggaggaattcca

SEQ ID NO: 2625806 - DNA, 25 bp, Homo sapien
acaagggaggaattccaggacacag

SEQ ID NO: 2625807 - DNA, 25 bp, Homo sapien
gtgaaacaagggaggaattccagga

SEQ ID NO: 2625808 - DNA, 25 bp, Homo sapien
ctggaaaacagtgaaacaagggagg

SEQ ID NO: 2625809 - DNA, 25 bp, Homo sapien
gctaggctcaattctcttgctccag

SEQ ID NO: 2625810 - DNA, 25 bp, Homo sapien
tatagcaagtctagtgcaaagacag

SEQ ID NO: 2625811 - DNA, 25 bp, Homo sapien
ttttcagtggaccagtaggaagaca

SEQ ID NO: 2625812 - DNA, 25 bp, Homo sapien
ccagtaggaagacaggcgaggtata

SEQ ID NO: 2625813 - DNA, 25 bp, Homo sapien
aagtagaacactggtggtcttccca

SEQ ID NO: 2625814 - DNA, 25 bp, Homo sapien
catagtctgtttccactgaatgccg

SEQ ID NO: 2625815 - DNA, 25 bp, Homo sapien
tgcttgtcacacctcaatctatgga

SEQ ID NO: 2625816 - DNA, 25 bp, Homo sapien
gttggcacacaagtgaagatctccc

SEQ ID NO: 2625817 - DNA, 25 bp, Homo sapien
acatgagggatgtgtggctctactc

SEQ ID NO: 2625818 - DNA, 25 bp, Homo sapien
gctatgtgcctccataagatgagac

SEQ ID NO: 2625819 - DNA, 25 bp, Homo sapien
cattcaaatcggtgcctccagtgtc

SEQ ID NO: 2625820 - DNA, 25 bp, Homo sapien
gcaatttagtaatggaggcagtcac

SEQ ID NO: 2625821 - DNA, 25 bp, Homo sapien
gcctacattacaagggatgacaact

SEQ ID NO: 2625822 - DNA, 25 bp, Homo sapien
caggcttggatagcaaaaaggttca

SEQ ID NO: 2625823 - DNA, 25 bp, Homo sapien
gtgaagagtgataggactgttcctc

SEQ ID NO: 2625824 - DNA, 25 bp, Homo sapien
gctaatctatggacaacatggcagg

SEQ ID NO: 2625825 - DNA, 25 bp, Homo sapien
gagaagtgatgtgtcctaccttgaa

SEQ ID NO: 2625826 - DNA, 25 bp, Homo sapien
tagatgtaaggatgccaacctctgg

SEQ ID NO: 2625827 - DNA, 25 bp, Homo sapien
gatgcagtaggtaccaccaagttaa

SEQ ID NO: 2625828 - DNA, 25 bp, Homo sapien
taaccccaagccctgagaaagcatc

SEQ ID NO: 2625829 - DNA, 25 bp, Homo sapien
gaaaagtttctaagcttatgcacgc

SEQ ID NO: 2625830 - DNA, 25 bp, Homo sapien
catgacaagcctactgagacagaaa

SEQ ID NO: 2625831 - DNA, 25 bp, Homo sapien
taagccctggtgacctaacatgaca

SEQ ID NO: 2625832 - DNA, 25 bp, Homo sapien
taaaatcacccgtactgacaggagc

SEQ ID NO: 2625833 - DNA, 25 bp, Homo sapien
taatcttccatgtcagaatctgacg

SEQ ID NO: 2625834 - DNA, 25 bp, Homo sapien
tcctatgatccccagagcttcttct

SEQ ID NO: 2625835 - DNA, 25 bp, Homo sapien
gaatctgacggacttcggtttcgat

SEQ ID NO: 2625836 - DNA, 25 bp, Homo sapien
gtttcgataacgaccaccacctgaa

SEQ ID NO: 2625837 - DNA, 25 bp, Homo sapien
tgcaggactgacaacttaaaataat

SEQ ID NO: 2625838 - DNA, 25 bp, Homo sapien
taagaaatccgttgacactgatgaa

SEQ ID NO: 2625839 - DNA, 25 bp, Homo sapien
aagacttaaacgataatcactgcac

SEQ ID NO: 2625840 - DNA, 25 bp, Homo sapien
caaaaagaagtactgaaatgcagga

SEQ ID NO: 2625841 - DNA, 25 bp, Homo sapien
caggtgttagttttggttcatatgc

SEQ ID NO: 2625842 - DNA, 25 bp, Homo sapien
ttttggttcatatgctttccttttc

SEQ ID NO: 2625843 - DNA, 25 bp, Homo sapien
gttagttttggttcatatgctttcc

SEQ ID NO: 2625844 - DNA, 25 bp, Homo sapien
cttcaggtgttagttttggttcata

SEQ ID NO: 2625845 - DNA, 25 bp, Homo sapien
tctcacattacaagtagacatgtga

SEQ ID NO: 2625846 - DNA, 25 bp, Homo sapien
ctcacattacaagtagacatgtgaa

SEQ ID NO: 2625847 - DNA, 25 bp, Homo sapien
tcacattacaagtagacatgtgaag

SEQ ID NO: 2625848 - DNA, 25 bp, Homo sapien
caaacgcagtaaaatccatatcttc

SEQ ID NO: 2625849 - DNA, 25 bp, Homo sapien
gaatctcttaaaagttgaagagtcc

SEQ ID NO: 2625850 - DNA, 25 bp, Homo sapien
gcagtaaaatccatatcttccaaat

SEQ ID NO: 2625851 - DNA, 25 bp, Homo sapien
tgaatctcttaaaagttgaagagtc

SEQ ID NO: 2625852 - DNA, 25 bp, Homo sapien
ttattttagcagattcactgccaag

SEQ ID NO: 2625853 - DNA, 25 bp, Homo sapien
attaagctgatgttttcctaagagc

SEQ ID NO: 2625854 - DNA, 25 bp, Homo sapien
tcactgccaagttcattaagctgat

SEQ ID NO: 2625855 - DNA, 25 bp, Homo sapien
gttttcctaagagcagttcctgagg

SEQ ID NO: 2625856 - DNA, 25 bp, Homo sapien
tctccaagatatttaagactttcac

SEQ ID NO: 2625857 - DNA, 25 bp, Homo sapien
ccaagatatttaagactttcacagt

SEQ ID NO: 2625858 - DNA, 25 bp, Homo sapien
tccatgaggatctaatctgtaaaca

SEQ ID NO: 2625859 - DNA, 25 bp, Homo sapien
tctgtaaacaggatcatactgagga

SEQ ID NO: 2625860 - DNA, 25 bp, Homo sapien
catcctcaatgtacacagcttttgg

SEQ ID NO: 2625861 - DNA, 25 bp, Homo sapien
tgatagttgtaagacaagcatccgc

SEQ ID NO: 2625862 - DNA, 25 bp, Homo sapien
taagctgctaacaatgtcacaaact

SEQ ID NO: 2625863 - DNA, 25 bp, Homo sapien
gcaattctgataagctgctaacaat

SEQ ID NO: 2625864 - DNA, 25 bp, Homo sapien
gaagttgtatctctagcaattctga

SEQ ID NO: 2625865 - DNA, 25 bp, Homo sapien
attactattactctctgcttatggg

SEQ ID NO: 2625866 - DNA, 25 bp, Homo sapien
acaaaaaatggtgttattcccatag

SEQ ID NO: 2625867 - DNA, 25 bp, Homo sapien
aatgttttcagtatctaaggtaagc

SEQ ID NO: 2625868 - DNA, 25 bp, Homo sapien
ggtaagctgctctattttcctatca

SEQ ID NO: 2625869 - DNA, 25 bp, Homo sapien
gaagtcaaagagtacactagtttca

SEQ ID NO: 2625870 - DNA, 25 bp, Homo sapien
tataacattcttatagaagtcaaag

SEQ ID NO: 2625871 - DNA, 25 bp, Homo sapien
ggtaatcttgcaagtgaagtaaaaa

SEQ ID NO: 2625872 - DNA, 25 bp, Homo sapien
gctggttggtaatcttgcaagtgaa

SEQ ID NO: 2625873 - DNA, 25 bp, Homo sapien
cctcttgctggttggtaatcttgca

SEQ ID NO: 2625874 - DNA, 25 bp, Homo sapien
tgcaagtgaagtaaaaatttcttcc

SEQ ID NO: 2625875 - DNA, 25 bp, Homo sapien
ttccaacaggatgaacaagatcttc

SEQ ID NO: 2625876 - DNA, 25 bp, Homo sapien
catgctgttctgatgtaactgccta

SEQ ID NO: 2625877 - DNA, 25 bp, Homo sapien
caagatcttctcactgactagtggt

SEQ ID NO: 2625878 - DNA, 25 bp, Homo sapien
gctgagcatgctgtattccactaga

SEQ ID NO: 2625879 - DNA, 25 bp, Homo sapien
gatgatggtaagtgtaccacacact

SEQ ID NO: 2625880 - DNA, 25 bp, Homo sapien
cattagagtccttctctgatgatgg

SEQ ID NO: 2625881 - DNA, 25 bp, Homo sapien
gctgtaaccatctgaatatacatag

SEQ ID NO: 2625882 - DNA, 25 bp, Homo sapien
tgaatatacataggttctccatcca

SEQ ID NO: 2625883 - DNA, 25 bp, Homo sapien
cctcagcttgccgagagctgcgatt

SEQ ID NO: 2625884 - DNA, 25 bp, Homo sapien
cagaaatttaaagattaagctctcc

SEQ ID NO: 2625885 - DNA, 25 bp, Homo sapien
agagctgcgattgcaggagcgcacc

SEQ ID NO: 2625886 - DNA, 25 bp, Homo sapien
tcataatcctggtcagaacagaaag

SEQ ID NO: 2625887 - DNA, 25 bp, Homo sapien
tagtaatgacaacatcctggtcaat

SEQ ID NO: 2625888 - DNA, 25 bp, Homo sapien
gagttagtaatgacaacatcctggt

SEQ ID NO: 2625889 - DNA, 25 bp, Homo sapien
ggaagttttgggctgttcgcatagc

SEQ ID NO: 2625890 - DNA, 25 bp, Homo sapien
cgcatagctgtttcataagagttag

SEQ ID NO: 2625891 - DNA, 25 bp, Homo sapien
tgactgttgaaagaaggtcttgaac

SEQ ID NO: 2625892 - DNA, 25 bp, Homo sapien
cagcagctggccattcaggcttatt

SEQ ID NO: 2625893 - DNA, 25 bp, Homo sapien
acaaactaaggagtagttcagcagc

SEQ ID NO: 2625894 - DNA, 25 bp, Homo sapien
acagtggtctgtaatcttcttcacc

SEQ ID NO: 2625895 - DNA, 25 bp, Homo sapien
agagatgccactcttaaagccatct

SEQ ID NO: 2625896 - DNA, 25 bp, Homo sapien
ttagccgtgcagcaacagttccaag

SEQ ID NO: 2625897 - DNA, 25 bp, Homo sapien
aaagccatctctgttgacttgttac

SEQ ID NO: 2625898 - DNA, 25 bp, Homo sapien
gttttaaaatgcgttctatagatcc

SEQ ID NO: 2625899 - DNA, 25 bp, Homo sapien
caatgttggtgttacttgtcaaggg

SEQ ID NO: 2625900 - DNA, 25 bp, Homo sapien
taaaagccagcttcaaagggttctc

SEQ ID NO: 2625901 - DNA, 25 bp, Homo sapien
ggcatttctaccaacatggatatga

SEQ ID NO: 2625902 - DNA, 25 bp, Homo sapien
ggatcatacttggaaaatcactgca

SEQ ID NO: 2625903 - DNA, 25 bp, Homo sapien
ttgtaattgttggatttcatcttcc

SEQ ID NO: 2625904 - DNA, 25 bp, Homo sapien
cactagtgaaggatcagtctcagtg

SEQ ID NO: 2625905 - DNA, 25 bp, Homo sapien
catccaagtaatcaagcaatgcttt

SEQ ID NO: 2625906 - DNA, 25 bp, Homo sapien
tctcagtgttttcatccaagtaatc

SEQ ID NO: 2625907 - DNA, 25 bp, Homo sapien
tagtttaacactgagacacacctgt

SEQ ID NO: 2625908 - DNA, 25 bp, Homo sapien
taaaatgctgaaggtagaagacttc

SEQ ID NO: 2625909 - DNA, 25 bp, Homo sapien
gctgaagagcttagtagtatcccat

SEQ ID NO: 2625910 - DNA, 25 bp, Homo sapien
cagatgatgggtcaactaggaaagt

SEQ ID NO: 2625911 - DNA, 25 bp, Homo sapien
tcagctcgatgcataatttggccag

SEQ ID NO: 2625912 - DNA, 25 bp, Homo sapien
caatttcctttgcatgatgtgttcc

SEQ ID NO: 2625913 - DNA, 25 bp, Homo sapien
ccactgggctatatagaatttacga

SEQ ID NO: 2625914 - DNA, 25 bp, Homo sapien
gagttgtgtctcgaaaccactgggc

SEQ ID NO: 2625915 - DNA, 25 bp, Homo sapien
catagtccacagtatcagagttcat

SEQ ID NO: 2625916 - DNA, 25 bp, Homo sapien
cctcatggaggccaagtatcgaaca

SEQ ID NO: 2625917 - DNA, 25 bp, Homo sapien
gtatcgaacaatcaagcaagcatca

SEQ ID NO: 2625918 - DNA, 25 bp, Homo sapien
aaagctctgggcaaacggcctcatg

SEQ ID NO: 2625919 - DNA, 25 bp, Homo sapien
agacaaacacttcatggcttttgtt

SEQ ID NO: 2625920 - DNA, 25 bp, Homo sapien
aatactggggtctacagcaacaacc

SEQ ID NO: 2625921 - DNA, 25 bp, Homo sapien
ccttgctagaatactggggtctaca

SEQ ID NO: 2625922 - DNA, 25 bp, Homo sapien
gaacagcaattgcattttcaccaag

SEQ ID NO: 2625923 - DNA, 25 bp, Homo sapien
tctcggacactagtcgaattatcca

SEQ ID NO: 2625924 - DNA, 25 bp, Homo sapien
ggacaaatcgacctagtaattctac

SEQ ID NO: 2625925 - DNA, 25 bp, Homo sapien
gaattatccatcaatcgtccatgaa

SEQ ID NO: 2625926 - DNA, 25 bp, Homo sapien
caagctgaggtcgacaaaggacaaa

SEQ ID NO: 2625927 - DNA, 25 bp, Homo sapien
catcattgactctgcgaatcatttt

SEQ ID NO: 2625928 - DNA, 25 bp, Homo sapien
gatttttggaaatgttggttgttca

SEQ ID NO: 2625929 - DNA, 25 bp, Homo sapien
gactctgcgaatcatttttacacac

SEQ ID NO: 2625930 - DNA, 25 bp, Homo sapien
tctctgagaatctttattactcttt

SEQ ID NO: 2625931 - DNA, 25 bp, Homo sapien
gtcattgtgtggagttggagtaaac

SEQ ID NO: 2625932 - DNA, 25 bp, Homo sapien
cattgtgtggagttggagtaaacca

SEQ ID NO: 2625933 - DNA, 25 bp, Homo sapien
tgtggagttggagtaaaccagagtt

SEQ ID NO: 2625934 - DNA, 25 bp, Homo sapien
gttggagtaaaccagagtttctgga

SEQ ID NO: 2625935 - DNA, 25 bp, Homo sapien
tctttgcagattattacccttgggc

SEQ ID NO: 2625936 - DNA, 25 bp, Homo sapien
taggcatatgcgctgtgactggcaa

SEQ ID NO: 2625937 - DNA, 25 bp, Homo sapien
aaaaagtaggcattactatctttgc

SEQ ID NO: 2625938 - DNA, 25 bp, Homo sapien
tcacaggcatgattacagtatactg

SEQ ID NO: 2625939 - DNA, 25 bp, Homo sapien
atccagtatctctgcatgctgcaac

SEQ ID NO: 2625940 - DNA, 25 bp, Homo sapien
atatccagtatctctgcatgctgca

SEQ ID NO: 2625941 - DNA, 25 bp, Homo sapien
tatccagtatctctgcatgctgcaa

SEQ ID NO: 2625942 - DNA, 25 bp, Homo sapien
catatccagtatctctgcatgctgc

SEQ ID NO: 2625943 - DNA, 25 bp, Homo sapien
gatcaatagttttctagggccagga

SEQ ID NO: 2625944 - DNA, 25 bp, Homo sapien
tatgaccctgtaatcacattcctgg

SEQ ID NO: 2625945 - DNA, 25 bp, Homo sapien
gaaaactggtggatagaggaacaac

SEQ ID NO: 2625946 - DNA, 25 bp, Homo sapien
gccaggaagagaggatcaactgcaa

SEQ ID NO: 2625947 - DNA, 25 bp, Homo sapien
ctttagaaccactgatagggaccat

SEQ ID NO: 2625948 - DNA, 25 bp, Homo sapien
tttcaaggtaaactggagacttcag

SEQ ID NO: 2625949 - DNA, 25 bp, Homo sapien
agaatgatgggctctaccctcagag

SEQ ID NO: 2625950 - DNA, 25 bp, Homo sapien
taatatgtactcttctacgtaaggc

SEQ ID NO: 2625951 - DNA, 25 bp, Homo sapien
ggttatcaacaagttgagtacaagc

SEQ ID NO: 2625952 - DNA, 25 bp, Homo sapien
cagctagagattcctcatatttaag

SEQ ID NO: 2625953 - DNA, 25 bp, Homo sapien
tcacaggtttatatgaggaatcctc

SEQ ID NO: 2625954 - DNA, 25 bp, Homo sapien
taagaatgtgctcaactaggttatc

SEQ ID NO: 2625955 - DNA, 25 bp, Homo sapien
catttagtggtaaggtatggttgca

SEQ ID NO: 2625956 - DNA, 25 bp, Homo sapien
caagctaccaatcttccagaattca

SEQ ID NO: 2625957 - DNA, 25 bp, Homo sapien
tgaataagaacaaagtggttatgca

SEQ ID NO: 2625958 - DNA, 25 bp, Homo sapien
taaggtatggttgcatagtcattgc

SEQ ID NO: 2625959 - DNA, 25 bp, Homo sapien
cctgctttagcctgtcgaggagctg

SEQ ID NO: 2625960 - DNA, 25 bp, Homo sapien
cccaggcggaagtgcagtagcacag

SEQ ID NO: 2625961 - DNA, 25 bp, Homo sapien
ctttagcctgtcgaggagctgggac

SEQ ID NO: 2625962 - DNA, 25 bp, Homo sapien
ctcctgctttagcctgtcgaggagc

SEQ ID NO: 2625963 - DNA, 25 bp, Homo sapien
tagatcttcctcaatagtggcaaga

SEQ ID NO: 2625964 - DNA, 25 bp, Homo sapien
agataaccatgaaatcattttgcgt

SEQ ID NO: 2625965 - DNA, 25 bp, Homo sapien
gctctaggatttttgcaacattgca

SEQ ID NO: 2625966 - DNA, 25 bp, Homo sapien
tgatgatgagcttcattagatcttc

SEQ ID NO: 2625967 - DNA, 25 bp, Homo sapien
tgtgtcactttatttacaacagctc

SEQ ID NO: 2625968 - DNA, 25 bp, Homo sapien
catagtatctattgaaacaagccca

SEQ ID NO: 2625969 - DNA, 25 bp, Homo sapien
tgaaacaagcccacacaaatttaaa

SEQ ID NO: 2625970 - DNA, 25 bp, Homo sapien
gacagctcacacaatgttgcactac

SEQ ID NO: 2625971 - DNA, 25 bp, Homo sapien
tgaaaagggatctaagaagtgctgg

SEQ ID NO: 2625972 - DNA, 25 bp, Homo sapien
caaaatcaaaatgccgacatagtgc

SEQ ID NO: 2625973 - DNA, 25 bp, Homo sapien
tgccgacatagtgctccaacggtga

SEQ ID NO: 2625974 - DNA, 25 bp, Homo sapien
tgctccaacggtgaaaagggatcta

SEQ ID NO: 2625975 - DNA, 25 bp, Homo sapien
tcaatagttcaagtactttatcttt

SEQ ID NO: 2625976 - DNA, 25 bp, Homo sapien
tacatcaatagttcaagtactttat

SEQ ID NO: 2625977 - DNA, 25 bp, Homo sapien
catcaatagttcaagtactttatct

SEQ ID NO: 2625978 - DNA, 25 bp, Homo sapien
acatcaatagttcaagtactttatc

SEQ ID NO: 2625979 - DNA, 25 bp, Homo sapien
tcttcttgtaggtaggtctggaggt

SEQ ID NO: 2625980 - DNA, 25 bp, Homo sapien
tctatctgcctgctgcatacgtgta

SEQ ID NO: 2625981 - DNA, 25 bp, Homo sapien
actgaggagttcttatcagataaaa

SEQ ID NO: 2625982 - DNA, 25 bp, Homo sapien
tcgaacattagacttggatgctgaa

SEQ ID NO: 2625983 - DNA, 25 bp, Homo sapien
gataaagctgcatgatggaactact

SEQ ID NO: 2625984 - DNA, 25 bp, Homo sapien
caaagtggcgtacacttgactgggt

SEQ ID NO: 2625985 - DNA, 25 bp, Homo sapien
caagcacctgtttgagataaagctg

SEQ ID NO: 2625986 - DNA, 25 bp, Homo sapien
gatggaactactcatccctgaggaa

SEQ ID NO: 2625987 - DNA, 25 bp, Homo sapien
aaatcttgaagggtatagactctgc

SEQ ID NO: 2625988 - DNA, 25 bp, Homo sapien
tatactactacatcagcattggctg

SEQ ID NO: 2625989 - DNA, 25 bp, Homo sapien
cacagggaagaccacagtatgttta

SEQ ID NO: 2625990 - DNA, 25 bp, Homo sapien
taagactccaccctgttgaacagat

SEQ ID NO: 2625991 - DNA, 25 bp, Homo sapien
tgactcctttgtgtgaaattaaaaa

SEQ ID NO: 2625992 - DNA, 25 bp, Homo sapien
tttaaaaaggtgacagtctcaatgt

SEQ ID NO: 2625993 - DNA, 25 bp, Homo sapien
cactgcacctgactcctttgtgtga

SEQ ID NO: 2625994 - DNA, 25 bp, Homo sapien
atataataaaaagcacccaacaaag

SEQ ID NO: 2625995 - DNA, 25 bp, Homo sapien
taaaaagcaatgtgaaggccagaaa

SEQ ID NO: 2625996 - DNA, 25 bp, Homo sapien
cccttggttaactagcagaatctgc

SEQ ID NO: 2625997 - DNA, 25 bp, Homo sapien
aggctatagagaacgcccttggtta

SEQ ID NO: 2625998 - DNA, 25 bp, Homo sapien
tccagaaagcactggagcaccagca

SEQ ID NO: 2625999 - DNA, 25 bp, Homo sapien
agttgctgatcagccttgttccgca

SEQ ID NO: 2626000 - DNA, 25 bp, Homo sapien
ggtctgtgcccatagcaattaaata

SEQ ID NO: 2626001 - DNA, 25 bp, Homo sapien
agccttgttccgcatagcaggttct

SEQ ID NO: 2626002 - DNA, 25 bp, Homo sapien
tgggtctgtgcccatagcaattaaa

SEQ ID NO: 2626003 - DNA, 25 bp, Homo sapien
taagaaaggctcgtctgtgttggcg

SEQ ID NO: 2626004 - DNA, 25 bp, Homo sapien
taagacatcttcataccagccactg

SEQ ID NO: 2626005 - DNA, 25 bp, Homo sapien
tgtgaacacaaagcgctagaggact

SEQ ID NO: 2626006 - DNA, 25 bp, Homo sapien
tgttggcggtttccacggatcatgg

SEQ ID NO: 2626007 - DNA, 25 bp, Homo sapien
tatcaacacaaaccatcagggcact

SEQ ID NO: 2626008 - DNA, 25 bp, Homo sapien
ggcactcctcgtatagtgtcctata

SEQ ID NO: 2626009 - DNA, 25 bp, Homo sapien
cattgcattgtgagagctgggtttc

SEQ ID NO: 2626010 - DNA, 25 bp, Homo sapien
tcagggcactcaggatatactaacc

SEQ ID NO: 2626011 - DNA, 25 bp, Homo sapien
ccagtgtgaccacaatgctaaaaaa

SEQ ID NO: 2626012 - DNA, 25 bp, Homo sapien
ccagcctctactatccattcttttt

SEQ ID NO: 2626013 - DNA, 25 bp, Homo sapien
ctccagtgtgaccacaatgctaaaa

SEQ ID NO: 2626014 - DNA, 25 bp, Homo sapien
tctcccctactgttatcatagtaat

SEQ ID NO: 2626015 - DNA, 25 bp, Homo sapien
gctatatacaagagcatagtcacgt

SEQ ID NO: 2626016 - DNA, 25 bp, Homo sapien
gaatgactgcagtaggttactacca

SEQ ID NO: 2626017 - DNA, 25 bp, Homo sapien
gaaaacaggctagattgtctgctat

SEQ ID NO: 2626018 - DNA, 25 bp, Homo sapien
gcattataaacaacggctcttcctg

SEQ ID NO: 2626019 - DNA, 25 bp, Homo sapien
cattttccttactaggtgatgattt

SEQ ID NO: 2626020 - DNA, 25 bp, Homo sapien
tcactgtcgcttgactcattttcct

SEQ ID NO: 2626021 - DNA, 25 bp, Homo sapien
ttcttcttcactgtcgcttgactca

SEQ ID NO: 2626022 - DNA, 25 bp, Homo sapien
tcttcactgtcgcttgactcatttt

SEQ ID NO: 2626023 - DNA, 25 bp, Homo sapien
ttatatcgtcttctgaatctgaatc

SEQ ID NO: 2626024 - DNA, 25 bp, Homo sapien
tttatatcgtcttctgaatctgaat

SEQ ID NO: 2626025 - DNA, 25 bp, Homo sapien
ggacacatttgcaaattcgattaaa

SEQ ID NO: 2626026 - DNA, 25 bp, Homo sapien
ttgcaaattcgattaaaggagctga

SEQ ID NO: 2626027 - DNA, 25 bp, Homo sapien
caaattcgattaaaggagctgaatt

SEQ ID NO: 2626028 - DNA, 25 bp, Homo sapien
catttgcaaattcgattaaaggagc

SEQ ID NO: 2626029 - DNA, 25 bp, Homo sapien
gttgttttaacatgagaagtaataa

SEQ ID NO: 2626030 - DNA, 25 bp, Homo sapien
tgttttaacatgagaagtaataaaa

SEQ ID NO: 2626031 - DNA, 25 bp, Homo sapien
ttagccatgtcactccgcaggaagt

SEQ ID NO: 2626032 - DNA, 25 bp, Homo sapien
tcggtttatcgctttatcatatact

SEQ ID NO: 2626033 - DNA, 25 bp, Homo sapien
tacttttgcagattcagatggagag

SEQ ID NO: 2626034 - DNA, 25 bp, Homo sapien
tctagatactgttttactatactcc

SEQ ID NO: 2626035 - DNA, 25 bp, Homo sapien
cttaaagcatatgggaggatgtatg

SEQ ID NO: 2626036 - DNA, 25 bp, Homo sapien
aaaaaatgcagtataacaactatgt

SEQ ID NO: 2626037 - DNA, 25 bp, Homo sapien
tagaaatgacttaaagcatatggga

SEQ ID NO: 2626038 - DNA, 25 bp, Homo sapien
caaacagcattacaataaaaaatac

SEQ ID NO: 2626039 - DNA, 25 bp, Homo sapien
caaacacggtaagagaatgactgct

SEQ ID NO: 2626040 - DNA, 25 bp, Homo sapien
tgctctctgctaagacgatacaaga

SEQ ID NO: 2626041 - DNA, 25 bp, Homo sapien
cctgcggattcaacccacagtggat

SEQ ID NO: 2626042 - DNA, 25 bp, Homo sapien
cagagttttcagacccttggtccaa

SEQ ID NO: 2626043 - DNA, 25 bp, Homo sapien
tcagggtccagatgttccatgagaa

SEQ ID NO: 2626044 - DNA, 25 bp, Homo sapien
cagtgaggtaattgctttgttccga

SEQ ID NO: 2626045 - DNA, 25 bp, Homo sapien
ttgtgctagctgaaacctccccttc

SEQ ID NO: 2626046 - DNA, 25 bp, Homo sapien
ctcctctatcctccccatcactttc

SEQ ID NO: 2626047 - DNA, 25 bp, Homo sapien
tacgctgcgaaatacgttgactcct

SEQ ID NO: 2626048 - DNA, 25 bp, Homo sapien
gcgaaatacgttgactcctcctccg

SEQ ID NO: 2626049 - DNA, 25 bp, Homo sapien
gctgcgaaatacgttgactcctcct

SEQ ID NO: 2626050 - DNA, 25 bp, Homo sapien
gtaatacgctgcgaaatacgttgac

SEQ ID NO: 2626051 - DNA, 25 bp, Homo sapien
taagtattacattacttggtgtaca

SEQ ID NO: 2626052 - DNA, 25 bp, Homo sapien
ttaatagactgacatatataagcac

SEQ ID NO: 2626053 - DNA, 25 bp, Homo sapien
ttacttggtgtacatttaatagact

SEQ ID NO: 2626054 - DNA, 25 bp, Homo sapien
tataaacgggtaagtagagaatctc

SEQ ID NO: 2626055 - DNA, 25 bp, Homo sapien
tacatatgaaccatatagctacata

SEQ ID NO: 2626056 - DNA, 25 bp, Homo sapien
catatgaaccatatagctacataaa

SEQ ID NO: 2626057 - DNA, 25 bp, Homo sapien
atatacatatgaaccatatagctac

SEQ ID NO: 2626058 - DNA, 25 bp, Homo sapien
tatacatatgaaccatatagctaca

SEQ ID NO: 2626059 - DNA, 25 bp, Homo sapien
cagcgccaaggggttaacatatact

SEQ ID NO: 2626060 - DNA, 25 bp, Homo sapien
gccaaggggttaacatatacttgta

SEQ ID NO: 2626061 - DNA, 25 bp, Homo sapien
cgccagcgccaaggggttaacatat

SEQ ID NO: 2626062 - DNA, 25 bp, Homo sapien
ccgccagcgccaaggggttaacata

SEQ ID NO: 2626063 - DNA, 25 bp, Homo sapien
atcccttgacgccgggagttgggat

SEQ ID NO: 2626064 - DNA, 25 bp, Homo sapien
gagttgggatttcccggcacacttc

SEQ ID NO: 2626065 - DNA, 25 bp, Homo sapien
agtttgcggccatcacggcgcttag

SEQ ID NO: 2626066 - DNA, 25 bp, Homo sapien
ttggacagcaaatagcgatgacatc

SEQ ID NO: 2626067 - DNA, 25 bp, Homo sapien
tctacccaaggcaccagtttgcggc

SEQ ID NO: 2626068 - DNA, 25 bp, Homo sapien
agtccaggagccactgtaggagcct

SEQ ID NO: 2626069 - DNA, 25 bp, Homo sapien
agctggaagtcccatccttggcggc

SEQ ID NO: 2626070 - DNA, 25 bp, Homo sapien
ttagctggaagtcccatccttggcg

SEQ ID NO: 2626071 - DNA, 25 bp, Homo sapien
ctggaagtcccatccttggcggcat

SEQ ID NO: 2626072 - DNA, 25 bp, Homo sapien
ggaagtcccatccttggcggcatac

SEQ ID NO: 2626073 - DNA, 25 bp, Homo sapien
ctataatacagtgggagtaaaaatg

SEQ ID NO: 2626074 - DNA, 25 bp, Homo sapien
agggagctcccacaaaaatgtttgc

SEQ ID NO: 2626075 - DNA, 25 bp, Homo sapien
tgtttctgctgcacaacagcgaagg

SEQ ID NO: 2626076 - DNA, 25 bp, Homo sapien
ccaggttccacttactcttcataaa

SEQ ID NO: 2626077 - DNA, 25 bp, Homo sapien
ctccaagaacactttattaagaaca

SEQ ID NO: 2626078 - DNA, 25 bp, Homo sapien
tattcgctccaccagattacctggg

SEQ ID NO: 2626079 - DNA, 25 bp, Homo sapien
aaaaactccttctgcagataggtca

SEQ ID NO: 2626080 - DNA, 25 bp, Homo sapien
taggtcatagatactgcatgctttt

SEQ ID NO: 2626081 - DNA, 25 bp, Homo sapien
ttgcagtattcgctccaccagatta

SEQ ID NO: 2626082 - DNA, 25 bp, Homo sapien
tctagttctaaaataaccggacatc

SEQ ID NO: 2626083 - DNA, 25 bp, Homo sapien
tgcaggatacaataaaaccctggag

SEQ ID NO: 2626084 - DNA, 25 bp, Homo sapien
cctgatttagtcaagatatctgcag

SEQ ID NO: 2626085 - DNA, 25 bp, Homo sapien
gacaactgttcccaagacttatgat

SEQ ID NO: 2626086 - DNA, 25 bp, Homo sapien
aatttctaatgagtggcaaacacag

SEQ ID NO: 2626087 - DNA, 25 bp, Homo sapien
aattactctgaacaggattcccaag

SEQ ID NO: 2626088 - DNA, 25 bp, Homo sapien
tatggccaactgaggcaacagaaga

SEQ ID NO: 2626089 - DNA, 25 bp, Homo sapien
caattagcttagagtagtgagacac

SEQ ID NO: 2626090 - DNA, 25 bp, Homo sapien
tatgctgctcccactttcagaattc

SEQ ID NO: 2626091 - DNA, 25 bp, Homo sapien
gctgctcccactttcagaattccat

SEQ ID NO: 2626092 - DNA, 25 bp, Homo sapien
cccactttcagaattccatccccca

SEQ ID NO: 2626093 - DNA, 25 bp, Homo sapien
ccactttcagaattccatcccccat

SEQ ID NO: 2626094 - DNA, 25 bp, Homo sapien
aagacacgaagatctgccagctttg

SEQ ID NO: 2626095 - DNA, 25 bp, Homo sapien
catcttcaagacacgaagatctgcc

SEQ ID NO: 2626096 - DNA, 25 bp, Homo sapien
ctagcctctagcttgaatatccgct

SEQ ID NO: 2626097 - DNA, 25 bp, Homo sapien
agcctctagcttgaatatccgctca

SEQ ID NO: 2626098 - DNA, 25 bp, Homo sapien
tcagatgcttcttgggaccaccagc

SEQ ID NO: 2626099 - DNA, 25 bp, Homo sapien
gatgcttcttgggaccaccagccat

SEQ ID NO: 2626100 - DNA, 25 bp, Homo sapien
cagatgcttcttgggaccaccagcc

SEQ ID NO: 2626101 - DNA, 25 bp, Homo sapien
ttcagatgcttcttgggaccaccag

SEQ ID NO: 2626102 - DNA, 25 bp, Homo sapien
ccaatgctttggagttgctacctac

SEQ ID NO: 2626103 - DNA, 25 bp, Homo sapien
tggatggacaaggagcaaacacact

SEQ ID NO: 2626104 - DNA, 25 bp, Homo sapien
gatggacaaggagcaaacacactgg

SEQ ID NO: 2626105 - DNA, 25 bp, Homo sapien
aacacactggtcaatttatccagca

SEQ ID NO: 2626106 - DNA, 25 bp, Homo sapien
ctggtggatggacaaggagcaaaca

SEQ ID NO: 2626107 - DNA, 25 bp, Homo sapien
aatgatgagggggagacactctctc

SEQ ID NO: 2626108 - DNA, 25 bp, Homo sapien
gagacactctctcaacttgtgagga

SEQ ID NO: 2626109 - DNA, 25 bp, Homo sapien
ggagacactctctcaacttgtgagg

SEQ ID NO: 2626110 - DNA, 25 bp, Homo sapien
aggaaaatgatgagggggagacact

SEQ ID NO: 2626111 - DNA, 25 bp, Homo sapien
tttgtacttagcctcctcgggtgta

SEQ ID NO: 2626112 - DNA, 25 bp, Homo sapien
caaccttaatgaacccctgcatgca

SEQ ID NO: 2626113 - DNA, 25 bp, Homo sapien
aatttgtacttagcctcctcgggtg

SEQ ID NO: 2626114 - DNA, 25 bp, Homo sapien
atcagttcgtaccttgccatcaacc

SEQ ID NO: 2626115 - DNA, 25 bp, Homo sapien
atgaggggatcaaggtagcggatgc

SEQ ID NO: 2626116 - DNA, 25 bp, Homo sapien
gggatcaaggtagcggatgctgtga

SEQ ID NO: 2626117 - DNA, 25 bp, Homo sapien
cagtgtaccagtgttgaacttgatg

SEQ ID NO: 2626118 - DNA, 25 bp, Homo sapien
caaggtagcggatgctgtgagcatc

SEQ ID NO: 2626119 - DNA, 25 bp, Homo sapien
ttggtgatcacaccagttattccca

SEQ ID NO: 2626120 - DNA, 25 bp, Homo sapien
acaccagttattcccaggttagcac

SEQ ID NO: 2626121 - DNA, 25 bp, Homo sapien
ctttcatgtgaaccacgtcaaaaga

SEQ ID NO: 2626122 - DNA, 25 bp, Homo sapien
gatcacaccagttattcccaggtta

SEQ ID NO: 2626123 - DNA, 25 bp, Homo sapien
tgttggaaagtcgagtagcaaagct

SEQ ID NO: 2626124 - DNA, 25 bp, Homo sapien
ggaaagtcgagtagcaaagctgttg

SEQ ID NO: 2626125 - DNA, 25 bp, Homo sapien
aatgttggaaagtcgagtagcaaag

SEQ ID NO: 2626126 - DNA, 25 bp, Homo sapien
aaaaatgttggaaagtcgagtagca

SEQ ID NO: 2626127 - DNA, 25 bp, Homo sapien
tagtgaggcagataccctttcctcg

SEQ ID NO: 2626128 - DNA, 25 bp, Homo sapien
actgctctgtttggcccccagtctt

SEQ ID NO: 2626129 - DNA, 25 bp, Homo sapien
ctttcctcggggaagagaaatccat

SEQ ID NO: 2626130 - DNA, 25 bp, Homo sapien
ctctctcttcagcaatagtgaggca

SEQ ID NO: 2626131 - DNA, 25 bp, Homo sapien
taattatgtacaaagatttaacacg

SEQ ID NO: 2626132 - DNA, 25 bp, Homo sapien
ttcctattaattcctgccacattat

SEQ ID NO: 2626133 - DNA, 25 bp, Homo sapien
atttaacacgtcacccagggaccat

SEQ ID NO: 2626134 - DNA, 25 bp, Homo sapien
gtacaaagatttaacacgtcaccca

SEQ ID NO: 2626135 - DNA, 25 bp, Homo sapien
aattcactgtgcaatcacaagtatc

SEQ ID NO: 2626136 - DNA, 25 bp, Homo sapien
gccaaatgagattggtggcaaatat

SEQ ID NO: 2626137 - DNA, 25 bp, Homo sapien
tatcaataacagaataggccaagtg

SEQ ID NO: 2626138 - DNA, 25 bp, Homo sapien
gaaccccagttctcgagatacttta

SEQ ID NO: 2626139 - DNA, 25 bp, Homo sapien
ggagatactaccaacacaaacccag

SEQ ID NO: 2626140 - DNA, 25 bp, Homo sapien
catagaatgctgaagaaaactaccc

SEQ ID NO: 2626141 - DNA, 25 bp, Homo sapien
cacataatttaagagcctagaggag

SEQ ID NO: 2626142 - DNA, 25 bp, Homo sapien
gcatcactgaggtacagactaggca

SEQ ID NO: 2626143 - DNA, 25 bp, Homo sapien
catagagaccactgaggaggctact

SEQ ID NO: 2626144 - DNA, 25 bp, Homo sapien
gaggctactaaaatctgacctggga

SEQ ID NO: 2626145 - DNA, 25 bp, Homo sapien
taaggcaaaggtataactaggtctg

SEQ ID NO: 2626146 - DNA, 25 bp, Homo sapien
tactcagtgactaggtgggtaaaag

SEQ ID NO: 2626147 - DNA, 25 bp, Homo sapien
catctagcagttccatcgtctgcag

SEQ ID NO: 2626148 - DNA, 25 bp, Homo sapien
tcaaacagcaaagcgatcatctagc

SEQ ID NO: 2626149 - DNA, 25 bp, Homo sapien
ggctcaggttggacatacttatata

SEQ ID NO: 2626150 - DNA, 25 bp, Homo sapien
aatgatcttctacaggaattacctg

SEQ ID NO: 2626151 - DNA, 25 bp, Homo sapien
acccggagactagggacagaaggcg

SEQ ID NO: 2626152 - DNA, 25 bp, Homo sapien
ttcgcggttctgaggaatgagtgag

SEQ ID NO: 2626153 - DNA, 25 bp, Homo sapien
gtgacccagtcacgaatcaaaggcg

SEQ ID NO: 2626154 - DNA, 25 bp, Homo sapien
aagggtgctgaacgctctctgcctt

SEQ ID NO: 2626155 - DNA, 25 bp, Homo sapien
acacatcagccacggggagcatgtt

SEQ ID NO: 2626156 - DNA, 25 bp, Homo sapien
aagttgtatcttgagtgtttccagt

SEQ ID NO: 2626157 - DNA, 25 bp, Homo sapien
tcagccacggggagcatgttggact

SEQ ID NO: 2626158 - DNA, 25 bp, Homo sapien
tgtatcttgagtgtttccagtatac

SEQ ID NO: 2626159 - DNA, 25 bp, Homo sapien
ttgtctgagtttccatattacaact

SEQ ID NO: 2626160 - DNA, 25 bp, Homo sapien
aacttgatacgctgagggtaagcat

SEQ ID NO: 2626161 - DNA, 25 bp, Homo sapien
acttgatacgctgagggtaagcatc

SEQ ID NO: 2626162 - DNA, 25 bp, Homo sapien
caactgtgtagtatgctcaatttca

SEQ ID NO: 2626163 - DNA, 25 bp, Homo sapien
tgctcttttcccgaataacaagggc

SEQ ID NO: 2626164 - DNA, 25 bp, Homo sapien
tagtatctgggccttcaactgtgta

SEQ ID NO: 2626165 - DNA, 25 bp, Homo sapien
cagagcttgtttgcggctttcgaac

SEQ ID NO: 2626166 - DNA, 25 bp, Homo sapien
gtaaagacccgctttctgctccgga

SEQ ID NO: 2626167 - DNA, 25 bp, Homo sapien
gatgcaaccgtacctgctagaactt

SEQ ID NO: 2626168 - DNA, 25 bp, Homo sapien
tacagctgcgcccatatgaagcata

SEQ ID NO: 2626169 - DNA, 25 bp, Homo sapien
ccattggcagaatgatggatcacag

SEQ ID NO: 2626170 - DNA, 25 bp, Homo sapien
aagttagaagctgggcagcaaacat

SEQ ID NO: 2626171 - DNA, 25 bp, Homo sapien
ttcagagttttatctgttgatagag

SEQ ID NO: 2626172 - DNA, 25 bp, Homo sapien
atctgttgatagagaaacatttaca

SEQ ID NO: 2626173 - DNA, 25 bp, Homo sapien
tgttatgtaatttctcatggtatgt

SEQ ID NO: 2626174 - DNA, 25 bp, Homo sapien
ccacctgccttggcctccctgctgg

SEQ ID NO: 2626175 - DNA, 25 bp, Homo sapien
gggattatcggcatatgccaccaca

SEQ ID NO: 2626176 - DNA, 25 bp, Homo sapien
acctgccttggcctccctgctggga

SEQ ID NO: 2626177 - DNA, 25 bp, Homo sapien
attatcggcatatgccaccacacct

SEQ ID NO: 2626178 - DNA, 25 bp, Homo sapien
actgttctagcatagtatctgaaac

SEQ ID NO: 2626179 - DNA, 25 bp, Homo sapien
gaaacataggaggtgatttatgact

SEQ ID NO: 2626180 - DNA, 25 bp, Homo sapien
catattatacagaggccattactca

SEQ ID NO: 2626181 - DNA, 25 bp, Homo sapien
aattgggacaagttgatctttataa

SEQ ID NO: 2626182 - DNA, 25 bp, Homo sapien
aggcgggaagatggcctaaaccttg

SEQ ID NO: 2626183 - DNA, 25 bp, Homo sapien
gtgtgcgtgtgtttgagatagggcc

SEQ ID NO: 2626184 - DNA, 25 bp, Homo sapien
tgtgcgtgtgtttgagatagggcct

SEQ ID NO: 2626185 - DNA, 25 bp, Homo sapien
gtccacctgctatctagccatctcc

SEQ ID NO: 2626186 - DNA, 25 bp, Homo sapien
cttctgtccacctgctatctagcca

SEQ ID NO: 2626187 - DNA, 25 bp, Homo sapien
ctgtcgggcaggtccgcgaccttcc

SEQ ID NO: 2626188 - DNA, 25 bp, Homo sapien
tacatccccactacccagtccgggc

SEQ ID NO: 2626189 - DNA, 25 bp, Homo sapien
gcacccggccctggtacatccccac

SEQ ID NO: 2626190 - DNA, 25 bp, Homo sapien
tgtcgggcaggtccgcgaccttccg

SEQ ID NO: 2626191 - DNA, 25 bp, Homo sapien
tggcctcctcgtaagctccccggac

SEQ ID NO: 2626192 - DNA, 25 bp, Homo sapien
ctggcctcctcgtaagctccccgga

SEQ ID NO: 2626193 - DNA, 25 bp, Homo sapien
atcctggcctcctcgtaagctcccc

SEQ ID NO: 2626194 - DNA, 25 bp, Homo sapien
tcctggcctcctcgtaagctccccg

SEQ ID NO: 2626195 - DNA, 25 bp, Homo sapien
tgcccctggcggaggtaactgcccg

SEQ ID NO: 2626196 - DNA, 25 bp, Homo sapien
caggacgcaggctcgcgtcagggct

SEQ ID NO: 2626197 - DNA, 25 bp, Homo sapien
gcctagccttctcgcgcctgactgg

SEQ ID NO: 2626198 - DNA, 25 bp, Homo sapien
gcagctgtcggcctggcgtcttcac

SEQ ID NO: 2626199 - DNA, 25 bp, Homo sapien
ggcagcttagagggcccgggcggag

SEQ ID NO: 2626200 - DNA, 25 bp, Homo sapien
tccgaggaacgcgttaactgggaga

SEQ ID NO: 2626201 - DNA, 25 bp, Homo sapien
gaacgcgttaactgggagaagtgaa

SEQ ID NO: 2626202 - DNA, 25 bp, Homo sapien
ctagcagcgtccgaggaacgcgtta

SEQ ID NO: 2626203 - DNA, 25 bp, Homo sapien
accccttattttcgggtctgtgcag

SEQ ID NO: 2626204 - DNA, 25 bp, Homo sapien
tgttggtcggttattaagcggctcc

SEQ ID NO: 2626205 - DNA, 25 bp, Homo sapien
gtgagccccgcccaatgcctgtgcg

SEQ ID NO: 2626206 - DNA, 25 bp, Homo sapien
tctgtgcagggtccccgctaggaag

SEQ ID NO: 2626207 - DNA, 25 bp, Homo sapien
tcggaaaatgccttcttcagtgttc

SEQ ID NO: 2626208 - DNA, 25 bp, Homo sapien
gagaataagtccgtaggacagtgag

SEQ ID NO: 2626209 - DNA, 25 bp, Homo sapien
gaggcgaaaacagtgcggagaataa

SEQ ID NO: 2626210 - DNA, 25 bp, Homo sapien
gaacagggcgaaggaggcgaaaaca

SEQ ID NO: 2626211 - DNA, 25 bp, Homo sapien
cagggccattttcggtgcagaacat

SEQ ID NO: 2626212 - DNA, 25 bp, Homo sapien
gagctctcgggctgcctgcttgtga

SEQ ID NO: 2626213 - DNA, 25 bp, Homo sapien
ggtcctgccttcaaaaacaggccag

SEQ ID NO: 2626214 - DNA, 25 bp, Homo sapien
gaggccttcacatttaagctacaca

SEQ ID NO: 2626215 - DNA, 25 bp, Homo sapien
ggctgagctgccagaatgccatccg

SEQ ID NO: 2626216 - DNA, 25 bp, Homo sapien
tagcacggcttatgtaaaatgttcg

SEQ ID NO: 2626217 - DNA, 25 bp, Homo sapien
gacttttatgctaactctagcacgg

SEQ ID NO: 2626218 - DNA, 25 bp, Homo sapien
atgcagccagttcgcctaccctgta

SEQ ID NO: 2626219 - DNA, 25 bp, Homo sapien
ttacagtaaacattgccggatacat

SEQ ID NO: 2626220 - DNA, 25 bp, Homo sapien
taaataaacgtgtggagcaatcaac

SEQ ID NO: 2626221 - DNA, 25 bp, Homo sapien
tatttctaggtctaatggccacaca

SEQ ID NO: 2626222 - DNA, 25 bp, Homo sapien
tgccggatacatttccatacgtttt

SEQ ID NO: 2626223 - DNA, 25 bp, Homo sapien
ggctaagcagatccattcccataat

SEQ ID NO: 2626224 - DNA, 25 bp, Homo sapien
gtcctctaacaactggttttgtcag

SEQ ID NO: 2626225 - DNA, 25 bp, Homo sapien
tacctggttgagcaggtgataaaac

SEQ ID NO: 2626226 - DNA, 25 bp, Homo sapien
gagaattgacatagctatatacctg

SEQ ID NO: 2626227 - DNA, 25 bp, Homo sapien
ttaaacttgcagagtgcaaacttgc

SEQ ID NO: 2626228 - DNA, 25 bp, Homo sapien
taaatatggagttataaccagctac

SEQ ID NO: 2626229 - DNA, 25 bp, Homo sapien
ctctgaatgttgatctctagttgga

SEQ ID NO: 2626230 - DNA, 25 bp, Homo sapien
gagtgcttcactattaatctctgaa

SEQ ID NO: 2626231 - DNA, 25 bp, Homo sapien
ggcctcagcgcctggcgggttattc

SEQ ID NO: 2626232 - DNA, 25 bp, Homo sapien
agcgcctggcgggttattcttttat

SEQ ID NO: 2626233 - DNA, 25 bp, Homo sapien
gcctggcgggttattcttttatgta

SEQ ID NO: 2626234 - DNA, 25 bp, Homo sapien
gcctcagcgcctggcgggttattct

SEQ ID NO: 2626235 - DNA, 25 bp, Homo sapien
actgcaggggaacttgccaataact

SEQ ID NO: 2626236 - DNA, 25 bp, Homo sapien
aactgcaggggaacttgccaataac

SEQ ID NO: 2626237 - DNA, 25 bp, Homo sapien
cttcgctgggcccagagcgctccat

SEQ ID NO: 2626238 - DNA, 25 bp, Homo sapien
gaaccccgtgaagcccatggtgacc

SEQ ID NO: 2626239 - DNA, 25 bp, Homo sapien
cgaaccccgtgaagcccatggtgac

SEQ ID NO: 2626240 - DNA, 25 bp, Homo sapien
cagtgttttgcgacttctttccaca

SEQ ID NO: 2626241 - DNA, 25 bp, Homo sapien
ccagtgttttgcgacttctttccac

SEQ ID NO: 2626242 - DNA, 25 bp, Homo sapien
ttccacagctgtccttcgagtttgt

SEQ ID NO: 2626243 - DNA, 25 bp, Homo sapien
ctgtccttcgagtttgttcaaacat

SEQ ID NO: 2626244 - DNA, 25 bp, Homo sapien
gaggatgttggctcaatatcttcat

SEQ ID NO: 2626245 - DNA, 25 bp, Homo sapien
cttgaggatgttggctcaatatctt

SEQ ID NO: 2626246 - DNA, 25 bp, Homo sapien
ctctgaccacatttgatcttgagga

SEQ ID NO: 2626247 - DNA, 25 bp, Homo sapien
tggaagatgatttggagcaatctct

SEQ ID NO: 2626248 - DNA, 25 bp, Homo sapien
gtaaaggagggccaattaactcatc

SEQ ID NO: 2626249 - DNA, 25 bp, Homo sapien
ttaactcatcatcagaagagtcaga

SEQ ID NO: 2626250 - DNA, 25 bp, Homo sapien
actcatcatcagaagagtcagaact

SEQ ID NO: 2626251 - DNA, 25 bp, Homo sapien
gaagagtcagaactctgttcacttt

SEQ ID NO: 2626252 - DNA, 25 bp, Homo sapien
tggaggtaaaggaccgaggatatct

SEQ ID NO: 2626253 - DNA, 25 bp, Homo sapien
gtaaaggaccgaggatatcttcctc

SEQ ID NO: 2626254 - DNA, 25 bp, Homo sapien
aaaggaccgaggatatcttcctcca

SEQ ID NO: 2626255 - DNA, 25 bp, Homo sapien
gaccgaggatatcttcctccataaa

SEQ ID NO: 2626256 - DNA, 25 bp, Homo sapien
tgtaaacactacaccggcctgactt

SEQ ID NO: 2626257 - DNA, 25 bp, Homo sapien
ggcccatctctccctaactttatta

SEQ ID NO: 2626258 - DNA, 25 bp, Homo sapien
gtacagtggtacgatttttagctcg

SEQ ID NO: 2626259 - DNA, 25 bp, Homo sapien
cttacttaaatgttatgtcttgaaa

SEQ ID NO: 2626260 - DNA, 25 bp, Homo sapien
ttcatgattataagagaagtagtca

SEQ ID NO: 2626261 - DNA, 25 bp, Homo sapien
tttcatgattataagagaagtagtc

SEQ ID NO: 2626262 - DNA, 25 bp, Homo sapien
ttttcatgattataagagaagtagt

SEQ ID NO: 2626263 - DNA, 25 bp, Homo sapien
tcatgattataagagaagtagtcaa

SEQ ID NO: 2626264 - DNA, 25 bp, Homo sapien
caccctgatatctccacagttctgt

SEQ ID NO: 2626265 - DNA, 25 bp, Homo sapien
tcaccctgatatctccacagttctg

SEQ ID NO: 2626266 - DNA, 25 bp, Homo sapien
ccctgatatctccacagttctgtta

SEQ ID NO: 2626267 - DNA, 25 bp, Homo sapien
ttcaccctgatatctccacagttct

SEQ ID NO: 2626268 - DNA, 25 bp, Homo sapien
tggaactgtgaacactaccttgtca

SEQ ID NO: 2626269 - DNA, 25 bp, Homo sapien
ggccatgaacactccaccacagtaa

SEQ ID NO: 2626270 - DNA, 25 bp, Homo sapien
cattcccgcattttgtttaagaaag

SEQ ID NO: 2626271 - DNA, 25 bp, Homo sapien
caccaccttggtagcaatcaaaaac

SEQ ID NO: 2626272 - DNA, 25 bp, Homo sapien
cgagtcaggaatcttgtgaacagga

SEQ ID NO: 2626273 - DNA, 25 bp, Homo sapien
tatctcatgcgagtcaggaatcttg

SEQ ID NO: 2626274 - DNA, 25 bp, Homo sapien
gcttcagcgttatctcatgcgagtc

SEQ ID NO: 2626275 - DNA, 25 bp, Homo sapien
gttttagtgccatgcttcagcgtta

SEQ ID NO: 2626276 - DNA, 25 bp, Homo sapien
tatatgtagctttctctcaaagcag

SEQ ID NO: 2626277 - DNA, 25 bp, Homo sapien
caaagcagagagtccctagatctac

SEQ ID NO: 2626278 - DNA, 25 bp, Homo sapien
tcattgttcctaagctatatgtagc

SEQ ID NO: 2626279 - DNA, 25 bp, Homo sapien
ttcctaggtccaattcacacgtcaa

SEQ ID NO: 2626280 - DNA, 25 bp, Homo sapien
ctgagggatccagacccaaagcaga

SEQ ID NO: 2626281 - DNA, 25 bp, Homo sapien
tgagggatccagacccaaagcagac

SEQ ID NO: 2626282 - DNA, 25 bp, Homo sapien
gagggatccagacccaaagcagaca

SEQ ID NO: 2626283 - DNA, 25 bp, Homo sapien
agggatccagacccaaagcagacac

SEQ ID NO: 2626284 - DNA, 25 bp, Homo sapien
agtcatatcctcctgtcaccaaacg

SEQ ID NO: 2626285 - DNA, 25 bp, Homo sapien
atatcctcctgtcaccaaacgggca

SEQ ID NO: 2626286 - DNA, 25 bp, Homo sapien
aagcatccattccagcaaaatccca

SEQ ID NO: 2626287 - DNA, 25 bp, Homo sapien
tcatatcctcctgtcaccaaacggg

SEQ ID NO: 2626288 - DNA, 25 bp, Homo sapien
gtgaaacagctagacaatacatgcc

SEQ ID NO: 2626289 - DNA, 25 bp, Homo sapien
gataaagcctttgatattccacagg

SEQ ID NO: 2626290 - DNA, 25 bp, Homo sapien
gagggtgagcaagcgttaccacctg

SEQ ID NO: 2626291 - DNA, 25 bp, Homo sapien
ggtgacataaccgattcaggaagaa

SEQ ID NO: 2626292 - DNA, 25 bp, Homo sapien
tcagcctctgaagtaaccaggatta

SEQ ID NO: 2626293 - DNA, 25 bp, Homo sapien
gcatcctgcagtatcaaaaattaag

SEQ ID NO: 2626294 - DNA, 25 bp, Homo sapien
gcctggagcatcctgcagtatcaaa

SEQ ID NO: 2626295 - DNA, 25 bp, Homo sapien
tgcgcccggcctggagcatcctgca

SEQ ID NO: 2626296 - DNA, 25 bp, Homo sapien
aaaacttcctatgcaactcaacctg

SEQ ID NO: 2626297 - DNA, 25 bp, Homo sapien
taacacaatagcttcagatatcatg

SEQ ID NO: 2626298 - DNA, 25 bp, Homo sapien
tacactgagaaactataacaccaag

SEQ ID NO: 2626299 - DNA, 25 bp, Homo sapien
tggcaaccttaatatgaaacaagat

SEQ ID NO: 2626300 - DNA, 25 bp, Homo sapien
tctcctgtgttactatactgtaatg

SEQ ID NO: 2626301 - DNA, 25 bp, Homo sapien
tgtgttactatactgtaatgacttg

SEQ ID NO: 2626302 - DNA, 25 bp, Homo sapien
cctgtgttactatactgtaatgact

SEQ ID NO: 2626303 - DNA, 25 bp, Homo sapien
tgttactatactgtaatgacttgat

SEQ ID NO: 2626304 - DNA, 25 bp, Homo sapien
tgagagcttccagatacaacaagaa

SEQ ID NO: 2626305 - DNA, 25 bp, Homo sapien
aaaaccatctctgtcaatcaccttg

SEQ ID NO: 2626306 - DNA, 25 bp, Homo sapien
cttggtgttggccatgtccacaata

SEQ ID NO: 2626307 - DNA, 25 bp, Homo sapien
tactggtctccttttatacattcca

SEQ ID NO: 2626308 - DNA, 25 bp, Homo sapien
agactaatacaataagttgatacca

SEQ ID NO: 2626309 - DNA, 25 bp, Homo sapien
tacaataagttgataccagtagagt

SEQ ID NO: 2626310 - DNA, 25 bp, Homo sapien
taatacaataagttgataccagtag

SEQ ID NO: 2626311 - DNA, 25 bp, Homo sapien
aataagttgataccagtagagtggg

SEQ ID NO: 2626312 - DNA, 25 bp, Homo sapien
ttcttatatgctttccctacgctgg

SEQ ID NO: 2626313 - DNA, 25 bp, Homo sapien
tataacctcttatacagtgtgatgg

SEQ ID NO: 2626314 - DNA, 25 bp, Homo sapien
tcagttcctccaatatgttcagctc

SEQ ID NO: 2626315 - DNA, 25 bp, Homo sapien
gctctgctccatatcagggccttct

SEQ ID NO: 2626316 - DNA, 25 bp, Homo sapien
tctgctttcattttacctcatgtgc

SEQ ID NO: 2626317 - DNA, 25 bp, Homo sapien
cactgtcgggggaacagcacgaact

SEQ ID NO: 2626318 - DNA, 25 bp, Homo sapien
catagcaatcagtataatcccttaa

SEQ ID NO: 2626319 - DNA, 25 bp, Homo sapien
tatagttctaacgtaggaacagaaa

SEQ ID NO: 2626320 - DNA, 25 bp, Homo sapien
cagtatgaagcattgctgtatgacc

SEQ ID NO: 2626321 - DNA, 25 bp, Homo sapien
agtcataaattctccctttattttg

SEQ ID NO: 2626322 - DNA, 25 bp, Homo sapien
gggatgccatgagccagtatgaagc

SEQ ID NO: 2626323 - DNA, 25 bp, Homo sapien
ttattttgggatgccatgagccagt

SEQ ID NO: 2626324 - DNA, 25 bp, Homo sapien
tacgaagtgcattcctgtgaactac

SEQ ID NO: 2626325 - DNA, 25 bp, Homo sapien
gattcacctaaataataccacctat

SEQ ID NO: 2626326 - DNA, 25 bp, Homo sapien
caaggcaaatttaagtatcagaaag

SEQ ID NO: 2626327 - DNA, 25 bp, Homo sapien
ttgtatagattgacaaacttcagtt

SEQ ID NO: 2626328 - DNA, 25 bp, Homo sapien
gcatgcgtcgcatagttctcctgcc

SEQ ID NO: 2626329 - DNA, 25 bp, Homo sapien
gtgcatgcgtcgcatagttctcctg

SEQ ID NO: 2626330 - DNA, 25 bp, Homo sapien
tgcatgcgtcgcatagttctcctgc

SEQ ID NO: 2626331 - DNA, 25 bp, Homo sapien
gagcttctgccgagaaatcagctgt

SEQ ID NO: 2626332 - DNA, 25 bp, Homo sapien
cttctgccgagaaatcagctgttat

SEQ ID NO: 2626333 - DNA, 25 bp, Homo sapien
tagagcttctgccgagaaatcagct

SEQ ID NO: 2626334 - DNA, 25 bp, Homo sapien
tttatttccatgtttagtgcttcct

SEQ ID NO: 2626335 - DNA, 25 bp, Homo sapien
ttaaccctaaatacagccaattcag

SEQ ID NO: 2626336 - DNA, 25 bp, Homo sapien
cattcatagcctcatactctttaaa

SEQ ID NO: 2626337 - DNA, 25 bp, Homo sapien
cacattcatagcctcatactcttta

SEQ ID NO: 2626338 - DNA, 25 bp, Homo sapien
ctaaatacagccaattcagcccata

SEQ ID NO: 2626339 - DNA, 25 bp, Homo sapien
ctgaggaactgagactacagagtgt

SEQ ID NO: 2626340 - DNA, 25 bp, Homo sapien
aggaactgagactacagagtgtgcc

SEQ ID NO: 2626341 - DNA, 25 bp, Homo sapien
ctcctgacccgaggtgctccgcccg

SEQ ID NO: 2626342 - DNA, 25 bp, Homo sapien
ctgacccgaggtgctccgcccgcct

SEQ ID NO: 2626343 - DNA, 25 bp, Homo sapien
cagtttgaaaaagcaccgcactacc

SEQ ID NO: 2626344 - DNA, 25 bp, Homo sapien
catgaactcaattaatgctcgcaca

SEQ ID NO: 2626345 - DNA, 25 bp, Homo sapien
gaaacagtactgcttgcgacacaca

SEQ ID NO: 2626346 - DNA, 25 bp, Homo sapien
gactgcgtaccacactcaataaagg

SEQ ID NO: 2626347 - DNA, 25 bp, Homo sapien
acaggcacccaccaccacgcccagc

SEQ ID NO: 2626348 - DNA, 25 bp, Homo sapien
gacagagtctcactcggttgccagg

SEQ ID NO: 2626349 - DNA, 25 bp, Homo sapien
ctggagtgcaatgatgcaatctcgg

SEQ ID NO: 2626350 - DNA, 25 bp, Homo sapien
agtgcaatgatgcaatctcggctca

SEQ ID NO: 2626351 - DNA, 25 bp, Homo sapien
ctgtgtcgttttcttgtcttctgga

SEQ ID NO: 2626352 - DNA, 25 bp, Homo sapien
gtcgttttcttgtcttctggatgtt

SEQ ID NO: 2626353 - DNA, 25 bp, Homo sapien
gtgtcgttttcttgtcttctggatg

SEQ ID NO: 2626354 - DNA, 25 bp, Homo sapien
ttttcttgtcttctggatgttttca

SEQ ID NO: 2626355 - DNA, 25 bp, Homo sapien
tgcatcgtccgtggtttaaacacac

SEQ ID NO: 2626356 - DNA, 25 bp, Homo sapien
aatttcggtcccagatctgtatgct

SEQ ID NO: 2626357 - DNA, 25 bp, Homo sapien
tatatgtgcacgtagtgggaatgac

SEQ ID NO: 2626358 - DNA, 25 bp, Homo sapien
gaggtttccatctctactatatgtg

SEQ ID NO: 2626359 - DNA, 25 bp, Homo sapien
gtttaagttaacagcacccagagat

SEQ ID NO: 2626360 - DNA, 25 bp, Homo sapien
gcattccaatggctttctttctaca

SEQ ID NO: 2626361 - DNA, 25 bp, Homo sapien
aatttactgcttggttaaaactcag

SEQ ID NO: 2626362 - DNA, 25 bp, Homo sapien
taagatctctatgctgttatgaagc

SEQ ID NO: 2626363 - DNA, 25 bp, Homo sapien
taaaacatgctgtaggactatgcag

SEQ ID NO: 2626364 - DNA, 25 bp, Homo sapien
cctttagtcgcctagaaatctgtca

SEQ ID NO: 2626365 - DNA, 25 bp, Homo sapien
ttggatgcgtaagatgttcacagcc

SEQ ID NO: 2626366 - DNA, 25 bp, Homo sapien
cagagcttaggaaagtcaggactca

SEQ ID NO: 2626367 - DNA, 25 bp, Homo sapien
gttccactgcacatgaaatattgaa

SEQ ID NO: 2626368 - DNA, 25 bp, Homo sapien
actcccatattccagtggcaagaga

SEQ ID NO: 2626369 - DNA, 25 bp, Homo sapien
gaactagggctaaaagttccactgc

SEQ ID NO: 2626370 - DNA, 25 bp, Homo sapien
tttaataagaacacagatcacccac

SEQ ID NO: 2626371 - DNA, 25 bp, Homo sapien
tatgtcaaggctaaagctggtggat

SEQ ID NO: 2626372 - DNA, 25 bp, Homo sapien
cttcacttttccctatgtcaaggct

SEQ ID NO: 2626373 - DNA, 25 bp, Homo sapien
tcacttttccctatgtcaaggctaa

SEQ ID NO: 2626374 - DNA, 25 bp, Homo sapien
gtcaaggctaaagctggtggatcac

SEQ ID NO: 2626375 - DNA, 25 bp, Homo sapien
taaggcaccatgacacggaatgagc

SEQ ID NO: 2626376 - DNA, 25 bp, Homo sapien
ccatattgccaattgataccagata

SEQ ID NO: 2626377 - DNA, 25 bp, Homo sapien
tatgtctaaaatagcccctaaccag

SEQ ID NO: 2626378 - DNA, 25 bp, Homo sapien
ccatgcagaacagccagaatgattc

SEQ ID NO: 2626379 - DNA, 25 bp, Homo sapien
caatatgtagtagggaatttcaccc

SEQ ID NO: 2626380 - DNA, 25 bp, Homo sapien
gaaatgggcttcagtacatagtggg

SEQ ID NO: 2626381 - DNA, 25 bp, Homo sapien
tcactggtagagctgatacaaaagt

SEQ ID NO: 2626382 - DNA, 25 bp, Homo sapien
ggtcatgtaggcagaaaatcaacaa

SEQ ID NO: 2626383 - DNA, 25 bp, Homo sapien
gagaaacaatgctgtaggccacccc

SEQ ID NO: 2626384 - DNA, 25 bp, Homo sapien
gcagacatgccttagtctagccaag

SEQ ID NO: 2626385 - DNA, 25 bp, Homo sapien
tgttgaagcagccatgagcctaaat

SEQ ID NO: 2626386 - DNA, 25 bp, Homo sapien
tctagccaagcaactacaagcatgc

SEQ ID NO: 2626387 - DNA, 25 bp, Homo sapien
aaagcttcctctgctaataaatggt

SEQ ID NO: 2626388 - DNA, 25 bp, Homo sapien
atggtttataggcaaacctcctaag

SEQ ID NO: 2626389 - DNA, 25 bp, Homo sapien
gatatcatctggctactagatctag

SEQ ID NO: 2626390 - DNA, 25 bp, Homo sapien
taagttatggccgtttaaactcagc

SEQ ID NO: 2626391 - DNA, 25 bp, Homo sapien
atgtgctgttatgtttatcctgttg

SEQ ID NO: 2626392 - DNA, 25 bp, Homo sapien
aatgtgctgttatgtttatcctgtt

SEQ ID NO: 2626393 - DNA, 25 bp, Homo sapien
tgtgctgttatgtttatcctgttga

SEQ ID NO: 2626394 - DNA, 25 bp, Homo sapien
caatgtgctgttatgtttatcctgt

SEQ ID NO: 2626395 - DNA, 25 bp, Homo sapien
aaagagagccgatgcttccttccct

SEQ ID NO: 2626396 - DNA, 25 bp, Homo sapien
tcaaagagagccgatgcttccttcc

SEQ ID NO: 2626397 - DNA, 25 bp, Homo sapien
cagctgggcagatttagccactctc

SEQ ID NO: 2626398 - DNA, 25 bp, Homo sapien
agagagccgatgcttccttccctca

SEQ ID NO: 2626399 - DNA, 25 bp, Homo sapien
tgactggcacgctcctagcagatct

SEQ ID NO: 2626400 - DNA, 25 bp, Homo sapien
tcccgcctaggcttcacagtgttgg

SEQ ID NO: 2626401 - DNA, 25 bp, Homo sapien
tgactacatgcagccgggtggaaca

SEQ ID NO: 2626402 - DNA, 25 bp, Homo sapien
gacactgcgagtagacagaagacac

SEQ ID NO: 2626403 - DNA, 25 bp, Homo sapien
tcaggcataatgtcgggaatctaaa

SEQ ID NO: 2626404 - DNA, 25 bp, Homo sapien
gctgtagtatgaggagacttcacca

SEQ ID NO: 2626405 - DNA, 25 bp, Homo sapien
gcatcaaacatcaacacttggacag

SEQ ID NO: 2626406 - DNA, 25 bp, Homo sapien
tcatcctaagcaaagaatatcgttc

SEQ ID NO: 2626407 - DNA, 25 bp, Homo sapien
gaggcaaggacattaccatcatagg

SEQ ID NO: 2626408 - DNA, 25 bp, Homo sapien
cctgtttatagtggaacttaggatg

SEQ ID NO: 2626409 - DNA, 25 bp, Homo sapien
caagaagtgtctgtgcccgagtcat

SEQ ID NO: 2626410 - DNA, 25 bp, Homo sapien
catcataggaaaaagtcacgcaaga

SEQ ID NO: 2626411 - DNA, 25 bp, Homo sapien
gatgtttaaggtttacacccagcac

SEQ ID NO: 2626412 - DNA, 25 bp, Homo sapien
tctgaatgagttccccagggtaaaa

SEQ ID NO: 2626413 - DNA, 25 bp, Homo sapien
tcagatacactactgggatgagaac

SEQ ID NO: 2626414 - DNA, 25 bp, Homo sapien
tatagcactgttagattcacctgcc

SEQ ID NO: 2626415 - DNA, 25 bp, Homo sapien
tattaaattgtcggatgtcccataa

SEQ ID NO: 2626416 - DNA, 25 bp, Homo sapien
tgtcggatgtcccataattttaatg

SEQ ID NO: 2626417 - DNA, 25 bp, Homo sapien
aattgtcggatgtcccataatttta

SEQ ID NO: 2626418 - DNA, 25 bp, Homo sapien
attgtcggatgtcccataattttaa

SEQ ID NO: 2626419 - DNA, 25 bp, Homo sapien
catcctctttgaatagatgtaccag

SEQ ID NO: 2626420 - DNA, 25 bp, Homo sapien
tctttgaatagatgtaccagtgact

SEQ ID NO: 2626421 - DNA, 25 bp, Homo sapien
tcctctttgaatagatgtaccagtg

SEQ ID NO: 2626422 - DNA, 25 bp, Homo sapien
gccacatcctctttgaatagatgta

SEQ ID NO: 2626423 - DNA, 25 bp, Homo sapien
ggctgaggagaaaagaatatacgta

SEQ ID NO: 2626424 - DNA, 25 bp, Homo sapien
tcaaggctgaggagaaaagaatata

SEQ ID NO: 2626425 - DNA, 25 bp, Homo sapien
gctgaggagaaaagaatatacgtac

SEQ ID NO: 2626426 - DNA, 25 bp, Homo sapien
aaggctgaggagaaaagaatatacg

SEQ ID NO: 2626427 - DNA, 25 bp, Homo sapien
catccacaacatactgataactcct

SEQ ID NO: 2626428 - DNA, 25 bp, Homo sapien
tccacaacatactgataactcctac

SEQ ID NO: 2626429 - DNA, 25 bp, Homo sapien
ccacaacatactgataactcctacg

SEQ ID NO: 2626430 - DNA, 25 bp, Homo sapien
agccatccacaacatactgataact

SEQ ID NO: 2626431 - DNA, 25 bp, Homo sapien
agtgaatgctggtgttttagtgttc

SEQ ID NO: 2626432 - DNA, 25 bp, Homo sapien
gtgaatgctggtgttttagtgttca

SEQ ID NO: 2626433 - DNA, 25 bp, Homo sapien
tgaatgctggtgttttagtgttcat

SEQ ID NO: 2626434 - DNA, 25 bp, Homo sapien
cctggtgtcctagaatataagcatg

SEQ ID NO: 2626435 - DNA, 25 bp, Homo sapien
ggaataactgcatagattgttaaca

SEQ ID NO: 2626436 - DNA, 25 bp, Homo sapien
catatgtatactgagcctggtgtcc

SEQ ID NO: 2626437 - DNA, 25 bp, Homo sapien
acatcttctgactgaaaacaatgtt

SEQ ID NO: 2626438 - DNA, 25 bp, Homo sapien
gggaatgcctgctatctctgaaatt

SEQ ID NO: 2626439 - DNA, 25 bp, Homo sapien
aaatgtccaaggcatactagttgaa

SEQ ID NO: 2626440 - DNA, 25 bp, Homo sapien
tcagaggctatatgctaggttatgc

SEQ ID NO: 2626441 - DNA, 25 bp, Homo sapien
tatttacaaaactagaggtctctca

SEQ ID NO: 2626442 - DNA, 25 bp, Homo sapien
taataagccatgctagaagttggct

SEQ ID NO: 2626443 - DNA, 25 bp, Homo sapien
taagccatgctagaagttggctctt

SEQ ID NO: 2626444 - DNA, 25 bp, Homo sapien
ctaataagccatgctagaagttggc

SEQ ID NO: 2626445 - DNA, 25 bp, Homo sapien
aataagccatgctagaagttggctc

SEQ ID NO: 2626446 - DNA, 25 bp, Homo sapien
catccttggcactaaatgaatccca

SEQ ID NO: 2626447 - DNA, 25 bp, Homo sapien
cagtaaaagtttgctccaaccctgt

SEQ ID NO: 2626448 - DNA, 25 bp, Homo sapien
tctctaataggccagataggagtgc

SEQ ID NO: 2626449 - DNA, 25 bp, Homo sapien
tctggaacctggtagtcatccttgg

SEQ ID NO: 2626450 - DNA, 25 bp, Homo sapien
actccatctggttttttcacgtttg

SEQ ID NO: 2626451 - DNA, 25 bp, Homo sapien
aatgcagtgattccctgaacaagca

SEQ ID NO: 2626452 - DNA, 25 bp, Homo sapien
tacaagaatggataagctaatgcag

SEQ ID NO: 2626453 - DNA, 25 bp, Homo sapien
tggtttttgtcatatagtacaagaa

SEQ ID NO: 2626454 - DNA, 25 bp, Homo sapien
atgattatgttgaaactccatttcc

SEQ ID NO: 2626455 - DNA, 25 bp, Homo sapien
gattatgttgaaactccatttccgg

SEQ ID NO: 2626456 - DNA, 25 bp, Homo sapien
tgttgaaactccatttccggatcct

SEQ ID NO: 2626457 - DNA, 25 bp, Homo sapien
tgaaactccatttccggatcctcca

SEQ ID NO: 2626458 - DNA, 25 bp, Homo sapien
acatccagccaaacaggcagtttcc

SEQ ID NO: 2626459 - DNA, 25 bp, Homo sapien
cactgagggtgtaaatgttagagag

SEQ ID NO: 2626460 - DNA, 25 bp, Homo sapien
cctcttcactgagggtgtaaatgtt

SEQ ID NO: 2626461 - DNA, 25 bp, Homo sapien
gggcagcaggttactgttactctct

SEQ ID NO: 2626462 - DNA, 25 bp, Homo sapien
gggtcgtaatagactttagccaatc

SEQ ID NO: 2626463 - DNA, 25 bp, Homo sapien
tctgactcttgttggggtcgtaata

SEQ ID NO: 2626464 - DNA, 25 bp, Homo sapien
cgtaatagactttagccaatccatt

SEQ ID NO: 2626465 - DNA, 25 bp, Homo sapien
gatgccacaggcagcgaacaacact

SEQ ID NO: 2626466 - DNA, 25 bp, Homo sapien
tatcactgctaatgcctctgtccag

SEQ ID NO: 2626467 - DNA, 25 bp, Homo sapien
tcctgtaagtggttagttccctgct

SEQ ID NO: 2626468 - DNA, 25 bp, Homo sapien
tgcaaagtgggcagaacgtttttcc

SEQ ID NO: 2626469 - DNA, 25 bp, Homo sapien
tcagtgtggatcaagggcaatattc

SEQ ID NO: 2626470 - DNA, 25 bp, Homo sapien
ctctagttacgttttcagacttttg

SEQ ID NO: 2626471 - DNA, 25 bp, Homo sapien
tctgcggacagagaataatcttgcc

SEQ ID NO: 2626472 - DNA, 25 bp, Homo sapien
gaggggaaacgtatctgtgctgtcc

SEQ ID NO: 2626473 - DNA, 25 bp, Homo sapien
acagtggtatgcttaagtttgaaac

SEQ ID NO: 2626474 - DNA, 25 bp, Homo sapien
taaatgggtgctatcaaatgaggct

SEQ ID NO: 2626475 - DNA, 25 bp, Homo sapien
tacaagtgtctggaactgagttggc

SEQ ID NO: 2626476 - DNA, 25 bp, Homo sapien
tgtctcagactaaagcaacctgggt

SEQ ID NO: 2626477 - DNA, 25 bp, Homo sapien
cctttcctcaaaggatgtgggacct

SEQ ID NO: 2626478 - DNA, 25 bp, Homo sapien
cttccgctgggttttaaccacacat

SEQ ID NO: 2626479 - DNA, 25 bp, Homo sapien
tgccttccgctgggttttaaccaca

SEQ ID NO: 2626480 - DNA, 25 bp, Homo sapien
ttccgctgggttttaaccacacata

SEQ ID NO: 2626481 - DNA, 25 bp, Homo sapien
tccgctgggttttaaccacacataa

SEQ ID NO: 2626482 - DNA, 25 bp, Homo sapien
tcatggaaacatcggtgaggctccc

SEQ ID NO: 2626483 - DNA, 25 bp, Homo sapien
caacactgagtaaccggaagggagg

SEQ ID NO: 2626484 - DNA, 25 bp, Homo sapien
gcttttcacttcaaacgactggagg

SEQ ID NO: 2626485 - DNA, 25 bp, Homo sapien
tgcatgaaataaccctgtccctgtg

SEQ ID NO: 2626486 - DNA, 25 bp, Homo sapien
tgctacaggaggttcaggtttatgc

SEQ ID NO: 2626487 - DNA, 25 bp, Homo sapien
ttcaggggatccagtctgtccttct

SEQ ID NO: 2626488 - DNA, 25 bp, Homo sapien
ctgctacaggaggttcaggtttatg

SEQ ID NO: 2626489 - DNA, 25 bp, Homo sapien
acttcaggggatccagtctgtcctt

SEQ ID NO: 2626490 - DNA, 25 bp, Homo sapien
atataggaagagagagtgcccccgt

SEQ ID NO: 2626491 - DNA, 25 bp, Homo sapien
tactgtcatcggtcttgtccaaagc

SEQ ID NO: 2626492 - DNA, 25 bp, Homo sapien
aatggcttcccgaggattactgtca

SEQ ID NO: 2626493 - DNA, 25 bp, Homo sapien
gtgggttccaactcggccaccacga

SEQ ID NO: 2626494 - DNA, 25 bp, Homo sapien
aggctcataaatagggtatactgac

SEQ ID NO: 2626495 - DNA, 25 bp, Homo sapien
tagggtatactgactcattatgcta

SEQ ID NO: 2626496 - DNA, 25 bp, Homo sapien
catctcaggctcataaatagggtat

SEQ ID NO: 2626497 - DNA, 25 bp, Homo sapien
aatagggtatactgactcattatgc

SEQ ID NO: 2626498 - DNA, 25 bp, Homo sapien
tagacgtctactaggtccatttgat

SEQ ID NO: 2626499 - DNA, 25 bp, Homo sapien
tactaggtccatttgatcgagagct

SEQ ID NO: 2626500 - DNA, 25 bp, Homo sapien
gactagaattgcaactcccattttt

SEQ ID NO: 2626501 - DNA, 25 bp, Homo sapien
tgtctcgttgatctaacactgacag

SEQ ID NO: 2626502 - DNA, 25 bp, Homo sapien
agtttatttgctcagaggtgttcat

SEQ ID NO: 2626503 - DNA, 25 bp, Homo sapien
aaacaccagctcctggatttgttga

SEQ ID NO: 2626504 - DNA, 25 bp, Homo sapien
ttatttgctcagaggtgttcatagt

SEQ ID NO: 2626505 - DNA, 25 bp, Homo sapien
tctagctagcagtttatctattttg

SEQ ID NO: 2626506 - DNA, 25 bp, Homo sapien
aaatggtgattaacaggtgtatgca

SEQ ID NO: 2626507 - DNA, 25 bp, Homo sapien
aagtatccgtaggaggttgatggct

SEQ ID NO: 2626508 - DNA, 25 bp, Homo sapien
tgttctataatcttgacagaaatgg

SEQ ID NO: 2626509 - DNA, 25 bp, Homo sapien
ccgtaggaggttgatggctaacatc

SEQ ID NO: 2626510 - DNA, 25 bp, Homo sapien
atcagattcaacttgggcaaacatg

SEQ ID NO: 2626511 - DNA, 25 bp, Homo sapien
cttgggcaaacatggttttgggctg

SEQ ID NO: 2626512 - DNA, 25 bp, Homo sapien
attcaacttgggcaaacatggtttt

SEQ ID NO: 2626513 - DNA, 25 bp, Homo sapien
caacttgggcaaacatggttttggg

SEQ ID NO: 2626514 - DNA, 25 bp, Homo sapien
tgtcccatacccctcccactcatgc

SEQ ID NO: 2626515 - DNA, 25 bp, Homo sapien
atacccctcccactcatgcaaacag

SEQ ID NO: 2626516 - DNA, 25 bp, Homo sapien
tcccatacccctcccactcatgcaa

SEQ ID NO: 2626517 - DNA, 25 bp, Homo sapien
ccatacccctcccactcatgcaaac

SEQ ID NO: 2626518 - DNA, 25 bp, Homo sapien
taactctcttaagatgacccagaag

SEQ ID NO: 2626519 - DNA, 25 bp, Homo sapien
tactgtactaaatgctctgtgaggc

SEQ ID NO: 2626520 - DNA, 25 bp, Homo sapien
gagataatgctctttcccagtatgg

SEQ ID NO: 2626521 - DNA, 25 bp, Homo sapien
tcttctgacgaacctgcaaagtacg

SEQ ID NO: 2626522 - DNA, 25 bp, Homo sapien
tgctgtcacagtcagcaccataaga

SEQ ID NO: 2626523 - DNA, 25 bp, Homo sapien
aagaaccattgtgttgaacatgatg

SEQ ID NO: 2626524 - DNA, 25 bp, Homo sapien
catgatggccaacagtgaggccaac

SEQ ID NO: 2626525 - DNA, 25 bp, Homo sapien
cattgtgttgaacatgatggccaac

SEQ ID NO: 2626526 - DNA, 25 bp, Homo sapien
gccccagtcatggctttgccttttg

SEQ ID NO: 2626527 - DNA, 25 bp, Homo sapien
tttgccttttgcagggtctctggcc

SEQ ID NO: 2626528 - DNA, 25 bp, Homo sapien
ggctttgccttttgcagggtctctg

SEQ ID NO: 2626529 - DNA, 25 bp, Homo sapien
tcatggctttgccttttgcagggtc

SEQ ID NO: 2626530 - DNA, 25 bp, Homo sapien
caagtatttcttaccggaagtggag

SEQ ID NO: 2626531 - DNA, 25 bp, Homo sapien
aacagtcacccagcaaccagaaatg

SEQ ID NO: 2626532 - DNA, 25 bp, Homo sapien
ggagttgcccaagtatttatttgta

SEQ ID NO: 2626533 - DNA, 25 bp, Homo sapien
gagttgactgcatttgttacccatg

SEQ ID NO: 2626534 - DNA, 25 bp, Homo sapien
caattaaatgaaatactggcctcca

SEQ ID NO: 2626535 - DNA, 25 bp, Homo sapien
gaatttatcgggcagccaacacatg

SEQ ID NO: 2626536 - DNA, 25 bp, Homo sapien
caacacatgtatgacacactaggcc

SEQ ID NO: 2626537 - DNA, 25 bp, Homo sapien
cagcctaagtgacagtgcggtaccc

SEQ ID NO: 2626538 - DNA, 25 bp, Homo sapien
agccgcaggtgcagcatcctgtggc

SEQ ID NO: 2626539 - DNA, 25 bp, Homo sapien
ggcagccgcaggtgcagcatcctgt

SEQ ID NO: 2626540 - DNA, 25 bp, Homo sapien
tcggcagccgcaggtgcagcatcct

SEQ ID NO: 2626541 - DNA, 25 bp, Homo sapien
gcaggtgcagcatcctgtggcctca

SEQ ID NO: 2626542 - DNA, 25 bp, Homo sapien
tgctgtgctggctgcggcttttccg

SEQ ID NO: 2626543 - DNA, 25 bp, Homo sapien
gagcttccggagatggggcctctct

SEQ ID NO: 2626544 - DNA, 25 bp, Homo sapien
gagttggaggagcttccggagatgg

SEQ ID NO: 2626545 - DNA, 25 bp, Homo sapien
catttggtgccagcatgagttggag

SEQ ID NO: 2626546 - DNA, 25 bp, Homo sapien
cggcgggagagttgccggcagccct

SEQ ID NO: 2626547 - DNA, 25 bp, Homo sapien
ctggagttaatgtccaacctagggt

SEQ ID NO: 2626548 - DNA, 25 bp, Homo sapien
gccatcagcccggatgggtctcctg

SEQ ID NO: 2626549 - DNA, 25 bp, Homo sapien
aggattgcgaactcttgcccctgac

SEQ ID NO: 2626550 - DNA, 25 bp, Homo sapien
ctctccttctcggtgctagaactcc

SEQ ID NO: 2626551 - DNA, 25 bp, Homo sapien
gagagcatcctaatttcagctaagg

SEQ ID NO: 2626552 - DNA, 25 bp, Homo sapien
caagtgctagatatttgcaggtgct

SEQ ID NO: 2626553 - DNA, 25 bp, Homo sapien
caggtgcttggacgggctgatcatc

SEQ ID NO: 2626554 - DNA, 25 bp, Homo sapien
gatgagggtcgtcttcaaattccaa

SEQ ID NO: 2626555 - DNA, 25 bp, Homo sapien
ggcagcgagataacccagtcacaga

SEQ ID NO: 2626556 - DNA, 25 bp, Homo sapien
caatccagttttcatgaggcctggc

SEQ ID NO: 2626557 - DNA, 25 bp, Homo sapien
gaatggtggagattccggtcagcct

SEQ ID NO: 2626558 - DNA, 25 bp, Homo sapien
gcttttcggagacacgtggcggaat

SEQ ID NO: 2626559 - DNA, 25 bp, Homo sapien
ttaaatgtgagatcaactgagagct

SEQ ID NO: 2626560 - DNA, 25 bp, Homo sapien
ctaaaggagtttaaatgtgagatca

SEQ ID NO: 2626561 - DNA, 25 bp, Homo sapien
aaacagcgagagaggagctgaatca

SEQ ID NO: 2626562 - DNA, 25 bp, Homo sapien
gctgagcagttggtagcaggagcag

SEQ ID NO: 2626563 - DNA, 25 bp, Homo sapien
tgttggcagctacctgtgcccaaga

SEQ ID NO: 2626564 - DNA, 25 bp, Homo sapien
ggcagctacctgtgcccaagagaca

SEQ ID NO: 2626565 - DNA, 25 bp, Homo sapien
ctgttggcagctacctgtgcccaag

SEQ ID NO: 2626566 - DNA, 25 bp, Homo sapien
ttggcagctacctgtgcccaagaga

SEQ ID NO: 2626567 - DNA, 25 bp, Homo sapien
tttctccaagatgactcctggggga

SEQ ID NO: 2626568 - DNA, 25 bp, Homo sapien
ctcctgggggaagggtctgcttcat

SEQ ID NO: 2626569 - DNA, 25 bp, Homo sapien
ccatttttctccaagatgactcctg

SEQ ID NO: 2626570 - DNA, 25 bp, Homo sapien
tttttctccaagatgactcctgggg

SEQ ID NO: 2626571 - DNA, 25 bp, Homo sapien
tattatccccattgcacaggtaggg

SEQ ID NO: 2626572 - DNA, 25 bp, Homo sapien
gacatcaacataagacacaccattg

SEQ ID NO: 2626573 - DNA, 25 bp, Homo sapien
ctctgcttgcagttgaggaaggact

SEQ ID NO: 2626574 - DNA, 25 bp, Homo sapien
cactttactcaatggcctcagtggg

SEQ ID NO: 2626575 - DNA, 25 bp, Homo sapien
ctgtcttgatatttgcctctggttg

SEQ ID NO: 2626576 - DNA, 25 bp, Homo sapien
ctttattgctgtcttgatatttgcc

SEQ ID NO: 2626577 - DNA, 25 bp, Homo sapien
tattgctgtcttgatatttgcctct

SEQ ID NO: 2626578 - DNA, 25 bp, Homo sapien
ttgctgtcttgatatttgcctctgg

SEQ ID NO: 2626579 - DNA, 25 bp, Homo sapien
taagggagattttgcccctcaggag

SEQ ID NO: 2626580 - DNA, 25 bp, Homo sapien
gcactatcagtgcagaatagcccag

SEQ ID NO: 2626581 - DNA, 25 bp, Homo sapien
gaatggaccttctaagcactatcag

SEQ ID NO: 2626582 - DNA, 25 bp, Homo sapien
gaaacccaggcctagatcggtagaa

SEQ ID NO: 2626583 - DNA, 25 bp, Homo sapien
tggcccgcaggatcactgtggacct

SEQ ID NO: 2626584 - DNA, 25 bp, Homo sapien
gtaagatagcccccgatggaagaaa

SEQ ID NO: 2626585 - DNA, 25 bp, Homo sapien
gatggaagaaaacgggcagggtcca

SEQ ID NO: 2626586 - DNA, 25 bp, Homo sapien
ggcccgcaggatcactgtggacctg

SEQ ID NO: 2626587 - DNA, 25 bp, Homo sapien
atattgaccacaacttagtcacatg

SEQ ID NO: 2626588 - DNA, 25 bp, Homo sapien
tcatattgaccacaacttagtcaca

SEQ ID NO: 2626589 - DNA, 25 bp, Homo sapien
ctcatattgaccacaacttagtcac

SEQ ID NO: 2626590 - DNA, 25 bp, Homo sapien
gcagtctgtattccagacagttctg

SEQ ID NO: 2626591 - DNA, 25 bp, Homo sapien
actggatcacctgctatggctaatc

SEQ ID NO: 2626592 - DNA, 25 bp, Homo sapien
taagagcccagagttccgaatgaga

SEQ ID NO: 2626593 - DNA, 25 bp, Homo sapien
gaattgtggctaacataagagccca

SEQ ID NO: 2626594 - DNA, 25 bp, Homo sapien
cagaggctcctctatgaagaaaacg

SEQ ID NO: 2626595 - DNA, 25 bp, Homo sapien
ccgtgtctggctatgtctgacttct

SEQ ID NO: 2626596 - DNA, 25 bp, Homo sapien
tgacctcagaagttttcgcttctgg

SEQ ID NO: 2626597 - DNA, 25 bp, Homo sapien
tcattggtggaactgctagcagccg

SEQ ID NO: 2626598 - DNA, 25 bp, Homo sapien
tggtttttcgcaccttgtgtttgcc

SEQ ID NO: 2626599 - DNA, 25 bp, Homo sapien
ttggctagccacaagatttttgcac

SEQ ID NO: 2626600 - DNA, 25 bp, Homo sapien
cttccggggataacgatagtccttg

SEQ ID NO: 2626601 - DNA, 25 bp, Homo sapien
gttgggcaaagggaacttctctctg

SEQ ID NO: 2626602 - DNA, 25 bp, Homo sapien
tctcagctccaacacgtgcttgcag

SEQ ID NO: 2626603 - DNA, 25 bp, Homo sapien
ggcctatgagaaaatgtactcccag

SEQ ID NO: 2626604 - DNA, 25 bp, Homo sapien
tagaaatgagtccatacctacagac

SEQ ID NO: 2626605 - DNA, 25 bp, Homo sapien
agtcagttaatgctccaggcctatg

SEQ ID NO: 2626606 - DNA, 25 bp, Homo sapien
taaagactggtcaatggacctcacg

SEQ ID NO: 2626607 - DNA, 25 bp, Homo sapien
cgtctggaggcttgaccatggaaaa

SEQ ID NO: 2626608 - DNA, 25 bp, Homo sapien
caagctcatttggattgttggtaga

SEQ ID NO: 2626609 - DNA, 25 bp, Homo sapien
tacatttgttatctcagtttccaca

SEQ ID NO: 2626610 - DNA, 25 bp, Homo sapien
tgctcagctgttcatatgttacagt

SEQ ID NO: 2626611 - DNA, 25 bp, Homo sapien
ggctatgtgcaatgttattctttca

SEQ ID NO: 2626612 - DNA, 25 bp, Homo sapien
ccagggctatgtgcaatgttattct

SEQ ID NO: 2626613 - DNA, 25 bp, Homo sapien
cacaacccagggctatgtgcaatgt

SEQ ID NO: 2626614 - DNA, 25 bp, Homo sapien
tgcaatgttattctttcaccttctt

SEQ ID NO: 2626615 - DNA, 25 bp, Homo sapien
tctcattgtcttccctgctagagcc

SEQ ID NO: 2626616 - DNA, 25 bp, Homo sapien
gctgctctcattgtcttccctgcta

SEQ ID NO: 2626617 - DNA, 25 bp, Homo sapien
ctgctctcattgtcttccctgctag

SEQ ID NO: 2626618 - DNA, 25 bp, Homo sapien
caagctgctctcattgtcttccctg

SEQ ID NO: 2626619 - DNA, 25 bp, Homo sapien
aatacactttaggagtctgtttctt

SEQ ID NO: 2626620 - DNA, 25 bp, Homo sapien
ttaggagtctgtttctttgatacag

SEQ ID NO: 2626621 - DNA, 25 bp, Homo sapien
ctttgatacagccaggagggtaaaa

SEQ ID NO: 2626622 - DNA, 25 bp, Homo sapien
tttctttgatacagccaggagggta

SEQ ID NO: 2626623 - DNA, 25 bp, Homo sapien
tccagacccacttgacttgtcagtg

SEQ ID NO: 2626624 - DNA, 25 bp, Homo sapien
cctacaccatgactagcatccaaaa

SEQ ID NO: 2626625 - DNA, 25 bp, Homo sapien
tagcatccaaaaggacctccagacc

SEQ ID NO: 2626626 - DNA, 25 bp, Homo sapien
gtcagtgtggtggtctcccaagcca

SEQ ID NO: 2626627 - DNA, 25 bp, Homo sapien
tgaaccagaccatgcagtaacctga

SEQ ID NO: 2626628 - DNA, 25 bp, Homo sapien
actgcattagacctctgcggcctta

SEQ ID NO: 2626629 - DNA, 25 bp, Homo sapien
cagacacgggcagctcatttgcaga

SEQ ID NO: 2626630 - DNA, 25 bp, Homo sapien
gagtgtcatgaaggtctagaaaccc

SEQ ID NO: 2626631 - DNA, 25 bp, Homo sapien
cagtgccgaagaggctttatggaga

SEQ ID NO: 2626632 - DNA, 25 bp, Homo sapien
agtgccgaagaggctttatggagag

SEQ ID NO: 2626633 - DNA, 25 bp, Homo sapien
acagtgccgaagaggctttatggag

SEQ ID NO: 2626634 - DNA, 25 bp, Homo sapien
agaagaaccaagtattctctgagta

SEQ ID NO: 2626635 - DNA, 25 bp, Homo sapien
ctaggcctgcatgactgtctctatg

SEQ ID NO: 2626636 - DNA, 25 bp, Homo sapien
tgcatgactgtctctatggatccaa

SEQ ID NO: 2626637 - DNA, 25 bp, Homo sapien
ggcctgcatgactgtctctatggat

SEQ ID NO: 2626638 - DNA, 25 bp, Homo sapien
cctgcatgactgtctctatggatcc

SEQ ID NO: 2626639 - DNA, 25 bp, Homo sapien
tagggttgctaaggtgtactgctcc

SEQ ID NO: 2626640 - DNA, 25 bp, Homo sapien
aggtggtcgtccagttgccctccac

SEQ ID NO: 2626641 - DNA, 25 bp, Homo sapien
ctggatctgacattctctaggtggt

SEQ ID NO: 2626642 - DNA, 25 bp, Homo sapien
ctttctttgccccttggactggatc

SEQ ID NO: 2626643 - DNA, 25 bp, Homo sapien
tactgggccgcagatgggattctca

SEQ ID NO: 2626644 - DNA, 25 bp, Homo sapien
caaaacagggccgaacaggcaatgc

SEQ ID NO: 2626645 - DNA, 25 bp, Homo sapien
gaacctagctgacacactcttgagg

SEQ ID NO: 2626646 - DNA, 25 bp, Homo sapien
tgagtatgccataccagggctagag

SEQ ID NO: 2626647 - DNA, 25 bp, Homo sapien
ctggtgggttctattgtgaacaatg

SEQ ID NO: 2626648 - DNA, 25 bp, Homo sapien
acaatggctctagcctcttttgagt

SEQ ID NO: 2626649 - DNA, 25 bp, Homo sapien
tgtgaacaatggctctagcctcttt

SEQ ID NO: 2626650 - DNA, 25 bp, Homo sapien
gaacaatggctctagcctcttttga

SEQ ID NO: 2626651 - DNA, 25 bp, Homo sapien
gggtcaaggaaagattgacggttca

SEQ ID NO: 2626652 - DNA, 25 bp, Homo sapien
gattgtccagacattggtgggtata

SEQ ID NO: 2626653 - DNA, 25 bp, Homo sapien
tatagaggggctaattacagcaagt

SEQ ID NO: 2626654 - DNA, 25 bp, Homo sapien
agattgacggttcaaggaggcaatg

SEQ ID NO: 2626655 - DNA, 25 bp, Homo sapien
ttcagaatccaaggctagacccgtc

SEQ ID NO: 2626656 - DNA, 25 bp, Homo sapien
tctaactccaagtgcaacttgtgca

SEQ ID NO: 2626657 - DNA, 25 bp, Homo sapien
aacttgtgcacaacgctgaccctga

SEQ ID NO: 2626658 - DNA, 25 bp, Homo sapien
caaatttaagattacccaagatgac

SEQ ID NO: 2626659 - DNA, 25 bp, Homo sapien
ttgccagccaccacgatatcatgag

SEQ ID NO: 2626660 - DNA, 25 bp, Homo sapien
gattggacctcatctaataagttga

SEQ ID NO: 2626661 - DNA, 25 bp, Homo sapien
aattctgactcaaaactgcaacatg

SEQ ID NO: 2626662 - DNA, 25 bp, Homo sapien
gattaccctccattatgattggacc

SEQ ID NO: 2626663 - DNA, 25 bp, Homo sapien
tgaaattggtgagttgacaggtgtg

SEQ ID NO: 2626664 - DNA, 25 bp, Homo sapien
aaattggtgagttgacaggtgtgga

SEQ ID NO: 2626665 - DNA, 25 bp, Homo sapien
tggagagggagtctttggataggca

SEQ ID NO: 2626666 - DNA, 25 bp, Homo sapien
ctgaaattggtgagttgacaggtgt

SEQ ID NO: 2626667 - DNA, 25 bp, Homo sapien
ctgttgctaactggatcctttttcc

SEQ ID NO: 2626668 - DNA, 25 bp, Homo sapien
tttgtgaacagtaagacagtcctcc

SEQ ID NO: 2626669 - DNA, 25 bp, Homo sapien
gacatggacactgatgaggagcata

SEQ ID NO: 2626670 - DNA, 25 bp, Homo sapien
taagaagttaggagctcagcagacg

SEQ ID NO: 2626671 - DNA, 25 bp, Homo sapien
ctagagacatctgagagacatggac

SEQ ID NO: 2626672 - DNA, 25 bp, Homo sapien
cagaagaacccataacctagagtca

SEQ ID NO: 2626673 - DNA, 25 bp, Homo sapien
tctcatagctgcacgttgtggcaat

SEQ ID NO: 2626674 - DNA, 25 bp, Homo sapien
gtataggtgtgaacaaagtgctttc

SEQ ID NO: 2626675 - DNA, 25 bp, Homo sapien
caattaaactaagatgaactgctgc

SEQ ID NO: 2626676 - DNA, 25 bp, Homo sapien
cagtacccatgatgccaaggcagga

SEQ ID NO: 2626677 - DNA, 25 bp, Homo sapien
gctcttgtccttttatgctgataga

SEQ ID NO: 2626678 - DNA, 25 bp, Homo sapien
tatctatcttgtaaagctcttgtcc

SEQ ID NO: 2626679 - DNA, 25 bp, Homo sapien
aacctgccccgaggtttggcaaatg

SEQ ID NO: 2626680 - DNA, 25 bp, Homo sapien
gatgtgcttccaagatggccactag

SEQ ID NO: 2626681 - DNA, 25 bp, Homo sapien
gtggtgcttctgatgtgcttccaag

SEQ ID NO: 2626682 - DNA, 25 bp, Homo sapien
gatggccactagcaatttccaaggc

SEQ ID NO: 2626683 - DNA, 25 bp, Homo sapien
tccaagatggccactagcaatttcc

SEQ ID NO: 2626684 - DNA, 25 bp, Homo sapien
tgtggaatcagtgttcacagctgga

SEQ ID NO: 2626685 - DNA, 25 bp, Homo sapien
ctgtggaatcagtgttcacagctgg

SEQ ID NO: 2626686 - DNA, 25 bp, Homo sapien
tctttggtggaccaccagggattgt

SEQ ID NO: 2626687 - DNA, 25 bp, Homo sapien
tcagattctttggtggaccaccagg

SEQ ID NO: 2626688 - DNA, 25 bp, Homo sapien
tttggtggaccaccagggattgtac

SEQ ID NO: 2626689 - DNA, 25 bp, Homo sapien
atttgtcagattctttggtggacca

SEQ ID NO: 2626690 - DNA, 25 bp, Homo sapien
gatggtggatcttgcctgagttcag

SEQ ID NO: 2626691 - DNA, 25 bp, Homo sapien
acacagtgctggtttacaagggtta

SEQ ID NO: 2626692 - DNA, 25 bp, Homo sapien
cactagttctacttaaacaagtttg

SEQ ID NO: 2626693 - DNA, 25 bp, Homo sapien
gagaaatgtaagaagatggtggatc

SEQ ID NO: 2626694 - DNA, 25 bp, Homo sapien
tgcaactgggctctccatgggctcc

SEQ ID NO: 2626695 - DNA, 25 bp, Homo sapien
ctgcaactgggctctccatgggctc

SEQ ID NO: 2626696 - DNA, 25 bp, Homo sapien
gcctggctgtccgaaatatctgccc

SEQ ID NO: 2626697 - DNA, 25 bp, Homo sapien
ggctgtccgaaatatctgcccaagt

SEQ ID NO: 2626698 - DNA, 25 bp, Homo sapien
ctggctgtccgaaatatctgcccaa

SEQ ID NO: 2626699 - DNA, 25 bp, Homo sapien
tgtccgaaatatctgcccaagtccc

SEQ ID NO: 2626700 - DNA, 25 bp, Homo sapien
ctaaagttcccctttttcagctgtg

SEQ ID NO: 2626701 - DNA, 25 bp, Homo sapien
aggtgttctcaaaatctccaacctg

SEQ ID NO: 2626702 - DNA, 25 bp, Homo sapien
ctggcctttcccattagaacctgtt

SEQ ID NO: 2626703 - DNA, 25 bp, Homo sapien
gggcttccatctatcacaggtgttc

SEQ ID NO: 2626704 - DNA, 25 bp, Homo sapien
aatttgactgaagaaaaactttcag

SEQ ID NO: 2626705 - DNA, 25 bp, Homo sapien
tgtacttccaaaatttgactgaaga

SEQ ID NO: 2626706 - DNA, 25 bp, Homo sapien
ctcttttcgctcacttgtacttcca

SEQ ID NO: 2626707 - DNA, 25 bp, Homo sapien
tcttttcgctcacttgtacttccaa

SEQ ID NO: 2626708 - DNA, 25 bp, Homo sapien
actgccgtgcttactggagggctcg

SEQ ID NO: 2626709 - DNA, 25 bp, Homo sapien
gtgggtagtatccatggtcactgcc

SEQ ID NO: 2626710 - DNA, 25 bp, Homo sapien
tggtcactgccgtgcttactggagg

SEQ ID NO: 2626711 - DNA, 25 bp, Homo sapien
gtagtatccatggtcactgccgtgc

SEQ ID NO: 2626712 - DNA, 25 bp, Homo sapien
ccatcacatctctttgtagagccaa

SEQ ID NO: 2626713 - DNA, 25 bp, Homo sapien
gccaatagtggcagtttccacatcc

SEQ ID NO: 2626714 - DNA, 25 bp, Homo sapien
cttgtagtccatccagttagtcatc

SEQ ID NO: 2626715 - DNA, 25 bp, Homo sapien
ttcttgtagtccatccagttagtca

SEQ ID NO: 2626716 - DNA, 25 bp, Homo sapien
tatatatggcatcagaatttccctc

SEQ ID NO: 2626717 - DNA, 25 bp, Homo sapien
cactatcaagttctggctttttctg

SEQ ID NO: 2626718 - DNA, 25 bp, Homo sapien
ttccctctttgaaggcatcactatc

SEQ ID NO: 2626719 - DNA, 25 bp, Homo sapien
ctagccttatatatggcatcagaat

SEQ ID NO: 2626720 - DNA, 25 bp, Homo sapien
taatatcacgctgcctaatacctaa

SEQ ID NO: 2626721 - DNA, 25 bp, Homo sapien
tttaactgtgcattgacaaatctta

SEQ ID NO: 2626722 - DNA, 25 bp, Homo sapien
aacaaaaatgtaggaacattgatgg

SEQ ID NO: 2626723 - DNA, 25 bp, Homo sapien
atgtaggaacattgatggttatttc

SEQ ID NO: 2626724 - DNA, 25 bp, Homo sapien
tattctttgccagttcagaggagcc

SEQ ID NO: 2626725 - DNA, 25 bp, Homo sapien
gagcctcctcctaataccacttttg

SEQ ID NO: 2626726 - DNA, 25 bp, Homo sapien
gcaagcaaggagttccaggatggta

SEQ ID NO: 2626727 - DNA, 25 bp, Homo sapien
tacatgtgaggtcatagtttagcca

SEQ ID NO: 2626728 - DNA, 25 bp, Homo sapien
gaagctctaagcctcctggttcact

SEQ ID NO: 2626729 - DNA, 25 bp, Homo sapien
gaagtgataagcattacccatgttg

SEQ ID NO: 2626730 - DNA, 25 bp, Homo sapien
gatcttggtctttggcattgttcag

SEQ ID NO: 2626731 - DNA, 25 bp, Homo sapien
tcagatctggttccactaatactgg

SEQ ID NO: 2626732 - DNA, 25 bp, Homo sapien
gcatggccccggtcgggccacgcat

SEQ ID NO: 2626733 - DNA, 25 bp, Homo sapien
aagacaaaagcaggcacacataaat

SEQ ID NO: 2626734 - DNA, 25 bp, Homo sapien
catggccccggtcgggccacgcatt

SEQ ID NO: 2626735 - DNA, 25 bp, Homo sapien
caaaagcaggcacacataaatgcca

SEQ ID NO: 2626736 - DNA, 25 bp, Homo sapien
taaagttgacggcttgtttcttcac

SEQ ID NO: 2626737 - DNA, 25 bp, Homo sapien
ttcctctaaccgtgataggggaatg

SEQ ID NO: 2626738 - DNA, 25 bp, Homo sapien
ttaaagttgacggcttgtttcttca

SEQ ID NO: 2626739 - DNA, 25 bp, Homo sapien
ctaaccgtgataggggaatgtcaag

SEQ ID NO: 2626740 - DNA, 25 bp, Homo sapien
cctgctgcctgtcaaggctcctaga

SEQ ID NO: 2626741 - DNA, 25 bp, Homo sapien
cactaagagactcaccaggaaggtc

SEQ ID NO: 2626742 - DNA, 25 bp, Homo sapien
gacactcgctcaagattccagaaac

SEQ ID NO: 2626743 - DNA, 25 bp, Homo sapien
aatgtagactcacctccactgtctg

SEQ ID NO: 2626744 - DNA, 25 bp, Homo sapien
cagtctaatgggctttgaaaaactc

SEQ ID NO: 2626745 - DNA, 25 bp, Homo sapien
aatgtcatcgggcagtctaatgggc

SEQ ID NO: 2626746 - DNA, 25 bp, Homo sapien
tggccacaggagacttcccctaatt

SEQ ID NO: 2626747 - DNA, 25 bp, Homo sapien
tcttctgttaagaatgtcatcgggc

SEQ ID NO: 2626748 - DNA, 25 bp, Homo sapien
aagtgcctacgcgaatcaaccagtg

SEQ ID NO: 2626749 - DNA, 25 bp, Homo sapien
ccagtgtcacatagaagcagattcc

SEQ ID NO: 2626750 - DNA, 25 bp, Homo sapien
tcggcccataaaaccaccgtgcagg

SEQ ID NO: 2626751 - DNA, 25 bp, Homo sapien
tcagtttagtgagcattcggcccat

SEQ ID NO: 2626752 - DNA, 25 bp, Homo sapien
tgtcacacctgtggtgatacgtggg

SEQ ID NO: 2626753 - DNA, 25 bp, Homo sapien
gaacttgaagggatctgacagatgg

SEQ ID NO: 2626754 - DNA, 25 bp, Homo sapien
cagagagaaacgtcagagcaggcat

SEQ ID NO: 2626755 - DNA, 25 bp, Homo sapien
tacgtttctggttgggcctctgtca

SEQ ID NO: 2626756 - DNA, 25 bp, Homo sapien
cagcaagtatgatgtaatgatgctt

SEQ ID NO: 2626757 - DNA, 25 bp, Homo sapien
gagaatcattgattacttcagcaag

SEQ ID NO: 2626758 - DNA, 25 bp, Homo sapien
tcctgtgctcttgttccatgagaat

SEQ ID NO: 2626759 - DNA, 25 bp, Homo sapien
tccatgagaatcattgattacttca

SEQ ID NO: 2626760 - DNA, 25 bp, Homo sapien
taatttgcttggagcagacagggcc

SEQ ID NO: 2626761 - DNA, 25 bp, Homo sapien
caaggattgtttactgctgccactc

SEQ ID NO: 2626762 - DNA, 25 bp, Homo sapien
gctgccactcatatattccatgggt

SEQ ID NO: 2626763 - DNA, 25 bp, Homo sapien
tcaccaacagtcaagttaaacaagc

SEQ ID NO: 2626764 - DNA, 25 bp, Homo sapien
tacctctgcaatgattctactccag

SEQ ID NO: 2626765 - DNA, 25 bp, Homo sapien
gtgccacatttaacagcatgcgcag

SEQ ID NO: 2626766 - DNA, 25 bp, Homo sapien
taacagcatgcgcagatacctctgc

SEQ ID NO: 2626767 - DNA, 25 bp, Homo sapien
taatgccatcttggatagccaatcc

SEQ ID NO: 2626768 - DNA, 25 bp, Homo sapien
tccaaacagagccgctcctcattat

SEQ ID NO: 2626769 - DNA, 25 bp, Homo sapien
aaacagagccgctcctcattatcct

SEQ ID NO: 2626770 - DNA, 25 bp, Homo sapien
ccatccaaacagagccgctcctcat

SEQ ID NO: 2626771 - DNA, 25 bp, Homo sapien
gagccgctcctcattatcctctact

SEQ ID NO: 2626772 - DNA, 25 bp, Homo sapien
taacaatggatatatggaactgctg

SEQ ID NO: 2626773 - DNA, 25 bp, Homo sapien
aacactggtttggtacctcagggat

SEQ ID NO: 2626774 - DNA, 25 bp, Homo sapien
tccttcagaagaaccataatgactg

SEQ ID NO: 2626775 - DNA, 25 bp, Homo sapien
tgctgaccacttttctaaacactgg

SEQ ID NO: 2626776 - DNA, 25 bp, Homo sapien
gcgctataccaaatacccttctagt

SEQ ID NO: 2626777 - DNA, 25 bp, Homo sapien
ctagttctaatcttgaaaggaccaa

SEQ ID NO: 2626778 - DNA, 25 bp, Homo sapien
aattaaactcactagcgctatacca

SEQ ID NO: 2626779 - DNA, 25 bp, Homo sapien
ctgaagttgaatccagaggtgaaat

SEQ ID NO: 2626780 - DNA, 25 bp, Homo sapien
tctctccttcattgaggggcctaac

SEQ ID NO: 2626781 - DNA, 25 bp, Homo sapien
aatctctccttcattgaggggccta

SEQ ID NO: 2626782 - DNA, 25 bp, Homo sapien
ctttggaatatcataaggcacaaaa

SEQ ID NO: 2626783 - DNA, 25 bp, Homo sapien
tatcataaggcacaaaaatctctcc

SEQ ID NO: 2626784 - DNA, 25 bp, Homo sapien
cacttgaagatgctcctgatttttt

SEQ ID NO: 2626785 - DNA, 25 bp, Homo sapien
cctggaaggccactgaagaagtctt

SEQ ID NO: 2626786 - DNA, 25 bp, Homo sapien
acttcttcacacctgcctggaaggc

SEQ ID NO: 2626787 - DNA, 25 bp, Homo sapien
tcctgagaacgccaaagcccaactg

SEQ ID NO: 2626788 - DNA, 25 bp, Homo sapien
tgcaatccttaatgccagaacctac

SEQ ID NO: 2626789 - DNA, 25 bp, Homo sapien
attcatctaagtaaggtgcctgtcc

SEQ ID NO: 2626790 - DNA, 25 bp, Homo sapien
tgtgggactgttctcttgcaatcct

SEQ ID NO: 2626791 - DNA, 25 bp, Homo sapien
gcagaaactctcttcttgcagcatt

SEQ ID NO: 2626792 - DNA, 25 bp, Homo sapien
tcccatggtggctgataaagcaagt

SEQ ID NO: 2626793 - DNA, 25 bp, Homo sapien
taatagacaccaaacttggccccat

SEQ ID NO: 2626794 - DNA, 25 bp, Homo sapien
tggaatgcaggcacgtccccaactt

SEQ ID NO: 2626795 - DNA, 25 bp, Homo sapien
ttctcctccatagcatgcactggca

SEQ ID NO: 2626796 - DNA, 25 bp, Homo sapien
cgaaggagcctggaagtgtactgcc

SEQ ID NO: 2626797 - DNA, 25 bp, Homo sapien
caaggtggcttcatgcgaaggagcc

SEQ ID NO: 2626798 - DNA, 25 bp, Homo sapien
cacccatgagggaaagccttagcca

SEQ ID NO: 2626799 - DNA, 25 bp, Homo sapien
gatttagaatagagatggcaccact

SEQ ID NO: 2626800 - DNA, 25 bp, Homo sapien
tatctgctccagatcgcttgctggt

SEQ ID NO: 2626801 - DNA, 25 bp, Homo sapien
tctgtcgagtcaagttgtggatcta

SEQ ID NO: 2626802 - DNA, 25 bp, Homo sapien
tagttgggaatcttaatgcaagcag

SEQ ID NO: 2626803 - DNA, 25 bp, Homo sapien
ggacaatgacggaaagactggtatc

SEQ ID NO: 2626804 - DNA, 25 bp, Homo sapien
agctgtgaacttggcattgcttggc

SEQ ID NO: 2626805 - DNA, 25 bp, Homo sapien
cagctgtgaacttggcattgcttgg

SEQ ID NO: 2626806 - DNA, 25 bp, Homo sapien
ctgtgaacttggcattgcttggcag

SEQ ID NO: 2626807 - DNA, 25 bp, Homo sapien
gtgaacttggcattgcttggcagga

SEQ ID NO: 2626808 - DNA, 25 bp, Homo sapien
gcacttggtactgagcagaacacca

SEQ ID NO: 2626809 - DNA, 25 bp, Homo sapien
catgtgaaagtgctgcacttggtac

SEQ ID NO: 2626810 - DNA, 25 bp, Homo sapien
cattgagcatcaagcatgtgaaagt

SEQ ID NO: 2626811 - DNA, 25 bp, Homo sapien
cattcattgagcatcaagcatgtga

SEQ ID NO: 2626812 - DNA, 25 bp, Homo sapien
gattgtggctcagctgtatcgtcac

SEQ ID NO: 2626813 - DNA, 25 bp, Homo sapien
tcctggtaaacatcactgggtaagc

SEQ ID NO: 2626814 - DNA, 25 bp, Homo sapien
cagagtgcgaatcatgtctccgagt

SEQ ID NO: 2626815 - DNA, 25 bp, Homo sapien
gatgcaaccccttaggcacttctgg

SEQ ID NO: 2626816 - DNA, 25 bp, Homo sapien
tcctggaggaattgtgaagaatcac

SEQ ID NO: 2626817 - DNA, 25 bp, Homo sapien
cacatgagtgcagcctatcacagag

SEQ ID NO: 2626818 - DNA, 25 bp, Homo sapien
aagtcctatctgtcatcctggagga

SEQ ID NO: 2626819 - DNA, 25 bp, Homo sapien
gtcccatagatcacgtaaagtccag

SEQ ID NO: 2626820 - DNA, 25 bp, Homo sapien
acctccatggaacccttttgccttg

SEQ ID NO: 2626821 - DNA, 25 bp, Homo sapien
ttttagagttgttcacggcccactc

SEQ ID NO: 2626822 - DNA, 25 bp, Homo sapien
ttgctccaagtaaaggggatctttc

SEQ ID NO: 2626823 - DNA, 25 bp, Homo sapien
tttgccttgattgtctttttctgta

SEQ ID NO: 2626824 - DNA, 25 bp, Homo sapien
ctttagacttataagaaagggcaga

SEQ ID NO: 2626825 - DNA, 25 bp, Homo sapien
gcagacgaagcctcgatgtaaaata

SEQ ID NO: 2626826 - DNA, 25 bp, Homo sapien
taggggaggctttagacttataaga

SEQ ID NO: 2626827 - DNA, 25 bp, Homo sapien
agggcagacgaagcctcgatgtaaa

SEQ ID NO: 2626828 - DNA, 25 bp, Homo sapien
cacgcatggaacttgtcggagatga

SEQ ID NO: 2626829 - DNA, 25 bp, Homo sapien
ggagatgaccaggacagaaaagtga

SEQ ID NO: 2626830 - DNA, 25 bp, Homo sapien
cagtcacgcatggaacttgtcggag

SEQ ID NO: 2626831 - DNA, 25 bp, Homo sapien
tggaacttgtcggagatgaccagga

SEQ ID NO: 2626832 - DNA, 25 bp, Homo sapien
agtgtcagtgtgaatctcaaacagc

SEQ ID NO: 2626833 - DNA, 25 bp, Homo sapien
gatctcttcattgggctagtgcttg

SEQ ID NO: 2626834 - DNA, 25 bp, Homo sapien
ggctagtgcttgaagtgctgccaaa

SEQ ID NO: 2626835 - DNA, 25 bp, Homo sapien
agcaagctgacattccggttgggag

SEQ ID NO: 2626836 - DNA, 25 bp, Homo sapien
tgtgaagcaaaccaacactccgtca

SEQ ID NO: 2626837 - DNA, 25 bp, Homo sapien
tactgagtgcaaagtgtgtctattc

SEQ ID NO: 2626838 - DNA, 25 bp, Homo sapien
caggaataccccacactcatatggc

SEQ ID NO: 2626839 - DNA, 25 bp, Homo sapien
ggctgttccagtcttcaattggcat

SEQ ID NO: 2626840 - DNA, 25 bp, Homo sapien
cggcttgacctcagacgatttagct

SEQ ID NO: 2626841 - DNA, 25 bp, Homo sapien
ccccggcttgacctcagacgattta

SEQ ID NO: 2626842 - DNA, 25 bp, Homo sapien
gacctcagacgatttagctttggaa

SEQ ID NO: 2626843 - DNA, 25 bp, Homo sapien
cttgacctcagacgatttagctttg

SEQ ID NO: 2626844 - DNA, 25 bp, Homo sapien
tttggctccaatacacgacatgagc

SEQ ID NO: 2626845 - DNA, 25 bp, Homo sapien
tggctccaatacacgacatgagctc

SEQ ID NO: 2626846 - DNA, 25 bp, Homo sapien
aatacacgacatgagctcaaagcca

SEQ ID NO: 2626847 - DNA, 25 bp, Homo sapien
tccaatacacgacatgagctcaaag

SEQ ID NO: 2626848 - DNA, 25 bp, Homo sapien
aggaccagctgagttgataaacagg

SEQ ID NO: 2626849 - DNA, 25 bp, Homo sapien
ataaacaggttttccataaggacat

SEQ ID NO: 2626850 - DNA, 25 bp, Homo sapien
tcaattgttgccaaatggaactctc

SEQ ID NO: 2626851 - DNA, 25 bp, Homo sapien
tgccaaatggaactctccaaggacc

SEQ ID NO: 2626852 - DNA, 25 bp, Homo sapien
ggtgagggtgttgggtgcatcatgc

SEQ ID NO: 2626853 - DNA, 25 bp, Homo sapien
atcatgcccgtgtgtactctccacc

SEQ ID NO: 2626854 - DNA, 25 bp, Homo sapien
agtcatggtcaagtacccgtgcctg

SEQ ID NO: 2626855 - DNA, 25 bp, Homo sapien
tacccgtgcctgtgtttggcgctgg

SEQ ID NO: 2626856 - DNA, 25 bp, Homo sapien
actgcaccaaatgcagagcagactg

SEQ ID NO: 2626857 - DNA, 25 bp, Homo sapien
gcaccaaatgcagagcagactgttc

SEQ ID NO: 2626858 - DNA, 25 bp, Homo sapien
gtatactgcaccaaatgcagagcag

SEQ ID NO: 2626859 - DNA, 25 bp, Homo sapien
ccggagtatactgcaccaaatgcag

SEQ ID NO: 2626860 - DNA, 25 bp, Homo sapien
gtcctgccctgcactttggcagaac

SEQ ID NO: 2626861 - DNA, 25 bp, Homo sapien
ctgttcttaactcgccttccccagt

SEQ ID NO: 2626862 - DNA, 25 bp, Homo sapien
gctgttcttaactcgccttccccag

SEQ ID NO: 2626863 - DNA, 25 bp, Homo sapien
gaataaacttagaggcaaacgcggc

SEQ ID NO: 2626864 - DNA, 25 bp, Homo sapien
gacacaagtcccgttgcatactggc

SEQ ID NO: 2626865 - DNA, 25 bp, Homo sapien
gcatactggcgttctgacctccaaa

SEQ ID NO: 2626866 - DNA, 25 bp, Homo sapien
ttttgccagatttcgcggtagtgcc

SEQ ID NO: 2626867 - DNA, 25 bp, Homo sapien
tctagcgacccccagcgcagccctt

SEQ ID NO: 2626868 - DNA, 25 bp, Homo sapien
ttccccgctggtgacctagattggg

SEQ ID NO: 2626869 - DNA, 25 bp, Homo sapien
cagcgcagcccttccccgctggtga

SEQ ID NO: 2626870 - DNA, 25 bp, Homo sapien
cctctctagcgacccccagcgcagc

SEQ ID NO: 2626871 - DNA, 25 bp, Homo sapien
cccggggatgaaattacaatcgagt

SEQ ID NO: 2626872 - DNA, 25 bp, Homo sapien
ggcccggggatgaaattacaatcga

SEQ ID NO: 2626873 - DNA, 25 bp, Homo sapien
gcccggggatgaaattacaatcgag

SEQ ID NO: 2626874 - DNA, 25 bp, Homo sapien
cggcccggggatgaaattacaatcg

SEQ ID NO: 2626875 - DNA, 25 bp, Homo sapien
cgggaggtcggcgtgcgcgagtgaa

SEQ ID NO: 2626876 - DNA, 25 bp, Homo sapien
ctgcaaagtttcaccaagtcccggg

SEQ ID NO: 2626877 - DNA, 25 bp, Homo sapien
ggcgcacacggaaagggcgtctccg

SEQ ID NO: 2626878 - DNA, 25 bp, Homo sapien
ttccaagaggtaggactgcagccgg

SEQ ID NO: 2626879 - DNA, 25 bp, Homo sapien
gttttcggatggccgctcggagcga

SEQ ID NO: 2626880 - DNA, 25 bp, Homo sapien
tggttttcggatggccgctcggagc

SEQ ID NO: 2626881 - DNA, 25 bp, Homo sapien
ggttttcggatggccgctcggagcg

SEQ ID NO: 2626882 - DNA, 25 bp, Homo sapien
ctggttttcggatggccgctcggag

SEQ ID NO: 2626883 - DNA, 25 bp, Homo sapien
tccccacataccaaccagtgaggag

SEQ ID NO: 2626884 - DNA, 25 bp, Homo sapien
ttccccacataccaaccagtgagga

SEQ ID NO: 2626885 - DNA, 25 bp, Homo sapien
cccacataccaaccagtgaggagca

SEQ ID NO: 2626886 - DNA, 25 bp, Homo sapien
ccacataccaaccagtgaggagcat

SEQ ID NO: 2626887 - DNA, 25 bp, Homo sapien
aacagctgcttctcagttgcaaact

SEQ ID NO: 2626888 - DNA, 25 bp, Homo sapien
gattttggggatatcctccagctgc

SEQ ID NO: 2626889 - DNA, 25 bp, Homo sapien
ctaaaaaggatggctaaattgtgga

SEQ ID NO: 2626890 - DNA, 25 bp, Homo sapien
tgggtggtccttgagatcccaaaag

SEQ ID NO: 2626891 - DNA, 25 bp, Homo sapien
cattggaatgcccattatgtaccaa

SEQ ID NO: 2626892 - DNA, 25 bp, Homo sapien
taaactctatagaccacaatgaatc

SEQ ID NO: 2626893 - DNA, 25 bp, Homo sapien
catggatgcctaagctcaattatac

SEQ ID NO: 2626894 - DNA, 25 bp, Homo sapien
gcaggtatatcttccgtcatcatag

SEQ ID NO: 2626895 - DNA, 25 bp, Homo sapien
ttcatttttatcaggcatgttggtt

SEQ ID NO: 2626896 - DNA, 25 bp, Homo sapien
tattcatttttatcaggcatgttgg

SEQ ID NO: 2626897 - DNA, 25 bp, Homo sapien
aggagtattcatttttatcaggcat

SEQ ID NO: 2626898 - DNA, 25 bp, Homo sapien
agtattcatttttatcaggcatgtt

SEQ ID NO: 2626899 - DNA, 25 bp, Homo sapien
tcatagcgctccatctcttcagggc

SEQ ID NO: 2626900 - DNA, 25 bp, Homo sapien
gctagtcactggcaccttattttgt

SEQ ID NO: 2626901 - DNA, 25 bp, Homo sapien
gatgaagcagatacttattccagtg

SEQ ID NO: 2626902 - DNA, 25 bp, Homo sapien
tccagtgttcacagtctagctctgt

SEQ ID NO: 2626903 - DNA, 25 bp, Homo sapien
cagctttataattagttctgtaatc

SEQ ID NO: 2626904 - DNA, 25 bp, Homo sapien
agctttataattagttctgtaatct

SEQ ID NO: 2626905 - DNA, 25 bp, Homo sapien
gctttataattagttctgtaatctg

SEQ ID NO: 2626906 - DNA, 25 bp, Homo sapien
aactctttagcttggtttagaatag

SEQ ID NO: 2626907 - DNA, 25 bp, Homo sapien
ctgctataaaacaactctttagctt

SEQ ID NO: 2626908 - DNA, 25 bp, Homo sapien
ctataaaacaactctttagcttggt

SEQ ID NO: 2626909 - DNA, 25 bp, Homo sapien
acaactctttagcttggtttagaat

SEQ ID NO: 2626910 - DNA, 25 bp, Homo sapien
cagctttggtcctgcgtcatggttc

SEQ ID NO: 2626911 - DNA, 25 bp, Homo sapien
ccactattattctggggacttctta

SEQ ID NO: 2626912 - DNA, 25 bp, Homo sapien
tatttgtcattctagcatctccttc

SEQ ID NO: 2626913 - DNA, 25 bp, Homo sapien
tgtccaagttttcgtgacagtcatc

SEQ ID NO: 2626914 - DNA, 25 bp, Homo sapien
gcaactctaggattgccaacttcac

SEQ ID NO: 2626915 - DNA, 25 bp, Homo sapien
ctcattgtcagcaactctaggattg

SEQ ID NO: 2626916 - DNA, 25 bp, Homo sapien
taggattgccaacttcacttcaagt

SEQ ID NO: 2626917 - DNA, 25 bp, Homo sapien
gccaacttcacttcaagtttgtgat

SEQ ID NO: 2626918 - DNA, 25 bp, Homo sapien
ctctctgtgttccagatatgactct

SEQ ID NO: 2626919 - DNA, 25 bp, Homo sapien
ctctgtgttccagatatgactctcc

SEQ ID NO: 2626920 - DNA, 25 bp, Homo sapien
cctctctctgtgttccagatatgac

SEQ ID NO: 2626921 - DNA, 25 bp, Homo sapien
ctgtgttccagatatgactctccat

SEQ ID NO: 2626922 - DNA, 25 bp, Homo sapien
cggtggttcctccacaccttgtttg

SEQ ID NO: 2626923 - DNA, 25 bp, Homo sapien
cagagccctgtctcctttagcagac

SEQ ID NO: 2626924 - DNA, 25 bp, Homo sapien
gtttggaaaggtgaccttgctccag

SEQ ID NO: 2626925 - DNA, 25 bp, Homo sapien
gttggggaccgctgtcttacatcat

SEQ ID NO: 2626926 - DNA, 25 bp, Homo sapien
gaggcccaagaccagggctctagcc

SEQ ID NO: 2626927 - DNA, 25 bp, Homo sapien
catgaaggttctgagcggagctgtg

SEQ ID NO: 2626928 - DNA, 25 bp, Homo sapien
gagaggcccaagaccagggctctag

SEQ ID NO: 2626929 - DNA, 25 bp, Homo sapien
aagaccagggctctagccctcatga

SEQ ID NO: 2626930 - DNA, 25 bp, Homo sapien
ctacttcggttgctgctcatcagct

SEQ ID NO: 2626931 - DNA, 25 bp, Homo sapien
catcagctagaacaggatttttcaa

SEQ ID NO: 2626932 - DNA, 25 bp, Homo sapien
aatgttttgctctctatgtcctgga

SEQ ID NO: 2626933 - DNA, 25 bp, Homo sapien
catcatagcagtggaagccagaggg

SEQ ID NO: 2626934 - DNA, 25 bp, Homo sapien
ggtcctggaatgatgagttctcatg

SEQ ID NO: 2626935 - DNA, 25 bp, Homo sapien
caagactggcgatgggtcctggaat

SEQ ID NO: 2626936 - DNA, 25 bp, Homo sapien
tgccacaactgcttccagacacccg

SEQ ID NO: 2626937 - DNA, 25 bp, Homo sapien
tctcatgttttgatggccttgcttg

SEQ ID NO: 2626938 - DNA, 25 bp, Homo sapien
atgtattaaagtaagatgacaggca

SEQ ID NO: 2626939 - DNA, 25 bp, Homo sapien
gtattaaagtaagatgacaggcaca

SEQ ID NO: 2626940 - DNA, 25 bp, Homo sapien
tattaaagtaagatgacaggcacat

SEQ ID NO: 2626941 - DNA, 25 bp, Homo sapien
taaatgtattaaagtaagatgacag

SEQ ID NO: 2626942 - DNA, 25 bp, Homo sapien
ccagcaaagggagattcagggtagc

SEQ ID NO: 2626943 - DNA, 25 bp, Homo sapien
aactattgcccttattctctcgggt

SEQ ID NO: 2626944 - DNA, 25 bp, Homo sapien
tctcgggtaacttctaataggtcag

SEQ ID NO: 2626945 - DNA, 25 bp, Homo sapien
gcatcagtagataaatcagtccaac

SEQ ID NO: 2626946 - DNA, 25 bp, Homo sapien
ccagcttgatgtcaagaggaggccc

SEQ ID NO: 2626947 - DNA, 25 bp, Homo sapien
ccgtacagttcaatgcgcccagctt

SEQ ID NO: 2626948 - DNA, 25 bp, Homo sapien
cactggatgctgaaagccgtacagt

SEQ ID NO: 2626949 - DNA, 25 bp, Homo sapien
gatgtcaagaggaggccctaccttg

SEQ ID NO: 2626950 - DNA, 25 bp, Homo sapien
gaaactcccatgcccgtgtactcac

SEQ ID NO: 2626951 - DNA, 25 bp, Homo sapien
cgaggaaactcccatgcccgtgtac

SEQ ID NO: 2626952 - DNA, 25 bp, Homo sapien
gaggaaactcccatgcccgtgtact

SEQ ID NO: 2626953 - DNA, 25 bp, Homo sapien
aggaaactcccatgcccgtgtactc

SEQ ID NO: 2626954 - DNA, 25 bp, Homo sapien
tgaggagtccaggaggaagacacat

SEQ ID NO: 2626955 - DNA, 25 bp, Homo sapien
ctgaggagtccaggaggaagacaca

SEQ ID NO: 2626956 - DNA, 25 bp, Homo sapien
ctgcgggaacacacatcagacctac

SEQ ID NO: 2626957 - DNA, 25 bp, Homo sapien
cacacatcagacctacttgggttgg

SEQ ID NO: 2626958 - DNA, 25 bp, Homo sapien
catcagacctacttgggttgggtgg

SEQ ID NO: 2626959 - DNA, 25 bp, Homo sapien
ggaacacacatcagacctacttggg

SEQ ID NO: 2626960 - DNA, 25 bp, Homo sapien
gctctgaggtgcgttgcctaacatc

SEQ ID NO: 2626961 - DNA, 25 bp, Homo sapien
gcttgtgtaagatcaaaggttgtaa

SEQ ID NO: 2626962 - DNA, 25 bp, Homo sapien
gttgcctaacatcacgtgcactagt

SEQ ID NO: 2626963 - DNA, 25 bp, Homo sapien
ggttgtaattgcactcacagtggca

SEQ ID NO: 2626964 - DNA, 25 bp, Homo sapien
aggcacgctgtgcaactgctcctgc

SEQ ID NO: 2626965 - DNA, 25 bp, Homo sapien
cagggatttatctgcgccaacctca

SEQ ID NO: 2626966 - DNA, 25 bp, Homo sapien
tctgcgccaacctcagagtaaaaga

SEQ ID NO: 2626967 - DNA, 25 bp, Homo sapien
cgtggtcgggatgtcccggctgaga

SEQ ID NO: 2626968 - DNA, 25 bp, Homo sapien
aaaattgcctgatgatcaggttgtc

SEQ ID NO: 2626969 - DNA, 25 bp, Homo sapien
aaaaattgcctgatgatcaggttgt

SEQ ID NO: 2626970 - DNA, 25 bp, Homo sapien
aaattgcctgatgatcaggttgtcc

SEQ ID NO: 2626971 - DNA, 25 bp, Homo sapien
cagcctggctgtaagctgctatgct

SEQ ID NO: 2626972 - DNA, 25 bp, Homo sapien
gctcacacgatattcagtgcctggt

SEQ ID NO: 2626973 - DNA, 25 bp, Homo sapien
cttgggacaaagtggtgacatgccg

SEQ ID NO: 2626974 - DNA, 25 bp, Homo sapien
gaggagagctcagccgccctttgcc

SEQ ID NO: 2626975 - DNA, 25 bp, Homo sapien
ccttcactcgctccaggtttccaag

SEQ ID NO: 2626976 - DNA, 25 bp, Homo sapien
tgatgaattccacagaatagtactg

SEQ ID NO: 2626977 - DNA, 25 bp, Homo sapien
gtttccaagacagggccacctcaga

SEQ ID NO: 2626978 - DNA, 25 bp, Homo sapien
cctcagaatccgaaaccacaatgac

SEQ ID NO: 2626979 - DNA, 25 bp, Homo sapien
ttttgaatgtgacatacagacttac

SEQ ID NO: 2626980 - DNA, 25 bp, Homo sapien
ccagcacacatttggcttttgaatg

SEQ ID NO: 2626981 - DNA, 25 bp, Homo sapien
cgcgcccagcacacatttggctttt

SEQ ID NO: 2626982 - DNA, 25 bp, Homo sapien
catttggcttttgaatgtgacatac

SEQ ID NO: 2626983 - DNA, 25 bp, Homo sapien
ttgatactatcaaaccccataggtg

SEQ ID NO: 2626984 - DNA, 25 bp, Homo sapien
agtgaacaatcacttttcttgatac

SEQ ID NO: 2626985 - DNA, 25 bp, Homo sapien
gaggctccacggaagtgtaagcaca

SEQ ID NO: 2626986 - DNA, 25 bp, Homo sapien
ctgccatgggctagtccattggcaa

SEQ ID NO: 2626987 - DNA, 25 bp, Homo sapien
tggtatctggatcgaggcccttgat

SEQ ID NO: 2626988 - DNA, 25 bp, Homo sapien
tgccctcacggcaaactggtagttg

SEQ ID NO: 2626989 - DNA, 25 bp, Homo sapien
gatccgctcatggattgaggtccac

SEQ ID NO: 2626990 - DNA, 25 bp, Homo sapien
ggcccttgataaccatggagtccat

SEQ ID NO: 2626991 - DNA, 25 bp, Homo sapien
aagcccagatatgcagctcccttgg

SEQ ID NO: 2626992 - DNA, 25 bp, Homo sapien
caagtgagtcttcatgaggcaagcc

SEQ ID NO: 2626993 - DNA, 25 bp, Homo sapien
aggctgtccttctgcacggcatcca

SEQ ID NO: 2626994 - DNA, 25 bp, Homo sapien
ggcatccaggtcaagtgagtcttca

SEQ ID NO: 2626995 - DNA, 25 bp, Homo sapien
tgacctccaggacatagaaacagcc

SEQ ID NO: 2626996 - DNA, 25 bp, Homo sapien
cccaaggatgatgcaaaaataaatc

SEQ ID NO: 2626997 - DNA, 25 bp, Homo sapien
aaacagcccgtgtccctgttgacag

SEQ ID NO: 2626998 - DNA, 25 bp, Homo sapien
ctcaaacttcccaaggatgatgcaa

SEQ ID NO: 2626999 - DNA, 25 bp, Homo sapien
cagaggagttgatgttgtttgaata

SEQ ID NO: 2627000 - DNA, 25 bp, Homo sapien
tattttcaggcgaacacgaacgctg

SEQ ID NO: 2627001 - DNA, 25 bp, Homo sapien
ccatgtcagcgctcaacttctttga

SEQ ID NO: 2627002 - DNA, 25 bp, Homo sapien
gatactcctcgaccatcattcagag

SEQ ID NO: 2627003 - DNA, 25 bp, Homo sapien
ctatgtgggtttctagaacaactgt

SEQ ID NO: 2627004 - DNA, 25 bp, Homo sapien
gagttcacttttgcctgcgaacctt

SEQ ID NO: 2627005 - DNA, 25 bp, Homo sapien
cacattgcaattctgggagttcact

SEQ ID NO: 2627006 - DNA, 25 bp, Homo sapien
tgcctgcgaaccttgccaatgggaa

SEQ ID NO: 2627007 - DNA, 25 bp, Homo sapien
tcttcccattcccagaacagagctc

SEQ ID NO: 2627008 - DNA, 25 bp, Homo sapien
aaggatcctgtgatcaacatcagtg

SEQ ID NO: 2627009 - DNA, 25 bp, Homo sapien
ctaaggatcctgtgatcaacatcag

SEQ ID NO: 2627010 - DNA, 25 bp, Homo sapien
taaggatcctgtgatcaacatcagt

SEQ ID NO: 2627011 - DNA, 25 bp, Homo sapien
tgtaagtgtgggaactactgccatc

SEQ ID NO: 2627012 - DNA, 25 bp, Homo sapien
tccagactgagtcgcaagggctcgt

SEQ ID NO: 2627013 - DNA, 25 bp, Homo sapien
gaaggtgccctctatctgacgcaat

SEQ ID NO: 2627014 - DNA, 25 bp, Homo sapien
tgttataaacgccaaagaacgctga

SEQ ID NO: 2627015 - DNA, 25 bp, Homo sapien
ttattttggaaagaaatgtatgtac

SEQ ID NO: 2627016 - DNA, 25 bp, Homo sapien
tccacacagcagaagcgcaaatggt

SEQ ID NO: 2627017 - DNA, 25 bp, Homo sapien
taagccagtcaaccaaacacatgcc

SEQ ID NO: 2627018 - DNA, 25 bp, Homo sapien
gcaaatggtgcataacccctgtggg

SEQ ID NO: 2627019 - DNA, 25 bp, Homo sapien
gcaaagcataatgggagaagcggct

SEQ ID NO: 2627020 - DNA, 25 bp, Homo sapien
tgcttctgctgtagatattacagaa

SEQ ID NO: 2627021 - DNA, 25 bp, Homo sapien
tctgctgtagatattacagaagcta

SEQ ID NO: 2627022 - DNA, 25 bp, Homo sapien
tacagaagctaaatactggattttt

SEQ ID NO: 2627023 - DNA, 25 bp, Homo sapien
tggatttttaagtcccctttgctca

SEQ ID NO: 2627024 - DNA, 25 bp, Homo sapien
tggcttgggttatacgctttaagta

SEQ ID NO: 2627025 - DNA, 25 bp, Homo sapien
taatgaccacattccgaccagccat

SEQ ID NO: 2627026 - DNA, 25 bp, Homo sapien
ggatctatgcctgatcttataatga

SEQ ID NO: 2627027 - DNA, 25 bp, Homo sapien
gtcattctgcagagtgttcctggaa

SEQ ID NO: 2627028 - DNA, 25 bp, Homo sapien
tctgagtagcacgatgaaatagcac

SEQ ID NO: 2627029 - DNA, 25 bp, Homo sapien
ctatctttgtacagcaagcagtccc

SEQ ID NO: 2627030 - DNA, 25 bp, Homo sapien
gtcttcacacaaaaggcccttgagg

SEQ ID NO: 2627031 - DNA, 25 bp, Homo sapien
gcatgcagcgtatctgtgtgccaga

SEQ ID NO: 2627032 - DNA, 25 bp, Homo sapien
aagaaaagcagcacacccttcatca

SEQ ID NO: 2627033 - DNA, 25 bp, Homo sapien
aaaagcagcacacccttcatcagca

SEQ ID NO: 2627034 - DNA, 25 bp, Homo sapien
gaaaagcagcacacccttcatcagc

SEQ ID NO: 2627035 - DNA, 25 bp, Homo sapien
agaaaagcagcacacccttcatcag

SEQ ID NO: 2627036 - DNA, 25 bp, Homo sapien
tgatataacggggtccatagcggcc

SEQ ID NO: 2627037 - DNA, 25 bp, Homo sapien
ataacggggtccatagcggccactt

SEQ ID NO: 2627038 - DNA, 25 bp, Homo sapien
tcggtgatataacggggtccatagc

SEQ ID NO: 2627039 - DNA, 25 bp, Homo sapien
gtcggtgatataacggggtccatag

SEQ ID NO: 2627040 - DNA, 25 bp, Homo sapien
gtcttcaaatccttcatcatcctca

SEQ ID NO: 2627041 - DNA, 25 bp, Homo sapien
ccaaatctaagtcgtcttcaaatcc

SEQ ID NO: 2627042 - DNA, 25 bp, Homo sapien
taagtcgtcttcaaatccttcatca

SEQ ID NO: 2627043 - DNA, 25 bp, Homo sapien
aggaaatatccaaatctaagtcgtc

SEQ ID NO: 2627044 - DNA, 25 bp, Homo sapien
ggtctttgggttagatatagacatc

SEQ ID NO: 2627045 - DNA, 25 bp, Homo sapien
ctttgggttagatatagacatcttc

SEQ ID NO: 2627046 - DNA, 25 bp, Homo sapien
ggttagatatagacatcttcttgct

SEQ ID NO: 2627047 - DNA, 25 bp, Homo sapien
agatatagacatcttcttgctttcc

SEQ ID NO: 2627048 - DNA, 25 bp, Homo sapien
tgtagtcattgacacagaagctgtc

SEQ ID NO: 2627049 - DNA, 25 bp, Homo sapien
tcacaaggcatgtcaaagagccttg

SEQ ID NO: 2627050 - DNA, 25 bp, Homo sapien
cccagggtgcactggcatcgcgagc

SEQ ID NO: 2627051 - DNA, 25 bp, Homo sapien
caaagagccttgacattatggccac

SEQ ID NO: 2627052 - DNA, 25 bp, Homo sapien
ttcttcagaggttcaaacgttacat

SEQ ID NO: 2627053 - DNA, 25 bp, Homo sapien
caaacgttacataggagtggccaaa

SEQ ID NO: 2627054 - DNA, 25 bp, Homo sapien
aaatgcctgataagaattcttcaga

SEQ ID NO: 2627055 - DNA, 25 bp, Homo sapien
cctgataagaattcttcagaggttc

SEQ ID NO: 2627056 - DNA, 25 bp, Homo sapien
cctgctgccccgcttcctctccccc

SEQ ID NO: 2627057 - DNA, 25 bp, Homo sapien
gctgccccgcttcctctcccccagc

SEQ ID NO: 2627058 - DNA, 25 bp, Homo sapien
tctccctgctgccccgcttcctctc

SEQ ID NO: 2627059 - DNA, 25 bp, Homo sapien
ctctccctgctgccccgcttcctct

SEQ ID NO: 2627060 - DNA, 25 bp, Homo sapien
gaatgttgtgaatgtactcttcatt

SEQ ID NO: 2627061 - DNA, 25 bp, Homo sapien
tcattcctattgtctcatgagctgg

SEQ ID NO: 2627062 - DNA, 25 bp, Homo sapien
gtctcatgagctggtttagagacag

SEQ ID NO: 2627063 - DNA, 25 bp, Homo sapien
tcctcactgtcacacttgaatgttg

SEQ ID NO: 2627064 - DNA, 25 bp, Homo sapien
cgtgttcgttctccccacagtagag

SEQ ID NO: 2627065 - DNA, 25 bp, Homo sapien
gggagcgtcggatgatagccaggga

SEQ ID NO: 2627066 - DNA, 25 bp, Homo sapien
gtagagcagtaagccatcctctgcc

SEQ ID NO: 2627067 - DNA, 25 bp, Homo sapien
tgaactgcagggagcgtcggatgat

SEQ ID NO: 2627068 - DNA, 25 bp, Homo sapien
tgctaggaccctacaaggtgaaaac

SEQ ID NO: 2627069 - DNA, 25 bp, Homo sapien
tctatccgatcctccaagtgctagg

SEQ ID NO: 2627070 - DNA, 25 bp, Homo sapien
taacaactgccagtgctactgagag

SEQ ID NO: 2627071 - DNA, 25 bp, Homo sapien
aaaaccaccgcccaagatcctggtg

SEQ ID NO: 2627072 - DNA, 25 bp, Homo sapien
cttacgatgatggcaaccccagttc

SEQ ID NO: 2627073 - DNA, 25 bp, Homo sapien
tagagcataaccgtgtgccaacccc

SEQ ID NO: 2627074 - DNA, 25 bp, Homo sapien
tctgtagagcataaccgtgtgccaa

SEQ ID NO: 2627075 - DNA, 25 bp, Homo sapien
cgtgtgccaaccccctagtttgatt

SEQ ID NO: 2627076 - DNA, 25 bp, Homo sapien
ccgtgtgccaaccccctagtttgat

SEQ ID NO: 2627077 - DNA, 25 bp, Homo sapien
aataggccttaccaagcccatccag

SEQ ID NO: 2627078 - DNA, 25 bp, Homo sapien
gttcaccatgagaaataggccttac

SEQ ID NO: 2627079 - DNA, 25 bp, Homo sapien
tggagtgcaagaccactcagtagca

SEQ ID NO: 2627080 - DNA, 25 bp, Homo sapien
cacatcaaaggtctgttgcatgggt

SEQ ID NO: 2627081 - DNA, 25 bp, Homo sapien
ttgggcacagtcctgcaacatggac

SEQ ID NO: 2627082 - DNA, 25 bp, Homo sapien
tctctttggtagatgtgcggtggat

SEQ ID NO: 2627083 - DNA, 25 bp, Homo sapien
cttctctttggtagatgtgcggtgg

SEQ ID NO: 2627084 - DNA, 25 bp, Homo sapien
tggacctatgcaccaacagcaatga

SEQ ID NO: 2627085 - DNA, 25 bp, Homo sapien
tgcttccagaagggaggattttgga

SEQ ID NO: 2627086 - DNA, 25 bp, Homo sapien
ctgggagcgccaccaagatagagag

SEQ ID NO: 2627087 - DNA, 25 bp, Homo sapien
gatagagaggtgtccggaaagtaat

SEQ ID NO: 2627088 - DNA, 25 bp, Homo sapien
atagagaggtgtccggaaagtaatt

SEQ ID NO: 2627089 - DNA, 25 bp, Homo sapien
caagatagagaggtgtccggaaagt

SEQ ID NO: 2627090 - DNA, 25 bp, Homo sapien
gaaagcctcggtttgtccctgttgc

SEQ ID NO: 2627091 - DNA, 25 bp, Homo sapien
ggccagggcctcatgtcaattctcc

SEQ ID NO: 2627092 - DNA, 25 bp, Homo sapien
tgttgctctaaccaaccagtaagcg

SEQ ID NO: 2627093 - DNA, 25 bp, Homo sapien
ttcacagcgagcgactgcacacagc

SEQ ID NO: 2627094 - DNA, 25 bp, Homo sapien
taggccagttgttgtgtaggtttct

SEQ ID NO: 2627095 - DNA, 25 bp, Homo sapien
cataggccagttgttgtgtaggttt

SEQ ID NO: 2627096 - DNA, 25 bp, Homo sapien
aggccagttgttgtgtaggtttctg

SEQ ID NO: 2627097 - DNA, 25 bp, Homo sapien
ataggccagttgttgtgtaggtttc

SEQ ID NO: 2627098 - DNA, 25 bp, Homo sapien
gaattggtccagtcttttcataaag

SEQ ID NO: 2627099 - DNA, 25 bp, Homo sapien
tccttgaattggtccagtcttttca

SEQ ID NO: 2627100 - DNA, 25 bp, Homo sapien
ttccctccttgaattggtccagtct

SEQ ID NO: 2627101 - DNA, 25 bp, Homo sapien
cctccttgaattggtccagtctttt

SEQ ID NO: 2627102 - DNA, 25 bp, Homo sapien
agggagggagggccccataatacat

SEQ ID NO: 2627103 - DNA, 25 bp, Homo sapien
tcagaatccctatttctacttccaa

SEQ ID NO: 2627104 - DNA, 25 bp, Homo sapien
ggccccataatacattggcacatgg

SEQ ID NO: 2627105 - DNA, 25 bp, Homo sapien
agggagggccccataatacattggc

SEQ ID NO: 2627106 - DNA, 25 bp, Homo sapien
cacagtgtcgacctttaaacccaag

SEQ ID NO: 2627107 - DNA, 25 bp, Homo sapien
ctttgattgctgtgcaggtgccacc

SEQ ID NO: 2627108 - DNA, 25 bp, Homo sapien
catggatgcacgaggcctcatcaca

SEQ ID NO: 2627109 - DNA, 25 bp, Homo sapien
cagaggcaaatgtaggagtcggctt

SEQ ID NO: 2627110 - DNA, 25 bp, Homo sapien
aaattaacatgcagatagaaaccgc

SEQ ID NO: 2627111 - DNA, 25 bp, Homo sapien
gatagaaaccgccttcaacttgctt

SEQ ID NO: 2627112 - DNA, 25 bp, Homo sapien
catgcagatagaaaccgccttcaac

SEQ ID NO: 2627113 - DNA, 25 bp, Homo sapien
tacatctacacaaattaacatgcag

SEQ ID NO: 2627114 - DNA, 25 bp, Homo sapien
cagggagttgcagcgtaagatctca

SEQ ID NO: 2627115 - DNA, 25 bp, Homo sapien
agttgcagcgtaagatctcagagac

SEQ ID NO: 2627116 - DNA, 25 bp, Homo sapien
ggaaaggtaatgctggggctccagt

SEQ ID NO: 2627117 - DNA, 25 bp, Homo sapien
cagtggccagggagttgcagcgtaa

SEQ ID NO: 2627118 - DNA, 25 bp, Homo sapien
atagctgtacaggaggacaccatct

SEQ ID NO: 2627119 - DNA, 25 bp, Homo sapien
gagtctggccgaaatgtgatctcaa

SEQ ID NO: 2627120 - DNA, 25 bp, Homo sapien
gccccctgccaagttgatggacagg

SEQ ID NO: 2627121 - DNA, 25 bp, Homo sapien
tgcctgtgtcatagctgtacaggag

SEQ ID NO: 2627122 - DNA, 25 bp, Homo sapien
acacgaagctcgtgccagttgccca

SEQ ID NO: 2627123 - DNA, 25 bp, Homo sapien
ttgctgtgcgagatacacgaagctc

SEQ ID NO: 2627124 - DNA, 25 bp, Homo sapien
tgtgcgagatacacgaagctcgtgc

SEQ ID NO: 2627125 - DNA, 25 bp, Homo sapien
cattctttgctgtgcgagatacacg

SEQ ID NO: 2627126 - DNA, 25 bp, Homo sapien
ctgggtgccggacacgggagtctca

SEQ ID NO: 2627127 - DNA, 25 bp, Homo sapien
tgccggacacgggagtctcatatcc

SEQ ID NO: 2627128 - DNA, 25 bp, Homo sapien
gccggacacgggagtctcatatcct

SEQ ID NO: 2627129 - DNA, 25 bp, Homo sapien
ggacacgggagtctcatatcctacc

SEQ ID NO: 2627130 - DNA, 25 bp, Homo sapien
catcatcataattggggactccgcc

SEQ ID NO: 2627131 - DNA, 25 bp, Homo sapien
atgctcccgctgaaaggcttcagga

SEQ ID NO: 2627132 - DNA, 25 bp, Homo sapien
gacacccgagttcttcttcacatca

SEQ ID NO: 2627133 - DNA, 25 bp, Homo sapien
tgcacttaatctgtgtgaagcctcc

SEQ ID NO: 2627134 - DNA, 25 bp, Homo sapien
tctgggtggcccagtaaacatgagg

SEQ ID NO: 2627135 - DNA, 25 bp, Homo sapien
gtggcccagtaaacatgaggaagag

SEQ ID NO: 2627136 - DNA, 25 bp, Homo sapien
aaacatgaggaagagatgcctgtac

SEQ ID NO: 2627137 - DNA, 25 bp, Homo sapien
cagtaaacatgaggaagagatgcct

SEQ ID NO: 2627138 - DNA, 25 bp, Homo sapien
aagtgtctttcttgggtgcagcaga

SEQ ID NO: 2627139 - DNA, 25 bp, Homo sapien
cagcagatgacactgatcataatcc

SEQ ID NO: 2627140 - DNA, 25 bp, Homo sapien
ggtgcagcagatgacactgatcata

SEQ ID NO: 2627141 - DNA, 25 bp, Homo sapien
agatgacactgatcataatcctcac

SEQ ID NO: 2627142 - DNA, 25 bp, Homo sapien
agacctcgaacttcagtaacaaagg

SEQ ID NO: 2627143 - DNA, 25 bp, Homo sapien
tcacagacctcgaacttcagtaaca

SEQ ID NO: 2627144 - DNA, 25 bp, Homo sapien
gaaacacgtgactgtcagcaaatgt

SEQ ID NO: 2627145 - DNA, 25 bp, Homo sapien
aacaaagggaaacacgtgactgtca

SEQ ID NO: 2627146 - DNA, 25 bp, Homo sapien
ctcacacaggggtgggccgcattct

SEQ ID NO: 2627147 - DNA, 25 bp, Homo sapien
tggatggttcggtcattcaggatga

SEQ ID NO: 2627148 - DNA, 25 bp, Homo sapien
cccaaggggcagtcacagtcatagc

SEQ ID NO: 2627149 - DNA, 25 bp, Homo sapien
acattcactccggaggtgaagtcat

SEQ ID NO: 2627150 - DNA, 25 bp, Homo sapien
tattctagataccagggccgtgtcc

SEQ ID NO: 2627151 - DNA, 25 bp, Homo sapien
gcaggaaaggccacactgaaactga

SEQ ID NO: 2627152 - DNA, 25 bp, Homo sapien
taagcaggtacagaaagcaagtcca

SEQ ID NO: 2627153 - DNA, 25 bp, Homo sapien
tctccccacgaataataatgaccag

SEQ ID NO: 2627154 - DNA, 25 bp, Homo sapien
ctgctacagagaaacaccgccatct

SEQ ID NO: 2627155 - DNA, 25 bp, Homo sapien
ccatctagtggcctgtggaatcctg

SEQ ID NO: 2627156 - DNA, 25 bp, Homo sapien
tacagagaaacaccgccatctagtg

SEQ ID NO: 2627157 - DNA, 25 bp, Homo sapien
tagtggcctgtggaatcctgcacag

SEQ ID NO: 2627158 - DNA, 25 bp, Homo sapien
gagagtccagaacgtcctcttaggg

SEQ ID NO: 2627159 - DNA, 25 bp, Homo sapien
aaagctctgcccgagagtccagaac

SEQ ID NO: 2627160 - DNA, 25 bp, Homo sapien
caaatcccaattactctggttgcag

SEQ ID NO: 2627161 - DNA, 25 bp, Homo sapien
tttcacagtccttgtcaaatcccaa

SEQ ID NO: 2627162 - DNA, 25 bp, Homo sapien
ggctctgcacatgagcttccgaggg

SEQ ID NO: 2627163 - DNA, 25 bp, Homo sapien
gggaggcttcccaccacgcgtaggc

SEQ ID NO: 2627164 - DNA, 25 bp, Homo sapien
caagggttgggacgtgcctgccaca

SEQ ID NO: 2627165 - DNA, 25 bp, Homo sapien
gaggcttcccaccacgcgtaggcat

SEQ ID NO: 2627166 - DNA, 25 bp, Homo sapien
gctgttgttggcccgtggcggtggg

SEQ ID NO: 2627167 - DNA, 25 bp, Homo sapien
tgctgttgttggcccgtggcggtgg

SEQ ID NO: 2627168 - DNA, 25 bp, Homo sapien
ctgctgttgttggcccgtggcggtg

SEQ ID NO: 2627169 - DNA, 25 bp, Homo sapien
ggttgtcatacgtcaggtaactgcg

SEQ ID NO: 2627170 - DNA, 25 bp, Homo sapien
taactgcggccgataaactgcggga

SEQ ID NO: 2627171 - DNA, 25 bp, Homo sapien
gataaactgcgggatctcaatggct

SEQ ID NO: 2627172 - DNA, 25 bp, Homo sapien
caagatatctgggttgtcatacgtc

SEQ ID NO: 2627173 - DNA, 25 bp, Homo sapien
ggaaggtgcctgttgaagcttatta

SEQ ID NO: 2627174 - DNA, 25 bp, Homo sapien
tgaggaaggtgcctgttgaagctta

SEQ ID NO: 2627175 - DNA, 25 bp, Homo sapien
gaaggtgcctgttgaagcttattac

SEQ ID NO: 2627176 - DNA, 25 bp, Homo sapien
gaggaaggtgcctgttgaagcttat

SEQ ID NO: 2627177 - DNA, 25 bp, Homo sapien
cctgaagaggacaagagacctttgc

SEQ ID NO: 2627178 - DNA, 25 bp, Homo sapien
ggctattccaaaccaagagcgagga

SEQ ID NO: 2627179 - DNA, 25 bp, Homo sapien
cctgtatccacatgaagagagctga

SEQ ID NO: 2627180 - DNA, 25 bp, Homo sapien
acgcagggtaggtatggactcagca

SEQ ID NO: 2627181 - DNA, 25 bp, Homo sapien
gaacacatttgatcttgatcctgac

SEQ ID NO: 2627182 - DNA, 25 bp, Homo sapien
cacatttgatcttgatcctgacacc

SEQ ID NO: 2627183 - DNA, 25 bp, Homo sapien
acacatttgatcttgatcctgacac

SEQ ID NO: 2627184 - DNA, 25 bp, Homo sapien
aacacatttgatcttgatcctgaca

SEQ ID NO: 2627185 - DNA, 25 bp, Homo sapien
atgaagtcgctgttgggtctcatgg

SEQ ID NO: 2627186 - DNA, 25 bp, Homo sapien
ggctccatcccgaaggcccaaggaa

SEQ ID NO: 2627187 - DNA, 25 bp, Homo sapien
gggctccatcccgaaggcccaagga

SEQ ID NO: 2627188 - DNA, 25 bp, Homo sapien
agggctccatcccgaaggcccaagg

SEQ ID NO: 2627189 - DNA, 25 bp, Homo sapien
attgatgtggtgggataacagccca

SEQ ID NO: 2627190 - DNA, 25 bp, Homo sapien
caaaccactggcctacactggaatt

SEQ ID NO: 2627191 - DNA, 25 bp, Homo sapien
agagcaggcacagaagtcgacctcg

SEQ ID NO: 2627192 - DNA, 25 bp, Homo sapien
cctacatcagcatcggggacattga

SEQ ID NO: 2627193 - DNA, 25 bp, Homo sapien
aaaacactgaggcataagcagacac

SEQ ID NO: 2627194 - DNA, 25 bp, Homo sapien
gaggcataagcagacacggttcaca

SEQ ID NO: 2627195 - DNA, 25 bp, Homo sapien
taagcagacacggttcacagacgat

SEQ ID NO: 2627196 - DNA, 25 bp, Homo sapien
acggttcacagacgattctcagggc

SEQ ID NO: 2627197 - DNA, 25 bp, Homo sapien
tggatgccacaccactgcccaggtt

SEQ ID NO: 2627198 - DNA, 25 bp, Homo sapien
tgccacaccactgcccaggttatag

SEQ ID NO: 2627199 - DNA, 25 bp, Homo sapien
ggatgccacaccactgcccaggtta

SEQ ID NO: 2627200 - DNA, 25 bp, Homo sapien
gatggatgccacaccactgcccagg

SEQ ID NO: 2627201 - DNA, 25 bp, Homo sapien
accgaccatcgttgaaggagccatt

SEQ ID NO: 2627202 - DNA, 25 bp, Homo sapien
ttaactcggtgccaccgaccatcgt

SEQ ID NO: 2627203 - DNA, 25 bp, Homo sapien
tcggtgccaccgaccatcgttgaag

SEQ ID NO: 2627204 - DNA, 25 bp, Homo sapien
tgccaccgaccatcgttgaaggagc

SEQ ID NO: 2627205 - DNA, 25 bp, Homo sapien
cattctttaaagtccacatacactg

SEQ ID NO: 2627206 - DNA, 25 bp, Homo sapien
cttctccagaaggttactgcttaat

SEQ ID NO: 2627207 - DNA, 25 bp, Homo sapien
catacactgaactctcaaggttctt

SEQ ID NO: 2627208 - DNA, 25 bp, Homo sapien
cagaaggttactgcttaatgaaggt

SEQ ID NO: 2627209 - DNA, 25 bp, Homo sapien
gaggagcagcgcctaacttagacta

SEQ ID NO: 2627210 - DNA, 25 bp, Homo sapien
tgaatgacaacacagtgccagcact

SEQ ID NO: 2627211 - DNA, 25 bp, Homo sapien
tgctgtggaattacaccagaggagc

SEQ ID NO: 2627212 - DNA, 25 bp, Homo sapien
tgtattaaaggacacactatgtgcc

SEQ ID NO: 2627213 - DNA, 25 bp, Homo sapien
tacagagctccattgatgttaagct

SEQ ID NO: 2627214 - DNA, 25 bp, Homo sapien
agtcatccacggttatctttcctga

SEQ ID NO: 2627215 - DNA, 25 bp, Homo sapien
tccatagtcatccacggttatcttt

SEQ ID NO: 2627216 - DNA, 25 bp, Homo sapien
tgatgttaagctgccgcatcatgcc

SEQ ID NO: 2627217 - DNA, 25 bp, Homo sapien
tatattgcctgttagtgtgcagagc

SEQ ID NO: 2627218 - DNA, 25 bp, Homo sapien
gtgagagatacagcccacgagccct

SEQ ID NO: 2627219 - DNA, 25 bp, Homo sapien
tgtttttcccatccacggcatcttc

SEQ ID NO: 2627220 - DNA, 25 bp, Homo sapien
tccacgagggaaatgtggtaatcgg

SEQ ID NO: 2627221 - DNA, 25 bp, Homo sapien
attctcagaatagaaggctctgtcc

SEQ ID NO: 2627222 - DNA, 25 bp, Homo sapien
tgagggcccctgggattctcagaat

SEQ ID NO: 2627223 - DNA, 25 bp, Homo sapien
ggattctcagaatagaaggctctgt

SEQ ID NO: 2627224 - DNA, 25 bp, Homo sapien
gattctcagaatagaaggctctgtc

SEQ ID NO: 2627225 - DNA, 25 bp, Homo sapien
tggcagccgctacatattcaatgga

SEQ ID NO: 2627226 - DNA, 25 bp, Homo sapien
aaagtccgatgcttcctacacagag

SEQ ID NO: 2627227 - DNA, 25 bp, Homo sapien
tcagctcgtggagtgtcagcaggaa

SEQ ID NO: 2627228 - DNA, 25 bp, Homo sapien
gagctatagcagacaggctctggaa

SEQ ID NO: 2627229 - DNA, 25 bp, Homo sapien
tatttttatggactagtcagaacac

SEQ ID NO: 2627230 - DNA, 25 bp, Homo sapien
gttaatccgaacaatccaagggcca

SEQ ID NO: 2627231 - DNA, 25 bp, Homo sapien
ttatggactagtcagaacacagtga

SEQ ID NO: 2627232 - DNA, 25 bp, Homo sapien
ccgaacaatccaagggccaatgtgg

SEQ ID NO: 2627233 - DNA, 25 bp, Homo sapien
tagggatttcacattcgaggtaagc

SEQ ID NO: 2627234 - DNA, 25 bp, Homo sapien
aagagaatggtcagctccccaagtt

SEQ ID NO: 2627235 - DNA, 25 bp, Homo sapien
tatactgtgtggacaatctgcagct

SEQ ID NO: 2627236 - DNA, 25 bp, Homo sapien
gaattcagagtcatccacccaaact

SEQ ID NO: 2627237 - DNA, 25 bp, Homo sapien
tagtaaagggacacagctcatggta

SEQ ID NO: 2627238 - DNA, 25 bp, Homo sapien
ggatctgccagtgaaccagctgtct

SEQ ID NO: 2627239 - DNA, 25 bp, Homo sapien
tttcccttagtaagtccatcatggg

SEQ ID NO: 2627240 - DNA, 25 bp, Homo sapien
ggttctcacccagatgctcagacca

SEQ ID NO: 2627241 - DNA, 25 bp, Homo sapien
tgtgccttgcacaaaccccaaaagt

SEQ ID NO: 2627242 - DNA, 25 bp, Homo sapien
ttacattatgtgcttaaaactgtgc

SEQ ID NO: 2627243 - DNA, 25 bp, Homo sapien
tgctgcacaaacaaatgtagagtcg

SEQ ID NO: 2627244 - DNA, 25 bp, Homo sapien
gactgggactaattataggctcttg

SEQ ID NO: 2627245 - DNA, 25 bp, Homo sapien
tcctcccacgcagggagggggtagc

SEQ ID NO: 2627246 - DNA, 25 bp, Homo sapien
caactccgggcgcttttccgagctc

SEQ ID NO: 2627247 - DNA, 25 bp, Homo sapien
aggtgaaaaatgcagcgtttcctcc

SEQ ID NO: 2627248 - DNA, 25 bp, Homo sapien
gggcgcttttccgagctccttcctc

SEQ ID NO: 2627249 - DNA, 25 bp, Homo sapien
cagggactgaaagccttgaggaagc

SEQ ID NO: 2627250 - DNA, 25 bp, Homo sapien
tgggttcacaccttttccgagtcag

SEQ ID NO: 2627251 - DNA, 25 bp, Homo sapien
cactatcaggataagctttggagag

SEQ ID NO: 2627252 - DNA, 25 bp, Homo sapien
catccttggagttgatgcgagccag

SEQ ID NO: 2627253 - DNA, 25 bp, Homo sapien
gtcaaggtccttataacactaggaa

SEQ ID NO: 2627254 - DNA, 25 bp, Homo sapien
aactgcggatcccaaactgttccct

SEQ ID NO: 2627255 - DNA, 25 bp, Homo sapien
gatgtgctgtacctaaaatcatgtt

SEQ ID NO: 2627256 - DNA, 25 bp, Homo sapien
aattgcttgcaaaagattggcctgg

SEQ ID NO: 2627257 - DNA, 25 bp, Homo sapien
tgtgtaagtgcctaaagaaccgtag

SEQ ID NO: 2627258 - DNA, 25 bp, Homo sapien
tttgcacacgtgattgaatggctca

SEQ ID NO: 2627259 - DNA, 25 bp, Homo sapien
tagatcctatgtgttgcccttaaga

SEQ ID NO: 2627260 - DNA, 25 bp, Homo sapien
tggttgctgggactgaataccctaa

SEQ ID NO: 2627261 - DNA, 25 bp, Homo sapien
gctcgtggatctgaaagattacatt

SEQ ID NO: 2627262 - DNA, 25 bp, Homo sapien
ttatatgatagaggtgctttgttcc

SEQ ID NO: 2627263 - DNA, 25 bp, Homo sapien
catttagtactattacactctcaga

SEQ ID NO: 2627264 - DNA, 25 bp, Homo sapien
cagcattactttcaccgctcgtgga

SEQ ID NO: 2627265 - DNA, 25 bp, Homo sapien
aacttcttcaggactatcaataaag

SEQ ID NO: 2627266 - DNA, 25 bp, Homo sapien
tcacaattttactcgtcctcaggaa

SEQ ID NO: 2627267 - DNA, 25 bp, Homo sapien
actattaacttcttcaggactatca

SEQ ID NO: 2627268 - DNA, 25 bp, Homo sapien
aatctgaacttggatgtcaaaaata

SEQ ID NO: 2627269 - DNA, 25 bp, Homo sapien
ctcctaagggatacttttgcctcag

SEQ ID NO: 2627270 - DNA, 25 bp, Homo sapien
actcctaagggatacttttgcctca

SEQ ID NO: 2627271 - DNA, 25 bp, Homo sapien
tcctaagggatacttttgcctcagt

SEQ ID NO: 2627272 - DNA, 25 bp, Homo sapien
tacctgcgggcctgaagactggccc

SEQ ID NO: 2627273 - DNA, 25 bp, Homo sapien
tatctactgtcagcaccagagtgca

SEQ ID NO: 2627274 - DNA, 25 bp, Homo sapien
tggcccactcagcacattgtatcta

SEQ ID NO: 2627275 - DNA, 25 bp, Homo sapien
agtgcactgctcaagacccagaggg

SEQ ID NO: 2627276 - DNA, 25 bp, Homo sapien
tagagcacttcatcgttaaaaggga

SEQ ID NO: 2627277 - DNA, 25 bp, Homo sapien
taaagtatgatagcgtgagtcccga

SEQ ID NO: 2627278 - DNA, 25 bp, Homo sapien
cagtcactcttatagcgtagttgaa

SEQ ID NO: 2627279 - DNA, 25 bp, Homo sapien
gacaatccttggtattagtgagaag

SEQ ID NO: 2627280 - DNA, 25 bp, Homo sapien
catgctgcctctaccgtcttctatc

SEQ ID NO: 2627281 - DNA, 25 bp, Homo sapien
atgctgcctctaccgtcttctatca

SEQ ID NO: 2627282 - DNA, 25 bp, Homo sapien
ggagtggcacaagtggtagtcataa

SEQ ID NO: 2627283 - DNA, 25 bp, Homo sapien
ctggtaaagttgagggagtggcaca

SEQ ID NO: 2627284 - DNA, 25 bp, Homo sapien
caagtggtagtcataactagaggca

SEQ ID NO: 2627285 - DNA, 25 bp, Homo sapien
tggcacaagtggtagtcataactag

SEQ ID NO: 2627286 - DNA, 25 bp, Homo sapien
tcagtactggatactcatagagctc

SEQ ID NO: 2627287 - DNA, 25 bp, Homo sapien
gctggatattcagtactggatactc

SEQ ID NO: 2627288 - DNA, 25 bp, Homo sapien
tactggatactcatagagctcagca

SEQ ID NO: 2627289 - DNA, 25 bp, Homo sapien
gatattcagtactggatactcatag

SEQ ID NO: 2627290 - DNA, 25 bp, Homo sapien
ggaaaatagcaagaggtgacagaaa

SEQ ID NO: 2627291 - DNA, 25 bp, Homo sapien
caccttgaatccgaggactgttgaa

SEQ ID NO: 2627292 - DNA, 25 bp, Homo sapien
ccgaggactgttgaattgtggaaca

SEQ ID NO: 2627293 - DNA, 25 bp, Homo sapien
tgaatccgaggactgttgaattgtg

SEQ ID NO: 2627294 - DNA, 25 bp, Homo sapien
agacaccttgaatccgaggactgtt

SEQ ID NO: 2627295 - DNA, 25 bp, Homo sapien
tgtcttacgttgtctaaaatgacaa

SEQ ID NO: 2627296 - DNA, 25 bp, Homo sapien
ccttttgtgaaatatgggaattgca

SEQ ID NO: 2627297 - DNA, 25 bp, Homo sapien
tgcattcttataggatgttgctgct

SEQ ID NO: 2627298 - DNA, 25 bp, Homo sapien
cacatgcattcttataggatgttgc

SEQ ID NO: 2627299 - DNA, 25 bp, Homo sapien
cagtggttacagaggcggcgaaaac

SEQ ID NO: 2627300 - DNA, 25 bp, Homo sapien
tactctgctagaaaaccgaggccaa

SEQ ID NO: 2627301 - DNA, 25 bp, Homo sapien
taggtaattcgcaaagtcccaacaa

SEQ ID NO: 2627302 - DNA, 25 bp, Homo sapien
caatgtacggaggaaaaatctcacc

SEQ ID NO: 2627303 - DNA, 25 bp, Homo sapien
caaaattaattgtgccgaagagaac

SEQ ID NO: 2627304 - DNA, 25 bp, Homo sapien
tctgtagagtcctgactgcgtgcca

SEQ ID NO: 2627305 - DNA, 25 bp, Homo sapien
gaagagaacaccatcaaacgcgtcc

SEQ ID NO: 2627306 - DNA, 25 bp, Homo sapien
aaacgcgtccggcatacagcgtaaa

SEQ ID NO: 2627307 - DNA, 25 bp, Homo sapien
aaaaaacacgttggccttggtgctg

SEQ ID NO: 2627308 - DNA, 25 bp, Homo sapien
gagccttggcgatacattcacctgg

SEQ ID NO: 2627309 - DNA, 25 bp, Homo sapien
ccacaattagctgagactgaggtct

SEQ ID NO: 2627310 - DNA, 25 bp, Homo sapien
taaaaatattgtggaccttaggcac

SEQ ID NO: 2627311 - DNA, 25 bp, Homo sapien
ccgtttttcctcacgaaacagtgcg

SEQ ID NO: 2627312 - DNA, 25 bp, Homo sapien
gaagctgtggcaaatccctaaattt

SEQ ID NO: 2627313 - DNA, 25 bp, Homo sapien
tatggcctggtcaaatattgctaac

SEQ ID NO: 2627314 - DNA, 25 bp, Homo sapien
gcgtataccgcaactcttcaaattg

SEQ ID NO: 2627315 - DNA, 25 bp, Homo sapien
tattcaccggttaataaactatgct

SEQ ID NO: 2627316 - DNA, 25 bp, Homo sapien
taagtctacatttatcagtcaggct

SEQ ID NO: 2627317 - DNA, 25 bp, Homo sapien
gaagcctgtttaagggtcaagatgt

SEQ ID NO: 2627318 - DNA, 25 bp, Homo sapien
catgtctctcaaatagcattccaaa

SEQ ID NO: 2627319 - DNA, 25 bp, Homo sapien
taatgttttcctctcccttgaatgg

SEQ ID NO: 2627320 - DNA, 25 bp, Homo sapien
gattttaaaccaactgatacgtctg

SEQ ID NO: 2627321 - DNA, 25 bp, Homo sapien
caggctaatcaaggacattctgacc

SEQ ID NO: 2627322 - DNA, 25 bp, Homo sapien
tatgagctgtaattaaccttcggtc

SEQ ID NO: 2627323 - DNA, 25 bp, Homo sapien
tctctgacactgtgcgctgcaggtt

SEQ ID NO: 2627324 - DNA, 25 bp, Homo sapien
caagatccaaggactccaacagtga

SEQ ID NO: 2627325 - DNA, 25 bp, Homo sapien
taggcccagagggataaatggtctg

SEQ ID NO: 2627326 - DNA, 25 bp, Homo sapien
tctgattcacttagactgggtcatc

SEQ ID NO: 2627327 - DNA, 25 bp, Homo sapien
ccagggtgttgcgatatggtgccca

SEQ ID NO: 2627328 - DNA, 25 bp, Homo sapien
tgatgcccaaccagcatagctagga

SEQ ID NO: 2627329 - DNA, 25 bp, Homo sapien
gaatgctgccaaaagagggccttcg

SEQ ID NO: 2627330 - DNA, 25 bp, Homo sapien
tataatctactcctcacacatgtgg

SEQ ID NO: 2627331 - DNA, 25 bp, Homo sapien
cactcgaagagccaggtgtagttca

SEQ ID NO: 2627332 - DNA, 25 bp, Homo sapien
ggacttctgagagccttcggtgtgc

SEQ ID NO: 2627333 - DNA, 25 bp, Homo sapien
ccagctatgtcccaaagtttgttct

SEQ ID NO: 2627334 - DNA, 25 bp, Homo sapien
tcctttgctacaagaccagctatgt

SEQ ID NO: 2627335 - DNA, 25 bp, Homo sapien
catagtcattaagccaaattctaca

SEQ ID NO: 2627336 - DNA, 25 bp, Homo sapien
caaaagtttgtgaatagtctatatg

SEQ ID NO: 2627337 - DNA, 25 bp, Homo sapien
aataaacatagtcattaagccaaat

SEQ ID NO: 2627338 - DNA, 25 bp, Homo sapien
gaatagtctatatggtgtccttcaa

SEQ ID NO: 2627339 - DNA, 25 bp, Homo sapien
gatgattgtggcaccacctttaagg

SEQ ID NO: 2627340 - DNA, 25 bp, Homo sapien
tcaaaatgctctttaggtcaaacac

SEQ ID NO: 2627341 - DNA, 25 bp, Homo sapien
cagcatgcaggttttcactagaccc

SEQ ID NO: 2627342 - DNA, 25 bp, Homo sapien
taaggtgtcttctagatcaaaatgc

SEQ ID NO: 2627343 - DNA, 25 bp, Homo sapien
ccagcccttgtttagagacccagag

SEQ ID NO: 2627344 - DNA, 25 bp, Homo sapien
gtctctgtaacgataccagcccttg

SEQ ID NO: 2627345 - DNA, 25 bp, Homo sapien
tgtacagtttctgcaccgcacagac

SEQ ID NO: 2627346 - DNA, 25 bp, Homo sapien
aaatggtcactgtatacagttgtac

SEQ ID NO: 2627347 - DNA, 25 bp, Homo sapien
ttacagggagtctgcagaagggcct

SEQ ID NO: 2627348 - DNA, 25 bp, Homo sapien
tttacagggagtctgcagaagggcc

SEQ ID NO: 2627349 - DNA, 25 bp, Homo sapien
ggaaataaaccgattgcctcttgga

SEQ ID NO: 2627350 - DNA, 25 bp, Homo sapien
tcatatcaggttgcaaacaggctgc

SEQ ID NO: 2627351 - DNA, 25 bp, Homo sapien
tccagggttggctcacataattcac

SEQ ID NO: 2627352 - DNA, 25 bp, Homo sapien
gaatcccagatttcacgcatagttg

SEQ ID NO: 2627353 - DNA, 25 bp, Homo sapien
tcctcaatccagaccaatgttttca

SEQ ID NO: 2627354 - DNA, 25 bp, Homo sapien
tccagaccaatgttttcaaaggcct

SEQ ID NO: 2627355 - DNA, 25 bp, Homo sapien
ctctttataaatgaactcatttgtg

SEQ ID NO: 2627356 - DNA, 25 bp, Homo sapien
cctcaatccagaccaatgttttcaa

SEQ ID NO: 2627357 - DNA, 25 bp, Homo sapien
ccaggtgtgaatctttccccagagc

SEQ ID NO: 2627358 - DNA, 25 bp, Homo sapien
caggtgtgaatctttccccagagcc

SEQ ID NO: 2627359 - DNA, 25 bp, Homo sapien
ttctgtttggttgatgtgcacttca

SEQ ID NO: 2627360 - DNA, 25 bp, Homo sapien
gaggacaagattgtctgcagaggag

SEQ ID NO: 2627361 - DNA, 25 bp, Homo sapien
gactgaggacaagattgtctgcaga

SEQ ID NO: 2627362 - DNA, 25 bp, Homo sapien
ctggttcgcttgtcagggcatggga

SEQ ID NO: 2627363 - DNA, 25 bp, Homo sapien
tgaggacaagattgtctgcagagga

SEQ ID NO: 2627364 - DNA, 25 bp, Homo sapien
tacaatcttgtgagaggcccggagc

SEQ ID NO: 2627365 - DNA, 25 bp, Homo sapien
cattaggtaagctgttgagggtgcc

SEQ ID NO: 2627366 - DNA, 25 bp, Homo sapien
caggtgccattaggtaagctgctcc

SEQ ID NO: 2627367 - DNA, 25 bp, Homo sapien
gggtgccattaggtaaccaggtgcc

SEQ ID NO: 2627368 - DNA, 25 bp, Homo sapien
aagagatcttaaacacattttttag

SEQ ID NO: 2627369 - DNA, 25 bp, Homo sapien
tctttaagcttctgcattgaaaaag

SEQ ID NO: 2627370 - DNA, 25 bp, Homo sapien
agaagacttcagtttaaagagatct

SEQ ID NO: 2627371 - DNA, 25 bp, Homo sapien
ctgcttcacttgttcagaagacttc

SEQ ID NO: 2627372 - DNA, 25 bp, Homo sapien
tatactagggcaaatcacacttctt

SEQ ID NO: 2627373 - DNA, 25 bp, Homo sapien
ttaataagtcatcgtaacaccaact

SEQ ID NO: 2627374 - DNA, 25 bp, Homo sapien
cctctgagtgcttctagtgctatag

SEQ ID NO: 2627375 - DNA, 25 bp, Homo sapien
gaatgagtagcgtcagggaaagaat

SEQ ID NO: 2627376 - DNA, 25 bp, Homo sapien
ccttcttggttgatgtagctgcctg

SEQ ID NO: 2627377 - DNA, 25 bp, Homo sapien
cagggctgactggaggatctctgct

SEQ ID NO: 2627378 - DNA, 25 bp, Homo sapien
ggatggaacatgttgtcagccttct

SEQ ID NO: 2627379 - DNA, 25 bp, Homo sapien
gattgcatgatttctctcccctaaa

SEQ ID NO: 2627380 - DNA, 25 bp, Homo sapien
cagaagaaattcacgcacactgagc

SEQ ID NO: 2627381 - DNA, 25 bp, Homo sapien
tgggtcccaagaacctcacagagac

SEQ ID NO: 2627382 - DNA, 25 bp, Homo sapien
cgtgcattgtaggagtcagttcccc

SEQ ID NO: 2627383 - DNA, 25 bp, Homo sapien
aagacctattccaagccgggtgttg

SEQ ID NO: 2627384 - DNA, 25 bp, Homo sapien
ggtactgttgcagtgagatgccaga

SEQ ID NO: 2627385 - DNA, 25 bp, Homo sapien
gaaatgcactagtgtgggcaaatac

SEQ ID NO: 2627386 - DNA, 25 bp, Homo sapien
taactccgtttggagatatgtactc

SEQ ID NO: 2627387 - DNA, 25 bp, Homo sapien
ccgacccgacgatgtacaaagaaag

SEQ ID NO: 2627388 - DNA, 25 bp, Homo sapien
ttaggatcccaacgtctgctagaac

SEQ ID NO: 2627389 - DNA, 25 bp, Homo sapien
gacctcttaggatcccaacgtctgc

SEQ ID NO: 2627390 - DNA, 25 bp, Homo sapien
gttgctggagaggtggctagaagac

SEQ ID NO: 2627391 - DNA, 25 bp, Homo sapien
tggagtcacaaatagcaaagcagca

SEQ ID NO: 2627392 - DNA, 25 bp, Homo sapien
cttttccccaatagttgtcatagcc

SEQ ID NO: 2627393 - DNA, 25 bp, Homo sapien
ccccaatagttgtcatagccttctc

SEQ ID NO: 2627394 - DNA, 25 bp, Homo sapien
ttccccaatagttgtcatagccttc

SEQ ID NO: 2627395 - DNA, 25 bp, Homo sapien
caatagttgtcatagccttctccag

SEQ ID NO: 2627396 - DNA, 25 bp, Homo sapien
cacgagtgggtccacatatcacaca

SEQ ID NO: 2627397 - DNA, 25 bp, Homo sapien
agctggcttgctcacgagtgggtcc

SEQ ID NO: 2627398 - DNA, 25 bp, Homo sapien
gacatgtattccttctcccacaggg

SEQ ID NO: 2627399 - DNA, 25 bp, Homo sapien
acactccaaacatgccaattcacca

SEQ ID NO: 2627400 - DNA, 25 bp, Homo sapien
ctgaggtcaaagagtaggacagcca

SEQ ID NO: 2627401 - DNA, 25 bp, Homo sapien
gaggtcaaagagtaggacagccagt

SEQ ID NO: 2627402 - DNA, 25 bp, Homo sapien
aggtcaaagagtaggacagccagtt

SEQ ID NO: 2627403 - DNA, 25 bp, Homo sapien
tgaggtcaaagagtaggacagccag

SEQ ID NO: 2627404 - DNA, 25 bp, Homo sapien
tgtccctgtccaaagtgcgctggag

SEQ ID NO: 2627405 - DNA, 25 bp, Homo sapien
gagagttcaggatgctcacggtgaa

SEQ ID NO: 2627406 - DNA, 25 bp, Homo sapien
gggaagatgataagaccctttcctg

SEQ ID NO: 2627407 - DNA, 25 bp, Homo sapien
ctaatgaacagcgagaagaggaaca

SEQ ID NO: 2627408 - DNA, 25 bp, Homo sapien
gaccacacttgagtaactctgttcc

SEQ ID NO: 2627409 - DNA, 25 bp, Homo sapien
gacaatctagcaccctccaattctg

SEQ ID NO: 2627410 - DNA, 25 bp, Homo sapien
gctcatctggacaatctagcaccct

SEQ ID NO: 2627411 - DNA, 25 bp, Homo sapien
ccaattctgcacttttgtcatgacc

SEQ ID NO: 2627412 - DNA, 25 bp, Homo sapien
cccaaaacacacagtggagaccata

SEQ ID NO: 2627413 - DNA, 25 bp, Homo sapien
ctccttctaccagcagtggtctcat

SEQ ID NO: 2627414 - DNA, 25 bp, Homo sapien
tagagccccagtggaggaaagacct

SEQ ID NO: 2627415 - DNA, 25 bp, Homo sapien
gaggaaagacctggaacattcctcc

SEQ ID NO: 2627416 - DNA, 25 bp, Homo sapien
gagatgtccctgcaaggagatctcc

SEQ ID NO: 2627417 - DNA, 25 bp, Homo sapien
tccctgcaaggagatctccaacaag

SEQ ID NO: 2627418 - DNA, 25 bp, Homo sapien
gctaagggggtttcggagagatgtc

SEQ ID NO: 2627419 - DNA, 25 bp, Homo sapien
gatgtccctgcaaggagatctccaa

SEQ ID NO: 2627420 - DNA, 25 bp, Homo sapien
cttgtcccggttgtggtctggtttg

SEQ ID NO: 2627421 - DNA, 25 bp, Homo sapien
cccggttgtggtctggtttgaacag

SEQ ID NO: 2627422 - DNA, 25 bp, Homo sapien
tgctggtaaccatgcccgaatcttc

SEQ ID NO: 2627423 - DNA, 25 bp, Homo sapien
agggattctgggaacgctgcacccc

SEQ ID NO: 2627424 - DNA, 25 bp, Homo sapien
tcagaacatttacaattcccagcca

SEQ ID NO: 2627425 - DNA, 25 bp, Homo sapien
gaacatttacaattcccagccaatg

SEQ ID NO: 2627426 - DNA, 25 bp, Homo sapien
cagaacatttacaattcccagccaa

SEQ ID NO: 2627427 - DNA, 25 bp, Homo sapien
ttcagaacatttacaattcccagcc

SEQ ID NO: 2627428 - DNA, 25 bp, Homo sapien
tattctctggcccagataaagctgg

SEQ ID NO: 2627429 - DNA, 25 bp, Homo sapien
taaagctggattgtgcatctgcagc

SEQ ID NO: 2627430 - DNA, 25 bp, Homo sapien
tctactattttcatgtggccccaat

SEQ ID NO: 2627431 - DNA, 25 bp, Homo sapien
ttttgactccagagaggaacgacga

SEQ ID NO: 2627432 - DNA, 25 bp, Homo sapien
cagatggtggaccattcctcaggtc

SEQ ID NO: 2627433 - DNA, 25 bp, Homo sapien
gcaggtccagccacatcattaagct

SEQ ID NO: 2627434 - DNA, 25 bp, Homo sapien
gccagctcaattcgtgcaggtccag

SEQ ID NO: 2627435 - DNA, 25 bp, Homo sapien
tgtgtaggtgatcaagccatggtgc

SEQ ID NO: 2627436 - DNA, 25 bp, Homo sapien
cctatgaatggtggcttagaagcca

SEQ ID NO: 2627437 - DNA, 25 bp, Homo sapien
ggtcttttcttgactatacctatga

SEQ ID NO: 2627438 - DNA, 25 bp, Homo sapien
ttgaggtcattggaatttgaaaccc

SEQ ID NO: 2627439 - DNA, 25 bp, Homo sapien
gaaacccataccataaaatgaggtg

SEQ ID NO: 2627440 - DNA, 25 bp, Homo sapien
tatgggcatgccagaaggcagtccc

SEQ ID NO: 2627441 - DNA, 25 bp, Homo sapien
gaagcttcctacattcctctatggg

SEQ ID NO: 2627442 - DNA, 25 bp, Homo sapien
cagacagcttgtgggaaatggtttg

SEQ ID NO: 2627443 - DNA, 25 bp, Homo sapien
ttgtttccttcaggcttgcccatgc

SEQ ID NO: 2627444 - DNA, 25 bp, Homo sapien
aggattgttggcaagatccttgttc

SEQ ID NO: 2627445 - DNA, 25 bp, Homo sapien
gaaatgaatcggaaggtgacaggaa

SEQ ID NO: 2627446 - DNA, 25 bp, Homo sapien
aacgctctggctcaggattgttggc

SEQ ID NO: 2627447 - DNA, 25 bp, Homo sapien
gggagctcagaacgctctggctcag

SEQ ID NO: 2627448 - DNA, 25 bp, Homo sapien
gaatactgtcctgatagctgcctaa

SEQ ID NO: 2627449 - DNA, 25 bp, Homo sapien
aacactggagtggaggcgacttcac

SEQ ID NO: 2627450 - DNA, 25 bp, Homo sapien
caaaatggcactgctcggagagatc

SEQ ID NO: 2627451 - DNA, 25 bp, Homo sapien
ccagatccgtgtgatggccaaggcc

SEQ ID NO: 2627452 - DNA, 25 bp, Homo sapien
tagagactccccgaacacaaatatg

SEQ ID NO: 2627453 - DNA, 25 bp, Homo sapien
agagactccccgaacacaaatatga

SEQ ID NO: 2627454 - DNA, 25 bp, Homo sapien
gagactccccgaacacaaatatgac

SEQ ID NO: 2627455 - DNA, 25 bp, Homo sapien
ttagagactccccgaacacaaatat

SEQ ID NO: 2627456 - DNA, 25 bp, Homo sapien
gagggcagctctttagtgcttattt

SEQ ID NO: 2627457 - DNA, 25 bp, Homo sapien
agcagagggcagctctttagtgctt

SEQ ID NO: 2627458 - DNA, 25 bp, Homo sapien
cctgttttacacattcgctgtggtc

SEQ ID NO: 2627459 - DNA, 25 bp, Homo sapien
acacattcgctgtggtcagaatcac

SEQ ID NO: 2627460 - DNA, 25 bp, Homo sapien
tcacctctcttagaggataacagga

SEQ ID NO: 2627461 - DNA, 25 bp, Homo sapien
tctgggcctttgaaaggtgcatttc

SEQ ID NO: 2627462 - DNA, 25 bp, Homo sapien
gtgcatttcacctctcttagaggat

SEQ ID NO: 2627463 - DNA, 25 bp, Homo sapien
tgccatccaatctttaccgtgtctg

SEQ ID NO: 2627464 - DNA, 25 bp, Homo sapien
gacaaagtttcttcggctacaacag

SEQ ID NO: 2627465 - DNA, 25 bp, Homo sapien
agatccccgtccgaaaatcttcagg

SEQ ID NO: 2627466 - DNA, 25 bp, Homo sapien
tttccatttggcgtccagagcaacg

SEQ ID NO: 2627467 - DNA, 25 bp, Homo sapien
gttctatccagaaacgccctgtccg

SEQ ID NO: 2627468 - DNA, 25 bp, Homo sapien
ggacgcacgggccagccggcggaac

SEQ ID NO: 2627469 - DNA, 25 bp, Homo sapien
tgccccggccaaggacgcacgggcc

SEQ ID NO: 2627470 - DNA, 25 bp, Homo sapien
acgcacgggccagccggcggaacca

SEQ ID NO: 2627471 - DNA, 25 bp, Homo sapien
ggccaaggacgcacgggccagccgg

SEQ ID NO: 2627472 - DNA, 25 bp, Homo sapien
gcaatttcccgtcttgctgcgcact

SEQ ID NO: 2627473 - DNA, 25 bp, Homo sapien
tatgaatcagctgcggggcaagcgc

SEQ ID NO: 2627474 - DNA, 25 bp, Homo sapien
aagggctccacgagccgggccgagt

SEQ ID NO: 2627475 - DNA, 25 bp, Homo sapien
cctcacaacccggactttgcgggcg

SEQ ID NO: 2627476 - DNA, 25 bp, Homo sapien
cggtcgcgtccagccgggatgggct

SEQ ID NO: 2627477 - DNA, 25 bp, Homo sapien
gaagttgtcggattctttcccgcac

SEQ ID NO: 2627478 - DNA, 25 bp, Homo sapien
ccgtccgagcgcaggtggtagccca

SEQ ID NO: 2627479 - DNA, 25 bp, Homo sapien
agccaagcaaacgctgggcagaggc

SEQ ID NO: 2627480 - DNA, 25 bp, Homo sapien
gacacaggaatacctctcctcagat

SEQ ID NO: 2627481 - DNA, 25 bp, Homo sapien
gaaatactcacacttgagcaggaag

SEQ ID NO: 2627482 - DNA, 25 bp, Homo sapien
tctgctctgaagcaacgttgctaat

SEQ ID NO: 2627483 - DNA, 25 bp, Homo sapien
ttcgtatctatcaagtggaaaaagg

SEQ ID NO: 2627484 - DNA, 25 bp, Homo sapien
gagaaaggcacatttcacatggtgg

SEQ ID NO: 2627485 - DNA, 25 bp, Homo sapien
aagaatgagagccaagtgaaagtgg

SEQ ID NO: 2627486 - DNA, 25 bp, Homo sapien
gtggaaggagaaaggcacatttcac

SEQ ID NO: 2627487 - DNA, 25 bp, Homo sapien
atggtggaaggagaaaggcacattt

SEQ ID NO: 2627488 - DNA, 25 bp, Homo sapien
taattaagtaccatggactctgaca

SEQ ID NO: 2627489 - DNA, 25 bp, Homo sapien
taacctaccttatagcattggcatg

SEQ ID NO: 2627490 - DNA, 25 bp, Homo sapien
ggaacaatagcacgcagacttgtgg

SEQ ID NO: 2627491 - DNA, 25 bp, Homo sapien
tgacaagtgatttaacccctctagg

SEQ ID NO: 2627492 - DNA, 25 bp, Homo sapien
gtgagggcatctccattcttcccca

SEQ ID NO: 2627493 - DNA, 25 bp, Homo sapien
ttggaggtgagggcatctccattct

SEQ ID NO: 2627494 - DNA, 25 bp, Homo sapien
tgagggcatctccattcttccccat

SEQ ID NO: 2627495 - DNA, 25 bp, Homo sapien
gaggtgagggcatctccattcttcc

SEQ ID NO: 2627496 - DNA, 25 bp, Homo sapien
gaatgttgtctgaaagactgcaaat

SEQ ID NO: 2627497 - DNA, 25 bp, Homo sapien
gttgtctgaaagactgcaaatagag

SEQ ID NO: 2627498 - DNA, 25 bp, Homo sapien
caggagtcaatggtaaacgttcagc

SEQ ID NO: 2627499 - DNA, 25 bp, Homo sapien
tgataaggaaggttgtggacagtcc

SEQ ID NO: 2627500 - DNA, 25 bp, Homo sapien
ctgacgcgtagaattggtggaaact

SEQ ID NO: 2627501 - DNA, 25 bp, Homo sapien
gatgtttcaatcctactgatctgga

SEQ ID NO: 2627502 - DNA, 25 bp, Homo sapien
aaaatctattttcttagtgcatccc

SEQ ID NO: 2627503 - DNA, 25 bp, Homo sapien
cctggatcattaacagaaaatgcag

SEQ ID NO: 2627504 - DNA, 25 bp, Homo sapien
ttcttagtgcatcccatcctaccta

SEQ ID NO: 2627505 - DNA, 25 bp, Homo sapien
tgtcctggatcattaacagaaaatg

SEQ ID NO: 2627506 - DNA, 25 bp, Homo sapien
atcttcgtggctctctggaattcag

SEQ ID NO: 2627507 - DNA, 25 bp, Homo sapien
tcagtattcacgaggacagactcaa

SEQ ID NO: 2627508 - DNA, 25 bp, Homo sapien
aagaaagaggtaggaggaatgaatt

SEQ ID NO: 2627509 - DNA, 25 bp, Homo sapien
gaatgaattggttaatcttcgtggc

SEQ ID NO: 2627510 - DNA, 25 bp, Homo sapien
tggatggaacattaagtgctagcac

SEQ ID NO: 2627511 - DNA, 25 bp, Homo sapien
cacttcagctgggtataggccaaga

SEQ ID NO: 2627512 - DNA, 25 bp, Homo sapien
tcaggaagctacattggaaagaaaa

SEQ ID NO: 2627513 - DNA, 25 bp, Homo sapien
caggaagttactctccaacatggct

SEQ ID NO: 2627514 - DNA, 25 bp, Homo sapien
tgtagaataccctatgcgtgtgttc

SEQ ID NO: 2627515 - DNA, 25 bp, Homo sapien
cgtgtgtagaataccctatgcgtgt

SEQ ID NO: 2627516 - DNA, 25 bp, Homo sapien
acagcccgtgtgtagaataccctat

SEQ ID NO: 2627517 - DNA, 25 bp, Homo sapien
aataccctatgcgtgtgttcacctc

SEQ ID NO: 2627518 - DNA, 25 bp, Homo sapien
tgatagatggctctctgagtctccc

SEQ ID NO: 2627519 - DNA, 25 bp, Homo sapien
tttcagatacggtggccacatggcc

SEQ ID NO: 2627520 - DNA, 25 bp, Homo sapien
agttccattttctctcggaagttga

SEQ ID NO: 2627521 - DNA, 25 bp, Homo sapien
acatggccacactccatctcttggg

SEQ ID NO: 2627522 - DNA, 25 bp, Homo sapien
tggcatcgtccaccaaactctttat

SEQ ID NO: 2627523 - DNA, 25 bp, Homo sapien
catcgtccaccaaactctttattct

SEQ ID NO: 2627524 - DNA, 25 bp, Homo sapien
ggcatcgtccaccaaactctttatt

SEQ ID NO: 2627525 - DNA, 25 bp, Homo sapien
tcgtccaccaaactctttattctta

SEQ ID NO: 2627526 - DNA, 25 bp, Homo sapien
tagggaaaacgaacaatatatcctg

SEQ ID NO: 2627527 - DNA, 25 bp, Homo sapien
ggcacactattcaagttgaatgcag

SEQ ID NO: 2627528 - DNA, 25 bp, Homo sapien
tatatcctgtccagtagaatcttgt

SEQ ID NO: 2627529 - DNA, 25 bp, Homo sapien
tgaatgttcctagaaacgtaacaaa

SEQ ID NO: 2627530 - DNA, 25 bp, Homo sapien
gagacaaaaagaacgatgcctttca

SEQ ID NO: 2627531 - DNA, 25 bp, Homo sapien
ttgagacaaaaagaacgatgccttt

SEQ ID NO: 2627532 - DNA, 25 bp, Homo sapien
aaaaagaacgatgcctttcatgcct

SEQ ID NO: 2627533 - DNA, 25 bp, Homo sapien
gacaaaaagaacgatgcctttcatg

SEQ ID NO: 2627534 - DNA, 25 bp, Homo sapien
tctaggaatacaactctcagtaagg

SEQ ID NO: 2627535 - DNA, 25 bp, Homo sapien
ccatgatcccgaagtaattccagca

SEQ ID NO: 2627536 - DNA, 25 bp, Homo sapien
tcagtaaggacaagaaaacaacagg

SEQ ID NO: 2627537 - DNA, 25 bp, Homo sapien
ggtccaggtcatgacctgaactgtg

SEQ ID NO: 2627538 - DNA, 25 bp, Homo sapien
aatgtttcatttcgggtgctgtggc

SEQ ID NO: 2627539 - DNA, 25 bp, Homo sapien
tccatttgacaagggttgtatcccc

SEQ ID NO: 2627540 - DNA, 25 bp, Homo sapien
gttactgctgcccttagtggtcatg

SEQ ID NO: 2627541 - DNA, 25 bp, Homo sapien
tgctaaattcaacaggcaggagctg

SEQ ID NO: 2627542 - DNA, 25 bp, Homo sapien
tttcacaagaaaagtccttgggctc

SEQ ID NO: 2627543 - DNA, 25 bp, Homo sapien
cccaaggcagtgtccgtcccaggat

SEQ ID NO: 2627544 - DNA, 25 bp, Homo sapien
tacagtgcaaagtcttgaagtcctc

SEQ ID NO: 2627545 - DNA, 25 bp, Homo sapien
gtcccaggatcccaagtacagtgca

SEQ ID NO: 2627546 - DNA, 25 bp, Homo sapien
tcaaagcaaatgtatcccttatccc

SEQ ID NO: 2627547 - DNA, 25 bp, Homo sapien
cagtgactgtcaaactatgttcccc

SEQ ID NO: 2627548 - DNA, 25 bp, Homo sapien
tccctcagggcatactcagtgactg

SEQ ID NO: 2627549 - DNA, 25 bp, Homo sapien
caaaataacacaaccattacgaggt

SEQ ID NO: 2627550 - DNA, 25 bp, Homo sapien
cagctatgagtgtgaagttataggt

SEQ ID NO: 2627551 - DNA, 25 bp, Homo sapien
tccttaagtaattttcagctatgag

SEQ ID NO: 2627552 - DNA, 25 bp, Homo sapien
gagtcttgagttatttgccaattac

SEQ ID NO: 2627553 - DNA, 25 bp, Homo sapien
gccaattacaccagtttttgtgtgt

SEQ ID NO: 2627554 - DNA, 25 bp, Homo sapien
ggtgggctgtgacaactctagtctc

SEQ ID NO: 2627555 - DNA, 25 bp, Homo sapien
acggtgggctgtgacaactctagtc

SEQ ID NO: 2627556 - DNA, 25 bp, Homo sapien
tgggctgtgacaactctagtctcac

SEQ ID NO: 2627557 - DNA, 25 bp, Homo sapien
ggccacggtgggctgtgacaactct

SEQ ID NO: 2627558 - DNA, 25 bp, Homo sapien
tctcacctccgctgtgaatgaggca

SEQ ID NO: 2627559 - DNA, 25 bp, Homo sapien
tagtaagctcattggtgctcgtgac

SEQ ID NO: 2627560 - DNA, 25 bp, Homo sapien
gaatgaggcaaagatctacagcaca

SEQ ID NO: 2627561 - DNA, 25 bp, Homo sapien
gagaaacgtggcatgaacaataggt

SEQ ID NO: 2627562 - DNA, 25 bp, Homo sapien
aaaagtgaatggactacagcaacac

SEQ ID NO: 2627563 - DNA, 25 bp, Homo sapien
taaaagtgaatggactacagcaaca

SEQ ID NO: 2627564 - DNA, 25 bp, Homo sapien
agtaaaagtgaatggactacagcaa

SEQ ID NO: 2627565 - DNA, 25 bp, Homo sapien
gtaaaagtgaatggactacagcaac

SEQ ID NO: 2627566 - DNA, 25 bp, Homo sapien
agtgcaaatcccatgaaaagcccag

SEQ ID NO: 2627567 - DNA, 25 bp, Homo sapien
tatgtccacgcacaggaagatttag

SEQ ID NO: 2627568 - DNA, 25 bp, Homo sapien
ggaataaacagaccaaccagtggaa

SEQ ID NO: 2627569 - DNA, 25 bp, Homo sapien
gagagacttatcctacccgatgtca

SEQ ID NO: 2627570 - DNA, 25 bp, Homo sapien
ttattccttatggagtgcaccttcc

SEQ ID NO: 2627571 - DNA, 25 bp, Homo sapien
ttccttcaccatggagttcaatctg

SEQ ID NO: 2627572 - DNA, 25 bp, Homo sapien
gagttcaatctgacacaaatatgtg

SEQ ID NO: 2627573 - DNA, 25 bp, Homo sapien
ggagtgcaccttccaggtcatgatg

SEQ ID NO: 2627574 - DNA, 25 bp, Homo sapien
agaacaagacagaaacattggtgag

SEQ ID NO: 2627575 - DNA, 25 bp, Homo sapien
aacaagacagaaacattggtgagtg

SEQ ID NO: 2627576 - DNA, 25 bp, Homo sapien
caagacagaaacattggtgagtgca

SEQ ID NO: 2627577 - DNA, 25 bp, Homo sapien
aagacagaaacattggtgagtgcat

SEQ ID NO: 2627578 - DNA, 25 bp, Homo sapien
tggctggcatcagcacaccgtactc

SEQ ID NO: 2627579 - DNA, 25 bp, Homo sapien
gtactcgcgccatgtactctgtggc

SEQ ID NO: 2627580 - DNA, 25 bp, Homo sapien
accgtactcgcgccatgtactctgt

SEQ ID NO: 2627581 - DNA, 25 bp, Homo sapien
ggctggcatcagcacaccgtactcg

SEQ ID NO: 2627582 - DNA, 25 bp, Homo sapien
ttcaagtgtggtgaagttctgacca

SEQ ID NO: 2627583 - DNA, 25 bp, Homo sapien
caagtgtggtgaagttctgaccact

SEQ ID NO: 2627584 - DNA, 25 bp, Homo sapien
gcttcaagtgtggtgaagttctgac

SEQ ID NO: 2627585 - DNA, 25 bp, Homo sapien
cagcttcaagtgtggtgaagttctg

SEQ ID NO: 2627586 - DNA, 25 bp, Homo sapien
caatgggcttgaggataggcagaca

SEQ ID NO: 2627587 - DNA, 25 bp, Homo sapien
gttttccagcattaagcaaagcgtg

SEQ ID NO: 2627588 - DNA, 25 bp, Homo sapien
ggattctgattagcggtgcccacta

SEQ ID NO: 2627589 - DNA, 25 bp, Homo sapien
caaagattattgaggaacccgtaca

SEQ ID NO: 2627590 - DNA, 25 bp, Homo sapien
tgtcttttatctcctgtgtcatttt

SEQ ID NO: 2627591 - DNA, 25 bp, Homo sapien
ttgtcttttatctcctgtgtcattt

SEQ ID NO: 2627592 - DNA, 25 bp, Homo sapien
gtcttttatctcctgtgtcattttg

SEQ ID NO: 2627593 - DNA, 25 bp, Homo sapien
tttgctttctgcttgttgaattgtt

SEQ ID NO: 2627594 - DNA, 25 bp, Homo sapien
atattaggtgtttgtcaggtgcata

SEQ ID NO: 2627595 - DNA, 25 bp, Homo sapien
gatgctggatattaggtgtttgtca

SEQ ID NO: 2627596 - DNA, 25 bp, Homo sapien
tcctgggttcatgcctttcttccac

SEQ ID NO: 2627597 - DNA, 25 bp, Homo sapien
aagctcacaattctccagacatcag

SEQ ID NO: 2627598 - DNA, 25 bp, Homo sapien
tccaagctcacaattctccagacat

SEQ ID NO: 2627599 - DNA, 25 bp, Homo sapien
gctccaagctcacaattctccagac

SEQ ID NO: 2627600 - DNA, 25 bp, Homo sapien
caagctcacaattctccagacatca

SEQ ID NO: 2627601 - DNA, 25 bp, Homo sapien
cacactgttgttggctatgacgcag

SEQ ID NO: 2627602 - DNA, 25 bp, Homo sapien
cagatttggtaggaacacctgtcaa

SEQ ID NO: 2627603 - DNA, 25 bp, Homo sapien
tatagaacaggatctttccattggc

SEQ ID NO: 2627604 - DNA, 25 bp, Homo sapien
caaggattagttttgtgctgttggc

SEQ ID NO: 2627605 - DNA, 25 bp, Homo sapien
tcccatgtatgttgaagaatcccct

SEQ ID NO: 2627606 - DNA, 25 bp, Homo sapien
tattctacaaagttggcagagtctg

SEQ ID NO: 2627607 - DNA, 25 bp, Homo sapien
gaaatgtcctgagccatggctgaag

SEQ ID NO: 2627608 - DNA, 25 bp, Homo sapien
gaaatgttcatggactctttccagg

SEQ ID NO: 2627609 - DNA, 25 bp, Homo sapien
tcacaccagtccacaacatagccta

SEQ ID NO: 2627610 - DNA, 25 bp, Homo sapien
tagcctataacatctccaggttggg

SEQ ID NO: 2627611 - DNA, 25 bp, Homo sapien
gggtttccaagacagagagaatcca

SEQ ID NO: 2627612 - DNA, 25 bp, Homo sapien
cacatcctgggtatggtcacaccag

SEQ ID NO: 2627613 - DNA, 25 bp, Homo sapien
tgcttgtggtattgggacctacatt

SEQ ID NO: 2627614 - DNA, 25 bp, Homo sapien
tgtggtattgggacctacattcttc

SEQ ID NO: 2627615 - DNA, 25 bp, Homo sapien
gcttgtggtattgggacctacattc

SEQ ID NO: 2627616 - DNA, 25 bp, Homo sapien
tggtattgggacctacattcttcca

SEQ ID NO: 2627617 - DNA, 25 bp, Homo sapien
ggtgaatatagcaatgcgatgatat

SEQ ID NO: 2627618 - DNA, 25 bp, Homo sapien
cagaaatcccacttgaactttcttc

SEQ ID NO: 2627619 - DNA, 25 bp, Homo sapien
tactagcttagcacagtcaaagtct

SEQ ID NO: 2627620 - DNA, 25 bp, Homo sapien
aatgcgatgatatggaagcttcttc

SEQ ID NO: 2627621 - DNA, 25 bp, Homo sapien
ttttgtagataacccataaattctg

SEQ ID NO: 2627622 - DNA, 25 bp, Homo sapien
ttctgaagtcatatcgaactcctgg

SEQ ID NO: 2627623 - DNA, 25 bp, Homo sapien
taaacaagcaatcctttttgtagat

SEQ ID NO: 2627624 - DNA, 25 bp, Homo sapien
gataacccataaattctgaagtcat

SEQ ID NO: 2627625 - DNA, 25 bp, Homo sapien
gatgtcaatgtatccaccagcacgt

SEQ ID NO: 2627626 - DNA, 25 bp, Homo sapien
gatttcagatagacatggtaccctt

SEQ ID NO: 2627627 - DNA, 25 bp, Homo sapien
gcactgcctcgccttggatttcaga

SEQ ID NO: 2627628 - DNA, 25 bp, Homo sapien
actgccttttcaaatcgtgggtggc

SEQ ID NO: 2627629 - DNA, 25 bp, Homo sapien
gccatgcaagaagggaattcagcct

SEQ ID NO: 2627630 - DNA, 25 bp, Homo sapien
gtaagttaaaatgctgccctgcccc

SEQ ID NO: 2627631 - DNA, 25 bp, Homo sapien
aaggccaggctttcttaaggagctg

SEQ ID NO: 2627632 - DNA, 25 bp, Homo sapien
ggtactagtgatccagccaaagcat

SEQ ID NO: 2627633 - DNA, 25 bp, Homo sapien
ttgtatttgcaacattctgaaccat

SEQ ID NO: 2627634 - DNA, 25 bp, Homo sapien
gaaaaactcatagaaggattctggc

SEQ ID NO: 2627635 - DNA, 25 bp, Homo sapien
tgaccttcgtgaacgtagcactggg

SEQ ID NO: 2627636 - DNA, 25 bp, Homo sapien
gggccttcaccagcactagtgaatg

SEQ ID NO: 2627637 - DNA, 25 bp, Homo sapien
tgttcatccggagtcgtgaccttcg

SEQ ID NO: 2627638 - DNA, 25 bp, Homo sapien
cagtgtagtagtcaacatgcagtca

SEQ ID NO: 2627639 - DNA, 25 bp, Homo sapien
tgcagtcagcaccacaacctgtctg

SEQ ID NO: 2627640 - DNA, 25 bp, Homo sapien
caagccagggctaatgaagtttaac

SEQ ID NO: 2627641 - DNA, 25 bp, Homo sapien
tcaatagtcacaagccaagccaggg

SEQ ID NO: 2627642 - DNA, 25 bp, Homo sapien
taggaatgaaggctctcacatctaa

SEQ ID NO: 2627643 - DNA, 25 bp, Homo sapien
cacatctaaggtatatatatgctca

SEQ ID NO: 2627644 - DNA, 25 bp, Homo sapien
agcaaggtatgggagttccagtttt

SEQ ID NO: 2627645 - DNA, 25 bp, Homo sapien
ctttagggtttatgtaggcattttg

SEQ ID NO: 2627646 - DNA, 25 bp, Homo sapien
cactatcttcctgttcccattgctt

SEQ ID NO: 2627647 - DNA, 25 bp, Homo sapien
tgctcagtcccaaataaacatcttt

SEQ ID NO: 2627648 - DNA, 25 bp, Homo sapien
tatctctctgttattagactgacac

SEQ ID NO: 2627649 - DNA, 25 bp, Homo sapien
cattgcttgcaatttccaccaaata

SEQ ID NO: 2627650 - DNA, 25 bp, Homo sapien
agttgtaatatgaattctgcctgac

SEQ ID NO: 2627651 - DNA, 25 bp, Homo sapien
tacaagtttatgattgaaagtaatt

SEQ ID NO: 2627652 - DNA, 25 bp, Homo sapien
aatatgaattctgcctgacttcagg

SEQ ID NO: 2627653 - DNA, 25 bp, Homo sapien
ttctcaaattatgtatgcaagttgt

SEQ ID NO: 2627654 - DNA, 25 bp, Homo sapien
gcagaaaaccatgggcagtaggata

SEQ ID NO: 2627655 - DNA, 25 bp, Homo sapien
cagtaggatatgaatcagcatcgag

SEQ ID NO: 2627656 - DNA, 25 bp, Homo sapien
cactgacttttcaagtagcacatga

SEQ ID NO: 2627657 - DNA, 25 bp, Homo sapien
tgaccatgatgagcaagacgcagaa

SEQ ID NO: 2627658 - DNA, 25 bp, Homo sapien
ctctcttcttggataaaaccttcct

SEQ ID NO: 2627659 - DNA, 25 bp, Homo sapien
ccagacttttctcttactctcttct

SEQ ID NO: 2627660 - DNA, 25 bp, Homo sapien
caatgtcatttctatcttactaaat

SEQ ID NO: 2627661 - DNA, 25 bp, Homo sapien
ggataaaaccttcctcacacactta

SEQ ID NO: 2627662 - DNA, 25 bp, Homo sapien
tgtcaggataacaggtctccttgat

SEQ ID NO: 2627663 - DNA, 25 bp, Homo sapien
gtcaggataacaggtctccttgatc

SEQ ID NO: 2627664 - DNA, 25 bp, Homo sapien
cagaagctgcctggttataggtcaa

SEQ ID NO: 2627665 - DNA, 25 bp, Homo sapien
tgtgagtgacttcctagtgcctagg

SEQ ID NO: 2627666 - DNA, 25 bp, Homo sapien
tccaaacatgggtgaagccaactgg

SEQ ID NO: 2627667 - DNA, 25 bp, Homo sapien
tcaggtgaggtcattagtcccagca

SEQ ID NO: 2627668 - DNA, 25 bp, Homo sapien
tgctatagtaatgtctcctgtggcc

SEQ ID NO: 2627669 - DNA, 25 bp, Homo sapien
tactgggattaaggaccaaggccac

SEQ ID NO: 2627670 - DNA, 25 bp, Homo sapien
taagcatgctcccatgatcctgccg

SEQ ID NO: 2627671 - DNA, 25 bp, Homo sapien
aaaataccagttgtgtaccaggtgc

SEQ ID NO: 2627672 - DNA, 25 bp, Homo sapien
ctactcaggaggctgaggcaggaga

SEQ ID NO: 2627673 - DNA, 25 bp, Homo sapien
tggtggtgcatgcctgtaatcccag

SEQ ID NO: 2627674 - DNA, 25 bp, Homo sapien
gcaggagaattgcttgaccctggga

SEQ ID NO: 2627675 - DNA, 25 bp, Homo sapien
ctaaagatacaaaattacctgggtg

SEQ ID NO: 2627676 - DNA, 25 bp, Homo sapien
ttgtttagaaatgtgacggctaggc

SEQ ID NO: 2627677 - DNA, 25 bp, Homo sapien
aaaatgaacccctttcatgcttgtt

SEQ ID NO: 2627678 - DNA, 25 bp, Homo sapien
ttagaaatgtgacggctaggcgcag

SEQ ID NO: 2627679 - DNA, 25 bp, Homo sapien
aatgaacccctttcatgcttgttta

SEQ ID NO: 2627680 - DNA, 25 bp, Homo sapien
gcattgggcaccagaagcatgagca

SEQ ID NO: 2627681 - DNA, 25 bp, Homo sapien
ctcttcatagtgttgaatggcacag

SEQ ID NO: 2627682 - DNA, 25 bp, Homo sapien
gaggtgtggctacttgtttctcttc

SEQ ID NO: 2627683 - DNA, 25 bp, Homo sapien
gcacagtgcaaggcattgggcacca

SEQ ID NO: 2627684 - DNA, 25 bp, Homo sapien
ctgttagactaatcaggataccgct

SEQ ID NO: 2627685 - DNA, 25 bp, Homo sapien
tgctgacaatactggccctaaagtc

SEQ ID NO: 2627686 - DNA, 25 bp, Homo sapien
tccagcaaaaggcaagtactggttt

SEQ ID NO: 2627687 - DNA, 25 bp, Homo sapien
ggataccgctttctactacgtgagg

SEQ ID NO: 2627688 - DNA, 25 bp, Homo sapien
ccaaatggttttgctcaccttgatt

SEQ ID NO: 2627689 - DNA, 25 bp, Homo sapien
tcaagggcattaaaagcctcctgaa

SEQ ID NO: 2627690 - DNA, 25 bp, Homo sapien
tatagtttatgtcaagggcattaaa

SEQ ID NO: 2627691 - DNA, 25 bp, Homo sapien
tttgtccccaaatggttttgctcac

SEQ ID NO: 2627692 - DNA, 25 bp, Homo sapien
tgctacatatttggaggttctggtg

SEQ ID NO: 2627693 - DNA, 25 bp, Homo sapien
tgtaggtcactgaacagacattgaa

SEQ ID NO: 2627694 - DNA, 25 bp, Homo sapien
gacttaatgctctctaaccacatga

SEQ ID NO: 2627695 - DNA, 25 bp, Homo sapien
cattgtaaaacaaatggtgtaaact

SEQ ID NO: 2627696 - DNA, 25 bp, Homo sapien
tctccatgatttcactgacaggtct

SEQ ID NO: 2627697 - DNA, 25 bp, Homo sapien
tatctgcctatatcacttactttgg

SEQ ID NO: 2627698 - DNA, 25 bp, Homo sapien
cagagctttgtggttatcagtatac

SEQ ID NO: 2627699 - DNA, 25 bp, Homo sapien
tggtcatctatcctgaaataaggct

SEQ ID NO: 2627700 - DNA, 25 bp, Homo sapien
catcagttttgacacagtcatagca

SEQ ID NO: 2627701 - DNA, 25 bp, Homo sapien
cccatgatgcagatcctttttgtaa

SEQ ID NO: 2627702 - DNA, 25 bp, Homo sapien
ttataacaaagcagataagggctgt

SEQ ID NO: 2627703 - DNA, 25 bp, Homo sapien
taacacctctttgactgcacttcag

SEQ ID NO: 2627704 - DNA, 25 bp, Homo sapien
ttcagccaaaacaacatatggcaac

SEQ ID NO: 2627705 - DNA, 25 bp, Homo sapien
cagattgaatgtagaagcaagtatg

SEQ ID NO: 2627706 - DNA, 25 bp, Homo sapien
gtagaagcaagtatgagaatccagc

SEQ ID NO: 2627707 - DNA, 25 bp, Homo sapien
cagccaaaacaacatatggcaacag

SEQ ID NO: 2627708 - DNA, 25 bp, Homo sapien
tctgattggtgtgagcagactatcc

SEQ ID NO: 2627709 - DNA, 25 bp, Homo sapien
taagttttcggggatttctggatgc

SEQ ID NO: 2627710 - DNA, 25 bp, Homo sapien
agccgttatggtgctttaattgaaa

SEQ ID NO: 2627711 - DNA, 25 bp, Homo sapien
cataatcctttagaagtggttccct

SEQ ID NO: 2627712 - DNA, 25 bp, Homo sapien
tacttttttgttagctccatgacct

SEQ ID NO: 2627713 - DNA, 25 bp, Homo sapien
tcccagagtacttacacagacctag

SEQ ID NO: 2627714 - DNA, 25 bp, Homo sapien
agttatcccttctctaatataggcc

SEQ ID NO: 2627715 - DNA, 25 bp, Homo sapien
gataggaatgtgttctaagaaactc

SEQ ID NO: 2627716 - DNA, 25 bp, Homo sapien
acaaacttgagataattcacttctt

SEQ ID NO: 2627717 - DNA, 25 bp, Homo sapien
caaacttgagataattcacttctta

SEQ ID NO: 2627718 - DNA, 25 bp, Homo sapien
aacaaacttgagataattcacttct

SEQ ID NO: 2627719 - DNA, 25 bp, Homo sapien
aaacaactagggaaatatggccttg

SEQ ID NO: 2627720 - DNA, 25 bp, Homo sapien
taattcattaatggatctctctggc

SEQ ID NO: 2627721 - DNA, 25 bp, Homo sapien
taaatcttcttattgggcttaatcc

SEQ ID NO: 2627722 - DNA, 25 bp, Homo sapien
tgcctagtggttgcatggtatacct

SEQ ID NO: 2627723 - DNA, 25 bp, Homo sapien
aattgacactctattccggaggtgg

SEQ ID NO: 2627724 - DNA, 25 bp, Homo sapien
gcaggacagtgcaaaccgtttcatt

SEQ ID NO: 2627725 - DNA, 25 bp, Homo sapien
gggactgccacactaaatcacttaa

SEQ ID NO: 2627726 - DNA, 25 bp, Homo sapien
tctcaaaggaagtcataatggctct

SEQ ID NO: 2627727 - DNA, 25 bp, Homo sapien
ctctggagtagccatgcctgactaa

SEQ ID NO: 2627728 - DNA, 25 bp, Homo sapien
gatccgcctactatcagcctctgga

SEQ ID NO: 2627729 - DNA, 25 bp, Homo sapien
tacccaatccggaaatctagacttc

SEQ ID NO: 2627730 - DNA, 25 bp, Homo sapien
tggtgcataagcttactacagctgg

SEQ ID NO: 2627731 - DNA, 25 bp, Homo sapien
tggatttggttagcatgggtcagta

SEQ ID NO: 2627732 - DNA, 25 bp, Homo sapien
ttttagaatcgaacttttgaggcat

SEQ ID NO: 2627733 - DNA, 25 bp, Homo sapien
cagtgtagttgcagaaaccacggga

SEQ ID NO: 2627734 - DNA, 25 bp, Homo sapien
ccacaaaacatacagactgaggtgt

SEQ ID NO: 2627735 - DNA, 25 bp, Homo sapien
ttcttgcaagggacaggatcaatgg

SEQ ID NO: 2627736 - DNA, 25 bp, Homo sapien
ggatcaatggaaccaacatcaatgg

SEQ ID NO: 2627737 - DNA, 25 bp, Homo sapien
gacaggatcaatggaaccaacatca

SEQ ID NO: 2627738 - DNA, 25 bp, Homo sapien
caagggacaggatcaatggaaccaa

SEQ ID NO: 2627739 - DNA, 25 bp, Homo sapien
gcgaggagaacgtcccgctggatct

SEQ ID NO: 2627740 - DNA, 25 bp, Homo sapien
tctgtttcgcgcagggcggaatgac

SEQ ID NO: 2627741 - DNA, 25 bp, Homo sapien
ctccgagtacgaggtaagcccgctg

SEQ ID NO: 2627742 - DNA, 25 bp, Homo sapien
cgctggatctgacccgaggtaacgc

SEQ ID NO: 2627743 - DNA, 25 bp, Homo sapien
tacctaggcttttatgcatggcacc

SEQ ID NO: 2627744 - DNA, 25 bp, Homo sapien
gattgggcccttctctaacagtaca

SEQ ID NO: 2627745 - DNA, 25 bp, Homo sapien
gaatggaccttgaaactacctaggc

SEQ ID NO: 2627746 - DNA, 25 bp, Homo sapien
gagcactagccagtatatgaccatg

SEQ ID NO: 2627747 - DNA, 25 bp, Homo sapien
gctgccatcatgtcttggtttgttg

SEQ ID NO: 2627748 - DNA, 25 bp, Homo sapien
ccaggacggcgacaagaccacggtg

SEQ ID NO: 2627749 - DNA, 25 bp, Homo sapien
acaagaccacggtgcagctggccca

SEQ ID NO: 2627750 - DNA, 25 bp, Homo sapien
caataggattattctgctgccatca

SEQ ID NO: 2627751 - DNA, 25 bp, Homo sapien
acccattttcttgttcccacactgg

SEQ ID NO: 2627752 - DNA, 25 bp, Homo sapien
tttcttgttcccacactggaaccca

SEQ ID NO: 2627753 - DNA, 25 bp, Homo sapien
cagacccatcctgctgttccactgc

SEQ ID NO: 2627754 - DNA, 25 bp, Homo sapien
tggaacccagacccatcctgctgtt

SEQ ID NO: 2627755 - DNA, 25 bp, Homo sapien
caaccagtcctggattagagcttaa

SEQ ID NO: 2627756 - DNA, 25 bp, Homo sapien
ttatgctcgacactctacccagtgc

SEQ ID NO: 2627757 - DNA, 25 bp, Homo sapien
ccttgggatagatactaacaggtcc

SEQ ID NO: 2627758 - DNA, 25 bp, Homo sapien
ctaagaggcaagtacccttgggata

SEQ ID NO: 2627759 - DNA, 25 bp, Homo sapien
ttacagtttgcttctccaacctgga

SEQ ID NO: 2627760 - DNA, 25 bp, Homo sapien
gaacaggtgggaaggttagctctcc

SEQ ID NO: 2627761 - DNA, 25 bp, Homo sapien
attagagagaattcacaggcttgtc

SEQ ID NO: 2627762 - DNA, 25 bp, Homo sapien
tccggtggcaccagaaccttctatt

SEQ ID NO: 2627763 - DNA, 25 bp, Homo sapien
tcagcttcgggtaacagccaggccc

SEQ ID NO: 2627764 - DNA, 25 bp, Homo sapien
tgaaaaagcagttgtccagaagacc

SEQ ID NO: 2627765 - DNA, 25 bp, Homo sapien
ccagcccgagcccaatttattccac

SEQ ID NO: 2627766 - DNA, 25 bp, Homo sapien
caggacctggtgcacactttgtggc

SEQ ID NO: 2627767 - DNA, 25 bp, Homo sapien
aaagtttgtcctctgcgtaggcagc

SEQ ID NO: 2627768 - DNA, 25 bp, Homo sapien
cctgaaaacattggagttggtgatg

SEQ ID NO: 2627769 - DNA, 25 bp, Homo sapien
ggtcttcattaatagacccactgga

SEQ ID NO: 2627770 - DNA, 25 bp, Homo sapien
cacactgagactggattggtcttca

SEQ ID NO: 2627771 - DNA, 25 bp, Homo sapien
gatcactgtgaatactggtttctcc

SEQ ID NO: 2627772 - DNA, 25 bp, Homo sapien
ctaggtctcccttttgatcactgtg

SEQ ID NO: 2627773 - DNA, 25 bp, Homo sapien
cccttttgatcactgtgaatactgg

SEQ ID NO: 2627774 - DNA, 25 bp, Homo sapien
tcctttgggttcattgcagacaggt

SEQ ID NO: 2627775 - DNA, 25 bp, Homo sapien
cccagagccagatctacatgaacat

SEQ ID NO: 2627776 - DNA, 25 bp, Homo sapien
tcaggcccacagtaattctggacat

SEQ ID NO: 2627777 - DNA, 25 bp, Homo sapien
atgattcaggcccacagtaattctg

SEQ ID NO: 2627778 - DNA, 25 bp, Homo sapien
ccagagccagatctacatgaacatc

SEQ ID NO: 2627779 - DNA, 25 bp, Homo sapien
tcttgcctgctgtctaacaatttct

SEQ ID NO: 2627780 - DNA, 25 bp, Homo sapien
cacgggtacacataactcttgcctg

SEQ ID NO: 2627781 - DNA, 25 bp, Homo sapien
tcatatatcttcttgcacgggtaca

SEQ ID NO: 2627782 - DNA, 25 bp, Homo sapien
taattatgctcttttgctctggatt

SEQ ID NO: 2627783 - DNA, 25 bp, Homo sapien
tgaccatgtctggtaggcttgagga

SEQ ID NO: 2627784 - DNA, 25 bp, Homo sapien
ctttattgaaatgttgcagaggcca

SEQ ID NO: 2627785 - DNA, 25 bp, Homo sapien
tgcttctgctatggtcactatgagt

SEQ ID NO: 2627786 - DNA, 25 bp, Homo sapien
ggcttgaggatcagctgtcatgtct

SEQ ID NO: 2627787 - DNA, 25 bp, Homo sapien
tcagagttgagggtgcttcacagtc

SEQ ID NO: 2627788 - DNA, 25 bp, Homo sapien
gttgagggtgcttcacagtcaggtc

SEQ ID NO: 2627789 - DNA, 25 bp, Homo sapien
ctttgggattttgcttggccacttt

SEQ ID NO: 2627790 - DNA, 25 bp, Homo sapien
agagttgagggtgcttcacagtcag

SEQ ID NO: 2627791 - DNA, 25 bp, Homo sapien
gccagaactgctttatcccacggaa

SEQ ID NO: 2627792 - DNA, 25 bp, Homo sapien
tgccaggtccatgaccacacgtctg

SEQ ID NO: 2627793 - DNA, 25 bp, Homo sapien
cagccctagagttccccaatgaaaa

SEQ ID NO: 2627794 - DNA, 25 bp, Homo sapien
gttccctaatgagaagtcaacagtg

SEQ ID NO: 2627795 - DNA, 25 bp, Homo sapien
gaatcagttctctatctatgctgcc

SEQ ID NO: 2627796 - DNA, 25 bp, Homo sapien
caaaacagatgtctatcctaagcca

SEQ ID NO: 2627797 - DNA, 25 bp, Homo sapien
tgaacccagtccaattagcatatct

SEQ ID NO: 2627798 - DNA, 25 bp, Homo sapien
ccatggtagatcctgcctgggcatg

SEQ ID NO: 2627799 - DNA, 25 bp, Homo sapien
tagagcaatagcagcaagatgagta

SEQ ID NO: 2627800 - DNA, 25 bp, Homo sapien
gagcaatagcagcaagatgagtaca

SEQ ID NO: 2627801 - DNA, 25 bp, Homo sapien
agagcaatagcagcaagatgagtac

SEQ ID NO: 2627802 - DNA, 25 bp, Homo sapien
caagtggttctacagtttaactcaa

SEQ ID NO: 2627803 - DNA, 25 bp, Homo sapien
taattctattgccaacttgcctgaa

SEQ ID NO: 2627804 - DNA, 25 bp, Homo sapien
tgttttcctcttaaacctactgcta

SEQ ID NO: 2627805 - DNA, 25 bp, Homo sapien
gcctgaatgttaacacaagtggttc

SEQ ID NO: 2627806 - DNA, 25 bp, Homo sapien
cagagcaaccatctgatttctcaat

SEQ ID NO: 2627807 - DNA, 25 bp, Homo sapien
actgccattgccatcatggcccgtt

SEQ ID NO: 2627808 - DNA, 25 bp, Homo sapien
aaactgccattgccatcatggcccg

SEQ ID NO: 2627809 - DNA, 25 bp, Homo sapien
gacagagcaaccatctgatttctca

SEQ ID NO: 2627810 - DNA, 25 bp, Homo sapien
gccatgtagagctctcaaggcattg

SEQ ID NO: 2627811 - DNA, 25 bp, Homo sapien
aagggataggccatgtagagctctc

SEQ ID NO: 2627812 - DNA, 25 bp, Homo sapien
gagaattaggaaagggataggccat

SEQ ID NO: 2627813 - DNA, 25 bp, Homo sapien
ttaggaaagggataggccatgtaga

SEQ ID NO: 2627814 - DNA, 25 bp, Homo sapien
cccatgcttagccaataataggaaa

SEQ ID NO: 2627815 - DNA, 25 bp, Homo sapien
tgtccaagatgagatcaatgtagtg

SEQ ID NO: 2627816 - DNA, 25 bp, Homo sapien
tagtgaatagcatggttaaaagcct

SEQ ID NO: 2627817 - DNA, 25 bp, Homo sapien
tcaatgaaatatgagaacaagatgc

SEQ ID NO: 2627818 - DNA, 25 bp, Homo sapien
ttttgaaagtcatgatcagccacac

SEQ ID NO: 2627819 - DNA, 25 bp, Homo sapien
ggttcttgtgggagttaatcagcca

SEQ ID NO: 2627820 - DNA, 25 bp, Homo sapien
taaatgtgctaaactggaggtaact

SEQ ID NO: 2627821 - DNA, 25 bp, Homo sapien
tgaccctctattgattagccccaag

SEQ ID NO: 2627822 - DNA, 25 bp, Homo sapien
tagtttccctactgaaccctgcctc

SEQ ID NO: 2627823 - DNA, 25 bp, Homo sapien
cacctgccttctaccctctggttgg

SEQ ID NO: 2627824 - DNA, 25 bp, Homo sapien
gcagccaccacatcccttcatatca

SEQ ID NO: 2627825 - DNA, 25 bp, Homo sapien
tctagaacacctgccttctaccctc

SEQ ID NO: 2627826 - DNA, 25 bp, Homo sapien
tccccattttagagcaggtaggcca

SEQ ID NO: 2627827 - DNA, 25 bp, Homo sapien
taccatttaactgtgagcaatctca

SEQ ID NO: 2627828 - DNA, 25 bp, Homo sapien
ccttcataggcagtaggagctcaaa

SEQ ID NO: 2627829 - DNA, 25 bp, Homo sapien
tcagctgaaatcctgggagggctca

SEQ ID NO: 2627830 - DNA, 25 bp, Homo sapien
gtcagcccgtcatttttggtacaag

SEQ ID NO: 2627831 - DNA, 25 bp, Homo sapien
caaccttcaggttttagtcagcccg

SEQ ID NO: 2627832 - DNA, 25 bp, Homo sapien
tacttcaggtggtgtaactgtcaca

SEQ ID NO: 2627833 - DNA, 25 bp, Homo sapien
gaacatgggcctcaaaatgcaacca

SEQ ID NO: 2627834 - DNA, 25 bp, Homo sapien
tagtccttgaataagcctacttgaa

SEQ ID NO: 2627835 - DNA, 25 bp, Homo sapien
gcatctcattgaaacttggaaggtg

SEQ ID NO: 2627836 - DNA, 25 bp, Homo sapien
ccaaagcttgtccttgttagaaagc

SEQ ID NO: 2627837 - DNA, 25 bp, Homo sapien
gaatcttaagtcaccatgggaacct

SEQ ID NO: 2627838 - DNA, 25 bp, Homo sapien
cccacttagtgtatagtgatgcaaa

SEQ ID NO: 2627839 - DNA, 25 bp, Homo sapien
tgtggagggctcactacttgtattg

SEQ ID NO: 2627840 - DNA, 25 bp, Homo sapien
acttcatgcggccaacatttgtgga

SEQ ID NO: 2627841 - DNA, 25 bp, Homo sapien
tctgtgttaggatctggactcttac

SEQ ID NO: 2627842 - DNA, 25 bp, Homo sapien
cataaccagtggtgtgtgagagcca

SEQ ID NO: 2627843 - DNA, 25 bp, Homo sapien
tatttcctgatcattgtggtccaga

SEQ ID NO: 2627844 - DNA, 25 bp, Homo sapien
taaccaccataggacccgctattag

SEQ ID NO: 2627845 - DNA, 25 bp, Homo sapien
tatcagacaataaaagcgagtccca

SEQ ID NO: 2627846 - DNA, 25 bp, Homo sapien
tatgggagttaacctctcccagaaa

SEQ ID NO: 2627847 - DNA, 25 bp, Homo sapien
aatgatgtttgaggttggctataac

SEQ ID NO: 2627848 - DNA, 25 bp, Homo sapien
agttaggccacttgcttgttttgtg

SEQ ID NO: 2627849 - DNA, 25 bp, Homo sapien
ctccatatgggagttaacctctccc

SEQ ID NO: 2627850 - DNA, 25 bp, Homo sapien
ccctgtaagtctgggaatgatggtg

SEQ ID NO: 2627851 - DNA, 25 bp, Homo sapien
ggtaccaagcttgccagaaactgag

SEQ ID NO: 2627852 - DNA, 25 bp, Homo sapien
gatggtgagtcaggagggtatggta

SEQ ID NO: 2627853 - DNA, 25 bp, Homo sapien
tgacttcagattgtttccctgtaag

SEQ ID NO: 2627854 - DNA, 25 bp, Homo sapien
tggctgagcatgacattgactttat

SEQ ID NO: 2627855 - DNA, 25 bp, Homo sapien
gagcatgacattgactttatgcagt

SEQ ID NO: 2627856 - DNA, 25 bp, Homo sapien
ctgagcatgacattgactttatgca

SEQ ID NO: 2627857 - DNA, 25 bp, Homo sapien
ctgtagtcctgctgccatggttctg

SEQ ID NO: 2627858 - DNA, 25 bp, Homo sapien
tctgctgtggcaagcaagtcacttc

SEQ ID NO: 2627859 - DNA, 25 bp, Homo sapien
gagaacagcggtcttctgtctgctg

SEQ ID NO: 2627860 - DNA, 25 bp, Homo sapien
gtgtctatatgtgccttctccctgg

SEQ ID NO: 2627861 - DNA, 25 bp, Homo sapien
tcctctgagagaacagcggtcttct

SEQ ID NO: 2627862 - DNA, 25 bp, Homo sapien
tccctccagtagccccctcaaatgc

SEQ ID NO: 2627863 - DNA, 25 bp, Homo sapien
ccctccagtagccccctcaaatgct

SEQ ID NO: 2627864 - DNA, 25 bp, Homo sapien
ttatagattgagttcttcataaagt

SEQ ID NO: 2627865 - DNA, 25 bp, Homo sapien
atagattgagttcttcataaagttc

SEQ ID NO: 2627866 - DNA, 25 bp, Homo sapien
ggcagagggtttcctagctacataa

SEQ ID NO: 2627867 - DNA, 25 bp, Homo sapien
tcaccgaaatacactcttcaagctt

SEQ ID NO: 2627868 - DNA, 25 bp, Homo sapien
gctacataattcaccgaaatacact

SEQ ID NO: 2627869 - DNA, 25 bp, Homo sapien
agagggtttcctagctacataattc

SEQ ID NO: 2627870 - DNA, 25 bp, Homo sapien
aaaaagtagaaaggcaccctctctg

SEQ ID NO: 2627871 - DNA, 25 bp, Homo sapien
ctataatagaaaaagtagaaaggca

SEQ ID NO: 2627872 - DNA, 25 bp, Homo sapien
accctctctgcatttttcttcagtc

SEQ ID NO: 2627873 - DNA, 25 bp, Homo sapien
gcaccctctctgcatttttcttcag

SEQ ID NO: 2627874 - DNA, 25 bp, Homo sapien
agactactgtcttctccaaaacgac

SEQ ID NO: 2627875 - DNA, 25 bp, Homo sapien
tactgtcttctccaaaacgacttcg

SEQ ID NO: 2627876 - DNA, 25 bp, Homo sapien
tctccaaaacgacttcggatgctgg

SEQ ID NO: 2627877 - DNA, 25 bp, Homo sapien
acttcggatgctggggcaccactca

SEQ ID NO: 2627878 - DNA, 25 bp, Homo sapien
aattgagctctgaaatgttatgatg

SEQ ID NO: 2627879 - DNA, 25 bp, Homo sapien
tagtcgattgacttgcttgatgaaa

SEQ ID NO: 2627880 - DNA, 25 bp, Homo sapien
agacacagttgggtttgatagtcga

SEQ ID NO: 2627881 - DNA, 25 bp, Homo sapien
tgttggtattggcaaccaacactgc

SEQ ID NO: 2627882 - DNA, 25 bp, Homo sapien
aaatcagttcaaccatttgtgtcct

SEQ ID NO: 2627883 - DNA, 25 bp, Homo sapien
gttcacatgcacctctatacactcc

SEQ ID NO: 2627884 - DNA, 25 bp, Homo sapien
tatacactccttgccttccgtattt

SEQ ID NO: 2627885 - DNA, 25 bp, Homo sapien
agacccattccataagaaacctttg

SEQ ID NO: 2627886 - DNA, 25 bp, Homo sapien
tggcttgcacagcactgcatggctg

SEQ ID NO: 2627887 - DNA, 25 bp, Homo sapien
ggtgcattacaaaatgaggaacata

SEQ ID NO: 2627888 - DNA, 25 bp, Homo sapien
cacttggtgcattacaaaatgagga

SEQ ID NO: 2627889 - DNA, 25 bp, Homo sapien
catcacttggtgcattacaaaatga

SEQ ID NO: 2627890 - DNA, 25 bp, Homo sapien
ttagcacatcacttggtgcattaca

SEQ ID NO: 2627891 - DNA, 25 bp, Homo sapien
tttccttcccagtcatccgagggat

SEQ ID NO: 2627892 - DNA, 25 bp, Homo sapien
ggaaaatgtcctgttcagtcataga

SEQ ID NO: 2627893 - DNA, 25 bp, Homo sapien
cagcagagttttttgtcaggcattc

SEQ ID NO: 2627894 - DNA, 25 bp, Homo sapien
gaatctgcttcatgtcaaagtgtca

SEQ ID NO: 2627895 - DNA, 25 bp, Homo sapien
gagcaaatgtggatcagtctctatt

SEQ ID NO: 2627896 - DNA, 25 bp, Homo sapien
gtctctattgtcctggtgtctccaa

SEQ ID NO: 2627897 - DNA, 25 bp, Homo sapien
gtctccttgttgacatagggcggtc

SEQ ID NO: 2627898 - DNA, 25 bp, Homo sapien
tgtctccaaccagggagtgggaata

SEQ ID NO: 2627899 - DNA, 25 bp, Homo sapien
ctccttccagattccggtcatcatt

SEQ ID NO: 2627900 - DNA, 25 bp, Homo sapien
cttccagattccggtcatcattctt

SEQ ID NO: 2627901 - DNA, 25 bp, Homo sapien
ccttccagattccggtcatcattct

SEQ ID NO: 2627902 - DNA, 25 bp, Homo sapien
tccttccagattccggtcatcattc

SEQ ID NO: 2627903 - DNA, 25 bp, Homo sapien
cagtttaagactatacataggactc

SEQ ID NO: 2627904 - DNA, 25 bp, Homo sapien
tggagagtcttccagcgttcagctg

SEQ ID NO: 2627905 - DNA, 25 bp, Homo sapien
gaaggctccaaggttgaacagaaga

SEQ ID NO: 2627906 - DNA, 25 bp, Homo sapien
gactatacataggactctgaaggct

SEQ ID NO: 2627907 - DNA, 25 bp, Homo sapien
ctatacattttttggtattgtcatc

SEQ ID NO: 2627908 - DNA, 25 bp, Homo sapien
acatcacagtgatcagatccttcta

SEQ ID NO: 2627909 - DNA, 25 bp, Homo sapien
agtgatcagatccttctatacattt

SEQ ID NO: 2627910 - DNA, 25 bp, Homo sapien
gtattgtcatcaggaccattgcttt

SEQ ID NO: 2627911 - DNA, 25 bp, Homo sapien
gcagtgacggtggttcctttttctc

SEQ ID NO: 2627912 - DNA, 25 bp, Homo sapien
tggcagtgacggtggttcctttttc

SEQ ID NO: 2627913 - DNA, 25 bp, Homo sapien
agtgacggtggttcctttttctcag

SEQ ID NO: 2627914 - DNA, 25 bp, Homo sapien
cagtgacggtggttcctttttctca

SEQ ID NO: 2627915 - DNA, 25 bp, Homo sapien
agtatgatgttggttcgtctttagt

SEQ ID NO: 2627916 - DNA, 25 bp, Homo sapien
tgttaaaatacagtctggtgacttg

SEQ ID NO: 2627917 - DNA, 25 bp, Homo sapien
gatgttggttcgtctttagtactac

SEQ ID NO: 2627918 - DNA, 25 bp, Homo sapien
tcaaaagtcaacgttcacattagct

SEQ ID NO: 2627919 - DNA, 25 bp, Homo sapien
gcctcttgcacaaaggttttgtcat

SEQ ID NO: 2627920 - DNA, 25 bp, Homo sapien
gagtattttgctagcaaattttgct

SEQ ID NO: 2627921 - DNA, 25 bp, Homo sapien
cttctaagagcattgagtattttgc

SEQ ID NO: 2627922 - DNA, 25 bp, Homo sapien
agagtaagttctctgggcccacatc

SEQ ID NO: 2627923 - DNA, 25 bp, Homo sapien
atgcttctttcaaatagttaatatg

SEQ ID NO: 2627924 - DNA, 25 bp, Homo sapien
tatcatatctatgatttaatgccat

SEQ ID NO: 2627925 - DNA, 25 bp, Homo sapien
tatgaatcctatcatatctatgatt

SEQ ID NO: 2627926 - DNA, 25 bp, Homo sapien
tgcttctttcaaatagttaatatga

SEQ ID NO: 2627927 - DNA, 25 bp, Homo sapien
cactgtgatagatttgcgataagag

SEQ ID NO: 2627928 - DNA, 25 bp, Homo sapien
tataaaacaggaagatagctagttc

SEQ ID NO: 2627929 - DNA, 25 bp, Homo sapien
gatttgcgataagagcaaattttgg

SEQ ID NO: 2627930 - DNA, 25 bp, Homo sapien
tagacctttacaattggaagaacca

SEQ ID NO: 2627931 - DNA, 25 bp, Homo sapien
atgcttcacaaagacctttcagatt

SEQ ID NO: 2627932 - DNA, 25 bp, Homo sapien
tcagattattgtgtaggctcagtcc

SEQ ID NO: 2627933 - DNA, 25 bp, Homo sapien
ggctcagtcctctcttcacatgcat

SEQ ID NO: 2627934 - DNA, 25 bp, Homo sapien
aaagacctttcagattattgtgtag

SEQ ID NO: 2627935 - DNA, 25 bp, Homo sapien
tattgtgtaaagacatgacaacggg

SEQ ID NO: 2627936 - DNA, 25 bp, Homo sapien
tgacaacgggtaagccactgagacc

SEQ ID NO: 2627937 - DNA, 25 bp, Homo sapien
tcagaccctcttaaggatattgtgt

SEQ ID NO: 2627938 - DNA, 25 bp, Homo sapien
ccactgagaccagcaacggtgttcc

SEQ ID NO: 2627939 - DNA, 25 bp, Homo sapien
ggtatccttactccgctccctttca

SEQ ID NO: 2627940 - DNA, 25 bp, Homo sapien
ccaactcggaaaaccagaggtggct

SEQ ID NO: 2627941 - DNA, 25 bp, Homo sapien
ctcggaaaaccagaggtggctccgg

SEQ ID NO: 2627942 - DNA, 25 bp, Homo sapien
ctttggtatccttactccgctccct

SEQ ID NO: 2627943 - DNA, 25 bp, Homo sapien
tcacagagcactaacagtaaaagtt

SEQ ID NO: 2627944 - DNA, 25 bp, Homo sapien
gcactaacagtaaaagtttgtagcc

SEQ ID NO: 2627945 - DNA, 25 bp, Homo sapien
cagagcactaacagtaaaagtttgt

SEQ ID NO: 2627946 - DNA, 25 bp, Homo sapien
gagcactaacagtaaaagtttgtag

SEQ ID NO: 2627947 - DNA, 25 bp, Homo sapien
tcggagatcctcagacctaacaagg

SEQ ID NO: 2627948 - DNA, 25 bp, Homo sapien
ttcccaggacttcggagatcctcag

SEQ ID NO: 2627949 - DNA, 25 bp, Homo sapien
ggacttcggagatcctcagacctaa

SEQ ID NO: 2627950 - DNA, 25 bp, Homo sapien
tcctcagacctaacaagggccttgg

SEQ ID NO: 2627951 - DNA, 25 bp, Homo sapien
tgtgcgaggcgctttcacatttttc

SEQ ID NO: 2627952 - DNA, 25 bp, Homo sapien
tcttatgcccacatcgctgatggga

SEQ ID NO: 2627953 - DNA, 25 bp, Homo sapien
tgggaaatgagtgacttaggctgct

SEQ ID NO: 2627954 - DNA, 25 bp, Homo sapien
ttctgggaactgtgcgaggcgcttt

SEQ ID NO: 2627955 - DNA, 25 bp, Homo sapien
tttgtcagataagtagactgcaaat

SEQ ID NO: 2627956 - DNA, 25 bp, Homo sapien
tatttcttcacatcctctccacacc

SEQ ID NO: 2627957 - DNA, 25 bp, Homo sapien
tttcttcacatcctctccacacctg

SEQ ID NO: 2627958 - DNA, 25 bp, Homo sapien
gtcagataagtagactgcaaatatt

SEQ ID NO: 2627959 - DNA, 25 bp, Homo sapien
acctgcatccttagttagtgacccc

SEQ ID NO: 2627960 - DNA, 25 bp, Homo sapien
cctgctctaaactctcaagttgctg

SEQ ID NO: 2627961 - DNA, 25 bp, Homo sapien
catttagatggagtgttgtcagttc

SEQ ID NO: 2627962 - DNA, 25 bp, Homo sapien
ctgtgtccatttagatggagtgttg

SEQ ID NO: 2627963 - DNA, 25 bp, Homo sapien
taggttggtggcttgactggaaatc

SEQ ID NO: 2627964 - DNA, 25 bp, Homo sapien
tcagctaacttcagatacaggttgt

SEQ ID NO: 2627965 - DNA, 25 bp, Homo sapien
ggtggcttgactggaaatctttgtt

SEQ ID NO: 2627966 - DNA, 25 bp, Homo sapien
ggcactggttcattcagatagtgat

SEQ ID NO: 2627967 - DNA, 25 bp, Homo sapien
agttttctttttctcttgatttgct

SEQ ID NO: 2627968 - DNA, 25 bp, Homo sapien
atgtagttttctttttctcttgatt

SEQ ID NO: 2627969 - DNA, 25 bp, Homo sapien
tagttttctttttctcttgatttgc

SEQ ID NO: 2627970 - DNA, 25 bp, Homo sapien
tcaatgtagttttctttttctcttg

SEQ ID NO: 2627971 - DNA, 25 bp, Homo sapien
ctcttgccatatactgactaataca

SEQ ID NO: 2627972 - DNA, 25 bp, Homo sapien
gccgtttctcttgccatatactgac

SEQ ID NO: 2627973 - DNA, 25 bp, Homo sapien
tctaattgttctttcctcgcacatt

SEQ ID NO: 2627974 - DNA, 25 bp, Homo sapien
tcctcgcacattgccgtttctcttg

SEQ ID NO: 2627975 - DNA, 25 bp, Homo sapien
cccgcttcctttgactgtgtcactg

SEQ ID NO: 2627976 - DNA, 25 bp, Homo sapien
tggtcccccgcttcctttgactgtg

SEQ ID NO: 2627977 - DNA, 25 bp, Homo sapien
caaggagagcccaatcaccagtggt

SEQ ID NO: 2627978 - DNA, 25 bp, Homo sapien
agtggtagaagtgttgctggtcccc

SEQ ID NO: 2627979 - DNA, 25 bp, Homo sapien
cagttggaattagtccagggcattg

SEQ ID NO: 2627980 - DNA, 25 bp, Homo sapien
agcaccaggtagctcaaactgtggg

SEQ ID NO: 2627981 - DNA, 25 bp, Homo sapien
gaagcactggcaaacttgatgcctg

SEQ ID NO: 2627982 - DNA, 25 bp, Homo sapien
cattggaccagtgttgagttcatag

SEQ ID NO: 2627983 - DNA, 25 bp, Homo sapien
ttctttccctacgaccctcacatat

SEQ ID NO: 2627984 - DNA, 25 bp, Homo sapien
tctttccctacgaccctcacatatg

SEQ ID NO: 2627985 - DNA, 25 bp, Homo sapien
ctttccctacgaccctcacatatgg

SEQ ID NO: 2627986 - DNA, 25 bp, Homo sapien
tttctttccctacgaccctcacata

SEQ ID NO: 2627987 - DNA, 25 bp, Homo sapien
tcaaataaactttgtatatgtatat

SEQ ID NO: 2627988 - DNA, 25 bp, Homo sapien
gtcattttcattttgcgtgtcattt

SEQ ID NO: 2627989 - DNA, 25 bp, Homo sapien
gtatatgtatataagtgtgaatcat

SEQ ID NO: 2627990 - DNA, 25 bp, Homo sapien
tcattttgcgtgtcattttcaaata

SEQ ID NO: 2627991 - DNA, 25 bp, Homo sapien
aaggctttctgctgcaacctttgcc

SEQ ID NO: 2627992 - DNA, 25 bp, Homo sapien
ggctttctgctgcaacctttgccat

SEQ ID NO: 2627993 - DNA, 25 bp, Homo sapien
catgatgctcaaggctttctgctgc

SEQ ID NO: 2627994 - DNA, 25 bp, Homo sapien
gatgctcaaggctttctgctgcaac

SEQ ID NO: 2627995 - DNA, 25 bp, Homo sapien
cacttagttcctcagtaacagctct

SEQ ID NO: 2627996 - DNA, 25 bp, Homo sapien
tctcaagggactgacatcacttagt

SEQ ID NO: 2627997 - DNA, 25 bp, Homo sapien
gactgacatcacttagttcctcagt

SEQ ID NO: 2627998 - DNA, 25 bp, Homo sapien
ctgttctctcaagggactgacatca

SEQ ID NO: 2627999 - DNA, 25 bp, Homo sapien
taatgatccattcgtggcttcacca

SEQ ID NO: 2628000 - DNA, 25 bp, Homo sapien
cagcaggattatctgtcccttggtg

SEQ ID NO: 2628001 - DNA, 25 bp, Homo sapien
gggtttggccataggagctgcttta

SEQ ID NO: 2628002 - DNA, 25 bp, Homo sapien
gcttcaccatgtgaattggcagcca

SEQ ID NO: 2628003 - DNA, 25 bp, Homo sapien
gagagttaagtttccacgctggccc

SEQ ID NO: 2628004 - DNA, 25 bp, Homo sapien
tttccaactaaaatacgagttctca

SEQ ID NO: 2628005 - DNA, 25 bp, Homo sapien
tacataggattccaaactgtgtgca

SEQ ID NO: 2628006 - DNA, 25 bp, Homo sapien
cgagttctcaatgttggaattgatg

SEQ ID NO: 2628007 - DNA, 25 bp, Homo sapien
gcttatcatacttcccacaagggca

SEQ ID NO: 2628008 - DNA, 25 bp, Homo sapien
aggtgcccagactgcaatcgcgaag

SEQ ID NO: 2628009 - DNA, 25 bp, Homo sapien
tatagtgtgtactgcttcctagagc

SEQ ID NO: 2628010 - DNA, 25 bp, Homo sapien
tttggtaacggtggaagactacatc

SEQ ID NO: 2628011 - DNA, 25 bp, Homo sapien
ctacagaacgatgcgggcattttcc

SEQ ID NO: 2628012 - DNA, 25 bp, Homo sapien
ggttctccgcctccaggatcctcac

SEQ ID NO: 2628013 - DNA, 25 bp, Homo sapien
atggtcttgaagtaaaagccccagt

SEQ ID NO: 2628014 - DNA, 25 bp, Homo sapien
agcttccggttctccgcctccagga

SEQ ID NO: 2628015 - DNA, 25 bp, Homo sapien
catcagcagcaagacgggcattgtc

SEQ ID NO: 2628016 - DNA, 25 bp, Homo sapien
tcagcagcaagacgggcattgtcga

SEQ ID NO: 2628017 - DNA, 25 bp, Homo sapien
tcatcagcagcaagacgggcattgt

SEQ ID NO: 2628018 - DNA, 25 bp, Homo sapien
cagcagcaagacgggcattgtcgat

SEQ ID NO: 2628019 - DNA, 25 bp, Homo sapien
tctgccttcctaaatgttccaactg

SEQ ID NO: 2628020 - DNA, 25 bp, Homo sapien
ctgccttcctaaatgttccaactgc

SEQ ID NO: 2628021 - DNA, 25 bp, Homo sapien
tgccttcctaaatgttccaactgcc

SEQ ID NO: 2628022 - DNA, 25 bp, Homo sapien
ccttcctaaatgttccaactgcctt

SEQ ID NO: 2628023 - DNA, 25 bp, Homo sapien
ggcccgcagctgatagcctgcaaat

SEQ ID NO: 2628024 - DNA, 25 bp, Homo sapien
cacgtgcaaggactgaagagaggcc

SEQ ID NO: 2628025 - DNA, 25 bp, Homo sapien
tgcaaataaatggaatctcagtcct

SEQ ID NO: 2628026 - DNA, 25 bp, Homo sapien
tggaacctgaggatggcccgcagct

SEQ ID NO: 2628027 - DNA, 25 bp, Homo sapien
tttttcacgcaaaagttcccatatc

SEQ ID NO: 2628028 - DNA, 25 bp, Homo sapien
cagagattagcataactttacaggc

SEQ ID NO: 2628029 - DNA, 25 bp, Homo sapien
cacgcaaaagttcccatatcttcca

SEQ ID NO: 2628030 - DNA, 25 bp, Homo sapien
tacaggcaaaattctgtagcccttt

SEQ ID NO: 2628031 - DNA, 25 bp, Homo sapien
ttcctttgacgttaggctttatctg

SEQ ID NO: 2628032 - DNA, 25 bp, Homo sapien
cctttgacgttaggctttatctgac

SEQ ID NO: 2628033 - DNA, 25 bp, Homo sapien
tttgacgttaggctttatctgacac

SEQ ID NO: 2628034 - DNA, 25 bp, Homo sapien
gacgttaggctttatctgacactta

SEQ ID NO: 2628035 - DNA, 25 bp, Homo sapien
aggccatctgcaagccgaggagcag

SEQ ID NO: 2628036 - DNA, 25 bp, Homo sapien
ggccatctgcaagccgaggagcagg

SEQ ID NO: 2628037 - DNA, 25 bp, Homo sapien
ccatctgcaagccgaggagcaggga

SEQ ID NO: 2628038 - DNA, 25 bp, Homo sapien
atctgcaagccgaggagcagggaaa

SEQ ID NO: 2628039 - DNA, 25 bp, Homo sapien
gccaggaggcaacatcttcttttcg

SEQ ID NO: 2628040 - DNA, 25 bp, Homo sapien
tagaatgtatgttgggcatccccgg

SEQ ID NO: 2628041 - DNA, 25 bp, Homo sapien
tgctggagacttgactgaggaccag

SEQ ID NO: 2628042 - DNA, 25 bp, Homo sapien
gcatccccgggccttgtctcttagg

SEQ ID NO: 2628043 - DNA, 25 bp, Homo sapien
aagatgggtgatgatttggtccaca

SEQ ID NO: 2628044 - DNA, 25 bp, Homo sapien
caaacacattggtaagctgactatc

SEQ ID NO: 2628045 - DNA, 25 bp, Homo sapien
tgactatcatgcaagtacatcatag

SEQ ID NO: 2628046 - DNA, 25 bp, Homo sapien
gtgatgatttggtccacagcagcgg

SEQ ID NO: 2628047 - DNA, 25 bp, Homo sapien
gttcacctttaaaactgatatggtc

SEQ ID NO: 2628048 - DNA, 25 bp, Homo sapien
cacctttaaaactgatatggtcctt

SEQ ID NO: 2628049 - DNA, 25 bp, Homo sapien
tcatggttcacctttaaaactgata

SEQ ID NO: 2628050 - DNA, 25 bp, Homo sapien
tggttcacctttaaaactgatatgg

SEQ ID NO: 2628051 - DNA, 25 bp, Homo sapien
ccataaattatgcactccagcgtct

SEQ ID NO: 2628052 - DNA, 25 bp, Homo sapien
gggaatatcaggaatcagcacctcg

SEQ ID NO: 2628053 - DNA, 25 bp, Homo sapien
ggcaatggttaagcctcactctggg

SEQ ID NO: 2628054 - DNA, 25 bp, Homo sapien
gcacctcggaggcaatggttaagcc

SEQ ID NO: 2628055 - DNA, 25 bp, Homo sapien
gctgttgcctgaaaccactcatcaa

SEQ ID NO: 2628056 - DNA, 25 bp, Homo sapien
aggctgttgcctgaaaccactcatc

SEQ ID NO: 2628057 - DNA, 25 bp, Homo sapien
ggctgttgcctgaaaccactcatca

SEQ ID NO: 2628058 - DNA, 25 bp, Homo sapien
tgttgcctgaaaccactcatcaagg

SEQ ID NO: 2628059 - DNA, 25 bp, Homo sapien
ttcactcttctcatagtcgttttca

SEQ ID NO: 2628060 - DNA, 25 bp, Homo sapien
tttcactcttctcatagtcgttttc

SEQ ID NO: 2628061 - DNA, 25 bp, Homo sapien
tacgagtgtccattagttcaggaat

SEQ ID NO: 2628062 - DNA, 25 bp, Homo sapien
cagtgtgttcaaatgaccaactatg

SEQ ID NO: 2628063 - DNA, 25 bp, Homo sapien
aaaagtgatgatcccttctccttcc

SEQ ID NO: 2628064 - DNA, 25 bp, Homo sapien
tatgtttaaatagccgactgctccc

SEQ ID NO: 2628065 - DNA, 25 bp, Homo sapien
cagatgtggaattgaggaagataaa

SEQ ID NO: 2628066 - DNA, 25 bp, Homo sapien
tggaatcaggacagactgtccttgc

SEQ ID NO: 2628067 - DNA, 25 bp, Homo sapien
gaattgaggaagataaattcctgga

SEQ ID NO: 2628068 - DNA, 25 bp, Homo sapien
tcaggacagactgtccttgcattct

SEQ ID NO: 2628069 - DNA, 25 bp, Homo sapien
gctgagacaactggtcagacacaat

SEQ ID NO: 2628070 - DNA, 25 bp, Homo sapien
cagacacaatcatcagatacgcggc

SEQ ID NO: 2628071 - DNA, 25 bp, Homo sapien
ctatgtactcttaagcagtttcgac

SEQ ID NO: 2628072 - DNA, 25 bp, Homo sapien
actgagtcatgtctaggcaatcctg

SEQ ID NO: 2628073 - DNA, 25 bp, Homo sapien
catcccactgctgtgtgctattgtc

SEQ ID NO: 2628074 - DNA, 25 bp, Homo sapien
ctgcttttcatcctactggtcctcg

SEQ ID NO: 2628075 - DNA, 25 bp, Homo sapien
ggaagatataaaagagcccaagtaa

SEQ ID NO: 2628076 - DNA, 25 bp, Homo sapien
tggtcctcgccagaagtcgctggtt

SEQ ID NO: 2628077 - DNA, 25 bp, Homo sapien
tattctgacattctcatataagctt

SEQ ID NO: 2628078 - DNA, 25 bp, Homo sapien
tattgaatcatctgcagttgccctg

SEQ ID NO: 2628079 - DNA, 25 bp, Homo sapien
gaatatgtcatgttgccatttgcct

SEQ ID NO: 2628080 - DNA, 25 bp, Homo sapien
gtacaggataaaacgttggctccag

SEQ ID NO: 2628081 - DNA, 25 bp, Homo sapien
agatgtgttgttccacaaattcttg

SEQ ID NO: 2628082 - DNA, 25 bp, Homo sapien
aagatgtgttgttccacaaattctt

SEQ ID NO: 2628083 - DNA, 25 bp, Homo sapien
aaagatgtgttgttccacaaattct

SEQ ID NO: 2628084 - DNA, 25 bp, Homo sapien
gatgaaagcagttttattagccttt

SEQ ID NO: 2628085 - DNA, 25 bp, Homo sapien
aggatgaaagcagttttattagcct

SEQ ID NO: 2628086 - DNA, 25 bp, Homo sapien
ctaggatgaaagcagttttattagc

SEQ ID NO: 2628087 - DNA, 25 bp, Homo sapien
tgaaagcagttttattagccttttc

SEQ ID NO: 2628088 - DNA, 25 bp, Homo sapien
ctgacagccagttcctgagtgtggg

SEQ ID NO: 2628089 - DNA, 25 bp, Homo sapien
cccctcctttgttgtgatgctggaa

SEQ ID NO: 2628090 - DNA, 25 bp, Homo sapien
cctctggatctctagtctggaaaca

SEQ ID NO: 2628091 - DNA, 25 bp, Homo sapien
agtctgacagccagttcctgagtgt

SEQ ID NO: 2628092 - DNA, 25 bp, Homo sapien
ctggcactgcccgtagaattgctaa

SEQ ID NO: 2628093 - DNA, 25 bp, Homo sapien
acaatgttctggcactgcccgtaga

SEQ ID NO: 2628094 - DNA, 25 bp, Homo sapien
gcactgcccgtagaattgctaaagg

SEQ ID NO: 2628095 - DNA, 25 bp, Homo sapien
tgttctggcactgcccgtagaattg

SEQ ID NO: 2628096 - DNA, 25 bp, Homo sapien
caaaaattgccttgtgtggtgcttg

SEQ ID NO: 2628097 - DNA, 25 bp, Homo sapien
gctcctgggatagccctacttcaga

SEQ ID NO: 2628098 - DNA, 25 bp, Homo sapien
tgtttgtggatcaccagcatccagg

SEQ ID NO: 2628099 - DNA, 25 bp, Homo sapien
tgtgtggtgcttgttctcagcctgc

SEQ ID NO: 2628100 - DNA, 25 bp, Homo sapien
ccacatccttttggccgatcccaga

SEQ ID NO: 2628101 - DNA, 25 bp, Homo sapien
gatcccagagtttgtctgcagacat

SEQ ID NO: 2628102 - DNA, 25 bp, Homo sapien
agtttgtctgcagacatttctcaga

SEQ ID NO: 2628103 - DNA, 25 bp, Homo sapien
tttggccgatcccagagtttgtctg

SEQ ID NO: 2628104 - DNA, 25 bp, Homo sapien
tctggtctctgtacaggcagcacta

SEQ ID NO: 2628105 - DNA, 25 bp, Homo sapien
tgtgaaatccggtctggtctctgta

SEQ ID NO: 2628106 - DNA, 25 bp, Homo sapien
caggcagcactatgttggtaagcca

SEQ ID NO: 2628107 - DNA, 25 bp, Homo sapien
cttcttacaaatacacacccttgtg

SEQ ID NO: 2628108 - DNA, 25 bp, Homo sapien
tgcttaagtccagcctactgggttc

SEQ ID NO: 2628109 - DNA, 25 bp, Homo sapien
gtgaacatcctccagcatgcttaag

SEQ ID NO: 2628110 - DNA, 25 bp, Homo sapien
tttttggagtctaaggtcagctaca

SEQ ID NO: 2628111 - DNA, 25 bp, Homo sapien
cagctacagctttttgatccataga

SEQ ID NO: 2628112 - DNA, 25 bp, Homo sapien
tctaggccttgacctgccataacag

SEQ ID NO: 2628113 - DNA, 25 bp, Homo sapien
tctcccacagctaatgcctgatagc

SEQ ID NO: 2628114 - DNA, 25 bp, Homo sapien
ctaatgcctgatagcctccttgtac

SEQ ID NO: 2628115 - DNA, 25 bp, Homo sapien
tctgctgccttgcatctggttttgt

SEQ ID NO: 2628116 - DNA, 25 bp, Homo sapien
cagagaggtcagcaaggttatagcc

SEQ ID NO: 2628117 - DNA, 25 bp, Homo sapien
gagaggtcagcaaggttatagccat

SEQ ID NO: 2628118 - DNA, 25 bp, Homo sapien
agagaggtcagcaaggttatagcca

SEQ ID NO: 2628119 - DNA, 25 bp, Homo sapien
gaggtcagcaaggttatagccatat

SEQ ID NO: 2628120 - DNA, 25 bp, Homo sapien
agctcctccctggtaaaactctaag

SEQ ID NO: 2628121 - DNA, 25 bp, Homo sapien
gctgctcttgcaggctataagttca

SEQ ID NO: 2628122 - DNA, 25 bp, Homo sapien
catgcccttccttatgcatggagaa

SEQ ID NO: 2628123 - DNA, 25 bp, Homo sapien
ggctataagttcatgcccttcctta

SEQ ID NO: 2628124 - DNA, 25 bp, Homo sapien
tttggcggtggatagaggctgagat

SEQ ID NO: 2628125 - DNA, 25 bp, Homo sapien
agaggctgagatgcttgcagcactg

SEQ ID NO: 2628126 - DNA, 25 bp, Homo sapien
ctgtttggcggtggatagaggctga

SEQ ID NO: 2628127 - DNA, 25 bp, Homo sapien
atagaggctgagatgcttgcagcac

SEQ ID NO: 2628128 - DNA, 25 bp, Homo sapien
acctccacattttctttgagatgaa

SEQ ID NO: 2628129 - DNA, 25 bp, Homo sapien
tccacattttctttgagatgaagat

SEQ ID NO: 2628130 - DNA, 25 bp, Homo sapien
cctccacattttctttgagatgaag

SEQ ID NO: 2628131 - DNA, 25 bp, Homo sapien
cacctccacattttctttgagatga

SEQ ID NO: 2628132 - DNA, 25 bp, Homo sapien
gatagtcagagccaacaccatcagg

SEQ ID NO: 2628133 - DNA, 25 bp, Homo sapien
agtcagagccaacaccatcaggaag

SEQ ID NO: 2628134 - DNA, 25 bp, Homo sapien
gggtggaagtaggaagatagtcaga

SEQ ID NO: 2628135 - DNA, 25 bp, Homo sapien
gtcagagccaacaccatcaggaagc

SEQ ID NO: 2628136 - DNA, 25 bp, Homo sapien
tgtgctggtggtcaccaaatcaaga

SEQ ID NO: 2628137 - DNA, 25 bp, Homo sapien
tggtggtcaccaaatcaagatgtgg

SEQ ID NO: 2628138 - DNA, 25 bp, Homo sapien
caagatgtggtactttctgggtatc

SEQ ID NO: 2628139 - DNA, 25 bp, Homo sapien
ttctgggtatccacagtatgtgtca

SEQ ID NO: 2628140 - DNA, 25 bp, Homo sapien
ggtgtctcataagtttacaatcttt

SEQ ID NO: 2628141 - DNA, 25 bp, Homo sapien
gtgtctcataagtttacaatctttt

SEQ ID NO: 2628142 - DNA, 25 bp, Homo sapien
gtctcataagtttacaatcttttaa

SEQ ID NO: 2628143 - DNA, 25 bp, Homo sapien
tttcattctggaatgtctataatga

SEQ ID NO: 2628144 - DNA, 25 bp, Homo sapien
tcagatctaggcagctactaagctt

SEQ ID NO: 2628145 - DNA, 25 bp, Homo sapien
agatctaggcagctactaagctttg

SEQ ID NO: 2628146 - DNA, 25 bp, Homo sapien
actctaccatcactgacattccagg

SEQ ID NO: 2628147 - DNA, 25 bp, Homo sapien
gtttttcagatctaggcagctacta

SEQ ID NO: 2628148 - DNA, 25 bp, Homo sapien
ttttgctaaacaatcctggactaag

SEQ ID NO: 2628149 - DNA, 25 bp, Homo sapien
caacatggcctaaattataagggaa

SEQ ID NO: 2628150 - DNA, 25 bp, Homo sapien
cacatctacaatgcagttattactg

SEQ ID NO: 2628151 - DNA, 25 bp, Homo sapien
acaatcctggactaagcaacatttt

SEQ ID NO: 2628152 - DNA, 25 bp, Homo sapien
cagtttgcatcatgtgaaccacttt

SEQ ID NO: 2628153 - DNA, 25 bp, Homo sapien
tgccaaaacgctgactacacggcca

SEQ ID NO: 2628154 - DNA, 25 bp, Homo sapien
tcaaagtgcagccagtgccaacagg

SEQ ID NO: 2628155 - DNA, 25 bp, Homo sapien
atgaaaatgccaaaacgctgactac

SEQ ID NO: 2628156 - DNA, 25 bp, Homo sapien
ctgctgcccaaccattgcagattat

SEQ ID NO: 2628157 - DNA, 25 bp, Homo sapien
tgctgcccaaccattgcagattatt

SEQ ID NO: 2628158 - DNA, 25 bp, Homo sapien
cactgataacggtcacagcatctat

SEQ ID NO: 2628159 - DNA, 25 bp, Homo sapien
tgataacggtcacagcatctatctg

SEQ ID NO: 2628160 - DNA, 25 bp, Homo sapien
gcctctgctgtggggggggtcccca

SEQ ID NO: 2628161 - DNA, 25 bp, Homo sapien
tgcctctgctgtggggggggtcccc

SEQ ID NO: 2628162 - DNA, 25 bp, Homo sapien
tgtgcctctgctgtggggggggtcc

SEQ ID NO: 2628163 - DNA, 25 bp, Homo sapien
ctgtgcctctgctgtggggggggtc

SEQ ID NO: 2628164 - DNA, 25 bp, Homo sapien
tgggaatgtgtctcctttgaagggt

SEQ ID NO: 2628165 - DNA, 25 bp, Homo sapien
tacttattcatcaagcaacccgtgg

SEQ ID NO: 2628166 - DNA, 25 bp, Homo sapien
tcacttggagcatgaaactgggaat

SEQ ID NO: 2628167 - DNA, 25 bp, Homo sapien
caacccgtggaagctacaagtgtca

SEQ ID NO: 2628168 - DNA, 25 bp, Homo sapien
gttgtaacttcttggatctttgaat

SEQ ID NO: 2628169 - DNA, 25 bp, Homo sapien
tcagttgtaacttcttggatctttg

SEQ ID NO: 2628170 - DNA, 25 bp, Homo sapien
cttcagttgtaacttcttggatctt

SEQ ID NO: 2628171 - DNA, 25 bp, Homo sapien
cagttgtaacttcttggatctttga

SEQ ID NO: 2628172 - DNA, 25 bp, Homo sapien
gacagtcagattgcacctgcacgaa

SEQ ID NO: 2628173 - DNA, 25 bp, Homo sapien
tggaagatgtgttgtgcatggcaca

SEQ ID NO: 2628174 - DNA, 25 bp, Homo sapien
tgcgcagcactgttcatcatagcag

SEQ ID NO: 2628175 - DNA, 25 bp, Homo sapien
aagtgggtcagagtctgcgcagcac

SEQ ID NO: 2628176 - DNA, 25 bp, Homo sapien
caaagtatagaataagatagggtag

SEQ ID NO: 2628177 - DNA, 25 bp, Homo sapien
gaggcttttcatctcgctgtggcac

SEQ ID NO: 2628178 - DNA, 25 bp, Homo sapien
tatagcaatactccttcaaggtgca

SEQ ID NO: 2628179 - DNA, 25 bp, Homo sapien
atggattttatggaactttggatat

SEQ ID NO: 2628180 - DNA, 25 bp, Homo sapien
aagtagcttggaagctgggattaac

SEQ ID NO: 2628181 - DNA, 25 bp, Homo sapien
acttggtgcagagtgtagtctgaga

SEQ ID NO: 2628182 - DNA, 25 bp, Homo sapien
gtctgagatactaactaactttcat

SEQ ID NO: 2628183 - DNA, 25 bp, Homo sapien
aatgtttggctgatttatgccttgt

SEQ ID NO: 2628184 - DNA, 25 bp, Homo sapien
aactcagctggattgaatgtttggc

SEQ ID NO: 2628185 - DNA, 25 bp, Homo sapien
tcatgtgtaacaacagctgtgcaag

SEQ ID NO: 2628186 - DNA, 25 bp, Homo sapien
caagtaggtggagatgtcaggaatc

SEQ ID NO: 2628187 - DNA, 25 bp, Homo sapien
ggatataggtagctcatcagatgga

SEQ ID NO: 2628188 - DNA, 25 bp, Homo sapien
cctcgtaaaactgggatgctgttgc

SEQ ID NO: 2628189 - DNA, 25 bp, Homo sapien
ttctgaacgttgtctccttgccagt

SEQ ID NO: 2628190 - DNA, 25 bp, Homo sapien
tctactgtgttaggttttctgaacg

SEQ ID NO: 2628191 - DNA, 25 bp, Homo sapien
aatactcagcctccggtctgctgct

SEQ ID NO: 2628192 - DNA, 25 bp, Homo sapien
ttgttaataccggaggccacagcta

SEQ ID NO: 2628193 - DNA, 25 bp, Homo sapien
tttggcccccatgggtgccttgtgt

SEQ ID NO: 2628194 - DNA, 25 bp, Homo sapien
gccttgtgtagagtgcatactcaca

SEQ ID NO: 2628195 - DNA, 25 bp, Homo sapien
ggggtacttcatcacaggccaacat

SEQ ID NO: 2628196 - DNA, 25 bp, Homo sapien
tactcacaactgttcagggtgacct

SEQ ID NO: 2628197 - DNA, 25 bp, Homo sapien
tttgcttcaactagacctggttcag

SEQ ID NO: 2628198 - DNA, 25 bp, Homo sapien
tgtcaaccaactttgcttcaactag

SEQ ID NO: 2628199 - DNA, 25 bp, Homo sapien
aagaggcatgagttgtcaaccaact

SEQ ID NO: 2628200 - DNA, 25 bp, Homo sapien
ggcatgagttgtcaaccaactttgc

SEQ ID NO: 2628201 - DNA, 25 bp, Homo sapien
tgtgagagcctgaactgtatctctt

SEQ ID NO: 2628202 - DNA, 25 bp, Homo sapien
gagcattgtgagagcctgaactgta

SEQ ID NO: 2628203 - DNA, 25 bp, Homo sapien
tcctgagcattgtgagagcctgaac

SEQ ID NO: 2628204 - DNA, 25 bp, Homo sapien
aaatcctgagcattgtgagagcctg

SEQ ID NO: 2628205 - DNA, 25 bp, Homo sapien
tcacacgagctgcatacactgtacc

SEQ ID NO: 2628206 - DNA, 25 bp, Homo sapien
cacgagctgcatacactgtacccaa

SEQ ID NO: 2628207 - DNA, 25 bp, Homo sapien
tgtcacacgagctgcatacactgta

SEQ ID NO: 2628208 - DNA, 25 bp, Homo sapien
acctgtcacacgagctgcatacact

SEQ ID NO: 2628209 - DNA, 25 bp, Homo sapien
ggagtattatctataagcctctgat

SEQ ID NO: 2628210 - DNA, 25 bp, Homo sapien
gagtattatctataagcctctgatt

SEQ ID NO: 2628211 - DNA, 25 bp, Homo sapien
agtattatctataagcctctgattg

SEQ ID NO: 2628212 - DNA, 25 bp, Homo sapien
gctacagcagatagcagacaggtat

SEQ ID NO: 2628213 - DNA, 25 bp, Homo sapien
tcaaagccggtctcagtggctgtcg

SEQ ID NO: 2628214 - DNA, 25 bp, Homo sapien
gctactggagtttgcggctgccgct

SEQ ID NO: 2628215 - DNA, 25 bp, Homo sapien
tttggacaccgaggtcagagttgcc

SEQ ID NO: 2628216 - DNA, 25 bp, Homo sapien
agacgagtcccagctttgcagtgcc

SEQ ID NO: 2628217 - DNA, 25 bp, Homo sapien
gatagtggctggcggtgcgcagcct

SEQ ID NO: 2628218 - DNA, 25 bp, Homo sapien
gctggcggtgcgcagccttggagtg

SEQ ID NO: 2628219 - DNA, 25 bp, Homo sapien
tggcggtgcgcagccttggagtgca

SEQ ID NO: 2628220 - DNA, 25 bp, Homo sapien
gtggctggcggtgcgcagccttgga

SEQ ID NO: 2628221 - DNA, 25 bp, Homo sapien
catagactgcaaagagcgtgaggcc

SEQ ID NO: 2628222 - DNA, 25 bp, Homo sapien
taccagcgtgtagaaggtcgtctcc

SEQ ID NO: 2628223 - DNA, 25 bp, Homo sapien
tccagtcgatgaagcaccaggtgtc

SEQ ID NO: 2628224 - DNA, 25 bp, Homo sapien
caaagtgcccaacaggtcggtgaca

SEQ ID NO: 2628225 - DNA, 25 bp, Homo sapien
tgacatcccatcagttgttttatga

SEQ ID NO: 2628226 - DNA, 25 bp, Homo sapien
tgcttcacactcatctgacatccca

SEQ ID NO: 2628227 - DNA, 25 bp, Homo sapien
tctcttgtatgtatagatgtgcttc

SEQ ID NO: 2628228 - DNA, 25 bp, Homo sapien
cccatcagttgttttatgactccac

SEQ ID NO: 2628229 - DNA, 25 bp, Homo sapien
catcacatactacgttcctaagggt

SEQ ID NO: 2628230 - DNA, 25 bp, Homo sapien
tgagacccagaggttttgaggaact

SEQ ID NO: 2628231 - DNA, 25 bp, Homo sapien
tatgcctggaaactcagcagttccc

SEQ ID NO: 2628232 - DNA, 25 bp, Homo sapien
tggtctctggaaaagacctacggcc

SEQ ID NO: 2628233 - DNA, 25 bp, Homo sapien
caaaagcatagctggagccatttaa

SEQ ID NO: 2628234 - DNA, 25 bp, Homo sapien
gaaatagtagtagtggtaattcaca

SEQ ID NO: 2628235 - DNA, 25 bp, Homo sapien
ggttgagtctcacagtcaaggaaga

SEQ ID NO: 2628236 - DNA, 25 bp, Homo sapien
catagctggagccatttaactaggg

SEQ ID NO: 2628237 - DNA, 25 bp, Homo sapien
gaggaagctacataataagcctcag

SEQ ID NO: 2628238 - DNA, 25 bp, Homo sapien
aagtgagatcgcacatttagatttc

SEQ ID NO: 2628239 - DNA, 25 bp, Homo sapien
tatgtctaccttatcaatattagga

SEQ ID NO: 2628240 - DNA, 25 bp, Homo sapien
tcaattgggaaaacatataaatgct

SEQ ID NO: 2628241 - DNA, 25 bp, Homo sapien
tgatattcgcaaagtcctcagtgag

SEQ ID NO: 2628242 - DNA, 25 bp, Homo sapien
cacagaagcaattcggatggcctgc

SEQ ID NO: 2628243 - DNA, 25 bp, Homo sapien
tctgagcagtgctgtccggagcgct

SEQ ID NO: 2628244 - DNA, 25 bp, Homo sapien
acttggctgatataactggttgacg

SEQ ID NO: 2628245 - DNA, 25 bp, Homo sapien
acggagggtaggtcttcgcagccat

SEQ ID NO: 2628246 - DNA, 25 bp, Homo sapien
caaggtgaccattaagtgccccaat

SEQ ID NO: 2628247 - DNA, 25 bp, Homo sapien
cagcatcactgggagttacacaaaa

SEQ ID NO: 2628248 - DNA, 25 bp, Homo sapien
tgatgatagcccttctgagcacagc

SEQ ID NO: 2628249 - DNA, 25 bp, Homo sapien
cttcttgtctgttatatccttttga

SEQ ID NO: 2628250 - DNA, 25 bp, Homo sapien
ttgtctgttatatccttttgagatg

SEQ ID NO: 2628251 - DNA, 25 bp, Homo sapien
tcttgtctgttatatccttttgaga

SEQ ID NO: 2628252 - DNA, 25 bp, Homo sapien
ttcttgtctgttatatccttttgag

SEQ ID NO: 2628253 - DNA, 25 bp, Homo sapien
taattgttcagattttagtgtgtag

SEQ ID NO: 2628254 - DNA, 25 bp, Homo sapien
tgctgtggttaaacgttcttaggaa

SEQ ID NO: 2628255 - DNA, 25 bp, Homo sapien
tgtgtagagttgctgtggttaaacg

SEQ ID NO: 2628256 - DNA, 25 bp, Homo sapien
ttcagattttagtgtgtagagttgc

SEQ ID NO: 2628257 - DNA, 25 bp, Homo sapien
gagtttgtgcaagcaatcctgtctc

SEQ ID NO: 2628258 - DNA, 25 bp, Homo sapien
aactctgcaagtgagaccatgtggt

SEQ ID NO: 2628259 - DNA, 25 bp, Homo sapien
gccgctgtacctgactgtatattca

SEQ ID NO: 2628260 - DNA, 25 bp, Homo sapien
tccatttgtgctactgcagaggaca

SEQ ID NO: 2628261 - DNA, 25 bp, Homo sapien
gaaacccatccatgttgagattcat

SEQ ID NO: 2628262 - DNA, 25 bp, Homo sapien
gaacagccatccctagtcaactact

SEQ ID NO: 2628263 - DNA, 25 bp, Homo sapien
gacagaccacattgttgactctaga

SEQ ID NO: 2628264 - DNA, 25 bp, Homo sapien
catcctgatatagtgtgtgtccatc

SEQ ID NO: 2628265 - DNA, 25 bp, Homo sapien
gaggttagtttcagagtgctccaaa

SEQ ID NO: 2628266 - DNA, 25 bp, Homo sapien
gggtctatagctcaagtcccaaaga

SEQ ID NO: 2628267 - DNA, 25 bp, Homo sapien
tcccaaagaggcaagactcaggatg

SEQ ID NO: 2628268 - DNA, 25 bp, Homo sapien
taaagtaccttgcatggtgcctcac

SEQ ID NO: 2628269 - DNA, 25 bp, Homo sapien
gctgtttgtgcagctattgctgaga

SEQ ID NO: 2628270 - DNA, 25 bp, Homo sapien
tatcaaagcccgatgaagcagtatg

SEQ ID NO: 2628271 - DNA, 25 bp, Homo sapien
gtgctacaccaccagatggctctgt

SEQ ID NO: 2628272 - DNA, 25 bp, Homo sapien
actctggagatagataggagaacgc

SEQ ID NO: 2628273 - DNA, 25 bp, Homo sapien
gatagtcgtcaagtcagagttgtcc

SEQ ID NO: 2628274 - DNA, 25 bp, Homo sapien
tgcatatgtggccatggatttcgga

SEQ ID NO: 2628275 - DNA, 25 bp, Homo sapien
tttcggagtgtagaagctgaggtca

SEQ ID NO: 2628276 - DNA, 25 bp, Homo sapien
gagttgtccctcattggagtcccat

SEQ ID NO: 2628277 - DNA, 25 bp, Homo sapien
gaatttagaatacagcgtcgttgtt

SEQ ID NO: 2628278 - DNA, 25 bp, Homo sapien
gagtttaacatgaaaccggtgtgga

SEQ ID NO: 2628279 - DNA, 25 bp, Homo sapien
tgttgagcgcctactatagggatct

SEQ ID NO: 2628280 - DNA, 25 bp, Homo sapien
gaagccgtcgccagttgttgagcgc

SEQ ID NO: 2628281 - DNA, 25 bp, Homo sapien
tctgtggactgttcgaacgcccagg

SEQ ID NO: 2628282 - DNA, 25 bp, Homo sapien
gcctggtcgctagggttggtctcca

SEQ ID NO: 2628283 - DNA, 25 bp, Homo sapien
caaccttccctgagcggtgggacgg

SEQ ID NO: 2628284 - DNA, 25 bp, Homo sapien
ttgttccccactgacgggacgcgag

SEQ ID NO: 2628285 - DNA, 25 bp, Homo sapien
cagctaggctataaaccccttcggg

SEQ ID NO: 2628286 - DNA, 25 bp, Homo sapien
gatgcacagctacgttctggctgta

SEQ ID NO: 2628287 - DNA, 25 bp, Homo sapien
tctggccgacctcatcagctaggct

SEQ ID NO: 2628288 - DNA, 25 bp, Homo sapien
tgtaactttaacgtgaagcctgcag

SEQ ID NO: 2628289 - DNA, 25 bp, Homo sapien
catgaccatgtaaacctctaggcag

SEQ ID NO: 2628290 - DNA, 25 bp, Homo sapien
caaccgtggtacaatataggaaggc

SEQ ID NO: 2628291 - DNA, 25 bp, Homo sapien
tgtaggtaacacagaccaaccgtgg

SEQ ID NO: 2628292 - DNA, 25 bp, Homo sapien
gctggctaccgcagtcatgcattga

SEQ ID NO: 2628293 - DNA, 25 bp, Homo sapien
aaaatcctctgcctagcactgctct

SEQ ID NO: 2628294 - DNA, 25 bp, Homo sapien
cattgaattaatgcttggtagcctg

SEQ ID NO: 2628295 - DNA, 25 bp, Homo sapien
tgactggcacctttggaatgaaaga

SEQ ID NO: 2628296 - DNA, 25 bp, Homo sapien
gaactccatggatctgtgttctgac

SEQ ID NO: 2628297 - DNA, 25 bp, Homo sapien
aaatagtatgataaatgcacagaca

SEQ ID NO: 2628298 - DNA, 25 bp, Homo sapien
tgcacagacaattgcagtaaattct

SEQ ID NO: 2628299 - DNA, 25 bp, Homo sapien
aatattgaagaggtaagggaggcaa

SEQ ID NO: 2628300 - DNA, 25 bp, Homo sapien
taagtgtgtcaaggttgcaacagaa

SEQ ID NO: 2628301 - DNA, 25 bp, Homo sapien
aaatgaagatgtagtcacctcagat

SEQ ID NO: 2628302 - DNA, 25 bp, Homo sapien
gataaaattggtatcgtgtatgata

SEQ ID NO: 2628303 - DNA, 25 bp, Homo sapien
atgaagatgtagtcacctcagataa

SEQ ID NO: 2628304 - DNA, 25 bp, Homo sapien
tatttgccttatgttaactttaaga

SEQ ID NO: 2628305 - DNA, 25 bp, Homo sapien
taagtggtcacatttgttttgggct

SEQ ID NO: 2628306 - DNA, 25 bp, Homo sapien
gacattctcctaaaaatccgtaata

SEQ ID NO: 2628307 - DNA, 25 bp, Homo sapien
tacatatgacacttggttataactc

SEQ ID NO: 2628308 - DNA, 25 bp, Homo sapien
tgttacagacatacttatcaccgtg

SEQ ID NO: 2628309 - DNA, 25 bp, Homo sapien
tcatctgtgacctcacttgactctt

SEQ ID NO: 2628310 - DNA, 25 bp, Homo sapien
ctcatctgtgacctcacttgactct

SEQ ID NO: 2628311 - DNA, 25 bp, Homo sapien
tcttttgaggcttcttgacttgttc

SEQ ID NO: 2628312 - DNA, 25 bp, Homo sapien
tttacgccttgattcttttgaggct

SEQ ID NO: 2628313 - DNA, 25 bp, Homo sapien
attttacgccttgattcttttgagg

SEQ ID NO: 2628314 - DNA, 25 bp, Homo sapien
tcttgacttgttcctagtaattcaa

SEQ ID NO: 2628315 - DNA, 25 bp, Homo sapien
ccttttggtcttctaatggctagac

SEQ ID NO: 2628316 - DNA, 25 bp, Homo sapien
cttttggtcttctaatggctagact

SEQ ID NO: 2628317 - DNA, 25 bp, Homo sapien
tccttttggtcttctaatggctaga

SEQ ID NO: 2628318 - DNA, 25 bp, Homo sapien
ttttggtcttctaatggctagactg

SEQ ID NO: 2628319 - DNA, 25 bp, Homo sapien
gcaaaataaccaacagcttaatata

SEQ ID NO: 2628320 - DNA, 25 bp, Homo sapien
ctaacagtgcactaactttaaatgt

SEQ ID NO: 2628321 - DNA, 25 bp, Homo sapien
tcagaacaggcttaataggaacttt

SEQ ID NO: 2628322 - DNA, 25 bp, Homo sapien
cacattttagggcataatggcagaa

SEQ ID NO: 2628323 - DNA, 25 bp, Homo sapien
tgagttgagatcgcctgtccggcct

SEQ ID NO: 2628324 - DNA, 25 bp, Homo sapien
ttgagatcgcctgtccggcctgggc

SEQ ID NO: 2628325 - DNA, 25 bp, Homo sapien
gtgagttgagatcgcctgtccggcc

SEQ ID NO: 2628326 - DNA, 25 bp, Homo sapien
agttgagatcgcctgtccggcctgg

SEQ ID NO: 2628327 - DNA, 25 bp, Homo sapien
aacgagactggatctcaaaatatag

SEQ ID NO: 2628328 - DNA, 25 bp, Homo sapien
gactggatctcaaaatatagataaa

SEQ ID NO: 2628329 - DNA, 25 bp, Homo sapien
cgagactggatctcaaaatatagat

SEQ ID NO: 2628330 - DNA, 25 bp, Homo sapien
gagactggatctcaaaatatagata

SEQ ID NO: 2628331 - DNA, 25 bp, Homo sapien
ccttggtttgtgatagcataactcc

SEQ ID NO: 2628332 - DNA, 25 bp, Homo sapien
ctattgcaaccaatgaaggccattc

SEQ ID NO: 2628333 - DNA, 25 bp, Homo sapien
cagtcacctggatactgaactttcc

SEQ ID NO: 2628334 - DNA, 25 bp, Homo sapien
ctttcgcttcctattgcaaccaatg

SEQ ID NO: 2628335 - DNA, 25 bp, Homo sapien
tgccagccggttctgttctcagtca

SEQ ID NO: 2628336 - DNA, 25 bp, Homo sapien
cagtagatagattttagtgtgcatg

SEQ ID NO: 2628337 - DNA, 25 bp, Homo sapien
aatcttcctaatcaatacatctgaa

SEQ ID NO: 2628338 - DNA, 25 bp, Homo sapien
aaagcagtagatagattttagtgtg

SEQ ID NO: 2628339 - DNA, 25 bp, Homo sapien
agcagtagatagattttagtgtgca

SEQ ID NO: 2628340 - DNA, 25 bp, Homo sapien
atacattgagtgatgggcatttgga

SEQ ID NO: 2628341 - DNA, 25 bp, Homo sapien
tttatccatacattgagtgatgggc

SEQ ID NO: 2628342 - DNA, 25 bp, Homo sapien
aataatagtctccactcttatccaa

SEQ ID NO: 2628343 - DNA, 25 bp, Homo sapien
tagtctccactcttatccaagtcac

SEQ ID NO: 2628344 - DNA, 25 bp, Homo sapien
gacggtccgcctaatcgttccagga

SEQ ID NO: 2628345 - DNA, 25 bp, Homo sapien
tctagcaacttacgggctccaagcg

SEQ ID NO: 2628346 - DNA, 25 bp, Homo sapien
taattcacgcggctctcgtaacaag

SEQ ID NO: 2628347 - DNA, 25 bp, Homo sapien
gatgtgcatcactcaagcgggcttc

SEQ ID NO: 2628348 - DNA, 25 bp, Homo sapien
agaaactatggtccctgcgtcacag

SEQ ID NO: 2628349 - DNA, 25 bp, Homo sapien
gaagcctcagagtgaacaattgtcc

SEQ ID NO: 2628350 - DNA, 25 bp, Homo sapien
tctgggaacgtacccctgtgaggca

SEQ ID NO: 2628351 - DNA, 25 bp, Homo sapien
tcagctacgtcagagtggaaaaggt

SEQ ID NO: 2628352 - DNA, 25 bp, Homo sapien
gggcacgattcctctgatttcagct

SEQ ID NO: 2628353 - DNA, 25 bp, Homo sapien
tcatcatgattagttgcgaaaacag

SEQ ID NO: 2628354 - DNA, 25 bp, Homo sapien
gagctgcaagttaactcagtgggat

SEQ ID NO: 2628355 - DNA, 25 bp, Homo sapien
taaaacgtgcagtcctatgtaatcg

SEQ ID NO: 2628356 - DNA, 25 bp, Homo sapien
agaactaagaatggaaggactggcc

SEQ ID NO: 2628357 - DNA, 25 bp, Homo sapien
gatcataatacaagagaagcacagg

SEQ ID NO: 2628358 - DNA, 25 bp, Homo sapien
tgtaagacaaggataccacgagcgt

SEQ ID NO: 2628359 - DNA, 25 bp, Homo sapien
gaagcacagggcaaagacactgcat

SEQ ID NO: 2628360 - DNA, 25 bp, Homo sapien
agtcaactggactgctgagtgagag

SEQ ID NO: 2628361 - DNA, 25 bp, Homo sapien
cctggccttggaagggtatcacttt

SEQ ID NO: 2628362 - DNA, 25 bp, Homo sapien
ggcttcctcccgaaatgtgagacta

SEQ ID NO: 2628363 - DNA, 25 bp, Homo sapien
tgctggaacagctacataaaatagt

SEQ ID NO: 2628364 - DNA, 25 bp, Homo sapien
actagggggatgattattagtcaca

SEQ ID NO: 2628365 - DNA, 25 bp, Homo sapien
catctgctatgctgtcatgactagg

SEQ ID NO: 2628366 - DNA, 25 bp, Homo sapien
gattattagtcacatagagcttggg

SEQ ID NO: 2628367 - DNA, 25 bp, Homo sapien
catgttcatctgctatgctgtcatg

SEQ ID NO: 2628368 - DNA, 25 bp, Homo sapien
gcgcaagagaaagtgtaagtaacat

SEQ ID NO: 2628369 - DNA, 25 bp, Homo sapien
agcgcaagagaaagtgtaagtaaca

SEQ ID NO: 2628370 - DNA, 25 bp, Homo sapien
gaatgactgctaactggtgcctggg

SEQ ID NO: 2628371 - DNA, 25 bp, Homo sapien
ccgtaattgtggtgctagagccgca

SEQ ID NO: 2628372 - DNA, 25 bp, Homo sapien
tcattggtgatgctctctggccgga

SEQ ID NO: 2628373 - DNA, 25 bp, Homo sapien
tttccggcactgaaacgcgatcggc

SEQ ID NO: 2628374 - DNA, 25 bp, Homo sapien
ttaacatgtcaatgatgcctagtgt

SEQ ID NO: 2628375 - DNA, 25 bp, Homo sapien
cagctcggagcactctctgatccgg

SEQ ID NO: 2628376 - DNA, 25 bp, Homo sapien
aacaattctatttggctaagcttta

SEQ ID NO: 2628377 - DNA, 25 bp, Homo sapien
aatgatgcctagtgttggagagtgc

SEQ ID NO: 2628378 - DNA, 25 bp, Homo sapien
gacttttcttcaggagatctgtaac

SEQ ID NO: 2628379 - DNA, 25 bp, Homo sapien
tctgagggagtactctcggtagcca

SEQ ID NO: 2628380 - DNA, 25 bp, Homo sapien
tcagcctccgagaagttaacgtgtc

SEQ ID NO: 2628381 - DNA, 25 bp, Homo sapien
gccttaagccgcaaatggcagctga

SEQ ID NO: 2628382 - DNA, 25 bp, Homo sapien
ttctcactgaagaacactgtgatct

SEQ ID NO: 2628383 - DNA, 25 bp, Homo sapien
tataactagttttcttgtccctgaa

SEQ ID NO: 2628384 - DNA, 25 bp, Homo sapien
ccccatagattgaggaggtactgta

SEQ ID NO: 2628385 - DNA, 25 bp, Homo sapien
gacttctggtgtgtcatattccttc

SEQ ID NO: 2628386 - DNA, 25 bp, Homo sapien
ttcctcctccaatgaaaggctggtt

SEQ ID NO: 2628387 - DNA, 25 bp, Homo sapien
ccatcatatccaacgtgctctgggt

SEQ ID NO: 2628388 - DNA, 25 bp, Homo sapien
tgctctgggtcatcataaacctcct

SEQ ID NO: 2628389 - DNA, 25 bp, Homo sapien
taatagttgctggaacttcacatcc

SEQ ID NO: 2628390 - DNA, 25 bp, Homo sapien
ctaactaactatacaagatatttcc

SEQ ID NO: 2628391 - DNA, 25 bp, Homo sapien
ctaactatacaagatatttccatac

SEQ ID NO: 2628392 - DNA, 25 bp, Homo sapien
taactaactatacaagatatttcca

SEQ ID NO: 2628393 - DNA, 25 bp, Homo sapien
aactaactatacaagatatttccat

SEQ ID NO: 2628394 - DNA, 25 bp, Homo sapien
ctgtaggagagaagataatagtgaa

SEQ ID NO: 2628395 - DNA, 25 bp, Homo sapien
ggagagaagataatagtgaatgcca

SEQ ID NO: 2628396 - DNA, 25 bp, Homo sapien
taggagagaagataatagtgaatgc

SEQ ID NO: 2628397 - DNA, 25 bp, Homo sapien
gagagaagataatagtgaatgccat

SEQ ID NO: 2628398 - DNA, 25 bp, Homo sapien
gttcaaacataacaggacatcttta

SEQ ID NO: 2628399 - DNA, 25 bp, Homo sapien
gaatccctagcggtcacatctcgtg

SEQ ID NO: 2628400 - DNA, 25 bp, Homo sapien
gggtccacttacatcctcgatctaa

SEQ ID NO: 2628401 - DNA, 25 bp, Homo sapien
ggaaattccaggctaagtctcctgg

SEQ ID NO: 2628402 - DNA, 25 bp, Homo sapien
ccttgtgactgaggattgaatccct

SEQ ID NO: 2628403 - DNA, 25 bp, Homo sapien
tgttatctcaaccaggccatcagag

SEQ ID NO: 2628404 - DNA, 25 bp, Homo sapien
catgacttggcgttgcaaagagcta

SEQ ID NO: 2628405 - DNA, 25 bp, Homo sapien
gatttccacggagattagccagagc

SEQ ID NO: 2628406 - DNA, 25 bp, Homo sapien
cagtatcctagacgcacaaaagaga

SEQ ID NO: 2628407 - DNA, 25 bp, Homo sapien
ttctccagaggaaacttgaattctc

SEQ ID NO: 2628408 - DNA, 25 bp, Homo sapien
cttcagctgtcccagccatgttttc

SEQ ID NO: 2628409 - DNA, 25 bp, Homo sapien
cccagccatgttttctccagaggaa

SEQ ID NO: 2628410 - DNA, 25 bp, Homo sapien
tctccagaggaaacttgaattctct

SEQ ID NO: 2628411 - DNA, 25 bp, Homo sapien
gattctggctgagctcacattgagt

SEQ ID NO: 2628412 - DNA, 25 bp, Homo sapien
caaaggatggaaccacttaggcctc

SEQ ID NO: 2628413 - DNA, 25 bp, Homo sapien
cataacccaggaggctttcaaggaa

SEQ ID NO: 2628414 - DNA, 25 bp, Homo sapien
tcttgaattggcattagagcctggc

SEQ ID NO: 2628415 - DNA, 25 bp, Homo sapien
ccatcatttgtggtctctcagggca

SEQ ID NO: 2628416 - DNA, 25 bp, Homo sapien
tgacctatcttggaggctactgccc

SEQ ID NO: 2628417 - DNA, 25 bp, Homo sapien
gttccattcgagtgacatccccgag

SEQ ID NO: 2628418 - DNA, 25 bp, Homo sapien
gtgcaagcttgctgaggccatggct

SEQ ID NO: 2628419 - DNA, 25 bp, Homo sapien
agctcttgcacatgggatgggaccc

SEQ ID NO: 2628420 - DNA, 25 bp, Homo sapien
gactgatcggatttgaactgagagc

SEQ ID NO: 2628421 - DNA, 25 bp, Homo sapien
ctggcttggcttaggctgagtagat

SEQ ID NO: 2628422 - DNA, 25 bp, Homo sapien
ccctgcttttgagtggtgtgcctta

SEQ ID NO: 2628423 - DNA, 25 bp, Homo sapien
cagggttatctgctcagtggctgat

SEQ ID NO: 2628424 - DNA, 25 bp, Homo sapien
tgagagagttttcccattcaagcaa

SEQ ID NO: 2628425 - DNA, 25 bp, Homo sapien
tgacaaagatacctctggagcagcc

SEQ ID NO: 2628426 - DNA, 25 bp, Homo sapien
tactatatgataggaatggcctggg

SEQ ID NO: 2628427 - DNA, 25 bp, Homo sapien
aggccaacgtgggaggatcgcttaa

SEQ ID NO: 2628428 - DNA, 25 bp, Homo sapien
tcgcttaagcccatgagttcgagac

SEQ ID NO: 2628429 - DNA, 25 bp, Homo sapien
aggatcgcttaagcccatgagttcg

SEQ ID NO: 2628430 - DNA, 25 bp, Homo sapien
ggaggccaacgtgggaggatcgctt

SEQ ID NO: 2628431 - DNA, 25 bp, Homo sapien
taaatggatgtttgagatgtttgag

SEQ ID NO: 2628432 - DNA, 25 bp, Homo sapien
gtttgagatgtttgaggcagaattt

SEQ ID NO: 2628433 - DNA, 25 bp, Homo sapien
gatgtttgagatgtttgaggcagaa

SEQ ID NO: 2628434 - DNA, 25 bp, Homo sapien
atggatgtttgagatgtttgaggca

SEQ ID NO: 2628435 - DNA, 25 bp, Homo sapien
aaggtctccagcgagtatgatgctc

SEQ ID NO: 2628436 - DNA, 25 bp, Homo sapien
tctccagcgagtatgatgctctgaa

SEQ ID NO: 2628437 - DNA, 25 bp, Homo sapien
cagcgagtatgatgctctgaaaagt

SEQ ID NO: 2628438 - DNA, 25 bp, Homo sapien
ggtctccagcgagtatgatgctctg

SEQ ID NO: 2628439 - DNA, 25 bp, Homo sapien
tactcacgtttcaaatccaatcatg

SEQ ID NO: 2628440 - DNA, 25 bp, Homo sapien
ggtgcctgtgaagcaagctaattac

SEQ ID NO: 2628441 - DNA, 25 bp, Homo sapien
agtcccttctgcctaggtgcctgtg

SEQ ID NO: 2628442 - DNA, 25 bp, Homo sapien
ttctgcctaggtgcctgtgaagcaa

SEQ ID NO: 2628443 - DNA, 25 bp, Homo sapien
ttctcctacagtccactctgctgcc

SEQ ID NO: 2628444 - DNA, 25 bp, Homo sapien
tctcctacagtccactctgctgcca

SEQ ID NO: 2628445 - DNA, 25 bp, Homo sapien
cttctcctacagtccactctgctgc

SEQ ID NO: 2628446 - DNA, 25 bp, Homo sapien
ctcctacagtccactctgctgccat

SEQ ID NO: 2628447 - DNA, 25 bp, Homo sapien
atgaccccagtaaagtgctataaag

SEQ ID NO: 2628448 - DNA, 25 bp, Homo sapien
ccccagtaaagtgctataaagtata

SEQ ID NO: 2628449 - DNA, 25 bp, Homo sapien
ctagtgcttgatccattattgatga

SEQ ID NO: 2628450 - DNA, 25 bp, Homo sapien
tataaagtatattgatgtggcccat

SEQ ID NO: 2628451 - DNA, 25 bp, Homo sapien
ctggaaggtagatatagtaattcat

SEQ ID NO: 2628452 - DNA, 25 bp, Homo sapien
cttcatggtcaccaggaccaaaagg

SEQ ID NO: 2628453 - DNA, 25 bp, Homo sapien
tggtcaccaggaccaaaaggatggt

SEQ ID NO: 2628454 - DNA, 25 bp, Homo sapien
tcatggtcaccaggaccaaaaggat

SEQ ID NO: 2628455 - DNA, 25 bp, Homo sapien
catggtcaccaggaccaaaaggatg

SEQ ID NO: 2628456 - DNA, 25 bp, Homo sapien
tagattaggaaatacaaggtttcac

SEQ ID NO: 2628457 - DNA, 25 bp, Homo sapien
caaggtttcacacttcccttctgga

SEQ ID NO: 2628458 - DNA, 25 bp, Homo sapien
ggtgccgttgtacttttccacactg

SEQ ID NO: 2628459 - DNA, 25 bp, Homo sapien
catccggttcttcataggaaagttg

SEQ ID NO: 2628460 - DNA, 25 bp, Homo sapien
tatcttggcactcatatatagagca

SEQ ID NO: 2628461 - DNA, 25 bp, Homo sapien
ggtcctgagatttagctcctacccc

SEQ ID NO: 2628462 - DNA, 25 bp, Homo sapien
gccgggtaagttttcaacagcagga

SEQ ID NO: 2628463 - DNA, 25 bp, Homo sapien
tctccctgctctagattatcttggc

SEQ ID NO: 2628464 - DNA, 25 bp, Homo sapien
ggcagaagagaggaggaagatttcc

SEQ ID NO: 2628465 - DNA, 25 bp, Homo sapien
gcagaagagaggaggaagatttcct

SEQ ID NO: 2628466 - DNA, 25 bp, Homo sapien
tgggaaaacattcagggcagaagag

SEQ ID NO: 2628467 - DNA, 25 bp, Homo sapien
gtttgggaaaacattcagggcagaa

SEQ ID NO: 2628468 - DNA, 25 bp, Homo sapien
tcccaccaaaatgaataagcttatc

SEQ ID NO: 2628469 - DNA, 25 bp, Homo sapien
tgaaaaactttggaactctcctata

SEQ ID NO: 2628470 - DNA, 25 bp, Homo sapien
tcctataaatcccaccaaaatgaat

SEQ ID NO: 2628471 - DNA, 25 bp, Homo sapien
ttggaactctcctataaatcccacc

SEQ ID NO: 2628472 - DNA, 25 bp, Homo sapien
cattgcattctgaccaaggggcata

SEQ ID NO: 2628473 - DNA, 25 bp, Homo sapien
ctgagtcttggtacagccattgcat

SEQ ID NO: 2628474 - DNA, 25 bp, Homo sapien
gagtcttggtacagccattgcattc

SEQ ID NO: 2628475 - DNA, 25 bp, Homo sapien
caaggggcatagaagtcccactggc

SEQ ID NO: 2628476 - DNA, 25 bp, Homo sapien
attaccagggagcccttgatggcag

SEQ ID NO: 2628477 - DNA, 25 bp, Homo sapien
cagggagcccttgatggcagccact

SEQ ID NO: 2628478 - DNA, 25 bp, Homo sapien
cttgatggcagccactctccacagt

SEQ ID NO: 2628479 - DNA, 25 bp, Homo sapien
ggcagccactctccacagtctcctt

SEQ ID NO: 2628480 - DNA, 25 bp, Homo sapien
gtgtgacttaacagtgtccttttgt

SEQ ID NO: 2628481 - DNA, 25 bp, Homo sapien
gcccagatggtgttgtttgcataag

SEQ ID NO: 2628482 - DNA, 25 bp, Homo sapien
agagcccagatggtgttgtttgcat

SEQ ID NO: 2628483 - DNA, 25 bp, Homo sapien
ccagatggtgttgtttgcataagaa

SEQ ID NO: 2628484 - DNA, 25 bp, Homo sapien
tgtaagtgatgaagataccgctcat

SEQ ID NO: 2628485 - DNA, 25 bp, Homo sapien
cagcctgagcatggctctggtgtct

SEQ ID NO: 2628486 - DNA, 25 bp, Homo sapien
catcatgtttaagcaaaggagccac

SEQ ID NO: 2628487 - DNA, 25 bp, Homo sapien
tggaactcggtaaggtttcttgata

SEQ ID NO: 2628488 - DNA, 25 bp, Homo sapien
catactgcccatacacagcaactga

SEQ ID NO: 2628489 - DNA, 25 bp, Homo sapien
tgaaaagcacctgaaacgctctcca

SEQ ID NO: 2628490 - DNA, 25 bp, Homo sapien
gttggacatcctcttgtaggttcac

SEQ ID NO: 2628491 - DNA, 25 bp, Homo sapien
caggactgtgtttcaaaagcatttc

SEQ ID NO: 2628492 - DNA, 25 bp, Homo sapien
tcatcacagtcagaatccccattgc

SEQ ID NO: 2628493 - DNA, 25 bp, Homo sapien
ccagtaagttctatgttaggaggag

SEQ ID NO: 2628494 - DNA, 25 bp, Homo sapien
acaggaaggtctcctttctgagtcc

SEQ ID NO: 2628495 - DNA, 25 bp, Homo sapien
ttaggaggaggtttatcgatatcac

SEQ ID NO: 2628496 - DNA, 25 bp, Homo sapien
tttcgtatctatggcaacagctggt

SEQ ID NO: 2628497 - DNA, 25 bp, Homo sapien
tttgggaaacacatggctctttcgt

SEQ ID NO: 2628498 - DNA, 25 bp, Homo sapien
gagcacagcatcctaatacacacca

SEQ ID NO: 2628499 - DNA, 25 bp, Homo sapien
gcttcccctgcttggtataatcact

SEQ ID NO: 2628500 - DNA, 25 bp, Homo sapien
tcctaaactggccagtgagttcatt

SEQ ID NO: 2628501 - DNA, 25 bp, Homo sapien
ctacattgaccaccaaaacttttgg

SEQ ID NO: 2628502 - DNA, 25 bp, Homo sapien
ggacatttccactcagcctgtagaa

SEQ ID NO: 2628503 - DNA, 25 bp, Homo sapien
tattgatgactctgttcctaaactg

SEQ ID NO: 2628504 - DNA, 25 bp, Homo sapien
cattggtatgtgaagtataactgcg

SEQ ID NO: 2628505 - DNA, 25 bp, Homo sapien
tgatgaagatctaaaaaaggagcgc

SEQ ID NO: 2628506 - DNA, 25 bp, Homo sapien
tgatgtgtgttctgtcgacgtatgt

SEQ ID NO: 2628507 - DNA, 25 bp, Homo sapien
gcgcttccgactagatgatgtgtgt

SEQ ID NO: 2628508 - DNA, 25 bp, Homo sapien
taggcactgtagtcatacagagagg

SEQ ID NO: 2628509 - DNA, 25 bp, Homo sapien
tgtgtcccgtactggtcgattaatc

SEQ ID NO: 2628510 - DNA, 25 bp, Homo sapien
tccagaatggctcagcaagttgtaa

SEQ ID NO: 2628511 - DNA, 25 bp, Homo sapien
ccagattgcagataatgtgtcccgt

SEQ ID NO: 2628512 - DNA, 25 bp, Homo sapien
tgaagcagcttttaaagcgttttcc

SEQ ID NO: 2628513 - DNA, 25 bp, Homo sapien
gttccttgcatccatgacttgaaaa

SEQ ID NO: 2628514 - DNA, 25 bp, Homo sapien
ccatgacttgaaaatttaacgacaa

SEQ ID NO: 2628515 - DNA, 25 bp, Homo sapien
ttttccagttccttgcatccatgac

SEQ ID NO: 2628516 - DNA, 25 bp, Homo sapien
gcccaggcagaatatcgccttttgt

SEQ ID NO: 2628517 - DNA, 25 bp, Homo sapien
aactaaggccagatatgaagcctgc

SEQ ID NO: 2628518 - DNA, 25 bp, Homo sapien
tatgacttgaggaagattagtcaca

SEQ ID NO: 2628519 - DNA, 25 bp, Homo sapien
tgtccagctctaggtaactaaggcc

SEQ ID NO: 2628520 - DNA, 25 bp, Homo sapien
tgattccctacgaggactccttgct

SEQ ID NO: 2628521 - DNA, 25 bp, Homo sapien
aatgggtcccctcaacagtagccaa

SEQ ID NO: 2628522 - DNA, 25 bp, Homo sapien
aaatgtgtacggtttgcaatggcac

SEQ ID NO: 2628523 - DNA, 25 bp, Homo sapien
tttcacagaggcacaaggtacttcc

SEQ ID NO: 2628524 - DNA, 25 bp, Homo sapien
actgggaggtgggttattgcattca

SEQ ID NO: 2628525 - DNA, 25 bp, Homo sapien
agctcctcatcttcgcattgtgtgc

SEQ ID NO: 2628526 - DNA, 25 bp, Homo sapien
tgtcgtttctccaacgcaggatctc

SEQ ID NO: 2628527 - DNA, 25 bp, Homo sapien
cattcacggcttcttgttttcttcc

SEQ ID NO: 2628528 - DNA, 25 bp, Homo sapien
gagatggcttttgcagggtcctgac

SEQ ID NO: 2628529 - DNA, 25 bp, Homo sapien
gaagtttagtgccaggctactgggt

SEQ ID NO: 2628530 - DNA, 25 bp, Homo sapien
tccatctcaagcaactggctctatg

SEQ ID NO: 2628531 - DNA, 25 bp, Homo sapien
tgacccagggctatgattcatcaac

SEQ ID NO: 2628532 - DNA, 25 bp, Homo sapien
ctccactctagagacacaaaatctg

SEQ ID NO: 2628533 - DNA, 25 bp, Homo sapien
tcaagactgcctctaaggtcaaaat

SEQ ID NO: 2628534 - DNA, 25 bp, Homo sapien
gatgacatctgtcattaaacaatgg

SEQ ID NO: 2628535 - DNA, 25 bp, Homo sapien
tacaaatagcctgggagtgtggcct

SEQ ID NO: 2628536 - DNA, 25 bp, Homo sapien
tcactatgactatctcttgggggag

SEQ ID NO: 2628537 - DNA, 25 bp, Homo sapien
catcactatgactatctcttggggg

SEQ ID NO: 2628538 - DNA, 25 bp, Homo sapien
atcactatgactatctcttggggga

SEQ ID NO: 2628539 - DNA, 25 bp, Homo sapien
cactatgactatctcttgggggagc

SEQ ID NO: 2628540 - DNA, 25 bp, Homo sapien
gcttggagtaagaatcttaagccta

SEQ ID NO: 2628541 - DNA, 25 bp, Homo sapien
gcaagtttaagtaaggcttggagta

SEQ ID NO: 2628542 - DNA, 25 bp, Homo sapien
tatcatcccacaagtgccaatcctg

SEQ ID NO: 2628543 - DNA, 25 bp, Homo sapien
gagaacagaagtcctaatatcatcc

SEQ ID NO: 2628544 - DNA, 25 bp, Homo sapien
ttcctcttgccgtttggttctgaaa

SEQ ID NO: 2628545 - DNA, 25 bp, Homo sapien
cctcttgccgtttggttctgaaatt

SEQ ID NO: 2628546 - DNA, 25 bp, Homo sapien
tcttgccgtttggttctgaaattca

SEQ ID NO: 2628547 - DNA, 25 bp, Homo sapien
cttgccgtttggttctgaaattcat

SEQ ID NO: 2628548 - DNA, 25 bp, Homo sapien
caaaggaaagcaatgtggttcaagc

SEQ ID NO: 2628549 - DNA, 25 bp, Homo sapien
aggaaagcaatgtggttcaagcaac

SEQ ID NO: 2628550 - DNA, 25 bp, Homo sapien
gaggtgatggacagaattctgttgg

SEQ ID NO: 2628551 - DNA, 25 bp, Homo sapien
tggacagaattctgttggaaccaaa

SEQ ID NO: 2628552 - DNA, 25 bp, Homo sapien
tagggattagaacaagatttcctga

SEQ ID NO: 2628553 - DNA, 25 bp, Homo sapien
ctagggattagaacaagatttcctg

SEQ ID NO: 2628554 - DNA, 25 bp, Homo sapien
catggcgaagcaaggtggaatttga

SEQ ID NO: 2628555 - DNA, 25 bp, Homo sapien
ctttcatggcgaagcaaggtggaat

SEQ ID NO: 2628556 - DNA, 25 bp, Homo sapien
gcaggaagcgagctttcatggcgaa

SEQ ID NO: 2628557 - DNA, 25 bp, Homo sapien
gcgagctttcatggcgaagcaaggt

SEQ ID NO: 2628558 - DNA, 25 bp, Homo sapien
ataagagagtatccttcattgcaag

SEQ ID NO: 2628559 - DNA, 25 bp, Homo sapien
tggccactgggtttccaataagaga

SEQ ID NO: 2628560 - DNA, 25 bp, Homo sapien
tgacaatgcatttccccaacaagcc

SEQ ID NO: 2628561 - DNA, 25 bp, Homo sapien
tcattgcaagtgtacactacatttt

SEQ ID NO: 2628562 - DNA, 25 bp, Homo sapien
cagtacaggtagaacacaggcaatt

SEQ ID NO: 2628563 - DNA, 25 bp, Homo sapien
agtacaggtagaacacaggcaattt

SEQ ID NO: 2628564 - DNA, 25 bp, Homo sapien
tgccacctgaacaggaaacagtcac

SEQ ID NO: 2628565 - DNA, 25 bp, Homo sapien
ggaccttctaaggacatgccacctg

SEQ ID NO: 2628566 - DNA, 25 bp, Homo sapien
tttttgtacacagcgggcattcttc

SEQ ID NO: 2628567 - DNA, 25 bp, Homo sapien
gggggtgactctgtatgccatccat

SEQ ID NO: 2628568 - DNA, 25 bp, Homo sapien
agatgtggtcgttaggagaaaagcc

SEQ ID NO: 2628569 - DNA, 25 bp, Homo sapien
gcctcttcatagtaaacaaggtatt

SEQ ID NO: 2628570 - DNA, 25 bp, Homo sapien
aaaaggataagggagatgtggtcgt

SEQ ID NO: 2628571 - DNA, 25 bp, Homo sapien
ggtcgttaggagaaaagcctcttca

SEQ ID NO: 2628572 - DNA, 25 bp, Homo sapien
ctgacatttaggcactgcctgtgtt

SEQ ID NO: 2628573 - DNA, 25 bp, Homo sapien
tgacatttaggcactgcctgtgtta

SEQ ID NO: 2628574 - DNA, 25 bp, Homo sapien
attcgtagggcattttacaaacaca

SEQ ID NO: 2628575 - DNA, 25 bp, Homo sapien
cattcgtagggcattttacaaacac

SEQ ID NO: 2628576 - DNA, 25 bp, Homo sapien
acattcgtagggcattttacaaaca

SEQ ID NO: 2628577 - DNA, 25 bp, Homo sapien
ccacattcgtagggcattttacaaa

SEQ ID NO: 2628578 - DNA, 25 bp, Homo sapien
agttggtttgatcagtggtgagcac

SEQ ID NO: 2628579 - DNA, 25 bp, Homo sapien
tcggcctctagcttcagttggtttg

SEQ ID NO: 2628580 - DNA, 25 bp, Homo sapien
caggagactcgaggcaggaaggaca

SEQ ID NO: 2628581 - DNA, 25 bp, Homo sapien
gggaagctgacatgtatgggccaca

SEQ ID NO: 2628582 - DNA, 25 bp, Homo sapien
cataactattaacaacgagctgcag

SEQ ID NO: 2628583 - DNA, 25 bp, Homo sapien
aattacccactgtagcttcaagaag

SEQ ID NO: 2628584 - DNA, 25 bp, Homo sapien
tgttgccagtatctgagaccatgga

SEQ ID NO: 2628585 - DNA, 25 bp, Homo sapien
gtatctaggctgaccaccatttcca

SEQ ID NO: 2628586 - DNA, 25 bp, Homo sapien
cagccaagagttcatgtccataaaa

SEQ ID NO: 2628587 - DNA, 25 bp, Homo sapien
cattgtccaaaaatggatgacccta

SEQ ID NO: 2628588 - DNA, 25 bp, Homo sapien
caaatgggaccattaattgcaggag

SEQ ID NO: 2628589 - DNA, 25 bp, Homo sapien
caatgtgatcatagtcaaatgggac

SEQ ID NO: 2628590 - DNA, 25 bp, Homo sapien
gtacagctgtccctaccagtaaggg

SEQ ID NO: 2628591 - DNA, 25 bp, Homo sapien
gtaatttctaccctgacagtggaga

SEQ ID NO: 2628592 - DNA, 25 bp, Homo sapien
gcagagtacagctgtccctaccagt

SEQ ID NO: 2628593 - DNA, 25 bp, Homo sapien
tgcatcttgcaaactgtcagaggca

SEQ ID NO: 2628594 - DNA, 25 bp, Homo sapien
gaggtcagtgcatgtcaaatcagtc

SEQ ID NO: 2628595 - DNA, 25 bp, Homo sapien
tcttcggcccactgctaaactagaa

SEQ ID NO: 2628596 - DNA, 25 bp, Homo sapien
gaatgtgggaatcttatcctctgag

SEQ ID NO: 2628597 - DNA, 25 bp, Homo sapien
tcacccctgtttgggagaacatttc

SEQ ID NO: 2628598 - DNA, 25 bp, Homo sapien
gatgcttctcggcagacacatttgc

SEQ ID NO: 2628599 - DNA, 25 bp, Homo sapien
cagcacaaggccttatgctggtgac

SEQ ID NO: 2628600 - DNA, 25 bp, Homo sapien
ctccttgccgttcacttccacacaa

SEQ ID NO: 2628601 - DNA, 25 bp, Homo sapien
gcctcacactcagacatcgtctgct

SEQ ID NO: 2628602 - DNA, 25 bp, Homo sapien
cattttgtagagtgtgttctggccc

SEQ ID NO: 2628603 - DNA, 25 bp, Homo sapien
tttgttctcagacaagacacccctg

SEQ ID NO: 2628604 - DNA, 25 bp, Homo sapien
cctgtgtactccctgaaaactctgg

SEQ ID NO: 2628605 - DNA, 25 bp, Homo sapien
ttaccagggtcagaacaatacagag

SEQ ID NO: 2628606 - DNA, 25 bp, Homo sapien
tcacgacaacattcactgctcctct

SEQ ID NO: 2628607 - DNA, 25 bp, Homo sapien
cagtatttcaagacaacacctcttc

SEQ ID NO: 2628608 - DNA, 25 bp, Homo sapien
tcaaacctcttagttacatctactc

SEQ ID NO: 2628609 - DNA, 25 bp, Homo sapien
tcctttctcaaacctcttagttaca

SEQ ID NO: 2628610 - DNA, 25 bp, Homo sapien
ctgctgcgacaatcctaattctcca

SEQ ID NO: 2628611 - DNA, 25 bp, Homo sapien
tgctgcgacaatcctaattctccac

SEQ ID NO: 2628612 - DNA, 25 bp, Homo sapien
gctgcgacaatcctaattctccaca

SEQ ID NO: 2628613 - DNA, 25 bp, Homo sapien
tgcgacaatcctaattctccacagg

SEQ ID NO: 2628614 - DNA, 25 bp, Homo sapien
ctctccataggtgttcaagaactta

SEQ ID NO: 2628615 - DNA, 25 bp, Homo sapien
tcctcaaagcctctccataggtgtt

SEQ ID NO: 2628616 - DNA, 25 bp, Homo sapien
aactttcctcaaagcctctccatag

SEQ ID NO: 2628617 - DNA, 25 bp, Homo sapien
aagcctctccataggtgttcaagaa

SEQ ID NO: 2628618 - DNA, 25 bp, Homo sapien
gaaagggcaggaagatggaattctc

SEQ ID NO: 2628619 - DNA, 25 bp, Homo sapien
tgaccctcacctgatctgaggcaca

SEQ ID NO: 2628620 - DNA, 25 bp, Homo sapien
agggcaggaagatggaattctcaca

SEQ ID NO: 2628621 - DNA, 25 bp, Homo sapien
cttctaacccagatgaccctcacct

SEQ ID NO: 2628622 - DNA, 25 bp, Homo sapien
tgattacaagtcatcctgcactggg

SEQ ID NO: 2628623 - DNA, 25 bp, Homo sapien
gagattagccatgatctgcccagca

SEQ ID NO: 2628624 - DNA, 25 bp, Homo sapien
tacataagatgtcacaggaaggcac

SEQ ID NO: 2628625 - DNA, 25 bp, Homo sapien
taagccgggcacataaatggacaca

SEQ ID NO: 2628626 - DNA, 25 bp, Homo sapien
gccttcacagcctgacaggaataaa

SEQ ID NO: 2628627 - DNA, 25 bp, Homo sapien
aaaagacaaattgtaggtgctttgg

SEQ ID NO: 2628628 - DNA, 25 bp, Homo sapien
agctttctcgtccacaaatgtgtga

SEQ ID NO: 2628629 - DNA, 25 bp, Homo sapien
ggctcctatcatggcatcagctttc

SEQ ID NO: 2628630 - DNA, 25 bp, Homo sapien
gtaatagaccctcaagccaacatcg

SEQ ID NO: 2628631 - DNA, 25 bp, Homo sapien
tctgtgttcccagttgactagggca

SEQ ID NO: 2628632 - DNA, 25 bp, Homo sapien
tcagtgcaagtctcctctcatagag

SEQ ID NO: 2628633 - DNA, 25 bp, Homo sapien
ggacatcattgatctgccgtataac

SEQ ID NO: 2628634 - DNA, 25 bp, Homo sapien
tagttggaacctgggcatttgtgtc

SEQ ID NO: 2628635 - DNA, 25 bp, Homo sapien
accagggttgaaattcagactctcc

SEQ ID NO: 2628636 - DNA, 25 bp, Homo sapien
gagggagctcactgaagaatagaaa

SEQ ID NO: 2628637 - DNA, 25 bp, Homo sapien
tattcaccgtgtgccttgggcaatg

SEQ ID NO: 2628638 - DNA, 25 bp, Homo sapien
ttaataccaaagtacgagaatctgg

SEQ ID NO: 2628639 - DNA, 25 bp, Homo sapien
aagtacgagaatctggtgagccttc

SEQ ID NO: 2628640 - DNA, 25 bp, Homo sapien
tcctggacgcctagtttaataccaa

SEQ ID NO: 2628641 - DNA, 25 bp, Homo sapien
ttcttaatatcctggacgcctagtt

SEQ ID NO: 2628642 - DNA, 25 bp, Homo sapien
aatagttgcctctttccgcactgtt

SEQ ID NO: 2628643 - DNA, 25 bp, Homo sapien
gttgcctctttccgcactgttgcct

SEQ ID NO: 2628644 - DNA, 25 bp, Homo sapien
gcctctttccgcactgttgcctctg

SEQ ID NO: 2628645 - DNA, 25 bp, Homo sapien
tagttgcctctttccgcactgttgc

SEQ ID NO: 2628646 - DNA, 25 bp, Homo sapien
gacttcattaaaagtactccaacaa

SEQ ID NO: 2628647 - DNA, 25 bp, Homo sapien
gtttgttccaaaccacgctctctgt

SEQ ID NO: 2628648 - DNA, 25 bp, Homo sapien
taaaagtactccaacaatcagtgct

SEQ ID NO: 2628649 - DNA, 25 bp, Homo sapien
actgccaaaatgataatggacttca

SEQ ID NO: 2628650 - DNA, 25 bp, Homo sapien
ccacataagcaaaaatagaaacatg

SEQ ID NO: 2628651 - DNA, 25 bp, Homo sapien
tgtcttcatgatatcaaccacataa

SEQ ID NO: 2628652 - DNA, 25 bp, Homo sapien
tgcttggtactatgtaggcaatggg

SEQ ID NO: 2628653 - DNA, 25 bp, Homo sapien
tagcaaaatgcacgtgatccttgtc

SEQ ID NO: 2628654 - DNA, 25 bp, Homo sapien
tcatcagtgtaataatgggtcagtg

SEQ ID NO: 2628655 - DNA, 25 bp, Homo sapien
gcccaatcagcatgatatcatcagt

SEQ ID NO: 2628656 - DNA, 25 bp, Homo sapien
tgtggtcttctgtgggatatccaga

SEQ ID NO: 2628657 - DNA, 25 bp, Homo sapien
ctcttgcccaatcagcatgatatca

SEQ ID NO: 2628658 - DNA, 25 bp, Homo sapien
caccctttgagctatatggattcac

SEQ ID NO: 2628659 - DNA, 25 bp, Homo sapien
ttgagctatatggattcacatctcc

SEQ ID NO: 2628660 - DNA, 25 bp, Homo sapien
gctatatggattcacatctccacac

SEQ ID NO: 2628661 - DNA, 25 bp, Homo sapien
tcacagtccaccctttgagctatat

SEQ ID NO: 2628662 - DNA, 25 bp, Homo sapien
gagaggtacaaagcattcagtggca

SEQ ID NO: 2628663 - DNA, 25 bp, Homo sapien
aggagtctcagaccaccatgcgggt

SEQ ID NO: 2628664 - DNA, 25 bp, Homo sapien
gcaaagactgcaagacatgggaaag

SEQ ID NO: 2628665 - DNA, 25 bp, Homo sapien
gataaagcttggctctagtacccct

SEQ ID NO: 2628666 - DNA, 25 bp, Homo sapien
cagagggtcaattttcaacaggttc

SEQ ID NO: 2628667 - DNA, 25 bp, Homo sapien
tgcagagggtcaattttcaacaggt

SEQ ID NO: 2628668 - DNA, 25 bp, Homo sapien
aatgcagagggtcaattttcaacag

SEQ ID NO: 2628669 - DNA, 25 bp, Homo sapien
aatgaatgcagagggtcaattttca

SEQ ID NO: 2628670 - DNA, 25 bp, Homo sapien
ttccaacagttgtgctcccgcactt

SEQ ID NO: 2628671 - DNA, 25 bp, Homo sapien
cacttggcagcagtctcaatccctg

SEQ ID NO: 2628672 - DNA, 25 bp, Homo sapien
aagtaggtgctgcttccacttggca

SEQ ID NO: 2628673 - DNA, 25 bp, Homo sapien
ttctagagggactgagtgccaatta

SEQ ID NO: 2628674 - DNA, 25 bp, Homo sapien
tcccatggcacagggaagtaatgaa

SEQ ID NO: 2628675 - DNA, 25 bp, Homo sapien
tgaaaacttggtggctcctgtggag

SEQ ID NO: 2628676 - DNA, 25 bp, Homo sapien
gactagggagaagatggatacagcc

SEQ ID NO: 2628677 - DNA, 25 bp, Homo sapien
gcccctctctcatagttgcagtctg

SEQ ID NO: 2628678 - DNA, 25 bp, Homo sapien
gtgagctaagaccacttcctgccta

SEQ ID NO: 2628679 - DNA, 25 bp, Homo sapien
acttcctgcctagcaagtgctgaag

SEQ ID NO: 2628680 - DNA, 25 bp, Homo sapien
ctagcaagtgctgaaggcaggatgc

SEQ ID NO: 2628681 - DNA, 25 bp, Homo sapien
taagaccacttcctgcctagcaagt

SEQ ID NO: 2628682 - DNA, 25 bp, Homo sapien
actagatgagtagggaaaggagtca

SEQ ID NO: 2628683 - DNA, 25 bp, Homo sapien
aaatgggactagatgagtagggaaa

SEQ ID NO: 2628684 - DNA, 25 bp, Homo sapien
catagtggaagtcccgttcttctcc

SEQ ID NO: 2628685 - DNA, 25 bp, Homo sapien
tataaaatgggactagatgagtagg

SEQ ID NO: 2628686 - DNA, 25 bp, Homo sapien
tggaaagtgtttggcctagcacaat

SEQ ID NO: 2628687 - DNA, 25 bp, Homo sapien
gtggaaaccaactctactgtgtcaa

SEQ ID NO: 2628688 - DNA, 25 bp, Homo sapien
tgaacagatttaccatcccgaagaa

SEQ ID NO: 2628689 - DNA, 25 bp, Homo sapien
tattcagttccagctcatgacgccc

SEQ ID NO: 2628690 - DNA, 25 bp, Homo sapien
ccttatttgatgaacactcctaagt

SEQ ID NO: 2628691 - DNA, 25 bp, Homo sapien
atttgatgaacactcctaagtcttc

SEQ ID NO: 2628692 - DNA, 25 bp, Homo sapien
tgttcttcttgcaactccttatttg

SEQ ID NO: 2628693 - DNA, 25 bp, Homo sapien
tcatgtatacaataaatctggtttc

SEQ ID NO: 2628694 - DNA, 25 bp, Homo sapien
taatctgctggccttagaatctctg

SEQ ID NO: 2628695 - DNA, 25 bp, Homo sapien
gagctgttgtcccagtgattctgag

SEQ ID NO: 2628696 - DNA, 25 bp, Homo sapien
tactttggctgaaggacgacgtggc

SEQ ID NO: 2628697 - DNA, 25 bp, Homo sapien
ggtttgcctacaagaaaacgtcagc

SEQ ID NO: 2628698 - DNA, 25 bp, Homo sapien
tggcagaagccagacctatattacc

SEQ ID NO: 2628699 - DNA, 25 bp, Homo sapien
tatattaccatccagtctcagctta

SEQ ID NO: 2628700 - DNA, 25 bp, Homo sapien
ttacaaactgagaaacgagtcccag

SEQ ID NO: 2628701 - DNA, 25 bp, Homo sapien
taacctgaccaagtctaccaactag

SEQ ID NO: 2628702 - DNA, 25 bp, Homo sapien
aaccagtcttccagcatgaaaagca

SEQ ID NO: 2628703 - DNA, 25 bp, Homo sapien
aagagagggctaagcaacaagggtg

SEQ ID NO: 2628704 - DNA, 25 bp, Homo sapien
gtcaaataatgagcgataaagccaa

SEQ ID NO: 2628705 - DNA, 25 bp, Homo sapien
taaaagtatgcctatgggtgggttg

SEQ ID NO: 2628706 - DNA, 25 bp, Homo sapien
ctatatcgagatatagaaaattccc

SEQ ID NO: 2628707 - DNA, 25 bp, Homo sapien
catgtaaacaatcctatgtcaagat

SEQ ID NO: 2628708 - DNA, 25 bp, Homo sapien
aaaatatgcaattctaagtgtgcaa

SEQ ID NO: 2628709 - DNA, 25 bp, Homo sapien
ttctccctggacatcatataaagga

SEQ ID NO: 2628710 - DNA, 25 bp, Homo sapien
tttctctctacagaggcattctctt

SEQ ID NO: 2628711 - DNA, 25 bp, Homo sapien
tttttctctctacagaggcattctc

SEQ ID NO: 2628712 - DNA, 25 bp, Homo sapien
tcttttttctctctacagaggcatt

SEQ ID NO: 2628713 - DNA, 25 bp, Homo sapien
cttttttctctctacagaggcattc

SEQ ID NO: 2628714 - DNA, 25 bp, Homo sapien
gactatggttaagcaaagttcactc

SEQ ID NO: 2628715 - DNA, 25 bp, Homo sapien
ccttgactatggttaagcaaagttc

SEQ ID NO: 2628716 - DNA, 25 bp, Homo sapien
caaaaccttgactatggttaagcaa

SEQ ID NO: 2628717 - DNA, 25 bp, Homo sapien
ctatggttaagcaaagttcactcat

SEQ ID NO: 2628718 - DNA, 25 bp, Homo sapien
tttcgcttctggtgtgaatagactt

SEQ ID NO: 2628719 - DNA, 25 bp, Homo sapien
gcttctggtgtgaatagacttgccc

SEQ ID NO: 2628720 - DNA, 25 bp, Homo sapien
ggtgtgaatagacttgccccatatt

SEQ ID NO: 2628721 - DNA, 25 bp, Homo sapien
acttcctgaaccctttgtctcttct

SEQ ID NO: 2628722 - DNA, 25 bp, Homo sapien
tcagcacaacactggtcatgtctca

SEQ ID NO: 2628723 - DNA, 25 bp, Homo sapien
gtcagcacaacactggtcatgtctc

SEQ ID NO: 2628724 - DNA, 25 bp, Homo sapien
cagcacaacactggtcatgtctcac

SEQ ID NO: 2628725 - DNA, 25 bp, Homo sapien
tctccaaccatgctgcttgtggtcc

SEQ ID NO: 2628726 - DNA, 25 bp, Homo sapien
tgcttgtggtccattctgaattcat

SEQ ID NO: 2628727 - DNA, 25 bp, Homo sapien
cttgttctccaaccatgctgcttgt

SEQ ID NO: 2628728 - DNA, 25 bp, Homo sapien
tgttctccaaccatgctgcttgtgg

SEQ ID NO: 2628729 - DNA, 25 bp, Homo sapien
catgcagctatcacctggcagagag

SEQ ID NO: 2628730 - DNA, 25 bp, Homo sapien
ggatagaatctgaccctgacatgca

SEQ ID NO: 2628731 - DNA, 25 bp, Homo sapien
gaaggacgaactcaaatacagatgg

SEQ ID NO: 2628732 - DNA, 25 bp, Homo sapien
gagtctgaggtatagacactgccct

SEQ ID NO: 2628733 - DNA, 25 bp, Homo sapien
tccatacccttgtgttcagacacct

SEQ ID NO: 2628734 - DNA, 25 bp, Homo sapien
tcagacaccttatgaatatctgcag

SEQ ID NO: 2628735 - DNA, 25 bp, Homo sapien
gacaccttatgaatatctgcagtca

SEQ ID NO: 2628736 - DNA, 25 bp, Homo sapien
ccctccatacccttgtgttcagaca

SEQ ID NO: 2628737 - DNA, 25 bp, Homo sapien
tgaactgccttggtgttaggagagc

SEQ ID NO: 2628738 - DNA, 25 bp, Homo sapien
tatctgagttcccacaagcaaactg

SEQ ID NO: 2628739 - DNA, 25 bp, Homo sapien
taaaggcccatccatactaggtggt

SEQ ID NO: 2628740 - DNA, 25 bp, Homo sapien
gaatgggctttagaacctatctgag

SEQ ID NO: 2628741 - DNA, 25 bp, Homo sapien
ggttcttccttgttaggattccaga

SEQ ID NO: 2628742 - DNA, 25 bp, Homo sapien
tgttcaggttcttccttgttaggat

SEQ ID NO: 2628743 - DNA, 25 bp, Homo sapien
tagccagggttatttgttcaggttc

SEQ ID NO: 2628744 - DNA, 25 bp, Homo sapien
tctgacatgtttttagccagggtta

SEQ ID NO: 2628745 - DNA, 25 bp, Homo sapien
tgactctccttacccataagcatgg

SEQ ID NO: 2628746 - DNA, 25 bp, Homo sapien
actctccttacccataagcatggaa

SEQ ID NO: 2628747 - DNA, 25 bp, Homo sapien
atattgactctccttacccataagc

SEQ ID NO: 2628748 - DNA, 25 bp, Homo sapien
cacgatattgactctccttacccat

SEQ ID NO: 2628749 - DNA, 25 bp, Homo sapien
gaaaaatttccagtgtggagtggtg

SEQ ID NO: 2628750 - DNA, 25 bp, Homo sapien
ccccttgctgggtgtcttccaaatt

SEQ ID NO: 2628751 - DNA, 25 bp, Homo sapien
gagtggtgaagaataatgggatttt

SEQ ID NO: 2628752 - DNA, 25 bp, Homo sapien
tcttctggtctagggcagagaaact

SEQ ID NO: 2628753 - DNA, 25 bp, Homo sapien
ttctacaactattggaacaaagcct

SEQ ID NO: 2628754 - DNA, 25 bp, Homo sapien
tactgtggactcatatcttgagagg

SEQ ID NO: 2628755 - DNA, 25 bp, Homo sapien
tagatcacagccgtatgatccagtc

SEQ ID NO: 2628756 - DNA, 25 bp, Homo sapien
caaagccttcttgtagatggtggaa

SEQ ID NO: 2628757 - DNA, 25 bp, Homo sapien
tttgcctactagtaattcattttca

SEQ ID NO: 2628758 - DNA, 25 bp, Homo sapien
tcaccaaatatatggatgatttctt

SEQ ID NO: 2628759 - DNA, 25 bp, Homo sapien
tgcatataagcaaacaattttcctt

SEQ ID NO: 2628760 - DNA, 25 bp, Homo sapien
ccttttgcctactagtaattcattt

SEQ ID NO: 2628761 - DNA, 25 bp, Homo sapien
tctcagagttaggtcaagcgtgtct

SEQ ID NO: 2628762 - DNA, 25 bp, Homo sapien
tgaccgggataattgtgcagctaat

SEQ ID NO: 2628763 - DNA, 25 bp, Homo sapien
gacaaggcactgttctgagaaagac

SEQ ID NO: 2628764 - DNA, 25 bp, Homo sapien
agtgtatatacccacccttcaggga

SEQ ID NO: 2628765 - DNA, 25 bp, Homo sapien
gctgctcaaggctcccgataatcca

SEQ ID NO: 2628766 - DNA, 25 bp, Homo sapien
caaggctcccgataatccagtttct

SEQ ID NO: 2628767 - DNA, 25 bp, Homo sapien
ctgggcttaaggctgctcaaggctc

SEQ ID NO: 2628768 - DNA, 25 bp, Homo sapien
cttaaggctgctcaaggctcccgat

SEQ ID NO: 2628769 - DNA, 25 bp, Homo sapien
tcagtgctgagcctggatatcagaa

SEQ ID NO: 2628770 - DNA, 25 bp, Homo sapien
gcttggcattgcgacatccggtaca

SEQ ID NO: 2628771 - DNA, 25 bp, Homo sapien
gtaagaatctgaaacggcacatgtg

SEQ ID NO: 2628772 - DNA, 25 bp, Homo sapien
gaaattcacggtccagggaatcata

SEQ ID NO: 2628773 - DNA, 25 bp, Homo sapien
gtacagttccgggatctgattccaa

SEQ ID NO: 2628774 - DNA, 25 bp, Homo sapien
ttggccctgggcactacactggttt

SEQ ID NO: 2628775 - DNA, 25 bp, Homo sapien
ctgggcactacactggtttcccatc

SEQ ID NO: 2628776 - DNA, 25 bp, Homo sapien
agtacagttccgggatctgattcca

SEQ ID NO: 2628777 - DNA, 25 bp, Homo sapien
ttctactgattcttcagtaacaggg

SEQ ID NO: 2628778 - DNA, 25 bp, Homo sapien
ttcccagagtcctgattgtcctgct

SEQ ID NO: 2628779 - DNA, 25 bp, Homo sapien
tcctcccttgagatttctccaagga

SEQ ID NO: 2628780 - DNA, 25 bp, Homo sapien
ttgtcctgcttctactgattcttca

SEQ ID NO: 2628781 - DNA, 25 bp, Homo sapien
tcaggtaccgaaagcccagttgaac

SEQ ID NO: 2628782 - DNA, 25 bp, Homo sapien
caggtaccgaaagcccagttgaact

SEQ ID NO: 2628783 - DNA, 25 bp, Homo sapien
tttcaggtaccgaaagcccagttga

SEQ ID NO: 2628784 - DNA, 25 bp, Homo sapien
ttcaggtaccgaaagcccagttgaa

SEQ ID NO: 2628785 - DNA, 25 bp, Homo sapien
taatgagagaacctgagcactggac

SEQ ID NO: 2628786 - DNA, 25 bp, Homo sapien
caggaagatctgacttatgtgccct

SEQ ID NO: 2628787 - DNA, 25 bp, Homo sapien
tcctagtgaggagaattggtggcat

SEQ ID NO: 2628788 - DNA, 25 bp, Homo sapien
cagttggcaggatccttaaagtcac

SEQ ID NO: 2628789 - DNA, 25 bp, Homo sapien
tctaacaagagtcaaaggctcccag

SEQ ID NO: 2628790 - DNA, 25 bp, Homo sapien
cacccattgtggaagctgctgatgc

SEQ ID NO: 2628791 - DNA, 25 bp, Homo sapien
tcccagagcttggtcacccattgtg

SEQ ID NO: 2628792 - DNA, 25 bp, Homo sapien
aacatctcctattgctgactctgcc

SEQ ID NO: 2628793 - DNA, 25 bp, Homo sapien
gattggttcttgttctgaaaccatt

SEQ ID NO: 2628794 - DNA, 25 bp, Homo sapien
agacacttgaaatgattggttcttg

SEQ ID NO: 2628795 - DNA, 25 bp, Homo sapien
tgattggttcttgttctgaaaccat

SEQ ID NO: 2628796 - DNA, 25 bp, Homo sapien
gacacttgaaatgattggttcttgt

SEQ ID NO: 2628797 - DNA, 25 bp, Homo sapien
tttcaggtttatcaatcatactcat

SEQ ID NO: 2628798 - DNA, 25 bp, Homo sapien
ctgaaaacgaatttcaggtttatca

SEQ ID NO: 2628799 - DNA, 25 bp, Homo sapien
acgaatttcaggtttatcaatcata

SEQ ID NO: 2628800 - DNA, 25 bp, Homo sapien
gaatttcaggtttatcaatcatact

SEQ ID NO: 2628801 - DNA, 25 bp, Homo sapien
gaagcagctggagacccaccacact

SEQ ID NO: 2628802 - DNA, 25 bp, Homo sapien
tgtcaattcatctgctgtagcctcc

SEQ ID NO: 2628803 - DNA, 25 bp, Homo sapien
cctgtgttattgtcaattcatctgc

SEQ ID NO: 2628804 - DNA, 25 bp, Homo sapien
gaagttctgttgtgtagaagcagct

SEQ ID NO: 2628805 - DNA, 25 bp, Homo sapien
ctgatacatcagcaagtgaattgct

SEQ ID NO: 2628806 - DNA, 25 bp, Homo sapien
tgtggctaacaacagtagcctgata

SEQ ID NO: 2628807 - DNA, 25 bp, Homo sapien
cagcaagtgaattgctctcctgtac

SEQ ID NO: 2628808 - DNA, 25 bp, Homo sapien
aacaacagtagcctgatacatcagc

SEQ ID NO: 2628809 - DNA, 25 bp, Homo sapien
ctccgggagtgagtgtacctggcca

SEQ ID NO: 2628810 - DNA, 25 bp, Homo sapien
ggatcttccaatgatctccctaaga

SEQ ID NO: 2628811 - DNA, 25 bp, Homo sapien
tacacaagggcactgatttgcagac

SEQ ID NO: 2628812 - DNA, 25 bp, Homo sapien
cctggccagggtattatctgggatc

SEQ ID NO: 2628813 - DNA, 25 bp, Homo sapien
ggttctttttatctctgtgatgtta

SEQ ID NO: 2628814 - DNA, 25 bp, Homo sapien
tctgtgatgttatccttttctggtt

SEQ ID NO: 2628815 - DNA, 25 bp, Homo sapien
tgatgttatccttttctggttttac

SEQ ID NO: 2628816 - DNA, 25 bp, Homo sapien
tgtgatgttatccttttctggtttt

SEQ ID NO: 2628817 - DNA, 25 bp, Homo sapien
gttccttgatacaggtcatcccttg

SEQ ID NO: 2628818 - DNA, 25 bp, Homo sapien
cactttgaactggaaccttagtgct

SEQ ID NO: 2628819 - DNA, 25 bp, Homo sapien
ttctaactgtgtactaccagcactt

SEQ ID NO: 2628820 - DNA, 25 bp, Homo sapien
ggtcatcccttgaccagtgggccag

SEQ ID NO: 2628821 - DNA, 25 bp, Homo sapien
ccagattttcttcactggttgttcc

SEQ ID NO: 2628822 - DNA, 25 bp, Homo sapien
cagattttcttcactggttgttccc

SEQ ID NO: 2628823 - DNA, 25 bp, Homo sapien
gattttcttcactggttgttcccat

SEQ ID NO: 2628824 - DNA, 25 bp, Homo sapien
agattttcttcactggttgttccca

SEQ ID NO: 2628825 - DNA, 25 bp, Homo sapien
tgaggttaccggaggtagaacaatc

SEQ ID NO: 2628826 - DNA, 25 bp, Homo sapien
cagccattctgaggttaccggaggt

SEQ ID NO: 2628827 - DNA, 25 bp, Homo sapien
ttaccggaggtagaacaatcctgca

SEQ ID NO: 2628828 - DNA, 25 bp, Homo sapien
gaggtagaacaatcctgcagctgaa

SEQ ID NO: 2628829 - DNA, 25 bp, Homo sapien
cttcccaaatttgactcatgggaat

SEQ ID NO: 2628830 - DNA, 25 bp, Homo sapien
gcttcccaaatttgactcatgggaa

SEQ ID NO: 2628831 - DNA, 25 bp, Homo sapien
ggttgcaggatctaatagtggccaa

SEQ ID NO: 2628832 - DNA, 25 bp, Homo sapien
gaccctgtatattcacgagttcata

SEQ ID NO: 2628833 - DNA, 25 bp, Homo sapien
caatggccaaatgatcaagaccaag

SEQ ID NO: 2628834 - DNA, 25 bp, Homo sapien
tggattactctcacaatctggatgg

SEQ ID NO: 2628835 - DNA, 25 bp, Homo sapien
tcccatttagatcatgaagactgga

SEQ ID NO: 2628836 - DNA, 25 bp, Homo sapien
gcatgtggccatcccatttagatca

SEQ ID NO: 2628837 - DNA, 25 bp, Homo sapien
gaagactggagagcttgacatagtc

SEQ ID NO: 2628838 - DNA, 25 bp, Homo sapien
ctaacttagactcccaggtctccag

SEQ ID NO: 2628839 - DNA, 25 bp, Homo sapien
gtttagctagaccatgagtttcttg

SEQ ID NO: 2628840 - DNA, 25 bp, Homo sapien
catgtagcaattgtactgaaatctg

SEQ ID NO: 2628841 - DNA, 25 bp, Homo sapien
ccatctgggtgaataatgctttgct

SEQ ID NO: 2628842 - DNA, 25 bp, Homo sapien
gagctactatcttctgccatctggg

SEQ ID NO: 2628843 - DNA, 25 bp, Homo sapien
caaagtaagagcacttcccctagat

SEQ ID NO: 2628844 - DNA, 25 bp, Homo sapien
tgtcaataccatcccaaagtaagag

SEQ ID NO: 2628845 - DNA, 25 bp, Homo sapien
cttcccctagatccagtagttctgg

SEQ ID NO: 2628846 - DNA, 25 bp, Homo sapien
ctggttgctaaaaagtaatggctta

SEQ ID NO: 2628847 - DNA, 25 bp, Homo sapien
gcttccatcgtacaaactgggtttg

SEQ ID NO: 2628848 - DNA, 25 bp, Homo sapien
aaggcattttctagacaagtttgga

SEQ ID NO: 2628849 - DNA, 25 bp, Homo sapien
tttgtggagatgttgggattcccac

SEQ ID NO: 2628850 - DNA, 25 bp, Homo sapien
gaatgccatctgctatgtcgaagga

SEQ ID NO: 2628851 - DNA, 25 bp, Homo sapien
tcatcaatgctgtggatcacaggca

SEQ ID NO: 2628852 - DNA, 25 bp, Homo sapien
cattttcttcgggtgtgaagaggta

SEQ ID NO: 2628853 - DNA, 25 bp, Homo sapien
ggagtttctatcacaaatatcgttt

SEQ ID NO: 2628854 - DNA, 25 bp, Homo sapien
cacaaatatcgtttctgtttcatca

SEQ ID NO: 2628855 - DNA, 25 bp, Homo sapien
ttaacgaagtgcctttaattcagcc

SEQ ID NO: 2628856 - DNA, 25 bp, Homo sapien
tctgttattgagaccctgtgggcta

SEQ ID NO: 2628857 - DNA, 25 bp, Homo sapien
taattcagccttatccaactaggga

SEQ ID NO: 2628858 - DNA, 25 bp, Homo sapien
tgtgggctacttgtactgtacctcc

SEQ ID NO: 2628859 - DNA, 25 bp, Homo sapien
taattgtgaagagctaatgcagaca

SEQ ID NO: 2628860 - DNA, 25 bp, Homo sapien
ccttatgaaagccaaatgactgcct

SEQ ID NO: 2628861 - DNA, 25 bp, Homo sapien
gaaggtaaaatgctaattgggctca

SEQ ID NO: 2628862 - DNA, 25 bp, Homo sapien
gctatataccaaatcatgctgaact

SEQ ID NO: 2628863 - DNA, 25 bp, Homo sapien
gaaaaggtatggtatcaatggaacc

SEQ ID NO: 2628864 - DNA, 25 bp, Homo sapien
catccagaggactagcttttgagca

SEQ ID NO: 2628865 - DNA, 25 bp, Homo sapien
gctggagtgccctaattaataaaat

SEQ ID NO: 2628866 - DNA, 25 bp, Homo sapien
tttgagcatctgacgatcaatggca

SEQ ID NO: 2628867 - DNA, 25 bp, Homo sapien
cagcgccccatcgaagctaaagggc

SEQ ID NO: 2628868 - DNA, 25 bp, Homo sapien
tagaaacgtgaacgcagtccaggcg

SEQ ID NO: 2628869 - DNA, 25 bp, Homo sapien
agcaacaagcttggcgggagatcct

SEQ ID NO: 2628870 - DNA, 25 bp, Homo sapien
tgtagcggcaagtgtgcgccaacac

SEQ ID NO: 2628871 - DNA, 25 bp, Homo sapien
ggagacttagtcacatagcatgcaa

SEQ ID NO: 2628872 - DNA, 25 bp, Homo sapien
tctcagaacttggtcaggccttaat

SEQ ID NO: 2628873 - DNA, 25 bp, Homo sapien
gagtcagtcatatgaccaccggcaa

SEQ ID NO: 2628874 - DNA, 25 bp, Homo sapien
gacccaatcgcaatgggcaaaagtg

SEQ ID NO: 2628875 - DNA, 25 bp, Homo sapien
tggcccaggccggcaaaggtctttc

SEQ ID NO: 2628876 - DNA, 25 bp, Homo sapien
ggaggagacatcagctccggaagag

SEQ ID NO: 2628877 - DNA, 25 bp, Homo sapien
gggaggagacatcagctccggaaga

SEQ ID NO: 2628878 - DNA, 25 bp, Homo sapien
cgtgaccgtgttggcccgcaatcac

SEQ ID NO: 2628879 - DNA, 25 bp, Homo sapien
acaatcggcgggtgcgccccggtca

SEQ ID NO: 2628880 - DNA, 25 bp, Homo sapien
gtgcgccccggtcacgtgaccgtgt

SEQ ID NO: 2628881 - DNA, 25 bp, Homo sapien
ccggtcacgtgaccgtgttggcccg

SEQ ID NO: 2628882 - DNA, 25 bp, Homo sapien
tgggcctgagccagatccccgagct

SEQ ID NO: 2628883 - DNA, 25 bp, Homo sapien
tcaccggcagcttcgctaagttgct

SEQ ID NO: 2628884 - DNA, 25 bp, Homo sapien
ccccgagctcttccactcgtctcac

SEQ ID NO: 2628885 - DNA, 25 bp, Homo sapien
gtctcaccacactagagactgcggc

SEQ ID NO: 2628886 - DNA, 25 bp, Homo sapien
agcgccagtaccttagcgccgtctg

SEQ ID NO: 2628887 - DNA, 25 bp, Homo sapien
gccatcgagcgccagtaccttagcg

SEQ ID NO: 2628888 - DNA, 25 bp, Homo sapien
tcgagcgccagtaccttagcgccgt

SEQ ID NO: 2628889 - DNA, 25 bp, Homo sapien
agccatcgagcgccagtaccttagc

SEQ ID NO: 2628890 - DNA, 25 bp, Homo sapien
aaagttctagaagatttgatggatt

SEQ ID NO: 2628891 - DNA, 25 bp, Homo sapien
tgctgcagaggcccgaattaaaaag

SEQ ID NO: 2628892 - DNA, 25 bp, Homo sapien
gaagatttgatggatttgaacattc

SEQ ID NO: 2628893 - DNA, 25 bp, Homo sapien
ctagaagatttgatggatttgaaca

SEQ ID NO: 2628894 - DNA, 25 bp, Homo sapien
acatttcttgatgttagcatgcctc

SEQ ID NO: 2628895 - DNA, 25 bp, Homo sapien
agaaaaaaaggtgttgtccacacag

SEQ ID NO: 2628896 - DNA, 25 bp, Homo sapien
aaatcttcatctactagcttgttct

SEQ ID NO: 2628897 - DNA, 25 bp, Homo sapien
caaaatatgtcatgtccaaaatagc

SEQ ID NO: 2628898 - DNA, 25 bp, Homo sapien
ggaaaatcttcatctactagcttgt

SEQ ID NO: 2628899 - DNA, 25 bp, Homo sapien
tcaggaaaatcttcatctactagct

SEQ ID NO: 2628900 - DNA, 25 bp, Homo sapien
tggattttcttaagagccactctct

SEQ ID NO: 2628901 - DNA, 25 bp, Homo sapien
gagagacattccagtagctcatccc

SEQ ID NO: 2628902 - DNA, 25 bp, Homo sapien
gtagctcatccccaagcaaattgca

SEQ ID NO: 2628903 - DNA, 25 bp, Homo sapien
ggctcctcgtctccaagagagacat

SEQ ID NO: 2628904 - DNA, 25 bp, Homo sapien
gaccctttgatccactactcttagt

SEQ ID NO: 2628905 - DNA, 25 bp, Homo sapien
ctactcttagtagtacaacaaagac

SEQ ID NO: 2628906 - DNA, 25 bp, Homo sapien
cagaatacaaactcagaccctttga

SEQ ID NO: 2628907 - DNA, 25 bp, Homo sapien
tcagaccctttgatccactactctt

SEQ ID NO: 2628908 - DNA, 25 bp, Homo sapien
gacatcgataatttagcatctgtag

SEQ ID NO: 2628909 - DNA, 25 bp, Homo sapien
catttaactggataggacatcgata

SEQ ID NO: 2628910 - DNA, 25 bp, Homo sapien
tgtctagatcttggaaagaaactcc

SEQ ID NO: 2628911 - DNA, 25 bp, Homo sapien
gcatctgtagcaagtaactgattcc

SEQ ID NO: 2628912 - DNA, 25 bp, Homo sapien
aaaacaggtgatttgtgccactccc

SEQ ID NO: 2628913 - DNA, 25 bp, Homo sapien
caaagtatgacaaagagacgccacc

SEQ ID NO: 2628914 - DNA, 25 bp, Homo sapien
gcctggaaaatgctaccctatctga

SEQ ID NO: 2628915 - DNA, 25 bp, Homo sapien
tcctaggttcaagcgcaaacttctt

SEQ ID NO: 2628916 - DNA, 25 bp, Homo sapien
cgccagttttctcaagtgatcatcc

SEQ ID NO: 2628917 - DNA, 25 bp, Homo sapien
gcgccagttttctcaagtgatcatc

SEQ ID NO: 2628918 - DNA, 25 bp, Homo sapien
ggcgccagttttctcaagtgatcat

SEQ ID NO: 2628919 - DNA, 25 bp, Homo sapien
catagccagcagatgaatgtcacta

SEQ ID NO: 2628920 - DNA, 25 bp, Homo sapien
gttgctgatcagcacaatacttcga

SEQ ID NO: 2628921 - DNA, 25 bp, Homo sapien
cttgtatgtagtgcagcccgctcca

SEQ ID NO: 2628922 - DNA, 25 bp, Homo sapien
gacacactagtatccacttcatgat

SEQ ID NO: 2628923 - DNA, 25 bp, Homo sapien
tttagtagggtacccaagctggata

SEQ ID NO: 2628924 - DNA, 25 bp, Homo sapien
atctttatgcagtgtaatgttctca

SEQ ID NO: 2628925 - DNA, 25 bp, Homo sapien
caggtcttcttttttggaactctct

SEQ ID NO: 2628926 - DNA, 25 bp, Homo sapien
gggttactactcattattagtgaca

SEQ ID NO: 2628927 - DNA, 25 bp, Homo sapien
catggcaaacttcaaggtagtgaga

SEQ ID NO: 2628928 - DNA, 25 bp, Homo sapien
cagaagtccaaggtatcagcaaggt

SEQ ID NO: 2628929 - DNA, 25 bp, Homo sapien
cagcaaggtatcagaaagatcatcc

SEQ ID NO: 2628930 - DNA, 25 bp, Homo sapien
agatatcaagttaggctctctggcc

SEQ ID NO: 2628931 - DNA, 25 bp, Homo sapien
aatctgaggttgagggcttgccaaa

SEQ ID NO: 2628932 - DNA, 25 bp, Homo sapien
tgacattcaaagtgcggccacggga

SEQ ID NO: 2628933 - DNA, 25 bp, Homo sapien
aaagaactcagcatccccgaaaagg

SEQ ID NO: 2628934 - DNA, 25 bp, Homo sapien
tttgataggaagcaggcaacctctt

SEQ ID NO: 2628935 - DNA, 25 bp, Homo sapien
gatgaggacttgacgtttggaaaca

SEQ ID NO: 2628936 - DNA, 25 bp, Homo sapien
ggtaggcagaaagtgagacaacact

SEQ ID NO: 2628937 - DNA, 25 bp, Homo sapien
caagttacaggtttgagactcagtc

SEQ ID NO: 2628938 - DNA, 25 bp, Homo sapien
tattacaggtggtaaaagaagccat

SEQ ID NO: 2628939 - DNA, 25 bp, Homo sapien
gtatgtttaccaaaagcagcctgga

SEQ ID NO: 2628940 - DNA, 25 bp, Homo sapien
cacaaagcgcatttagggaagaagt

SEQ ID NO: 2628941 - DNA, 25 bp, Homo sapien
gagcaacactggactagaacatgat

SEQ ID NO: 2628942 - DNA, 25 bp, Homo sapien
gattacacaggatgactgcagagac

SEQ ID NO: 2628943 - DNA, 25 bp, Homo sapien
tcacttggtcacaaagaaggatgca

SEQ ID NO: 2628944 - DNA, 25 bp, Homo sapien
agaagtaatgatgtgtgcaaggcta

SEQ ID NO: 2628945 - DNA, 25 bp, Homo sapien
gcagaagtaatgatgtgtgcaaggc

SEQ ID NO: 2628946 - DNA, 25 bp, Homo sapien
acttggtcacaaagaaggatgcaga

SEQ ID NO: 2628947 - DNA, 25 bp, Homo sapien
taagggcctaccatgcattaagcac

SEQ ID NO: 2628948 - DNA, 25 bp, Homo sapien
taagcactatgtatacaggtaaatt

SEQ ID NO: 2628949 - DNA, 25 bp, Homo sapien
gcatctaatttgactgaaaagggct

SEQ ID NO: 2628950 - DNA, 25 bp, Homo sapien
tgtgatcagtgcgacaacatgggag

SEQ ID NO: 2628951 - DNA, 25 bp, Homo sapien
acaaattattctccaactgtgtggg

SEQ ID NO: 2628952 - DNA, 25 bp, Homo sapien
tagagggcatagcagtttggaatcc

SEQ ID NO: 2628953 - DNA, 25 bp, Homo sapien
tatgccttgtcagccactggtatag

SEQ ID NO: 2628954 - DNA, 25 bp, Homo sapien
ccaagtggtctaccagggtcacgaa

SEQ ID NO: 2628955 - DNA, 25 bp, Homo sapien
gctaaagcagtagacagttcccaac

SEQ ID NO: 2628956 - DNA, 25 bp, Homo sapien
taaaaagctatatcctcagggtcta

SEQ ID NO: 2628957 - DNA, 25 bp, Homo sapien
caaaaccctataaatgcagcagagc

SEQ ID NO: 2628958 - DNA, 25 bp, Homo sapien
tcatattgggaaagagccatacaca

SEQ ID NO: 2628959 - DNA, 25 bp, Homo sapien
ccgctgtaacatggtatcatctcat

SEQ ID NO: 2628960 - DNA, 25 bp, Homo sapien
tatgctcaataacagtttacttgga

SEQ ID NO: 2628961 - DNA, 25 bp, Homo sapien
taattgtggctatattaaatgtatc

SEQ ID NO: 2628962 - DNA, 25 bp, Homo sapien
atcttaatgtaataccgctgtaaca

SEQ ID NO: 2628963 - DNA, 25 bp, Homo sapien
tagagccacgctagcgcgtcagcct

SEQ ID NO: 2628964 - DNA, 25 bp, Homo sapien
cccgcagcgtgggtgacgcgtctta

SEQ ID NO: 2628965 - DNA, 25 bp, Homo sapien
gacgcgtcttagagccacgctagcg

SEQ ID NO: 2628966 - DNA, 25 bp, Homo sapien
cgtgggtgacgcgtcttagagccac

SEQ ID NO: 2628967 - DNA, 25 bp, Homo sapien
gtttgttccgctgcgcggctcgctt

SEQ ID NO: 2628968 - DNA, 25 bp, Homo sapien
tccaggcggccccagtcgctgaagg

SEQ ID NO: 2628969 - DNA, 25 bp, Homo sapien
gcggcggcggcgagtttgttccgct

SEQ ID NO: 2628970 - DNA, 25 bp, Homo sapien
ttccagccgctgaggatggccgcct

SEQ ID NO: 2628971 - DNA, 25 bp, Homo sapien
cggcagccgcgtcagggtgctggcc

SEQ ID NO: 2628972 - DNA, 25 bp, Homo sapien
gcagccgcgtcagggtgctggccgc

SEQ ID NO: 2628973 - DNA, 25 bp, Homo sapien
gtacgcgccaccctctccttgctca

SEQ ID NO: 2628974 - DNA, 25 bp, Homo sapien
catccacctcctcccgtgaggtcgt

SEQ ID NO: 2628975 - DNA, 25 bp, Homo sapien
gccggggcgcgagagttccccaggc

SEQ ID NO: 2628976 - DNA, 25 bp, Homo sapien
caggaatggctgcatggacggagcc

SEQ ID NO: 2628977 - DNA, 25 bp, Homo sapien
ggccccactgtcctccgcggcctgc

SEQ ID NO: 2628978 - DNA, 25 bp, Homo sapien
ctgcatggacggagccagacccagg

SEQ ID NO: 2628979 - DNA, 25 bp, Homo sapien
tcaactgtagcttctcggtgactac

SEQ ID NO: 2628980 - DNA, 25 bp, Homo sapien
catgaaggtgcttccctgagatgtt

SEQ ID NO: 2628981 - DNA, 25 bp, Homo sapien
gggccccatgaaggtgcttccctga

SEQ ID NO: 2628982 - DNA, 25 bp, Homo sapien
agggtccacgccaagacgcttctga

SEQ ID NO: 2628983 - DNA, 25 bp, Homo sapien
atgtgcctgttttggcgggtggaaa

SEQ ID NO: 2628984 - DNA, 25 bp, Homo sapien
tgtgcctgttttggcgggtggaaaa

SEQ ID NO: 2628985 - DNA, 25 bp, Homo sapien
gaactgtctcatttccgtaaccgga

SEQ ID NO: 2628986 - DNA, 25 bp, Homo sapien
gcgcccggccgtaaatttgtcatct

SEQ ID NO: 2628987 - DNA, 25 bp, Homo sapien
caagtgttttggtacagtgatccgg

SEQ ID NO: 2628988 - DNA, 25 bp, Homo sapien
tgatccggaatcaaagacgctggga

SEQ ID NO: 2628989 - DNA, 25 bp, Homo sapien
ttttgggtgataaaccacataatca

SEQ ID NO: 2628990 - DNA, 25 bp, Homo sapien
tttttgggtgataaaccacataatc

SEQ ID NO: 2628991 - DNA, 25 bp, Homo sapien
tttgggtgataaaccacataatcaa

SEQ ID NO: 2628992 - DNA, 25 bp, Homo sapien
aggaagatccctcaacaaaaagtat

SEQ ID NO: 2628993 - DNA, 25 bp, Homo sapien
taatgatttgtacttcccaactgac

SEQ ID NO: 2628994 - DNA, 25 bp, Homo sapien
tcagtgacctcagatataggctttt

SEQ ID NO: 2628995 - DNA, 25 bp, Homo sapien
cccaactgacacagatcatgaggtg

SEQ ID NO: 2628996 - DNA, 25 bp, Homo sapien
ttaatagcttctttttaattcataa

SEQ ID NO: 2628997 - DNA, 25 bp, Homo sapien
taatagcttctttttaattcataaa

SEQ ID NO: 2628998 - DNA, 25 bp, Homo sapien
cagaaataactcagggttggccggg

SEQ ID NO: 2628999 - DNA, 25 bp, Homo sapien
tattgcctagcaagtgagatacagc

SEQ ID NO: 2629000 - DNA, 25 bp, Homo sapien
ggttagctattgtacaggtattgcc

SEQ ID NO: 2629001 - DNA, 25 bp, Homo sapien
tattccctgggcaaaatctaattcc

SEQ ID NO: 2629002 - DNA, 25 bp, Homo sapien
taatcctacaatgcatagggcaggc

SEQ ID NO: 2629003 - DNA, 25 bp, Homo sapien
gctctgacagggaaaagcacaaggt

SEQ ID NO: 2629004 - DNA, 25 bp, Homo sapien
tccaggagaacaatagacagacacc

SEQ ID NO: 2629005 - DNA, 25 bp, Homo sapien
tatatagtcccaatcctccaggaga

SEQ ID NO: 2629006 - DNA, 25 bp, Homo sapien
aacctggtccaaacatagcaaatcg

SEQ ID NO: 2629007 - DNA, 25 bp, Homo sapien
tttgaagctcttcttgtgtatggac

SEQ ID NO: 2629008 - DNA, 25 bp, Homo sapien
cataggacggctggattttgaagct

SEQ ID NO: 2629009 - DNA, 25 bp, Homo sapien
gaggcaaaccagctgttgggcaaag

SEQ ID NO: 2629010 - DNA, 25 bp, Homo sapien
ttaactgtagattaacatgaaaatt

SEQ ID NO: 2629011 - DNA, 25 bp, Homo sapien
gtttgaattaactgtagattaacat

SEQ ID NO: 2629012 - DNA, 25 bp, Homo sapien
aactgtagattaacatgaaaattac

SEQ ID NO: 2629013 - DNA, 25 bp, Homo sapien
aattaactgtagattaacatgaaaa

SEQ ID NO: 2629014 - DNA, 25 bp, Homo sapien
ctgaaaattgactcctgatccaata

SEQ ID NO: 2629015 - DNA, 25 bp, Homo sapien
ttgaatttatgttggttgttcaact

SEQ ID NO: 2629016 - DNA, 25 bp, Homo sapien
tgttgaatttatgttggttgttcaa

SEQ ID NO: 2629017 - DNA, 25 bp, Homo sapien
tgaaaattgactcctgatccaatac

SEQ ID NO: 2629018 - DNA, 25 bp, Homo sapien
cacttgtatgctcttcccttgctct

SEQ ID NO: 2629019 - DNA, 25 bp, Homo sapien
ctgcacttgtatgctcttcccttgc

SEQ ID NO: 2629020 - DNA, 25 bp, Homo sapien
tgttaactgcacttgtatgctcttc

SEQ ID NO: 2629021 - DNA, 25 bp, Homo sapien
ttgtatgctcttcccttgctctatc

SEQ ID NO: 2629022 - DNA, 25 bp, Homo sapien
gatgaacccatctacaacttcacac

SEQ ID NO: 2629023 - DNA, 25 bp, Homo sapien
gaatcacactgtaccggcttccttg

SEQ ID NO: 2629024 - DNA, 25 bp, Homo sapien
ttttatgagcttcagcatttgcaac

SEQ ID NO: 2629025 - DNA, 25 bp, Homo sapien
tcaccttcattgtgtcgactgaaca

SEQ ID NO: 2629026 - DNA, 25 bp, Homo sapien
taaaaatgtacatatgagtacttac

SEQ ID NO: 2629027 - DNA, 25 bp, Homo sapien
ttaaaaatgtacatatgagtactta

SEQ ID NO: 2629028 - DNA, 25 bp, Homo sapien
taaaatccaccagggtaggaatcag

SEQ ID NO: 2629029 - DNA, 25 bp, Homo sapien
taactgcaacatgcctgtaggaact

SEQ ID NO: 2629030 - DNA, 25 bp, Homo sapien
tttcatgcctaacagatcacaggga

SEQ ID NO: 2629031 - DNA, 25 bp, Homo sapien
tataatactagctcatggcccaatg

SEQ ID NO: 2629032 - DNA, 25 bp, Homo sapien
gcctcaggccttaggtaggccctgt

SEQ ID NO: 2629033 - DNA, 25 bp, Homo sapien
tggtagggacatggagatttctcag

SEQ ID NO: 2629034 - DNA, 25 bp, Homo sapien
cagtaacagcactggagtaccagag

SEQ ID NO: 2629035 - DNA, 25 bp, Homo sapien
tccagcatgactgctgaattctgcc

SEQ ID NO: 2629036 - DNA, 25 bp, Homo sapien
cactactggcttagttacaacttca

SEQ ID NO: 2629037 - DNA, 25 bp, Homo sapien
ttaatgtacttatcaacaaggtgca

SEQ ID NO: 2629038 - DNA, 25 bp, Homo sapien
acaaggtgcatttaaatgtatccta

SEQ ID NO: 2629039 - DNA, 25 bp, Homo sapien
tagattttgacttgtccgtctattc

SEQ ID NO: 2629040 - DNA, 25 bp, Homo sapien
caaaaatttaccaggatccaaacat

SEQ ID NO: 2629041 - DNA, 25 bp, Homo sapien
tgcattacttttaatagttttgaaa

SEQ ID NO: 2629042 - DNA, 25 bp, Homo sapien
ccaggatccaaacataaactgaggg

SEQ ID NO: 2629043 - DNA, 25 bp, Homo sapien
tgtaagtcaaaacccttaatttgca

SEQ ID NO: 2629044 - DNA, 25 bp, Homo sapien
tggatctgtcattgccataatatga

SEQ ID NO: 2629045 - DNA, 25 bp, Homo sapien
gagaaaattcatcttgccattcatg

SEQ ID NO: 2629046 - DNA, 25 bp, Homo sapien
ttcccgaagacccaaaggctggatc

SEQ ID NO: 2629047 - DNA, 25 bp, Homo sapien
ttacatccccttgagaaatacaaga

SEQ ID NO: 2629048 - DNA, 25 bp, Homo sapien
aagtttatttgccttggaattcagc

SEQ ID NO: 2629049 - DNA, 25 bp, Homo sapien
ccaaaatcttatgagtaggagggac

SEQ ID NO: 2629050 - DNA, 25 bp, Homo sapien
ctttggataagttgctcaagttttg

SEQ ID NO: 2629051 - DNA, 25 bp, Homo sapien
tttgtagagcacttagataaaaata

SEQ ID NO: 2629052 - DNA, 25 bp, Homo sapien
aaccagtcagagtttcagcctctgt

SEQ ID NO: 2629053 - DNA, 25 bp, Homo sapien
ttgcacgcttagattccacttcttc

SEQ ID NO: 2629054 - DNA, 25 bp, Homo sapien
tcatcttgcacgcttagattccact

SEQ ID NO: 2629055 - DNA, 25 bp, Homo sapien
ttcaagaatccactcaatgccattc

SEQ ID NO: 2629056 - DNA, 25 bp, Homo sapien
aatattcacatcacgaccttagtaa

SEQ ID NO: 2629057 - DNA, 25 bp, Homo sapien
tcacatcacgaccttagtaataaat

SEQ ID NO: 2629058 - DNA, 25 bp, Homo sapien
ctgagcaaatattcacatcacgacc

SEQ ID NO: 2629059 - DNA, 25 bp, Homo sapien
ttcagttcccaagatctgaaaagag

SEQ ID NO: 2629060 - DNA, 25 bp, Homo sapien
tgtaattgatttatggtaaagagta

SEQ ID NO: 2629061 - DNA, 25 bp, Homo sapien
acagcagttatagctgtccaaatga

SEQ ID NO: 2629062 - DNA, 25 bp, Homo sapien
attttggggctaaatactaggactg

SEQ ID NO: 2629063 - DNA, 25 bp, Homo sapien
gcagttatagctgtccaaatgaaag

SEQ ID NO: 2629064 - DNA, 25 bp, Homo sapien
tctgataaccacttatgaacccttg

SEQ ID NO: 2629065 - DNA, 25 bp, Homo sapien
tttctgataaccacttatgaaccct

SEQ ID NO: 2629066 - DNA, 25 bp, Homo sapien
tgataaccacttatgaacccttgaa

SEQ ID NO: 2629067 - DNA, 25 bp, Homo sapien
gtctttaagcagtgtatttattaag

SEQ ID NO: 2629068 - DNA, 25 bp, Homo sapien
tgatacatacaagtctctgggaagt

SEQ ID NO: 2629069 - DNA, 25 bp, Homo sapien
tcataggtctttctcgaaggtctcc

SEQ ID NO: 2629070 - DNA, 25 bp, Homo sapien
ttctgccgagtataagccatttgtg

SEQ ID NO: 2629071 - DNA, 25 bp, Homo sapien
tagtccattaggcaaaattctgccc

SEQ ID NO: 2629072 - DNA, 25 bp, Homo sapien
tctacttggttgtggactacatttc

SEQ ID NO: 2629073 - DNA, 25 bp, Homo sapien
taattggagttaagacccttgcttc

SEQ ID NO: 2629074 - DNA, 25 bp, Homo sapien
tcctgtccagtgaagtatctacttg

SEQ ID NO: 2629075 - DNA, 25 bp, Homo sapien
tactgcatgagtacaatcgtaacct

SEQ ID NO: 2629076 - DNA, 25 bp, Homo sapien
gatgggatacatcttgcaaaaggga

SEQ ID NO: 2629077 - DNA, 25 bp, Homo sapien
gaatgcatttcctcccaactgtgga

SEQ ID NO: 2629078 - DNA, 25 bp, Homo sapien
tgtgctcaggatcttacaaagctgc

SEQ ID NO: 2629079 - DNA, 25 bp, Homo sapien
tctgctgctaggtatcaaattatca

SEQ ID NO: 2629080 - DNA, 25 bp, Homo sapien
aatcaaccaaggatatcattcactg

SEQ ID NO: 2629081 - DNA, 25 bp, Homo sapien
caagggaaatatcatcctaggcaaa

SEQ ID NO: 2629082 - DNA, 25 bp, Homo sapien
taggcaaagccgtctacagtgcaag

SEQ ID NO: 2629083 - DNA, 25 bp, Homo sapien
catcaatagtgatcaaacatggaaa

SEQ ID NO: 2629084 - DNA, 25 bp, Homo sapien
tttgtgataatcactaactccctgg

SEQ ID NO: 2629085 - DNA, 25 bp, Homo sapien
tatatccaggcatcagttaccaact

SEQ ID NO: 2629086 - DNA, 25 bp, Homo sapien
gaatgctattggcacccttgcctga

SEQ ID NO: 2629087 - DNA, 25 bp, Homo sapien
tggaatcttgatgctactgactgac

SEQ ID NO: 2629088 - DNA, 25 bp, Homo sapien
tagagggtcagccaaccgccttatt

SEQ ID NO: 2629089 - DNA, 25 bp, Homo sapien
gaagctccattctgtgtaattcact

SEQ ID NO: 2629090 - DNA, 25 bp, Homo sapien
tctatgggagttatagacaactatc

SEQ ID NO: 2629091 - DNA, 25 bp, Homo sapien
tatgtccttcgaatgactttcagag

SEQ ID NO: 2629092 - DNA, 25 bp, Homo sapien
gagaggaaacagtctcggacatgca

SEQ ID NO: 2629093 - DNA, 25 bp, Homo sapien
gactctcagggatgcaagaaatttt

SEQ ID NO: 2629094 - DNA, 25 bp, Homo sapien
cggacatgcaaacagtcttccagac

SEQ ID NO: 2629095 - DNA, 25 bp, Homo sapien
taattttaggcctggcttcttagga

SEQ ID NO: 2629096 - DNA, 25 bp, Homo sapien
gactgaatgcccacactatctgaga

SEQ ID NO: 2629097 - DNA, 25 bp, Homo sapien
tgggtggtacctaacaatctgggcc

SEQ ID NO: 2629098 - DNA, 25 bp, Homo sapien
tttgctgcagcataacaagggtgac

SEQ ID NO: 2629099 - DNA, 25 bp, Homo sapien
tgtagaacctgacccaacgatggat

SEQ ID NO: 2629100 - DNA, 25 bp, Homo sapien
tctcttgccactttgaagagtgaac

SEQ ID NO: 2629101 - DNA, 25 bp, Homo sapien
gcaaaatcagtgttgaggcagtcat

SEQ ID NO: 2629102 - DNA, 25 bp, Homo sapien
ctgcttctgcaaaaaccaaagtggt

SEQ ID NO: 2629103 - DNA, 25 bp, Homo sapien
tgcacaaagtggatgcacacaaacg

SEQ ID NO: 2629104 - DNA, 25 bp, Homo sapien
catggctactgccaacctatggaaa

SEQ ID NO: 2629105 - DNA, 25 bp, Homo sapien
ggaaacaattagaggctggtgagga

SEQ ID NO: 2629106 - DNA, 25 bp, Homo sapien
caacttgctgtctggaaacaattag

SEQ ID NO: 2629107 - DNA, 25 bp, Homo sapien
cccagcaacttgctgtctggaaaca

SEQ ID NO: 2629108 - DNA, 25 bp, Homo sapien
cactgttgtttgtctgaaagccttt

SEQ ID NO: 2629109 - DNA, 25 bp, Homo sapien
ccaccactcctcagcatccgatagg

SEQ ID NO: 2629110 - DNA, 25 bp, Homo sapien
tcagcatccgataggctgctgttcc

SEQ ID NO: 2629111 - DNA, 25 bp, Homo sapien
tgctgttcctgtgccatcactgttg

SEQ ID NO: 2629112 - DNA, 25 bp, Homo sapien
tgggactgccatctgtagacatctg

SEQ ID NO: 2629113 - DNA, 25 bp, Homo sapien
ggactgccatctgtagacatctgca

SEQ ID NO: 2629114 - DNA, 25 bp, Homo sapien
ttttgggactgccatctgtagacat

SEQ ID NO: 2629115 - DNA, 25 bp, Homo sapien
ttgggactgccatctgtagacatct

SEQ ID NO: 2629116 - DNA, 25 bp, Homo sapien
ctgtaacccagcacaggtttatatg

SEQ ID NO: 2629117 - DNA, 25 bp, Homo sapien
cagcacaggtttatatggaatgttg

SEQ ID NO: 2629118 - DNA, 25 bp, Homo sapien
tcatgtcacatgaggactgtaaccc

SEQ ID NO: 2629119 - DNA, 25 bp, Homo sapien
gtcacatgaggactgtaacccagca

SEQ ID NO: 2629120 - DNA, 25 bp, Homo sapien
taaggtttggcactgagtacgccct

SEQ ID NO: 2629121 - DNA, 25 bp, Homo sapien
cagaacctggccgttttatggtaag

SEQ ID NO: 2629122 - DNA, 25 bp, Homo sapien
tggaactatatgatgaccctctgaa

SEQ ID NO: 2629123 - DNA, 25 bp, Homo sapien
acttactgtctgctctgtcaccggg

SEQ ID NO: 2629124 - DNA, 25 bp, Homo sapien
tgttttcaatgtcctgctcaaattc

SEQ ID NO: 2629125 - DNA, 25 bp, Homo sapien
atcacccgattttattctgttttca

SEQ ID NO: 2629126 - DNA, 25 bp, Homo sapien
gttttcaatgtcctgctcaaattcc

SEQ ID NO: 2629127 - DNA, 25 bp, Homo sapien
ttctctatcacaatcacccgatttt

SEQ ID NO: 2629128 - DNA, 25 bp, Homo sapien
ttgtaagaaccccacaattctgtga

SEQ ID NO: 2629129 - DNA, 25 bp, Homo sapien
tagctttcatggtcacttcagcttc

SEQ ID NO: 2629130 - DNA, 25 bp, Homo sapien
cccaaagcaaatcacccggtatagc

SEQ ID NO: 2629131 - DNA, 25 bp, Homo sapien
aaatcacccggtatagctttcatgg

SEQ ID NO: 2629132 - DNA, 25 bp, Homo sapien
aatgtaaggatccacgaaggcttgt

SEQ ID NO: 2629133 - DNA, 25 bp, Homo sapien
gcttgtatcctgaacccattatgaa

SEQ ID NO: 2629134 - DNA, 25 bp, Homo sapien
ggcttgctccttaatagatcttgtg

SEQ ID NO: 2629135 - DNA, 25 bp, Homo sapien
tgcccactagaagacacacacttgg

SEQ ID NO: 2629136 - DNA, 25 bp, Homo sapien
caaggggactgtatcttcccctgat

SEQ ID NO: 2629137 - DNA, 25 bp, Homo sapien
ctgggccagcaacttgacaagctac

SEQ ID NO: 2629138 - DNA, 25 bp, Homo sapien
gggccagcaacttgacaagctacca

SEQ ID NO: 2629139 - DNA, 25 bp, Homo sapien
cagcaacttgacaagctaccaaggg

SEQ ID NO: 2629140 - DNA, 25 bp, Homo sapien
cctgatatctggacaggacactgtc

SEQ ID NO: 2629141 - DNA, 25 bp, Homo sapien
caggaagtcaggctaggaattaagg

SEQ ID NO: 2629142 - DNA, 25 bp, Homo sapien
tgggaacttgatattacttgacctc

SEQ ID NO: 2629143 - DNA, 25 bp, Homo sapien
tctcatgctgtagcacataggagaa

SEQ ID NO: 2629144 - DNA, 25 bp, Homo sapien
ttccctgtgctctcatcagaaatac

SEQ ID NO: 2629145 - DNA, 25 bp, Homo sapien
cttccctgtgctctcatcagaaata

SEQ ID NO: 2629146 - DNA, 25 bp, Homo sapien
tttgtccagtatctagaacttgctg

SEQ ID NO: 2629147 - DNA, 25 bp, Homo sapien
acttgctgctacaatcttggtgagt

SEQ ID NO: 2629148 - DNA, 25 bp, Homo sapien
agtggagggaggtgaacattttgtc

SEQ ID NO: 2629149 - DNA, 25 bp, Homo sapien
ttcagcattacattctaaagaaaca

SEQ ID NO: 2629150 - DNA, 25 bp, Homo sapien
tgagaatcactgaggaacgagcagc

SEQ ID NO: 2629151 - DNA, 25 bp, Homo sapien
ccccgtcagtgaaggccagtggagt

SEQ ID NO: 2629152 - DNA, 25 bp, Homo sapien
cagtcacatacgtggaggctcttga

SEQ ID NO: 2629153 - DNA, 25 bp, Homo sapien
tggagtcacagtcacatacgtggag

SEQ ID NO: 2629154 - DNA, 25 bp, Homo sapien
gaaaggctgatttcaatgatgttaa

SEQ ID NO: 2629155 - DNA, 25 bp, Homo sapien
gaggaaaggctgatttcaatgatgt

SEQ ID NO: 2629156 - DNA, 25 bp, Homo sapien
ttaagaggaaaggctgatttcaatg

SEQ ID NO: 2629157 - DNA, 25 bp, Homo sapien
taagaggaaaggctgatttcaatga

SEQ ID NO: 2629158 - DNA, 25 bp, Homo sapien
ttttaaccgctcctttatagctctg

SEQ ID NO: 2629159 - DNA, 25 bp, Homo sapien
accgctcctttatagctctgcccat

SEQ ID NO: 2629160 - DNA, 25 bp, Homo sapien
taaccgctcctttatagctctgccc

SEQ ID NO: 2629161 - DNA, 25 bp, Homo sapien
ttaaccgctcctttatagctctgcc

SEQ ID NO: 2629162 - DNA, 25 bp, Homo sapien
atttccactacatttcccctgttct

SEQ ID NO: 2629163 - DNA, 25 bp, Homo sapien
tctcataaccgctttccttcataaa

SEQ ID NO: 2629164 - DNA, 25 bp, Homo sapien
ttctcataaccgctttccttcataa

SEQ ID NO: 2629165 - DNA, 25 bp, Homo sapien
gatgatgaaacaattagaaacattg

SEQ ID NO: 2629166 - DNA, 25 bp, Homo sapien
tgatagacaatcatctatcaaagat

SEQ ID NO: 2629167 - DNA, 25 bp, Homo sapien
tactgatgagtaacccactaattcc

SEQ ID NO: 2629168 - DNA, 25 bp, Homo sapien
aaaaaacccatctgatagacaatca

SEQ ID NO: 2629169 - DNA, 25 bp, Homo sapien
ctgccaagctggctgacagggtagt

SEQ ID NO: 2629170 - DNA, 25 bp, Homo sapien
tgccaagctggctgacagggtagtc

SEQ ID NO: 2629171 - DNA, 25 bp, Homo sapien
tccaggttgcagaagcgaaggcgaa

SEQ ID NO: 2629172 - DNA, 25 bp, Homo sapien
tcaaggaggccagttcgagaactgc

SEQ ID NO: 2629173 - DNA, 25 bp, Homo sapien
ctctgatcagagagcgcgggttcgc

SEQ ID NO: 2629174 - DNA, 25 bp, Homo sapien
tccgagcttcgcctctgatcagaga

SEQ ID NO: 2629175 - DNA, 25 bp, Homo sapien
tgcggcccgcacaaacgcgcaaaag

SEQ ID NO: 2629176 - DNA, 25 bp, Homo sapien
gcgcgctgtgtccacgcgcacagct

SEQ ID NO: 2629177 - DNA, 25 bp, Homo sapien
gggattcttccccgcgcaacagcag

SEQ ID NO: 2629178 - DNA, 25 bp, Homo sapien
ccagttccatcggtgccaacgtgcg

SEQ ID NO: 2629179 - DNA, 25 bp, Homo sapien
cccagttcatgcggactggtggctg

SEQ ID NO: 2629180 - DNA, 25 bp, Homo sapien
catgcatccaggtctgctgtagttt

SEQ ID NO: 2629181 - DNA, 25 bp, Homo sapien
atccaggtctgctgtagtttgacaa

SEQ ID NO: 2629182 - DNA, 25 bp, Homo sapien
ccaggtctgctgtagtttgacaata

SEQ ID NO: 2629183 - DNA, 25 bp, Homo sapien
tctgctgtagtttgacaatatagtt

SEQ ID NO: 2629184 - DNA, 25 bp, Homo sapien
aatccagctcacaaagaagtgtata

SEQ ID NO: 2629185 - DNA, 25 bp, Homo sapien
atccagctcacaaagaagtgtatac

SEQ ID NO: 2629186 - DNA, 25 bp, Homo sapien
ctgtctctattaaaaatacatatat

SEQ ID NO: 2629187 - DNA, 25 bp, Homo sapien
tcagcctgggcaacctggctaaacc

SEQ ID NO: 2629188 - DNA, 25 bp, Homo sapien
ctgggcgtggtggcctgcacctgta

SEQ ID NO: 2629189 - DNA, 25 bp, Homo sapien
aaaaatacatatatacaaaaattag

SEQ ID NO: 2629190 - DNA, 25 bp, Homo sapien
tctggagcagatataaggcatcgaa

SEQ ID NO: 2629191 - DNA, 25 bp, Homo sapien
ccttctagaatagaggatagagatc

SEQ ID NO: 2629192 - DNA, 25 bp, Homo sapien
tgacttggcttcaccacatcaaaca

SEQ ID NO: 2629193 - DNA, 25 bp, Homo sapien
ggcatcgaacaaaaactcctttgac

SEQ ID NO: 2629194 - DNA, 25 bp, Homo sapien
tatgcaggccttcaatatggaacac

SEQ ID NO: 2629195 - DNA, 25 bp, Homo sapien
gcttaatgctttggcttcaactgcc

SEQ ID NO: 2629196 - DNA, 25 bp, Homo sapien
tgccccaacctgtgtagacaaaagg

SEQ ID NO: 2629197 - DNA, 25 bp, Homo sapien
tcccactgtagcgagtctttgctgc

SEQ ID NO: 2629198 - DNA, 25 bp, Homo sapien
actgcggccagtctaggagtagcta

SEQ ID NO: 2629199 - DNA, 25 bp, Homo sapien
tgcggccagtctaggagtagctatt

SEQ ID NO: 2629200 - DNA, 25 bp, Homo sapien
gcggccagtctaggagtagctattc

SEQ ID NO: 2629201 - DNA, 25 bp, Homo sapien
cactgcggccagtctaggagtagct

SEQ ID NO: 2629202 - DNA, 25 bp, Homo sapien
tagtcccatgatttttagtcctacc

SEQ ID NO: 2629203 - DNA, 25 bp, Homo sapien
ttagaacttctgacgtagtcccatg

SEQ ID NO: 2629204 - DNA, 25 bp, Homo sapien
ttaagcactatacccatgcctggag

SEQ ID NO: 2629205 - DNA, 25 bp, Homo sapien
taaaaggcatttaagcactataccc

SEQ ID NO: 2629206 - DNA, 25 bp, Homo sapien
gaataccagacttttgtcggatgta

SEQ ID NO: 2629207 - DNA, 25 bp, Homo sapien
ctgaataccagacttttgtcggatg

SEQ ID NO: 2629208 - DNA, 25 bp, Homo sapien
tctgaataccagacttttgtcggat

SEQ ID NO: 2629209 - DNA, 25 bp, Homo sapien
attctgaataccagacttttgtcgg

SEQ ID NO: 2629210 - DNA, 25 bp, Homo sapien
tacaggaggaagtttgagccaatgg

SEQ ID NO: 2629211 - DNA, 25 bp, Homo sapien
gagctacaggaggaagtttgagcca

SEQ ID NO: 2629212 - DNA, 25 bp, Homo sapien
caggaggaagtttgagccaatggca

SEQ ID NO: 2629213 - DNA, 25 bp, Homo sapien
gctacaggaggaagtttgagccaat

SEQ ID NO: 2629214 - DNA, 25 bp, Homo sapien
tacacaaagcaaacgatcctcaggc

SEQ ID NO: 2629215 - DNA, 25 bp, Homo sapien
tatacctctacagaggaagagggcc

SEQ ID NO: 2629216 - DNA, 25 bp, Homo sapien
gaaatattatgacaacagctggcac

SEQ ID NO: 2629217 - DNA, 25 bp, Homo sapien
cagaaatttaagtgatgggcccaag

SEQ ID NO: 2629218 - DNA, 25 bp, Homo sapien
ctcaaaggagtctattgcttgttct

SEQ ID NO: 2629219 - DNA, 25 bp, Homo sapien
taagtagcacagttgggccatgcca

SEQ ID NO: 2629220 - DNA, 25 bp, Homo sapien
gattccctttaagctgagcagcagg

SEQ ID NO: 2629221 - DNA, 25 bp, Homo sapien
caaagcaggcttctgtctaaagtgc

SEQ ID NO: 2629222 - DNA, 25 bp, Homo sapien
gacttggtgtcaactggtacagacc

SEQ ID NO: 2629223 - DNA, 25 bp, Homo sapien
taacatcagcacaaaccagcactgt

SEQ ID NO: 2629224 - DNA, 25 bp, Homo sapien
ttataacatcagcacaaaccagcac

SEQ ID NO: 2629225 - DNA, 25 bp, Homo sapien
catcagcacaaaccagcactgtggc

SEQ ID NO: 2629226 - DNA, 25 bp, Homo sapien
ttcctgctcctttataacatcagca

SEQ ID NO: 2629227 - DNA, 25 bp, Homo sapien
gctgtgaagtgacaaagataaccgg

SEQ ID NO: 2629228 - DNA, 25 bp, Homo sapien
gtgaagtgacaaagataaccggcct

SEQ ID NO: 2629229 - DNA, 25 bp, Homo sapien
atatttaagcttcatctcatctatt

SEQ ID NO: 2629230 - DNA, 25 bp, Homo sapien
gagctgtgaagtgacaaagataacc

SEQ ID NO: 2629231 - DNA, 25 bp, Homo sapien
tgcctgtggacttgcacccagaagg

SEQ ID NO: 2629232 - DNA, 25 bp, Homo sapien
tatcttcccaatatggactccctgg

SEQ ID NO: 2629233 - DNA, 25 bp, Homo sapien
cccagaaggcacttgtaggtagtca

SEQ ID NO: 2629234 - DNA, 25 bp, Homo sapien
taagatgcgcccagtgaattcagca

SEQ ID NO: 2629235 - DNA, 25 bp, Homo sapien
gccacctttcatgagactgtttact

SEQ ID NO: 2629236 - DNA, 25 bp, Homo sapien
tcctgataaaaggtgactgccctct

SEQ ID NO: 2629237 - DNA, 25 bp, Homo sapien
ctttgcaaattcagtctgtgctcct

SEQ ID NO: 2629238 - DNA, 25 bp, Homo sapien
tattaatagttgtcaccatcacctg

SEQ ID NO: 2629239 - DNA, 25 bp, Homo sapien
ggtatttatctgctgactactatca

SEQ ID NO: 2629240 - DNA, 25 bp, Homo sapien
tattgtttctaattccagagttgaa

SEQ ID NO: 2629241 - DNA, 25 bp, Homo sapien
tcagcaacatccttagatattgttt

SEQ ID NO: 2629242 - DNA, 25 bp, Homo sapien
tccagagttgaaccatctagaatga

SEQ ID NO: 2629243 - DNA, 25 bp, Homo sapien
ggttgaccctcacaagacttattgt

SEQ ID NO: 2629244 - DNA, 25 bp, Homo sapien
tcagttccagtttctaggctcagga

SEQ ID NO: 2629245 - DNA, 25 bp, Homo sapien
gacttattgttatatgatcaggaag

SEQ ID NO: 2629246 - DNA, 25 bp, Homo sapien
caagggttgaccctcacaagactta

SEQ ID NO: 2629247 - DNA, 25 bp, Homo sapien
tgagttgctgtacacacaagactgt

SEQ ID NO: 2629248 - DNA, 25 bp, Homo sapien
gaccattcccatcattgagtgtgga

SEQ ID NO: 2629249 - DNA, 25 bp, Homo sapien
ctttagctggttacaagactccttc

SEQ ID NO: 2629250 - DNA, 25 bp, Homo sapien
tgtgtgtgaccaacagtcctgtcca

SEQ ID NO: 2629251 - DNA, 25 bp, Homo sapien
ggagctttgccataattcttgtagc

SEQ ID NO: 2629252 - DNA, 25 bp, Homo sapien
aaaaaaaaccagctttctagctctg

SEQ ID NO: 2629253 - DNA, 25 bp, Homo sapien
ctggagctttgccataattcttgta

SEQ ID NO: 2629254 - DNA, 25 bp, Homo sapien
aaaaccagctttctagctctggagc

SEQ ID NO: 2629255 - DNA, 25 bp, Homo sapien
tcccaaatcagtcattctcaatctc

SEQ ID NO: 2629256 - DNA, 25 bp, Homo sapien
atctctaaattcttggtctttctgc

SEQ ID NO: 2629257 - DNA, 25 bp, Homo sapien
ggatcccacagaagtttcttggtta

SEQ ID NO: 2629258 - DNA, 25 bp, Homo sapien
gcagatcacatcacactgatttggt

SEQ ID NO: 2629259 - DNA, 25 bp, Homo sapien
cttttctccagactttcaacagcct

SEQ ID NO: 2629260 - DNA, 25 bp, Homo sapien
cttctcttttctccagactttcaac

SEQ ID NO: 2629261 - DNA, 25 bp, Homo sapien
tcttttctccagactttcaacagcc

SEQ ID NO: 2629262 - DNA, 25 bp, Homo sapien
tctcttttctccagactttcaacag

SEQ ID NO: 2629263 - DNA, 25 bp, Homo sapien
ggcagtttacatggagcatcatcat

SEQ ID NO: 2629264 - DNA, 25 bp, Homo sapien
tcaaccacttgtgatcatgttacca

SEQ ID NO: 2629265 - DNA, 25 bp, Homo sapien
gtttacatggagcatcatcatcaaa

SEQ ID NO: 2629266 - DNA, 25 bp, Homo sapien
gatcatgttaccagttaaaacttta

SEQ ID NO: 2629267 - DNA, 25 bp, Homo sapien
tgcaaacctgacctaatggaatagc

SEQ ID NO: 2629268 - DNA, 25 bp, Homo sapien
caggagctccacgagatcctctact

SEQ ID NO: 2629269 - DNA, 25 bp, Homo sapien
tactgtgcaaacctgacctaatgga

SEQ ID NO: 2629270 - DNA, 25 bp, Homo sapien
gagatcctctactggcttcattttt

SEQ ID NO: 2629271 - DNA, 25 bp, Homo sapien
tgccagtgccaaggtcaacagcagc

SEQ ID NO: 2629272 - DNA, 25 bp, Homo sapien
aaagcatcacttgatcctgccagtg

SEQ ID NO: 2629273 - DNA, 25 bp, Homo sapien
gccagtgccaaggtcaacagcagct

SEQ ID NO: 2629274 - DNA, 25 bp, Homo sapien
agaaaaagcatcacttgatcctgcc

SEQ ID NO: 2629275 - DNA, 25 bp, Homo sapien
cactgcatagtagcctgagccatac

SEQ ID NO: 2629276 - DNA, 25 bp, Homo sapien
tgagccataccacagccatactgca

SEQ ID NO: 2629277 - DNA, 25 bp, Homo sapien
gcatagtagcctgagccataccaca

SEQ ID NO: 2629278 - DNA, 25 bp, Homo sapien
gagccataccacagccatactgcag

SEQ ID NO: 2629279 - DNA, 25 bp, Homo sapien
tctagccagaggtggacaaccaggt

SEQ ID NO: 2629280 - DNA, 25 bp, Homo sapien
ccaggtgtgtctatgaacaggtact

SEQ ID NO: 2629281 - DNA, 25 bp, Homo sapien
gcacagttgaacttgggttggtctc

SEQ ID NO: 2629282 - DNA, 25 bp, Homo sapien
ccccttgttgtagggaatgatctca

SEQ ID NO: 2629283 - DNA, 25 bp, Homo sapien
caaggcctcctggtctgtccagaag

SEQ ID NO: 2629284 - DNA, 25 bp, Homo sapien
gaagaagtgctctaagccccaaggc

SEQ ID NO: 2629285 - DNA, 25 bp, Homo sapien
tccatggaaatgtgatgcgtacact

SEQ ID NO: 2629286 - DNA, 25 bp, Homo sapien
tagaagagggaaacacaacaaatgc

SEQ ID NO: 2629287 - DNA, 25 bp, Homo sapien
caggttttcttgatagcctgaatgt

SEQ ID NO: 2629288 - DNA, 25 bp, Homo sapien
gctttgacctattattattccctaa

SEQ ID NO: 2629289 - DNA, 25 bp, Homo sapien
tttctggcatagctgtagtctgtag

SEQ ID NO: 2629290 - DNA, 25 bp, Homo sapien
tgacttgtgtgaactggccagctca

SEQ ID NO: 2629291 - DNA, 25 bp, Homo sapien
gggacctgcgctgacttgtgtgaac

SEQ ID NO: 2629292 - DNA, 25 bp, Homo sapien
tgtagtctgtagacatcatgctggg

SEQ ID NO: 2629293 - DNA, 25 bp, Homo sapien
aaaaacgtgcagcaaaaagtgtgtg

SEQ ID NO: 2629294 - DNA, 25 bp, Homo sapien
aaaaaacgtgcagcaaaaagtgtgt

SEQ ID NO: 2629295 - DNA, 25 bp, Homo sapien
taaaaaacgtgcagcaaaaagtgtg

SEQ ID NO: 2629296 - DNA, 25 bp, Homo sapien
ctgtacttcttaaatcctgctcatc

SEQ ID NO: 2629297 - DNA, 25 bp, Homo sapien
cctttgatgaccaaatgcgaaaagc

SEQ ID NO: 2629298 - DNA, 25 bp, Homo sapien
cgagagccagttgtctcagacaggg

SEQ ID NO: 2629299 - DNA, 25 bp, Homo sapien
tcagacagggtcaaaagttcacttc

SEQ ID NO: 2629300 - DNA, 25 bp, Homo sapien
tgacagaacaagatccacgagagcc

SEQ ID NO: 2629301 - DNA, 25 bp, Homo sapien
ctttactgattgctgttgaactgtg

SEQ ID NO: 2629302 - DNA, 25 bp, Homo sapien
cagattattgatgattatccagtca

SEQ ID NO: 2629303 - DNA, 25 bp, Homo sapien
tagaggacaccaaactggtatttac

SEQ ID NO: 2629304 - DNA, 25 bp, Homo sapien
tgcttacttgttgtgtgaaggaaac

SEQ ID NO: 2629305 - DNA, 25 bp, Homo sapien
tcattgccaatggtgtgtttgccaa

SEQ ID NO: 2629306 - DNA, 25 bp, Homo sapien
tgtgatatctggctggtcttactcc

SEQ ID NO: 2629307 - DNA, 25 bp, Homo sapien
gaacacagctagtcttggcatccag

SEQ ID NO: 2629308 - DNA, 25 bp, Homo sapien
tagacccttcctgagagccttagct

SEQ ID NO: 2629309 - DNA, 25 bp, Homo sapien
tcttgaataaatttcgttctcttgg

SEQ ID NO: 2629310 - DNA, 25 bp, Homo sapien
cgttctcttggaagtaggtatttca

SEQ ID NO: 2629311 - DNA, 25 bp, Homo sapien
gccactctgtgtctcgtttccaagc

SEQ ID NO: 2629312 - DNA, 25 bp, Homo sapien
cataaacaggttggtctgggctcct

SEQ ID NO: 2629313 - DNA, 25 bp, Homo sapien
ttgtctggttttgcatgcagcagca

SEQ ID NO: 2629314 - DNA, 25 bp, Homo sapien
catatgtggtgctcgttgcttggta

SEQ ID NO: 2629315 - DNA, 25 bp, Homo sapien
gcttggtacttgtttactaggctga

SEQ ID NO: 2629316 - DNA, 25 bp, Homo sapien
cacccgcgtgaatgcatttgtctgg

SEQ ID NO: 2629317 - DNA, 25 bp, Homo sapien
ggtgactccttgagacaggtgctaa

SEQ ID NO: 2629318 - DNA, 25 bp, Homo sapien
ggtggagcgcctcacagtgtactta

SEQ ID NO: 2629319 - DNA, 25 bp, Homo sapien
cagaaggtacaaaggtgcagaagac

SEQ ID NO: 2629320 - DNA, 25 bp, Homo sapien
cacaatgaacaaaactgcgctggct

SEQ ID NO: 2629321 - DNA, 25 bp, Homo sapien
gctctgctaaggatagctgctgtgg

SEQ ID NO: 2629322 - DNA, 25 bp, Homo sapien
ccagggtgctctgctaaggatagct

SEQ ID NO: 2629323 - DNA, 25 bp, Homo sapien
gattaacactttgcagactccaggg

SEQ ID NO: 2629324 - DNA, 25 bp, Homo sapien
ggattaacactttgcagactccagg

SEQ ID NO: 2629325 - DNA, 25 bp, Homo sapien
taccatttctaccagctgatcgcat

SEQ ID NO: 2629326 - DNA, 25 bp, Homo sapien
ccatttctaccagctgatcgcatcg

SEQ ID NO: 2629327 - DNA, 25 bp, Homo sapien
gataccatttctaccagctgatcgc

SEQ ID NO: 2629328 - DNA, 25 bp, Homo sapien
atttctaccagctgatcgcatcggc

SEQ ID NO: 2629329 - DNA, 25 bp, Homo sapien
cttcaagtactgtcatgaatacaac

SEQ ID NO: 2629330 - DNA, 25 bp, Homo sapien
tagcacttcaagtactgtcatgaat

SEQ ID NO: 2629331 - DNA, 25 bp, Homo sapien
cacttcaagtactgtcatgaataca

SEQ ID NO: 2629332 - DNA, 25 bp, Homo sapien
tcaagtactgtcatgaatacaacag

SEQ ID NO: 2629333 - DNA, 25 bp, Homo sapien
taactgttgttacctaggaagagca

SEQ ID NO: 2629334 - DNA, 25 bp, Homo sapien
cactcgtaagggtagagaattacca

SEQ ID NO: 2629335 - DNA, 25 bp, Homo sapien
gatactgtggcagctatttccctca

SEQ ID NO: 2629336 - DNA, 25 bp, Homo sapien
gctgcaattctgtgatgacactcgt

SEQ ID NO: 2629337 - DNA, 25 bp, Homo sapien
tacccctacactaagtagattcacc

SEQ ID NO: 2629338 - DNA, 25 bp, Homo sapien
tttacccctacactaagtagattca

SEQ ID NO: 2629339 - DNA, 25 bp, Homo sapien
acactaagtagattcaccactgtga

SEQ ID NO: 2629340 - DNA, 25 bp, Homo sapien
ccctacactaagtagattcaccact

SEQ ID NO: 2629341 - DNA, 25 bp, Homo sapien
cctcgccagagttttgaataatatg

SEQ ID NO: 2629342 - DNA, 25 bp, Homo sapien
tgccctcgccagagttttgaataat

SEQ ID NO: 2629343 - DNA, 25 bp, Homo sapien
gactgccctcgccagagttttgaat

SEQ ID NO: 2629344 - DNA, 25 bp, Homo sapien
ttgcctgactgccctcgccagagtt

SEQ ID NO: 2629345 - DNA, 25 bp, Homo sapien
caggtgaacggcacttggtgaattt

SEQ ID NO: 2629346 - DNA, 25 bp, Homo sapien
atgaaaaagtctctcgctcaggtga

SEQ ID NO: 2629347 - DNA, 25 bp, Homo sapien
ggtgaatttaggctccttagaagaa

SEQ ID NO: 2629348 - DNA, 25 bp, Homo sapien
tctcgctcaggtgaacggcacttgg

SEQ ID NO: 2629349 - DNA, 25 bp, Homo sapien
cagctgtatgggtcctaggttcttt

SEQ ID NO: 2629350 - DNA, 25 bp, Homo sapien
gctgtatgggtcctaggttctttgt

SEQ ID NO: 2629351 - DNA, 25 bp, Homo sapien
acagctgtatgggtcctaggttctt

SEQ ID NO: 2629352 - DNA, 25 bp, Homo sapien
tgtatgggtcctaggttctttgtac

SEQ ID NO: 2629353 - DNA, 25 bp, Homo sapien
gcagaaacataatcagggcattctt

SEQ ID NO: 2629354 - DNA, 25 bp, Homo sapien
agcagaaacataatcagggcattct

SEQ ID NO: 2629355 - DNA, 25 bp, Homo sapien
tcatcaacagagaaacacttttcat

SEQ ID NO: 2629356 - DNA, 25 bp, Homo sapien
tccagatggaggtaaacgatgaatt

SEQ ID NO: 2629357 - DNA, 25 bp, Homo sapien
gctagttagcttgatacaataaggt

SEQ ID NO: 2629358 - DNA, 25 bp, Homo sapien
cactgtaccaccattgctagttagc

SEQ ID NO: 2629359 - DNA, 25 bp, Homo sapien
tttttgctctgatatcataaatgca

SEQ ID NO: 2629360 - DNA, 25 bp, Homo sapien
gctctgatatcataaatgcatcagg

SEQ ID NO: 2629361 - DNA, 25 bp, Homo sapien
tctttttgctctgatatcataaatg

SEQ ID NO: 2629362 - DNA, 25 bp, Homo sapien
tttgctctgatatcataaatgcatc

SEQ ID NO: 2629363 - DNA, 25 bp, Homo sapien
acatctgatcactatttacaagatc

SEQ ID NO: 2629364 - DNA, 25 bp, Homo sapien
tctgatcactatttacaagatctgc

SEQ ID NO: 2629365 - DNA, 25 bp, Homo sapien
gatcactatttacaagatctgccat

SEQ ID NO: 2629366 - DNA, 25 bp, Homo sapien
ttttggagtaaaacatctgatcact

SEQ ID NO: 2629367 - DNA, 25 bp, Homo sapien
aatatctgcattgcgtggtgcttcc

SEQ ID NO: 2629368 - DNA, 25 bp, Homo sapien
ccatctcacttggatatctgcatga

SEQ ID NO: 2629369 - DNA, 25 bp, Homo sapien
cgttcagtaaagtccagttgagggc

SEQ ID NO: 2629370 - DNA, 25 bp, Homo sapien
tgcatgaatcccagttaaactgacg

SEQ ID NO: 2629371 - DNA, 25 bp, Homo sapien
actgaactcgccataatttccagag

SEQ ID NO: 2629372 - DNA, 25 bp, Homo sapien
aactgatgttgtcaatatagggtcc

SEQ ID NO: 2629373 - DNA, 25 bp, Homo sapien
tatccactttcaatgagtacactgg

SEQ ID NO: 2629374 - DNA, 25 bp, Homo sapien
cagagtttcgttgtttggatctcac

SEQ ID NO: 2629375 - DNA, 25 bp, Homo sapien
ttcacatgtaaattggctcatctga

SEQ ID NO: 2629376 - DNA, 25 bp, Homo sapien
tcttcacatgtaaattggctcatct

SEQ ID NO: 2629377 - DNA, 25 bp, Homo sapien
attggctcatctgaggaagtgttac

SEQ ID NO: 2629378 - DNA, 25 bp, Homo sapien
cttcttcacatgtaaattggctcat

SEQ ID NO: 2629379 - DNA, 25 bp, Homo sapien
aagataataattaagagccatggaa

SEQ ID NO: 2629380 - DNA, 25 bp, Homo sapien
gataataattaagagccatggaaag

SEQ ID NO: 2629381 - DNA, 25 bp, Homo sapien
gcatcactgttagcccaaatattcc

SEQ ID NO: 2629382 - DNA, 25 bp, Homo sapien
taagaatacaaatagcatcactgtt

SEQ ID NO: 2629383 - DNA, 25 bp, Homo sapien
tgactccaaatcaaaacccaggttc

SEQ ID NO: 2629384 - DNA, 25 bp, Homo sapien
ctctatgaaataagtttgtgacccc

SEQ ID NO: 2629385 - DNA, 25 bp, Homo sapien
aaatcatgcattcatagttggcaca

SEQ ID NO: 2629386 - DNA, 25 bp, Homo sapien
tgtgtcatgctgctgtttcgctgtt

SEQ ID NO: 2629387 - DNA, 25 bp, Homo sapien
ttgaggagatctggatcgattcctt

SEQ ID NO: 2629388 - DNA, 25 bp, Homo sapien
gaggagatctggatcgattccttta

SEQ ID NO: 2629389 - DNA, 25 bp, Homo sapien
aggagatctggatcgattcctttaa

SEQ ID NO: 2629390 - DNA, 25 bp, Homo sapien
tctggatcgattcctttaatctttg

SEQ ID NO: 2629391 - DNA, 25 bp, Homo sapien
tcgcattgagtatgaggccctgtgg

SEQ ID NO: 2629392 - DNA, 25 bp, Homo sapien
tctgcttggataacactgggctgct

SEQ ID NO: 2629393 - DNA, 25 bp, Homo sapien
tctggtcaaggcataagagatctgc

SEQ ID NO: 2629394 - DNA, 25 bp, Homo sapien
tttgtcaggcaagggcaaggcagtc

SEQ ID NO: 2629395 - DNA, 25 bp, Homo sapien
tgattttgttcagttggtctgtgct

SEQ ID NO: 2629396 - DNA, 25 bp, Homo sapien
taaatacgtagctcttgggaaacca

SEQ ID NO: 2629397 - DNA, 25 bp, Homo sapien
aatgcttgctttgaggccagtccac

SEQ ID NO: 2629398 - DNA, 25 bp, Homo sapien
acagattccgctgcagaggctatag

SEQ ID NO: 2629399 - DNA, 25 bp, Homo sapien
gatatcccaatgctctcaagaatga

SEQ ID NO: 2629400 - DNA, 25 bp, Homo sapien
ttgataacagaagcacactatcagg

SEQ ID NO: 2629401 - DNA, 25 bp, Homo sapien
tatgttggtgtttgataacagaagc

SEQ ID NO: 2629402 - DNA, 25 bp, Homo sapien
tttatgttggtgtttgataacagaa

SEQ ID NO: 2629403 - DNA, 25 bp, Homo sapien
ataacagaagcacactatcaggaat

SEQ ID NO: 2629404 - DNA, 25 bp, Homo sapien
aaatctgtggtccggttctgctcag

SEQ ID NO: 2629405 - DNA, 25 bp, Homo sapien
agaaatctgtggtccggttctgctc

SEQ ID NO: 2629406 - DNA, 25 bp, Homo sapien
atctgtggtccggttctgctcagtg

SEQ ID NO: 2629407 - DNA, 25 bp, Homo sapien
tctgtggtccggttctgctcagtgg

SEQ ID NO: 2629408 - DNA, 25 bp, Homo sapien
gagaacaaggagtatcgaggagttt

SEQ ID NO: 2629409 - DNA, 25 bp, Homo sapien
attcacagcccgtctgcacagcctt

SEQ ID NO: 2629410 - DNA, 25 bp, Homo sapien
aacaaggagtatcgaggagtttggc

SEQ ID NO: 2629411 - DNA, 25 bp, Homo sapien
ttcacagcccgtctgcacagccttg

SEQ ID NO: 2629412 - DNA, 25 bp, Homo sapien
gtcaaacagatctgtctgagatgtg

SEQ ID NO: 2629413 - DNA, 25 bp, Homo sapien
agatgacaagtagagcactcaaatc

SEQ ID NO: 2629414 - DNA, 25 bp, Homo sapien
tccataagccagattaattttgtta

SEQ ID NO: 2629415 - DNA, 25 bp, Homo sapien
caagtagagcactcaaatcctgtca

SEQ ID NO: 2629416 - DNA, 25 bp, Homo sapien
tcaggtactcagagattcaaataat

SEQ ID NO: 2629417 - DNA, 25 bp, Homo sapien
gtactcagagattcaaataattcac

SEQ ID NO: 2629418 - DNA, 25 bp, Homo sapien
caggtactcagagattcaaataatt

SEQ ID NO: 2629419 - DNA, 25 bp, Homo sapien
ggtactcagagattcaaataattca

SEQ ID NO: 2629420 - DNA, 25 bp, Homo sapien
agactccatctattgatggcaggag

SEQ ID NO: 2629421 - DNA, 25 bp, Homo sapien
gccacgcagactcaagtagcgaaga

SEQ ID NO: 2629422 - DNA, 25 bp, Homo sapien
tattggtaaaagcagggtacaaggc

SEQ ID NO: 2629423 - DNA, 25 bp, Homo sapien
aagaaacagactccatctattgatg

SEQ ID NO: 2629424 - DNA, 25 bp, Homo sapien
cataatgtagaatcattatgagctt

SEQ ID NO: 2629425 - DNA, 25 bp, Homo sapien
taatgtagaatcattatgagcttat

SEQ ID NO: 2629426 - DNA, 25 bp, Homo sapien
atgtagaatcattatgagcttattt

SEQ ID NO: 2629427 - DNA, 25 bp, Homo sapien
aatgtagaatcattatgagcttatt

SEQ ID NO: 2629428 - DNA, 25 bp, Homo sapien
tctcattctctagcaggctcagcca

SEQ ID NO: 2629429 - DNA, 25 bp, Homo sapien
ccatcgttcaggtaagtggcttagc

SEQ ID NO: 2629430 - DNA, 25 bp, Homo sapien
ttcttaatgcattggcggttagcca

SEQ ID NO: 2629431 - DNA, 25 bp, Homo sapien
tagttttactcatctgggccgggct

SEQ ID NO: 2629432 - DNA, 25 bp, Homo sapien
atctcttgatgcactatctccctcc

SEQ ID NO: 2629433 - DNA, 25 bp, Homo sapien
gatctcttgatgcactatctccctc

SEQ ID NO: 2629434 - DNA, 25 bp, Homo sapien
tctcttgatgcactatctccctcct

SEQ ID NO: 2629435 - DNA, 25 bp, Homo sapien
ccccacagtctccctttccgctgcc

SEQ ID NO: 2629436 - DNA, 25 bp, Homo sapien
agaattcactctcagtcctgaagcc

SEQ ID NO: 2629437 - DNA, 25 bp, Homo sapien
tctgctggcttgagtcccggggctc

SEQ ID NO: 2629438 - DNA, 25 bp, Homo sapien
acaggagcgtgacagttccgtttcc

SEQ ID NO: 2629439 - DNA, 25 bp, Homo sapien
acacagttggtccttcgccgctcgc

SEQ ID NO: 2629440 - DNA, 25 bp, Homo sapien
ggcaagtgaaagtcccatttccttc

SEQ ID NO: 2629441 - DNA, 25 bp, Homo sapien
taagtttgtcaagattcacactgct

SEQ ID NO: 2629442 - DNA, 25 bp, Homo sapien
gtttgtcaagattcacactgctaat

SEQ ID NO: 2629443 - DNA, 25 bp, Homo sapien
ttgtcaagattcacactgctaatct

SEQ ID NO: 2629444 - DNA, 25 bp, Homo sapien
tttataagtttgtcaagattcacac

SEQ ID NO: 2629445 - DNA, 25 bp, Homo sapien
cttctttaatggagacctcctttgc

SEQ ID NO: 2629446 - DNA, 25 bp, Homo sapien
gcctcagaaagttgagcagtctcag

SEQ ID NO: 2629447 - DNA, 25 bp, Homo sapien
tctttcagggctatagtaaggatat

SEQ ID NO: 2629448 - DNA, 25 bp, Homo sapien
tctatgtggacttaaaacactttac

SEQ ID NO: 2629449 - DNA, 25 bp, Homo sapien
tacccatcttacatgtctttcaggg

SEQ ID NO: 2629450 - DNA, 25 bp, Homo sapien
ttattatattatgaagagtagcaca

SEQ ID NO: 2629451 - DNA, 25 bp, Homo sapien
tattatattatgaagagtagcacat

SEQ ID NO: 2629452 - DNA, 25 bp, Homo sapien
attatattatgaagagtagcacatt

SEQ ID NO: 2629453 - DNA, 25 bp, Homo sapien
ttgatattcaatggtctgttgtagc

SEQ ID NO: 2629454 - DNA, 25 bp, Homo sapien
tgatattcaatggtctgttgtagcc

SEQ ID NO: 2629455 - DNA, 25 bp, Homo sapien
gttgatattcaatggtctgttgtag

SEQ ID NO: 2629456 - DNA, 25 bp, Homo sapien
tgttgatattcaatggtctgttgta

SEQ ID NO: 2629457 - DNA, 25 bp, Homo sapien
cccacttggttaggatatatgatct

SEQ ID NO: 2629458 - DNA, 25 bp, Homo sapien
cattgattgatctgtgtatacagaa

SEQ ID NO: 2629459 - DNA, 25 bp, Homo sapien
gattgatctgtgtatacagaaccat

SEQ ID NO: 2629460 - DNA, 25 bp, Homo sapien
tagaaaacacatggtgtatcacatt

SEQ ID NO: 2629461 - DNA, 25 bp, Homo sapien
ttgtactggatcttaaagagaaagt

SEQ ID NO: 2629462 - DNA, 25 bp, Homo sapien
gccttgtactggatcttaaagagaa

SEQ ID NO: 2629463 - DNA, 25 bp, Homo sapien
ccttgtactggatcttaaagagaaa

SEQ ID NO: 2629464 - DNA, 25 bp, Homo sapien
cttgtactggatcttaaagagaaag

SEQ ID NO: 2629465 - DNA, 25 bp, Homo sapien
caacatttggcgactttttagcaga

SEQ ID NO: 2629466 - DNA, 25 bp, Homo sapien
tgtgccctagtcactaattcctggt

SEQ ID NO: 2629467 - DNA, 25 bp, Homo sapien
cctggtaaacaggaaaagcctcaat

SEQ ID NO: 2629468 - DNA, 25 bp, Homo sapien
tccacttatgaaactattgcagagg

SEQ ID NO: 2629469 - DNA, 25 bp, Homo sapien
ttcatgagactttaacttctctttt

SEQ ID NO: 2629470 - DNA, 25 bp, Homo sapien
tctcttttataagatcagcacttat

SEQ ID NO: 2629471 - DNA, 25 bp, Homo sapien
ttctcttttataagatcagcactta

SEQ ID NO: 2629472 - DNA, 25 bp, Homo sapien
ttcatgtgttctacaactgctgtca

SEQ ID NO: 2629473 - DNA, 25 bp, Homo sapien
tacacgctgttcatgtgttctacaa

SEQ ID NO: 2629474 - DNA, 25 bp, Homo sapien
tatgctttttacacgctgttcatgt

SEQ ID NO: 2629475 - DNA, 25 bp, Homo sapien
ttttatgctttttacacgctgttca

SEQ ID NO: 2629476 - DNA, 25 bp, Homo sapien
gcatgtcctgataaagtttgcttat

SEQ ID NO: 2629477 - DNA, 25 bp, Homo sapien
ttctctgcatgtcctgataaagttt

SEQ ID NO: 2629478 - DNA, 25 bp, Homo sapien
tcacttacaagtttggcaatattat

SEQ ID NO: 2629479 - DNA, 25 bp, Homo sapien
gcttatttctttcttatatccctcc

SEQ ID NO: 2629480 - DNA, 25 bp, Homo sapien
agttctgcgaattttacttggtaca

SEQ ID NO: 2629481 - DNA, 25 bp, Homo sapien
aaagtctctcattatgattgtggat

SEQ ID NO: 2629482 - DNA, 25 bp, Homo sapien
tgtctgtcacctactagttctgcga

SEQ ID NO: 2629483 - DNA, 25 bp, Homo sapien
atacgtattccgcatttattgggta

SEQ ID NO: 2629484 - DNA, 25 bp, Homo sapien
tttttctctattagttctttgtgct

SEQ ID NO: 2629485 - DNA, 25 bp, Homo sapien
ctcctttttctctattagttctttg

SEQ ID NO: 2629486 - DNA, 25 bp, Homo sapien
ttctctattagttctttgtgctttt

SEQ ID NO: 2629487 - DNA, 25 bp, Homo sapien
ttgtgcttttcttcatttaattcaa

SEQ ID NO: 2629488 - DNA, 25 bp, Homo sapien
gacttcttagctttgcatttaactc

SEQ ID NO: 2629489 - DNA, 25 bp, Homo sapien
ttcttagctttgcatttaactctga

SEQ ID NO: 2629490 - DNA, 25 bp, Homo sapien
agttgtagcttgattatttcatttt

SEQ ID NO: 2629491 - DNA, 25 bp, Homo sapien
gttgtagcttgattatttcattttg

SEQ ID NO: 2629492 - DNA, 25 bp, Homo sapien
gaatgagcatgtgtgaagccctctc

SEQ ID NO: 2629493 - DNA, 25 bp, Homo sapien
atcaaagtacagtttagactaaggg

SEQ ID NO: 2629494 - DNA, 25 bp, Homo sapien
aagccctctcacagaattgcttcta

SEQ ID NO: 2629495 - DNA, 25 bp, Homo sapien
tgtgtcctcaagtttagcagactct

SEQ ID NO: 2629496 - DNA, 25 bp, Homo sapien
tggaagggtagattgatagagtcta

SEQ ID NO: 2629497 - DNA, 25 bp, Homo sapien
gatatccggttaaatgaactactca

SEQ ID NO: 2629498 - DNA, 25 bp, Homo sapien
cacccggcctactcaagacttttga

SEQ ID NO: 2629499 - DNA, 25 bp, Homo sapien
tgtcaaagtacatttgagattgtga

SEQ ID NO: 2629500 - DNA, 25 bp, Homo sapien
cacgtgattctatagtgcagacagg

SEQ ID NO: 2629501 - DNA, 25 bp, Homo sapien
caaataaggagctgtgtataccagt

SEQ ID NO: 2629502 - DNA, 25 bp, Homo sapien
tctggtgtgcagctagcgtcatctt

SEQ ID NO: 2629503 - DNA, 25 bp, Homo sapien
tttagttaacatagcctctctgagg

SEQ ID NO: 2629504 - DNA, 25 bp, Homo sapien
cagtagaatcctgatatgattttga

SEQ ID NO: 2629505 - DNA, 25 bp, Homo sapien
ttagtctgaactcttgctagtttgg

SEQ ID NO: 2629506 - DNA, 25 bp, Homo sapien
ctttgtggcaaaacagtagaatcct

SEQ ID NO: 2629507 - DNA, 25 bp, Homo sapien
tgatttagtctgaactcttgctagt

SEQ ID NO: 2629508 - DNA, 25 bp, Homo sapien
gaatctttgccaacagaaaggcgtt

SEQ ID NO: 2629509 - DNA, 25 bp, Homo sapien
gaaaggcgttgctctaaatcgcgaa

SEQ ID NO: 2629510 - DNA, 25 bp, Homo sapien
ggtattacgaagaattgcaatctcc

SEQ ID NO: 2629511 - DNA, 25 bp, Homo sapien
caaaaccgtctacgcttaaggtgag

SEQ ID NO: 2629512 - DNA, 25 bp, Homo sapien
cagagaaccgagatatgccagcaag

SEQ ID NO: 2629513 - DNA, 25 bp, Homo sapien
ttgtcagtgacgtttgcctccagct

SEQ ID NO: 2629514 - DNA, 25 bp, Homo sapien
gatgcaccgttgacacaggtacaga

SEQ ID NO: 2629515 - DNA, 25 bp, Homo sapien
tatgtagctgacagggacttcgggc

SEQ ID NO: 2629516 - DNA, 25 bp, Homo sapien
gcaaagctttggtgaagttcaaaac

SEQ ID NO: 2629517 - DNA, 25 bp, Homo sapien
gagtctctgattagtaggtaccaca

SEQ ID NO: 2629518 - DNA, 25 bp, Homo sapien
ctgacagccttatggtagggagaca

SEQ ID NO: 2629519 - DNA, 25 bp, Homo sapien
taaagaactaggatcatgcggaatg

SEQ ID NO: 2629520 - DNA, 25 bp, Homo sapien
atcttttgaagatcgatgttgctgc

SEQ ID NO: 2629521 - DNA, 25 bp, Homo sapien
atcgtatttcagttaccaccaaatg

SEQ ID NO: 2629522 - DNA, 25 bp, Homo sapien
aatcaatgtatcgtatttcagttac

SEQ ID NO: 2629523 - DNA, 25 bp, Homo sapien
acatcttttgaagatcgatgttgct

SEQ ID NO: 2629524 - DNA, 25 bp, Homo sapien
cctgacctggtgtgcagtacctggg

SEQ ID NO: 2629525 - DNA, 25 bp, Homo sapien
cccagactgtatttgagtaggatcg

SEQ ID NO: 2629526 - DNA, 25 bp, Homo sapien
cgtgaaagggtcttagttatgacca

SEQ ID NO: 2629527 - DNA, 25 bp, Homo sapien
tagatgtggccgtcttgtatatcat

SEQ ID NO: 2629528 - DNA, 25 bp, Homo sapien
gaatctcaattcatgcattatgcca

SEQ ID NO: 2629529 - DNA, 25 bp, Homo sapien
tgactctccggagtctggtgagccc

SEQ ID NO: 2629530 - DNA, 25 bp, Homo sapien
ttatccccataaattggcatttcgg

SEQ ID NO: 2629531 - DNA, 25 bp, Homo sapien
taaaagagttcaccattccaagagg

SEQ ID NO: 2629532 - DNA, 25 bp, Homo sapien
tattcagggctatacagctttctgc

SEQ ID NO: 2629533 - DNA, 25 bp, Homo sapien
ggatgatcccatatatacaaagctg

SEQ ID NO: 2629534 - DNA, 25 bp, Homo sapien
tacaaagctgaaacacaatgactga

SEQ ID NO: 2629535 - DNA, 25 bp, Homo sapien
tttctatgacactataccctgctgg

SEQ ID NO: 2629536 - DNA, 25 bp, Homo sapien
atttcttatattgttgttaatcatc

SEQ ID NO: 2629537 - DNA, 25 bp, Homo sapien
gaagaaagaaggatattctaatatt

SEQ ID NO: 2629538 - DNA, 25 bp, Homo sapien
gaagacctgcgagtaaaactgaaga

SEQ ID NO: 2629539 - DNA, 25 bp, Homo sapien
agaaagaaggatattctaatatttc

SEQ ID NO: 2629540 - DNA, 25 bp, Homo sapien
aaactccaatggttcagtgactgtg

SEQ ID NO: 2629541 - DNA, 25 bp, Homo sapien
ggaggaacagagagccaggaccaaa

SEQ ID NO: 2629542 - DNA, 25 bp, Homo sapien
caaagctccttatgtaagcaacccc

SEQ ID NO: 2629543 - DNA, 25 bp, Homo sapien
gatcaagatccaatgctaaactcca

SEQ ID NO: 2629544 - DNA, 25 bp, Homo sapien
ccagagtaacttgtaacagcaggtg

SEQ ID NO: 2629545 - DNA, 25 bp, Homo sapien
gtcacactgtgtgggctaagctagc

SEQ ID NO: 2629546 - DNA, 25 bp, Homo sapien
taagctagcacctcatcactgcaag

SEQ ID NO: 2629547 - DNA, 25 bp, Homo sapien
gcagtggtcctgtgaaatcccatat

SEQ ID NO: 2629548 - DNA, 25 bp, Homo sapien
gcaccttgtacaacagtattcagca

SEQ ID NO: 2629549 - DNA, 25 bp, Homo sapien
gatatgggaccccaaaaggcaagta

SEQ ID NO: 2629550 - DNA, 25 bp, Homo sapien
taacaactgctcagggcaagtaaag

SEQ ID NO: 2629551 - DNA, 25 bp, Homo sapien
gaaatgaactacagggaggaatatc

SEQ ID NO: 2629552 - DNA, 25 bp, Homo sapien
gcctaacgggttagctctgccgtct

SEQ ID NO: 2629553 - DNA, 25 bp, Homo sapien
taagccgcctaacgggttagctctg

SEQ ID NO: 2629554 - DNA, 25 bp, Homo sapien
agtgccagttctttccggtgttcag

SEQ ID NO: 2629555 - DNA, 25 bp, Homo sapien
tagctctgccgtctatgtctatcag

SEQ ID NO: 2629556 - DNA, 25 bp, Homo sapien
gcagctgtaattgtctatgtactga

SEQ ID NO: 2629557 - DNA, 25 bp, Homo sapien
aaagcagctgtaattgtctatgtac

SEQ ID NO: 2629558 - DNA, 25 bp, Homo sapien
tctttatgtctttggactagacagt

SEQ ID NO: 2629559 - DNA, 25 bp, Homo sapien
ttctttatgtctttggactagacag

SEQ ID NO: 2629560 - DNA, 25 bp, Homo sapien
tcgggcttcttatggaagttcttct

SEQ ID NO: 2629561 - DNA, 25 bp, Homo sapien
catttaaagactggactacatgctc

SEQ ID NO: 2629562 - DNA, 25 bp, Homo sapien
tatgcaacactgtctaataattcag

SEQ ID NO: 2629563 - DNA, 25 bp, Homo sapien
taaagactggactacatgctcggct

SEQ ID NO: 2629564 - DNA, 25 bp, Homo sapien
tccgtgccacacttgtatgggtaca

SEQ ID NO: 2629565 - DNA, 25 bp, Homo sapien
agtccgtgccacacttgtatgggta

SEQ ID NO: 2629566 - DNA, 25 bp, Homo sapien
gagtccgtgccacacttgtatgggt

SEQ ID NO: 2629567 - DNA, 25 bp, Homo sapien
ggattgagtccgtgccacacttgta

SEQ ID NO: 2629568 - DNA, 25 bp, Homo sapien
gaatcaggtcctacagacttgaagg

SEQ ID NO: 2629569 - DNA, 25 bp, Homo sapien
tggtacccgggtctttgtctagcat

SEQ ID NO: 2629570 - DNA, 25 bp, Homo sapien
gcagttgctgttcgcggatggctaa

SEQ ID NO: 2629571 - DNA, 25 bp, Homo sapien
cagccgaactcctctcgatgttcag

SEQ ID NO: 2629572 - DNA, 25 bp, Homo sapien
tggcttgaactaaggtctgcactgt

SEQ ID NO: 2629573 - DNA, 25 bp, Homo sapien
ggcttgaactaaggtctgcactgtg

SEQ ID NO: 2629574 - DNA, 25 bp, Homo sapien
gcttgaactaaggtctgcactgtgg

SEQ ID NO: 2629575 - DNA, 25 bp, Homo sapien
tccaagctatcatccagattctctt

SEQ ID NO: 2629576 - DNA, 25 bp, Homo sapien
agggcaaggtctccctccaagctat

SEQ ID NO: 2629577 - DNA, 25 bp, Homo sapien
cctccaagctatcatccagattctc

SEQ ID NO: 2629578 - DNA, 25 bp, Homo sapien
gcaaggtctccctccaagctatcat

SEQ ID NO: 2629579 - DNA, 25 bp, Homo sapien
ccatgattcctgattttactggaag

SEQ ID NO: 2629580 - DNA, 25 bp, Homo sapien
tgtgccatggattgaagtaagatga

SEQ ID NO: 2629581 - DNA, 25 bp, Homo sapien
aatccagttatggtctgagctgtgc

SEQ ID NO: 2629582 - DNA, 25 bp, Homo sapien
gaataaataagatggccatgattcc

SEQ ID NO: 2629583 - DNA, 25 bp, Homo sapien
aagtatttcacccatcttaagttga

SEQ ID NO: 2629584 - DNA, 25 bp, Homo sapien
ctgtagaccaaactataattctggg

SEQ ID NO: 2629585 - DNA, 25 bp, Homo sapien
aggctagatattcaacctttgtcag

SEQ ID NO: 2629586 - DNA, 25 bp, Homo sapien
gatattgcctagttctcatccaagg

SEQ ID NO: 2629587 - DNA, 25 bp, Homo sapien
gccctttctagatgttcgtggactt

SEQ ID NO: 2629588 - DNA, 25 bp, Homo sapien
tctgccctttctagatgttcgtgga

SEQ ID NO: 2629589 - DNA, 25 bp, Homo sapien
tgccttccctgactgggccttcaat

SEQ ID NO: 2629590 - DNA, 25 bp, Homo sapien
gccttccctgactgggccttcaata

SEQ ID NO: 2629591 - DNA, 25 bp, Homo sapien
acaagttaaccaacgcatctggcag

SEQ ID NO: 2629592 - DNA, 25 bp, Homo sapien
cacaagttaaccaacgcatctggca

SEQ ID NO: 2629593 - DNA, 25 bp, Homo sapien
ccacaagttaaccaacgcatctggc

SEQ ID NO: 2629594 - DNA, 25 bp, Homo sapien
tccacaagttaaccaacgcatctgg

SEQ ID NO: 2629595 - DNA, 25 bp, Homo sapien
tatagatgacccttagaacggttac

SEQ ID NO: 2629596 - DNA, 25 bp, Homo sapien
tgccactggctcagacccgtgggct

SEQ ID NO: 2629597 - DNA, 25 bp, Homo sapien
tcttatcagcgcattccaccccatg

SEQ ID NO: 2629598 - DNA, 25 bp, Homo sapien
gctcagacccgtgggcttggcatat

SEQ ID NO: 2629599 - DNA, 25 bp, Homo sapien
tactggctcagcctgtggtatcact

SEQ ID NO: 2629600 - DNA, 25 bp, Homo sapien
gggtatgagatgtggctctctcctc

SEQ ID NO: 2629601 - DNA, 25 bp, Homo sapien
tcatcggagacaatctaattttgtc

SEQ ID NO: 2629602 - DNA, 25 bp, Homo sapien
tgtagacatatgtggcaattgacca

SEQ ID NO: 2629603 - DNA, 25 bp, Homo sapien
taattaaccaattcagctaaaagtc

SEQ ID NO: 2629604 - DNA, 25 bp, Homo sapien
gagggtgacagtggttgctctgtcc

SEQ ID NO: 2629605 - DNA, 25 bp, Homo sapien
taaaagtccaattagtgtggaagac

SEQ ID NO: 2629606 - DNA, 25 bp, Homo sapien
ggtggcaagctcatattcctttttc

SEQ ID NO: 2629607 - DNA, 25 bp, Homo sapien
tgcttaaggttatcgactgtgattc

SEQ ID NO: 2629608 - DNA, 25 bp, Homo sapien
ctgcttaaggttatcgactgtgatt

SEQ ID NO: 2629609 - DNA, 25 bp, Homo sapien
ctgaaaactgttgtttgagcttgac

SEQ ID NO: 2629610 - DNA, 25 bp, Homo sapien
gctcaaagttcagatccttaaaggg

SEQ ID NO: 2629611 - DNA, 25 bp, Homo sapien
ctgctgagacagcttgtgactgaaa

SEQ ID NO: 2629612 - DNA, 25 bp, Homo sapien
tgtttgagcttgactcatgtgctca

SEQ ID NO: 2629613 - DNA, 25 bp, Homo sapien
tctggaattccagcatgcaacctgt

SEQ ID NO: 2629614 - DNA, 25 bp, Homo sapien
actctacggtggacaaaaggtctgt

SEQ ID NO: 2629615 - DNA, 25 bp, Homo sapien
gatcctaacactcagactcttaagt

SEQ ID NO: 2629616 - DNA, 25 bp, Homo sapien
cagggttagctttcttgctcgtccc

SEQ ID NO: 2629617 - DNA, 25 bp, Homo sapien
cgtcagtgcctcataaaatccaatc

SEQ ID NO: 2629618 - DNA, 25 bp, Homo sapien
gagccacgtcagtgcctcataaaat

SEQ ID NO: 2629619 - DNA, 25 bp, Homo sapien
ccacgtcagtgcctcataaaatcca

SEQ ID NO: 2629620 - DNA, 25 bp, Homo sapien
gtgcctcataaaatccaatctccat

SEQ ID NO: 2629621 - DNA, 25 bp, Homo sapien
tctttaaggctgctaatcatgatct

SEQ ID NO: 2629622 - DNA, 25 bp, Homo sapien
ttctttaaggctgctaatcatgatc

SEQ ID NO: 2629623 - DNA, 25 bp, Homo sapien
aaatatgcataccagttttcttcca

SEQ ID NO: 2629624 - DNA, 25 bp, Homo sapien
tgaaaatatgcataccagttttctt

SEQ ID NO: 2629625 - DNA, 25 bp, Homo sapien
ggttgaaaatatgcataccagtttt

SEQ ID NO: 2629626 - DNA, 25 bp, Homo sapien
ccagttgattactttaacctccttg

SEQ ID NO: 2629627 - DNA, 25 bp, Homo sapien
catttctgactgtggacaattctaa

SEQ ID NO: 2629628 - DNA, 25 bp, Homo sapien
accaccatttctgactgtggacaat

SEQ ID NO: 2629629 - DNA, 25 bp, Homo sapien
agcactttggatctgggaatggcaa

SEQ ID NO: 2629630 - DNA, 25 bp, Homo sapien
tttggatctgggaatggcaagacca

SEQ ID NO: 2629631 - DNA, 25 bp, Homo sapien
ttccgagcagtggagagaaatgatt

SEQ ID NO: 2629632 - DNA, 25 bp, Homo sapien
catctctgttgacggtgagcccttg

SEQ ID NO: 2629633 - DNA, 25 bp, Homo sapien
tgttcttcgacactgacatctctgt

SEQ ID NO: 2629634 - DNA, 25 bp, Homo sapien
cagaaaactttcgtgttccgagcag

SEQ ID NO: 2629635 - DNA, 25 bp, Homo sapien
actcctggacatgggaatctcgagg

SEQ ID NO: 2629636 - DNA, 25 bp, Homo sapien
gactcctggacatgggaatctcgag

SEQ ID NO: 2629637 - DNA, 25 bp, Homo sapien
ttgactcctggacatgggaatctcg

SEQ ID NO: 2629638 - DNA, 25 bp, Homo sapien
cctttgtggtttcaccattgactcc

SEQ ID NO: 2629639 - DNA, 25 bp, Homo sapien
agaacagcagttgaagcgggtccta

SEQ ID NO: 2629640 - DNA, 25 bp, Homo sapien
tccagaacagcagttgaagcgggtc

SEQ ID NO: 2629641 - DNA, 25 bp, Homo sapien
caaatgtccgcagggacggcaagag

SEQ ID NO: 2629642 - DNA, 25 bp, Homo sapien
gacctcaaggctctcatgtgtgcag

SEQ ID NO: 2629643 - DNA, 25 bp, Homo sapien
gaaactgtgccctctgtgatggaga

SEQ ID NO: 2629644 - DNA, 25 bp, Homo sapien
tgtggatgataccaacagagtggga

SEQ ID NO: 2629645 - DNA, 25 bp, Homo sapien
tatacatgacaactgaagcctattc

SEQ ID NO: 2629646 - DNA, 25 bp, Homo sapien
gaactccagggtgcctttgtatagt

SEQ ID NO: 2629647 - DNA, 25 bp, Homo sapien
cataatctggacttcagagcatgac

SEQ ID NO: 2629648 - DNA, 25 bp, Homo sapien
ggctgcctgctccatcataatctgg

SEQ ID NO: 2629649 - DNA, 25 bp, Homo sapien
ggtgtactggacagacatagatccc

SEQ ID NO: 2629650 - DNA, 25 bp, Homo sapien
gcccaaaccctatgaacatgagcat

SEQ ID NO: 2629651 - DNA, 25 bp, Homo sapien
cagagcaaagggcattggcaggagt

SEQ ID NO: 2629652 - DNA, 25 bp, Homo sapien
taaagcgactggagctactttgtgg

SEQ ID NO: 2629653 - DNA, 25 bp, Homo sapien
tgggtccctcttgagtctgagaaca

SEQ ID NO: 2629654 - DNA, 25 bp, Homo sapien
gcctggcctaatccatcttgtctta

SEQ ID NO: 2629655 - DNA, 25 bp, Homo sapien
gggttgatgtgttggaaggatatat

SEQ ID NO: 2629656 - DNA, 25 bp, Homo sapien
aatacccaagccctgcgaacctgag

SEQ ID NO: 2629657 - DNA, 25 bp, Homo sapien
gttgatgtgttggaaggatatatag

SEQ ID NO: 2629658 - DNA, 25 bp, Homo sapien
tcaccacccgtgggaaactgttaca

SEQ ID NO: 2629659 - DNA, 25 bp, Homo sapien
ttcagccattgactcatcgacatga

SEQ ID NO: 2629660 - DNA, 25 bp, Homo sapien
tgcccggtggaatcgcagtgcagca

SEQ ID NO: 2629661 - DNA, 25 bp, Homo sapien
gactcatcgacatgagagtctcgag

SEQ ID NO: 2629662 - DNA, 25 bp, Homo sapien
cttggttcaggtcccatggcgtgtg

SEQ ID NO: 2629663 - DNA, 25 bp, Homo sapien
ggcatctccagacagcttcaggccg

SEQ ID NO: 2629664 - DNA, 25 bp, Homo sapien
cgctggcatctccagacagcttcag

SEQ ID NO: 2629665 - DNA, 25 bp, Homo sapien
agcttcaggccgctttggatctcac

SEQ ID NO: 2629666 - DNA, 25 bp, Homo sapien
cagcttcaggccgctttggatctca

SEQ ID NO: 2629667 - DNA, 25 bp, Homo sapien
gtgcaaatgtccacagggacagcat

SEQ ID NO: 2629668 - DNA, 25 bp, Homo sapien
tatgagtgcaggcacagttccagtg

SEQ ID NO: 2629669 - DNA, 25 bp, Homo sapien
catgagggtccccattggagtgcct

SEQ ID NO: 2629670 - DNA, 25 bp, Homo sapien
ggtccccattggagtgcctcggact

SEQ ID NO: 2629671 - DNA, 25 bp, Homo sapien
tctgtaggtgcctggaattgtcaga

SEQ ID NO: 2629672 - DNA, 25 bp, Homo sapien
aacataaccagtccatggtacagca

SEQ ID NO: 2629673 - DNA, 25 bp, Homo sapien
gatctagagttaatgccctggaact

SEQ ID NO: 2629674 - DNA, 25 bp, Homo sapien
ggcacaaggctataaatcttcctgt

SEQ ID NO: 2629675 - DNA, 25 bp, Homo sapien
ttgcacgctgggctaaagggttgaa

SEQ ID NO: 2629676 - DNA, 25 bp, Homo sapien
taaagggttgaaggacatcttgtgc

SEQ ID NO: 2629677 - DNA, 25 bp, Homo sapien
tattttaggatgttgcactcccagc

SEQ ID NO: 2629678 - DNA, 25 bp, Homo sapien
agatggagacaggaatacagcccag

SEQ ID NO: 2629679 - DNA, 25 bp, Homo sapien
caagggatagcaagactagggttca

SEQ ID NO: 2629680 - DNA, 25 bp, Homo sapien
cagtgatgtaagaccaatgcccagt

SEQ ID NO: 2629681 - DNA, 25 bp, Homo sapien
tgcctacggtagatggtgtcttaac

SEQ ID NO: 2629682 - DNA, 25 bp, Homo sapien
tgagggaccccaataagcagcttac

SEQ ID NO: 2629683 - DNA, 25 bp, Homo sapien
tccggacgcctaaggagggaagctc

SEQ ID NO: 2629684 - DNA, 25 bp, Homo sapien
gaagtgtagatatccgatttctgac

SEQ ID NO: 2629685 - DNA, 25 bp, Homo sapien
tagtactacaggagagaccgagaac

SEQ ID NO: 2629686 - DNA, 25 bp, Homo sapien
agtgaaaaatccaagagacctccgg

SEQ ID NO: 2629687 - DNA, 25 bp, Homo sapien
ctggagcaagttgtgggaagtgagt

SEQ ID NO: 2629688 - DNA, 25 bp, Homo sapien
taactacatcagaagaggaaccgcc

SEQ ID NO: 2629689 - DNA, 25 bp, Homo sapien
cagtcgccttcagtgtccacatagg

SEQ ID NO: 2629690 - DNA, 25 bp, Homo sapien
tatgctcctcctgcttacgaggcgg

SEQ ID NO: 2629691 - DNA, 25 bp, Homo sapien
gattcagaagatcaagcttgtggag

SEQ ID NO: 2629692 - DNA, 25 bp, Homo sapien
tcccgcgaccagtcttcgaagaggg

SEQ ID NO: 2629693 - DNA, 25 bp, Homo sapien
gggaatccaaagaacgcgctcctgt

SEQ ID NO: 2629694 - DNA, 25 bp, Homo sapien
ttcgtccgaaggttgtgcacgccgc

SEQ ID NO: 2629695 - DNA, 25 bp, Homo sapien
ggaagccccagtaccgctgattctg

SEQ ID NO: 2629696 - DNA, 25 bp, Homo sapien
tactcaagccttggtaatggcaggc

SEQ ID NO: 2629697 - DNA, 25 bp, Homo sapien
tgccgttggaaaagcacggtattag

SEQ ID NO: 2629698 - DNA, 25 bp, Homo sapien
gccagatgcggggtataatgtcctg

SEQ ID NO: 2629699 - DNA, 25 bp, Homo sapien
tttccaagtgccgttggaaaagcac

SEQ ID NO: 2629700 - DNA, 25 bp, Homo sapien
gcagactggattcgtttctgcccca

SEQ ID NO: 2629701 - DNA, 25 bp, Homo sapien
ccctggttagaacgttcattattgc

SEQ ID NO: 2629702 - DNA, 25 bp, Homo sapien
ggatgttactaaggaggaggccaga

SEQ ID NO: 2629703 - DNA, 25 bp, Homo sapien
ccaaatgcattgctagtactggagc

SEQ ID NO: 2629704 - DNA, 25 bp, Homo sapien
cagtcgtctgtccacgaagcaaggg

SEQ ID NO: 2629705 - DNA, 25 bp, Homo sapien
gccctcaagcgcatgcaatctgcag

SEQ ID NO: 2629706 - DNA, 25 bp, Homo sapien
tggaacttcggttggtggcttcggc

SEQ ID NO: 2629707 - DNA, 25 bp, Homo sapien
tctcctcggacggacgtctccggcc

SEQ ID NO: 2629708 - DNA, 25 bp, Homo sapien
actgggcgttttctcaattggtgca

SEQ ID NO: 2629709 - DNA, 25 bp, Homo sapien
gctaatatctcgtaggaacttcctg

SEQ ID NO: 2629710 - DNA, 25 bp, Homo sapien
tcttagcgcccaacaggacgtttca

SEQ ID NO: 2629711 - DNA, 25 bp, Homo sapien
tctgggtcctagaaacgctaatatc

SEQ ID NO: 2629712 - DNA, 25 bp, Homo sapien
ggttgcagatgtgagggattcggtg

SEQ ID NO: 2629713 - DNA, 25 bp, Homo sapien
cccagttgcgcctggagttaccggg

SEQ ID NO: 2629714 - DNA, 25 bp, Homo sapien
tccagaacccagtccggtggctgcg

SEQ ID NO: 2629715 - DNA, 25 bp, Homo sapien
agggattcggtgtcgcagctgcccc

SEQ ID NO: 2629716 - DNA, 25 bp, Homo sapien
tctcggtcgcggcaccgctcgttgg

SEQ ID NO: 2629717 - DNA, 25 bp, Homo sapien
tcgcggcaccgctcgttggtctgcg

SEQ ID NO: 2629718 - DNA, 25 bp, Homo sapien
gaggtctctcggtcgcggcaccgct

SEQ ID NO: 2629719 - DNA, 25 bp, Homo sapien
tcggtcgcggcaccgctcgttggtc

SEQ ID NO: 2629720 - DNA, 25 bp, Homo sapien
ttgtgatattagtccgcccaggcgg

SEQ ID NO: 2629721 - DNA, 25 bp, Homo sapien
tcatatgaacactagctccgcggag

SEQ ID NO: 2629722 - DNA, 25 bp, Homo sapien
agcactttggtagcacggagcgcac

SEQ ID NO: 2629723 - DNA, 25 bp, Homo sapien
tcatcagaataaaggagcggttccc

SEQ ID NO: 2629724 - DNA, 25 bp, Homo sapien
ggacacagtaaaatcacacgtaccc

SEQ ID NO: 2629725 - DNA, 25 bp, Homo sapien
cacgtacccctatgttagaagatgg

SEQ ID NO: 2629726 - DNA, 25 bp, Homo sapien
tcttacagtcgcattttgagggagt

SEQ ID NO: 2629727 - DNA, 25 bp, Homo sapien
ctatcttgaactggagtgttaggga

SEQ ID NO: 2629728 - DNA, 25 bp, Homo sapien
gcagctttggacttcgccgtcggta

SEQ ID NO: 2629729 - DNA, 25 bp, Homo sapien
ttgctctcggttcaggtcccgtggt

SEQ ID NO: 2629730 - DNA, 25 bp, Homo sapien
ttcgccgtcggtagcatttgcgtct

SEQ ID NO: 2629731 - DNA, 25 bp, Homo sapien
agcctttgattcctcgacatgggag

SEQ ID NO: 2629732 - DNA, 25 bp, Homo sapien
agtgttccttgaagcgggtagtgtc

SEQ ID NO: 2629733 - DNA, 25 bp, Homo sapien
cgggtagtgtcgcaggcttgcagaa

SEQ ID NO: 2629734 - DNA, 25 bp, Homo sapien
gcacagtgttccttgaagcgggtag

SEQ ID NO: 2629735 - DNA, 25 bp, Homo sapien
cagagggcgccatgggcttgtgtcc

SEQ ID NO: 2629736 - DNA, 25 bp, Homo sapien
gtaaaagtccgcagggacagaatga

SEQ ID NO: 2629737 - DNA, 25 bp, Homo sapien
tgtaaaagtccgcagggacagaatg

SEQ ID NO: 2629738 - DNA, 25 bp, Homo sapien
tgaagagagtttctctaaatgaaaa

SEQ ID NO: 2629739 - DNA, 25 bp, Homo sapien
gagaggaagaaccaattaaggaatg

SEQ ID NO: 2629740 - DNA, 25 bp, Homo sapien
aaatgtttaggacattcaggagagg

SEQ ID NO: 2629741 - DNA, 25 bp, Homo sapien
tacatgaagagagtttctctaaatg

SEQ ID NO: 2629742 - DNA, 25 bp, Homo sapien
gaagcccatatcttgatgctgcaga

SEQ ID NO: 2629743 - DNA, 25 bp, Homo sapien
tgctctgaagcccatatcttgatgc

SEQ ID NO: 2629744 - DNA, 25 bp, Homo sapien
ctaaaaacgtgctctgaagcccata

SEQ ID NO: 2629745 - DNA, 25 bp, Homo sapien
gcccatatcttgatgctgcagacag

SEQ ID NO: 2629746 - DNA, 25 bp, Homo sapien
cccactgtgcggagaagtctgtgca

SEQ ID NO: 2629747 - DNA, 25 bp, Homo sapien
caccagtaagagttttgcagttccc

SEQ ID NO: 2629748 - DNA, 25 bp, Homo sapien
tctctggagggatctatacgtctgt

SEQ ID NO: 2629749 - DNA, 25 bp, Homo sapien
aaggtatagttcttgccatcagtcc

SEQ ID NO: 2629750 - DNA, 25 bp, Homo sapien
tatgtatgacccatttcagtgcttc

SEQ ID NO: 2629751 - DNA, 25 bp, Homo sapien
caattctctacaaatgctgccgccg

SEQ ID NO: 2629752 - DNA, 25 bp, Homo sapien
cccgcttggagagacgtggagtact

SEQ ID NO: 2629753 - DNA, 25 bp, Homo sapien
cgccgctgccatcgaagttcttatg

SEQ ID NO: 2629754 - DNA, 25 bp, Homo sapien
gaactgccattgctcagtaggaaaa

SEQ ID NO: 2629755 - DNA, 25 bp, Homo sapien
ggcagtgagacatccgcctctaagc

SEQ ID NO: 2629756 - DNA, 25 bp, Homo sapien
tccggtgttggacgtgaaattggca

SEQ ID NO: 2629757 - DNA, 25 bp, Homo sapien
gaaaaatggactgcgaggctccggt

SEQ ID NO: 2629758 - DNA, 25 bp, Homo sapien
aaagagagtcgctgcgacggatcga

SEQ ID NO: 2629759 - DNA, 25 bp, Homo sapien
aactgctactgacattactcccacg

SEQ ID NO: 2629760 - DNA, 25 bp, Homo sapien
tccctaattactgagggccccgcga

SEQ ID NO: 2629761 - DNA, 25 bp, Homo sapien
atcgactggccgttgggtggaactt

SEQ ID NO: 2629762 - DNA, 25 bp, Homo sapien
tctgcgaaatgtcggtgcctggagc

SEQ ID NO: 2629763 - DNA, 25 bp, Homo sapien
gcaggcaccctgaaatcgaaacttg

SEQ ID NO: 2629764 - DNA, 25 bp, Homo sapien
tgctgtcgccccgagaaaatggagg

SEQ ID NO: 2629765 - DNA, 25 bp, Homo sapien
tgcctggagcttgcgaatgactgcg

SEQ ID NO: 2629766 - DNA, 25 bp, Homo sapien
cccaggcactgctaaactggtcatc

SEQ ID NO: 2629767 - DNA, 25 bp, Homo sapien
actgctaaactggtcatcgctaaac

SEQ ID NO: 2629768 - DNA, 25 bp, Homo sapien
ggcactgctaaactggtcatcgcta

SEQ ID NO: 2629769 - DNA, 25 bp, Homo sapien
caggcactgctaaactggtcatcgc

SEQ ID NO: 2629770 - DNA, 25 bp, Homo sapien
agagaacgagcgctacaaaacgcag

SEQ ID NO: 2629771 - DNA, 25 bp, Homo sapien
accatctgtgtccgggaaatgagca

SEQ ID NO: 2629772 - DNA, 25 bp, Homo sapien
tgtccgggaaatgagcattgctgcc

SEQ ID NO: 2629773 - DNA, 25 bp, Homo sapien
caaaacgcagggattaaagagttct

SEQ ID NO: 2629774 - DNA, 25 bp, Homo sapien
gatgaggcttcagttgctgttaatg

SEQ ID NO: 2629775 - DNA, 25 bp, Homo sapien
tagtttaattttctggacacaggtc

SEQ ID NO: 2629776 - DNA, 25 bp, Homo sapien
accactgtttatagagaaatactga

SEQ ID NO: 2629777 - DNA, 25 bp, Homo sapien
tgacctttttcgacccaggagtgaa

SEQ ID NO: 2629778 - DNA, 25 bp, Homo sapien
taacatacactaacatttcagaatc

SEQ ID NO: 2629779 - DNA, 25 bp, Homo sapien
tatgtgatcttattatgccaaataa

SEQ ID NO: 2629780 - DNA, 25 bp, Homo sapien
tgtaatacatactaataagacattc

SEQ ID NO: 2629781 - DNA, 25 bp, Homo sapien
catatttgataatgcatcttatgtg

SEQ ID NO: 2629782 - DNA, 25 bp, Homo sapien
tttcagggcccaggattccaaaggc

SEQ ID NO: 2629783 - DNA, 25 bp, Homo sapien
tctcggatggaagtctccggctcca

SEQ ID NO: 2629784 - DNA, 25 bp, Homo sapien
gatcatccaatggaaggtctcagag

SEQ ID NO: 2629785 - DNA, 25 bp, Homo sapien
tccactaagcgagaggcgagttgcg

SEQ ID NO: 2629786 - DNA, 25 bp, Homo sapien
ttcctcaacccaagcacatacttgg

SEQ ID NO: 2629787 - DNA, 25 bp, Homo sapien
catacttggtaggactgtctttggc

SEQ ID NO: 2629788 - DNA, 25 bp, Homo sapien
tagtccccagctctacaaattgctg

SEQ ID NO: 2629789 - DNA, 25 bp, Homo sapien
gggaagtggtacagtagtccccagc

SEQ ID NO: 2629790 - DNA, 25 bp, Homo sapien
gcagaattgatctcggtggcagcac

SEQ ID NO: 2629791 - DNA, 25 bp, Homo sapien
tcttcatgggttgcaggacgtttgc

SEQ ID NO: 2629792 - DNA, 25 bp, Homo sapien
gcactttctgagtcatagcaccgct

SEQ ID NO: 2629793 - DNA, 25 bp, Homo sapien
gcaccgctcattcgtccgagcagaa

SEQ ID NO: 2629794 - DNA, 25 bp, Homo sapien
gtttcgtgcagaccaactagcgccg

SEQ ID NO: 2629795 - DNA, 25 bp, Homo sapien
cgtcctgggagagagctaaagctta

SEQ ID NO: 2629796 - DNA, 25 bp, Homo sapien
ccaatgaagtgcgtgtgagaaaccg

SEQ ID NO: 2629797 - DNA, 25 bp, Homo sapien
tcttttgggcgccatcagcggtgca

SEQ ID NO: 2629798 - DNA, 25 bp, Homo sapien
tagtcttaatttctggcgccatgtc

SEQ ID NO: 2629799 - DNA, 25 bp, Homo sapien
tcaatttagcgggagttagtgacct

SEQ ID NO: 2629800 - DNA, 25 bp, Homo sapien
tgtctcatgactgcagcttattctg

SEQ ID NO: 2629801 - DNA, 25 bp, Homo sapien
aagccctgaaaattagtagcacaag

SEQ ID NO: 2629802 - DNA, 25 bp, Homo sapien
tgcctgggctagttttgagtttttg

SEQ ID NO: 2629803 - DNA, 25 bp, Homo sapien
tcttagaatctttgtactttatatt

SEQ ID NO: 2629804 - DNA, 25 bp, Homo sapien
agtcttagaatctttgtactttata

SEQ ID NO: 2629805 - DNA, 25 bp, Homo sapien
gtcttagaatctttgtactttatat

SEQ ID NO: 2629806 - DNA, 25 bp, Homo sapien
aggagcaggccagggtagtcgccca

SEQ ID NO: 2629807 - DNA, 25 bp, Homo sapien
ttgtcagatgcctgatgggtcataa

SEQ ID NO: 2629808 - DNA, 25 bp, Homo sapien
tcagatgcctgatgggtcataatgt

SEQ ID NO: 2629809 - DNA, 25 bp, Homo sapien
gaggagcaggccagggtagtcgccc

SEQ ID NO: 2629810 - DNA, 25 bp, Homo sapien
ctggagttgtctgcctaccgagcga

SEQ ID NO: 2629811 - DNA, 25 bp, Homo sapien
gacgggagtacgttgagaccctatg

SEQ ID NO: 2629812 - DNA, 25 bp, Homo sapien
gagctcgcagtgataaggaaaggaa

SEQ ID NO: 2629813 - DNA, 25 bp, Homo sapien
gagccgaaagtaggtcccagtggaa

SEQ ID NO: 2629814 - DNA, 25 bp, Homo sapien
ggcgtctgccccaagagcatgcaat

SEQ ID NO: 2629815 - DNA, 25 bp, Homo sapien
tagcggaaatctcagggctcaggac

SEQ ID NO: 2629816 - DNA, 25 bp, Homo sapien
ctcggtggacacattcttagggcgt

SEQ ID NO: 2629817 - DNA, 25 bp, Homo sapien
caaagacacattggactcggtggac

SEQ ID NO: 2629818 - DNA, 25 bp, Homo sapien
gacagcgggtgccttttggaacgcc

SEQ ID NO: 2629819 - DNA, 25 bp, Homo sapien
gacagcaggacaccgaggtctgtga

SEQ ID NO: 2629820 - DNA, 25 bp, Homo sapien
caagtacagcgaagcccactgagtt

SEQ ID NO: 2629821 - DNA, 25 bp, Homo sapien
gcccggagtctactggcaaaacgga

SEQ ID NO: 2629822 - DNA, 25 bp, Homo sapien
tctgaggacaatgttaccgatgtgt

SEQ ID NO: 2629823 - DNA, 25 bp, Homo sapien
ttgctctgaggacaatgttaccgat

SEQ ID NO: 2629824 - DNA, 25 bp, Homo sapien
gacaatgttaccgatgtgtttttca

SEQ ID NO: 2629825 - DNA, 25 bp, Homo sapien
tatttttgtgtcttgctctgaggac

SEQ ID NO: 2629826 - DNA, 25 bp, Homo sapien
ttccccatgcgaaggcgaagttacc

SEQ ID NO: 2629827 - DNA, 25 bp, Homo sapien
taagacttgctttagctgcgcagga

SEQ ID NO: 2629828 - DNA, 25 bp, Homo sapien
gaagttaccctgtgactcgttggtc

SEQ ID NO: 2629829 - DNA, 25 bp, Homo sapien
tttagcgatgaccagtttagcagtg

SEQ ID NO: 2629830 - DNA, 25 bp, Homo sapien
cccacggtttcgcgcgtcgttggct

SEQ ID NO: 2629831 - DNA, 25 bp, Homo sapien
cgccgccggcgtctctgtcgcagga

SEQ ID NO: 2629832 - DNA, 25 bp, Homo sapien
agcaagtttcgatttcgcggtgcct

SEQ ID NO: 2629833 - DNA, 25 bp, Homo sapien
ttcgcggtgcctgggatttccaccc

SEQ ID NO: 2629834 - DNA, 25 bp, Homo sapien
cccgttgcgccgagtctggcgttgc

SEQ ID NO: 2629835 - DNA, 25 bp, Homo sapien
ctggcgttgccggatgggtgctgca

SEQ ID NO: 2629836 - DNA, 25 bp, Homo sapien
agagatttaaagtcgcagctgcccc

SEQ ID NO: 2629837 - DNA, 25 bp, Homo sapien
cctcaggccgcggatctgagagatt

SEQ ID NO: 2629838 - DNA, 25 bp, Homo sapien
cgagccgtggtctcttgttcacagc

SEQ ID NO: 2629839 - DNA, 25 bp, Homo sapien
tcttggtgacggcaccgctggttgc

SEQ ID NO: 2629840 - DNA, 25 bp, Homo sapien
gctggttgcgccaaaacaaatgttg

SEQ ID NO: 2629841 - DNA, 25 bp, Homo sapien
tgtcacagcacttgctgcacggagt

SEQ ID NO: 2629842 - DNA, 25 bp, Homo sapien
tagtgccggcttcgcggtcgcagca

SEQ ID NO: 2629843 - DNA, 25 bp, Homo sapien
atccgaggccctctagtgccggctt

SEQ ID NO: 2629844 - DNA, 25 bp, Homo sapien
ctgtttgtgtcaactgctagtcgtg

SEQ ID NO: 2629845 - DNA, 25 bp, Homo sapien
gctagtcgtgctgtgcacagtttcc

SEQ ID NO: 2629846 - DNA, 25 bp, Homo sapien
gagttgctggttttgatccacgctt

SEQ ID NO: 2629847 - DNA, 25 bp, Homo sapien
gctggttttgatccacgctttctcc

SEQ ID NO: 2629848 - DNA, 25 bp, Homo sapien
ccactgagttgctggttttgatcca

SEQ ID NO: 2629849 - DNA, 25 bp, Homo sapien
tttgatccacgctttctcccagaga

SEQ ID NO: 2629850 - DNA, 25 bp, Homo sapien
tagtctagcccagctggcggtttct

SEQ ID NO: 2629851 - DNA, 25 bp, Homo sapien
tgtggtatccctacggctgtcgtcg

SEQ ID NO: 2629852 - DNA, 25 bp, Homo sapien
ctggatgtacttctgtggccgcgca

SEQ ID NO: 2629853 - DNA, 25 bp, Homo sapien
gcagaaccactgattgcgcggagct

SEQ ID NO: 2629854 - DNA, 25 bp, Homo sapien
gcagcataatcggtgaagggagcct

SEQ ID NO: 2629855 - DNA, 25 bp, Homo sapien
cacagacatttgctacgggcagctg

SEQ ID NO: 2629856 - DNA, 25 bp, Homo sapien
tgcgtcctgcgaagccagtggaatc

SEQ ID NO: 2629857 - DNA, 25 bp, Homo sapien
cgttatcggacgctctctggcggca

SEQ ID NO: 2629858 - DNA, 25 bp, Homo sapien
tgtggtctcggctactctagaggct

SEQ ID NO: 2629859 - DNA, 25 bp, Homo sapien
gatcgctggatcccaggaagtcgag

SEQ ID NO: 2629860 - DNA, 25 bp, Homo sapien
ctgtggtctcggctactctagaggc

SEQ ID NO: 2629861 - DNA, 25 bp, Homo sapien
gaggatcgctggatcccaggaagtc

SEQ ID NO: 2629862 - DNA, 25 bp, Homo sapien
tatactttgttcctgggaccaacag

SEQ ID NO: 2629863 - DNA, 25 bp, Homo sapien
ggcgaccagaatggtttatactttg

SEQ ID NO: 2629864 - DNA, 25 bp, Homo sapien
tttgttcctgggaccaacaggatct

SEQ ID NO: 2629865 - DNA, 25 bp, Homo sapien
tcctgcgtaggaagctgttggcgac

SEQ ID NO: 2629866 - DNA, 25 bp, Homo sapien
gctgtgccttttacgctcctaagga

SEQ ID NO: 2629867 - DNA, 25 bp, Homo sapien
gctgcgatcagaaaacgctgtgcct

SEQ ID NO: 2629868 - DNA, 25 bp, Homo sapien
aaaggcaagcagttgttggcccctc

SEQ ID NO: 2629869 - DNA, 25 bp, Homo sapien
gaatcaacgagcgttcccacagagt

SEQ ID NO: 2629870 - DNA, 25 bp, Homo sapien
tgtgctggagtcttgcagttcattt

SEQ ID NO: 2629871 - DNA, 25 bp, Homo sapien
cttgtgctggagtcttgcagttcat

SEQ ID NO: 2629872 - DNA, 25 bp, Homo sapien
ctcttgtgctggagtcttgcagttc

SEQ ID NO: 2629873 - DNA, 25 bp, Homo sapien
gtgctggagtcttgcagttcatttt

SEQ ID NO: 2629874 - DNA, 25 bp, Homo sapien
ttgcatttccggaaagacagagaaa

SEQ ID NO: 2629875 - DNA, 25 bp, Homo sapien
gacagagaaagcgtcagtgatccat

SEQ ID NO: 2629876 - DNA, 25 bp, Homo sapien
cactttgagatgttcattaggtttg

SEQ ID NO: 2629877 - DNA, 25 bp, Homo sapien
tggatggcactttgagatgttcatt

SEQ ID NO: 2629878 - DNA, 25 bp, Homo sapien
caaaggctctacctaggctgtacca

SEQ ID NO: 2629879 - DNA, 25 bp, Homo sapien
tatagccccactcttgactgaaaag

SEQ ID NO: 2629880 - DNA, 25 bp, Homo sapien
gagtgagtgacaattgcgaccccaa

SEQ ID NO: 2629881 - DNA, 25 bp, Homo sapien
tctcccgtctgtaagaccagaaggc

SEQ ID NO: 2629882 - DNA, 25 bp, Homo sapien
agttctctgtaactttaaacttctg

SEQ ID NO: 2629883 - DNA, 25 bp, Homo sapien
caccagttcccagccctattttgtt

SEQ ID NO: 2629884 - DNA, 25 bp, Homo sapien
tagagactgttggccaggcctcaaa

SEQ ID NO: 2629885 - DNA, 25 bp, Homo sapien
ttcttgcgctatcgcccagggtggg

SEQ ID NO: 2629886 - DNA, 25 bp, Homo sapien
tggctttccggacaggggtatctta

SEQ ID NO: 2629887 - DNA, 25 bp, Homo sapien
cggtggtcttgtgcctgcattgaaa

SEQ ID NO: 2629888 - DNA, 25 bp, Homo sapien
gggtatcttataactgtctttgaag

SEQ ID NO: 2629889 - DNA, 25 bp, Homo sapien
tgtggccttgcatagtcggtggtct

SEQ ID NO: 2629890 - DNA, 25 bp, Homo sapien
tcaaggctaggaaaccataccagga

SEQ ID NO: 2629891 - DNA, 25 bp, Homo sapien
gattgcagttgcgagctctgacacc

SEQ ID NO: 2629892 - DNA, 25 bp, Homo sapien
ggaagtgacatttcttacccacctg

SEQ ID NO: 2629893 - DNA, 25 bp, Homo sapien
cagcccattgccagatattacagga

SEQ ID NO: 2629894 - DNA, 25 bp, Homo sapien
cctctggaataagggctttatgccc

SEQ ID NO: 2629895 - DNA, 25 bp, Homo sapien
taacaggactgtctcgagtcaggtg

SEQ ID NO: 2629896 - DNA, 25 bp, Homo sapien
tttctcggttcaggaactgggtcac

SEQ ID NO: 2629897 - DNA, 25 bp, Homo sapien
gaatggcatccaccaaagttaggcc

SEQ ID NO: 2629898 - DNA, 25 bp, Homo sapien
ctatgtaagcccagcatggcagcct

SEQ ID NO: 2629899 - DNA, 25 bp, Homo sapien
ggcagcctgaatgcactgtacttca

SEQ ID NO: 2629900 - DNA, 25 bp, Homo sapien
tactttaggcttaagtctggtggca

SEQ ID NO: 2629901 - DNA, 25 bp, Homo sapien
caagctacgtggctggtctaggaaa

SEQ ID NO: 2629902 - DNA, 25 bp, Homo sapien
cctcgatgtgcttgtaggccagatt

SEQ ID NO: 2629903 - DNA, 25 bp, Homo sapien
gctgtgcctcgatgtgcttgtaggc

SEQ ID NO: 2629904 - DNA, 25 bp, Homo sapien
atggaggacccgcaccggctctggt

SEQ ID NO: 2629905 - DNA, 25 bp, Homo sapien
tatctctactatcttggtgaggggg

SEQ ID NO: 2629906 - DNA, 25 bp, Homo sapien
ctggagctgatgccctgaaatgcca

SEQ ID NO: 2629907 - DNA, 25 bp, Homo sapien
aatgccatggttgtcaattcaaaag

SEQ ID NO: 2629908 - DNA, 25 bp, Homo sapien
tgaaatgccatggttgtcaattcaa

SEQ ID NO: 2629909 - DNA, 25 bp, Homo sapien
gccatggttgtcaattcaaaaggca

SEQ ID NO: 2629910 - DNA, 25 bp, Homo sapien
gagccttcagtgttgctagatcttg

SEQ ID NO: 2629911 - DNA, 25 bp, Homo sapien
gttttgctgaatatttggttttgct

SEQ ID NO: 2629912 - DNA, 25 bp, Homo sapien
tgctagatcttgaagttttgctgaa

SEQ ID NO: 2629913 - DNA, 25 bp, Homo sapien
tttggttttgctggatccaatccat

SEQ ID NO: 2629914 - DNA, 25 bp, Homo sapien
tcctgggatacctgcagcttgaagg

SEQ ID NO: 2629915 - DNA, 25 bp, Homo sapien
tatgaggatgcataaatctttttcc

SEQ ID NO: 2629916 - DNA, 25 bp, Homo sapien
tgtgagagaatagcctccttgggcc

SEQ ID NO: 2629917 - DNA, 25 bp, Homo sapien
tccttgggccaagtatgcaccggtg

SEQ ID NO: 2629918 - DNA, 25 bp, Homo sapien
ggagatgaaagctcagttcccacaa

SEQ ID NO: 2629919 - DNA, 25 bp, Homo sapien
caatcggattccatggtgccctcaa

SEQ ID NO: 2629920 - DNA, 25 bp, Homo sapien
gagaatggtcacatgggaagcctgc

SEQ ID NO: 2629921 - DNA, 25 bp, Homo sapien
gaagcctgcttcatatccaaatcct

SEQ ID NO: 2629922 - DNA, 25 bp, Homo sapien
gttcagcagccggccaaaaggaaca

SEQ ID NO: 2629923 - DNA, 25 bp, Homo sapien
tcagcagccggccaaaaggaacaga

SEQ ID NO: 2629924 - DNA, 25 bp, Homo sapien
ttcagcagccggccaaaaggaacag

SEQ ID NO: 2629925 - DNA, 25 bp, Homo sapien
agtttctgggtcctagcactgctag

SEQ ID NO: 2629926 - DNA, 25 bp, Homo sapien
gcagcaccgctggtgggtccagccc

SEQ ID NO: 2629927 - DNA, 25 bp, Homo sapien
gcttctcctaaacagtttcgctagt

SEQ ID NO: 2629928 - DNA, 25 bp, Homo sapien
cttcatgggtcgtggacttgcagga

SEQ ID NO: 2629929 - DNA, 25 bp, Homo sapien
tagcacggctactttccccgggctg

SEQ ID NO: 2629930 - DNA, 25 bp, Homo sapien
tgtcctagcacggctactttccccg

SEQ ID NO: 2629931 - DNA, 25 bp, Homo sapien
ctagcacggctactttccccgggct

SEQ ID NO: 2629932 - DNA, 25 bp, Homo sapien
ctgtgtcctagcacggctactttcc

SEQ ID NO: 2629933 - DNA, 25 bp, Homo sapien
tggtagcgctgaacaaaacaacatt

SEQ ID NO: 2629934 - DNA, 25 bp, Homo sapien
gagccagcggtttcgcatccgcact

SEQ ID NO: 2629935 - DNA, 25 bp, Homo sapien
cacatgttctttgtggtatcgcttc

SEQ ID NO: 2629936 - DNA, 25 bp, Homo sapien
tgttttctcggttgccgcgctcttg

SEQ ID NO: 2629937 - DNA, 25 bp, Homo sapien
tcttccccggtagaataaatgtggc

SEQ ID NO: 2629938 - DNA, 25 bp, Homo sapien
cactgtcttccccggtagaataaat

SEQ ID NO: 2629939 - DNA, 25 bp, Homo sapien
tgtcttccccggtagaataaatgtg

SEQ ID NO: 2629940 - DNA, 25 bp, Homo sapien
cttccccggtagaataaatgtggcg

SEQ ID NO: 2629941 - DNA, 25 bp, Homo sapien
tgtagcaaggcagacttaaccgtgc

SEQ ID NO: 2629942 - DNA, 25 bp, Homo sapien
taagcaagtcccgatttagggcatc

SEQ ID NO: 2629943 - DNA, 25 bp, Homo sapien
aagtttcgatttcgcggtgcccgct

SEQ ID NO: 2629944 - DNA, 25 bp, Homo sapien
gaagtcactgtttagctgtagcaag

SEQ ID NO: 2629945 - DNA, 25 bp, Homo sapien
tcgcagccagttgcgcagagtctgg

SEQ ID NO: 2629946 - DNA, 25 bp, Homo sapien
gatttggaatcgcagccagttgcgc

SEQ ID NO: 2629947 - DNA, 25 bp, Homo sapien
ccgctcctccgagccagaggcagag

SEQ ID NO: 2629948 - DNA, 25 bp, Homo sapien
ctgagggatttggaatcgcagccag

SEQ ID NO: 2629949 - DNA, 25 bp, Homo sapien
tcctaaagtcggtgtcacggtggca

SEQ ID NO: 2629950 - DNA, 25 bp, Homo sapien
caaaatggatgttgtccttgggaac

SEQ ID NO: 2629951 - DNA, 25 bp, Homo sapien
gagttctcttggtcgcggcacatct

SEQ ID NO: 2629952 - DNA, 25 bp, Homo sapien
ttttctgcgtgacaacaccgttggt

SEQ ID NO: 2629953 - DNA, 25 bp, Homo sapien
ttctcgaatctgctagtcccacacg

SEQ ID NO: 2629954 - DNA, 25 bp, Homo sapien
cattaggaagttatgtggtggctcc

SEQ ID NO: 2629955 - DNA, 25 bp, Homo sapien
ggcagtttccggctagcactttcgc

SEQ ID NO: 2629956 - DNA, 25 bp, Homo sapien
gaagtgtactaggttccagtcccgc

SEQ ID NO: 2629957 - DNA, 25 bp, Homo sapien
cagttatcagttgcagtccgctcgt

SEQ ID NO: 2629958 - DNA, 25 bp, Homo sapien
cagcagcactttgtcgtagtggcac

SEQ ID NO: 2629959 - DNA, 25 bp, Homo sapien
gcaccatcgagccagaagcagtatt

SEQ ID NO: 2629960 - DNA, 25 bp, Homo sapien
tgacagtgcagctcgtttctcagag

SEQ ID NO: 2629961 - DNA, 25 bp, Homo sapien
gatagaaatcgggaactgccctttg

SEQ ID NO: 2629962 - DNA, 25 bp, Homo sapien
tgcgcatcgcaagggatcggttgat

SEQ ID NO: 2629963 - DNA, 25 bp, Homo sapien
tccaaagggatgaggtgtcggcttc

SEQ ID NO: 2629964 - DNA, 25 bp, Homo sapien
cacgtcctgtgctagagtcttgcga

SEQ ID NO: 2629965 - DNA, 25 bp, Homo sapien
tgacatccgcccaggttcatccaga

SEQ ID NO: 2629966 - DNA, 25 bp, Homo sapien
cacgatgagttcagctggagacact

SEQ ID NO: 2629967 - DNA, 25 bp, Homo sapien
gtgctcttctctggtctgacatccg

SEQ ID NO: 2629968 - DNA, 25 bp, Homo sapien
taagctagggtgaggattagacacg

SEQ ID NO: 2629969 - DNA, 25 bp, Homo sapien
tattctactgcctgcaaaagaaggc

SEQ ID NO: 2629970 - DNA, 25 bp, Homo sapien
gaatatacagttgccgacttgccct

SEQ ID NO: 2629971 - DNA, 25 bp, Homo sapien
gaagaagcctcaagtaccagggcag

SEQ ID NO: 2629972 - DNA, 25 bp, Homo sapien
tgaatgccggaactagaatgcctcc

SEQ ID NO: 2629973 - DNA, 25 bp, Homo sapien
gaaagtattaaaggctgggcatcat

SEQ ID NO: 2629974 - DNA, 25 bp, Homo sapien
gcctagaacctgcatacacttagca

SEQ ID NO: 2629975 - DNA, 25 bp, Homo sapien
cagatttgatctggtgcctagaacc

SEQ ID NO: 2629976 - DNA, 25 bp, Homo sapien
aaaaatatactttgcggctgggcac

SEQ ID NO: 2629977 - DNA, 25 bp, Homo sapien
catggatttactggagacttgtagc

SEQ ID NO: 2629978 - DNA, 25 bp, Homo sapien
gatgaattcacagcactctctgccc

SEQ ID NO: 2629979 - DNA, 25 bp, Homo sapien
tgacttcccagacaattcacctgtg

SEQ ID NO: 2629980 - DNA, 25 bp, Homo sapien
gagagattcttaatccggtccatgg

SEQ ID NO: 2629981 - DNA, 25 bp, Homo sapien
gatattcggcgtaagctacagaagc

SEQ ID NO: 2629982 - DNA, 25 bp, Homo sapien
gagtttcaaatgcttgactccgcca

SEQ ID NO: 2629983 - DNA, 25 bp, Homo sapien
taataccgggcaacctactctgctt

SEQ ID NO: 2629984 - DNA, 25 bp, Homo sapien
tccacctggcgcatgtttcaagtat

SEQ ID NO: 2629985 - DNA, 25 bp, Homo sapien
ggataatgggtccaaatggcccgca

SEQ ID NO: 2629986 - DNA, 25 bp, Homo sapien
ccttacatctagtgccgaaaccggg

SEQ ID NO: 2629987 - DNA, 25 bp, Homo sapien
tcctcgttagatccagcagactgct

SEQ ID NO: 2629988 - DNA, 25 bp, Homo sapien
ggcgtgctctcagggtttgaaccaa

SEQ ID NO: 2629989 - DNA, 25 bp, Homo sapien
ttctctagcctaggaaggttcaagt

SEQ ID NO: 2629990 - DNA, 25 bp, Homo sapien
gggtggcacatcctgatccccttta

SEQ ID NO: 2629991 - DNA, 25 bp, Homo sapien
aacaattggagttcactgcggccta

SEQ ID NO: 2629992 - DNA, 25 bp, Homo sapien
caacttagactctgatgctccatgg

SEQ ID NO: 2629993 - DNA, 25 bp, Homo sapien
gaagtgagacctgctggcggcaata

SEQ ID NO: 2629994 - DNA, 25 bp, Homo sapien
gtctcagtgtaaaacctgatcatat

SEQ ID NO: 2629995 - DNA, 25 bp, Homo sapien
aaaactgccttatggctggaagtga

SEQ ID NO: 2629996 - DNA, 25 bp, Homo sapien
cactgagatgtctgtgtaaagtcaa

SEQ ID NO: 2629997 - DNA, 25 bp, Homo sapien
ggttattagtctggaaacaacagga

SEQ ID NO: 2629998 - DNA, 25 bp, Homo sapien
agcctgattatagcctgctgcagtc

SEQ ID NO: 2629999 - DNA, 25 bp, Homo sapien
agtagcctgattatagcctgctgca

SEQ ID NO: 2630000 - DNA, 25 bp, Homo sapien
taacattttaggttattagtctgga

SEQ ID NO: 2630001 - DNA, 25 bp, Homo sapien
tagatgctgatgtatgcggaaccca

SEQ ID NO: 2630002 - DNA, 25 bp, Homo sapien
tatactggctatgagacttctgttg

SEQ ID NO: 2630003 - DNA, 25 bp, Homo sapien
aaggactcacctactcagacagaaa

SEQ ID NO: 2630004 - DNA, 25 bp, Homo sapien
ttaggagctgtctcaagtaagagct

SEQ ID NO: 2630005 - DNA, 25 bp, Homo sapien
aactgtgcgcttctcaatatcctgc

SEQ ID NO: 2630006 - DNA, 25 bp, Homo sapien
tttctatccgctctcctattgttgg

SEQ ID NO: 2630007 - DNA, 25 bp, Homo sapien
ttatgttgctataatgcagccatga

SEQ ID NO: 2630008 - DNA, 25 bp, Homo sapien
tatctttacatgtgcagtcaccctg

SEQ ID NO: 2630009 - DNA, 25 bp, Homo sapien
ggtgttagcattaggcccatcttcc

SEQ ID NO: 2630010 - DNA, 25 bp, Homo sapien
gcaattctgccgtcaagaggtccat

SEQ ID NO: 2630011 - DNA, 25 bp, Homo sapien
tattactctgtcacgcatactggag

SEQ ID NO: 2630012 - DNA, 25 bp, Homo sapien
tgtgtgaccccataccttgttgtag

SEQ ID NO: 2630013 - DNA, 25 bp, Homo sapien
gaaaagtcaagcttggacccaagtc

SEQ ID NO: 2630014 - DNA, 25 bp, Homo sapien
tcttgtggaccttgatatctgtacc

SEQ ID NO: 2630015 - DNA, 25 bp, Homo sapien
taaagccctgccaactgaagttagg

SEQ ID NO: 2630016 - DNA, 25 bp, Homo sapien
tcttcatgggtactggacaaaggac

SEQ ID NO: 2630017 - DNA, 25 bp, Homo sapien
attgaaacatttgccgagcgtggtg

SEQ ID NO: 2630018 - DNA, 25 bp, Homo sapien
tcataaggatcctgacaagtactct

SEQ ID NO: 2630019 - DNA, 25 bp, Homo sapien
gttgataacttcaagcagaacagga

SEQ ID NO: 2630020 - DNA, 25 bp, Homo sapien
gaatgaattacatggaactaaactg

SEQ ID NO: 2630021 - DNA, 25 bp, Homo sapien
tggcctatgttatgattcatatgat

SEQ ID NO: 2630022 - DNA, 25 bp, Homo sapien
gcctttaatagttgacaaacttctc

SEQ ID NO: 2630023 - DNA, 25 bp, Homo sapien
tcctctctatcaaagagtaagggtt

SEQ ID NO: 2630024 - DNA, 25 bp, Homo sapien
agaaaaaagagagtttgcctcatgc

SEQ ID NO: 2630025 - DNA, 25 bp, Homo sapien
cactgtctggcgatggatgaactgt

SEQ ID NO: 2630026 - DNA, 25 bp, Homo sapien
tgtgttcctaatgcatgtgtactga

SEQ ID NO: 2630027 - DNA, 25 bp, Homo sapien
gaacaagggcctcagttagtcactg

SEQ ID NO: 2630028 - DNA, 25 bp, Homo sapien
ggaaagtgtagtccccagccaaaga

SEQ ID NO: 2630029 - DNA, 25 bp, Homo sapien
tttatacctaagcttgacagccctg

SEQ ID NO: 2630030 - DNA, 25 bp, Homo sapien
gaaccatgtcaaaaggtacctgaga

SEQ ID NO: 2630031 - DNA, 25 bp, Homo sapien
gacctggcttggaaatatgatcctc

SEQ ID NO: 2630032 - DNA, 25 bp, Homo sapien
tagagggcatcaagatcttcccaga

SEQ ID NO: 2630033 - DNA, 25 bp, Homo sapien
tgtgcttttcaataaaggattggga

SEQ ID NO: 2630034 - DNA, 25 bp, Homo sapien
actgcgcctggctcaaatgtgcttt

SEQ ID NO: 2630035 - DNA, 25 bp, Homo sapien
cgcctggctcaaatgtgcttttcaa

SEQ ID NO: 2630036 - DNA, 25 bp, Homo sapien
tgcgcctggctcaaatgtgcttttc

SEQ ID NO: 2630037 - DNA, 25 bp, Homo sapien
tgagagaggccaaaacactgagacc

SEQ ID NO: 2630038 - DNA, 25 bp, Homo sapien
caagatgccgcagttccttcaagaa

SEQ ID NO: 2630039 - DNA, 25 bp, Homo sapien
tcaggtaagtatcaccccagctgcc

SEQ ID NO: 2630040 - DNA, 25 bp, Homo sapien
gatgctgcatcccaatggagcttac

SEQ ID NO: 2630041 - DNA, 25 bp, Homo sapien
taaaattgaatgtgatatcactcat

SEQ ID NO: 2630042 - DNA, 25 bp, Homo sapien
gaatgtgatatcactcatatttcct

SEQ ID NO: 2630043 - DNA, 25 bp, Homo sapien
ttgaatgtgatatcactcatatttc

SEQ ID NO: 2630044 - DNA, 25 bp, Homo sapien
cataaaattgaatgtgatatcactc

SEQ ID NO: 2630045 - DNA, 25 bp, Homo sapien
tatatttcccaaccaaggcttcctg

SEQ ID NO: 2630046 - DNA, 25 bp, Homo sapien
tcggatagctcctagatcctgtgcc

SEQ ID NO: 2630047 - DNA, 25 bp, Homo sapien
gattcacttgctcggatagctccta

SEQ ID NO: 2630048 - DNA, 25 bp, Homo sapien
ctccctagattcacttgctcggata

SEQ ID NO: 2630049 - DNA, 25 bp, Homo sapien
caaattcttgtcttggccctggtct

SEQ ID NO: 2630050 - DNA, 25 bp, Homo sapien
tgtcatctttgtaccacgagcctag

SEQ ID NO: 2630051 - DNA, 25 bp, Homo sapien
tacagtggttgcttcatggcggaca

SEQ ID NO: 2630052 - DNA, 25 bp, Homo sapien
cactgtagctctgtctgtgaggcct

SEQ ID NO: 2630053 - DNA, 25 bp, Homo sapien
tgtggtctcctagaggtcatcaggg

SEQ ID NO: 2630054 - DNA, 25 bp, Homo sapien
tcttacacggtactaaagtggccta

SEQ ID NO: 2630055 - DNA, 25 bp, Homo sapien
taagaatagcagaataggacatgga

SEQ ID NO: 2630056 - DNA, 25 bp, Homo sapien
tcttaaaggattcatgcatagggct

SEQ ID NO: 2630057 - DNA, 25 bp, Homo sapien
cctatcaagttgtcaggtaaggtgg

SEQ ID NO: 2630058 - DNA, 25 bp, Homo sapien
ctttaatctcaaggctccaatggga

SEQ ID NO: 2630059 - DNA, 25 bp, Homo sapien
tgaaggcttcagttctccgcaaggc

SEQ ID NO: 2630060 - DNA, 25 bp, Homo sapien
ttcagttctccgcaaggcctctgtt

SEQ ID NO: 2630061 - DNA, 25 bp, Homo sapien
aacagtaattgcctaggtgcttgct

SEQ ID NO: 2630062 - DNA, 25 bp, Homo sapien
tagtactagacactgagaagtccag

SEQ ID NO: 2630063 - DNA, 25 bp, Homo sapien
gaattgggattacggaggaactcaa

SEQ ID NO: 2630064 - DNA, 25 bp, Homo sapien
tgagttttgcaacacctgaagaacg

SEQ ID NO: 2630065 - DNA, 25 bp, Homo sapien
ttttcttcgtgagagccggggctcc

SEQ ID NO: 2630066 - DNA, 25 bp, Homo sapien
agagcctcttgttccgtgctttccc

SEQ ID NO: 2630067 - DNA, 25 bp, Homo sapien
agggcataatgcgccccacgccttt

SEQ ID NO: 2630068 - DNA, 25 bp, Homo sapien
tagctcgtgggtcgccctccttcct

SEQ ID NO: 2630069 - DNA, 25 bp, Homo sapien
gcttgggctactgcagagcctggca

SEQ ID NO: 2630070 - DNA, 25 bp, Homo sapien
ctctgagaagaaaccgggcagcggt

SEQ ID NO: 2630071 - DNA, 25 bp, Homo sapien
caggcttgcgcgtcacttacgtcga

SEQ ID NO: 2630072 - DNA, 25 bp, Homo sapien
gaagctgggaacctaagtcattgcc

SEQ ID NO: 2630073 - DNA, 25 bp, Homo sapien
acagcgccggaggttccgagcgcca

SEQ ID NO: 2630074 - DNA, 25 bp, Homo sapien
cagggcgcgcaagtccaacaaggga

SEQ ID NO: 2630075 - DNA, 25 bp, Homo sapien
gactcgacagccgtggcggtcctct

SEQ ID NO: 2630076 - DNA, 25 bp, Homo sapien
aattggagtcgggagacgcgagcta

SEQ ID NO: 2630077 - DNA, 25 bp, Homo sapien
gtacacccatgagctcgagccgagg

SEQ ID NO: 2630078 - DNA, 25 bp, Homo sapien
gaaaggcgagggaagaaaggcgagc

SEQ ID NO: 2630079 - DNA, 25 bp, Homo sapien
caaaagaagagcatgataatgtaca

SEQ ID NO: 2630080 - DNA, 25 bp, Homo sapien
gagctcgagccgaggaacaaaaccc

SEQ ID NO: 2630081 - DNA, 25 bp, Homo sapien
caatcggtcgaggatcattttatga

SEQ ID NO: 2630082 - DNA, 25 bp, Homo sapien
gctgttcattcaatcggtcgaggat

SEQ ID NO: 2630083 - DNA, 25 bp, Homo sapien
agggtgatgtcagtaaaccggtcct

SEQ ID NO: 2630084 - DNA, 25 bp, Homo sapien
tcagtaaaccggtcctgctctcgct

SEQ ID NO: 2630085 - DNA, 25 bp, Homo sapien
gccttgtgagccttaaaatggtgtc

SEQ ID NO: 2630086 - DNA, 25 bp, Homo sapien
tcctgaaagaatttgtagaagaact

SEQ ID NO: 2630087 - DNA, 25 bp, Homo sapien
taaactcctgaaagaatttgtagaa

SEQ ID NO: 2630088 - DNA, 25 bp, Homo sapien
ccaatggttcttgggtaaactcctg

SEQ ID NO: 2630089 - DNA, 25 bp, Homo sapien
tatctccaccaatggttcttgggta

SEQ ID NO: 2630090 - DNA, 25 bp, Homo sapien
aaactacatatcacaacgcctggca

SEQ ID NO: 2630091 - DNA, 25 bp, Homo sapien
taattccttgctagttggacaaccc

SEQ ID NO: 2630092 - DNA, 25 bp, Homo sapien
caaacgattgctgtgagccttagac

SEQ ID NO: 2630093 - DNA, 25 bp, Homo sapien
tgatccatcccattgtagagccaga

SEQ ID NO: 2630094 - DNA, 25 bp, Homo sapien
ttaactgcccgctaaagtgaaacca

SEQ ID NO: 2630095 - DNA, 25 bp, Homo sapien
tgggacctgaacagcaatacgaagg

SEQ ID NO: 2630096 - DNA, 25 bp, Homo sapien
taagttcaaactggatccacagccc

SEQ ID NO: 2630097 - DNA, 25 bp, Homo sapien
agtcacggagagaagaaacgtcctc

SEQ ID NO: 2630098 - DNA, 25 bp, Homo sapien
tgtggcattactctagactcaggga

SEQ ID NO: 2630099 - DNA, 25 bp, Homo sapien
taatttgaagcaagcagactggcga

SEQ ID NO: 2630100 - DNA, 25 bp, Homo sapien
aatcctgagtctgcacacctgtggc

SEQ ID NO: 2630101 - DNA, 25 bp, Homo sapien
cagcttagacttgaggacagcccaa

SEQ ID NO: 2630102 - DNA, 25 bp, Homo sapien
tgagggaaccatatgctagggatgt

SEQ ID NO: 2630103 - DNA, 25 bp, Homo sapien
caaaaaatgtgataagggccaggcg

SEQ ID NO: 2630104 - DNA, 25 bp, Homo sapien
ggagaaaacttcgtatgccatgtca

SEQ ID NO: 2630105 - DNA, 25 bp, Homo sapien
tgccatgtcaacacagaggtggtca

SEQ ID NO: 2630106 - DNA, 25 bp, Homo sapien
tctgctcctttggtctgtatgtctc

SEQ ID NO: 2630107 - DNA, 25 bp, Homo sapien
gatcagttgaccatattatttgcat

SEQ ID NO: 2630108 - DNA, 25 bp, Homo sapien
catttgttgcagaaaacattccttc

SEQ ID NO: 2630109 - DNA, 25 bp, Homo sapien
cattcttggcatccctgaagatcag

SEQ ID NO: 2630110 - DNA, 25 bp, Homo sapien
gtgcttttgacgtcacatccacgaa

SEQ ID NO: 2630111 - DNA, 25 bp, Homo sapien
cttgatgcctagtgacactgaactt

SEQ ID NO: 2630112 - DNA, 25 bp, Homo sapien
taagaatgatgtggtgaagcttccc

SEQ ID NO: 2630113 - DNA, 25 bp, Homo sapien
tgaagtgactgatacctcatagtgg

SEQ ID NO: 2630114 - DNA, 25 bp, Homo sapien
tatgtgaactcaattaaatggcgaa

SEQ ID NO: 2630115 - DNA, 25 bp, Homo sapien
atatgtgaactcaattaaatggcga

SEQ ID NO: 2630116 - DNA, 25 bp, Homo sapien
gaatggacataaacctggcaactga

SEQ ID NO: 2630117 - DNA, 25 bp, Homo sapien
tttagaggcttatgacggaatggac

SEQ ID NO: 2630118 - DNA, 25 bp, Homo sapien
caagaaaaagtgctcctaccaggct

SEQ ID NO: 2630119 - DNA, 25 bp, Homo sapien
tttgcagagtgggataagccagcct

SEQ ID NO: 2630120 - DNA, 25 bp, Homo sapien
tagtagacatcctccctatgggaca

SEQ ID NO: 2630121 - DNA, 25 bp, Homo sapien
gacttatttatgcacatcccgtggg

SEQ ID NO: 2630122 - DNA, 25 bp, Homo sapien
tatacttagactaatgcccagggct

SEQ ID NO: 2630123 - DNA, 25 bp, Homo sapien
aggaagatcaagcagccctcgggtg

SEQ ID NO: 2630124 - DNA, 25 bp, Homo sapien
ccacttcaatggtgccttcggcaat

SEQ ID NO: 2630125 - DNA, 25 bp, Homo sapien
gggtcagatggacagccatcttctt

SEQ ID NO: 2630126 - DNA, 25 bp, Homo sapien
tcaccttgacggtacttgctggtaa

SEQ ID NO: 2630127 - DNA, 25 bp, Homo sapien
tacggactgcttggcagaagccact

SEQ ID NO: 2630128 - DNA, 25 bp, Homo sapien
gtccttcacatgtgacagctgaagt

SEQ ID NO: 2630129 - DNA, 25 bp, Homo sapien
cagctgaagttccacaatttcaata

SEQ ID NO: 2630130 - DNA, 25 bp, Homo sapien
gctctctcgaagatatcgtttattg

SEQ ID NO: 2630131 - DNA, 25 bp, Homo sapien
tgcgctctctcgaagatatcgttta

SEQ ID NO: 2630132 - DNA, 25 bp, Homo sapien
tttccatgcgctctctcgaagatat

SEQ ID NO: 2630133 - DNA, 25 bp, Homo sapien
ctctcgaagatatcgtttattgcat

SEQ ID NO: 2630134 - DNA, 25 bp, Homo sapien
accagatgtggcctcataacagtga

SEQ ID NO: 2630135 - DNA, 25 bp, Homo sapien
ctgcagagtcgccactggcagggct

SEQ ID NO: 2630136 - DNA, 25 bp, Homo sapien
cagaagccacctgctatagtttgaa

SEQ ID NO: 2630137 - DNA, 25 bp, Homo sapien
taatgccctattaacagtgatccaa

SEQ ID NO: 2630138 - DNA, 25 bp, Homo sapien
gaatacctgtttcgaggctaactcc

SEQ ID NO: 2630139 - DNA, 25 bp, Homo sapien
gacgactccaagattcctcactgag

SEQ ID NO: 2630140 - DNA, 25 bp, Homo sapien
ggcattcgtagagcttcttccttcc

SEQ ID NO: 2630141 - DNA, 25 bp, Homo sapien
tggcattcgtagagcttcttccttc

SEQ ID NO: 2630142 - DNA, 25 bp, Homo sapien
ctggcattcgtagagcttcttcctt

SEQ ID NO: 2630143 - DNA, 25 bp, Homo sapien
gatctttgaactggtcccagctgtt

SEQ ID NO: 2630144 - DNA, 25 bp, Homo sapien
gtgatctttgaactggtcccagctg

SEQ ID NO: 2630145 - DNA, 25 bp, Homo sapien
caagtgatctttgaactggtcccag

SEQ ID NO: 2630146 - DNA, 25 bp, Homo sapien
tctttgaactggtcccagctgttaa

SEQ ID NO: 2630147 - DNA, 25 bp, Homo sapien
tgtgaatcgtgcacctggctgtcct

SEQ ID NO: 2630148 - DNA, 25 bp, Homo sapien
gattgacccgttcaacatgcagctc

SEQ ID NO: 2630149 - DNA, 25 bp, Homo sapien
gcagctcctctacatgtacttcagt

SEQ ID NO: 2630150 - DNA, 25 bp, Homo sapien
tgaaatattgtgagcatcactgaga

SEQ ID NO: 2630151 - DNA, 25 bp, Homo sapien
tgtttcaacggacaacagttcagca

SEQ ID NO: 2630152 - DNA, 25 bp, Homo sapien
gaaaagatccctcctctgtggcaat

SEQ ID NO: 2630153 - DNA, 25 bp, Homo sapien
actttggtccacttgtctgttaggc

SEQ ID NO: 2630154 - DNA, 25 bp, Homo sapien
ggacagtcaaactgcccataatcag

SEQ ID NO: 2630155 - DNA, 25 bp, Homo sapien
gaactggtggttgtcattataacca

SEQ ID NO: 2630156 - DNA, 25 bp, Homo sapien
cccttcagtggccattaaataaaat

SEQ ID NO: 2630157 - DNA, 25 bp, Homo sapien
catctggtggtaaaatactagtgca

SEQ ID NO: 2630158 - DNA, 25 bp, Homo sapien
caaactttgaaagaaccagagatgc

SEQ ID NO: 2630159 - DNA, 25 bp, Homo sapien
tgtaaagaactcccaatatttaaca

SEQ ID NO: 2630160 - DNA, 25 bp, Homo sapien
acgtacgcctcgtgccgagcggttc

SEQ ID NO: 2630161 - DNA, 25 bp, Homo sapien
cgacgtacgcctcgtgccgagcggt

SEQ ID NO: 2630162 - DNA, 25 bp, Homo sapien
cgcctcgtgccgagcggttccagcg

SEQ ID NO: 2630163 - DNA, 25 bp, Homo sapien
gtgccgagcggttccagcgcttcag

SEQ ID NO: 2630164 - DNA, 25 bp, Homo sapien
cagctcttgggcttcgctgcacggc

SEQ ID NO: 2630165 - DNA, 25 bp, Homo sapien
gagacgccccacagcgtttcctgaa

SEQ ID NO: 2630166 - DNA, 25 bp, Homo sapien
tttcctgaaggaccaatccggagcg

SEQ ID NO: 2630167 - DNA, 25 bp, Homo sapien
cgctgtcgcgcttgaggctcccgga

SEQ ID NO: 2630168 - DNA, 25 bp, Homo sapien
ggggtgctggcggcgagtcccccag

SEQ ID NO: 2630169 - DNA, 25 bp, Homo sapien
gtgctggcggcgagtcccccagccc

SEQ ID NO: 2630170 - DNA, 25 bp, Homo sapien
gggtgctggcggcgagtcccccagc

SEQ ID NO: 2630171 - DNA, 25 bp, Homo sapien
tgctggcggcgagtcccccagcccc

SEQ ID NO: 2630172 - DNA, 25 bp, Homo sapien
cccacttcgcagacaccccgtggca

SEQ ID NO: 2630173 - DNA, 25 bp, Homo sapien
acttcgcagacaccccgtggcaggg

SEQ ID NO: 2630174 - DNA, 25 bp, Homo sapien
cttccttgggtcgcggggaggagag

SEQ ID NO: 2630175 - DNA, 25 bp, Homo sapien
tcgcagacaccccgtggcagggctt

SEQ ID NO: 2630176 - DNA, 25 bp, Homo sapien
tgtcaagcacgcagaagctggctgg

SEQ ID NO: 2630177 - DNA, 25 bp, Homo sapien
tgtactcaggaggacgaaaacaggg

SEQ ID NO: 2630178 - DNA, 25 bp, Homo sapien
gaggctcttccttacttcgtgcggt

SEQ ID NO: 2630179 - DNA, 25 bp, Homo sapien
agacccggttgcgatcttttcctgg

SEQ ID NO: 2630180 - DNA, 25 bp, Homo sapien
caaacgcgatttgtgtaatttccaa

SEQ ID NO: 2630181 - DNA, 25 bp, Homo sapien
ttttggattcccgcggcctcaattg

SEQ ID NO: 2630182 - DNA, 25 bp, Homo sapien
gcctcaattgcaaacgcgatttgtg

SEQ ID NO: 2630183 - DNA, 25 bp, Homo sapien
catttgaaatcttgacttggaatca

SEQ ID NO: 2630184 - DNA, 25 bp, Homo sapien
ttcgtggaacatctaacaccctcct

SEQ ID NO: 2630185 - DNA, 25 bp, Homo sapien
ggattcgtggaacatctaacaccct

SEQ ID NO: 2630186 - DNA, 25 bp, Homo sapien
caggccaggattcgtggaacatcta

SEQ ID NO: 2630187 - DNA, 25 bp, Homo sapien
gccaggattcgtggaacatctaaca

SEQ ID NO: 2630188 - DNA, 25 bp, Homo sapien
cactgccttgatgagattactaaag

SEQ ID NO: 2630189 - DNA, 25 bp, Homo sapien
ggtgtgcagtggaacctaacactac

SEQ ID NO: 2630190 - DNA, 25 bp, Homo sapien
ctaacactacgaaacaggccactgc

SEQ ID NO: 2630191 - DNA, 25 bp, Homo sapien
cctgggatggcataagtcagtgaca

SEQ ID NO: 2630192 - DNA, 25 bp, Homo sapien
tgggagactggggggccgagtcagg

SEQ ID NO: 2630193 - DNA, 25 bp, Homo sapien
tggccttgggagactggggggccga

SEQ ID NO: 2630194 - DNA, 25 bp, Homo sapien
ctgggggagtggccttgggagactg

SEQ ID NO: 2630195 - DNA, 25 bp, Homo sapien
cctgggggagtggccttgggagact

SEQ ID NO: 2630196 - DNA, 25 bp, Homo sapien
gctttggtgccaagcatgaagtcaa

SEQ ID NO: 2630197 - DNA, 25 bp, Homo sapien
cagctttggtgccaagcatgaagtc

SEQ ID NO: 2630198 - DNA, 25 bp, Homo sapien
tttggtgccaagcatgaagtcaagt

SEQ ID NO: 2630199 - DNA, 25 bp, Homo sapien
atcagctttggtgccaagcatgaag

SEQ ID NO: 2630200 - DNA, 25 bp, Homo sapien
tccaggtgtgcaccaactccaccat

SEQ ID NO: 2630201 - DNA, 25 bp, Homo sapien
gcaccaactccaccatcccctgatc

SEQ ID NO: 2630202 - DNA, 25 bp, Homo sapien
aaatagccatggtccttccaggtgt

SEQ ID NO: 2630203 - DNA, 25 bp, Homo sapien
tgctaaatagccatggtccttccag

SEQ ID NO: 2630204 - DNA, 25 bp, Homo sapien
gtcctgactcaattccgctttgttc

SEQ ID NO: 2630205 - DNA, 25 bp, Homo sapien
tgcatcaccattgtaactctgaaga

SEQ ID NO: 2630206 - DNA, 25 bp, Homo sapien
cgctttgttcaaaataccgtcgatc

SEQ ID NO: 2630207 - DNA, 25 bp, Homo sapien
caccattgtaactctgaagatccag

SEQ ID NO: 2630208 - DNA, 25 bp, Homo sapien
taatgggccaatatctgttgatggc

SEQ ID NO: 2630209 - DNA, 25 bp, Homo sapien
ggtaatgggccaatatctgttgatg

SEQ ID NO: 2630210 - DNA, 25 bp, Homo sapien
caaccaggcgcccataggtaatggg

SEQ ID NO: 2630211 - DNA, 25 bp, Homo sapien
aaccaggcgcccataggtaatgggc

SEQ ID NO: 2630212 - DNA, 25 bp, Homo sapien
ccatctctctctcccagaatgagta

SEQ ID NO: 2630213 - DNA, 25 bp, Homo sapien
acttcccatgatgtcccaggtatat

SEQ ID NO: 2630214 - DNA, 25 bp, Homo sapien
ttcacacaatatgcccccatctctc

SEQ ID NO: 2630215 - DNA, 25 bp, Homo sapien
cagtgtaatctttgccacttcccat

SEQ ID NO: 2630216 - DNA, 25 bp, Homo sapien
gagcaacagcgcttccgtcagattg

SEQ ID NO: 2630217 - DNA, 25 bp, Homo sapien
ctatgaagaattctccagctgttct

SEQ ID NO: 2630218 - DNA, 25 bp, Homo sapien
aacagcgcttccgtcagattgacac

SEQ ID NO: 2630219 - DNA, 25 bp, Homo sapien
cttcatagagcaacagcgcttccgt

SEQ ID NO: 2630220 - DNA, 25 bp, Homo sapien
tcaagatctttccttcagcacaaaa

SEQ ID NO: 2630221 - DNA, 25 bp, Homo sapien
accatcaagatctttccttcagcac

SEQ ID NO: 2630222 - DNA, 25 bp, Homo sapien
gcaacacatgtggttaggggctatt

SEQ ID NO: 2630223 - DNA, 25 bp, Homo sapien
atctttccttcagcacaaaacaacg

SEQ ID NO: 2630224 - DNA, 25 bp, Homo sapien
aatttaattgaagcaattcctattc

SEQ ID NO: 2630225 - DNA, 25 bp, Homo sapien
tttaattgaagcaattcctattcat

SEQ ID NO: 2630226 - DNA, 25 bp, Homo sapien
taattgaagcaattcctattcattt

SEQ ID NO: 2630227 - DNA, 25 bp, Homo sapien
aattgaagcaattcctattcatttt

SEQ ID NO: 2630228 - DNA, 25 bp, Homo sapien
tagataagcttctgtacctcactgg

SEQ ID NO: 2630229 - DNA, 25 bp, Homo sapien
tgtgatggtagataagcttctgtac

SEQ ID NO: 2630230 - DNA, 25 bp, Homo sapien
tttctgtaacatcaagatgtgatgg

SEQ ID NO: 2630231 - DNA, 25 bp, Homo sapien
catcaagatgtgatggtagataagc

SEQ ID NO: 2630232 - DNA, 25 bp, Homo sapien
taattgacccggtatttttggctga

SEQ ID NO: 2630233 - DNA, 25 bp, Homo sapien
gctttgggagccacttctgagaatt

SEQ ID NO: 2630234 - DNA, 25 bp, Homo sapien
tagtacttgctaattgacccggtat

SEQ ID NO: 2630235 - DNA, 25 bp, Homo sapien
cacactgttccatagtacttgctaa

SEQ ID NO: 2630236 - DNA, 25 bp, Homo sapien
atcatgaagtcaaagctcatgcagg

SEQ ID NO: 2630237 - DNA, 25 bp, Homo sapien
catgcaggtctacttggcttgggaa

SEQ ID NO: 2630238 - DNA, 25 bp, Homo sapien
acaagaatcatgaagtcaaagctca

SEQ ID NO: 2630239 - DNA, 25 bp, Homo sapien
aaagctcatgcaggtctacttggct

SEQ ID NO: 2630240 - DNA, 25 bp, Homo sapien
ctggcgtagtaagtaataacgtagg

SEQ ID NO: 2630241 - DNA, 25 bp, Homo sapien
taacgtagggattactgaagggagc

SEQ ID NO: 2630242 - DNA, 25 bp, Homo sapien
tatgtcaaatccaaactggcgtagt

SEQ ID NO: 2630243 - DNA, 25 bp, Homo sapien
taaattatgtaggtatctgcagtca

SEQ ID NO: 2630244 - DNA, 25 bp, Homo sapien
gattcatggttgactggagtatgag

SEQ ID NO: 2630245 - DNA, 25 bp, Homo sapien
catgaaacgttctgaagaggcaaat

SEQ ID NO: 2630246 - DNA, 25 bp, Homo sapien
tagtagtggtgtatgcacaactctc

SEQ ID NO: 2630247 - DNA, 25 bp, Homo sapien
ggtaaagctggctaagcaaagcagg

SEQ ID NO: 2630248 - DNA, 25 bp, Homo sapien
acaccttattgggactcgctgtgag

SEQ ID NO: 2630249 - DNA, 25 bp, Homo sapien
tatcaagagagcaccaatatgtggc

SEQ ID NO: 2630250 - DNA, 25 bp, Homo sapien
tgcactctcgggacttatcatgacc

SEQ ID NO: 2630251 - DNA, 25 bp, Homo sapien
gaaatggagctgcaaaggaataaag

SEQ ID NO: 2630252 - DNA, 25 bp, Homo sapien
ttaatgtccaggatttaatacttgg

SEQ ID NO: 2630253 - DNA, 25 bp, Homo sapien
taatacttggtataaggtaagctga

SEQ ID NO: 2630254 - DNA, 25 bp, Homo sapien
gatatatgctgtctctagcctgcta

SEQ ID NO: 2630255 - DNA, 25 bp, Homo sapien
taagctgaacactttgatatatgct

SEQ ID NO: 2630256 - DNA, 25 bp, Homo sapien
gcttcttcagtgagacgggctccgg

SEQ ID NO: 2630257 - DNA, 25 bp, Homo sapien
gctgaacagtgcatggatcgccaag

SEQ ID NO: 2630258 - DNA, 25 bp, Homo sapien
gatcactgacctcgttttggaccaa

SEQ ID NO: 2630259 - DNA, 25 bp, Homo sapien
gaagcagtaatcatgcgtgaccgca

SEQ ID NO: 2630260 - DNA, 25 bp, Homo sapien
caggaactttctggccagacgtgga

SEQ ID NO: 2630261 - DNA, 25 bp, Homo sapien
gatgaaccttcctctaagccgtgag

SEQ ID NO: 2630262 - DNA, 25 bp, Homo sapien
cagggcgctggagacctaataatct

SEQ ID NO: 2630263 - DNA, 25 bp, Homo sapien
tctggtgcgtaaatgcccctgggag

SEQ ID NO: 2630264 - DNA, 25 bp, Homo sapien
tgctactctcggtctgacagccact

SEQ ID NO: 2630265 - DNA, 25 bp, Homo sapien
cctcgaattcggtagaagcctatcc

SEQ ID NO: 2630266 - DNA, 25 bp, Homo sapien
tgtcagtttctcgaagggcgtcagc

SEQ ID NO: 2630267 - DNA, 25 bp, Homo sapien
agcctatccgtttccccagcgtgat

SEQ ID NO: 2630268 - DNA, 25 bp, Homo sapien
taggtcccaatactgccagggatga

SEQ ID NO: 2630269 - DNA, 25 bp, Homo sapien
aatactgccagggatgacccttggg

SEQ ID NO: 2630270 - DNA, 25 bp, Homo sapien
tcccaatactgccagggatgaccct

SEQ ID NO: 2630271 - DNA, 25 bp, Homo sapien
tacactaggtcccaatactgccagg

SEQ ID NO: 2630272 - DNA, 25 bp, Homo sapien
gtcagtgttttcactcaactttttc

SEQ ID NO: 2630273 - DNA, 25 bp, Homo sapien
tgactggagcatgcccagtagacag

SEQ ID NO: 2630274 - DNA, 25 bp, Homo sapien
ggagcatgcccagtagacagctcct

SEQ ID NO: 2630275 - DNA, 25 bp, Homo sapien
tgtcagtgttttcactcaacttttt

SEQ ID NO: 2630276 - DNA, 25 bp, Homo sapien
tcatccctagggtgcaaggctcatt

SEQ ID NO: 2630277 - DNA, 25 bp, Homo sapien
cgtaatccatcattatacaaacaga

SEQ ID NO: 2630278 - DNA, 25 bp, Homo sapien
cctagggtgcaaggctcattcaaca

SEQ ID NO: 2630279 - DNA, 25 bp, Homo sapien
caacatcctaataccaaaacctgga

SEQ ID NO: 2630280 - DNA, 25 bp, Homo sapien
tccttccctgttctttactcttgct

SEQ ID NO: 2630281 - DNA, 25 bp, Homo sapien
tgttctttactcttgctttcactca

SEQ ID NO: 2630282 - DNA, 25 bp, Homo sapien
ccaccacttcgtaaaggcggatgat

SEQ ID NO: 2630283 - DNA, 25 bp, Homo sapien
tcttgtccaggatcttaatggccac

SEQ ID NO: 2630284 - DNA, 25 bp, Homo sapien
tgtgcttcacggcagacacaatctg

SEQ ID NO: 2630285 - DNA, 25 bp, Homo sapien
gctaatttttccgaagagctcccca

SEQ ID NO: 2630286 - DNA, 25 bp, Homo sapien
tactcaggcctgcaagtcaggttcc

SEQ ID NO: 2630287 - DNA, 25 bp, Homo sapien
tacagagtgtgcattaggagtccag

SEQ ID NO: 2630288 - DNA, 25 bp, Homo sapien
tttctgacagatccgttcaactggg

SEQ ID NO: 2630289 - DNA, 25 bp, Homo sapien
tgctcctacaaccatgcaggctgag

SEQ ID NO: 2630290 - DNA, 25 bp, Homo sapien
cctgatggccctcctggaataagaa

SEQ ID NO: 2630291 - DNA, 25 bp, Homo sapien
ttacagaattcagccgaagggaggt

SEQ ID NO: 2630292 - DNA, 25 bp, Homo sapien
tgacctgttcagtcccaagggctct

SEQ ID NO: 2630293 - DNA, 25 bp, Homo sapien
gaacacactgtggattgtgggcaca

SEQ ID NO: 2630294 - DNA, 25 bp, Homo sapien
catttttacagtaaaatgtcaaaat

SEQ ID NO: 2630295 - DNA, 25 bp, Homo sapien
tcatttttacagtaaaatgtcaaaa

SEQ ID NO: 2630296 - DNA, 25 bp, Homo sapien
cagtaaaatgtcaaaataaaaaatg

SEQ ID NO: 2630297 - DNA, 25 bp, Homo sapien
tagcatcatgactgggacactttcc

SEQ ID NO: 2630298 - DNA, 25 bp, Homo sapien
tccttgagagtgctggtttccgaca

SEQ ID NO: 2630299 - DNA, 25 bp, Homo sapien
gacccctgtgattgagctgcgagca

SEQ ID NO: 2630300 - DNA, 25 bp, Homo sapien
taaatgccgatgtagtgctcgtccc

SEQ ID NO: 2630301 - DNA, 25 bp, Homo sapien
tttagaagcagcaacaatcatcttg

SEQ ID NO: 2630302 - DNA, 25 bp, Homo sapien
ggttagttacaagcagtctagtgca

SEQ ID NO: 2630303 - DNA, 25 bp, Homo sapien
gcaacaatcatcttggttagttaca

SEQ ID NO: 2630304 - DNA, 25 bp, Homo sapien
caatcatcttggttagttacaagca

SEQ ID NO: 2630305 - DNA, 25 bp, Homo sapien
tcccaattgcacagcccaaaggtgc

SEQ ID NO: 2630306 - DNA, 25 bp, Homo sapien
agcctccctgacgtggaatgtctgc

SEQ ID NO: 2630307 - DNA, 25 bp, Homo sapien
cgtggaatgtctgcagaacttgttt

SEQ ID NO: 2630308 - DNA, 25 bp, Homo sapien
gcagaacttgtttggtactcccaat

SEQ ID NO: 2630309 - DNA, 25 bp, Homo sapien
gacactagacccaaacagatgcaaa

SEQ ID NO: 2630310 - DNA, 25 bp, Homo sapien
tttgaggttgacactagacccaaac

SEQ ID NO: 2630311 - DNA, 25 bp, Homo sapien
gatgcaaacagccactttctgtcct

SEQ ID NO: 2630312 - DNA, 25 bp, Homo sapien
cactttctgtcctcttgtgacacag

SEQ ID NO: 2630313 - DNA, 25 bp, Homo sapien
gtgctgaactatgacatgagcctta

SEQ ID NO: 2630314 - DNA, 25 bp, Homo sapien
tactggcacagagcattaatcatac

SEQ ID NO: 2630315 - DNA, 25 bp, Homo sapien
tttctcaaagtccattgccggcaat

SEQ ID NO: 2630316 - DNA, 25 bp, Homo sapien
ttaaagaatggtggcaaaatggtgc

SEQ ID NO: 2630317 - DNA, 25 bp, Homo sapien
tcaacatagaggctgacaacctaaa

SEQ ID NO: 2630318 - DNA, 25 bp, Homo sapien
agtgttataaattcaacatagaggc

SEQ ID NO: 2630319 - DNA, 25 bp, Homo sapien
gaggctgacaacctaaattcatggt

SEQ ID NO: 2630320 - DNA, 25 bp, Homo sapien
gacaacctaaattcatggtgtaaca

SEQ ID NO: 2630321 - DNA, 25 bp, Homo sapien
tagattatgctgaacaacagtgaga

SEQ ID NO: 2630322 - DNA, 25 bp, Homo sapien
aacatggtacattcaggagctgtga

SEQ ID NO: 2630323 - DNA, 25 bp, Homo sapien
ctaggtgtgctcctgaatcagttca

SEQ ID NO: 2630324 - DNA, 25 bp, Homo sapien
tattgtaatgacctctgaacagaga

SEQ ID NO: 2630325 - DNA, 25 bp, Homo sapien
tttatgaaggctagctctgaactct

SEQ ID NO: 2630326 - DNA, 25 bp, Homo sapien
caagcatgttggtggtagatcacag

SEQ ID NO: 2630327 - DNA, 25 bp, Homo sapien
tgtggcatgactttcacaagctctg

SEQ ID NO: 2630328 - DNA, 25 bp, Homo sapien
tagaagacacctactttgatagaga

SEQ ID NO: 2630329 - DNA, 25 bp, Homo sapien
atgcaggtactacttgctaagagct

SEQ ID NO: 2630330 - DNA, 25 bp, Homo sapien
gagctttatgtgtgttatcatattt

SEQ ID NO: 2630331 - DNA, 25 bp, Homo sapien
cttatcttgtaggacaaatggtcta

SEQ ID NO: 2630332 - DNA, 25 bp, Homo sapien
agaaagatattttacctgtctgtca

SEQ ID NO: 2630333 - DNA, 25 bp, Homo sapien
cattatccgaattgtgaattggtta

SEQ ID NO: 2630334 - DNA, 25 bp, Homo sapien
tttagtcagatggatgacagagcct

SEQ ID NO: 2630335 - DNA, 25 bp, Homo sapien
ggctacttgccattcattaactgct

SEQ ID NO: 2630336 - DNA, 25 bp, Homo sapien
ctggctacttgccattcattaactg

SEQ ID NO: 2630337 - DNA, 25 bp, Homo sapien
gcctggctacttgccattcattaac

SEQ ID NO: 2630338 - DNA, 25 bp, Homo sapien
ctgcctggctacttgccattcatta

SEQ ID NO: 2630339 - DNA, 25 bp, Homo sapien
cagtagcagtaaagagccagtttct

SEQ ID NO: 2630340 - DNA, 25 bp, Homo sapien
catcctaatgcatggcgtgtgttga

SEQ ID NO: 2630341 - DNA, 25 bp, Homo sapien
tcaccttggaatctgggaacaattg

SEQ ID NO: 2630342 - DNA, 25 bp, Homo sapien
gaaacctaccatatgccttgaacag

SEQ ID NO: 2630343 - DNA, 25 bp, Homo sapien
tttatgtttggagccataggccaca

SEQ ID NO: 2630344 - DNA, 25 bp, Homo sapien
tatgtttggagccataggccacatc

SEQ ID NO: 2630345 - DNA, 25 bp, Homo sapien
atgtttggagccataggccacatca

SEQ ID NO: 2630346 - DNA, 25 bp, Homo sapien
attttatgtttggagccataggcca

SEQ ID NO: 2630347 - DNA, 25 bp, Homo sapien
gggcgttgaggtctaggtattctaa

SEQ ID NO: 2630348 - DNA, 25 bp, Homo sapien
ctgaggccgaccgtagcggatctga

SEQ ID NO: 2630349 - DNA, 25 bp, Homo sapien
tgagaagatccgagaacacaggcga

SEQ ID NO: 2630350 - DNA, 25 bp, Homo sapien
ggtattctaacgacagaggagttgg

SEQ ID NO: 2630351 - DNA, 25 bp, Homo sapien
gagtcgggtgggttggcggctataa

SEQ ID NO: 2630352 - DNA, 25 bp, Homo sapien
tgctgccgctcggtcacgcttggtg

SEQ ID NO: 2630353 - DNA, 25 bp, Homo sapien
gcggactgtcctttcgtggctcact

SEQ ID NO: 2630354 - DNA, 25 bp, Homo sapien
cggctataaagctggtggcgaaggg

SEQ ID NO: 2630355 - DNA, 25 bp, Homo sapien
gcgagtcatcgcctctagtttcctt

SEQ ID NO: 2630356 - DNA, 25 bp, Homo sapien
ttttgattggtagaagccggactgg

SEQ ID NO: 2630357 - DNA, 25 bp, Homo sapien
gggaaaatcctagcgagtcatcgcc

SEQ ID NO: 2630358 - DNA, 25 bp, Homo sapien
acttcctcggccctgagactttgtc

SEQ ID NO: 2630359 - DNA, 25 bp, Homo sapien
acctttctgtagaagtactttgcct

SEQ ID NO: 2630360 - DNA, 25 bp, Homo sapien
ctgtaagggcacacctttctgtaga

SEQ ID NO: 2630361 - DNA, 25 bp, Homo sapien
cctttctgtagaagtactttgcctt

SEQ ID NO: 2630362 - DNA, 25 bp, Homo sapien
cacctttctgtagaagtactttgcc

SEQ ID NO: 2630363 - DNA, 25 bp, Homo sapien
cactccagtctgactgacaaagtga

SEQ ID NO: 2630364 - DNA, 25 bp, Homo sapien
cagctacttgagagaatctcttgaa

SEQ ID NO: 2630365 - DNA, 25 bp, Homo sapien
aataccagctacttgagagaatctc

SEQ ID NO: 2630366 - DNA, 25 bp, Homo sapien
tgcactccagtctgactgacaaagt

SEQ ID NO: 2630367 - DNA, 25 bp, Homo sapien
gataagaccctcaacatgcagaatg

SEQ ID NO: 2630368 - DNA, 25 bp, Homo sapien
taagataagaccctcaacatgcaga

SEQ ID NO: 2630369 - DNA, 25 bp, Homo sapien
gataagataagaccctcaacatgca

SEQ ID NO: 2630370 - DNA, 25 bp, Homo sapien
taagaccctcaacatgcagaatggg

SEQ ID NO: 2630371 - DNA, 25 bp, Homo sapien
ccagctactttaatggtggcattta

SEQ ID NO: 2630372 - DNA, 25 bp, Homo sapien
accagctactttaatggtggcattt

SEQ ID NO: 2630373 - DNA, 25 bp, Homo sapien
caccagctactttaatggtggcatt

SEQ ID NO: 2630374 - DNA, 25 bp, Homo sapien
actggcctctccagcgcatatgagg

SEQ ID NO: 2630375 - DNA, 25 bp, Homo sapien
ctctccagcgcatatgaggctcctg

SEQ ID NO: 2630376 - DNA, 25 bp, Homo sapien
tccagcgcatatgaggctcctgatg

SEQ ID NO: 2630377 - DNA, 25 bp, Homo sapien
cagcgcatatgaggctcctgatgtt

SEQ ID NO: 2630378 - DNA, 25 bp, Homo sapien
ccacttccctctcttcagcttgggc

SEQ ID NO: 2630379 - DNA, 25 bp, Homo sapien
aaagcccatgcatcatcagactcct

SEQ ID NO: 2630380 - DNA, 25 bp, Homo sapien
gattccacttccctctcttcagctt

SEQ ID NO: 2630381 - DNA, 25 bp, Homo sapien
ttgggctgcagtggtggagggagca

SEQ ID NO: 2630382 - DNA, 25 bp, Homo sapien
tcacgaaataacattacaggttgtg

SEQ ID NO: 2630383 - DNA, 25 bp, Homo sapien
acgaaataacattacaggttgtgtt

SEQ ID NO: 2630384 - DNA, 25 bp, Homo sapien
cgaaataacattacaggttgtgttt

SEQ ID NO: 2630385 - DNA, 25 bp, Homo sapien
cacgaaataacattacaggttgtgt

SEQ ID NO: 2630386 - DNA, 25 bp, Homo sapien
attcgcagcaggcttttatccagcc

SEQ ID NO: 2630387 - DNA, 25 bp, Homo sapien
aaaggcattcgcagcaggcttttat

SEQ ID NO: 2630388 - DNA, 25 bp, Homo sapien
ggcattcgcagcaggcttttatcca

SEQ ID NO: 2630389 - DNA, 25 bp, Homo sapien
taaaaaggcattcgcagcaggcttt

SEQ ID NO: 2630390 - DNA, 25 bp, Homo sapien
gagcacagctgggacaatacccttg

SEQ ID NO: 2630391 - DNA, 25 bp, Homo sapien
agcagaaacaaggcctgtccctgag

SEQ ID NO: 2630392 - DNA, 25 bp, Homo sapien
tcacaaggcgtgagtggtgacatta

SEQ ID NO: 2630393 - DNA, 25 bp, Homo sapien
cctctaaaagcagcaagttaatgtg

SEQ ID NO: 2630394 - DNA, 25 bp, Homo sapien
tgacattaggggctgtcactaatag

SEQ ID NO: 2630395 - DNA, 25 bp, Homo sapien
ttaggggctgtcactaatagaacag

SEQ ID NO: 2630396 - DNA, 25 bp, Homo sapien
gaatgcagcagagaggactcgccat

SEQ ID NO: 2630397 - DNA, 25 bp, Homo sapien
ctgtcagtgccagtagggcaggcag

SEQ ID NO: 2630398 - DNA, 25 bp, Homo sapien
aggaatgcagcagagaggactcgcc

SEQ ID NO: 2630399 - DNA, 25 bp, Homo sapien
ttgtgttgctgtcagtgccagtagg

SEQ ID NO: 2630400 - DNA, 25 bp, Homo sapien
tcatttcctgatcgaacagcctcac

SEQ ID NO: 2630401 - DNA, 25 bp, Homo sapien
cctcatttcctgatcgaacagcctc

SEQ ID NO: 2630402 - DNA, 25 bp, Homo sapien
ctcatttcctgatcgaacagcctca

SEQ ID NO: 2630403 - DNA, 25 bp, Homo sapien
gcctcatttcctgatcgaacagcct

SEQ ID NO: 2630404 - DNA, 25 bp, Homo sapien
ttaataagtcgaggaggagcctggt

SEQ ID NO: 2630405 - DNA, 25 bp, Homo sapien
cacaagttaggagcttaataagtcg

SEQ ID NO: 2630406 - DNA, 25 bp, Homo sapien
taggagcttaataagtcgaggagga

SEQ ID NO: 2630407 - DNA, 25 bp, Homo sapien
tgaacacaagttaggagcttaataa

SEQ ID NO: 2630408 - DNA, 25 bp, Homo sapien
ccagtgcccccaggaaagtgtggat

SEQ ID NO: 2630409 - DNA, 25 bp, Homo sapien
gatgaaagggagagtgctaacaacc

SEQ ID NO: 2630410 - DNA, 25 bp, Homo sapien
aagggagagtgctaacaacccaagg

SEQ ID NO: 2630411 - DNA, 25 bp, Homo sapien
tgctaacaacccaaggaggagtccc

SEQ ID NO: 2630412 - DNA, 25 bp, Homo sapien
gctgagtaacaataacttggcagag

SEQ ID NO: 2630413 - DNA, 25 bp, Homo sapien
cttttgctgagtaacaataacttgg

SEQ ID NO: 2630414 - DNA, 25 bp, Homo sapien
ctgataaggattaacacttgattat

SEQ ID NO: 2630415 - DNA, 25 bp, Homo sapien
actgataaggattaacacttgatta

SEQ ID NO: 2630416 - DNA, 25 bp, Homo sapien
tatcgcaattaatattgttgcttca

SEQ ID NO: 2630417 - DNA, 25 bp, Homo sapien
taatattgttgcttcaaggtctggg

SEQ ID NO: 2630418 - DNA, 25 bp, Homo sapien
tatccagtatcgcaattaatattgt

SEQ ID NO: 2630419 - DNA, 25 bp, Homo sapien
cagtatcgcaattaatattgttgct

SEQ ID NO: 2630420 - DNA, 25 bp, Homo sapien
caggttagagtctttggagatggcc

SEQ ID NO: 2630421 - DNA, 25 bp, Homo sapien
tgacccaagtgttgccaactgacag

SEQ ID NO: 2630422 - DNA, 25 bp, Homo sapien
cacactgacataccacaagagggtg

SEQ ID NO: 2630423 - DNA, 25 bp, Homo sapien
tgatcatactgacctcatgacccca

SEQ ID NO: 2630424 - DNA, 25 bp, Homo sapien
tcttaaatgaccctcatcaccaagt

SEQ ID NO: 2630425 - DNA, 25 bp, Homo sapien
tctgccttatcgatatctttaatat

SEQ ID NO: 2630426 - DNA, 25 bp, Homo sapien
cagccctctgctgggtacaatttaa

SEQ ID NO: 2630427 - DNA, 25 bp, Homo sapien
gccagctgttctgccttatcgatat

SEQ ID NO: 2630428 - DNA, 25 bp, Homo sapien
tatctggctttactagtagttcttt

SEQ ID NO: 2630429 - DNA, 25 bp, Homo sapien
atttatctggctttactagtagttc

SEQ ID NO: 2630430 - DNA, 25 bp, Homo sapien
tttatctggctttactagtagttct

SEQ ID NO: 2630431 - DNA, 25 bp, Homo sapien
ctatttatctggctttactagtagt

SEQ ID NO: 2630432 - DNA, 25 bp, Homo sapien
tgaggtacacggcagtcttagagaa

SEQ ID NO: 2630433 - DNA, 25 bp, Homo sapien
gacttcacatcatatccgagatggg

SEQ ID NO: 2630434 - DNA, 25 bp, Homo sapien
gattcccgttgtggttctgaccctg

SEQ ID NO: 2630435 - DNA, 25 bp, Homo sapien
tttcaagctcaaagactcatggtgc

SEQ ID NO: 2630436 - DNA, 25 bp, Homo sapien
ttgtcttggctatttatgcatgctg

SEQ ID NO: 2630437 - DNA, 25 bp, Homo sapien
tgtcttggctatttatgcatgctgt

SEQ ID NO: 2630438 - DNA, 25 bp, Homo sapien
tcttggctatttatgcatgctgttt

SEQ ID NO: 2630439 - DNA, 25 bp, Homo sapien
ttggctatttatgcatgctgttttt

SEQ ID NO: 2630440 - DNA, 25 bp, Homo sapien
ctgaagttcttgagggatagtttca

SEQ ID NO: 2630441 - DNA, 25 bp, Homo sapien
gatagtttcaaagcctggttttcaa

SEQ ID NO: 2630442 - DNA, 25 bp, Homo sapien
actgaagttcttgagggatagtttc

SEQ ID NO: 2630443 - DNA, 25 bp, Homo sapien
aagttcttgagggatagtttcaaag

SEQ ID NO: 2630444 - DNA, 25 bp, Homo sapien
taggttcggtgtggtagtttctgcc

SEQ ID NO: 2630445 - DNA, 25 bp, Homo sapien
tcctattcgtaaaccgtgatacagt

SEQ ID NO: 2630446 - DNA, 25 bp, Homo sapien
agtaaattttgcttgttgaggtcgc

SEQ ID NO: 2630447 - DNA, 25 bp, Homo sapien
gatttttcactttgctcacgacact

SEQ ID NO: 2630448 - DNA, 25 bp, Homo sapien
cgcccggtccctcagtctggtgaaa

SEQ ID NO: 2630449 - DNA, 25 bp, Homo sapien
tctggtgaaaagctccgttgcccac

SEQ ID NO: 2630450 - DNA, 25 bp, Homo sapien
gacttgctttttcgacttctgagga

SEQ ID NO: 2630451 - DNA, 25 bp, Homo sapien
taagtgctgtcacgctactgcgatc

SEQ ID NO: 2630452 - DNA, 25 bp, Homo sapien
ggagaatgttttgtggaccactttg

SEQ ID NO: 2630453 - DNA, 25 bp, Homo sapien
aggagaatgttttgtggaccacttt

SEQ ID NO: 2630454 - DNA, 25 bp, Homo sapien
gacctacaaatgtggtggcatcgac

SEQ ID NO: 2630455 - DNA, 25 bp, Homo sapien
cctacaaatgtggtggcatcgacaa

SEQ ID NO: 2630456 - DNA, 25 bp, Homo sapien
ctgacctacaaatgtggtggcatcg

SEQ ID NO: 2630457 - DNA, 25 bp, Homo sapien
catctgacctacaaatgtggtggca

SEQ ID NO: 2630458 - DNA, 25 bp, Homo sapien
tagacaaatataagggacccctatg

SEQ ID NO: 2630459 - DNA, 25 bp, Homo sapien
gtatcacactactttgcatgctaga

SEQ ID NO: 2630460 - DNA, 25 bp, Homo sapien
gctatctccatttgcctaagcagtt

SEQ ID NO: 2630461 - DNA, 25 bp, Homo sapien
ggtataattaccagcccatagtctt

SEQ ID NO: 2630462 - DNA, 25 bp, Homo sapien
gactgcttttgcgtgggtcaccaga

SEQ ID NO: 2630463 - DNA, 25 bp, Homo sapien
taagtaccactccactaaaacgcgc

SEQ ID NO: 2630464 - DNA, 25 bp, Homo sapien
aacgcgctctgtggttagttctcgg

SEQ ID NO: 2630465 - DNA, 25 bp, Homo sapien
taatacaaccaggtcgggactgctt

SEQ ID NO: 2630466 - DNA, 25 bp, Homo sapien
cacttgctccatcaaggttgcctca

SEQ ID NO: 2630467 - DNA, 25 bp, Homo sapien
tggcacccatacacttgctccatca

SEQ ID NO: 2630468 - DNA, 25 bp, Homo sapien
accttccatttgtagtaaactcagt

SEQ ID NO: 2630469 - DNA, 25 bp, Homo sapien
tcaaggttgcctcaaaccttccatt

SEQ ID NO: 2630470 - DNA, 25 bp, Homo sapien
gaaagatttatccagtttgcaatgc

SEQ ID NO: 2630471 - DNA, 25 bp, Homo sapien
gatcatatgagtcttcagtgaatcg

SEQ ID NO: 2630472 - DNA, 25 bp, Homo sapien
tgatagctgttgactgattcgggtg

SEQ ID NO: 2630473 - DNA, 25 bp, Homo sapien
taagccaacaatgaggtttgcctct

SEQ ID NO: 2630474 - DNA, 25 bp, Homo sapien
tatttgagcttaaaacccactatgg

SEQ ID NO: 2630475 - DNA, 25 bp, Homo sapien
gacctctatgacactaagtcctgga

SEQ ID NO: 2630476 - DNA, 25 bp, Homo sapien
ccttagcttatcctgtggcaatatg

SEQ ID NO: 2630477 - DNA, 25 bp, Homo sapien
tggccctcactagagtcaccaatga

SEQ ID NO: 2630478 - DNA, 25 bp, Homo sapien
cgtccacaattgttggcctttagga

SEQ ID NO: 2630479 - DNA, 25 bp, Homo sapien
cctggtggtctttggttgaccagac

SEQ ID NO: 2630480 - DNA, 25 bp, Homo sapien
tgtcatgccttaaacagaaacgtgt

SEQ ID NO: 2630481 - DNA, 25 bp, Homo sapien
gaaacgtgtcagcaagtcttgagga

SEQ ID NO: 2630482 - DNA, 25 bp, Homo sapien
cagcattagttccattatattctct

SEQ ID NO: 2630483 - DNA, 25 bp, Homo sapien
ttacacagcattagttccattatat

SEQ ID NO: 2630484 - DNA, 25 bp, Homo sapien
gttacacagcattagttccattata

SEQ ID NO: 2630485 - DNA, 25 bp, Homo sapien
ttagttccattatattctcttggtc

SEQ ID NO: 2630486 - DNA, 25 bp, Homo sapien
ggttgcatcgacttttttactagag

SEQ ID NO: 2630487 - DNA, 25 bp, Homo sapien
gcagatgctatttgataccaagggc

SEQ ID NO: 2630488 - DNA, 25 bp, Homo sapien
aacccaacttggtgaactcccagct

SEQ ID NO: 2630489 - DNA, 25 bp, Homo sapien
tgactaacttcattaccttaaaggc

SEQ ID NO: 2630490 - DNA, 25 bp, Homo sapien
ggaatagcgccaaatagatatagat

SEQ ID NO: 2630491 - DNA, 25 bp, Homo sapien
taggacgccaggaatgctcactcat

SEQ ID NO: 2630492 - DNA, 25 bp, Homo sapien
tgtaaagattcagagtgggtacttg

SEQ ID NO: 2630493 - DNA, 25 bp, Homo sapien
gaaacacaaattatagcttctgtaa

SEQ ID NO: 2630494 - DNA, 25 bp, Homo sapien
atgagccaccctgcactgccaaaag

SEQ ID NO: 2630495 - DNA, 25 bp, Homo sapien
tgcactgccaaaagctatcattttt

SEQ ID NO: 2630496 - DNA, 25 bp, Homo sapien
accctgcactgccaaaagctatcat

SEQ ID NO: 2630497 - DNA, 25 bp, Homo sapien
cactgccaaaagctatcatttttaa

SEQ ID NO: 2630498 - DNA, 25 bp, Homo sapien
ccttgacaagagaggagtgtatcca

SEQ ID NO: 2630499 - DNA, 25 bp, Homo sapien
cctgaccttgcggtagtaaagaatg

SEQ ID NO: 2630500 - DNA, 25 bp, Homo sapien
ttatacaggaattacaagtgcagtc

SEQ ID NO: 2630501 - DNA, 25 bp, Homo sapien
taaaagagcctatatgtggtcaatc

SEQ ID NO: 2630502 - DNA, 25 bp, Homo sapien
taaatgttttcgacctcaagctaac

SEQ ID NO: 2630503 - DNA, 25 bp, Homo sapien
cttggaagtccaaatagggcccctg

SEQ ID NO: 2630504 - DNA, 25 bp, Homo sapien
caagctaacttttgggcattaaagc

SEQ ID NO: 2630505 - DNA, 25 bp, Homo sapien
tacactggcacaaagttagaatttg

SEQ ID NO: 2630506 - DNA, 25 bp, Homo sapien
agcccaaacgcttttcaagttcaca

SEQ ID NO: 2630507 - DNA, 25 bp, Homo sapien
gcctgtatggtaccaacttgacata

SEQ ID NO: 2630508 - DNA, 25 bp, Homo sapien
ttagacaggtttacactatctctgc

SEQ ID NO: 2630509 - DNA, 25 bp, Homo sapien
ggacctaaaactgaatggacataga

SEQ ID NO: 2630510 - DNA, 25 bp, Homo sapien
tcgcctcattgtctttagctgacat

SEQ ID NO: 2630511 - DNA, 25 bp, Homo sapien
catccaaagttactcctgctgcctg

SEQ ID NO: 2630512 - DNA, 25 bp, Homo sapien
cttttccctgatgtagtccttcgcc

SEQ ID NO: 2630513 - DNA, 25 bp, Homo sapien
ttgaatttgcgagctgccacctcct

SEQ ID NO: 2630514 - DNA, 25 bp, Homo sapien
cagagcagcttttgcaactgttgtc

SEQ ID NO: 2630515 - DNA, 25 bp, Homo sapien
gcaactgttgtcactttcctcaagt

SEQ ID NO: 2630516 - DNA, 25 bp, Homo sapien
ctcccagagcagcttttgcaactgt

SEQ ID NO: 2630517 - DNA, 25 bp, Homo sapien
aactgttgtcactttcctcaagtcc

SEQ ID NO: 2630518 - DNA, 25 bp, Homo sapien
gggcaggcggagaggggttggtgaa

SEQ ID NO: 2630519 - DNA, 25 bp, Homo sapien
ccaagggaaaggggcaggcggagag

SEQ ID NO: 2630520 - DNA, 25 bp, Homo sapien
tgtaacagagaggacccaagggaaa

SEQ ID NO: 2630521 - DNA, 25 bp, Homo sapien
ctgtaacagagaggacccaagggaa

SEQ ID NO: 2630522 - DNA, 25 bp, Homo sapien
ttcctccagctcgctaggaaaaatc

SEQ ID NO: 2630523 - DNA, 25 bp, Homo sapien
tcctccagctcgctaggaaaaatca

SEQ ID NO: 2630524 - DNA, 25 bp, Homo sapien
cctccagctcgctaggaaaaatcag

SEQ ID NO: 2630525 - DNA, 25 bp, Homo sapien
caggtaatataactccactccgggt

SEQ ID NO: 2630526 - DNA, 25 bp, Homo sapien
ttacaaagcgtgatgtcctctctgg

SEQ ID NO: 2630527 - DNA, 25 bp, Homo sapien
ttcagggacacatttgcttctcccc

SEQ ID NO: 2630528 - DNA, 25 bp, Homo sapien
ccttgaagaaccagttacaaagcgt

SEQ ID NO: 2630529 - DNA, 25 bp, Homo sapien
ggcgggcggccacgtgactgcagct

SEQ ID NO: 2630530 - DNA, 25 bp, Homo sapien
ctgcgcctccaacccggaagaacag

SEQ ID NO: 2630531 - DNA, 25 bp, Homo sapien
cgcgagaggacgtcgcgctggcaga

SEQ ID NO: 2630532 - DNA, 25 bp, Homo sapien
gcgcgctctccgaaccaaaaggcga

SEQ ID NO: 2630533 - DNA, 25 bp, Homo sapien
gggaggctgacagccttgggctgtg

SEQ ID NO: 2630534 - DNA, 25 bp, Homo sapien
gccgggaggctgacagccttgggct

SEQ ID NO: 2630535 - DNA, 25 bp, Homo sapien
tgggccgggaggctgacagccttgg

SEQ ID NO: 2630536 - DNA, 25 bp, Homo sapien
gaggctgacagccttgggctgtgcc

SEQ ID NO: 2630537 - DNA, 25 bp, Homo sapien
gaaccgcccatcgaaagtcctctat

SEQ ID NO: 2630538 - DNA, 25 bp, Homo sapien
ccccgatcttgagggccgaaatgac

SEQ ID NO: 2630539 - DNA, 25 bp, Homo sapien
aatgaccccgtacgactctcgctgt

SEQ ID NO: 2630540 - DNA, 25 bp, Homo sapien
tctctggatgaaccgcccatcgaaa

SEQ ID NO: 2630541 - DNA, 25 bp, Homo sapien
ttgtgctcgcaatctcctatgtccc

SEQ ID NO: 2630542 - DNA, 25 bp, Homo sapien
tttgtgctcgcaatctcctatgtcc

SEQ ID NO: 2630543 - DNA, 25 bp, Homo sapien
gtgctcgcaatctcctatgtcccca

SEQ ID NO: 2630544 - DNA, 25 bp, Homo sapien
aatttgtgctcgcaatctcctatgt

SEQ ID NO: 2630545 - DNA, 25 bp, Homo sapien
ctggaaagaaggcaatcctaaactg

SEQ ID NO: 2630546 - DNA, 25 bp, Homo sapien
tgctggaaagaaggcaatcctaaac

SEQ ID NO: 2630547 - DNA, 25 bp, Homo sapien
ctgctggaaagaaggcaatcctaaa

SEQ ID NO: 2630548 - DNA, 25 bp, Homo sapien
tggaaagaaggcaatcctaaactgt

SEQ ID NO: 2630549 - DNA, 25 bp, Homo sapien
ctttcatatgtatgtttaatgtaac

SEQ ID NO: 2630550 - DNA, 25 bp, Homo sapien
atccttgagggaaagcacccaacct

SEQ ID NO: 2630551 - DNA, 25 bp, Homo sapien
gcacccaacctaaagagggaggata

SEQ ID NO: 2630552 - DNA, 25 bp, Homo sapien
tatttaagagagtcagctctggatc

SEQ ID NO: 2630553 - DNA, 25 bp, Homo sapien
gcatcagacatcagtagggccaaag

SEQ ID NO: 2630554 - DNA, 25 bp, Homo sapien
tcagcagatccttggcaggggcatc

SEQ ID NO: 2630555 - DNA, 25 bp, Homo sapien
ggccaaagccttcataggcccattt

SEQ ID NO: 2630556 - DNA, 25 bp, Homo sapien
tcataggcccatttctgtgaaaaat

SEQ ID NO: 2630557 - DNA, 25 bp, Homo sapien
tgccaagtgcacctctcaagaaaat

SEQ ID NO: 2630558 - DNA, 25 bp, Homo sapien
caccaggctgcgtgaagtgtcactg

SEQ ID NO: 2630559 - DNA, 25 bp, Homo sapien
acattcctcagtagatccccaggga

SEQ ID NO: 2630560 - DNA, 25 bp, Homo sapien
ggatgcatgaaaggcactcccactg

SEQ ID NO: 2630561 - DNA, 25 bp, Homo sapien
gttgatatgagttcccaattttctg

SEQ ID NO: 2630562 - DNA, 25 bp, Homo sapien
ccactgttttcaataggtttgccat

SEQ ID NO: 2630563 - DNA, 25 bp, Homo sapien
acacgagcagccagtcaccactgtt

SEQ ID NO: 2630564 - DNA, 25 bp, Homo sapien
cagtcaccactgttttcaataggtt

SEQ ID NO: 2630565 - DNA, 25 bp, Homo sapien
ctaagtagaggacacgagcagccag

SEQ ID NO: 2630566 - DNA, 25 bp, Homo sapien
taaaaaatccttcttcacacgtaga

SEQ ID NO: 2630567 - DNA, 25 bp, Homo sapien
ttcacacgtagacccttacaggacc

SEQ ID NO: 2630568 - DNA, 25 bp, Homo sapien
ccacagttcttggtgagtataaaat

SEQ ID NO: 2630569 - DNA, 25 bp, Homo sapien
gttttacaggcgctttacaccacag

SEQ ID NO: 2630570 - DNA, 25 bp, Homo sapien
tctgttagcgctggaaatcaggaac

SEQ ID NO: 2630571 - DNA, 25 bp, Homo sapien
atgatcactcacaagcaccaggcca

SEQ ID NO: 2630572 - DNA, 25 bp, Homo sapien
tcaggaacgtctatagtacatggaa

SEQ ID NO: 2630573 - DNA, 25 bp, Homo sapien
tcatttacaatcactgaagtgagac

SEQ ID NO: 2630574 - DNA, 25 bp, Homo sapien
ctttagctacaggacatcagtttct

SEQ ID NO: 2630575 - DNA, 25 bp, Homo sapien
ccattcttgcaacctaagatctgaa

SEQ ID NO: 2630576 - DNA, 25 bp, Homo sapien
taaagcttaggaaacccattcttgc

SEQ ID NO: 2630577 - DNA, 25 bp, Homo sapien
taagtcaacctagacctgaatttga

SEQ ID NO: 2630578 - DNA, 25 bp, Homo sapien
aacttttatgcctactcttctgaaa

SEQ ID NO: 2630579 - DNA, 25 bp, Homo sapien
gaaacttttatgcctactcttctga

SEQ ID NO: 2630580 - DNA, 25 bp, Homo sapien
tgttcctgattcatacttataattc

SEQ ID NO: 2630581 - DNA, 25 bp, Homo sapien
gatgttcctgattcatacttataat

SEQ ID NO: 2630582 - DNA, 25 bp, Homo sapien
gcacccgattccacgacaacattaa

SEQ ID NO: 2630583 - DNA, 25 bp, Homo sapien
tttgaccaccaaatcagaagccagc

SEQ ID NO: 2630584 - DNA, 25 bp, Homo sapien
taaaaccctgcttgaccaagttctg

SEQ ID NO: 2630585 - DNA, 25 bp, Homo sapien
gggactccaacagtcagttgcttat

SEQ ID NO: 2630586 - DNA, 25 bp, Homo sapien
tatgtcagtgtaagtcattgcgcct

SEQ ID NO: 2630587 - DNA, 25 bp, Homo sapien
tagtcatgccctctctagaaatagc

SEQ ID NO: 2630588 - DNA, 25 bp, Homo sapien
taggtaaagctactcgccactcagc

SEQ ID NO: 2630589 - DNA, 25 bp, Homo sapien
cattgcgccttcaggtgtcagaaga

SEQ ID NO: 2630590 - DNA, 25 bp, Homo sapien
aaatgagttacttccctgtttgctt

SEQ ID NO: 2630591 - DNA, 25 bp, Homo sapien
tgctcaactctagttatcatctgtg

SEQ ID NO: 2630592 - DNA, 25 bp, Homo sapien
caagtgttaggatcctgtcaagtta

SEQ ID NO: 2630593 - DNA, 25 bp, Homo sapien
gctttagctgagttacagttaaccc

SEQ ID NO: 2630594 - DNA, 25 bp, Homo sapien
tatcaaatgctcagctgagaccgct

SEQ ID NO: 2630595 - DNA, 25 bp, Homo sapien
tctgaattgattctactggccccta

SEQ ID NO: 2630596 - DNA, 25 bp, Homo sapien
cagacttggctcaaatgagaggccc

SEQ ID NO: 2630597 - DNA, 25 bp, Homo sapien
tagaatgtttccctgaatgcgctcc

SEQ ID NO: 2630598 - DNA, 25 bp, Homo sapien
cactgcgcccggccatccatttttt

SEQ ID NO: 2630599 - DNA, 25 bp, Homo sapien
tgcgcccggccatccattttttaaa

SEQ ID NO: 2630600 - DNA, 25 bp, Homo sapien
actgcgcccggccatccatttttta

SEQ ID NO: 2630601 - DNA, 25 bp, Homo sapien
tgtgactcttggaacctggtccatt

SEQ ID NO: 2630602 - DNA, 25 bp, Homo sapien
gccatggagcttagcgcatcatatc

SEQ ID NO: 2630603 - DNA, 25 bp, Homo sapien
tggtccattgccagaactgtagttt

SEQ ID NO: 2630604 - DNA, 25 bp, Homo sapien
taaataaaactaatcagcgttcctg

SEQ ID NO: 2630605 - DNA, 25 bp, Homo sapien
tatagtccaaatattgtttgatgac

SEQ ID NO: 2630606 - DNA, 25 bp, Homo sapien
gactgggtagtgcttaggtaatggg

SEQ ID NO: 2630607 - DNA, 25 bp, Homo sapien
atgactgggtagtgcttaggtaatg

SEQ ID NO: 2630608 - DNA, 25 bp, Homo sapien
ctgggtagtgcttaggtaatggggg

SEQ ID NO: 2630609 - DNA, 25 bp, Homo sapien
aaaaacgtccaaaatgatttgctgc

SEQ ID NO: 2630610 - DNA, 25 bp, Homo sapien
aatgatttgctgctaggacaacagc

SEQ ID NO: 2630611 - DNA, 25 bp, Homo sapien
cgtccaaaatgatttgctgctagga

SEQ ID NO: 2630612 - DNA, 25 bp, Homo sapien
gcagctgtgatctgaccagtaaaaa

SEQ ID NO: 2630613 - DNA, 25 bp, Homo sapien
tagtagtagacttgtgcatcaaagc

SEQ ID NO: 2630614 - DNA, 25 bp, Homo sapien
gagaactctgggctttatataacaa

SEQ ID NO: 2630615 - DNA, 25 bp, Homo sapien
tcttgctaagtattctggcctacac

SEQ ID NO: 2630616 - DNA, 25 bp, Homo sapien
ttaagaacagcatcgaacttctggc

SEQ ID NO: 2630617 - DNA, 25 bp, Homo sapien
gctcctagaacaatgcctcgcatat

SEQ ID NO: 2630618 - DNA, 25 bp, Homo sapien
tatgcaatccaccttaatgagctat

SEQ ID NO: 2630619 - DNA, 25 bp, Homo sapien
caaaaccgtcctgggccacttgtgg

SEQ ID NO: 2630620 - DNA, 25 bp, Homo sapien
cacaggctgcggcttgaacaaactt

SEQ ID NO: 2630621 - DNA, 25 bp, Homo sapien
taacatgacctagaagagaggaccc

SEQ ID NO: 2630622 - DNA, 25 bp, Homo sapien
tgttcaccacactccaagaccaatg

SEQ ID NO: 2630623 - DNA, 25 bp, Homo sapien
tcacctcaaaggtcagaggaagctt

SEQ ID NO: 2630624 - DNA, 25 bp, Homo sapien
actctactaaagtggcctgtgccca

SEQ ID NO: 2630625 - DNA, 25 bp, Homo sapien
gaaacaactgctagcaaaggccaac

SEQ ID NO: 2630626 - DNA, 25 bp, Homo sapien
tagcatcaataaatggcggtgcaga

SEQ ID NO: 2630627 - DNA, 25 bp, Homo sapien
cagacccagttatgtgttaaggctc

SEQ ID NO: 2630628 - DNA, 25 bp, Homo sapien
taactgaaccaccactgatcttgaa

SEQ ID NO: 2630629 - DNA, 25 bp, Homo sapien
aattgcacccatcgactttgctgcg

SEQ ID NO: 2630630 - DNA, 25 bp, Homo sapien
cttgtgtcaaatcctcgaacaattg

SEQ ID NO: 2630631 - DNA, 25 bp, Homo sapien
aatcctcgaacaattgcacccatcg

SEQ ID NO: 2630632 - DNA, 25 bp, Homo sapien
cgaacaattgcacccatcgactttg

SEQ ID NO: 2630633 - DNA, 25 bp, Homo sapien
atgaactctttggacatctcttttg

SEQ ID NO: 2630634 - DNA, 25 bp, Homo sapien
tccttgcattgttgagcaaagagtt

SEQ ID NO: 2630635 - DNA, 25 bp, Homo sapien
cttgcattgttgagcaaagagtttc

SEQ ID NO: 2630636 - DNA, 25 bp, Homo sapien
ctctttggacatctcttttgcatat

SEQ ID NO: 2630637 - DNA, 25 bp, Homo sapien
gtgctgtgctgataaggatgtctac

SEQ ID NO: 2630638 - DNA, 25 bp, Homo sapien
agtgctgtgctgataaggatgtcta

SEQ ID NO: 2630639 - DNA, 25 bp, Homo sapien
ctggagagacgagctcacctatcac

SEQ ID NO: 2630640 - DNA, 25 bp, Homo sapien
tgtctgcttcatctagccgctctgg

SEQ ID NO: 2630641 - DNA, 25 bp, Homo sapien
gtctgcttcatctagccgctctggg

SEQ ID NO: 2630642 - DNA, 25 bp, Homo sapien
tctgcttcatctagccgctctgggg

SEQ ID NO: 2630643 - DNA, 25 bp, Homo sapien
acactggagcctgaaattgttgctg

SEQ ID NO: 2630644 - DNA, 25 bp, Homo sapien
tattgtgttgtacacactggagcct

SEQ ID NO: 2630645 - DNA, 25 bp, Homo sapien
ctcctctagatattgtgttgtacac

SEQ ID NO: 2630646 - DNA, 25 bp, Homo sapien
tagatattgtgttgtacacactgga

SEQ ID NO: 2630647 - DNA, 25 bp, Homo sapien
caagagggtgccatcagcactggac

SEQ ID NO: 2630648 - DNA, 25 bp, Homo sapien
tcaagagggtgccatcagcactgga

SEQ ID NO: 2630649 - DNA, 25 bp, Homo sapien
gagggtgccatcagcactggactac

SEQ ID NO: 2630650 - DNA, 25 bp, Homo sapien
aagagggtgccatcagcactggact

SEQ ID NO: 2630651 - DNA, 25 bp, Homo sapien
cttatgaatgtagagttctcctggc

SEQ ID NO: 2630652 - DNA, 25 bp, Homo sapien
cagctaaatccacaacaactgaacc

SEQ ID NO: 2630653 - DNA, 25 bp, Homo sapien
tctcctggcttagtggtttcaaagt

SEQ ID NO: 2630654 - DNA, 25 bp, Homo sapien
taaatccacaacaactgaaccttcc

SEQ ID NO: 2630655 - DNA, 25 bp, Homo sapien
tgatgttgttggaatatagggtgct

SEQ ID NO: 2630656 - DNA, 25 bp, Homo sapien
gcaggtctgtgtagcctatgtgagt

SEQ ID NO: 2630657 - DNA, 25 bp, Homo sapien
gttcctctaatgacatgacccatcg

SEQ ID NO: 2630658 - DNA, 25 bp, Homo sapien
aaaaattatctttgtccgggctgat

SEQ ID NO: 2630659 - DNA, 25 bp, Homo sapien
gaagggtgtaatggtagctgctttt

SEQ ID NO: 2630660 - DNA, 25 bp, Homo sapien
actgtcttctgttttactggggcac

SEQ ID NO: 2630661 - DNA, 25 bp, Homo sapien
tgctgtatatgcagaagccgttgac

SEQ ID NO: 2630662 - DNA, 25 bp, Homo sapien
aggaatatttttcggtgtgggagct

SEQ ID NO: 2630663 - DNA, 25 bp, Homo sapien
caaacaatcaagactaaaccctggt

SEQ ID NO: 2630664 - DNA, 25 bp, Homo sapien
caaaatcaaacaatcaagactaaac

SEQ ID NO: 2630665 - DNA, 25 bp, Homo sapien
atcaagactaaaccctggtaaatgg

SEQ ID NO: 2630666 - DNA, 25 bp, Homo sapien
caatcaagactaaaccctggtaaat

SEQ ID NO: 2630667 - DNA, 25 bp, Homo sapien
tgcatagcccattaaccatctggtg

SEQ ID NO: 2630668 - DNA, 25 bp, Homo sapien
tatccaaagttccagtgcatagccc

SEQ ID NO: 2630669 - DNA, 25 bp, Homo sapien
ccactggaatatctagggattgaca

SEQ ID NO: 2630670 - DNA, 25 bp, Homo sapien
actattactttggaagtggcaccac

SEQ ID NO: 2630671 - DNA, 25 bp, Homo sapien
aatgccagccaagccaaaagtggtc

SEQ ID NO: 2630672 - DNA, 25 bp, Homo sapien
ggtatgataccccacaatgccagcc

SEQ ID NO: 2630673 - DNA, 25 bp, Homo sapien
gaaaaggctagattgggagccgcaa

SEQ ID NO: 2630674 - DNA, 25 bp, Homo sapien
gggtcactccccagacggtatgata

SEQ ID NO: 2630675 - DNA, 25 bp, Homo sapien
tcccatcagtgccaacccaccaact

SEQ ID NO: 2630676 - DNA, 25 bp, Homo sapien
cagaggatatgaatgcagcaagagc

SEQ ID NO: 2630677 - DNA, 25 bp, Homo sapien
gtgccaacccaccaactgcagtcag

SEQ ID NO: 2630678 - DNA, 25 bp, Homo sapien
gacagaggatatgaatgcagcaaga

SEQ ID NO: 2630679 - DNA, 25 bp, Homo sapien
cactgtagagggcagctaaatatcc

SEQ ID NO: 2630680 - DNA, 25 bp, Homo sapien
aaatatccaccaacaaaggtgccgg

SEQ ID NO: 2630681 - DNA, 25 bp, Homo sapien
tcagtgggacgcttgaacatgtcca

SEQ ID NO: 2630682 - DNA, 25 bp, Homo sapien
tgttcaatgttataaccactgtaga

SEQ ID NO: 2630683 - DNA, 25 bp, Homo sapien
cctttggtctattagcttagagatt

SEQ ID NO: 2630684 - DNA, 25 bp, Homo sapien
aaacctttggtctattagcttagag

SEQ ID NO: 2630685 - DNA, 25 bp, Homo sapien
aacctttggtctattagcttagaga

SEQ ID NO: 2630686 - DNA, 25 bp, Homo sapien
tttggtctattagcttagagatttc

SEQ ID NO: 2630687 - DNA, 25 bp, Homo sapien
agcacaaacccgagcctaggtacat

SEQ ID NO: 2630688 - DNA, 25 bp, Homo sapien
acacagcacaaacccgagcctaggt

SEQ ID NO: 2630689 - DNA, 25 bp, Homo sapien
accgacacagcacaaacccgagcct

SEQ ID NO: 2630690 - DNA, 25 bp, Homo sapien
gaggccagccaaggcaccgacacag

SEQ ID NO: 2630691 - DNA, 25 bp, Homo sapien
agcaaccccaatcatgcccagtgca

SEQ ID NO: 2630692 - DNA, 25 bp, Homo sapien
gttttaggactccgagggtggctgc

SEQ ID NO: 2630693 - DNA, 25 bp, Homo sapien
gtgcattgccaagacgtgctgttcc

SEQ ID NO: 2630694 - DNA, 25 bp, Homo sapien
tgagctagtaattctgggcccggtt

SEQ ID NO: 2630695 - DNA, 25 bp, Homo sapien
aatggtaccacccaaagccatcgct

SEQ ID NO: 2630696 - DNA, 25 bp, Homo sapien
accacccaaagccatcgctccagac

SEQ ID NO: 2630697 - DNA, 25 bp, Homo sapien
gtaccacccaaagccatcgctccag

SEQ ID NO: 2630698 - DNA, 25 bp, Homo sapien
tggtaccacccaaagccatcgctcc

SEQ ID NO: 2630699 - DNA, 25 bp, Homo sapien
tgaatgagaattacaccaactggaa

SEQ ID NO: 2630700 - DNA, 25 bp, Homo sapien
tcagctaacgggacacagtcagtaa

SEQ ID NO: 2630701 - DNA, 25 bp, Homo sapien
caaaagttagcttatgtatagtaca

SEQ ID NO: 2630702 - DNA, 25 bp, Homo sapien
taggatattttgactcagttgatgc

SEQ ID NO: 2630703 - DNA, 25 bp, Homo sapien
caagcccagatttgtagcgtttgct

SEQ ID NO: 2630704 - DNA, 25 bp, Homo sapien
tgtcacagctacagtcaaaacatct

SEQ ID NO: 2630705 - DNA, 25 bp, Homo sapien
tccacactgcaatactgctaccaag

SEQ ID NO: 2630706 - DNA, 25 bp, Homo sapien
tagacataagtaacctcaagagcat

SEQ ID NO: 2630707 - DNA, 25 bp, Homo sapien
acaacagaatgtatgcgagaacttc

SEQ ID NO: 2630708 - DNA, 25 bp, Homo sapien
aaaacaacagaatgtatgcgagaac

SEQ ID NO: 2630709 - DNA, 25 bp, Homo sapien
aacagaatgtatgcgagaacttcac

SEQ ID NO: 2630710 - DNA, 25 bp, Homo sapien
aaacaacagaatgtatgcgagaact

SEQ ID NO: 2630711 - DNA, 25 bp, Homo sapien
tgtgtggaattcaccacttgtgatg

SEQ ID NO: 2630712 - DNA, 25 bp, Homo sapien
tgctcaacttgtataccctttcaaa

SEQ ID NO: 2630713 - DNA, 25 bp, Homo sapien
acctaagcacgacccaactccaatg

SEQ ID NO: 2630714 - DNA, 25 bp, Homo sapien
caatgaacacccagcatcaatgcgt

SEQ ID NO: 2630715 - DNA, 25 bp, Homo sapien
accaatgtaagtgccgaggtaggcc

SEQ ID NO: 2630716 - DNA, 25 bp, Homo sapien
gcaagtaagtacagctgccaaaccc

SEQ ID NO: 2630717 - DNA, 25 bp, Homo sapien
gctgctgcatccgtagcaaaatgtg

SEQ ID NO: 2630718 - DNA, 25 bp, Homo sapien
ggcaatgagagacccactaaaggtg

SEQ ID NO: 2630719 - DNA, 25 bp, Homo sapien
tgaacccagacaggtgatgccagta

SEQ ID NO: 2630720 - DNA, 25 bp, Homo sapien
tagcagccagtaagcctgcattgag

SEQ ID NO: 2630721 - DNA, 25 bp, Homo sapien
cttgggtccaccatgaatgggatta

SEQ ID NO: 2630722 - DNA, 25 bp, Homo sapien
gaatgggattatcccgcccacacta

SEQ ID NO: 2630723 - DNA, 25 bp, Homo sapien
ttcagcacagtgataacgacgggca

SEQ ID NO: 2630724 - DNA, 25 bp, Homo sapien
tatgacaggatagcaccagacgagc

SEQ ID NO: 2630725 - DNA, 25 bp, Homo sapien
cccacgatggtcagcagattgttgt

SEQ ID NO: 2630726 - DNA, 25 bp, Homo sapien
gagcctatgagtgcacccacgatgg

SEQ ID NO: 2630727 - DNA, 25 bp, Homo sapien
tttgtttcatgtatgtgttgtttct

SEQ ID NO: 2630728 - DNA, 25 bp, Homo sapien
tccttttgtttcatgtatgtgttgt

SEQ ID NO: 2630729 - DNA, 25 bp, Homo sapien
tcaggaagccatttccttttgtttc

SEQ ID NO: 2630730 - DNA, 25 bp, Homo sapien
gtttcatgtatgtgttgtttcttac

SEQ ID NO: 2630731 - DNA, 25 bp, Homo sapien
taagtggcatgcctgtggcagtgaa

SEQ ID NO: 2630732 - DNA, 25 bp, Homo sapien
aataatttggtagttctatatacag

SEQ ID NO: 2630733 - DNA, 25 bp, Homo sapien
ctatggaatgctgatggtaagtggc

SEQ ID NO: 2630734 - DNA, 25 bp, Homo sapien
tatttatggtctcaggcagctatcg

SEQ ID NO: 2630735 - DNA, 25 bp, Homo sapien
tagagccgctaagcacagccatgaa

SEQ ID NO: 2630736 - DNA, 25 bp, Homo sapien
acctagagccgctaagcacagccat

SEQ ID NO: 2630737 - DNA, 25 bp, Homo sapien
ctacctagagccgctaagcacagcc

SEQ ID NO: 2630738 - DNA, 25 bp, Homo sapien
ctagagccgctaagcacagccatga

SEQ ID NO: 2630739 - DNA, 25 bp, Homo sapien
tcacaagactcatctcacatgcaga

SEQ ID NO: 2630740 - DNA, 25 bp, Homo sapien
ttcacaagactcatctcacatgcag

SEQ ID NO: 2630741 - DNA, 25 bp, Homo sapien
ttccgtatgtgtgccagaaatttcc

SEQ ID NO: 2630742 - DNA, 25 bp, Homo sapien
catgggttttccaccagctgttgaa

SEQ ID NO: 2630743 - DNA, 25 bp, Homo sapien
aatgctattagcttctcgaatcatg

SEQ ID NO: 2630744 - DNA, 25 bp, Homo sapien
catgtcaattgcattgtcaaggttg

SEQ ID NO: 2630745 - DNA, 25 bp, Homo sapien
gaaagacatggctagaacccactgt

SEQ ID NO: 2630746 - DNA, 25 bp, Homo sapien
taatttaatcttgacaacgggccca

SEQ ID NO: 2630747 - DNA, 25 bp, Homo sapien
tctaatgagtgagctaaagactttc

SEQ ID NO: 2630748 - DNA, 25 bp, Homo sapien
gaaaaaagactcgaaaatgatgtaa

SEQ ID NO: 2630749 - DNA, 25 bp, Homo sapien
cagtgagcatctttaccaaatcagc

SEQ ID NO: 2630750 - DNA, 25 bp, Homo sapien
gctttggctgcacagagaccatagc

SEQ ID NO: 2630751 - DNA, 25 bp, Homo sapien
tttttgccttgctcagtgagcatct

SEQ ID NO: 2630752 - DNA, 25 bp, Homo sapien
caaatcagcaatggggtattgagct

SEQ ID NO: 2630753 - DNA, 25 bp, Homo sapien
caaaagcgctggctaattcaaggcc

SEQ ID NO: 2630754 - DNA, 25 bp, Homo sapien
ttcaaggccaaatagtggcagctat

SEQ ID NO: 2630755 - DNA, 25 bp, Homo sapien
cattgaaattgggagacaaatgggc

SEQ ID NO: 2630756 - DNA, 25 bp, Homo sapien
aacctatgttacagctgttctctgg

SEQ ID NO: 2630757 - DNA, 25 bp, Homo sapien
ttcccgatgaggcaactgctgtcca

SEQ ID NO: 2630758 - DNA, 25 bp, Homo sapien
tgctgtccacaaaaactaacgaatg

SEQ ID NO: 2630759 - DNA, 25 bp, Homo sapien
taagggctgaactgctactctgttt

SEQ ID NO: 2630760 - DNA, 25 bp, Homo sapien
ggctagtctatccatccgaagggaa

SEQ ID NO: 2630761 - DNA, 25 bp, Homo sapien
agctgaccaggcattcggcctgcaa

SEQ ID NO: 2630762 - DNA, 25 bp, Homo sapien
ggcattcggcctgcaactgggtgaa

SEQ ID NO: 2630763 - DNA, 25 bp, Homo sapien
tgaccaggcattcggcctgcaactg

SEQ ID NO: 2630764 - DNA, 25 bp, Homo sapien
gcctgcaactgggtgaattccaaac

SEQ ID NO: 2630765 - DNA, 25 bp, Homo sapien
gtgtcattagctccaattacaagga

SEQ ID NO: 2630766 - DNA, 25 bp, Homo sapien
tggcatgcctgcaataatagagttg

SEQ ID NO: 2630767 - DNA, 25 bp, Homo sapien
gctccaattacaaggaccaaatcag

SEQ ID NO: 2630768 - DNA, 25 bp, Homo sapien
tgcctgcaataatagagttgggatc

SEQ ID NO: 2630769 - DNA, 25 bp, Homo sapien
taggtttgtagaagattggattgtc

SEQ ID NO: 2630770 - DNA, 25 bp, Homo sapien
ggattgtccactgcagcatagccaa

SEQ ID NO: 2630771 - DNA, 25 bp, Homo sapien
cctggagcgcgtcacatgttttctt

SEQ ID NO: 2630772 - DNA, 25 bp, Homo sapien
gaagcatggccgtgttaggtttgta

SEQ ID NO: 2630773 - DNA, 25 bp, Homo sapien
tgcagaggtggcattattagctaac

SEQ ID NO: 2630774 - DNA, 25 bp, Homo sapien
caacaggactacatctaaaatgagg

SEQ ID NO: 2630775 - DNA, 25 bp, Homo sapien
tcaaactgcggttgaattgcaaggg

SEQ ID NO: 2630776 - DNA, 25 bp, Homo sapien
gtgcccttgaaatatagactctgaa

SEQ ID NO: 2630777 - DNA, 25 bp, Homo sapien
taaacgcgagcattacagtaacaaa

SEQ ID NO: 2630778 - DNA, 25 bp, Homo sapien
taggcacgatagcaaagtcacaaag

SEQ ID NO: 2630779 - DNA, 25 bp, Homo sapien
cacagatcttaatctcaggcacagc

SEQ ID NO: 2630780 - DNA, 25 bp, Homo sapien
tgagtgcaggaactaccttttcaag

SEQ ID NO: 2630781 - DNA, 25 bp, Homo sapien
tctgtccttgcaatagtttgctcag

SEQ ID NO: 2630782 - DNA, 25 bp, Homo sapien
tggtgttccccaccttgtgtccaag

SEQ ID NO: 2630783 - DNA, 25 bp, Homo sapien
tgtgtggtgttccccaccttgtgtc

SEQ ID NO: 2630784 - DNA, 25 bp, Homo sapien
ttctgtccttgcaatagtttgctca

SEQ ID NO: 2630785 - DNA, 25 bp, Homo sapien
catccactctcttagaatttttcaa

SEQ ID NO: 2630786 - DNA, 25 bp, Homo sapien
cattacctcaattagttatcacttt

SEQ ID NO: 2630787 - DNA, 25 bp, Homo sapien
tataatgtgtaaaaacttatacatt

SEQ ID NO: 2630788 - DNA, 25 bp, Homo sapien
caattagttatcacttttgtggtga

SEQ ID NO: 2630789 - DNA, 25 bp, Homo sapien
cgcgcccggcccatggactattttt

SEQ ID NO: 2630790 - DNA, 25 bp, Homo sapien
tttctaccactatcttaatcattat

SEQ ID NO: 2630791 - DNA, 25 bp, Homo sapien
ttttctaccactatcttaatcatta

SEQ ID NO: 2630792 - DNA, 25 bp, Homo sapien
tttttttctaccactatcttaatca

SEQ ID NO: 2630793 - DNA, 25 bp, Homo sapien
tgcaactccttactccacatccctt

SEQ ID NO: 2630794 - DNA, 25 bp, Homo sapien
ctccttactccacatcccttccaaa

SEQ ID NO: 2630795 - DNA, 25 bp, Homo sapien
cttactccacatcccttccaaaaat

SEQ ID NO: 2630796 - DNA, 25 bp, Homo sapien
aattgcaactccttactccacatcc

SEQ ID NO: 2630797 - DNA, 25 bp, Homo sapien
ccacacatatctccactctctgaca

SEQ ID NO: 2630798 - DNA, 25 bp, Homo sapien
cagtgttggaagttccctcggtatt

SEQ ID NO: 2630799 - DNA, 25 bp, Homo sapien
cttcagttagttgctcctttggcat

SEQ ID NO: 2630800 - DNA, 25 bp, Homo sapien
catttatggaaccaggtaatagtgt

SEQ ID NO: 2630801 - DNA, 25 bp, Homo sapien
caggtaatagtgtagatatatcttc

SEQ ID NO: 2630802 - DNA, 25 bp, Homo sapien
gatatatcttcagttagttgctcct

SEQ ID NO: 2630803 - DNA, 25 bp, Homo sapien
tgtccctcttctgatctggtgtcat

SEQ ID NO: 2630804 - DNA, 25 bp, Homo sapien
ttgtccctcttctgatctggtgtca

SEQ ID NO: 2630805 - DNA, 25 bp, Homo sapien
aattgccctagttcttttcctattg

SEQ ID NO: 2630806 - DNA, 25 bp, Homo sapien
catcgccaagctagatatgcggaac

SEQ ID NO: 2630807 - DNA, 25 bp, Homo sapien
cagtgacaaagagttggtaattgcc

SEQ ID NO: 2630808 - DNA, 25 bp, Homo sapien
ttcctccatcgccaagctagatatg

SEQ ID NO: 2630809 - DNA, 25 bp, Homo sapien
gttcctgaaatgtaagccaaagccc

SEQ ID NO: 2630810 - DNA, 25 bp, Homo sapien
cctgaaatgtaagccaaagccccac

SEQ ID NO: 2630811 - DNA, 25 bp, Homo sapien
tgaaatgtaagccaaagccccacat

SEQ ID NO: 2630812 - DNA, 25 bp, Homo sapien
tcctgaaatgtaagccaaagcccca

SEQ ID NO: 2630813 - DNA, 25 bp, Homo sapien
tgaaatgcagttgttgtcaagtgga

SEQ ID NO: 2630814 - DNA, 25 bp, Homo sapien
gttgttgtcaagtggagcccctttc

SEQ ID NO: 2630815 - DNA, 25 bp, Homo sapien
ttggttcaagggtagaatttattga

SEQ ID NO: 2630816 - DNA, 25 bp, Homo sapien
cgctttttcttttcgcaattgtgag

SEQ ID NO: 2630817 - DNA, 25 bp, Homo sapien
ataatgctagatgtatcaaagaaat

SEQ ID NO: 2630818 - DNA, 25 bp, Homo sapien
ttggaatgcctcacaacccaagtct

SEQ ID NO: 2630819 - DNA, 25 bp, Homo sapien
tcaaatttcagtggagttcttggaa

SEQ ID NO: 2630820 - DNA, 25 bp, Homo sapien
ccaagtctcagaattaaagccaaaa

SEQ ID NO: 2630821 - DNA, 25 bp, Homo sapien
gaaaatgctattatgataagtcaaa

SEQ ID NO: 2630822 - DNA, 25 bp, Homo sapien
gcatcagctcgacctttctgattca

SEQ ID NO: 2630823 - DNA, 25 bp, Homo sapien
gctgagcatcagctcgacctttctg

SEQ ID NO: 2630824 - DNA, 25 bp, Homo sapien
cttgtcaaccttctgaaggatgagc

SEQ ID NO: 2630825 - DNA, 25 bp, Homo sapien
ttctcgatctgctcccttgtcaacc

SEQ ID NO: 2630826 - DNA, 25 bp, Homo sapien
ctatgctgagaaccctattccttca

SEQ ID NO: 2630827 - DNA, 25 bp, Homo sapien
tgctgagaaccctattccttcactc

SEQ ID NO: 2630828 - DNA, 25 bp, Homo sapien
tatgctgagaaccctattccttcac

SEQ ID NO: 2630829 - DNA, 25 bp, Homo sapien
atgctgagaaccctattccttcact

SEQ ID NO: 2630830 - DNA, 25 bp, Homo sapien
aaataaacatcgtggtcaggacgtc

SEQ ID NO: 2630831 - DNA, 25 bp, Homo sapien
tcaggacgtctgtccggcatccttg

SEQ ID NO: 2630832 - DNA, 25 bp, Homo sapien
tgcaatgaaacacgagtgctctggt

SEQ ID NO: 2630833 - DNA, 25 bp, Homo sapien
gtgctctggtgagactacgcggccc

SEQ ID NO: 2630834 - DNA, 25 bp, Homo sapien
taattgccggatcaatccaatggac

SEQ ID NO: 2630835 - DNA, 25 bp, Homo sapien
gaaactcttgcctgggttgctcaga

SEQ ID NO: 2630836 - DNA, 25 bp, Homo sapien
gaccagcgcgctcttgaaactcttg

SEQ ID NO: 2630837 - DNA, 25 bp, Homo sapien
ttctctgaggcatgtgacgctggtg

SEQ ID NO: 2630838 - DNA, 25 bp, Homo sapien
gagtactagccttttctcagtaaat

SEQ ID NO: 2630839 - DNA, 25 bp, Homo sapien
caacagagtactagccttttctcag

SEQ ID NO: 2630840 - DNA, 25 bp, Homo sapien
agtccaacagagtactagccttttc

SEQ ID NO: 2630841 - DNA, 25 bp, Homo sapien
caaagtccaacagagtactagcctt

SEQ ID NO: 2630842 - DNA, 25 bp, Homo sapien
ggattttttcatactgggaaagctc

SEQ ID NO: 2630843 - DNA, 25 bp, Homo sapien
tttcatactgggaaagctctttttc

SEQ ID NO: 2630844 - DNA, 25 bp, Homo sapien
ttcatactgggaaagctctttttct

SEQ ID NO: 2630845 - DNA, 25 bp, Homo sapien
attttttcatactgggaaagctctt

SEQ ID NO: 2630846 - DNA, 25 bp, Homo sapien
tgccttgtaaagtccaattttctct

SEQ ID NO: 2630847 - DNA, 25 bp, Homo sapien
ggttgttccttcgtcacccgcagga

SEQ ID NO: 2630848 - DNA, 25 bp, Homo sapien
aacatgttgctcacacgcagccctt

SEQ ID NO: 2630849 - DNA, 25 bp, Homo sapien
cataagtcacgctgggttgttcctt

SEQ ID NO: 2630850 - DNA, 25 bp, Homo sapien
tgtcttcacatatcacccattctgc

SEQ ID NO: 2630851 - DNA, 25 bp, Homo sapien
tccttgtcttcacatatcacccatt

SEQ ID NO: 2630852 - DNA, 25 bp, Homo sapien
tgtcagtagtattcacagaagtgct

SEQ ID NO: 2630853 - DNA, 25 bp, Homo sapien
ttgtcagtagtattcacagaagtgc

SEQ ID NO: 2630854 - DNA, 25 bp, Homo sapien
ccgggctagtacagctagatggggc

SEQ ID NO: 2630855 - DNA, 25 bp, Homo sapien
cgggctagtacagctagatggggca

SEQ ID NO: 2630856 - DNA, 25 bp, Homo sapien
cccgggctagtacagctagatgggg

SEQ ID NO: 2630857 - DNA, 25 bp, Homo sapien
aagctttgaaatgtgcaccgttgat

SEQ ID NO: 2630858 - DNA, 25 bp, Homo sapien
caagctcggagaatttcaggaacca

SEQ ID NO: 2630859 - DNA, 25 bp, Homo sapien
caccgttgatagcaagacatggagt

SEQ ID NO: 2630860 - DNA, 25 bp, Homo sapien
gaaatataagtttagagctacggca

SEQ ID NO: 2630861 - DNA, 25 bp, Homo sapien
taagggaaaatgtggtcccttggca

SEQ ID NO: 2630862 - DNA, 25 bp, Homo sapien
ggtcccttggcatatgttcgatttc

SEQ ID NO: 2630863 - DNA, 25 bp, Homo sapien
tatgttcgatttcccttattttcaa

SEQ ID NO: 2630864 - DNA, 25 bp, Homo sapien
tttcaatcccccatataaatgcagc

SEQ ID NO: 2630865 - DNA, 25 bp, Homo sapien
cttcacttccttgcaaggttttgtg

SEQ ID NO: 2630866 - DNA, 25 bp, Homo sapien
cacttccttgcaaggttttgtgcac

SEQ ID NO: 2630867 - DNA, 25 bp, Homo sapien
cagacttcacttccttgcaaggttt

SEQ ID NO: 2630868 - DNA, 25 bp, Homo sapien
gacttcacttccttgcaaggttttg

SEQ ID NO: 2630869 - DNA, 25 bp, Homo sapien
caaggacacgaataccaagcatttc

SEQ ID NO: 2630870 - DNA, 25 bp, Homo sapien
tttttccgtctctgaactgatgcta

SEQ ID NO: 2630871 - DNA, 25 bp, Homo sapien
gcatttctgacataagcttcttaga

SEQ ID NO: 2630872 - DNA, 25 bp, Homo sapien
ctttgggtatacagaattcaaggac

SEQ ID NO: 2630873 - DNA, 25 bp, Homo sapien
ctcttcttatagtctggcttacctc

SEQ ID NO: 2630874 - DNA, 25 bp, Homo sapien
gcctcttcttcggtctctttgccat

SEQ ID NO: 2630875 - DNA, 25 bp, Homo sapien
tattatatgattacaccatattgca

SEQ ID NO: 2630876 - DNA, 25 bp, Homo sapien
tattgcaatgcctcttcttcggtct

SEQ ID NO: 2630877 - DNA, 25 bp, Homo sapien
taaatgctccctgtttggtgaaaga

SEQ ID NO: 2630878 - DNA, 25 bp, Homo sapien
tcttgtaagtgtctgagtgcgtgtg

SEQ ID NO: 2630879 - DNA, 25 bp, Homo sapien
gagattaggtcagttttcagctcac

SEQ ID NO: 2630880 - DNA, 25 bp, Homo sapien
ccctgtttggtgaaagagattttct

SEQ ID NO: 2630881 - DNA, 25 bp, Homo sapien
gaacgctgtgttctaattggcacaa

SEQ ID NO: 2630882 - DNA, 25 bp, Homo sapien
cccatgtaaggtggacaactggaca

SEQ ID NO: 2630883 - DNA, 25 bp, Homo sapien
gacactcagagtagattcccatgta

SEQ ID NO: 2630884 - DNA, 25 bp, Homo sapien
gacagtgactttttactgccgctaa

SEQ ID NO: 2630885 - DNA, 25 bp, Homo sapien
gatgttggtgcattcacttctggcc

SEQ ID NO: 2630886 - DNA, 25 bp, Homo sapien
agatccgcgcccagagggagctaac

SEQ ID NO: 2630887 - DNA, 25 bp, Homo sapien
gagtcagccggcttttccgaggagt

SEQ ID NO: 2630888 - DNA, 25 bp, Homo sapien
ctccagaggcgtaggcagcggatcc

SEQ ID NO: 2630889 - DNA, 25 bp, Homo sapien
ggcttcaacctgtttacaagcggac

SEQ ID NO: 2630890 - DNA, 25 bp, Homo sapien
tttcggcagccttcaaatcggcagg

SEQ ID NO: 2630891 - DNA, 25 bp, Homo sapien
cactgacatttagactccaggcttc

SEQ ID NO: 2630892 - DNA, 25 bp, Homo sapien
gagatagggccatacaaaacaccag

SEQ ID NO: 2630893 - DNA, 25 bp, Homo sapien
tggcagcccccgagctcggtgcaaa

SEQ ID NO: 2630894 - DNA, 25 bp, Homo sapien
gcagcccccgagctcggtgcaaagg

SEQ ID NO: 2630895 - DNA, 25 bp, Homo sapien
ctggcagcccccgagctcggtgcaa

SEQ ID NO: 2630896 - DNA, 25 bp, Homo sapien
agcccccgagctcggtgcaaaggca

SEQ ID NO: 2630897 - DNA, 25 bp, Homo sapien
gcataggacgctttagcagcgaatt

SEQ ID NO: 2630898 - DNA, 25 bp, Homo sapien
gctttagcagcgaattagacagagc

SEQ ID NO: 2630899 - DNA, 25 bp, Homo sapien
tgcaagcataggacgctttagcagc

SEQ ID NO: 2630900 - DNA, 25 bp, Homo sapien
attagacagagctagaggcgccggc

SEQ ID NO: 2630901 - DNA, 25 bp, Homo sapien
gacagcaaaattcggaaagcgggaa

SEQ ID NO: 2630902 - DNA, 25 bp, Homo sapien
tccccagaagggattggttcaggct

SEQ ID NO: 2630903 - DNA, 25 bp, Homo sapien
aaagcgggaagataccgtcagcgcc

SEQ ID NO: 2630904 - DNA, 25 bp, Homo sapien
gaggagatcctacgctggaaagcaa

SEQ ID NO: 2630905 - DNA, 25 bp, Homo sapien
tgctgctttggacggtttaaaatcc

SEQ ID NO: 2630906 - DNA, 25 bp, Homo sapien
tgctttggacggtttaaaatcctca

SEQ ID NO: 2630907 - DNA, 25 bp, Homo sapien
gaagggaggaaaagtcagccaagca

SEQ ID NO: 2630908 - DNA, 25 bp, Homo sapien
aagggaggaaaagtcagccaagcac

SEQ ID NO: 2630909 - DNA, 25 bp, Homo sapien
tttttacttcagcaacggaagcgag

SEQ ID NO: 2630910 - DNA, 25 bp, Homo sapien
gaggaggaaaggacactaattatgt

SEQ ID NO: 2630911 - DNA, 25 bp, Homo sapien
tgtgctcgttctgaccagtttataa

SEQ ID NO: 2630912 - DNA, 25 bp, Homo sapien
gagaaatcagtgattcattaaagag

SEQ ID NO: 2630913 - DNA, 25 bp, Homo sapien
gaagtgcacgcatgattcagtgaag

SEQ ID NO: 2630914 - DNA, 25 bp, Homo sapien
cctgatttcatttgcgccgagagag

SEQ ID NO: 2630915 - DNA, 25 bp, Homo sapien
tatggtaaaatctttgcgatcgcca

SEQ ID NO: 2630916 - DNA, 25 bp, Homo sapien
ccgagagaggcaacttttaagggtg

SEQ ID NO: 2630917 - DNA, 25 bp, Homo sapien
agtgcagtgatattgtaaaacagag

SEQ ID NO: 2630918 - DNA, 25 bp, Homo sapien
cagagccctttaaacattaaatgtg

SEQ ID NO: 2630919 - DNA, 25 bp, Homo sapien
gaggactagtagtgcagtgatattg

SEQ ID NO: 2630920 - DNA, 25 bp, Homo sapien
tcccctttatgacaaagtgcaaagg

SEQ ID NO: 2630921 - DNA, 25 bp, Homo sapien
cgttccctagtttagagtcattctt

SEQ ID NO: 2630922 - DNA, 25 bp, Homo sapien
tcagattggaatggattatcacagt

SEQ ID NO: 2630923 - DNA, 25 bp, Homo sapien
tgtgcctcttaactcttggcaaagg

SEQ ID NO: 2630924 - DNA, 25 bp, Homo sapien
gacttagttctgtcaatacctgggc

SEQ ID NO: 2630925 - DNA, 25 bp, Homo sapien
ggaggtcaaacgcacatcataggga

SEQ ID NO: 2630926 - DNA, 25 bp, Homo sapien
tagggatcctagcttgtgtgaacac

SEQ ID NO: 2630927 - DNA, 25 bp, Homo sapien
tggttcacaaccaatatggaggtca

SEQ ID NO: 2630928 - DNA, 25 bp, Homo sapien
gttcattccagtacatgtttaggca

SEQ ID NO: 2630929 - DNA, 25 bp, Homo sapien
tgaagttagtgtcctgagtaggaca

SEQ ID NO: 2630930 - DNA, 25 bp, Homo sapien
taaagtaaccagttacaaaggtgca

SEQ ID NO: 2630931 - DNA, 25 bp, Homo sapien
agttagtgtcctgagtaggacagaa

SEQ ID NO: 2630932 - DNA, 25 bp, Homo sapien
ttgaagttagtgtcctgagtaggac

SEQ ID NO: 2630933 - DNA, 25 bp, Homo sapien
gtttatattcctaatttcctgatag

SEQ ID NO: 2630934 - DNA, 25 bp, Homo sapien
tgttcctgagtgacattggtctgta

SEQ ID NO: 2630935 - DNA, 25 bp, Homo sapien
caatcagccttgaatacccgagata

SEQ ID NO: 2630936 - DNA, 25 bp, Homo sapien
tatctaatcttagtgggaaaacttc

SEQ ID NO: 2630937 - DNA, 25 bp, Homo sapien
gatgccaagggtccgtttgcagaaa

SEQ ID NO: 2630938 - DNA, 25 bp, Homo sapien
gccgcctcagaaggtagaagtgctt

SEQ ID NO: 2630939 - DNA, 25 bp, Homo sapien
tataaactgcctcatggtaggagct

SEQ ID NO: 2630940 - DNA, 25 bp, Homo sapien
ttttccggatcacacatagagccct

SEQ ID NO: 2630941 - DNA, 25 bp, Homo sapien
tctgctactccaagctctatcttca

SEQ ID NO: 2630942 - DNA, 25 bp, Homo sapien
catcctctgctactccaagctctat

SEQ ID NO: 2630943 - DNA, 25 bp, Homo sapien
ctctgctactccaagctctatcttc

SEQ ID NO: 2630944 - DNA, 25 bp, Homo sapien
gctactccaagctctatcttcacca

SEQ ID NO: 2630945 - DNA, 25 bp, Homo sapien
agggagtggcttatttttatcatta

SEQ ID NO: 2630946 - DNA, 25 bp, Homo sapien
tctaacttgatagggagtggcttat

SEQ ID NO: 2630947 - DNA, 25 bp, Homo sapien
attttctaacttgatagggagtggc

SEQ ID NO: 2630948 - DNA, 25 bp, Homo sapien
tatcattataatctttgtgttcagc

SEQ ID NO: 2630949 - DNA, 25 bp, Homo sapien
aaggcatactgttcttcggctgcca

SEQ ID NO: 2630950 - DNA, 25 bp, Homo sapien
cctagagtcatgtacgattttcatg

SEQ ID NO: 2630951 - DNA, 25 bp, Homo sapien
tgatcacagtgtccatggccctaga

SEQ ID NO: 2630952 - DNA, 25 bp, Homo sapien
tttcatgttcaataataggaaggca

SEQ ID NO: 2630953 - DNA, 25 bp, Homo sapien
cgctatgttgtttacagaagtgaaa

SEQ ID NO: 2630954 - DNA, 25 bp, Homo sapien
gtcaatccagaaaagtacaatcagg

SEQ ID NO: 2630955 - DNA, 25 bp, Homo sapien
tgtatttgtacacctcacttaaaga

SEQ ID NO: 2630956 - DNA, 25 bp, Homo sapien
aattgaatactacctatgtaccagg

SEQ ID NO: 2630957 - DNA, 25 bp, Homo sapien
tgcatccatgatgacatcatggctg

SEQ ID NO: 2630958 - DNA, 25 bp, Homo sapien
catccatgatgacatcatggctgac

SEQ ID NO: 2630959 - DNA, 25 bp, Homo sapien
cattgcctgcatccatgatgacatc

SEQ ID NO: 2630960 - DNA, 25 bp, Homo sapien
catcacatcattgcctgcatccatg

SEQ ID NO: 2630961 - DNA, 25 bp, Homo sapien
attagaagtggaattatgagagaaa

SEQ ID NO: 2630962 - DNA, 25 bp, Homo sapien
ctacaggatatggaaagaaggcagg

SEQ ID NO: 2630963 - DNA, 25 bp, Homo sapien
agaaggcaggctaaaattagaagtg

SEQ ID NO: 2630964 - DNA, 25 bp, Homo sapien
tagaagtggaattatgagagaaaca

SEQ ID NO: 2630965 - DNA, 25 bp, Homo sapien
gaatctcaactaagttgtacaacca

SEQ ID NO: 2630966 - DNA, 25 bp, Homo sapien
aaaaccagtagttgtctttcgtgca

SEQ ID NO: 2630967 - DNA, 25 bp, Homo sapien
tcctctcttgaggaatctcaactaa

SEQ ID NO: 2630968 - DNA, 25 bp, Homo sapien
gttgtctttcgtgcaatgattttcc

SEQ ID NO: 2630969 - DNA, 25 bp, Homo sapien
caagtggctcaaatatagccatagt

SEQ ID NO: 2630970 - DNA, 25 bp, Homo sapien
tctgcccacacactgaccaatactg

SEQ ID NO: 2630971 - DNA, 25 bp, Homo sapien
ggctcaaatatagccatagtaaata

SEQ ID NO: 2630972 - DNA, 25 bp, Homo sapien
tgacatcacaagtggctcaaatata

SEQ ID NO: 2630973 - DNA, 25 bp, Homo sapien
cactgggtcgttaacttgctgccta

SEQ ID NO: 2630974 - DNA, 25 bp, Homo sapien
attttattgactctacatatgcagc

SEQ ID NO: 2630975 - DNA, 25 bp, Homo sapien
tgtgcttcttgtaacactgggtcgt

SEQ ID NO: 2630976 - DNA, 25 bp, Homo sapien
tacatatgcagcaggctatccccat

SEQ ID NO: 2630977 - DNA, 25 bp, Homo sapien
agaatcccagtccaagtcttccttt

SEQ ID NO: 2630978 - DNA, 25 bp, Homo sapien
tcagacatccacgttcatcttgcct

SEQ ID NO: 2630979 - DNA, 25 bp, Homo sapien
tcatcttgcctagaataatgaacgt

SEQ ID NO: 2630980 - DNA, 25 bp, Homo sapien
ataatgaacgtttggtattttctca

SEQ ID NO: 2630981 - DNA, 25 bp, Homo sapien
caccatcaggtctgaaaagacaaaa

SEQ ID NO: 2630982 - DNA, 25 bp, Homo sapien
tcacccagcagggatcaaattctat

SEQ ID NO: 2630983 - DNA, 25 bp, Homo sapien
caaggtagggtatgtgtttgtagat

SEQ ID NO: 2630984 - DNA, 25 bp, Homo sapien
taaagtttgtaagatagtcaccatc

SEQ ID NO: 2630985 - DNA, 25 bp, Homo sapien
atccaattggcatagggcactatgg

SEQ ID NO: 2630986 - DNA, 25 bp, Homo sapien
tccaattggcatagggcactatggc

SEQ ID NO: 2630987 - DNA, 25 bp, Homo sapien
tattctataattgacagactttggg

SEQ ID NO: 2630988 - DNA, 25 bp, Homo sapien
agcaccccagtactccaaagcaaat

SEQ ID NO: 2630989 - DNA, 25 bp, Homo sapien
actacactgacttctaacacaatag

SEQ ID NO: 2630990 - DNA, 25 bp, Homo sapien
aagcaaatgttactcactacactga

SEQ ID NO: 2630991 - DNA, 25 bp, Homo sapien
gatcatgggctgcaaaccatacgcc

SEQ ID NO: 2630992 - DNA, 25 bp, Homo sapien
tctaacccacttggtttggtgaaca

SEQ ID NO: 2630993 - DNA, 25 bp, Homo sapien
aaagttgagcccagctggatcatgg

SEQ ID NO: 2630994 - DNA, 25 bp, Homo sapien
cagttctggtttacagcgttctgac

SEQ ID NO: 2630995 - DNA, 25 bp, Homo sapien
ctatcgcaattttcaactcaagtct

SEQ ID NO: 2630996 - DNA, 25 bp, Homo sapien
cgcaattttcaactcaagtctttta

SEQ ID NO: 2630997 - DNA, 25 bp, Homo sapien
gcaattttcaactcaagtcttttac

SEQ ID NO: 2630998 - DNA, 25 bp, Homo sapien
atcgcaattttcaactcaagtcttt

SEQ ID NO: 2630999 - DNA, 25 bp, Homo sapien
caggcagatgctatagggtaaagtc

SEQ ID NO: 2631000 - DNA, 25 bp, Homo sapien
cagcaatgtgcttgggcaactcgat

SEQ ID NO: 2631001 - DNA, 25 bp, Homo sapien
tagcaacagaaagatacttgggcat

SEQ ID NO: 2631002 - DNA, 25 bp, Homo sapien
taagataacaaaagtcaggcagatg

SEQ ID NO: 2631003 - DNA, 25 bp, Homo sapien
caatatggtttgctaacgaagttga

SEQ ID NO: 2631004 - DNA, 25 bp, Homo sapien
tctcaagtggagaataaacccacaa

SEQ ID NO: 2631005 - DNA, 25 bp, Homo sapien
tgaagcctctattctcaagtggaga

SEQ ID NO: 2631006 - DNA, 25 bp, Homo sapien
cagttgaattcacacccaagtatat

SEQ ID NO: 2631007 - DNA, 25 bp, Homo sapien
caatgttctttcaatacacaataca

SEQ ID NO: 2631008 - DNA, 25 bp, Homo sapien
tcatgcacatggcagtaatccgtta

SEQ ID NO: 2631009 - DNA, 25 bp, Homo sapien
ttgatatatcaaatgtctttggcaa

SEQ ID NO: 2631010 - DNA, 25 bp, Homo sapien
gaagtcatcccagtttaatgaaaac

SEQ ID NO: 2631011 - DNA, 25 bp, Homo sapien
tccggacccagaggtcaacttaagc

SEQ ID NO: 2631012 - DNA, 25 bp, Homo sapien
tttgcccgcgattccggacccagag

SEQ ID NO: 2631013 - DNA, 25 bp, Homo sapien
ccgcgattccggacccagaggtcaa

SEQ ID NO: 2631014 - DNA, 25 bp, Homo sapien
gattccggacccagaggtcaactta

SEQ ID NO: 2631015 - DNA, 25 bp, Homo sapien
aactgcatcttggtgaggattcgca

SEQ ID NO: 2631016 - DNA, 25 bp, Homo sapien
cattcagcgcgaaggtctgcgggta

SEQ ID NO: 2631017 - DNA, 25 bp, Homo sapien
ttagccgcggtgtgcaatgaaagcc

SEQ ID NO: 2631018 - DNA, 25 bp, Homo sapien
tgctgtcggctgtcatggaggccac

SEQ ID NO: 2631019 - DNA, 25 bp, Homo sapien
tcgcaggcgaccgcacgcagcgccg

SEQ ID NO: 2631020 - DNA, 25 bp, Homo sapien
gcacgcagcgccgcgaggtccagcg

SEQ ID NO: 2631021 - DNA, 25 bp, Homo sapien
gtcgcaggcgaccgcacgcagcgcc

SEQ ID NO: 2631022 - DNA, 25 bp, Homo sapien
tgcagcaggcagtcgcaggcgaccg

SEQ ID NO: 2631023 - DNA, 25 bp, Homo sapien
ggcaaagatatgacctcgctctcct

SEQ ID NO: 2631024 - DNA, 25 bp, Homo sapien
tcgctctcctcgtaacggtgcacgc

SEQ ID NO: 2631025 - DNA, 25 bp, Homo sapien
ccacgagggttgacaccagctgatc

SEQ ID NO: 2631026 - DNA, 25 bp, Homo sapien
ggccagggccgggttgtgtgggctg

SEQ ID NO: 2631027 - DNA, 25 bp, Homo sapien
ccactctcttaagtggcgtttctct

SEQ ID NO: 2631028 - DNA, 25 bp, Homo sapien
ctcttaagtggcgtttctcttcatc

SEQ ID NO: 2631029 - DNA, 25 bp, Homo sapien
actcagccatgtgacacatggtcac

SEQ ID NO: 2631030 - DNA, 25 bp, Homo sapien
ttaagtggcgtttctcttcatcacc

SEQ ID NO: 2631031 - DNA, 25 bp, Homo sapien
cgatgaccacgaggaataatttctt

SEQ ID NO: 2631032 - DNA, 25 bp, Homo sapien
atcaattcgacctcttcgatgacca

SEQ ID NO: 2631033 - DNA, 25 bp, Homo sapien
tcaccacgcacccagtaaaaatgaa

SEQ ID NO: 2631034 - DNA, 25 bp, Homo sapien
tctggtatcgcaagtcatcaattcg

SEQ ID NO: 2631035 - DNA, 25 bp, Homo sapien
tttgaataatggaagtttgtctggt

SEQ ID NO: 2631036 - DNA, 25 bp, Homo sapien
tgtggttttcatactgccgtttgaa

SEQ ID NO: 2631037 - DNA, 25 bp, Homo sapien
gaacagaataatccaatggcacaaa

SEQ ID NO: 2631038 - DNA, 25 bp, Homo sapien
tatagtggggatttctataggaaca

SEQ ID NO: 2631039 - DNA, 25 bp, Homo sapien
tgtgctccagtccaagcaaaaaggc

SEQ ID NO: 2631040 - DNA, 25 bp, Homo sapien
gaccgtaacagcaaggatctgcagt

SEQ ID NO: 2631041 - DNA, 25 bp, Homo sapien
caaaaaggcttgcaatagcattagc

SEQ ID NO: 2631042 - DNA, 25 bp, Homo sapien
gatgaaactgggtgtgaccgtaaca

SEQ ID NO: 2631043 - DNA, 25 bp, Homo sapien
ccacctcagggacttttacttgctg

SEQ ID NO: 2631044 - DNA, 25 bp, Homo sapien
gatttgtgcataggcagctcctcgc

SEQ ID NO: 2631045 - DNA, 25 bp, Homo sapien
gctcctcgccattcaggtcttagag

SEQ ID NO: 2631046 - DNA, 25 bp, Homo sapien
atttcaggcctgttcccacctcagg

SEQ ID NO: 2631047 - DNA, 25 bp, Homo sapien
ccttctagtatcctcaatctcatga

SEQ ID NO: 2631048 - DNA, 25 bp, Homo sapien
tagagggtatcaaatacctcctaca

SEQ ID NO: 2631049 - DNA, 25 bp, Homo sapien
cctcctacaacttagatactttatg

SEQ ID NO: 2631050 - DNA, 25 bp, Homo sapien
ttagacattagagggtatcaaatac

SEQ ID NO: 2631051 - DNA, 25 bp, Homo sapien
gcttgtgtagtcagtgccaaagtat

SEQ ID NO: 2631052 - DNA, 25 bp, Homo sapien
gaaagtgaactatctgaagtagaac

SEQ ID NO: 2631053 - DNA, 25 bp, Homo sapien
gacaaaaggtcgagtaacatctgct

SEQ ID NO: 2631054 - DNA, 25 bp, Homo sapien
ccaaagtatttagctggtagcagaa

SEQ ID NO: 2631055 - DNA, 25 bp, Homo sapien
tagttgacagttacaaatctcatca

SEQ ID NO: 2631056 - DNA, 25 bp, Homo sapien
ttaatagttgacagttacaaatctc

SEQ ID NO: 2631057 - DNA, 25 bp, Homo sapien
tgtatttaatagttgacagttacaa

SEQ ID NO: 2631058 - DNA, 25 bp, Homo sapien
cccacagttctcaatcaaatatgct

SEQ ID NO: 2631059 - DNA, 25 bp, Homo sapien
taaaatgtgcatttaatagctcaat

SEQ ID NO: 2631060 - DNA, 25 bp, Homo sapien
atctttcagtgatgaatttgagcag

SEQ ID NO: 2631061 - DNA, 25 bp, Homo sapien
tatcagttagcaatatacaaatgca

SEQ ID NO: 2631062 - DNA, 25 bp, Homo sapien
taagagatctaataacaggttgaca

SEQ ID NO: 2631063 - DNA, 25 bp, Homo sapien
ttctcaaatggagagacgggtgcta

SEQ ID NO: 2631064 - DNA, 25 bp, Homo sapien
tatatgtagccaggtgttagaccag

SEQ ID NO: 2631065 - DNA, 25 bp, Homo sapien
tctattcctgaaggtgctgcccctc

SEQ ID NO: 2631066 - DNA, 25 bp, Homo sapien
gatccacagtacttgagcctaggca

SEQ ID NO: 2631067 - DNA, 25 bp, Homo sapien
tgcccctttgggtctactgtttctg

SEQ ID NO: 2631068 - DNA, 25 bp, Homo sapien
cctgtatccagggtatgtggagata

SEQ ID NO: 2631069 - DNA, 25 bp, Homo sapien
gagtcacaaccttggaggtcgtata

SEQ ID NO: 2631070 - DNA, 25 bp, Homo sapien
tcacaatgcaattatttggtgcccc

SEQ ID NO: 2631071 - DNA, 25 bp, Homo sapien
cttatgggacaaactaaaactggct

SEQ ID NO: 2631072 - DNA, 25 bp, Homo sapien
taaggcccaaaaccagacagaatag

SEQ ID NO: 2631073 - DNA, 25 bp, Homo sapien
gcaaatgtccccttaagtagtcagt

SEQ ID NO: 2631074 - DNA, 25 bp, Homo sapien
cattagtcctcatgattgacaggga

SEQ ID NO: 2631075 - DNA, 25 bp, Homo sapien
tagttcaaaccggaaaagtagcagc

SEQ ID NO: 2631076 - DNA, 25 bp, Homo sapien
tgaggaaattcagcgaaagggcacg

SEQ ID NO: 2631077 - DNA, 25 bp, Homo sapien
aaagtatatgagtctagcctcaggg

SEQ ID NO: 2631078 - DNA, 25 bp, Homo sapien
gaaagaaaaatatcgcaactgagga

SEQ ID NO: 2631079 - DNA, 25 bp, Homo sapien
tggtgatcagtaaaaaatcagggaa

SEQ ID NO: 2631080 - DNA, 25 bp, Homo sapien
ggtgatcagtaaaaaatcagggaac

SEQ ID NO: 2631081 - DNA, 25 bp, Homo sapien
tatcacccaggttgtcccagaacat

SEQ ID NO: 2631082 - DNA, 25 bp, Homo sapien
taaacagtgctcaggcaatgacctc

SEQ ID NO: 2631083 - DNA, 25 bp, Homo sapien
tagaagtgcggttgctgtgtcacag

SEQ ID NO: 2631084 - DNA, 25 bp, Homo sapien
ggccatgcctcgtttccctaagtta

SEQ ID NO: 2631085 - DNA, 25 bp, Homo sapien
gcaggctgggtgaatacctctttga

SEQ ID NO: 2631086 - DNA, 25 bp, Homo sapien
aggctgggtgaatacctctttgaaa

SEQ ID NO: 2631087 - DNA, 25 bp, Homo sapien
caggctgggtgaatacctctttgaa

SEQ ID NO: 2631088 - DNA, 25 bp, Homo sapien
ggctgggtgaatacctctttgaaag

SEQ ID NO: 2631089 - DNA, 25 bp, Homo sapien
ccttttagtcatggccaagaggtgg

SEQ ID NO: 2631090 - DNA, 25 bp, Homo sapien
tctgcatttcaagggtctggaggac

SEQ ID NO: 2631091 - DNA, 25 bp, Homo sapien
cacaatgtcccgaagctgcaaagag

SEQ ID NO: 2631092 - DNA, 25 bp, Homo sapien
gtataagtccaaagtctcgcctgag

SEQ ID NO: 2631093 - DNA, 25 bp, Homo sapien
tttcttaacggttctccatatagga

SEQ ID NO: 2631094 - DNA, 25 bp, Homo sapien
ttcttaacggttctccatataggaa

SEQ ID NO: 2631095 - DNA, 25 bp, Homo sapien
tcttaacggttctccatataggaaa

SEQ ID NO: 2631096 - DNA, 25 bp, Homo sapien
ccactgttacactgactacctgctt

SEQ ID NO: 2631097 - DNA, 25 bp, Homo sapien
tgttagatgctttactaatccagga

SEQ ID NO: 2631098 - DNA, 25 bp, Homo sapien
ggatccactgttacactgactacct

SEQ ID NO: 2631099 - DNA, 25 bp, Homo sapien
tgctttactaatccaggatccactg

SEQ ID NO: 2631100 - DNA, 25 bp, Homo sapien
gctagccctgtactagatggcatga

SEQ ID NO: 2631101 - DNA, 25 bp, Homo sapien
gagcatgtgtctgcccatatatggc

SEQ ID NO: 2631102 - DNA, 25 bp, Homo sapien
gattataacaatgaactggagcatg

SEQ ID NO: 2631103 - DNA, 25 bp, Homo sapien
gtcagttaatgaacagctagccctg

SEQ ID NO: 2631104 - DNA, 25 bp, Homo sapien
tgcatggcctagaacaattcatctt

SEQ ID NO: 2631105 - DNA, 25 bp, Homo sapien
tttcatacgacaaaactagagtagc

SEQ ID NO: 2631106 - DNA, 25 bp, Homo sapien
caacttggcccatttctgtgataga

SEQ ID NO: 2631107 - DNA, 25 bp, Homo sapien
tcataaccttgtttggagagacaac

SEQ ID NO: 2631108 - DNA, 25 bp, Homo sapien
cacgtgatttattgatgaaaggatc

SEQ ID NO: 2631109 - DNA, 25 bp, Homo sapien
aaaggatcaataaccctttctctgt

SEQ ID NO: 2631110 - DNA, 25 bp, Homo sapien
tcagcaccccagacacataagaaaa

SEQ ID NO: 2631111 - DNA, 25 bp, Homo sapien
taacctctcttggattcagcacccc

SEQ ID NO: 2631112 - DNA, 25 bp, Homo sapien
gttggaagtcagctcagaattgaaa

SEQ ID NO: 2631113 - DNA, 25 bp, Homo sapien
aaatgttggaagtcagctcagaatt

SEQ ID NO: 2631114 - DNA, 25 bp, Homo sapien
atgaggcatagaaggtgaaagaaga

SEQ ID NO: 2631115 - DNA, 25 bp, Homo sapien
tagacataaaacaatagagataata

SEQ ID NO: 2631116 - DNA, 25 bp, Homo sapien
ctttctctgtatgcaggcgccttaa

SEQ ID NO: 2631117 - DNA, 25 bp, Homo sapien
tgtaatcagcacaaaagtactggga

SEQ ID NO: 2631118 - DNA, 25 bp, Homo sapien
ggcgccttaaggctgaacgtcagtc

SEQ ID NO: 2631119 - DNA, 25 bp, Homo sapien
tattttaccaagtcagtgtgcacac

SEQ ID NO: 2631120 - DNA, 25 bp, Homo sapien
gaacataagtatgagacaaactcca

SEQ ID NO: 2631121 - DNA, 25 bp, Homo sapien
cattcttacagagcaaaattgaaag

SEQ ID NO: 2631122 - DNA, 25 bp, Homo sapien
ccttgagaagttctagcatacgtct

SEQ ID NO: 2631123 - DNA, 25 bp, Homo sapien
aatctagctagatgctggctccaaa

SEQ ID NO: 2631124 - DNA, 25 bp, Homo sapien
gacaatgtccctctaacttgagggc

SEQ ID NO: 2631125 - DNA, 25 bp, Homo sapien
gagtgtgcccatgccgaaataatcc

SEQ ID NO: 2631126 - DNA, 25 bp, Homo sapien
gaaataatccatcggtaacctgctg

SEQ ID NO: 2631127 - DNA, 25 bp, Homo sapien
tgagggaatcttgcccatggataat

SEQ ID NO: 2631128 - DNA, 25 bp, Homo sapien
gatttcagtgcccaacagttctctc

SEQ ID NO: 2631129 - DNA, 25 bp, Homo sapien
cagtaggtatgccaaacccacttct

SEQ ID NO: 2631130 - DNA, 25 bp, Homo sapien
cccaggaaacccagtaggtatgcca

SEQ ID NO: 2631131 - DNA, 25 bp, Homo sapien
tccatacaactctgaaggcccagga

SEQ ID NO: 2631132 - DNA, 25 bp, Homo sapien
tctggtcactgcctgatagcttctg

SEQ ID NO: 2631133 - DNA, 25 bp, Homo sapien
tacttggtcataattcataattgaa

SEQ ID NO: 2631134 - DNA, 25 bp, Homo sapien
aattgaaacatagagttctttctgg

SEQ ID NO: 2631135 - DNA, 25 bp, Homo sapien
tttcaggccattaattcaaaagtta

SEQ ID NO: 2631136 - DNA, 25 bp, Homo sapien
ttcctcaatatcatgtaatttaaca

SEQ ID NO: 2631137 - DNA, 25 bp, Homo sapien
caccctctgtagatgtagattcatc

SEQ ID NO: 2631138 - DNA, 25 bp, Homo sapien
tcccattcctcaatatcatgtaatt

SEQ ID NO: 2631139 - DNA, 25 bp, Homo sapien
tcatcccattcctcaatatcatgta

SEQ ID NO: 2631140 - DNA, 25 bp, Homo sapien
ggaattattaagaacccattcttca

SEQ ID NO: 2631141 - DNA, 25 bp, Homo sapien
gacttttctgcttggagaccgtgga

SEQ ID NO: 2631142 - DNA, 25 bp, Homo sapien
cttcatcagccacatgtgtcttaag

SEQ ID NO: 2631143 - DNA, 25 bp, Homo sapien
catgtgtcttaaggaagtttctgag

SEQ ID NO: 2631144 - DNA, 25 bp, Homo sapien
tcaaatgggagccacctaaagttca

SEQ ID NO: 2631145 - DNA, 25 bp, Homo sapien
atgggagccacctaaagttcatcat

SEQ ID NO: 2631146 - DNA, 25 bp, Homo sapien
aaatgggagccacctaaagttcatc

SEQ ID NO: 2631147 - DNA, 25 bp, Homo sapien
aatgggagccacctaaagttcatca

SEQ ID NO: 2631148 - DNA, 25 bp, Homo sapien
ttggcagtctaaattccctgaagac

SEQ ID NO: 2631149 - DNA, 25 bp, Homo sapien
tatgcatatgctttgtacaagactc

SEQ ID NO: 2631150 - DNA, 25 bp, Homo sapien
caagactcttagtttcttggcagtc

SEQ ID NO: 2631151 - DNA, 25 bp, Homo sapien
taagcccattgatgttatgcatatg

SEQ ID NO: 2631152 - DNA, 25 bp, Homo sapien
tgtaattgctggttcggaggtaatg

SEQ ID NO: 2631153 - DNA, 25 bp, Homo sapien
aaacactttgtaattgctggttcgg

SEQ ID NO: 2631154 - DNA, 25 bp, Homo sapien
ttcggaggtaatgaacaggatgaca

SEQ ID NO: 2631155 - DNA, 25 bp, Homo sapien
gaacaggatgacaatttcttacatc

SEQ ID NO: 2631156 - DNA, 25 bp, Homo sapien
tgaagtcaggcagttattcctgatc

SEQ ID NO: 2631157 - DNA, 25 bp, Homo sapien
gaagtcaggcagttattcctgatct

SEQ ID NO: 2631158 - DNA, 25 bp, Homo sapien
gtgaagtcaggcagttattcctgat

SEQ ID NO: 2631159 - DNA, 25 bp, Homo sapien
gagggctaagagcagggagttagtc

SEQ ID NO: 2631160 - DNA, 25 bp, Homo sapien
ggagggctaagagcagggagttagt

SEQ ID NO: 2631161 - DNA, 25 bp, Homo sapien
cagagagctggcaagagtggtatta

SEQ ID NO: 2631162 - DNA, 25 bp, Homo sapien
agctggcaagagtggtattaccagg

SEQ ID NO: 2631163 - DNA, 25 bp, Homo sapien
gtggtattaccagggtctgtattca

SEQ ID NO: 2631164 - DNA, 25 bp, Homo sapien
caagagtggtattaccagggtctgt

SEQ ID NO: 2631165 - DNA, 25 bp, Homo sapien
cttgtcactagcatgggttgagtca

SEQ ID NO: 2631166 - DNA, 25 bp, Homo sapien
ttgtcactagcatgggttgagtcat

SEQ ID NO: 2631167 - DNA, 25 bp, Homo sapien
cgttggctacagaccgcacaaggga

SEQ ID NO: 2631168 - DNA, 25 bp, Homo sapien
gctacagaccgcacaagggataaaa

SEQ ID NO: 2631169 - DNA, 25 bp, Homo sapien
aacggggatgtcgttggctacagac

SEQ ID NO: 2631170 - DNA, 25 bp, Homo sapien
tcctcctcctgaacggggatgtcgt

SEQ ID NO: 2631171 - DNA, 25 bp, Homo sapien
ctgtcctcagatactcagacaagca

SEQ ID NO: 2631172 - DNA, 25 bp, Homo sapien
tctgtcctcagatactcagacaagc

SEQ ID NO: 2631173 - DNA, 25 bp, Homo sapien
actttcatgagtctcatattcctcc

SEQ ID NO: 2631174 - DNA, 25 bp, Homo sapien
cctccttgttttgagtgctccataa

SEQ ID NO: 2631175 - DNA, 25 bp, Homo sapien
tgagtgctccataaaccaccaatgg

SEQ ID NO: 2631176 - DNA, 25 bp, Homo sapien
ccaccaatggatcaatgggctgcat

SEQ ID NO: 2631177 - DNA, 25 bp, Homo sapien
tcttgaagttggctgtatgatcatg

SEQ ID NO: 2631178 - DNA, 25 bp, Homo sapien
ggtcattaaatctgctcctgcaatg

SEQ ID NO: 2631179 - DNA, 25 bp, Homo sapien
ggctgtatgatcatggtctcttgat

SEQ ID NO: 2631180 - DNA, 25 bp, Homo sapien
cctgcaatgatcttgaagttggctg

SEQ ID NO: 2631181 - DNA, 25 bp, Homo sapien
tgattcccgcctgtaatttagagta

SEQ ID NO: 2631182 - DNA, 25 bp, Homo sapien
catctatagtaagtgggttgtcctg

SEQ ID NO: 2631183 - DNA, 25 bp, Homo sapien
gatttgattcgaaaccacacaggca

SEQ ID NO: 2631184 - DNA, 25 bp, Homo sapien
atggcagggcttctataccagcaag

SEQ ID NO: 2631185 - DNA, 25 bp, Homo sapien
ctgtgaaagaaagatttgatggagt

SEQ ID NO: 2631186 - DNA, 25 bp, Homo sapien
gaaagatttgatggagtcctggaag

SEQ ID NO: 2631187 - DNA, 25 bp, Homo sapien
tttgatggagtcctggaagaactgc

SEQ ID NO: 2631188 - DNA, 25 bp, Homo sapien
aaagaaagatttgatggagtcctgg

SEQ ID NO: 2631189 - DNA, 25 bp, Homo sapien
tggatagtggtagaagagctgacca

SEQ ID NO: 2631190 - DNA, 25 bp, Homo sapien
gatggtgatgggtatgttgaatgga

SEQ ID NO: 2631191 - DNA, 25 bp, Homo sapien
agcctgtgaagggagctgcagttcc

SEQ ID NO: 2631192 - DNA, 25 bp, Homo sapien
agctgaccaatttcggtctcaagag

SEQ ID NO: 2631193 - DNA, 25 bp, Homo sapien
cacatgtcatgaaagtttctaaacc

SEQ ID NO: 2631194 - DNA, 25 bp, Homo sapien
acatgtcatgaaagtttctaaacct

SEQ ID NO: 2631195 - DNA, 25 bp, Homo sapien
tcttctgaccagagattgtagtaga

SEQ ID NO: 2631196 - DNA, 25 bp, Homo sapien
ggtcttctgaccagagattgtagta

SEQ ID NO: 2631197 - DNA, 25 bp, Homo sapien
gggtcttctgaccagagattgtagt

SEQ ID NO: 2631198 - DNA, 25 bp, Homo sapien
tctgaccagagattgtagtagaatt

SEQ ID NO: 2631199 - DNA, 25 bp, Homo sapien
tccaaagcaatgtgatctaaagagg

SEQ ID NO: 2631200 - DNA, 25 bp, Homo sapien
gcaatgtgatctaaagaggctcttt

SEQ ID NO: 2631201 - DNA, 25 bp, Homo sapien
caaagcaatgtgatctaaagaggct

SEQ ID NO: 2631202 - DNA, 25 bp, Homo sapien
taaatccaaagcaatgtgatctaaa

SEQ ID NO: 2631203 - DNA, 25 bp, Homo sapien
tgtgaatgatctacagccactgatg

SEQ ID NO: 2631204 - DNA, 25 bp, Homo sapien
tcttgtgaatgatctacagccactg

SEQ ID NO: 2631205 - DNA, 25 bp, Homo sapien
cacatcttgtgaatgatctacagcc

SEQ ID NO: 2631206 - DNA, 25 bp, Homo sapien
ctacaccacatcttgtgaatgatct

SEQ ID NO: 2631207 - DNA, 25 bp, Homo sapien
gtgagggtcccgttggcagcaatct

SEQ ID NO: 2631208 - DNA, 25 bp, Homo sapien
cagcaatctggtatctaacaagtgg

SEQ ID NO: 2631209 - DNA, 25 bp, Homo sapien
cagatgcaggtttagatgcctcagc

SEQ ID NO: 2631210 - DNA, 25 bp, Homo sapien
aacaagtggattgtgtctccataca

SEQ ID NO: 2631211 - DNA, 25 bp, Homo sapien
tcaagccttagttgacacactggca

SEQ ID NO: 2631212 - DNA, 25 bp, Homo sapien
tgcccaatggccaatttttcttcat

SEQ ID NO: 2631213 - DNA, 25 bp, Homo sapien
tctcaagccttagttgacacactgg

SEQ ID NO: 2631214 - DNA, 25 bp, Homo sapien
ctggcagctgcccaatggccaattt

SEQ ID NO: 2631215 - DNA, 25 bp, Homo sapien
ccttcgtactgttaatgttgtttga

SEQ ID NO: 2631216 - DNA, 25 bp, Homo sapien
tccttcgtactgttaatgttgtttg

SEQ ID NO: 2631217 - DNA, 25 bp, Homo sapien
tcttccttcgtactgttaatgttgt

SEQ ID NO: 2631218 - DNA, 25 bp, Homo sapien
gagcctgcagagaaacccagtgcat

SEQ ID NO: 2631219 - DNA, 25 bp, Homo sapien
agtcaccttctaaatccatcagctt

SEQ ID NO: 2631220 - DNA, 25 bp, Homo sapien
tctgacacttctaaatctataacac

SEQ ID NO: 2631221 - DNA, 25 bp, Homo sapien
aagaataacaatgcttaagtcacct

SEQ ID NO: 2631222 - DNA, 25 bp, Homo sapien
ctgacacttctaaatctataacacc

SEQ ID NO: 2631223 - DNA, 25 bp, Homo sapien
acactaagggcactgaagtcgtttg

SEQ ID NO: 2631224 - DNA, 25 bp, Homo sapien
atcccaaggtaccacactaagggca

SEQ ID NO: 2631225 - DNA, 25 bp, Homo sapien
aatggcaactttccatcccaaggta

SEQ ID NO: 2631226 - DNA, 25 bp, Homo sapien
gagtaatggttctaatggcaacttt

SEQ ID NO: 2631227 - DNA, 25 bp, Homo sapien
tcacatccatattacttgaaagtgt

SEQ ID NO: 2631228 - DNA, 25 bp, Homo sapien
tttgccttcacatccatattacttg

SEQ ID NO: 2631229 - DNA, 25 bp, Homo sapien
catccatattacttgaaagtgttct

SEQ ID NO: 2631230 - DNA, 25 bp, Homo sapien
caccatttgccttcacatccatatt

SEQ ID NO: 2631231 - DNA, 25 bp, Homo sapien
ccattgctagttgaaaagtgacctc

SEQ ID NO: 2631232 - DNA, 25 bp, Homo sapien
tagtgaagcccgtatgtatggagtt

SEQ ID NO: 2631233 - DNA, 25 bp, Homo sapien
gaatagctgattcttacaacaactg

SEQ ID NO: 2631234 - DNA, 25 bp, Homo sapien
caacaactgtatgatcagggatgag

SEQ ID NO: 2631235 - DNA, 25 bp, Homo sapien
gcatctgaaaatagtccctgcatgc

SEQ ID NO: 2631236 - DNA, 25 bp, Homo sapien
tcttgccataatcaagcatctgaaa

SEQ ID NO: 2631237 - DNA, 25 bp, Homo sapien
caagcatctgaaaatagtccctgca

SEQ ID NO: 2631238 - DNA, 25 bp, Homo sapien
cttgccataatcaagcatctgaaaa

SEQ ID NO: 2631239 - DNA, 25 bp, Homo sapien
tggcaaaaactaagttctccatctt

SEQ ID NO: 2631240 - DNA, 25 bp, Homo sapien
gatttctaacacaaagcgggcacaa

SEQ ID NO: 2631241 - DNA, 25 bp, Homo sapien
ctggcaaaaactaagttctccatct

SEQ ID NO: 2631242 - DNA, 25 bp, Homo sapien
atttctaacacaaagcgggcacaaa

SEQ ID NO: 2631243 - DNA, 25 bp, Homo sapien
tcagagggtaatggagtttgttgtt

SEQ ID NO: 2631244 - DNA, 25 bp, Homo sapien
cctaatccaactgaggtcagagggt

SEQ ID NO: 2631245 - DNA, 25 bp, Homo sapien
cagggttctccattagcctaatcca

SEQ ID NO: 2631246 - DNA, 25 bp, Homo sapien
gttggaatccatacaggtcaatttc

SEQ ID NO: 2631247 - DNA, 25 bp, Homo sapien
cacaggctgaggatataaagttctc

SEQ ID NO: 2631248 - DNA, 25 bp, Homo sapien
tccaccatactacagatttcacagg

SEQ ID NO: 2631249 - DNA, 25 bp, Homo sapien
ggacctgaatactctcttgtaatac

SEQ ID NO: 2631250 - DNA, 25 bp, Homo sapien
tcatagcaaagcaggatctgttttc

SEQ ID NO: 2631251 - DNA, 25 bp, Homo sapien
cgcccgatgatggagtaaattttaa

SEQ ID NO: 2631252 - DNA, 25 bp, Homo sapien
ctacaagcgcccgatgatggagtaa

SEQ ID NO: 2631253 - DNA, 25 bp, Homo sapien
catggagcccaaggcattatcctaa

SEQ ID NO: 2631254 - DNA, 25 bp, Homo sapien
ctaagttaactaatgtaggaagaga

SEQ ID NO: 2631255 - DNA, 25 bp, Homo sapien
agtccaaaatcaaatgcaatgatga

SEQ ID NO: 2631256 - DNA, 25 bp, Homo sapien
caaatgcaatgatgatagctttacc

SEQ ID NO: 2631257 - DNA, 25 bp, Homo sapien
tagaagtctgtcctgtttaatgaag

SEQ ID NO: 2631258 - DNA, 25 bp, Homo sapien
caggactttctcttgatgatactta

SEQ ID NO: 2631259 - DNA, 25 bp, Homo sapien
ctgcattaattgtggttgaaacaaa

SEQ ID NO: 2631260 - DNA, 25 bp, Homo sapien
gcattaattgtggttgaaacaaaaa

SEQ ID NO: 2631261 - DNA, 25 bp, Homo sapien
gagagctttgggaggaattgggaag

SEQ ID NO: 2631262 - DNA, 25 bp, Homo sapien
tttctgcattaattgtggttgaaac

SEQ ID NO: 2631263 - DNA, 25 bp, Homo sapien
tttttctctgatatcttcttcccat

SEQ ID NO: 2631264 - DNA, 25 bp, Homo sapien
ttgctttttctctgatatcttcttc

SEQ ID NO: 2631265 - DNA, 25 bp, Homo sapien
tcattgctttttctctgatatcttc

SEQ ID NO: 2631266 - DNA, 25 bp, Homo sapien
gctttttctctgatatcttcttccc

SEQ ID NO: 2631267 - DNA, 25 bp, Homo sapien
gtcattccacatccataactttcca

SEQ ID NO: 2631268 - DNA, 25 bp, Homo sapien
tcattccacatccataactttccat

SEQ ID NO: 2631269 - DNA, 25 bp, Homo sapien
ttcttttcctggataaagtcattcc

SEQ ID NO: 2631270 - DNA, 25 bp, Homo sapien
tttcctggataaagtcattccacat

SEQ ID NO: 2631271 - DNA, 25 bp, Homo sapien
gagccatgccatttcatcaggttgg

SEQ ID NO: 2631272 - DNA, 25 bp, Homo sapien
gcaagggctgcctcatttacctgtg

SEQ ID NO: 2631273 - DNA, 25 bp, Homo sapien
tatatagtatggcacagagactcca

SEQ ID NO: 2631274 - DNA, 25 bp, Homo sapien
gagttactatcttctgcgggatgca

SEQ ID NO: 2631275 - DNA, 25 bp, Homo sapien
gatctcatagattataagtgctcca

SEQ ID NO: 2631276 - DNA, 25 bp, Homo sapien
ttatcacgttatgcccacagtttgg

SEQ ID NO: 2631277 - DNA, 25 bp, Homo sapien
aagtgctccatgtattatcacgtta

SEQ ID NO: 2631278 - DNA, 25 bp, Homo sapien
gaactgccagtcttccaatacttgg

SEQ ID NO: 2631279 - DNA, 25 bp, Homo sapien
tgccttcccctagagttattcccag

SEQ ID NO: 2631280 - DNA, 25 bp, Homo sapien
agaaagccacagattcatggcaaga

SEQ ID NO: 2631281 - DNA, 25 bp, Homo sapien
caacatgtagccttgctttaacagc

SEQ ID NO: 2631282 - DNA, 25 bp, Homo sapien
gacagaagagggtgcatatgccttc

SEQ ID NO: 2631283 - DNA, 25 bp, Homo sapien
taacccctacttgtgatactgatat

SEQ ID NO: 2631284 - DNA, 25 bp, Homo sapien
tctaaagagcttctagtggccaaag

SEQ ID NO: 2631285 - DNA, 25 bp, Homo sapien
ctaggattgagttataaacccaaag

SEQ ID NO: 2631286 - DNA, 25 bp, Homo sapien
taagttagtactagaatgattctgc

SEQ ID NO: 2631287 - DNA, 25 bp, Homo sapien
cctcctgaacttcggggacagatca

SEQ ID NO: 2631288 - DNA, 25 bp, Homo sapien
ctgaacttcggggacagatcaggga

SEQ ID NO: 2631289 - DNA, 25 bp, Homo sapien
ttggcctcctgaacttcggggacag

SEQ ID NO: 2631290 - DNA, 25 bp, Homo sapien
ctaagcaggctccactcggcgcctc

SEQ ID NO: 2631291 - DNA, 25 bp, Homo sapien
tgaggctgaccccaatcctgcatat

SEQ ID NO: 2631292 - DNA, 25 bp, Homo sapien
cccgaagataagcaccatctctgac

SEQ ID NO: 2631293 - DNA, 25 bp, Homo sapien
tcaccacatatcaggactctcttct

SEQ ID NO: 2631294 - DNA, 25 bp, Homo sapien
tcctgcatattgagtcaccacatat

SEQ ID NO: 2631295 - DNA, 25 bp, Homo sapien
ggccttaaccttggctttgacatcc

SEQ ID NO: 2631296 - DNA, 25 bp, Homo sapien
gcttgttcacttccgttggccttaa

SEQ ID NO: 2631297 - DNA, 25 bp, Homo sapien
ttatgctaggctgacagcttgttca

SEQ ID NO: 2631298 - DNA, 25 bp, Homo sapien
gttggccttaaccttggctttgaca

SEQ ID NO: 2631299 - DNA, 25 bp, Homo sapien
actccacttaacacctcaggaatgt

SEQ ID NO: 2631300 - DNA, 25 bp, Homo sapien
tccacttaacacctcaggaatgttt

SEQ ID NO: 2631301 - DNA, 25 bp, Homo sapien
acactccacttaacacctcaggaat

SEQ ID NO: 2631302 - DNA, 25 bp, Homo sapien
cacttaacacctcaggaatgttttt

SEQ ID NO: 2631303 - DNA, 25 bp, Homo sapien
gagatgggcctcaaaatctccaaat

SEQ ID NO: 2631304 - DNA, 25 bp, Homo sapien
tttcgtcttcttctgaactctgtcc

SEQ ID NO: 2631305 - DNA, 25 bp, Homo sapien
aaattcacaggcagcatgacccttt

SEQ ID NO: 2631306 - DNA, 25 bp, Homo sapien
tttccatgattttcgtcttcttctg

SEQ ID NO: 2631307 - DNA, 25 bp, Homo sapien
atggaaaaattcctctacacataca

SEQ ID NO: 2631308 - DNA, 25 bp, Homo sapien
gctctgaaattgtggcagtaatcaa

SEQ ID NO: 2631309 - DNA, 25 bp, Homo sapien
aggctctgaaattgtggcagtaatc

SEQ ID NO: 2631310 - DNA, 25 bp, Homo sapien
ggaaaaattcctctacacatacacc

SEQ ID NO: 2631311 - DNA, 25 bp, Homo sapien
ctctacaagtcagaagagaggggga

SEQ ID NO: 2631312 - DNA, 25 bp, Homo sapien
cataaacgaagaagacataaaatac

SEQ ID NO: 2631313 - DNA, 25 bp, Homo sapien
aagcttcataaacgaagaagacata

SEQ ID NO: 2631314 - DNA, 25 bp, Homo sapien
agtcagaagagagggggaggccaat

SEQ ID NO: 2631315 - DNA, 25 bp, Homo sapien
taaaatgagactcttcataagggtt

SEQ ID NO: 2631316 - DNA, 25 bp, Homo sapien
tgagactcttcataagggttcacag

SEQ ID NO: 2631317 - DNA, 25 bp, Homo sapien
tacaagcccagtgaactgcccatat

SEQ ID NO: 2631318 - DNA, 25 bp, Homo sapien
ttctctgagatgtagtagggataca

SEQ ID NO: 2631319 - DNA, 25 bp, Homo sapien
catttcagcaccttctaggctgttt

SEQ ID NO: 2631320 - DNA, 25 bp, Homo sapien
tgcatttcagcaccttctaggctgt

SEQ ID NO: 2631321 - DNA, 25 bp, Homo sapien
gtctgcatttcagcaccttctaggc

SEQ ID NO: 2631322 - DNA, 25 bp, Homo sapien
tgccagtttatagctgtgagtctgc

SEQ ID NO: 2631323 - DNA, 25 bp, Homo sapien
ggtttgtggcatgctaatctctcat

SEQ ID NO: 2631324 - DNA, 25 bp, Homo sapien
caggtctgctttcgtgttgtggtta

SEQ ID NO: 2631325 - DNA, 25 bp, Homo sapien
taacagttgagctatccaggtctgc

SEQ ID NO: 2631326 - DNA, 25 bp, Homo sapien
ctatagttgagttttcggagcctct

SEQ ID NO: 2631327 - DNA, 25 bp, Homo sapien
tgtagattgaaaatctcaagtctag

SEQ ID NO: 2631328 - DNA, 25 bp, Homo sapien
catgtttccgccggaaagtatattt

SEQ ID NO: 2631329 - DNA, 25 bp, Homo sapien
tcaatcttcttgtagattgaaaatc

SEQ ID NO: 2631330 - DNA, 25 bp, Homo sapien
caaacatgtttccgccggaaagtat

SEQ ID NO: 2631331 - DNA, 25 bp, Homo sapien
ttgtgtgtcccattatgagatttcc

SEQ ID NO: 2631332 - DNA, 25 bp, Homo sapien
cattcgtggaacattgttaacttct

SEQ ID NO: 2631333 - DNA, 25 bp, Homo sapien
ttcccataatactgagaaaagtcta

SEQ ID NO: 2631334 - DNA, 25 bp, Homo sapien
cacaggaagtaagatcgggtaactc

SEQ ID NO: 2631335 - DNA, 25 bp, Homo sapien
gttgccgtagtctcagaagccccaa

SEQ ID NO: 2631336 - DNA, 25 bp, Homo sapien
gctttggttgccgtagtctcagaag

SEQ ID NO: 2631337 - DNA, 25 bp, Homo sapien
tggttgccgtagtctcagaagcccc

SEQ ID NO: 2631338 - DNA, 25 bp, Homo sapien
tgtgctttggttgccgtagtctcag

SEQ ID NO: 2631339 - DNA, 25 bp, Homo sapien
catggtatgttctgctctgctactt

SEQ ID NO: 2631340 - DNA, 25 bp, Homo sapien
aagccatggtatgttctgctctgct

SEQ ID NO: 2631341 - DNA, 25 bp, Homo sapien
gccatggtatgttctgctctgctac

SEQ ID NO: 2631342 - DNA, 25 bp, Homo sapien
ggtatgttctgctctgctacttcca

SEQ ID NO: 2631343 - DNA, 25 bp, Homo sapien
ttgactgtctctactattctatgaa

SEQ ID NO: 2631344 - DNA, 25 bp, Homo sapien
tgactgtctctactattctatgaac

SEQ ID NO: 2631345 - DNA, 25 bp, Homo sapien
cattgactgtctctactattctatg

SEQ ID NO: 2631346 - DNA, 25 bp, Homo sapien
tcattgactgtctctactattctat

SEQ ID NO: 2631347 - DNA, 25 bp, Homo sapien
tatgccaacgtaaaatacttctttc

SEQ ID NO: 2631348 - DNA, 25 bp, Homo sapien
taatacacaatataaactacaatgt

SEQ ID NO: 2631349 - DNA, 25 bp, Homo sapien
tatatctatgccaacgtaaaatact

SEQ ID NO: 2631350 - DNA, 25 bp, Homo sapien
atttatatatctatgccaacgtaaa

SEQ ID NO: 2631351 - DNA, 25 bp, Homo sapien
caataggcctcattgcactcccaaa

SEQ ID NO: 2631352 - DNA, 25 bp, Homo sapien
cagactgttccatcaaaagaaagac

SEQ ID NO: 2631353 - DNA, 25 bp, Homo sapien
tccaaacaggtcaatcaaaagaaag

SEQ ID NO: 2631354 - DNA, 25 bp, Homo sapien
tcacaatgcactttctcagagagct

SEQ ID NO: 2631355 - DNA, 25 bp, Homo sapien
tcctgagcacatcctttcaagcttc

SEQ ID NO: 2631356 - DNA, 25 bp, Homo sapien
gttcccaaacctgttgtatcatcca

SEQ ID NO: 2631357 - DNA, 25 bp, Homo sapien
agatgtcattttttagcaaggcatt

SEQ ID NO: 2631358 - DNA, 25 bp, Homo sapien
cgttgtgcggcccaacatctacttc

SEQ ID NO: 2631359 - DNA, 25 bp, Homo sapien
ttccagctcggttccattctgccca

SEQ ID NO: 2631360 - DNA, 25 bp, Homo sapien
gctcggttccattctgcccatcact

SEQ ID NO: 2631361 - DNA, 25 bp, Homo sapien
tccagctcggttccattctgcccat

SEQ ID NO: 2631362 - DNA, 25 bp, Homo sapien
cagctcggttccattctgcccatca

SEQ ID NO: 2631363 - DNA, 25 bp, Homo sapien
ctagatcattgtcatgtcccgatga

SEQ ID NO: 2631364 - DNA, 25 bp, Homo sapien
gtcatgtcccgatgactgaaagaaa

SEQ ID NO: 2631365 - DNA, 25 bp, Homo sapien
aaagtgctgtgtagcttttaaggga

SEQ ID NO: 2631366 - DNA, 25 bp, Homo sapien
gaagcgccatccttgttcccagaat

SEQ ID NO: 2631367 - DNA, 25 bp, Homo sapien
cagctccagaagatacttttccaaa

SEQ ID NO: 2631368 - DNA, 25 bp, Homo sapien
tccaaatgacctgagtcatggctaa

SEQ ID NO: 2631369 - DNA, 25 bp, Homo sapien
taataacatttgtgtctgaggtttc

SEQ ID NO: 2631370 - DNA, 25 bp, Homo sapien
tggctaataacatttgtgtctgagg

SEQ ID NO: 2631371 - DNA, 25 bp, Homo sapien
gccactgagcccagtttgaatgctt

SEQ ID NO: 2631372 - DNA, 25 bp, Homo sapien
tgagcccagtttgaatgctttttta

SEQ ID NO: 2631373 - DNA, 25 bp, Homo sapien
actgagcccagtttgaatgcttttt

SEQ ID NO: 2631374 - DNA, 25 bp, Homo sapien
taagccactgagcccagtttgaatg

SEQ ID NO: 2631375 - DNA, 25 bp, Homo sapien
tcctgctttctgtcatgggcattta

SEQ ID NO: 2631376 - DNA, 25 bp, Homo sapien
agggtttttcttgtctctccttcag

SEQ ID NO: 2631377 - DNA, 25 bp, Homo sapien
agtaggttgtacagtttccatgtaa

SEQ ID NO: 2631378 - DNA, 25 bp, Homo sapien
ctttcctgctttctgtcatgggcat

SEQ ID NO: 2631379 - DNA, 25 bp, Homo sapien
ccactgaaagggtgcaatacagctt

SEQ ID NO: 2631380 - DNA, 25 bp, Homo sapien
tagacttggcacatggagattccgc

SEQ ID NO: 2631381 - DNA, 25 bp, Homo sapien
tgatcttgtgtcttagagaagcccc

SEQ ID NO: 2631382 - DNA, 25 bp, Homo sapien
tattaatccctcttttgcgtggctg

SEQ ID NO: 2631383 - DNA, 25 bp, Homo sapien
ctggcgtgcagtagtgccaccttag

SEQ ID NO: 2631384 - DNA, 25 bp, Homo sapien
cctggcgtgcagtagtgccacctta

SEQ ID NO: 2631385 - DNA, 25 bp, Homo sapien
cttgcctggcgtgcagtagtgccac

SEQ ID NO: 2631386 - DNA, 25 bp, Homo sapien
tgcctggcgtgcagtagtgccacct

SEQ ID NO: 2631387 - DNA, 25 bp, Homo sapien
taaaccatgtagcaagggataccct

SEQ ID NO: 2631388 - DNA, 25 bp, Homo sapien
cttcaaaacatcttgacagttggcc

SEQ ID NO: 2631389 - DNA, 25 bp, Homo sapien
cctaatggaccctagttggctaata

SEQ ID NO: 2631390 - DNA, 25 bp, Homo sapien
gataccctacatatatctctctggg

SEQ ID NO: 2631391 - DNA, 25 bp, Homo sapien
taagtggaataggaataagaatgac

SEQ ID NO: 2631392 - DNA, 25 bp, Homo sapien
ttaagtggaataggaataagaatga

SEQ ID NO: 2631393 - DNA, 25 bp, Homo sapien
gaataggaataagaatgacagaaag

SEQ ID NO: 2631394 - DNA, 25 bp, Homo sapien
taggaataagaatgacagaaagcat

SEQ ID NO: 2631395 - DNA, 25 bp, Homo sapien
ccttcaactgtcatcagcttagatt

SEQ ID NO: 2631396 - DNA, 25 bp, Homo sapien
ttttctctccttgttctaacacagg

SEQ ID NO: 2631397 - DNA, 25 bp, Homo sapien
ctgtcatcagcttagattctgccaa

SEQ ID NO: 2631398 - DNA, 25 bp, Homo sapien
aggtccctgttgagcccatccatga

SEQ ID NO: 2631399 - DNA, 25 bp, Homo sapien
agcagtctccacgaggacccaggcg

SEQ ID NO: 2631400 - DNA, 25 bp, Homo sapien
cagggcgcgtacgccccggctgctc

SEQ ID NO: 2631401 - DNA, 25 bp, Homo sapien
gctggaggccagggcgcgtacgccc

SEQ ID NO: 2631402 - DNA, 25 bp, Homo sapien
acctgcgagtgtgcgcagggactct

SEQ ID NO: 2631403 - DNA, 25 bp, Homo sapien
tctgttccaccaccaagataaaatg

SEQ ID NO: 2631404 - DNA, 25 bp, Homo sapien
ctgttccaccaccaagataaaatgc

SEQ ID NO: 2631405 - DNA, 25 bp, Homo sapien
actctgttccaccaccaagataaaa

SEQ ID NO: 2631406 - DNA, 25 bp, Homo sapien
tgttccaccaccaagataaaatgct

SEQ ID NO: 2631407 - DNA, 25 bp, Homo sapien
ttaatgccaagtttattcccagagt

SEQ ID NO: 2631408 - DNA, 25 bp, Homo sapien
ccaaaaatcaaggaggcaacttctt

SEQ ID NO: 2631409 - DNA, 25 bp, Homo sapien
caaggaggcaacttcttgcaagagc

SEQ ID NO: 2631410 - DNA, 25 bp, Homo sapien
gcaggagcagagtccggattaatgc

SEQ ID NO: 2631411 - DNA, 25 bp, Homo sapien
tctctggggactgcattgaggagct

SEQ ID NO: 2631412 - DNA, 25 bp, Homo sapien
aaagagcctttcagcagcatgtctc

SEQ ID NO: 2631413 - DNA, 25 bp, Homo sapien
agctaaagagcctttcagcagcata

SEQ ID NO: 2631414 - DNA, 25 bp, Homo sapien
ttttcttcagagtagctaaagagcc

SEQ ID NO: 2631415 - DNA, 25 bp, Homo sapien
cttctaagacatttgtcttgagaaa

SEQ ID NO: 2631416 - DNA, 25 bp, Homo sapien
tgtttcagaagggtcaatctccata

SEQ ID NO: 2631417 - DNA, 25 bp, Homo sapien
caaggatcatgatgtgacacagctg

SEQ ID NO: 2631418 - DNA, 25 bp, Homo sapien
tcaaggatcatgatgtgacacagct

SEQ ID NO: 2631419 - DNA, 25 bp, Homo sapien
cagaagggtcaatctccatactcac

SEQ ID NO: 2631420 - DNA, 25 bp, Homo sapien
gatgtcaaaaaacacgatgggtttg

SEQ ID NO: 2631421 - DNA, 25 bp, Homo sapien
gagggcttggcgtcgacggcgatgt

SEQ ID NO: 2631422 - DNA, 25 bp, Homo sapien
ggcccgagggcttggcgtcgacggc

SEQ ID NO: 2631423 - DNA, 25 bp, Homo sapien
aaaaaacacgatgggtttgaccatg

SEQ ID NO: 2631424 - DNA, 25 bp, Homo sapien
tcatgaaatttctccaccagtgcca

SEQ ID NO: 2631425 - DNA, 25 bp, Homo sapien
atgaaatttctccaccagtgccatt

SEQ ID NO: 2631426 - DNA, 25 bp, Homo sapien
catcatgaaatttctccaccagtgc

SEQ ID NO: 2631427 - DNA, 25 bp, Homo sapien
gttctcatcatgaaatttctccacc

SEQ ID NO: 2631428 - DNA, 25 bp, Homo sapien
cttccacaatattcatgtgttcttt

SEQ ID NO: 2631429 - DNA, 25 bp, Homo sapien
tggcttccacaatattcatgtgttc

SEQ ID NO: 2631430 - DNA, 25 bp, Homo sapien
ggcttccacaatattcatgtgttct

SEQ ID NO: 2631431 - DNA, 25 bp, Homo sapien
catggcttccacaatattcatgtgt

SEQ ID NO: 2631432 - DNA, 25 bp, Homo sapien
cgtgacaacatgatgttcagcacgg

SEQ ID NO: 2631433 - DNA, 25 bp, Homo sapien
caacatgatgttcagcacggtagga

SEQ ID NO: 2631434 - DNA, 25 bp, Homo sapien
tcagcacggtaggaatgactgccat

SEQ ID NO: 2631435 - DNA, 25 bp, Homo sapien
tgatgttcagcacggtaggaatgac

SEQ ID NO: 2631436 - DNA, 25 bp, Homo sapien
ccgcgggctgccggggctcgcagag

SEQ ID NO: 2631437 - DNA, 25 bp, Homo sapien
gggctgccggggctcgcagagtatt

SEQ ID NO: 2631438 - DNA, 25 bp, Homo sapien
tgccggggctcgcagagtattagcc

SEQ ID NO: 2631439 - DNA, 25 bp, Homo sapien
ccggggctcgcagagtattagccat

SEQ ID NO: 2631440 - DNA, 25 bp, Homo sapien
gcggcggcagccgtgcccaggctgc

SEQ ID NO: 2631441 - DNA, 25 bp, Homo sapien
cccgcgggcggcggcagccgtgccc

SEQ ID NO: 2631442 - DNA, 25 bp, Homo sapien
gcgggcggcggcagccgtgcccagg

SEQ ID NO: 2631443 - DNA, 25 bp, Homo sapien
ccaggctgctgcagcgccgcccgcc

SEQ ID NO: 2631444 - DNA, 25 bp, Homo sapien
agccagagagcaatcaccggctggg

SEQ ID NO: 2631445 - DNA, 25 bp, Homo sapien
aatgaaacctctggccgaggcaggg

SEQ ID NO: 2631446 - DNA, 25 bp, Homo sapien
ggaaaagaagcagccgctatttcca

SEQ ID NO: 2631447 - DNA, 25 bp, Homo sapien
aaaatgaaacctctggccgaggcag

SEQ ID NO: 2631448 - DNA, 25 bp, Homo sapien
cagctttcgtaaatattcagttaaa

SEQ ID NO: 2631449 - DNA, 25 bp, Homo sapien
ctcagctctggacttctggatcacg

SEQ ID NO: 2631450 - DNA, 25 bp, Homo sapien
ggacttctggatcacgacgtcgata

SEQ ID NO: 2631451 - DNA, 25 bp, Homo sapien
gatcacgacgtcgatatccttctga

SEQ ID NO: 2631452 - DNA, 25 bp, Homo sapien
cgacgtcgatatccttctgaattcg

SEQ ID NO: 2631453 - DNA, 25 bp, Homo sapien
tcccgcgctcgttgcagcagctgtt

SEQ ID NO: 2631454 - DNA, 25 bp, Homo sapien
gttgccaaatgaaccccagaatggg

SEQ ID NO: 2631455 - DNA, 25 bp, Homo sapien
gacgtcgcggtcagaaaactgggaa

SEQ ID NO: 2631456 - DNA, 25 bp, Homo sapien
agccacagacgtcgcggtcagaaaa

SEQ ID NO: 2631457 - DNA, 25 bp, Homo sapien
ggccggagatgggccgagcgctgcc

SEQ ID NO: 2631458 - DNA, 25 bp, Homo sapien
gccggagatgggccgagcgctgccc

SEQ ID NO: 2631459 - DNA, 25 bp, Homo sapien
gggccggagatgggccgagcgctgc

SEQ ID NO: 2631460 - DNA, 25 bp, Homo sapien
ggcgctgggtgccttgggaatccga

SEQ ID NO: 2631461 - DNA, 25 bp, Homo sapien
ccttctctttgccagtcggagggga

SEQ ID NO: 2631462 - DNA, 25 bp, Homo sapien
gagcaaaatggacgaaaggcgaccc

SEQ ID NO: 2631463 - DNA, 25 bp, Homo sapien
tgccttgggaatccgaggaatccct

SEQ ID NO: 2631464 - DNA, 25 bp, Homo sapien
agctacccctggagtggatttgttt

SEQ ID NO: 2631465 - DNA, 25 bp, Homo sapien
aaaagctacccctggagtggatttg

SEQ ID NO: 2631466 - DNA, 25 bp, Homo sapien
aagctacccctggagtggatttgtt

SEQ ID NO: 2631467 - DNA, 25 bp, Homo sapien
aaagctacccctggagtggatttgt

SEQ ID NO: 2631468 - DNA, 25 bp, Homo sapien
taaaagtaaaggtggagtcagagta

SEQ ID NO: 2631469 - DNA, 25 bp, Homo sapien
aaaggtggagtcagagtatctgaaa

SEQ ID NO: 2631470 - DNA, 25 bp, Homo sapien
aaggtggagtcagagtatctgaaat

SEQ ID NO: 2631471 - DNA, 25 bp, Homo sapien
aagtaaaggtggagtcagagtatct

SEQ ID NO: 2631472 - DNA, 25 bp, Homo sapien
ttaaaacctcagagttatactttca

SEQ ID NO: 2631473 - DNA, 25 bp, Homo sapien
cacaatacattcctggctgaaagtt

SEQ ID NO: 2631474 - DNA, 25 bp, Homo sapien
aaaacctcagagttatactttcaca

SEQ ID NO: 2631475 - DNA, 25 bp, Homo sapien
tcacaatacattcctggctgaaagt

SEQ ID NO: 2631476 - DNA, 25 bp, Homo sapien
actgcatcagcttatatccatggag

SEQ ID NO: 2631477 - DNA, 25 bp, Homo sapien
tacactttaaagcagggacttcact

SEQ ID NO: 2631478 - DNA, 25 bp, Homo sapien
ccagtcaatatctacgagtctcttc

SEQ ID NO: 2631479 - DNA, 25 bp, Homo sapien
tattactgtgtccacaggagtacac

SEQ ID NO: 2631480 - DNA, 25 bp, Homo sapien
tgttgggtaaaaccaggatgcgcca

SEQ ID NO: 2631481 - DNA, 25 bp, Homo sapien
cttgccttttatagcaactatagca

SEQ ID NO: 2631482 - DNA, 25 bp, Homo sapien
actatagcaacagccatgagagtca

SEQ ID NO: 2631483 - DNA, 25 bp, Homo sapien
ttccccttgttactactgtctgtgg

SEQ ID NO: 2631484 - DNA, 25 bp, Homo sapien
gttactactgtctgtggtgtagagg

SEQ ID NO: 2631485 - DNA, 25 bp, Homo sapien
ctgttccccttgttactactgtctg

SEQ ID NO: 2631486 - DNA, 25 bp, Homo sapien
ttactactgtctgtggtgtagaggt

SEQ ID NO: 2631487 - DNA, 25 bp, Homo sapien
gaaagacaggacttcactctagaat

SEQ ID NO: 2631488 - DNA, 25 bp, Homo sapien
gagaaggcaactgtttaatttagaa

SEQ ID NO: 2631489 - DNA, 25 bp, Homo sapien
gagagacaacaatctatacctagta

SEQ ID NO: 2631490 - DNA, 25 bp, Homo sapien
catgagactttcgatgtacacaatt

SEQ ID NO: 2631491 - DNA, 25 bp, Homo sapien
tactggtattaaactattacatcga

SEQ ID NO: 2631492 - DNA, 25 bp, Homo sapien
tctacagcaacataaatggcactgg

SEQ ID NO: 2631493 - DNA, 25 bp, Homo sapien
acagcaacataaatggcactggagg

SEQ ID NO: 2631494 - DNA, 25 bp, Homo sapien
ggtattaaactattacatcgacaaa

SEQ ID NO: 2631495 - DNA, 25 bp, Homo sapien
gctggatcaaagcagttgacatact

SEQ ID NO: 2631496 - DNA, 25 bp, Homo sapien
tggatcaaagcagttgacatactac

SEQ ID NO: 2631497 - DNA, 25 bp, Homo sapien
tagtccacacgtactctggccaaaa

SEQ ID NO: 2631498 - DNA, 25 bp, Homo sapien
aatatagtccacacgtactctggcc

SEQ ID NO: 2631499 - DNA, 25 bp, Homo sapien
aaagacatctcccaatagccaacaa

SEQ ID NO: 2631500 - DNA, 25 bp, Homo sapien
aatagccaacaacttctaaaggagt

SEQ ID NO: 2631501 - DNA, 25 bp, Homo sapien
ccaaagcagctgtcagttgctccat

SEQ ID NO: 2631502 - DNA, 25 bp, Homo sapien
ctgaaagcatctggcccaaccaaag

SEQ ID NO: 2631503 - DNA, 25 bp, Homo sapien
ctgggtaatcttcagatacatgtac

SEQ ID NO: 2631504 - DNA, 25 bp, Homo sapien
tcagatacatgtactgagtaggata

SEQ ID NO: 2631505 - DNA, 25 bp, Homo sapien
cagatacatgtactgagtaggatac

SEQ ID NO: 2631506 - DNA, 25 bp, Homo sapien
agatacatgtactgagtaggataca

SEQ ID NO: 2631507 - DNA, 25 bp, Homo sapien
tattggctctgtagtaactagcaca

SEQ ID NO: 2631508 - DNA, 25 bp, Homo sapien
ttctctgaacttgacacatatgtat

SEQ ID NO: 2631509 - DNA, 25 bp, Homo sapien
tggtattggctctgtagtaactagc

SEQ ID NO: 2631510 - DNA, 25 bp, Homo sapien
ttggctctgtagtaactagcacatc

SEQ ID NO: 2631511 - DNA, 25 bp, Homo sapien
ctgttgctattctatgaaaaattac

SEQ ID NO: 2631512 - DNA, 25 bp, Homo sapien
tttggattttatggataagcaacag

SEQ ID NO: 2631513 - DNA, 25 bp, Homo sapien
aataaaattcttcggaatcattgtc

SEQ ID NO: 2631514 - DNA, 25 bp, Homo sapien
ctgccctccgtaataaaattcttcg

SEQ ID NO: 2631515 - DNA, 25 bp, Homo sapien
ccgtaataaaattcttcggaatcat

SEQ ID NO: 2631516 - DNA, 25 bp, Homo sapien
aaattcttcggaatcattgtcacct

SEQ ID NO: 2631517 - DNA, 25 bp, Homo sapien
ggcccatatatctctctaactgctg

SEQ ID NO: 2631518 - DNA, 25 bp, Homo sapien
tctctaactgctgacaaatcagctt

SEQ ID NO: 2631519 - DNA, 25 bp, Homo sapien
ggtgcttgtgcagttccccatcata

SEQ ID NO: 2631520 - DNA, 25 bp, Homo sapien
ctgagagaaactgcatgtggcccat

SEQ ID NO: 2631521 - DNA, 25 bp, Homo sapien
cctactggccactacaaatgagaat

SEQ ID NO: 2631522 - DNA, 25 bp, Homo sapien
tctcagaatgctcgtttcccaaacg

SEQ ID NO: 2631523 - DNA, 25 bp, Homo sapien
gatatacgttccttaagccacccca

SEQ ID NO: 2631524 - DNA, 25 bp, Homo sapien
caatcctaccataagaccagaacag

SEQ ID NO: 2631525 - DNA, 25 bp, Homo sapien
gcaaacccatttccgttgtgatgcc

SEQ ID NO: 2631526 - DNA, 25 bp, Homo sapien
tgaataactttcagtggcccaggat

SEQ ID NO: 2631527 - DNA, 25 bp, Homo sapien
aatgacgctgtgtatatgcaaaccc

SEQ ID NO: 2631528 - DNA, 25 bp, Homo sapien
gcccaggatctcatgaatagcaaat

SEQ ID NO: 2631529 - DNA, 25 bp, Homo sapien
acttcaacagaatttaccataaagg

SEQ ID NO: 2631530 - DNA, 25 bp, Homo sapien
taaaggaataatcagaacgtgcata

SEQ ID NO: 2631531 - DNA, 25 bp, Homo sapien
ggtacgtttacaggcaggaagatta

SEQ ID NO: 2631532 - DNA, 25 bp, Homo sapien
aaatcagtacgacccttatctacaa

SEQ ID NO: 2631533 - DNA, 25 bp, Homo sapien
gattaccaaaaaagcacggaagcta

SEQ ID NO: 2631534 - DNA, 25 bp, Homo sapien
acagccatgtgggtaagaacagaaa

SEQ ID NO: 2631535 - DNA, 25 bp, Homo sapien
tacccattagtgaaggagtcgatac

SEQ ID NO: 2631536 - DNA, 25 bp, Homo sapien
tagaatcacttcttgaattactggg

SEQ ID NO: 2631537 - DNA, 25 bp, Homo sapien
tacatcatcaatggctccatattcc

SEQ ID NO: 2631538 - DNA, 25 bp, Homo sapien
caatatctacatcatcaatggctcc

SEQ ID NO: 2631539 - DNA, 25 bp, Homo sapien
tcaagaaagctaacatcgatatgca

SEQ ID NO: 2631540 - DNA, 25 bp, Homo sapien
catcgatatgcagatcaatatctac

SEQ ID NO: 2631541 - DNA, 25 bp, Homo sapien
caattataggttctgttcgaattac

SEQ ID NO: 2631542 - DNA, 25 bp, Homo sapien
tactgtgtaagtgaacagtgtagtc

SEQ ID NO: 2631543 - DNA, 25 bp, Homo sapien
ttctgttcgaattacttcccaagcc

SEQ ID NO: 2631544 - DNA, 25 bp, Homo sapien
cagtgtagtcgaacaattataggtt

SEQ ID NO: 2631545 - DNA, 25 bp, Homo sapien
taagtagagccacgcaattgaaatg

SEQ ID NO: 2631546 - DNA, 25 bp, Homo sapien
gatctgaacacaatgtaggtggcca

SEQ ID NO: 2631547 - DNA, 25 bp, Homo sapien
ggtggccatcactaagaaagcaaat

SEQ ID NO: 2631548 - DNA, 25 bp, Homo sapien
tttgacaaggatatacacataggcc

SEQ ID NO: 2631549 - DNA, 25 bp, Homo sapien
cccaatccaaatcgctcttttgtgg

SEQ ID NO: 2631550 - DNA, 25 bp, Homo sapien
tgtcccaatccaaatcgctcttttg

SEQ ID NO: 2631551 - DNA, 25 bp, Homo sapien
cagctgatgtcccaatccaaatcgc

SEQ ID NO: 2631552 - DNA, 25 bp, Homo sapien
tgatgtcccaatccaaatcgctctt

SEQ ID NO: 2631553 - DNA, 25 bp, Homo sapien
taaggcagaatgttggtaactccta

SEQ ID NO: 2631554 - DNA, 25 bp, Homo sapien
gacttgcttcgatatcttcttcatg

SEQ ID NO: 2631555 - DNA, 25 bp, Homo sapien
gaaaacacgcagaactggctctacg

SEQ ID NO: 2631556 - DNA, 25 bp, Homo sapien
tggtaaagaattctggaatgccaac

SEQ ID NO: 2631557 - DNA, 25 bp, Homo sapien
aatgcaggggagacttcactttctt

SEQ ID NO: 2631558 - DNA, 25 bp, Homo sapien
atgcaggggagacttcactttcttc

SEQ ID NO: 2631559 - DNA, 25 bp, Homo sapien
tgcagggcaaggacggttcaaaagt

SEQ ID NO: 2631560 - DNA, 25 bp, Homo sapien
gttaggataccaataagccctgagg

SEQ ID NO: 2631561 - DNA, 25 bp, Homo sapien
tgactgtgctggaacaagtcctccg

SEQ ID NO: 2631562 - DNA, 25 bp, Homo sapien
taattgctgtcatagcctgctccgc

SEQ ID NO: 2631563 - DNA, 25 bp, Homo sapien
atttaagaactcaagatgaaaatat

SEQ ID NO: 2631564 - DNA, 25 bp, Homo sapien
aagaactcaagatgaaaatatttac

SEQ ID NO: 2631565 - DNA, 25 bp, Homo sapien
actcaagatgaaaatatttacgcac

SEQ ID NO: 2631566 - DNA, 25 bp, Homo sapien
gaactcaagatgaaaatatttacgc

SEQ ID NO: 2631567 - DNA, 25 bp, Homo sapien
cacaggtaaaaacatgcatgggcag

SEQ ID NO: 2631568 - DNA, 25 bp, Homo sapien
cggctacagcataaagtgacttcag

SEQ ID NO: 2631569 - DNA, 25 bp, Homo sapien
ccactcatgtgagaagaccagagat

SEQ ID NO: 2631570 - DNA, 25 bp, Homo sapien
taagggctttgtgaatccaatgcgt

SEQ ID NO: 2631571 - DNA, 25 bp, Homo sapien
accaggaagccacggtctcgtactg

SEQ ID NO: 2631572 - DNA, 25 bp, Homo sapien
cacggtctcgtactggaatgcattt

SEQ ID NO: 2631573 - DNA, 25 bp, Homo sapien
gaagccacggtctcgtactggaatg

SEQ ID NO: 2631574 - DNA, 25 bp, Homo sapien
ctgcaccaggaagccacggtctcgt

SEQ ID NO: 2631575 - DNA, 25 bp, Homo sapien
taatacagggatccgctgttcagca

SEQ ID NO: 2631576 - DNA, 25 bp, Homo sapien
tacagggatccgctgttcagcaaac

SEQ ID NO: 2631577 - DNA, 25 bp, Homo sapien
tcatttaatacagggatccgctgtt

SEQ ID NO: 2631578 - DNA, 25 bp, Homo sapien
gatccgctgttcagcaaactcaatt

SEQ ID NO: 2631579 - DNA, 25 bp, Homo sapien
gtagctgatgaagcctaacacgatg

SEQ ID NO: 2631580 - DNA, 25 bp, Homo sapien
tctgcacagcagacaaaaggcattt

SEQ ID NO: 2631581 - DNA, 25 bp, Homo sapien
taacacgatgcaatccacggtgcct

SEQ ID NO: 2631582 - DNA, 25 bp, Homo sapien
tagtgccactgctcctacgcttact

SEQ ID NO: 2631583 - DNA, 25 bp, Homo sapien
gtcatttactaatatagagtaaaaa

SEQ ID NO: 2631584 - DNA, 25 bp, Homo sapien
tcataccattttaatacgaaataaa

SEQ ID NO: 2631585 - DNA, 25 bp, Homo sapien
tccttttcagttagttttagacaca

SEQ ID NO: 2631586 - DNA, 25 bp, Homo sapien
gatccttttcagttagttttagaca

SEQ ID NO: 2631587 - DNA, 25 bp, Homo sapien
acagctcccgttcacatacggtagg

SEQ ID NO: 2631588 - DNA, 25 bp, Homo sapien
cagggtttgaaaagcaaacacacac

SEQ ID NO: 2631589 - DNA, 25 bp, Homo sapien
acacagctcccgttcacatacggta

SEQ ID NO: 2631590 - DNA, 25 bp, Homo sapien
cagcttcattcattactcccagggt

SEQ ID NO: 2631591 - DNA, 25 bp, Homo sapien
aaataaattggcttccattttatgg

SEQ ID NO: 2631592 - DNA, 25 bp, Homo sapien
tctttttattacatactctgcctat

SEQ ID NO: 2631593 - DNA, 25 bp, Homo sapien
attttacataaagcatgcacgaggg

SEQ ID NO: 2631594 - DNA, 25 bp, Homo sapien
ccattttatggcagttatctttaca

SEQ ID NO: 2631595 - DNA, 25 bp, Homo sapien
tgttgtgccttcataagcctgatgc

SEQ ID NO: 2631596 - DNA, 25 bp, Homo sapien
tagtaaccctctaagtataggctag

SEQ ID NO: 2631597 - DNA, 25 bp, Homo sapien
ttagttatagggatgctcagaaccg

SEQ ID NO: 2631598 - DNA, 25 bp, Homo sapien
gactaggccaaggagtgtgtacatt

SEQ ID NO: 2631599 - DNA, 25 bp, Homo sapien
acataagatagttactacccttcag

SEQ ID NO: 2631600 - DNA, 25 bp, Homo sapien
ataagatagttactacccttcaggt

SEQ ID NO: 2631601 - DNA, 25 bp, Homo sapien
cacagaaggatatggctcgaaaatc

SEQ ID NO: 2631602 - DNA, 25 bp, Homo sapien
gatcattaggatctaccacagaagg

SEQ ID NO: 2631603 - DNA, 25 bp, Homo sapien
gattccaacgcagacctacacatgg

SEQ ID NO: 2631604 - DNA, 25 bp, Homo sapien
gttgaaggccaacatctgaggatca

SEQ ID NO: 2631605 - DNA, 25 bp, Homo sapien
gtgctttcattactcgatcatagtt

SEQ ID NO: 2631606 - DNA, 25 bp, Homo sapien
gctttcattactcgatcatagttct

SEQ ID NO: 2631607 - DNA, 25 bp, Homo sapien
tctgatagaagttatgctatccagt

SEQ ID NO: 2631608 - DNA, 25 bp, Homo sapien
gaagttatgctatccagtgctttca

SEQ ID NO: 2631609 - DNA, 25 bp, Homo sapien
caaataaggagtgcttgtctgagaa

SEQ ID NO: 2631610 - DNA, 25 bp, Homo sapien
gagaaagctgcatagcagcttagtg

SEQ ID NO: 2631611 - DNA, 25 bp, Homo sapien
gtgaatgaacgaatatttgactaca

SEQ ID NO: 2631612 - DNA, 25 bp, Homo sapien
tacagagcagtagcgataactctgg

SEQ ID NO: 2631613 - DNA, 25 bp, Homo sapien
agtaagggatgagcaagggggtcct

SEQ ID NO: 2631614 - DNA, 25 bp, Homo sapien
cattgcagtaagggatgagcaaggg

SEQ ID NO: 2631615 - DNA, 25 bp, Homo sapien
tgcagtaagggatgagcaagggggt

SEQ ID NO: 2631616 - DNA, 25 bp, Homo sapien
gatgagcaagggggtcctgtttatc

SEQ ID NO: 2631617 - DNA, 25 bp, Homo sapien
taaaacttcctggtcgtagcatggt

SEQ ID NO: 2631618 - DNA, 25 bp, Homo sapien
tcaaagagacatgtgtataaaaccc

SEQ ID NO: 2631619 - DNA, 25 bp, Homo sapien
ttgaaatgggcatcacagcaaggtg

SEQ ID NO: 2631620 - DNA, 25 bp, Homo sapien
tatggtaaatctcacggagttggag

SEQ ID NO: 2631621 - DNA, 25 bp, Homo sapien
agtttcacaatatgtgatctattac

SEQ ID NO: 2631622 - DNA, 25 bp, Homo sapien
atgtgatctattacttgatataacc

SEQ ID NO: 2631623 - DNA, 25 bp, Homo sapien
gaactgatgtggagtatgcataaac

SEQ ID NO: 2631624 - DNA, 25 bp, Homo sapien
tctttggctggtggactgctgagaa

SEQ ID NO: 2631625 - DNA, 25 bp, Homo sapien
tgaaatgcaaaggtgcttccaaaga

SEQ ID NO: 2631626 - DNA, 25 bp, Homo sapien
ccaaagagttttttagcagctctaa

SEQ ID NO: 2631627 - DNA, 25 bp, Homo sapien
gactacatgaccatctgttgaatga

SEQ ID NO: 2631628 - DNA, 25 bp, Homo sapien
agacagtgatatcttccccatacat

SEQ ID NO: 2631629 - DNA, 25 bp, Homo sapien
gaaggttctggattgccaaatcaag

SEQ ID NO: 2631630 - DNA, 25 bp, Homo sapien
tgatcatttactgaaagacagtgat

SEQ ID NO: 2631631 - DNA, 25 bp, Homo sapien
ccattcctcaggatggagtgccagt

SEQ ID NO: 2631632 - DNA, 25 bp, Homo sapien
atcgtgtattagaagcaacaaccag

SEQ ID NO: 2631633 - DNA, 25 bp, Homo sapien
accattcctcaggatggagtgccag

SEQ ID NO: 2631634 - DNA, 25 bp, Homo sapien
ctgcaatcgtgtattagaagcaaca

SEQ ID NO: 2631635 - DNA, 25 bp, Homo sapien
ccaaatgatatgcttgacattggac

SEQ ID NO: 2631636 - DNA, 25 bp, Homo sapien
gacattggactaagatagattccac

SEQ ID NO: 2631637 - DNA, 25 bp, Homo sapien
ggactaagatagattccacttccat

SEQ ID NO: 2631638 - DNA, 25 bp, Homo sapien
gattccacttccatacattgcacca

SEQ ID NO: 2631639 - DNA, 25 bp, Homo sapien
taagactcaccattcaggcaccatg

SEQ ID NO: 2631640 - DNA, 25 bp, Homo sapien
gcgttccaagtttcctatcattgag

SEQ ID NO: 2631641 - DNA, 25 bp, Homo sapien
tgttcacctggttatcagacctctc

SEQ ID NO: 2631642 - DNA, 25 bp, Homo sapien
tgtgaatgacatctcctaaaacgtg

SEQ ID NO: 2631643 - DNA, 25 bp, Homo sapien
aaacatcggcaaaataataatttag

SEQ ID NO: 2631644 - DNA, 25 bp, Homo sapien
cattctaggtaaaggtttgatcaca

SEQ ID NO: 2631645 - DNA, 25 bp, Homo sapien
caatcgacctactatgcaaagttcc

SEQ ID NO: 2631646 - DNA, 25 bp, Homo sapien
tagggacaaagctgtctgatgcagc

SEQ ID NO: 2631647 - DNA, 25 bp, Homo sapien
ccttggctgacaccttctgtttctt

SEQ ID NO: 2631648 - DNA, 25 bp, Homo sapien
ttggctgacaccttctgtttcttgt

SEQ ID NO: 2631649 - DNA, 25 bp, Homo sapien
tggctcgtccttggctgacaccttc

SEQ ID NO: 2631650 - DNA, 25 bp, Homo sapien
gcttgaagctggctcgtccttggct

SEQ ID NO: 2631651 - DNA, 25 bp, Homo sapien
tctactgcctaggagtatctctggt

SEQ ID NO: 2631652 - DNA, 25 bp, Homo sapien
gctgatgaggccacagttcactaat

SEQ ID NO: 2631653 - DNA, 25 bp, Homo sapien
taggctccaagagacggaatatgtg

SEQ ID NO: 2631654 - DNA, 25 bp, Homo sapien
cccctcagtaggatgtaggctccaa

SEQ ID NO: 2631655 - DNA, 25 bp, Homo sapien
tagactagcatcaatttccttgcac

SEQ ID NO: 2631656 - DNA, 25 bp, Homo sapien
taatagtcactaagatggctccagg

SEQ ID NO: 2631657 - DNA, 25 bp, Homo sapien
ctaggtcacggaggttacagaaaca

SEQ ID NO: 2631658 - DNA, 25 bp, Homo sapien
aaagcttggcctctttatttcaagg

SEQ ID NO: 2631659 - DNA, 25 bp, Homo sapien
tttgcaggaattgggattgctgtcc

SEQ ID NO: 2631660 - DNA, 25 bp, Homo sapien
ttaagttacggctttgcaggaattg

SEQ ID NO: 2631661 - DNA, 25 bp, Homo sapien
ttcacataaggctatgcattttaag

SEQ ID NO: 2631662 - DNA, 25 bp, Homo sapien
tgcattttaagttacggctttgcag

SEQ ID NO: 2631663 - DNA, 25 bp, Homo sapien
tctaaaggaatcctagtccattccg

SEQ ID NO: 2631664 - DNA, 25 bp, Homo sapien
tcctagtccattccgacttaatata

SEQ ID NO: 2631665 - DNA, 25 bp, Homo sapien
ggaatcctagtccattccgacttaa

SEQ ID NO: 2631666 - DNA, 25 bp, Homo sapien
ttattctaaaggaatcctagtccat

SEQ ID NO: 2631667 - DNA, 25 bp, Homo sapien
tattggggacaacccatatctctcc

SEQ ID NO: 2631668 - DNA, 25 bp, Homo sapien
aaagaatcgtgtgcagacatggtca

SEQ ID NO: 2631669 - DNA, 25 bp, Homo sapien
tcgtgtgcagacatggtcagtattg

SEQ ID NO: 2631670 - DNA, 25 bp, Homo sapien
acgaaaaagaatcgtgtgcagacat

SEQ ID NO: 2631671 - DNA, 25 bp, Homo sapien
taacccatttgtggcaaagacagta

SEQ ID NO: 2631672 - DNA, 25 bp, Homo sapien
gctaaagagaccaaacgataattca

SEQ ID NO: 2631673 - DNA, 25 bp, Homo sapien
ccaggcttgactaagatggtgtttt

SEQ ID NO: 2631674 - DNA, 25 bp, Homo sapien
tcttctaagttaacagcatttaaaa

SEQ ID NO: 2631675 - DNA, 25 bp, Homo sapien
ctgtgggaatcagattagcatggga

SEQ ID NO: 2631676 - DNA, 25 bp, Homo sapien
ctgttttatcatctcaactgtggga

SEQ ID NO: 2631677 - DNA, 25 bp, Homo sapien
tagtcattaggcaaagcttctaaca

SEQ ID NO: 2631678 - DNA, 25 bp, Homo sapien
gaaaacatgtgtttagcatactatg

SEQ ID NO: 2631679 - DNA, 25 bp, Homo sapien
tggcaatacgagttccttcatcatt

SEQ ID NO: 2631680 - DNA, 25 bp, Homo sapien
atccaagttattggcaatacgagtt

SEQ ID NO: 2631681 - DNA, 25 bp, Homo sapien
tattggcaatacgagttccttcatc

SEQ ID NO: 2631682 - DNA, 25 bp, Homo sapien
agttattggcaatacgagttccttc

SEQ ID NO: 2631683 - DNA, 25 bp, Homo sapien
cactggtcgcactatttagtctgac

SEQ ID NO: 2631684 - DNA, 25 bp, Homo sapien
gcagctgctacgaagtctactataa

SEQ ID NO: 2631685 - DNA, 25 bp, Homo sapien
tatccccgcataaaagactgtctga

SEQ ID NO: 2631686 - DNA, 25 bp, Homo sapien
gaacagcccattctatgtcatgcct

SEQ ID NO: 2631687 - DNA, 25 bp, Homo sapien
tactcggaggatctctttgtgaatg

SEQ ID NO: 2631688 - DNA, 25 bp, Homo sapien
atctcccacttggccgtcttcatag

SEQ ID NO: 2631689 - DNA, 25 bp, Homo sapien
ttaaccagtagcagtttgattacca

SEQ ID NO: 2631690 - DNA, 25 bp, Homo sapien
tttgtgaatgcctccttcttgtgta

SEQ ID NO: 2631691 - DNA, 25 bp, Homo sapien
cgaggaaggctttcgaatcatgtta

SEQ ID NO: 2631692 - DNA, 25 bp, Homo sapien
tattgtatgagcaacccaaacttca

SEQ ID NO: 2631693 - DNA, 25 bp, Homo sapien
ccaaacttcagtttaagtgctgttg

SEQ ID NO: 2631694 - DNA, 25 bp, Homo sapien
atccagctttgaacccgaggaaggc

SEQ ID NO: 2631695 - DNA, 25 bp, Homo sapien
gcctcagtggtcctagtggtcaaac

SEQ ID NO: 2631696 - DNA, 25 bp, Homo sapien
tctacagagcttattggaggtgcct

SEQ ID NO: 2631697 - DNA, 25 bp, Homo sapien
gaattatgctggaggcactctacag

SEQ ID NO: 2631698 - DNA, 25 bp, Homo sapien
tatagattcggtctaccaggccatg

SEQ ID NO: 2631699 - DNA, 25 bp, Homo sapien
tacgtcgacaacacagatgcttgca

SEQ ID NO: 2631700 - DNA, 25 bp, Homo sapien
attgcttgccttttgtctgcaactc

SEQ ID NO: 2631701 - DNA, 25 bp, Homo sapien
aaccttttaccttgtcaccttgcag

SEQ ID NO: 2631702 - DNA, 25 bp, Homo sapien
gtcacaacccaatatgggccaacct

SEQ ID NO: 2631703 - DNA, 25 bp, Homo sapien
tgctggattcctaagctgtactcac

SEQ ID NO: 2631704 - DNA, 25 bp, Homo sapien
tggttgctggattcctaagctgtac

SEQ ID NO: 2631705 - DNA, 25 bp, Homo sapien
ggttgctggattcctaagctgtact

SEQ ID NO: 2631706 - DNA, 25 bp, Homo sapien
ttgctggattcctaagctgtactca

SEQ ID NO: 2631707 - DNA, 25 bp, Homo sapien
aacccctgtgggtgcgctctatgag

SEQ ID NO: 2631708 - DNA, 25 bp, Homo sapien
tgagcgtaaatgagttggttaaacc

SEQ ID NO: 2631709 - DNA, 25 bp, Homo sapien
tggttaaacccctgtgggtgcgctc

SEQ ID NO: 2631710 - DNA, 25 bp, Homo sapien
tcttccagtgtcacactctgctgag

SEQ ID NO: 2631711 - DNA, 25 bp, Homo sapien
ccttccgtggtaaacctatgacagt

SEQ ID NO: 2631712 - DNA, 25 bp, Homo sapien
tgcctccttccgtggtaaacctatg

SEQ ID NO: 2631713 - DNA, 25 bp, Homo sapien
aacctatgacagtaggatcatgcat

SEQ ID NO: 2631714 - DNA, 25 bp, Homo sapien
aaacctatgacagtaggatcatgca

SEQ ID NO: 2631715 - DNA, 25 bp, Homo sapien
tgtgaagctgctccccgctgttgtt

SEQ ID NO: 2631716 - DNA, 25 bp, Homo sapien
cccgctgttgtttgtagataaggac

SEQ ID NO: 2631717 - DNA, 25 bp, Homo sapien
atgaattcttagagtgtgaagctgc

SEQ ID NO: 2631718 - DNA, 25 bp, Homo sapien
gggcttgtgatgaattcttagagtg

SEQ ID NO: 2631719 - DNA, 25 bp, Homo sapien
gtactaggactgagtcctgacttca

SEQ ID NO: 2631720 - DNA, 25 bp, Homo sapien
taagatttgcaaagactgtactagg

SEQ ID NO: 2631721 - DNA, 25 bp, Homo sapien
gtattttagtagcacttctagaaaa

SEQ ID NO: 2631722 - DNA, 25 bp, Homo sapien
gacatcatctaaacagtaagatttg

SEQ ID NO: 2631723 - DNA, 25 bp, Homo sapien
tcagtgggatcacccggggaaggcc

SEQ ID NO: 2631724 - DNA, 25 bp, Homo sapien
agaaggccacgtgcttcagtgggat

SEQ ID NO: 2631725 - DNA, 25 bp, Homo sapien
ggtgccagccgtccccacaacagga

SEQ ID NO: 2631726 - DNA, 25 bp, Homo sapien
gggaaggcccaaggccggtgccagc

SEQ ID NO: 2631727 - DNA, 25 bp, Homo sapien
agaaagtcccgagacaggcccattt

SEQ ID NO: 2631728 - DNA, 25 bp, Homo sapien
cacatctggtcctctgcggtccgtt

SEQ ID NO: 2631729 - DNA, 25 bp, Homo sapien
cccgcgatgcgggtgagaaagtccc

SEQ ID NO: 2631730 - DNA, 25 bp, Homo sapien
tctgagatggccacggttccaggtg

SEQ ID NO: 2631731 - DNA, 25 bp, Homo sapien
acaaacagaaaacccatccacagcg

SEQ ID NO: 2631732 - DNA, 25 bp, Homo sapien
aacaaacagaaaacccatccacagc

SEQ ID NO: 2631733 - DNA, 25 bp, Homo sapien
caaacagaaaacccatccacagcgt

SEQ ID NO: 2631734 - DNA, 25 bp, Homo sapien
aaacaaacagaaaacccatccacag

SEQ ID NO: 2631735 - DNA, 25 bp, Homo sapien
caatcgccggatgtttgagtacctc

SEQ ID NO: 2631736 - DNA, 25 bp, Homo sapien
tctttctgaggccagacgccagcat

SEQ ID NO: 2631737 - DNA, 25 bp, Homo sapien
gagtcagtggccaacgtttcctgtg

SEQ ID NO: 2631738 - DNA, 25 bp, Homo sapien
tgaagggactctaggtacgacacga

SEQ ID NO: 2631739 - DNA, 25 bp, Homo sapien
aaaagtgcccacgagcaaaattttg

SEQ ID NO: 2631740 - DNA, 25 bp, Homo sapien
tttcatgaaactaggaccgccagca

SEQ ID NO: 2631741 - DNA, 25 bp, Homo sapien
tgcccacgagcaaaattttgacctt

SEQ ID NO: 2631742 - DNA, 25 bp, Homo sapien
actttcatgaaactaggaccgccag

SEQ ID NO: 2631743 - DNA, 25 bp, Homo sapien
actctgagttagcttgcatgtgtgt

SEQ ID NO: 2631744 - DNA, 25 bp, Homo sapien
ctctgagttagcttgcatgtgtgtg

SEQ ID NO: 2631745 - DNA, 25 bp, Homo sapien
aattttaaggagtcacagaccctgg

SEQ ID NO: 2631746 - DNA, 25 bp, Homo sapien
tgaagcacatctacagactgcatta

SEQ ID NO: 2631747 - DNA, 25 bp, Homo sapien
tccagatcgactgcgaatgacagat

SEQ ID NO: 2631748 - DNA, 25 bp, Homo sapien
cagaccctggtggtcagtgaatcat

SEQ ID NO: 2631749 - DNA, 25 bp, Homo sapien
tcatcatgagtttgtgagttgagaa

SEQ ID NO: 2631750 - DNA, 25 bp, Homo sapien
catcatgagtttgtgagttgagaag

SEQ ID NO: 2631751 - DNA, 25 bp, Homo sapien
atgagtttgtgagttgagaagagcc

SEQ ID NO: 2631752 - DNA, 25 bp, Homo sapien
tcatgagtttgtgagttgagaagag

SEQ ID NO: 2631753 - DNA, 25 bp, Homo sapien
cttttgagaacactgcggctgatgc

SEQ ID NO: 2631754 - DNA, 25 bp, Homo sapien
agaacactgcggctgatgcttcttg

SEQ ID NO: 2631755 - DNA, 25 bp, Homo sapien
gcagcagcgggaaggttacagttac

SEQ ID NO: 2631756 - DNA, 25 bp, Homo sapien
gcttcttgtacaaatattcgctttc

SEQ ID NO: 2631757 - DNA, 25 bp, Homo sapien
cacgaattatccgtcggccctcgga

SEQ ID NO: 2631758 - DNA, 25 bp, Homo sapien
cgaaagccttttctgcggtgttgtc

SEQ ID NO: 2631759 - DNA, 25 bp, Homo sapien
gctccgaagagctcatcttgaggga

SEQ ID NO: 2631760 - DNA, 25 bp, Homo sapien
tgccactgggtaggaagctccgaag

SEQ ID NO: 2631761 - DNA, 25 bp, Homo sapien
ctgcagttctgtccagaaacgagtt

SEQ ID NO: 2631762 - DNA, 25 bp, Homo sapien
aagaaagaccccgaagacctgcagt

SEQ ID NO: 2631763 - DNA, 25 bp, Homo sapien
gaccccgaagacctgcagttctgtc

SEQ ID NO: 2631764 - DNA, 25 bp, Homo sapien
gcagttctgtccagaaacgagtttt

SEQ ID NO: 2631765 - DNA, 25 bp, Homo sapien
gggtccccagatgcagcgaatgaac

SEQ ID NO: 2631766 - DNA, 25 bp, Homo sapien
gatgcagcgaatgaacaggttttcc

SEQ ID NO: 2631767 - DNA, 25 bp, Homo sapien
cctcgtaaaaatgatggaggtgaag

SEQ ID NO: 2631768 - DNA, 25 bp, Homo sapien
caggttttcctcgtaaaaatgatgg

SEQ ID NO: 2631769 - DNA, 25 bp, Homo sapien
taagctgcccccgtcgacttggcaa

SEQ ID NO: 2631770 - DNA, 25 bp, Homo sapien
cgtcgacttggcaacgtgtcccgcg

SEQ ID NO: 2631771 - DNA, 25 bp, Homo sapien
ttggcaacgtgtcccgcggtattgt

SEQ ID NO: 2631772 - DNA, 25 bp, Homo sapien
gtgtcccgcggtattgttcctttca

SEQ ID NO: 2631773 - DNA, 25 bp, Homo sapien
gactttcgaggtcctcctcagttcc

SEQ ID NO: 2631774 - DNA, 25 bp, Homo sapien
aaggactttcgaggtcctcctcagt

SEQ ID NO: 2631775 - DNA, 25 bp, Homo sapien
tcagatcgaaggactttcgaggtcc

SEQ ID NO: 2631776 - DNA, 25 bp, Homo sapien
gatcgaaggactttcgaggtcctcc

SEQ ID NO: 2631777 - DNA, 25 bp, Homo sapien
tttttaagccgcacaccccaagtca

SEQ ID NO: 2631778 - DNA, 25 bp, Homo sapien
ttgcaactctgcaaaggatgaaatt

SEQ ID NO: 2631779 - DNA, 25 bp, Homo sapien
gagaattcaatgtgaccctccttcc

SEQ ID NO: 2631780 - DNA, 25 bp, Homo sapien
cacacagtgtgtgtccgtctgtttg

SEQ ID NO: 2631781 - DNA, 25 bp, Homo sapien
catcgagcagtcttgattagcacca

SEQ ID NO: 2631782 - DNA, 25 bp, Homo sapien
tgtatcagatttataacgtgcatcg

SEQ ID NO: 2631783 - DNA, 25 bp, Homo sapien
tcttgattagcaccaaggtgagctt

SEQ ID NO: 2631784 - DNA, 25 bp, Homo sapien
tataacgtgcatcgagcagtcttga

SEQ ID NO: 2631785 - DNA, 25 bp, Homo sapien
gattggctgcaccacgcagctgttg

SEQ ID NO: 2631786 - DNA, 25 bp, Homo sapien
tcgcccgcgtggtcctgagatcggt

SEQ ID NO: 2631787 - DNA, 25 bp, Homo sapien
aaaccagggcaacgtggtcagtgct

SEQ ID NO: 2631788 - DNA, 25 bp, Homo sapien
cagttccggagctgccgcgttcaat

SEQ ID NO: 2631789 - DNA, 25 bp, Homo sapien
caagtccgaggcagttatccacaag

SEQ ID NO: 2631790 - DNA, 25 bp, Homo sapien
gattggaacttctagcgactgcctg

SEQ ID NO: 2631791 - DNA, 25 bp, Homo sapien
tatccacaagaaaacacgcgcgtgc

SEQ ID NO: 2631792 - DNA, 25 bp, Homo sapien
gcgggcggaaccgaagctcgctctt

SEQ ID NO: 2631793 - DNA, 25 bp, Homo sapien
tgaaagcgcgctttctaaatttcca

SEQ ID NO: 2631794 - DNA, 25 bp, Homo sapien
taaaaatgagtgtgcgtacgcgtgg

SEQ ID NO: 2631795 - DNA, 25 bp, Homo sapien
ctgtcggcaggcgatgtacaaatga

SEQ ID NO: 2631796 - DNA, 25 bp, Homo sapien
tctaatcagcaaaggggctgtcggc

SEQ ID NO: 2631797 - DNA, 25 bp, Homo sapien
taccgtgtgaatttgctgtggcacc

SEQ ID NO: 2631798 - DNA, 25 bp, Homo sapien
gattgtttcactggtagttcctgca

SEQ ID NO: 2631799 - DNA, 25 bp, Homo sapien
gaaccaagtgggtaagcagtccaga

SEQ ID NO: 2631800 - DNA, 25 bp, Homo sapien
cagtgtctgacagatggtgaatacc

SEQ ID NO: 2631801 - DNA, 25 bp, Homo sapien
cctgagctgtcgacgcatactgttt

SEQ ID NO: 2631802 - DNA, 25 bp, Homo sapien
gccctgagctgtcgacgcatactgt

SEQ ID NO: 2631803 - DNA, 25 bp, Homo sapien
tgccctgagctgtcgacgcatactg

SEQ ID NO: 2631804 - DNA, 25 bp, Homo sapien
gagctgtcgacgcatactgtttaat

SEQ ID NO: 2631805 - DNA, 25 bp, Homo sapien
tctcattcaagagaacacctttccg

SEQ ID NO: 2631806 - DNA, 25 bp, Homo sapien
tgagggagattaggtcactggcaat

SEQ ID NO: 2631807 - DNA, 25 bp, Homo sapien
aacacctttccgcagtatgcagtca

SEQ ID NO: 2631808 - DNA, 25 bp, Homo sapien
catgtctgctgagggagattaggtc

SEQ ID NO: 2631809 - DNA, 25 bp, Homo sapien
catttgtggccacagcctcttcaga

SEQ ID NO: 2631810 - DNA, 25 bp, Homo sapien
ttgggatttaggcattggctgcaat

SEQ ID NO: 2631811 - DNA, 25 bp, Homo sapien
cctcttcagagccacagtttgtcat

SEQ ID NO: 2631812 - DNA, 25 bp, Homo sapien
ggctgcaatgcatttgtggccacag

SEQ ID NO: 2631813 - DNA, 25 bp, Homo sapien
cttcctttttcctgaactgaagact

SEQ ID NO: 2631814 - DNA, 25 bp, Homo sapien
tttttcctgaactgaagactggatt

SEQ ID NO: 2631815 - DNA, 25 bp, Homo sapien
cctttttcctgaactgaagactgga

SEQ ID NO: 2631816 - DNA, 25 bp, Homo sapien
tcctttttcctgaactgaagactgg

SEQ ID NO: 2631817 - DNA, 25 bp, Homo sapien
caaggcttcacaggtagagttattt

SEQ ID NO: 2631818 - DNA, 25 bp, Homo sapien
ataaaaaagcaaggcttcacaggta

SEQ ID NO: 2631819 - DNA, 25 bp, Homo sapien
cttcacaggtagagttattttgcct

SEQ ID NO: 2631820 - DNA, 25 bp, Homo sapien
aaaaagcaaggcttcacaggtagag

SEQ ID NO: 2631821 - DNA, 25 bp, Homo sapien
tgagattatagatagctaaactgac

SEQ ID NO: 2631822 - DNA, 25 bp, Homo sapien
gaataatcggcacactctaagcttt

SEQ ID NO: 2631823 - DNA, 25 bp, Homo sapien
gatgtcattgccactaacaactgac

SEQ ID NO: 2631824 - DNA, 25 bp, Homo sapien
catgaacctttaaacagtatgagat

SEQ ID NO: 2631825 - DNA, 25 bp, Homo sapien
cctctaaaagtaatgtccagtccct

SEQ ID NO: 2631826 - DNA, 25 bp, Homo sapien
tacttcctactaagtccatactctt

SEQ ID NO: 2631827 - DNA, 25 bp, Homo sapien
tatacttcctactaagtccatactc

SEQ ID NO: 2631828 - DNA, 25 bp, Homo sapien
gggtcctgctgttatatttggttgt

SEQ ID NO: 2631829 - DNA, 25 bp, Homo sapien
gctttatacttcctactaagtccat

SEQ ID NO: 2631830 - DNA, 25 bp, Homo sapien
catctgtagcttggcactcattggg

SEQ ID NO: 2631831 - DNA, 25 bp, Homo sapien
ggaagtactgccgacgaagtcatca

SEQ ID NO: 2631832 - DNA, 25 bp, Homo sapien
aattgattgggagtgcatctgtagc

SEQ ID NO: 2631833 - DNA, 25 bp, Homo sapien
gaagtcatcaatatgtgctcccaca

SEQ ID NO: 2631834 - DNA, 25 bp, Homo sapien
attcagcataggctaaaactgtaac

SEQ ID NO: 2631835 - DNA, 25 bp, Homo sapien
caaattcagcataggctaaaactgt

SEQ ID NO: 2631836 - DNA, 25 bp, Homo sapien
aattacagtcaaattcagcataggc

SEQ ID NO: 2631837 - DNA, 25 bp, Homo sapien
cagtcaaattcagcataggctaaaa

SEQ ID NO: 2631838 - DNA, 25 bp, Homo sapien
ctgctgctctgaggttttcaagccc

SEQ ID NO: 2631839 - DNA, 25 bp, Homo sapien
tttcatccatccctctaatttttat

SEQ ID NO: 2631840 - DNA, 25 bp, Homo sapien
gctctgaggttttcaagccctgttt

SEQ ID NO: 2631841 - DNA, 25 bp, Homo sapien
tgctgctctgaggttttcaagccct

SEQ ID NO: 2631842 - DNA, 25 bp, Homo sapien
tgaagattgcttctaggtaatgaga

SEQ ID NO: 2631843 - DNA, 25 bp, Homo sapien
gatagacaatattcgcaaagaaaag

SEQ ID NO: 2631844 - DNA, 25 bp, Homo sapien
caccatgcgtcctcagtctagagaa

SEQ ID NO: 2631845 - DNA, 25 bp, Homo sapien
gcgtctggcccaataggtcccattt

SEQ ID NO: 2631846 - DNA, 25 bp, Homo sapien
caccagccagcatcaaacacccact

SEQ ID NO: 2631847 - DNA, 25 bp, Homo sapien
agtaacaccagccagcatcaaacac

SEQ ID NO: 2631848 - DNA, 25 bp, Homo sapien
ttaagtaacaccagccagcatcaaa

SEQ ID NO: 2631849 - DNA, 25 bp, Homo sapien
aacaccagccagcatcaaacaccca

SEQ ID NO: 2631850 - DNA, 25 bp, Homo sapien
tagcccttggtattagagagtttgg

SEQ ID NO: 2631851 - DNA, 25 bp, Homo sapien
agagtttgggctcagttctatttac

SEQ ID NO: 2631852 - DNA, 25 bp, Homo sapien
gatcagcctcaccatagcccttggt

SEQ ID NO: 2631853 - DNA, 25 bp, Homo sapien
aagtcctggatcagcctcaccatag

SEQ ID NO: 2631854 - DNA, 25 bp, Homo sapien
gaggagacttacatccctgtatacg

SEQ ID NO: 2631855 - DNA, 25 bp, Homo sapien
tgtatacgcttttactcacacagtt

SEQ ID NO: 2631856 - DNA, 25 bp, Homo sapien
ggctggaccagttccccctatgtct

SEQ ID NO: 2631857 - DNA, 25 bp, Homo sapien
ttctaatcacaacgctggctggacc

SEQ ID NO: 2631858 - DNA, 25 bp, Homo sapien
ctgaccacctgacagcccacagcca

SEQ ID NO: 2631859 - DNA, 25 bp, Homo sapien
tgaccacctgacagcccacagccat

SEQ ID NO: 2631860 - DNA, 25 bp, Homo sapien
taaactctgcttgcaaaggtatgtc

SEQ ID NO: 2631861 - DNA, 25 bp, Homo sapien
ctgacatatgccatggctatagtaa

SEQ ID NO: 2631862 - DNA, 25 bp, Homo sapien
tcccatccatccctagaattgtggg

SEQ ID NO: 2631863 - DNA, 25 bp, Homo sapien
ccatattaattgtaggtctctgtct

SEQ ID NO: 2631864 - DNA, 25 bp, Homo sapien
aaggaaacttttagcttatatagtg

SEQ ID NO: 2631865 - DNA, 25 bp, Homo sapien
atatagtgggatgtgagcaaatagc

SEQ ID NO: 2631866 - DNA, 25 bp, Homo sapien
tagcttatatagtgggatgtgagca

SEQ ID NO: 2631867 - DNA, 25 bp, Homo sapien
cttttagcttatatagtgggatgtg

SEQ ID NO: 2631868 - DNA, 25 bp, Homo sapien
gcctgaaccgtagttgccaaagaag

SEQ ID NO: 2631869 - DNA, 25 bp, Homo sapien
catcttatcgtctgggtccacatca

SEQ ID NO: 2631870 - DNA, 25 bp, Homo sapien
catcacatgcctgaaccgtagttgc

SEQ ID NO: 2631871 - DNA, 25 bp, Homo sapien
gggcatcttatcgtctgggtccaca

SEQ ID NO: 2631872 - DNA, 25 bp, Homo sapien
tgcacttagatgttccctacttctg

SEQ ID NO: 2631873 - DNA, 25 bp, Homo sapien
tacttctgagcacttgcctcccatg

SEQ ID NO: 2631874 - DNA, 25 bp, Homo sapien
acttgcctcccatgtgacatgtttt

SEQ ID NO: 2631875 - DNA, 25 bp, Homo sapien
ttctcacatgttcgctcttccttgc

SEQ ID NO: 2631876 - DNA, 25 bp, Homo sapien
ttacccaagcctctttagagagtgc

SEQ ID NO: 2631877 - DNA, 25 bp, Homo sapien
gactgatttggtattgggtccccat

SEQ ID NO: 2631878 - DNA, 25 bp, Homo sapien
tattagtcgttgctctttttcatgc

SEQ ID NO: 2631879 - DNA, 25 bp, Homo sapien
gagagtgctagaaacctaagaatgc

SEQ ID NO: 2631880 - DNA, 25 bp, Homo sapien
tgcttttgggtacaaggccaaacca

SEQ ID NO: 2631881 - DNA, 25 bp, Homo sapien
cccactcacaactttcaatctgggc

SEQ ID NO: 2631882 - DNA, 25 bp, Homo sapien
actcacaactttcaatctgggcctc

SEQ ID NO: 2631883 - DNA, 25 bp, Homo sapien
tctccagcctatcaccctcacatgg

SEQ ID NO: 2631884 - DNA, 25 bp, Homo sapien
tcatcttctcgtctccagcctatca

SEQ ID NO: 2631885 - DNA, 25 bp, Homo sapien
tctgtggaaacttccctctgtgctc

SEQ ID NO: 2631886 - DNA, 25 bp, Homo sapien
ggtccttgaagttgctgttctcttt

SEQ ID NO: 2631887 - DNA, 25 bp, Homo sapien
ctgtggaaacttccctctgtgctca

SEQ ID NO: 2631888 - DNA, 25 bp, Homo sapien
ctccaggtccttgaagttgctgttc

SEQ ID NO: 2631889 - DNA, 25 bp, Homo sapien
tgcctgaggcgaaagggaccctgct

SEQ ID NO: 2631890 - DNA, 25 bp, Homo sapien
tatccatcaacagactgttgcctga

SEQ ID NO: 2631891 - DNA, 25 bp, Homo sapien
actgttgcctgaggcgaaagggacc

SEQ ID NO: 2631892 - DNA, 25 bp, Homo sapien
acagactgttgcctgaggcgaaagg

SEQ ID NO: 2631893 - DNA, 25 bp, Homo sapien
aaactgcagtcaacacacactcgat

SEQ ID NO: 2631894 - DNA, 25 bp, Homo sapien
atctgcaacaatccccagctctggc

SEQ ID NO: 2631895 - DNA, 25 bp, Homo sapien
gggcacctattatctggaccagagc

SEQ ID NO: 2631896 - DNA, 25 bp, Homo sapien
ttggccatctgctgcggaaactgca

SEQ ID NO: 2631897 - DNA, 25 bp, Homo sapien
gaaagaggataaaagcagtcctaga

SEQ ID NO: 2631898 - DNA, 25 bp, Homo sapien
ggtggaaagaggataaaagcagtcc

SEQ ID NO: 2631899 - DNA, 25 bp, Homo sapien
ttaaatgacaaagagttgttcagat

SEQ ID NO: 2631900 - DNA, 25 bp, Homo sapien
ggaaagaggataaaagcagtcctag

SEQ ID NO: 2631901 - DNA, 25 bp, Homo sapien
tggtgaagtcaaaacttaaatccat

SEQ ID NO: 2631902 - DNA, 25 bp, Homo sapien
ttggtgaagtcaaaacttaaatcca

SEQ ID NO: 2631903 - DNA, 25 bp, Homo sapien
caacatttcggcagctttagggtct

SEQ ID NO: 2631904 - DNA, 25 bp, Homo sapien
aatgagttcataagtggcaatctga

SEQ ID NO: 2631905 - DNA, 25 bp, Homo sapien
tgagttcataagtggcaatctgatt

SEQ ID NO: 2631906 - DNA, 25 bp, Homo sapien
atcaacatttcggcagctttagggt

SEQ ID NO: 2631907 - DNA, 25 bp, Homo sapien
tccttggtgaggtcgcagtagaaat

SEQ ID NO: 2631908 - DNA, 25 bp, Homo sapien
tctggacggctgtgcacaatctctg

SEQ ID NO: 2631909 - DNA, 25 bp, Homo sapien
tggacggctgtgcacaatctctggg

SEQ ID NO: 2631910 - DNA, 25 bp, Homo sapien
accctccttggtgaggtcgcagtag

SEQ ID NO: 2631911 - DNA, 25 bp, Homo sapien
tgtctgcagatatctctgtcggctt

SEQ ID NO: 2631912 - DNA, 25 bp, Homo sapien
cccaaccgcggctttcttgtaggca

SEQ ID NO: 2631913 - DNA, 25 bp, Homo sapien
aaccgcggctttcttgtaggcacca

SEQ ID NO: 2631914 - DNA, 25 bp, Homo sapien
actctgtctgcagatatctctgtcg

SEQ ID NO: 2631915 - DNA, 25 bp, Homo sapien
tggagacccatttctctacgtagag

SEQ ID NO: 2631916 - DNA, 25 bp, Homo sapien
cctgtttgaatgtccagtggagacc

SEQ ID NO: 2631917 - DNA, 25 bp, Homo sapien
cattttggtgcgtcatagatttaca

SEQ ID NO: 2631918 - DNA, 25 bp, Homo sapien
tgatgttgcaatagaatctcttggc

SEQ ID NO: 2631919 - DNA, 25 bp, Homo sapien
ggtgagtgcgaccttcgaatatcaa

SEQ ID NO: 2631920 - DNA, 25 bp, Homo sapien
gaatatcaatctcataattggctgc

SEQ ID NO: 2631921 - DNA, 25 bp, Homo sapien
agccgcttatatagcccacattgag

SEQ ID NO: 2631922 - DNA, 25 bp, Homo sapien
cacattgagctttgcagctgggtga

SEQ ID NO: 2631923 - DNA, 25 bp, Homo sapien
ttgtaagatctttctgagcattgtt

SEQ ID NO: 2631924 - DNA, 25 bp, Homo sapien
tgtaagatctttctgagcattgttc

SEQ ID NO: 2631925 - DNA, 25 bp, Homo sapien
attgtaagatctttctgagcattgt

SEQ ID NO: 2631926 - DNA, 25 bp, Homo sapien
tattgtaagatctttctgagcattg

SEQ ID NO: 2631927 - DNA, 25 bp, Homo sapien
gactgagagcataacctacagcttc

SEQ ID NO: 2631928 - DNA, 25 bp, Homo sapien
cagggagcctgtgagagcaaaactg

SEQ ID NO: 2631929 - DNA, 25 bp, Homo sapien
taccaggataggtggatgaaggact

SEQ ID NO: 2631930 - DNA, 25 bp, Homo sapien
caaaactggtaaagcgataccagga

SEQ ID NO: 2631931 - DNA, 25 bp, Homo sapien
ttctagactgagaaggttaacatac

SEQ ID NO: 2631932 - DNA, 25 bp, Homo sapien
tctagactgagaaggttaacataca

SEQ ID NO: 2631933 - DNA, 25 bp, Homo sapien
tttctagactgagaaggttaacata

SEQ ID NO: 2631934 - DNA, 25 bp, Homo sapien
ctagactgagaaggttaacatacat

SEQ ID NO: 2631935 - DNA, 25 bp, Homo sapien
tggcagcagtagttcgttccagtgc

SEQ ID NO: 2631936 - DNA, 25 bp, Homo sapien
gcagcagtagttcgttccagtgccc

SEQ ID NO: 2631937 - DNA, 25 bp, Homo sapien
cttggcagcagtagttcgttccagt

SEQ ID NO: 2631938 - DNA, 25 bp, Homo sapien
agcagtagttcgttccagtgcccat

SEQ ID NO: 2631939 - DNA, 25 bp, Homo sapien
tcatcggataaatactgcctcatag

SEQ ID NO: 2631940 - DNA, 25 bp, Homo sapien
tcggataaatactgcctcatagttt

SEQ ID NO: 2631941 - DNA, 25 bp, Homo sapien
cggataaatactgcctcatagtttc

SEQ ID NO: 2631942 - DNA, 25 bp, Homo sapien
catcggataaatactgcctcatagt

SEQ ID NO: 2631943 - DNA, 25 bp, Homo sapien
caataaatgtgaaaaccctatcatc

SEQ ID NO: 2631944 - DNA, 25 bp, Homo sapien
tcagatggataatgcatcaacatca

SEQ ID NO: 2631945 - DNA, 25 bp, Homo sapien
atcagatggataatgcatcaacatc

SEQ ID NO: 2631946 - DNA, 25 bp, Homo sapien
atgtgaaaaccctatcatcctgttt

SEQ ID NO: 2631947 - DNA, 25 bp, Homo sapien
tatgcccaaaatatgctcagtgcct

SEQ ID NO: 2631948 - DNA, 25 bp, Homo sapien
gggagatgttgaaaagtcatgtgaa

SEQ ID NO: 2631949 - DNA, 25 bp, Homo sapien
tcaacctcacaatgagcaggtaaaa

SEQ ID NO: 2631950 - DNA, 25 bp, Homo sapien
caaatagcaagttcagtgtgaagca

SEQ ID NO: 2631951 - DNA, 25 bp, Homo sapien
gccaatgttcagattcaggaaatac

SEQ ID NO: 2631952 - DNA, 25 bp, Homo sapien
ggccaatgttcagattcaggaaata

SEQ ID NO: 2631953 - DNA, 25 bp, Homo sapien
caggccaatgttcagattcaggaaa

SEQ ID NO: 2631954 - DNA, 25 bp, Homo sapien
ggcaggccaatgttcagattcagga

SEQ ID NO: 2631955 - DNA, 25 bp, Homo sapien
cttgtcgttcagaccatgttccaac

SEQ ID NO: 2631956 - DNA, 25 bp, Homo sapien
catgttccaacaggattgagagaac

SEQ ID NO: 2631957 - DNA, 25 bp, Homo sapien
cgttcagaccatgttccaacaggat

SEQ ID NO: 2631958 - DNA, 25 bp, Homo sapien
caacaggattgagagaacccaagaa

SEQ ID NO: 2631959 - DNA, 25 bp, Homo sapien
gatcttgggatcgtgtgtctgtagt

SEQ ID NO: 2631960 - DNA, 25 bp, Homo sapien
ttgggatcgtgtgtctgtagtttga

SEQ ID NO: 2631961 - DNA, 25 bp, Homo sapien
tcttccgatctggatcttgggatcg

SEQ ID NO: 2631962 - DNA, 25 bp, Homo sapien
tctcttccgatctggatcttgggat

SEQ ID NO: 2631963 - DNA, 25 bp, Homo sapien
acacttctaccgctgtcatggaggt

SEQ ID NO: 2631964 - DNA, 25 bp, Homo sapien
agcagaacctcacaccggtggtctt

SEQ ID NO: 2631965 - DNA, 25 bp, Homo sapien
cacacacttctaccgctgtcatgga

SEQ ID NO: 2631966 - DNA, 25 bp, Homo sapien
cagaacctcacaccggtggtcttgc

SEQ ID NO: 2631967 - DNA, 25 bp, Homo sapien
tgggcttcctgcacattaagatgat

SEQ ID NO: 2631968 - DNA, 25 bp, Homo sapien
caacgaaacaattcctgttacaagc

SEQ ID NO: 2631969 - DNA, 25 bp, Homo sapien
tctctaatacttgcaacgaaacaat

SEQ ID NO: 2631970 - DNA, 25 bp, Homo sapien
gagtagacaggcacatctctaatac

SEQ ID NO: 2631971 - DNA, 25 bp, Homo sapien
ctgggtaccctgttctcttggccca

SEQ ID NO: 2631972 - DNA, 25 bp, Homo sapien
tctcttggcccacgggaccctggag

SEQ ID NO: 2631973 - DNA, 25 bp, Homo sapien
caaatggtctcccagccagatagct

SEQ ID NO: 2631974 - DNA, 25 bp, Homo sapien
gacatcaactgctggttcacccaaa

SEQ ID NO: 2631975 - DNA, 25 bp, Homo sapien
gcgcttcgtgtctacattccagaaa

SEQ ID NO: 2631976 - DNA, 25 bp, Homo sapien
tgccagaggttcaatttgcgcttcg

SEQ ID NO: 2631977 - DNA, 25 bp, Homo sapien
aaattgtaaggacgtttcctctgca

SEQ ID NO: 2631978 - DNA, 25 bp, Homo sapien
cagcgtgcggaaacgataactgcac

SEQ ID NO: 2631979 - DNA, 25 bp, Homo sapien
cactgcaatcctgtccaacgggcag

SEQ ID NO: 2631980 - DNA, 25 bp, Homo sapien
aatcctgtccaacgggcagctctga

SEQ ID NO: 2631981 - DNA, 25 bp, Homo sapien
ttagcgccaaaggattgatttcccc

SEQ ID NO: 2631982 - DNA, 25 bp, Homo sapien
tttagcgccaaaggattgatttccc

SEQ ID NO: 2631983 - DNA, 25 bp, Homo sapien
tagttgatcattctttctgaaagga

SEQ ID NO: 2631984 - DNA, 25 bp, Homo sapien
cattctttctgaaaggacggacacc

SEQ ID NO: 2631985 - DNA, 25 bp, Homo sapien
tcattctttctgaaaggacggacac

SEQ ID NO: 2631986 - DNA, 25 bp, Homo sapien
ctccatgtagttgatcattctttct

SEQ ID NO: 2631987 - DNA, 25 bp, Homo sapien
tcagttcagtcctgagcatgcgaag

SEQ ID NO: 2631988 - DNA, 25 bp, Homo sapien
tgcgaaggtccgcagttgattgcag

SEQ ID NO: 2631989 - DNA, 25 bp, Homo sapien
tgcgaaaccacaaacctcagttcag

SEQ ID NO: 2631990 - DNA, 25 bp, Homo sapien
tcggccaagcgaggacggaaatttg

SEQ ID NO: 2631991 - DNA, 25 bp, Homo sapien
ggtatttcttggcagacgacaggcc

SEQ ID NO: 2631992 - DNA, 25 bp, Homo sapien
cagaaggcaccgttcttgtgcggtc

SEQ ID NO: 2631993 - DNA, 25 bp, Homo sapien
tagaatttcatgctcccggcatcgg

SEQ ID NO: 2631994 - DNA, 25 bp, Homo sapien
tgcggtctgttgctcggttctcagc

SEQ ID NO: 2631995 - DNA, 25 bp, Homo sapien
aaaacagtctgggtgaattagcaag

SEQ ID NO: 2631996 - DNA, 25 bp, Homo sapien
tgcacgcagagcttcctagccttac

SEQ ID NO: 2631997 - DNA, 25 bp, Homo sapien
tgtgattcttattctgatgcctagg

SEQ ID NO: 2631998 - DNA, 25 bp, Homo sapien
ctaggactcctgctgcgattgtggt

SEQ ID NO: 2631999 - DNA, 25 bp, Homo sapien
gccagcgggagaggattagggctcc

SEQ ID NO: 2632000 - DNA, 25 bp, Homo sapien
tagggctcccgaggcaacttgctcg

SEQ ID NO: 2632001 - DNA, 25 bp, Homo sapien
ctcggcgagccagcgggagaggatt

SEQ ID NO: 2632002 - DNA, 25 bp, Homo sapien
agaggattagggctcccgaggcaac

SEQ ID NO: 2632003 - DNA, 25 bp, Homo sapien
cagctccatcgccattggtctgacg

SEQ ID NO: 2632004 - DNA, 25 bp, Homo sapien
ttatcatatttcagcctcgccgccg

SEQ ID NO: 2632005 - DNA, 25 bp, Homo sapien
tcgccattggtctgacgcagcgcgc

SEQ ID NO: 2632006 - DNA, 25 bp, Homo sapien
ggcgcagctgttctgattatcatat

SEQ ID NO: 2632007 - DNA, 25 bp, Homo sapien
gccctcgcggatctaggagtccaat

SEQ ID NO: 2632008 - DNA, 25 bp, Homo sapien
ttgccaatgctgaaagagccgctgc

SEQ ID NO: 2632009 - DNA, 25 bp, Homo sapien
tacagttggtgaacagcccacagag

SEQ ID NO: 2632010 - DNA, 25 bp, Homo sapien
agtccaatttaagccggcggagttg

SEQ ID NO: 2632011 - DNA, 25 bp, Homo sapien
aataaatacatgattgactaaccgt

SEQ ID NO: 2632012 - DNA, 25 bp, Homo sapien
taaatacatgattgactaaccgttt

SEQ ID NO: 2632013 - DNA, 25 bp, Homo sapien
aatacatgattgactaaccgtttac

SEQ ID NO: 2632014 - DNA, 25 bp, Homo sapien
acatgattgactaaccgtttacttc

SEQ ID NO: 2632015 - DNA, 25 bp, Homo sapien
tactgatcgtgaatctgattgccgc

SEQ ID NO: 2632016 - DNA, 25 bp, Homo sapien
gattgccgcaaccaacacataggga

SEQ ID NO: 2632017 - DNA, 25 bp, Homo sapien
tgtacagctctcgtccaaatactga

SEQ ID NO: 2632018 - DNA, 25 bp, Homo sapien
ttccaaatccggagaaaccctcaga

SEQ ID NO: 2632019 - DNA, 25 bp, Homo sapien
gaattaggcacatgcaagcctgtgt

SEQ ID NO: 2632020 - DNA, 25 bp, Homo sapien
gagatgtggaaatctaactgtccag

SEQ ID NO: 2632021 - DNA, 25 bp, Homo sapien
cacatgtgtgtatccagaattaggc

SEQ ID NO: 2632022 - DNA, 25 bp, Homo sapien
gaaaagatccacataacaggaggag

SEQ ID NO: 2632023 - DNA, 25 bp, Homo sapien
caagggacaatctttataggttcca

SEQ ID NO: 2632024 - DNA, 25 bp, Homo sapien
aagggacaatctttataggttccat

SEQ ID NO: 2632025 - DNA, 25 bp, Homo sapien
cgttcttgctgaagccgatgctgca

SEQ ID NO: 2632026 - DNA, 25 bp, Homo sapien
tctgctcggcagaagagaccgtcct

SEQ ID NO: 2632027 - DNA, 25 bp, Homo sapien
cgatgtgatacaccttggagcgggc

SEQ ID NO: 2632028 - DNA, 25 bp, Homo sapien
cacttggcgcatttgatcccgtaca

SEQ ID NO: 2632029 - DNA, 25 bp, Homo sapien
gtacatttatgtgtaaccatataga

SEQ ID NO: 2632030 - DNA, 25 bp, Homo sapien
gaggccagagcgaactggaagtaat

SEQ ID NO: 2632031 - DNA, 25 bp, Homo sapien
tacacgtgtacacaagtggtgtaca

SEQ ID NO: 2632032 - DNA, 25 bp, Homo sapien
gacacacagacggtgtaggtgtgct

SEQ ID NO: 2632033 - DNA, 25 bp, Homo sapien
tgtttagtgggaattgatactttaa

SEQ ID NO: 2632034 - DNA, 25 bp, Homo sapien
ttcagtgtttagtgggaattgatac

SEQ ID NO: 2632035 - DNA, 25 bp, Homo sapien
tcagtgtttagtgggaattgatact

SEQ ID NO: 2632036 - DNA, 25 bp, Homo sapien
agtgtttagtgggaattgatacttt

SEQ ID NO: 2632037 - DNA, 25 bp, Homo sapien
ataaatactacaccagcagggactt

SEQ ID NO: 2632038 - DNA, 25 bp, Homo sapien
accagggaaaggaacgcagagcact

SEQ ID NO: 2632039 - DNA, 25 bp, Homo sapien
ggaacgcagagcacttcagtgacag

SEQ ID NO: 2632040 - DNA, 25 bp, Homo sapien
gaattttctcttgggccaaggccac

SEQ ID NO: 2632041 - DNA, 25 bp, Homo sapien
ccttgcaccgcttgttttgaaacca

SEQ ID NO: 2632042 - DNA, 25 bp, Homo sapien
tgaggcccgtcatctctaccagttg

SEQ ID NO: 2632043 - DNA, 25 bp, Homo sapien
tttgaaaccagacccggatcacacg

SEQ ID NO: 2632044 - DNA, 25 bp, Homo sapien
ttcatgagcgcatctggccgcgggt

SEQ ID NO: 2632045 - DNA, 25 bp, Homo sapien
caggaacgcacctcgcacgctgcgt

SEQ ID NO: 2632046 - DNA, 25 bp, Homo sapien
gaacgcacctcgcacgctgcgtctc

SEQ ID NO: 2632047 - DNA, 25 bp, Homo sapien
acctcgcacgctgcgtctccttccc

SEQ ID NO: 2632048 - DNA, 25 bp, Homo sapien
gcacctcgcacgctgcgtctccttc

SEQ ID NO: 2632049 - DNA, 25 bp, Homo sapien
tattgactcagttaatccgccgtac

SEQ ID NO: 2632050 - DNA, 25 bp, Homo sapien
tctgtgggctggactattaggtctg

SEQ ID NO: 2632051 - DNA, 25 bp, Homo sapien
cacaggctaagcaaatataccctgg

SEQ ID NO: 2632052 - DNA, 25 bp, Homo sapien
gccgtacctacggatattagttaga

SEQ ID NO: 2632053 - DNA, 25 bp, Homo sapien
tgggttagcctgtaagccaccgtcg

SEQ ID NO: 2632054 - DNA, 25 bp, Homo sapien
aagcaggctgatctatgtcactctg

SEQ ID NO: 2632055 - DNA, 25 bp, Homo sapien
tgtcactctgcaaggcgaagtcgct

SEQ ID NO: 2632056 - DNA, 25 bp, Homo sapien
gtcgtgtctctctggactggcagcc

SEQ ID NO: 2632057 - DNA, 25 bp, Homo sapien
acagttaaaccagagtctcctgttg

SEQ ID NO: 2632058 - DNA, 25 bp, Homo sapien
taaaccagagtctcctgttgggaat

SEQ ID NO: 2632059 - DNA, 25 bp, Homo sapien
ctcctgttgggaattcagcctcttc

SEQ ID NO: 2632060 - DNA, 25 bp, Homo sapien
gagtctcctgttgggaattcagcct

SEQ ID NO: 2632061 - DNA, 25 bp, Homo sapien
tacaatcgccttgatttgggtccta

SEQ ID NO: 2632062 - DNA, 25 bp, Homo sapien
tctggcacatgctacctagagttag

SEQ ID NO: 2632063 - DNA, 25 bp, Homo sapien
gaaaattgtacccagacacatgcct

SEQ ID NO: 2632064 - DNA, 25 bp, Homo sapien
gatgctcaggaaggataaacttact

SEQ ID NO: 2632065 - DNA, 25 bp, Homo sapien
tgctgttaggtgtatctggaagttg

SEQ ID NO: 2632066 - DNA, 25 bp, Homo sapien
gaggacattgatgctacttcactgc

SEQ ID NO: 2632067 - DNA, 25 bp, Homo sapien
cttcactgccagtggaattagagcc

SEQ ID NO: 2632068 - DNA, 25 bp, Homo sapien
agtggaattagagcccggtcctcct

SEQ ID NO: 2632069 - DNA, 25 bp, Homo sapien
cattgactgggtcgttaaatacttt

SEQ ID NO: 2632070 - DNA, 25 bp, Homo sapien
gtcattaaaacagacttcgtgcatt

SEQ ID NO: 2632071 - DNA, 25 bp, Homo sapien
tgttgctaccatatcaccttgtcat

SEQ ID NO: 2632072 - DNA, 25 bp, Homo sapien
cagagttcgacattataatttccca

SEQ ID NO: 2632073 - DNA, 25 bp, Homo sapien
aaataaaccagctacaggacaggcc

SEQ ID NO: 2632074 - DNA, 25 bp, Homo sapien
gaaaggactctttcagccaaggagg

SEQ ID NO: 2632075 - DNA, 25 bp, Homo sapien
acaatcccgagacgcttgtggcaaa

SEQ ID NO: 2632076 - DNA, 25 bp, Homo sapien
gggaaaagttcttggacagacacaa

SEQ ID NO: 2632077 - DNA, 25 bp, Homo sapien
ctacatatggcgctttgatttcaca

SEQ ID NO: 2632078 - DNA, 25 bp, Homo sapien
aatagtcctgaagatataattctac

SEQ ID NO: 2632079 - DNA, 25 bp, Homo sapien
tagacatataattcaaagaccaccg

SEQ ID NO: 2632080 - DNA, 25 bp, Homo sapien
gacatgaaaagtggcaagtcttccg

SEQ ID NO: 2632081 - DNA, 25 bp, Homo sapien
cgtcaatgggcaagtgggtacacac

SEQ ID NO: 2632082 - DNA, 25 bp, Homo sapien
gatagcattgcgctgaaactacagg

SEQ ID NO: 2632083 - DNA, 25 bp, Homo sapien
taatcgtgaactccaagcaagtcgt

SEQ ID NO: 2632084 - DNA, 25 bp, Homo sapien
tcagggtgaatagcagccaagcatc

SEQ ID NO: 2632085 - DNA, 25 bp, Homo sapien
caggtcgcggaaccaagaagacaaa

SEQ ID NO: 2632086 - DNA, 25 bp, Homo sapien
aagcggccaggtcgcggaaccaaga

SEQ ID NO: 2632087 - DNA, 25 bp, Homo sapien
ggccaggtcgcggaaccaagaagac

SEQ ID NO: 2632088 - DNA, 25 bp, Homo sapien
tgcaaagcggccaggtcgcggaacc

SEQ ID NO: 2632089 - DNA, 25 bp, Homo sapien
ggagatactggattagtcaaagaca

SEQ ID NO: 2632090 - DNA, 25 bp, Homo sapien
ttccaagcagcaagaggagatactg

SEQ ID NO: 2632091 - DNA, 25 bp, Homo sapien
gacacctcgcctaagctttctttca

SEQ ID NO: 2632092 - DNA, 25 bp, Homo sapien
tcatttccaagcagcaagaggagat

SEQ ID NO: 2632093 - DNA, 25 bp, Homo sapien
tatggggatagtagtgttgtcatct

SEQ ID NO: 2632094 - DNA, 25 bp, Homo sapien
gacctgtctaatagccattaacttt

SEQ ID NO: 2632095 - DNA, 25 bp, Homo sapien
tttagatagacctgtctaatagcca

SEQ ID NO: 2632096 - DNA, 25 bp, Homo sapien
tgtgtctttagatagacctgtctaa

SEQ ID NO: 2632097 - DNA, 25 bp, Homo sapien
cttagagaggtgaaagaccatgggt

SEQ ID NO: 2632098 - DNA, 25 bp, Homo sapien
gcagcactcagatgtttccgtcaac

SEQ ID NO: 2632099 - DNA, 25 bp, Homo sapien
gaaatctgaagatagggcaaaggca

SEQ ID NO: 2632100 - DNA, 25 bp, Homo sapien
aaggcagacaaggtcagtttatgaa

SEQ ID NO: 2632101 - DNA, 25 bp, Homo sapien
tctgatccttcaccaaagcatcttc

SEQ ID NO: 2632102 - DNA, 25 bp, Homo sapien
ttttgtaaagaagctgacttgtaac

SEQ ID NO: 2632103 - DNA, 25 bp, Homo sapien
ttgtaaagaagctgacttgtaactg

SEQ ID NO: 2632104 - DNA, 25 bp, Homo sapien
gtaaagaagctgacttgtaactgac

SEQ ID NO: 2632105 - DNA, 25 bp, Homo sapien
gtattttgtaaagaagctgacttgt

SEQ ID NO: 2632106 - DNA, 25 bp, Homo sapien
tcttctaacccttgccgctgttttc

SEQ ID NO: 2632107 - DNA, 25 bp, Homo sapien
aaagtcttctaacccttgccgctgt

SEQ ID NO: 2632108 - DNA, 25 bp, Homo sapien
cccttgccgctgttttccattgtga

SEQ ID NO: 2632109 - DNA, 25 bp, Homo sapien
gccgctgttttccattgtgaatgtt

SEQ ID NO: 2632110 - DNA, 25 bp, Homo sapien
ctgttatccgagacattttgtgagc

SEQ ID NO: 2632111 - DNA, 25 bp, Homo sapien
attatgagtccagctgttatccgag

SEQ ID NO: 2632112 - DNA, 25 bp, Homo sapien
gaggacattatgagtccagctgtta

SEQ ID NO: 2632113 - DNA, 25 bp, Homo sapien
agctgttatccgagacattttgtga

SEQ ID NO: 2632114 - DNA, 25 bp, Homo sapien
cagaaaaatttcatctgcttttgca

SEQ ID NO: 2632115 - DNA, 25 bp, Homo sapien
gaaaaatttcatctgcttttgcaga

SEQ ID NO: 2632116 - DNA, 25 bp, Homo sapien
aaatttcatctgcttttgcagactc

SEQ ID NO: 2632117 - DNA, 25 bp, Homo sapien
aaaaatttcatctgcttttgcagac

SEQ ID NO: 2632118 - DNA, 25 bp, Homo sapien
tcaaattgttcatcagagagaaata

SEQ ID NO: 2632119 - DNA, 25 bp, Homo sapien
tgtactaaattccaatagcttttga

SEQ ID NO: 2632120 - DNA, 25 bp, Homo sapien
aaaaatataaggcatcaagagtgat

SEQ ID NO: 2632121 - DNA, 25 bp, Homo sapien
caagagtgataatgtactaaattcc

SEQ ID NO: 2632122 - DNA, 25 bp, Homo sapien
tagactggtctaggaattcagcttc

SEQ ID NO: 2632123 - DNA, 25 bp, Homo sapien
catttgtgcttggttagggaagacc

SEQ ID NO: 2632124 - DNA, 25 bp, Homo sapien
aatttcaaggatgggactgtaggcc

SEQ ID NO: 2632125 - DNA, 25 bp, Homo sapien
agaagtaaatctgtcctgtgcctag

SEQ ID NO: 2632126 - DNA, 25 bp, Homo sapien
cctcactcctacttgtgggttgaaa

SEQ ID NO: 2632127 - DNA, 25 bp, Homo sapien
taggcataagaaggccaattgccag

SEQ ID NO: 2632128 - DNA, 25 bp, Homo sapien
ttgaagtgtaccctttcagcaccag

SEQ ID NO: 2632129 - DNA, 25 bp, Homo sapien
taactctaagggtgaggatatcctc

SEQ ID NO: 2632130 - DNA, 25 bp, Homo sapien
ctaactaacgtattaagtttcgctg

SEQ ID NO: 2632131 - DNA, 25 bp, Homo sapien
catatcagtaggacggtattaggta

SEQ ID NO: 2632132 - DNA, 25 bp, Homo sapien
tcgcaaatgcaaaatcgtccaaaaa

SEQ ID NO: 2632133 - DNA, 25 bp, Homo sapien
taagtttcgctgatccagaaagaac

SEQ ID NO: 2632134 - DNA, 25 bp, Homo sapien
ctcacactggaatgtactgaagtag

SEQ ID NO: 2632135 - DNA, 25 bp, Homo sapien
gaatcccaatttgctcacactggaa

SEQ ID NO: 2632136 - DNA, 25 bp, Homo sapien
taccagaatcccaatttgctcacac

SEQ ID NO: 2632137 - DNA, 25 bp, Homo sapien
cacactggaatgtactgaagtagtt

SEQ ID NO: 2632138 - DNA, 25 bp, Homo sapien
ctccccgcaacaacttcactagaag

SEQ ID NO: 2632139 - DNA, 25 bp, Homo sapien
ttctccccgcaacaacttcactaga

SEQ ID NO: 2632140 - DNA, 25 bp, Homo sapien
ccttctccccgcaacaacttcacta

SEQ ID NO: 2632141 - DNA, 25 bp, Homo sapien
tctccccgcaacaacttcactagaa

SEQ ID NO: 2632142 - DNA, 25 bp, Homo sapien
atcaataaggatcttgcaaagtgcc

SEQ ID NO: 2632143 - DNA, 25 bp, Homo sapien
ggatcttgcaaagtgccacatgctc

SEQ ID NO: 2632144 - DNA, 25 bp, Homo sapien
gctgcgtggaacaggttgtatgacc

SEQ ID NO: 2632145 - DNA, 25 bp, Homo sapien
gatggctgcgtggaacaggttgtat

SEQ ID NO: 2632146 - DNA, 25 bp, Homo sapien
ctgaatcatcagcaagtgagtcaga

SEQ ID NO: 2632147 - DNA, 25 bp, Homo sapien
ccttctcacactggtagaacaacat

SEQ ID NO: 2632148 - DNA, 25 bp, Homo sapien
gaaacatccttctcacactggtaga

SEQ ID NO: 2632149 - DNA, 25 bp, Homo sapien
tcatcagcaagtgagtcagaaacat

SEQ ID NO: 2632150 - DNA, 25 bp, Homo sapien
gtctatttttggcaatgattgtaaa

SEQ ID NO: 2632151 - DNA, 25 bp, Homo sapien
ttagtctatttttggcaatgattgt

SEQ ID NO: 2632152 - DNA, 25 bp, Homo sapien
tagtctatttttggcaatgattgta

SEQ ID NO: 2632153 - DNA, 25 bp, Homo sapien
tctatttttggcaatgattgtaaat

SEQ ID NO: 2632154 - DNA, 25 bp, Homo sapien
tcatcctagctggaaaccaagttat

SEQ ID NO: 2632155 - DNA, 25 bp, Homo sapien
taaagttgcctatgttatctgtcag

SEQ ID NO: 2632156 - DNA, 25 bp, Homo sapien
cttatgaactggtgtatttctcccc

SEQ ID NO: 2632157 - DNA, 25 bp, Homo sapien
gattctgcctatacaactttaaagg

SEQ ID NO: 2632158 - DNA, 25 bp, Homo sapien
ctcactgattgtcctccattagagg

SEQ ID NO: 2632159 - DNA, 25 bp, Homo sapien
tcacttatctctcactgattgtcct

SEQ ID NO: 2632160 - DNA, 25 bp, Homo sapien
actgattgtcctccattagaggaca

SEQ ID NO: 2632161 - DNA, 25 bp, Homo sapien
cacttatctctcactgattgtcctc

SEQ ID NO: 2632162 - DNA, 25 bp, Homo sapien
gatgccataatatctcccttgtctg

SEQ ID NO: 2632163 - DNA, 25 bp, Homo sapien
cattagatgccataatatctccctt

SEQ ID NO: 2632164 - DNA, 25 bp, Homo sapien
tgccataatatctcccttgtctgtg

SEQ ID NO: 2632165 - DNA, 25 bp, Homo sapien
tagatgccataatatctcccttgtc

SEQ ID NO: 2632166 - DNA, 25 bp, Homo sapien
tacaattcgttccttagggaatgcc

SEQ ID NO: 2632167 - DNA, 25 bp, Homo sapien
ctcaggaatttggatggcgttattt

SEQ ID NO: 2632168 - DNA, 25 bp, Homo sapien
tatcctggcagaaacctggcatgca

SEQ ID NO: 2632169 - DNA, 25 bp, Homo sapien
gcatgcatcttgttctcaggaattt

SEQ ID NO: 2632170 - DNA, 25 bp, Homo sapien
ttctctttcattgtcccggaatgat

SEQ ID NO: 2632171 - DNA, 25 bp, Homo sapien
tctgaagcttctaatctattcccaa

SEQ ID NO: 2632172 - DNA, 25 bp, Homo sapien
gaagcttctaatctattcccaataa

SEQ ID NO: 2632173 - DNA, 25 bp, Homo sapien
gaatgatatcagatcccttcgggtt

SEQ ID NO: 2632174 - DNA, 25 bp, Homo sapien
gaattagatgtgtgaggtttgcctc

SEQ ID NO: 2632175 - DNA, 25 bp, Homo sapien
ttgcctcgagcaacaatcagatagg

SEQ ID NO: 2632176 - DNA, 25 bp, Homo sapien
gatttcacttgccaagggctggttt

SEQ ID NO: 2632177 - DNA, 25 bp, Homo sapien
gtgatttcacttgccaagggctggt

SEQ ID NO: 2632178 - DNA, 25 bp, Homo sapien
actctttgaaggatgctccagacag

SEQ ID NO: 2632179 - DNA, 25 bp, Homo sapien
ctaaattgcagaggaggtgaaaact

SEQ ID NO: 2632180 - DNA, 25 bp, Homo sapien
gctaaattgcagaggaggtgaaaac

SEQ ID NO: 2632181 - DNA, 25 bp, Homo sapien
cagctagagttgtacaaaggcagca

SEQ ID NO: 2632182 - DNA, 25 bp, Homo sapien
cagggcatatgctgaaggagactca

SEQ ID NO: 2632183 - DNA, 25 bp, Homo sapien
gggacagccgcattaggatccattt

SEQ ID NO: 2632184 - DNA, 25 bp, Homo sapien
gaccaaactcagctagagttgtaca

SEQ ID NO: 2632185 - DNA, 25 bp, Homo sapien
taagttgccaggagagagctaaact

SEQ ID NO: 2632186 - DNA, 25 bp, Homo sapien
tgccaggagagagctaaactttttg

SEQ ID NO: 2632187 - DNA, 25 bp, Homo sapien
cttgactgaataagttgccaggaga

SEQ ID NO: 2632188 - DNA, 25 bp, Homo sapien
actgaataagttgccaggagagagc

SEQ ID NO: 2632189 - DNA, 25 bp, Homo sapien
ggacttttgacagttcgtccaactg

SEQ ID NO: 2632190 - DNA, 25 bp, Homo sapien
tttatctggacttttgacagttcgt

SEQ ID NO: 2632191 - DNA, 25 bp, Homo sapien
tcctaggtccatcaattaaatgatc

SEQ ID NO: 2632192 - DNA, 25 bp, Homo sapien
tccttttcctaggtccatcaattaa

SEQ ID NO: 2632193 - DNA, 25 bp, Homo sapien
gaaacttgcgaaaaatactgactgt

SEQ ID NO: 2632194 - DNA, 25 bp, Homo sapien
tgtttcatgatcctgagaaacttgc

SEQ ID NO: 2632195 - DNA, 25 bp, Homo sapien
tactgactgtattgtgatgatgggc

SEQ ID NO: 2632196 - DNA, 25 bp, Homo sapien
aaagttaaagatacattcagtttca

SEQ ID NO: 2632197 - DNA, 25 bp, Homo sapien
tagttctgaccaccaccttttaatg

SEQ ID NO: 2632198 - DNA, 25 bp, Homo sapien
atagttctgaccaccaccttttaat

SEQ ID NO: 2632199 - DNA, 25 bp, Homo sapien
gttctgaccaccaccttttaatgac

SEQ ID NO: 2632200 - DNA, 25 bp, Homo sapien
tctgaccaccaccttttaatgactg

SEQ ID NO: 2632201 - DNA, 25 bp, Homo sapien
ttccgagtgtgggtggtcgaataaa

SEQ ID NO: 2632202 - DNA, 25 bp, Homo sapien
tgcttccgagtgtgggtggtcgaat

SEQ ID NO: 2632203 - DNA, 25 bp, Homo sapien
agtgtgggtggtcgaataaactctt

SEQ ID NO: 2632204 - DNA, 25 bp, Homo sapien
ggtggtcgaataaactcttttagca

SEQ ID NO: 2632205 - DNA, 25 bp, Homo sapien
atttttctgatcctgaaggctgctc

SEQ ID NO: 2632206 - DNA, 25 bp, Homo sapien
taattaccatgtaggcttatggccc

SEQ ID NO: 2632207 - DNA, 25 bp, Homo sapien
catacagtgatgattatagaggcag

SEQ ID NO: 2632208 - DNA, 25 bp, Homo sapien
aagtagcccaggatagtggtgctgc

SEQ ID NO: 2632209 - DNA, 25 bp, Homo sapien
cacttaagtggagtgttccaaagca

SEQ ID NO: 2632210 - DNA, 25 bp, Homo sapien
taactgagctttccatcgatgtgtc

SEQ ID NO: 2632211 - DNA, 25 bp, Homo sapien
caccttcacaccagtgtacgataac

SEQ ID NO: 2632212 - DNA, 25 bp, Homo sapien
tcacaccagtgtacgataactgagc

SEQ ID NO: 2632213 - DNA, 25 bp, Homo sapien
gatgtgtcttgaccttataagaagc

SEQ ID NO: 2632214 - DNA, 25 bp, Homo sapien
tgtgaaagtagcctagagatgcgta

SEQ ID NO: 2632215 - DNA, 25 bp, Homo sapien
tgagggtaaaaagtaggcatatcca

SEQ ID NO: 2632216 - DNA, 25 bp, Homo sapien
gatgcgtaatccaggactaatctgt

SEQ ID NO: 2632217 - DNA, 25 bp, Homo sapien
tgagccatcacatctactagtagac

SEQ ID NO: 2632218 - DNA, 25 bp, Homo sapien
gaagtacaatatcgaagattcagaa

SEQ ID NO: 2632219 - DNA, 25 bp, Homo sapien
gcagaagtacaatatcgaagattca

SEQ ID NO: 2632220 - DNA, 25 bp, Homo sapien
gtacaatatcgaagattcagaaaca

SEQ ID NO: 2632221 - DNA, 25 bp, Homo sapien
cagaagtacaatatcgaagattcag

SEQ ID NO: 2632222 - DNA, 25 bp, Homo sapien
gatctgattttctgtcagggggatc

SEQ ID NO: 2632223 - DNA, 25 bp, Homo sapien
tggcctcgaagggtaaaggcagtta

SEQ ID NO: 2632224 - DNA, 25 bp, Homo sapien
tcagggggatcgtgttaatgttaac

SEQ ID NO: 2632225 - DNA, 25 bp, Homo sapien
ttaatgttaacacagctccacgggg

SEQ ID NO: 2632226 - DNA, 25 bp, Homo sapien
cagtgatgtctagactgctatgctt

SEQ ID NO: 2632227 - DNA, 25 bp, Homo sapien
gtgatgtctagactgctatgctttg

SEQ ID NO: 2632228 - DNA, 25 bp, Homo sapien
tctgagaattcacaatgcttatact

SEQ ID NO: 2632229 - DNA, 25 bp, Homo sapien
aattcacaatgcttatactcttctc

SEQ ID NO: 2632230 - DNA, 25 bp, Homo sapien
cccttatgactaggtattactgtac

SEQ ID NO: 2632231 - DNA, 25 bp, Homo sapien
aatggccttggggtcaattatcaat

SEQ ID NO: 2632232 - DNA, 25 bp, Homo sapien
ttactgtactaatgaaaaacagggc

SEQ ID NO: 2632233 - DNA, 25 bp, Homo sapien
tctcagggctaaattagcattggtc

SEQ ID NO: 2632234 - DNA, 25 bp, Homo sapien
tattttatacatctatccaattgat

SEQ ID NO: 2632235 - DNA, 25 bp, Homo sapien
tccaattgatacttatcatcatccc

SEQ ID NO: 2632236 - DNA, 25 bp, Homo sapien
tccctctggtgtacccgttcactat

SEQ ID NO: 2632237 - DNA, 25 bp, Homo sapien
ttccctctggtgtacccgttcacta

SEQ ID NO: 2632238 - DNA, 25 bp, Homo sapien
tcacagataccacaatatagagatt

SEQ ID NO: 2632239 - DNA, 25 bp, Homo sapien
gtcacagataccacaatatagagat

SEQ ID NO: 2632240 - DNA, 25 bp, Homo sapien
ggtcacagataccacaatatagaga

SEQ ID NO: 2632241 - DNA, 25 bp, Homo sapien
ctttaaaattgatgatggagttgta

SEQ ID NO: 2632242 - DNA, 25 bp, Homo sapien
tttaaaattgatgatggagttgtaa

SEQ ID NO: 2632243 - DNA, 25 bp, Homo sapien
taatttcttccactggccaatgaag

SEQ ID NO: 2632244 - DNA, 25 bp, Homo sapien
ccactggccaatgaagagtcactgt

SEQ ID NO: 2632245 - DNA, 25 bp, Homo sapien
cactggccaatgaagagtcactgtt

SEQ ID NO: 2632246 - DNA, 25 bp, Homo sapien
tcttccactggccaatgaagagtca

SEQ ID NO: 2632247 - DNA, 25 bp, Homo sapien
aaatagcatcaacatcattgtgggt

SEQ ID NO: 2632248 - DNA, 25 bp, Homo sapien
tagaaatagcatcaacatcattgtg

SEQ ID NO: 2632249 - DNA, 25 bp, Homo sapien
cttagaaatagcatcaacatcattg

SEQ ID NO: 2632250 - DNA, 25 bp, Homo sapien
ctcttagaaatagcatcaacatcat

SEQ ID NO: 2632251 - DNA, 25 bp, Homo sapien
gacatgaccccccagggttgtatca

SEQ ID NO: 2632252 - DNA, 25 bp, Homo sapien
tgacatgaccccccagggttgtatc

SEQ ID NO: 2632253 - DNA, 25 bp, Homo sapien
cttccacactgacatgaccccccag

SEQ ID NO: 2632254 - DNA, 25 bp, Homo sapien
acactgacatgaccccccagggttg

SEQ ID NO: 2632255 - DNA, 25 bp, Homo sapien
tcatgcttctcagttctcaatgccg

SEQ ID NO: 2632256 - DNA, 25 bp, Homo sapien
gcttctcagttctcaatgccgactt

SEQ ID NO: 2632257 - DNA, 25 bp, Homo sapien
tcagttctcaatgccgacttgacat

SEQ ID NO: 2632258 - DNA, 25 bp, Homo sapien
tcaatgccgacttgacattgcccat

SEQ ID NO: 2632259 - DNA, 25 bp, Homo sapien
tataccacaaggctacaatggcagg

SEQ ID NO: 2632260 - DNA, 25 bp, Homo sapien
tgacaggtggtactctggtgagctc

SEQ ID NO: 2632261 - DNA, 25 bp, Homo sapien
cgtgatttcgtattcagtctgggcc

SEQ ID NO: 2632262 - DNA, 25 bp, Homo sapien
gcatctcttaggtctggcatcacca

SEQ ID NO: 2632263 - DNA, 25 bp, Homo sapien
agtttggcatgctcaacatccctct

SEQ ID NO: 2632264 - DNA, 25 bp, Homo sapien
tggcatgctcaacatccctcttctt

SEQ ID NO: 2632265 - DNA, 25 bp, Homo sapien
tgagtttggcatgctcaacatccct

SEQ ID NO: 2632266 - DNA, 25 bp, Homo sapien
tttggcatgctcaacatccctcttc

SEQ ID NO: 2632267 - DNA, 25 bp, Homo sapien
tctgagtagtccaaaaactccgcat

SEQ ID NO: 2632268 - DNA, 25 bp, Homo sapien
tccgcattgctagttggaaggtaga

SEQ ID NO: 2632269 - DNA, 25 bp, Homo sapien
tatatttggaatactctctgagtag

SEQ ID NO: 2632270 - DNA, 25 bp, Homo sapien
taagattttgattctctatatttgg

SEQ ID NO: 2632271 - DNA, 25 bp, Homo sapien
aaaaggaacaagtaacggcatacag

SEQ ID NO: 2632272 - DNA, 25 bp, Homo sapien
catacagattaccaatagccacttc

SEQ ID NO: 2632273 - DNA, 25 bp, Homo sapien
aacaagtaacggcatacagattacc

SEQ ID NO: 2632274 - DNA, 25 bp, Homo sapien
taccaatagccacttcaatggagaa

SEQ ID NO: 2632275 - DNA, 25 bp, Homo sapien
tgcatgagcatgcgtgtttattttt

SEQ ID NO: 2632276 - DNA, 25 bp, Homo sapien
gtgcatgagcatgcgtgtttatttt

SEQ ID NO: 2632277 - DNA, 25 bp, Homo sapien
tgtgcatgagcatgcgtgtttattt

SEQ ID NO: 2632278 - DNA, 25 bp, Homo sapien
tactgttaggcctgatgcaactccc

SEQ ID NO: 2632279 - DNA, 25 bp, Homo sapien
ggcactcctgatactgttaggcctg

SEQ ID NO: 2632280 - DNA, 25 bp, Homo sapien
cttctggtgcttgatcacagcgtgg

SEQ ID NO: 2632281 - DNA, 25 bp, Homo sapien
tcacagcgtggtagagatccacatg

SEQ ID NO: 2632282 - DNA, 25 bp, Homo sapien
tccatacatgttggatgatcaagtt

SEQ ID NO: 2632283 - DNA, 25 bp, Homo sapien
ctttccatacatgttggatgatcaa

SEQ ID NO: 2632284 - DNA, 25 bp, Homo sapien
tacatgttggatgatcaagtttttc

SEQ ID NO: 2632285 - DNA, 25 bp, Homo sapien
tgttggatgatcaagtttttcccca

SEQ ID NO: 2632286 - DNA, 25 bp, Homo sapien
actttctcagaggggaaagaggaca

SEQ ID NO: 2632287 - DNA, 25 bp, Homo sapien
ttctcagaggggaaagaggacatac

SEQ ID NO: 2632288 - DNA, 25 bp, Homo sapien
tgtaactttctcagaggggaaagag

SEQ ID NO: 2632289 - DNA, 25 bp, Homo sapien
taactttctcagaggggaaagagga

SEQ ID NO: 2632290 - DNA, 25 bp, Homo sapien
tctttgggtagtctcctagcagtgc

SEQ ID NO: 2632291 - DNA, 25 bp, Homo sapien
ctttggttatgaattctttgggtag

SEQ ID NO: 2632292 - DNA, 25 bp, Homo sapien
tcctagcagtgcgagtttctgaatt

SEQ ID NO: 2632293 - DNA, 25 bp, Homo sapien
tactttccgatcatttgtgaaattc

SEQ ID NO: 2632294 - DNA, 25 bp, Homo sapien
tttccattattctcccactttctaa

SEQ ID NO: 2632295 - DNA, 25 bp, Homo sapien
ttctcccactttctaattcttgtcc

SEQ ID NO: 2632296 - DNA, 25 bp, Homo sapien
ttttccattattctcccactttcta

SEQ ID NO: 2632297 - DNA, 25 bp, Homo sapien
tcccactttctaattcttgtcccat

SEQ ID NO: 2632298 - DNA, 25 bp, Homo sapien
gattcactggcactaatttgtcatt

SEQ ID NO: 2632299 - DNA, 25 bp, Homo sapien
cagaagcgttcactctcacagatat

SEQ ID NO: 2632300 - DNA, 25 bp, Homo sapien
tcacagatatttcagcatggcagat

SEQ ID NO: 2632301 - DNA, 25 bp, Homo sapien
cagcatggcagattcgtgggtcgaa

SEQ ID NO: 2632302 - DNA, 25 bp, Homo sapien
catgctttgtcattcgggctgaagg

SEQ ID NO: 2632303 - DNA, 25 bp, Homo sapien
tgctttgtcattcgggctgaagggt

SEQ ID NO: 2632304 - DNA, 25 bp, Homo sapien
aagcgatcctctgaagtagcattca

SEQ ID NO: 2632305 - DNA, 25 bp, Homo sapien
gtcatgctttgtcattcgggctgaa

SEQ ID NO: 2632306 - DNA, 25 bp, Homo sapien
ctgttagccctggaataacattcat

SEQ ID NO: 2632307 - DNA, 25 bp, Homo sapien
aaatgatattagactctgttagccc

SEQ ID NO: 2632308 - DNA, 25 bp, Homo sapien
gatattagactctgttagccctgga

SEQ ID NO: 2632309 - DNA, 25 bp, Homo sapien
taaaatgatattagactctgttagc

SEQ ID NO: 2632310 - DNA, 25 bp, Homo sapien
tgatggtgatgtacttgctcatgtg

SEQ ID NO: 2632311 - DNA, 25 bp, Homo sapien
catgagatccatgacactgtctgct

SEQ ID NO: 2632312 - DNA, 25 bp, Homo sapien
gcataatgtagatgcctctcctgga

SEQ ID NO: 2632313 - DNA, 25 bp, Homo sapien
tcctggagactctttgaatctactt

SEQ ID NO: 2632314 - DNA, 25 bp, Homo sapien
gcaggaccaggtagaggtgaacaaa

SEQ ID NO: 2632315 - DNA, 25 bp, Homo sapien
tcttaaagggtggtatgatttggct

SEQ ID NO: 2632316 - DNA, 25 bp, Homo sapien
gaggtgaacaaatcatggagacagt

SEQ ID NO: 2632317 - DNA, 25 bp, Homo sapien
tggtagtgagtgagtcttgggagat

SEQ ID NO: 2632318 - DNA, 25 bp, Homo sapien
gatacaattagtgtttgcttgtttg

SEQ ID NO: 2632319 - DNA, 25 bp, Homo sapien
gatacgtgaaaaaccactttatcag

SEQ ID NO: 2632320 - DNA, 25 bp, Homo sapien
tcagttaggactgcattcggtgcac

SEQ ID NO: 2632321 - DNA, 25 bp, Homo sapien
tgattctctgaagcatgtgggcaca

SEQ ID NO: 2632322 - DNA, 25 bp, Homo sapien
tcactactagtgtgattgccttgaa

SEQ ID NO: 2632323 - DNA, 25 bp, Homo sapien
gtctggagattttcactactagtgt

SEQ ID NO: 2632324 - DNA, 25 bp, Homo sapien
tgtctccttcgaatctctttggctc

SEQ ID NO: 2632325 - DNA, 25 bp, Homo sapien
tgacaggaccagtaagtctggagat

SEQ ID NO: 2632326 - DNA, 25 bp, Homo sapien
gctatcaaatgcgagaatggacacc

SEQ ID NO: 2632327 - DNA, 25 bp, Homo sapien
caagctatcaaatgcgagaatggac

SEQ ID NO: 2632328 - DNA, 25 bp, Homo sapien
cagctttgatattggcaagctatca

SEQ ID NO: 2632329 - DNA, 25 bp, Homo sapien
gggatcccctcaacaaatccagctt

SEQ ID NO: 2632330 - DNA, 25 bp, Homo sapien
gaataaatgtagtattccttcacac

SEQ ID NO: 2632331 - DNA, 25 bp, Homo sapien
cacactaagaaggattggtaaaata

SEQ ID NO: 2632332 - DNA, 25 bp, Homo sapien
gtagtattccttcacactaagaagg

SEQ ID NO: 2632333 - DNA, 25 bp, Homo sapien
tcacactaagaaggattggtaaaat

SEQ ID NO: 2632334 - DNA, 25 bp, Homo sapien
tttgaatctggtccgtgacacaatc

SEQ ID NO: 2632335 - DNA, 25 bp, Homo sapien
aggctttgaatctggtccgtgacac

SEQ ID NO: 2632336 - DNA, 25 bp, Homo sapien
gaatctggtccgtgacacaatccat

SEQ ID NO: 2632337 - DNA, 25 bp, Homo sapien
gctttgaatctggtccgtgacacaa

SEQ ID NO: 2632338 - DNA, 25 bp, Homo sapien
aagtcagaatttttgatgaggttca

SEQ ID NO: 2632339 - DNA, 25 bp, Homo sapien
gaggttcaaagatggctcttcatga

SEQ ID NO: 2632340 - DNA, 25 bp, Homo sapien
ttgatgaggttcaaagatggctctt

SEQ ID NO: 2632341 - DNA, 25 bp, Homo sapien
gatgaggttcaaagatggctcttca

SEQ ID NO: 2632342 - DNA, 25 bp, Homo sapien
gaatggcagctgttaagaattcaat

SEQ ID NO: 2632343 - DNA, 25 bp, Homo sapien
aagaattcaattgtgtgtatgacac

SEQ ID NO: 2632344 - DNA, 25 bp, Homo sapien
ttttgaatggcagctgttaagaatt

SEQ ID NO: 2632345 - DNA, 25 bp, Homo sapien
tggcagctgttaagaattcaattgt

SEQ ID NO: 2632346 - DNA, 25 bp, Homo sapien
aactctccaccgagatgtaaattcc

SEQ ID NO: 2632347 - DNA, 25 bp, Homo sapien
gagaggaaaactctccaccgagatg

SEQ ID NO: 2632348 - DNA, 25 bp, Homo sapien
ggaaaactctccaccgagatgtaaa

SEQ ID NO: 2632349 - DNA, 25 bp, Homo sapien
tctccaccgagatgtaaattcccca

SEQ ID NO: 2632350 - DNA, 25 bp, Homo sapien
cattgcagccagacgtgaaagttta

SEQ ID NO: 2632351 - DNA, 25 bp, Homo sapien
ccctacgtttagtgcctgtctgtga

SEQ ID NO: 2632352 - DNA, 25 bp, Homo sapien
ctgtctgtgagatgatattaacatt

SEQ ID NO: 2632353 - DNA, 25 bp, Homo sapien
catctcccctacgtttagtgcctgt

SEQ ID NO: 2632354 - DNA, 25 bp, Homo sapien
ctgatgggaatttcctaacattttt

SEQ ID NO: 2632355 - DNA, 25 bp, Homo sapien
gcaaataggtcttgggtacgtaaca

SEQ ID NO: 2632356 - DNA, 25 bp, Homo sapien
cctgcaaataggtcttgggtacgta

SEQ ID NO: 2632357 - DNA, 25 bp, Homo sapien
ggaattagaattagagtctttgccc

SEQ ID NO: 2632358 - DNA, 25 bp, Homo sapien
agagtctttgccctgcaaataggtc

SEQ ID NO: 2632359 - DNA, 25 bp, Homo sapien
tagaggtgtcgtagctcagcttctg

SEQ ID NO: 2632360 - DNA, 25 bp, Homo sapien
tgttctttttggatgtggaagaggc

SEQ ID NO: 2632361 - DNA, 25 bp, Homo sapien
cagcttctgatgaccctaatgtcaa

SEQ ID NO: 2632362 - DNA, 25 bp, Homo sapien
tgaccctaatgtcaaagggaaagtg

SEQ ID NO: 2632363 - DNA, 25 bp, Homo sapien
ttattttctgatgggataacagcca

SEQ ID NO: 2632364 - DNA, 25 bp, Homo sapien
actgtcagctatttcatatcctttc

SEQ ID NO: 2632365 - DNA, 25 bp, Homo sapien
gcagtgtgcaggactgttctttaaa

SEQ ID NO: 2632366 - DNA, 25 bp, Homo sapien
acagcagtgtgcaggactgttcttt

SEQ ID NO: 2632367 - DNA, 25 bp, Homo sapien
tgcaggccttcagtggacctctttc

SEQ ID NO: 2632368 - DNA, 25 bp, Homo sapien
tcttatcagagttggactgctttcc

SEQ ID NO: 2632369 - DNA, 25 bp, Homo sapien
tctactgtctggactcacactgcag

SEQ ID NO: 2632370 - DNA, 25 bp, Homo sapien
agctggagtctgaaaagtctctgag

SEQ ID NO: 2632371 - DNA, 25 bp, Homo sapien
ttttcctcgatttgctttgatccca

SEQ ID NO: 2632372 - DNA, 25 bp, Homo sapien
ctcctaagtgtccagggtttatggc

SEQ ID NO: 2632373 - DNA, 25 bp, Homo sapien
cagtatggactctcttaatttccag

SEQ ID NO: 2632374 - DNA, 25 bp, Homo sapien
tatggactctcttaatttccagtct

SEQ ID NO: 2632375 - DNA, 25 bp, Homo sapien
tcatgactgtatgaccaaactgtgg

SEQ ID NO: 2632376 - DNA, 25 bp, Homo sapien
cagatcaaattcatgactgtatgac

SEQ ID NO: 2632377 - DNA, 25 bp, Homo sapien
aatttaaacaagtcttgactataca

SEQ ID NO: 2632378 - DNA, 25 bp, Homo sapien
gactatacagatcaaattcatgact

SEQ ID NO: 2632379 - DNA, 25 bp, Homo sapien
tgtttccaggtcattaatcaagtgc

SEQ ID NO: 2632380 - DNA, 25 bp, Homo sapien
ttccaggtcattaatcaagtgctcc

SEQ ID NO: 2632381 - DNA, 25 bp, Homo sapien
caggtcattaatcaagtgctccttc

SEQ ID NO: 2632382 - DNA, 25 bp, Homo sapien
tgaatcattaataaagctgaaaaga

SEQ ID NO: 2632383 - DNA, 25 bp, Homo sapien
ttgaggtccacctgaactccacttt

SEQ ID NO: 2632384 - DNA, 25 bp, Homo sapien
gctaccattcttggaatcactgtgg

SEQ ID NO: 2632385 - DNA, 25 bp, Homo sapien
gactctgcctggctaccattcttgg

SEQ ID NO: 2632386 - DNA, 25 bp, Homo sapien
tttgcagaaggtccaacacttgttt

SEQ ID NO: 2632387 - DNA, 25 bp, Homo sapien
gtaaaacaacaacatagcttgttga

SEQ ID NO: 2632388 - DNA, 25 bp, Homo sapien
catagcttgttgaattgcagtcgtc

SEQ ID NO: 2632389 - DNA, 25 bp, Homo sapien
aacaacatagcttgttgaattgcag

SEQ ID NO: 2632390 - DNA, 25 bp, Homo sapien
tgttgaattgcagtcgtcagagtca

SEQ ID NO: 2632391 - DNA, 25 bp, Homo sapien
ctctgtgctttactcgtactgactc

SEQ ID NO: 2632392 - DNA, 25 bp, Homo sapien
cccattcccgcacatatccaagttt

SEQ ID NO: 2632393 - DNA, 25 bp, Homo sapien
ctcttctctgtgctttactcgtact

SEQ ID NO: 2632394 - DNA, 25 bp, Homo sapien
catatccaagttttacacttattcc

SEQ ID NO: 2632395 - DNA, 25 bp, Homo sapien
ttggccttccagtcaaatttctgta

SEQ ID NO: 2632396 - DNA, 25 bp, Homo sapien
gtaggaacacagtacagtgaagacc

SEQ ID NO: 2632397 - DNA, 25 bp, Homo sapien
gattgttgcccttttactctacctc

SEQ ID NO: 2632398 - DNA, 25 bp, Homo sapien
ggaggcatccaacccaaatgcgtag

SEQ ID NO: 2632399 - DNA, 25 bp, Homo sapien
tggctgctgtccaagaaacaggaac

SEQ ID NO: 2632400 - DNA, 25 bp, Homo sapien
aagcagacacggactggctgctgtc

SEQ ID NO: 2632401 - DNA, 25 bp, Homo sapien
cctggttcccaaaagcagacacgga

SEQ ID NO: 2632402 - DNA, 25 bp, Homo sapien
agctagtgaggcaatgctggtgttc

SEQ ID NO: 2632403 - DNA, 25 bp, Homo sapien
tcagcatggtatcattgctacttct

SEQ ID NO: 2632404 - DNA, 25 bp, Homo sapien
aaggcttttcagcatggtatcattg

SEQ ID NO: 2632405 - DNA, 25 bp, Homo sapien
gagaaggcttttcagcatggtatca

SEQ ID NO: 2632406 - DNA, 25 bp, Homo sapien
tctagataacctgttggggtgttta

SEQ ID NO: 2632407 - DNA, 25 bp, Homo sapien
atccctggaccattgttcactctct

SEQ ID NO: 2632408 - DNA, 25 bp, Homo sapien
ccaacacggtttcacgcttctcttg

SEQ ID NO: 2632409 - DNA, 25 bp, Homo sapien
gtttcacgcttctcttggtgtgctc

SEQ ID NO: 2632410 - DNA, 25 bp, Homo sapien
tccagcccaacacggtttcacgctt

SEQ ID NO: 2632411 - DNA, 25 bp, Homo sapien
atcttccttttgtggcatctaagac

SEQ ID NO: 2632412 - DNA, 25 bp, Homo sapien
caagataatcttccttttgtggcat

SEQ ID NO: 2632413 - DNA, 25 bp, Homo sapien
ctacaagataatcttccttttgtgg

SEQ ID NO: 2632414 - DNA, 25 bp, Homo sapien
taatcttccttttgtggcatctaag

SEQ ID NO: 2632415 - DNA, 25 bp, Homo sapien
gggctatgagctgtgagagaccatt

SEQ ID NO: 2632416 - DNA, 25 bp, Homo sapien
cagcagaacttcaggaaaatggcca

SEQ ID NO: 2632417 - DNA, 25 bp, Homo sapien
gactgagattcttctgggctatgag

SEQ ID NO: 2632418 - DNA, 25 bp, Homo sapien
tttggcagcttagtgagtaggcagc

SEQ ID NO: 2632419 - DNA, 25 bp, Homo sapien
tctttaacttgggctttcaaagcca

SEQ ID NO: 2632420 - DNA, 25 bp, Homo sapien
aacttgggctttcaaagccaaatgc

SEQ ID NO: 2632421 - DNA, 25 bp, Homo sapien
taacttgggctttcaaagccaaatg

SEQ ID NO: 2632422 - DNA, 25 bp, Homo sapien
tgcatcccatgtgagtagtataggg

SEQ ID NO: 2632423 - DNA, 25 bp, Homo sapien
cagtcaagcaggctcttgcatccca

SEQ ID NO: 2632424 - DNA, 25 bp, Homo sapien
tgttggggaggacaccatagctagt

SEQ ID NO: 2632425 - DNA, 25 bp, Homo sapien
gacaccatagctagtccacaagcct

SEQ ID NO: 2632426 - DNA, 25 bp, Homo sapien
gtagccaagatactttcaacaccat

SEQ ID NO: 2632427 - DNA, 25 bp, Homo sapien
gatactttcaacaccatggccacaa

SEQ ID NO: 2632428 - DNA, 25 bp, Homo sapien
aggcctgtttgtagccaagatactt

SEQ ID NO: 2632429 - DNA, 25 bp, Homo sapien
ggcctgtttgtagccaagatacttt

SEQ ID NO: 2632430 - DNA, 25 bp, Homo sapien
aatacacgagcggaaccaaatgccc

SEQ ID NO: 2632431 - DNA, 25 bp, Homo sapien
cagctgagctttgcctagacaagcc

SEQ ID NO: 2632432 - DNA, 25 bp, Homo sapien
cacatgtgcctgaacttgtatccac

SEQ ID NO: 2632433 - DNA, 25 bp, Homo sapien
gattgtcctcatcaatacacgagcg

SEQ ID NO: 2632434 - DNA, 25 bp, Homo sapien
cagactgcctggttgaaggctggaa

SEQ ID NO: 2632435 - DNA, 25 bp, Homo sapien
tgttcttttgcacggcaattcaccc

SEQ ID NO: 2632436 - DNA, 25 bp, Homo sapien
ggctggaactgctcacctttaaaca

SEQ ID NO: 2632437 - DNA, 25 bp, Homo sapien
ccctgttcttttgcacggcaattca

SEQ ID NO: 2632438 - DNA, 25 bp, Homo sapien
ctttcacatcatcgcactctgcttg

SEQ ID NO: 2632439 - DNA, 25 bp, Homo sapien
catcatcgcactctgcttgtaaaat

SEQ ID NO: 2632440 - DNA, 25 bp, Homo sapien
aggaaaagcttctaacaagctgagt

SEQ ID NO: 2632441 - DNA, 25 bp, Homo sapien
tgagtgcatcatcattagttcttcc

SEQ ID NO: 2632442 - DNA, 25 bp, Homo sapien
catactggaaggcagcagcatcttc

SEQ ID NO: 2632443 - DNA, 25 bp, Homo sapien
aacatactggaaggcagcagcatct

SEQ ID NO: 2632444 - DNA, 25 bp, Homo sapien
cttaacatactggaaggcagcagca

SEQ ID NO: 2632445 - DNA, 25 bp, Homo sapien
taacatactggaaggcagcagcatc

SEQ ID NO: 2632446 - DNA, 25 bp, Homo sapien
ggtagattctccagccctaaaacag

SEQ ID NO: 2632447 - DNA, 25 bp, Homo sapien
gagcagagatttagagagagtgcac

SEQ ID NO: 2632448 - DNA, 25 bp, Homo sapien
ttagagagagtgcactgcattgtgg

SEQ ID NO: 2632449 - DNA, 25 bp, Homo sapien
tacagtactgcatgggcagaaccac

SEQ ID NO: 2632450 - DNA, 25 bp, Homo sapien
catctatctgatgcaatatgctcca

SEQ ID NO: 2632451 - DNA, 25 bp, Homo sapien
tgaaatacttgcagtggcataacaa

SEQ ID NO: 2632452 - DNA, 25 bp, Homo sapien
tcagaggtttgactgctttagctag

SEQ ID NO: 2632453 - DNA, 25 bp, Homo sapien
caattgagaaagacagtagctgatg

SEQ ID NO: 2632454 - DNA, 25 bp, Homo sapien
tcttcaacatcttccttctttaaaa

SEQ ID NO: 2632455 - DNA, 25 bp, Homo sapien
caacatcttccttctttaaaaacat

SEQ ID NO: 2632456 - DNA, 25 bp, Homo sapien
catctcttcaacatcttccttcttt

SEQ ID NO: 2632457 - DNA, 25 bp, Homo sapien
ttcatctcttcaacatcttccttct

SEQ ID NO: 2632458 - DNA, 25 bp, Homo sapien
agttctacttctactgacactagag

SEQ ID NO: 2632459 - DNA, 25 bp, Homo sapien
aatctgggtgtctgtctgtgctatc

SEQ ID NO: 2632460 - DNA, 25 bp, Homo sapien
tatctcttgtcttagtcgctgccaa

SEQ ID NO: 2632461 - DNA, 25 bp, Homo sapien
tcgctgccaagacatactacctcta

SEQ ID NO: 2632462 - DNA, 25 bp, Homo sapien
ctatgtggactgatgcttcttggat

SEQ ID NO: 2632463 - DNA, 25 bp, Homo sapien
ctaaccacgtgtcttctgaaaaatt

SEQ ID NO: 2632464 - DNA, 25 bp, Homo sapien
atgtggactgatgcttcttggatag

SEQ ID NO: 2632465 - DNA, 25 bp, Homo sapien
taaccacgtgtcttctgaaaaattc

SEQ ID NO: 2632466 - DNA, 25 bp, Homo sapien
gatgaagaggacttatctccacacc

SEQ ID NO: 2632467 - DNA, 25 bp, Homo sapien
gggtagcttccatattcagtctgag

SEQ ID NO: 2632468 - DNA, 25 bp, Homo sapien
gacagcaccttgtaagaggctatgg

SEQ ID NO: 2632469 - DNA, 25 bp, Homo sapien
gagaccattcttggggtagcttcca

SEQ ID NO: 2632470 - DNA, 25 bp, Homo sapien
aagccaaccgagctgtgcttctggg

SEQ ID NO: 2632471 - DNA, 25 bp, Homo sapien
tgggcagtgctctctcacttcgtgg

SEQ ID NO: 2632472 - DNA, 25 bp, Homo sapien
catcttcagctgatccacgtcctgc

SEQ ID NO: 2632473 - DNA, 25 bp, Homo sapien
cacagagtcccgttctcagaagcca

SEQ ID NO: 2632474 - DNA, 25 bp, Homo sapien
gctgccgtgcaaacaaatctcagcc

SEQ ID NO: 2632475 - DNA, 25 bp, Homo sapien
gggagatagcagttgtcttattacc

SEQ ID NO: 2632476 - DNA, 25 bp, Homo sapien
tatagcctttttatgggagatagca

SEQ ID NO: 2632477 - DNA, 25 bp, Homo sapien
ctttttatgggagatagcagttgtc

SEQ ID NO: 2632478 - DNA, 25 bp, Homo sapien
tagcagttgtcttattacctctcat

SEQ ID NO: 2632479 - DNA, 25 bp, Homo sapien
ttcttcgcatctctctgcacaatga

SEQ ID NO: 2632480 - DNA, 25 bp, Homo sapien
ttactctgctggcgacttggtgctc

SEQ ID NO: 2632481 - DNA, 25 bp, Homo sapien
attgttcttcgcatctctctgcaca

SEQ ID NO: 2632482 - DNA, 25 bp, Homo sapien
gtgctctcccttacactgagattat

SEQ ID NO: 2632483 - DNA, 25 bp, Homo sapien
aggctgagaaaattcttccagctca

SEQ ID NO: 2632484 - DNA, 25 bp, Homo sapien
gaaggctgagaaaattcttccagct

SEQ ID NO: 2632485 - DNA, 25 bp, Homo sapien
ggctgagaaaattcttccagctcat

SEQ ID NO: 2632486 - DNA, 25 bp, Homo sapien
aaggctgagaaaattcttccagctc

SEQ ID NO: 2632487 - DNA, 25 bp, Homo sapien
tatgtctgtgagagcctagtgaaag

SEQ ID NO: 2632488 - DNA, 25 bp, Homo sapien
gaggaacggtatggaaaaatcttga

SEQ ID NO: 2632489 - DNA, 25 bp, Homo sapien
ttaaatggcaagtctaaggatatgg

SEQ ID NO: 2632490 - DNA, 25 bp, Homo sapien
gccaagatgtgacttcagcggtcca

SEQ ID NO: 2632491 - DNA, 25 bp, Homo sapien
gaccagcgagaagctgtagcttaag

SEQ ID NO: 2632492 - DNA, 25 bp, Homo sapien
ccttgagttcaaggtgaccagcgag

SEQ ID NO: 2632493 - DNA, 25 bp, Homo sapien
agatttgatggagctcttcctacga

SEQ ID NO: 2632494 - DNA, 25 bp, Homo sapien
ggtctctcaaaaccttgagttcaag

SEQ ID NO: 2632495 - DNA, 25 bp, Homo sapien
ctgcatctgacgcatgaaacaacag

SEQ ID NO: 2632496 - DNA, 25 bp, Homo sapien
tgaaacaacaggaagctgttgatag

SEQ ID NO: 2632497 - DNA, 25 bp, Homo sapien
gcatctgacgcatgaaacaacagga

SEQ ID NO: 2632498 - DNA, 25 bp, Homo sapien
tcagactgcatctgacgcatgaaac

SEQ ID NO: 2632499 - DNA, 25 bp, Homo sapien
gattcccatatatcagagatgagaa

SEQ ID NO: 2632500 - DNA, 25 bp, Homo sapien
tatgaagatggattcccatatatca

SEQ ID NO: 2632501 - DNA, 25 bp, Homo sapien
gatggattcccatatatcagagatg

SEQ ID NO: 2632502 - DNA, 25 bp, Homo sapien
cctgtatgaagatggattcccatat

SEQ ID NO: 2632503 - DNA, 25 bp, Homo sapien
ggatctgggtagccttataaggctc

SEQ ID NO: 2632504 - DNA, 25 bp, Homo sapien
aggatctgggtagccttataaggct

SEQ ID NO: 2632505 - DNA, 25 bp, Homo sapien
gatctgggtagccttataaggctct

SEQ ID NO: 2632506 - DNA, 25 bp, Homo sapien
ggcgctgttctctggtatcctctct

SEQ ID NO: 2632507 - DNA, 25 bp, Homo sapien
gaaaagtggtcagatcggaaggccc

SEQ ID NO: 2632508 - DNA, 25 bp, Homo sapien
gtcagatcggaaggccctcgagacc

SEQ ID NO: 2632509 - DNA, 25 bp, Homo sapien
tccacacctagtgtgccagcgttgt

SEQ ID NO: 2632510 - DNA, 25 bp, Homo sapien
aataaagccagcttcgcgggtccgt

SEQ ID NO: 2632511 - DNA, 25 bp, Homo sapien
caggctctgtccgagacatggacaa

SEQ ID NO: 2632512 - DNA, 25 bp, Homo sapien
ggacatctgcctttcattgagaggg

SEQ ID NO: 2632513 - DNA, 25 bp, Homo sapien
tgtttaggctaaagtccacgggctg

SEQ ID NO: 2632514 - DNA, 25 bp, Homo sapien
gcaggcgacagcgacccctgggcgg

SEQ ID NO: 2632515 - DNA, 25 bp, Homo sapien
cagcaggcgacagcgacccctgggc

SEQ ID NO: 2632516 - DNA, 25 bp, Homo sapien
gacagcgacccctgggcgggcgcgg

SEQ ID NO: 2632517 - DNA, 25 bp, Homo sapien
aggcgacagcgacccctgggcgggc

SEQ ID NO: 2632518 - DNA, 25 bp, Homo sapien
aagtggcagtttcgtcttgcatccc

SEQ ID NO: 2632519 - DNA, 25 bp, Homo sapien
tcattttggaacaagtggcagtttc

SEQ ID NO: 2632520 - DNA, 25 bp, Homo sapien
tggcagtttcgtcttgcatccctgc

SEQ ID NO: 2632521 - DNA, 25 bp, Homo sapien
gtggcagtttcgtcttgcatccctg

SEQ ID NO: 2632522 - DNA, 25 bp, Homo sapien
tcaaaatatccctcctcttgggtgc

SEQ ID NO: 2632523 - DNA, 25 bp, Homo sapien
caaaatatccctcctcttgggtgct

SEQ ID NO: 2632524 - DNA, 25 bp, Homo sapien
ccctcctcttgggtgctgacataga

SEQ ID NO: 2632525 - DNA, 25 bp, Homo sapien
cctcttgggtgctgacatagaaaca

SEQ ID NO: 2632526 - DNA, 25 bp, Homo sapien
tatgaccacaactccagtctaatgg

SEQ ID NO: 2632527 - DNA, 25 bp, Homo sapien
tcctcaggcctaggaatggtcatgg

SEQ ID NO: 2632528 - DNA, 25 bp, Homo sapien
tccctactgttgcttgcgctagatg

SEQ ID NO: 2632529 - DNA, 25 bp, Homo sapien
gttctctggaaggttggatcttgcc

SEQ ID NO: 2632530 - DNA, 25 bp, Homo sapien
aaggctaatcaacaagctgagggag

SEQ ID NO: 2632531 - DNA, 25 bp, Homo sapien
aggctaatcaacaagctgagggagt

SEQ ID NO: 2632532 - DNA, 25 bp, Homo sapien
aaaatcccgtgaattcattgctgcc

SEQ ID NO: 2632533 - DNA, 25 bp, Homo sapien
gaggagcatctatctactgaagtca

SEQ ID NO: 2632534 - DNA, 25 bp, Homo sapien
tcttgcctgtgaaaagaagaccctt

SEQ ID NO: 2632535 - DNA, 25 bp, Homo sapien
taagctgtggcccaagagctcatgc

SEQ ID NO: 2632536 - DNA, 25 bp, Homo sapien
aaagtgcttacttgcagttgtcaca

SEQ ID NO: 2632537 - DNA, 25 bp, Homo sapien
tacggcataagatcatttcaccaaa

SEQ ID NO: 2632538 - DNA, 25 bp, Homo sapien
aaaatcctatgaacagaagtgtgtg

SEQ ID NO: 2632539 - DNA, 25 bp, Homo sapien
taaggattggccagtacccatgtat

SEQ ID NO: 2632540 - DNA, 25 bp, Homo sapien
caatatttgagatagccgtgcttag

SEQ ID NO: 2632541 - DNA, 25 bp, Homo sapien
tgtgtctttccatgtctactacctc

SEQ ID NO: 2632542 - DNA, 25 bp, Homo sapien
tcctggaacacagcataacaagtgg

SEQ ID NO: 2632543 - DNA, 25 bp, Homo sapien
tataaagcaccttgggagcctctcc

SEQ ID NO: 2632544 - DNA, 25 bp, Homo sapien
ctagaagtcaagcatcctggattgt

SEQ ID NO: 2632545 - DNA, 25 bp, Homo sapien
tgttgctcttgagacacttccagtg

SEQ ID NO: 2632546 - DNA, 25 bp, Homo sapien
ctctggaacccaatttatttcactg

SEQ ID NO: 2632547 - DNA, 25 bp, Homo sapien
tcactgaagaattgagggaattgaa

SEQ ID NO: 2632548 - DNA, 25 bp, Homo sapien
tactggtcacgttctgtctgggctc

SEQ ID NO: 2632549 - DNA, 25 bp, Homo sapien
gatgtcctgggaatcctaggctcca

SEQ ID NO: 2632550 - DNA, 25 bp, Homo sapien
gatgttaaagcgctggtcccaagag

SEQ ID NO: 2632551 - DNA, 25 bp, Homo sapien
cactcggacgctacaagcctgttgg

SEQ ID NO: 2632552 - DNA, 25 bp, Homo sapien
tgaggcgctccggacgaatgaactc

SEQ ID NO: 2632553 - DNA, 25 bp, Homo sapien
gggaacactgcagcgaaaatctacc

SEQ ID NO: 2632554 - DNA, 25 bp, Homo sapien
aacagcgggctgacgaaatgaaggc

SEQ ID NO: 2632555 - DNA, 25 bp, Homo sapien
ggaaacacgcttgcttcgactcatg

SEQ ID NO: 2632556 - DNA, 25 bp, Homo sapien
ctgcacgaggttgtaagtgtgccac

SEQ ID NO: 2632557 - DNA, 25 bp, Homo sapien
ggcccgcattgtccttctcgatgtt

SEQ ID NO: 2632558 - DNA, 25 bp, Homo sapien
cacgaggttgtaagtgtgccacatg

SEQ ID NO: 2632559 - DNA, 25 bp, Homo sapien
ggttgtaagtgtgccacatgtcctc

SEQ ID NO: 2632560 - DNA, 25 bp, Homo sapien
gaactgctccctcacaaatcctggg

SEQ ID NO: 2632561 - DNA, 25 bp, Homo sapien
caaagtgtatgtggcgctggatagc

SEQ ID NO: 2632562 - DNA, 25 bp, Homo sapien
tgactaagcagatatgggcgaggcc

SEQ ID NO: 2632563 - DNA, 25 bp, Homo sapien
gactctgtctgtaccttgcggatgg

SEQ ID NO: 2632564 - DNA, 25 bp, Homo sapien
gcggctagccacagtagggtcacaa

SEQ ID NO: 2632565 - DNA, 25 bp, Homo sapien
tttagtgtctgaaaggcggctagcc

SEQ ID NO: 2632566 - DNA, 25 bp, Homo sapien
tgagtccatagaaagctcgatccgg

SEQ ID NO: 2632567 - DNA, 25 bp, Homo sapien
gagctgttccccagaaacgtgaaga

SEQ ID NO: 2632568 - DNA, 25 bp, Homo sapien
taatcctcttcagaactggaatcac

SEQ ID NO: 2632569 - DNA, 25 bp, Homo sapien
ttaatcctcttcagaactggaatca

SEQ ID NO: 2632570 - DNA, 25 bp, Homo sapien
gctttctgtcacaaggatgctgaga

SEQ ID NO: 2632571 - DNA, 25 bp, Homo sapien
cttgcagctttctgtcacaaggatg

SEQ ID NO: 2632572 - DNA, 25 bp, Homo sapien
aagacataagaaatccctgtatgaa

SEQ ID NO: 2632573 - DNA, 25 bp, Homo sapien
gaaatccctgtatgaatcaaaaagt

SEQ ID NO: 2632574 - DNA, 25 bp, Homo sapien
gccaatcacaaaatatctagtgtag

SEQ ID NO: 2632575 - DNA, 25 bp, Homo sapien
attgtttaaatacatgtcttgccaa

SEQ ID NO: 2632576 - DNA, 25 bp, Homo sapien
taaatacatgtcttgccaatcacaa

SEQ ID NO: 2632577 - DNA, 25 bp, Homo sapien
aatacatgtcttgccaatcacaaaa

SEQ ID NO: 2632578 - DNA, 25 bp, Homo sapien
catgattggtttaacaagcctttga

SEQ ID NO: 2632579 - DNA, 25 bp, Homo sapien
tgacaatccctagcagatcaaagtt

SEQ ID NO: 2632580 - DNA, 25 bp, Homo sapien
taggcatcgtctttaaatacacaca

SEQ ID NO: 2632581 - DNA, 25 bp, Homo sapien
tcaagtctactaattgtacggcaat

SEQ ID NO: 2632582 - DNA, 25 bp, Homo sapien
cagggatgctgctggtttacggacc

SEQ ID NO: 2632583 - DNA, 25 bp, Homo sapien
cactacttgaaataggcgtcgctga

SEQ ID NO: 2632584 - DNA, 25 bp, Homo sapien
caggtagcgcctgtctcagtaggtc

SEQ ID NO: 2632585 - DNA, 25 bp, Homo sapien
gccagagatttaccagcacaggaag

SEQ ID NO: 2632586 - DNA, 25 bp, Homo sapien
tagcagttggaattagactactgta

SEQ ID NO: 2632587 - DNA, 25 bp, Homo sapien
gaaggtacattggagttatcgatag

SEQ ID NO: 2632588 - DNA, 25 bp, Homo sapien
tttgcaagcacatgataggaaatgg

SEQ ID NO: 2632589 - DNA, 25 bp, Homo sapien
tccaatacttaatgagtagcagttg

SEQ ID NO: 2632590 - DNA, 25 bp, Homo sapien
taggtgattagcacacttcccctcc

SEQ ID NO: 2632591 - DNA, 25 bp, Homo sapien
taactctaaacagcaatctgcagtc

SEQ ID NO: 2632592 - DNA, 25 bp, Homo sapien
tgcctcctccaatcgatccttgatg

SEQ ID NO: 2632593 - DNA, 25 bp, Homo sapien
tcttgtagcacggaggttcttaggt

SEQ ID NO: 2632594 - DNA, 25 bp, Homo sapien
tagtgtaacatgtggatgagaatac

SEQ ID NO: 2632595 - DNA, 25 bp, Homo sapien
cacaatataataacatgttactgaa

SEQ ID NO: 2632596 - DNA, 25 bp, Homo sapien
tagttattttacagattattcttgg

SEQ ID NO: 2632597 - DNA, 25 bp, Homo sapien
gttatttatctcaacacaatataat

SEQ ID NO: 2632598 - DNA, 25 bp, Homo sapien
tgcctcagtattgggtgttttgaaa

SEQ ID NO: 2632599 - DNA, 25 bp, Homo sapien
gcaaagccaggcaatatgactgcca

SEQ ID NO: 2632600 - DNA, 25 bp, Homo sapien
aatgacaaaacccttctgactgggt

SEQ ID NO: 2632601 - DNA, 25 bp, Homo sapien
ctgaaagctgagaagaactggcatt

SEQ ID NO: 2632602 - DNA, 25 bp, Homo sapien
ttagaagtaataggccttctgcagc

SEQ ID NO: 2632603 - DNA, 25 bp, Homo sapien
tttccactgggtgagacagtgtcaa

SEQ ID NO: 2632604 - DNA, 25 bp, Homo sapien
tacgaagcagaaagattagaagtaa

SEQ ID NO: 2632605 - DNA, 25 bp, Homo sapien
acagtgtcaagggtagaggctacaa

SEQ ID NO: 2632606 - DNA, 25 bp, Homo sapien
gaggtcaccataggctgggatcatg

SEQ ID NO: 2632607 - DNA, 25 bp, Homo sapien
taagagagaacaatctggccgggca

SEQ ID NO: 2632608 - DNA, 25 bp, Homo sapien
tacttatcagcccattaagagagaa

SEQ ID NO: 2632609 - DNA, 25 bp, Homo sapien
gattgtgtaattgggcattctgcag

SEQ ID NO: 2632610 - DNA, 25 bp, Homo sapien
ctaatttggtacagtagctctagga

SEQ ID NO: 2632611 - DNA, 25 bp, Homo sapien
gattgccaggaaccatcagaaactg

SEQ ID NO: 2632612 - DNA, 25 bp, Homo sapien
gaatgattctcccatagaggcttca

SEQ ID NO: 2632613 - DNA, 25 bp, Homo sapien
agatcatcctgttttttatggtggg

SEQ ID NO: 2632614 - DNA, 25 bp, Homo sapien
aactcctggcctaaagtgatctacc

SEQ ID NO: 2632615 - DNA, 25 bp, Homo sapien
agtgatctacccacctcggcctccc

SEQ ID NO: 2632616 - DNA, 25 bp, Homo sapien
gattataggcatgagccaccacatc

SEQ ID NO: 2632617 - DNA, 25 bp, Homo sapien
cactatgttgaccaaactcatcttg

SEQ ID NO: 2632618 - DNA, 25 bp, Homo sapien
aactctctgtgttaaaagcactacc

SEQ ID NO: 2632619 - DNA, 25 bp, Homo sapien
ggatgaaaacatgatgcaggactca

SEQ ID NO: 2632620 - DNA, 25 bp, Homo sapien
actttcatggctaggtcagatttaa

SEQ ID NO: 2632621 - DNA, 25 bp, Homo sapien
ggcaagacggtggtgatgtcatcaa

SEQ ID NO: 2632622 - DNA, 25 bp, Homo sapien
aaatccaaataaacacctcagtatt

SEQ ID NO: 2632623 - DNA, 25 bp, Homo sapien
caaaatctagcacaactccttgtac

SEQ ID NO: 2632624 - DNA, 25 bp, Homo sapien
tatcaaaatctagcacaactccttg

SEQ ID NO: 2632625 - DNA, 25 bp, Homo sapien
cctttatcaaaatctagcacaactc

SEQ ID NO: 2632626 - DNA, 25 bp, Homo sapien
ctagcacaactccttgtacacagat

SEQ ID NO: 2632627 - DNA, 25 bp, Homo sapien
gttacatagagttaactaagagtcc

SEQ ID NO: 2632628 - DNA, 25 bp, Homo sapien
taactaagagtccatcatgttttga

SEQ ID NO: 2632629 - DNA, 25 bp, Homo sapien
aaaacaaaatccagttacatagagt

SEQ ID NO: 2632630 - DNA, 25 bp, Homo sapien
catcatgttttgagttatggaaggc

SEQ ID NO: 2632631 - DNA, 25 bp, Homo sapien
gaatgatacgcagcagcgtagaaca

SEQ ID NO: 2632632 - DNA, 25 bp, Homo sapien
tatccaaacatgtcttccaccgggc

SEQ ID NO: 2632633 - DNA, 25 bp, Homo sapien
ttcacatcaacattgaatgatacgc

SEQ ID NO: 2632634 - DNA, 25 bp, Homo sapien
caccgggccgctgaaagtcattgaa

SEQ ID NO: 2632635 - DNA, 25 bp, Homo sapien
tgactagactgcattttctaccata

SEQ ID NO: 2632636 - DNA, 25 bp, Homo sapien
aatgactagactgcattttctacca

SEQ ID NO: 2632637 - DNA, 25 bp, Homo sapien
gactagactgcattttctaccataa

SEQ ID NO: 2632638 - DNA, 25 bp, Homo sapien
actagactgcattttctaccataaa

SEQ ID NO: 2632639 - DNA, 25 bp, Homo sapien
cccagaggtacctgaattgaaggta

SEQ ID NO: 2632640 - DNA, 25 bp, Homo sapien
tcccagaggtacctgaattgaaggt

SEQ ID NO: 2632641 - DNA, 25 bp, Homo sapien
ccagaggtacctgaattgaaggtat

SEQ ID NO: 2632642 - DNA, 25 bp, Homo sapien
tcttgatttgtcttgaatacacctt

SEQ ID NO: 2632643 - DNA, 25 bp, Homo sapien
gaccatttccaaacttccaccaaga

SEQ ID NO: 2632644 - DNA, 25 bp, Homo sapien
tctcctacaccttcattgaccattt

SEQ ID NO: 2632645 - DNA, 25 bp, Homo sapien
cagttgcccctaatacagcctgaag

SEQ ID NO: 2632646 - DNA, 25 bp, Homo sapien
gcaggatcctctagagaaaaggcat

SEQ ID NO: 2632647 - DNA, 25 bp, Homo sapien
cattggtaccctgacctggcataaa

SEQ ID NO: 2632648 - DNA, 25 bp, Homo sapien
ggcatcaatcacatgagcccattgg

SEQ ID NO: 2632649 - DNA, 25 bp, Homo sapien
tctggaatagctctacattagcagg

SEQ ID NO: 2632650 - DNA, 25 bp, Homo sapien
ggtgttccatatcctgaccctgtga

SEQ ID NO: 2632651 - DNA, 25 bp, Homo sapien
gctatacatgcctttgagtgacacc

SEQ ID NO: 2632652 - DNA, 25 bp, Homo sapien
tccaggtcaaacagctagagaatcc

SEQ ID NO: 2632653 - DNA, 25 bp, Homo sapien
taatgacctgtatgcagactgagaa

SEQ ID NO: 2632654 - DNA, 25 bp, Homo sapien
tcacttttctccaactgcatcaaaa

SEQ ID NO: 2632655 - DNA, 25 bp, Homo sapien
cctcacttttctccaactgcatcaa

SEQ ID NO: 2632656 - DNA, 25 bp, Homo sapien
ctcacttttctccaactgcatcaaa

SEQ ID NO: 2632657 - DNA, 25 bp, Homo sapien
cattaagggcttgagatgtgtccaa

SEQ ID NO: 2632658 - DNA, 25 bp, Homo sapien
catggaggcaatctgcatatggcta

SEQ ID NO: 2632659 - DNA, 25 bp, Homo sapien
tcagggcaatgacaaaccattaagg

SEQ ID NO: 2632660 - DNA, 25 bp, Homo sapien
tgtgtccaaatttatcatggaggca

SEQ ID NO: 2632661 - DNA, 25 bp, Homo sapien
tagtaagatacttgggtggatccac

SEQ ID NO: 2632662 - DNA, 25 bp, Homo sapien
ttaagtctcccatgatatcttcagg

SEQ ID NO: 2632663 - DNA, 25 bp, Homo sapien
tctggctgctagcaatcaaaggact

SEQ ID NO: 2632664 - DNA, 25 bp, Homo sapien
taattattggctaagtctgctactg

SEQ ID NO: 2632665 - DNA, 25 bp, Homo sapien
ggtaatgattcacctctcccaactg

SEQ ID NO: 2632666 - DNA, 25 bp, Homo sapien
tcccaactggacacttatagacatc

SEQ ID NO: 2632667 - DNA, 25 bp, Homo sapien
caactaacggagaaccaataagcac

SEQ ID NO: 2632668 - DNA, 25 bp, Homo sapien
tccagttctgtttttgggttggcca

SEQ ID NO: 2632669 - DNA, 25 bp, Homo sapien
caaacgatatgcctgtcttgacctc

SEQ ID NO: 2632670 - DNA, 25 bp, Homo sapien
gctcaaacgatatgcctgtcttgac

SEQ ID NO: 2632671 - DNA, 25 bp, Homo sapien
tcaaacgatatgcctgtcttgacct

SEQ ID NO: 2632672 - DNA, 25 bp, Homo sapien
ctcaaacgatatgcctgtcttgacc

SEQ ID NO: 2632673 - DNA, 25 bp, Homo sapien
agttgatccaaatgtcatgttctcc

SEQ ID NO: 2632674 - DNA, 25 bp, Homo sapien
aatgtcatgttctcctttacttctg

SEQ ID NO: 2632675 - DNA, 25 bp, Homo sapien
acttctgtgacattgggaattgatg

SEQ ID NO: 2632676 - DNA, 25 bp, Homo sapien
ttgggttggtgactaaagttgatcc

SEQ ID NO: 2632677 - DNA, 25 bp, Homo sapien
gacgtcagaacagattccagttgtg

SEQ ID NO: 2632678 - DNA, 25 bp, Homo sapien
tgtccacatctataggcatataagg

SEQ ID NO: 2632679 - DNA, 25 bp, Homo sapien
tataggcatataagggcccacaagc

SEQ ID NO: 2632680 - DNA, 25 bp, Homo sapien
ccagttgtgtaatgcaaatgtccac

SEQ ID NO: 2632681 - DNA, 25 bp, Homo sapien
ctgcaataaaaggagtcaattgtca

SEQ ID NO: 2632682 - DNA, 25 bp, Homo sapien
caataacaattggtgtgggataaaa

SEQ ID NO: 2632683 - DNA, 25 bp, Homo sapien
gctttcaataacaattggtgtggga

SEQ ID NO: 2632684 - DNA, 25 bp, Homo sapien
ggagtcaattgtcaaatttggaatc

SEQ ID NO: 2632685 - DNA, 25 bp, Homo sapien
tgtgtctgtttaggaccaatatcca

SEQ ID NO: 2632686 - DNA, 25 bp, Homo sapien
ctgtcccatgggtaaatactgttgg

SEQ ID NO: 2632687 - DNA, 25 bp, Homo sapien
tatccattctttcaagaaggtcatt

SEQ ID NO: 2632688 - DNA, 25 bp, Homo sapien
catccagcactatgactatgtccag

SEQ ID NO: 2632689 - DNA, 25 bp, Homo sapien
gcatttttatctttagaacaacaga

SEQ ID NO: 2632690 - DNA, 25 bp, Homo sapien
taatttgctttcagaatatttggtt

SEQ ID NO: 2632691 - DNA, 25 bp, Homo sapien
tgtgcatttttatctttagaacaac

SEQ ID NO: 2632692 - DNA, 25 bp, Homo sapien
ttgctttcagaatatttggttttat

SEQ ID NO: 2632693 - DNA, 25 bp, Homo sapien
tatatatctttacggcagactcctc

SEQ ID NO: 2632694 - DNA, 25 bp, Homo sapien
agcatccctttgtatgttactaagt

SEQ ID NO: 2632695 - DNA, 25 bp, Homo sapien
tctcctatcactatgaaaactgtca

SEQ ID NO: 2632696 - DNA, 25 bp, Homo sapien
tggtgcaaaagagtaaggttttctc

SEQ ID NO: 2632697 - DNA, 25 bp, Homo sapien
gaaacaaacttgtctgtgagtattg

SEQ ID NO: 2632698 - DNA, 25 bp, Homo sapien
actctgaaacaaacttgtctgtgag

SEQ ID NO: 2632699 - DNA, 25 bp, Homo sapien
aacaaacttgtctgtgagtattgca

SEQ ID NO: 2632700 - DNA, 25 bp, Homo sapien
ggaactctgaaacaaacttgtctgt

SEQ ID NO: 2632701 - DNA, 25 bp, Homo sapien
tcagtctctttgctgctgatctccc

SEQ ID NO: 2632702 - DNA, 25 bp, Homo sapien
gaacttggaccatggcaatggtcag

SEQ ID NO: 2632703 - DNA, 25 bp, Homo sapien
tagctcaggccagacatcattgctt

SEQ ID NO: 2632704 - DNA, 25 bp, Homo sapien
gacatcattgctttgaacttggacc

SEQ ID NO: 2632705 - DNA, 25 bp, Homo sapien
tcggtggaagaatacttattgaggt

SEQ ID NO: 2632706 - DNA, 25 bp, Homo sapien
tcttcggtggaagaatacttattga

SEQ ID NO: 2632707 - DNA, 25 bp, Homo sapien
ctcttcggtggaagaatacttattg

SEQ ID NO: 2632708 - DNA, 25 bp, Homo sapien
cttcggtggaagaatacttattgag

SEQ ID NO: 2632709 - DNA, 25 bp, Homo sapien
agagctgtcatagtctggcggccac

SEQ ID NO: 2632710 - DNA, 25 bp, Homo sapien
cttgctgtgtctattccaagagctg

SEQ ID NO: 2632711 - DNA, 25 bp, Homo sapien
tgtctattccaagagctgtcatagt

SEQ ID NO: 2632712 - DNA, 25 bp, Homo sapien
gtctggcggccacctctctggacta

SEQ ID NO: 2632713 - DNA, 25 bp, Homo sapien
gtgagagcatgggtaattagctttc

SEQ ID NO: 2632714 - DNA, 25 bp, Homo sapien
tgagagcatgggtaattagctttcc

SEQ ID NO: 2632715 - DNA, 25 bp, Homo sapien
ccgggcttccgtgaatgcctccttt

SEQ ID NO: 2632716 - DNA, 25 bp, Homo sapien
gatgaccttcttcagtcgatgattg

SEQ ID NO: 2632717 - DNA, 25 bp, Homo sapien
catcttcacagtcttggatgacctt

SEQ ID NO: 2632718 - DNA, 25 bp, Homo sapien
cgatgattgtcatgagactctccat

SEQ ID NO: 2632719 - DNA, 25 bp, Homo sapien
gactagagccaattcatcagagaca

SEQ ID NO: 2632720 - DNA, 25 bp, Homo sapien
tcagtgggttcacttgcaattgatt

SEQ ID NO: 2632721 - DNA, 25 bp, Homo sapien
tcagtgcttaaatttcctcggttat

SEQ ID NO: 2632722 - DNA, 25 bp, Homo sapien
tttaacaatggtgactagagccaat

SEQ ID NO: 2632723 - DNA, 25 bp, Homo sapien
tacttgacatcctctacctaaggca

SEQ ID NO: 2632724 - DNA, 25 bp, Homo sapien
ggcaaatttccatgaagacctttaa

SEQ ID NO: 2632725 - DNA, 25 bp, Homo sapien
gttatcctcaacagccagtcaccat

SEQ ID NO: 2632726 - DNA, 25 bp, Homo sapien
tagggaatgccataactcgttatcc

SEQ ID NO: 2632727 - DNA, 25 bp, Homo sapien
acatcagtaattacctttgtaggac

SEQ ID NO: 2632728 - DNA, 25 bp, Homo sapien
agtcagtctgccctttcgttgaggc

SEQ ID NO: 2632729 - DNA, 25 bp, Homo sapien
ctgccctttcgttgaggcaagagaa

SEQ ID NO: 2632730 - DNA, 25 bp, Homo sapien
ttagacgcggcagtgaagaattcaa

SEQ ID NO: 2632731 - DNA, 25 bp, Homo sapien
ctgtgaataatgagcactgaagcca

SEQ ID NO: 2632732 - DNA, 25 bp, Homo sapien
tgtgaataatgagcactgaagccag

SEQ ID NO: 2632733 - DNA, 25 bp, Homo sapien
gtgaataatgagcactgaagccagt

SEQ ID NO: 2632734 - DNA, 25 bp, Homo sapien
tccatttcaaatgaagctgctgact

SEQ ID NO: 2632735 - DNA, 25 bp, Homo sapien
tcgagggattatgatttgactagcc

SEQ ID NO: 2632736 - DNA, 25 bp, Homo sapien
tatgatttgactagccttctgcatg

SEQ ID NO: 2632737 - DNA, 25 bp, Homo sapien
ccattccaatcataggctcctactg

SEQ ID NO: 2632738 - DNA, 25 bp, Homo sapien
gaagcaagcggttcattctttttgg

SEQ ID NO: 2632739 - DNA, 25 bp, Homo sapien
tctcctttggaagctgtatggcagg

SEQ ID NO: 2632740 - DNA, 25 bp, Homo sapien
gataagcatgggatttttctaacag

SEQ ID NO: 2632741 - DNA, 25 bp, Homo sapien
gagagccagagccaagtaaagccta

SEQ ID NO: 2632742 - DNA, 25 bp, Homo sapien
aaagggccaggatctagtgaggtaa

SEQ ID NO: 2632743 - DNA, 25 bp, Homo sapien
gttagcgtagttactaattgaggct

SEQ ID NO: 2632744 - DNA, 25 bp, Homo sapien
gcgtagttactaattgaggcttggg

SEQ ID NO: 2632745 - DNA, 25 bp, Homo sapien
cagttagcgtagttactaattgagg

SEQ ID NO: 2632746 - DNA, 25 bp, Homo sapien
tagcgtagttactaattgaggcttg

SEQ ID NO: 2632747 - DNA, 25 bp, Homo sapien
ttgcaatgatggaacggcacacact

SEQ ID NO: 2632748 - DNA, 25 bp, Homo sapien
tatacataacccttgattgcctggg

SEQ ID NO: 2632749 - DNA, 25 bp, Homo sapien
gaatgtaacttgataaaaggcctcc

SEQ ID NO: 2632750 - DNA, 25 bp, Homo sapien
cacggtttggctttggacacatcta

SEQ ID NO: 2632751 - DNA, 25 bp, Homo sapien
cccttaaaggcttcatgtaataaat

SEQ ID NO: 2632752 - DNA, 25 bp, Homo sapien
tatgattgtaccgaggctgtccagc

SEQ ID NO: 2632753 - DNA, 25 bp, Homo sapien
catcctgtagataatgacctggcct

SEQ ID NO: 2632754 - DNA, 25 bp, Homo sapien
gcaatatagagcacatctccagaag

SEQ ID NO: 2632755 - DNA, 25 bp, Homo sapien
cactgagcgtctggagaattttgat

SEQ ID NO: 2632756 - DNA, 25 bp, Homo sapien
cagcttggactcttgcagagcagga

SEQ ID NO: 2632757 - DNA, 25 bp, Homo sapien
ctgagctttactgctgcgctgggct

SEQ ID NO: 2632758 - DNA, 25 bp, Homo sapien
gcagcttggactcttgcagagcagg

SEQ ID NO: 2632759 - DNA, 25 bp, Homo sapien
ggataaagaatatcagtcggttcca

SEQ ID NO: 2632760 - DNA, 25 bp, Homo sapien
cagatttcatcgcttgacagtaaca

SEQ ID NO: 2632761 - DNA, 25 bp, Homo sapien
tctagaagaggagctagttggcaaa

SEQ ID NO: 2632762 - DNA, 25 bp, Homo sapien
catctttgaggatgaacagctgtta

SEQ ID NO: 2632763 - DNA, 25 bp, Homo sapien
tacataggggctccgactagaagaa

SEQ ID NO: 2632764 - DNA, 25 bp, Homo sapien
tgtcagtattagaatccttgtcaat

SEQ ID NO: 2632765 - DNA, 25 bp, Homo sapien
tgttcccatgtacataggggctccg

SEQ ID NO: 2632766 - DNA, 25 bp, Homo sapien
gctccgactagaagaatgtcagtat

SEQ ID NO: 2632767 - DNA, 25 bp, Homo sapien
cacgtctgcttaataggttccaggc

SEQ ID NO: 2632768 - DNA, 25 bp, Homo sapien
catgaattgtgctgccgagatgaac

SEQ ID NO: 2632769 - DNA, 25 bp, Homo sapien
cagcggagctcctatcacgatgtca

SEQ ID NO: 2632770 - DNA, 25 bp, Homo sapien
aattgcagttccaaaacgagccccg

SEQ ID NO: 2632771 - DNA, 25 bp, Homo sapien
gcttttaacagaagcccatggcaag

SEQ ID NO: 2632772 - DNA, 25 bp, Homo sapien
cctaaaagttgagggcacaagagac

SEQ ID NO: 2632773 - DNA, 25 bp, Homo sapien
tcacaacgttgagatggcacaaatg

SEQ ID NO: 2632774 - DNA, 25 bp, Homo sapien
gatctgtgcacattaccatacatag

SEQ ID NO: 2632775 - DNA, 25 bp, Homo sapien
agtgtcttaccatccccacctgatg

SEQ ID NO: 2632776 - DNA, 25 bp, Homo sapien
taaatccatttctccgtggatagac

SEQ ID NO: 2632777 - DNA, 25 bp, Homo sapien
tctccgtggatagactggccaaaaa

SEQ ID NO: 2632778 - DNA, 25 bp, Homo sapien
gtcagaccgtcaccatttaaatcca

SEQ ID NO: 2632779 - DNA, 25 bp, Homo sapien
ttggctcaaaattcatggtcacttt

SEQ ID NO: 2632780 - DNA, 25 bp, Homo sapien
gtagcatttatgcatactgtttcct

SEQ ID NO: 2632781 - DNA, 25 bp, Homo sapien
cagcttcataaatcgtgtcttcttt

SEQ ID NO: 2632782 - DNA, 25 bp, Homo sapien
tttaactacggccacatctcgggac

SEQ ID NO: 2632783 - DNA, 25 bp, Homo sapien
ttatagctttgattcgagcatattt

SEQ ID NO: 2632784 - DNA, 25 bp, Homo sapien
tatagctttgattcgagcatatttc

SEQ ID NO: 2632785 - DNA, 25 bp, Homo sapien
tagctttgattcgagcatatttcaa

SEQ ID NO: 2632786 - DNA, 25 bp, Homo sapien
gctttgattcgagcatatttcaaca

SEQ ID NO: 2632787 - DNA, 25 bp, Homo sapien
aacatgtagaaggagtgcttagtgc

SEQ ID NO: 2632788 - DNA, 25 bp, Homo sapien
cgaactgtgatgttcctttgaacct

SEQ ID NO: 2632789 - DNA, 25 bp, Homo sapien
gcttagtgcattctgattttcgaac

SEQ ID NO: 2632790 - DNA, 25 bp, Homo sapien
gaatctagggtgacacggtactgca

SEQ ID NO: 2632791 - DNA, 25 bp, Homo sapien
ttcttgatttggaataaggcagcaa

SEQ ID NO: 2632792 - DNA, 25 bp, Homo sapien
tcttgatttggaataaggcagcaac

SEQ ID NO: 2632793 - DNA, 25 bp, Homo sapien
attcttgatttggaataaggcagca

SEQ ID NO: 2632794 - DNA, 25 bp, Homo sapien
tatgtaacacttccgggaacatttc

SEQ ID NO: 2632795 - DNA, 25 bp, Homo sapien
ttcttgagacctcaagccaaagatc

SEQ ID NO: 2632796 - DNA, 25 bp, Homo sapien
ggagtgatggcaacatcacacttgg

SEQ ID NO: 2632797 - DNA, 25 bp, Homo sapien
tggagtgatggcaacatcacacttg

SEQ ID NO: 2632798 - DNA, 25 bp, Homo sapien
gaacaggcccattttctggatcggt

SEQ ID NO: 2632799 - DNA, 25 bp, Homo sapien
aacgttattctcacagagtcctgaa

SEQ ID NO: 2632800 - DNA, 25 bp, Homo sapien
ggtagagaatcatcaagaacaggcc

SEQ ID NO: 2632801 - DNA, 25 bp, Homo sapien
ttctggatcggtaagattaaagtcc

SEQ ID NO: 2632802 - DNA, 25 bp, Homo sapien
tgtcctggtgttataggcactgtcc

SEQ ID NO: 2632803 - DNA, 25 bp, Homo sapien
tgtgaggctaacgttgaacttatca

SEQ ID NO: 2632804 - DNA, 25 bp, Homo sapien
tatcattctgggatcggacaatcag

SEQ ID NO: 2632805 - DNA, 25 bp, Homo sapien
aaactagatttggagaataatgcac

SEQ ID NO: 2632806 - DNA, 25 bp, Homo sapien
gattcacaactgtctttttggatag

SEQ ID NO: 2632807 - DNA, 25 bp, Homo sapien
agggatatccaactttacatgtgat

SEQ ID NO: 2632808 - DNA, 25 bp, Homo sapien
cctcttctcaggaagggatatccaa

SEQ ID NO: 2632809 - DNA, 25 bp, Homo sapien
gatattatgattagattcacaactg

SEQ ID NO: 2632810 - DNA, 25 bp, Homo sapien
tcatattcaatttctacatgtattt

SEQ ID NO: 2632811 - DNA, 25 bp, Homo sapien
ctacatgtattttgtatgatctgct

SEQ ID NO: 2632812 - DNA, 25 bp, Homo sapien
ttctacatgtattttgtatgatctg

SEQ ID NO: 2632813 - DNA, 25 bp, Homo sapien
catgtattttgtatgatctgctcac

SEQ ID NO: 2632814 - DNA, 25 bp, Homo sapien
cattttccatgagataggatgtgtt

SEQ ID NO: 2632815 - DNA, 25 bp, Homo sapien
ttccatgagataggatgtgttaaac

SEQ ID NO: 2632816 - DNA, 25 bp, Homo sapien
tcacattttccatgagataggatgt

SEQ ID NO: 2632817 - DNA, 25 bp, Homo sapien
catgagataggatgtgttaaactga

SEQ ID NO: 2632818 - DNA, 25 bp, Homo sapien
aagtgcttaagattgtgcctaggac

SEQ ID NO: 2632819 - DNA, 25 bp, Homo sapien
tcccaagttgattctgatgtgcgac

SEQ ID NO: 2632820 - DNA, 25 bp, Homo sapien
gttcttggacactgatacactttgg

SEQ ID NO: 2632821 - DNA, 25 bp, Homo sapien
tataacgagtaatgaacactggctc

SEQ ID NO: 2632822 - DNA, 25 bp, Homo sapien
aagggtttcaggaggttcttcgctg

SEQ ID NO: 2632823 - DNA, 25 bp, Homo sapien
caacttcatattttaccgggataga

SEQ ID NO: 2632824 - DNA, 25 bp, Homo sapien
ggtttcaggaggttcttcgctgtca

SEQ ID NO: 2632825 - DNA, 25 bp, Homo sapien
cttcatattttaccgggatagaaat

SEQ ID NO: 2632826 - DNA, 25 bp, Homo sapien
tccacaggatgagaacgatgaccaa

SEQ ID NO: 2632827 - DNA, 25 bp, Homo sapien
cattcgggaattaagactggacagc

SEQ ID NO: 2632828 - DNA, 25 bp, Homo sapien
tggcggcctctaagaaaatatcgtg

SEQ ID NO: 2632829 - DNA, 25 bp, Homo sapien
tgaccaagaaatatgctggcggcct

SEQ ID NO: 2632830 - DNA, 25 bp, Homo sapien
agggactgtctcattggcagcaatt

SEQ ID NO: 2632831 - DNA, 25 bp, Homo sapien
ttcatttccaatgtcctcagtagaa

SEQ ID NO: 2632832 - DNA, 25 bp, Homo sapien
tcatttccaatgtcctcagtagaat

SEQ ID NO: 2632833 - DNA, 25 bp, Homo sapien
tctcattggcagcaattgaaatgtg

SEQ ID NO: 2632834 - DNA, 25 bp, Homo sapien
tgcttaaaaggtacaactgaactgg

SEQ ID NO: 2632835 - DNA, 25 bp, Homo sapien
gaagcataatctgcaggcctgaaac

SEQ ID NO: 2632836 - DNA, 25 bp, Homo sapien
tgaaacctatggcatccctgtgcag

SEQ ID NO: 2632837 - DNA, 25 bp, Homo sapien
tttagctgggtagggaacgccttga

SEQ ID NO: 2632838 - DNA, 25 bp, Homo sapien
tagggctaccgtgacactggctgtt

SEQ ID NO: 2632839 - DNA, 25 bp, Homo sapien
tggaaagaagggagaccacggaaca

SEQ ID NO: 2632840 - DNA, 25 bp, Homo sapien
taatcctggctagatgggatctgcc

SEQ ID NO: 2632841 - DNA, 25 bp, Homo sapien
tacaggaaaaccagactcccatctg

SEQ ID NO: 2632842 - DNA, 25 bp, Homo sapien
ggcattggaaaagatccactttttc

SEQ ID NO: 2632843 - DNA, 25 bp, Homo sapien
gaaattgacagcttaagctctggca

SEQ ID NO: 2632844 - DNA, 25 bp, Homo sapien
attggggaatgaaattgacagctta

SEQ ID NO: 2632845 - DNA, 25 bp, Homo sapien
ggggaatgaaattgacagcttaagc

SEQ ID NO: 2632846 - DNA, 25 bp, Homo sapien
ttgggtacagcacagggtaaccatt

SEQ ID NO: 2632847 - DNA, 25 bp, Homo sapien
gttgggtacagcacagggtaaccat

SEQ ID NO: 2632848 - DNA, 25 bp, Homo sapien
gggtacagcacagggtaaccatttg

SEQ ID NO: 2632849 - DNA, 25 bp, Homo sapien
tgggtacagcacagggtaaccattt

SEQ ID NO: 2632850 - DNA, 25 bp, Homo sapien
gcagacagccctatagatgttaata

SEQ ID NO: 2632851 - DNA, 25 bp, Homo sapien
catgggaggtagacgtaagcagaca

SEQ ID NO: 2632852 - DNA, 25 bp, Homo sapien
taggacactcagtctacatgggagg

SEQ ID NO: 2632853 - DNA, 25 bp, Homo sapien
gattccctacacaccaaggatagga

SEQ ID NO: 2632854 - DNA, 25 bp, Homo sapien
acttgttcaatattatggctcatga

SEQ ID NO: 2632855 - DNA, 25 bp, Homo sapien
tgttcaatattatggctcatgaaac

SEQ ID NO: 2632856 - DNA, 25 bp, Homo sapien
cttgttcaatattatggctcatgaa

SEQ ID NO: 2632857 - DNA, 25 bp, Homo sapien
gttcaatattatggctcatgaaaca

SEQ ID NO: 2632858 - DNA, 25 bp, Homo sapien
ggatcctcaaagatatggggtctgc

SEQ ID NO: 2632859 - DNA, 25 bp, Homo sapien
agagttgatactgaaaggatcctca

SEQ ID NO: 2632860 - DNA, 25 bp, Homo sapien
gaattgtgcctcgtttgagatggtc

SEQ ID NO: 2632861 - DNA, 25 bp, Homo sapien
tgagatggtcagttgatgtagtcat

SEQ ID NO: 2632862 - DNA, 25 bp, Homo sapien
tataaaagttggtttccacaagata

SEQ ID NO: 2632863 - DNA, 25 bp, Homo sapien
aaacattgacttggctgatgtcaga

SEQ ID NO: 2632864 - DNA, 25 bp, Homo sapien
tccacaagataagcgaaacattgac

SEQ ID NO: 2632865 - DNA, 25 bp, Homo sapien
tgtcagaagaagtgagattacatgt

SEQ ID NO: 2632866 - DNA, 25 bp, Homo sapien
tttgattgctgctacttaaaaccag

SEQ ID NO: 2632867 - DNA, 25 bp, Homo sapien
gagatgcattttcactccgaagttc

SEQ ID NO: 2632868 - DNA, 25 bp, Homo sapien
cttatagtaagatttaagctggaaa

SEQ ID NO: 2632869 - DNA, 25 bp, Homo sapien
cgaagttctccccttatagtaagat

SEQ ID NO: 2632870 - DNA, 25 bp, Homo sapien
tattctatgtaaggaacaactttgc

SEQ ID NO: 2632871 - DNA, 25 bp, Homo sapien
tatggaaaccggaatctagataaga

SEQ ID NO: 2632872 - DNA, 25 bp, Homo sapien
taagcccagcaaggcagattttaaa

SEQ ID NO: 2632873 - DNA, 25 bp, Homo sapien
tgctaagcgctctttatgacataag

SEQ ID NO: 2632874 - DNA, 25 bp, Homo sapien
tgcccggtagcccatctttggatat

SEQ ID NO: 2632875 - DNA, 25 bp, Homo sapien
ggtagcccatctttggatatttgaa

SEQ ID NO: 2632876 - DNA, 25 bp, Homo sapien
catctttggatatttgaatagcaag

SEQ ID NO: 2632877 - DNA, 25 bp, Homo sapien
gcccatctttggatatttgaatagc

SEQ ID NO: 2632878 - DNA, 25 bp, Homo sapien
gcaacaatccggcaaaagcactcag

SEQ ID NO: 2632879 - DNA, 25 bp, Homo sapien
ccggcaaaagcactcagcaggatga

SEQ ID NO: 2632880 - DNA, 25 bp, Homo sapien
acaatccggcaaaagcactcagcag

SEQ ID NO: 2632881 - DNA, 25 bp, Homo sapien
aaaagcactcagcaggatgacccat

SEQ ID NO: 2632882 - DNA, 25 bp, Homo sapien
tcagtggtcttttgaagaatccaat

SEQ ID NO: 2632883 - DNA, 25 bp, Homo sapien
tttcagtggtcttttgaagaatcca

SEQ ID NO: 2632884 - DNA, 25 bp, Homo sapien
ctttttcagtggtcttttgaagaat

SEQ ID NO: 2632885 - DNA, 25 bp, Homo sapien
ttctttttcagtggtcttttgaaga

SEQ ID NO: 2632886 - DNA, 25 bp, Homo sapien
tggaacccttagcattcaaaagctg

SEQ ID NO: 2632887 - DNA, 25 bp, Homo sapien
aatggagcaacctaggagcttatgc

SEQ ID NO: 2632888 - DNA, 25 bp, Homo sapien
cctgtaccaaggagttgagacaact

SEQ ID NO: 2632889 - DNA, 25 bp, Homo sapien
catttacgagtgctgactgtcatgc

SEQ ID NO: 2632890 - DNA, 25 bp, Homo sapien
tcaatggatccgttagctttactac

SEQ ID NO: 2632891 - DNA, 25 bp, Homo sapien
catggttcagtttacaatgggagca

SEQ ID NO: 2632892 - DNA, 25 bp, Homo sapien
cttatgttaaaaattgtgccgggct

SEQ ID NO: 2632893 - DNA, 25 bp, Homo sapien
tttggtcagaaaagagagtgcatac

SEQ ID NO: 2632894 - DNA, 25 bp, Homo sapien
ccaccattcacggtgtgcaagctgt

SEQ ID NO: 2632895 - DNA, 25 bp, Homo sapien
gggccaccattcacggtgtgcaagc

SEQ ID NO: 2632896 - DNA, 25 bp, Homo sapien
accattcacggtgtgcaagctgtgg

SEQ ID NO: 2632897 - DNA, 25 bp, Homo sapien
ccattcacggtgtgcaagctgtggc

SEQ ID NO: 2632898 - DNA, 25 bp, Homo sapien
gtgaaaagcaggacagtcagttccc

SEQ ID NO: 2632899 - DNA, 25 bp, Homo sapien
gattacagcgtgttggacaaggaca

SEQ ID NO: 2632900 - DNA, 25 bp, Homo sapien
tcagttcccatggagtagattacag

SEQ ID NO: 2632901 - DNA, 25 bp, Homo sapien
gacaaggacattcccccgcgtgaag

SEQ ID NO: 2632902 - DNA, 25 bp, Homo sapien
gatttgtcagaagccactttatttt

SEQ ID NO: 2632903 - DNA, 25 bp, Homo sapien
actttattttaacaataatgtgact

SEQ ID NO: 2632904 - DNA, 25 bp, Homo sapien
tgatttgtcagaagccactttattt

SEQ ID NO: 2632905 - DNA, 25 bp, Homo sapien
tattttaacaataatgtgactgcac

SEQ ID NO: 2632906 - DNA, 25 bp, Homo sapien
atgaaaagtacataggatgctattt

SEQ ID NO: 2632907 - DNA, 25 bp, Homo sapien
ggcctgagggttgttggaagaaatg

SEQ ID NO: 2632908 - DNA, 25 bp, Homo sapien
ctgagggttgttggaagaaatgaaa

SEQ ID NO: 2632909 - DNA, 25 bp, Homo sapien
gaaaagtacataggatgctattttg

SEQ ID NO: 2632910 - DNA, 25 bp, Homo sapien
tctccagtagtcttgaaaatctccc

SEQ ID NO: 2632911 - DNA, 25 bp, Homo sapien
agatttttctccagtagtcttgaaa

SEQ ID NO: 2632912 - DNA, 25 bp, Homo sapien
ttttctccagtagtcttgaaaatct

SEQ ID NO: 2632913 - DNA, 25 bp, Homo sapien
gatttttctccagtagtcttgaaaa

SEQ ID NO: 2632914 - DNA, 25 bp, Homo sapien
tttagaacaccgctgcagaacaaaa

SEQ ID NO: 2632915 - DNA, 25 bp, Homo sapien
ctatgtgaaccctttagaacaccgc

SEQ ID NO: 2632916 - DNA, 25 bp, Homo sapien
cctgtataaatgattgagtcactga

SEQ ID NO: 2632917 - DNA, 25 bp, Homo sapien
aatcctgtataaatgattgagtcac

SEQ ID NO: 2632918 - DNA, 25 bp, Homo sapien
gccaagatttccctggtgtgtcaga

SEQ ID NO: 2632919 - DNA, 25 bp, Homo sapien
tcctaataaggaatgcagagcatct

SEQ ID NO: 2632920 - DNA, 25 bp, Homo sapien
gtctctcaaggtgcaaaatgctgca

SEQ ID NO: 2632921 - DNA, 25 bp, Homo sapien
gctgcagcagcatgacggaaagatt

SEQ ID NO: 2632922 - DNA, 25 bp, Homo sapien
caggatgctcatttaccttgacgta

SEQ ID NO: 2632923 - DNA, 25 bp, Homo sapien
caattggtgtacaggatatgccata

SEQ ID NO: 2632924 - DNA, 25 bp, Homo sapien
cacagctgatgcaccagataagaca

SEQ ID NO: 2632925 - DNA, 25 bp, Homo sapien
caaagctctgaccttcaattggtgt

SEQ ID NO: 2632926 - DNA, 25 bp, Homo sapien
gtagatgacctgacaaataacccct

SEQ ID NO: 2632927 - DNA, 25 bp, Homo sapien
tagagcattagagtgaaaacctgcc

SEQ ID NO: 2632928 - DNA, 25 bp, Homo sapien
gctaaatcttgtacaggaaacacca

SEQ ID NO: 2632929 - DNA, 25 bp, Homo sapien
tctgccaaaacttaggtagatgacc

SEQ ID NO: 2632930 - DNA, 25 bp, Homo sapien
cactaattaccgtctgatggctgaa

SEQ ID NO: 2632931 - DNA, 25 bp, Homo sapien
gaagtactaactagagacctggcac

SEQ ID NO: 2632932 - DNA, 25 bp, Homo sapien
taacgatgaggtatgcagaatgggc

SEQ ID NO: 2632933 - DNA, 25 bp, Homo sapien
catgcaaagctaaagagccttgggc

SEQ ID NO: 2632934 - DNA, 25 bp, Homo sapien
gggatacgagaacctgcacactcta

SEQ ID NO: 2632935 - DNA, 25 bp, Homo sapien
ccttggccgagggatacgagaacct

SEQ ID NO: 2632936 - DNA, 25 bp, Homo sapien
ctgcacactctagaagctgtccaga

SEQ ID NO: 2632937 - DNA, 25 bp, Homo sapien
accgtagttgcgctgggtttgcaga

SEQ ID NO: 2632938 - DNA, 25 bp, Homo sapien
ttgactgagcgctaacaccagcagc

SEQ ID NO: 2632939 - DNA, 25 bp, Homo sapien
cttgactgagcgctaacaccagcag

SEQ ID NO: 2632940 - DNA, 25 bp, Homo sapien
aggacacccgcggatccccacactg

SEQ ID NO: 2632941 - DNA, 25 bp, Homo sapien
ggacacccgcggatccccacactgt

SEQ ID NO: 2632942 - DNA, 25 bp, Homo sapien
gttgggctgcaggactcgcggtctc

SEQ ID NO: 2632943 - DNA, 25 bp, Homo sapien
tgcaggactcgcggtctccaggaca

SEQ ID NO: 2632944 - DNA, 25 bp, Homo sapien
ccccgggaagaaacacagcgcttcg

SEQ ID NO: 2632945 - DNA, 25 bp, Homo sapien
gggctcgcaggcttctgcaaagcca

SEQ ID NO: 2632946 - DNA, 25 bp, Homo sapien
ggcattattcacatccttgggttga

SEQ ID NO: 2632947 - DNA, 25 bp, Homo sapien
gcttcgtcctcaagtaagaaataga

SEQ ID NO: 2632948 - DNA, 25 bp, Homo sapien
ttgccaatcagagcggtgatctttc

SEQ ID NO: 2632949 - DNA, 25 bp, Homo sapien
tttcacttgccaatcagagcggtga

SEQ ID NO: 2632950 - DNA, 25 bp, Homo sapien
ctttcacttgccaatcagagcggtg

SEQ ID NO: 2632951 - DNA, 25 bp, Homo sapien
cacttgccaatcagagcggtgatct

SEQ ID NO: 2632952 - DNA, 25 bp, Homo sapien
gccaggctcctgaaatacaatgata

SEQ ID NO: 2632953 - DNA, 25 bp, Homo sapien
tcttggtgggcaaagggtatcaaca

SEQ ID NO: 2632954 - DNA, 25 bp, Homo sapien
cctgagatgcaagaccctgatgact

SEQ ID NO: 2632955 - DNA, 25 bp, Homo sapien
gaatgaggtaacatctccctgtggg

SEQ ID NO: 2632956 - DNA, 25 bp, Homo sapien
taaggaattctagtacctccagggc

SEQ ID NO: 2632957 - DNA, 25 bp, Homo sapien
ccttgaatgaattgtctgggtaacc

SEQ ID NO: 2632958 - DNA, 25 bp, Homo sapien
tgtgaaccgtaagtaaagcagccct

SEQ ID NO: 2632959 - DNA, 25 bp, Homo sapien
gacagtgaagaaagcgatttgccaa

SEQ ID NO: 2632960 - DNA, 25 bp, Homo sapien
gaagacagctctatccacatgacct

SEQ ID NO: 2632961 - DNA, 25 bp, Homo sapien
tatatctagcaggtaaaaacaggct

SEQ ID NO: 2632962 - DNA, 25 bp, Homo sapien
tctaaaatcattgtgcagcatggtc

SEQ ID NO: 2632963 - DNA, 25 bp, Homo sapien
tattctgccgctgtataatgaggac

SEQ ID NO: 2632964 - DNA, 25 bp, Homo sapien
gctgtgagcattccttaacttgtgt

SEQ ID NO: 2632965 - DNA, 25 bp, Homo sapien
attctcagccttgaggaccttgctt

SEQ ID NO: 2632966 - DNA, 25 bp, Homo sapien
ccttgaggaccttgcttctctagct

SEQ ID NO: 2632967 - DNA, 25 bp, Homo sapien
ttgtaactttgatgtctggatgcat

SEQ ID NO: 2632968 - DNA, 25 bp, Homo sapien
ctagctctgactggttctaattcca

SEQ ID NO: 2632969 - DNA, 25 bp, Homo sapien
tttgcttctgggagaccaacattgt

SEQ ID NO: 2632970 - DNA, 25 bp, Homo sapien
cattgtaggccaaacaacaatttaa

SEQ ID NO: 2632971 - DNA, 25 bp, Homo sapien
tgctgcactgcatagccaaactgtt

SEQ ID NO: 2632972 - DNA, 25 bp, Homo sapien
tgttcacttgaaggaccggaaaata

SEQ ID NO: 2632973 - DNA, 25 bp, Homo sapien
caatcgcagagcatcctttaaggaa

SEQ ID NO: 2632974 - DNA, 25 bp, Homo sapien
agagaggctgacacccaatcgcaga

SEQ ID NO: 2632975 - DNA, 25 bp, Homo sapien
caaaagacttagttcttggagcata

SEQ ID NO: 2632976 - DNA, 25 bp, Homo sapien
gaattttaatctagggaatgagctg

SEQ ID NO: 2632977 - DNA, 25 bp, Homo sapien
gattgttcttgcaacaggccttcag

SEQ ID NO: 2632978 - DNA, 25 bp, Homo sapien
tccgcctacaccgaaaagagaacag

SEQ ID NO: 2632979 - DNA, 25 bp, Homo sapien
cagtcagtcctcatcacacagagag

SEQ ID NO: 2632980 - DNA, 25 bp, Homo sapien
tgcatatcaccacaaactccaggaa

SEQ ID NO: 2632981 - DNA, 25 bp, Homo sapien
tgcttggtgagctctaaatggtacc

SEQ ID NO: 2632982 - DNA, 25 bp, Homo sapien
gaattcacccgtgaaggctgcccgt

SEQ ID NO: 2632983 - DNA, 25 bp, Homo sapien
gctttctgctggtaaacataaaatg

SEQ ID NO: 2632984 - DNA, 25 bp, Homo sapien
ccaggccacggacaacacaaggtgc

SEQ ID NO: 2632985 - DNA, 25 bp, Homo sapien
gcagttgtgtggcacttaacaagaa

SEQ ID NO: 2632986 - DNA, 25 bp, Homo sapien
ttaacaagaaggatgtggaagcact

SEQ ID NO: 2632987 - DNA, 25 bp, Homo sapien
cataacatcatgaccacctctgtga

SEQ ID NO: 2632988 - DNA, 25 bp, Homo sapien
tttctctcaactaagcactccctgg

SEQ ID NO: 2632989 - DNA, 25 bp, Homo sapien
acatgtggctcgtggctacgtattg

SEQ ID NO: 2632990 - DNA, 25 bp, Homo sapien
tgtggctcgtggctacgtattgttc

SEQ ID NO: 2632991 - DNA, 25 bp, Homo sapien
catgtggctcgtggctacgtattgt

SEQ ID NO: 2632992 - DNA, 25 bp, Homo sapien
cacatgtggctcgtggctacgtatt

SEQ ID NO: 2632993 - DNA, 25 bp, Homo sapien
gtagccagctacattaagaacataa

SEQ ID NO: 2632994 - DNA, 25 bp, Homo sapien
tcagctatgatttgacctgctgcct

SEQ ID NO: 2632995 - DNA, 25 bp, Homo sapien
taatgcaagctacgaatattagcca

SEQ ID NO: 2632996 - DNA, 25 bp, Homo sapien
tgtctgtaacactgctgcattgcca

SEQ ID NO: 2632997 - DNA, 25 bp, Homo sapien
tctcaggaaagccactccagggtga

SEQ ID NO: 2632998 - DNA, 25 bp, Homo sapien
catttatacacatctcccattcggt

SEQ ID NO: 2632999 - DNA, 25 bp, Homo sapien
cacatgtggcagtggataggtcaac

SEQ ID NO: 2633000 - DNA, 25 bp, Homo sapien
aaatttagtttttcacatgtggcag

SEQ ID NO: 2633001 - DNA, 25 bp, Homo sapien
tagcctcggattcaaggatagcctt

SEQ ID NO: 2633002 - DNA, 25 bp, Homo sapien
tatgcaagaaacaccacttcccttg

SEQ ID NO: 2633003 - DNA, 25 bp, Homo sapien
gaggaactccgtgattcctcagggc

SEQ ID NO: 2633004 - DNA, 25 bp, Homo sapien
tagctgtctacccttgaacctttag

SEQ ID NO: 2633005 - DNA, 25 bp, Homo sapien
tatcattgcctctgtcacttattct

SEQ ID NO: 2633006 - DNA, 25 bp, Homo sapien
ctatcattgcctctgtcacttattc

SEQ ID NO: 2633007 - DNA, 25 bp, Homo sapien
cattgcctctgtcacttattcttaa

SEQ ID NO: 2633008 - DNA, 25 bp, Homo sapien
tgcctctgtcacttattcttaattg

SEQ ID NO: 2633009 - DNA, 25 bp, Homo sapien
gagttatcgaacattgcaattctct

SEQ ID NO: 2633010 - DNA, 25 bp, Homo sapien
atcaaccactgtatccattcttgag

SEQ ID NO: 2633011 - DNA, 25 bp, Homo sapien
tcaaccactgtatccattcttgagt

SEQ ID NO: 2633012 - DNA, 25 bp, Homo sapien
ccattcttgagttatcgaacattgc

SEQ ID NO: 2633013 - DNA, 25 bp, Homo sapien
gctcaaagcaatagtgggtgaatgt

SEQ ID NO: 2633014 - DNA, 25 bp, Homo sapien
aagaatgccctatgatagaatctgg

SEQ ID NO: 2633015 - DNA, 25 bp, Homo sapien
gtcacagtagctctatctaatgcct

SEQ ID NO: 2633016 - DNA, 25 bp, Homo sapien
cttgaagtgttatcaaagaatgccc

SEQ ID NO: 2633017 - DNA, 25 bp, Homo sapien
gttggttttcatctcagtaacattt

SEQ ID NO: 2633018 - DNA, 25 bp, Homo sapien
gttttcatctcagtaacatttggaa

SEQ ID NO: 2633019 - DNA, 25 bp, Homo sapien
tttcatctcagtaacatttggaatg

SEQ ID NO: 2633020 - DNA, 25 bp, Homo sapien
tggttttcatctcagtaacatttgg

SEQ ID NO: 2633021 - DNA, 25 bp, Homo sapien
tcctggtgaggatcaagccgaggct

SEQ ID NO: 2633022 - DNA, 25 bp, Homo sapien
cctggtgaggatcaagccgaggctc

SEQ ID NO: 2633023 - DNA, 25 bp, Homo sapien
ctggtgaggatcaagccgaggctca

SEQ ID NO: 2633024 - DNA, 25 bp, Homo sapien
tggtgaggatcaagccgaggctcat

SEQ ID NO: 2633025 - DNA, 25 bp, Homo sapien
aaatcctcagattgggagggatggt

SEQ ID NO: 2633026 - DNA, 25 bp, Homo sapien
gagaagacactactgtctatgtact

SEQ ID NO: 2633027 - DNA, 25 bp, Homo sapien
tgtactttcttgagaggaataatga

SEQ ID NO: 2633028 - DNA, 25 bp, Homo sapien
cactactgtctatgtactttcttga

SEQ ID NO: 2633029 - DNA, 25 bp, Homo sapien
agagctgaaaatcaggactgatgtc

SEQ ID NO: 2633030 - DNA, 25 bp, Homo sapien
gaacacacacccgttgtgtaatact

SEQ ID NO: 2633031 - DNA, 25 bp, Homo sapien
ccgttgtgtaatactgattcccaca

SEQ ID NO: 2633032 - DNA, 25 bp, Homo sapien
gagctgaaaatcaggactgatgtca

SEQ ID NO: 2633033 - DNA, 25 bp, Homo sapien
tccaggccttgtacaaatttttcca

SEQ ID NO: 2633034 - DNA, 25 bp, Homo sapien
aaattctttactgcatcccaaggat

SEQ ID NO: 2633035 - DNA, 25 bp, Homo sapien
gggcctatatccaggccttgtacaa

SEQ ID NO: 2633036 - DNA, 25 bp, Homo sapien
aattctttactgcatcccaaggata

SEQ ID NO: 2633037 - DNA, 25 bp, Homo sapien
tgcatattgaattgctccgaatgtg

SEQ ID NO: 2633038 - DNA, 25 bp, Homo sapien
tgtttgtgaggtccccaccatattg

SEQ ID NO: 2633039 - DNA, 25 bp, Homo sapien
gatgtctgggatgttgctacaatca

SEQ ID NO: 2633040 - DNA, 25 bp, Homo sapien
tattggcatactgaattaaccccac

SEQ ID NO: 2633041 - DNA, 25 bp, Homo sapien
cctcagtatattgtcatggttgcat

SEQ ID NO: 2633042 - DNA, 25 bp, Homo sapien
catcatgtgattcaccgtcagttac

SEQ ID NO: 2633043 - DNA, 25 bp, Homo sapien
tactttcgtagcacttcgtcgccca

SEQ ID NO: 2633044 - DNA, 25 bp, Homo sapien
gctttcaacattgaaccatcatgtg

SEQ ID NO: 2633045 - DNA, 25 bp, Homo sapien
tgtcccagccttttctagtagagct

SEQ ID NO: 2633046 - DNA, 25 bp, Homo sapien
ttctgttggaatactagcgattgct

SEQ ID NO: 2633047 - DNA, 25 bp, Homo sapien
tatcaagggcgtttctgtttaagta

SEQ ID NO: 2633048 - DNA, 25 bp, Homo sapien
aaatttgttctcctaatgtcccagc

SEQ ID NO: 2633049 - DNA, 25 bp, Homo sapien
agagtaatctgcactgaatcccact

SEQ ID NO: 2633050 - DNA, 25 bp, Homo sapien
taatctgcactgaatcccacttgtg

SEQ ID NO: 2633051 - DNA, 25 bp, Homo sapien
tctgcactgaatcccacttgtgaca

SEQ ID NO: 2633052 - DNA, 25 bp, Homo sapien
actgaatcccacttgtgacatttcc

SEQ ID NO: 2633053 - DNA, 25 bp, Homo sapien
gatcaaatggccatgagatgtcttc

SEQ ID NO: 2633054 - DNA, 25 bp, Homo sapien
ttctggacaatggtcccactccagc

SEQ ID NO: 2633055 - DNA, 25 bp, Homo sapien
atatgaactgtgatttctgtcctgc

SEQ ID NO: 2633056 - DNA, 25 bp, Homo sapien
actccagccaaaagctcccactgca

SEQ ID NO: 2633057 - DNA, 25 bp, Homo sapien
tcacctcggtgagcctgaataaccg

SEQ ID NO: 2633058 - DNA, 25 bp, Homo sapien
gaataaccgtgatattgccattctc

SEQ ID NO: 2633059 - DNA, 25 bp, Homo sapien
tatctggccggtataatttgcccga

SEQ ID NO: 2633060 - DNA, 25 bp, Homo sapien
ccgaggagcaccagcaacaaagtga

SEQ ID NO: 2633061 - DNA, 25 bp, Homo sapien
taaacaggtagactcttccttcctc

SEQ ID NO: 2633062 - DNA, 25 bp, Homo sapien
ccaagagcacgtctgtaatggtgtc

SEQ ID NO: 2633063 - DNA, 25 bp, Homo sapien
tgaacacagcacactaccaaaatag

SEQ ID NO: 2633064 - DNA, 25 bp, Homo sapien
ggtcactcatgtacattggtgcacc

SEQ ID NO: 2633065 - DNA, 25 bp, Homo sapien
aatcgagtgttttcaatgccctcgg

SEQ ID NO: 2633066 - DNA, 25 bp, Homo sapien
ccttcaagaaattggtgctgaccca

SEQ ID NO: 2633067 - DNA, 25 bp, Homo sapien
tgcaattgctgaaccaaatcgagtg

SEQ ID NO: 2633068 - DNA, 25 bp, Homo sapien
tactttgtgcggatagtgccctgat

SEQ ID NO: 2633069 - DNA, 25 bp, Homo sapien
atagccatccaaggacctcccaaag

SEQ ID NO: 2633070 - DNA, 25 bp, Homo sapien
caaaggcaccaatagacacatcggt

SEQ ID NO: 2633071 - DNA, 25 bp, Homo sapien
catcggtgatggaatccccatttaa

SEQ ID NO: 2633072 - DNA, 25 bp, Homo sapien
tcccaaagtactggagatggctcct

SEQ ID NO: 2633073 - DNA, 25 bp, Homo sapien
gattcttgattgaataaacaacttc

SEQ ID NO: 2633074 - DNA, 25 bp, Homo sapien
tgattctattcccttgccggcccaa

SEQ ID NO: 2633075 - DNA, 25 bp, Homo sapien
gagacaaatgaatggagattcttga

SEQ ID NO: 2633076 - DNA, 25 bp, Homo sapien
caatatacttatttttgaccttgaa

SEQ ID NO: 2633077 - DNA, 25 bp, Homo sapien
tatctgagcattcttgttgaccaaa

SEQ ID NO: 2633078 - DNA, 25 bp, Homo sapien
tctggtgtgaatgaagcttctatag

SEQ ID NO: 2633079 - DNA, 25 bp, Homo sapien
tctgagcattcttgttgaccaaagt

SEQ ID NO: 2633080 - DNA, 25 bp, Homo sapien
tagctacatcagcaatactttgtga

SEQ ID NO: 2633081 - DNA, 25 bp, Homo sapien
cggggcaactctgtgcttgatttac

SEQ ID NO: 2633082 - DNA, 25 bp, Homo sapien
cccctggaggttactctggatgaaa

SEQ ID NO: 2633083 - DNA, 25 bp, Homo sapien
tataaatgatgtgctcggggcaact

SEQ ID NO: 2633084 - DNA, 25 bp, Homo sapien
gaaaatccatctgcatcaagtgtga

SEQ ID NO: 2633085 - DNA, 25 bp, Homo sapien
gcaaatccaaagagttgacaacatc

SEQ ID NO: 2633086 - DNA, 25 bp, Homo sapien
accttggcagtctcagaataggctt

SEQ ID NO: 2633087 - DNA, 25 bp, Homo sapien
gatgtccacacgcaaatccaaagag

SEQ ID NO: 2633088 - DNA, 25 bp, Homo sapien
ggcagtctcagaataggcttcaagg

SEQ ID NO: 2633089 - DNA, 25 bp, Homo sapien
catctaggactagatcagaaatgca

SEQ ID NO: 2633090 - DNA, 25 bp, Homo sapien
agaaatgcaaagtccgtcctcacca

SEQ ID NO: 2633091 - DNA, 25 bp, Homo sapien
atgcaaagtccgtcctcaccacagt

SEQ ID NO: 2633092 - DNA, 25 bp, Homo sapien
gcagctggtatttgtcggacatcta

SEQ ID NO: 2633093 - DNA, 25 bp, Homo sapien
tatttttcagcgttactgaaaatgt

SEQ ID NO: 2633094 - DNA, 25 bp, Homo sapien
ggttgctgacaataaagggttgttc

SEQ ID NO: 2633095 - DNA, 25 bp, Homo sapien
aaaaatcaacaacaattccagtgtt

SEQ ID NO: 2633096 - DNA, 25 bp, Homo sapien
cagtgttgtatgcactttccctttt

SEQ ID NO: 2633097 - DNA, 25 bp, Homo sapien
caaccatagttgcaaagctcaggct

SEQ ID NO: 2633098 - DNA, 25 bp, Homo sapien
ccacttggcacagggtgtttaaaca

SEQ ID NO: 2633099 - DNA, 25 bp, Homo sapien
taaaggaagtagttgccacttggca

SEQ ID NO: 2633100 - DNA, 25 bp, Homo sapien
ctcaggctaagctttgggactcaaa

SEQ ID NO: 2633101 - DNA, 25 bp, Homo sapien
caacaatgatcaattggcatacaac

SEQ ID NO: 2633102 - DNA, 25 bp, Homo sapien
gaccaaggaaacaacaatgatcaat

SEQ ID NO: 2633103 - DNA, 25 bp, Homo sapien
ggaaacaacaatgatcaattggcat

SEQ ID NO: 2633104 - DNA, 25 bp, Homo sapien
caatgatcaattggcatacaacatt

SEQ ID NO: 2633105 - DNA, 25 bp, Homo sapien
aagcagggtagcctacatcgcaggc

SEQ ID NO: 2633106 - DNA, 25 bp, Homo sapien
tacatcgcaggcaacagacttctga

SEQ ID NO: 2633107 - DNA, 25 bp, Homo sapien
ggcatgttacttctgtcccatcaac

SEQ ID NO: 2633108 - DNA, 25 bp, Homo sapien
acctggcatgttacttctgtcccat

SEQ ID NO: 2633109 - DNA, 25 bp, Homo sapien
tgagagacgcctgattctgaaggtt

SEQ ID NO: 2633110 - DNA, 25 bp, Homo sapien
gaaactgagagacgcctgattctga

SEQ ID NO: 2633111 - DNA, 25 bp, Homo sapien
gagacgcctgattctgaaggttttg

SEQ ID NO: 2633112 - DNA, 25 bp, Homo sapien
cgcctgattctgaaggttttgaaga

SEQ ID NO: 2633113 - DNA, 25 bp, Homo sapien
ggttgaccaaattatcagccttgtt

SEQ ID NO: 2633114 - DNA, 25 bp, Homo sapien
ttgaggttgaccaaattatcagcct

SEQ ID NO: 2633115 - DNA, 25 bp, Homo sapien
caggagaggaattttgaggttgacc

SEQ ID NO: 2633116 - DNA, 25 bp, Homo sapien
atttcagcatcatacaggagaggaa

SEQ ID NO: 2633117 - DNA, 25 bp, Homo sapien
cctggctggaagaaaaccctaatct

SEQ ID NO: 2633118 - DNA, 25 bp, Homo sapien
gatatcgacctattagaacctgtgg

SEQ ID NO: 2633119 - DNA, 25 bp, Homo sapien
tgtctgtgccatgaactcaccttac

SEQ ID NO: 2633120 - DNA, 25 bp, Homo sapien
tgttacccacttaccaagacacctg

SEQ ID NO: 2633121 - DNA, 25 bp, Homo sapien
cccatccgaagagatttcataaaaa

SEQ ID NO: 2633122 - DNA, 25 bp, Homo sapien
gattgaaggaacattcccatccgaa

SEQ ID NO: 2633123 - DNA, 25 bp, Homo sapien
tggaccaacatcttcaaaactgtgc

SEQ ID NO: 2633124 - DNA, 25 bp, Homo sapien
gagaagatgaattttggaccaacat

SEQ ID NO: 2633125 - DNA, 25 bp, Homo sapien
tgcaccccagttaggtacatcagtg

SEQ ID NO: 2633126 - DNA, 25 bp, Homo sapien
cttttctttggtatactgagggatg

SEQ ID NO: 2633127 - DNA, 25 bp, Homo sapien
gttgccatgcttactggaacacttc

SEQ ID NO: 2633128 - DNA, 25 bp, Homo sapien
tgtggatgattacagttgccatgct

SEQ ID NO: 2633129 - DNA, 25 bp, Homo sapien
tgatatctgcattacaactgatgtc

SEQ ID NO: 2633130 - DNA, 25 bp, Homo sapien
ctttggtgtgcctgaaattttcact

SEQ ID NO: 2633131 - DNA, 25 bp, Homo sapien
tctgcattacaactgatgtcaccag

SEQ ID NO: 2633132 - DNA, 25 bp, Homo sapien
aagatgtttgtcctattttcagtgg

SEQ ID NO: 2633133 - DNA, 25 bp, Homo sapien
tgcgaaagtcccgttccaaattctg

SEQ ID NO: 2633134 - DNA, 25 bp, Homo sapien
gcaggtaacattactacaggaagca

SEQ ID NO: 2633135 - DNA, 25 bp, Homo sapien
tgtgaacgtctttcaaccagcaggt

SEQ ID NO: 2633136 - DNA, 25 bp, Homo sapien
ccaaattctggtagtcacattaaca

SEQ ID NO: 2633137 - DNA, 25 bp, Homo sapien
gctgccgttagctgtactgtctgga

SEQ ID NO: 2633138 - DNA, 25 bp, Homo sapien
cgtaacagtgttatcttcaatcaca

SEQ ID NO: 2633139 - DNA, 25 bp, Homo sapien
tgttatcttcaatcacatatatctc

SEQ ID NO: 2633140 - DNA, 25 bp, Homo sapien
ggttataggtgttgatttctgcagc

SEQ ID NO: 2633141 - DNA, 25 bp, Homo sapien
tcctgttggtacttcggctttctca

SEQ ID NO: 2633142 - DNA, 25 bp, Homo sapien
ttgcaaccagagctaacagcaaaag

SEQ ID NO: 2633143 - DNA, 25 bp, Homo sapien
tgcaaccagagctaacagcaaaagg

SEQ ID NO: 2633144 - DNA, 25 bp, Homo sapien
tacttcctattataactcctgttgg

SEQ ID NO: 2633145 - DNA, 25 bp, Homo sapien
gactgatgacctgatatctaccacc

SEQ ID NO: 2633146 - DNA, 25 bp, Homo sapien
tgatgcacctctgggaatccctgag

SEQ ID NO: 2633147 - DNA, 25 bp, Homo sapien
ttggctgcccacgtcctctgatgca

SEQ ID NO: 2633148 - DNA, 25 bp, Homo sapien
ctctgatgcacctctgggaatccct

SEQ ID NO: 2633149 - DNA, 25 bp, Homo sapien
actgagctctgtggtctcatcaatc

SEQ ID NO: 2633150 - DNA, 25 bp, Homo sapien
gagctctgtggtctcatcaatctca

SEQ ID NO: 2633151 - DNA, 25 bp, Homo sapien
ctctgtggtctcatcaatctcatct

SEQ ID NO: 2633152 - DNA, 25 bp, Homo sapien
gctctgtggtctcatcaatctcatc

SEQ ID NO: 2633153 - DNA, 25 bp, Homo sapien
tggactctggcatacctaactggag

SEQ ID NO: 2633154 - DNA, 25 bp, Homo sapien
taataatggtaccaccaggaggtgg

SEQ ID NO: 2633155 - DNA, 25 bp, Homo sapien
gaactgttgtgcctcctaaaagaga

SEQ ID NO: 2633156 - DNA, 25 bp, Homo sapien
gataactttggaccgctggagagaa

SEQ ID NO: 2633157 - DNA, 25 bp, Homo sapien
caaatgacagtagcgcccaggttga

SEQ ID NO: 2633158 - DNA, 25 bp, Homo sapien
catcgggtagctagaggccaggaat

SEQ ID NO: 2633159 - DNA, 25 bp, Homo sapien
tatgcctgaatgtacacaaaagggc

SEQ ID NO: 2633160 - DNA, 25 bp, Homo sapien
gagagaccctgtcctggtgtgataa

SEQ ID NO: 2633161 - DNA, 25 bp, Homo sapien
caatattcaataatgtggtatgaaa

SEQ ID NO: 2633162 - DNA, 25 bp, Homo sapien
tggatatgagaaaaactactaactg

SEQ ID NO: 2633163 - DNA, 25 bp, Homo sapien
taacaatattcaataatgtggtatg

SEQ ID NO: 2633164 - DNA, 25 bp, Homo sapien
gaaaaactactaactgttgactaca

SEQ ID NO: 2633165 - DNA, 25 bp, Homo sapien
caatctcttatactagtgggacaaa

SEQ ID NO: 2633166 - DNA, 25 bp, Homo sapien
gatgcatgacaggaatgttggcaga

SEQ ID NO: 2633167 - DNA, 25 bp, Homo sapien
taactagctcagaaacgtactcccc

SEQ ID NO: 2633168 - DNA, 25 bp, Homo sapien
caacacacattgaggtatgggccct

SEQ ID NO: 2633169 - DNA, 25 bp, Homo sapien
tgttgctgtaacaaactgcagttgt

SEQ ID NO: 2633170 - DNA, 25 bp, Homo sapien
aaatgcctcgaaagtcattagagtg

SEQ ID NO: 2633171 - DNA, 25 bp, Homo sapien
ggccctatgacaatctgtgacagat

SEQ ID NO: 2633172 - DNA, 25 bp, Homo sapien
gtgagttttgatattgggagagctc

SEQ ID NO: 2633173 - DNA, 25 bp, Homo sapien
gacccctgcaaggttattagctaag

SEQ ID NO: 2633174 - DNA, 25 bp, Homo sapien
gaagcaaaactaatcctggcgtgga

SEQ ID NO: 2633175 - DNA, 25 bp, Homo sapien
ctgagggaaacagctagagcccggc

SEQ ID NO: 2633176 - DNA, 25 bp, Homo sapien
taagcctccataacgcaggcggcaa

SEQ ID NO: 2633177 - DNA, 25 bp, Homo sapien
tctcatcttctaacagagcgttctg

SEQ ID NO: 2633178 - DNA, 25 bp, Homo sapien
gataatttgctactacacgtgtgtc

SEQ ID NO: 2633179 - DNA, 25 bp, Homo sapien
tctagtctcatggaatctcgtcttt

SEQ ID NO: 2633180 - DNA, 25 bp, Homo sapien
ttcacctctcacaagcaacgttatg

SEQ ID NO: 2633181 - DNA, 25 bp, Homo sapien
tacctattggcgaaacgactgatgg

SEQ ID NO: 2633182 - DNA, 25 bp, Homo sapien
tgtgttgcagcccatcaaaggcagc

SEQ ID NO: 2633183 - DNA, 25 bp, Homo sapien
taaaggagtagacatgggctgacat

SEQ ID NO: 2633184 - DNA, 25 bp, Homo sapien
cacgaagagttcctgataatgggta

SEQ ID NO: 2633185 - DNA, 25 bp, Homo sapien
tgtttacacttaagccacctacgga

SEQ ID NO: 2633186 - DNA, 25 bp, Homo sapien
gaagcaactggacgtgagggactac

SEQ ID NO: 2633187 - DNA, 25 bp, Homo sapien
gtttgatcccagtagcgccgaagtg

SEQ ID NO: 2633188 - DNA, 25 bp, Homo sapien
gctgagtaaacacctctgacgtggg

SEQ ID NO: 2633189 - DNA, 25 bp, Homo sapien
tgtccaaacctagttatcctgctgg

SEQ ID NO: 2633190 - DNA, 25 bp, Homo sapien
aagcaataatgagtctctaccagtg

SEQ ID NO: 2633191 - DNA, 25 bp, Homo sapien
tggcctgtgggacaaattggcccat

SEQ ID NO: 2633192 - DNA, 25 bp, Homo sapien
gcaatggtcagcaaatatggcctgt

SEQ ID NO: 2633193 - DNA, 25 bp, Homo sapien
gatgaatcaggggacgagatctcca

SEQ ID NO: 2633194 - DNA, 25 bp, Homo sapien
tgatgaatcaggggacgagatctcc

SEQ ID NO: 2633195 - DNA, 25 bp, Homo sapien
atgaatcaggggacgagatctccat

SEQ ID NO: 2633196 - DNA, 25 bp, Homo sapien
ctgatgaatcaggggacgagatctc

SEQ ID NO: 2633197 - DNA, 25 bp, Homo sapien
taatacttaatccaagaaggctctc

SEQ ID NO: 2633198 - DNA, 25 bp, Homo sapien
aatggccctaggtatctgagactcc

SEQ ID NO: 2633199 - DNA, 25 bp, Homo sapien
ggctctcaaaaactgctagctttac

SEQ ID NO: 2633200 - DNA, 25 bp, Homo sapien
atgaagcatcctgagatgaaggaca

SEQ ID NO: 2633201 - DNA, 25 bp, Homo sapien
tccaaatcctacagattctccagtt

SEQ ID NO: 2633202 - DNA, 25 bp, Homo sapien
tcattccaaatcctacagattctcc

SEQ ID NO: 2633203 - DNA, 25 bp, Homo sapien
caaatcctacagattctccagtttc

SEQ ID NO: 2633204 - DNA, 25 bp, Homo sapien
tctctcattccaaatcctacagatt

SEQ ID NO: 2633205 - DNA, 25 bp, Homo sapien
ccattccactgaggttgccaatctt

SEQ ID NO: 2633206 - DNA, 25 bp, Homo sapien
catccattccactgaggttgccaat

SEQ ID NO: 2633207 - DNA, 25 bp, Homo sapien
tccattccactgaggttgccaatct

SEQ ID NO: 2633208 - DNA, 25 bp, Homo sapien
tccatccattccactgaggttgcca

SEQ ID NO: 2633209 - DNA, 25 bp, Homo sapien
agaatccttgagctggtggttcatg

SEQ ID NO: 2633210 - DNA, 25 bp, Homo sapien
ctttgaagtatgcatagaatccttg

SEQ ID NO: 2633211 - DNA, 25 bp, Homo sapien
tgaagtatgcatagaatccttgagc

SEQ ID NO: 2633212 - DNA, 25 bp, Homo sapien
tatgcatagaatccttgagctggtg

SEQ ID NO: 2633213 - DNA, 25 bp, Homo sapien
tcacttcactagttctagttttctt

SEQ ID NO: 2633214 - DNA, 25 bp, Homo sapien
tgctttcacttcactagttctagtt

SEQ ID NO: 2633215 - DNA, 25 bp, Homo sapien
aaaacccctaagatcatcatgactg

SEQ ID NO: 2633216 - DNA, 25 bp, Homo sapien
aacccctaagatcatcatgactggc

SEQ ID NO: 2633217 - DNA, 25 bp, Homo sapien
tcaccatgagatactgctactaaca

SEQ ID NO: 2633218 - DNA, 25 bp, Homo sapien
tgctactaacaaacataggaagact

SEQ ID NO: 2633219 - DNA, 25 bp, Homo sapien
ggttctcaccatgagatactgctac

SEQ ID NO: 2633220 - DNA, 25 bp, Homo sapien
gatactgctactaacaaacatagga

SEQ ID NO: 2633221 - DNA, 25 bp, Homo sapien
ccccttaaagaattggctagtacat

SEQ ID NO: 2633222 - DNA, 25 bp, Homo sapien
tacatcaggtcaggctgtgtcctcc

SEQ ID NO: 2633223 - DNA, 25 bp, Homo sapien
tattaccgtcaaatgagaggactcc

SEQ ID NO: 2633224 - DNA, 25 bp, Homo sapien
accctgccggatggccaaatcagac

SEQ ID NO: 2633225 - DNA, 25 bp, Homo sapien
gaagcccgggagatggcttcgacca

SEQ ID NO: 2633226 - DNA, 25 bp, Homo sapien
aagcccgggagatggcttcgaccat

SEQ ID NO: 2633227 - DNA, 25 bp, Homo sapien
agcccgggagatggcttcgaccatc

SEQ ID NO: 2633228 - DNA, 25 bp, Homo sapien
ttaatgcccctgcagcgtatgaccc

SEQ ID NO: 2633229 - DNA, 25 bp, Homo sapien
gaaatgttaatgcccctgcagcgta

SEQ ID NO: 2633230 - DNA, 25 bp, Homo sapien
gttgctgttcatccctttgaggagg

SEQ ID NO: 2633231 - DNA, 25 bp, Homo sapien
atgttaatgcccctgcagcgtatga

SEQ ID NO: 2633232 - DNA, 25 bp, Homo sapien
cctcgcaatccgctggaagatgcag

SEQ ID NO: 2633233 - DNA, 25 bp, Homo sapien
atgcctcgcaatccgctggaagatg

SEQ ID NO: 2633234 - DNA, 25 bp, Homo sapien
agcatgcctcgcaatccgctggaag

SEQ ID NO: 2633235 - DNA, 25 bp, Homo sapien
cagcatgcctcgcaatccgctggaa

SEQ ID NO: 2633236 - DNA, 25 bp, Homo sapien
agccaggtgccccaggtagacaaac

SEQ ID NO: 2633237 - DNA, 25 bp, Homo sapien
tgccccaggtagacaaactttcttg

SEQ ID NO: 2633238 - DNA, 25 bp, Homo sapien
gcagcaggaatcatcatctgctttt

SEQ ID NO: 2633239 - DNA, 25 bp, Homo sapien
gtagacaaactttcttgtaagcttc

SEQ ID NO: 2633240 - DNA, 25 bp, Homo sapien
tgagctgtttctttctccggtagtg

SEQ ID NO: 2633241 - DNA, 25 bp, Homo sapien
ttctccactttcttttcagcctgtt

SEQ ID NO: 2633242 - DNA, 25 bp, Homo sapien
tctcttccagggtggctgtaactgt

SEQ ID NO: 2633243 - DNA, 25 bp, Homo sapien
ttctttctccggtagtggatcttgg

SEQ ID NO: 2633244 - DNA, 25 bp, Homo sapien
gagcaggagtatgtgggtcttgagt

SEQ ID NO: 2633245 - DNA, 25 bp, Homo sapien
gcaggagtatgtgggtcttgagtac

SEQ ID NO: 2633246 - DNA, 25 bp, Homo sapien
agcaggagtatgtgggtcttgagta

SEQ ID NO: 2633247 - DNA, 25 bp, Homo sapien
ttctaaatgccagttgaataactgc

SEQ ID NO: 2633248 - DNA, 25 bp, Homo sapien
taagtgcacaaatagtcatttgccc

SEQ ID NO: 2633249 - DNA, 25 bp, Homo sapien
taactgctgttggtcctcacctcca

SEQ ID NO: 2633250 - DNA, 25 bp, Homo sapien
tccacgttctgtcgttgttaaggac

SEQ ID NO: 2633251 - DNA, 25 bp, Homo sapien
tagaccaagtacagtgttctcgtgc

SEQ ID NO: 2633252 - DNA, 25 bp, Homo sapien
ctcgtgcttgataaaattgtaatga

SEQ ID NO: 2633253 - DNA, 25 bp, Homo sapien
tgaaaggctgtagaccaagtacagt

SEQ ID NO: 2633254 - DNA, 25 bp, Homo sapien
tgtaatgattggtgctttgactgtc

SEQ ID NO: 2633255 - DNA, 25 bp, Homo sapien
gttcataagtagatatatgctgcag

SEQ ID NO: 2633256 - DNA, 25 bp, Homo sapien
gaatttggtcaatgttgtgaaacat

SEQ ID NO: 2633257 - DNA, 25 bp, Homo sapien
tggaacagcaaacttgggaatttgg

SEQ ID NO: 2633258 - DNA, 25 bp, Homo sapien
tatgctgcagtttcatttggttcag

SEQ ID NO: 2633259 - DNA, 25 bp, Homo sapien
ctgtgtttgttctatgcccaaactt

SEQ ID NO: 2633260 - DNA, 25 bp, Homo sapien
aatgaagagtgccagtgctctattg

SEQ ID NO: 2633261 - DNA, 25 bp, Homo sapien
tattgatctcgaaattaaaaatggc

SEQ ID NO: 2633262 - DNA, 25 bp, Homo sapien
gaagagtgccagtgctctattgatc

SEQ ID NO: 2633263 - DNA, 25 bp, Homo sapien
ctaattttaagactgtctattaact

SEQ ID NO: 2633264 - DNA, 25 bp, Homo sapien
tcactgtggagctggctataattca

SEQ ID NO: 2633265 - DNA, 25 bp, Homo sapien
cactgtggagctggctataattcaa

SEQ ID NO: 2633266 - DNA, 25 bp, Homo sapien
tgtggagctggctataattcaatat

SEQ ID NO: 2633267 - DNA, 25 bp, Homo sapien
ccacagaacacaatcatgatgaaaa

SEQ ID NO: 2633268 - DNA, 25 bp, Homo sapien
gccacagaacacaatcatgatgaaa

SEQ ID NO: 2633269 - DNA, 25 bp, Homo sapien
acagaacacaatcatgatgaaaaat

SEQ ID NO: 2633270 - DNA, 25 bp, Homo sapien
tgccacagaacacaatcatgatgaa

SEQ ID NO: 2633271 - DNA, 25 bp, Homo sapien
ctgtgttttggggagttctctcttc

SEQ ID NO: 2633272 - DNA, 25 bp, Homo sapien
gcttccaaccttcctgagtttgata

SEQ ID NO: 2633273 - DNA, 25 bp, Homo sapien
cttgcttccaaccttcctgagtttg

SEQ ID NO: 2633274 - DNA, 25 bp, Homo sapien
caaccttcctgagtttgatatgcat

SEQ ID NO: 2633275 - DNA, 25 bp, Homo sapien
tacatgccccatgtctctggactgg

SEQ ID NO: 2633276 - DNA, 25 bp, Homo sapien
gagatagcacactacatgccccatg

SEQ ID NO: 2633277 - DNA, 25 bp, Homo sapien
ccccagccagggctttgtagtgagg

SEQ ID NO: 2633278 - DNA, 25 bp, Homo sapien
ggacgtctactctctctggcaagta

SEQ ID NO: 2633279 - DNA, 25 bp, Homo sapien
aactctccaaagtgccaatgacaca

SEQ ID NO: 2633280 - DNA, 25 bp, Homo sapien
tcaactctccaaagtgccaatgaca

SEQ ID NO: 2633281 - DNA, 25 bp, Homo sapien
caactctccaaagtgccaatgacac

SEQ ID NO: 2633282 - DNA, 25 bp, Homo sapien
ctctgctgtgaatcttggcttgtgt

SEQ ID NO: 2633283 - DNA, 25 bp, Homo sapien
gtctctgctgtgaatcttggcttgt

SEQ ID NO: 2633284 - DNA, 25 bp, Homo sapien
accacattccttatctccaaaatct

SEQ ID NO: 2633285 - DNA, 25 bp, Homo sapien
ccacattccttatctccaaaatctt

SEQ ID NO: 2633286 - DNA, 25 bp, Homo sapien
ggctctgagtatggaaagaggtaca

SEQ ID NO: 2633287 - DNA, 25 bp, Homo sapien
tctaacaaagtatccgattccagtt

SEQ ID NO: 2633288 - DNA, 25 bp, Homo sapien
ctcctcatactgtgaggagggctct

SEQ ID NO: 2633289 - DNA, 25 bp, Homo sapien
tacatcattgctctgagtcccctga

SEQ ID NO: 2633290 - DNA, 25 bp, Homo sapien
ggtttggaacctggaaatgtctgat

SEQ ID NO: 2633291 - DNA, 25 bp, Homo sapien
ctggaggtttggaacctggaaatgt

SEQ ID NO: 2633292 - DNA, 25 bp, Homo sapien
tcctctgagtcatccagtgtgggct

SEQ ID NO: 2633293 - DNA, 25 bp, Homo sapien
tcagataatgcaggtccagtcctct

SEQ ID NO: 2633294 - DNA, 25 bp, Homo sapien
ggcccccttcttcaggagccaccaa

SEQ ID NO: 2633295 - DNA, 25 bp, Homo sapien
gcccccttcttcaggagccaccaaa

SEQ ID NO: 2633296 - DNA, 25 bp, Homo sapien
tccactgtgagatgagtagatactc

SEQ ID NO: 2633297 - DNA, 25 bp, Homo sapien
tgctgaaagtggaggtatcgccaga

SEQ ID NO: 2633298 - DNA, 25 bp, Homo sapien
taaaggtttcctagatggatttcca

SEQ ID NO: 2633299 - DNA, 25 bp, Homo sapien
cacttggcccaaatatctgctgaaa

SEQ ID NO: 2633300 - DNA, 25 bp, Homo sapien
tacatgtctaaactttagaaagccc

SEQ ID NO: 2633301 - DNA, 25 bp, Homo sapien
gtgtcaaagctagatctccaccacg

SEQ ID NO: 2633302 - DNA, 25 bp, Homo sapien
tctccaccacgttgcctgaagtggt

SEQ ID NO: 2633303 - DNA, 25 bp, Homo sapien
tgtggacgcagtcaaactcaggttt

SEQ ID NO: 2633304 - DNA, 25 bp, Homo sapien
ttcacctgagggctttaccgataat

SEQ ID NO: 2633305 - DNA, 25 bp, Homo sapien
gctttaccgataatctaaattttgc

SEQ ID NO: 2633306 - DNA, 25 bp, Homo sapien
cctgagggctttaccgataatctaa

SEQ ID NO: 2633307 - DNA, 25 bp, Homo sapien
tggccttttcacctgagggctttac

SEQ ID NO: 2633308 - DNA, 25 bp, Homo sapien
tggttacaagactgctttgaggagc

SEQ ID NO: 2633309 - DNA, 25 bp, Homo sapien
taggacctggcagtatccgaggagt

SEQ ID NO: 2633310 - DNA, 25 bp, Homo sapien
gggcctaaggtgtacttcacctgaa

SEQ ID NO: 2633311 - DNA, 25 bp, Homo sapien
tccgaggagtttacagcagatggct

SEQ ID NO: 2633312 - DNA, 25 bp, Homo sapien
atgtatcttcacaaagtccttttct

SEQ ID NO: 2633313 - DNA, 25 bp, Homo sapien
ttcacaaagtccttttctggtttca

SEQ ID NO: 2633314 - DNA, 25 bp, Homo sapien
tatcttcacaaagtccttttctggt

SEQ ID NO: 2633315 - DNA, 25 bp, Homo sapien
tcacaaagtccttttctggtttcat

SEQ ID NO: 2633316 - DNA, 25 bp, Homo sapien
taaactgcctgtgaagtagacgcca

SEQ ID NO: 2633317 - DNA, 25 bp, Homo sapien
tagacgccactttgcaggaatccgg

SEQ ID NO: 2633318 - DNA, 25 bp, Homo sapien
gaaacaaagatccacatcagaatca

SEQ ID NO: 2633319 - DNA, 25 bp, Homo sapien
gaatgcggttcttcttcgaaacaaa

SEQ ID NO: 2633320 - DNA, 25 bp, Homo sapien
ttttcctacacaagtggatgatcat

SEQ ID NO: 2633321 - DNA, 25 bp, Homo sapien
cactgacagcatactcgagtgactt

SEQ ID NO: 2633322 - DNA, 25 bp, Homo sapien
cagcatactcgagtgacttggtgaa

SEQ ID NO: 2633323 - DNA, 25 bp, Homo sapien
gacatgtagaatcaagaacactgac

SEQ ID NO: 2633324 - DNA, 25 bp, Homo sapien
gaacactgacagcatactcgagtga

SEQ ID NO: 2633325 - DNA, 25 bp, Homo sapien
gtagggttctgagatggttgggcat

SEQ ID NO: 2633326 - DNA, 25 bp, Homo sapien
ttgactgcatgccttgtgatatggg

SEQ ID NO: 2633327 - DNA, 25 bp, Homo sapien
ttctgagatggttgggcattctgaa

SEQ ID NO: 2633328 - DNA, 25 bp, Homo sapien
tacctttgactgcatgccttgtgat

SEQ ID NO: 2633329 - DNA, 25 bp, Homo sapien
tgtctttagctccaaagactctaca

SEQ ID NO: 2633330 - DNA, 25 bp, Homo sapien
ttttaatctcaatcacatgggtggg

SEQ ID NO: 2633331 - DNA, 25 bp, Homo sapien
gatatggtcaacttttgcggcacag

SEQ ID NO: 2633332 - DNA, 25 bp, Homo sapien
gactctacaacttgatgatatggtc

SEQ ID NO: 2633333 - DNA, 25 bp, Homo sapien
tgctattcttggacttagctgctaa

SEQ ID NO: 2633334 - DNA, 25 bp, Homo sapien
tcttggacttagctgctaatctggc

SEQ ID NO: 2633335 - DNA, 25 bp, Homo sapien
gacttagctgctaatctggctttct

SEQ ID NO: 2633336 - DNA, 25 bp, Homo sapien
catctgctattcttggacttagctg

SEQ ID NO: 2633337 - DNA, 25 bp, Homo sapien
ttcattcttatgctcaaatgaagga

SEQ ID NO: 2633338 - DNA, 25 bp, Homo sapien
tctaatatcagctttgcatacacaa

SEQ ID NO: 2633339 - DNA, 25 bp, Homo sapien
ttctaatatcagctttgcatacaca

SEQ ID NO: 2633340 - DNA, 25 bp, Homo sapien
atattctaatatcagctttgcatac

SEQ ID NO: 2633341 - DNA, 25 bp, Homo sapien
ttatcacaatcacaaatgctgtttt

SEQ ID NO: 2633342 - DNA, 25 bp, Homo sapien
caggttccacttatcacaatcacaa

SEQ ID NO: 2633343 - DNA, 25 bp, Homo sapien
tcacaatcacaaatgctgttttctt

SEQ ID NO: 2633344 - DNA, 25 bp, Homo sapien
tcaggttccacttatcacaatcaca

SEQ ID NO: 2633345 - DNA, 25 bp, Homo sapien
tttctttccgtgtgctgttccagtc

SEQ ID NO: 2633346 - DNA, 25 bp, Homo sapien
tgtgctgttccagtccggtcttggt

SEQ ID NO: 2633347 - DNA, 25 bp, Homo sapien
tccgtgtgctgttccagtccggtct

SEQ ID NO: 2633348 - DNA, 25 bp, Homo sapien
tctttccgtgtgctgttccagtccg

SEQ ID NO: 2633349 - DNA, 25 bp, Homo sapien
tgctacactcgctgttcccagggca

SEQ ID NO: 2633350 - DNA, 25 bp, Homo sapien
aggaaagtccccacatgttggaatg

SEQ ID NO: 2633351 - DNA, 25 bp, Homo sapien
tccccacatgttggaatgggatgct

SEQ ID NO: 2633352 - DNA, 25 bp, Homo sapien
ttggaatgggatgctacactcgctg

SEQ ID NO: 2633353 - DNA, 25 bp, Homo sapien
gaaggttccgagtgatttctacaga

SEQ ID NO: 2633354 - DNA, 25 bp, Homo sapien
cacagagttcttgcaaaccggtaaa

SEQ ID NO: 2633355 - DNA, 25 bp, Homo sapien
tctacagacttacacttgggtcccc

SEQ ID NO: 2633356 - DNA, 25 bp, Homo sapien
gattggtcctccataggctttggct

SEQ ID NO: 2633357 - DNA, 25 bp, Homo sapien
ttgaacccagtgatgcattgctccc

SEQ ID NO: 2633358 - DNA, 25 bp, Homo sapien
agatcctaccctggtttgaacccag

SEQ ID NO: 2633359 - DNA, 25 bp, Homo sapien
aatactggggctccaatcagcgcta

SEQ ID NO: 2633360 - DNA, 25 bp, Homo sapien
caatcagcgctagtagatcctaccc

SEQ ID NO: 2633361 - DNA, 25 bp, Homo sapien
ttgacggtgtccacccatccaggga

SEQ ID NO: 2633362 - DNA, 25 bp, Homo sapien
agcttgacggtgtccacccatccag

SEQ ID NO: 2633363 - DNA, 25 bp, Homo sapien
cagttttcatcacagggaggaagct

SEQ ID NO: 2633364 - DNA, 25 bp, Homo sapien
agaatggctgccagagctctaatga

SEQ ID NO: 2633365 - DNA, 25 bp, Homo sapien
atctctcgtccctgaggtgtcactt

SEQ ID NO: 2633366 - DNA, 25 bp, Homo sapien
tcgtccctgaggtgtcactttgcag

SEQ ID NO: 2633367 - DNA, 25 bp, Homo sapien
ttttactctgatgtcccgcatagat

SEQ ID NO: 2633368 - DNA, 25 bp, Homo sapien
cttttactctgatgtcccgcataga

SEQ ID NO: 2633369 - DNA, 25 bp, Homo sapien
tctattgccatctgagtcttgaggg

SEQ ID NO: 2633370 - DNA, 25 bp, Homo sapien
ccatagttataagggattctgggaa

SEQ ID NO: 2633371 - DNA, 25 bp, Homo sapien
taactgctataggctcccatcttct

SEQ ID NO: 2633372 - DNA, 25 bp, Homo sapien
tgtctgcaataactgctggagaaaa

SEQ ID NO: 2633373 - DNA, 25 bp, Homo sapien
ctagttgttcttggatggcttcagg

SEQ ID NO: 2633374 - DNA, 25 bp, Homo sapien
tctttgaaagttctccaccaggtcc

SEQ ID NO: 2633375 - DNA, 25 bp, Homo sapien
ttgatcccaggaatgagtgaactac

SEQ ID NO: 2633376 - DNA, 25 bp, Homo sapien
cagggcactgacaccgcattcatct

SEQ ID NO: 2633377 - DNA, 25 bp, Homo sapien
gtaagcccaaatactctgtttgtgg

SEQ ID NO: 2633378 - DNA, 25 bp, Homo sapien
ccacagatattcttgtttcaatgcc

SEQ ID NO: 2633379 - DNA, 25 bp, Homo sapien
tcccacagatattcttgtttcaatg

SEQ ID NO: 2633380 - DNA, 25 bp, Homo sapien
tggtggcttggagccaaaatccagg

SEQ ID NO: 2633381 - DNA, 25 bp, Homo sapien
gcttaccaattaggcaattacttgt

SEQ ID NO: 2633382 - DNA, 25 bp, Homo sapien
ggcttaccaattaggcaattacttg

SEQ ID NO: 2633383 - DNA, 25 bp, Homo sapien
cttaccaattaggcaattacttgtg

SEQ ID NO: 2633384 - DNA, 25 bp, Homo sapien
caacttggtgactagatgatctttc

SEQ ID NO: 2633385 - DNA, 25 bp, Homo sapien
actggtctcctgctataatgtttcc

SEQ ID NO: 2633386 - DNA, 25 bp, Homo sapien
gtgtactcatgaaaagaggcttctt

SEQ ID NO: 2633387 - DNA, 25 bp, Homo sapien
ggcagcccatttggcccacagatga

SEQ ID NO: 2633388 - DNA, 25 bp, Homo sapien
atatctcccttgattgtgttcccca

SEQ ID NO: 2633389 - DNA, 25 bp, Homo sapien
tatctcccttgattgtgttccccat

SEQ ID NO: 2633390 - DNA, 25 bp, Homo sapien
tctttggctcaaatgaagggcagaa

SEQ ID NO: 2633391 - DNA, 25 bp, Homo sapien
tctctgttgcatgaggaacaagtgc

SEQ ID NO: 2633392 - DNA, 25 bp, Homo sapien
caggtctagctgcaacttgagaagt

SEQ ID NO: 2633393 - DNA, 25 bp, Homo sapien
caggagaagtttgttccgagtgtca

SEQ ID NO: 2633394 - DNA, 25 bp, Homo sapien
tccttttcctgttcggactatctca

SEQ ID NO: 2633395 - DNA, 25 bp, Homo sapien
gagtgctacagaggctccaaccttg

SEQ ID NO: 2633396 - DNA, 25 bp, Homo sapien
ctgttcggactatctcaggaaagga

SEQ ID NO: 2633397 - DNA, 25 bp, Homo sapien
tggtttctgcagatcgagtgctaca

SEQ ID NO: 2633398 - DNA, 25 bp, Homo sapien
tgatacaagctcatcctgtttttca

SEQ ID NO: 2633399 - DNA, 25 bp, Homo sapien
tcagctgcaccttggatagtattga

SEQ ID NO: 2633400 - DNA, 25 bp, Homo sapien
tgtttagtgatacaagctcatcctg

SEQ ID NO: 2633401 - DNA, 25 bp, Homo sapien
cagctgcaccttggatagtattgat

SEQ ID NO: 2633402 - DNA, 25 bp, Homo sapien
gggtgcctctcagacgggcccaagc

SEQ ID NO: 2633403 - DNA, 25 bp, Homo sapien
cattcggtgcagcaggctggtaaaa

SEQ ID NO: 2633404 - DNA, 25 bp, Homo sapien
aagcgggtgacctcgccgccgcttt

SEQ ID NO: 2633405 - DNA, 25 bp, Homo sapien
tagaagacagttgtttgggtgcctc

SEQ ID NO: 2633406 - DNA, 25 bp, Homo sapien
ttcgcggcgtctggagtcggagccc

SEQ ID NO: 2633407 - DNA, 25 bp, Homo sapien
ggcgcagccgcgctttaaatctaga

SEQ ID NO: 2633408 - DNA, 25 bp, Homo sapien
cccaattatctttcggaggtgcccg

SEQ ID NO: 2633409 - DNA, 25 bp, Homo sapien
attcaatggacgtcagaagccgggc

SEQ ID NO: 2633410 - DNA, 25 bp, Homo sapien
cagtgtgaatcaggtgacatttccc

SEQ ID NO: 2633411 - DNA, 25 bp, Homo sapien
ctgggcactgcggtcctccatgaac

SEQ ID NO: 2633412 - DNA, 25 bp, Homo sapien
agcccacccggctggtgcctcgcgc

SEQ ID NO: 2633413 - DNA, 25 bp, Homo sapien
ccggctggtgcctcgcgcggaccat

SEQ ID NO: 2633414 - DNA, 25 bp, Homo sapien
ggcactgcggtcctccatgaactgg

SEQ ID NO: 2633415 - DNA, 25 bp, Homo sapien
agggagagcgaggtggctagcgaag

SEQ ID NO: 2633416 - DNA, 25 bp, Homo sapien
gagagacgcgggagaaaagtaggaa

SEQ ID NO: 2633417 - DNA, 25 bp, Homo sapien
gaagtgagagagacgcgggagaaaa

SEQ ID NO: 2633418 - DNA, 25 bp, Homo sapien
aggtggctagcgaaggagacccggc

SEQ ID NO: 2633419 - DNA, 25 bp, Homo sapien
gggcgcccccgttgaaaatcatcca

SEQ ID NO: 2633420 - DNA, 25 bp, Homo sapien
acaggacctggcagcggccgttctt

SEQ ID NO: 2633421 - DNA, 25 bp, Homo sapien
tcggtccacgaggtgctcagccggc

SEQ ID NO: 2633422 - DNA, 25 bp, Homo sapien
tcagttcggtcttgtacaggacctg

SEQ ID NO: 2633423 - DNA, 25 bp, Homo sapien
caggttggtgggtttcaccaccaca

SEQ ID NO: 2633424 - DNA, 25 bp, Homo sapien
cacacttggctaagaagtctggcgt

SEQ ID NO: 2633425 - DNA, 25 bp, Homo sapien
tggctaagaagtctggcgtgtattc

SEQ ID NO: 2633426 - DNA, 25 bp, Homo sapien
cagatctctctcattaaggagcaca

SEQ ID NO: 2633427 - DNA, 25 bp, Homo sapien
catctgccttggtactggacttcca

SEQ ID NO: 2633428 - DNA, 25 bp, Homo sapien
ccaggtgatgttggaacaatccggg

SEQ ID NO: 2633429 - DNA, 25 bp, Homo sapien
acattcattgcggtaggttttccca

SEQ ID NO: 2633430 - DNA, 25 bp, Homo sapien
tacatcttgcctttaggagtgcaca

SEQ ID NO: 2633431 - DNA, 25 bp, Homo sapien
gctgcctggacagaaaacatcccga

SEQ ID NO: 2633432 - DNA, 25 bp, Homo sapien
taggcattattggtctggtccacca

SEQ ID NO: 2633433 - DNA, 25 bp, Homo sapien
tccgattacaggtcacacagtaggc

SEQ ID NO: 2633434 - DNA, 25 bp, Homo sapien
gcaggtagcctttctcaggtggcag

SEQ ID NO: 2633435 - DNA, 25 bp, Homo sapien
ttctctttttccttcctcaatccag

SEQ ID NO: 2633436 - DNA, 25 bp, Homo sapien
tctctttttccttcctcaatccaga

SEQ ID NO: 2633437 - DNA, 25 bp, Homo sapien
tctttttccttcctcaatccagaat

SEQ ID NO: 2633438 - DNA, 25 bp, Homo sapien
ctttttccttcctcaatccagaata

SEQ ID NO: 2633439 - DNA, 25 bp, Homo sapien
tatttttcgcttccagcaagtctgg

SEQ ID NO: 2633440 - DNA, 25 bp, Homo sapien
ttgcagcgtatttctccctatggtg

SEQ ID NO: 2633441 - DNA, 25 bp, Homo sapien
ccatgaggaatactgtggtcacaac

SEQ ID NO: 2633442 - DNA, 25 bp, Homo sapien
tatatgtgtcaatgcctccagaaga

SEQ ID NO: 2633443 - DNA, 25 bp, Homo sapien
cagtgcactggatatcttcacagga

SEQ ID NO: 2633444 - DNA, 25 bp, Homo sapien
ccttcatggcacactcgctggcata

SEQ ID NO: 2633445 - DNA, 25 bp, Homo sapien
cacagacaggctcatccgacttact

SEQ ID NO: 2633446 - DNA, 25 bp, Homo sapien
gacttactgtcagggcacagctcat

SEQ ID NO: 2633447 - DNA, 25 bp, Homo sapien
agttgcaagatccggagtgctttac

SEQ ID NO: 2633448 - DNA, 25 bp, Homo sapien
tgcaagatccggagtgctttacttc

SEQ ID NO: 2633449 - DNA, 25 bp, Homo sapien
ttgcaagatccggagtgctttactt

SEQ ID NO: 2633450 - DNA, 25 bp, Homo sapien
gttgcaagatccggagtgctttact

SEQ ID NO: 2633451 - DNA, 25 bp, Homo sapien
taaatacggacaacaacagcgcaga

SEQ ID NO: 2633452 - DNA, 25 bp, Homo sapien
agcagctcagtgtatgttttcaaag

SEQ ID NO: 2633453 - DNA, 25 bp, Homo sapien
caatggctcaggttttacgggcaga

SEQ ID NO: 2633454 - DNA, 25 bp, Homo sapien
gatacagccatattacagcgttgca

SEQ ID NO: 2633455 - DNA, 25 bp, Homo sapien
cactctagaatagaagatataggaa

SEQ ID NO: 2633456 - DNA, 25 bp, Homo sapien
gaagatataggaaagctgtagtcct

SEQ ID NO: 2633457 - DNA, 25 bp, Homo sapien
tcttcctcggtgtcttccgaaatgg

SEQ ID NO: 2633458 - DNA, 25 bp, Homo sapien
aggaaagctgtagtcctggtcttca

SEQ ID NO: 2633459 - DNA, 25 bp, Homo sapien
aatgaatgcctctccgtgtccaatg

SEQ ID NO: 2633460 - DNA, 25 bp, Homo sapien
caaaggctatgtcaacactgaacac

SEQ ID NO: 2633461 - DNA, 25 bp, Homo sapien
aactatgggcctcatccagtagacc

SEQ ID NO: 2633462 - DNA, 25 bp, Homo sapien
tcatgtatgtacagatcaggcagca

SEQ ID NO: 2633463 - DNA, 25 bp, Homo sapien
cagccaagatatctgaggtctaagg

SEQ ID NO: 2633464 - DNA, 25 bp, Homo sapien
gaaccatccagtattcatgggggga

SEQ ID NO: 2633465 - DNA, 25 bp, Homo sapien
ggaatcttggtgataccagccaaga

SEQ ID NO: 2633466 - DNA, 25 bp, Homo sapien
catggggggattccagcaaaataga

SEQ ID NO: 2633467 - DNA, 25 bp, Homo sapien
aggaaacagactcatcgccctccat

SEQ ID NO: 2633468 - DNA, 25 bp, Homo sapien
gacactccttggtagatgccaatgc

SEQ ID NO: 2633469 - DNA, 25 bp, Homo sapien
ccaatgcccactactgaggaaacag

SEQ ID NO: 2633470 - DNA, 25 bp, Homo sapien
actccttggtagatgccaatgccca

SEQ ID NO: 2633471 - DNA, 25 bp, Homo sapien
ggaagtagtcatcagcagagctgac

SEQ ID NO: 2633472 - DNA, 25 bp, Homo sapien
tgaggaagtagtcatcagcagagct

SEQ ID NO: 2633473 - DNA, 25 bp, Homo sapien
gaggaagtagtcatcagcagagctg

SEQ ID NO: 2633474 - DNA, 25 bp, Homo sapien
ggtgaggaagtagtcatcagcagag

SEQ ID NO: 2633475 - DNA, 25 bp, Homo sapien
caatttcgaagttgtggagactttc

SEQ ID NO: 2633476 - DNA, 25 bp, Homo sapien
ctgataacttctcatgttcatgttg

SEQ ID NO: 2633477 - DNA, 25 bp, Homo sapien
gataacttctcatgttcatgttgct

SEQ ID NO: 2633478 - DNA, 25 bp, Homo sapien
cttcgaaacaatttcgaagttgtgg

SEQ ID NO: 2633479 - DNA, 25 bp, Homo sapien
gattagatatgactgccgaagccga

SEQ ID NO: 2633480 - DNA, 25 bp, Homo sapien
tattttacccattgatcagcagaag

SEQ ID NO: 2633481 - DNA, 25 bp, Homo sapien
cagcagaagcttatggaattcacac

SEQ ID NO: 2633482 - DNA, 25 bp, Homo sapien
tcaatcagcaggactggcggtggca

SEQ ID NO: 2633483 - DNA, 25 bp, Homo sapien
gacttccctttatgtcagctctttc

SEQ ID NO: 2633484 - DNA, 25 bp, Homo sapien
ctctgacttccctttatgtcagctc

SEQ ID NO: 2633485 - DNA, 25 bp, Homo sapien
tcttccttcttcgtagcacctctca

SEQ ID NO: 2633486 - DNA, 25 bp, Homo sapien
tctgtagactctcctagcatcacat

SEQ ID NO: 2633487 - DNA, 25 bp, Homo sapien
tgcccttctccgccacaacgtctgc

SEQ ID NO: 2633488 - DNA, 25 bp, Homo sapien
cccttctccgccacaacgtctgcct

SEQ ID NO: 2633489 - DNA, 25 bp, Homo sapien
cctggaaacggaaagggcagctaca

SEQ ID NO: 2633490 - DNA, 25 bp, Homo sapien
gcccttctccgccacaacgtctgcc

SEQ ID NO: 2633491 - DNA, 25 bp, Homo sapien
tcagcttgcagctccggaggcaaaa

SEQ ID NO: 2633492 - DNA, 25 bp, Homo sapien
taggttctcaaggacgcaaagagcc

SEQ ID NO: 2633493 - DNA, 25 bp, Homo sapien
gccaacgcccattgatagcagacag

SEQ ID NO: 2633494 - DNA, 25 bp, Homo sapien
tccgcaaaaatggagggacccaaga

SEQ ID NO: 2633495 - DNA, 25 bp, Homo sapien
cactgcgtaatgctccctgcttttc

SEQ ID NO: 2633496 - DNA, 25 bp, Homo sapien
gaaacactgcgtaatgctccctgct

SEQ ID NO: 2633497 - DNA, 25 bp, Homo sapien
tcactgatgagggtattaaaagaaa

SEQ ID NO: 2633498 - DNA, 25 bp, Homo sapien
ttaaaagaaacactgcgtaatgctc

SEQ ID NO: 2633499 - DNA, 25 bp, Homo sapien
tgtgaagtggctgaataaaggaaaa

SEQ ID NO: 2633500 - DNA, 25 bp, Homo sapien
ttatgtgtgaagtggctgaataaag

SEQ ID NO: 2633501 - DNA, 25 bp, Homo sapien
tgtgtgaagtggctgaataaaggaa

SEQ ID NO: 2633502 - DNA, 25 bp, Homo sapien
tatgtgtgaagtggctgaataaagg

SEQ ID NO: 2633503 - DNA, 25 bp, Homo sapien
ctatagtcgcagctgcctgggaggc

SEQ ID NO: 2633504 - DNA, 25 bp, Homo sapien
aagcccaggagctcagggatgtagt

SEQ ID NO: 2633505 - DNA, 25 bp, Homo sapien
ttaagcccaggagctcagggatgta

SEQ ID NO: 2633506 - DNA, 25 bp, Homo sapien
aggagctcagggatgtagtgagcta

SEQ ID NO: 2633507 - DNA, 25 bp, Homo sapien
tcagaccaggaactcaaatgtaggt

SEQ ID NO: 2633508 - DNA, 25 bp, Homo sapien
gcacagttagcaagtatcagaccag

SEQ ID NO: 2633509 - DNA, 25 bp, Homo sapien
tccattttacggaacaggacacaga

SEQ ID NO: 2633510 - DNA, 25 bp, Homo sapien
gcacttatagcatatgccgagcact

SEQ ID NO: 2633511 - DNA, 25 bp, Homo sapien
tctgaaagaaaactgagacggagta

SEQ ID NO: 2633512 - DNA, 25 bp, Homo sapien
caatgatagttcaatgaatgggcaa

SEQ ID NO: 2633513 - DNA, 25 bp, Homo sapien
tctttcaagaatgagacagtcatct

SEQ ID NO: 2633514 - DNA, 25 bp, Homo sapien
ggatggtgggttcacaagaattcat

SEQ ID NO: 2633515 - DNA, 25 bp, Homo sapien
gtgtgtcttgagtctggtcctgtgc

SEQ ID NO: 2633516 - DNA, 25 bp, Homo sapien
tgccaatctccatgtggaagtcctc

SEQ ID NO: 2633517 - DNA, 25 bp, Homo sapien
gccaatctccatgtggaagtcctca

SEQ ID NO: 2633518 - DNA, 25 bp, Homo sapien
ttcatcaactgttatgagttgtgtg

SEQ ID NO: 2633519 - DNA, 25 bp, Homo sapien
aaatgcatccaggtagagtgaacag

SEQ ID NO: 2633520 - DNA, 25 bp, Homo sapien
aagtcctcaggattagttaaaatgc

SEQ ID NO: 2633521 - DNA, 25 bp, Homo sapien
gagtgaacaggaactccaaatgcct

SEQ ID NO: 2633522 - DNA, 25 bp, Homo sapien
aaatgccttgaagcaggaaaaagag

SEQ ID NO: 2633523 - DNA, 25 bp, Homo sapien
gaaccaatccccttacaggtactga

SEQ ID NO: 2633524 - DNA, 25 bp, Homo sapien
tcaagaaaggtataacaaagctggg

SEQ ID NO: 2633525 - DNA, 25 bp, Homo sapien
aacagtatgcaaccgattttatgac

SEQ ID NO: 2633526 - DNA, 25 bp, Homo sapien
agggacaactattacttcaagaaag

SEQ ID NO: 2633527 - DNA, 25 bp, Homo sapien
tttttgtatttttggtagagatgag

SEQ ID NO: 2633528 - DNA, 25 bp, Homo sapien
acacacaccgccacgcccagcaaat

SEQ ID NO: 2633529 - DNA, 25 bp, Homo sapien
ctacagacacacaccgccacgccca

SEQ ID NO: 2633530 - DNA, 25 bp, Homo sapien
cagacacacaccgccacgcccagca

SEQ ID NO: 2633531 - DNA, 25 bp, Homo sapien
catgaggtctaaggaggaagccatc

SEQ ID NO: 2633532 - DNA, 25 bp, Homo sapien
aaggtgaaggcccaagtgctgacag

SEQ ID NO: 2633533 - DNA, 25 bp, Homo sapien
caagggtgtcgctttcatgcctgct

SEQ ID NO: 2633534 - DNA, 25 bp, Homo sapien
tcttagaggctaatgcaattccggt

SEQ ID NO: 2633535 - DNA, 25 bp, Homo sapien
cagactgcatgttattgcgagcagg

SEQ ID NO: 2633536 - DNA, 25 bp, Homo sapien
ggaacaaagatcctgacttttctag

SEQ ID NO: 2633537 - DNA, 25 bp, Homo sapien
agtttttatatgctcttctggaact

SEQ ID NO: 2633538 - DNA, 25 bp, Homo sapien
aggattttcccatcgctctctggta

SEQ ID NO: 2633539 - DNA, 25 bp, Homo sapien
tattctttgaagctagagttaatgg

SEQ ID NO: 2633540 - DNA, 25 bp, Homo sapien
gaatctcttgaaacaataaggtgca

SEQ ID NO: 2633541 - DNA, 25 bp, Homo sapien
aaggtgcattgggaaatctgacctg

SEQ ID NO: 2633542 - DNA, 25 bp, Homo sapien
gatgcaggcaccaccaggaatctct

SEQ ID NO: 2633543 - DNA, 25 bp, Homo sapien
tatctgccaacctaagatgtccact

SEQ ID NO: 2633544 - DNA, 25 bp, Homo sapien
cactttgatgacttaaggcttgagg

SEQ ID NO: 2633545 - DNA, 25 bp, Homo sapien
gatcaagtgatgagagaattcgcaa

SEQ ID NO: 2633546 - DNA, 25 bp, Homo sapien
gaattcgcaacatctacgtttgtgc

SEQ ID NO: 2633547 - DNA, 25 bp, Homo sapien
cagaaagccgtaatctcagtgcaag

SEQ ID NO: 2633548 - DNA, 25 bp, Homo sapien
cagagcagggagcttttgaactgta

SEQ ID NO: 2633549 - DNA, 25 bp, Homo sapien
tggaagagagtatccacagagcagg

SEQ ID NO: 2633550 - DNA, 25 bp, Homo sapien
gacggagtccaggattgccagagca

SEQ ID NO: 2633551 - DNA, 25 bp, Homo sapien
ggtggaacactgtttgctacaaatg

SEQ ID NO: 2633552 - DNA, 25 bp, Homo sapien
tctctcagaggtgaatatagcattc

SEQ ID NO: 2633553 - DNA, 25 bp, Homo sapien
gaaatgtggaagtaaaaaatataga

SEQ ID NO: 2633554 - DNA, 25 bp, Homo sapien
tctatgaaacattgcttagaaatgt

SEQ ID NO: 2633555 - DNA, 25 bp, Homo sapien
tcttctttagtactgaaggttagaa

SEQ ID NO: 2633556 - DNA, 25 bp, Homo sapien
atcttctttagtactgaaggttaga

SEQ ID NO: 2633557 - DNA, 25 bp, Homo sapien
tacaatgaaaccactggattccaac

SEQ ID NO: 2633558 - DNA, 25 bp, Homo sapien
aatgaaaccactggattccaactca

SEQ ID NO: 2633559 - DNA, 25 bp, Homo sapien
accactggattagatacaatgaaac

SEQ ID NO: 2633560 - DNA, 25 bp, Homo sapien
gatacaatgaaaccactggattcca

SEQ ID NO: 2633561 - DNA, 25 bp, Homo sapien
tgcccacaaagcctcgctcattgtt

SEQ ID NO: 2633562 - DNA, 25 bp, Homo sapien
gatgctaatccttaataaactcagg

SEQ ID NO: 2633563 - DNA, 25 bp, Homo sapien
cttaataaactcaggataaactcca

SEQ ID NO: 2633564 - DNA, 25 bp, Homo sapien
tacacttcaggatgctaatccttaa

SEQ ID NO: 2633565 - DNA, 25 bp, Homo sapien
tgtttcaatacacttcaggatgcta

SEQ ID NO: 2633566 - DNA, 25 bp, Homo sapien
gaaaaccattggacttggaatctag

SEQ ID NO: 2633567 - DNA, 25 bp, Homo sapien
gctgtcaggagcaatgtgattgatc

SEQ ID NO: 2633568 - DNA, 25 bp, Homo sapien
taggtctcggtatcctatcagaggg

SEQ ID NO: 2633569 - DNA, 25 bp, Homo sapien
ctagcatcatagtaccaggaaaacc

SEQ ID NO: 2633570 - DNA, 25 bp, Homo sapien
gggacactatagtatctctgtagag

SEQ ID NO: 2633571 - DNA, 25 bp, Homo sapien
tcaagagctaaaatcacatgtggcc

SEQ ID NO: 2633572 - DNA, 25 bp, Homo sapien
tgccaaatatatcagtgctgttcag

SEQ ID NO: 2633573 - DNA, 25 bp, Homo sapien
tactctagaggtactatagggacac

SEQ ID NO: 2633574 - DNA, 25 bp, Homo sapien
ttccataagaagtgaggtaaagaag

SEQ ID NO: 2633575 - DNA, 25 bp, Homo sapien
cactccccaatttcagaacaccagc

SEQ ID NO: 2633576 - DNA, 25 bp, Homo sapien
ccataagaagtgaggtaaagaagag

SEQ ID NO: 2633577 - DNA, 25 bp, Homo sapien
tttcagaacaccagccttccataag

SEQ ID NO: 2633578 - DNA, 25 bp, Homo sapien
tgaagtgaggttcatctacatttca

SEQ ID NO: 2633579 - DNA, 25 bp, Homo sapien
caaagaaacgttatcattaaagagt

SEQ ID NO: 2633580 - DNA, 25 bp, Homo sapien
taggatgaggccctaagtttaaggc

SEQ ID NO: 2633581 - DNA, 25 bp, Homo sapien
gatattcgtctctttacaaagaaac

SEQ ID NO: 2633582 - DNA, 25 bp, Homo sapien
tctctccatgatgtagcttcctcca

SEQ ID NO: 2633583 - DNA, 25 bp, Homo sapien
ctcctctctccatgatgtagcttcc

SEQ ID NO: 2633584 - DNA, 25 bp, Homo sapien
tcctctctccatgatgtagcttcct

SEQ ID NO: 2633585 - DNA, 25 bp, Homo sapien
tccatgatgtagcttcctccacccc

SEQ ID NO: 2633586 - DNA, 25 bp, Homo sapien
ggtggaagcccagaccttactgatg

SEQ ID NO: 2633587 - DNA, 25 bp, Homo sapien
tattacttcagaggcgggttttcca

SEQ ID NO: 2633588 - DNA, 25 bp, Homo sapien
tagacccactatgaagaatgcagtt

SEQ ID NO: 2633589 - DNA, 25 bp, Homo sapien
gaggttgagaccctcataagaggtt

SEQ ID NO: 2633590 - DNA, 25 bp, Homo sapien
aaggctagtggagtcaagctgtggg

SEQ ID NO: 2633591 - DNA, 25 bp, Homo sapien
aggctagtggagtcaagctgtggga

SEQ ID NO: 2633592 - DNA, 25 bp, Homo sapien
gctagtggagtcaagctgtgggagt

SEQ ID NO: 2633593 - DNA, 25 bp, Homo sapien
ctagtggagtcaagctgtgggagtg

SEQ ID NO: 2633594 - DNA, 25 bp, Homo sapien
tataccaggaacgtcagtaagccac

SEQ ID NO: 2633595 - DNA, 25 bp, Homo sapien
tgatgtgacagtcaacggccccttg

SEQ ID NO: 2633596 - DNA, 25 bp, Homo sapien
tatataattctctctcgtgctcgcg

SEQ ID NO: 2633597 - DNA, 25 bp, Homo sapien
gaggtttcggatacactggcaaagc

SEQ ID NO: 2633598 - DNA, 25 bp, Homo sapien
cactatactcgaatgtaaaggttac

SEQ ID NO: 2633599 - DNA, 25 bp, Homo sapien
aacagggaagctgagctaaaaagat

SEQ ID NO: 2633600 - DNA, 25 bp, Homo sapien
ttactggtcccactatactcgaatg

SEQ ID NO: 2633601 - DNA, 25 bp, Homo sapien
ctggatgaacaaatttactggtccc

SEQ ID NO: 2633602 - DNA, 25 bp, Homo sapien
aaactatgattcaatttcaccttgc

SEQ ID NO: 2633603 - DNA, 25 bp, Homo sapien
caccttgctcaattactgatatcta

SEQ ID NO: 2633604 - DNA, 25 bp, Homo sapien
gttgcaatgaagagcgatgaacatt

SEQ ID NO: 2633605 - DNA, 25 bp, Homo sapien
tactctatgtggtttaacataggcc

SEQ ID NO: 2633606 - DNA, 25 bp, Homo sapien
gggtccaaaagattgcctgcagatt

SEQ ID NO: 2633607 - DNA, 25 bp, Homo sapien
gtccaaaagattgcctgcagattat

SEQ ID NO: 2633608 - DNA, 25 bp, Homo sapien
agggtccaaaagattgcctgcagat

SEQ ID NO: 2633609 - DNA, 25 bp, Homo sapien
ataatcaatcctctgtgagaaaagg

SEQ ID NO: 2633610 - DNA, 25 bp, Homo sapien
agcaagcagaggctagcttttataa

SEQ ID NO: 2633611 - DNA, 25 bp, Homo sapien
cagaggctagcttttataacttaac

SEQ ID NO: 2633612 - DNA, 25 bp, Homo sapien
gtcaacacatctgagatatacttac

SEQ ID NO: 2633613 - DNA, 25 bp, Homo sapien
tatcatcaagagtatatgtcaacac

SEQ ID NO: 2633614 - DNA, 25 bp, Homo sapien
caagaaaagtttgcaccataagact

SEQ ID NO: 2633615 - DNA, 25 bp, Homo sapien
agaaaagtttgcaccataagacttg

SEQ ID NO: 2633616 - DNA, 25 bp, Homo sapien
aagaaaagtttgcaccataagactt

SEQ ID NO: 2633617 - DNA, 25 bp, Homo sapien
gtcaagcagagatatagtcagtgcc

SEQ ID NO: 2633618 - DNA, 25 bp, Homo sapien
tttattcacagtcaagcagagatat

SEQ ID NO: 2633619 - DNA, 25 bp, Homo sapien
cacagtcaagcagagatatagtcag

SEQ ID NO: 2633620 - DNA, 25 bp, Homo sapien
aagcagagatatagtcagtgccaac

SEQ ID NO: 2633621 - DNA, 25 bp, Homo sapien
tttattaggagattaagagatgtat

SEQ ID NO: 2633622 - DNA, 25 bp, Homo sapien
ttaggagattaagagatgtatttat

SEQ ID NO: 2633623 - DNA, 25 bp, Homo sapien
agagatgtatttattatacatggac

SEQ ID NO: 2633624 - DNA, 25 bp, Homo sapien
gtatttattatacatggactataaa

SEQ ID NO: 2633625 - DNA, 25 bp, Homo sapien
ggtatgatcacctcaaatcttctct

SEQ ID NO: 2633626 - DNA, 25 bp, Homo sapien
ctatataggaaattgaaacatgctc

SEQ ID NO: 2633627 - DNA, 25 bp, Homo sapien
tgttgcagttgatttcaagcattcc

SEQ ID NO: 2633628 - DNA, 25 bp, Homo sapien
taacttgagaatggctataaaaagc

SEQ ID NO: 2633629 - DNA, 25 bp, Homo sapien
ggattcaacgaacccttgggaagca

SEQ ID NO: 2633630 - DNA, 25 bp, Homo sapien
caactgcaggcattgtgggttttgg

SEQ ID NO: 2633631 - DNA, 25 bp, Homo sapien
ttagactggcagcagactaccaaac

SEQ ID NO: 2633632 - DNA, 25 bp, Homo sapien
gacctttttctcgtgcagttttggc

SEQ ID NO: 2633633 - DNA, 25 bp, Homo sapien
tttgtgtgtccttagatgaaatgcc

SEQ ID NO: 2633634 - DNA, 25 bp, Homo sapien
aaagcatactattactcgtggcaca

SEQ ID NO: 2633635 - DNA, 25 bp, Homo sapien
cgtggcacatattagtttaggctga

SEQ ID NO: 2633636 - DNA, 25 bp, Homo sapien
taaagttcagtcagtcattccgtgt

SEQ ID NO: 2633637 - DNA, 25 bp, Homo sapien
ggtttatgcctaatggcctcaaagg

SEQ ID NO: 2633638 - DNA, 25 bp, Homo sapien
ttggtccatcgtaaacactctcctg

SEQ ID NO: 2633639 - DNA, 25 bp, Homo sapien
gctcctgggtgaactttggtccatc

SEQ ID NO: 2633640 - DNA, 25 bp, Homo sapien
ctacaagatactcctgggccaataa

SEQ ID NO: 2633641 - DNA, 25 bp, Homo sapien
gacctgtcagggatgtatgtgccaa

SEQ ID NO: 2633642 - DNA, 25 bp, Homo sapien
gtatgtgccaagacccaccttctca

SEQ ID NO: 2633643 - DNA, 25 bp, Homo sapien
gatgagatcctcacatggctgtctt

SEQ ID NO: 2633644 - DNA, 25 bp, Homo sapien
tgctcattccggtcagacctgtcag

SEQ ID NO: 2633645 - DNA, 25 bp, Homo sapien
gaagaatgagcaatggcatacatct

SEQ ID NO: 2633646 - DNA, 25 bp, Homo sapien
gagcaatggcatacatctgatttac

SEQ ID NO: 2633647 - DNA, 25 bp, Homo sapien
tggcatacatctgatttacacccat

SEQ ID NO: 2633648 - DNA, 25 bp, Homo sapien
aatgagcaatggcatacatctgatt

SEQ ID NO: 2633649 - DNA, 25 bp, Homo sapien
ccataattcagcacactcaggatga

SEQ ID NO: 2633650 - DNA, 25 bp, Homo sapien
tcaatcccataattcagcacactca

SEQ ID NO: 2633651 - DNA, 25 bp, Homo sapien
aattcagcacactcaggatgaaacc

SEQ ID NO: 2633652 - DNA, 25 bp, Homo sapien
aatcccataattcagcacactcagg

SEQ ID NO: 2633653 - DNA, 25 bp, Homo sapien
acaaagccccgtatcctggaggaag

SEQ ID NO: 2633654 - DNA, 25 bp, Homo sapien
cagcgaggtatgcttacaaatggtc

SEQ ID NO: 2633655 - DNA, 25 bp, Homo sapien
ttcatactaagagttggagcccaaa

SEQ ID NO: 2633656 - DNA, 25 bp, Homo sapien
accatatttttcagcgaggtatgct

SEQ ID NO: 2633657 - DNA, 25 bp, Homo sapien
gacacaagatgtaggcaccctgctg

SEQ ID NO: 2633658 - DNA, 25 bp, Homo sapien
catatgcttgttcaggtagagccca

SEQ ID NO: 2633659 - DNA, 25 bp, Homo sapien
tgatttaggttcctcacgtaaagca

SEQ ID NO: 2633660 - DNA, 25 bp, Homo sapien
gcccagctagggactgacagtggta

SEQ ID NO: 2633661 - DNA, 25 bp, Homo sapien
gttctaggactagaggaagtagagc

SEQ ID NO: 2633662 - DNA, 25 bp, Homo sapien
tccctggggcaaagaaagagtcttc

SEQ ID NO: 2633663 - DNA, 25 bp, Homo sapien
gaagtagagcatgaaatttccttcc

SEQ ID NO: 2633664 - DNA, 25 bp, Homo sapien
tctgaggttctaggactagaggaag

SEQ ID NO: 2633665 - DNA, 25 bp, Homo sapien
ctggactttgtcttggcaaagggag

SEQ ID NO: 2633666 - DNA, 25 bp, Homo sapien
gactggactttgtcttggcaaaggg

SEQ ID NO: 2633667 - DNA, 25 bp, Homo sapien
ctgggactggactttgtcttggcaa

SEQ ID NO: 2633668 - DNA, 25 bp, Homo sapien
agttttctgggactggactttgtct

SEQ ID NO: 2633669 - DNA, 25 bp, Homo sapien
gagcactgagcaagatggccacctc

SEQ ID NO: 2633670 - DNA, 25 bp, Homo sapien
tggagttcccatcttgaccctacag

SEQ ID NO: 2633671 - DNA, 25 bp, Homo sapien
aatcaggatttgtagctcagccacc

SEQ ID NO: 2633672 - DNA, 25 bp, Homo sapien
cctggtggtaagtctcgctcctgga

SEQ ID NO: 2633673 - DNA, 25 bp, Homo sapien
ggataacgggtatctcatggagccc

SEQ ID NO: 2633674 - DNA, 25 bp, Homo sapien
aggaatagcttgtcagcaacccagg

SEQ ID NO: 2633675 - DNA, 25 bp, Homo sapien
caggagcgaagtcggcctctcgttt

SEQ ID NO: 2633676 - DNA, 25 bp, Homo sapien
tgcagaatgtggttgccccaaggct

SEQ ID NO: 2633677 - DNA, 25 bp, Homo sapien
gggttgcagacgaggagcagttgga

SEQ ID NO: 2633678 - DNA, 25 bp, Homo sapien
ttgcagacgaggagcagttggatca

SEQ ID NO: 2633679 - DNA, 25 bp, Homo sapien
cgaggagcagttggatcatttgatt

SEQ ID NO: 2633680 - DNA, 25 bp, Homo sapien
cagacgaggagcagttggatcattt

SEQ ID NO: 2633681 - DNA, 25 bp, Homo sapien
tttaggagctgcaaatattgaggtc

SEQ ID NO: 2633682 - DNA, 25 bp, Homo sapien
aaatgcgtgccaggttttgtcctgc

SEQ ID NO: 2633683 - DNA, 25 bp, Homo sapien
tgtcctgctgcagtcaactgtcttg

SEQ ID NO: 2633684 - DNA, 25 bp, Homo sapien
gcagttttattagcttcacccatag

SEQ ID NO: 2633685 - DNA, 25 bp, Homo sapien
caagagatcccaaaggaagcagtaa

SEQ ID NO: 2633686 - DNA, 25 bp, Homo sapien
ttacaagagatcccaaaggaagcag

SEQ ID NO: 2633687 - DNA, 25 bp, Homo sapien
cccatgagactaacagtggctcgct

SEQ ID NO: 2633688 - DNA, 25 bp, Homo sapien
tgagactaacagtggctcgctcggc

SEQ ID NO: 2633689 - DNA, 25 bp, Homo sapien
gattgttcccatttcccgtggtgct

SEQ ID NO: 2633690 - DNA, 25 bp, Homo sapien
ctttttagccccaaacttcagtgca

SEQ ID NO: 2633691 - DNA, 25 bp, Homo sapien
ccactgggtgatttccatttgtttg

SEQ ID NO: 2633692 - DNA, 25 bp, Homo sapien
ggtgctgtgggacatatacttggcc

SEQ ID NO: 2633693 - DNA, 25 bp, Homo sapien
agtagcaaatgagctcaaaccggac

SEQ ID NO: 2633694 - DNA, 25 bp, Homo sapien
ctagtgagtagcaaatgagctcaaa

SEQ ID NO: 2633695 - DNA, 25 bp, Homo sapien
gtgagtagcaaatgagctcaaaccg

SEQ ID NO: 2633696 - DNA, 25 bp, Homo sapien
gagtagcaaatgagctcaaaccgga

SEQ ID NO: 2633697 - DNA, 25 bp, Homo sapien
caggtcattgcggcccttgagctgg

SEQ ID NO: 2633698 - DNA, 25 bp, Homo sapien
agctggttgtagaatttgggcatcc

SEQ ID NO: 2633699 - DNA, 25 bp, Homo sapien
gtgcttggttcttagggttctccag

SEQ ID NO: 2633700 - DNA, 25 bp, Homo sapien
gctccacgagttcttgggtgtgacc

SEQ ID NO: 2633701 - DNA, 25 bp, Homo sapien
tcaatacagcccacaccctgcttgc

SEQ ID NO: 2633702 - DNA, 25 bp, Homo sapien
gggctgtaccagaaaccggtatcca

SEQ ID NO: 2633703 - DNA, 25 bp, Homo sapien
cctggtagatccctcgggacttcat

SEQ ID NO: 2633704 - DNA, 25 bp, Homo sapien
cttgctggggcctggtagatccctc

SEQ ID NO: 2633705 - DNA, 25 bp, Homo sapien
acccggtggcatcaattgactgata

SEQ ID NO: 2633706 - DNA, 25 bp, Homo sapien
ggcatcaattgactgataatcaccc

SEQ ID NO: 2633707 - DNA, 25 bp, Homo sapien
caattgactgataatcaccctgcac

SEQ ID NO: 2633708 - DNA, 25 bp, Homo sapien
accggctcctccttgtagagagaca

SEQ ID NO: 2633709 - DNA, 25 bp, Homo sapien
gggatcagcaaattaaggaggcccc

SEQ ID NO: 2633710 - DNA, 25 bp, Homo sapien
ttccctttgatgacaacgtttgcag

SEQ ID NO: 2633711 - DNA, 25 bp, Homo sapien
tttgatgacaacgtttgcaggcttc

SEQ ID NO: 2633712 - DNA, 25 bp, Homo sapien
cttgggggatcagcaaattaaggag

SEQ ID NO: 2633713 - DNA, 25 bp, Homo sapien
caagaggacatatcaggaagtgggt

SEQ ID NO: 2633714 - DNA, 25 bp, Homo sapien
ggtgctgtgaactattgggctccat

SEQ ID NO: 2633715 - DNA, 25 bp, Homo sapien
aagaggacatatcaggaagtgggtg

SEQ ID NO: 2633716 - DNA, 25 bp, Homo sapien
gggtgctgtgaactattgggctcca

SEQ ID NO: 2633717 - DNA, 25 bp, Homo sapien
gaagtagaccatggcaaaggttctc

SEQ ID NO: 2633718 - DNA, 25 bp, Homo sapien
caattccctgtggagggtgaagtag

SEQ ID NO: 2633719 - DNA, 25 bp, Homo sapien
attccctgtggagggtgaagtagac

SEQ ID NO: 2633720 - DNA, 25 bp, Homo sapien
ggcaaaggttctccaaatgactctt

SEQ ID NO: 2633721 - DNA, 25 bp, Homo sapien
cagagtttatcttagtagaatcttc

SEQ ID NO: 2633722 - DNA, 25 bp, Homo sapien
cttccagagtttatcttagtagaat

SEQ ID NO: 2633723 - DNA, 25 bp, Homo sapien
tggcttccagagtttatcttagtag

SEQ ID NO: 2633724 - DNA, 25 bp, Homo sapien
tccagagtttatcttagtagaatct

SEQ ID NO: 2633725 - DNA, 25 bp, Homo sapien
aggaagaggaacagggtcatactga

SEQ ID NO: 2633726 - DNA, 25 bp, Homo sapien
ctgaggaagaggaacagggtcatac

SEQ ID NO: 2633727 - DNA, 25 bp, Homo sapien
gaggaacagggtcatactgaggact

SEQ ID NO: 2633728 - DNA, 25 bp, Homo sapien
aagaggaacagggtcatactgagga

SEQ ID NO: 2633729 - DNA, 25 bp, Homo sapien
gagttggagtatgcaggtcttctgt

SEQ ID NO: 2633730 - DNA, 25 bp, Homo sapien
aagttgtggttgagcattgcccggg

SEQ ID NO: 2633731 - DNA, 25 bp, Homo sapien
taaactcaacccgtaacagctgtgt

SEQ ID NO: 2633732 - DNA, 25 bp, Homo sapien
ctaggtgctaataaactcaacccgt

SEQ ID NO: 2633733 - DNA, 25 bp, Homo sapien
cagtaggatccaacgaagtcatata

SEQ ID NO: 2633734 - DNA, 25 bp, Homo sapien
gaagagctccatcaaccaattgcag

SEQ ID NO: 2633735 - DNA, 25 bp, Homo sapien
taccaccgaggaagtattcgtacca

SEQ ID NO: 2633736 - DNA, 25 bp, Homo sapien
gatagaagtgtgaaataccaccgag

SEQ ID NO: 2633737 - DNA, 25 bp, Homo sapien
aaatgaggcttgaataagcaccagg

SEQ ID NO: 2633738 - DNA, 25 bp, Homo sapien
tgaggcttgaataagcaccaggttc

SEQ ID NO: 2633739 - DNA, 25 bp, Homo sapien
gaggcttgaataagcaccaggttcc

SEQ ID NO: 2633740 - DNA, 25 bp, Homo sapien
caaaatgaggcttgaataagcacca

SEQ ID NO: 2633741 - DNA, 25 bp, Homo sapien
tatatgccttgtaagtcacttgtac

SEQ ID NO: 2633742 - DNA, 25 bp, Homo sapien
catatatgccttgtaagtcacttgt

SEQ ID NO: 2633743 - DNA, 25 bp, Homo sapien
atatgccttgtaagtcacttgtacc

SEQ ID NO: 2633744 - DNA, 25 bp, Homo sapien
atatatgccttgtaagtcacttgta

SEQ ID NO: 2633745 - DNA, 25 bp, Homo sapien
agcatattgtattcactggctcctg

SEQ ID NO: 2633746 - DNA, 25 bp, Homo sapien
gttcttaggcttagcctgccccttc

SEQ ID NO: 2633747 - DNA, 25 bp, Homo sapien
tctgctctgcaaagcatattgtatt

SEQ ID NO: 2633748 - DNA, 25 bp, Homo sapien
aggccaactacagggttcttaggct

SEQ ID NO: 2633749 - DNA, 25 bp, Homo sapien
tctttgtctagcaggtcggagctcg

SEQ ID NO: 2633750 - DNA, 25 bp, Homo sapien
tcaatcagtacccaacaacagctgt

SEQ ID NO: 2633751 - DNA, 25 bp, Homo sapien
tgcagcgtctcagccgtcagaatga

SEQ ID NO: 2633752 - DNA, 25 bp, Homo sapien
tacaactgtcaataaggctccctct

SEQ ID NO: 2633753 - DNA, 25 bp, Homo sapien
gatagacttcagacccttaatgcca

SEQ ID NO: 2633754 - DNA, 25 bp, Homo sapien
ttaagacaccgtggctgagtgctcc

SEQ ID NO: 2633755 - DNA, 25 bp, Homo sapien
tcatgtgtgcgccagtgatgggcct

SEQ ID NO: 2633756 - DNA, 25 bp, Homo sapien
taacactgtgtaatccctgagcagc

SEQ ID NO: 2633757 - DNA, 25 bp, Homo sapien
aatcttaatgatgccctgccacttt

SEQ ID NO: 2633758 - DNA, 25 bp, Homo sapien
cttaatgatgccctgccactttatc

SEQ ID NO: 2633759 - DNA, 25 bp, Homo sapien
gatgccctgccactttatctccaga

SEQ ID NO: 2633760 - DNA, 25 bp, Homo sapien
taatgatgccctgccactttatctc

SEQ ID NO: 2633761 - DNA, 25 bp, Homo sapien
catagtaccacaaggccaatattaa

SEQ ID NO: 2633762 - DNA, 25 bp, Homo sapien
cattggtgactgagtaacgcgtggc

SEQ ID NO: 2633763 - DNA, 25 bp, Homo sapien
gggccattggcaccctccattggtg

SEQ ID NO: 2633764 - DNA, 25 bp, Homo sapien
taggacagagtgctgccatagtacc

SEQ ID NO: 2633765 - DNA, 25 bp, Homo sapien
ctgcatacaagctgaaaaaactata

SEQ ID NO: 2633766 - DNA, 25 bp, Homo sapien
aactataaattcacatttctggagc

SEQ ID NO: 2633767 - DNA, 25 bp, Homo sapien
tgcatacaagctgaaaaaactataa

SEQ ID NO: 2633768 - DNA, 25 bp, Homo sapien
ataaattcacatttctggagccaca

SEQ ID NO: 2633769 - DNA, 25 bp, Homo sapien
tgtgtctctgcatacagtgtagttt

SEQ ID NO: 2633770 - DNA, 25 bp, Homo sapien
gtctctgcatacagtgtagttttat

SEQ ID NO: 2633771 - DNA, 25 bp, Homo sapien
gtgtctctgcatacagtgtagtttt

SEQ ID NO: 2633772 - DNA, 25 bp, Homo sapien
gatgtgtctctgcatacagtgtagt

SEQ ID NO: 2633773 - DNA, 25 bp, Homo sapien
gctccagatgcggaattcgccaaga

SEQ ID NO: 2633774 - DNA, 25 bp, Homo sapien
tgcggaattcgccaagatgagtgag

SEQ ID NO: 2633775 - DNA, 25 bp, Homo sapien
cagatgcggaattcgccaagatgag

SEQ ID NO: 2633776 - DNA, 25 bp, Homo sapien
cttgctccagatgcggaattcgcca

SEQ ID NO: 2633777 - DNA, 25 bp, Homo sapien
gactgtttgtcttggatcaacatca

SEQ ID NO: 2633778 - DNA, 25 bp, Homo sapien
cttaaatcaagtcgtttctctttct

SEQ ID NO: 2633779 - DNA, 25 bp, Homo sapien
ttctctttcttacttgctgcaatga

SEQ ID NO: 2633780 - DNA, 25 bp, Homo sapien
tgagactgtttgtcttggatcaaca

SEQ ID NO: 2633781 - DNA, 25 bp, Homo sapien
aataagttgctacaattggacctaa

SEQ ID NO: 2633782 - DNA, 25 bp, Homo sapien
gttgctacaattggacctaaaaggc

SEQ ID NO: 2633783 - DNA, 25 bp, Homo sapien
tctgcttactttcaggggccttcca

SEQ ID NO: 2633784 - DNA, 25 bp, Homo sapien
tgctacaattggacctaaaaggctt

SEQ ID NO: 2633785 - DNA, 25 bp, Homo sapien
gctgatctttgcaatatggttcctg

SEQ ID NO: 2633786 - DNA, 25 bp, Homo sapien
cgtagacttacgatgtagtatttga

SEQ ID NO: 2633787 - DNA, 25 bp, Homo sapien
aggaaaactgtatgactgctgatct

SEQ ID NO: 2633788 - DNA, 25 bp, Homo sapien
tgcaatatggttcctgttttcacag

SEQ ID NO: 2633789 - DNA, 25 bp, Homo sapien
ccagagcccgaatcgtgaagaggca

SEQ ID NO: 2633790 - DNA, 25 bp, Homo sapien
agccattgaagaccagagcccgaat

SEQ ID NO: 2633791 - DNA, 25 bp, Homo sapien
ttgaagaccagagcccgaatcgtga

SEQ ID NO: 2633792 - DNA, 25 bp, Homo sapien
gcccgaatcgtgaagaggcagtcat

SEQ ID NO: 2633793 - DNA, 25 bp, Homo sapien
agacaaatacctttctccggacact

SEQ ID NO: 2633794 - DNA, 25 bp, Homo sapien
tgacacaatgtcagacaaatacctt

SEQ ID NO: 2633795 - DNA, 25 bp, Homo sapien
gggccttcggaaatctgacacaatg

SEQ ID NO: 2633796 - DNA, 25 bp, Homo sapien
tctcaaggtgctcatgggccttcgg

SEQ ID NO: 2633797 - DNA, 25 bp, Homo sapien
ctaaggagacgtaatggcaactttc

SEQ ID NO: 2633798 - DNA, 25 bp, Homo sapien
gctgctaaagctctcagtctgctcc

SEQ ID NO: 2633799 - DNA, 25 bp, Homo sapien
taaggagacgtaatggcaactttcc

SEQ ID NO: 2633800 - DNA, 25 bp, Homo sapien
tttccaaaagctgctaaagctctca

SEQ ID NO: 2633801 - DNA, 25 bp, Homo sapien
tgtctgtgctttggatgaagtggct

SEQ ID NO: 2633802 - DNA, 25 bp, Homo sapien
tgctttggatgaagtggctggggtg

SEQ ID NO: 2633803 - DNA, 25 bp, Homo sapien
ctgtgctttggatgaagtggctggg

SEQ ID NO: 2633804 - DNA, 25 bp, Homo sapien
ctgtctgtgctttggatgaagtggc

SEQ ID NO: 2633805 - DNA, 25 bp, Homo sapien
acataagggtggtgcacgtgtgtct

SEQ ID NO: 2633806 - DNA, 25 bp, Homo sapien
aatgagagcttttagctgaaggatg

SEQ ID NO: 2633807 - DNA, 25 bp, Homo sapien
atgaaaacataagggtggtgcacgt

SEQ ID NO: 2633808 - DNA, 25 bp, Homo sapien
gagagcttttagctgaaggatgaaa

SEQ ID NO: 2633809 - DNA, 25 bp, Homo sapien
tcctgttcataggaatgtcctctgt

SEQ ID NO: 2633810 - DNA, 25 bp, Homo sapien
tgtgcgtgaatcgaccaccgaaaat

SEQ ID NO: 2633811 - DNA, 25 bp, Homo sapien
cctctgtagtcagcatgtgcgtgaa

SEQ ID NO: 2633812 - DNA, 25 bp, Homo sapien
taacagtgtccagaggtctgatgat

SEQ ID NO: 2633813 - DNA, 25 bp, Homo sapien
ggatctcacatttaacctctatttg

SEQ ID NO: 2633814 - DNA, 25 bp, Homo sapien
ccttgagctccttcgtctttgagga

SEQ ID NO: 2633815 - DNA, 25 bp, Homo sapien
tggcctgctttgctattgccagcca

SEQ ID NO: 2633816 - DNA, 25 bp, Homo sapien
ttttcccctgtaattccttgagctc

SEQ ID NO: 2633817 - DNA, 25 bp, Homo sapien
aatttgtacccaaagagtattgagt

SEQ ID NO: 2633818 - DNA, 25 bp, Homo sapien
atttgtacccaaagagtattgagtt

SEQ ID NO: 2633819 - DNA, 25 bp, Homo sapien
gaatttgtacccaaagagtattgag

SEQ ID NO: 2633820 - DNA, 25 bp, Homo sapien
ggaatttgtacccaaagagtattga

SEQ ID NO: 2633821 - DNA, 25 bp, Homo sapien
ggacggagaactcttggcaaggctt

SEQ ID NO: 2633822 - DNA, 25 bp, Homo sapien
atctgtggttaggaatggaaggccc

SEQ ID NO: 2633823 - DNA, 25 bp, Homo sapien
ggtgaaagccattgacaccgagcct

SEQ ID NO: 2633824 - DNA, 25 bp, Homo sapien
gcaaggcttgctaccagtgggtgtt

SEQ ID NO: 2633825 - DNA, 25 bp, Homo sapien
gataattcattaaagcgtaaggctc

SEQ ID NO: 2633826 - DNA, 25 bp, Homo sapien
cactacttagtctgaaatggaaaac

SEQ ID NO: 2633827 - DNA, 25 bp, Homo sapien
tgtacatctgtataaggttaacaaa

SEQ ID NO: 2633828 - DNA, 25 bp, Homo sapien
cagagaagtctttgtaccgatacat

SEQ ID NO: 2633829 - DNA, 25 bp, Homo sapien
gatcaatccttgcatagagatgatg

SEQ ID NO: 2633830 - DNA, 25 bp, Homo sapien
ttactgttcaaaaagtgacacacac

SEQ ID NO: 2633831 - DNA, 25 bp, Homo sapien
cacaacacactcttgtatggttcca

SEQ ID NO: 2633832 - DNA, 25 bp, Homo sapien
caagctgattcagatagatttcgaa

SEQ ID NO: 2633833 - DNA, 25 bp, Homo sapien
ttctaacaattaggacttcctggca

SEQ ID NO: 2633834 - DNA, 25 bp, Homo sapien
tctaacaattaggacttcctggcaa

SEQ ID NO: 2633835 - DNA, 25 bp, Homo sapien
atttctaacaattaggacttcctgg

SEQ ID NO: 2633836 - DNA, 25 bp, Homo sapien
tttctaacaattaggacttcctggc

SEQ ID NO: 2633837 - DNA, 25 bp, Homo sapien
cttctggcagatgtgatacctagct

SEQ ID NO: 2633838 - DNA, 25 bp, Homo sapien
gactctgcaaggtccggaagaaaga

SEQ ID NO: 2633839 - DNA, 25 bp, Homo sapien
aaatgcttacactatgagttgcaga

SEQ ID NO: 2633840 - DNA, 25 bp, Homo sapien
gagcttcagccttccacttatcttc

SEQ ID NO: 2633841 - DNA, 25 bp, Homo sapien
ttcaaaccccctaggacaatccaca

SEQ ID NO: 2633842 - DNA, 25 bp, Homo sapien
gctgtttggatagtctgtctaacat

SEQ ID NO: 2633843 - DNA, 25 bp, Homo sapien
acaatccacagctccatgaaaacat

SEQ ID NO: 2633844 - DNA, 25 bp, Homo sapien
ccacagctccatgaaaacatgagtc

SEQ ID NO: 2633845 - DNA, 25 bp, Homo sapien
cttcgatttctcatactcggctgtg

SEQ ID NO: 2633846 - DNA, 25 bp, Homo sapien
acagggcttcactattttgccaagg

SEQ ID NO: 2633847 - DNA, 25 bp, Homo sapien
tatttcttggacctttatgcttcga

SEQ ID NO: 2633848 - DNA, 25 bp, Homo sapien
aactttaaatcaagtttatatctgc

SEQ ID NO: 2633849 - DNA, 25 bp, Homo sapien
ggtccttccccagaagaatcatatg

SEQ ID NO: 2633850 - DNA, 25 bp, Homo sapien
caagccttgtggatggttgtgtctc

SEQ ID NO: 2633851 - DNA, 25 bp, Homo sapien
aataggacccttggcattgccacgc

SEQ ID NO: 2633852 - DNA, 25 bp, Homo sapien
tgtctcaactggctttggtccttcc

SEQ ID NO: 2633853 - DNA, 25 bp, Homo sapien
gacagcgggtagctttccttgatag

SEQ ID NO: 2633854 - DNA, 25 bp, Homo sapien
cacacccagatgacgtaggcagagc

SEQ ID NO: 2633855 - DNA, 25 bp, Homo sapien
gatgtgcgaatcttcaatcctaaag

SEQ ID NO: 2633856 - DNA, 25 bp, Homo sapien
tccttgatagaaaggtatggccact

SEQ ID NO: 2633857 - DNA, 25 bp, Homo sapien
tgagggttttttgaataactcacag

SEQ ID NO: 2633858 - DNA, 25 bp, Homo sapien
gttttttgaataactcacagtcctc

SEQ ID NO: 2633859 - DNA, 25 bp, Homo sapien
tttttgaataactcacagtcctcag

SEQ ID NO: 2633860 - DNA, 25 bp, Homo sapien
atctgagggttttttgaataactca

SEQ ID NO: 2633861 - DNA, 25 bp, Homo sapien
ctttgggtgtattagtgaggtgctc

SEQ ID NO: 2633862 - DNA, 25 bp, Homo sapien
gctacagggcagtttgagagaagcc

SEQ ID NO: 2633863 - DNA, 25 bp, Homo sapien
cagtttgagagaagcctttgggtgt

SEQ ID NO: 2633864 - DNA, 25 bp, Homo sapien
caccatgcctcgctacagggcagtt

SEQ ID NO: 2633865 - DNA, 25 bp, Homo sapien
tcacactattctgtggaaggagtcg

SEQ ID NO: 2633866 - DNA, 25 bp, Homo sapien
gcttttggttctttggcattgtgta

SEQ ID NO: 2633867 - DNA, 25 bp, Homo sapien
ggaaggagtcgctctcatttttctt

SEQ ID NO: 2633868 - DNA, 25 bp, Homo sapien
tctttggcattgtgtacctgtcttc

SEQ ID NO: 2633869 - DNA, 25 bp, Homo sapien
ccatctagctgaacattctcctgaa

SEQ ID NO: 2633870 - DNA, 25 bp, Homo sapien
ctcctgaacatctgcctgaacatcc

SEQ ID NO: 2633871 - DNA, 25 bp, Homo sapien
catctagctgaacattctcctgaac

SEQ ID NO: 2633872 - DNA, 25 bp, Homo sapien
tgaacatctgcctgaacatcctcct

SEQ ID NO: 2633873 - DNA, 25 bp, Homo sapien
ccagagagttcagggcaatgttttt

SEQ ID NO: 2633874 - DNA, 25 bp, Homo sapien
tgtgcacaatattcgcagtccatag

SEQ ID NO: 2633875 - DNA, 25 bp, Homo sapien
gctctgataactggaactgttggaa

SEQ ID NO: 2633876 - DNA, 25 bp, Homo sapien
gaattccatctcttgggctgaagac

SEQ ID NO: 2633877 - DNA, 25 bp, Homo sapien
tttgccttagccatactgaagtcca

SEQ ID NO: 2633878 - DNA, 25 bp, Homo sapien
tccgattttcttgacgtgtaaggaa

SEQ ID NO: 2633879 - DNA, 25 bp, Homo sapien
actgaagtccattccgattttcttg

SEQ ID NO: 2633880 - DNA, 25 bp, Homo sapien
tttcttgacgtgtaaggaagtgaga

SEQ ID NO: 2633881 - DNA, 25 bp, Homo sapien
aagatcctgtgtactcgtcaccgag

SEQ ID NO: 2633882 - DNA, 25 bp, Homo sapien
ttacaaagatagctgagaaagatcc

SEQ ID NO: 2633883 - DNA, 25 bp, Homo sapien
agagtgattaatccaccacatagtg

SEQ ID NO: 2633884 - DNA, 25 bp, Homo sapien
aaccatatagtacaacaaccaagcc

SEQ ID NO: 2633885 - DNA, 25 bp, Homo sapien
tatagggcaagtaaaagacagagct

SEQ ID NO: 2633886 - DNA, 25 bp, Homo sapien
tcatgtactcctgacaacctgagga

SEQ ID NO: 2633887 - DNA, 25 bp, Homo sapien
gagagtctgactcaagaacctgcaa

SEQ ID NO: 2633888 - DNA, 25 bp, Homo sapien
cagacattgtgagaggcatttaaca

SEQ ID NO: 2633889 - DNA, 25 bp, Homo sapien
ttcaaggtggcctgttaatccagga

SEQ ID NO: 2633890 - DNA, 25 bp, Homo sapien
tatacagacatacctacctgactcc

SEQ ID NO: 2633891 - DNA, 25 bp, Homo sapien
agattccaacttccacaggcatgaa

SEQ ID NO: 2633892 - DNA, 25 bp, Homo sapien
aaatttgggccatcagaaaatgtca

SEQ ID NO: 2633893 - DNA, 25 bp, Homo sapien
caacgtggcgaaataccatctgtac

SEQ ID NO: 2633894 - DNA, 25 bp, Homo sapien
ccaacgtggcgaaataccatctgta

SEQ ID NO: 2633895 - DNA, 25 bp, Homo sapien
tttgacatagcctcatcgttgtggg

SEQ ID NO: 2633896 - DNA, 25 bp, Homo sapien
catcaagcctggttcatactttgga

SEQ ID NO: 2633897 - DNA, 25 bp, Homo sapien
actctggcactgtaagaggctccac

SEQ ID NO: 2633898 - DNA, 25 bp, Homo sapien
gccatattgctcctagtctccaggg

SEQ ID NO: 2633899 - DNA, 25 bp, Homo sapien
ccgagggagccttgaaactgtagtt

SEQ ID NO: 2633900 - DNA, 25 bp, Homo sapien
tcagaacctaatgacgtctcaccag

SEQ ID NO: 2633901 - DNA, 25 bp, Homo sapien
cagcaatggtctcgaaagttctccc

SEQ ID NO: 2633902 - DNA, 25 bp, Homo sapien
gatgatatcactcctctgttcaaga

SEQ ID NO: 2633903 - DNA, 25 bp, Homo sapien
tatgaaatacaagcattaatgttcc

SEQ ID NO: 2633904 - DNA, 25 bp, Homo sapien
gccaaaccgtatcagtatagaacat

SEQ ID NO: 2633905 - DNA, 25 bp, Homo sapien
gcctcaatagtgctgaaggagccaa

SEQ ID NO: 2633906 - DNA, 25 bp, Homo sapien
tatattcattatcaccaagggtcca

SEQ ID NO: 2633907 - DNA, 25 bp, Homo sapien
cctacgtacaatgcgggtacaggca

SEQ ID NO: 2633908 - DNA, 25 bp, Homo sapien
cttaaccaccaaatctcgtgagtct

SEQ ID NO: 2633909 - DNA, 25 bp, Homo sapien
ttacttcctacgtacaatgcgggta

SEQ ID NO: 2633910 - DNA, 25 bp, Homo sapien
ccaaatctcgtgagtctcattcact

SEQ ID NO: 2633911 - DNA, 25 bp, Homo sapien
tgttggcaaatgggggcttaggcct

SEQ ID NO: 2633912 - DNA, 25 bp, Homo sapien
caaatgggggcttaggcctttctag

SEQ ID NO: 2633913 - DNA, 25 bp, Homo sapien
tctgttggcaaatgggggcttaggc

SEQ ID NO: 2633914 - DNA, 25 bp, Homo sapien
tggcaaatgggggcttaggcctttc

SEQ ID NO: 2633915 - DNA, 25 bp, Homo sapien
tgtaaagtttcttgttactgctagt

SEQ ID NO: 2633916 - DNA, 25 bp, Homo sapien
gcccatacatcccattgtaaagttt

SEQ ID NO: 2633917 - DNA, 25 bp, Homo sapien
tgctgcccatacatcccattgtaaa

SEQ ID NO: 2633918 - DNA, 25 bp, Homo sapien
ttgagagccaccttcgtgtctcttg

SEQ ID NO: 2633919 - DNA, 25 bp, Homo sapien
gaagcagcataatagtcaagaggag

SEQ ID NO: 2633920 - DNA, 25 bp, Homo sapien
tatcttggcattcccactgaagctg

SEQ ID NO: 2633921 - DNA, 25 bp, Homo sapien
ccagtctccatgacatatcttggca

SEQ ID NO: 2633922 - DNA, 25 bp, Homo sapien
tcaagaggagttttgtgcttacagg

SEQ ID NO: 2633923 - DNA, 25 bp, Homo sapien
cagggagatgtcgaggggcagcgtt

SEQ ID NO: 2633924 - DNA, 25 bp, Homo sapien
tcagtgcactaatgccacagacaaa

SEQ ID NO: 2633925 - DNA, 25 bp, Homo sapien
catctgggggtcgtacaaaaacaat

SEQ ID NO: 2633926 - DNA, 25 bp, Homo sapien
cagcgttgaggagaaagggtagaca

SEQ ID NO: 2633927 - DNA, 25 bp, Homo sapien
tgccaaggattctaaagccagatgc

SEQ ID NO: 2633928 - DNA, 25 bp, Homo sapien
tggtataccccatcagacgcctgtt

SEQ ID NO: 2633929 - DNA, 25 bp, Homo sapien
taaccacatgtaagtagctagaggc

SEQ ID NO: 2633930 - DNA, 25 bp, Homo sapien
ctagattccctagctgatgcctggg

SEQ ID NO: 2633931 - DNA, 25 bp, Homo sapien
cctaggcatttggctcaatgccagg

SEQ ID NO: 2633932 - DNA, 25 bp, Homo sapien
gcaggatccagagaacaccctggcc

SEQ ID NO: 2633933 - DNA, 25 bp, Homo sapien
ctgcccaagttttctcggttcatgt

SEQ ID NO: 2633934 - DNA, 25 bp, Homo sapien
ttttctcggttcatgtcaggccagg

SEQ ID NO: 2633935 - DNA, 25 bp, Homo sapien
ttctgctgtcttgaaactctgcccc

SEQ ID NO: 2633936 - DNA, 25 bp, Homo sapien
gccttctgctgtcttgaaactctgc

SEQ ID NO: 2633937 - DNA, 25 bp, Homo sapien
tctgctgtcttgaaactctgcccca

SEQ ID NO: 2633938 - DNA, 25 bp, Homo sapien
ttgccttctgctgtcttgaaactct

SEQ ID NO: 2633939 - DNA, 25 bp, Homo sapien
cagtctgttgtccaaactctgcagt

SEQ ID NO: 2633940 - DNA, 25 bp, Homo sapien
taacgtcgtgtcgaccacaggtggg

SEQ ID NO: 2633941 - DNA, 25 bp, Homo sapien
gacctggtttgcataggcctcacag

SEQ ID NO: 2633942 - DNA, 25 bp, Homo sapien
ccctctagcaggtcatttcagtggc

SEQ ID NO: 2633943 - DNA, 25 bp, Homo sapien
ccccgggtctggttcagcgcagcag

SEQ ID NO: 2633944 - DNA, 25 bp, Homo sapien
ggccccgggtctggttcagcgcagc

SEQ ID NO: 2633945 - DNA, 25 bp, Homo sapien
gccccgggtctggttcagcgcagca

SEQ ID NO: 2633946 - DNA, 25 bp, Homo sapien
gggccccgggtctggttcagcgcag

SEQ ID NO: 2633947 - DNA, 25 bp, Homo sapien
tctcctcacgttaccacaaagctat

SEQ ID NO: 2633948 - DNA, 25 bp, Homo sapien
cccttggtacaagttagatcaaaca

SEQ ID NO: 2633949 - DNA, 25 bp, Homo sapien
taaaagtcaaaaccctgtgaggtca

SEQ ID NO: 2633950 - DNA, 25 bp, Homo sapien
tttgaaggagcatgactagaagtcc

SEQ ID NO: 2633951 - DNA, 25 bp, Homo sapien
cctcaattggtttgtaaacacttgt

SEQ ID NO: 2633952 - DNA, 25 bp, Homo sapien
tctatagcctgtttcttattgccag

SEQ ID NO: 2633953 - DNA, 25 bp, Homo sapien
tagcctgtttcttattgccagtcat

SEQ ID NO: 2633954 - DNA, 25 bp, Homo sapien
aaacacttgttgtttctatagcctg

SEQ ID NO: 2633955 - DNA, 25 bp, Homo sapien
tctctctggtaagccatagatttga

SEQ ID NO: 2633956 - DNA, 25 bp, Homo sapien
actaaggccacggagatattgcgct

SEQ ID NO: 2633957 - DNA, 25 bp, Homo sapien
gatattgcgctctggtcttctctct

SEQ ID NO: 2633958 - DNA, 25 bp, Homo sapien
agtcaggactaaggccacggagata

SEQ ID NO: 2633959 - DNA, 25 bp, Homo sapien
tcttactctcagatatgacctcatg

SEQ ID NO: 2633960 - DNA, 25 bp, Homo sapien
tgcacttttactctccttcaagtgt

SEQ ID NO: 2633961 - DNA, 25 bp, Homo sapien
ccttcacttagaaactagagatggg

SEQ ID NO: 2633962 - DNA, 25 bp, Homo sapien
tgtatattgttacctatctctctcc

SEQ ID NO: 2633963 - DNA, 25 bp, Homo sapien
tcacagaccttcgtctcttagcgac

SEQ ID NO: 2633964 - DNA, 25 bp, Homo sapien
ccaaaatcacagaccttcgtctctt

SEQ ID NO: 2633965 - DNA, 25 bp, Homo sapien
tggtcccgtccctactacccatgtc

SEQ ID NO: 2633966 - DNA, 25 bp, Homo sapien
gaccttcgtctcttagcgaccttca

SEQ ID NO: 2633967 - DNA, 25 bp, Homo sapien
agccaacatggttctccctccaggc

SEQ ID NO: 2633968 - DNA, 25 bp, Homo sapien
acagccaacatggttctccctccag

SEQ ID NO: 2633969 - DNA, 25 bp, Homo sapien
cagccaacatggttctccctccagg

SEQ ID NO: 2633970 - DNA, 25 bp, Homo sapien
gggaatttgtacattctggagctat

SEQ ID NO: 2633971 - DNA, 25 bp, Homo sapien
ggcttgatcactgaatcttagggag

SEQ ID NO: 2633972 - DNA, 25 bp, Homo sapien
tgcattggggacttttttggcccca

SEQ ID NO: 2633973 - DNA, 25 bp, Homo sapien
ggtgctttgggcctgtgatcttcat

SEQ ID NO: 2633974 - DNA, 25 bp, Homo sapien
tgacaatactaacagaaggagatgc

SEQ ID NO: 2633975 - DNA, 25 bp, Homo sapien
attactttcaagtgtactaagggag

SEQ ID NO: 2633976 - DNA, 25 bp, Homo sapien
agtaggtggcattcccaagtgttta

SEQ ID NO: 2633977 - DNA, 25 bp, Homo sapien
gccagttctgaagtaggtggcattc

SEQ ID NO: 2633978 - DNA, 25 bp, Homo sapien
tattgcatgatacttttcgttggca

SEQ ID NO: 2633979 - DNA, 25 bp, Homo sapien
cagtattgcatgatacttttcgttg

SEQ ID NO: 2633980 - DNA, 25 bp, Homo sapien
gatacttttcgttggcattggagtt

SEQ ID NO: 2633981 - DNA, 25 bp, Homo sapien
gcatgatacttttcgttggcattgg

SEQ ID NO: 2633982 - DNA, 25 bp, Homo sapien
cagttcctatttcattggagtcaaa

SEQ ID NO: 2633983 - DNA, 25 bp, Homo sapien
agttttctgaggtgctactctggaa

SEQ ID NO: 2633984 - DNA, 25 bp, Homo sapien
taagttcggccacacgagccgactc

SEQ ID NO: 2633985 - DNA, 25 bp, Homo sapien
aattctgtgattgtttggagccttc

SEQ ID NO: 2633986 - DNA, 25 bp, Homo sapien
tgaatgaggaccctctgtagcacaa

SEQ ID NO: 2633987 - DNA, 25 bp, Homo sapien
tgaggaccctctgtagcacaataaa

SEQ ID NO: 2633988 - DNA, 25 bp, Homo sapien
tgtagcacaataaacctgggcctaa

SEQ ID NO: 2633989 - DNA, 25 bp, Homo sapien
taaacctgggcctaatcttctccca

SEQ ID NO: 2633990 - DNA, 25 bp, Homo sapien
gactggcagtcgtgtggctctagag

SEQ ID NO: 2633991 - DNA, 25 bp, Homo sapien
agctgtaatatcctccttgactgca

SEQ ID NO: 2633992 - DNA, 25 bp, Homo sapien
tcatgcgggatgaaccctcagctgt

SEQ ID NO: 2633993 - DNA, 25 bp, Homo sapien
tgactgcaggactggcagtcgtgtg

SEQ ID NO: 2633994 - DNA, 25 bp, Homo sapien
cttttgcttgtcgactttcagagaa

SEQ ID NO: 2633995 - DNA, 25 bp, Homo sapien
tcttcctgtctttcggattgacttg

SEQ ID NO: 2633996 - DNA, 25 bp, Homo sapien
aatgatgtgccacacattatttttc

SEQ ID NO: 2633997 - DNA, 25 bp, Homo sapien
tcggattgacttgcttgcttatgca

SEQ ID NO: 2633998 - DNA, 25 bp, Homo sapien
cattccggtcttgggtgcgtgccgc

SEQ ID NO: 2633999 - DNA, 25 bp, Homo sapien
ccactgtgcacggattggaacccgg

SEQ ID NO: 2634000 - DNA, 25 bp, Homo sapien
caggctggcacgaacaggactgagt

SEQ ID NO: 2634001 - DNA, 25 bp, Homo sapien
tgagtagggacaggtatagccccac

SEQ ID NO: 2634002 - DNA, 25 bp, Homo sapien
cataaagcagacgggtctaaactac

SEQ ID NO: 2634003 - DNA, 25 bp, Homo sapien
ttaggctgccggatgtctgatctcc

SEQ ID NO: 2634004 - DNA, 25 bp, Homo sapien
ttataggcgccgcagccaatgagca

SEQ ID NO: 2634005 - DNA, 25 bp, Homo sapien
tgtaatctccggctagtcggctgct

SEQ ID NO: 2634006 - DNA, 25 bp, Homo sapien
tctgatctccgaataactgaggcgt

SEQ ID NO: 2634007 - DNA, 25 bp, Homo sapien
tcagcacacaggaacccacatcccc

SEQ ID NO: 2634008 - DNA, 25 bp, Homo sapien
agcacacaggaacccacatccccca

SEQ ID NO: 2634009 - DNA, 25 bp, Homo sapien
cagcacacaggaacccacatccccc

SEQ ID NO: 2634010 - DNA, 25 bp, Homo sapien
gcacacaggaacccacatcccccac

SEQ ID NO: 2634011 - DNA, 25 bp, Homo sapien
tacggagtacactttcacacacttc

SEQ ID NO: 2634012 - DNA, 25 bp, Homo sapien
ctaagtcgcgtacaggattgcctgt

SEQ ID NO: 2634013 - DNA, 25 bp, Homo sapien
tctcgtggcggcagagcctttagga

SEQ ID NO: 2634014 - DNA, 25 bp, Homo sapien
ttcccggtggtgcagtctcgtggcg

SEQ ID NO: 2634015 - DNA, 25 bp, Homo sapien
tccttttcacgtggaggaaagcgaa

SEQ ID NO: 2634016 - DNA, 25 bp, Homo sapien
ggaaagcgaattctccgaagactgt

SEQ ID NO: 2634017 - DNA, 25 bp, Homo sapien
gaattctccgaagactgttcggcgt

SEQ ID NO: 2634018 - DNA, 25 bp, Homo sapien
tttcacgtggaggaaagcgaattct

SEQ ID NO: 2634019 - DNA, 25 bp, Homo sapien
atgtgggaggcccaggagatcgaga

SEQ ID NO: 2634020 - DNA, 25 bp, Homo sapien
tgatgtgggaggcccaggagatcga

SEQ ID NO: 2634021 - DNA, 25 bp, Homo sapien
ggctgatgtgggaggcccaggagat

SEQ ID NO: 2634022 - DNA, 25 bp, Homo sapien
gctgatgtgggaggcccaggagatc

SEQ ID NO: 2634023 - DNA, 25 bp, Homo sapien
tctcctacggatgcatcttatggct

SEQ ID NO: 2634024 - DNA, 25 bp, Homo sapien
gatgcatcttatggcttccatatag

SEQ ID NO: 2634025 - DNA, 25 bp, Homo sapien
tacggatgcatcttatggcttccat

SEQ ID NO: 2634026 - DNA, 25 bp, Homo sapien
agagggtctcctacggatgcatctt

SEQ ID NO: 2634027 - DNA, 25 bp, Homo sapien
tctgagatactcctcgcacagccag

SEQ ID NO: 2634028 - DNA, 25 bp, Homo sapien
agaactctgcagttgccttagcaac

SEQ ID NO: 2634029 - DNA, 25 bp, Homo sapien
tgtgagttcactaccaagtcctttg

SEQ ID NO: 2634030 - DNA, 25 bp, Homo sapien
aacagctaaagtttcctgtcccagg

SEQ ID NO: 2634031 - DNA, 25 bp, Homo sapien
ggccatattctctcgttcataacct

SEQ ID NO: 2634032 - DNA, 25 bp, Homo sapien
ctttcttaaggccatattctctcgt

SEQ ID NO: 2634033 - DNA, 25 bp, Homo sapien
tattctctcgttcataacctttaca

SEQ ID NO: 2634034 - DNA, 25 bp, Homo sapien
taaggccatattctctcgttcataa

SEQ ID NO: 2634035 - DNA, 25 bp, Homo sapien
tagtagttgcaacaaaaatggttac

SEQ ID NO: 2634036 - DNA, 25 bp, Homo sapien
gccacagtagtagttgcaacaaaaa

SEQ ID NO: 2634037 - DNA, 25 bp, Homo sapien
agggccacagtagtagttgcaacaa

SEQ ID NO: 2634038 - DNA, 25 bp, Homo sapien
ccctcgttttgcaagggccacagta

SEQ ID NO: 2634039 - DNA, 25 bp, Homo sapien
tcatggcgaaagtcaaggaggagaa

SEQ ID NO: 2634040 - DNA, 25 bp, Homo sapien
gaggagaaagtcccatctcacatgg

SEQ ID NO: 2634041 - DNA, 25 bp, Homo sapien
ctggttctattcttcaggttaggct

SEQ ID NO: 2634042 - DNA, 25 bp, Homo sapien
gctgaggaggcagaagtccacttct

SEQ ID NO: 2634043 - DNA, 25 bp, Homo sapien
ggttctattcttcaggttaggctga

SEQ ID NO: 2634044 - DNA, 25 bp, Homo sapien
tctattcttcaggttaggctgagga

SEQ ID NO: 2634045 - DNA, 25 bp, Homo sapien
tctgatggctgaaggtaccactggg

SEQ ID NO: 2634046 - DNA, 25 bp, Homo sapien
gaaatggtcattggatttgatgaaa

SEQ ID NO: 2634047 - DNA, 25 bp, Homo sapien
gacccacagatctaaagcgaggtgt

SEQ ID NO: 2634048 - DNA, 25 bp, Homo sapien
tttgatgaaatttgggacccacaga

SEQ ID NO: 2634049 - DNA, 25 bp, Homo sapien
cctgcacttgacagacatggagaac

SEQ ID NO: 2634050 - DNA, 25 bp, Homo sapien
ccaggttgccaccaattactaagga

SEQ ID NO: 2634051 - DNA, 25 bp, Homo sapien
caagcttacatcctgctaggcatgc

SEQ ID NO: 2634052 - DNA, 25 bp, Homo sapien
cagaagtgaagtcagtgggccaagc

SEQ ID NO: 2634053 - DNA, 25 bp, Homo sapien
tcacttccagtgtcactcgcatggc

SEQ ID NO: 2634054 - DNA, 25 bp, Homo sapien
tgtcactcgcatggctactgtcaca

SEQ ID NO: 2634055 - DNA, 25 bp, Homo sapien
gctgagagtctctcatgagtttgct

SEQ ID NO: 2634056 - DNA, 25 bp, Homo sapien
gaacccaggaacagtttagctgagt

SEQ ID NO: 2634057 - DNA, 25 bp, Homo sapien
acactgtttctagggtcagggtcag

SEQ ID NO: 2634058 - DNA, 25 bp, Homo sapien
tctcattgcatggtggttggcttcc

SEQ ID NO: 2634059 - DNA, 25 bp, Homo sapien
tgattgacaacaggtctcaggtcct

SEQ ID NO: 2634060 - DNA, 25 bp, Homo sapien
gattatcatcaagctgtcacctagg

SEQ ID NO: 2634061 - DNA, 25 bp, Homo sapien
cataagctgcgtttccatttatcca

SEQ ID NO: 2634062 - DNA, 25 bp, Homo sapien
aagctgcgtttccatttatccaaag

SEQ ID NO: 2634063 - DNA, 25 bp, Homo sapien
ccggcataagctgcgtttccattta

SEQ ID NO: 2634064 - DNA, 25 bp, Homo sapien
ctttccggcataagctgcgtttcca

SEQ ID NO: 2634065 - DNA, 25 bp, Homo sapien
cactaatagatacagacctctggta

SEQ ID NO: 2634066 - DNA, 25 bp, Homo sapien
ttactagcactaatagatacagacc

SEQ ID NO: 2634067 - DNA, 25 bp, Homo sapien
ggtcatccatacattactagcacta

SEQ ID NO: 2634068 - DNA, 25 bp, Homo sapien
cagccctggtcatccatacattact

SEQ ID NO: 2634069 - DNA, 25 bp, Homo sapien
tccatttctgatattagtacagcca

SEQ ID NO: 2634070 - DNA, 25 bp, Homo sapien
cctttcaatatccatgggatctcta

SEQ ID NO: 2634071 - DNA, 25 bp, Homo sapien
gatattagtacagccagccttccat

SEQ ID NO: 2634072 - DNA, 25 bp, Homo sapien
gatctctagtgatgtctctcctctt

SEQ ID NO: 2634073 - DNA, 25 bp, Homo sapien
gaccggagccactcgtactcttgga

SEQ ID NO: 2634074 - DNA, 25 bp, Homo sapien
gaactgagacttcactggtggttgg

SEQ ID NO: 2634075 - DNA, 25 bp, Homo sapien
attccacagtccctctaaaggcctg

SEQ ID NO: 2634076 - DNA, 25 bp, Homo sapien
gagttggtgcaattcataaagctga

SEQ ID NO: 2634077 - DNA, 25 bp, Homo sapien
ggattaccagttgaagcagctagtg

SEQ ID NO: 2634078 - DNA, 25 bp, Homo sapien
gcccagacgcaatcacttaattagg

SEQ ID NO: 2634079 - DNA, 25 bp, Homo sapien
tagtggtttatagccgtgcccagac

SEQ ID NO: 2634080 - DNA, 25 bp, Homo sapien
taattaggcctgaatcatagcacgg

SEQ ID NO: 2634081 - DNA, 25 bp, Homo sapien
ttggcccaggcagtgcatataaagc

SEQ ID NO: 2634082 - DNA, 25 bp, Homo sapien
aaactcttcctggtaacgcactgga

SEQ ID NO: 2634083 - DNA, 25 bp, Homo sapien
tcaggtccacgatggttggcccagg

SEQ ID NO: 2634084 - DNA, 25 bp, Homo sapien
catataaagcatgatccagcctgca

SEQ ID NO: 2634085 - DNA, 25 bp, Homo sapien
caccatctggtagtttgtactgtcg

SEQ ID NO: 2634086 - DNA, 25 bp, Homo sapien
gagataaaaccgtgctcatccattc

SEQ ID NO: 2634087 - DNA, 25 bp, Homo sapien
gcagccagccttcgaaggtctgaat

SEQ ID NO: 2634088 - DNA, 25 bp, Homo sapien
tcgggtgaagcttcttgagataaaa

SEQ ID NO: 2634089 - DNA, 25 bp, Homo sapien
tctcgtagtaccagtggctgaacca

SEQ ID NO: 2634090 - DNA, 25 bp, Homo sapien
tcttccccatgtcatctgaacagga

SEQ ID NO: 2634091 - DNA, 25 bp, Homo sapien
tcatctgaacaggaaccgatacgat

SEQ ID NO: 2634092 - DNA, 25 bp, Homo sapien
tttcaaatgtgggtaatacaaacat

SEQ ID NO: 2634093 - DNA, 25 bp, Homo sapien
tcagtcatagaaggatgcagccctg

SEQ ID NO: 2634094 - DNA, 25 bp, Homo sapien
tcaggtacatctaccgtactgggtc

SEQ ID NO: 2634095 - DNA, 25 bp, Homo sapien
cctgtacggcacatattccatggaa

SEQ ID NO: 2634096 - DNA, 25 bp, Homo sapien
gacagtgttacaaccctaagccctg

SEQ ID NO: 2634097 - DNA, 25 bp, Homo sapien
gacaccttgtttctgaaggcatcgc

SEQ ID NO: 2634098 - DNA, 25 bp, Homo sapien
tgtttctgaaggcatcgcctgcctc

SEQ ID NO: 2634099 - DNA, 25 bp, Homo sapien
tgactgaagccttgagccctactca

SEQ ID NO: 2634100 - DNA, 25 bp, Homo sapien
ttttgactgacaccttgtttctgaa

SEQ ID NO: 2634101 - DNA, 25 bp, Homo sapien
cagtcagtgcgctggtggctaacag

SEQ ID NO: 2634102 - DNA, 25 bp, Homo sapien
tagccttggactagctggacatctt

SEQ ID NO: 2634103 - DNA, 25 bp, Homo sapien
cctggtaagtgcatgcgattgccaa

SEQ ID NO: 2634104 - DNA, 25 bp, Homo sapien
gaaccaggcacttttggcatgctgc

SEQ ID NO: 2634105 - DNA, 25 bp, Homo sapien
ttctctgtggatggcgctaaagcaa

SEQ ID NO: 2634106 - DNA, 25 bp, Homo sapien
tcacataggacaggatggtggttgc

SEQ ID NO: 2634107 - DNA, 25 bp, Homo sapien
gaacgaaaggactgaggaattcagc

SEQ ID NO: 2634108 - DNA, 25 bp, Homo sapien
cagtgaccgatttcttatgctgggt

SEQ ID NO: 2634109 - DNA, 25 bp, Homo sapien
ggacaccatgacttcaagtgaagac

SEQ ID NO: 2634110 - DNA, 25 bp, Homo sapien
agtgaagacagtttcgacccctgcc

SEQ ID NO: 2634111 - DNA, 25 bp, Homo sapien
caccatgacttcaagtgaagacagt

SEQ ID NO: 2634112 - DNA, 25 bp, Homo sapien
ccaggacaccatgacttcaagtgaa

SEQ ID NO: 2634113 - DNA, 25 bp, Homo sapien
tgctgggtatgctagagagactttc

SEQ ID NO: 2634114 - DNA, 25 bp, Homo sapien
tgtgagccctgaacagccctataca

SEQ ID NO: 2634115 - DNA, 25 bp, Homo sapien
tgagaaaggtaatctactgtgagcc

SEQ ID NO: 2634116 - DNA, 25 bp, Homo sapien
ggatccagctaacccaaatttagag

SEQ ID NO: 2634117 - DNA, 25 bp, Homo sapien
acctgaggggcccgcggtactgctc

SEQ ID NO: 2634118 - DNA, 25 bp, Homo sapien
gactcccggcgtcccgagccgaggc

SEQ ID NO: 2634119 - DNA, 25 bp, Homo sapien
tggagccccgaaggcggcaaaccca

SEQ ID NO: 2634120 - DNA, 25 bp, Homo sapien
tgctcgagccctggcgcgcggactg

SEQ ID NO: 2634121 - DNA, 25 bp, Homo sapien
tgctctcgcagcgagatctctcctg

SEQ ID NO: 2634122 - DNA, 25 bp, Homo sapien
tctccgacctgaagtcgtacagcgc

SEQ ID NO: 2634123 - DNA, 25 bp, Homo sapien
tgggttctccgacctgaagtcgtac

SEQ ID NO: 2634124 - DNA, 25 bp, Homo sapien
gatctctcctgggttctccgacctg

SEQ ID NO: 2634125 - DNA, 25 bp, Homo sapien
aagaggccgcggtcgccgcggctgt

SEQ ID NO: 2634126 - DNA, 25 bp, Homo sapien
ggtcgccgcggctgttgaccccctc

SEQ ID NO: 2634127 - DNA, 25 bp, Homo sapien
accccctcgagccagccctcgatgt

SEQ ID NO: 2634128 - DNA, 25 bp, Homo sapien
cgcggctgttgaccccctcgagcca

SEQ ID NO: 2634129 - DNA, 25 bp, Homo sapien
gggcacattggcgtagcgggccggg

SEQ ID NO: 2634130 - DNA, 25 bp, Homo sapien
ccccggggggcacattggcgtagcg

SEQ ID NO: 2634131 - DNA, 25 bp, Homo sapien
gacaggcaggggctcgaagcccccg

SEQ ID NO: 2634132 - DNA, 25 bp, Homo sapien
cgcgacaggcaggggctcgaagccc

SEQ ID NO: 2634133 - DNA, 25 bp, Homo sapien
catctccggtgaaggcgatagcctg

SEQ ID NO: 2634134 - DNA, 25 bp, Homo sapien
tcgaagtgcttgtagcgccgatgca

SEQ ID NO: 2634135 - DNA, 25 bp, Homo sapien
ggaagttagccagatgcccctgata

SEQ ID NO: 2634136 - DNA, 25 bp, Homo sapien
caatggcgtcataggcatctccggt

SEQ ID NO: 2634137 - DNA, 25 bp, Homo sapien
agtggtactgctgtcaaagtcgccc

SEQ ID NO: 2634138 - DNA, 25 bp, Homo sapien
tgctgtcaaagtcgcccctttcagc

SEQ ID NO: 2634139 - DNA, 25 bp, Homo sapien
aatacactccatatcacctgctcta

SEQ ID NO: 2634140 - DNA, 25 bp, Homo sapien
tcagcctgcacaatacactccatat

SEQ ID NO: 2634141 - DNA, 25 bp, Homo sapien
aggcgtccacgtctctgctcgcttc

SEQ ID NO: 2634142 - DNA, 25 bp, Homo sapien
caggcgtccacgtctctgctcgctt

SEQ ID NO: 2634143 - DNA, 25 bp, Homo sapien
gcgtccacgtctctgctcgcttcct

SEQ ID NO: 2634144 - DNA, 25 bp, Homo sapien
ggcgtccacgtctctgctcgcttcc

SEQ ID NO: 2634145 - DNA, 25 bp, Homo sapien
aaaatgatagcactgtcatcaaagg

SEQ ID NO: 2634146 - DNA, 25 bp, Homo sapien
ccttcgagaaagagtactcattccc

SEQ ID NO: 2634147 - DNA, 25 bp, Homo sapien
caaaggtactctttgaaccttcgag

SEQ ID NO: 2634148 - DNA, 25 bp, Homo sapien
cattccctaatgcaagatactcgag

SEQ ID NO: 2634149 - DNA, 25 bp, Homo sapien
tcacttcgtaaaggttgcaggcaag

SEQ ID NO: 2634150 - DNA, 25 bp, Homo sapien
gatcttaattcctctaccaaagcag

SEQ ID NO: 2634151 - DNA, 25 bp, Homo sapien
cactaagtgacagtgcagtgttcaa

SEQ ID NO: 2634152 - DNA, 25 bp, Homo sapien
tctaccctcgtctcaagattacaga

SEQ ID NO: 2634153 - DNA, 25 bp, Homo sapien
gatggcctcagacatccatcccgta

SEQ ID NO: 2634154 - DNA, 25 bp, Homo sapien
cattttgcagctgggttctcaccag

SEQ ID NO: 2634155 - DNA, 25 bp, Homo sapien
gagtatttgagttttccaccctcat

SEQ ID NO: 2634156 - DNA, 25 bp, Homo sapien
catccatcccgtaaccaatgtgttt

SEQ ID NO: 2634157 - DNA, 25 bp, Homo sapien
cactataaaggtatactgcagacag

SEQ ID NO: 2634158 - DNA, 25 bp, Homo sapien
cacttaaaggaactccctctagcca

SEQ ID NO: 2634159 - DNA, 25 bp, Homo sapien
tagcaatagtcgcaagaggtaaacc

SEQ ID NO: 2634160 - DNA, 25 bp, Homo sapien
tcaacttgctgccacctagatttag

SEQ ID NO: 2634161 - DNA, 25 bp, Homo sapien
agcagacccagctcagtcccacccc

SEQ ID NO: 2634162 - DNA, 25 bp, Homo sapien
agacccagctcagtcccaccccttg

SEQ ID NO: 2634163 - DNA, 25 bp, Homo sapien
gacccagctcagtcccaccccttgg

SEQ ID NO: 2634164 - DNA, 25 bp, Homo sapien
cagacccagctcagtcccacccctt

SEQ ID NO: 2634165 - DNA, 25 bp, Homo sapien
gctcccactgcgatgaggctctgca

SEQ ID NO: 2634166 - DNA, 25 bp, Homo sapien
tgaggctctgcacccacggcttctt

SEQ ID NO: 2634167 - DNA, 25 bp, Homo sapien
gcccatgctggtcccgacaggccag

SEQ ID NO: 2634168 - DNA, 25 bp, Homo sapien
agagcccatgctggtcccgacaggc

SEQ ID NO: 2634169 - DNA, 25 bp, Homo sapien
ttggccaaagataagtgagcgttac

SEQ ID NO: 2634170 - DNA, 25 bp, Homo sapien
taaaatagcttgtccaaaactcctc

SEQ ID NO: 2634171 - DNA, 25 bp, Homo sapien
tgagcgttacgcaggttaaaatagc

SEQ ID NO: 2634172 - DNA, 25 bp, Homo sapien
tgctgacctcgtgaggaagtgcccc

SEQ ID NO: 2634173 - DNA, 25 bp, Homo sapien
tggagtactctaagagcctcctcat

SEQ ID NO: 2634174 - DNA, 25 bp, Homo sapien
aactcttcccctggagtactctaag

SEQ ID NO: 2634175 - DNA, 25 bp, Homo sapien
gccatgatacctggcaggtgtctcg

SEQ ID NO: 2634176 - DNA, 25 bp, Homo sapien
ggtgtctcgagttcacctgttcctt

SEQ ID NO: 2634177 - DNA, 25 bp, Homo sapien
cggacatccttgtatgaaatcataa

SEQ ID NO: 2634178 - DNA, 25 bp, Homo sapien
tttcccgctgcctcgcactggcagg

SEQ ID NO: 2634179 - DNA, 25 bp, Homo sapien
tttactctgaccacatccggacatc

SEQ ID NO: 2634180 - DNA, 25 bp, Homo sapien
tcactcctgtggttttcccgctgcc

SEQ ID NO: 2634181 - DNA, 25 bp, Homo sapien
caaggcaaggcaagatagagcacac

SEQ ID NO: 2634182 - DNA, 25 bp, Homo sapien
ggaagagagtaaagtggcccctgct

SEQ ID NO: 2634183 - DNA, 25 bp, Homo sapien
tatgggaccctatctgagtgcactg

SEQ ID NO: 2634184 - DNA, 25 bp, Homo sapien
caattgccatgtatgccacggtggt

SEQ ID NO: 2634185 - DNA, 25 bp, Homo sapien
ccctgacgcaaagtgaaataggtcc

SEQ ID NO: 2634186 - DNA, 25 bp, Homo sapien
acaaagcaccgtcagggcaggcaca

SEQ ID NO: 2634187 - DNA, 25 bp, Homo sapien
gaaataggtccatgaagcacaattc

SEQ ID NO: 2634188 - DNA, 25 bp, Homo sapien
tcagggcaggcacactaccctgacg

SEQ ID NO: 2634189 - DNA, 25 bp, Homo sapien
tccacgtgtcgcctactctccttga

SEQ ID NO: 2634190 - DNA, 25 bp, Homo sapien
cttcctccacgtgtcgcctactctc

SEQ ID NO: 2634191 - DNA, 25 bp, Homo sapien
cccttcctccacgtgtcgcctactc

SEQ ID NO: 2634192 - DNA, 25 bp, Homo sapien
cgtgtcgcctactctccttgacttt

SEQ ID NO: 2634193 - DNA, 25 bp, Homo sapien
aagtctctcactcgaatttgatgga

SEQ ID NO: 2634194 - DNA, 25 bp, Homo sapien
aatagtgttacagcgatcctgaatg

SEQ ID NO: 2634195 - DNA, 25 bp, Homo sapien
tcctgaatgccgtcagccttctgca

SEQ ID NO: 2634196 - DNA, 25 bp, Homo sapien
agcttcttccaacttctgggtaact

SEQ ID NO: 2634197 - DNA, 25 bp, Homo sapien
tgtaaatcccgtatgaatcagtggc

SEQ ID NO: 2634198 - DNA, 25 bp, Homo sapien
caaattgatgacagctgatcgtccc

SEQ ID NO: 2634199 - DNA, 25 bp, Homo sapien
tgttaccatttcagtacccagggat

SEQ ID NO: 2634200 - DNA, 25 bp, Homo sapien
caagcttttgggacgcctgggtgaa

SEQ ID NO: 2634201 - DNA, 25 bp, Homo sapien
gggaacaagattacgacacatggct

SEQ ID NO: 2634202 - DNA, 25 bp, Homo sapien
tttgaatgcgttccctcatcctggg

SEQ ID NO: 2634203 - DNA, 25 bp, Homo sapien
gtaaaaccaggctcaagtgcacacc

SEQ ID NO: 2634204 - DNA, 25 bp, Homo sapien
ggtaccttcagatacaacagcttgg

SEQ ID NO: 2634205 - DNA, 25 bp, Homo sapien
ctagttagagctacgggacaaattc

SEQ ID NO: 2634206 - DNA, 25 bp, Homo sapien
gtaagaaggatgctgtgccagggct

SEQ ID NO: 2634207 - DNA, 25 bp, Homo sapien
ttagagctacgggacaaattcttaa

SEQ ID NO: 2634208 - DNA, 25 bp, Homo sapien
gagctacgggacaaattcttaaaca

SEQ ID NO: 2634209 - DNA, 25 bp, Homo sapien
taactcagttggcttacaagggtcc

SEQ ID NO: 2634210 - DNA, 25 bp, Homo sapien
tccattgattctgggataggagcca

SEQ ID NO: 2634211 - DNA, 25 bp, Homo sapien
gagaaatttgttatgagaccacctg

SEQ ID NO: 2634212 - DNA, 25 bp, Homo sapien
gaacacagacttatggacctgacac

SEQ ID NO: 2634213 - DNA, 25 bp, Homo sapien
gttgccttgctaccaagttgctgca

SEQ ID NO: 2634214 - DNA, 25 bp, Homo sapien
tagggaatacagtaagtttctctcc

SEQ ID NO: 2634215 - DNA, 25 bp, Homo sapien
tcccattcctgaaagcaaacaatgt

SEQ ID NO: 2634216 - DNA, 25 bp, Homo sapien
ttcaatcgtttatattcaaaagaga

SEQ ID NO: 2634217 - DNA, 25 bp, Homo sapien
acatggatttgggtgccactctctc

SEQ ID NO: 2634218 - DNA, 25 bp, Homo sapien
tgatggttccaagcactttcgcaga

SEQ ID NO: 2634219 - DNA, 25 bp, Homo sapien
ctctctccttgtagggctggaagcc

SEQ ID NO: 2634220 - DNA, 25 bp, Homo sapien
ccccttggccgtgctggattctgct

SEQ ID NO: 2634221 - DNA, 25 bp, Homo sapien
tcacacacaattcctgaggaccatg

SEQ ID NO: 2634222 - DNA, 25 bp, Homo sapien
tttgtcctcacacacaattcctgag

SEQ ID NO: 2634223 - DNA, 25 bp, Homo sapien
ggaccatgacatactggggacatca

SEQ ID NO: 2634224 - DNA, 25 bp, Homo sapien
caattcctgaggaccatgacatact

SEQ ID NO: 2634225 - DNA, 25 bp, Homo sapien
gaatttctacaatacccacagcctg

SEQ ID NO: 2634226 - DNA, 25 bp, Homo sapien
gatacagcttgcataggatccttca

SEQ ID NO: 2634227 - DNA, 25 bp, Homo sapien
tgaaacatcttcgattcccaggccc

SEQ ID NO: 2634228 - DNA, 25 bp, Homo sapien
cgccctgatgtttttgtaaggacaa

SEQ ID NO: 2634229 - DNA, 25 bp, Homo sapien
tagtctctagacagccctggtggtt

SEQ ID NO: 2634230 - DNA, 25 bp, Homo sapien
ctggtggttccagcccttcatacat

SEQ ID NO: 2634231 - DNA, 25 bp, Homo sapien
cctggtggttccagcccttcataca

SEQ ID NO: 2634232 - DNA, 25 bp, Homo sapien
ggctctgcatctcgctggtagtctc

SEQ ID NO: 2634233 - DNA, 25 bp, Homo sapien
agacctaggattctgctcagtctcc

SEQ ID NO: 2634234 - DNA, 25 bp, Homo sapien
aaagcaaaagccgtagacctaggat

SEQ ID NO: 2634235 - DNA, 25 bp, Homo sapien
aaaagccgtagacctaggattctgc

SEQ ID NO: 2634236 - DNA, 25 bp, Homo sapien
gccgtagacctaggattctgctcag

SEQ ID NO: 2634237 - DNA, 25 bp, Homo sapien
tagctggactcgtcatgggctgacc

SEQ ID NO: 2634238 - DNA, 25 bp, Homo sapien
ctttaattaactgatggtgcctgcc

SEQ ID NO: 2634239 - DNA, 25 bp, Homo sapien
tctggtcacacaaagggagaatgcc

SEQ ID NO: 2634240 - DNA, 25 bp, Homo sapien
ccagcacagaagatggtaaaagcac

SEQ ID NO: 2634241 - DNA, 25 bp, Homo sapien
tgggtccagagctaaccagtgccag

SEQ ID NO: 2634242 - DNA, 25 bp, Homo sapien
cctcggattgaattgttgactgacc

SEQ ID NO: 2634243 - DNA, 25 bp, Homo sapien
cagtgaaagtgtccgtgggtccaga

SEQ ID NO: 2634244 - DNA, 25 bp, Homo sapien
tgttacagtcaagccaattgtggga

SEQ ID NO: 2634245 - DNA, 25 bp, Homo sapien
tgggaaagcttcccaaacaggtcca

SEQ ID NO: 2634246 - DNA, 25 bp, Homo sapien
gggcccacatggttggaatctcagt

SEQ ID NO: 2634247 - DNA, 25 bp, Homo sapien
cagggaaagaaaactgacttgaagt

SEQ ID NO: 2634248 - DNA, 25 bp, Homo sapien
aacaggtccaaaaacagcgtaagag

SEQ ID NO: 2634249 - DNA, 25 bp, Homo sapien
gaacagtaacgttgttgtgcttgat

SEQ ID NO: 2634250 - DNA, 25 bp, Homo sapien
ctaaaggtccctgttgagaaacatc

SEQ ID NO: 2634251 - DNA, 25 bp, Homo sapien
ccctggctctgtagattccttgaag

SEQ ID NO: 2634252 - DNA, 25 bp, Homo sapien
tgcagtggtcactaaacagggatgt

SEQ ID NO: 2634253 - DNA, 25 bp, Homo sapien
gagacaacatattcagggcgtttta

SEQ ID NO: 2634254 - DNA, 25 bp, Homo sapien
cagtggctgtctacagcctctgaga

SEQ ID NO: 2634255 - DNA, 25 bp, Homo sapien
gtatccagtaaaagtcagggtgaat

SEQ ID NO: 2634256 - DNA, 25 bp, Homo sapien
tttattggagggttgactaggctgc

SEQ ID NO: 2634257 - DNA, 25 bp, Homo sapien
agaaacatggcccaagaggtagcag

SEQ ID NO: 2634258 - DNA, 25 bp, Homo sapien
aaacatggcccaagaggtagcaggg

SEQ ID NO: 2634259 - DNA, 25 bp, Homo sapien
ggcccaagaggtagcaggggagcca

SEQ ID NO: 2634260 - DNA, 25 bp, Homo sapien
atggcccaagaggtagcaggggagc

SEQ ID NO: 2634261 - DNA, 25 bp, Homo sapien
gctcaatgtgggcagtcaaaactcc

SEQ ID NO: 2634262 - DNA, 25 bp, Homo sapien
aaaaggagccgtgcaatgtcctgca

SEQ ID NO: 2634263 - DNA, 25 bp, Homo sapien
tccagattccttcagaaagagccag

SEQ ID NO: 2634264 - DNA, 25 bp, Homo sapien
agacctcgctggtagttggagccca

SEQ ID NO: 2634265 - DNA, 25 bp, Homo sapien
tacatatgctacctccagcccatag

SEQ ID NO: 2634266 - DNA, 25 bp, Homo sapien
cactacatatgctacctccagccca

SEQ ID NO: 2634267 - DNA, 25 bp, Homo sapien
tatgctacctccagcccatagacgg

SEQ ID NO: 2634268 - DNA, 25 bp, Homo sapien
atccactacatatgctacctccagc

SEQ ID NO: 2634269 - DNA, 25 bp, Homo sapien
catccccgttcaggcccacttctga

SEQ ID NO: 2634270 - DNA, 25 bp, Homo sapien
cgttcaggcccacttctgaatgggc

SEQ ID NO: 2634271 - DNA, 25 bp, Homo sapien
ccccgttcaggcccacttctgaatg

SEQ ID NO: 2634272 - DNA, 25 bp, Homo sapien
tcatccccgttcaggcccacttctg

SEQ ID NO: 2634273 - DNA, 25 bp, Homo sapien
tgagcgtagcttattcaggcctaga

SEQ ID NO: 2634274 - DNA, 25 bp, Homo sapien
aggaggccccttcagaaaatctgca

SEQ ID NO: 2634275 - DNA, 25 bp, Homo sapien
gcttctctgagtacgcttgagcgta

SEQ ID NO: 2634276 - DNA, 25 bp, Homo sapien
taatgcccttgcataacctccttgg

SEQ ID NO: 2634277 - DNA, 25 bp, Homo sapien
caaagagaggttgtaaagggtgcac

SEQ ID NO: 2634278 - DNA, 25 bp, Homo sapien
aagggtgcacgattttatgaatccc

SEQ ID NO: 2634279 - DNA, 25 bp, Homo sapien
tattgaagagccctaggagaaccct

SEQ ID NO: 2634280 - DNA, 25 bp, Homo sapien
caagctcttttactcattatgatgg

SEQ ID NO: 2634281 - DNA, 25 bp, Homo sapien
ttcctgatagttggggaatgatccg

SEQ ID NO: 2634282 - DNA, 25 bp, Homo sapien
gggaatgatccgctgtgctgctgct

SEQ ID NO: 2634283 - DNA, 25 bp, Homo sapien
ctgctgctgtagcatcaacgaatac

SEQ ID NO: 2634284 - DNA, 25 bp, Homo sapien
cgaatacatatacttcatcagcctc

SEQ ID NO: 2634285 - DNA, 25 bp, Homo sapien
gactaaagctatcatcactcttggc

SEQ ID NO: 2634286 - DNA, 25 bp, Homo sapien
taaggtccatgcgaaacatcagctg

SEQ ID NO: 2634287 - DNA, 25 bp, Homo sapien
ttgactgtacttactgactaaagct

SEQ ID NO: 2634288 - DNA, 25 bp, Homo sapien
gacaagttctgtctcataggctcct

SEQ ID NO: 2634289 - DNA, 25 bp, Homo sapien
gtttaagtaaagcacctccagagag

SEQ ID NO: 2634290 - DNA, 25 bp, Homo sapien
tcgatttgttcgacaggctggctgg

SEQ ID NO: 2634291 - DNA, 25 bp, Homo sapien
catttggttaatgtggtggtcctcc

SEQ ID NO: 2634292 - DNA, 25 bp, Homo sapien
tgttgaagggcaaactgactggacc

SEQ ID NO: 2634293 - DNA, 25 bp, Homo sapien
ggttggaggtgtcagtgtcctcatt

SEQ ID NO: 2634294 - DNA, 25 bp, Homo sapien
tcctcattgggggtgggtccatcat

SEQ ID NO: 2634295 - DNA, 25 bp, Homo sapien
ctttgaagcatagccatagcaggtt

SEQ ID NO: 2634296 - DNA, 25 bp, Homo sapien
catcacatttggtgggtgtgagaga

SEQ ID NO: 2634297 - DNA, 25 bp, Homo sapien
tctggaaatgagacactctgagtgt

SEQ ID NO: 2634298 - DNA, 25 bp, Homo sapien
tggtctttgcgttgtgatccccaca

SEQ ID NO: 2634299 - DNA, 25 bp, Homo sapien
gatccccacagttttggagtaccaa

SEQ ID NO: 2634300 - DNA, 25 bp, Homo sapien
tgcggctgttgataggatgatagct

SEQ ID NO: 2634301 - DNA, 25 bp, Homo sapien
atggagccactccataaagatttgg

SEQ ID NO: 2634302 - DNA, 25 bp, Homo sapien
tggagccactccataaagatttggg

SEQ ID NO: 2634303 - DNA, 25 bp, Homo sapien
tccggaaaatctctacacatccagc

SEQ ID NO: 2634304 - DNA, 25 bp, Homo sapien
ttctgtcctccggaaaatctctaca

SEQ ID NO: 2634305 - DNA, 25 bp, Homo sapien
cacaatgaagtcctggattcctcag

SEQ ID NO: 2634306 - DNA, 25 bp, Homo sapien
caggactaagtctaggaaaactgga

SEQ ID NO: 2634307 - DNA, 25 bp, Homo sapien
tctggagtaactgatcaggactaag

SEQ ID NO: 2634308 - DNA, 25 bp, Homo sapien
tgaaatattagtccgcactgtctcc

SEQ ID NO: 2634309 - DNA, 25 bp, Homo sapien
ctgaggagcacaaccatcagcactg

SEQ ID NO: 2634310 - DNA, 25 bp, Homo sapien
atcagcactgggcatgggatgcttg

SEQ ID NO: 2634311 - DNA, 25 bp, Homo sapien
aggagcacaaccatcagcactgggc

SEQ ID NO: 2634312 - DNA, 25 bp, Homo sapien
gcttgggggcctttgcttagttcta

SEQ ID NO: 2634313 - DNA, 25 bp, Homo sapien
cgggggagcagcttctagtaccgca

SEQ ID NO: 2634314 - DNA, 25 bp, Homo sapien
tctgctctgggcttccgggggagca

SEQ ID NO: 2634315 - DNA, 25 bp, Homo sapien
aatctgctctgggcttccgggggag

SEQ ID NO: 2634316 - DNA, 25 bp, Homo sapien
tccgggggagcagcttctagtaccg

SEQ ID NO: 2634317 - DNA, 25 bp, Homo sapien
ttgagtttctgtctaaagctctcct

SEQ ID NO: 2634318 - DNA, 25 bp, Homo sapien
cagccagctagttctgtatctgtct

SEQ ID NO: 2634319 - DNA, 25 bp, Homo sapien
gaagcagccagctagttctgtatct

SEQ ID NO: 2634320 - DNA, 25 bp, Homo sapien
gagtttctgtctaaagctctcctta

SEQ ID NO: 2634321 - DNA, 25 bp, Homo sapien
tgagaaccctgcccttttgtgctcc

SEQ ID NO: 2634322 - DNA, 25 bp, Homo sapien
cagctctaaagctgagaaccctgcc

SEQ ID NO: 2634323 - DNA, 25 bp, Homo sapien
tgtttttattggcttggggagccac

SEQ ID NO: 2634324 - DNA, 25 bp, Homo sapien
tagatgtttttattggcttggggag

SEQ ID NO: 2634325 - DNA, 25 bp, Homo sapien
gatgtttttattggcttggggagcc

SEQ ID NO: 2634326 - DNA, 25 bp, Homo sapien
ctttagatgtttttattggcttggg

SEQ ID NO: 2634327 - DNA, 25 bp, Homo sapien
cttccacaaacgttggacctctggg

SEQ ID NO: 2634328 - DNA, 25 bp, Homo sapien
gaagtgagtagaagacggccttcca

SEQ ID NO: 2634329 - DNA, 25 bp, Homo sapien
catctcagggaatgggtcacattgt

SEQ ID NO: 2634330 - DNA, 25 bp, Homo sapien
ctgggtttgttcacagagcaaggca

SEQ ID NO: 2634331 - DNA, 25 bp, Homo sapien
tatcctgttgggatgatcatctctc

SEQ ID NO: 2634332 - DNA, 25 bp, Homo sapien
agggcttggctttgtatcctgttgg

SEQ ID NO: 2634333 - DNA, 25 bp, Homo sapien
cagttagatcagcttttgtctggaa

SEQ ID NO: 2634334 - DNA, 25 bp, Homo sapien
tctggaaaggagccttgcagggctt

SEQ ID NO: 2634335 - DNA, 25 bp, Homo sapien
caagagactgggtactgtgaggaca

SEQ ID NO: 2634336 - DNA, 25 bp, Homo sapien
tctctggcctaacagctggtacatc

SEQ ID NO: 2634337 - DNA, 25 bp, Homo sapien
aagaggaggcaacaaggagcaagtc

SEQ ID NO: 2634338 - DNA, 25 bp, Homo sapien
caggtgatctgagggttgtctctgg

SEQ ID NO: 2634339 - DNA, 25 bp, Homo sapien
aatgaagagattcacccaggcccac

SEQ ID NO: 2634340 - DNA, 25 bp, Homo sapien
atgaagagattcacccaggcccact

SEQ ID NO: 2634341 - DNA, 25 bp, Homo sapien
aaaatgaagagattcacccaggccc

SEQ ID NO: 2634342 - DNA, 25 bp, Homo sapien
aaatgaagagattcacccaggccca

SEQ ID NO: 2634343 - DNA, 25 bp, Homo sapien
taatggagatggtgaagataaactc

SEQ ID NO: 2634344 - DNA, 25 bp, Homo sapien
gaccagtaatggagatggtgaagat

SEQ ID NO: 2634345 - DNA, 25 bp, Homo sapien
gatggtgaagataaactccttcagc

SEQ ID NO: 2634346 - DNA, 25 bp, Homo sapien
tggagatggtgaagataaactcctt

SEQ ID NO: 2634347 - DNA, 25 bp, Homo sapien
ttagctttgtacatttgattctgca

SEQ ID NO: 2634348 - DNA, 25 bp, Homo sapien
ctttagctttgtacatttgattctg

SEQ ID NO: 2634349 - DNA, 25 bp, Homo sapien
tagctttgtacatttgattctgcaa

SEQ ID NO: 2634350 - DNA, 25 bp, Homo sapien
agctttgtacatttgattctgcaac

SEQ ID NO: 2634351 - DNA, 25 bp, Homo sapien
tctttggtatatcccaacaaacaag

SEQ ID NO: 2634352 - DNA, 25 bp, Homo sapien
cctctttggtatatcccaacaaaca

SEQ ID NO: 2634353 - DNA, 25 bp, Homo sapien
tttggtatatcccaacaaacaagca

SEQ ID NO: 2634354 - DNA, 25 bp, Homo sapien
tggtatatcccaacaaacaagcaag

SEQ ID NO: 2634355 - DNA, 25 bp, Homo sapien
gctggtactcttccccttatgtctt

SEQ ID NO: 2634356 - DNA, 25 bp, Homo sapien
tattctcagctggtactcttcccct

SEQ ID NO: 2634357 - DNA, 25 bp, Homo sapien
tcagctggtactcttccccttatgt

SEQ ID NO: 2634358 - DNA, 25 bp, Homo sapien
tctcagctggtactcttccccttat

SEQ ID NO: 2634359 - DNA, 25 bp, Homo sapien
gggagtcacagttgtgtgcctgaac

SEQ ID NO: 2634360 - DNA, 25 bp, Homo sapien
gtaaacgtaagtgggtctgctcgtg

SEQ ID NO: 2634361 - DNA, 25 bp, Homo sapien
gggccccttgactttcgatctgtag

SEQ ID NO: 2634362 - DNA, 25 bp, Homo sapien
tatcttgtcttggtaaacgtaagtg

SEQ ID NO: 2634363 - DNA, 25 bp, Homo sapien
gagaaaattgattctaaggcaagta

SEQ ID NO: 2634364 - DNA, 25 bp, Homo sapien
tgattctaaggcaagtaaagcaaaa

SEQ ID NO: 2634365 - DNA, 25 bp, Homo sapien
caaaaggaaatgtaccatatggttt

SEQ ID NO: 2634366 - DNA, 25 bp, Homo sapien
catactaacttcagggtgatggtta

SEQ ID NO: 2634367 - DNA, 25 bp, Homo sapien
cacgacctgcctgatgcgtgggcat

SEQ ID NO: 2634368 - DNA, 25 bp, Homo sapien
gagaaagcccaactctcctgcgtgg

SEQ ID NO: 2634369 - DNA, 25 bp, Homo sapien
gcagccctctaatggagagtccaga

SEQ ID NO: 2634370 - DNA, 25 bp, Homo sapien
cctgtctgcatccaacatgtgagga

SEQ ID NO: 2634371 - DNA, 25 bp, Homo sapien
cctgtccattcccaatgtcatcttc

SEQ ID NO: 2634372 - DNA, 25 bp, Homo sapien
atgtcatcttctcaactccagcccc

SEQ ID NO: 2634373 - DNA, 25 bp, Homo sapien
ctgtccattcccaatgtcatcttct

SEQ ID NO: 2634374 - DNA, 25 bp, Homo sapien
cccaatgtcatcttctcaactccag

SEQ ID NO: 2634375 - DNA, 25 bp, Homo sapien
cagagacatggggagcacgggcagg

SEQ ID NO: 2634376 - DNA, 25 bp, Homo sapien
cagtgtaactctggggtttctgaac

SEQ ID NO: 2634377 - DNA, 25 bp, Homo sapien
ttctgaaccttgcacacttgtcagc

SEQ ID NO: 2634378 - DNA, 25 bp, Homo sapien
gggtttctgaaccttgcacacttgt

SEQ ID NO: 2634379 - DNA, 25 bp, Homo sapien
aactctggggtttctgaaccttgca

SEQ ID NO: 2634380 - DNA, 25 bp, Homo sapien
cccctctgcctaggctctgagtgca

SEQ ID NO: 2634381 - DNA, 25 bp, Homo sapien
tctgtgtactgcctgaatactgcca

SEQ ID NO: 2634382 - DNA, 25 bp, Homo sapien
tctctgtgtactgcctgaatactgc

SEQ ID NO: 2634383 - DNA, 25 bp, Homo sapien
ctctgcctaggctctgagtgcattc

SEQ ID NO: 2634384 - DNA, 25 bp, Homo sapien
tctgagcaatccagtaagcatcttc

SEQ ID NO: 2634385 - DNA, 25 bp, Homo sapien
gctgccattctgagcaatccagtaa

SEQ ID NO: 2634386 - DNA, 25 bp, Homo sapien
tcttcatttgtctgctgaacatcat

SEQ ID NO: 2634387 - DNA, 25 bp, Homo sapien
gagcaatccagtaagcatcttcatt

SEQ ID NO: 2634388 - DNA, 25 bp, Homo sapien
tttcactagtaatgacagtctttgc

SEQ ID NO: 2634389 - DNA, 25 bp, Homo sapien
ccattttcactagtaatgacagtct

SEQ ID NO: 2634390 - DNA, 25 bp, Homo sapien
ttttccattttcactagtaatgaca

SEQ ID NO: 2634391 - DNA, 25 bp, Homo sapien
tccattttcactagtaatgacagtc

SEQ ID NO: 2634392 - DNA, 25 bp, Homo sapien
tctgaactgagaacttataccactt

SEQ ID NO: 2634393 - DNA, 25 bp, Homo sapien
ctgagaacttataccactttcccct

SEQ ID NO: 2634394 - DNA, 25 bp, Homo sapien
gaactgagaacttataccactttcc

SEQ ID NO: 2634395 - DNA, 25 bp, Homo sapien
gttctgaactgagaacttataccac

SEQ ID NO: 2634396 - DNA, 25 bp, Homo sapien
tatgaaacctctgctccaggcccca

SEQ ID NO: 2634397 - DNA, 25 bp, Homo sapien
tccaggccccacttcatgttcccac

SEQ ID NO: 2634398 - DNA, 25 bp, Homo sapien
tgctccaggccccacttcatgttcc

SEQ ID NO: 2634399 - DNA, 25 bp, Homo sapien
ctatgaaacctctgctccaggcccc

SEQ ID NO: 2634400 - DNA, 25 bp, Homo sapien
tatcttctaagagtgcaagctcagt

SEQ ID NO: 2634401 - DNA, 25 bp, Homo sapien
tgagaattgatagccccttagtgat

SEQ ID NO: 2634402 - DNA, 25 bp, Homo sapien
tgaagcttggactcctgagaattga

SEQ ID NO: 2634403 - DNA, 25 bp, Homo sapien
tacttagcagaattgaggttcccta

SEQ ID NO: 2634404 - DNA, 25 bp, Homo sapien
agccagggacccttgtgcccatgag

SEQ ID NO: 2634405 - DNA, 25 bp, Homo sapien
tcataattaataatgaggtttagcc

SEQ ID NO: 2634406 - DNA, 25 bp, Homo sapien
attcagaggcatcataattaataat

SEQ ID NO: 2634407 - DNA, 25 bp, Homo sapien
cagaggcatcataattaataatgag

SEQ ID NO: 2634408 - DNA, 25 bp, Homo sapien
ggcatcataattaataatgaggttt

SEQ ID NO: 2634409 - DNA, 25 bp, Homo sapien
catcatacccttggctgccgtggtc

SEQ ID NO: 2634410 - DNA, 25 bp, Homo sapien
tcatacccttggctgccgtggtctt

SEQ ID NO: 2634411 - DNA, 25 bp, Homo sapien
gtcatcatacccttggctgccgtgg

SEQ ID NO: 2634412 - DNA, 25 bp, Homo sapien
atacccttggctgccgtggtcttcg

SEQ ID NO: 2634413 - DNA, 25 bp, Homo sapien
tggccaacgactgtccagtccagag

SEQ ID NO: 2634414 - DNA, 25 bp, Homo sapien
tcttcctccttctggccaacgactg

SEQ ID NO: 2634415 - DNA, 25 bp, Homo sapien
ccagtccagagacctgaaccttgga

SEQ ID NO: 2634416 - DNA, 25 bp, Homo sapien
gagacctgaaccttggacaaaacca

SEQ ID NO: 2634417 - DNA, 25 bp, Homo sapien
gaaccttgaattctgtatatctggc

SEQ ID NO: 2634418 - DNA, 25 bp, Homo sapien
ggaaccttgaattctgtatatctgg

SEQ ID NO: 2634419 - DNA, 25 bp, Homo sapien
ctgtctctgctgtagaatgttggtt

SEQ ID NO: 2634420 - DNA, 25 bp, Homo sapien
tcatgactgagtgcaaactccgact

SEQ ID NO: 2634421 - DNA, 25 bp, Homo sapien
cgactccaaatcccattcttgcatg

SEQ ID NO: 2634422 - DNA, 25 bp, Homo sapien
ttgcatggggccgctcctctgctgt

SEQ ID NO: 2634423 - DNA, 25 bp, Homo sapien
ggtggatagaggcaatctccattcc

SEQ ID NO: 2634424 - DNA, 25 bp, Homo sapien
gtggatagaggcaatctccattcct

SEQ ID NO: 2634425 - DNA, 25 bp, Homo sapien
cttgatgccaagatcgcctcagggc

SEQ ID NO: 2634426 - DNA, 25 bp, Homo sapien
aagatcgcctcagggcagcttatga

SEQ ID NO: 2634427 - DNA, 25 bp, Homo sapien
cctgctgaagtgatgaccgtttggt

SEQ ID NO: 2634428 - DNA, 25 bp, Homo sapien
ctgaagtgatgaccgtttggttcta

SEQ ID NO: 2634429 - DNA, 25 bp, Homo sapien
ctgctgaagtgatgaccgtttggtt

SEQ ID NO: 2634430 - DNA, 25 bp, Homo sapien
tgctgaagtgatgaccgtttggttc

SEQ ID NO: 2634431 - DNA, 25 bp, Homo sapien
gcctggagttagagtgtagacattt

SEQ ID NO: 2634432 - DNA, 25 bp, Homo sapien
ttagatgtgaggaaactgtgatggc

SEQ ID NO: 2634433 - DNA, 25 bp, Homo sapien
ggaaactgtgatggctctcccacct

SEQ ID NO: 2634434 - DNA, 25 bp, Homo sapien
tgaggaaactgtgatggctctccca

SEQ ID NO: 2634435 - DNA, 25 bp, Homo sapien
tgtgaggaaactgtgatggctctcc

SEQ ID NO: 2634436 - DNA, 25 bp, Homo sapien
agttgagaaaaattagtgaaggatt

SEQ ID NO: 2634437 - DNA, 25 bp, Homo sapien
ttgagaaaaattagtgaaggatttc

SEQ ID NO: 2634438 - DNA, 25 bp, Homo sapien
ctttatgatttttcacatgtataaa

SEQ ID NO: 2634439 - DNA, 25 bp, Homo sapien
gatttttcacatgtataaagttgag

SEQ ID NO: 2634440 - DNA, 25 bp, Homo sapien
gctttcccgcagtatgtacacttgc

SEQ ID NO: 2634441 - DNA, 25 bp, Homo sapien
gtatgtacacttgcgcggttttatt

SEQ ID NO: 2634442 - DNA, 25 bp, Homo sapien
ttcccgcagtatgtacacttgcgcg

SEQ ID NO: 2634443 - DNA, 25 bp, Homo sapien
cgcagtatgtacacttgcgcggttt

SEQ ID NO: 2634444 - DNA, 25 bp, Homo sapien
acattcacagggttgtattccagtg

SEQ ID NO: 2634445 - DNA, 25 bp, Homo sapien
cagggttgtattccagtgtgagttc

SEQ ID NO: 2634446 - DNA, 25 bp, Homo sapien
cttacattcacagggttgtattcca

SEQ ID NO: 2634447 - DNA, 25 bp, Homo sapien
tcacagggttgtattccagtgtgag

SEQ ID NO: 2634448 - DNA, 25 bp, Homo sapien
ctttcatgtctacttaggcgtgagg

SEQ ID NO: 2634449 - DNA, 25 bp, Homo sapien
ggcgtgaggaaacagcaaatgcttt

SEQ ID NO: 2634450 - DNA, 25 bp, Homo sapien
catgtctacttaggcgtgaggaaac

SEQ ID NO: 2634451 - DNA, 25 bp, Homo sapien
ctacttaggcgtgaggaaacagcaa

SEQ ID NO: 2634452 - DNA, 25 bp, Homo sapien
tcctccagcatagtgttgagcactg

SEQ ID NO: 2634453 - DNA, 25 bp, Homo sapien
ttgagcactgtgaaagccctgcgat

SEQ ID NO: 2634454 - DNA, 25 bp, Homo sapien
gccctgcgatattgcagtgcccaga

SEQ ID NO: 2634455 - DNA, 25 bp, Homo sapien
caatggtatattgatagacccaggg

SEQ ID NO: 2634456 - DNA, 25 bp, Homo sapien
tgtgactgccaccagatcattgcat

SEQ ID NO: 2634457 - DNA, 25 bp, Homo sapien
ttttgagaaggaatcagctttgaca

SEQ ID NO: 2634458 - DNA, 25 bp, Homo sapien
tctttatgcttcttggttgaaagtt

SEQ ID NO: 2634459 - DNA, 25 bp, Homo sapien
tgacattcttgtttcccagggtcat

SEQ ID NO: 2634460 - DNA, 25 bp, Homo sapien
ccatggagcctgcatggactgacac

SEQ ID NO: 2634461 - DNA, 25 bp, Homo sapien
cctgatgggaccattcagctgggaa

SEQ ID NO: 2634462 - DNA, 25 bp, Homo sapien
agctcctgcactaggggtggcccaa

SEQ ID NO: 2634463 - DNA, 25 bp, Homo sapien
tggcccaagagcgttcagagtagct

SEQ ID NO: 2634464 - DNA, 25 bp, Homo sapien
catgtgggccccctcattgctcgat

SEQ ID NO: 2634465 - DNA, 25 bp, Homo sapien
cccctcattgctcgatgggtggctt

SEQ ID NO: 2634466 - DNA, 25 bp, Homo sapien
tgggccccctcattgctcgatgggt

SEQ ID NO: 2634467 - DNA, 25 bp, Homo sapien
tcattgctcgatgggtggcttcccc

SEQ ID NO: 2634468 - DNA, 25 bp, Homo sapien
agaatgtcagctcccgcagttttcg

SEQ ID NO: 2634469 - DNA, 25 bp, Homo sapien
tgtgtggcctacgatgaacatctgt

SEQ ID NO: 2634470 - DNA, 25 bp, Homo sapien
tcgtatggccttgagtctccagagc

SEQ ID NO: 2634471 - DNA, 25 bp, Homo sapien
caactgctcctgttactgtgtggcc

SEQ ID NO: 2634472 - DNA, 25 bp, Homo sapien
agacttggcttttcgtcctgactca

SEQ ID NO: 2634473 - DNA, 25 bp, Homo sapien
agagacttggcttttcgtcctgact

SEQ ID NO: 2634474 - DNA, 25 bp, Homo sapien
cagggtatgggaggtagcataatgt

SEQ ID NO: 2634475 - DNA, 25 bp, Homo sapien
gaggtagcataatgtggtggctaag

SEQ ID NO: 2634476 - DNA, 25 bp, Homo sapien
gcagctgctcgatggtaacgcagga

SEQ ID NO: 2634477 - DNA, 25 bp, Homo sapien
tggtgaagacgttttgttcaaaagc

SEQ ID NO: 2634478 - DNA, 25 bp, Homo sapien
taggctagtttgcagcagtgcaagc

SEQ ID NO: 2634479 - DNA, 25 bp, Homo sapien
caaaagcctcattttgcaatacagg

SEQ ID NO: 2634480 - DNA, 25 bp, Homo sapien
caagagtgcagattaccaggaagtg

SEQ ID NO: 2634481 - DNA, 25 bp, Homo sapien
tctgcagccattccatcccctcttt

SEQ ID NO: 2634482 - DNA, 25 bp, Homo sapien
cctccaagagtgcagattaccagga

SEQ ID NO: 2634483 - DNA, 25 bp, Homo sapien
agagtgcagattaccaggaagtgag

SEQ ID NO: 2634484 - DNA, 25 bp, Homo sapien
cataagattaattgcataaagtgaa

SEQ ID NO: 2634485 - DNA, 25 bp, Homo sapien
tcgtgcgccatactttcataaatgt

SEQ ID NO: 2634486 - DNA, 25 bp, Homo sapien
tcacataagattaattgcataaagt

SEQ ID NO: 2634487 - DNA, 25 bp, Homo sapien
aagggtgaaggctcgtgcgccatac

SEQ ID NO: 2634488 - DNA, 25 bp, Homo sapien
tgccatgctggagatgctgttgtgt

SEQ ID NO: 2634489 - DNA, 25 bp, Homo sapien
tgaagctgccagaaatctgccgccc

SEQ ID NO: 2634490 - DNA, 25 bp, Homo sapien
tcttcaggatcagtgctgaagctgc

SEQ ID NO: 2634491 - DNA, 25 bp, Homo sapien
tgttggcttatggaatcacccctac

SEQ ID NO: 2634492 - DNA, 25 bp, Homo sapien
gaaacttcgaggatcccctctcatc

SEQ ID NO: 2634493 - DNA, 25 bp, Homo sapien
gtggaaacttcgaggatcccctctc

SEQ ID NO: 2634494 - DNA, 25 bp, Homo sapien
ggaaacttcgaggatcccctctcat

SEQ ID NO: 2634495 - DNA, 25 bp, Homo sapien
tggaaacttcgaggatcccctctca

SEQ ID NO: 2634496 - DNA, 25 bp, Homo sapien
ctgaagtcacctgtgttaatggcac

SEQ ID NO: 2634497 - DNA, 25 bp, Homo sapien
gggcatagatagaaccagtgtcggg

SEQ ID NO: 2634498 - DNA, 25 bp, Homo sapien
cgggggcatagatagaaccagtgtc

SEQ ID NO: 2634499 - DNA, 25 bp, Homo sapien
aagtcacctgtgttaatggcacttt

SEQ ID NO: 2634500 - DNA, 25 bp, Homo sapien
ttaagaagccctgtggagaagctgt

SEQ ID NO: 2634501 - DNA, 25 bp, Homo sapien
ctgtggagatggaacatagaaaact

SEQ ID NO: 2634502 - DNA, 25 bp, Homo sapien
tggagatggaacatagaaaactgga

SEQ ID NO: 2634503 - DNA, 25 bp, Homo sapien
agaagccctgtggagaagctgtgga

SEQ ID NO: 2634504 - DNA, 25 bp, Homo sapien
cagaggctccattggagtaaaaatc

SEQ ID NO: 2634505 - DNA, 25 bp, Homo sapien
cttcctcagaggctccattggagta

SEQ ID NO: 2634506 - DNA, 25 bp, Homo sapien
gagtaaaaatctggatatagtgcca

SEQ ID NO: 2634507 - DNA, 25 bp, Homo sapien
gtgccaagttctctgagaggtgccc

SEQ ID NO: 2634508 - DNA, 25 bp, Homo sapien
gatgtgggttcatatttgcagctag

SEQ ID NO: 2634509 - DNA, 25 bp, Homo sapien
gctgatggagtccgagattcagaac

SEQ ID NO: 2634510 - DNA, 25 bp, Homo sapien
tgtgggttcatatttgcagctagag

SEQ ID NO: 2634511 - DNA, 25 bp, Homo sapien
atgtgggttcatatttgcagctaga

SEQ ID NO: 2634512 - DNA, 25 bp, Homo sapien
ttgcttctcatgtcagggtggcaca

SEQ ID NO: 2634513 - DNA, 25 bp, Homo sapien
attgcttctcatgtcagggtggcac

SEQ ID NO: 2634514 - DNA, 25 bp, Homo sapien
tgcttctcatgtcagggtggcacat

SEQ ID NO: 2634515 - DNA, 25 bp, Homo sapien
gatgccaacctacgtcttctggtcc

SEQ ID NO: 2634516 - DNA, 25 bp, Homo sapien
tggtcctgagttcagagctactttt

SEQ ID NO: 2634517 - DNA, 25 bp, Homo sapien
agttcagagctacttttgctactca

SEQ ID NO: 2634518 - DNA, 25 bp, Homo sapien
cctacgtcttctggtcctgagttca

SEQ ID NO: 2634519 - DNA, 25 bp, Homo sapien
ctcaaagcccctagaatcctggacg

SEQ ID NO: 2634520 - DNA, 25 bp, Homo sapien
ccctagaatcctggacgaatgctga

SEQ ID NO: 2634521 - DNA, 25 bp, Homo sapien
ctgaggactctttccaaatatgtaa

SEQ ID NO: 2634522 - DNA, 25 bp, Homo sapien
gactctttccaaatatgtaaggcca

SEQ ID NO: 2634523 - DNA, 25 bp, Homo sapien
caagtggctatagcaactaagtctc

SEQ ID NO: 2634524 - DNA, 25 bp, Homo sapien
aagcccactttgtcagggatccaag

SEQ ID NO: 2634525 - DNA, 25 bp, Homo sapien
cctccattggaaataaggctttgac

SEQ ID NO: 2634526 - DNA, 25 bp, Homo sapien
tgcaagttgctcaatgatgtccgta

SEQ ID NO: 2634527 - DNA, 25 bp, Homo sapien
attgtccgcaattacttgtcctgaa

SEQ ID NO: 2634528 - DNA, 25 bp, Homo sapien
agcccagatgaaatgtgttgatcct

SEQ ID NO: 2634529 - DNA, 25 bp, Homo sapien
acacatgagtcatataagccccaac

SEQ ID NO: 2634530 - DNA, 25 bp, Homo sapien
tcatataagccccaactattaggaa

SEQ ID NO: 2634531 - DNA, 25 bp, Homo sapien
tgagtcatataagccccaactatta

SEQ ID NO: 2634532 - DNA, 25 bp, Homo sapien
catataagccccaactattaggaaa

SEQ ID NO: 2634533 - DNA, 25 bp, Homo sapien
tgtccgccatactggatggaggcca

SEQ ID NO: 2634534 - DNA, 25 bp, Homo sapien
taaatggcctggaatgaggtgacac

SEQ ID NO: 2634535 - DNA, 25 bp, Homo sapien
gcacccactgtggatcaatcagaac

SEQ ID NO: 2634536 - DNA, 25 bp, Homo sapien
tccacaaacgtgatgtccgccatac

SEQ ID NO: 2634537 - DNA, 25 bp, Homo sapien
tagagatagcagaagatctcccagt

SEQ ID NO: 2634538 - DNA, 25 bp, Homo sapien
gcctggagagcaaaccattacagct

SEQ ID NO: 2634539 - DNA, 25 bp, Homo sapien
aaattggaaatcagtggcttgctat

SEQ ID NO: 2634540 - DNA, 25 bp, Homo sapien
gatcaaacagttccatttaaatggg

SEQ ID NO: 2634541 - DNA, 25 bp, Homo sapien
gtctctctgatctcgagggggcaaa

SEQ ID NO: 2634542 - DNA, 25 bp, Homo sapien
aatgaacattcgctgacagttcccc

SEQ ID NO: 2634543 - DNA, 25 bp, Homo sapien
tatgagcatatttgaagatgtgcat

SEQ ID NO: 2634544 - DNA, 25 bp, Homo sapien
atttgaatgtgtattatgagcatat

SEQ ID NO: 2634545 - DNA, 25 bp, Homo sapien
aaaaaagcaaagacaatgaaagcag

SEQ ID NO: 2634546 - DNA, 25 bp, Homo sapien
gacaatgaaagcagcagaatgattt

SEQ ID NO: 2634547 - DNA, 25 bp, Homo sapien
aagacaatgaaagcagcagaatgat

SEQ ID NO: 2634548 - DNA, 25 bp, Homo sapien
caatgaaagcagcagaatgatttcc

SEQ ID NO: 2634549 - DNA, 25 bp, Homo sapien
gatgtaactcttgagaatggtataa

SEQ ID NO: 2634550 - DNA, 25 bp, Homo sapien
catttgattgaggatctgatgtaac

SEQ ID NO: 2634551 - DNA, 25 bp, Homo sapien
agtgtgcgcctaaaaccacagtggg

SEQ ID NO: 2634552 - DNA, 25 bp, Homo sapien
ctccagtgtttgtttggaggcctca

SEQ ID NO: 2634553 - DNA, 25 bp, Homo sapien
tgacatgtttattgagttttgcggc

SEQ ID NO: 2634554 - DNA, 25 bp, Homo sapien
gacatgtttattgagttttgcggct

SEQ ID NO: 2634555 - DNA, 25 bp, Homo sapien
ttgacatgtttattgagttttgcgg

SEQ ID NO: 2634556 - DNA, 25 bp, Homo sapien
taacagtgacttctcgcagggtgtc

SEQ ID NO: 2634557 - DNA, 25 bp, Homo sapien
gcaaagttttcgacttaggacagta

SEQ ID NO: 2634558 - DNA, 25 bp, Homo sapien
tcttaatgaatctggatcggtggct

SEQ ID NO: 2634559 - DNA, 25 bp, Homo sapien
tccccagccagtaaccttgcatttg

SEQ ID NO: 2634560 - DNA, 25 bp, Homo sapien
gttaacagggtgtagattccaggct

SEQ ID NO: 2634561 - DNA, 25 bp, Homo sapien
aacaccacattcatgacctccagag

SEQ ID NO: 2634562 - DNA, 25 bp, Homo sapien
gcgggacaaggttgcttttgatcca

SEQ ID NO: 2634563 - DNA, 25 bp, Homo sapien
cctccagagactatagcgtggaaga

SEQ ID NO: 2634564 - DNA, 25 bp, Homo sapien
tgtgctctgctttacttacacccaa

SEQ ID NO: 2634565 - DNA, 25 bp, Homo sapien
gacttacaagtgcaaaaatggaccc

SEQ ID NO: 2634566 - DNA, 25 bp, Homo sapien
gaagcaagtgcatccaataaaatta

SEQ ID NO: 2634567 - DNA, 25 bp, Homo sapien
taacctgcgagcatattaggaaaaa

SEQ ID NO: 2634568 - DNA, 25 bp, Homo sapien
tagagagctgctattcaactggcat

SEQ ID NO: 2634569 - DNA, 25 bp, Homo sapien
tgatccagcagaagttacacctagt

SEQ ID NO: 2634570 - DNA, 25 bp, Homo sapien
gcaagggcctatctcatgttcaatg

SEQ ID NO: 2634571 - DNA, 25 bp, Homo sapien
cagtgaccttattgccctttggcga

SEQ ID NO: 2634572 - DNA, 25 bp, Homo sapien
ggaacaaagaaatccataacattgt

SEQ ID NO: 2634573 - DNA, 25 bp, Homo sapien
tcaattagtttaaacaccattgcac

SEQ ID NO: 2634574 - DNA, 25 bp, Homo sapien
caaagaaatccataacattgtgatc

SEQ ID NO: 2634575 - DNA, 25 bp, Homo sapien
agaaatccataacattgtgatcaat

SEQ ID NO: 2634576 - DNA, 25 bp, Homo sapien
aatgtgtcctgtactcatgtctcac

SEQ ID NO: 2634577 - DNA, 25 bp, Homo sapien
aagtagtagctaccaccctatactg

SEQ ID NO: 2634578 - DNA, 25 bp, Homo sapien
tgagtgggaaccaaatgcaatcttg

SEQ ID NO: 2634579 - DNA, 25 bp, Homo sapien
tgcaatcttgagaaattcacctgat

SEQ ID NO: 2634580 - DNA, 25 bp, Homo sapien
taggtcagactgagagacttggcca

SEQ ID NO: 2634581 - DNA, 25 bp, Homo sapien
actgactgctatgctttcaagggca

SEQ ID NO: 2634582 - DNA, 25 bp, Homo sapien
gctgtgttcataaccagtaggtcag

SEQ ID NO: 2634583 - DNA, 25 bp, Homo sapien
cctgaaactggctatggtgggaata

SEQ ID NO: 2634584 - DNA, 25 bp, Homo sapien
caacaaaagtaaatttcactcgcat

SEQ ID NO: 2634585 - DNA, 25 bp, Homo sapien
aagtaaatttcactcgcatccatgt

SEQ ID NO: 2634586 - DNA, 25 bp, Homo sapien
aaaagtaaatttcactcgcatccat

SEQ ID NO: 2634587 - DNA, 25 bp, Homo sapien
ttcaacaaaagtaaatttcactcgc

SEQ ID NO: 2634588 - DNA, 25 bp, Homo sapien
tttccgacttctcacccactcatgc

SEQ ID NO: 2634589 - DNA, 25 bp, Homo sapien
ccactcatgcttcctcacagcctgc

SEQ ID NO: 2634590 - DNA, 25 bp, Homo sapien
gagagcctttctatagaacaggact

SEQ ID NO: 2634591 - DNA, 25 bp, Homo sapien
ggccacagatgagagcctttctata

SEQ ID NO: 2634592 - DNA, 25 bp, Homo sapien
cacagatcatgcagttttcaacaac

SEQ ID NO: 2634593 - DNA, 25 bp, Homo sapien
ccagcttgaaattatagtgctctgc

SEQ ID NO: 2634594 - DNA, 25 bp, Homo sapien
gccacatgacactcggtgtgaagtt

SEQ ID NO: 2634595 - DNA, 25 bp, Homo sapien
tcgccttttctaccactagcacaga

SEQ ID NO: 2634596 - DNA, 25 bp, Homo sapien
tctggtctactggttgcgaaggcca

SEQ ID NO: 2634597 - DNA, 25 bp, Homo sapien
tcaccctgccaagctgtagcattga

SEQ ID NO: 2634598 - DNA, 25 bp, Homo sapien
cctccaggtacagactgtcatggct

SEQ ID NO: 2634599 - DNA, 25 bp, Homo sapien
gtagcattgaagattgatctcagac

SEQ ID NO: 2634600 - DNA, 25 bp, Homo sapien
tgtggctgctgtcccacatcaatca

SEQ ID NO: 2634601 - DNA, 25 bp, Homo sapien
tggctgctgtcccacatcaatcaac

SEQ ID NO: 2634602 - DNA, 25 bp, Homo sapien
tgctgtcccacatcaatcaacctga

SEQ ID NO: 2634603 - DNA, 25 bp, Homo sapien
ggctgctgtcccacatcaatcaacc

SEQ ID NO: 2634604 - DNA, 25 bp, Homo sapien
gacaactgagagagaggatgccaga

SEQ ID NO: 2634605 - DNA, 25 bp, Homo sapien
tgccagaaatctataggagttcctc

SEQ ID NO: 2634606 - DNA, 25 bp, Homo sapien
gccagaaatctataggagttcctca

SEQ ID NO: 2634607 - DNA, 25 bp, Homo sapien
ggagagaaacgacaactgagagaga

SEQ ID NO: 2634608 - DNA, 25 bp, Homo sapien
agagtagtcctcacttcctagcagg

SEQ ID NO: 2634609 - DNA, 25 bp, Homo sapien
taatgagggaactggcctcacgcct

SEQ ID NO: 2634610 - DNA, 25 bp, Homo sapien
aaaatactatagcacacccaaaggg

SEQ ID NO: 2634611 - DNA, 25 bp, Homo sapien
ttcttcaagggaaatctagagctcc

SEQ ID NO: 2634612 - DNA, 25 bp, Homo sapien
ttgaatgaggagttacttcatttcc

SEQ ID NO: 2634613 - DNA, 25 bp, Homo sapien
ccagcacagatggtttttctgtcaa

SEQ ID NO: 2634614 - DNA, 25 bp, Homo sapien
cagcacagatggtttttctgtcaag

SEQ ID NO: 2634615 - DNA, 25 bp, Homo sapien
ccatgtagggtcttgaatgaggagt

SEQ ID NO: 2634616 - DNA, 25 bp, Homo sapien
ggtcatagcatggatagggaaactc

SEQ ID NO: 2634617 - DNA, 25 bp, Homo sapien
tccctggttattgagtgagccccaa

SEQ ID NO: 2634618 - DNA, 25 bp, Homo sapien
tatctgttttgttggctcttccctg

SEQ ID NO: 2634619 - DNA, 25 bp, Homo sapien
taaggtcaccttcgcgtgtggctgg

SEQ ID NO: 2634620 - DNA, 25 bp, Homo sapien
tcagagtatcggaccaagatgcact

SEQ ID NO: 2634621 - DNA, 25 bp, Homo sapien
tatagtgatttcgatcattgcagac

SEQ ID NO: 2634622 - DNA, 25 bp, Homo sapien
aagatgcactattgtgagtcctgcc

SEQ ID NO: 2634623 - DNA, 25 bp, Homo sapien
tgcaacttggcacatggttcctggt

SEQ ID NO: 2634624 - DNA, 25 bp, Homo sapien
ctgctcccttgatagtcataattat

SEQ ID NO: 2634625 - DNA, 25 bp, Homo sapien
tcggaaaacaccctcgcacaacaaa

SEQ ID NO: 2634626 - DNA, 25 bp, Homo sapien
gagggtctccgcatttattttcaag

SEQ ID NO: 2634627 - DNA, 25 bp, Homo sapien
tagtcataattatccagttgaggtg

SEQ ID NO: 2634628 - DNA, 25 bp, Homo sapien
aagccacagtaaatgaaaggaaacg

SEQ ID NO: 2634629 - DNA, 25 bp, Homo sapien
agccacagtaaatgaaaggaaacgg

SEQ ID NO: 2634630 - DNA, 25 bp, Homo sapien
gataggctccttgagatggggattt

SEQ ID NO: 2634631 - DNA, 25 bp, Homo sapien
ggctccttgagatggggatttatca

SEQ ID NO: 2634632 - DNA, 25 bp, Homo sapien
ttctgataggctccttgagatgggg

SEQ ID NO: 2634633 - DNA, 25 bp, Homo sapien
ttttttttctgataggctccttgag

SEQ ID NO: 2634634 - DNA, 25 bp, Homo sapien
gaaactaggtgtggctcttgaagta

SEQ ID NO: 2634635 - DNA, 25 bp, Homo sapien
tatcctaggtccaagagtgtctcca

SEQ ID NO: 2634636 - DNA, 25 bp, Homo sapien
tccgttaaacgaagtctacatgtac

SEQ ID NO: 2634637 - DNA, 25 bp, Homo sapien
ctaaagttgggcttgtagaatctcc

SEQ ID NO: 2634638 - DNA, 25 bp, Homo sapien
tgaagacaccgcctgagaaagagac

SEQ ID NO: 2634639 - DNA, 25 bp, Homo sapien
gaagcttccggatcagtgctgaaga

SEQ ID NO: 2634640 - DNA, 25 bp, Homo sapien
cagccccgttttgcaacgtgaataa

SEQ ID NO: 2634641 - DNA, 25 bp, Homo sapien
ccttgactctaggtgaggtgcccca

SEQ ID NO: 2634642 - DNA, 25 bp, Homo sapien
catatatgaaggcttttgacgcaca

SEQ ID NO: 2634643 - DNA, 25 bp, Homo sapien
tgctgggtcagtagaagttatgcac

SEQ ID NO: 2634644 - DNA, 25 bp, Homo sapien
gcctcacaaagagctacgatttcaa

SEQ ID NO: 2634645 - DNA, 25 bp, Homo sapien
ttgacgcacattgtccaaaagtcct

SEQ ID NO: 2634646 - DNA, 25 bp, Homo sapien
tgggactggacgtggttctccagat

SEQ ID NO: 2634647 - DNA, 25 bp, Homo sapien
tcttgaagaacagttctgggactgg

SEQ ID NO: 2634648 - DNA, 25 bp, Homo sapien
tcctccaaatgaactcagggttcga

SEQ ID NO: 2634649 - DNA, 25 bp, Homo sapien
gttcgaatcctgacttgtccatctc

SEQ ID NO: 2634650 - DNA, 25 bp, Homo sapien
tactgaagttatctggaaggggcca

SEQ ID NO: 2634651 - DNA, 25 bp, Homo sapien
cgaagagtcttagtgaaggtagcct

SEQ ID NO: 2634652 - DNA, 25 bp, Homo sapien
aagatgctctgtagaccctgcgggc

SEQ ID NO: 2634653 - DNA, 25 bp, Homo sapien
aatcactgtataagcgcccagaaag

SEQ ID NO: 2634654 - DNA, 25 bp, Homo sapien
agctgaaacttgaaaccggcttagt

SEQ ID NO: 2634655 - DNA, 25 bp, Homo sapien
ggagctgaaacttgaaaccggctta

SEQ ID NO: 2634656 - DNA, 25 bp, Homo sapien
gagctgaaacttgaaaccggcttag

SEQ ID NO: 2634657 - DNA, 25 bp, Homo sapien
ctggaattcaaggaggagctgaaac

SEQ ID NO: 2634658 - DNA, 25 bp, Homo sapien
cattttagcgggtaagctgcaagag

SEQ ID NO: 2634659 - DNA, 25 bp, Homo sapien
ctttgctctgggcccggaacatttt

SEQ ID NO: 2634660 - DNA, 25 bp, Homo sapien
ctctgggcccggaacattttagcgg

SEQ ID NO: 2634661 - DNA, 25 bp, Homo sapien
ccggaacattttagcgggtaagctg

SEQ ID NO: 2634662 - DNA, 25 bp, Homo sapien
gtgcatagaactatagacagcaaaa

SEQ ID NO: 2634663 - DNA, 25 bp, Homo sapien
tgtagaagaaatagcgttactgtgc

SEQ ID NO: 2634664 - DNA, 25 bp, Homo sapien
tgaggaattttagttgtagaagaaa

SEQ ID NO: 2634665 - DNA, 25 bp, Homo sapien
tagcgttactgtgcatagaactata

SEQ ID NO: 2634666 - DNA, 25 bp, Homo sapien
atccttcacttcaaaggcataaaag

SEQ ID NO: 2634667 - DNA, 25 bp, Homo sapien
ccttttgcatccttcacttcaaagg

SEQ ID NO: 2634668 - DNA, 25 bp, Homo sapien
cagttcttccttttgcatccttcac

SEQ ID NO: 2634669 - DNA, 25 bp, Homo sapien
ttgcctttatacttttccagagaaa

SEQ ID NO: 2634670 - DNA, 25 bp, Homo sapien
caactttacatgtcaattcagcaca

SEQ ID NO: 2634671 - DNA, 25 bp, Homo sapien
tactaataccattactctgaagact

SEQ ID NO: 2634672 - DNA, 25 bp, Homo sapien
tccaacttatgaccatgtaacagca

SEQ ID NO: 2634673 - DNA, 25 bp, Homo sapien
actatcagaactgtaataactaaag

SEQ ID NO: 2634674 - DNA, 25 bp, Homo sapien
caaccggaaagtgaagcaaaagatt

SEQ ID NO: 2634675 - DNA, 25 bp, Homo sapien
agattttaaaaaattctgcaagtag

SEQ ID NO: 2634676 - DNA, 25 bp, Homo sapien
gcaaaagattttaaaaaattctgca

SEQ ID NO: 2634677 - DNA, 25 bp, Homo sapien
atccaaccggaaagtgaagcaaaag

SEQ ID NO: 2634678 - DNA, 25 bp, Homo sapien
ttctgtctgtgagttggcagtcact

SEQ ID NO: 2634679 - DNA, 25 bp, Homo sapien
actggccacgtttacaactagtgaa

SEQ ID NO: 2634680 - DNA, 25 bp, Homo sapien
gcagtcactggccacgtttacaact

SEQ ID NO: 2634681 - DNA, 25 bp, Homo sapien
tggccacgtttacaactagtgaaac

SEQ ID NO: 2634682 - DNA, 25 bp, Homo sapien
cagatcctagaatcttaatcttgtg

SEQ ID NO: 2634683 - DNA, 25 bp, Homo sapien
tggtccaaactctttgtgcagttcc

SEQ ID NO: 2634684 - DNA, 25 bp, Homo sapien
tgcaaaagattctacttccttgctt

SEQ ID NO: 2634685 - DNA, 25 bp, Homo sapien
caacacgctgaagtgggatggtcca

SEQ ID NO: 2634686 - DNA, 25 bp, Homo sapien
gaggccaaagcctatgctgtctgta

SEQ ID NO: 2634687 - DNA, 25 bp, Homo sapien
tagcctaacactactgccctctgaa

SEQ ID NO: 2634688 - DNA, 25 bp, Homo sapien
gaacccaggtagcttgaggccaaag

SEQ ID NO: 2634689 - DNA, 25 bp, Homo sapien
aagaaggcggtactattgatagccc

SEQ ID NO: 2634690 - DNA, 25 bp, Homo sapien
agagctgctatgtcaggcctgatga

SEQ ID NO: 2634691 - DNA, 25 bp, Homo sapien
cagaacttcacaacttgaccctcag

SEQ ID NO: 2634692 - DNA, 25 bp, Homo sapien
tatgatcacttgtctaaccagagct

SEQ ID NO: 2634693 - DNA, 25 bp, Homo sapien
gaccctcagggttgacaagatactt

SEQ ID NO: 2634694 - DNA, 25 bp, Homo sapien
tctgttctattagaaacgcaatggc

SEQ ID NO: 2634695 - DNA, 25 bp, Homo sapien
tctctgttctattagaaacgcaatg

SEQ ID NO: 2634696 - DNA, 25 bp, Homo sapien
ttctattagaaacgcaatggcattc

SEQ ID NO: 2634697 - DNA, 25 bp, Homo sapien
tgttctattagaaacgcaatggcat

SEQ ID NO: 2634698 - DNA, 25 bp, Homo sapien
gtgagacactgtctccaaaaaaaaa

SEQ ID NO: 2634699 - DNA, 25 bp, Homo sapien
agtgagacactgtctccaaaaaaaa

SEQ ID NO: 2634700 - DNA, 25 bp, Homo sapien
gcactccagcctgggtgacagagtg

SEQ ID NO: 2634701 - DNA, 25 bp, Homo sapien
tgcaatgagctgagaacgcactact

SEQ ID NO: 2634702 - DNA, 25 bp, Homo sapien
gatattgaggcacattggtcactgt

SEQ ID NO: 2634703 - DNA, 25 bp, Homo sapien
gcattttcatcaagtacagtcctag

SEQ ID NO: 2634704 - DNA, 25 bp, Homo sapien
gaaatttcagtcatacacagtgctc

SEQ ID NO: 2634705 - DNA, 25 bp, Homo sapien
tcttgaatccaaagagtggtctagt

SEQ ID NO: 2634706 - DNA, 25 bp, Homo sapien
gaatgcataaaacacccctgcagtg

SEQ ID NO: 2634707 - DNA, 25 bp, Homo sapien
tagcctaattgttacagaaccccga

SEQ ID NO: 2634708 - DNA, 25 bp, Homo sapien
tgttacagtccttagcccaggcatc

SEQ ID NO: 2634709 - DNA, 25 bp, Homo sapien
ggtagcagcacatcagcaaatgact

SEQ ID NO: 2634710 - DNA, 25 bp, Homo sapien
aaattgaccatgagggagcatgagc

SEQ ID NO: 2634711 - DNA, 25 bp, Homo sapien
cagagtctgctattaaacatgtacc

SEQ ID NO: 2634712 - DNA, 25 bp, Homo sapien
tcctagttactaaaccagtggtaga

SEQ ID NO: 2634713 - DNA, 25 bp, Homo sapien
gagcatttacattgagctggcaaat

SEQ ID NO: 2634714 - DNA, 25 bp, Homo sapien
tagaagtgaggaacatgccgtaatt

SEQ ID NO: 2634715 - DNA, 25 bp, Homo sapien
tgtagggaaaccaactttatattca

SEQ ID NO: 2634716 - DNA, 25 bp, Homo sapien
cataaatataataggcgatgctggg

SEQ ID NO: 2634717 - DNA, 25 bp, Homo sapien
tatcgagatgatgagaaaagaggga

SEQ ID NO: 2634718 - DNA, 25 bp, Homo sapien
ggcttccagacatgcagtattcttg

SEQ ID NO: 2634719 - DNA, 25 bp, Homo sapien
tgacccacgaagtagcatagatatg

SEQ ID NO: 2634720 - DNA, 25 bp, Homo sapien
tatttcgcattctctactgtactgg

SEQ ID NO: 2634721 - DNA, 25 bp, Homo sapien
tattcttgtgcggacatttgcagcc

SEQ ID NO: 2634722 - DNA, 25 bp, Homo sapien
taaaatcacaggttcatgaaatatt

SEQ ID NO: 2634723 - DNA, 25 bp, Homo sapien
tggaagatctacctcaatcctttca

SEQ ID NO: 2634724 - DNA, 25 bp, Homo sapien
ggaagaactgaccatacaatatgac

SEQ ID NO: 2634725 - DNA, 25 bp, Homo sapien
tgaagtgggaagaactgaccataca

SEQ ID NO: 2634726 - DNA, 25 bp, Homo sapien
tccctaactctctaatgcggggccg

SEQ ID NO: 2634727 - DNA, 25 bp, Homo sapien
tctccctaactctctaatgcggggc

SEQ ID NO: 2634728 - DNA, 25 bp, Homo sapien
taactctctaatgcggggccgaagg

SEQ ID NO: 2634729 - DNA, 25 bp, Homo sapien
cctaactctctaatgcggggccgaa

SEQ ID NO: 2634730 - DNA, 25 bp, Homo sapien
gtccgcacggaagaggagatgctgt

SEQ ID NO: 2634731 - DNA, 25 bp, Homo sapien
atgctgtgggtgagtaacacccttt

SEQ ID NO: 2634732 - DNA, 25 bp, Homo sapien
gcgcctcggagggtccgcacggaag

SEQ ID NO: 2634733 - DNA, 25 bp, Homo sapien
tgctgtgggtgagtaacaccctttt

SEQ ID NO: 2634734 - DNA, 25 bp, Homo sapien
actccaggggtttgacgattaggcg

SEQ ID NO: 2634735 - DNA, 25 bp, Homo sapien
gaggtggtgaaatagaatggtcctg

SEQ ID NO: 2634736 - DNA, 25 bp, Homo sapien
ggaacaccttgcagcggcggtggga

SEQ ID NO: 2634737 - DNA, 25 bp, Homo sapien
cgattaggcgtcaagactgacttag

SEQ ID NO: 2634738 - DNA, 25 bp, Homo sapien
cagggccgttataaggaaacattct

SEQ ID NO: 2634739 - DNA, 25 bp, Homo sapien
gaacagggatcagggccgttataag

SEQ ID NO: 2634740 - DNA, 25 bp, Homo sapien
ggatcagggccgttataaggaaaca

SEQ ID NO: 2634741 - DNA, 25 bp, Homo sapien
cagaggaacagggatcagggccgtt

SEQ ID NO: 2634742 - DNA, 25 bp, Homo sapien
agctgacacagcgattaccaacgga

SEQ ID NO: 2634743 - DNA, 25 bp, Homo sapien
aaaacgaagagctgacgaacacgcc

SEQ ID NO: 2634744 - DNA, 25 bp, Homo sapien
gactactcccaatgtatagagcagg

SEQ ID NO: 2634745 - DNA, 25 bp, Homo sapien
gctctcccttttgatcggcatagaa

SEQ ID NO: 2634746 - DNA, 25 bp, Homo sapien
cccgcacaggctggagctgtatcag

SEQ ID NO: 2634747 - DNA, 25 bp, Homo sapien
ctgccccgcacaggctggagctgta

SEQ ID NO: 2634748 - DNA, 25 bp, Homo sapien
ccccgcacaggctggagctgtatca

SEQ ID NO: 2634749 - DNA, 25 bp, Homo sapien
gccccgcacaggctggagctgtatc

SEQ ID NO: 2634750 - DNA, 25 bp, Homo sapien
gctatactgagcgacgttacaccgg

SEQ ID NO: 2634751 - DNA, 25 bp, Homo sapien
tgagtgcggttatcctaagctctcc

SEQ ID NO: 2634752 - DNA, 25 bp, Homo sapien
ggcttttacactgctggaacctttg

SEQ ID NO: 2634753 - DNA, 25 bp, Homo sapien
caagagggcttcattcgtccatcca

SEQ ID NO: 2634754 - DNA, 25 bp, Homo sapien
acagatgtttagtgcacatcctgca

SEQ ID NO: 2634755 - DNA, 25 bp, Homo sapien
acatcgtggcctcaagtggacctct

SEQ ID NO: 2634756 - DNA, 25 bp, Homo sapien
ttctcatatatacccctgcacacag

SEQ ID NO: 2634757 - DNA, 25 bp, Homo sapien
tgcctggctaaatcttttgaaaact

SEQ ID NO: 2634758 - DNA, 25 bp, Homo sapien
tctgacgtcctagctgcgagcctgg

SEQ ID NO: 2634759 - DNA, 25 bp, Homo sapien
gttcaacgtttgtgtgcccggccag

SEQ ID NO: 2634760 - DNA, 25 bp, Homo sapien
cagttcgctcctccgcggaagttct

SEQ ID NO: 2634761 - DNA, 25 bp, Homo sapien
agttcttccccggatgcacaggcgg

SEQ ID NO: 2634762 - DNA, 25 bp, Homo sapien
ccagggcatccctgccggtattcta

SEQ ID NO: 2634763 - DNA, 25 bp, Homo sapien
gccggtattctacatccttactaaa

SEQ ID NO: 2634764 - DNA, 25 bp, Homo sapien
cacgtttatttcgtgcgccttgtgg

SEQ ID NO: 2634765 - DNA, 25 bp, Homo sapien
gcaaaggccggagtctagcgctggc

SEQ ID NO: 2634766 - DNA, 25 bp, Homo sapien
ccgtggacttgcgactgggagacca

SEQ ID NO: 2634767 - DNA, 25 bp, Homo sapien
tgctggtggccataaacagtacttc

SEQ ID NO: 2634768 - DNA, 25 bp, Homo sapien
cccgttcagatctgcgagaagtgca

SEQ ID NO: 2634769 - DNA, 25 bp, Homo sapien
cagaagagtgcagtactggtccaca

SEQ ID NO: 2634770 - DNA, 25 bp, Homo sapien
ctgggagaatgttttaaccggcgca

SEQ ID NO: 2634771 - DNA, 25 bp, Homo sapien
ggagaatgttttaaccggcgcagcg

SEQ ID NO: 2634772 - DNA, 25 bp, Homo sapien
gtgcccgcacgtgtcgagaccatct

SEQ ID NO: 2634773 - DNA, 25 bp, Homo sapien
gcccgcacgtgtcgagaccatctgg

SEQ ID NO: 2634774 - DNA, 25 bp, Homo sapien
ccacctcagcctcccaaaatgctgg

SEQ ID NO: 2634775 - DNA, 25 bp, Homo sapien
aaactcctgtcctcacgggatccgc

SEQ ID NO: 2634776 - DNA, 25 bp, Homo sapien
gattacaggcatgagccactgtccc

SEQ ID NO: 2634777 - DNA, 25 bp, Homo sapien
tgagccactgtcccaggcccagaaa

SEQ ID NO: 2634778 - DNA, 25 bp, Homo sapien
acaggtttcaccattttggccaggc

SEQ ID NO: 2634779 - DNA, 25 bp, Homo sapien
caggtttcaccattttggccaggct

SEQ ID NO: 2634780 - DNA, 25 bp, Homo sapien
ctcccgagttcaagtaattctctgc

SEQ ID NO: 2634781 - DNA, 25 bp, Homo sapien
tcccgagttcaagtaattctctgcc

SEQ ID NO: 2634782 - DNA, 25 bp, Homo sapien
aatcatggttcttggagccaggtat

SEQ ID NO: 2634783 - DNA, 25 bp, Homo sapien
tatatacgtttgacttgggaggaag

SEQ ID NO: 2634784 - DNA, 25 bp, Homo sapien
gcagaacttaccaagttgggtgtag

SEQ ID NO: 2634785 - DNA, 25 bp, Homo sapien
ggaagaagtatgttagtgctctctc

SEQ ID NO: 2634786 - DNA, 25 bp, Homo sapien
agatgccatctctacaaacaattaa

SEQ ID NO: 2634787 - DNA, 25 bp, Homo sapien
ctcggtaacatagggagatgccatc

SEQ ID NO: 2634788 - DNA, 25 bp, Homo sapien
gatgccatctctacaaacaattaaa

SEQ ID NO: 2634789 - DNA, 25 bp, Homo sapien
tagcctcggtaacatagggagatgc

SEQ ID NO: 2634790 - DNA, 25 bp, Homo sapien
gcatgcctagctagcagaaataatt

SEQ ID NO: 2634791 - DNA, 25 bp, Homo sapien
aaggaaattgacaggtttgcatgcc

SEQ ID NO: 2634792 - DNA, 25 bp, Homo sapien
caggcccctgtaaagatagctgtca

SEQ ID NO: 2634793 - DNA, 25 bp, Homo sapien
cagattgtaatataggcttgccttg

SEQ ID NO: 2634794 - DNA, 25 bp, Homo sapien
tcccctctttgggaagtgagagccc

SEQ ID NO: 2634795 - DNA, 25 bp, Homo sapien
gagttgattcctaagcatctccaca

SEQ ID NO: 2634796 - DNA, 25 bp, Homo sapien
tggtttagcccattactcaggttgc

SEQ ID NO: 2634797 - DNA, 25 bp, Homo sapien
tgttcttaggaacggaaaccagatg

SEQ ID NO: 2634798 - DNA, 25 bp, Homo sapien
tagcagccattgataacactcggac

SEQ ID NO: 2634799 - DNA, 25 bp, Homo sapien
gggccagctagattcatccattaca

SEQ ID NO: 2634800 - DNA, 25 bp, Homo sapien
tagcagccattgataacactcagac

SEQ ID NO: 2634801 - DNA, 25 bp, Homo sapien
tcccactggcttttcatgcaatgct

SEQ ID NO: 2634802 - DNA, 25 bp, Homo sapien
cactcagagtcatgggtaactataa

SEQ ID NO: 2634803 - DNA, 25 bp, Homo sapien
gttctgaaatcacatactgccggag

SEQ ID NO: 2634804 - DNA, 25 bp, Homo sapien
gaacatcactgttaaccctagaggt

SEQ ID NO: 2634805 - DNA, 25 bp, Homo sapien
tctagatggaagaaagcacgacaag

SEQ ID NO: 2634806 - DNA, 25 bp, Homo sapien
tatgccttcatattatggtaatctc

SEQ ID NO: 2634807 - DNA, 25 bp, Homo sapien
cttcatattatggtaatctcaaggg

SEQ ID NO: 2634808 - DNA, 25 bp, Homo sapien
attatggtaatctcaagggaactcg

SEQ ID NO: 2634809 - DNA, 25 bp, Homo sapien
ctttggaggaattatgccttcatat

SEQ ID NO: 2634810 - DNA, 25 bp, Homo sapien
tgtacacaagagaaaggtatggcat

SEQ ID NO: 2634811 - DNA, 25 bp, Homo sapien
tggcttctgtttccgaatgtacaca

SEQ ID NO: 2634812 - DNA, 25 bp, Homo sapien
gagacgtttgtcagtaaagccagtg

SEQ ID NO: 2634813 - DNA, 25 bp, Homo sapien
ctttaggtaccatgaaagcagtcag

SEQ ID NO: 2634814 - DNA, 25 bp, Homo sapien
agtgagctgtggtagcgccactgca

SEQ ID NO: 2634815 - DNA, 25 bp, Homo sapien
gaggtcaaggctgcagtgagctgtg

SEQ ID NO: 2634816 - DNA, 25 bp, Homo sapien
gaggtggaggattgcttgagcctgg

SEQ ID NO: 2634817 - DNA, 25 bp, Homo sapien
ctatagtcccatctgcttgcaaggc

SEQ ID NO: 2634818 - DNA, 25 bp, Homo sapien
tggaatgtgtaccatatgtgagttt

SEQ ID NO: 2634819 - DNA, 25 bp, Homo sapien
aaatggaatgtgtaccatatgtgag

SEQ ID NO: 2634820 - DNA, 25 bp, Homo sapien
tcactgctattggttgatcagtagc

SEQ ID NO: 2634821 - DNA, 25 bp, Homo sapien
gagttttcactgctattggttgatc

SEQ ID NO: 2634822 - DNA, 25 bp, Homo sapien
cttcctcccacttaccgagatgttt

SEQ ID NO: 2634823 - DNA, 25 bp, Homo sapien
cagttacttcctcccacttaccgag

SEQ ID NO: 2634824 - DNA, 25 bp, Homo sapien
tcctcccacttaccgagatgtttgg

SEQ ID NO: 2634825 - DNA, 25 bp, Homo sapien
agttcatcagttacttcctcccact

SEQ ID NO: 2634826 - DNA, 25 bp, Homo sapien
ccatgactaagctggagactagcca

SEQ ID NO: 2634827 - DNA, 25 bp, Homo sapien
ccaaatacaagagggctagctatca

SEQ ID NO: 2634828 - DNA, 25 bp, Homo sapien
gcaaggtgtttcttcggttccagga

SEQ ID NO: 2634829 - DNA, 25 bp, Homo sapien
gcttgggtttcctcacatatagtgg

SEQ ID NO: 2634830 - DNA, 25 bp, Homo sapien
acagtggcccgcaggagacaaaagt

SEQ ID NO: 2634831 - DNA, 25 bp, Homo sapien
cctaaagtggataagctgctcagtg

SEQ ID NO: 2634832 - DNA, 25 bp, Homo sapien
gacgtctcgtgaaggctcaacagtg

SEQ ID NO: 2634833 - DNA, 25 bp, Homo sapien
gacaaaagtagtcgagtcgcgcagc

SEQ ID NO: 2634834 - DNA, 25 bp, Homo sapien
aacagctcatctccgaatgcgtccg

SEQ ID NO: 2634835 - DNA, 25 bp, Homo sapien
ctgaacagctcatctccgaatgcgt

SEQ ID NO: 2634836 - DNA, 25 bp, Homo sapien
gccgcagtggtcgagtcgccctcga

SEQ ID NO: 2634837 - DNA, 25 bp, Homo sapien
agtcgccctcgaacacgctgaacag

SEQ ID NO: 2634838 - DNA, 25 bp, Homo sapien
tggcctaggaatgaggattttcaac

SEQ ID NO: 2634839 - DNA, 25 bp, Homo sapien
aataaaaaccctgtgatgttaattg

SEQ ID NO: 2634840 - DNA, 25 bp, Homo sapien
tgttaattgtactggaaatgtcagt

SEQ ID NO: 2634841 - DNA, 25 bp, Homo sapien
caacaaaaccgagaaatgatacatt

SEQ ID NO: 2634842 - DNA, 25 bp, Homo sapien
gaaataatatccctagtctataaag

SEQ ID NO: 2634843 - DNA, 25 bp, Homo sapien
tgagtgaacattatcacctgagctc

SEQ ID NO: 2634844 - DNA, 25 bp, Homo sapien
gaaaaaggccataaagtactctcac

SEQ ID NO: 2634845 - DNA, 25 bp, Homo sapien
caagttcaatacactgtgaaaaagg

SEQ ID NO: 2634846 - DNA, 25 bp, Homo sapien
tctatgccgcaatggaatatgggtt

SEQ ID NO: 2634847 - DNA, 25 bp, Homo sapien
taaaatgctagtgtagaacaaccac

SEQ ID NO: 2634848 - DNA, 25 bp, Homo sapien
tgagagctacaaagaagttaacctg

SEQ ID NO: 2634849 - DNA, 25 bp, Homo sapien
gaacaaccaccttcttagttgatgg

SEQ ID NO: 2634850 - DNA, 25 bp, Homo sapien
atgaattctgcagtatccactttta

SEQ ID NO: 2634851 - DNA, 25 bp, Homo sapien
aatgaattctgcagtatccactttt

SEQ ID NO: 2634852 - DNA, 25 bp, Homo sapien
gattctgattgtaatttaccatcaa

SEQ ID NO: 2634853 - DNA, 25 bp, Homo sapien
gtaccttcgaaatctacatctctct

SEQ ID NO: 2634854 - DNA, 25 bp, Homo sapien
aaaatgggttcatctgtaccttcga

SEQ ID NO: 2634855 - DNA, 25 bp, Homo sapien
cttaagtcttcagttattgactctt

SEQ ID NO: 2634856 - DNA, 25 bp, Homo sapien
tatatctaagtagcaacatggagac

SEQ ID NO: 2634857 - DNA, 25 bp, Homo sapien
gttctacatttacatgcctgtgtaa

SEQ ID NO: 2634858 - DNA, 25 bp, Homo sapien
catgtaaccacctgaattatgagtt

SEQ ID NO: 2634859 - DNA, 25 bp, Homo sapien
ccaaacttaggtaagtgttctacat

SEQ ID NO: 2634860 - DNA, 25 bp, Homo sapien
tcaacagtttcaactgattgtacct

SEQ ID NO: 2634861 - DNA, 25 bp, Homo sapien
caacagtttcaactgattgtacctt

SEQ ID NO: 2634862 - DNA, 25 bp, Homo sapien
ttcaacagtttcaactgattgtacc

SEQ ID NO: 2634863 - DNA, 25 bp, Homo sapien
cagcttttccaactcgtggtttaag

SEQ ID NO: 2634864 - DNA, 25 bp, Homo sapien
gcagcttttccaactcgtggtttaa

SEQ ID NO: 2634865 - DNA, 25 bp, Homo sapien
agcagcttttccaactcgtggttta

SEQ ID NO: 2634866 - DNA, 25 bp, Homo sapien
aagcatcaagaatgaacgggtattc

SEQ ID NO: 2634867 - DNA, 25 bp, Homo sapien
ttattgtcaacacactgaatggcct

SEQ ID NO: 2634868 - DNA, 25 bp, Homo sapien
tcccgctgaggtatgtgcagatact

SEQ ID NO: 2634869 - DNA, 25 bp, Homo sapien
gcatactgtttttcccgctgaggta

SEQ ID NO: 2634870 - DNA, 25 bp, Homo sapien
tcggcgcatactgtttttcccgctg

SEQ ID NO: 2634871 - DNA, 25 bp, Homo sapien
ttttcccgctgaggtatgtgcagat

SEQ ID NO: 2634872 - DNA, 25 bp, Homo sapien
cttttcccttaaggccaatgcaatg

SEQ ID NO: 2634873 - DNA, 25 bp, Homo sapien
tgggctggtaaatattacacgctgc

SEQ ID NO: 2634874 - DNA, 25 bp, Homo sapien
gttactcagagccttaattgggctg

SEQ ID NO: 2634875 - DNA, 25 bp, Homo sapien
taacaagacaagatgccgtaggatt

SEQ ID NO: 2634876 - DNA, 25 bp, Homo sapien
ttctctcataacttcggaacctctg

SEQ ID NO: 2634877 - DNA, 25 bp, Homo sapien
tcataacttcggaacctctgtaaag

SEQ ID NO: 2634878 - DNA, 25 bp, Homo sapien
gaacctctgtaaagcatacttctca

SEQ ID NO: 2634879 - DNA, 25 bp, Homo sapien
tttcatcaaatataacccaagcaac

SEQ ID NO: 2634880 - DNA, 25 bp, Homo sapien
gcatttggaatagtagccgaaagaa

SEQ ID NO: 2634881 - DNA, 25 bp, Homo sapien
cattcagcaaactgtcgggcatttg

SEQ ID NO: 2634882 - DNA, 25 bp, Homo sapien
catagtggacgttatcaggaagcaa

SEQ ID NO: 2634883 - DNA, 25 bp, Homo sapien
taatagtttcttcccatactacacc

SEQ ID NO: 2634884 - DNA, 25 bp, Homo sapien
atgtagtgttgcaatggagtgggcc

SEQ ID NO: 2634885 - DNA, 25 bp, Homo sapien
ggagtgggccgataatctgtgtaaa

SEQ ID NO: 2634886 - DNA, 25 bp, Homo sapien
tgttgcaatggagtgggccgataat

SEQ ID NO: 2634887 - DNA, 25 bp, Homo sapien
ttgcaatggagtgggccgataatct

SEQ ID NO: 2634888 - DNA, 25 bp, Homo sapien
cttgcattgcagtattaaaattatc

SEQ ID NO: 2634889 - DNA, 25 bp, Homo sapien
gcatctcgaagcacttgcattgcag

SEQ ID NO: 2634890 - DNA, 25 bp, Homo sapien
ggccaaatcacctgcatctcgaagc

SEQ ID NO: 2634891 - DNA, 25 bp, Homo sapien
aatcacctgcatctcgaagcacttg

SEQ ID NO: 2634892 - DNA, 25 bp, Homo sapien
tttggtcatttgaagtgcataggct

SEQ ID NO: 2634893 - DNA, 25 bp, Homo sapien
atttggtcatttgaagtgcataggc

SEQ ID NO: 2634894 - DNA, 25 bp, Homo sapien
aatttggtcatttgaagtgcatagg

SEQ ID NO: 2634895 - DNA, 25 bp, Homo sapien
gcattactgaatacttcttcaacca

SEQ ID NO: 2634896 - DNA, 25 bp, Homo sapien
ctgagggagttttttatcttcatcg

SEQ ID NO: 2634897 - DNA, 25 bp, Homo sapien
aattgcattactgaatacttcttca

SEQ ID NO: 2634898 - DNA, 25 bp, Homo sapien
tcatcggataagcaatcaattgcat

SEQ ID NO: 2634899 - DNA, 25 bp, Homo sapien
tcaaaagaggaagtacatgttctac

SEQ ID NO: 2634900 - DNA, 25 bp, Homo sapien
ggtgaataccaattcccctcttcaa

SEQ ID NO: 2634901 - DNA, 25 bp, Homo sapien
aaataggaagtaaaccaccatggtg

SEQ ID NO: 2634902 - DNA, 25 bp, Homo sapien
tttatcaatccttcagaaaagagaa

SEQ ID NO: 2634903 - DNA, 25 bp, Homo sapien
ttcccatcaaatttgcgggcatttg

SEQ ID NO: 2634904 - DNA, 25 bp, Homo sapien
taattcccatagcaaaggtctccgt

SEQ ID NO: 2634905 - DNA, 25 bp, Homo sapien
caaaggtctccgtggcaaataaggc

SEQ ID NO: 2634906 - DNA, 25 bp, Homo sapien
gttctagctggcatgttaattccca

SEQ ID NO: 2634907 - DNA, 25 bp, Homo sapien
caggttcaagttcttaagtaggtgg

SEQ ID NO: 2634908 - DNA, 25 bp, Homo sapien
tctcaaagactatgtaagccagtta

SEQ ID NO: 2634909 - DNA, 25 bp, Homo sapien
caaaagccaaggtttaaccttgatg

SEQ ID NO: 2634910 - DNA, 25 bp, Homo sapien
gaaactgtattagctcaggttcaag

SEQ ID NO: 2634911 - DNA, 25 bp, Homo sapien
gtttcagcgagggtacttttcagca

SEQ ID NO: 2634912 - DNA, 25 bp, Homo sapien
ttaaggactgcctttcaatgaagca

SEQ ID NO: 2634913 - DNA, 25 bp, Homo sapien
tatctgtcaagagaaacgagtctgg

SEQ ID NO: 2634914 - DNA, 25 bp, Homo sapien
gccaggctatgtgaattcaaactag

SEQ ID NO: 2634915 - DNA, 25 bp, Homo sapien
ctttcccccttggatgtccattcca

SEQ ID NO: 2634916 - DNA, 25 bp, Homo sapien
aggtgcctccttcttaacagtggag

SEQ ID NO: 2634917 - DNA, 25 bp, Homo sapien
ttaaagggagtctcactgctgctac

SEQ ID NO: 2634918 - DNA, 25 bp, Homo sapien
ggatgtccattccatcccccaggtg

SEQ ID NO: 2634919 - DNA, 25 bp, Homo sapien
aatgccttctttgcagagcccacta

SEQ ID NO: 2634920 - DNA, 25 bp, Homo sapien
ccttctttgcagagcccactattac

SEQ ID NO: 2634921 - DNA, 25 bp, Homo sapien
tgccttctttgcagagcccactatt

SEQ ID NO: 2634922 - DNA, 25 bp, Homo sapien
gccttctttgcagagcccactatta

SEQ ID NO: 2634923 - DNA, 25 bp, Homo sapien
gaaataggtctatacagcaagcaaa

SEQ ID NO: 2634924 - DNA, 25 bp, Homo sapien
tctctggaaataggtctatacagca

SEQ ID NO: 2634925 - DNA, 25 bp, Homo sapien
taggtctatacagcaagcaaaaggt

SEQ ID NO: 2634926 - DNA, 25 bp, Homo sapien
gtctatacagcaagcaaaaggtgaa

SEQ ID NO: 2634927 - DNA, 25 bp, Homo sapien
atcactgacttcaatctggtcagtg

SEQ ID NO: 2634928 - DNA, 25 bp, Homo sapien
tagatggcatccagtatctgcatgc

SEQ ID NO: 2634929 - DNA, 25 bp, Homo sapien
ctagatggcatccagtatctgcatg

SEQ ID NO: 2634930 - DNA, 25 bp, Homo sapien
cagtatctgcatgcactgggcatca

SEQ ID NO: 2634931 - DNA, 25 bp, Homo sapien
atccagtatctgcatgcactgggca

SEQ ID NO: 2634932 - DNA, 25 bp, Homo sapien
tccttcactgagcatgacgccatgt

SEQ ID NO: 2634933 - DNA, 25 bp, Homo sapien
ccaacattgtccagccggtggaggt

SEQ ID NO: 2634934 - DNA, 25 bp, Homo sapien
tacaactgatccctgctagcataga

SEQ ID NO: 2634935 - DNA, 25 bp, Homo sapien
ttaggatgcaggagcatgtatacat

SEQ ID NO: 2634936 - DNA, 25 bp, Homo sapien
cagacatctgaatgtattcaccaga

SEQ ID NO: 2634937 - DNA, 25 bp, Homo sapien
ccagacatctgaatgtattcaccag

SEQ ID NO: 2634938 - DNA, 25 bp, Homo sapien
acgaccagacatctgaatgtattca

SEQ ID NO: 2634939 - DNA, 25 bp, Homo sapien
gaccagacatctgaatgtattcacc

SEQ ID NO: 2634940 - DNA, 25 bp, Homo sapien
gttttccaattgttgggctcatctt

SEQ ID NO: 2634941 - DNA, 25 bp, Homo sapien
ttgttttccaattgttgggctcatc

SEQ ID NO: 2634942 - DNA, 25 bp, Homo sapien
attgttttccaattgttgggctcat

SEQ ID NO: 2634943 - DNA, 25 bp, Homo sapien
tgttttccaattgttgggctcatct

SEQ ID NO: 2634944 - DNA, 25 bp, Homo sapien
gcgcccgggccttcagaagtatatt

SEQ ID NO: 2634945 - DNA, 25 bp, Homo sapien
caccgcgcccgggccttcagaagta

SEQ ID NO: 2634946 - DNA, 25 bp, Homo sapien
cgcccgggccttcagaagtatattt

SEQ ID NO: 2634947 - DNA, 25 bp, Homo sapien
ccgcgcccgggccttcagaagtata

SEQ ID NO: 2634948 - DNA, 25 bp, Homo sapien
tggaaagcactatttagaggatcag

SEQ ID NO: 2634949 - DNA, 25 bp, Homo sapien
tactcaggattaatttcttctacac

SEQ ID NO: 2634950 - DNA, 25 bp, Homo sapien
tactcctggaattgctctataatgc

SEQ ID NO: 2634951 - DNA, 25 bp, Homo sapien
ccatgttgtaggtcaaatggaaagc

SEQ ID NO: 2634952 - DNA, 25 bp, Homo sapien
caggaccatgagttatatgacatat

SEQ ID NO: 2634953 - DNA, 25 bp, Homo sapien
cattattcaggaccatgagttatat

SEQ ID NO: 2634954 - DNA, 25 bp, Homo sapien
tatatgacatatatgcacaagacaa

SEQ ID NO: 2634955 - DNA, 25 bp, Homo sapien
tgcacaagacaagaattatactaaa

SEQ ID NO: 2634956 - DNA, 25 bp, Homo sapien
tcctttttacgatgactacgcacaa

SEQ ID NO: 2634957 - DNA, 25 bp, Homo sapien
gacaaggctaataggcatgtgctgc

SEQ ID NO: 2634958 - DNA, 25 bp, Homo sapien
gccagggcactcttttataatgaga

SEQ ID NO: 2634959 - DNA, 25 bp, Homo sapien
taaacattcacaggcttatgccagg

SEQ ID NO: 2634960 - DNA, 25 bp, Homo sapien
tacaatagataagcctgggagtgac

SEQ ID NO: 2634961 - DNA, 25 bp, Homo sapien
cagattgctttactgctctatggca

SEQ ID NO: 2634962 - DNA, 25 bp, Homo sapien
tgactaggaaatgaactgccatgct

SEQ ID NO: 2634963 - DNA, 25 bp, Homo sapien
gaggctcaggtagccttgattcaaa

SEQ ID NO: 2634964 - DNA, 25 bp, Homo sapien
tataatagataaccacactttcttc

SEQ ID NO: 2634965 - DNA, 25 bp, Homo sapien
gacctggttgtagaaaaggtaagca

SEQ ID NO: 2634966 - DNA, 25 bp, Homo sapien
aggtaagcagtattttggtttgtga

SEQ ID NO: 2634967 - DNA, 25 bp, Homo sapien
tacccaatttggcaagctgctgtct

SEQ ID NO: 2634968 - DNA, 25 bp, Homo sapien
tttgagaaattcaccactactcccc

SEQ ID NO: 2634969 - DNA, 25 bp, Homo sapien
tttttgagaaattcaccactactcc

SEQ ID NO: 2634970 - DNA, 25 bp, Homo sapien
gacttttttgagaaattcaccacta

SEQ ID NO: 2634971 - DNA, 25 bp, Homo sapien
tgagaaattcaccactactccccag

SEQ ID NO: 2634972 - DNA, 25 bp, Homo sapien
gaatacagctaaagcgtctgtagag

SEQ ID NO: 2634973 - DNA, 25 bp, Homo sapien
taaactactaggtcagatatgaaag

SEQ ID NO: 2634974 - DNA, 25 bp, Homo sapien
gggcataacctaatgaaatagagac

SEQ ID NO: 2634975 - DNA, 25 bp, Homo sapien
aacagtaaactgaacctgtagccag

SEQ ID NO: 2634976 - DNA, 25 bp, Homo sapien
catcaggtttagctggttttgcagc

SEQ ID NO: 2634977 - DNA, 25 bp, Homo sapien
gcagaagtacttctactacatacaa

SEQ ID NO: 2634978 - DNA, 25 bp, Homo sapien
tacatacaaaggatccagttcacca

SEQ ID NO: 2634979 - DNA, 25 bp, Homo sapien
tcaagctctctttgctacagcgcag

SEQ ID NO: 2634980 - DNA, 25 bp, Homo sapien
ttggtgatgacaaataagttacaga

SEQ ID NO: 2634981 - DNA, 25 bp, Homo sapien
tcatgatagtatgttcattaccatc

SEQ ID NO: 2634982 - DNA, 25 bp, Homo sapien
ccatcacattggagaactttggtga

SEQ ID NO: 2634983 - DNA, 25 bp, Homo sapien
aaaacttctaatttagaaatcatga

SEQ ID NO: 2634984 - DNA, 25 bp, Homo sapien
gctcaactctactatgtttttttag

SEQ ID NO: 2634985 - DNA, 25 bp, Homo sapien
tcaactctactatgtttttttagac

SEQ ID NO: 2634986 - DNA, 25 bp, Homo sapien
aaacaagctcaactctactatgttt

SEQ ID NO: 2634987 - DNA, 25 bp, Homo sapien
caagctcaactctactatgtttttt

SEQ ID NO: 2634988 - DNA, 25 bp, Homo sapien
caggagaacttaatgattgcaggca

SEQ ID NO: 2634989 - DNA, 25 bp, Homo sapien
tgctactgttagagaaccaaactgg

SEQ ID NO: 2634990 - DNA, 25 bp, Homo sapien
gaatagctgaagctaccagcgcaca

SEQ ID NO: 2634991 - DNA, 25 bp, Homo sapien
tgcctgctgcagtaagaccagatat

SEQ ID NO: 2634992 - DNA, 25 bp, Homo sapien
ttaggaatgtaaagcctaacactgc

SEQ ID NO: 2634993 - DNA, 25 bp, Homo sapien
ttttaaaacactctgtctattgtcc

SEQ ID NO: 2634994 - DNA, 25 bp, Homo sapien
ggagatgcaccaaaactgggacaac

SEQ ID NO: 2634995 - DNA, 25 bp, Homo sapien
tgtctattgtccaccggccgaaggt

SEQ ID NO: 2634996 - DNA, 25 bp, Homo sapien
gatgcataccactgagtcctactaa

SEQ ID NO: 2634997 - DNA, 25 bp, Homo sapien
cataccactgagtcctactaatttc

SEQ ID NO: 2634998 - DNA, 25 bp, Homo sapien
tgcataccactgagtcctactaatt

SEQ ID NO: 2634999 - DNA, 25 bp, Homo sapien
taccactgagtcctactaatttctt

SEQ ID NO: 2635000 - DNA, 25 bp, Homo sapien
cacaaagcgtatacacagtttccaa

SEQ ID NO: 2635001 - DNA, 25 bp, Homo sapien
gaatacattcgatgctcaaaagctt

SEQ ID NO: 2635002 - DNA, 25 bp, Homo sapien
ggatgccgtcaggaaaacgtttctg

SEQ ID NO: 2635003 - DNA, 25 bp, Homo sapien
tgcccatatcatcaatagggtctaa

SEQ ID NO: 2635004 - DNA, 25 bp, Homo sapien
tttattcagtgaaacatatagaatt

SEQ ID NO: 2635005 - DNA, 25 bp, Homo sapien
atttattcagtgaaacatatagaat

SEQ ID NO: 2635006 - DNA, 25 bp, Homo sapien
ttattcagtgaaacatatagaattc

SEQ ID NO: 2635007 - DNA, 25 bp, Homo sapien
tatttattcagtgaaacatatagaa

SEQ ID NO: 2635008 - DNA, 25 bp, Homo sapien
tagccaattaaaccaacaggataag

SEQ ID NO: 2635009 - DNA, 25 bp, Homo sapien
tgatgagagctgacaggttcagagc

SEQ ID NO: 2635010 - DNA, 25 bp, Homo sapien
tacactaaaaaccagtgagttggac

SEQ ID NO: 2635011 - DNA, 25 bp, Homo sapien
taaaagggtgaatgctatgctgtgt

SEQ ID NO: 2635012 - DNA, 25 bp, Homo sapien
gacaatgctgtacaagatctttccc

SEQ ID NO: 2635013 - DNA, 25 bp, Homo sapien
tacatatccgtgggttccacatcca

SEQ ID NO: 2635014 - DNA, 25 bp, Homo sapien
tctggactgcacatgtacacttttt

SEQ ID NO: 2635015 - DNA, 25 bp, Homo sapien
tataaaagaacacagatatacagtt

SEQ ID NO: 2635016 - DNA, 25 bp, Homo sapien
ccatgtcataggaagcaatgctttc

SEQ ID NO: 2635017 - DNA, 25 bp, Homo sapien
tgaggatgcctatgtgagcagagca

SEQ ID NO: 2635018 - DNA, 25 bp, Homo sapien
gcatcgtgctaataactgtgaggct

SEQ ID NO: 2635019 - DNA, 25 bp, Homo sapien
tagcatgacttatcaggcctaccag

SEQ ID NO: 2635020 - DNA, 25 bp, Homo sapien
agaacatcttacagtatacttctgg

SEQ ID NO: 2635021 - DNA, 25 bp, Homo sapien
ttacagtatacttctgggttaaagc

SEQ ID NO: 2635022 - DNA, 25 bp, Homo sapien
taaagtgaacaatgtacaaggagat

SEQ ID NO: 2635023 - DNA, 25 bp, Homo sapien
ataaagaaagttcaataataaagtg

SEQ ID NO: 2635024 - DNA, 25 bp, Homo sapien
catccatttgtaggactgttcttgc

SEQ ID NO: 2635025 - DNA, 25 bp, Homo sapien
gccactcgtcctttcatctctatta

SEQ ID NO: 2635026 - DNA, 25 bp, Homo sapien
cgtttgcgacatttgagttcatcca

SEQ ID NO: 2635027 - DNA, 25 bp, Homo sapien
tacatcagaagaagtagcaaatccc

SEQ ID NO: 2635028 - DNA, 25 bp, Homo sapien
tatataaccaagatgggcaagagcc

SEQ ID NO: 2635029 - DNA, 25 bp, Homo sapien
gctgctcaccaattgtcatccacaa

SEQ ID NO: 2635030 - DNA, 25 bp, Homo sapien
tagatttcaagtacatctctaacag

SEQ ID NO: 2635031 - DNA, 25 bp, Homo sapien
taaatgcaacaaactgctgctcacc

SEQ ID NO: 2635032 - DNA, 25 bp, Homo sapien
ctcagttagaaggagctcatcagca

SEQ ID NO: 2635033 - DNA, 25 bp, Homo sapien
aaagcagcttaataatgctgttgcc

SEQ ID NO: 2635034 - DNA, 25 bp, Homo sapien
gaaacacaaagcagcttaataatgc

SEQ ID NO: 2635035 - DNA, 25 bp, Homo sapien
aaggccattaaacatcatctcagtt

SEQ ID NO: 2635036 - DNA, 25 bp, Homo sapien
tggtcaacagctactcatcacattc

SEQ ID NO: 2635037 - DNA, 25 bp, Homo sapien
caccagtcctgatgtgaggaggtta

SEQ ID NO: 2635038 - DNA, 25 bp, Homo sapien
cactataggtggaaggcaccagtcc

SEQ ID NO: 2635039 - DNA, 25 bp, Homo sapien
tctcccaccaggtatgtacagtttg

SEQ ID NO: 2635040 - DNA, 25 bp, Homo sapien
cgaagtggtcctgctaattgttctg

SEQ ID NO: 2635041 - DNA, 25 bp, Homo sapien
catttgacgaagtggtcctgctaat

SEQ ID NO: 2635042 - DNA, 25 bp, Homo sapien
ctgcatttgacgaagtggtcctgct

SEQ ID NO: 2635043 - DNA, 25 bp, Homo sapien
ttgacgaagtggtcctgctaattgt

SEQ ID NO: 2635044 - DNA, 25 bp, Homo sapien
cctaggtattatgtctgcaatgtgg

SEQ ID NO: 2635045 - DNA, 25 bp, Homo sapien
aggtttccaagccagtattccagga

SEQ ID NO: 2635046 - DNA, 25 bp, Homo sapien
tggacattctgctcctaagtaggca

SEQ ID NO: 2635047 - DNA, 25 bp, Homo sapien
tgctaagtgattaaacggccaatct

SEQ ID NO: 2635048 - DNA, 25 bp, Homo sapien
tatatactacatccattaagtgagg

SEQ ID NO: 2635049 - DNA, 25 bp, Homo sapien
gctccagttgcccaggtatatacta

SEQ ID NO: 2635050 - DNA, 25 bp, Homo sapien
tcaaagacatctgtcattttgcaga

SEQ ID NO: 2635051 - DNA, 25 bp, Homo sapien
tgcagatatgggcaaatgtagctcc

SEQ ID NO: 2635052 - DNA, 25 bp, Homo sapien
tatataatagggagaagatttcatt

SEQ ID NO: 2635053 - DNA, 25 bp, Homo sapien
tgtttaccatagtctccttgtgcaa

SEQ ID NO: 2635054 - DNA, 25 bp, Homo sapien
gtacttactgggcaatgactttccc

SEQ ID NO: 2635055 - DNA, 25 bp, Homo sapien
gaccagagtttaaatcatcgtgccc

SEQ ID NO: 2635056 - DNA, 25 bp, Homo sapien
ggtatggtgcttaactgaacttaca

SEQ ID NO: 2635057 - DNA, 25 bp, Homo sapien
tggcatctagtatgagctacaaacc

SEQ ID NO: 2635058 - DNA, 25 bp, Homo sapien
gacaggccaggtctactgcccttgc

SEQ ID NO: 2635059 - DNA, 25 bp, Homo sapien
caaactgtgatgtagaaatagcccc

SEQ ID NO: 2635060 - DNA, 25 bp, Homo sapien
gaaaggtttaagctcatctactggc

SEQ ID NO: 2635061 - DNA, 25 bp, Homo sapien
aaagcagcagattttcccgaacaga

SEQ ID NO: 2635062 - DNA, 25 bp, Homo sapien
ggcctcaggttagaatcacacatgt

SEQ ID NO: 2635063 - DNA, 25 bp, Homo sapien
tttaatactcctatccagcctggcc

SEQ ID NO: 2635064 - DNA, 25 bp, Homo sapien
cactgtaactagcatggtgcctgat

SEQ ID NO: 2635065 - DNA, 25 bp, Homo sapien
cattctggaagaactcacatggaga

SEQ ID NO: 2635066 - DNA, 25 bp, Homo sapien
ccatggcaaccacgtctatgctttg

SEQ ID NO: 2635067 - DNA, 25 bp, Homo sapien
tggtcctgccagagtagaaagagaa

SEQ ID NO: 2635068 - DNA, 25 bp, Homo sapien
taagcagttacatgtcttcctgtcc

SEQ ID NO: 2635069 - DNA, 25 bp, Homo sapien
gctgacacttggtattaagtaggaa

SEQ ID NO: 2635070 - DNA, 25 bp, Homo sapien
tttattactaacatgctgacacttg

SEQ ID NO: 2635071 - DNA, 25 bp, Homo sapien
taacatgctgacacttggtattaag

SEQ ID NO: 2635072 - DNA, 25 bp, Homo sapien
ggtagagacacctgtttattactaa

SEQ ID NO: 2635073 - DNA, 25 bp, Homo sapien
ttgctgcttgacacatttgtcgaag

SEQ ID NO: 2635074 - DNA, 25 bp, Homo sapien
agcaattcttccaggcgcctcatac

SEQ ID NO: 2635075 - DNA, 25 bp, Homo sapien
gctgcttgacacatttgtcgaagca

SEQ ID NO: 2635076 - DNA, 25 bp, Homo sapien
gcgcctcatacaacgaattatgctg

SEQ ID NO: 2635077 - DNA, 25 bp, Homo sapien
aattagaaacagcttatccatttga

SEQ ID NO: 2635078 - DNA, 25 bp, Homo sapien
tagaaacagcttatccatttgatac

SEQ ID NO: 2635079 - DNA, 25 bp, Homo sapien
ctaaattagaaacagcttatccatt

SEQ ID NO: 2635080 - DNA, 25 bp, Homo sapien
aacagcttatccatttgatactgac

SEQ ID NO: 2635081 - DNA, 25 bp, Homo sapien
gaacatctcaaaacgtcctcctagg

SEQ ID NO: 2635082 - DNA, 25 bp, Homo sapien
tacatcaagcatacaccaaaggcct

SEQ ID NO: 2635083 - DNA, 25 bp, Homo sapien
tcctaggttgtggtccagggctcaa

SEQ ID NO: 2635084 - DNA, 25 bp, Homo sapien
tgtggaggccctagaccatcatatc

SEQ ID NO: 2635085 - DNA, 25 bp, Homo sapien
gattcaactggtaagcgagcagcct

SEQ ID NO: 2635086 - DNA, 25 bp, Homo sapien
aaagataaatgctaggtcgggcgca

SEQ ID NO: 2635087 - DNA, 25 bp, Homo sapien
tgactgactcagcaacaatgtggtt

SEQ ID NO: 2635088 - DNA, 25 bp, Homo sapien
gagcagcctagaaagtcaaacacct

SEQ ID NO: 2635089 - DNA, 25 bp, Homo sapien
caagtagaggctggcagcaaacaca

SEQ ID NO: 2635090 - DNA, 25 bp, Homo sapien
ctacaagtagaggctggcagcaaac

SEQ ID NO: 2635091 - DNA, 25 bp, Homo sapien
gcagcaaacacaatatctctcttga

SEQ ID NO: 2635092 - DNA, 25 bp, Homo sapien
ggctggcagcaaacacaatatctct

SEQ ID NO: 2635093 - DNA, 25 bp, Homo sapien
ccacacttgcaggcatttgtagtca

SEQ ID NO: 2635094 - DNA, 25 bp, Homo sapien
aaatgtatgggagaaccaaatccac

SEQ ID NO: 2635095 - DNA, 25 bp, Homo sapien
aatgtaatgcttatgtataaacatg

SEQ ID NO: 2635096 - DNA, 25 bp, Homo sapien
tgctttctatgaatgatgtttgatt

SEQ ID NO: 2635097 - DNA, 25 bp, Homo sapien
gaatcactatccgagcaatcaccag

SEQ ID NO: 2635098 - DNA, 25 bp, Homo sapien
cactgtaggctgtatatgtatcgga

SEQ ID NO: 2635099 - DNA, 25 bp, Homo sapien
tgctgaaggcataacaaagcaactc

SEQ ID NO: 2635100 - DNA, 25 bp, Homo sapien
tgctgctgctatgcctcttggatgc

SEQ ID NO: 2635101 - DNA, 25 bp, Homo sapien
cactggagcgatgtgttgactggac

SEQ ID NO: 2635102 - DNA, 25 bp, Homo sapien
tcttacgccccacactgcaatttgg

SEQ ID NO: 2635103 - DNA, 25 bp, Homo sapien
caatttggtcttgttgccgtatcca

SEQ ID NO: 2635104 - DNA, 25 bp, Homo sapien
tgcagtgggcaagaatctcaatgtt

SEQ ID NO: 2635105 - DNA, 25 bp, Homo sapien
tgagtatgactacaccaccactgca

SEQ ID NO: 2635106 - DNA, 25 bp, Homo sapien
ccagaatgctagcactttatcccaa

SEQ ID NO: 2635107 - DNA, 25 bp, Homo sapien
ccaagactcagaactaaccacgata

SEQ ID NO: 2635108 - DNA, 25 bp, Homo sapien
gggctcagtgacatgtacctatagt

SEQ ID NO: 2635109 - DNA, 25 bp, Homo sapien
ccagatggtatctgcaggacagggt

SEQ ID NO: 2635110 - DNA, 25 bp, Homo sapien
gcttgtatactttggccctgcggca

SEQ ID NO: 2635111 - DNA, 25 bp, Homo sapien
gcctcagggaatgatgcagtctgct

SEQ ID NO: 2635112 - DNA, 25 bp, Homo sapien
tgacaatgcacagtggctctgctgg

SEQ ID NO: 2635113 - DNA, 25 bp, Homo sapien
tatcatgttgagttatgtccccttc

SEQ ID NO: 2635114 - DNA, 25 bp, Homo sapien
ttcactgctatgctgaataggaggg

SEQ ID NO: 2635115 - DNA, 25 bp, Homo sapien
tccctgtttaggatggcgttagttg

SEQ ID NO: 2635116 - DNA, 25 bp, Homo sapien
ccttcatgcgtagttcctgtggaca

SEQ ID NO: 2635117 - DNA, 25 bp, Homo sapien
tgctataaccaattgcagcagactg

SEQ ID NO: 2635118 - DNA, 25 bp, Homo sapien
tagaatattcagaggctatgagaca

SEQ ID NO: 2635119 - DNA, 25 bp, Homo sapien
tcaaaaaatatctcgttcaacgatt

SEQ ID NO: 2635120 - DNA, 25 bp, Homo sapien
cagcagactgggtggtttataaaaa

SEQ ID NO: 2635121 - DNA, 25 bp, Homo sapien
tatttgattattcaggagaacagcc

SEQ ID NO: 2635122 - DNA, 25 bp, Homo sapien
tatatgcttagtgactccccgtgaa

SEQ ID NO: 2635123 - DNA, 25 bp, Homo sapien
tgtgccaagagagtgtcagcatcag

SEQ ID NO: 2635124 - DNA, 25 bp, Homo sapien
ggctcttaaaacaccctgaccattg

SEQ ID NO: 2635125 - DNA, 25 bp, Homo sapien
agcatgggcctgtgactggactgaa

SEQ ID NO: 2635126 - DNA, 25 bp, Homo sapien
cccggaaggctgagcaatagctaga

SEQ ID NO: 2635127 - DNA, 25 bp, Homo sapien
cctgtctgtgttagtgtccaagtcc

SEQ ID NO: 2635128 - DNA, 25 bp, Homo sapien
gctagagccgttactatcctgagag

SEQ ID NO: 2635129 - DNA, 25 bp, Homo sapien
tctgatgccaacctgtagagcagca

SEQ ID NO: 2635130 - DNA, 25 bp, Homo sapien
cagagtgctctgcaagggaccagaa

SEQ ID NO: 2635131 - DNA, 25 bp, Homo sapien
cagtgaggccttacgaagatttgca

SEQ ID NO: 2635132 - DNA, 25 bp, Homo sapien
tgtgggcgaacagcagcagagcttc

SEQ ID NO: 2635133 - DNA, 25 bp, Homo sapien
gagctcagattgggccactgaactc

SEQ ID NO: 2635134 - DNA, 25 bp, Homo sapien
atggcaggcgcctctaatccctgct

SEQ ID NO: 2635135 - DNA, 25 bp, Homo sapien
atgatggcaggcgcctctaatccct

SEQ ID NO: 2635136 - DNA, 25 bp, Homo sapien
ctcagattgggccactgaactccag

SEQ ID NO: 2635137 - DNA, 25 bp, Homo sapien
ttacaaaggggatgggtggtgggca

SEQ ID NO: 2635138 - DNA, 25 bp, Homo sapien
tacaaaggggatgggtggtgggcaa

SEQ ID NO: 2635139 - DNA, 25 bp, Homo sapien
acaaaggggatgggtggtgggcaag

SEQ ID NO: 2635140 - DNA, 25 bp, Homo sapien
caggagggtcataagtggagcctac

SEQ ID NO: 2635141 - DNA, 25 bp, Homo sapien
caggttgtagtagatgttcttggcc

SEQ ID NO: 2635142 - DNA, 25 bp, Homo sapien
gagcctactgccaggttgtagtaga

SEQ ID NO: 2635143 - DNA, 25 bp, Homo sapien
ctagtcaccaagagtgatgatttca

SEQ ID NO: 2635144 - DNA, 25 bp, Homo sapien
tcattataactagactggctgggtg

SEQ ID NO: 2635145 - DNA, 25 bp, Homo sapien
ttctgatccattctgagtaactgat

SEQ ID NO: 2635146 - DNA, 25 bp, Homo sapien
tacttacgtacctagtacaactggc

SEQ ID NO: 2635147 - DNA, 25 bp, Homo sapien
tttcttaaatgcaacccacatgcag

SEQ ID NO: 2635148 - DNA, 25 bp, Homo sapien
aaaaggatgccatgctagcagaact

SEQ ID NO: 2635149 - DNA, 25 bp, Homo sapien
aatgcttagttagcaaaaactcatg

SEQ ID NO: 2635150 - DNA, 25 bp, Homo sapien
cacagggcctgacaaaatgcttagt

SEQ ID NO: 2635151 - DNA, 25 bp, Homo sapien
tgcagtagagcaggacactgattgc

SEQ ID NO: 2635152 - DNA, 25 bp, Homo sapien
aacctggtgattaaatgacaacaag

SEQ ID NO: 2635153 - DNA, 25 bp, Homo sapien
tccttttttacatgtgctctcattt

SEQ ID NO: 2635154 - DNA, 25 bp, Homo sapien
taacttccgttgcatgcattgctgc

SEQ ID NO: 2635155 - DNA, 25 bp, Homo sapien
tgacaacaagaacgtgagaagagat

SEQ ID NO: 2635156 - DNA, 25 bp, Homo sapien
gtaaggttttcgagtctctctccca

SEQ ID NO: 2635157 - DNA, 25 bp, Homo sapien
tatagccttggtaccttgaaagtgt

SEQ ID NO: 2635158 - DNA, 25 bp, Homo sapien
gagtcattcattagcataaacccag

SEQ ID NO: 2635159 - DNA, 25 bp, Homo sapien
gtttcctttgaatctgccaacccaa

SEQ ID NO: 2635160 - DNA, 25 bp, Homo sapien
cccctgtggacctgctttctgtcat

SEQ ID NO: 2635161 - DNA, 25 bp, Homo sapien
gcccctgtggacctgctttctgtca

SEQ ID NO: 2635162 - DNA, 25 bp, Homo sapien
tgcccctgtggacctgctttctgtc

SEQ ID NO: 2635163 - DNA, 25 bp, Homo sapien
ttccctcctggttctgcttatcttc

SEQ ID NO: 2635164 - DNA, 25 bp, Homo sapien
tgttccctcctggttctgcttatct

SEQ ID NO: 2635165 - DNA, 25 bp, Homo sapien
cctcctggttctgcttatcttccat

SEQ ID NO: 2635166 - DNA, 25 bp, Homo sapien
ttctgttccctcctggttctgctta

SEQ ID NO: 2635167 - DNA, 25 bp, Homo sapien
ggtttcagctccctactgagacccc

SEQ ID NO: 2635168 - DNA, 25 bp, Homo sapien
tttcagctccctactgagaccccaa

SEQ ID NO: 2635169 - DNA, 25 bp, Homo sapien
tcagctccctactgagaccccaact

SEQ ID NO: 2635170 - DNA, 25 bp, Homo sapien
taggtttcagctccctactgagacc

SEQ ID NO: 2635171 - DNA, 25 bp, Homo sapien
gatgcgatactgtaaaaggcagctt

SEQ ID NO: 2635172 - DNA, 25 bp, Homo sapien
gtaggaacagttctgggagtaagag

SEQ ID NO: 2635173 - DNA, 25 bp, Homo sapien
gctttggacagccagaagacaagaa

SEQ ID NO: 2635174 - DNA, 25 bp, Homo sapien
tagctgcagtggagatgcgatactg

SEQ ID NO: 2635175 - DNA, 25 bp, Homo sapien
gggttcaagcgcttctcctcctgcc

SEQ ID NO: 2635176 - DNA, 25 bp, Homo sapien
ggcgtgcaccaccatccctggcttt

SEQ ID NO: 2635177 - DNA, 25 bp, Homo sapien
acaggcgtgcaccaccatccctggc

SEQ ID NO: 2635178 - DNA, 25 bp, Homo sapien
gcgtgcaccaccatccctggctttt

SEQ ID NO: 2635179 - DNA, 25 bp, Homo sapien
taattggcagcttgtcacggcagat

SEQ ID NO: 2635180 - DNA, 25 bp, Homo sapien
ggttcatttgcatcagtagtaggag

SEQ ID NO: 2635181 - DNA, 25 bp, Homo sapien
gatgagcccttcagttaattggcag

SEQ ID NO: 2635182 - DNA, 25 bp, Homo sapien
taggaaacgtgtagcagatgagccc

SEQ ID NO: 2635183 - DNA, 25 bp, Homo sapien
tgtcaccatcgccttgttcccccat

SEQ ID NO: 2635184 - DNA, 25 bp, Homo sapien
cgctgtcaccatcgccttgttcccc

SEQ ID NO: 2635185 - DNA, 25 bp, Homo sapien
gccgctgtcaccatcgccttgttcc

SEQ ID NO: 2635186 - DNA, 25 bp, Homo sapien
tgtcaccatgtcaccatcggggccg

SEQ ID NO: 2635187 - DNA, 25 bp, Homo sapien
tttggctgcagcagatttcgcattg

SEQ ID NO: 2635188 - DNA, 25 bp, Homo sapien
ctgcagcagatttcgcattgtcttc

SEQ ID NO: 2635189 - DNA, 25 bp, Homo sapien
gtagctttccatctcttgtgacagt

SEQ ID NO: 2635190 - DNA, 25 bp, Homo sapien
tttccatctcttgtgacagtgtctc

SEQ ID NO: 2635191 - DNA, 25 bp, Homo sapien
tgtttgcagttccactctagcagag

SEQ ID NO: 2635192 - DNA, 25 bp, Homo sapien
tcctctgtttgcagttccactctag

SEQ ID NO: 2635193 - DNA, 25 bp, Homo sapien
gcagttccactctagcagagcaggg

SEQ ID NO: 2635194 - DNA, 25 bp, Homo sapien
gttccactctagcagagcagggtgg

SEQ ID NO: 2635195 - DNA, 25 bp, Homo sapien
gctgccgtacgtggccctcgatgtg

SEQ ID NO: 2635196 - DNA, 25 bp, Homo sapien
ccatgtttgacaagacgcggctgcc

SEQ ID NO: 2635197 - DNA, 25 bp, Homo sapien
gctcgagaatcaagggcctcggccg

SEQ ID NO: 2635198 - DNA, 25 bp, Homo sapien
cctcgatgtgctctgcgtgttgctg

SEQ ID NO: 2635199 - DNA, 25 bp, Homo sapien
agagccgcacttctgggcggatgcc

SEQ ID NO: 2635200 - DNA, 25 bp, Homo sapien
cggctgccgagagccgcacttctgg

SEQ ID NO: 2635201 - DNA, 25 bp, Homo sapien
tggatcggaacgggagccgccccca

SEQ ID NO: 2635202 - DNA, 25 bp, Homo sapien
agcaaagccccctggatcggaacgg

SEQ ID NO: 2635203 - DNA, 25 bp, Homo sapien
aggcagccggtgctctaggatcgtt

SEQ ID NO: 2635204 - DNA, 25 bp, Homo sapien
gtagggagcctagctctctgaaagc

SEQ ID NO: 2635205 - DNA, 25 bp, Homo sapien
tctaggatcgttgggtagggagcct

SEQ ID NO: 2635206 - DNA, 25 bp, Homo sapien
agcagcaatgcctagtgggggtacc

SEQ ID NO: 2635207 - DNA, 25 bp, Homo sapien
ttgctaacatttgggctcagccagg

SEQ ID NO: 2635208 - DNA, 25 bp, Homo sapien
gatggatgatttagcatgcttcttg

SEQ ID NO: 2635209 - DNA, 25 bp, Homo sapien
ttgaggcctaagtgagaaagggctc

SEQ ID NO: 2635210 - DNA, 25 bp, Homo sapien
caacggtgatcaggtatcgaggatg

SEQ ID NO: 2635211 - DNA, 25 bp, Homo sapien
cagctcctctcgcattgtcccttca

SEQ ID NO: 2635212 - DNA, 25 bp, Homo sapien
tcctcagtatgataatgaatgcgtc

SEQ ID NO: 2635213 - DNA, 25 bp, Homo sapien
tgaatgcgtcttccttctaagtact

SEQ ID NO: 2635214 - DNA, 25 bp, Homo sapien
ctcagtgaatcctcagtatgataat

SEQ ID NO: 2635215 - DNA, 25 bp, Homo sapien
cggggcgtaacctcagttccagctg

SEQ ID NO: 2635216 - DNA, 25 bp, Homo sapien
tcctttttttacacgtgatgatggt

SEQ ID NO: 2635217 - DNA, 25 bp, Homo sapien
tgagtccgttaagggctctagccca

SEQ ID NO: 2635218 - DNA, 25 bp, Homo sapien
tagcccagatttgtcccaggctttc

SEQ ID NO: 2635219 - DNA, 25 bp, Homo sapien
tggcggggggatgtggtgcttgaat

SEQ ID NO: 2635220 - DNA, 25 bp, Homo sapien
ccatggggtacagaatcagaatgga

SEQ ID NO: 2635221 - DNA, 25 bp, Homo sapien
gatccatggggtacagaatcagaat

SEQ ID NO: 2635222 - DNA, 25 bp, Homo sapien
tgatccatggggtacagaatcagaa

SEQ ID NO: 2635223 - DNA, 25 bp, Homo sapien
ctgcagtaaagattctcagggtgtc

SEQ ID NO: 2635224 - DNA, 25 bp, Homo sapien
tatgccctaggaagaaatcatgctg

SEQ ID NO: 2635225 - DNA, 25 bp, Homo sapien
caaacctctactgtttgggacagta

SEQ ID NO: 2635226 - DNA, 25 bp, Homo sapien
caagggaaatagtggccccttaatg

SEQ ID NO: 2635227 - DNA, 25 bp, Homo sapien
caaatatgtattgattacccacttt

SEQ ID NO: 2635228 - DNA, 25 bp, Homo sapien
ctaagtgctcgaggtagaagagtaa

SEQ ID NO: 2635229 - DNA, 25 bp, Homo sapien
tcattgtatacctgtaaaacccaaa

SEQ ID NO: 2635230 - DNA, 25 bp, Homo sapien
caaggtaatatgctaagtgctcgag

SEQ ID NO: 2635231 - DNA, 25 bp, Homo sapien
tagttctttgcagcgcatcggaacc

SEQ ID NO: 2635232 - DNA, 25 bp, Homo sapien
gcatcggaaccgtctcttcttttgg

SEQ ID NO: 2635233 - DNA, 25 bp, Homo sapien
gggatagttctttgcagcgcatcgg

SEQ ID NO: 2635234 - DNA, 25 bp, Homo sapien
tttgcagcgcatcggaaccgtctct

SEQ ID NO: 2635235 - DNA, 25 bp, Homo sapien
cacccaagggggtgcatgaagcttc

SEQ ID NO: 2635236 - DNA, 25 bp, Homo sapien
taattaagtgtttctttgagttctg

SEQ ID NO: 2635237 - DNA, 25 bp, Homo sapien
acagtacatataattaagtgtttct

SEQ ID NO: 2635238 - DNA, 25 bp, Homo sapien
acctcgccctatacatgtcttcatt

SEQ ID NO: 2635239 - DNA, 25 bp, Homo sapien
gcacaaaggcaccaaaccaaaaggc

SEQ ID NO: 2635240 - DNA, 25 bp, Homo sapien
tgctctctaacgaacaagccaggca

SEQ ID NO: 2635241 - DNA, 25 bp, Homo sapien
cagctgcatcgactcatatgaggca

SEQ ID NO: 2635242 - DNA, 25 bp, Homo sapien
atttgcctgattggtccctgactga

SEQ ID NO: 2635243 - DNA, 25 bp, Homo sapien
gcaagactccaaggaaagaagagaa

SEQ ID NO: 2635244 - DNA, 25 bp, Homo sapien
gagagcaagactccaaggaaagaag

SEQ ID NO: 2635245 - DNA, 25 bp, Homo sapien
gagcaagactccaaggaaagaagag

SEQ ID NO: 2635246 - DNA, 25 bp, Homo sapien
gagagagcaagactccaaggaaaga

SEQ ID NO: 2635247 - DNA, 25 bp, Homo sapien
aggcgcccacgcgacttaaacggct

SEQ ID NO: 2635248 - DNA, 25 bp, Homo sapien
ctcgcaggcgcccacgcgacttaaa

SEQ ID NO: 2635249 - DNA, 25 bp, Homo sapien
ctctccgcggcttgctctcccaagc

SEQ ID NO: 2635250 - DNA, 25 bp, Homo sapien
cgacttaaacggctgcacgtgcaag

SEQ ID NO: 2635251 - DNA, 25 bp, Homo sapien
gaagacatatgagggttgatttctg

SEQ ID NO: 2635252 - DNA, 25 bp, Homo sapien
acataggaagacatatgagggttga

SEQ ID NO: 2635253 - DNA, 25 bp, Homo sapien
cttctcaaatatgggaacataggaa

SEQ ID NO: 2635254 - DNA, 25 bp, Homo sapien
catatgagggttgatttctgcttcc

SEQ ID NO: 2635255 - DNA, 25 bp, Homo sapien
gctggagtcctgttaaaattgtctc

SEQ ID NO: 2635256 - DNA, 25 bp, Homo sapien
aagctggagtcctgttaaaattgtc

SEQ ID NO: 2635257 - DNA, 25 bp, Homo sapien
tggagtcctgttaaaattgtctcca

SEQ ID NO: 2635258 - DNA, 25 bp, Homo sapien
gagtcctgttaaaattgtctccatt

SEQ ID NO: 2635259 - DNA, 25 bp, Homo sapien
tcttcgagaaggtccatcatccatt

SEQ ID NO: 2635260 - DNA, 25 bp, Homo sapien
tgaaatgatctcttcgagaaggtcc

SEQ ID NO: 2635261 - DNA, 25 bp, Homo sapien
tctgtttccaaaattccgcccagag

SEQ ID NO: 2635262 - DNA, 25 bp, Homo sapien
aaattccgcccagaggcaaatccac

SEQ ID NO: 2635263 - DNA, 25 bp, Homo sapien
aaaaccacccattgtggatgtatta

SEQ ID NO: 2635264 - DNA, 25 bp, Homo sapien
ggatgtattatctcgcttattacac

SEQ ID NO: 2635265 - DNA, 25 bp, Homo sapien
gtattatctcgcttattacactcac

SEQ ID NO: 2635266 - DNA, 25 bp, Homo sapien
cattgtggatgtattatctcgctta

SEQ ID NO: 2635267 - DNA, 25 bp, Homo sapien
aaaccagagctatcaccatcttcaa

SEQ ID NO: 2635268 - DNA, 25 bp, Homo sapien
agaaaccagagctatcaccatcttc

SEQ ID NO: 2635269 - DNA, 25 bp, Homo sapien
accagagctatcaccatcttcaaac

SEQ ID NO: 2635270 - DNA, 25 bp, Homo sapien
cagagctatcaccatcttcaaacct

SEQ ID NO: 2635271 - DNA, 25 bp, Homo sapien
ataaattcctagaccccattcccag

SEQ ID NO: 2635272 - DNA, 25 bp, Homo sapien
ccgtgttggattatcttcgcagtca

SEQ ID NO: 2635273 - DNA, 25 bp, Homo sapien
tctgttccgtgttggattatcttcg

SEQ ID NO: 2635274 - DNA, 25 bp, Homo sapien
ggattatcttcgcagtcattactag

SEQ ID NO: 2635275 - DNA, 25 bp, Homo sapien
accctctgttccgtgttggattatc

SEQ ID NO: 2635276 - DNA, 25 bp, Homo sapien
agtgtctctgtgttaagtacaaatt

SEQ ID NO: 2635277 - DNA, 25 bp, Homo sapien
gtgtctctgtgttaagtacaaattg

SEQ ID NO: 2635278 - DNA, 25 bp, Homo sapien
tgtctctgtgttaagtacaaattgt

SEQ ID NO: 2635279 - DNA, 25 bp, Homo sapien
accagtttagtgtctctgtgttaag

SEQ ID NO: 2635280 - DNA, 25 bp, Homo sapien
atgcctgacctctttactttcaact

SEQ ID NO: 2635281 - DNA, 25 bp, Homo sapien
cagagttttttcgatgctttttgtt

SEQ ID NO: 2635282 - DNA, 25 bp, Homo sapien
tactgatacataggtcttttatttc

SEQ ID NO: 2635283 - DNA, 25 bp, Homo sapien
tttcaactccatattgaaatatgct

SEQ ID NO: 2635284 - DNA, 25 bp, Homo sapien
cacctagtattcctaggcagtctcc

SEQ ID NO: 2635285 - DNA, 25 bp, Homo sapien
acagcacctagtattcctaggcagt

SEQ ID NO: 2635286 - DNA, 25 bp, Homo sapien
ctacagcacctagtattcctaggca

SEQ ID NO: 2635287 - DNA, 25 bp, Homo sapien
agcacctagtattcctaggcagtct

SEQ ID NO: 2635288 - DNA, 25 bp, Homo sapien
acctcttctgtatggccctgaagct

SEQ ID NO: 2635289 - DNA, 25 bp, Homo sapien
cctcttctgtatggccctgaagctt

SEQ ID NO: 2635290 - DNA, 25 bp, Homo sapien
gcaacctcggaaactacctcttcca

SEQ ID NO: 2635291 - DNA, 25 bp, Homo sapien
agaccaaatcctccacggcaacctc

SEQ ID NO: 2635292 - DNA, 25 bp, Homo sapien
tgccacttaatactggtcttctaga

SEQ ID NO: 2635293 - DNA, 25 bp, Homo sapien
gctgcatacattcgtctgggtctaa

SEQ ID NO: 2635294 - DNA, 25 bp, Homo sapien
aaaaaggccaccagtgcgctgcata

SEQ ID NO: 2635295 - DNA, 25 bp, Homo sapien
cattcgtctgggtctaagtcattat

SEQ ID NO: 2635296 - DNA, 25 bp, Homo sapien
ctcgttcacttccactgccacttct

SEQ ID NO: 2635297 - DNA, 25 bp, Homo sapien
cttctgctttgagaagtatcaccat

SEQ ID NO: 2635298 - DNA, 25 bp, Homo sapien
ctgctttgagaagtatcaccattac

SEQ ID NO: 2635299 - DNA, 25 bp, Homo sapien
cacttctgctttgagaagtatcacc

SEQ ID NO: 2635300 - DNA, 25 bp, Homo sapien
ttccagagcctgttattacttcttc

SEQ ID NO: 2635301 - DNA, 25 bp, Homo sapien
tccagagcctgttattacttcttca

SEQ ID NO: 2635302 - DNA, 25 bp, Homo sapien
gcctgttattacttcttcatttaaa

SEQ ID NO: 2635303 - DNA, 25 bp, Homo sapien
tctttccagagcctgttattacttc

SEQ ID NO: 2635304 - DNA, 25 bp, Homo sapien
gtatcactactttctcctccttctg

SEQ ID NO: 2635305 - DNA, 25 bp, Homo sapien
gagtatcactactttctcctccttc

SEQ ID NO: 2635306 - DNA, 25 bp, Homo sapien
tccttctgcttctgacttccaagaa

SEQ ID NO: 2635307 - DNA, 25 bp, Homo sapien
cttgagtatcactactttctcctcc

SEQ ID NO: 2635308 - DNA, 25 bp, Homo sapien
gaattgctggtggtgcatcatgtcc

SEQ ID NO: 2635309 - DNA, 25 bp, Homo sapien
cgtatttgtcgaagtttatgcctgt

SEQ ID NO: 2635310 - DNA, 25 bp, Homo sapien
cacttccacaagaatagtgtcgtat

SEQ ID NO: 2635311 - DNA, 25 bp, Homo sapien
ggtggtgcatcatgtccagacactt

SEQ ID NO: 2635312 - DNA, 25 bp, Homo sapien
aatctcgtcctgcaagtatgatagg

SEQ ID NO: 2635313 - DNA, 25 bp, Homo sapien
agtataaccagctttagcaatgttg

SEQ ID NO: 2635314 - DNA, 25 bp, Homo sapien
cagaccctgtttgagcgcaagccat

SEQ ID NO: 2635315 - DNA, 25 bp, Homo sapien
tatttttgcacaggagtaagcttag

SEQ ID NO: 2635316 - DNA, 25 bp, Homo sapien
tgcatcatatgagccaaaattggta

SEQ ID NO: 2635317 - DNA, 25 bp, Homo sapien
gcaactctttaaaacgactggcagt

SEQ ID NO: 2635318 - DNA, 25 bp, Homo sapien
ggcagttattccatcatgcatcata

SEQ ID NO: 2635319 - DNA, 25 bp, Homo sapien
caattctcgagttggtgctacaata

SEQ ID NO: 2635320 - DNA, 25 bp, Homo sapien
ggagtagcacataatatattacagc

SEQ ID NO: 2635321 - DNA, 25 bp, Homo sapien
ttgtcgaattgaatgtcccagctgg

SEQ ID NO: 2635322 - DNA, 25 bp, Homo sapien
tctttgcctatgatatccatcagtc

SEQ ID NO: 2635323 - DNA, 25 bp, Homo sapien
gccttgtactatttgtcgaattgaa

SEQ ID NO: 2635324 - DNA, 25 bp, Homo sapien
tgaacataagggtttggcgctgttc

SEQ ID NO: 2635325 - DNA, 25 bp, Homo sapien
ttctggaccaaaacccatatccaac

SEQ ID NO: 2635326 - DNA, 25 bp, Homo sapien
accaaaacccatatccaacatgcga

SEQ ID NO: 2635327 - DNA, 25 bp, Homo sapien
gctgttcctttgatggcattcctgg

SEQ ID NO: 2635328 - DNA, 25 bp, Homo sapien
tctttttgagaactggccaacttgg

SEQ ID NO: 2635329 - DNA, 25 bp, Homo sapien
ggtctgctgaacatctctacatgct

SEQ ID NO: 2635330 - DNA, 25 bp, Homo sapien
tatgtttcgcagaatttcaacgagc

SEQ ID NO: 2635331 - DNA, 25 bp, Homo sapien
gccaacttggagaacggtctgctga

SEQ ID NO: 2635332 - DNA, 25 bp, Homo sapien
ttagtttcaacaaagaccatagttc

SEQ ID NO: 2635333 - DNA, 25 bp, Homo sapien
cttgtagttgatattttttcttgac

SEQ ID NO: 2635334 - DNA, 25 bp, Homo sapien
ccatgaatacttgtagttgatattt

SEQ ID NO: 2635335 - DNA, 25 bp, Homo sapien
gaaaagttgcaataaaatctgcttt

SEQ ID NO: 2635336 - DNA, 25 bp, Homo sapien
gaactgggcactttccaaagcgaaa

SEQ ID NO: 2635337 - DNA, 25 bp, Homo sapien
agccctctggcagctactgaagtag

SEQ ID NO: 2635338 - DNA, 25 bp, Homo sapien
gaggctgtgctaaatggttatccga

SEQ ID NO: 2635339 - DNA, 25 bp, Homo sapien
gaccagtacgcccaattcgatgaac

SEQ ID NO: 2635340 - DNA, 25 bp, Homo sapien
tcaactgatgcaaacacgtttcctc

SEQ ID NO: 2635341 - DNA, 25 bp, Homo sapien
tatcaactgatgcaaacacgtttcc

SEQ ID NO: 2635342 - DNA, 25 bp, Homo sapien
aagccaggaatgtatgtactaaagg

SEQ ID NO: 2635343 - DNA, 25 bp, Homo sapien
gaatgtatgtactaaaggcaatttc

SEQ ID NO: 2635344 - DNA, 25 bp, Homo sapien
aatcccatgactcatcatctactgg

SEQ ID NO: 2635345 - DNA, 25 bp, Homo sapien
tgtgaagaagaaaacccagctgtgt

SEQ ID NO: 2635346 - DNA, 25 bp, Homo sapien
aaacccagctgtgttcaaagtgctc

SEQ ID NO: 2635347 - DNA, 25 bp, Homo sapien
tactggattgggagcttgtgaagaa

SEQ ID NO: 2635348 - DNA, 25 bp, Homo sapien
caggagctatgagaatgttaagttt

SEQ ID NO: 2635349 - DNA, 25 bp, Homo sapien
gtgtaggagtgagaatacaaggaca

SEQ ID NO: 2635350 - DNA, 25 bp, Homo sapien
tacaaggacaggagctatgagaatg

SEQ ID NO: 2635351 - DNA, 25 bp, Homo sapien
tgagaatacaaggacaggagctatg

SEQ ID NO: 2635352 - DNA, 25 bp, Homo sapien
gcaatgttgtaagttttagcatctc

SEQ ID NO: 2635353 - DNA, 25 bp, Homo sapien
atgttgtaagttttagcatctcaca

SEQ ID NO: 2635354 - DNA, 25 bp, Homo sapien
caatgttgtaagttttagcatctca

SEQ ID NO: 2635355 - DNA, 25 bp, Homo sapien
ctgcaatgttgtaagttttagcatc

SEQ ID NO: 2635356 - DNA, 25 bp, Homo sapien
aatattcccagttaacaccatttgt

SEQ ID NO: 2635357 - DNA, 25 bp, Homo sapien
taatattcccagttaacaccatttg

SEQ ID NO: 2635358 - DNA, 25 bp, Homo sapien
atattcccagttaacaccatttgta

SEQ ID NO: 2635359 - DNA, 25 bp, Homo sapien
taaacactatagtaagacttggcat

SEQ ID NO: 2635360 - DNA, 25 bp, Homo sapien
tgacacactactgttttaaagactc

SEQ ID NO: 2635361 - DNA, 25 bp, Homo sapien
ttatgccattgagtacagagctccc

SEQ ID NO: 2635362 - DNA, 25 bp, Homo sapien
tttaaccaaaagtgtatcatatcct

SEQ ID NO: 2635363 - DNA, 25 bp, Homo sapien
actaggatcgcgcttcggtgtggac

SEQ ID NO: 2635364 - DNA, 25 bp, Homo sapien
gctggaggtactaggatcgcgcttc

SEQ ID NO: 2635365 - DNA, 25 bp, Homo sapien
cctttctggactgtttcacgctgga

SEQ ID NO: 2635366 - DNA, 25 bp, Homo sapien
gggacatcgacgactcctttctgga

SEQ ID NO: 2635367 - DNA, 25 bp, Homo sapien
acacgcgggcggaagcagcttcgcc

SEQ ID NO: 2635368 - DNA, 25 bp, Homo sapien
gcttcgccgcggctccccgcacaca

SEQ ID NO: 2635369 - DNA, 25 bp, Homo sapien
cctccgcgagctcgggacacgcggg

SEQ ID NO: 2635370 - DNA, 25 bp, Homo sapien
gcccgtggaagcccgcctccgcgag

SEQ ID NO: 2635371 - DNA, 25 bp, Homo sapien
gagctactttgatgatttgataaac

SEQ ID NO: 2635372 - DNA, 25 bp, Homo sapien
tatcttccagatgagctactttgat

SEQ ID NO: 2635373 - DNA, 25 bp, Homo sapien
aaaagtatcttccagatgagctact

SEQ ID NO: 2635374 - DNA, 25 bp, Homo sapien
tgagctactttgatgatttgataaa

SEQ ID NO: 2635375 - DNA, 25 bp, Homo sapien
gaccgtccaagctactgatcgccgt

SEQ ID NO: 2635376 - DNA, 25 bp, Homo sapien
ctgatccattggttgggaaagagat

SEQ ID NO: 2635377 - DNA, 25 bp, Homo sapien
gatccattggttgggaaagagattg

SEQ ID NO: 2635378 - DNA, 25 bp, Homo sapien
ccaggatccgcgaccgtccaagcta

SEQ ID NO: 2635379 - DNA, 25 bp, Homo sapien
ttgccttttatgagtgattttgctg

SEQ ID NO: 2635380 - DNA, 25 bp, Homo sapien
tttgctgtttcgaatgccccccaag

SEQ ID NO: 2635381 - DNA, 25 bp, Homo sapien
ttttcatactgcacacacatgtctt

SEQ ID NO: 2635382 - DNA, 25 bp, Homo sapien
ctgaggtggaacaagctgacactct

SEQ ID NO: 2635383 - DNA, 25 bp, Homo sapien
acatgccgtggtgaaaaacttgagt

SEQ ID NO: 2635384 - DNA, 25 bp, Homo sapien
gacacatgccgtggtgaaaaacttg

SEQ ID NO: 2635385 - DNA, 25 bp, Homo sapien
attcacagacacatgccgtggtgaa

SEQ ID NO: 2635386 - DNA, 25 bp, Homo sapien
cagacacatgccgtggtgaaaaact

SEQ ID NO: 2635387 - DNA, 25 bp, Homo sapien
aaggatcatctgaaagaccagaaac

SEQ ID NO: 2635388 - DNA, 25 bp, Homo sapien
ggatcatctgaaagaccagaaacaa

SEQ ID NO: 2635389 - DNA, 25 bp, Homo sapien
aaaaaggatcatctgaaagaccaga

SEQ ID NO: 2635390 - DNA, 25 bp, Homo sapien
gatcatctgaaagaccagaaacaac

SEQ ID NO: 2635391 - DNA, 25 bp, Homo sapien
gttccacagatgttctgctggctca

SEQ ID NO: 2635392 - DNA, 25 bp, Homo sapien
cagatgttctgctggctcaaaggat

SEQ ID NO: 2635393 - DNA, 25 bp, Homo sapien
gatttgcatcaaaggcaactccacc

SEQ ID NO: 2635394 - DNA, 25 bp, Homo sapien
tatcaggggatgttccacagatgtt

SEQ ID NO: 2635395 - DNA, 25 bp, Homo sapien
gagcacatctctgacctcaaagagc

SEQ ID NO: 2635396 - DNA, 25 bp, Homo sapien
gagctcatattctagttcagtgatt

SEQ ID NO: 2635397 - DNA, 25 bp, Homo sapien
taggtggttggaatcaaagaagagc

SEQ ID NO: 2635398 - DNA, 25 bp, Homo sapien
gtcccagccatgtgttaggtggttg

SEQ ID NO: 2635399 - DNA, 25 bp, Homo sapien
cagtactaaatcatcccagagacaa

SEQ ID NO: 2635400 - DNA, 25 bp, Homo sapien
aaaaaatcagcagtactaaatcatc

SEQ ID NO: 2635401 - DNA, 25 bp, Homo sapien
cagcagtactaaatcatcccagaga

SEQ ID NO: 2635402 - DNA, 25 bp, Homo sapien
aatcagcagtactaaatcatcccag

SEQ ID NO: 2635403 - DNA, 25 bp, Homo sapien
ccccaggttaacacatgaaggctgg

SEQ ID NO: 2635404 - DNA, 25 bp, Homo sapien
cagagtgaggggagcatccacagtg

SEQ ID NO: 2635405 - DNA, 25 bp, Homo sapien
ctgccaggctgaatttgcagagtga

SEQ ID NO: 2635406 - DNA, 25 bp, Homo sapien
agagtgaggggagcatccacagtgc

SEQ ID NO: 2635407 - DNA, 25 bp, Homo sapien
ccaggctgaatttgcagagtgaggg

SEQ ID NO: 2635408 - DNA, 25 bp, Homo sapien
caagtgcaggttaaatttttcctat

SEQ ID NO: 2635409 - DNA, 25 bp, Homo sapien
cctatagtagtagacacaggaaatg

SEQ ID NO: 2635410 - DNA, 25 bp, Homo sapien
taagttctcttaactgtgtactggg

SEQ ID NO: 2635411 - DNA, 25 bp, Homo sapien
cacaggaaatgttctcaggcttagc

SEQ ID NO: 2635412 - DNA, 25 bp, Homo sapien
gatccctgtaagtcatgaaaagcta

SEQ ID NO: 2635413 - DNA, 25 bp, Homo sapien
gctttaggagccatgaaaacctctt

SEQ ID NO: 2635414 - DNA, 25 bp, Homo sapien
gctgcctgagatgctttaggagcca

SEQ ID NO: 2635415 - DNA, 25 bp, Homo sapien
gaaaagctatagttgcaatgcatgt

SEQ ID NO: 2635416 - DNA, 25 bp, Homo sapien
tatgttctctaatctccagtatgtc

SEQ ID NO: 2635417 - DNA, 25 bp, Homo sapien
aaaaagagcacgaagcacgattttc

SEQ ID NO: 2635418 - DNA, 25 bp, Homo sapien
tatctgggatcgttattcttggaag

SEQ ID NO: 2635419 - DNA, 25 bp, Homo sapien
cacctcaatggtataattatctggg

SEQ ID NO: 2635420 - DNA, 25 bp, Homo sapien
tactgttgactgtcctgaatcgaag

SEQ ID NO: 2635421 - DNA, 25 bp, Homo sapien
cacacggaaaatcttaggtggttca

SEQ ID NO: 2635422 - DNA, 25 bp, Homo sapien
taaatcagatgaaacaggcgccaac

SEQ ID NO: 2635423 - DNA, 25 bp, Homo sapien
gaatcattcgtttgatgcccaaaac

SEQ ID NO: 2635424 - DNA, 25 bp, Homo sapien
cggttcttagcgaagttgacttcca

SEQ ID NO: 2635425 - DNA, 25 bp, Homo sapien
cgcagagctatgacatattctgtaa

SEQ ID NO: 2635426 - DNA, 25 bp, Homo sapien
ccagaactttgactccttgaccgca

SEQ ID NO: 2635427 - DNA, 25 bp, Homo sapien
cttgaccgcacatcgcagagctatg

SEQ ID NO: 2635428 - DNA, 25 bp, Homo sapien
ggacgggaatcgcagggagtagctt

SEQ ID NO: 2635429 - DNA, 25 bp, Homo sapien
gacaggacgggaatcgcagggagta

SEQ ID NO: 2635430 - DNA, 25 bp, Homo sapien
acgggaatcgcagggagtagcttgc

SEQ ID NO: 2635431 - DNA, 25 bp, Homo sapien
cagagcagacaggacgggaatcgca

SEQ ID NO: 2635432 - DNA, 25 bp, Homo sapien
cttccataacaaccgcactggcctt

SEQ ID NO: 2635433 - DNA, 25 bp, Homo sapien
ataacaaccgcactggccttcttcc

SEQ ID NO: 2635434 - DNA, 25 bp, Homo sapien
ccataacaaccgcactggccttctt

SEQ ID NO: 2635435 - DNA, 25 bp, Homo sapien
ttccataacaaccgcactggccttc

SEQ ID NO: 2635436 - DNA, 25 bp, Homo sapien
ggtcagtgatcgtttcctccagaag

SEQ ID NO: 2635437 - DNA, 25 bp, Homo sapien
gctggtcagtgatcgtttcctccag

SEQ ID NO: 2635438 - DNA, 25 bp, Homo sapien
ggctggtcagtgatcgtttcctcca

SEQ ID NO: 2635439 - DNA, 25 bp, Homo sapien
tggtcagtgatcgtttcctccagaa

SEQ ID NO: 2635440 - DNA, 25 bp, Homo sapien
gattccccgccatctctggctgttg

SEQ ID NO: 2635441 - DNA, 25 bp, Homo sapien
acagcatctgggattgattctctag

SEQ ID NO: 2635442 - DNA, 25 bp, Homo sapien
gctgttgtcccatgcggcggcagca

SEQ ID NO: 2635443 - DNA, 25 bp, Homo sapien
ctccgcaacccagggagtcccatag

SEQ ID NO: 2635444 - DNA, 25 bp, Homo sapien
gctttctggatagtaccatatgttg

SEQ ID NO: 2635445 - DNA, 25 bp, Homo sapien
ctggatagtaccatatgttgtagcc

SEQ ID NO: 2635446 - DNA, 25 bp, Homo sapien
ttgctttctggatagtaccatatgt

SEQ ID NO: 2635447 - DNA, 25 bp, Homo sapien
ttctggatagtaccatatgttgtag

SEQ ID NO: 2635448 - DNA, 25 bp, Homo sapien
ttcccaagagaattataagaaatca

SEQ ID NO: 2635449 - DNA, 25 bp, Homo sapien
caagctgctggttagtagtgttcat

SEQ ID NO: 2635450 - DNA, 25 bp, Homo sapien
atagacacccaaaagctctcgcctc

SEQ ID NO: 2635451 - DNA, 25 bp, Homo sapien
cccaaaagctctcgcctcccagatg

SEQ ID NO: 2635452 - DNA, 25 bp, Homo sapien
atccgggtctaaagcgccaagtgca

SEQ ID NO: 2635453 - DNA, 25 bp, Homo sapien
gagatccgggtctaaagcgccaagt

SEQ ID NO: 2635454 - DNA, 25 bp, Homo sapien
gaggagcagggagatccgggtctaa

SEQ ID NO: 2635455 - DNA, 25 bp, Homo sapien
agggagatccgggtctaaagcgcca

SEQ ID NO: 2635456 - DNA, 25 bp, Homo sapien
aacgcaggcctgcatgacctcaatg

SEQ ID NO: 2635457 - DNA, 25 bp, Homo sapien
tgggctctgagtccacatccggaaa

SEQ ID NO: 2635458 - DNA, 25 bp, Homo sapien
ggatcgtccagttcgtggcctgaga

SEQ ID NO: 2635459 - DNA, 25 bp, Homo sapien
caagtgttcacgtctagagcagagc

SEQ ID NO: 2635460 - DNA, 25 bp, Homo sapien
tgcaacattggatacacagagatgt

SEQ ID NO: 2635461 - DNA, 25 bp, Homo sapien
taagcctggatggaatatggctcgc

SEQ ID NO: 2635462 - DNA, 25 bp, Homo sapien
cagagatgttatagcaccagaaagg

SEQ ID NO: 2635463 - DNA, 25 bp, Homo sapien
aatatggctcgccaactttgtcatg

SEQ ID NO: 2635464 - DNA, 25 bp, Homo sapien
cttcagcttggtaaaagatggtgta

SEQ ID NO: 2635465 - DNA, 25 bp, Homo sapien
tgttctccaccttggtctcaggacc

SEQ ID NO: 2635466 - DNA, 25 bp, Homo sapien
tcgtgaccgtcttcacgccaatgtt

SEQ ID NO: 2635467 - DNA, 25 bp, Homo sapien
atctctttccatgtgatcgtgaccg

SEQ ID NO: 2635468 - DNA, 25 bp, Homo sapien
caaaaggtgggtgctcttggcccca

SEQ ID NO: 2635469 - DNA, 25 bp, Homo sapien
taagtgattcatgccaggttgcaag

SEQ ID NO: 2635470 - DNA, 25 bp, Homo sapien
gggagccatgcctacaacaggtcta

SEQ ID NO: 2635471 - DNA, 25 bp, Homo sapien
tccacttcgctatgggcgtgcttac

SEQ ID NO: 2635472 - DNA, 25 bp, Homo sapien
cacaaagcagtttggtagttgccag

SEQ ID NO: 2635473 - DNA, 25 bp, Homo sapien
ttaagccaggcacgccattcctggg

SEQ ID NO: 2635474 - DNA, 25 bp, Homo sapien
caattcagggcctaaccaggacaaa

SEQ ID NO: 2635475 - DNA, 25 bp, Homo sapien
aagcaagaatccaagccttgcccag

SEQ ID NO: 2635476 - DNA, 25 bp, Homo sapien
gtgctggccatgacctgaacaatgt

SEQ ID NO: 2635477 - DNA, 25 bp, Homo sapien
aagatgctggaattgactgtcttgg

SEQ ID NO: 2635478 - DNA, 25 bp, Homo sapien
aggtctttcgtttcagggactccag

SEQ ID NO: 2635479 - DNA, 25 bp, Homo sapien
tactgcaagatgctggaattgactg

SEQ ID NO: 2635480 - DNA, 25 bp, Homo sapien
tgagaataagaaggcctccaccaat

SEQ ID NO: 2635481 - DNA, 25 bp, Homo sapien
gggttttttgagaccatatgccact

SEQ ID NO: 2635482 - DNA, 25 bp, Homo sapien
tttgagaccatatgccactgtcagg

SEQ ID NO: 2635483 - DNA, 25 bp, Homo sapien
tcagagaagttatgaggataatctc

SEQ ID NO: 2635484 - DNA, 25 bp, Homo sapien
ctatactactttcagcagggttggg

SEQ ID NO: 2635485 - DNA, 25 bp, Homo sapien
gctatactactttcagcagggttgg

SEQ ID NO: 2635486 - DNA, 25 bp, Homo sapien
tggctatactactttcagcagggtt

SEQ ID NO: 2635487 - DNA, 25 bp, Homo sapien
tatactactttcagcagggttggga

SEQ ID NO: 2635488 - DNA, 25 bp, Homo sapien
tgtcaatcaccaacttgtcactggg

SEQ ID NO: 2635489 - DNA, 25 bp, Homo sapien
tcaggtgaaactgggagctcctcaa

SEQ ID NO: 2635490 - DNA, 25 bp, Homo sapien
cctctggcatcctcgaacgtaggta

SEQ ID NO: 2635491 - DNA, 25 bp, Homo sapien
ttttctgggcggaatctcaggtgaa

SEQ ID NO: 2635492 - DNA, 25 bp, Homo sapien
tgggaggccagatatgtccaccctg

SEQ ID NO: 2635493 - DNA, 25 bp, Homo sapien
cctcggtgagagcttggtatctgaa

SEQ ID NO: 2635494 - DNA, 25 bp, Homo sapien
tctttgccgaccaagttcaactggc

SEQ ID NO: 2635495 - DNA, 25 bp, Homo sapien
aactttaacctaggcaggatgtggc

SEQ ID NO: 2635496 - DNA, 25 bp, Homo sapien
gaaaggctccactaactgtcacaag

SEQ ID NO: 2635497 - DNA, 25 bp, Homo sapien
tctcaggtgcggtgttgctacaggc

SEQ ID NO: 2635498 - DNA, 25 bp, Homo sapien
gagcctcagacaaccccttaggaag

SEQ ID NO: 2635499 - DNA, 25 bp, Homo sapien
tgctaggcattgcatgttcccaggc

SEQ ID NO: 2635500 - DNA, 25 bp, Homo sapien
ggcggcatgagaattggacgcatct

SEQ ID NO: 2635501 - DNA, 25 bp, Homo sapien
tcctacacctggacttgagtgcagg

SEQ ID NO: 2635502 - DNA, 25 bp, Homo sapien
gacttgagtgcaggacaacgggaca

SEQ ID NO: 2635503 - DNA, 25 bp, Homo sapien
tagagtcttattccccagtgccctg

SEQ ID NO: 2635504 - DNA, 25 bp, Homo sapien
cagattgcatccgtaggtggtccat

SEQ ID NO: 2635505 - DNA, 25 bp, Homo sapien
ccttgaacagccacgagagcattgc

SEQ ID NO: 2635506 - DNA, 25 bp, Homo sapien
tgcatagagctctgtgtcaagggct

SEQ ID NO: 2635507 - DNA, 25 bp, Homo sapien
ttttcatcagcacacgacaagcgtc

SEQ ID NO: 2635508 - DNA, 25 bp, Homo sapien
tcaagattgatacatggcatcctcc

SEQ ID NO: 2635509 - DNA, 25 bp, Homo sapien
ttgtcaagagcccaagtatggaggt

SEQ ID NO: 2635510 - DNA, 25 bp, Homo sapien
ccatccttgttgcagtgagacttga

SEQ ID NO: 2635511 - DNA, 25 bp, Homo sapien
ggtgctgcgccatcttgtggcctgt

SEQ ID NO: 2635512 - DNA, 25 bp, Homo sapien
gatgagatgcatttaaggccgatag

SEQ ID NO: 2635513 - DNA, 25 bp, Homo sapien
tagtaggacaatgcagtgactgact

SEQ ID NO: 2635514 - DNA, 25 bp, Homo sapien
caagctttgaatgataactacaggt

SEQ ID NO: 2635515 - DNA, 25 bp, Homo sapien
tacctttgcagtgaattgcatgtgc

SEQ ID NO: 2635516 - DNA, 25 bp, Homo sapien
gattagcctaaaattggacattgtc

SEQ ID NO: 2635517 - DNA, 25 bp, Homo sapien
tacatcaagcaggagagatcttcct

SEQ ID NO: 2635518 - DNA, 25 bp, Homo sapien
ttcagactcgataaacagaattcag

SEQ ID NO: 2635519 - DNA, 25 bp, Homo sapien
ggtatgaactagcagtcttacagcc

SEQ ID NO: 2635520 - DNA, 25 bp, Homo sapien
taatagcacatcagaaaaccttgtc

SEQ ID NO: 2635521 - DNA, 25 bp, Homo sapien
ggtatcctaccctcatctctgaaag

SEQ ID NO: 2635522 - DNA, 25 bp, Homo sapien
tggacaaaactagttcactcactgc

SEQ ID NO: 2635523 - DNA, 25 bp, Homo sapien
tatgtaatgtacacctgccctaagg

SEQ ID NO: 2635524 - DNA, 25 bp, Homo sapien
gtagttcctgctacaacttcagcag

SEQ ID NO: 2635525 - DNA, 25 bp, Homo sapien
gactagtagttcctgctacaacttc

SEQ ID NO: 2635526 - DNA, 25 bp, Homo sapien
tagtagttcctgctacaacttcagc

SEQ ID NO: 2635527 - DNA, 25 bp, Homo sapien
agttcctgctacaacttcagcagta

SEQ ID NO: 2635528 - DNA, 25 bp, Homo sapien
tattctaccgtggtacacagtggct

SEQ ID NO: 2635529 - DNA, 25 bp, Homo sapien
gagcggccagaagatctacaattag

SEQ ID NO: 2635530 - DNA, 25 bp, Homo sapien
ttgttagattcagaggagcggccag

SEQ ID NO: 2635531 - DNA, 25 bp, Homo sapien
tgcagtcagcatgaatccagtccag

SEQ ID NO: 2635532 - DNA, 25 bp, Homo sapien
tccaaaaaaatggcgctaaggccga

SEQ ID NO: 2635533 - DNA, 25 bp, Homo sapien
aaaaaaatggcgctaaggccgagag

SEQ ID NO: 2635534 - DNA, 25 bp, Homo sapien
aaaaaatggcgctaaggccgagaga

SEQ ID NO: 2635535 - DNA, 25 bp, Homo sapien
ccaaaaaaatggcgctaaggccgag

SEQ ID NO: 2635536 - DNA, 25 bp, Homo sapien
tgcgcttcagcctgcgcattcgctt

SEQ ID NO: 2635537 - DNA, 25 bp, Homo sapien
tcttttgcgcttcagcctgcgcatt

SEQ ID NO: 2635538 - DNA, 25 bp, Homo sapien
ttgcgcttcagcctgcgcattcgct

SEQ ID NO: 2635539 - DNA, 25 bp, Homo sapien
tcttcttttgcgcttcagcctgcgc

SEQ ID NO: 2635540 - DNA, 25 bp, Homo sapien
attatatggttgttacactcggcca

SEQ ID NO: 2635541 - DNA, 25 bp, Homo sapien
ttatatggttgttacactcggccac

SEQ ID NO: 2635542 - DNA, 25 bp, Homo sapien
tatatggttgttacactcggccaca

SEQ ID NO: 2635543 - DNA, 25 bp, Homo sapien
tattatatggttgttacactcggcc

SEQ ID NO: 2635544 - DNA, 25 bp, Homo sapien
gtcttcaaagatacagataatgtct

SEQ ID NO: 2635545 - DNA, 25 bp, Homo sapien
gaatgttggaaggtagactctcaga

SEQ ID NO: 2635546 - DNA, 25 bp, Homo sapien
ccgtggagcaaaggacaggcttact

SEQ ID NO: 2635547 - DNA, 25 bp, Homo sapien
ttaaagaatgttggaaggtagactc

SEQ ID NO: 2635548 - DNA, 25 bp, Homo sapien
gaagcttctcaagttacctgcaaat

SEQ ID NO: 2635549 - DNA, 25 bp, Homo sapien
gcatagaaaactctgcaagaggtga

SEQ ID NO: 2635550 - DNA, 25 bp, Homo sapien
tatacatcatctagctcctttcggc

SEQ ID NO: 2635551 - DNA, 25 bp, Homo sapien
catgttatatcaccatagttgagga

SEQ ID NO: 2635552 - DNA, 25 bp, Homo sapien
ctccgacctaaacttttgaagatag

SEQ ID NO: 2635553 - DNA, 25 bp, Homo sapien
tagtgcaggaagcaagggtctgttc

SEQ ID NO: 2635554 - DNA, 25 bp, Homo sapien
aagatagtgcaggaagcaagggtct

SEQ ID NO: 2635555 - DNA, 25 bp, Homo sapien
cctaaacttttgaagatagtgcagg

SEQ ID NO: 2635556 - DNA, 25 bp, Homo sapien
aaatggaacattccgctctttccgc

SEQ ID NO: 2635557 - DNA, 25 bp, Homo sapien
gaacccttcgatctagtctgggaga

SEQ ID NO: 2635558 - DNA, 25 bp, Homo sapien
gttcatgaccccgttattccacaga

SEQ ID NO: 2635559 - DNA, 25 bp, Homo sapien
acaatctgccgcagtctcgtgcgga

SEQ ID NO: 2635560 - DNA, 25 bp, Homo sapien
gtcttcacaacaccagagcagcgtt

SEQ ID NO: 2635561 - DNA, 25 bp, Homo sapien
tacattagaatggtgggatcccgtc

SEQ ID NO: 2635562 - DNA, 25 bp, Homo sapien
caaacaagttgttagctgaggatgc

SEQ ID NO: 2635563 - DNA, 25 bp, Homo sapien
cctggccgggagattcagtttcaaa

SEQ ID NO: 2635564 - DNA, 25 bp, Homo sapien
ttccttttctacagtgaatgatcat

SEQ ID NO: 2635565 - DNA, 25 bp, Homo sapien
tccttttctacagtgaatgatcatc

SEQ ID NO: 2635566 - DNA, 25 bp, Homo sapien
attccttttctacagtgaatgatca

SEQ ID NO: 2635567 - DNA, 25 bp, Homo sapien
ccttttctacagtgaatgatcatct

SEQ ID NO: 2635568 - DNA, 25 bp, Homo sapien
gtccttatcctgaaggattggaacc

SEQ ID NO: 2635569 - DNA, 25 bp, Homo sapien
cccaaattgtccttatcctgaagga

SEQ ID NO: 2635570 - DNA, 25 bp, Homo sapien
ccttatcctgaaggattggaaccat

SEQ ID NO: 2635571 - DNA, 25 bp, Homo sapien
caaattgtccttatcctgaaggatt

SEQ ID NO: 2635572 - DNA, 25 bp, Homo sapien
tcagggtaggtgcactaagcagccc

SEQ ID NO: 2635573 - DNA, 25 bp, Homo sapien
catgttgacaagttctctcctcagt

SEQ ID NO: 2635574 - DNA, 25 bp, Homo sapien
tgatcttggccacagatgaacgagc

SEQ ID NO: 2635575 - DNA, 25 bp, Homo sapien
ccatgccactgagccaaggtctgat

SEQ ID NO: 2635576 - DNA, 25 bp, Homo sapien
ttactatctctacccagctcagtct

SEQ ID NO: 2635577 - DNA, 25 bp, Homo sapien
cttactatctctacccagctcagtc

SEQ ID NO: 2635578 - DNA, 25 bp, Homo sapien
tactatctctacccagctcagtctt

SEQ ID NO: 2635579 - DNA, 25 bp, Homo sapien
taaggcagttagctctctggtgccc

SEQ ID NO: 2635580 - DNA, 25 bp, Homo sapien
attcagtgtttggatgagggcgccc

SEQ ID NO: 2635581 - DNA, 25 bp, Homo sapien
tcttgtagtaccatcttcttgggag

SEQ ID NO: 2635582 - DNA, 25 bp, Homo sapien
aacaaagtctcatggtagctgaggc

SEQ ID NO: 2635583 - DNA, 25 bp, Homo sapien
taactgtgggccactcgctgcagaa

SEQ ID NO: 2635584 - DNA, 25 bp, Homo sapien
ttccaagtcaacgaagacacagcac

SEQ ID NO: 2635585 - DNA, 25 bp, Homo sapien
cgaagaccaatttagtaagctgcat

SEQ ID NO: 2635586 - DNA, 25 bp, Homo sapien
tccagtttgtaagaacgaagaccaa

SEQ ID NO: 2635587 - DNA, 25 bp, Homo sapien
tttgtgtgtcatccctgcgcagggg

SEQ ID NO: 2635588 - DNA, 25 bp, Homo sapien
gtcatccctgcgcaggggccacgct

SEQ ID NO: 2635589 - DNA, 25 bp, Homo sapien
tgtgtgtcatccctgcgcaggggcc

SEQ ID NO: 2635590 - DNA, 25 bp, Homo sapien
tgtgtcatccctgcgcaggggccac

SEQ ID NO: 2635591 - DNA, 25 bp, Homo sapien
aaggaactgtatcaggttgttgttg

SEQ ID NO: 2635592 - DNA, 25 bp, Homo sapien
cgatcatcaaagatgtattgtctga

SEQ ID NO: 2635593 - DNA, 25 bp, Homo sapien
ctgcaaggaactgtatcaggttgtt

SEQ ID NO: 2635594 - DNA, 25 bp, Homo sapien
tgttttcgatcatcaaagatgtatt

SEQ ID NO: 2635595 - DNA, 25 bp, Homo sapien
catgtgtacatatcgcagcggcagc

SEQ ID NO: 2635596 - DNA, 25 bp, Homo sapien
tgttatggagaggaagactgcgact

SEQ ID NO: 2635597 - DNA, 25 bp, Homo sapien
cggcagcgggcttcagcgatattat

SEQ ID NO: 2635598 - DNA, 25 bp, Homo sapien
tggcaagagtccctgagtgtaacct

SEQ ID NO: 2635599 - DNA, 25 bp, Homo sapien
gaggaactcctgtaaatagcgcttt

SEQ ID NO: 2635600 - DNA, 25 bp, Homo sapien
tgatgtagtgggtaagaggaactcc

SEQ ID NO: 2635601 - DNA, 25 bp, Homo sapien
gccatgtctggaactgatgcttgct

SEQ ID NO: 2635602 - DNA, 25 bp, Homo sapien
tctcgatagccagacatgatgtagt

SEQ ID NO: 2635603 - DNA, 25 bp, Homo sapien
tacccttaccatatgaagatctcca

SEQ ID NO: 2635604 - DNA, 25 bp, Homo sapien
tttcatatagctcttgtatcacatt

SEQ ID NO: 2635605 - DNA, 25 bp, Homo sapien
taagtcttcttaaccatgaacatgc

SEQ ID NO: 2635606 - DNA, 25 bp, Homo sapien
catcacacttttatagattttttca

SEQ ID NO: 2635607 - DNA, 25 bp, Homo sapien
ctgggtcaagtgaagagcgaatcat

SEQ ID NO: 2635608 - DNA, 25 bp, Homo sapien
ctgggcatttcacaagtgttcgtaa

SEQ ID NO: 2635609 - DNA, 25 bp, Homo sapien
tctgggtcaagtgaagagcgaatca

SEQ ID NO: 2635610 - DNA, 25 bp, Homo sapien
catttcacaagtgttcgtaaagtga

SEQ ID NO: 2635611 - DNA, 25 bp, Homo sapien
agataatctacatcgaaacccataa

SEQ ID NO: 2635612 - DNA, 25 bp, Homo sapien
accagataatctacatcgaaaccca

SEQ ID NO: 2635613 - DNA, 25 bp, Homo sapien
tctgtaggtccaggggcacatctta

SEQ ID NO: 2635614 - DNA, 25 bp, Homo sapien
taatctacatcgaaacccataagtt

SEQ ID NO: 2635615 - DNA, 25 bp, Homo sapien
ttaattgcatttattttaatgctga

SEQ ID NO: 2635616 - DNA, 25 bp, Homo sapien
taattgcatttattttaatgctgaa

SEQ ID NO: 2635617 - DNA, 25 bp, Homo sapien
tttaattgcatttattttaatgctg

SEQ ID NO: 2635618 - DNA, 25 bp, Homo sapien
aattgcatttattttaatgctgaat

SEQ ID NO: 2635619 - DNA, 25 bp, Homo sapien
tttttttctgtagaggcagagtttc

SEQ ID NO: 2635620 - DNA, 25 bp, Homo sapien
tcactctgtgaggccagagtgcagt

SEQ ID NO: 2635621 - DNA, 25 bp, Homo sapien
acggggtctcactctgtgaggccag

SEQ ID NO: 2635622 - DNA, 25 bp, Homo sapien
gcgcataccaccatacccaactaat

SEQ ID NO: 2635623 - DNA, 25 bp, Homo sapien
ccatgtttgtggactagaaggctca

SEQ ID NO: 2635624 - DNA, 25 bp, Homo sapien
tgggaacctggtccacaatgcagta

SEQ ID NO: 2635625 - DNA, 25 bp, Homo sapien
gaaggctcaacatagtaaacatgca

SEQ ID NO: 2635626 - DNA, 25 bp, Homo sapien
tggcatgagatggagaccacaattt

SEQ ID NO: 2635627 - DNA, 25 bp, Homo sapien
ccctattgccgatccatagaggaag

SEQ ID NO: 2635628 - DNA, 25 bp, Homo sapien
tagtctgggtgtcaccctcttctcc

SEQ ID NO: 2635629 - DNA, 25 bp, Homo sapien
ttagtctgggtgtcaccctcttctc

SEQ ID NO: 2635630 - DNA, 25 bp, Homo sapien
taaaataaaccctattgccgatcca

SEQ ID NO: 2635631 - DNA, 25 bp, Homo sapien
ctaatagaggttttcagcgatgtct

SEQ ID NO: 2635632 - DNA, 25 bp, Homo sapien
tagaggttttcagcgatgtctgtgt

SEQ ID NO: 2635633 - DNA, 25 bp, Homo sapien
aatagaggttttcagcgatgtctgt

SEQ ID NO: 2635634 - DNA, 25 bp, Homo sapien
gcgatgtctgtgttctcatctttac

SEQ ID NO: 2635635 - DNA, 25 bp, Homo sapien
acttttagacaacgctgggcccatg

SEQ ID NO: 2635636 - DNA, 25 bp, Homo sapien
ttagacaacgctgggcccatgtagc

SEQ ID NO: 2635637 - DNA, 25 bp, Homo sapien
gccatctcaaattatctagtatgaa

SEQ ID NO: 2635638 - DNA, 25 bp, Homo sapien
atacttttagacaacgctgggccca

SEQ ID NO: 2635639 - DNA, 25 bp, Homo sapien
tgcttagtaaatatcctgctcctcc

SEQ ID NO: 2635640 - DNA, 25 bp, Homo sapien
tttctttgcttagtaaatatcctgc

SEQ ID NO: 2635641 - DNA, 25 bp, Homo sapien
tcaagaaatcttttcaaggctttct

SEQ ID NO: 2635642 - DNA, 25 bp, Homo sapien
ttcaaggctttctttgcttagtaaa

SEQ ID NO: 2635643 - DNA, 25 bp, Homo sapien
tatattttcaggtaaggtagcttga

SEQ ID NO: 2635644 - DNA, 25 bp, Homo sapien
ggtttcctgacttcacttttgtgcc

SEQ ID NO: 2635645 - DNA, 25 bp, Homo sapien
cacagttgtaaaatcaacatagtga

SEQ ID NO: 2635646 - DNA, 25 bp, Homo sapien
agggtttcctgacttcacttttgtg

SEQ ID NO: 2635647 - DNA, 25 bp, Homo sapien
tcactatgtagtacaacacactgct

SEQ ID NO: 2635648 - DNA, 25 bp, Homo sapien
aacattcactatgtagtacaacaca

SEQ ID NO: 2635649 - DNA, 25 bp, Homo sapien
ttcactatgtagtacaacacactgc

SEQ ID NO: 2635650 - DNA, 25 bp, Homo sapien
cattcactatgtagtacaacacact

SEQ ID NO: 2635651 - DNA, 25 bp, Homo sapien
ggtccaccctcttgcacaggtcgtt

SEQ ID NO: 2635652 - DNA, 25 bp, Homo sapien
gcacaggtcgtttctcttgtcgagt

SEQ ID NO: 2635653 - DNA, 25 bp, Homo sapien
gtgtgggctgtggtccaccctcttg

SEQ ID NO: 2635654 - DNA, 25 bp, Homo sapien
cctcttgcacaggtcgtttctcttg

SEQ ID NO: 2635655 - DNA, 25 bp, Homo sapien
tctgttggtgtaaagcgacattcca

SEQ ID NO: 2635656 - DNA, 25 bp, Homo sapien
gcaggtggcccatacaattttacta

SEQ ID NO: 2635657 - DNA, 25 bp, Homo sapien
tgtaaagcgacattccagctgctga

SEQ ID NO: 2635658 - DNA, 25 bp, Homo sapien
cagctgctgaagctccgtgatctgc

SEQ ID NO: 2635659 - DNA, 25 bp, Homo sapien
gcacagccgaatgcgaactgcattg

SEQ ID NO: 2635660 - DNA, 25 bp, Homo sapien
gcgaactgcattggcagctttgcac

SEQ ID NO: 2635661 - DNA, 25 bp, Homo sapien
aaatgcagttctcactccgccaaaa

SEQ ID NO: 2635662 - DNA, 25 bp, Homo sapien
actccgccaaaagcacagccgaatg

SEQ ID NO: 2635663 - DNA, 25 bp, Homo sapien
gattgaatacaattcccaaggtttc

SEQ ID NO: 2635664 - DNA, 25 bp, Homo sapien
aatccattggattgccgtggaagag

SEQ ID NO: 2635665 - DNA, 25 bp, Homo sapien
ggaagaggccacaatccagatatga

SEQ ID NO: 2635666 - DNA, 25 bp, Homo sapien
catttaaaagcatcgtgggttgtgt

SEQ ID NO: 2635667 - DNA, 25 bp, Homo sapien
tcttgcaattgggagggattggcgt

SEQ ID NO: 2635668 - DNA, 25 bp, Homo sapien
ccaagagtgtcacattgtaagttgc

SEQ ID NO: 2635669 - DNA, 25 bp, Homo sapien
gagtgtcacattgtaagttgctttt

SEQ ID NO: 2635670 - DNA, 25 bp, Homo sapien
agggattggcgttgctgcagcaaca

SEQ ID NO: 2635671 - DNA, 25 bp, Homo sapien
tgctcgtgatcaaagtggggctcac

SEQ ID NO: 2635672 - DNA, 25 bp, Homo sapien
acgtactgcaggtactgtccacaag

SEQ ID NO: 2635673 - DNA, 25 bp, Homo sapien
catgaatgatccacgtactgcaggt

SEQ ID NO: 2635674 - DNA, 25 bp, Homo sapien
cgtactgcaggtactgtccacaagt

SEQ ID NO: 2635675 - DNA, 25 bp, Homo sapien
ccattcacatgaatgatccacgtac

SEQ ID NO: 2635676 - DNA, 25 bp, Homo sapien
tcctgcggctttcgtggagggacta

SEQ ID NO: 2635677 - DNA, 25 bp, Homo sapien
tttcatcagtgcatgccagcaggtg

SEQ ID NO: 2635678 - DNA, 25 bp, Homo sapien
gccagtgataatctccaaccagcag

SEQ ID NO: 2635679 - DNA, 25 bp, Homo sapien
cctctgcaggcgttgccagtgataa

SEQ ID NO: 2635680 - DNA, 25 bp, Homo sapien
tagagggtacagcataacgtttttg

SEQ ID NO: 2635681 - DNA, 25 bp, Homo sapien
gatacccataacagaatattcgggc

SEQ ID NO: 2635682 - DNA, 25 bp, Homo sapien
ctagaacacaggttgtagagggtac

SEQ ID NO: 2635683 - DNA, 25 bp, Homo sapien
tattcgggccttccgcatgaacacc

SEQ ID NO: 2635684 - DNA, 25 bp, Homo sapien
aatgttttaaagggataatctattg

SEQ ID NO: 2635685 - DNA, 25 bp, Homo sapien
atgttttaaagggataatctattgt

SEQ ID NO: 2635686 - DNA, 25 bp, Homo sapien
ctgagaagagctttgtaatcacatc

SEQ ID NO: 2635687 - DNA, 25 bp, Homo sapien
tgagaagagctttgtaatcacatcc

SEQ ID NO: 2635688 - DNA, 25 bp, Homo sapien
tttgatagagcaagagcaccaccca

SEQ ID NO: 2635689 - DNA, 25 bp, Homo sapien
gcatcaattgcgcacactcaagtgt

SEQ ID NO: 2635690 - DNA, 25 bp, Homo sapien
aaagcccagtccgtaatcagagtgc

SEQ ID NO: 2635691 - DNA, 25 bp, Homo sapien
taatgaaacccagggccaatggacc

SEQ ID NO: 2635692 - DNA, 25 bp, Homo sapien
gaagaggtgcttttgtgtgcagccc

SEQ ID NO: 2635693 - DNA, 25 bp, Homo sapien
gaagacttagaagaggtgcttttgt

SEQ ID NO: 2635694 - DNA, 25 bp, Homo sapien
tccaagaccctggaatgcacgttcg

SEQ ID NO: 2635695 - DNA, 25 bp, Homo sapien
cgcaggacttgctgatttatagcca

SEQ ID NO: 2635696 - DNA, 25 bp, Homo sapien
ctgccccagagggagatctgttgtg

SEQ ID NO: 2635697 - DNA, 25 bp, Homo sapien
cctctggcgtcaggctgccccagag

SEQ ID NO: 2635698 - DNA, 25 bp, Homo sapien
ttcctctttcccctcggcctctggc

SEQ ID NO: 2635699 - DNA, 25 bp, Homo sapien
cggcctctggcgtcaggctgcccca

SEQ ID NO: 2635700 - DNA, 25 bp, Homo sapien
ctgctgaacccctagtgtggagaca

SEQ ID NO: 2635701 - DNA, 25 bp, Homo sapien
tagggaacccaactatcaggcctgg

SEQ ID NO: 2635702 - DNA, 25 bp, Homo sapien
tagtgtggagacatatggggcaaaa

SEQ ID NO: 2635703 - DNA, 25 bp, Homo sapien
gagtgtcaaatgaaatagggaaccc

SEQ ID NO: 2635704 - DNA, 25 bp, Homo sapien
ggagcctctatgaagtccattccca

SEQ ID NO: 2635705 - DNA, 25 bp, Homo sapien
gaaggtgacactgcaggggaaggct

SEQ ID NO: 2635706 - DNA, 25 bp, Homo sapien
gaagaaggagcctctatgaagtcca

SEQ ID NO: 2635707 - DNA, 25 bp, Homo sapien
caagaagaaggagcctctatgaagt

SEQ ID NO: 2635708 - DNA, 25 bp, Homo sapien
agtgaggcaaccaaccaaagcaggg

SEQ ID NO: 2635709 - DNA, 25 bp, Homo sapien
aagcaaatgactgtcaccacgcggg

SEQ ID NO: 2635710 - DNA, 25 bp, Homo sapien
taagagcatctttcggtactgcaga

SEQ ID NO: 2635711 - DNA, 25 bp, Homo sapien
cacaaagcggtagtaaaggatctca

SEQ ID NO: 2635712 - DNA, 25 bp, Homo sapien
ttcaactcaagtcatcggagcttgt

SEQ ID NO: 2635713 - DNA, 25 bp, Homo sapien
tctcattgtcatcctacaaatcatc

SEQ ID NO: 2635714 - DNA, 25 bp, Homo sapien
aagtcatcggagcttgtgtctcatc

SEQ ID NO: 2635715 - DNA, 25 bp, Homo sapien
cattgtcatcctacaaatcatcttg

SEQ ID NO: 2635716 - DNA, 25 bp, Homo sapien
cctagcattcaggaccagtggcctt

SEQ ID NO: 2635717 - DNA, 25 bp, Homo sapien
cattcaggaccagtggccttagatt

SEQ ID NO: 2635718 - DNA, 25 bp, Homo sapien
tagcattcaggaccagtggccttag

SEQ ID NO: 2635719 - DNA, 25 bp, Homo sapien
ccctagcattcaggaccagtggcct

SEQ ID NO: 2635720 - DNA, 25 bp, Homo sapien
aaaaaacactagctgagaagagttt

SEQ ID NO: 2635721 - DNA, 25 bp, Homo sapien
aaaacactagctgagaagagtttaa

SEQ ID NO: 2635722 - DNA, 25 bp, Homo sapien
agagtctctctgttcattataatca

SEQ ID NO: 2635723 - DNA, 25 bp, Homo sapien
aaacactagctgagaagagtttaac

SEQ ID NO: 2635724 - DNA, 25 bp, Homo sapien
tgatcaggaaggacccgtttcacct

SEQ ID NO: 2635725 - DNA, 25 bp, Homo sapien
gtgatcaggaaggacccgtttcacc

SEQ ID NO: 2635726 - DNA, 25 bp, Homo sapien
ctctcacagattcttcagctccctc

SEQ ID NO: 2635727 - DNA, 25 bp, Homo sapien
tctctcacagattcttcagctccct

SEQ ID NO: 2635728 - DNA, 25 bp, Homo sapien
tcacaccacaatcctcctactgcac

SEQ ID NO: 2635729 - DNA, 25 bp, Homo sapien
tcttcagctccctcacaccacaatc

SEQ ID NO: 2635730 - DNA, 25 bp, Homo sapien
ggcataagggataggcagaaggagc

SEQ ID NO: 2635731 - DNA, 25 bp, Homo sapien
gcagaatctggcacgcccagcagtt

SEQ ID NO: 2635732 - DNA, 25 bp, Homo sapien
ggtctcacttctcgatggtcctgca

SEQ ID NO: 2635733 - DNA, 25 bp, Homo sapien
agcacagctctaccaccctggcctg

SEQ ID NO: 2635734 - DNA, 25 bp, Homo sapien
aggagtgctgatggtgcctcaagct

SEQ ID NO: 2635735 - DNA, 25 bp, Homo sapien
gctctcttgtagcatgaactgtgaa

SEQ ID NO: 2635736 - DNA, 25 bp, Homo sapien
cctcaagctcggttcctgctgcaag

SEQ ID NO: 2635737 - DNA, 25 bp, Homo sapien
tccatgtggttctgccccattgagc

SEQ ID NO: 2635738 - DNA, 25 bp, Homo sapien
ccagtaaatggcctgttgcgtgagg

SEQ ID NO: 2635739 - DNA, 25 bp, Homo sapien
cctccaacccaaatggtctcctcgg

SEQ ID NO: 2635740 - DNA, 25 bp, Homo sapien
tgttgcgtgaggtacagctcaatgg

SEQ ID NO: 2635741 - DNA, 25 bp, Homo sapien
cttgcagcaggaaccgagcttgagg

SEQ ID NO: 2635742 - DNA, 25 bp, Homo sapien
agttgcttgtcagagcctagtgtgt

SEQ ID NO: 2635743 - DNA, 25 bp, Homo sapien
gcttgtcagagcctagtgtgtccga

SEQ ID NO: 2635744 - DNA, 25 bp, Homo sapien
cagagcctagtgtgtccgaaattgg

SEQ ID NO: 2635745 - DNA, 25 bp, Homo sapien
tgtcagagcctagtgtgtccgaaat

SEQ ID NO: 2635746 - DNA, 25 bp, Homo sapien
caggactctgtcatatcatatcatc

SEQ ID NO: 2635747 - DNA, 25 bp, Homo sapien
catatcatctaggttcattacaccc

SEQ ID NO: 2635748 - DNA, 25 bp, Homo sapien
gtgcttattgcctcgtggccccaaa

SEQ ID NO: 2635749 - DNA, 25 bp, Homo sapien
taagaagtctagcagttcaggactc

SEQ ID NO: 2635750 - DNA, 25 bp, Homo sapien
ggaagcactgttgattataacttga

SEQ ID NO: 2635751 - DNA, 25 bp, Homo sapien
ccgggaagcactgttgattataact

SEQ ID NO: 2635752 - DNA, 25 bp, Homo sapien
aaagatagcatgaaccatcatcatc

SEQ ID NO: 2635753 - DNA, 25 bp, Homo sapien
aatgtaaagatagcatgaaccatca

SEQ ID NO: 2635754 - DNA, 25 bp, Homo sapien
gtgattttatcatcagctttgaaag

SEQ ID NO: 2635755 - DNA, 25 bp, Homo sapien
gctttgaaagtatgaggaggcagct

SEQ ID NO: 2635756 - DNA, 25 bp, Homo sapien
agctggattcctgattctgtgattt

SEQ ID NO: 2635757 - DNA, 25 bp, Homo sapien
tttgaaagtatgaggaggcagctgt

SEQ ID NO: 2635758 - DNA, 25 bp, Homo sapien
gccaggctgtaccagtataaccaga

SEQ ID NO: 2635759 - DNA, 25 bp, Homo sapien
ttggcttgggcaaaacctctgagct

SEQ ID NO: 2635760 - DNA, 25 bp, Homo sapien
tatggcccctatatgactccactgg

SEQ ID NO: 2635761 - DNA, 25 bp, Homo sapien
tgaatgcctatgtagcggaacccca

SEQ ID NO: 2635762 - DNA, 25 bp, Homo sapien
gaaaatcctgagaattggttcctaa

SEQ ID NO: 2635763 - DNA, 25 bp, Homo sapien
tggttcctaatctgttccctgcgaa

SEQ ID NO: 2635764 - DNA, 25 bp, Homo sapien
ctcgtactctgctccagaaatgtgg

SEQ ID NO: 2635765 - DNA, 25 bp, Homo sapien
aggctgcttcacacctttcagaagt

SEQ ID NO: 2635766 - DNA, 25 bp, Homo sapien
aggaggcttcgtgggacaggaacag

SEQ ID NO: 2635767 - DNA, 25 bp, Homo sapien
accaaatgggatgctaaggaggctt

SEQ ID NO: 2635768 - DNA, 25 bp, Homo sapien
aaatgggatgctaaggaggcttcgt

SEQ ID NO: 2635769 - DNA, 25 bp, Homo sapien
aggcttcgtgggacaggaacagcct

SEQ ID NO: 2635770 - DNA, 25 bp, Homo sapien
agagggctggtctggcccatcccac

SEQ ID NO: 2635771 - DNA, 25 bp, Homo sapien
ccgtttggaccttccggcctggatg

SEQ ID NO: 2635772 - DNA, 25 bp, Homo sapien
ttggaccttccggcctggatgctcc

SEQ ID NO: 2635773 - DNA, 25 bp, Homo sapien
gtttggaccttccggcctggatgct

SEQ ID NO: 2635774 - DNA, 25 bp, Homo sapien
gaagccgtagccttactgtcctgag

SEQ ID NO: 2635775 - DNA, 25 bp, Homo sapien
tcggaaagcactggttaaggtcctc

SEQ ID NO: 2635776 - DNA, 25 bp, Homo sapien
tgggcgtctgtgttcggaaagcact

SEQ ID NO: 2635777 - DNA, 25 bp, Homo sapien
ctggttaaggtcctctggtttgact

SEQ ID NO: 2635778 - DNA, 25 bp, Homo sapien
gaaagcactggttaaggtcctctgg

SEQ ID NO: 2635779 - DNA, 25 bp, Homo sapien
atgaaggtttctcctgtaccctaca

SEQ ID NO: 2635780 - DNA, 25 bp, Homo sapien
atgctggcttgcagtagggccctga

SEQ ID NO: 2635781 - DNA, 25 bp, Homo sapien
ctgtaccctacactactggctctga

SEQ ID NO: 2635782 - DNA, 25 bp, Homo sapien
agatgctggcttgcagtagggccct

SEQ ID NO: 2635783 - DNA, 25 bp, Homo sapien
gataaagagaaggtagtgtctaatg

SEQ ID NO: 2635784 - DNA, 25 bp, Homo sapien
aagagaaggtagtgtctaatgacac

SEQ ID NO: 2635785 - DNA, 25 bp, Homo sapien
aaggtagtgtctaatgacacttttc

SEQ ID NO: 2635786 - DNA, 25 bp, Homo sapien
ctttgataaagagaaggtagtgtct

SEQ ID NO: 2635787 - DNA, 25 bp, Homo sapien
gatgggtgacctcttttagctgcag

SEQ ID NO: 2635788 - DNA, 25 bp, Homo sapien
gagatttacaactgtttacccagca

SEQ ID NO: 2635789 - DNA, 25 bp, Homo sapien
gtaaaatgttaacacggctcagcgt

SEQ ID NO: 2635790 - DNA, 25 bp, Homo sapien
taatacgtcttgtcacttgcccaag

SEQ ID NO: 2635791 - DNA, 25 bp, Homo sapien
ttccccagttatccccacagagaga

SEQ ID NO: 2635792 - DNA, 25 bp, Homo sapien
ccttggtcatttatgttcaacgaat

SEQ ID NO: 2635793 - DNA, 25 bp, Homo sapien
ctctggctgcatgtcctttgggagg

SEQ ID NO: 2635794 - DNA, 25 bp, Homo sapien
tcttagattctactgtaaaaccata

SEQ ID NO: 2635795 - DNA, 25 bp, Homo sapien
cagttacaacagtttgaaacttctc

SEQ ID NO: 2635796 - DNA, 25 bp, Homo sapien
aatccactgggaattagtggcatct

SEQ ID NO: 2635797 - DNA, 25 bp, Homo sapien
tcttgccccttaatacttggcagtt

SEQ ID NO: 2635798 - DNA, 25 bp, Homo sapien
ggaattagtggcatcttgcccctta

SEQ ID NO: 2635799 - DNA, 25 bp, Homo sapien
gggagagcagtctcattcctgagtc

SEQ ID NO: 2635800 - DNA, 25 bp, Homo sapien
tcctgagtcactttccaccctgctg

SEQ ID NO: 2635801 - DNA, 25 bp, Homo sapien
ttttttggactgagagtcgaatggg

SEQ ID NO: 2635802 - DNA, 25 bp, Homo sapien
ttgccccgctgagggcaatgcctgc

SEQ ID NO: 2635803 - DNA, 25 bp, Homo sapien
cctctggctgttttatgaagtacaa

SEQ ID NO: 2635804 - DNA, 25 bp, Homo sapien
agtacaagtcccactcgcattctga

SEQ ID NO: 2635805 - DNA, 25 bp, Homo sapien
cccatgcagttttataggaggatcc

SEQ ID NO: 2635806 - DNA, 25 bp, Homo sapien
gttttataggaggatcctctggctg

SEQ ID NO: 2635807 - DNA, 25 bp, Homo sapien
taacttattaccgatgccttcttca

SEQ ID NO: 2635808 - DNA, 25 bp, Homo sapien
tccagtaacttattaccgatgcctt

SEQ ID NO: 2635809 - DNA, 25 bp, Homo sapien
caaaacgtgttcctcttgtgggcct

SEQ ID NO: 2635810 - DNA, 25 bp, Homo sapien
cttcaaaacgtgttcctcttgtggg

SEQ ID NO: 2635811 - DNA, 25 bp, Homo sapien
ccatcccttcagttgagctcccctt

SEQ ID NO: 2635812 - DNA, 25 bp, Homo sapien
gctgcctttttggccttgtttccac

SEQ ID NO: 2635813 - DNA, 25 bp, Homo sapien
tgctgcctttttggccttgtttcca

SEQ ID NO: 2635814 - DNA, 25 bp, Homo sapien
catcccttcagttgagctccccttc

SEQ ID NO: 2635815 - DNA, 25 bp, Homo sapien
aattcacgtgagatgctaggcaggc

SEQ ID NO: 2635816 - DNA, 25 bp, Homo sapien
cacagtgagttgtcccataggcatt

SEQ ID NO: 2635817 - DNA, 25 bp, Homo sapien
gaaactgcttagcaaccatcctgta

SEQ ID NO: 2635818 - DNA, 25 bp, Homo sapien
aaagaatgtttgtgcctactggcta

SEQ ID NO: 2635819 - DNA, 25 bp, Homo sapien
cctatgtcatagagtgtcttttagt

SEQ ID NO: 2635820 - DNA, 25 bp, Homo sapien
gaagcaaggtcccatttagtgcagg

SEQ ID NO: 2635821 - DNA, 25 bp, Homo sapien
gaaagaatagaagtggcccgcttac

SEQ ID NO: 2635822 - DNA, 25 bp, Homo sapien
tcattgtgccaatagcagagggtct

SEQ ID NO: 2635823 - DNA, 25 bp, Homo sapien
taattgcaggtgtgattgtccccag

SEQ ID NO: 2635824 - DNA, 25 bp, Homo sapien
tgtgtttatgggattgttatatatg

SEQ ID NO: 2635825 - DNA, 25 bp, Homo sapien
tgtttatgggattgttatatatgta

SEQ ID NO: 2635826 - DNA, 25 bp, Homo sapien
gtgtttatgggattgttatatatgt

SEQ ID NO: 2635827 - DNA, 25 bp, Homo sapien
tagtttataaggagaatatttggaa

SEQ ID NO: 2635828 - DNA, 25 bp, Homo sapien
ttagtttataaggagaatatttgga

SEQ ID NO: 2635829 - DNA, 25 bp, Homo sapien
taaagcccttgttgttggaggaagc

SEQ ID NO: 2635830 - DNA, 25 bp, Homo sapien
taagggcacggctgcatttcacaga

SEQ ID NO: 2635831 - DNA, 25 bp, Homo sapien
gacatgtcattccagtaagggcacg

SEQ ID NO: 2635832 - DNA, 25 bp, Homo sapien
gatctcatggccaagtaggagggct

SEQ ID NO: 2635833 - DNA, 25 bp, Homo sapien
cctctggccaagcaccgactgccca

SEQ ID NO: 2635834 - DNA, 25 bp, Homo sapien
ctctggccaagcaccgactgcccat

SEQ ID NO: 2635835 - DNA, 25 bp, Homo sapien
gcctctggccaagcaccgactgccc

SEQ ID NO: 2635836 - DNA, 25 bp, Homo sapien
ctgcaagccaggttcagttctgcct

SEQ ID NO: 2635837 - DNA, 25 bp, Homo sapien
gaattaccatgcttatcctcactca

SEQ ID NO: 2635838 - DNA, 25 bp, Homo sapien
aaagcccagtgacaggtctctctca

SEQ ID NO: 2635839 - DNA, 25 bp, Homo sapien
ggctttgtttcactgttcccctgga

SEQ ID NO: 2635840 - DNA, 25 bp, Homo sapien
cacagtctgtctacgaggcagggca

SEQ ID NO: 2635841 - DNA, 25 bp, Homo sapien
tcctctcctaaagaacgtaacaaga

SEQ ID NO: 2635842 - DNA, 25 bp, Homo sapien
ctagacctccttcgtccaacaacct

SEQ ID NO: 2635843 - DNA, 25 bp, Homo sapien
tagacctccttcgtccaacaacctc

SEQ ID NO: 2635844 - DNA, 25 bp, Homo sapien
aacctgcagctttcggggtcttcat

SEQ ID NO: 2635845 - DNA, 25 bp, Homo sapien
ttcaaacctgcagctttcggggtct

SEQ ID NO: 2635846 - DNA, 25 bp, Homo sapien
tgttcatccagtgtctttctatctt

SEQ ID NO: 2635847 - DNA, 25 bp, Homo sapien
ttgttcatccagtgtctttctatct

SEQ ID NO: 2635848 - DNA, 25 bp, Homo sapien
tttgttcatccagtgtctttctatc

SEQ ID NO: 2635849 - DNA, 25 bp, Homo sapien
gaagaagccatatttcttaggtgtc

SEQ ID NO: 2635850 - DNA, 25 bp, Homo sapien
ccatatttcttaggtgtctctgatg

SEQ ID NO: 2635851 - DNA, 25 bp, Homo sapien
ggctgatttggacactggacgtgca

SEQ ID NO: 2635852 - DNA, 25 bp, Homo sapien
tttggacactggacgtgcacaggtg

SEQ ID NO: 2635853 - DNA, 25 bp, Homo sapien
tttcaagcacatgctgtgtctgctt

SEQ ID NO: 2635854 - DNA, 25 bp, Homo sapien
tctgcttcatgtcttgagtgaattt

SEQ ID NO: 2635855 - DNA, 25 bp, Homo sapien
catttggaaccccacagtttgctaa

SEQ ID NO: 2635856 - DNA, 25 bp, Homo sapien
tgaattttgggcaagcctggatgtt

SEQ ID NO: 2635857 - DNA, 25 bp, Homo sapien
acatcatttattctagaatgccttc

SEQ ID NO: 2635858 - DNA, 25 bp, Homo sapien
gagcacccaaagactgggcagggct

SEQ ID NO: 2635859 - DNA, 25 bp, Homo sapien
gcacccaaagactgggcagggctga

SEQ ID NO: 2635860 - DNA, 25 bp, Homo sapien
cacccaaagactgggcagggctgat

SEQ ID NO: 2635861 - DNA, 25 bp, Homo sapien
ctggagcacccaaagactgggcagg

SEQ ID NO: 2635862 - DNA, 25 bp, Homo sapien
caggtcccactctcttgtatccggg

SEQ ID NO: 2635863 - DNA, 25 bp, Homo sapien
tgtatccggggaagcacacaaaggg

SEQ ID NO: 2635864 - DNA, 25 bp, Homo sapien
cacttccccagaggatgtagagcag

SEQ ID NO: 2635865 - DNA, 25 bp, Homo sapien
catgaatgtttctgcgtgactggac

SEQ ID NO: 2635866 - DNA, 25 bp, Homo sapien
tacatgtgtcaggagaaccacggcc

SEQ ID NO: 2635867 - DNA, 25 bp, Homo sapien
ggcttctgctacatgtgtcaggaga

SEQ ID NO: 2635868 - DNA, 25 bp, Homo sapien
ggttgcttctaggttcaaatgagct

SEQ ID NO: 2635869 - DNA, 25 bp, Homo sapien
tcacatggttgcttctaggttcaaa

SEQ ID NO: 2635870 - DNA, 25 bp, Homo sapien
caggccctaatatccagggtccagg

SEQ ID NO: 2635871 - DNA, 25 bp, Homo sapien
tcaggccctaatatccagggtccag

SEQ ID NO: 2635872 - DNA, 25 bp, Homo sapien
ttccagcacgttgacatacttccca

SEQ ID NO: 2635873 - DNA, 25 bp, Homo sapien
cttccagcacgttgacatacttccc

SEQ ID NO: 2635874 - DNA, 25 bp, Homo sapien
cgattctcggtgtggtccgggcctt

SEQ ID NO: 2635875 - DNA, 25 bp, Homo sapien
tgcattcgattctcggtgtggtccg

SEQ ID NO: 2635876 - DNA, 25 bp, Homo sapien
tctcggtgtggtccgggcctttctc

SEQ ID NO: 2635877 - DNA, 25 bp, Homo sapien
tgtggtccgggcctttctcacctca

SEQ ID NO: 2635878 - DNA, 25 bp, Homo sapien
caaggacctcctaatggcaagtgat

SEQ ID NO: 2635879 - DNA, 25 bp, Homo sapien
aggacctcctaatggcaagtgataa

SEQ ID NO: 2635880 - DNA, 25 bp, Homo sapien
ggacctcctaatggcaagtgataaa

SEQ ID NO: 2635881 - DNA, 25 bp, Homo sapien
aaggacctcctaatggcaagtgata

SEQ ID NO: 2635882 - DNA, 25 bp, Homo sapien
ttggttggagcctctgagttcagac

SEQ ID NO: 2635883 - DNA, 25 bp, Homo sapien
cagacacatgcctgaagttagtttc

SEQ ID NO: 2635884 - DNA, 25 bp, Homo sapien
tctctggactggggagctttcccat

SEQ ID NO: 2635885 - DNA, 25 bp, Homo sapien
tggagcctctgagttcagacacatg

SEQ ID NO: 2635886 - DNA, 25 bp, Homo sapien
ttataaataacactcgcctttcaaa

SEQ ID NO: 2635887 - DNA, 25 bp, Homo sapien
aataacactcgcctttcaaatgggc

SEQ ID NO: 2635888 - DNA, 25 bp, Homo sapien
cgcctttcaaatgggctctgtcttc

SEQ ID NO: 2635889 - DNA, 25 bp, Homo sapien
cactcgcctttcaaatgggctctgt

SEQ ID NO: 2635890 - DNA, 25 bp, Homo sapien
cctcaaacagtctatgattaaaatt

SEQ ID NO: 2635891 - DNA, 25 bp, Homo sapien
gagtctgagcaacgtaggaattgta

SEQ ID NO: 2635892 - DNA, 25 bp, Homo sapien
cgtaggaattgtaggaactggacca

SEQ ID NO: 2635893 - DNA, 25 bp, Homo sapien
ttagaccaaatcaacctcaaacagt

SEQ ID NO: 2635894 - DNA, 25 bp, Homo sapien
cggagagcagtctcaagagataact

SEQ ID NO: 2635895 - DNA, 25 bp, Homo sapien
caggtctccggagagcagtctcaag

SEQ ID NO: 2635896 - DNA, 25 bp, Homo sapien
tctttttgtcgtttgaatcctcaaa

SEQ ID NO: 2635897 - DNA, 25 bp, Homo sapien
tcaagagataactcttctgccttct

SEQ ID NO: 2635898 - DNA, 25 bp, Homo sapien
taaacaatagtgcttgctgtggcca

SEQ ID NO: 2635899 - DNA, 25 bp, Homo sapien
ttagttaagtagatgcagtccccgc

SEQ ID NO: 2635900 - DNA, 25 bp, Homo sapien
tagttgtgcaagattcagtaccgag

SEQ ID NO: 2635901 - DNA, 25 bp, Homo sapien
tccccgcaagggcaaggttcagatt

SEQ ID NO: 2635902 - DNA, 25 bp, Homo sapien
gttgggtagggaaagtggctatgtg

SEQ ID NO: 2635903 - DNA, 25 bp, Homo sapien
ggtagggaaagtggctatgtggcat

SEQ ID NO: 2635904 - DNA, 25 bp, Homo sapien
ctgcatagagccaagacagccggcc

SEQ ID NO: 2635905 - DNA, 25 bp, Homo sapien
tgcatagagccaagacagccggcca

SEQ ID NO: 2635906 - DNA, 25 bp, Homo sapien
ttccagtgagtttctcttctataga

SEQ ID NO: 2635907 - DNA, 25 bp, Homo sapien
cagtgagtttctcttctatagagtc

SEQ ID NO: 2635908 - DNA, 25 bp, Homo sapien
gtgagtttctcttctatagagtcac

SEQ ID NO: 2635909 - DNA, 25 bp, Homo sapien
tccagtgagtttctcttctatagag

SEQ ID NO: 2635910 - DNA, 25 bp, Homo sapien
ttctctggtattgcgatgggagctt

SEQ ID NO: 2635911 - DNA, 25 bp, Homo sapien
ggatttctctggtattgcgatggga

SEQ ID NO: 2635912 - DNA, 25 bp, Homo sapien
atttctctggtattgcgatgggagc

SEQ ID NO: 2635913 - DNA, 25 bp, Homo sapien
caggatttctctggtattgcgatgg

SEQ ID NO: 2635914 - DNA, 25 bp, Homo sapien
ctgaatgtttagcaaagctgtgaaa

SEQ ID NO: 2635915 - DNA, 25 bp, Homo sapien
tgacctgaatgtttagcaaagctgt

SEQ ID NO: 2635916 - DNA, 25 bp, Homo sapien
cctgaatgtttagcaaagctgtgaa

SEQ ID NO: 2635917 - DNA, 25 bp, Homo sapien
gacctgaatgtttagcaaagctgtg

SEQ ID NO: 2635918 - DNA, 25 bp, Homo sapien
aggcaggcacgtccttaaacaccag

SEQ ID NO: 2635919 - DNA, 25 bp, Homo sapien
ggttcgcaaccttgagtttagctcg

SEQ ID NO: 2635920 - DNA, 25 bp, Homo sapien
tggtgtgtgaggtttctacccgccc

SEQ ID NO: 2635921 - DNA, 25 bp, Homo sapien
tgagtttagctcgatgggctttggt

SEQ ID NO: 2635922 - DNA, 25 bp, Homo sapien
cattgtgaggccgttcagatctagg

SEQ ID NO: 2635923 - DNA, 25 bp, Homo sapien
ggccgtgcgtaagagccggataaat

SEQ ID NO: 2635924 - DNA, 25 bp, Homo sapien
cgagaagcagattcggcccctgatg

SEQ ID NO: 2635925 - DNA, 25 bp, Homo sapien
tatcacagtatccaccagcgagaag

SEQ ID NO: 2635926 - DNA, 25 bp, Homo sapien
aaggaagaagcgttgtctgcagatc

SEQ ID NO: 2635927 - DNA, 25 bp, Homo sapien
tgtctgcagatcagttgatccgcgg

SEQ ID NO: 2635928 - DNA, 25 bp, Homo sapien
gatccgcgggctttcctgtgtcgga

SEQ ID NO: 2635929 - DNA, 25 bp, Homo sapien
ctgtgtcggaatgccgccgttttcc

SEQ ID NO: 2635930 - DNA, 25 bp, Homo sapien
tcggccgggagccgcgctgggccgg

SEQ ID NO: 2635931 - DNA, 25 bp, Homo sapien
ctcggccgggagccgcgctgggccg

SEQ ID NO: 2635932 - DNA, 25 bp, Homo sapien
tcctcggccgggagccgcgctgggc

SEQ ID NO: 2635933 - DNA, 25 bp, Homo sapien
tccacgggcagcgatttccaaggct

SEQ ID NO: 2635934 - DNA, 25 bp, Homo sapien
tgctgggtcaacacttccgaaaaca

SEQ ID NO: 2635935 - DNA, 25 bp, Homo sapien
agccaggcgagttcacagggctgcc

SEQ ID NO: 2635936 - DNA, 25 bp, Homo sapien
gaaagagcaaggacatcctggctcg

SEQ ID NO: 2635937 - DNA, 25 bp, Homo sapien
tccgggctgatgatagcgcctcctg

SEQ ID NO: 2635938 - DNA, 25 bp, Homo sapien
ggtccgggctgatgatagcgcctcc

SEQ ID NO: 2635939 - DNA, 25 bp, Homo sapien
cgggctgatgatagcgcctcctggt

SEQ ID NO: 2635940 - DNA, 25 bp, Homo sapien
tcagtcctgtggagtaggggtccgg

SEQ ID NO: 2635941 - DNA, 25 bp, Homo sapien
gtacaacaaagaggtttggatcaat

SEQ ID NO: 2635942 - DNA, 25 bp, Homo sapien
tacaacaaagaggtttggatcaata

SEQ ID NO: 2635943 - DNA, 25 bp, Homo sapien
caacaaagaggtttggatcaatatc

SEQ ID NO: 2635944 - DNA, 25 bp, Homo sapien
acaaagaggtttggatcaatatcat

SEQ ID NO: 2635945 - DNA, 25 bp, Homo sapien
gaaccaatgcatgcaaatttgcaag

SEQ ID NO: 2635946 - DNA, 25 bp, Homo sapien
tctctggagcttgctttgcgggacc

SEQ ID NO: 2635947 - DNA, 25 bp, Homo sapien
gaccagctgaagatccttttccttg

SEQ ID NO: 2635948 - DNA, 25 bp, Homo sapien
tacaagtaatggaattctgcggttg

SEQ ID NO: 2635949 - DNA, 25 bp, Homo sapien
cgctgacaggtttaagagtcttagc

SEQ ID NO: 2635950 - DNA, 25 bp, Homo sapien
caaaatggcaggcttcattctctct

SEQ ID NO: 2635951 - DNA, 25 bp, Homo sapien
ctgggctggaaaccgcttcgctgac

SEQ ID NO: 2635952 - DNA, 25 bp, Homo sapien
taaacagccgcaaaggcaaaactgt

SEQ ID NO: 2635953 - DNA, 25 bp, Homo sapien
taaagagtcgtgtgtactcagcaac

SEQ ID NO: 2635954 - DNA, 25 bp, Homo sapien
tgaatgaggccatctttaaagagtc

SEQ ID NO: 2635955 - DNA, 25 bp, Homo sapien
cagaacttgggacgtctgagtaaac

SEQ ID NO: 2635956 - DNA, 25 bp, Homo sapien
cttgtactgcaagaaatgtgggtct

SEQ ID NO: 2635957 - DNA, 25 bp, Homo sapien
gcactgaaaatgcatccgcataaca

SEQ ID NO: 2635958 - DNA, 25 bp, Homo sapien
tgcttttaagtccttggccactggg

SEQ ID NO: 2635959 - DNA, 25 bp, Homo sapien
tccactcgatggctagcttttcaag

SEQ ID NO: 2635960 - DNA, 25 bp, Homo sapien
taggtctttcgatctccctttaatc

SEQ ID NO: 2635961 - DNA, 25 bp, Homo sapien
catcccaggcctgaggaattcgaat

SEQ ID NO: 2635962 - DNA, 25 bp, Homo sapien
ttcaggcaaatgttacgcttattga

SEQ ID NO: 2635963 - DNA, 25 bp, Homo sapien
caaatgttacgcttattgacatgta

SEQ ID NO: 2635964 - DNA, 25 bp, Homo sapien
gaatcgcaagaagttaggctccaga

SEQ ID NO: 2635965 - DNA, 25 bp, Homo sapien
aacggacagcaaatgagggatatgc

SEQ ID NO: 2635966 - DNA, 25 bp, Homo sapien
gagaaaagagaatcgagaacgtaga

SEQ ID NO: 2635967 - DNA, 25 bp, Homo sapien
actcttcccatacatcctggtattg

SEQ ID NO: 2635968 - DNA, 25 bp, Homo sapien
aatagttaaccgagtgaagaggaag

SEQ ID NO: 2635969 - DNA, 25 bp, Homo sapien
tacgtggacactataaaggtcagca

SEQ ID NO: 2635970 - DNA, 25 bp, Homo sapien
ccccagcttggataataggaaattc

SEQ ID NO: 2635971 - DNA, 25 bp, Homo sapien
tggcctttgggacctcatgttcgca

SEQ ID NO: 2635972 - DNA, 25 bp, Homo sapien
ggatctaccaatctttcagcccatg

SEQ ID NO: 2635973 - DNA, 25 bp, Homo sapien
gagtttatttgtttggactccaggc

SEQ ID NO: 2635974 - DNA, 25 bp, Homo sapien
gcagcttgtgccagccaactctgtg

SEQ ID NO: 2635975 - DNA, 25 bp, Homo sapien
caccagaaggctgatggttcaagtc

SEQ ID NO: 2635976 - DNA, 25 bp, Homo sapien
gctgatggttcaagtcaccacactc

SEQ ID NO: 2635977 - DNA, 25 bp, Homo sapien
gtaggcttggcttgcaggtgctcca

SEQ ID NO: 2635978 - DNA, 25 bp, Homo sapien
tatgctcctgagaatccatttgttg

SEQ ID NO: 2635979 - DNA, 25 bp, Homo sapien
tgctcctgagaatccatttgttgac

SEQ ID NO: 2635980 - DNA, 25 bp, Homo sapien
gattcatctgggtatgctcctgaga

SEQ ID NO: 2635981 - DNA, 25 bp, Homo sapien
tggattcatctgggtatgctcctga

SEQ ID NO: 2635982 - DNA, 25 bp, Homo sapien
ccattgacggtcattagagtactca

SEQ ID NO: 2635983 - DNA, 25 bp, Homo sapien
ttcatgtaaagacttagaaaatacc

SEQ ID NO: 2635984 - DNA, 25 bp, Homo sapien
tcattagagtactcatcagcctcca

SEQ ID NO: 2635985 - DNA, 25 bp, Homo sapien
gaaaataccattgacggtcattaga

SEQ ID NO: 2635986 - DNA, 25 bp, Homo sapien
aagtagctcaatttgcagtagccca

SEQ ID NO: 2635987 - DNA, 25 bp, Homo sapien
ttactaaagtatccctgggcataag

SEQ ID NO: 2635988 - DNA, 25 bp, Homo sapien
ttctccctgaaccacaagagagcag

SEQ ID NO: 2635989 - DNA, 25 bp, Homo sapien
tgggcataaggcacgactgggtcac

SEQ ID NO: 2635990 - DNA, 25 bp, Homo sapien
ccagtttgagctttggctctcagtc

SEQ ID NO: 2635991 - DNA, 25 bp, Homo sapien
gacttgtcgtactctgctctggctg

SEQ ID NO: 2635992 - DNA, 25 bp, Homo sapien
gctgtggtcattatgacttgtcgta

SEQ ID NO: 2635993 - DNA, 25 bp, Homo sapien
gctttgatcattggaattgctgtgg

SEQ ID NO: 2635994 - DNA, 25 bp, Homo sapien
gaagagtgaagctcttttattctgg

SEQ ID NO: 2635995 - DNA, 25 bp, Homo sapien
caggtaaaccttgggaagagtgaag

SEQ ID NO: 2635996 - DNA, 25 bp, Homo sapien
tggtcctcacaggtaaaccttggga

SEQ ID NO: 2635997 - DNA, 25 bp, Homo sapien
gcaggattgcttggctttggccgtg

SEQ ID NO: 2635998 - DNA, 25 bp, Homo sapien
caataggtccccagatctgacacat

SEQ ID NO: 2635999 - DNA, 25 bp, Homo sapien
cacatcaagattaagacatgaagat

SEQ ID NO: 2636000 - DNA, 25 bp, Homo sapien
ctgacacatcaagattaagacatga

SEQ ID NO: 2636001 - DNA, 25 bp, Homo sapien
gaaggacaacctctctggggagcac

SEQ ID NO: 2636002 - DNA, 25 bp, Homo sapien
gaaattccgttgagaacacaatgct

SEQ ID NO: 2636003 - DNA, 25 bp, Homo sapien
gatgtgaacggctacaaatgtcgta

SEQ ID NO: 2636004 - DNA, 25 bp, Homo sapien
caatgctctacgttcaggatgtgaa

SEQ ID NO: 2636005 - DNA, 25 bp, Homo sapien
aaatgtcgtattgcttatctcgctc

SEQ ID NO: 2636006 - DNA, 25 bp, Homo sapien
ctcagatgatgataacattcttggg

SEQ ID NO: 2636007 - DNA, 25 bp, Homo sapien
ttggtgtgggatctgtgtagactct

SEQ ID NO: 2636008 - DNA, 25 bp, Homo sapien
tagactctttgtgagagacctgtgg

SEQ ID NO: 2636009 - DNA, 25 bp, Homo sapien
cagtacagtcactactgtatttggg

SEQ ID NO: 2636010 - DNA, 25 bp, Homo sapien
ccctccatgaagattcttcctcggt

SEQ ID NO: 2636011 - DNA, 25 bp, Homo sapien
gatagacgtgctttccctccatgaa

SEQ ID NO: 2636012 - DNA, 25 bp, Homo sapien
tagacgtgctttccctccatgaaga

SEQ ID NO: 2636013 - DNA, 25 bp, Homo sapien
ccatgaagattcttcctcggtatcc

SEQ ID NO: 2636014 - DNA, 25 bp, Homo sapien
tcattgacctgagctatccaacttg

SEQ ID NO: 2636015 - DNA, 25 bp, Homo sapien
caacttgcattcagcaagtacaaaa

SEQ ID NO: 2636016 - DNA, 25 bp, Homo sapien
gtacaaaatctatttcagatgagtc

SEQ ID NO: 2636017 - DNA, 25 bp, Homo sapien
agatgagtctctgttcccattctgc

SEQ ID NO: 2636018 - DNA, 25 bp, Homo sapien
cctgaaatcgattttaagatattct

SEQ ID NO: 2636019 - DNA, 25 bp, Homo sapien
cactactggtgcacggatttgaaaa

SEQ ID NO: 2636020 - DNA, 25 bp, Homo sapien
tattctgtgttgggtgatgtcacag

SEQ ID NO: 2636021 - DNA, 25 bp, Homo sapien
tttttggttacgagatccattcctg

SEQ ID NO: 2636022 - DNA, 25 bp, Homo sapien
tgctcttgtgacttggttttaaacg

SEQ ID NO: 2636023 - DNA, 25 bp, Homo sapien
gttgagtctgagaacttcacaaaga

SEQ ID NO: 2636024 - DNA, 25 bp, Homo sapien
catagttgaacgtggagcaggaaga

SEQ ID NO: 2636025 - DNA, 25 bp, Homo sapien
gaaaactgctgatgtctcgtttagc

SEQ ID NO: 2636026 - DNA, 25 bp, Homo sapien
gatgcttctcccagtagatgaaaat

SEQ ID NO: 2636027 - DNA, 25 bp, Homo sapien
tttgcctctcaatcttcttcagctg

SEQ ID NO: 2636028 - DNA, 25 bp, Homo sapien
gttttgcctctcaatcttcttcagc

SEQ ID NO: 2636029 - DNA, 25 bp, Homo sapien
agttttgcctctcaatcttcttcag

SEQ ID NO: 2636030 - DNA, 25 bp, Homo sapien
tcctgatggccgatggttgacagcc

SEQ ID NO: 2636031 - DNA, 25 bp, Homo sapien
gctgggtccatcctaacagtgagta

SEQ ID NO: 2636032 - DNA, 25 bp, Homo sapien
tttgttgtccagctaggcgccaagg

SEQ ID NO: 2636033 - DNA, 25 bp, Homo sapien
gggcctcagctggacaattcttgct

SEQ ID NO: 2636034 - DNA, 25 bp, Homo sapien
gcctgatagaggacaaacttgttga

SEQ ID NO: 2636035 - DNA, 25 bp, Homo sapien
gctgctccgtgcttagtcttgaaaa

SEQ ID NO: 2636036 - DNA, 25 bp, Homo sapien
aatggctagcattcttgtggttagc

SEQ ID NO: 2636037 - DNA, 25 bp, Homo sapien
gacagtcgtgttccttttgtaagcc

SEQ ID NO: 2636038 - DNA, 25 bp, Homo sapien
tctctgttttagggtacttattcca

SEQ ID NO: 2636039 - DNA, 25 bp, Homo sapien
catacacaaagattcgtgtattttc

SEQ ID NO: 2636040 - DNA, 25 bp, Homo sapien
gggtacttattccatacacaaagat

SEQ ID NO: 2636041 - DNA, 25 bp, Homo sapien
tctagttagaatgttgatagctatt

SEQ ID NO: 2636042 - DNA, 25 bp, Homo sapien
tctaagaaatggcccacgtcagtca

SEQ ID NO: 2636043 - DNA, 25 bp, Homo sapien
ctctaagaaatggcccacgtcagtc

SEQ ID NO: 2636044 - DNA, 25 bp, Homo sapien
ctaagaaatggcccacgtcagtcat

SEQ ID NO: 2636045 - DNA, 25 bp, Homo sapien
tggtctgtttgcttgtctcacagtg

SEQ ID NO: 2636046 - DNA, 25 bp, Homo sapien
acaagaggcaagagcttagaaagca

SEQ ID NO: 2636047 - DNA, 25 bp, Homo sapien
tcctgtctggggttcatgacccaga

SEQ ID NO: 2636048 - DNA, 25 bp, Homo sapien
gggttcatgacccagagtcttggtc

SEQ ID NO: 2636049 - DNA, 25 bp, Homo sapien
tacagattctgttcgttgcaaagta

SEQ ID NO: 2636050 - DNA, 25 bp, Homo sapien
tgttcgttgcaaagtaggtacaggt

SEQ ID NO: 2636051 - DNA, 25 bp, Homo sapien
cagatccccctacagattctgttcg

SEQ ID NO: 2636052 - DNA, 25 bp, Homo sapien
cccctacagattctgttcgttgcaa

SEQ ID NO: 2636053 - DNA, 25 bp, Homo sapien
gctggtgcactcttgctaccagctg

SEQ ID NO: 2636054 - DNA, 25 bp, Homo sapien
gctgctggtgcactcttgctaccag

SEQ ID NO: 2636055 - DNA, 25 bp, Homo sapien
tgctggtgcactcttgctaccagct

SEQ ID NO: 2636056 - DNA, 25 bp, Homo sapien
ctggtgcactcttgctaccagctgg

SEQ ID NO: 2636057 - DNA, 25 bp, Homo sapien
cagctgttggctggcctttgtgaaa

SEQ ID NO: 2636058 - DNA, 25 bp, Homo sapien
ctttgtgaaagtccccgagctccag

SEQ ID NO: 2636059 - DNA, 25 bp, Homo sapien
atatcgtgaagccaattggcactgc

SEQ ID NO: 2636060 - DNA, 25 bp, Homo sapien
caggccaatgcttagcgggcaggta

SEQ ID NO: 2636061 - DNA, 25 bp, Homo sapien
gccttcccatagcaggggacccaga

SEQ ID NO: 2636062 - DNA, 25 bp, Homo sapien
ctttgtctcccaagtgcatgttcca

SEQ ID NO: 2636063 - DNA, 25 bp, Homo sapien
tgctgtggttacagacagagccttt

SEQ ID NO: 2636064 - DNA, 25 bp, Homo sapien
agtgcatgttccaattcagcccagg

SEQ ID NO: 2636065 - DNA, 25 bp, Homo sapien
caggcgcccagggaactaccctgga

SEQ ID NO: 2636066 - DNA, 25 bp, Homo sapien
gaactaccctggaccggggagatga

SEQ ID NO: 2636067 - DNA, 25 bp, Homo sapien
acaatgagccattcacaggcgccca

SEQ ID NO: 2636068 - DNA, 25 bp, Homo sapien
agtgggtttgtcttgaacaatgagc

SEQ ID NO: 2636069 - DNA, 25 bp, Homo sapien
ccagcagagtaaaatatggggaagg

SEQ ID NO: 2636070 - DNA, 25 bp, Homo sapien
aggacattaattccagatggcctgg

SEQ ID NO: 2636071 - DNA, 25 bp, Homo sapien
ggcaaagaagctctggctgggtaaa

SEQ ID NO: 2636072 - DNA, 25 bp, Homo sapien
gctgggtaaagtgcttggggaacca

SEQ ID NO: 2636073 - DNA, 25 bp, Homo sapien
tgtccagtttggatccacagagttg

SEQ ID NO: 2636074 - DNA, 25 bp, Homo sapien
tgtctgtccagtttggatccacaga

SEQ ID NO: 2636075 - DNA, 25 bp, Homo sapien
tccagtttggatccacagagttgag

SEQ ID NO: 2636076 - DNA, 25 bp, Homo sapien
gtgtgtctgtccagtttggatccac

SEQ ID NO: 2636077 - DNA, 25 bp, Homo sapien
gtggtatgcgtgtatacaaggatgt

SEQ ID NO: 2636078 - DNA, 25 bp, Homo sapien
gcagacatggaatcaagacagggtc

SEQ ID NO: 2636079 - DNA, 25 bp, Homo sapien
tcaggcagacatggaatcaagacag

SEQ ID NO: 2636080 - DNA, 25 bp, Homo sapien
tatgcgtgtatacaaggatgtttgt

SEQ ID NO: 2636081 - DNA, 25 bp, Homo sapien
catggtcatctgacatggactggtc

SEQ ID NO: 2636082 - DNA, 25 bp, Homo sapien
gactggtcctgctgcttagagagaa

SEQ ID NO: 2636083 - DNA, 25 bp, Homo sapien
tctgctggtagtccctgagctctcc

SEQ ID NO: 2636084 - DNA, 25 bp, Homo sapien
gagaactctgctggtagtccctgag

SEQ ID NO: 2636085 - DNA, 25 bp, Homo sapien
ctgcccaatttgtctaggacttggg

SEQ ID NO: 2636086 - DNA, 25 bp, Homo sapien
gaacccaaagttatagtccacagtc

SEQ ID NO: 2636087 - DNA, 25 bp, Homo sapien
ccaaagttatagtccacagtcatca

SEQ ID NO: 2636088 - DNA, 25 bp, Homo sapien
ctttgtagctaaggccacggctgcc

SEQ ID NO: 2636089 - DNA, 25 bp, Homo sapien
aagagtgcaggtccaatccgatggg

SEQ ID NO: 2636090 - DNA, 25 bp, Homo sapien
tccgatggggatatcagcttcatgg

SEQ ID NO: 2636091 - DNA, 25 bp, Homo sapien
tcaccaagagtgcaggtccaatccg

SEQ ID NO: 2636092 - DNA, 25 bp, Homo sapien
caatccgatggggatatcagcttca

SEQ ID NO: 2636093 - DNA, 25 bp, Homo sapien
gccaccttctaccacttgggcctgc

SEQ ID NO: 2636094 - DNA, 25 bp, Homo sapien
gatgctctcgaatggttctcttgct

SEQ ID NO: 2636095 - DNA, 25 bp, Homo sapien
ttggccaccttctaccacttgggcc

SEQ ID NO: 2636096 - DNA, 25 bp, Homo sapien
tctcgaatggttctcttgcttggtc

SEQ ID NO: 2636097 - DNA, 25 bp, Homo sapien
agacaagattctgtagcacaggtag

SEQ ID NO: 2636098 - DNA, 25 bp, Homo sapien
tcactgagttcctttgtgtgagtgc

SEQ ID NO: 2636099 - DNA, 25 bp, Homo sapien
caggtagtaggtaggacatgctgcc

SEQ ID NO: 2636100 - DNA, 25 bp, Homo sapien
tgagttcctttgtgtgagtgcagag

SEQ ID NO: 2636101 - DNA, 25 bp, Homo sapien
aagaatttggtcagattttggccca

SEQ ID NO: 2636102 - DNA, 25 bp, Homo sapien
aataaatgcatttgggaaagaattt

SEQ ID NO: 2636103 - DNA, 25 bp, Homo sapien
atgcatttgggaaagaatttggtca

SEQ ID NO: 2636104 - DNA, 25 bp, Homo sapien
taaatgcatttgggaaagaatttgg

SEQ ID NO: 2636105 - DNA, 25 bp, Homo sapien
gaaaacccaggtctaattctgtcat

SEQ ID NO: 2636106 - DNA, 25 bp, Homo sapien
tggaaaacccaggtctaattctgtc

SEQ ID NO: 2636107 - DNA, 25 bp, Homo sapien
ctggaaaacccaggtctaattctgt

SEQ ID NO: 2636108 - DNA, 25 bp, Homo sapien
ggaaaacccaggtctaattctgtca

SEQ ID NO: 2636109 - DNA, 25 bp, Homo sapien
cggtccgccttcctgagctgggttg

SEQ ID NO: 2636110 - DNA, 25 bp, Homo sapien
agctgctttctgtgccgctgttcgg

SEQ ID NO: 2636111 - DNA, 25 bp, Homo sapien
cgaaggagtccgattggcattgcat

SEQ ID NO: 2636112 - DNA, 25 bp, Homo sapien
cattgcattggagaggagcgtttgt

SEQ ID NO: 2636113 - DNA, 25 bp, Homo sapien
ttgagttttccacgtttctcctctg

SEQ ID NO: 2636114 - DNA, 25 bp, Homo sapien
gagttttccacgtttctcctctgga

SEQ ID NO: 2636115 - DNA, 25 bp, Homo sapien
cagaagctgacggacaccaagaggg

SEQ ID NO: 2636116 - DNA, 25 bp, Homo sapien
agagtgtccagaagctgacggacac

SEQ ID NO: 2636117 - DNA, 25 bp, Homo sapien
agaaagtcgaagcaggtagagccac

SEQ ID NO: 2636118 - DNA, 25 bp, Homo sapien
gcatgtgaaaaggtgatgatggcag

SEQ ID NO: 2636119 - DNA, 25 bp, Homo sapien
agggtagagtgtgaagcttgaggca

SEQ ID NO: 2636120 - DNA, 25 bp, Homo sapien
agtgtgaagcttgaggcatgtgaaa

SEQ ID NO: 2636121 - DNA, 25 bp, Homo sapien
tgtttttctttagacctctatgtgc

SEQ ID NO: 2636122 - DNA, 25 bp, Homo sapien
taagacctgccttatttcctactgt

SEQ ID NO: 2636123 - DNA, 25 bp, Homo sapien
tggggctccatattcagagaggtca

SEQ ID NO: 2636124 - DNA, 25 bp, Homo sapien
ctgaaatgcagacgcatgtttttct

SEQ ID NO: 2636125 - DNA, 25 bp, Homo sapien
tctctcattaggcatgttgttctgc

SEQ ID NO: 2636126 - DNA, 25 bp, Homo sapien
tctcattaggcatgttgttctgctt

SEQ ID NO: 2636127 - DNA, 25 bp, Homo sapien
cacattggagttggctgctgatgag

SEQ ID NO: 2636128 - DNA, 25 bp, Homo sapien
aaaatgggcacattggagttggctg

SEQ ID NO: 2636129 - DNA, 25 bp, Homo sapien
cagagtgtagagttcattttgcagg

SEQ ID NO: 2636130 - DNA, 25 bp, Homo sapien
agatctgatggccacacagagtgta

SEQ ID NO: 2636131 - DNA, 25 bp, Homo sapien
tttgcaggatatctctgatcagggc

SEQ ID NO: 2636132 - DNA, 25 bp, Homo sapien
tcacgcagatccacagatctgatgg

SEQ ID NO: 2636133 - DNA, 25 bp, Homo sapien
cacgttcagcacaagggatggtcta

SEQ ID NO: 2636134 - DNA, 25 bp, Homo sapien
gactagggtgttgaattaggtgcac

SEQ ID NO: 2636135 - DNA, 25 bp, Homo sapien
ggagtgaaaattgcacgggtctgaa

SEQ ID NO: 2636136 - DNA, 25 bp, Homo sapien
aattgcacgggtctgaagactaggg

SEQ ID NO: 2636137 - DNA, 25 bp, Homo sapien
tctggtggtctggtagttaactggg

SEQ ID NO: 2636138 - DNA, 25 bp, Homo sapien
attctgaagagaggtctggtggtct

SEQ ID NO: 2636139 - DNA, 25 bp, Homo sapien
ctgggggatacaaaagatttctcct

SEQ ID NO: 2636140 - DNA, 25 bp, Homo sapien
cattcaattctgaagagaggtctgg

SEQ ID NO: 2636141 - DNA, 25 bp, Homo sapien
tgtacctttaggaagcctctggtca

SEQ ID NO: 2636142 - DNA, 25 bp, Homo sapien
gtacctttaggaagcctctggtcat

SEQ ID NO: 2636143 - DNA, 25 bp, Homo sapien
tctgtacctttaggaagcctctggt

SEQ ID NO: 2636144 - DNA, 25 bp, Homo sapien
tttctgtacctttaggaagcctctg

SEQ ID NO: 2636145 - DNA, 25 bp, Homo sapien
gtcttttgattatagctagagtgtt

SEQ ID NO: 2636146 - DNA, 25 bp, Homo sapien
gcctctttctggtcttattattgtc

SEQ ID NO: 2636147 - DNA, 25 bp, Homo sapien
aattgattaggatcctgtcctgttg

SEQ ID NO: 2636148 - DNA, 25 bp, Homo sapien
tctgtattcactggcaggagccctc

SEQ ID NO: 2636149 - DNA, 25 bp, Homo sapien
cttaaacttgctttctgttcctcag

SEQ ID NO: 2636150 - DNA, 25 bp, Homo sapien
ttctgttcctcagctccttctttac

SEQ ID NO: 2636151 - DNA, 25 bp, Homo sapien
tgttcctcagctccttctttaccca

SEQ ID NO: 2636152 - DNA, 25 bp, Homo sapien
gttcctcagctccttctttacccat

SEQ ID NO: 2636153 - DNA, 25 bp, Homo sapien
cagacctccggggccaaaccacagc

SEQ ID NO: 2636154 - DNA, 25 bp, Homo sapien
tccagtccagacctccggggccaaa

SEQ ID NO: 2636155 - DNA, 25 bp, Homo sapien
tccagacctccggggccaaaccaca

SEQ ID NO: 2636156 - DNA, 25 bp, Homo sapien
gtccagtccagacctccggggccaa

SEQ ID NO: 2636157 - DNA, 25 bp, Homo sapien
actttcctgttccttgaggttcagc

SEQ ID NO: 2636158 - DNA, 25 bp, Homo sapien
aaacactgaactttcctgttccttg

SEQ ID NO: 2636159 - DNA, 25 bp, Homo sapien
tcaggcaaacactgaactttcctgt

SEQ ID NO: 2636160 - DNA, 25 bp, Homo sapien
aggcaaacactgaactttcctgttc

SEQ ID NO: 2636161 - DNA, 25 bp, Homo sapien
tgacctttgtggcttagtgagggct

SEQ ID NO: 2636162 - DNA, 25 bp, Homo sapien
tgaatggccatcgtagttgctgttt

SEQ ID NO: 2636163 - DNA, 25 bp, Homo sapien
ttttttgatgcatgctgagatactc

SEQ ID NO: 2636164 - DNA, 25 bp, Homo sapien
tttacaatcttgcactgattctctg

SEQ ID NO: 2636165 - DNA, 25 bp, Homo sapien
gaatccgatgcttctcgccgcacgt

SEQ ID NO: 2636166 - DNA, 25 bp, Homo sapien
tccccgaatccgatgcttctcgccg

SEQ ID NO: 2636167 - DNA, 25 bp, Homo sapien
tgcttctcgccgcacgtccttcttc

SEQ ID NO: 2636168 - DNA, 25 bp, Homo sapien
ccggccctccccgaatccgatgctt

SEQ ID NO: 2636169 - DNA, 25 bp, Homo sapien
ctgtgccaggaagtgctcggtaatg

SEQ ID NO: 2636170 - DNA, 25 bp, Homo sapien
tgccaggaagtgctcggtaatgtca

SEQ ID NO: 2636171 - DNA, 25 bp, Homo sapien
tgtgccaggaagtgctcggtaatgt

SEQ ID NO: 2636172 - DNA, 25 bp, Homo sapien
gccaggaagtgctcggtaatgtcac

SEQ ID NO: 2636173 - DNA, 25 bp, Homo sapien
ttgaaaagaaaacattccttctcta

SEQ ID NO: 2636174 - DNA, 25 bp, Homo sapien
tgaaaagaaaacattccttctctat

SEQ ID NO: 2636175 - DNA, 25 bp, Homo sapien
acgcaggcgagagggtttacagtct

SEQ ID NO: 2636176 - DNA, 25 bp, Homo sapien
gacccgggcgtggaccagcctccca

SEQ ID NO: 2636177 - DNA, 25 bp, Homo sapien
agcctcccaccgacgcgcaggtggc

SEQ ID NO: 2636178 - DNA, 25 bp, Homo sapien
gcccgggaccgtcgcctgctgcaaa

SEQ ID NO: 2636179 - DNA, 25 bp, Homo sapien
gagccttggcggcagcgctgcgccg

SEQ ID NO: 2636180 - DNA, 25 bp, Homo sapien
cccggcaccgcggagctcgcgggag

SEQ ID NO: 2636181 - DNA, 25 bp, Homo sapien
tgcaccttccgaaagaaagaattag

SEQ ID NO: 2636182 - DNA, 25 bp, Homo sapien
ttcctctcggcaatctcggcccggc

SEQ ID NO: 2636183 - DNA, 25 bp, Homo sapien
gactctgcgcgctgcacgcgccgcg

SEQ ID NO: 2636184 - DNA, 25 bp, Homo sapien
ctcccgggactctgcgcgctgcacg

SEQ ID NO: 2636185 - DNA, 25 bp, Homo sapien
tctgcgcgctgcacgcgccgcgccg

SEQ ID NO: 2636186 - DNA, 25 bp, Homo sapien
tcccgggactctgcgcgctgcacgc

SEQ ID NO: 2636187 - DNA, 25 bp, Homo sapien
cctgcggcagaggtgtgggtggagg

SEQ ID NO: 2636188 - DNA, 25 bp, Homo sapien
tgtgggtggagggcggcccggcggc

SEQ ID NO: 2636189 - DNA, 25 bp, Homo sapien
cccggcggccgcaggtgggagggag

SEQ ID NO: 2636190 - DNA, 25 bp, Homo sapien
gcggccgcaggtgggagggagtggg

SEQ ID NO: 2636191 - DNA, 25 bp, Homo sapien
ccagcgtaaggcctcctgcgccaac

SEQ ID NO: 2636192 - DNA, 25 bp, Homo sapien
ctcctgcgccaactgcgtgagcgcg

SEQ ID NO: 2636193 - DNA, 25 bp, Homo sapien
tcctgcgccaactgcgtgagcgcgg

SEQ ID NO: 2636194 - DNA, 25 bp, Homo sapien
gtaaggcctcctgcgccaactgcgt

SEQ ID NO: 2636195 - DNA, 25 bp, Homo sapien
tctctcgcgggctacattcgctcgg

SEQ ID NO: 2636196 - DNA, 25 bp, Homo sapien
gaatcccgacgacgaggcgcgattc

SEQ ID NO: 2636197 - DNA, 25 bp, Homo sapien
gctcgtagccctggcgcccgggaat

SEQ ID NO: 2636198 - DNA, 25 bp, Homo sapien
caccgactcggtaaggtgggcgccg

SEQ ID NO: 2636199 - DNA, 25 bp, Homo sapien
gctgcggggagcagtcaccactgct

SEQ ID NO: 2636200 - DNA, 25 bp, Homo sapien
cgcagtccccgggccaagccggagg

SEQ ID NO: 2636201 - DNA, 25 bp, Homo sapien
ccactgctttgaaactgaatggctg

SEQ ID NO: 2636202 - DNA, 25 bp, Homo sapien
gctttgaaactgaatggctgacaca

SEQ ID NO: 2636203 - DNA, 25 bp, Homo sapien
actttcactgatttcagctatcacc

SEQ ID NO: 2636204 - DNA, 25 bp, Homo sapien
aggcactttcactgatttcagctat

SEQ ID NO: 2636205 - DNA, 25 bp, Homo sapien
gcactttcactgatttcagctatca

SEQ ID NO: 2636206 - DNA, 25 bp, Homo sapien
ggcactttcactgatttcagctatc

SEQ ID NO: 2636207 - DNA, 25 bp, Homo sapien
ctcactacagtaagttaatcttcag

SEQ ID NO: 2636208 - DNA, 25 bp, Homo sapien
tgggtacctaatattcatgggtgcc

SEQ ID NO: 2636209 - DNA, 25 bp, Homo sapien
aaactcgtcttaagctagatcatga

SEQ ID NO: 2636210 - DNA, 25 bp, Homo sapien
catgggtgccagacactagtctaga

SEQ ID NO: 2636211 - DNA, 25 bp, Homo sapien
ggctgctgggtttacttaccaacag

SEQ ID NO: 2636212 - DNA, 25 bp, Homo sapien
cagaggctgccctagatggaactaa

SEQ ID NO: 2636213 - DNA, 25 bp, Homo sapien
tacagaacagttagaggtttaccac

SEQ ID NO: 2636214 - DNA, 25 bp, Homo sapien
taattgtaccaatgctaggtggccc

SEQ ID NO: 2636215 - DNA, 25 bp, Homo sapien
tatgtaggttggcagcaacattttt

SEQ ID NO: 2636216 - DNA, 25 bp, Homo sapien
gacctgtgaaggtctcggattattc

SEQ ID NO: 2636217 - DNA, 25 bp, Homo sapien
ttctcaaggacagtaatatgtaggt

SEQ ID NO: 2636218 - DNA, 25 bp, Homo sapien
tctcggattattctcaaggacagta

SEQ ID NO: 2636219 - DNA, 25 bp, Homo sapien
ggtccagcagctgacataaatcttg

SEQ ID NO: 2636220 - DNA, 25 bp, Homo sapien
gaggtccagcagctgacataaatct

SEQ ID NO: 2636221 - DNA, 25 bp, Homo sapien
gtccagcagctgacataaatcttgt

SEQ ID NO: 2636222 - DNA, 25 bp, Homo sapien
ggaggtccagcagctgacataaatc

SEQ ID NO: 2636223 - DNA, 25 bp, Homo sapien
tgtctgtcatcaggtaagctcctcc

SEQ ID NO: 2636224 - DNA, 25 bp, Homo sapien
cactgtctgtcatcaggtaagctcc

SEQ ID NO: 2636225 - DNA, 25 bp, Homo sapien
tcatcaggtaagctcctccacaggc

SEQ ID NO: 2636226 - DNA, 25 bp, Homo sapien
caggtaagctcctccacaggcaagt

SEQ ID NO: 2636227 - DNA, 25 bp, Homo sapien
ggctccagcatttacctagggctca

SEQ ID NO: 2636228 - DNA, 25 bp, Homo sapien
tcaacaagctgtcctcatatccagg

SEQ ID NO: 2636229 - DNA, 25 bp, Homo sapien
tagggctcactcagttcctagcaca

SEQ ID NO: 2636230 - DNA, 25 bp, Homo sapien
taaacaagtgctgagctaaagtgac

SEQ ID NO: 2636231 - DNA, 25 bp, Homo sapien
ctcagtaaagtacgtcccactccca

SEQ ID NO: 2636232 - DNA, 25 bp, Homo sapien
tcagtaaagtacgtcccactcccat

SEQ ID NO: 2636233 - DNA, 25 bp, Homo sapien
gaacaacctgggatagggatggtcc

SEQ ID NO: 2636234 - DNA, 25 bp, Homo sapien
gaaatgggttctgcgcacacttaca

SEQ ID NO: 2636235 - DNA, 25 bp, Homo sapien
ctcagagggcttggacggaaaacaa

SEQ ID NO: 2636236 - DNA, 25 bp, Homo sapien
catgctgaccaagttgaaatatgga

SEQ ID NO: 2636237 - DNA, 25 bp, Homo sapien
cttcccacgtgcactgccacaccca

SEQ ID NO: 2636238 - DNA, 25 bp, Homo sapien
ttcccacgtgcactgccacacccat

SEQ ID NO: 2636239 - DNA, 25 bp, Homo sapien
ctgtggtaagtaggaataaaatgcc

SEQ ID NO: 2636240 - DNA, 25 bp, Homo sapien
cctcagagattcaaagatcttgtgg

SEQ ID NO: 2636241 - DNA, 25 bp, Homo sapien
tggctgttaatttttcctgtggtaa

SEQ ID NO: 2636242 - DNA, 25 bp, Homo sapien
atgccttgaagaaaaccctcagaga

SEQ ID NO: 2636243 - DNA, 25 bp, Homo sapien
cataggccaattgatgtaaacaagt

SEQ ID NO: 2636244 - DNA, 25 bp, Homo sapien
gggtagaacacctcaagtctggagt

SEQ ID NO: 2636245 - DNA, 25 bp, Homo sapien
catgagtagatgtcaatggcaagtt

SEQ ID NO: 2636246 - DNA, 25 bp, Homo sapien
tcagtcaagttacagaagttagggt

SEQ ID NO: 2636247 - DNA, 25 bp, Homo sapien
tatttaagtgctgtaagtcaaaaag

SEQ ID NO: 2636248 - DNA, 25 bp, Homo sapien
accttaacaattttgcatttgcata

SEQ ID NO: 2636249 - DNA, 25 bp, Homo sapien
caaagtagtagcctgaaatgagaca

SEQ ID NO: 2636250 - DNA, 25 bp, Homo sapien
tttgcatatttaagtgctgtaagtc

SEQ ID NO: 2636251 - DNA, 25 bp, Homo sapien
tgttttcaagcgaacacccttggtg

SEQ ID NO: 2636252 - DNA, 25 bp, Homo sapien
gacctgaacagaaatatgagtttgg

SEQ ID NO: 2636253 - DNA, 25 bp, Homo sapien
caatgaaatctgctgacatatcaca

SEQ ID NO: 2636254 - DNA, 25 bp, Homo sapien
gttctattgtgacctaagactcaag

SEQ ID NO: 2636255 - DNA, 25 bp, Homo sapien
cctctagggatatgtaagtaacttc

SEQ ID NO: 2636256 - DNA, 25 bp, Homo sapien
tgtcatgggcttgataaacactccc

SEQ ID NO: 2636257 - DNA, 25 bp, Homo sapien
cattcatgatggacaaacatagccc

SEQ ID NO: 2636258 - DNA, 25 bp, Homo sapien
gaacaaagcacccagaacaacagat

SEQ ID NO: 2636259 - DNA, 25 bp, Homo sapien
tgtgtgcaaacattcctatttaggc

SEQ ID NO: 2636260 - DNA, 25 bp, Homo sapien
tgcacccggttgaaatcagttttat

SEQ ID NO: 2636261 - DNA, 25 bp, Homo sapien
gagatatgggcatagaattcaccct

SEQ ID NO: 2636262 - DNA, 25 bp, Homo sapien
tatttaggcctttgagagatatggg

SEQ ID NO: 2636263 - DNA, 25 bp, Homo sapien
tccacgggccaagtgtacatgctgc

SEQ ID NO: 2636264 - DNA, 25 bp, Homo sapien
tacatgctgcaatggaggaaacttc

SEQ ID NO: 2636265 - DNA, 25 bp, Homo sapien
acgggtcccctgataagctgttaga

SEQ ID NO: 2636266 - DNA, 25 bp, Homo sapien
tgttagatgatgacagccactttta

SEQ ID NO: 2636267 - DNA, 25 bp, Homo sapien
tggcacttaacacggaaacagagca

SEQ ID NO: 2636268 - DNA, 25 bp, Homo sapien
cacggaaacagagcaaggtaataag

SEQ ID NO: 2636269 - DNA, 25 bp, Homo sapien
tgcaggaagagtggcacttaacacg

SEQ ID NO: 2636270 - DNA, 25 bp, Homo sapien
caaatagtgttactgcaggaagagt

SEQ ID NO: 2636271 - DNA, 25 bp, Homo sapien
caatgaccttctgtactgaacggta

SEQ ID NO: 2636272 - DNA, 25 bp, Homo sapien
ggtattgtacgcctgagtcagctct

SEQ ID NO: 2636273 - DNA, 25 bp, Homo sapien
ctggtccaggaatgttccttggtcc

SEQ ID NO: 2636274 - DNA, 25 bp, Homo sapien
tgttccttggtccaatgaccttctg

SEQ ID NO: 2636275 - DNA, 25 bp, Homo sapien
cagtcctaagggtggtggctaatgc

SEQ ID NO: 2636276 - DNA, 25 bp, Homo sapien
tctcccgctgcatggtaaatattaa

SEQ ID NO: 2636277 - DNA, 25 bp, Homo sapien
gacctgacatactgcccctttctgg

SEQ ID NO: 2636278 - DNA, 25 bp, Homo sapien
tttctgggaagcgaagggtctgccc

SEQ ID NO: 2636279 - DNA, 25 bp, Homo sapien
tggtgcaataggctcactggcaacc

SEQ ID NO: 2636280 - DNA, 25 bp, Homo sapien
caagctgctcttaaacctgctctga

SEQ ID NO: 2636281 - DNA, 25 bp, Homo sapien
gaactagcaacaggctcctaacgag

SEQ ID NO: 2636282 - DNA, 25 bp, Homo sapien
tgggattacaccacatttggcctaa

SEQ ID NO: 2636283 - DNA, 25 bp, Homo sapien
tgttcctggccctgagtcaaacaca

SEQ ID NO: 2636284 - DNA, 25 bp, Homo sapien
tctggatggcatggcctccttaaag

SEQ ID NO: 2636285 - DNA, 25 bp, Homo sapien
tgcactcctagaccaaggtgcttga

SEQ ID NO: 2636286 - DNA, 25 bp, Homo sapien
gatagtctttcctctggtcctagct

SEQ ID NO: 2636287 - DNA, 25 bp, Homo sapien
cctttgagagtttctttattctcca

SEQ ID NO: 2636288 - DNA, 25 bp, Homo sapien
tgtgcaaccctttgagagtttcttt

SEQ ID NO: 2636289 - DNA, 25 bp, Homo sapien
tgcaaccctttgagagtttctttat

SEQ ID NO: 2636290 - DNA, 25 bp, Homo sapien
cttgtgcaaccctttgagagtttct

SEQ ID NO: 2636291 - DNA, 25 bp, Homo sapien
caggctggcatacaggttgccttca

SEQ ID NO: 2636292 - DNA, 25 bp, Homo sapien
cagtttctccctgatcattcgttcc

SEQ ID NO: 2636293 - DNA, 25 bp, Homo sapien
ttcgttcctctggacgatcatccat

SEQ ID NO: 2636294 - DNA, 25 bp, Homo sapien
tcctttccaaccattcgtgcttcca

SEQ ID NO: 2636295 - DNA, 25 bp, Homo sapien
catttggcacctagtcacaagttgc

SEQ ID NO: 2636296 - DNA, 25 bp, Homo sapien
caggcagtacaccttcacatgagga

SEQ ID NO: 2636297 - DNA, 25 bp, Homo sapien
aatttacccatctttctacgctgag

SEQ ID NO: 2636298 - DNA, 25 bp, Homo sapien
taatctagccatgaccaaaggccaa

SEQ ID NO: 2636299 - DNA, 25 bp, Homo sapien
tctcctggagactcagctgctaagt

SEQ ID NO: 2636300 - DNA, 25 bp, Homo sapien
cagatccatctcctttaactgggat

SEQ ID NO: 2636301 - DNA, 25 bp, Homo sapien
actgcgtcggcctttggaagctggt

SEQ ID NO: 2636302 - DNA, 25 bp, Homo sapien
tgatttcactgtgcgacctgatggg

SEQ ID NO: 2636303 - DNA, 25 bp, Homo sapien
taatggctgatacatagcaataatg

SEQ ID NO: 2636304 - DNA, 25 bp, Homo sapien
aaggcattatcaagtgtaactggca

SEQ ID NO: 2636305 - DNA, 25 bp, Homo sapien
tgtagccttaaattgggaaaaggca

SEQ ID NO: 2636306 - DNA, 25 bp, Homo sapien
agtagctttacccaccactgcaaat

SEQ ID NO: 2636307 - DNA, 25 bp, Homo sapien
catagtttgttggtcactcatttca

SEQ ID NO: 2636308 - DNA, 25 bp, Homo sapien
ccttgaagtgacagtctcatttaat

SEQ ID NO: 2636309 - DNA, 25 bp, Homo sapien
ttcagcttgcaactctaacaaccgc

SEQ ID NO: 2636310 - DNA, 25 bp, Homo sapien
taacaaccgcacaaatacttctcct

SEQ ID NO: 2636311 - DNA, 25 bp, Homo sapien
ctgaggcccaataaacacccggtat

SEQ ID NO: 2636312 - DNA, 25 bp, Homo sapien
gcatcactttgttaacacggcggtt

SEQ ID NO: 2636313 - DNA, 25 bp, Homo sapien
gagttaggccctatctgctgcagta

SEQ ID NO: 2636314 - DNA, 25 bp, Homo sapien
cagtaagtacagtctggcccgcatc

SEQ ID NO: 2636315 - DNA, 25 bp, Homo sapien
cattgggtctgaaggttctagttga

SEQ ID NO: 2636316 - DNA, 25 bp, Homo sapien
cccggagcatcacaaatagcagatg

SEQ ID NO: 2636317 - DNA, 25 bp, Homo sapien
ttctccataacattgggtctgaagg

SEQ ID NO: 2636318 - DNA, 25 bp, Homo sapien
ggttctagttgaaacacccggagca

SEQ ID NO: 2636319 - DNA, 25 bp, Homo sapien
tctgaactagacgtagaagtactag

SEQ ID NO: 2636320 - DNA, 25 bp, Homo sapien
tttgatccttgagctacgcctactg

SEQ ID NO: 2636321 - DNA, 25 bp, Homo sapien
gacatgcgtgaaacaaacttctgga

SEQ ID NO: 2636322 - DNA, 25 bp, Homo sapien
tgttacgagatggagctttgatcct

SEQ ID NO: 2636323 - DNA, 25 bp, Homo sapien
gccgtcttcacacactgtaagactt

SEQ ID NO: 2636324 - DNA, 25 bp, Homo sapien
caacaagcaaataggacacatctgt

SEQ ID NO: 2636325 - DNA, 25 bp, Homo sapien
ctgcagccgtcttcacacactgtaa

SEQ ID NO: 2636326 - DNA, 25 bp, Homo sapien
agtggtggtgcagcttgttcctgca

SEQ ID NO: 2636327 - DNA, 25 bp, Homo sapien
aaatcatgagatctccacttagatc

SEQ ID NO: 2636328 - DNA, 25 bp, Homo sapien
tctatttcttctacactcttctgcc

SEQ ID NO: 2636329 - DNA, 25 bp, Homo sapien
tagatctacaaaggggacatattaa

SEQ ID NO: 2636330 - DNA, 25 bp, Homo sapien
ggacatattaaaggttctctatttc

SEQ ID NO: 2636331 - DNA, 25 bp, Homo sapien
gagggaagaaggggaatccacagga

SEQ ID NO: 2636332 - DNA, 25 bp, Homo sapien
ggaatccacaggacttgacaactcg

SEQ ID NO: 2636333 - DNA, 25 bp, Homo sapien
atccacaggacttgacaactcgtgg

SEQ ID NO: 2636334 - DNA, 25 bp, Homo sapien
gaagaaggggaatccacaggacttg

SEQ ID NO: 2636335 - DNA, 25 bp, Homo sapien
aaaggctgctgctgtacggtttgct

SEQ ID NO: 2636336 - DNA, 25 bp, Homo sapien
tccttcgtgatccagccaaaggctg

SEQ ID NO: 2636337 - DNA, 25 bp, Homo sapien
tgaatccatggctcagctaaatctt

SEQ ID NO: 2636338 - DNA, 25 bp, Homo sapien
caggagggatttgctgagttccata

SEQ ID NO: 2636339 - DNA, 25 bp, Homo sapien
cagaccattgacagaacgctgcagc

SEQ ID NO: 2636340 - DNA, 25 bp, Homo sapien
gcagccaacgagttccattccaaac

SEQ ID NO: 2636341 - DNA, 25 bp, Homo sapien
gcaacgtacactttgtagacagggt

SEQ ID NO: 2636342 - DNA, 25 bp, Homo sapien
ttgacagaacgctgcagcatgcctc

SEQ ID NO: 2636343 - DNA, 25 bp, Homo sapien
caaggagtatataccagcatggctc

SEQ ID NO: 2636344 - DNA, 25 bp, Homo sapien
ggcatctgcacatttgactaggatg

SEQ ID NO: 2636345 - DNA, 25 bp, Homo sapien
aggatggtgtctacaactggctgga

SEQ ID NO: 2636346 - DNA, 25 bp, Homo sapien
tctttccgctaaactgtggcaagga

SEQ ID NO: 2636347 - DNA, 25 bp, Homo sapien
cagttccaacagtgttgatatggac

SEQ ID NO: 2636348 - DNA, 25 bp, Homo sapien
tccaacagtgttgatatggacagct

SEQ ID NO: 2636349 - DNA, 25 bp, Homo sapien
cagtgttgatatggacagctgactt

SEQ ID NO: 2636350 - DNA, 25 bp, Homo sapien
gcctttgcacagttccaacagtgtt

SEQ ID NO: 2636351 - DNA, 25 bp, Homo sapien
caatatgaggataaaattcagcagg

SEQ ID NO: 2636352 - DNA, 25 bp, Homo sapien
ttccaacaacagtctatctataaga

SEQ ID NO: 2636353 - DNA, 25 bp, Homo sapien
gtgaaacatcagtactgacaatatg

SEQ ID NO: 2636354 - DNA, 25 bp, Homo sapien
caaaggcggccaagaagttcttgcc

SEQ ID NO: 2636355 - DNA, 25 bp, Homo sapien
aaacggcgacgcatcctggtgaagt

SEQ ID NO: 2636356 - DNA, 25 bp, Homo sapien
aaagtgtcttctacgcccaactgga

SEQ ID NO: 2636357 - DNA, 25 bp, Homo sapien
caaagcaaaggttaagagggacagc

SEQ ID NO: 2636358 - DNA, 25 bp, Homo sapien
agatgcctgcaagaagctgtcctgt

SEQ ID NO: 2636359 - DNA, 25 bp, Homo sapien
gtttgaaccattggctttggttgct

SEQ ID NO: 2636360 - DNA, 25 bp, Homo sapien
agataaaggagaggagttcaaacac

SEQ ID NO: 2636361 - DNA, 25 bp, Homo sapien
taattgggaatgatgagataaagga

SEQ ID NO: 2636362 - DNA, 25 bp, Homo sapien
agaggagttcaaacactgactgtgg

SEQ ID NO: 2636363 - DNA, 25 bp, Homo sapien
tacagatggggtagaagaagaaggg

SEQ ID NO: 2636364 - DNA, 25 bp, Homo sapien
ctggtacagatggggtagaagaaga

SEQ ID NO: 2636365 - DNA, 25 bp, Homo sapien
ggtacagatggggtagaagaagaag

SEQ ID NO: 2636366 - DNA, 25 bp, Homo sapien
cagatggggtagaagaagaaggggt

SEQ ID NO: 2636367 - DNA, 25 bp, Homo sapien
tgaatccctgaagtctatgcttaga

SEQ ID NO: 2636368 - DNA, 25 bp, Homo sapien
tgaagtctatgcttagagacatctg

SEQ ID NO: 2636369 - DNA, 25 bp, Homo sapien
tctatgcttagagacatctgttgca

SEQ ID NO: 2636370 - DNA, 25 bp, Homo sapien
ttagagacatctgttgcagtgccag

SEQ ID NO: 2636371 - DNA, 25 bp, Homo sapien
ctgtgtttgaggagatgcagaaggt

SEQ ID NO: 2636372 - DNA, 25 bp, Homo sapien
tgtgtttgaggagatgcagaaggta

SEQ ID NO: 2636373 - DNA, 25 bp, Homo sapien
tgtttgaggagatgcagaaggtatt

SEQ ID NO: 2636374 - DNA, 25 bp, Homo sapien
gtgtttgaggagatgcagaaggtat

SEQ ID NO: 2636375 - DNA, 25 bp, Homo sapien
gaacactgtctcgtcactgggtata

SEQ ID NO: 2636376 - DNA, 25 bp, Homo sapien
gcctgtgtatgttactggagggcaa

SEQ ID NO: 2636377 - DNA, 25 bp, Homo sapien
caagaaggtcctcaatactggagtt

SEQ ID NO: 2636378 - DNA, 25 bp, Homo sapien
gagggcatcctgagacgctgacatt

SEQ ID NO: 2636379 - DNA, 25 bp, Homo sapien
agccattaaagttccagttcccaca

SEQ ID NO: 2636380 - DNA, 25 bp, Homo sapien
tgctttggtatgtcctggtagagtc

SEQ ID NO: 2636381 - DNA, 25 bp, Homo sapien
atctgttgacctttcagccattcag

SEQ ID NO: 2636382 - DNA, 25 bp, Homo sapien
tcccacatcttgagcctgataacaa

SEQ ID NO: 2636383 - DNA, 25 bp, Homo sapien
ctaatgatgtttggatgattcagat

SEQ ID NO: 2636384 - DNA, 25 bp, Homo sapien
taattgctcttctcacacgtggctc

SEQ ID NO: 2636385 - DNA, 25 bp, Homo sapien
ttcaatgaagagattgtaattgctc

SEQ ID NO: 2636386 - DNA, 25 bp, Homo sapien
cacgtggctcccaacatcctaatga

SEQ ID NO: 2636387 - DNA, 25 bp, Homo sapien
ggccacggagtaactgttcagtgta

SEQ ID NO: 2636388 - DNA, 25 bp, Homo sapien
tggttttcatggagatacgaaaggc

SEQ ID NO: 2636389 - DNA, 25 bp, Homo sapien
gaaggctccatatttactcagcaaa

SEQ ID NO: 2636390 - DNA, 25 bp, Homo sapien
gacatctctgtgaatgatttggttt

SEQ ID NO: 2636391 - DNA, 25 bp, Homo sapien
caattcttagtctctgaccagtgct

SEQ ID NO: 2636392 - DNA, 25 bp, Homo sapien
cagtgctgtcaattagcaaattggc

SEQ ID NO: 2636393 - DNA, 25 bp, Homo sapien
tcaggtgccataaatgcaattgtcc

SEQ ID NO: 2636394 - DNA, 25 bp, Homo sapien
tgtccccagtaattgtccctgaaac

SEQ ID NO: 2636395 - DNA, 25 bp, Homo sapien
gccacggacttctagttggtaagta

SEQ ID NO: 2636396 - DNA, 25 bp, Homo sapien
tccttccactacagacaggagctgc

SEQ ID NO: 2636397 - DNA, 25 bp, Homo sapien
gagcttaattttccaggtagcacaa

SEQ ID NO: 2636398 - DNA, 25 bp, Homo sapien
ggcaagaggacaacagatcattact

SEQ ID NO: 2636399 - DNA, 25 bp, Homo sapien
agctccttccatactgttgacctct

SEQ ID NO: 2636400 - DNA, 25 bp, Homo sapien
agtgtttttctgcattccatggtgg

SEQ ID NO: 2636401 - DNA, 25 bp, Homo sapien
tatcaaagcaagatgattggagtgt

SEQ ID NO: 2636402 - DNA, 25 bp, Homo sapien
tataatagcacagccaacactccat

SEQ ID NO: 2636403 - DNA, 25 bp, Homo sapien
ttgaagctttgcacaactgtaactt

SEQ ID NO: 2636404 - DNA, 25 bp, Homo sapien
gaaaaagccagtgttgaagctttgc

SEQ ID NO: 2636405 - DNA, 25 bp, Homo sapien
gagaaaaagccagtgttgaagcttt

SEQ ID NO: 2636406 - DNA, 25 bp, Homo sapien
tgttgaagctttgcacaactgtaac

SEQ ID NO: 2636407 - DNA, 25 bp, Homo sapien
gaagttctaaacaacgaagagccac

SEQ ID NO: 2636408 - DNA, 25 bp, Homo sapien
gaagagccacatctcgtaaaccagg

SEQ ID NO: 2636409 - DNA, 25 bp, Homo sapien
cgatggagcagtagttgcactagca

SEQ ID NO: 2636410 - DNA, 25 bp, Homo sapien
caaatgtgaagggatcgatggagca

SEQ ID NO: 2636411 - DNA, 25 bp, Homo sapien
cactggcctcgttcatagctgttca

SEQ ID NO: 2636412 - DNA, 25 bp, Homo sapien
gacacctgaggtagtagaaactgga

SEQ ID NO: 2636413 - DNA, 25 bp, Homo sapien
taacctgcacaataagagtggtgac

SEQ ID NO: 2636414 - DNA, 25 bp, Homo sapien
tagaagttagcccttaagccctgga

SEQ ID NO: 2636415 - DNA, 25 bp, Homo sapien
acacaagcgctagccctggttgcgg

SEQ ID NO: 2636416 - DNA, 25 bp, Homo sapien
tttctccggtcgctcgggtgcttcc

SEQ ID NO: 2636417 - DNA, 25 bp, Homo sapien
tctctgaatgagaggcgcgtagagc

SEQ ID NO: 2636418 - DNA, 25 bp, Homo sapien
agtgttcctggcaccgcctgacttc

SEQ ID NO: 2636419 - DNA, 25 bp, Homo sapien
tccagggaacgaagcggtacttgta

SEQ ID NO: 2636420 - DNA, 25 bp, Homo sapien
ttgtaacggcgccatcgctgccaca

SEQ ID NO: 2636421 - DNA, 25 bp, Homo sapien
taggttcagtgcgatccagggaacg

SEQ ID NO: 2636422 - DNA, 25 bp, Homo sapien
tgtggcttaggttcagtgcgatcca

SEQ ID NO: 2636423 - DNA, 25 bp, Homo sapien
gcacctaattaacccctggtggaga

SEQ ID NO: 2636424 - DNA, 25 bp, Homo sapien
catcccgacgtgcttttgagtggcg

SEQ ID NO: 2636425 - DNA, 25 bp, Homo sapien
taacgcgcgagctactgcacgctat

SEQ ID NO: 2636426 - DNA, 25 bp, Homo sapien
gggatgggcttctttaaccacgtga

SEQ ID NO: 2636427 - DNA, 25 bp, Homo sapien
cagaaaagaattgtttgagggagtt

SEQ ID NO: 2636428 - DNA, 25 bp, Homo sapien
tagttagctaactcccaacacttcc

SEQ ID NO: 2636429 - DNA, 25 bp, Homo sapien
caagtagtcagtacttatgaaaggc

SEQ ID NO: 2636430 - DNA, 25 bp, Homo sapien
gcccattctataccacatgctgtgg

SEQ ID NO: 2636431 - DNA, 25 bp, Homo sapien
taaggaactataagcttattctcat

SEQ ID NO: 2636432 - DNA, 25 bp, Homo sapien
aaggaactataagcttattctcatg

SEQ ID NO: 2636433 - DNA, 25 bp, Homo sapien
agtttctattcactacccttcaact

SEQ ID NO: 2636434 - DNA, 25 bp, Homo sapien
tattcactacccttcaactgataaa

SEQ ID NO: 2636435 - DNA, 25 bp, Homo sapien
tttctattcactacccttcaactga

SEQ ID NO: 2636436 - DNA, 25 bp, Homo sapien
ctattcactacccttcaactgataa

SEQ ID NO: 2636437 - DNA, 25 bp, Homo sapien
ctttcagtaatgttcctaggacatc

SEQ ID NO: 2636438 - DNA, 25 bp, Homo sapien
gattcctctggaacatatcggaggg

SEQ ID NO: 2636439 - DNA, 25 bp, Homo sapien
atcttcatctgagataactttgtct

SEQ ID NO: 2636440 - DNA, 25 bp, Homo sapien
gagataactttgtctttggattcct

SEQ ID NO: 2636441 - DNA, 25 bp, Homo sapien
tgatgttcaactgccagtaggtctt

SEQ ID NO: 2636442 - DNA, 25 bp, Homo sapien
taggtcttgatattttgatttaaca

SEQ ID NO: 2636443 - DNA, 25 bp, Homo sapien
cccttgatgttcaactgccagtagg

SEQ ID NO: 2636444 - DNA, 25 bp, Homo sapien
gccagtaggtcttgatattttgatt

SEQ ID NO: 2636445 - DNA, 25 bp, Homo sapien
aatgagctagttgcttgggcaacac

SEQ ID NO: 2636446 - DNA, 25 bp, Homo sapien
caggatacatagatacgactgcgcc

SEQ ID NO: 2636447 - DNA, 25 bp, Homo sapien
tagtaacgaagacaccttttccagc

SEQ ID NO: 2636448 - DNA, 25 bp, Homo sapien
gtttaaaggtactttgctgttgatg

SEQ ID NO: 2636449 - DNA, 25 bp, Homo sapien
gtacacaacttttgatatccctttg

SEQ ID NO: 2636450 - DNA, 25 bp, Homo sapien
ccccatccaggcatctaaaaataaa

SEQ ID NO: 2636451 - DNA, 25 bp, Homo sapien
tgtcattcccatcaatgagtacccc

SEQ ID NO: 2636452 - DNA, 25 bp, Homo sapien
gactggaaaaagatcggctcatact

SEQ ID NO: 2636453 - DNA, 25 bp, Homo sapien
ctcatttttaaagggccgagtcgat

SEQ ID NO: 2636454 - DNA, 25 bp, Homo sapien
gaatttctgacgttagccatgtact

SEQ ID NO: 2636455 - DNA, 25 bp, Homo sapien
gagtcgatccctcccattgcaagat

SEQ ID NO: 2636456 - DNA, 25 bp, Homo sapien
cacagccagagggttatgaatttct

SEQ ID NO: 2636457 - DNA, 25 bp, Homo sapien
gcccttggcactcagtcatatgaca

SEQ ID NO: 2636458 - DNA, 25 bp, Homo sapien
caggcttggacttcgtttctcacta

SEQ ID NO: 2636459 - DNA, 25 bp, Homo sapien
tctcactaacgccaaagcccatgtt

SEQ ID NO: 2636460 - DNA, 25 bp, Homo sapien
tagatagggactcacaaacttagca

SEQ ID NO: 2636461 - DNA, 25 bp, Homo sapien
tcaaattcctgataacagacattag

SEQ ID NO: 2636462 - DNA, 25 bp, Homo sapien
tgataacagacattagctgctctgt

SEQ ID NO: 2636463 - DNA, 25 bp, Homo sapien
gaaaactgcaggcacatcaaattcc

SEQ ID NO: 2636464 - DNA, 25 bp, Homo sapien
ttcctgataacagacattagctgct

SEQ ID NO: 2636465 - DNA, 25 bp, Homo sapien
gacaattgtgtagtagtttgaaaaa

SEQ ID NO: 2636466 - DNA, 25 bp, Homo sapien
taagtgcgacaagaacaacacatcg

SEQ ID NO: 2636467 - DNA, 25 bp, Homo sapien
agtttgaaaaaagctcttctccttg

SEQ ID NO: 2636468 - DNA, 25 bp, Homo sapien
cttgattgatgtccctaagtgcgac

SEQ ID NO: 2636469 - DNA, 25 bp, Homo sapien
ccaattaaacttggaattgcattac

SEQ ID NO: 2636470 - DNA, 25 bp, Homo sapien
tattgtgtatttaggtgaaaaccaa

SEQ ID NO: 2636471 - DNA, 25 bp, Homo sapien
ttgaaattgtaatgaagcaagtagc

SEQ ID NO: 2636472 - DNA, 25 bp, Homo sapien
cacttagaattaatagctgagtaga

SEQ ID NO: 2636473 - DNA, 25 bp, Homo sapien
gatgcctggctacaattttataaac

SEQ ID NO: 2636474 - DNA, 25 bp, Homo sapien
cagaagtttgtacacatcagcagta

SEQ ID NO: 2636475 - DNA, 25 bp, Homo sapien
tacacatcagcagtactacaagaac

SEQ ID NO: 2636476 - DNA, 25 bp, Homo sapien
caagaactgctgatgcctggctaca

SEQ ID NO: 2636477 - DNA, 25 bp, Homo sapien
caagtttcagtatcagatgttcaag

SEQ ID NO: 2636478 - DNA, 25 bp, Homo sapien
tgttgtactttaatacctggtgtac

SEQ ID NO: 2636479 - DNA, 25 bp, Homo sapien
tagtgacaatcagaacaagtttcag

SEQ ID NO: 2636480 - DNA, 25 bp, Homo sapien
tatttaatgaatcttaagctacagc

SEQ ID NO: 2636481 - DNA, 25 bp, Homo sapien
caaaaattcatggtgagcagttgca

SEQ ID NO: 2636482 - DNA, 25 bp, Homo sapien
tcctcttagatgaccagtgattcca

SEQ ID NO: 2636483 - DNA, 25 bp, Homo sapien
tgtttgcccagagtttcaaagcaca

SEQ ID NO: 2636484 - DNA, 25 bp, Homo sapien
catttggaagcaagaaaacaaccgg

SEQ ID NO: 2636485 - DNA, 25 bp, Homo sapien
tatcttttcgtaatactatgttggc

SEQ ID NO: 2636486 - DNA, 25 bp, Homo sapien
tcggtagatcaagctaggaagaact

SEQ ID NO: 2636487 - DNA, 25 bp, Homo sapien
gatttctttaatcagagtttggtag

SEQ ID NO: 2636488 - DNA, 25 bp, Homo sapien
tgggtttgtgctaaatcggtagatc

SEQ ID NO: 2636489 - DNA, 25 bp, Homo sapien
ttgagctaacaagccgcaaggagac

SEQ ID NO: 2636490 - DNA, 25 bp, Homo sapien
cagagatgccacagcctgcttatgg

SEQ ID NO: 2636491 - DNA, 25 bp, Homo sapien
gaagaatgccgaagctttgaacatg

SEQ ID NO: 2636492 - DNA, 25 bp, Homo sapien
tatggccacgttggaagatagcttg

SEQ ID NO: 2636493 - DNA, 25 bp, Homo sapien
gaatactcttcatgggactggcctt

SEQ ID NO: 2636494 - DNA, 25 bp, Homo sapien
gaagtgggccccgagtgttactctg

SEQ ID NO: 2636495 - DNA, 25 bp, Homo sapien
ggcctccgctgaagattgctgactg

SEQ ID NO: 2636496 - DNA, 25 bp, Homo sapien
cacttggcttagcagggaaccacct

SEQ ID NO: 2636497 - DNA, 25 bp, Homo sapien
ccccactgctgagatgttggtccat

SEQ ID NO: 2636498 - DNA, 25 bp, Homo sapien
cttctgaggatcatgattttgaccc

SEQ ID NO: 2636499 - DNA, 25 bp, Homo sapien
tgttaatagccttgtaaatgtgtaa

SEQ ID NO: 2636500 - DNA, 25 bp, Homo sapien
cagttgggtctttgtcttctgagga

SEQ ID NO: 2636501 - DNA, 25 bp, Homo sapien
tcttcacgtggctcagactgcggtc

SEQ ID NO: 2636502 - DNA, 25 bp, Homo sapien
tacatacaatgtgtgccaaggtctg

SEQ ID NO: 2636503 - DNA, 25 bp, Homo sapien
gaaaactctgaacgcctcattgagg

SEQ ID NO: 2636504 - DNA, 25 bp, Homo sapien
gggcactgtttcatggttctgtcca

SEQ ID NO: 2636505 - DNA, 25 bp, Homo sapien
caagtcaggtagcttttaactctta

SEQ ID NO: 2636506 - DNA, 25 bp, Homo sapien
taattgcctctacgtgaaacagtac

SEQ ID NO: 2636507 - DNA, 25 bp, Homo sapien
gtcttaaaattaacactgctcccat

SEQ ID NO: 2636508 - DNA, 25 bp, Homo sapien
ctaaggagatattactaaggagatc

SEQ ID NO: 2636509 - DNA, 25 bp, Homo sapien
gggtgatccacctcgaatgccccat

SEQ ID NO: 2636510 - DNA, 25 bp, Homo sapien
taatagacttctggcttggcgacct

SEQ ID NO: 2636511 - DNA, 25 bp, Homo sapien
tcagaccttctgcaattgcacttgc

SEQ ID NO: 2636512 - DNA, 25 bp, Homo sapien
tttctctcctcaactgcttactcag

SEQ ID NO: 2636513 - DNA, 25 bp, Homo sapien
taatcatgtttctgaagatgagatc

SEQ ID NO: 2636514 - DNA, 25 bp, Homo sapien
ggcagtcatggatagcatgaagcta

SEQ ID NO: 2636515 - DNA, 25 bp, Homo sapien
tctggcaaggtcatcatgagtcgat

SEQ ID NO: 2636516 - DNA, 25 bp, Homo sapien
tgagatctgagtcaccccagttcag

SEQ ID NO: 2636517 - DNA, 25 bp, Homo sapien
ggaagatgcttcaatagcaaagttc

SEQ ID NO: 2636518 - DNA, 25 bp, Homo sapien
ctgctccaaaaggaagcacgtccta

SEQ ID NO: 2636519 - DNA, 25 bp, Homo sapien
ggagccagacttccttggaagatgc

SEQ ID NO: 2636520 - DNA, 25 bp, Homo sapien
tttgacacacagggagtaggaggct

SEQ ID NO: 2636521 - DNA, 25 bp, Homo sapien
tagtttaaagttagctcatttgtcc

SEQ ID NO: 2636522 - DNA, 25 bp, Homo sapien
tcattttgacccaaagactgaatgt

SEQ ID NO: 2636523 - DNA, 25 bp, Homo sapien
agtcctcattttgacccaaagactg

SEQ ID NO: 2636524 - DNA, 25 bp, Homo sapien
ttcctccacgtgaactaaaggagtc

SEQ ID NO: 2636525 - DNA, 25 bp, Homo sapien
gagcacatagggtccaaagcctttg

SEQ ID NO: 2636526 - DNA, 25 bp, Homo sapien
cacatagggtccaaagcctttgttt

SEQ ID NO: 2636527 - DNA, 25 bp, Homo sapien
aaagcggtaactcttagcctggctg

SEQ ID NO: 2636528 - DNA, 25 bp, Homo sapien
ttaaatagatattcgaagaaagcgg

SEQ ID NO: 2636529 - DNA, 25 bp, Homo sapien
tcctcttgagtcctctttagcatgg

SEQ ID NO: 2636530 - DNA, 25 bp, Homo sapien
ctcctcttgagtcctctttagcatg

SEQ ID NO: 2636531 - DNA, 25 bp, Homo sapien
tgagtcctctttagcatggaaccca

SEQ ID NO: 2636532 - DNA, 25 bp, Homo sapien
cctcttgagtcctctttagcatgga

SEQ ID NO: 2636533 - DNA, 25 bp, Homo sapien
gtctcctctggggatcgtctgatgt

SEQ ID NO: 2636534 - DNA, 25 bp, Homo sapien
cctctggggatcgtctgatgtccat

SEQ ID NO: 2636535 - DNA, 25 bp, Homo sapien
tcctctggggatcgtctgatgtcca

SEQ ID NO: 2636536 - DNA, 25 bp, Homo sapien
tcccactctcccaagtatggcaaga

SEQ ID NO: 2636537 - DNA, 25 bp, Homo sapien
gaggatgggtcattgctaagcgcaa

SEQ ID NO: 2636538 - DNA, 25 bp, Homo sapien
ggttccctacgttattctgatgccg

SEQ ID NO: 2636539 - DNA, 25 bp, Homo sapien
gatttaatgctgtctccactggttg

SEQ ID NO: 2636540 - DNA, 25 bp, Homo sapien
gacctacactgtttccagcacctga

SEQ ID NO: 2636541 - DNA, 25 bp, Homo sapien
tacggcagtttcgagtttcacttcc

SEQ ID NO: 2636542 - DNA, 25 bp, Homo sapien
tgggtacggcagtttcgagtttcac

SEQ ID NO: 2636543 - DNA, 25 bp, Homo sapien
gtgggtacggcagtttcgagtttca

SEQ ID NO: 2636544 - DNA, 25 bp, Homo sapien
ggcagtttcgagtttcacttccttc

SEQ ID NO: 2636545 - DNA, 25 bp, Homo sapien
cacagccagcgagtccctgctgtac

SEQ ID NO: 2636546 - DNA, 25 bp, Homo sapien
gccagcgagtccctgctgtacagct

SEQ ID NO: 2636547 - DNA, 25 bp, Homo sapien
cagcgagtccctgctgtacagctgg

SEQ ID NO: 2636548 - DNA, 25 bp, Homo sapien
cagccagcgagtccctgctgtacag

SEQ ID NO: 2636549 - DNA, 25 bp, Homo sapien
ccaactgagtttgtcaagggcaata

SEQ ID NO: 2636550 - DNA, 25 bp, Homo sapien
tatgaataagaagggacctcaggtc

SEQ ID NO: 2636551 - DNA, 25 bp, Homo sapien
caaaggaccaatttaaagtgccaga

SEQ ID NO: 2636552 - DNA, 25 bp, Homo sapien
ttggaaatccgagtgcagaaatggc

SEQ ID NO: 2636553 - DNA, 25 bp, Homo sapien
aggaacaactagagtctagaacaca

SEQ ID NO: 2636554 - DNA, 25 bp, Homo sapien
gcttcgtgttcgtggccagcagata

SEQ ID NO: 2636555 - DNA, 25 bp, Homo sapien
cttgtgctgtgcatgagccttgtag

SEQ ID NO: 2636556 - DNA, 25 bp, Homo sapien
tcaggagatgcgcattgagcagaag

SEQ ID NO: 2636557 - DNA, 25 bp, Homo sapien
gattatgggtgtgggccaccacacc

SEQ ID NO: 2636558 - DNA, 25 bp, Homo sapien
ttatgggtgtgggccaccacaccca

SEQ ID NO: 2636559 - DNA, 25 bp, Homo sapien
gggattatgggtgtgggccaccaca

SEQ ID NO: 2636560 - DNA, 25 bp, Homo sapien
cacccagctaattttttgcattttt

SEQ ID NO: 2636561 - DNA, 25 bp, Homo sapien
tgaattatttcccagtatagccttt

SEQ ID NO: 2636562 - DNA, 25 bp, Homo sapien
attctgaattatttcccagtatagc

SEQ ID NO: 2636563 - DNA, 25 bp, Homo sapien
tctgaattatttcccagtatagcct

SEQ ID NO: 2636564 - DNA, 25 bp, Homo sapien
ttatttcccagtatagccttttctg

SEQ ID NO: 2636565 - DNA, 25 bp, Homo sapien
gcaagcagggaagttttgcaggtca

SEQ ID NO: 2636566 - DNA, 25 bp, Homo sapien
ccaagatactggctgacactttcat

SEQ ID NO: 2636567 - DNA, 25 bp, Homo sapien
tcaagcaggtggacaaccaagatac

SEQ ID NO: 2636568 - DNA, 25 bp, Homo sapien
gaaggtggccccttaggctgccagc

SEQ ID NO: 2636569 - DNA, 25 bp, Homo sapien
tgagtcaccctccaggggtgtagca

SEQ ID NO: 2636570 - DNA, 25 bp, Homo sapien
ggtgtagcacactgagactccaaag

SEQ ID NO: 2636571 - DNA, 25 bp, Homo sapien
caatatcagggcaagaacaaaggct

SEQ ID NO: 2636572 - DNA, 25 bp, Homo sapien
aagccacactacaaggcagccacag

SEQ ID NO: 2636573 - DNA, 25 bp, Homo sapien
ctggattcccatttaattgttctat

SEQ ID NO: 2636574 - DNA, 25 bp, Homo sapien
aattagtggcactacactaatttcc

SEQ ID NO: 2636575 - DNA, 25 bp, Homo sapien
ggttcatcaggatgatgctttagta

SEQ ID NO: 2636576 - DNA, 25 bp, Homo sapien
ctaatttccaaaagcccaggttcat

SEQ ID NO: 2636577 - DNA, 25 bp, Homo sapien
tttccaaaagcccaggttcatcagg

SEQ ID NO: 2636578 - DNA, 25 bp, Homo sapien
cgcccggccgtgagtagatttctta

SEQ ID NO: 2636579 - DNA, 25 bp, Homo sapien
ccggccgtgagtagatttcttattt

SEQ ID NO: 2636580 - DNA, 25 bp, Homo sapien
cgcgcccggccgtgagtagatttct

SEQ ID NO: 2636581 - DNA, 25 bp, Homo sapien
gcccggccgtgagtagatttcttat

SEQ ID NO: 2636582 - DNA, 25 bp, Homo sapien
tcagctctgcgcaggcggaacatct

SEQ ID NO: 2636583 - DNA, 25 bp, Homo sapien
gctgcctcggagtccgggctggtgg

SEQ ID NO: 2636584 - DNA, 25 bp, Homo sapien
ggcctgggtgaatcggcgctcacac

SEQ ID NO: 2636585 - DNA, 25 bp, Homo sapien
cttcaagctgcggaagacgctgcgg

SEQ ID NO: 2636586 - DNA, 25 bp, Homo sapien
ctgacgtgaggacggtgaacaatcg

SEQ ID NO: 2636587 - DNA, 25 bp, Homo sapien
ctgctgacgtgaggacggtgaacaa

SEQ ID NO: 2636588 - DNA, 25 bp, Homo sapien
ccctgctgctgacgtgaggacggtg

SEQ ID NO: 2636589 - DNA, 25 bp, Homo sapien
tgaacaatcgggaacgttcggtgga

SEQ ID NO: 2636590 - DNA, 25 bp, Homo sapien
aggagcagctggagtcggggattac

SEQ ID NO: 2636591 - DNA, 25 bp, Homo sapien
gaagctccgccctctacgtcgggcg

SEQ ID NO: 2636592 - DNA, 25 bp, Homo sapien
gtcaaagaagctccgccctctacgt

SEQ ID NO: 2636593 - DNA, 25 bp, Homo sapien
gccgcggtcaaagaagctccgccct

SEQ ID NO: 2636594 - DNA, 25 bp, Homo sapien
gcggtcaaagaagctccgccctcta

SEQ ID NO: 2636595 - DNA, 25 bp, Homo sapien
aggaagagcgcctccaccagagaac

SEQ ID NO: 2636596 - DNA, 25 bp, Homo sapien
acaccaggaagagcgcctccaccag

SEQ ID NO: 2636597 - DNA, 25 bp, Homo sapien
ccaggaagagcgcctccaccagaga

SEQ ID NO: 2636598 - DNA, 25 bp, Homo sapien
gaagagcgcctccaccagagaacct

SEQ ID NO: 2636599 - DNA, 25 bp, Homo sapien
aaagagtgtggaagaagcggtgcga

SEQ ID NO: 2636600 - DNA, 25 bp, Homo sapien
ggagaaagagtgtggaagaagcggt

SEQ ID NO: 2636601 - DNA, 25 bp, Homo sapien
agtgtggaagaagcggtgcgaacga

SEQ ID NO: 2636602 - DNA, 25 bp, Homo sapien
ctcgcgagatcgtgcacagtggcga

SEQ ID NO: 2636603 - DNA, 25 bp, Homo sapien
accagtctcagtcccaaaatggcgc

SEQ ID NO: 2636604 - DNA, 25 bp, Homo sapien
ctttgaataatccccttttgccgct

SEQ ID NO: 2636605 - DNA, 25 bp, Homo sapien
tggcgccgacccgatccgcaatgtt

SEQ ID NO: 2636606 - DNA, 25 bp, Homo sapien
ccccacaaccagtctcagtcccaaa

SEQ ID NO: 2636607 - DNA, 25 bp, Homo sapien
tcgtaaaccaaagaatggttctctc

SEQ ID NO: 2636608 - DNA, 25 bp, Homo sapien
caggactcaaaggaacaaagtagcc

SEQ ID NO: 2636609 - DNA, 25 bp, Homo sapien
cacttcctcgaattaagaaaacagg

SEQ ID NO: 2636610 - DNA, 25 bp, Homo sapien
aaaatgcacatgtcccctcagaccc

SEQ ID NO: 2636611 - DNA, 25 bp, Homo sapien
aacggtaggtgacggtattatggag

SEQ ID NO: 2636612 - DNA, 25 bp, Homo sapien
aagcaagcacccgataaaagtctac

SEQ ID NO: 2636613 - DNA, 25 bp, Homo sapien
tgaacaagacatcggagtagaggga

SEQ ID NO: 2636614 - DNA, 25 bp, Homo sapien
gacggtattatggagggcaagggca

SEQ ID NO: 2636615 - DNA, 25 bp, Homo sapien
tacaggagcctggaaaagggcttct

SEQ ID NO: 2636616 - DNA, 25 bp, Homo sapien
acaggagcctggaaaagggcttctt

SEQ ID NO: 2636617 - DNA, 25 bp, Homo sapien
caggagcctggaaaagggcttcttt

SEQ ID NO: 2636618 - DNA, 25 bp, Homo sapien
ctacaggagcctggaaaagggcttc

SEQ ID NO: 2636619 - DNA, 25 bp, Homo sapien
tactaccatgctgccggaaaactgc

SEQ ID NO: 2636620 - DNA, 25 bp, Homo sapien
taaacatcagcatatacagagacac

SEQ ID NO: 2636621 - DNA, 25 bp, Homo sapien
tcagtttcggctgaagaaccccaac

SEQ ID NO: 2636622 - DNA, 25 bp, Homo sapien
aaagttttcatatggctatctcccg

SEQ ID NO: 2636623 - DNA, 25 bp, Homo sapien
ctctgaaataatatcgaagttcttt

SEQ ID NO: 2636624 - DNA, 25 bp, Homo sapien
acaggactgcacaggaaggtgttgg

SEQ ID NO: 2636625 - DNA, 25 bp, Homo sapien
aataatatcgaagttctttgaagat

SEQ ID NO: 2636626 - DNA, 25 bp, Homo sapien
ggactgcacaggaaggtgttggttt

SEQ ID NO: 2636627 - DNA, 25 bp, Homo sapien
ggcatccggcctcatctctttaatt

SEQ ID NO: 2636628 - DNA, 25 bp, Homo sapien
tgcagtgtcgcgatcgcagcgccaa

SEQ ID NO: 2636629 - DNA, 25 bp, Homo sapien
gatcgcagcgccaaaaataccgagg

SEQ ID NO: 2636630 - DNA, 25 bp, Homo sapien
ccaaaaataccgaggcatccggcct

SEQ ID NO: 2636631 - DNA, 25 bp, Homo sapien
aattacacaacttctacaagacagg

SEQ ID NO: 2636632 - DNA, 25 bp, Homo sapien
taaaagataagaacgaaattacaca

SEQ ID NO: 2636633 - DNA, 25 bp, Homo sapien
acttctacaagacaggagaaaactc

SEQ ID NO: 2636634 - DNA, 25 bp, Homo sapien
acatctttttatcgcaccacatgca

SEQ ID NO: 2636635 - DNA, 25 bp, Homo sapien
gagagcaaaaattacctaggtttca

SEQ ID NO: 2636636 - DNA, 25 bp, Homo sapien
tggtcatgatggcaagcgcctgtta

SEQ ID NO: 2636637 - DNA, 25 bp, Homo sapien
ttaaaggcaagggtcacagtaaaca

SEQ ID NO: 2636638 - DNA, 25 bp, Homo sapien
tgaggcagtcccttcaaaaagctaa

SEQ ID NO: 2636639 - DNA, 25 bp, Homo sapien
gagcttcagtaaataacgtccttgc

SEQ ID NO: 2636640 - DNA, 25 bp, Homo sapien
acgtccttgcaagggatctatataa

SEQ ID NO: 2636641 - DNA, 25 bp, Homo sapien
taaataacgtccttgcaagggatct

SEQ ID NO: 2636642 - DNA, 25 bp, Homo sapien
tctaagagcttcagtaaataacgtc

SEQ ID NO: 2636643 - DNA, 25 bp, Homo sapien
taacataggatacatcagacagaga

SEQ ID NO: 2636644 - DNA, 25 bp, Homo sapien
ggcactcggcctaggcagtttcttt

SEQ ID NO: 2636645 - DNA, 25 bp, Homo sapien
agttcccaaggtcaaatagtagctg

SEQ ID NO: 2636646 - DNA, 25 bp, Homo sapien
tagctgaaactcttaactgctctgg

SEQ ID NO: 2636647 - DNA, 25 bp, Homo sapien
tagttatactagcatgcagccaata

SEQ ID NO: 2636648 - DNA, 25 bp, Homo sapien
gggcattatctcaaattacactcag

SEQ ID NO: 2636649 - DNA, 25 bp, Homo sapien
tacgagaactattcactagcgctac

SEQ ID NO: 2636650 - DNA, 25 bp, Homo sapien
tacattggtacacctctatggagaa

SEQ ID NO: 2636651 - DNA, 25 bp, Homo sapien
gacactgatcttatacatggaaaat

SEQ ID NO: 2636652 - DNA, 25 bp, Homo sapien
aagaccatttatgcccaggacctgg

SEQ ID NO: 2636653 - DNA, 25 bp, Homo sapien
aagttcaaagacactgatcttatac

SEQ ID NO: 2636654 - DNA, 25 bp, Homo sapien
agaaagaccatttatgcccaggacc

SEQ ID NO: 2636655 - DNA, 25 bp, Homo sapien
gaaattaccaaatgtgaaatccacc

SEQ ID NO: 2636656 - DNA, 25 bp, Homo sapien
cagtaaagaacagtcgaaagaagtc

SEQ ID NO: 2636657 - DNA, 25 bp, Homo sapien
aaacaaaggtgcactaaggtaatgc

SEQ ID NO: 2636658 - DNA, 25 bp, Homo sapien
acttctggggaagttaagacaggag

SEQ ID NO: 2636659 - DNA, 25 bp, Homo sapien
tacagaagtgtgcaggcaagcgctg

SEQ ID NO: 2636660 - DNA, 25 bp, Homo sapien
aagagtaagaccctactgatacaga

SEQ ID NO: 2636661 - DNA, 25 bp, Homo sapien
ctctattgatatggagggaggcaag

SEQ ID NO: 2636662 - DNA, 25 bp, Homo sapien
ctccaatcccctgagaaagagtaag

SEQ ID NO: 2636663 - DNA, 25 bp, Homo sapien
caactcagtgaaacaaggcttcaac

SEQ ID NO: 2636664 - DNA, 25 bp, Homo sapien
tctccaactcagtgaaacaaggctt

SEQ ID NO: 2636665 - DNA, 25 bp, Homo sapien
gtgaaacaaggcttcaacacctcat

SEQ ID NO: 2636666 - DNA, 25 bp, Homo sapien
cagtctctccaactcagtgaaacaa

SEQ ID NO: 2636667 - DNA, 25 bp, Homo sapien
ggctggagcaaagtcatgctgcgcc

SEQ ID NO: 2636668 - DNA, 25 bp, Homo sapien
ctggagcaaagtcatgctgcgccat

SEQ ID NO: 2636669 - DNA, 25 bp, Homo sapien
caggctggagcaaagtcatgctgcg

SEQ ID NO: 2636670 - DNA, 25 bp, Homo sapien
gatggtggagtagggaaattaagcc

SEQ ID NO: 2636671 - DNA, 25 bp, Homo sapien
tattccagctctagtatgtctcagc

SEQ ID NO: 2636672 - DNA, 25 bp, Homo sapien
tctggtgtatgcataaaagtaactt

SEQ ID NO: 2636673 - DNA, 25 bp, Homo sapien
gggagataagagtgtctaccatctt

SEQ ID NO: 2636674 - DNA, 25 bp, Homo sapien
tcacttctgaaacctagtctactat

SEQ ID NO: 2636675 - DNA, 25 bp, Homo sapien
ggtgagcagttcactcaagcaaatg

SEQ ID NO: 2636676 - DNA, 25 bp, Homo sapien
ttcgttctcaatggatactgtaggg

SEQ ID NO: 2636677 - DNA, 25 bp, Homo sapien
cttcgttctcaatggatactgtagg

SEQ ID NO: 2636678 - DNA, 25 bp, Homo sapien
ttcactcaagcaaatggtcattgtc

SEQ ID NO: 2636679 - DNA, 25 bp, Homo sapien
gtccatgcaaagttttcagaatgct

SEQ ID NO: 2636680 - DNA, 25 bp, Homo sapien
ctgtccatgcaaagttttcagaatg

SEQ ID NO: 2636681 - DNA, 25 bp, Homo sapien
tgtccatgcaaagttttcagaatgc

SEQ ID NO: 2636682 - DNA, 25 bp, Homo sapien
cattaggacgcccaatagcagaatc

SEQ ID NO: 2636683 - DNA, 25 bp, Homo sapien
aagagttgtgtcgtcgacggttcac

SEQ ID NO: 2636684 - DNA, 25 bp, Homo sapien
tgtcgtcgacggttcacatcataac

SEQ ID NO: 2636685 - DNA, 25 bp, Homo sapien
cgacggttcacatcataacgattct

SEQ ID NO: 2636686 - DNA, 25 bp, Homo sapien
actgtttgcgttctctcttgtcttc

SEQ ID NO: 2636687 - DNA, 25 bp, Homo sapien
ctacgagaacgggaacttccaccat

SEQ ID NO: 2636688 - DNA, 25 bp, Homo sapien
gagaacgggaacttccaccatggta

SEQ ID NO: 2636689 - DNA, 25 bp, Homo sapien
ttcaaactgtttgcgttctctcttg

SEQ ID NO: 2636690 - DNA, 25 bp, Homo sapien
tctctctcatactcaggatttaaag

SEQ ID NO: 2636691 - DNA, 25 bp, Homo sapien
ctctcatactcaggatttaaagacg

SEQ ID NO: 2636692 - DNA, 25 bp, Homo sapien
tctcatactcaggatttaaagacgg

SEQ ID NO: 2636693 - DNA, 25 bp, Homo sapien
tctctcatactcaggatttaaagac

SEQ ID NO: 2636694 - DNA, 25 bp, Homo sapien
tctaacaaaagtgtctgaccacccc

SEQ ID NO: 2636695 - DNA, 25 bp, Homo sapien
tccaacatggattgagcacctctga

SEQ ID NO: 2636696 - DNA, 25 bp, Homo sapien
tcaaatatagactagctccacaagc

SEQ ID NO: 2636697 - DNA, 25 bp, Homo sapien
tactgttaggactagtatgctgtca

SEQ ID NO: 2636698 - DNA, 25 bp, Homo sapien
agaggagcttgggagatttttttgg

SEQ ID NO: 2636699 - DNA, 25 bp, Homo sapien
ctaagagaggagcttgggagatttt

SEQ ID NO: 2636700 - DNA, 25 bp, Homo sapien
ttttttggttgggtatgtgtgtgtc

SEQ ID NO: 2636701 - DNA, 25 bp, Homo sapien
tatgtgtgtgtctgggcgtgtaggc

SEQ ID NO: 2636702 - DNA, 25 bp, Homo sapien
cttacctggaaggaagtagcactag

SEQ ID NO: 2636703 - DNA, 25 bp, Homo sapien
tccttagaccaaccctgaaacagta

SEQ ID NO: 2636704 - DNA, 25 bp, Homo sapien
taaatcaacccaggatcagtaccaa

SEQ ID NO: 2636705 - DNA, 25 bp, Homo sapien
ttttatatgacaaacgctcactggc

SEQ ID NO: 2636706 - DNA, 25 bp, Homo sapien
caaaaacagtactccataggacttc

SEQ ID NO: 2636707 - DNA, 25 bp, Homo sapien
tggaagaagaccatgcttaagctaa

SEQ ID NO: 2636708 - DNA, 25 bp, Homo sapien
accatgcctggtcgccactaattat

SEQ ID NO: 2636709 - DNA, 25 bp, Homo sapien
tcatcaaactaccaaggagctgaaa

SEQ ID NO: 2636710 - DNA, 25 bp, Homo sapien
tgaagagaaaacttatcactaagac

SEQ ID NO: 2636711 - DNA, 25 bp, Homo sapien
gactctataaggcagcaatttaaac

SEQ ID NO: 2636712 - DNA, 25 bp, Homo sapien
taagacaatagtacatacacagacc

SEQ ID NO: 2636713 - DNA, 25 bp, Homo sapien
tgcacccagcaagctttccaattaa

SEQ ID NO: 2636714 - DNA, 25 bp, Homo sapien
tcctgtggcagatatttcaaaatgt

SEQ ID NO: 2636715 - DNA, 25 bp, Homo sapien
tagtaaacctacactgaatggttgg

SEQ ID NO: 2636716 - DNA, 25 bp, Homo sapien
ttcactcagattaagcaatgtgccc

SEQ ID NO: 2636717 - DNA, 25 bp, Homo sapien
gggtaagaggcttataagtgtgcac

SEQ ID NO: 2636718 - DNA, 25 bp, Homo sapien
tagctaccttctacatacatgaagt

SEQ ID NO: 2636719 - DNA, 25 bp, Homo sapien
tacatgaagtttctgactcaatcac

SEQ ID NO: 2636720 - DNA, 25 bp, Homo sapien
tgtcttgttattcatgctcttccca

SEQ ID NO: 2636721 - DNA, 25 bp, Homo sapien
ggaactggcccaattctcaggaaga

SEQ ID NO: 2636722 - DNA, 25 bp, Homo sapien
taacctgcaattagatatcagaggg

SEQ ID NO: 2636723 - DNA, 25 bp, Homo sapien
cttgtctgggatttactgtggaatg

SEQ ID NO: 2636724 - DNA, 25 bp, Homo sapien
gcataggattccaattacaattcaa

SEQ ID NO: 2636725 - DNA, 25 bp, Homo sapien
gccatacactgtcactagcatagga

SEQ ID NO: 2636726 - DNA, 25 bp, Homo sapien
taggtagcagagtaagagatgacaa

SEQ ID NO: 2636727 - DNA, 25 bp, Homo sapien
gatgcctaggagtaagaaatattct

SEQ ID NO: 2636728 - DNA, 25 bp, Homo sapien
taagaattcgtattaggccaggcac

SEQ ID NO: 2636729 - DNA, 25 bp, Homo sapien
tattctggctagttcctcaatgagg

SEQ ID NO: 2636730 - DNA, 25 bp, Homo sapien
cagacttttctcaagactactgcag

SEQ ID NO: 2636731 - DNA, 25 bp, Homo sapien
tatatgaatgcagaccaaccaactc

SEQ ID NO: 2636732 - DNA, 25 bp, Homo sapien
agataaattctgctacacagtggct

SEQ ID NO: 2636733 - DNA, 25 bp, Homo sapien
cataaataaagcatgaccaagagtc

SEQ ID NO: 2636734 - DNA, 25 bp, Homo sapien
taactggctgtgacggaagatttcc

SEQ ID NO: 2636735 - DNA, 25 bp, Homo sapien
tacctttcttaatgaccagcatcct

SEQ ID NO: 2636736 - DNA, 25 bp, Homo sapien
catccttggagctctagatttagga

SEQ ID NO: 2636737 - DNA, 25 bp, Homo sapien
ctgggaatccagatagctgtaagtc

SEQ ID NO: 2636738 - DNA, 25 bp, Homo sapien
aactcttgccacctagaactcagca

SEQ ID NO: 2636739 - DNA, 25 bp, Homo sapien
gagcacatatgggtcaactcttgcc

SEQ ID NO: 2636740 - DNA, 25 bp, Homo sapien
caaagctacataaagttgggtttct

SEQ ID NO: 2636741 - DNA, 25 bp, Homo sapien
taaaactgagcaccaggtaaaacag

SEQ ID NO: 2636742 - DNA, 25 bp, Homo sapien
taaaagcattaaagttgccaacgcc

SEQ ID NO: 2636743 - DNA, 25 bp, Homo sapien
cgccaaatgtggactcatgagggaa

SEQ ID NO: 2636744 - DNA, 25 bp, Homo sapien
ctcatgagggaaagaagttccaact

SEQ ID NO: 2636745 - DNA, 25 bp, Homo sapien
tagatggactaaagttcttggcagt

SEQ ID NO: 2636746 - DNA, 25 bp, Homo sapien
gtagccaaggaatcaatgtcaacat

SEQ ID NO: 2636747 - DNA, 25 bp, Homo sapien
gttctagagttcagtaacagctcca

SEQ ID NO: 2636748 - DNA, 25 bp, Homo sapien
ttcttatcccacaaacaatgaaggt

SEQ ID NO: 2636749 - DNA, 25 bp, Homo sapien
tttctataatacacagaagagcagc

SEQ ID NO: 2636750 - DNA, 25 bp, Homo sapien
gagaagaggaatttgagcgattaca

SEQ ID NO: 2636751 - DNA, 25 bp, Homo sapien
ctgattaagtttgtcaacaggagaa

SEQ ID NO: 2636752 - DNA, 25 bp, Homo sapien
gattaagtttgtcaacaggagaaga

SEQ ID NO: 2636753 - DNA, 25 bp, Homo sapien
caggagaagaggaatttgagcgatt

SEQ ID NO: 2636754 - DNA, 25 bp, Homo sapien
cgtgtcagtttggttagacgaggct

SEQ ID NO: 2636755 - DNA, 25 bp, Homo sapien
gtgtcagtttggttagacgaggctg

SEQ ID NO: 2636756 - DNA, 25 bp, Homo sapien
gccagcacggctttcatcttcatgt

SEQ ID NO: 2636757 - DNA, 25 bp, Homo sapien
agccagcacggctttcatcttcatg

SEQ ID NO: 2636758 - DNA, 25 bp, Homo sapien
gagccagcacggctttcatcttcat

SEQ ID NO: 2636759 - DNA, 25 bp, Homo sapien
ccagcacggctttcatcttcatgtt

SEQ ID NO: 2636760 - DNA, 25 bp, Homo sapien
ccctttcttggtgagtactattgct

SEQ ID NO: 2636761 - DNA, 25 bp, Homo sapien
tcagtttgtgggaaggttgaagacc

SEQ ID NO: 2636762 - DNA, 25 bp, Homo sapien
tgatctgctgggaaatcactgaggc

SEQ ID NO: 2636763 - DNA, 25 bp, Homo sapien
tcaagtgaacttgaaagaacatcag

SEQ ID NO: 2636764 - DNA, 25 bp, Homo sapien
ataatattgaaatctcgaatacaga

SEQ ID NO: 2636765 - DNA, 25 bp, Homo sapien
ctataatattgaaatctcgaataca

SEQ ID NO: 2636766 - DNA, 25 bp, Homo sapien
tataatattgaaatctcgaatacag

SEQ ID NO: 2636767 - DNA, 25 bp, Homo sapien
gaaacacaactatcatatgtcccag

SEQ ID NO: 2636768 - DNA, 25 bp, Homo sapien
taatcaaagatagatggtaccatgt

SEQ ID NO: 2636769 - DNA, 25 bp, Homo sapien
cattagggaaatcatacttcacacc

SEQ ID NO: 2636770 - DNA, 25 bp, Homo sapien
tctcctaagaggataaatggccaat

SEQ ID NO: 2636771 - DNA, 25 bp, Homo sapien
gacaaaatgtttggcctcatgtagc

SEQ ID NO: 2636772 - DNA, 25 bp, Homo sapien
tcaagtcaatcaactgggctgttaa

SEQ ID NO: 2636773 - DNA, 25 bp, Homo sapien
cccttggcaggagaaatataaacta

SEQ ID NO: 2636774 - DNA, 25 bp, Homo sapien
taagcaaagtaatgtgccaagcacc

SEQ ID NO: 2636775 - DNA, 25 bp, Homo sapien
ggggcgtggggaagggctgggcatg

SEQ ID NO: 2636776 - DNA, 25 bp, Homo sapien
tggctgtaatcccagcactctggga

SEQ ID NO: 2636777 - DNA, 25 bp, Homo sapien
aggggcgtggggaagggctgggcat

SEQ ID NO: 2636778 - DNA, 25 bp, Homo sapien
gggcgtggggaagggctgggcatgg

SEQ ID NO: 2636779 - DNA, 25 bp, Homo sapien
cacattcacatacaatagttacagc

SEQ ID NO: 2636780 - DNA, 25 bp, Homo sapien
tcacatacaatagttacagccacat

SEQ ID NO: 2636781 - DNA, 25 bp, Homo sapien
taaccacgaagataaagtaataata

SEQ ID NO: 2636782 - DNA, 25 bp, Homo sapien
gtaataatatatgattaaagacaga

SEQ ID NO: 2636783 - DNA, 25 bp, Homo sapien
caagcctgttagtcacaagtcataa

SEQ ID NO: 2636784 - DNA, 25 bp, Homo sapien
tgctactaagtactgaagggaaatc

SEQ ID NO: 2636785 - DNA, 25 bp, Homo sapien
ttttgggtaacatggcagtagctga

SEQ ID NO: 2636786 - DNA, 25 bp, Homo sapien
gaagagagagaggacgtgaacacac

SEQ ID NO: 2636787 - DNA, 25 bp, Homo sapien
atcttgatttgccttagtttctaaa

SEQ ID NO: 2636788 - DNA, 25 bp, Homo sapien
ttttctcctgttagtagtcacagag

SEQ ID NO: 2636789 - DNA, 25 bp, Homo sapien
tagtttctaaatctcatcctctcca

SEQ ID NO: 2636790 - DNA, 25 bp, Homo sapien
tccccagccggatgttttcatcttg

SEQ ID NO: 2636791 - DNA, 25 bp, Homo sapien
agtcataatgatctctatccccaaa

SEQ ID NO: 2636792 - DNA, 25 bp, Homo sapien
tacctcgataccctgataaagtggc

SEQ ID NO: 2636793 - DNA, 25 bp, Homo sapien
tccactaatttggtgtctgcttaaa

SEQ ID NO: 2636794 - DNA, 25 bp, Homo sapien
aatctttctgactagggccaggtgt

SEQ ID NO: 2636795 - DNA, 25 bp, Homo sapien
caaactccttaactgtgtttgtgcc

SEQ ID NO: 2636796 - DNA, 25 bp, Homo sapien
aactccttaactgtgtttgtgccat

SEQ ID NO: 2636797 - DNA, 25 bp, Homo sapien
agaacaaactccttaactgtgtttg

SEQ ID NO: 2636798 - DNA, 25 bp, Homo sapien
ctaaagaacaaactccttaactgtg

SEQ ID NO: 2636799 - DNA, 25 bp, Homo sapien
cagagactattaaatctagactagc

SEQ ID NO: 2636800 - DNA, 25 bp, Homo sapien
gaatcgtaactaagcaataatgcag

SEQ ID NO: 2636801 - DNA, 25 bp, Homo sapien
cacttttaccattcaatgacaccta

SEQ ID NO: 2636802 - DNA, 25 bp, Homo sapien
aattatcaactattatgaaagagaa

SEQ ID NO: 2636803 - DNA, 25 bp, Homo sapien
cttcagggatggtctaaatgactgc

SEQ ID NO: 2636804 - DNA, 25 bp, Homo sapien
tctgcagacaaaaatagagctttca

SEQ ID NO: 2636805 - DNA, 25 bp, Homo sapien
tcaccagagagtccttaaccacaat

SEQ ID NO: 2636806 - DNA, 25 bp, Homo sapien
tcaaacaagggcacctttgcaaagt

SEQ ID NO: 2636807 - DNA, 25 bp, Homo sapien
ctgttcactaataacttggaattct

SEQ ID NO: 2636808 - DNA, 25 bp, Homo sapien
tgttcactaataacttggaattctc

SEQ ID NO: 2636809 - DNA, 25 bp, Homo sapien
cctcagttaagggagcacatgtttc

SEQ ID NO: 2636810 - DNA, 25 bp, Homo sapien
cagttaagggagcacatgtttcatc

SEQ ID NO: 2636811 - DNA, 25 bp, Homo sapien
ttgaagtcacagatcaagccatttt

SEQ ID NO: 2636812 - DNA, 25 bp, Homo sapien
ttccacggtccaaacttgaagtcac

SEQ ID NO: 2636813 - DNA, 25 bp, Homo sapien
gatgtatcactgctacttgtctctg

SEQ ID NO: 2636814 - DNA, 25 bp, Homo sapien
tgtgggtttgaaagtgctgttcttc

SEQ ID NO: 2636815 - DNA, 25 bp, Homo sapien
cagagaaatgttgcagtgatgaaga

SEQ ID NO: 2636816 - DNA, 25 bp, Homo sapien
tatgagagatgtatcacactaagat

SEQ ID NO: 2636817 - DNA, 25 bp, Homo sapien
agaaagtcaatgttggaccaaccca

SEQ ID NO: 2636818 - DNA, 25 bp, Homo sapien
tacatcgtcacattgctagtcagag

SEQ ID NO: 2636819 - DNA, 25 bp, Homo sapien
tgaaaaccctggtctgacaacatac

SEQ ID NO: 2636820 - DNA, 25 bp, Homo sapien
ttttccatgtcgtggacagatccag

SEQ ID NO: 2636821 - DNA, 25 bp, Homo sapien
gggagaccgcacaaagtggacttga

SEQ ID NO: 2636822 - DNA, 25 bp, Homo sapien
tctgcaagcaaaacagtgtaagctg

SEQ ID NO: 2636823 - DNA, 25 bp, Homo sapien
caccatctttagtaaggtattactt

SEQ ID NO: 2636824 - DNA, 25 bp, Homo sapien
aagcatgtttagagtatgtttatgt

SEQ ID NO: 2636825 - DNA, 25 bp, Homo sapien
gcatgtttagagtatgtttatgttt

SEQ ID NO: 2636826 - DNA, 25 bp, Homo sapien
agcatgtttagagtatgtttatgtt

SEQ ID NO: 2636827 - DNA, 25 bp, Homo sapien
agtatttccgtcagcagcaaaacag

SEQ ID NO: 2636828 - DNA, 25 bp, Homo sapien
taccgatagcttcgtcaaagcatgc

SEQ ID NO: 2636829 - DNA, 25 bp, Homo sapien
agctgcccattatttagacaccaag

SEQ ID NO: 2636830 - DNA, 25 bp, Homo sapien
tccatggcctagttctgagttcagc

SEQ ID NO: 2636831 - DNA, 25 bp, Homo sapien
cctcaatatcctatgagtagctgga

SEQ ID NO: 2636832 - DNA, 25 bp, Homo sapien
caacttagtttgcatgattatggag

SEQ ID NO: 2636833 - DNA, 25 bp, Homo sapien
atttagactccagtatcagattagg

SEQ ID NO: 2636834 - DNA, 25 bp, Homo sapien
tataaatctgattaagtcaagctga

SEQ ID NO: 2636835 - DNA, 25 bp, Homo sapien
tgcaccccctgcttttgccagccca

SEQ ID NO: 2636836 - DNA, 25 bp, Homo sapien
ataggctcctcctctgcccgatccc

SEQ ID NO: 2636837 - DNA, 25 bp, Homo sapien
tgctgccctgcaggttcactcttct

SEQ ID NO: 2636838 - DNA, 25 bp, Homo sapien
cagcccaccctctgcataggctcct

SEQ ID NO: 2636839 - DNA, 25 bp, Homo sapien
aagtttaacacaccctgattagtct

SEQ ID NO: 2636840 - DNA, 25 bp, Homo sapien
taaattttgtgcagacgctcctccg

SEQ ID NO: 2636841 - DNA, 25 bp, Homo sapien
tcctccgaacagtggtttgctgccc

SEQ ID NO: 2636842 - DNA, 25 bp, Homo sapien
cacaccctgattagtctctttcctt

SEQ ID NO: 2636843 - DNA, 25 bp, Homo sapien
tgatgagaaggacccgacatcccaa

SEQ ID NO: 2636844 - DNA, 25 bp, Homo sapien
ggaaccactgccaatggcaaagcat

SEQ ID NO: 2636845 - DNA, 25 bp, Homo sapien
ggcaaagcatgtgtcccgggacaga

SEQ ID NO: 2636846 - DNA, 25 bp, Homo sapien
caactgtcttcagtaggaaccactg

SEQ ID NO: 2636847 - DNA, 25 bp, Homo sapien
taagagacataaaggccacagtgag

SEQ ID NO: 2636848 - DNA, 25 bp, Homo sapien
gacaatgggccagagcagatatgct

SEQ ID NO: 2636849 - DNA, 25 bp, Homo sapien
taaatgtatcatgcagggccagaca

SEQ ID NO: 2636850 - DNA, 25 bp, Homo sapien
gattccacgctctaccacttagtgg

SEQ ID NO: 2636851 - DNA, 25 bp, Homo sapien
catggttgtgcacatctataatcca

SEQ ID NO: 2636852 - DNA, 25 bp, Homo sapien
gagacattaaaattgcttgagcctg

SEQ ID NO: 2636853 - DNA, 25 bp, Homo sapien
ttgtgcacatctataatccaagcta

SEQ ID NO: 2636854 - DNA, 25 bp, Homo sapien
atctgggcatggttgtgcacatcta

SEQ ID NO: 2636855 - DNA, 25 bp, Homo sapien
ttttcttcattggtactgctctgtt

SEQ ID NO: 2636856 - DNA, 25 bp, Homo sapien
tttcttcattggtactgctctgttg

SEQ ID NO: 2636857 - DNA, 25 bp, Homo sapien
cttcattggtactgctctgttggta

SEQ ID NO: 2636858 - DNA, 25 bp, Homo sapien
gaaagaggatgttgttaccagaagg

SEQ ID NO: 2636859 - DNA, 25 bp, Homo sapien
ccaaatgaaagaggatgttgttacc

SEQ ID NO: 2636860 - DNA, 25 bp, Homo sapien
gctccccaaatgaaagaggatgttg

SEQ ID NO: 2636861 - DNA, 25 bp, Homo sapien
aatgaaagaggatgttgttaccaga

SEQ ID NO: 2636862 - DNA, 25 bp, Homo sapien
aagagtgccttattaggaacatcaa

SEQ ID NO: 2636863 - DNA, 25 bp, Homo sapien
gactaagagtgccttattaggaaca

SEQ ID NO: 2636864 - DNA, 25 bp, Homo sapien
ttacagactaagagtgccttattag

SEQ ID NO: 2636865 - DNA, 25 bp, Homo sapien
tatcacctgcacataataagcatgt

SEQ ID NO: 2636866 - DNA, 25 bp, Homo sapien
ctccccctcctataacgttttgatg

SEQ ID NO: 2636867 - DNA, 25 bp, Homo sapien
cctggatcaccctgcagacgattat

SEQ ID NO: 2636868 - DNA, 25 bp, Homo sapien
ttttgatgtgccaaacgactaaagt

SEQ ID NO: 2636869 - DNA, 25 bp, Homo sapien
taaccatccaggtgcgtctcttctc

SEQ ID NO: 2636870 - DNA, 25 bp, Homo sapien
acaagagcttccttcaggtggctgc

SEQ ID NO: 2636871 - DNA, 25 bp, Homo sapien
caagagcttccttcaggtggctgct

SEQ ID NO: 2636872 - DNA, 25 bp, Homo sapien
gacaagagcttccttcaggtggctg

SEQ ID NO: 2636873 - DNA, 25 bp, Homo sapien
tccttcatttgtccccagaaaggct

SEQ ID NO: 2636874 - DNA, 25 bp, Homo sapien
catctccaaacctctggttagtttc

SEQ ID NO: 2636875 - DNA, 25 bp, Homo sapien
gcttccttcatttgtccccagaaag

SEQ ID NO: 2636876 - DNA, 25 bp, Homo sapien
ggatcggctgttctcaaaataacct

SEQ ID NO: 2636877 - DNA, 25 bp, Homo sapien
gaaaaggagcaagacggttaactgc

SEQ ID NO: 2636878 - DNA, 25 bp, Homo sapien
atgcttgtcgcactaaattgaaggc

SEQ ID NO: 2636879 - DNA, 25 bp, Homo sapien
aatcaaagcactgattgtcatctgc

SEQ ID NO: 2636880 - DNA, 25 bp, Homo sapien
tgcatgcagacatgattaacaaatg

SEQ ID NO: 2636881 - DNA, 25 bp, Homo sapien
taacaaatgcttgtcgcactaaatt

SEQ ID NO: 2636882 - DNA, 25 bp, Homo sapien
tggatgtgggcagctactagaattc

SEQ ID NO: 2636883 - DNA, 25 bp, Homo sapien
cattatgaaccccagagtggatgtg

SEQ ID NO: 2636884 - DNA, 25 bp, Homo sapien
tgtgggcagctactagaattctttc

SEQ ID NO: 2636885 - DNA, 25 bp, Homo sapien
gatgtgggcagctactagaattctt

SEQ ID NO: 2636886 - DNA, 25 bp, Homo sapien
tgactcaaagtctgccgctgcctga

SEQ ID NO: 2636887 - DNA, 25 bp, Homo sapien
accacacacactgttatcagacctt

SEQ ID NO: 2636888 - DNA, 25 bp, Homo sapien
gcctgagtcagctgcactcgggcat

SEQ ID NO: 2636889 - DNA, 25 bp, Homo sapien
tcgggcataaaccacacacactgtt

SEQ ID NO: 2636890 - DNA, 25 bp, Homo sapien
ctctgacctggtgggcaccacggtc

SEQ ID NO: 2636891 - DNA, 25 bp, Homo sapien
gggagggccagcttcatccccttta

SEQ ID NO: 2636892 - DNA, 25 bp, Homo sapien
caccacggtcgggagggccagcttc

SEQ ID NO: 2636893 - DNA, 25 bp, Homo sapien
gcttcatcccctttacctaatgtca

SEQ ID NO: 2636894 - DNA, 25 bp, Homo sapien
caggctttcaagttccactaaattt

SEQ ID NO: 2636895 - DNA, 25 bp, Homo sapien
tcaactttatgatcaggctttcaag

SEQ ID NO: 2636896 - DNA, 25 bp, Homo sapien
ttatgatcaggctttcaagttccac

SEQ ID NO: 2636897 - DNA, 25 bp, Homo sapien
ttcagtcaactttatgatcaggctt

SEQ ID NO: 2636898 - DNA, 25 bp, Homo sapien
ggatttcgcgtgcttgggcctcgac

SEQ ID NO: 2636899 - DNA, 25 bp, Homo sapien
ttgagttttctcatagacttgcgtt

SEQ ID NO: 2636900 - DNA, 25 bp, Homo sapien
cgggggccacatctacaaactccgg

SEQ ID NO: 2636901 - DNA, 25 bp, Homo sapien
gacttgcgttttctcccaccgagca

SEQ ID NO: 2636902 - DNA, 25 bp, Homo sapien
tggctcagtacagcttcagagatgt

SEQ ID NO: 2636903 - DNA, 25 bp, Homo sapien
ggctcagtacagcttcagagatgtc

SEQ ID NO: 2636904 - DNA, 25 bp, Homo sapien
gacggcatcatctttcgatttgaca

SEQ ID NO: 2636905 - DNA, 25 bp, Homo sapien
ccttggttgggtctagcgccacagt

SEQ ID NO: 2636906 - DNA, 25 bp, Homo sapien
ccatccggctttggaacaaagggcg

SEQ ID NO: 2636907 - DNA, 25 bp, Homo sapien
cagaacatgacgtttgggagcagcc

SEQ ID NO: 2636908 - DNA, 25 bp, Homo sapien
ggtcgttcttggtggtgaaacgatg

SEQ ID NO: 2636909 - DNA, 25 bp, Homo sapien
gtcgttcttggtggtgaaacgatga

SEQ ID NO: 2636910 - DNA, 25 bp, Homo sapien
tcgttcttggtggtgaaacgatgac

SEQ ID NO: 2636911 - DNA, 25 bp, Homo sapien
ttgcttggccgggggccacccttga

SEQ ID NO: 2636912 - DNA, 25 bp, Homo sapien
tgtccttggggttagtcaccaaaga

SEQ ID NO: 2636913 - DNA, 25 bp, Homo sapien
ttggccgggggccacccttgatgtc

SEQ ID NO: 2636914 - DNA, 25 bp, Homo sapien
gctgtctagagagagacttgattca

SEQ ID NO: 2636915 - DNA, 25 bp, Homo sapien
ccaggatgtataggtccaccctcac

SEQ ID NO: 2636916 - DNA, 25 bp, Homo sapien
agccaccagtcctttgggaattatg

SEQ ID NO: 2636917 - DNA, 25 bp, Homo sapien
accccaggatgtataggtccaccct

SEQ ID NO: 2636918 - DNA, 25 bp, Homo sapien
ccagtcctttgggaattatgtttgg

SEQ ID NO: 2636919 - DNA, 25 bp, Homo sapien
ggtcgcaaatgagacattcgttggg

SEQ ID NO: 2636920 - DNA, 25 bp, Homo sapien
cattcgttggggtcggtggtcccat

SEQ ID NO: 2636921 - DNA, 25 bp, Homo sapien
gagacattcgttggggtcggtggtc

SEQ ID NO: 2636922 - DNA, 25 bp, Homo sapien
ttaagacttggtcgcaaatgagaca

SEQ ID NO: 2636923 - DNA, 25 bp, Homo sapien
cacactggtatgatctctccccttt

SEQ ID NO: 2636924 - DNA, 25 bp, Homo sapien
gacttggccacagatctcacactgg

SEQ ID NO: 2636925 - DNA, 25 bp, Homo sapien
tcacactggtatgatctctcccctt

SEQ ID NO: 2636926 - DNA, 25 bp, Homo sapien
ttggccacagatctcacactggtat

SEQ ID NO: 2636927 - DNA, 25 bp, Homo sapien
agtgaaccccaaggtgtgtcttcag

SEQ ID NO: 2636928 - DNA, 25 bp, Homo sapien
tgaaccccaaggtgtgtcttcaggt

SEQ ID NO: 2636929 - DNA, 25 bp, Homo sapien
cagtgaaccccaaggtgtgtcttca

SEQ ID NO: 2636930 - DNA, 25 bp, Homo sapien
tcagtgaaccccaaggtgtgtcttc

SEQ ID NO: 2636931 - DNA, 25 bp, Homo sapien
atccatcttggagtaggtgaatctg

SEQ ID NO: 2636932 - DNA, 25 bp, Homo sapien
agtaggtgaatctgctactgcagca

SEQ ID NO: 2636933 - DNA, 25 bp, Homo sapien
gtaggtgaatctgctactgcagcat

SEQ ID NO: 2636934 - DNA, 25 bp, Homo sapien
catccatcttggagtaggtgaatct

SEQ ID NO: 2636935 - DNA, 25 bp, Homo sapien
gcctgttccagcttcatagccttca

SEQ ID NO: 2636936 - DNA, 25 bp, Homo sapien
ccaggacttgcctgttccagcttca

SEQ ID NO: 2636937 - DNA, 25 bp, Homo sapien
acttgcctgttccagcttcatagcc

SEQ ID NO: 2636938 - DNA, 25 bp, Homo sapien
cagcttcatagccttcatgaaatat

SEQ ID NO: 2636939 - DNA, 25 bp, Homo sapien
tcatcaaaatctagactctttatga

SEQ ID NO: 2636940 - DNA, 25 bp, Homo sapien
catcaaaatctagactctttatgac

SEQ ID NO: 2636941 - DNA, 25 bp, Homo sapien
ctcatcaaaatctagactctttatg

SEQ ID NO: 2636942 - DNA, 25 bp, Homo sapien
tgaacaattgtgtggatagtggtaa

SEQ ID NO: 2636943 - DNA, 25 bp, Homo sapien
cctctgacattctaaagttcttgtc

SEQ ID NO: 2636944 - DNA, 25 bp, Homo sapien
gaatggctcctgaacaattgtgtgg

SEQ ID NO: 2636945 - DNA, 25 bp, Homo sapien
agcagaggagcacctgacactgtcc

SEQ ID NO: 2636946 - DNA, 25 bp, Homo sapien
cagcccctcctgtctgggagtttag

SEQ ID NO: 2636947 - DNA, 25 bp, Homo sapien
ctggagcgttcttccctgtgcctgg

SEQ ID NO: 2636948 - DNA, 25 bp, Homo sapien
cccctcctgtctgggagtttagtca

SEQ ID NO: 2636949 - DNA, 25 bp, Homo sapien
cctctctccatgcagcccctcctgt

SEQ ID NO: 2636950 - DNA, 25 bp, Homo sapien
agattggcttttgtttccgaagtga

SEQ ID NO: 2636951 - DNA, 25 bp, Homo sapien
tctgcctgatttcacaagatgaacg

SEQ ID NO: 2636952 - DNA, 25 bp, Homo sapien
agatgaacgtccatgcttgtcccta

SEQ ID NO: 2636953 - DNA, 25 bp, Homo sapien
tcaaaatatacctgctgtgcccctc

SEQ ID NO: 2636954 - DNA, 25 bp, Homo sapien
tgtcgggtagacatctgcaaatttg

SEQ ID NO: 2636955 - DNA, 25 bp, Homo sapien
tcaaagtggagctgtcgggtagaca

SEQ ID NO: 2636956 - DNA, 25 bp, Homo sapien
tagacataagtttgaggtggcaact

SEQ ID NO: 2636957 - DNA, 25 bp, Homo sapien
tggcaactgggcatcaaagtggagc

SEQ ID NO: 2636958 - DNA, 25 bp, Homo sapien
atgggtgccagctccagctaagagg

SEQ ID NO: 2636959 - DNA, 25 bp, Homo sapien
taagggaaggatctgactactaccc

SEQ ID NO: 2636960 - DNA, 25 bp, Homo sapien
tgagaggctccatgacccggttgag

SEQ ID NO: 2636961 - DNA, 25 bp, Homo sapien
tctcaccgatgacctgggaaccatg

SEQ ID NO: 2636962 - DNA, 25 bp, Homo sapien
gaccttgtaaatcagacttgcctcc

SEQ ID NO: 2636963 - DNA, 25 bp, Homo sapien
tagaggcatttctcacgctcaagaa

SEQ ID NO: 2636964 - DNA, 25 bp, Homo sapien
aaagagtgtttagctagtcacaggg

SEQ ID NO: 2636965 - DNA, 25 bp, Homo sapien
tattatggctgtcccgtgcccaaga

SEQ ID NO: 2636966 - DNA, 25 bp, Homo sapien
agtctgcttgactgctcctcaaaca

SEQ ID NO: 2636967 - DNA, 25 bp, Homo sapien
gtcactgtagccaaaatctgtagcc

SEQ ID NO: 2636968 - DNA, 25 bp, Homo sapien
aaaatctgtagccagtctgcttgac

SEQ ID NO: 2636969 - DNA, 25 bp, Homo sapien
tttgagtcactgtagccaaaatctg

SEQ ID NO: 2636970 - DNA, 25 bp, Homo sapien
catgtgtccaccattcccatcccca

SEQ ID NO: 2636971 - DNA, 25 bp, Homo sapien
acacatcgcaaacatgtgtccacca

SEQ ID NO: 2636972 - DNA, 25 bp, Homo sapien
aacacatcgcaaacatgtgtccacc

SEQ ID NO: 2636973 - DNA, 25 bp, Homo sapien
tccaccattcccatccccaatatca

SEQ ID NO: 2636974 - DNA, 25 bp, Homo sapien
ccactttttcctcctttctgcccat

SEQ ID NO: 2636975 - DNA, 25 bp, Homo sapien
caaagccactttttcctcctttctg

SEQ ID NO: 2636976 - DNA, 25 bp, Homo sapien
gccactttttcctcctttctgccca

SEQ ID NO: 2636977 - DNA, 25 bp, Homo sapien
ctcaccaaagccactttttcctcct

SEQ ID NO: 2636978 - DNA, 25 bp, Homo sapien
tctataatctggtggttcctgtcca

SEQ ID NO: 2636979 - DNA, 25 bp, Homo sapien
acctctataatctggtggttcctgt

SEQ ID NO: 2636980 - DNA, 25 bp, Homo sapien
ctctataatctggtggttcctgtcc

SEQ ID NO: 2636981 - DNA, 25 bp, Homo sapien
tcacctctataatctggtggttcct

SEQ ID NO: 2636982 - DNA, 25 bp, Homo sapien
catctcgccagttataagcaggcat

SEQ ID NO: 2636983 - DNA, 25 bp, Homo sapien
gagacactgggtgtgttctgctgct

SEQ ID NO: 2636984 - DNA, 25 bp, Homo sapien
ttgacaagccataatcccatctcgc

SEQ ID NO: 2636985 - DNA, 25 bp, Homo sapien
agacactgggtgtgttctgctgctt

SEQ ID NO: 2636986 - DNA, 25 bp, Homo sapien
gtgaagtagccttttcatctgcatc

SEQ ID NO: 2636987 - DNA, 25 bp, Homo sapien
gcacatgtccatagcagcagacgct

SEQ ID NO: 2636988 - DNA, 25 bp, Homo sapien
ggcagcacatgtccatagcagcaga

SEQ ID NO: 2636989 - DNA, 25 bp, Homo sapien
tccaaaagtgaagtagccttttcat

SEQ ID NO: 2636990 - DNA, 25 bp, Homo sapien
gtgctaccattcttgaccctgcttc

SEQ ID NO: 2636991 - DNA, 25 bp, Homo sapien
cagtgaataggctccactgaccaga

SEQ ID NO: 2636992 - DNA, 25 bp, Homo sapien
ccctgcttcacagtgaataggctcc

SEQ ID NO: 2636993 - DNA, 25 bp, Homo sapien
aataggctccactgaccagagctga

SEQ ID NO: 2636994 - DNA, 25 bp, Homo sapien
cataagattctgcagtgccatcgtc

SEQ ID NO: 2636995 - DNA, 25 bp, Homo sapien
tgttccagccttgacaaatacagtg

SEQ ID NO: 2636996 - DNA, 25 bp, Homo sapien
gcaattatgtcaggaagcccatctg

SEQ ID NO: 2636997 - DNA, 25 bp, Homo sapien
gcccatctgatggaacgaaatcctc

SEQ ID NO: 2636998 - DNA, 25 bp, Homo sapien
ttgatgggagataaatcgttgagtc

SEQ ID NO: 2636999 - DNA, 25 bp, Homo sapien
tctggttttcttggagcacatgggc

SEQ ID NO: 2637000 - DNA, 25 bp, Homo sapien
cttggagcacatgggctgatattaa

SEQ ID NO: 2637001 - DNA, 25 bp, Homo sapien
ggagataaatcgttgagtcttcatg

SEQ ID NO: 2637002 - DNA, 25 bp, Homo sapien
cgcattcaagcaatcaggtattcta

SEQ ID NO: 2637003 - DNA, 25 bp, Homo sapien
tcaagcaatcaggtattctataagc

SEQ ID NO: 2637004 - DNA, 25 bp, Homo sapien
ttttttcaacgcattcaagcaatca

SEQ ID NO: 2637005 - DNA, 25 bp, Homo sapien
tcaacgcattcaagcaatcaggtat

SEQ ID NO: 2637006 - DNA, 25 bp, Homo sapien
tgcaggcacactacgcactcatttc

SEQ ID NO: 2637007 - DNA, 25 bp, Homo sapien
tagctccaagggcacgaggtccaag

SEQ ID NO: 2637008 - DNA, 25 bp, Homo sapien
agggcacgaggtccaagccctgcag

SEQ ID NO: 2637009 - DNA, 25 bp, Homo sapien
cgtgttcctagctccaagggcacga

SEQ ID NO: 2637010 - DNA, 25 bp, Homo sapien
cactggaatgctctccgagtgtggg

SEQ ID NO: 2637011 - DNA, 25 bp, Homo sapien
acttcactggaatgctctccgagtg

SEQ ID NO: 2637012 - DNA, 25 bp, Homo sapien
ggagtgtttggaacaaatcagaaga

SEQ ID NO: 2637013 - DNA, 25 bp, Homo sapien
gggagtgtttggaacaaatcagaag

SEQ ID NO: 2637014 - DNA, 25 bp, Homo sapien
tcctggcactgtccccagtttgctg

SEQ ID NO: 2637015 - DNA, 25 bp, Homo sapien
gctgttaaccttttttgctgtcacc

SEQ ID NO: 2637016 - DNA, 25 bp, Homo sapien
gaattaaggaatcaagttccattcc

SEQ ID NO: 2637017 - DNA, 25 bp, Homo sapien
cactgtccccagtttgctgttaacc

SEQ ID NO: 2637018 - DNA, 25 bp, Homo sapien
agaaacatctgcttatctggaggct

SEQ ID NO: 2637019 - DNA, 25 bp, Homo sapien
gaggctgccaacataagaacctcat

SEQ ID NO: 2637020 - DNA, 25 bp, Homo sapien
aaacatctgcttatctggaggctgc

SEQ ID NO: 2637021 - DNA, 25 bp, Homo sapien
tggaggctgccaacataagaacctc

SEQ ID NO: 2637022 - DNA, 25 bp, Homo sapien
tcacgtgacccatgggtgtggcaat

SEQ ID NO: 2637023 - DNA, 25 bp, Homo sapien
gctactcttcagctcatgcctgcag

SEQ ID NO: 2637024 - DNA, 25 bp, Homo sapien
ctgacagcaccccaaccgctgctgt

SEQ ID NO: 2637025 - DNA, 25 bp, Homo sapien
gcagtctgccctgcttctgacagca

SEQ ID NO: 2637026 - DNA, 25 bp, Homo sapien
acttctccaggtagataactttcac

SEQ ID NO: 2637027 - DNA, 25 bp, Homo sapien
tccaggtagataactttcactggcc

SEQ ID NO: 2637028 - DNA, 25 bp, Homo sapien
ctccaggtagataactttcactggc

SEQ ID NO: 2637029 - DNA, 25 bp, Homo sapien
tcacttctccaggtagataactttc

SEQ ID NO: 2637030 - DNA, 25 bp, Homo sapien
ctcctcctctataaggttctctgac

SEQ ID NO: 2637031 - DNA, 25 bp, Homo sapien
gacagctaatgcaggcaaccaacca

SEQ ID NO: 2637032 - DNA, 25 bp, Homo sapien
tctctgacagctaatgcaggcaacc

SEQ ID NO: 2637033 - DNA, 25 bp, Homo sapien
ccaaccaagcatcccgtaaggctgg

SEQ ID NO: 2637034 - DNA, 25 bp, Homo sapien
gggtcattggagtacacagcccact

SEQ ID NO: 2637035 - DNA, 25 bp, Homo sapien
ttatcaaactatccacaatgacatc

SEQ ID NO: 2637036 - DNA, 25 bp, Homo sapien
tccacaatgacatctatgtatgtga

SEQ ID NO: 2637037 - DNA, 25 bp, Homo sapien
ctgacatgtactacacagagctgca

SEQ ID NO: 2637038 - DNA, 25 bp, Homo sapien
tccctccaggtatgaccacaggctc

SEQ ID NO: 2637039 - DNA, 25 bp, Homo sapien
taactcgtagttcaggacatttccc

SEQ ID NO: 2637040 - DNA, 25 bp, Homo sapien
aggacctgaagctgagatctctaac

SEQ ID NO: 2637041 - DNA, 25 bp, Homo sapien
tgagatctctaactcgtagttcagg

SEQ ID NO: 2637042 - DNA, 25 bp, Homo sapien
gagtagtgccttctttgtcacagga

SEQ ID NO: 2637043 - DNA, 25 bp, Homo sapien
aaataagccttagtccccagatcac

SEQ ID NO: 2637044 - DNA, 25 bp, Homo sapien
gcttcaaccataacagagcaacagg

SEQ ID NO: 2637045 - DNA, 25 bp, Homo sapien
gagtcactacataacacagcttagc

SEQ ID NO: 2637046 - DNA, 25 bp, Homo sapien
acattaatggctttccgggggattg

SEQ ID NO: 2637047 - DNA, 25 bp, Homo sapien
agagtaacattaatggctttccggg

SEQ ID NO: 2637048 - DNA, 25 bp, Homo sapien
cattaatggctttccgggggattgg

SEQ ID NO: 2637049 - DNA, 25 bp, Homo sapien
cctggcagagtaacattaatggctt

SEQ ID NO: 2637050 - DNA, 25 bp, Homo sapien
gatgggtgctatatttaaaatcctc

SEQ ID NO: 2637051 - DNA, 25 bp, Homo sapien
agatgggtgctatatttaaaatcct

SEQ ID NO: 2637052 - DNA, 25 bp, Homo sapien
gctgacttgtgatgagtgggagcac

SEQ ID NO: 2637053 - DNA, 25 bp, Homo sapien
gtgtgtggctgacttgtgatgagtg

SEQ ID NO: 2637054 - DNA, 25 bp, Homo sapien
tgtggctgacttgtgatgagtggga

SEQ ID NO: 2637055 - DNA, 25 bp, Homo sapien
tgacttgtgatgagtgggagcacca

SEQ ID NO: 2637056 - DNA, 25 bp, Homo sapien
ggataaagctttgctcgttttacca

SEQ ID NO: 2637057 - DNA, 25 bp, Homo sapien
gcatcgatgggcaagggataaagct

SEQ ID NO: 2637058 - DNA, 25 bp, Homo sapien
gctttgctcgttttaccatcaaaac

SEQ ID NO: 2637059 - DNA, 25 bp, Homo sapien
tgctcgttttaccatcaaaacttcc

SEQ ID NO: 2637060 - DNA, 25 bp, Homo sapien
catatcggggaccaccccactgtgg

SEQ ID NO: 2637061 - DNA, 25 bp, Homo sapien
agcatatcggggaccaccccactgt

SEQ ID NO: 2637062 - DNA, 25 bp, Homo sapien
gtcagccagcatatcggggaccacc

SEQ ID NO: 2637063 - DNA, 25 bp, Homo sapien
tcaggtcagccagcatatcggggac

SEQ ID NO: 2637064 - DNA, 25 bp, Homo sapien
gtatggcagacaatatacataggca

SEQ ID NO: 2637065 - DNA, 25 bp, Homo sapien
tgtatggcagacaatatacataggc

SEQ ID NO: 2637066 - DNA, 25 bp, Homo sapien
atggcagacaatatacataggcaaa

SEQ ID NO: 2637067 - DNA, 25 bp, Homo sapien
ctgtatggcagacaatatacatagg

SEQ ID NO: 2637068 - DNA, 25 bp, Homo sapien
aaggccacatctttggtgttcccaa

SEQ ID NO: 2637069 - DNA, 25 bp, Homo sapien
caccgaatgtagaggagagcagcca

SEQ ID NO: 2637070 - DNA, 25 bp, Homo sapien
gttcccaaggccaccgaatgtagag

SEQ ID NO: 2637071 - DNA, 25 bp, Homo sapien
caaggccaccgaatgtagaggagag

SEQ ID NO: 2637072 - DNA, 25 bp, Homo sapien
atattcactgaacaaaagccctccc

SEQ ID NO: 2637073 - DNA, 25 bp, Homo sapien
tcccctcctatatacatcacttcac

SEQ ID NO: 2637074 - DNA, 25 bp, Homo sapien
catattcactgaacaaaagccctcc

SEQ ID NO: 2637075 - DNA, 25 bp, Homo sapien
aagccctcccctcctatatacatca

SEQ ID NO: 2637076 - DNA, 25 bp, Homo sapien
tctgcttgaagttggtcgcctgtta

SEQ ID NO: 2637077 - DNA, 25 bp, Homo sapien
gccctgggtgtagcctttccttgga

SEQ ID NO: 2637078 - DNA, 25 bp, Homo sapien
gtaactctccctgtggctttgtctg

SEQ ID NO: 2637079 - DNA, 25 bp, Homo sapien
gaaacagggatgaaagggagactcc

SEQ ID NO: 2637080 - DNA, 25 bp, Homo sapien
agaagagattagaaataggtctcca

SEQ ID NO: 2637081 - DNA, 25 bp, Homo sapien
gctctgaataggagcttggctcttt

SEQ ID NO: 2637082 - DNA, 25 bp, Homo sapien
aggctctgaataggagcttggctct

SEQ ID NO: 2637083 - DNA, 25 bp, Homo sapien
gagattagaaataggtctccatctt

SEQ ID NO: 2637084 - DNA, 25 bp, Homo sapien
agctcatcagagcaataaggtctcc

SEQ ID NO: 2637085 - DNA, 25 bp, Homo sapien
cagctcatcagagcaataaggtctc

SEQ ID NO: 2637086 - DNA, 25 bp, Homo sapien
ccctgcggtaatctctgcgtttcct

SEQ ID NO: 2637087 - DNA, 25 bp, Homo sapien
tcccctgcggtaatctctgcgtttc

SEQ ID NO: 2637088 - DNA, 25 bp, Homo sapien
cttcccctgcggtaatctctgcgtt

SEQ ID NO: 2637089 - DNA, 25 bp, Homo sapien
ttcccctgcggtaatctctgcgttt

SEQ ID NO: 2637090 - DNA, 25 bp, Homo sapien
tacaatggtctcagctcctccaagc

SEQ ID NO: 2637091 - DNA, 25 bp, Homo sapien
tccaagcaatgcctgctccacactg

SEQ ID NO: 2637092 - DNA, 25 bp, Homo sapien
aagcaatgcctgctccacactgtca

SEQ ID NO: 2637093 - DNA, 25 bp, Homo sapien
gctcctccaagcaatgcctgctcca

SEQ ID NO: 2637094 - DNA, 25 bp, Homo sapien
tacataggaggcactggtagacggg

SEQ ID NO: 2637095 - DNA, 25 bp, Homo sapien
tttctcactagaggtagcatctgca

SEQ ID NO: 2637096 - DNA, 25 bp, Homo sapien
aggatgtcgggatgtttctccctga

SEQ ID NO: 2637097 - DNA, 25 bp, Homo sapien
aggaggatgtcgggatgtttctccc

SEQ ID NO: 2637098 - DNA, 25 bp, Homo sapien
ctttgcctgctagcttctgcttagt

SEQ ID NO: 2637099 - DNA, 25 bp, Homo sapien
tcatacatctttgcctgctagcttc

SEQ ID NO: 2637100 - DNA, 25 bp, Homo sapien
catacatctttgcctgctagcttct

SEQ ID NO: 2637101 - DNA, 25 bp, Homo sapien
catctttgcctgctagcttctgctt

SEQ ID NO: 2637102 - DNA, 25 bp, Homo sapien
aggactgacagcttgcacattagta

SEQ ID NO: 2637103 - DNA, 25 bp, Homo sapien
gactgacagcttgcacattagtagc

SEQ ID NO: 2637104 - DNA, 25 bp, Homo sapien
gacagcttgcacattagtagcttct

SEQ ID NO: 2637105 - DNA, 25 bp, Homo sapien
gcttgcacattagtagcttctacct

SEQ ID NO: 2637106 - DNA, 25 bp, Homo sapien
tgatggtctgatttcatagaatcac

SEQ ID NO: 2637107 - DNA, 25 bp, Homo sapien
caggagaacactgcagtattcctct

SEQ ID NO: 2637108 - DNA, 25 bp, Homo sapien
tgcagtattcctctctgatggtctg

SEQ ID NO: 2637109 - DNA, 25 bp, Homo sapien
catttacaacccatgcaggagaaca

SEQ ID NO: 2637110 - DNA, 25 bp, Homo sapien
catctgggaaatatgaaacctagtg

SEQ ID NO: 2637111 - DNA, 25 bp, Homo sapien
gagtttcaaaagaagcggttacaga

SEQ ID NO: 2637112 - DNA, 25 bp, Homo sapien
caaaagctccaattatgaattgagg

SEQ ID NO: 2637113 - DNA, 25 bp, Homo sapien
cctagtggtcccagtcatctagaca

SEQ ID NO: 2637114 - DNA, 25 bp, Homo sapien
caaaccaaccaatgcacagctttct

SEQ ID NO: 2637115 - DNA, 25 bp, Homo sapien
gctttctctgataactgctactggt

SEQ ID NO: 2637116 - DNA, 25 bp, Homo sapien
tcaaatattccaaaccaaccaatgc

SEQ ID NO: 2637117 - DNA, 25 bp, Homo sapien
tgcacagctttctctgataactgct

SEQ ID NO: 2637118 - DNA, 25 bp, Homo sapien
atcttcatatggcgtctcaactttt

SEQ ID NO: 2637119 - DNA, 25 bp, Homo sapien
ccatcttcatatggcgtctcaactt

SEQ ID NO: 2637120 - DNA, 25 bp, Homo sapien
ctttgaagcatgaatttgaatttgg

SEQ ID NO: 2637121 - DNA, 25 bp, Homo sapien
ttcatatggcgtctcaactttttgg

SEQ ID NO: 2637122 - DNA, 25 bp, Homo sapien
gccgtggagctgaggtagaaacctc

SEQ ID NO: 2637123 - DNA, 25 bp, Homo sapien
tggagctgaggtagaaacctcagca

SEQ ID NO: 2637124 - DNA, 25 bp, Homo sapien
cagaagcctcagcacatttcaccag

SEQ ID NO: 2637125 - DNA, 25 bp, Homo sapien
gcagaagcctcagcacatttcacca

SEQ ID NO: 2637126 - DNA, 25 bp, Homo sapien
gaataagactggctcatctagcatg

SEQ ID NO: 2637127 - DNA, 25 bp, Homo sapien
tatcttccggtgaccagcatacagg

SEQ ID NO: 2637128 - DNA, 25 bp, Homo sapien
tacacatcctaggaactgcaggcca

SEQ ID NO: 2637129 - DNA, 25 bp, Homo sapien
catgttaaacagagttgctacaggc

SEQ ID NO: 2637130 - DNA, 25 bp, Homo sapien
tcttcaagacacattaggactaggt

SEQ ID NO: 2637131 - DNA, 25 bp, Homo sapien
tgttctgacagaggatcatagatcc

SEQ ID NO: 2637132 - DNA, 25 bp, Homo sapien
gatttagtaaagataccagtcctcc

SEQ ID NO: 2637133 - DNA, 25 bp, Homo sapien
cagagaaagcggaagtatgaccaca

SEQ ID NO: 2637134 - DNA, 25 bp, Homo sapien
ttcaccatttcttctcctgttatca

SEQ ID NO: 2637135 - DNA, 25 bp, Homo sapien
tcaccatttcttctcctgttatcat

SEQ ID NO: 2637136 - DNA, 25 bp, Homo sapien
cttcaccatttcttctcctgttatc

SEQ ID NO: 2637137 - DNA, 25 bp, Homo sapien
aatctgacttccatgaaaccaaggc

SEQ ID NO: 2637138 - DNA, 25 bp, Homo sapien
aaggtcatctctctgattccaccat

SEQ ID NO: 2637139 - DNA, 25 bp, Homo sapien
gaaaaacaagtgacacagccatgat

SEQ ID NO: 2637140 - DNA, 25 bp, Homo sapien
tctcctcgtctttgaaccaccagga

SEQ ID NO: 2637141 - DNA, 25 bp, Homo sapien
tgacatgcacaagtgccaacttcag

SEQ ID NO: 2637142 - DNA, 25 bp, Homo sapien
atgcacaagtgccaacttcagtagc

SEQ ID NO: 2637143 - DNA, 25 bp, Homo sapien
gacatgcacaagtgccaacttcagt

SEQ ID NO: 2637144 - DNA, 25 bp, Homo sapien
gagtgacatgcacaagtgccaactt

SEQ ID NO: 2637145 - DNA, 25 bp, Homo sapien
gaaagctgggcatcttcctgagatc

SEQ ID NO: 2637146 - DNA, 25 bp, Homo sapien
ggaaagctgggcatcttcctgagat

SEQ ID NO: 2637147 - DNA, 25 bp, Homo sapien
tgtgggtgacaccttctcggtttag

SEQ ID NO: 2637148 - DNA, 25 bp, Homo sapien
tttctttcacacctacacagcatgt

SEQ ID NO: 2637149 - DNA, 25 bp, Homo sapien
gacaccttctcggtttagtccatag

SEQ ID NO: 2637150 - DNA, 25 bp, Homo sapien
tagtccatagattacagagtatgga

SEQ ID NO: 2637151 - DNA, 25 bp, Homo sapien
tccagtgagctcttttagcacatac

SEQ ID NO: 2637152 - DNA, 25 bp, Homo sapien
ccagtgagctcttttagcacatacc

SEQ ID NO: 2637153 - DNA, 25 bp, Homo sapien
tttctccagtgagctcttttagcac

SEQ ID NO: 2637154 - DNA, 25 bp, Homo sapien
tctccagtgagctcttttagcacat

SEQ ID NO: 2637155 - DNA, 25 bp, Homo sapien
tcctctttcttctcgtgaacagata

SEQ ID NO: 2637156 - DNA, 25 bp, Homo sapien
taaatgtccctgtgagattcgaatt

SEQ ID NO: 2637157 - DNA, 25 bp, Homo sapien
gagattcgaatttcctttgcctagt

SEQ ID NO: 2637158 - DNA, 25 bp, Homo sapien
ttgcctagtgaattacaaagggatg

SEQ ID NO: 2637159 - DNA, 25 bp, Homo sapien
gtggaatccaattgcagtcaagttt

SEQ ID NO: 2637160 - DNA, 25 bp, Homo sapien
tgtggaatccaattgcagtcaagtt

SEQ ID NO: 2637161 - DNA, 25 bp, Homo sapien
tatgtctctaattgataattcatgt

SEQ ID NO: 2637162 - DNA, 25 bp, Homo sapien
tgtctctaattgataattcatgtgg

SEQ ID NO: 2637163 - DNA, 25 bp, Homo sapien
gactaagatttgaggcaaaagcctt

SEQ ID NO: 2637164 - DNA, 25 bp, Homo sapien
taaactgtttgaagcttaggtcctg

SEQ ID NO: 2637165 - DNA, 25 bp, Homo sapien
tttgccttctcctctatgcaggtac

SEQ ID NO: 2637166 - DNA, 25 bp, Homo sapien
aaaagccttatagtaatagcacaca

SEQ ID NO: 2637167 - DNA, 25 bp, Homo sapien
atgatagtgcatctcccagcagaag

SEQ ID NO: 2637168 - DNA, 25 bp, Homo sapien
tttcctcatgatagtgcatctccca

SEQ ID NO: 2637169 - DNA, 25 bp, Homo sapien
gatagtgcatctcccagcagaagcc

SEQ ID NO: 2637170 - DNA, 25 bp, Homo sapien
aatatgtgagtgtattcccctcttc

SEQ ID NO: 2637171 - DNA, 25 bp, Homo sapien
ggtatacctaggcaagaacctggga

SEQ ID NO: 2637172 - DNA, 25 bp, Homo sapien
gaaatagagttctggcgcttcaaag

SEQ ID NO: 2637173 - DNA, 25 bp, Homo sapien
tatggtgagccattgagacagctgg

SEQ ID NO: 2637174 - DNA, 25 bp, Homo sapien
tgagatgtgcgttttctgaccccag

SEQ ID NO: 2637175 - DNA, 25 bp, Homo sapien
taaagcaaagttaagccttctcagc

SEQ ID NO: 2637176 - DNA, 25 bp, Homo sapien
gcagatgcctattaacaattaaagc

SEQ ID NO: 2637177 - DNA, 25 bp, Homo sapien
tgaggcacatcgaaatctcccacac

SEQ ID NO: 2637178 - DNA, 25 bp, Homo sapien
caagttctgccacaaacaagctgag

SEQ ID NO: 2637179 - DNA, 25 bp, Homo sapien
aatctccaaggtgtcaaatgatgca

SEQ ID NO: 2637180 - DNA, 25 bp, Homo sapien
caagaaattatcttcctccaggtaa

SEQ ID NO: 2637181 - DNA, 25 bp, Homo sapien
ctccaggtaaaatctccaaggtgtc

SEQ ID NO: 2637182 - DNA, 25 bp, Homo sapien
aagaagcttcaagaaattatcttcc

SEQ ID NO: 2637183 - DNA, 25 bp, Homo sapien
gaggacaagggaatcccttggtata

SEQ ID NO: 2637184 - DNA, 25 bp, Homo sapien
ctggaggacaagggaatcccttggt

SEQ ID NO: 2637185 - DNA, 25 bp, Homo sapien
tggaggacaagggaatcccttggta

SEQ ID NO: 2637186 - DNA, 25 bp, Homo sapien
tcttccatcatatcgcctgtcattg

SEQ ID NO: 2637187 - DNA, 25 bp, Homo sapien
tgtcattgctaaacccaactgaaag

SEQ ID NO: 2637188 - DNA, 25 bp, Homo sapien
ccatcatatcgcctgtcattgctaa

SEQ ID NO: 2637189 - DNA, 25 bp, Homo sapien
tatcgcctgtcattgctaaacccaa

SEQ ID NO: 2637190 - DNA, 25 bp, Homo sapien
gacctcgtccttcatgaaagagcag

SEQ ID NO: 2637191 - DNA, 25 bp, Homo sapien
tgaactcatccagtaaaggagcctg

SEQ ID NO: 2637192 - DNA, 25 bp, Homo sapien
tgctcatcacctatgaagttctggg

SEQ ID NO: 2637193 - DNA, 25 bp, Homo sapien
ccaagttggatactattctgcacag

SEQ ID NO: 2637194 - DNA, 25 bp, Homo sapien
ctggcctttgtgctgtagcattaaa

SEQ ID NO: 2637195 - DNA, 25 bp, Homo sapien
cattaaagagagtttcggccacgtc

SEQ ID NO: 2637196 - DNA, 25 bp, Homo sapien
acgtctcgtagtcaagtccccgcat

SEQ ID NO: 2637197 - DNA, 25 bp, Homo sapien
catacaaagatttgacactagcctc

SEQ ID NO: 2637198 - DNA, 25 bp, Homo sapien
tgacattactgaaatattgctgatg

SEQ ID NO: 2637199 - DNA, 25 bp, Homo sapien
cacatggaagtgctgggtgagacca

SEQ ID NO: 2637200 - DNA, 25 bp, Homo sapien
ttgttaagagggtgttcattctcac

SEQ ID NO: 2637201 - DNA, 25 bp, Homo sapien
aaaccagtgagctattgcattcagc

SEQ ID NO: 2637202 - DNA, 25 bp, Homo sapien
atgaagcactaacatcagttttgag

SEQ ID NO: 2637203 - DNA, 25 bp, Homo sapien
tgaagcactaacatcagttttgagg

SEQ ID NO: 2637204 - DNA, 25 bp, Homo sapien
tatgaagcactaacatcagttttga

SEQ ID NO: 2637205 - DNA, 25 bp, Homo sapien
tatcggtgaggtgcctctttcccat

SEQ ID NO: 2637206 - DNA, 25 bp, Homo sapien
acctcctgcgaacctttcaactgaa

SEQ ID NO: 2637207 - DNA, 25 bp, Homo sapien
acatcatacatcttggtatcggtga

SEQ ID NO: 2637208 - DNA, 25 bp, Homo sapien
tacatcttggtatcggtgaggtgcc

SEQ ID NO: 2637209 - DNA, 25 bp, Homo sapien
tgtcaggaaaagaatcctgaacagg

SEQ ID NO: 2637210 - DNA, 25 bp, Homo sapien
aaagaatcctgaacaggaaagcaaa

SEQ ID NO: 2637211 - DNA, 25 bp, Homo sapien
tgacaaatgtgtcaggaaaagaatc

SEQ ID NO: 2637212 - DNA, 25 bp, Homo sapien
aatcttggtcacagatgacaaatgt

SEQ ID NO: 2637213 - DNA, 25 bp, Homo sapien
aaaggtacttcctcagcgtggctgc

SEQ ID NO: 2637214 - DNA, 25 bp, Homo sapien
ccacatggtgaaaggtacttcctca

SEQ ID NO: 2637215 - DNA, 25 bp, Homo sapien
gtgaaaggtacttcctcagcgtggc

SEQ ID NO: 2637216 - DNA, 25 bp, Homo sapien
taccacatggtgaaaggtacttcct

SEQ ID NO: 2637217 - DNA, 25 bp, Homo sapien
caactggcagctgcgggaaagagga

SEQ ID NO: 2637218 - DNA, 25 bp, Homo sapien
taggaataaaggcttttggctccat

SEQ ID NO: 2637219 - DNA, 25 bp, Homo sapien
ttaggaataaaggcttttggctcca

SEQ ID NO: 2637220 - DNA, 25 bp, Homo sapien
tgcgggaaagaggaattaggaataa

SEQ ID NO: 2637221 - DNA, 25 bp, Homo sapien
gatgaacaagtggattttgccaaag

SEQ ID NO: 2637222 - DNA, 25 bp, Homo sapien
tgtaatgcatctctgtatctgaatc

SEQ ID NO: 2637223 - DNA, 25 bp, Homo sapien
tctgtatctgaatcagtggaatctt

SEQ ID NO: 2637224 - DNA, 25 bp, Homo sapien
tttttaaatgacgatgaacaagtgg

SEQ ID NO: 2637225 - DNA, 25 bp, Homo sapien
ttggaccctgactgacacaggaggg

SEQ ID NO: 2637226 - DNA, 25 bp, Homo sapien
aaagttggcctcactcttttgcaaa

SEQ ID NO: 2637227 - DNA, 25 bp, Homo sapien
tattagaaggcagagtcattggaac

SEQ ID NO: 2637228 - DNA, 25 bp, Homo sapien
cagcccggagttgattgtagcttcc

SEQ ID NO: 2637229 - DNA, 25 bp, Homo sapien
atggcaaatggaccgagttcagcaa

SEQ ID NO: 2637230 - DNA, 25 bp, Homo sapien
tggcaaatggaccgagttcagcaat

SEQ ID NO: 2637231 - DNA, 25 bp, Homo sapien
ggcaaatggaccgagttcagcaatc

SEQ ID NO: 2637232 - DNA, 25 bp, Homo sapien
gatggcaaatggaccgagttcagca

SEQ ID NO: 2637233 - DNA, 25 bp, Homo sapien
tcacacactcataactaaaacccat

SEQ ID NO: 2637234 - DNA, 25 bp, Homo sapien
cacactcataactaaaacccatcat

SEQ ID NO: 2637235 - DNA, 25 bp, Homo sapien
tcactcacacactcataactaaaac

SEQ ID NO: 2637236 - DNA, 25 bp, Homo sapien
cttcgtttcttcactcacacactca

SEQ ID NO: 2637237 - DNA, 25 bp, Homo sapien
tatggcaaaatcctacgcagcttga

SEQ ID NO: 2637238 - DNA, 25 bp, Homo sapien
tctggaacggcacacgagagcatta

SEQ ID NO: 2637239 - DNA, 25 bp, Homo sapien
gacggtaagtatcacacatgctcca

SEQ ID NO: 2637240 - DNA, 25 bp, Homo sapien
gcctgcccagttgacaagtgactca

SEQ ID NO: 2637241 - DNA, 25 bp, Homo sapien
tgatggtctgttttcaagttcaagg

SEQ ID NO: 2637242 - DNA, 25 bp, Homo sapien
tttcaagttcaaggagttctctttc

SEQ ID NO: 2637243 - DNA, 25 bp, Homo sapien
ctgttttcaagttcaaggagttctc

SEQ ID NO: 2637244 - DNA, 25 bp, Homo sapien
tcaagttcaaggagttctctttctt

SEQ ID NO: 2637245 - DNA, 25 bp, Homo sapien
cacccgcattaacaattttgaaaag

SEQ ID NO: 2637246 - DNA, 25 bp, Homo sapien
tagggattggttttggtcacccgca

SEQ ID NO: 2637247 - DNA, 25 bp, Homo sapien
ttttgaaaagcgtaccataattatg

SEQ ID NO: 2637248 - DNA, 25 bp, Homo sapien
aaagcgtaccataattatgactaca

SEQ ID NO: 2637249 - DNA, 25 bp, Homo sapien
cgctatcaataggattgtggcaggc

SEQ ID NO: 2637250 - DNA, 25 bp, Homo sapien
caaaaccttcagctggcagttgccg

SEQ ID NO: 2637251 - DNA, 25 bp, Homo sapien
cattgcaatcacaagatccaaaacc

SEQ ID NO: 2637252 - DNA, 25 bp, Homo sapien
aagtggattgatcgtgccagtttcc

SEQ ID NO: 2637253 - DNA, 25 bp, Homo sapien
taaaatattcagctgcctcaatcat

SEQ ID NO: 2637254 - DNA, 25 bp, Homo sapien
aaataaaatattcagctgcctcaat

SEQ ID NO: 2637255 - DNA, 25 bp, Homo sapien
cgctaagccccatcttattttcagg

SEQ ID NO: 2637256 - DNA, 25 bp, Homo sapien
gctaagccccatcttattttcaggg

SEQ ID NO: 2637257 - DNA, 25 bp, Homo sapien
tatccctttccctacgatgatcact

SEQ ID NO: 2637258 - DNA, 25 bp, Homo sapien
tcctggatgttctactgcaaatatc

SEQ ID NO: 2637259 - DNA, 25 bp, Homo sapien
aggcctgcacggtagtcctggatgt

SEQ ID NO: 2637260 - DNA, 25 bp, Homo sapien
ctttccctacgatgatcactgaaga

SEQ ID NO: 2637261 - DNA, 25 bp, Homo sapien
gaggactaccttttctagtgagaga

SEQ ID NO: 2637262 - DNA, 25 bp, Homo sapien
aacagaagtagtttcattgggcttt

SEQ ID NO: 2637263 - DNA, 25 bp, Homo sapien
gagcagggaggactaccttttctag

SEQ ID NO: 2637264 - DNA, 25 bp, Homo sapien
caaaaacagaagtagtttcattggg

SEQ ID NO: 2637265 - DNA, 25 bp, Homo sapien
cattccacgttcctatatttactgg

SEQ ID NO: 2637266 - DNA, 25 bp, Homo sapien
tcctctgtattcaaaaattcctcag

SEQ ID NO: 2637267 - DNA, 25 bp, Homo sapien
aattcctcagatcagttgctctcac

SEQ ID NO: 2637268 - DNA, 25 bp, Homo sapien
gccctatttctctcctctgtattca

SEQ ID NO: 2637269 - DNA, 25 bp, Homo sapien
agatcttcttcacctgtgacgacat

SEQ ID NO: 2637270 - DNA, 25 bp, Homo sapien
aaagatcttcttcacctgtgacgac

SEQ ID NO: 2637271 - DNA, 25 bp, Homo sapien
gacaacaaagatcttcttcacctgt

SEQ ID NO: 2637272 - DNA, 25 bp, Homo sapien
acaaagatcttcttcacctgtgacg

SEQ ID NO: 2637273 - DNA, 25 bp, Homo sapien
gaagaagaatgacagcgggttccat

SEQ ID NO: 2637274 - DNA, 25 bp, Homo sapien
atgaagaagaatgacagcgggttcc

SEQ ID NO: 2637275 - DNA, 25 bp, Homo sapien
tgaagaagaatgacagcgggttcca

SEQ ID NO: 2637276 - DNA, 25 bp, Homo sapien
caaaatgataacaccaaatgggcat

SEQ ID NO: 2637277 - DNA, 25 bp, Homo sapien
ccaaaatgataacaccaaatgggca

SEQ ID NO: 2637278 - DNA, 25 bp, Homo sapien
attccaaaatgataacaccaaatgg

SEQ ID NO: 2637279 - DNA, 25 bp, Homo sapien
ttccaaaatgataacaccaaatggg

SEQ ID NO: 2637280 - DNA, 25 bp, Homo sapien
agatgctactctctccttctgggta

SEQ ID NO: 2637281 - DNA, 25 bp, Homo sapien
gaactgcttccatttgccaatacag

SEQ ID NO: 2637282 - DNA, 25 bp, Homo sapien
ggcaccactgccactctagcagatg

SEQ ID NO: 2637283 - DNA, 25 bp, Homo sapien
ctgggtatcaccagctcctactggg

SEQ ID NO: 2637284 - DNA, 25 bp, Homo sapien
taggacaccaaaaacgctgaagaca

SEQ ID NO: 2637285 - DNA, 25 bp, Homo sapien
gacaccagaagcactagccttgctg

SEQ ID NO: 2637286 - DNA, 25 bp, Homo sapien
gatcactttaaatgcggtagttttg

SEQ ID NO: 2637287 - DNA, 25 bp, Homo sapien
catcatcaggttgagagaccacagg

SEQ ID NO: 2637288 - DNA, 25 bp, Homo sapien
aggctctcctactgtattgagtaac

SEQ ID NO: 2637289 - DNA, 25 bp, Homo sapien
gtaggctctcctactgtattgagta

SEQ ID NO: 2637290 - DNA, 25 bp, Homo sapien
taactggatttgcttttcacgttcc

SEQ ID NO: 2637291 - DNA, 25 bp, Homo sapien
tgagtaactggatttgcttttcacg

SEQ ID NO: 2637292 - DNA, 25 bp, Homo sapien
gaataccacctatagggcctagaaa

SEQ ID NO: 2637293 - DNA, 25 bp, Homo sapien
tattcacaagactgagtcctttggc

SEQ ID NO: 2637294 - DNA, 25 bp, Homo sapien
gaatcagatttctatagctaacccc

SEQ ID NO: 2637295 - DNA, 25 bp, Homo sapien
tcatcaaatgctggtcagctgacac

SEQ ID NO: 2637296 - DNA, 25 bp, Homo sapien
ctccatagtgcactttttcttcacc

SEQ ID NO: 2637297 - DNA, 25 bp, Homo sapien
ggttaatgtgaggaaacgtcagttc

SEQ ID NO: 2637298 - DNA, 25 bp, Homo sapien
ggaaacgtcagttcaccaaaatagc

SEQ ID NO: 2637299 - DNA, 25 bp, Homo sapien
cagttcaccaaaatagccaagattc

SEQ ID NO: 2637300 - DNA, 25 bp, Homo sapien
ggtccagatgtagtatccatcttga

SEQ ID NO: 2637301 - DNA, 25 bp, Homo sapien
tccagatgtagtatccatcttgagg

SEQ ID NO: 2637302 - DNA, 25 bp, Homo sapien
aaggtccagatgtagtatccatctt

SEQ ID NO: 2637303 - DNA, 25 bp, Homo sapien
agatgtagtatccatcttgaggatg

SEQ ID NO: 2637304 - DNA, 25 bp, Homo sapien
ataatgacaatggtgtcagtgtctg

SEQ ID NO: 2637305 - DNA, 25 bp, Homo sapien
tcttctcccccgagcctgtgttgtt

SEQ ID NO: 2637306 - DNA, 25 bp, Homo sapien
ccttcaccccacttcagttccttct

SEQ ID NO: 2637307 - DNA, 25 bp, Homo sapien
cttaatcgataaagaagaagcatcc

SEQ ID NO: 2637308 - DNA, 25 bp, Homo sapien
tcagtcaattttggcgttgacccgt

SEQ ID NO: 2637309 - DNA, 25 bp, Homo sapien
ttctcatcccgattccatctagtca

SEQ ID NO: 2637310 - DNA, 25 bp, Homo sapien
gcgttgacccgttgtaccttgcaat

SEQ ID NO: 2637311 - DNA, 25 bp, Homo sapien
ccttgcaatttttatcattctgtgc

SEQ ID NO: 2637312 - DNA, 25 bp, Homo sapien
ggcacatatcacatccgtgtgtgaa

SEQ ID NO: 2637313 - DNA, 25 bp, Homo sapien
taataagctgaagtcgtaacaaggt

SEQ ID NO: 2637314 - DNA, 25 bp, Homo sapien
ggtcagttgggtaataagctgaagt

SEQ ID NO: 2637315 - DNA, 25 bp, Homo sapien
tcacatccgtgtgtgaacactcaat

SEQ ID NO: 2637316 - DNA, 25 bp, Homo sapien
acataaggaaaactatactgaatcc

SEQ ID NO: 2637317 - DNA, 25 bp, Homo sapien
cactaggtgattgacacctgggacg

SEQ ID NO: 2637318 - DNA, 25 bp, Homo sapien
gtcctctgtcgttattactaacatg

SEQ ID NO: 2637319 - DNA, 25 bp, Homo sapien
gggtgtcctctgtcgttattactaa

SEQ ID NO: 2637320 - DNA, 25 bp, Homo sapien
ttgttcttcttccactaggtgattg

SEQ ID NO: 2637321 - DNA, 25 bp, Homo sapien
gcttttctgtaaggttgtagcattt

SEQ ID NO: 2637322 - DNA, 25 bp, Homo sapien
ttatcacagcccacaactgctgcta

SEQ ID NO: 2637323 - DNA, 25 bp, Homo sapien
acagcccacaactgctgctaaatgc

SEQ ID NO: 2637324 - DNA, 25 bp, Homo sapien
gcccctgcttcacgcagttgtgttg

SEQ ID NO: 2637325 - DNA, 25 bp, Homo sapien
tttgaccgtgaagacaatatgagca

SEQ ID NO: 2637326 - DNA, 25 bp, Homo sapien
ctttgaccgtgaagacaatatgagc

SEQ ID NO: 2637327 - DNA, 25 bp, Homo sapien
ctaacctgctgaataggtctggtgt

SEQ ID NO: 2637328 - DNA, 25 bp, Homo sapien
aacctgctgaataggtctggtgtgg

SEQ ID NO: 2637329 - DNA, 25 bp, Homo sapien
taacctgctgaataggtctggtgtg

SEQ ID NO: 2637330 - DNA, 25 bp, Homo sapien
acctgctgaataggtctggtgtggt

SEQ ID NO: 2637331 - DNA, 25 bp, Homo sapien
ctctgttgagttataatgcgagttg

SEQ ID NO: 2637332 - DNA, 25 bp, Homo sapien
gttgagttataatgcgagttgagtt

SEQ ID NO: 2637333 - DNA, 25 bp, Homo sapien
ctgttgagttataatgcgagttgag

SEQ ID NO: 2637334 - DNA, 25 bp, Homo sapien
gagttataatgcgagttgagttata

SEQ ID NO: 2637335 - DNA, 25 bp, Homo sapien
ttctcatatggttgctgcaaattgc

SEQ ID NO: 2637336 - DNA, 25 bp, Homo sapien
tctcatatggttgctgcaaattgca

SEQ ID NO: 2637337 - DNA, 25 bp, Homo sapien
tgtttcttcactagcaaaatgagaa

SEQ ID NO: 2637338 - DNA, 25 bp, Homo sapien
ctgtttcttcactagcaaaatgaga

SEQ ID NO: 2637339 - DNA, 25 bp, Homo sapien
ggccggatctgtgggaataagcaaa

SEQ ID NO: 2637340 - DNA, 25 bp, Homo sapien
cggagggcacagaatggccggatct

SEQ ID NO: 2637341 - DNA, 25 bp, Homo sapien
gaatggccagctgtcgctgcctgcc

SEQ ID NO: 2637342 - DNA, 25 bp, Homo sapien
gcctgccagcaaacggagggcacag

SEQ ID NO: 2637343 - DNA, 25 bp, Homo sapien
gccctcttgcctgtgatccttcctt

SEQ ID NO: 2637344 - DNA, 25 bp, Homo sapien
gcctgtgatccttccttgcattctt

SEQ ID NO: 2637345 - DNA, 25 bp, Homo sapien
gtagcaaggccaggtgttgggcaca

SEQ ID NO: 2637346 - DNA, 25 bp, Homo sapien
tgtagcaaggccaggtgttgggcac

SEQ ID NO: 2637347 - DNA, 25 bp, Homo sapien
tgtcctttctgtgatggtgcatcac

SEQ ID NO: 2637348 - DNA, 25 bp, Homo sapien
tctgtcctttctgtgatggtgcatc

SEQ ID NO: 2637349 - DNA, 25 bp, Homo sapien
gtgcatctgtttgccctgggatctc

SEQ ID NO: 2637350 - DNA, 25 bp, Homo sapien
tctgtttgccctgggatctccccta

SEQ ID NO: 2637351 - DNA, 25 bp, Homo sapien
tattatggggctcctgcagtatacc

SEQ ID NO: 2637352 - DNA, 25 bp, Homo sapien
tatagcacccttctgcttcaagttc

SEQ ID NO: 2637353 - DNA, 25 bp, Homo sapien
gtgtcaaattcagtgctattatggg

SEQ ID NO: 2637354 - DNA, 25 bp, Homo sapien
gcagtatacctaagtctgtcccagg

SEQ ID NO: 2637355 - DNA, 25 bp, Homo sapien
tgaagtggcacttcagtttccccaa

SEQ ID NO: 2637356 - DNA, 25 bp, Homo sapien
aaacacaagtgtaagtgctctggaa

SEQ ID NO: 2637357 - DNA, 25 bp, Homo sapien
cagagatttggacataaccacgacc

SEQ ID NO: 2637358 - DNA, 25 bp, Homo sapien
ctctggaatttcataccagggcggg

SEQ ID NO: 2637359 - DNA, 25 bp, Homo sapien
caagccttagctggtccgattcacc

SEQ ID NO: 2637360 - DNA, 25 bp, Homo sapien
gattccaggaggtctttttaatctg

SEQ ID NO: 2637361 - DNA, 25 bp, Homo sapien
gccagaaactgctgaacacaaagca

SEQ ID NO: 2637362 - DNA, 25 bp, Homo sapien
gattcacctaaagcagtagtaccta

SEQ ID NO: 2637363 - DNA, 25 bp, Homo sapien
tctgaaacataatgccaagtggatg

SEQ ID NO: 2637364 - DNA, 25 bp, Homo sapien
attcagatagaaacttccggttcat

SEQ ID NO: 2637365 - DNA, 25 bp, Homo sapien
gtggatgattcagatagaaacttcc

SEQ ID NO: 2637366 - DNA, 25 bp, Homo sapien
ctgaaacataatgccaagtggatga

SEQ ID NO: 2637367 - DNA, 25 bp, Homo sapien
cctcaacatccttataagaggaata

SEQ ID NO: 2637368 - DNA, 25 bp, Homo sapien
cttcctcaacatccttataagagga

SEQ ID NO: 2637369 - DNA, 25 bp, Homo sapien
taagaggaataaagacaacatgtca

SEQ ID NO: 2637370 - DNA, 25 bp, Homo sapien
aagaggaataaagacaacatgtcat

SEQ ID NO: 2637371 - DNA, 25 bp, Homo sapien
ctgctctctggtatgggtcttgaag

SEQ ID NO: 2637372 - DNA, 25 bp, Homo sapien
aaaactgctctctggtatgggtctt

SEQ ID NO: 2637373 - DNA, 25 bp, Homo sapien
aactgctctctggtatgggtcttga

SEQ ID NO: 2637374 - DNA, 25 bp, Homo sapien
ctacaaaaggagataaatcaggttt

SEQ ID NO: 2637375 - DNA, 25 bp, Homo sapien
actgttgctgctacttaactctgtg

SEQ ID NO: 2637376 - DNA, 25 bp, Homo sapien
agcagtcaaaacggagcaaagagaa

SEQ ID NO: 2637377 - DNA, 25 bp, Homo sapien
cagtcaaaacggagcaaagagaagt

SEQ ID NO: 2637378 - DNA, 25 bp, Homo sapien
agcaaagagaagtgtcctgcctccc

SEQ ID NO: 2637379 - DNA, 25 bp, Homo sapien
tcaacgaaatttaaaaggagcagag

SEQ ID NO: 2637380 - DNA, 25 bp, Homo sapien
caacgaaatttaaaaggagcagagt

SEQ ID NO: 2637381 - DNA, 25 bp, Homo sapien
gcaaagccttttgcgattgtttttg

SEQ ID NO: 2637382 - DNA, 25 bp, Homo sapien
ttgcagcaaagccttttgcgattgt

SEQ ID NO: 2637383 - DNA, 25 bp, Homo sapien
aaagccttttgcgattgtttttgca

SEQ ID NO: 2637384 - DNA, 25 bp, Homo sapien
cagcaaagccttttgcgattgtttt

SEQ ID NO: 2637385 - DNA, 25 bp, Homo sapien
ggaaatcatccaacacgtcccactt

SEQ ID NO: 2637386 - DNA, 25 bp, Homo sapien
tgtagacttcctctccaaatagaag

SEQ ID NO: 2637387 - DNA, 25 bp, Homo sapien
aagctgggaaatcatccaacacgtc

SEQ ID NO: 2637388 - DNA, 25 bp, Homo sapien
tgcagattggcttgatggtgaaaaa

SEQ ID NO: 2637389 - DNA, 25 bp, Homo sapien
ctacattctaagccaaccaggatac

SEQ ID NO: 2637390 - DNA, 25 bp, Homo sapien
attctaagccaaccaggatactcat

SEQ ID NO: 2637391 - DNA, 25 bp, Homo sapien
tacattctaagccaaccaggatact

SEQ ID NO: 2637392 - DNA, 25 bp, Homo sapien
cattctaagccaaccaggatactca

SEQ ID NO: 2637393 - DNA, 25 bp, Homo sapien
tcacattgtatattgagctagacac

SEQ ID NO: 2637394 - DNA, 25 bp, Homo sapien
tccccacacctcacattgtatattg

SEQ ID NO: 2637395 - DNA, 25 bp, Homo sapien
tctcaacagaaaagtctggtaacct

SEQ ID NO: 2637396 - DNA, 25 bp, Homo sapien
cttttgattgctgagatagctccat

SEQ ID NO: 2637397 - DNA, 25 bp, Homo sapien
tcaggcttctaacctaaagctcttt

SEQ ID NO: 2637398 - DNA, 25 bp, Homo sapien
caggcttctaacctaaagctctttt

SEQ ID NO: 2637399 - DNA, 25 bp, Homo sapien
tttgcacctttgctcactgtgagtg

SEQ ID NO: 2637400 - DNA, 25 bp, Homo sapien
agttgttgtgagacatccacatcca

SEQ ID NO: 2637401 - DNA, 25 bp, Homo sapien
catggatggagagttgccaagtgct

SEQ ID NO: 2637402 - DNA, 25 bp, Homo sapien
ccaagtgcttaactgggttcccgca

SEQ ID NO: 2637403 - DNA, 25 bp, Homo sapien
ttcatcaaaggtaaccaaatgctct

SEQ ID NO: 2637404 - DNA, 25 bp, Homo sapien
tcaaaggtaaccaaatgctcttttc

SEQ ID NO: 2637405 - DNA, 25 bp, Homo sapien
catcaaaggtaaccaaatgctcttt

SEQ ID NO: 2637406 - DNA, 25 bp, Homo sapien
cttcatcaaaggtaaccaaatgctc

SEQ ID NO: 2637407 - DNA, 25 bp, Homo sapien
aaatatgcttcagctctatttctgt

SEQ ID NO: 2637408 - DNA, 25 bp, Homo sapien
tctatttctgtccatcctaaaggag

SEQ ID NO: 2637409 - DNA, 25 bp, Homo sapien
tatgcttcagctctatttctgtcca

SEQ ID NO: 2637410 - DNA, 25 bp, Homo sapien
tatttctgtccatcctaaaggagtc

SEQ ID NO: 2637411 - DNA, 25 bp, Homo sapien
tcaggagtctgcaagctgtaagtct

SEQ ID NO: 2637412 - DNA, 25 bp, Homo sapien
agtctgcaagctgtaagtctgaata

SEQ ID NO: 2637413 - DNA, 25 bp, Homo sapien
agctgtaagtctgaataaagaaggc

SEQ ID NO: 2637414 - DNA, 25 bp, Homo sapien
aagctgtaagtctgaataaagaagg

SEQ ID NO: 2637415 - DNA, 25 bp, Homo sapien
ctgcccagaatacgtgatgcgatat

SEQ ID NO: 2637416 - DNA, 25 bp, Homo sapien
cgtgatgcgatatagacaatggaga

SEQ ID NO: 2637417 - DNA, 25 bp, Homo sapien
ccagaatacgtgatgcgatatagac

SEQ ID NO: 2637418 - DNA, 25 bp, Homo sapien
aatacgtgatgcgatatagacaatg

SEQ ID NO: 2637419 - DNA, 25 bp, Homo sapien
tccgttagagggatttccttgcgga

SEQ ID NO: 2637420 - DNA, 25 bp, Homo sapien
tgttcccagagtagtgtttgctccg

SEQ ID NO: 2637421 - DNA, 25 bp, Homo sapien
tgatttatcactcccatttcctgcg

SEQ ID NO: 2637422 - DNA, 25 bp, Homo sapien
tcactcccatttcctgcgtgtgttc

SEQ ID NO: 2637423 - DNA, 25 bp, Homo sapien
cagaatctatgtgtcagtagaggca

SEQ ID NO: 2637424 - DNA, 25 bp, Homo sapien
gctggccagggaacaatgactaatg

SEQ ID NO: 2637425 - DNA, 25 bp, Homo sapien
ggaaagaaagtgacaatcagaatct

SEQ ID NO: 2637426 - DNA, 25 bp, Homo sapien
taaggtagccacctataggctggcc

SEQ ID NO: 2637427 - DNA, 25 bp, Homo sapien
tgtaggattctggacacttgtccag

SEQ ID NO: 2637428 - DNA, 25 bp, Homo sapien
taggattctggacacttgtccagct

SEQ ID NO: 2637429 - DNA, 25 bp, Homo sapien
tgtgtaggattctggacacttgtcc

SEQ ID NO: 2637430 - DNA, 25 bp, Homo sapien
gattctggacacttgtccagctgct

SEQ ID NO: 2637431 - DNA, 25 bp, Homo sapien
tttgcaattgagtaggaggtggcac

SEQ ID NO: 2637432 - DNA, 25 bp, Homo sapien
tgctggagaactattgtgagctcct

SEQ ID NO: 2637433 - DNA, 25 bp, Homo sapien
gtgagctccttgtttgcaattgagt

SEQ ID NO: 2637434 - DNA, 25 bp, Homo sapien
ccaatgatctcttggtgattatgac

SEQ ID NO: 2637435 - DNA, 25 bp, Homo sapien
ccaaaattctgaggcacgttagtgc

SEQ ID NO: 2637436 - DNA, 25 bp, Homo sapien
gcaaaagtcaatctgaaggatctgg

SEQ ID NO: 2637437 - DNA, 25 bp, Homo sapien
gccgtatgagcaatggaaaatccca

SEQ ID NO: 2637438 - DNA, 25 bp, Homo sapien
gaggtttggctctgtttgcatgcaa

SEQ ID NO: 2637439 - DNA, 25 bp, Homo sapien
tagctgcattaattgaagcatgtac

SEQ ID NO: 2637440 - DNA, 25 bp, Homo sapien
ctttaattacatctggtgccaaaag

SEQ ID NO: 2637441 - DNA, 25 bp, Homo sapien
aagaagcagttggttcattactaaa

SEQ ID NO: 2637442 - DNA, 25 bp, Homo sapien
gtttctctagctgcattaattgaag

SEQ ID NO: 2637443 - DNA, 25 bp, Homo sapien
tgagccaggtgtgggatatagtctc

SEQ ID NO: 2637444 - DNA, 25 bp, Homo sapien
tagtctcgtggtgcgccgtttctta

SEQ ID NO: 2637445 - DNA, 25 bp, Homo sapien
tctgagccaggtgtgggatatagtc

SEQ ID NO: 2637446 - DNA, 25 bp, Homo sapien
atatagtctcgtggtgcgccgtttc

SEQ ID NO: 2637447 - DNA, 25 bp, Homo sapien
ttgcgtgaaacttctgtacctgctg

SEQ ID NO: 2637448 - DNA, 25 bp, Homo sapien
gcttctttgccggatgttccagcat

SEQ ID NO: 2637449 - DNA, 25 bp, Homo sapien
cattagaggtagaattcatgtctgc

SEQ ID NO: 2637450 - DNA, 25 bp, Homo sapien
catgtctgccagttgttcaaataga

SEQ ID NO: 2637451 - DNA, 25 bp, Homo sapien
cctccttcagattaggggattcgtc

SEQ ID NO: 2637452 - DNA, 25 bp, Homo sapien
ttggaatcagttcttgactccactg

SEQ ID NO: 2637453 - DNA, 25 bp, Homo sapien
gttggaatcagttcttgactccact

SEQ ID NO: 2637454 - DNA, 25 bp, Homo sapien
cagattaggggattcgtctccattt

SEQ ID NO: 2637455 - DNA, 25 bp, Homo sapien
tgaatgctcttcaactgcagcagct

SEQ ID NO: 2637456 - DNA, 25 bp, Homo sapien
gctgctcctgaatgctcttcaactg

SEQ ID NO: 2637457 - DNA, 25 bp, Homo sapien
cagctctaggtaagctggtccccac

SEQ ID NO: 2637458 - DNA, 25 bp, Homo sapien
ctgcagcagctctaggtaagctggt

SEQ ID NO: 2637459 - DNA, 25 bp, Homo sapien
taaaaagtggtcctcgcagatcaga

SEQ ID NO: 2637460 - DNA, 25 bp, Homo sapien
gcagaggattctctcttccaccggg

SEQ ID NO: 2637461 - DNA, 25 bp, Homo sapien
agtttggcccaatctgtactccaga

SEQ ID NO: 2637462 - DNA, 25 bp, Homo sapien
aatcttggttaagacccctgcacca

SEQ ID NO: 2637463 - DNA, 25 bp, Homo sapien
tataccagtatggtataaaacgcca

SEQ ID NO: 2637464 - DNA, 25 bp, Homo sapien
tataaaacgccatataccagtatgg

SEQ ID NO: 2637465 - DNA, 25 bp, Homo sapien
taaaacgccatataccagtatggta

SEQ ID NO: 2637466 - DNA, 25 bp, Homo sapien
gtataaaacgccatataccagtatg

SEQ ID NO: 2637467 - DNA, 25 bp, Homo sapien
ctaacacattgactgcgatgttcat

SEQ ID NO: 2637468 - DNA, 25 bp, Homo sapien
tctaacacattgactgcgatgttca

SEQ ID NO: 2637469 - DNA, 25 bp, Homo sapien
cttctaacacattgactgcgatgtt

SEQ ID NO: 2637470 - DNA, 25 bp, Homo sapien
ttctaacacattgactgcgatgttc

SEQ ID NO: 2637471 - DNA, 25 bp, Homo sapien
cactgtgagatctacagggaagcca

SEQ ID NO: 2637472 - DNA, 25 bp, Homo sapien
gacttttcgaatggaccctatggga

SEQ ID NO: 2637473 - DNA, 25 bp, Homo sapien
gctgcgtaactgtgaactatggcca

SEQ ID NO: 2637474 - DNA, 25 bp, Homo sapien
catgtggtggtacgaaaacaattcc

SEQ ID NO: 2637475 - DNA, 25 bp, Homo sapien
cttagagagtaggtttgcacaaatc

SEQ ID NO: 2637476 - DNA, 25 bp, Homo sapien
tgcaagccttctacatcttagagag

SEQ ID NO: 2637477 - DNA, 25 bp, Homo sapien
tctgggaagcaaaggtcacccctgg

SEQ ID NO: 2637478 - DNA, 25 bp, Homo sapien
gacatggtgtgtaaactagctttga

SEQ ID NO: 2637479 - DNA, 25 bp, Homo sapien
tacagtagtccaagtgaactaacac

SEQ ID NO: 2637480 - DNA, 25 bp, Homo sapien
caccgcgactgtcccagaagtaaat

SEQ ID NO: 2637481 - DNA, 25 bp, Homo sapien
gtatatcttattacagtagtccaag

SEQ ID NO: 2637482 - DNA, 25 bp, Homo sapien
ttataagttacccaatctgtatatc

SEQ ID NO: 2637483 - DNA, 25 bp, Homo sapien
tcagagaacagctgtcttccttgtc

SEQ ID NO: 2637484 - DNA, 25 bp, Homo sapien
cagagaacagctgtcttccttgtcc

SEQ ID NO: 2637485 - DNA, 25 bp, Homo sapien
ctccgaggtcagcagaacaggtgtg

SEQ ID NO: 2637486 - DNA, 25 bp, Homo sapien
cagcagaacaggtgtggaaagtgcc

SEQ ID NO: 2637487 - DNA, 25 bp, Homo sapien
tgtagtgtggaccagacactggatg

SEQ ID NO: 2637488 - DNA, 25 bp, Homo sapien
tgaatccacactgagctttgagacc

SEQ ID NO: 2637489 - DNA, 25 bp, Homo sapien
ctttgactggacttagcaagctgct

SEQ ID NO: 2637490 - DNA, 25 bp, Homo sapien
gctgctgcaagtagaggcggcccat

SEQ ID NO: 2637491 - DNA, 25 bp, Homo sapien
gattggtgtgtcaagctctctcttt

SEQ ID NO: 2637492 - DNA, 25 bp, Homo sapien
caagattggtgtgtcaagctctctc

SEQ ID NO: 2637493 - DNA, 25 bp, Homo sapien
ctcaagattggtgtgtcaagctctc

SEQ ID NO: 2637494 - DNA, 25 bp, Homo sapien
aagattggtgtgtcaagctctctct

SEQ ID NO: 2637495 - DNA, 25 bp, Homo sapien
aatcatccaaataccttaaatcagg

SEQ ID NO: 2637496 - DNA, 25 bp, Homo sapien
agtgtttaatcatccaaatacctta

SEQ ID NO: 2637497 - DNA, 25 bp, Homo sapien
ttaatcatccaaataccttaaatca

SEQ ID NO: 2637498 - DNA, 25 bp, Homo sapien
atccaaataccttaaatcaggttct

SEQ ID NO: 2637499 - DNA, 25 bp, Homo sapien
ttggttaaatggtgggcagggttca

SEQ ID NO: 2637500 - DNA, 25 bp, Homo sapien
tggttaaatggtgggcagggttcag

SEQ ID NO: 2637501 - DNA, 25 bp, Homo sapien
tgggcagggttcaggtcatttcatc

SEQ ID NO: 2637502 - DNA, 25 bp, Homo sapien
taaatgagagagaattgtattctta

SEQ ID NO: 2637503 - DNA, 25 bp, Homo sapien
ctaaatgagagagaattgtattctt

SEQ ID NO: 2637504 - DNA, 25 bp, Homo sapien
aaatgagagagaattgtattcttac

SEQ ID NO: 2637505 - DNA, 25 bp, Homo sapien
tgtaatcccatattaatgagtccat

SEQ ID NO: 2637506 - DNA, 25 bp, Homo sapien
taatcccatattaatgagtccattc

SEQ ID NO: 2637507 - DNA, 25 bp, Homo sapien
ctgtaatcccatattaatgagtcca

SEQ ID NO: 2637508 - DNA, 25 bp, Homo sapien
aatcccatattaatgagtccattct

SEQ ID NO: 2637509 - DNA, 25 bp, Homo sapien
cagtcagaggccatgtctttttctt

SEQ ID NO: 2637510 - DNA, 25 bp, Homo sapien
gcagtcagaggccatgtctttttct

SEQ ID NO: 2637511 - DNA, 25 bp, Homo sapien
tatactacccgttgtgatgaaagga

SEQ ID NO: 2637512 - DNA, 25 bp, Homo sapien
gagttagaaaaatcctgtccctgcc

SEQ ID NO: 2637513 - DNA, 25 bp, Homo sapien
aaagggacatatacagacacgtgca

SEQ ID NO: 2637514 - DNA, 25 bp, Homo sapien
tttcaccaatgcattaaacaccagc

SEQ ID NO: 2637515 - DNA, 25 bp, Homo sapien
agtggaagatgacagcagagtagaa

SEQ ID NO: 2637516 - DNA, 25 bp, Homo sapien
gtggaagatgacagcagagtagaaa

SEQ ID NO: 2637517 - DNA, 25 bp, Homo sapien
gaagcagaaatgagtggaagatgac

SEQ ID NO: 2637518 - DNA, 25 bp, Homo sapien
agaaaaagaaggttgaatgatctgc

SEQ ID NO: 2637519 - DNA, 25 bp, Homo sapien
gatgctcttcacattacagccatta

SEQ ID NO: 2637520 - DNA, 25 bp, Homo sapien
caattagaggagagagtgtataaac

SEQ ID NO: 2637521 - DNA, 25 bp, Homo sapien
agatggctctcttcgtgtgtgatgc

SEQ ID NO: 2637522 - DNA, 25 bp, Homo sapien
ggtaaagtcctgatgcaattagagg

SEQ ID NO: 2637523 - DNA, 25 bp, Homo sapien
cagtgctgtttagtgatttggtgtt

SEQ ID NO: 2637524 - DNA, 25 bp, Homo sapien
aattcacagtgtaattctttgtagc

SEQ ID NO: 2637525 - DNA, 25 bp, Homo sapien
tgatttggtgttacccttaatgaat

SEQ ID NO: 2637526 - DNA, 25 bp, Homo sapien
tctgtacaaacagtgctgtttagtg

SEQ ID NO: 2637527 - DNA, 25 bp, Homo sapien
aatggccgctaaattatttccacag

SEQ ID NO: 2637528 - DNA, 25 bp, Homo sapien
attcctacagaaatggccgctaaat

SEQ ID NO: 2637529 - DNA, 25 bp, Homo sapien
aattatttccacagcttttcgacat

SEQ ID NO: 2637530 - DNA, 25 bp, Homo sapien
cagaaatggccgctaaattatttcc

SEQ ID NO: 2637531 - DNA, 25 bp, Homo sapien
ttcatgccttaagccaatgatgcgg

SEQ ID NO: 2637532 - DNA, 25 bp, Homo sapien
gcaacacggtgtttccagtgccaaa

SEQ ID NO: 2637533 - DNA, 25 bp, Homo sapien
cctcggtaaggtaaatcgtgtggca

SEQ ID NO: 2637534 - DNA, 25 bp, Homo sapien
cagatttgtggtcttgggtttcaac

SEQ ID NO: 2637535 - DNA, 25 bp, Homo sapien
catttccatagatatgctcctcgaa

SEQ ID NO: 2637536 - DNA, 25 bp, Homo sapien
tgaggaacttcagaaggacgaggct

SEQ ID NO: 2637537 - DNA, 25 bp, Homo sapien
tcctcgaaattagactgccctgtgt

SEQ ID NO: 2637538 - DNA, 25 bp, Homo sapien
agttataatagtcagaagatgtctc

SEQ ID NO: 2637539 - DNA, 25 bp, Homo sapien
gaacttatgatctgaagcaggcttg

SEQ ID NO: 2637540 - DNA, 25 bp, Homo sapien
cacagcgatacacataggattcaga

SEQ ID NO: 2637541 - DNA, 25 bp, Homo sapien
taggcagagaccatccacttatcag

SEQ ID NO: 2637542 - DNA, 25 bp, Homo sapien
gataaatctggcaacaccatcggta

SEQ ID NO: 2637543 - DNA, 25 bp, Homo sapien
aaagaataggcaggagcaattccct

SEQ ID NO: 2637544 - DNA, 25 bp, Homo sapien
gcaggagcaattccctgttgcctcc

SEQ ID NO: 2637545 - DNA, 25 bp, Homo sapien
gttgcctcctactgcctttcggtct

SEQ ID NO: 2637546 - DNA, 25 bp, Homo sapien
ctgttgcctcctactgcctttcggt

SEQ ID NO: 2637547 - DNA, 25 bp, Homo sapien
gaaactagaaagctgcaaacaacca

SEQ ID NO: 2637548 - DNA, 25 bp, Homo sapien
tgcaaacaaccagtgatgctggagt

SEQ ID NO: 2637549 - DNA, 25 bp, Homo sapien
cagtgatgctggagtaaaccacatg

SEQ ID NO: 2637550 - DNA, 25 bp, Homo sapien
aatgatggaagaaactagaaagctg

SEQ ID NO: 2637551 - DNA, 25 bp, Homo sapien
ggacacaggtaccacagagatagta

SEQ ID NO: 2637552 - DNA, 25 bp, Homo sapien
gctgagagttaccagacctcagagg

SEQ ID NO: 2637553 - DNA, 25 bp, Homo sapien
tggctaaacaggcattggcaggatg

SEQ ID NO: 2637554 - DNA, 25 bp, Homo sapien
gatagtaactgtaacaatcttggct

SEQ ID NO: 2637555 - DNA, 25 bp, Homo sapien
ctttgcttccaatgccttgtgggtt

SEQ ID NO: 2637556 - DNA, 25 bp, Homo sapien
cattgacatgtgcttcttgaaatca

SEQ ID NO: 2637557 - DNA, 25 bp, Homo sapien
tattgcagctcggaaattctttgct

SEQ ID NO: 2637558 - DNA, 25 bp, Homo sapien
gtcttacgtcctcaacttcaaaatc

SEQ ID NO: 2637559 - DNA, 25 bp, Homo sapien
gggaaagcactccaggaccaccgag

SEQ ID NO: 2637560 - DNA, 25 bp, Homo sapien
caccagccttgattgcatttggcaa

SEQ ID NO: 2637561 - DNA, 25 bp, Homo sapien
ccaccgagctttggtttccatggca

SEQ ID NO: 2637562 - DNA, 25 bp, Homo sapien
tccatggcaacaatgtgggtcaaga

SEQ ID NO: 2637563 - DNA, 25 bp, Homo sapien
ctgggaaagtgagcctgaggcaaca

SEQ ID NO: 2637564 - DNA, 25 bp, Homo sapien
tccagtttagtctagggtggagctg

SEQ ID NO: 2637565 - DNA, 25 bp, Homo sapien
gctcattgtattcctcttctatgtc

SEQ ID NO: 2637566 - DNA, 25 bp, Homo sapien
gaaagtgagcctgaggcaacagcta

SEQ ID NO: 2637567 - DNA, 25 bp, Homo sapien
cacataaagcctaaatacggtgctg

SEQ ID NO: 2637568 - DNA, 25 bp, Homo sapien
cgggagtattaacaatatctgcgag

SEQ ID NO: 2637569 - DNA, 25 bp, Homo sapien
tacggtgctgttgcacagagggcac

SEQ ID NO: 2637570 - DNA, 25 bp, Homo sapien
cagagggcactccaatgctaggcat

SEQ ID NO: 2637571 - DNA, 25 bp, Homo sapien
ctgggcatatcacaatattcgcctt

SEQ ID NO: 2637572 - DNA, 25 bp, Homo sapien
gggcatatcacaatattcgccttga

SEQ ID NO: 2637573 - DNA, 25 bp, Homo sapien
aacaaagagactgaagatagctttc

SEQ ID NO: 2637574 - DNA, 25 bp, Homo sapien
ctgaagatagctttcagaccctctt

SEQ ID NO: 2637575 - DNA, 25 bp, Homo sapien
tgccagaacgttattaaaagtctca

SEQ ID NO: 2637576 - DNA, 25 bp, Homo sapien
tctttgggtttggacaggtgggcat

SEQ ID NO: 2637577 - DNA, 25 bp, Homo sapien
ttgcccaggtgtgcatgtcttccag

SEQ ID NO: 2637578 - DNA, 25 bp, Homo sapien
gtcttccagacaactgatcttgcca

SEQ ID NO: 2637579 - DNA, 25 bp, Homo sapien
ctggcatcagcatccttacccttga

SEQ ID NO: 2637580 - DNA, 25 bp, Homo sapien
tactgtgcataggaacccaactgag

SEQ ID NO: 2637581 - DNA, 25 bp, Homo sapien
tatctcatcaatctccaacccagca

SEQ ID NO: 2637582 - DNA, 25 bp, Homo sapien
ttattggaggagcacctatctcatc

SEQ ID NO: 2637583 - DNA, 25 bp, Homo sapien
ccaactcctttgacagtgggctttt

SEQ ID NO: 2637584 - DNA, 25 bp, Homo sapien
ggagatgggagcctacaaactgtgt

SEQ ID NO: 2637585 - DNA, 25 bp, Homo sapien
ttctatgtcttctctaccactggag

SEQ ID NO: 2637586 - DNA, 25 bp, Homo sapien
tcctttgacagtgggctttttgtta

SEQ ID NO: 2637587 - DNA, 25 bp, Homo sapien
agtacatacttagaaggatttctat

SEQ ID NO: 2637588 - DNA, 25 bp, Homo sapien
gtacatacttagaaggatttctatt

SEQ ID NO: 2637589 - DNA, 25 bp, Homo sapien
agtagacatgactatgcaggtagat

SEQ ID NO: 2637590 - DNA, 25 bp, Homo sapien
catacttagaaggatttctatttct

SEQ ID NO: 2637591 - DNA, 25 bp, Homo sapien
tacttgaacaacctatatagctgct

SEQ ID NO: 2637592 - DNA, 25 bp, Homo sapien
taatctatattgctctcctactgag

SEQ ID NO: 2637593 - DNA, 25 bp, Homo sapien
gaagctaagcagatatgatgaccta

SEQ ID NO: 2637594 - DNA, 25 bp, Homo sapien
tctgtctcaatatgtacaatcaagc

SEQ ID NO: 2637595 - DNA, 25 bp, Homo sapien
ccaccccttgtgtggtaagcatgca

SEQ ID NO: 2637596 - DNA, 25 bp, Homo sapien
tcaggttagctcctatgccctaaat

SEQ ID NO: 2637597 - DNA, 25 bp, Homo sapien
gctctctacctaaatgaaagttcac

SEQ ID NO: 2637598 - DNA, 25 bp, Homo sapien
ggtcctggttccttgcaaagctcat

SEQ ID NO: 2637599 - DNA, 25 bp, Homo sapien
aactcgtattaaagccctgatgtga

SEQ ID NO: 2637600 - DNA, 25 bp, Homo sapien
tatttgaggacattagtagacttcg

SEQ ID NO: 2637601 - DNA, 25 bp, Homo sapien
gcattcttaagtttgatggtgtcca

SEQ ID NO: 2637602 - DNA, 25 bp, Homo sapien
ttccaaactcgtattaaagccctga

SEQ ID NO: 2637603 - DNA, 25 bp, Homo sapien
gagttccacagaacctccaagttct

SEQ ID NO: 2637604 - DNA, 25 bp, Homo sapien
ggcagagcatttctgctaccttcca

SEQ ID NO: 2637605 - DNA, 25 bp, Homo sapien
tcaaaaattacaagttgagttccac

SEQ ID NO: 2637606 - DNA, 25 bp, Homo sapien
aagttgagttccacagaacctccaa

SEQ ID NO: 2637607 - DNA, 25 bp, Homo sapien
taccaagttgtcaaagatgtccaaa

SEQ ID NO: 2637608 - DNA, 25 bp, Homo sapien
gttgtcaaagatgtccaaattccac

SEQ ID NO: 2637609 - DNA, 25 bp, Homo sapien
gtttaaatccttttcaaatgcagac

SEQ ID NO: 2637610 - DNA, 25 bp, Homo sapien
ttaactctctaccaagttgtcaaag

SEQ ID NO: 2637611 - DNA, 25 bp, Homo sapien
gaatgatcgatcaccaccagattta

SEQ ID NO: 2637612 - DNA, 25 bp, Homo sapien
ccagatttacctctgggctgatgca

SEQ ID NO: 2637613 - DNA, 25 bp, Homo sapien
gctgatgcactgttgagagctcatt

SEQ ID NO: 2637614 - DNA, 25 bp, Homo sapien
agagctcattagcattccagttcta

SEQ ID NO: 2637615 - DNA, 25 bp, Homo sapien
caaccttggaaggatcgagccatac

SEQ ID NO: 2637616 - DNA, 25 bp, Homo sapien
gaattttattgaggagcgacttgac

SEQ ID NO: 2637617 - DNA, 25 bp, Homo sapien
gaaacactgaggtggcagactgtag

SEQ ID NO: 2637618 - DNA, 25 bp, Homo sapien
tgttcagcaggttgtttggctccca

SEQ ID NO: 2637619 - DNA, 25 bp, Homo sapien
tggaacacagcattcatatcgagca

SEQ ID NO: 2637620 - DNA, 25 bp, Homo sapien
aattcttgttcgactctttccatta

SEQ ID NO: 2637621 - DNA, 25 bp, Homo sapien
agatactgggttggaacacagcatt

SEQ ID NO: 2637622 - DNA, 25 bp, Homo sapien
tgaatttaattcttgttcgactctt

SEQ ID NO: 2637623 - DNA, 25 bp, Homo sapien
cattacaactcgaggttcagaaatt

SEQ ID NO: 2637624 - DNA, 25 bp, Homo sapien
caaaggaggttagggctctacgtag

SEQ ID NO: 2637625 - DNA, 25 bp, Homo sapien
aaattctcaagtgccctcgctacaa

SEQ ID NO: 2637626 - DNA, 25 bp, Homo sapien
tacagctccattacaactcgaggtt

SEQ ID NO: 2637627 - DNA, 25 bp, Homo sapien
gcaaacgggcgagcggtgaactaca

SEQ ID NO: 2637628 - DNA, 25 bp, Homo sapien
tgtagtctcgccctccgggtgttcc

SEQ ID NO: 2637629 - DNA, 25 bp, Homo sapien
ttccggtcaagcgtgcacagtcccg

SEQ ID NO: 2637630 - DNA, 25 bp, Homo sapien
ttctctctggctaggaccgcactgg

SEQ ID NO: 2637631 - DNA, 25 bp, Homo sapien
tacgttgaactgcttgtgcgcggag

SEQ ID NO: 2637632 - DNA, 25 bp, Homo sapien
gaaagattgcgaatagcccgatccc

SEQ ID NO: 2637633 - DNA, 25 bp, Homo sapien
ttcccagggtcatgtcacagagccg

SEQ ID NO: 2637634 - DNA, 25 bp, Homo sapien
cacacagagcgtaaagaaacccaac

SEQ ID NO: 2637635 - DNA, 25 bp, Homo sapien
acaagaagtggccaagacgctggaa

SEQ ID NO: 2637636 - DNA, 25 bp, Homo sapien
caagaagtggccaagacgctggaaa

SEQ ID NO: 2637637 - DNA, 25 bp, Homo sapien
aagaagtggccaagacgctggaaag

SEQ ID NO: 2637638 - DNA, 25 bp, Homo sapien
ggccactcacaaatctaaactgtac

SEQ ID NO: 2637639 - DNA, 25 bp, Homo sapien
ctcacaaatctaaactgtactaagc

SEQ ID NO: 2637640 - DNA, 25 bp, Homo sapien
ttggccactcacaaatctaaactgt

SEQ ID NO: 2637641 - DNA, 25 bp, Homo sapien
cacaaatctaaactgtactaagcca

SEQ ID NO: 2637642 - DNA, 25 bp, Homo sapien
tttgaaatcgatcccaactgtgctg

SEQ ID NO: 2637643 - DNA, 25 bp, Homo sapien
tccccacactgctattgccgatgat

SEQ ID NO: 2637644 - DNA, 25 bp, Homo sapien
aggagtcatctgcataacggaatag

SEQ ID NO: 2637645 - DNA, 25 bp, Homo sapien
tagtcaaagttctgatcagaggagt

SEQ ID NO: 2637646 - DNA, 25 bp, Homo sapien
tatagcataatgcaaggattcctgg

SEQ ID NO: 2637647 - DNA, 25 bp, Homo sapien
gtgatagacctagcttggaatcccc

SEQ ID NO: 2637648 - DNA, 25 bp, Homo sapien
gcgcagtgttagaatgtgatagacc

SEQ ID NO: 2637649 - DNA, 25 bp, Homo sapien
caagaagactcttaattagcgcagt

SEQ ID NO: 2637650 - DNA, 25 bp, Homo sapien
gcaggcacggggctaggcatcttac

SEQ ID NO: 2637651 - DNA, 25 bp, Homo sapien
tcttacacaaattatgccatcaaat

SEQ ID NO: 2637652 - DNA, 25 bp, Homo sapien
cttacacaaattatgccatcaaatc

SEQ ID NO: 2637653 - DNA, 25 bp, Homo sapien
cggggctaggcatcttacacaaatt

SEQ ID NO: 2637654 - DNA, 25 bp, Homo sapien
ttagggatgggaaaaagatagagtg

SEQ ID NO: 2637655 - DNA, 25 bp, Homo sapien
cttagggatgggaaaaagatagagt

SEQ ID NO: 2637656 - DNA, 25 bp, Homo sapien
agggatgggaaaaagatagagtgca

SEQ ID NO: 2637657 - DNA, 25 bp, Homo sapien
tagggatgggaaaaagatagagtgc

SEQ ID NO: 2637658 - DNA, 25 bp, Homo sapien
cctctttgaacacgatgcctggcaa

SEQ ID NO: 2637659 - DNA, 25 bp, Homo sapien
tcaataatgaggttcagtgcgggta

SEQ ID NO: 2637660 - DNA, 25 bp, Homo sapien
tagaatgtcccgcacactccagagc

SEQ ID NO: 2637661 - DNA, 25 bp, Homo sapien
gagcccacttatggccctgtccaaa

SEQ ID NO: 2637662 - DNA, 25 bp, Homo sapien
caacactgaatgtgaacgacatttg

SEQ ID NO: 2637663 - DNA, 25 bp, Homo sapien
cacggactgtcagccaaagtataga

SEQ ID NO: 2637664 - DNA, 25 bp, Homo sapien
ctgaaggcacggactgtcagccaaa

SEQ ID NO: 2637665 - DNA, 25 bp, Homo sapien
aaggcacggactgtcagccaaagta

SEQ ID NO: 2637666 - DNA, 25 bp, Homo sapien
ggcacggactgtcagccaaagtata

SEQ ID NO: 2637667 - DNA, 25 bp, Homo sapien
ctggatgcaacgcaatactgtctgt

SEQ ID NO: 2637668 - DNA, 25 bp, Homo sapien
ggatgcaacgcaatactgtctgttc

SEQ ID NO: 2637669 - DNA, 25 bp, Homo sapien
caacgcaatactgtctgttctcaga

SEQ ID NO: 2637670 - DNA, 25 bp, Homo sapien
tgcaacgcaatactgtctgttctca

SEQ ID NO: 2637671 - DNA, 25 bp, Homo sapien
ttggtgaagcgtgacagtaagagac

SEQ ID NO: 2637672 - DNA, 25 bp, Homo sapien
tattggtcacccagatttcgatgag

SEQ ID NO: 2637673 - DNA, 25 bp, Homo sapien
agggaaatcgtaagcagggagagac

SEQ ID NO: 2637674 - DNA, 25 bp, Homo sapien
cgtgacagtaagagacccagaaagg

SEQ ID NO: 2637675 - DNA, 25 bp, Homo sapien
tttccaagaaaagggcacaatatcc

SEQ ID NO: 2637676 - DNA, 25 bp, Homo sapien
tctccatgggctctgacaaattggc

SEQ ID NO: 2637677 - DNA, 25 bp, Homo sapien
ttttgccccttccagagtctaataa

SEQ ID NO: 2637678 - DNA, 25 bp, Homo sapien
tctgctctatctacaattttgcccc

SEQ ID NO: 2637679 - DNA, 25 bp, Homo sapien
cattatcctctgagtcaactcccat

SEQ ID NO: 2637680 - DNA, 25 bp, Homo sapien
tataattagcttcacattcatcatc

SEQ ID NO: 2637681 - DNA, 25 bp, Homo sapien
gtcttcagagaagtcgcagtttctt

SEQ ID NO: 2637682 - DNA, 25 bp, Homo sapien
catatttccacccagttttgtagca

SEQ ID NO: 2637683 - DNA, 25 bp, Homo sapien
tgtggctcaaggcagttcatactaa

SEQ ID NO: 2637684 - DNA, 25 bp, Homo sapien
gcctctaaaagaatggtcagatgaa

SEQ ID NO: 2637685 - DNA, 25 bp, Homo sapien
gtatttataggtcccatgctatggc

SEQ ID NO: 2637686 - DNA, 25 bp, Homo sapien
tcttgtatgtatcctcaactccagc

SEQ ID NO: 2637687 - DNA, 25 bp, Homo sapien
cttcatttttagccctattctatct

SEQ ID NO: 2637688 - DNA, 25 bp, Homo sapien
ttttagccctattctatctaattca

SEQ ID NO: 2637689 - DNA, 25 bp, Homo sapien
ttagccctattctatctaattcata

SEQ ID NO: 2637690 - DNA, 25 bp, Homo sapien
atttttagccctattctatctaatt

SEQ ID NO: 2637691 - DNA, 25 bp, Homo sapien
gcaccagggagcaggataagttgtc

SEQ ID NO: 2637692 - DNA, 25 bp, Homo sapien
ggagcaggataagttgtccatacca

SEQ ID NO: 2637693 - DNA, 25 bp, Homo sapien
ccagggagcaggataagttgtccat

SEQ ID NO: 2637694 - DNA, 25 bp, Homo sapien
gggagcaggataagttgtccatacc

SEQ ID NO: 2637695 - DNA, 25 bp, Homo sapien
gtacaggcttctgatcttcattctc

SEQ ID NO: 2637696 - DNA, 25 bp, Homo sapien
gtgctgtacaggcttctgatcttca

SEQ ID NO: 2637697 - DNA, 25 bp, Homo sapien
tcttcatggtgctgtacaggcttct

SEQ ID NO: 2637698 - DNA, 25 bp, Homo sapien
ctcttcatggtgctgtacaggcttc

SEQ ID NO: 2637699 - DNA, 25 bp, Homo sapien
taaacaatgaaattttgatcggctt

SEQ ID NO: 2637700 - DNA, 25 bp, Homo sapien
tgaatagtatctgcttaaacaatga

SEQ ID NO: 2637701 - DNA, 25 bp, Homo sapien
tgatcggcttttgtgcaagagtact

SEQ ID NO: 2637702 - DNA, 25 bp, Homo sapien
gccgattgggctcattgaatagtat

SEQ ID NO: 2637703 - DNA, 25 bp, Homo sapien
tccagtgatggtgtcccattttcat

SEQ ID NO: 2637704 - DNA, 25 bp, Homo sapien
ttccagtgatggtgtcccattttca

SEQ ID NO: 2637705 - DNA, 25 bp, Homo sapien
cttttctgtcaagcatgttttcagc

SEQ ID NO: 2637706 - DNA, 25 bp, Homo sapien
agcatgttttcagcacagacactga

SEQ ID NO: 2637707 - DNA, 25 bp, Homo sapien
cagacactgaataatgttgtattgg

SEQ ID NO: 2637708 - DNA, 25 bp, Homo sapien
aataatgttgtattggaaaactgac

SEQ ID NO: 2637709 - DNA, 25 bp, Homo sapien
ataataggctgtggtgatagtcctg

SEQ ID NO: 2637710 - DNA, 25 bp, Homo sapien
aggctgtggtgatagtcctgtatct

SEQ ID NO: 2637711 - DNA, 25 bp, Homo sapien
taggctgtggtgatagtcctgtatc

SEQ ID NO: 2637712 - DNA, 25 bp, Homo sapien
aataggctgtggtgatagtcctgta

SEQ ID NO: 2637713 - DNA, 25 bp, Homo sapien
ttcttcatttgtaatgtcatacatt

SEQ ID NO: 2637714 - DNA, 25 bp, Homo sapien
caatcttgtactgcattgaaggatt

SEQ ID NO: 2637715 - DNA, 25 bp, Homo sapien
tgtcatacattaaaataaagcccat

SEQ ID NO: 2637716 - DNA, 25 bp, Homo sapien
cttgtactgcattgaaggattcttc

SEQ ID NO: 2637717 - DNA, 25 bp, Homo sapien
aaaccgtcctctttagccctgtgct

SEQ ID NO: 2637718 - DNA, 25 bp, Homo sapien
tcctctttagccctgtgcttgagct

SEQ ID NO: 2637719 - DNA, 25 bp, Homo sapien
cctctttagccctgtgcttgagctc

SEQ ID NO: 2637720 - DNA, 25 bp, Homo sapien
ccgtcctctttagccctgtgcttga

SEQ ID NO: 2637721 - DNA, 25 bp, Homo sapien
aacctctatatttatagttcctcat

SEQ ID NO: 2637722 - DNA, 25 bp, Homo sapien
aaacctctatatttatagttcctca

SEQ ID NO: 2637723 - DNA, 25 bp, Homo sapien
gcaaagctctggtaaaacaggcagt

SEQ ID NO: 2637724 - DNA, 25 bp, Homo sapien
tattctctccaccttactgggaaga

SEQ ID NO: 2637725 - DNA, 25 bp, Homo sapien
tataattgatatgtgcctgggccta

SEQ ID NO: 2637726 - DNA, 25 bp, Homo sapien
caggcagtgcctccatatgtgattt

SEQ ID NO: 2637727 - DNA, 25 bp, Homo sapien
cagatgtctgacatttgtgctgtac

SEQ ID NO: 2637728 - DNA, 25 bp, Homo sapien
cattgctcactatgtaagataagac

SEQ ID NO: 2637729 - DNA, 25 bp, Homo sapien
catcaggttacatggcatctttcgt

SEQ ID NO: 2637730 - DNA, 25 bp, Homo sapien
gaatgtgctacagtaactaatcaga

SEQ ID NO: 2637731 - DNA, 25 bp, Homo sapien
catattgtcatgcagccatgtgcca

SEQ ID NO: 2637732 - DNA, 25 bp, Homo sapien
aagcttctgctctggaacactgcca

SEQ ID NO: 2637733 - DNA, 25 bp, Homo sapien
gaagccggccatgttaggaagacca

SEQ ID NO: 2637734 - DNA, 25 bp, Homo sapien
catttgggcaaggattcgatcagtc

SEQ ID NO: 2637735 - DNA, 25 bp, Homo sapien
tatgtaggataagattgggcttggg

SEQ ID NO: 2637736 - DNA, 25 bp, Homo sapien
ttgtcttaatttgattagtctctgg

SEQ ID NO: 2637737 - DNA, 25 bp, Homo sapien
cttaatttgattagtctctggaaag

SEQ ID NO: 2637738 - DNA, 25 bp, Homo sapien
tgtaggataagattgggcttgggca

SEQ ID NO: 2637739 - DNA, 25 bp, Homo sapien
taatagcatgtttttggttaccatc

SEQ ID NO: 2637740 - DNA, 25 bp, Homo sapien
atattttgactaaataatagcatgt

SEQ ID NO: 2637741 - DNA, 25 bp, Homo sapien
catgtttttggttaccatctgtgac

SEQ ID NO: 2637742 - DNA, 25 bp, Homo sapien
atagcatgtttttggttaccatctg

SEQ ID NO: 2637743 - DNA, 25 bp, Homo sapien
tgtatacaactgtcccgtctgccct

SEQ ID NO: 2637744 - DNA, 25 bp, Homo sapien
caccagcctatagaactgctgcttg

SEQ ID NO: 2637745 - DNA, 25 bp, Homo sapien
tgagacagccatttcatcccagaca

SEQ ID NO: 2637746 - DNA, 25 bp, Homo sapien
tccttaacgctgacctttccagatg

SEQ ID NO: 2637747 - DNA, 25 bp, Homo sapien
gatttagatgtagctctctggacga

SEQ ID NO: 2637748 - DNA, 25 bp, Homo sapien
gaaatacagccctcttcgttacaag

SEQ ID NO: 2637749 - DNA, 25 bp, Homo sapien
tacaacggcattgaatcaggacatc

SEQ ID NO: 2637750 - DNA, 25 bp, Homo sapien
ggttgataacctgtcagctgtcagc

SEQ ID NO: 2637751 - DNA, 25 bp, Homo sapien
gactctgaaccccaccagcgacctc

SEQ ID NO: 2637752 - DNA, 25 bp, Homo sapien
agcgacctctggtcacacctgagct

SEQ ID NO: 2637753 - DNA, 25 bp, Homo sapien
tgaaccccaccagcgacctctggtc

SEQ ID NO: 2637754 - DNA, 25 bp, Homo sapien
caccagcgacctctggtcacacctg

SEQ ID NO: 2637755 - DNA, 25 bp, Homo sapien
gatatataatctttaagcaatttaa

SEQ ID NO: 2637756 - DNA, 25 bp, Homo sapien
agcaatttaagatttttggcatatg

SEQ ID NO: 2637757 - DNA, 25 bp, Homo sapien
tttaagcaatttaagatttttggca

SEQ ID NO: 2637758 - DNA, 25 bp, Homo sapien
taagcaatttaagatttttggcata

SEQ ID NO: 2637759 - DNA, 25 bp, Homo sapien
taggacaaatgataaaactctgaag

SEQ ID NO: 2637760 - DNA, 25 bp, Homo sapien
tacaaatctggtcagtagaactgta

SEQ ID NO: 2637761 - DNA, 25 bp, Homo sapien
taacttggctaatgaagagtgctgc

SEQ ID NO: 2637762 - DNA, 25 bp, Homo sapien
caaatgagcacccacaatgtacaag

SEQ ID NO: 2637763 - DNA, 25 bp, Homo sapien
tgctggtataactttagtgacctgc

SEQ ID NO: 2637764 - DNA, 25 bp, Homo sapien
cctgctgtaagaatagaaggccttc

SEQ ID NO: 2637765 - DNA, 25 bp, Homo sapien
aaaccggaggcttcacattctgcat

SEQ ID NO: 2637766 - DNA, 25 bp, Homo sapien
caattctatattaaggtgatctcca

SEQ ID NO: 2637767 - DNA, 25 bp, Homo sapien
cgagcttggtcatgcctgcttcggg

SEQ ID NO: 2637768 - DNA, 25 bp, Homo sapien
tcagtaagttatcatggttcccaca

SEQ ID NO: 2637769 - DNA, 25 bp, Homo sapien
cataactggttagacaatctggacc

SEQ ID NO: 2637770 - DNA, 25 bp, Homo sapien
tgtttcatacaatcttgcagccaga

SEQ ID NO: 2637771 - DNA, 25 bp, Homo sapien
catatgggatgggtggtttctgctc

SEQ ID NO: 2637772 - DNA, 25 bp, Homo sapien
tatgggatgggtggtttctgctcag

SEQ ID NO: 2637773 - DNA, 25 bp, Homo sapien
gcatatgggatgggtggtttctgct

SEQ ID NO: 2637774 - DNA, 25 bp, Homo sapien
atatgggatgggtggtttctgctca

SEQ ID NO: 2637775 - DNA, 25 bp, Homo sapien
tttcaaatatctcagtaaacactag

SEQ ID NO: 2637776 - DNA, 25 bp, Homo sapien
ccgcacctggcaagttatttcaaat

SEQ ID NO: 2637777 - DNA, 25 bp, Homo sapien
cacctggcaagttatttcaaatatc

SEQ ID NO: 2637778 - DNA, 25 bp, Homo sapien
caaatatctcagtaaacactagagt

SEQ ID NO: 2637779 - DNA, 25 bp, Homo sapien
tcctgtatgctaagaggctgatcct

SEQ ID NO: 2637780 - DNA, 25 bp, Homo sapien
gtgctgtgtcctgtatgctaagagg

SEQ ID NO: 2637781 - DNA, 25 bp, Homo sapien
gggcaacagctctattgttccactt

SEQ ID NO: 2637782 - DNA, 25 bp, Homo sapien
aagaggctgatccttgcagtctgtg

SEQ ID NO: 2637783 - DNA, 25 bp, Homo sapien
ttccacagaaccttttataccctga

SEQ ID NO: 2637784 - DNA, 25 bp, Homo sapien
agaaccttttataccctgacactgt

SEQ ID NO: 2637785 - DNA, 25 bp, Homo sapien
ttagggtgtgttgctggcagcttct

SEQ ID NO: 2637786 - DNA, 25 bp, Homo sapien
tgctggcagcttcttccacagaacc

SEQ ID NO: 2637787 - DNA, 25 bp, Homo sapien
ttagctctcagagcctgctcctgag

SEQ ID NO: 2637788 - DNA, 25 bp, Homo sapien
attgttttagctctcagagcctgct

SEQ ID NO: 2637789 - DNA, 25 bp, Homo sapien
cagagcctgctcctgaggtctgagg

SEQ ID NO: 2637790 - DNA, 25 bp, Homo sapien
tgatctttcttctgggcatgggaca

SEQ ID NO: 2637791 - DNA, 25 bp, Homo sapien
gcattgtcccaagagtatgttttga

SEQ ID NO: 2637792 - DNA, 25 bp, Homo sapien
gatgacccgctcgtcttccatgtca

SEQ ID NO: 2637793 - DNA, 25 bp, Homo sapien
caagctgttctcctaaatgttgacc

SEQ ID NO: 2637794 - DNA, 25 bp, Homo sapien
taaatgttgacctcgctcagttgag

SEQ ID NO: 2637795 - DNA, 25 bp, Homo sapien
tggccagagcacatggatccaagtt

SEQ ID NO: 2637796 - DNA, 25 bp, Homo sapien
cagggcttccaccaccgtatgattt

SEQ ID NO: 2637797 - DNA, 25 bp, Homo sapien
tcacagtgtagtcaatgcctttctc

SEQ ID NO: 2637798 - DNA, 25 bp, Homo sapien
aaatagaaattggttgcttatggcc

SEQ ID NO: 2637799 - DNA, 25 bp, Homo sapien
ggcttacacggatgaaatatcatgg

SEQ ID NO: 2637800 - DNA, 25 bp, Homo sapien
cacagctgaaagcaggtgcctacag

SEQ ID NO: 2637801 - DNA, 25 bp, Homo sapien
gacaatagggcatagtaccaagatt

SEQ ID NO: 2637802 - DNA, 25 bp, Homo sapien
gaaaactattctaatggcttacacg

SEQ ID NO: 2637803 - DNA, 25 bp, Homo sapien
tctggcgcttgaagagtactggaac

SEQ ID NO: 2637804 - DNA, 25 bp, Homo sapien
aggctccaggatgtcactctggcgc

SEQ ID NO: 2637805 - DNA, 25 bp, Homo sapien
caggatgtcactctggcgcttgaag

SEQ ID NO: 2637806 - DNA, 25 bp, Homo sapien
gtactggaacgtcagagcaccctag

SEQ ID NO: 2637807 - DNA, 25 bp, Homo sapien
ttgccgacactcttctgtccacttt

SEQ ID NO: 2637808 - DNA, 25 bp, Homo sapien
acgtgaagaacatgaacccacactt

SEQ ID NO: 2637809 - DNA, 25 bp, Homo sapien
gaacatgaacccacacttcctggct

SEQ ID NO: 2637810 - DNA, 25 bp, Homo sapien
gaagaacatgaacccacacttcctg

SEQ ID NO: 2637811 - DNA, 25 bp, Homo sapien
tgtcgcagatgatatccacaaggcg

SEQ ID NO: 2637812 - DNA, 25 bp, Homo sapien
cttggcacttgtttcaaaaaactca

SEQ ID NO: 2637813 - DNA, 25 bp, Homo sapien
tgatatccacaaggcgctcaaatgt

SEQ ID NO: 2637814 - DNA, 25 bp, Homo sapien
tgttgtccttggcacttgtttcaaa

SEQ ID NO: 2637815 - DNA, 25 bp, Homo sapien
gctttgcagcagtgatggcaggatc

SEQ ID NO: 2637816 - DNA, 25 bp, Homo sapien
gaggagtttccttgagtctcgtgtt

SEQ ID NO: 2637817 - DNA, 25 bp, Homo sapien
gcaggatcagtctccaaactctctg

SEQ ID NO: 2637818 - DNA, 25 bp, Homo sapien
tgagtctcgtgttctgctttgcagc

SEQ ID NO: 2637819 - DNA, 25 bp, Homo sapien
tcaaataattgttaggcagtataaa

SEQ ID NO: 2637820 - DNA, 25 bp, Homo sapien
atgctgtttgttggcaaccagagcc

SEQ ID NO: 2637821 - DNA, 25 bp, Homo sapien
ttacaaatgctgtttgttggcaacc

SEQ ID NO: 2637822 - DNA, 25 bp, Homo sapien
cagtataaatgaaggctaatagacc

SEQ ID NO: 2637823 - DNA, 25 bp, Homo sapien
gacttcttcctctgcacgcatgcgg

SEQ ID NO: 2637824 - DNA, 25 bp, Homo sapien
gacagcgtccctaatcatgagaaaa

SEQ ID NO: 2637825 - DNA, 25 bp, Homo sapien
caagtcacatgcaggtaccagatgt

SEQ ID NO: 2637826 - DNA, 25 bp, Homo sapien
cacatattaaacaggaaagctccca

SEQ ID NO: 2637827 - DNA, 25 bp, Homo sapien
caatactttcatgggaagcctctct

SEQ ID NO: 2637828 - DNA, 25 bp, Homo sapien
tagtggatcttcaactaggaaggtg

SEQ ID NO: 2637829 - DNA, 25 bp, Homo sapien
tacaaaattagaatgctccagtggt

SEQ ID NO: 2637830 - DNA, 25 bp, Homo sapien
cagtgatacagaggccaaatttccc

SEQ ID NO: 2637831 - DNA, 25 bp, Homo sapien
tttttgatgcaattacagcaggagc

SEQ ID NO: 2637832 - DNA, 25 bp, Homo sapien
ggcttcccatctaagggccaattaa

SEQ ID NO: 2637833 - DNA, 25 bp, Homo sapien
tcctaagggtatctagaggagtgaa

SEQ ID NO: 2637834 - DNA, 25 bp, Homo sapien
taagtaacatagctcaatgccaatg

SEQ ID NO: 2637835 - DNA, 25 bp, Homo sapien
gaacttcaagtgaccctaaggagga

SEQ ID NO: 2637836 - DNA, 25 bp, Homo sapien
gccatcttaggacgctttgtgcacc

SEQ ID NO: 2637837 - DNA, 25 bp, Homo sapien
gcacttagttaccaggcagcaaaaa

SEQ ID NO: 2637838 - DNA, 25 bp, Homo sapien
gaaggtaccaacaccaaagctcttg

SEQ ID NO: 2637839 - DNA, 25 bp, Homo sapien
gaattcccagggttgacagtgttga

SEQ ID NO: 2637840 - DNA, 25 bp, Homo sapien
tatcctagggataatgagacaatgc

SEQ ID NO: 2637841 - DNA, 25 bp, Homo sapien
gacagtctaacggtatcacatcacg

SEQ ID NO: 2637842 - DNA, 25 bp, Homo sapien
gaagttccaggccaccaattagcat

SEQ ID NO: 2637843 - DNA, 25 bp, Homo sapien
ccaggtggcattaggtcggacaatc

SEQ ID NO: 2637844 - DNA, 25 bp, Homo sapien
cctttatgggaaacatggagctaca

SEQ ID NO: 2637845 - DNA, 25 bp, Homo sapien
cacggagactaaaaggtagggagct

SEQ ID NO: 2637846 - DNA, 25 bp, Homo sapien
ttaagaagagttccacagtgcagtc

SEQ ID NO: 2637847 - DNA, 25 bp, Homo sapien
ccctgagaactgtgcaaagactttg

SEQ ID NO: 2637848 - DNA, 25 bp, Homo sapien
gactttgtggccttttatatagaag

SEQ ID NO: 2637849 - DNA, 25 bp, Homo sapien
cagactaaagcttctttggactggg

SEQ ID NO: 2637850 - DNA, 25 bp, Homo sapien
tggccttttatatagaaggtgtcct

SEQ ID NO: 2637851 - DNA, 25 bp, Homo sapien
gaggccagacaacataatggaagct

SEQ ID NO: 2637852 - DNA, 25 bp, Homo sapien
ggccagacaacataatggaagctct

SEQ ID NO: 2637853 - DNA, 25 bp, Homo sapien
ccagacaacataatggaagctctgt

SEQ ID NO: 2637854 - DNA, 25 bp, Homo sapien
gccagacaacataatggaagctctg

SEQ ID NO: 2637855 - DNA, 25 bp, Homo sapien
tcggaggtgtcagagtgtctgcaca

SEQ ID NO: 2637856 - DNA, 25 bp, Homo sapien
caaagcctacaggagtcggaggtgt

SEQ ID NO: 2637857 - DNA, 25 bp, Homo sapien
gtagccactgagaagatccctaggg

SEQ ID NO: 2637858 - DNA, 25 bp, Homo sapien
cacctgttggattcacagataggca

SEQ ID NO: 2637859 - DNA, 25 bp, Homo sapien
tcagggagagcgtcttcagtgaaga

SEQ ID NO: 2637860 - DNA, 25 bp, Homo sapien
tcttagaagttcacagaagcaatgg

SEQ ID NO: 2637861 - DNA, 25 bp, Homo sapien
actccccatacttttgctcttagaa

SEQ ID NO: 2637862 - DNA, 25 bp, Homo sapien
aagcaatgggtaagacacttcagtc

SEQ ID NO: 2637863 - DNA, 25 bp, Homo sapien
gacaggaccgaggtgaccgcacctt

SEQ ID NO: 2637864 - DNA, 25 bp, Homo sapien
ccaggtttgaggacaggtcattcgc

SEQ ID NO: 2637865 - DNA, 25 bp, Homo sapien
ttcgctgagtgtcggaggcaggaca

SEQ ID NO: 2637866 - DNA, 25 bp, Homo sapien
ggaccgaggtgaccgcaccttggct

SEQ ID NO: 2637867 - DNA, 25 bp, Homo sapien
ctgcgtcgccgagaagattcgacag

SEQ ID NO: 2637868 - DNA, 25 bp, Homo sapien
gggttaaagctggtgctttgcacat

SEQ ID NO: 2637869 - DNA, 25 bp, Homo sapien
tgctgggttaaagctggtgctttgc

SEQ ID NO: 2637870 - DNA, 25 bp, Homo sapien
agtgaattgccccactggagtggga

SEQ ID NO: 2637871 - DNA, 25 bp, Homo sapien
cacttgcgataacgtcagaggaggc

SEQ ID NO: 2637872 - DNA, 25 bp, Homo sapien
tctggtcgccaagaacgttagaaca

SEQ ID NO: 2637873 - DNA, 25 bp, Homo sapien
ttgggcagctcaaggtcacttgcga

SEQ ID NO: 2637874 - DNA, 25 bp, Homo sapien
gaggctgctccttgggataatggaa

SEQ ID NO: 2637875 - DNA, 25 bp, Homo sapien
tgttcggctccactacctttagcaa

SEQ ID NO: 2637876 - DNA, 25 bp, Homo sapien
gttcggctccactacctttagcaaa

SEQ ID NO: 2637877 - DNA, 25 bp, Homo sapien
cggctccactacctttagcaaaaag

SEQ ID NO: 2637878 - DNA, 25 bp, Homo sapien
tcggctccactacctttagcaaaaa

SEQ ID NO: 2637879 - DNA, 25 bp, Homo sapien
tctgcacaaagaagccttctgactt

SEQ ID NO: 2637880 - DNA, 25 bp, Homo sapien
gttgttctgcacaaagaagccttct

SEQ ID NO: 2637881 - DNA, 25 bp, Homo sapien
tttggggccaagttgttctgcacaa

SEQ ID NO: 2637882 - DNA, 25 bp, Homo sapien
ccaagttgttctgcacaaagaagcc

SEQ ID NO: 2637883 - DNA, 25 bp, Homo sapien
ctcatacacatttccaaatgccccc

SEQ ID NO: 2637884 - DNA, 25 bp, Homo sapien
agggatgagaggctattctgctgtg

SEQ ID NO: 2637885 - DNA, 25 bp, Homo sapien
ggatgagaggctattctgctgtgaa

SEQ ID NO: 2637886 - DNA, 25 bp, Homo sapien
tgagaggctattctgctgtgaagtt

SEQ ID NO: 2637887 - DNA, 25 bp, Homo sapien
gatgagaggctattctgctgtgaag

SEQ ID NO: 2637888 - DNA, 25 bp, Homo sapien
tggatcaaagctccagactctcttt

SEQ ID NO: 2637889 - DNA, 25 bp, Homo sapien
tgtttcctggatcaaagctccagac

SEQ ID NO: 2637890 - DNA, 25 bp, Homo sapien
gatcaaagctccagactctcttttg

SEQ ID NO: 2637891 - DNA, 25 bp, Homo sapien
ttgatgtttcctggatcaaagctcc

SEQ ID NO: 2637892 - DNA, 25 bp, Homo sapien
agctgcttgccatgaaagacgtcaa

SEQ ID NO: 2637893 - DNA, 25 bp, Homo sapien
acctggctcacaggccagatgctca

SEQ ID NO: 2637894 - DNA, 25 bp, Homo sapien
agcaaacctacatgcacctggctca

SEQ ID NO: 2637895 - DNA, 25 bp, Homo sapien
agacgtcaaccctgagcctgagagg

SEQ ID NO: 2637896 - DNA, 25 bp, Homo sapien
taaacaggccaaaagatcccaactg

SEQ ID NO: 2637897 - DNA, 25 bp, Homo sapien
aagatcccaactgttcaataaactg

SEQ ID NO: 2637898 - DNA, 25 bp, Homo sapien
caggccaaaagatcccaactgttca

SEQ ID NO: 2637899 - DNA, 25 bp, Homo sapien
gccaaaagatcccaactgttcaata

SEQ ID NO: 2637900 - DNA, 25 bp, Homo sapien
tctcatggaatgtatggcctgaggt

SEQ ID NO: 2637901 - DNA, 25 bp, Homo sapien
cttgacttcctcgtaggcgggcagg

SEQ ID NO: 2637902 - DNA, 25 bp, Homo sapien
aagggaggatttgacatcaatgtgt

SEQ ID NO: 2637903 - DNA, 25 bp, Homo sapien
gcagccagaagcagttggacttccg

SEQ ID NO: 2637904 - DNA, 25 bp, Homo sapien
aggaatcatgttgacatcttatggc

SEQ ID NO: 2637905 - DNA, 25 bp, Homo sapien
atcatgttgacatcttatggccaca

SEQ ID NO: 2637906 - DNA, 25 bp, Homo sapien
gaaaggaatcatgttgacatcttat

SEQ ID NO: 2637907 - DNA, 25 bp, Homo sapien
ttgacatcttatggccacattcaga

SEQ ID NO: 2637908 - DNA, 25 bp, Homo sapien
cttggaaggcgaaatcaaaggatct

SEQ ID NO: 2637909 - DNA, 25 bp, Homo sapien
tgaacagtccatttgtagacaggct

SEQ ID NO: 2637910 - DNA, 25 bp, Homo sapien
tctgaatgggttgaaatgactttgc

SEQ ID NO: 2637911 - DNA, 25 bp, Homo sapien
caggcttgttggtctggtaacttcc

SEQ ID NO: 2637912 - DNA, 25 bp, Homo sapien
aaaaaggatgctcagtgcaagtgcc

SEQ ID NO: 2637913 - DNA, 25 bp, Homo sapien
tataaaaaggatgctcagtgcaagt

SEQ ID NO: 2637914 - DNA, 25 bp, Homo sapien
taaaaaggatgctcagtgcaagtgc

SEQ ID NO: 2637915 - DNA, 25 bp, Homo sapien
aaaaggatgctcagtgcaagtgcct

SEQ ID NO: 2637916 - DNA, 25 bp, Homo sapien
cagcagacgctggataggagcaata

SEQ ID NO: 2637917 - DNA, 25 bp, Homo sapien
cagacgctggataggagcaatagca

SEQ ID NO: 2637918 - DNA, 25 bp, Homo sapien
gagggagccagcacaacagtggtcc

SEQ ID NO: 2637919 - DNA, 25 bp, Homo sapien
ggttcccagcagacgctggatagga

SEQ ID NO: 2637920 - DNA, 25 bp, Homo sapien
gggaggatcaattgaaagtgttgtt

SEQ ID NO: 2637921 - DNA, 25 bp, Homo sapien
gataccatagggatcattcaactga

SEQ ID NO: 2637922 - DNA, 25 bp, Homo sapien
tcaactgattataacacaaaatggg

SEQ ID NO: 2637923 - DNA, 25 bp, Homo sapien
taaactctataacacaaaggaattc

SEQ ID NO: 2637924 - DNA, 25 bp, Homo sapien
gataatccttggcagtcagttcgta

SEQ ID NO: 2637925 - DNA, 25 bp, Homo sapien
tctaccagctgagtatgagaaggag

SEQ ID NO: 2637926 - DNA, 25 bp, Homo sapien
agcaatggttgccacatctgagtcc

SEQ ID NO: 2637927 - DNA, 25 bp, Homo sapien
tgtatgtttagaaccggcgtgagtg

SEQ ID NO: 2637928 - DNA, 25 bp, Homo sapien
aaaggcagctgaaaagaatatggaa

SEQ ID NO: 2637929 - DNA, 25 bp, Homo sapien
aacaggaatacaagttgaaggaatc

SEQ ID NO: 2637930 - DNA, 25 bp, Homo sapien
gaatatggaacaggaatacaagttg

SEQ ID NO: 2637931 - DNA, 25 bp, Homo sapien
gaatacaagttgaaggaatcaggca

SEQ ID NO: 2637932 - DNA, 25 bp, Homo sapien
tagatggcctataagattaagcatg

SEQ ID NO: 2637933 - DNA, 25 bp, Homo sapien
ctcttaggatactgaacgtggttga

SEQ ID NO: 2637934 - DNA, 25 bp, Homo sapien
taaaagcatgggttgattctgccta

SEQ ID NO: 2637935 - DNA, 25 bp, Homo sapien
cctggcccaaaggaatttgattact

SEQ ID NO: 2637936 - DNA, 25 bp, Homo sapien
gcaactactcttccttaatggacag

SEQ ID NO: 2637937 - DNA, 25 bp, Homo sapien
atccataagcatatcttgcagaggg

SEQ ID NO: 2637938 - DNA, 25 bp, Homo sapien
ccactggcaccagagggttagtact

SEQ ID NO: 2637939 - DNA, 25 bp, Homo sapien
taatggacagccacataacgtgtag

SEQ ID NO: 2637940 - DNA, 25 bp, Homo sapien
tattggacccataccacctccttaa

SEQ ID NO: 2637941 - DNA, 25 bp, Homo sapien
tatgccttaactgctgtacacagac

SEQ ID NO: 2637942 - DNA, 25 bp, Homo sapien
taatatacccagtagcacactggcg

SEQ ID NO: 2637943 - DNA, 25 bp, Homo sapien
cctgaacaatcttaaatgcctaatg

SEQ ID NO: 2637944 - DNA, 25 bp, Homo sapien
atttttggtatttgagccactcgct

SEQ ID NO: 2637945 - DNA, 25 bp, Homo sapien
cagattggagtgtttgtcgtttgct

SEQ ID NO: 2637946 - DNA, 25 bp, Homo sapien
ggtatttgagccactcgcttgaacc

SEQ ID NO: 2637947 - DNA, 25 bp, Homo sapien
tactctgaggatttttcagattgga

SEQ ID NO: 2637948 - DNA, 25 bp, Homo sapien
cattgatcatcccagaagtctagga

SEQ ID NO: 2637949 - DNA, 25 bp, Homo sapien
ttattactgtatcccctatgctggc

SEQ ID NO: 2637950 - DNA, 25 bp, Homo sapien
ggacccacgtgatgttgccttgact

SEQ ID NO: 2637951 - DNA, 25 bp, Homo sapien
tggtatcctcacaccctctggaagg

SEQ ID NO: 2637952 - DNA, 25 bp, Homo sapien
gtgcctttgaaatcccaatacccag

SEQ ID NO: 2637953 - DNA, 25 bp, Homo sapien
cctttgaaatcccaatacccagtca

SEQ ID NO: 2637954 - DNA, 25 bp, Homo sapien
gagtgtgcctttgaaatcccaatac

SEQ ID NO: 2637955 - DNA, 25 bp, Homo sapien
agagtgtgcctttgaaatcccaata

SEQ ID NO: 2637956 - DNA, 25 bp, Homo sapien
caagccatcccctgaaggaccggct

SEQ ID NO: 2637957 - DNA, 25 bp, Homo sapien
tcatgccctggtagcagaggatggt

SEQ ID NO: 2637958 - DNA, 25 bp, Homo sapien
ggaaaggtggttgatgggctctgag

SEQ ID NO: 2637959 - DNA, 25 bp, Homo sapien
tcccctgaaggaccggctgcctggg

SEQ ID NO: 2637960 - DNA, 25 bp, Homo sapien
aaaggcatcttagccaattagcagc

SEQ ID NO: 2637961 - DNA, 25 bp, Homo sapien
caaactgggttaacacattatttct

SEQ ID NO: 2637962 - DNA, 25 bp, Homo sapien
cttagacttctcaataaaaggcatc

SEQ ID NO: 2637963 - DNA, 25 bp, Homo sapien
gctctaggagcaactagctgtattt

SEQ ID NO: 2637964 - DNA, 25 bp, Homo sapien
ggtgttacatagttcaaaggtgcct

SEQ ID NO: 2637965 - DNA, 25 bp, Homo sapien
gagcccctggcacagtttcaggcca

SEQ ID NO: 2637966 - DNA, 25 bp, Homo sapien
cctcagcagaatgcgggtgttacat

SEQ ID NO: 2637967 - DNA, 25 bp, Homo sapien
agtgctggcccgcaagaattgagga

SEQ ID NO: 2637968 - DNA, 25 bp, Homo sapien
caggtggttgtactccatgggccat

SEQ ID NO: 2637969 - DNA, 25 bp, Homo sapien
tggttgtactccatgggccattttc

SEQ ID NO: 2637970 - DNA, 25 bp, Homo sapien
gatatgttcccaggtggttgtactc

SEQ ID NO: 2637971 - DNA, 25 bp, Homo sapien
tgtctttctcgaggatatgttccca

SEQ ID NO: 2637972 - DNA, 25 bp, Homo sapien
tccacagtgttgctaatgaattcat

SEQ ID NO: 2637973 - DNA, 25 bp, Homo sapien
cactgggagtgaactaacttgccaa

SEQ ID NO: 2637974 - DNA, 25 bp, Homo sapien
tatgtatagcattgatccacagtgt

SEQ ID NO: 2637975 - DNA, 25 bp, Homo sapien
gtctagagtagtcgcctttggccaa

SEQ ID NO: 2637976 - DNA, 25 bp, Homo sapien
tatggagagtttccttaagaggctg

SEQ ID NO: 2637977 - DNA, 25 bp, Homo sapien
tgatcatggatagggctcgtcaact

SEQ ID NO: 2637978 - DNA, 25 bp, Homo sapien
tatctaaggtcacagattattatcc

SEQ ID NO: 2637979 - DNA, 25 bp, Homo sapien
taaaagcaagacatatacaggtgca

SEQ ID NO: 2637980 - DNA, 25 bp, Homo sapien
caaacagtaactcgtactgtcacat

SEQ ID NO: 2637981 - DNA, 25 bp, Homo sapien
cagtaactcgtactgtcacattttg

SEQ ID NO: 2637982 - DNA, 25 bp, Homo sapien
tttacaaacagtaactcgtactgtc

SEQ ID NO: 2637983 - DNA, 25 bp, Homo sapien
actgtcacattttgcggcgcatctc

SEQ ID NO: 2637984 - DNA, 25 bp, Homo sapien
tcaaagtgctttactcctctgcagt

SEQ ID NO: 2637985 - DNA, 25 bp, Homo sapien
gggtgcagttagaaagaaagcatcc

SEQ ID NO: 2637986 - DNA, 25 bp, Homo sapien
gagcttcctgttggctgattcctta

SEQ ID NO: 2637987 - DNA, 25 bp, Homo sapien
tatgtttgcagtaaacaggctgggt

SEQ ID NO: 2637988 - DNA, 25 bp, Homo sapien
ttgtgtctgtcattcgctcccccat

SEQ ID NO: 2637989 - DNA, 25 bp, Homo sapien
tgtcacttgtgtctgtcattcgctc

SEQ ID NO: 2637990 - DNA, 25 bp, Homo sapien
taagttgttcctgtcacttgtgtct

SEQ ID NO: 2637991 - DNA, 25 bp, Homo sapien
ctgtctccctaagttgttcctgtca

SEQ ID NO: 2637992 - DNA, 25 bp, Homo sapien
tatcacaggatcagagccccttgct

SEQ ID NO: 2637993 - DNA, 25 bp, Homo sapien
ccaataagggcctagattgtatatc

SEQ ID NO: 2637994 - DNA, 25 bp, Homo sapien
gatcaataagcagagccagagcctt

SEQ ID NO: 2637995 - DNA, 25 bp, Homo sapien
gggatcaataagcagagccagagcc

SEQ ID NO: 2637996 - DNA, 25 bp, Homo sapien
tccacaattgatcgaatcctttcat

SEQ ID NO: 2637997 - DNA, 25 bp, Homo sapien
tcttggaggttacgaagtctttgaa

SEQ ID NO: 2637998 - DNA, 25 bp, Homo sapien
cgaagtctttgaattctttagtgta

SEQ ID NO: 2637999 - DNA, 25 bp, Homo sapien
aattgtctccgctttgaaattccac

SEQ ID NO: 2638000 - DNA, 25 bp, Homo sapien
ccaagcaattgcagtgcttttgaaa

SEQ ID NO: 2638001 - DNA, 25 bp, Homo sapien
catcagggagaatggcaccccagct

SEQ ID NO: 2638002 - DNA, 25 bp, Homo sapien
gaatggcaccccagctcttgaaacc

SEQ ID NO: 2638003 - DNA, 25 bp, Homo sapien
cacaccaagcaattgcagtgctttt

SEQ ID NO: 2638004 - DNA, 25 bp, Homo sapien
tgataagaatgccattgacgtcagc

SEQ ID NO: 2638005 - DNA, 25 bp, Homo sapien
catgataagaatgccattgacgtca

SEQ ID NO: 2638006 - DNA, 25 bp, Homo sapien
atgataagaatgccattgacgtcag

SEQ ID NO: 2638007 - DNA, 25 bp, Homo sapien
tgtgaataagaggagcctctgagga

SEQ ID NO: 2638008 - DNA, 25 bp, Homo sapien
ctgtgaataagaggagcctctgagg

SEQ ID NO: 2638009 - DNA, 25 bp, Homo sapien
gggtccttgcaggacagaacgctaa

SEQ ID NO: 2638010 - DNA, 25 bp, Homo sapien
gaacaaagtcttaactggcaagctg

SEQ ID NO: 2638011 - DNA, 25 bp, Homo sapien
ttcagaatccggtccacattttgct

SEQ ID NO: 2638012 - DNA, 25 bp, Homo sapien
caggacagaacgctaaggaacaaag

SEQ ID NO: 2638013 - DNA, 25 bp, Homo sapien
aaagctcagacacggaggacacgct

SEQ ID NO: 2638014 - DNA, 25 bp, Homo sapien
cggaggacacgctgtgatccactta

SEQ ID NO: 2638015 - DNA, 25 bp, Homo sapien
gacacgctgtgatccacttagccct

SEQ ID NO: 2638016 - DNA, 25 bp, Homo sapien
acacggctctgaaagctcagacacg

SEQ ID NO: 2638017 - DNA, 25 bp, Homo sapien
tacacaagagggtcttagccactgt

SEQ ID NO: 2638018 - DNA, 25 bp, Homo sapien
tagccttatatcaaagactgaagcc

SEQ ID NO: 2638019 - DNA, 25 bp, Homo sapien
tgagctaggagcacttacacaagag

SEQ ID NO: 2638020 - DNA, 25 bp, Homo sapien
tcagaagcagcattgactagtctct

SEQ ID NO: 2638021 - DNA, 25 bp, Homo sapien
tgaattcagcttttgagagcagacc

SEQ ID NO: 2638022 - DNA, 25 bp, Homo sapien
taagcttactatgggtcactcagca

SEQ ID NO: 2638023 - DNA, 25 bp, Homo sapien
ccttgagtaaagcatgacgcagcct

SEQ ID NO: 2638024 - DNA, 25 bp, Homo sapien
cctgcctcttaataggtggatgacc

SEQ ID NO: 2638025 - DNA, 25 bp, Homo sapien
ccctccattgtagcttaagatgtgg

SEQ ID NO: 2638026 - DNA, 25 bp, Homo sapien
tatttcgctggactttattgtagac

SEQ ID NO: 2638027 - DNA, 25 bp, Homo sapien
tcactctaggttctgatttggccaa

SEQ ID NO: 2638028 - DNA, 25 bp, Homo sapien
tcttcaaggatcaaagtaaaggtga

SEQ ID NO: 2638029 - DNA, 25 bp, Homo sapien
tacaaccgctgtttgtccttaggct

SEQ ID NO: 2638030 - DNA, 25 bp, Homo sapien
gcttagagagtcttactggctccta

SEQ ID NO: 2638031 - DNA, 25 bp, Homo sapien
gaacctggtcctttagtgaaagagc

SEQ ID NO: 2638032 - DNA, 25 bp, Homo sapien
taatagtgtttgatgctgcagccag

SEQ ID NO: 2638033 - DNA, 25 bp, Homo sapien
tactccttataatctagggtccagg

SEQ ID NO: 2638034 - DNA, 25 bp, Homo sapien
tggtaaacccatgaattgcctgcct

SEQ ID NO: 2638035 - DNA, 25 bp, Homo sapien
gctcttgagatacattgatgaccaa

SEQ ID NO: 2638036 - DNA, 25 bp, Homo sapien
tgccaggccctaatcaaagctcttg

SEQ ID NO: 2638037 - DNA, 25 bp, Homo sapien
ccagcccctggctgactctttcagc

SEQ ID NO: 2638038 - DNA, 25 bp, Homo sapien
agcaaactttttccacccacgtgca

SEQ ID NO: 2638039 - DNA, 25 bp, Homo sapien
ccctggctgactctttcagcagcaa

SEQ ID NO: 2638040 - DNA, 25 bp, Homo sapien
tcagcagcaaactttttccacccac

SEQ ID NO: 2638041 - DNA, 25 bp, Homo sapien
ctccccctgaagttggaacctggct

SEQ ID NO: 2638042 - DNA, 25 bp, Homo sapien
cctctaggctcactccccctgaagt

SEQ ID NO: 2638043 - DNA, 25 bp, Homo sapien
cctgaagttggaacctggctgtact

SEQ ID NO: 2638044 - DNA, 25 bp, Homo sapien
cccctgaagttggaacctggctgta

SEQ ID NO: 2638045 - DNA, 25 bp, Homo sapien
tggcccagctttccataaacacatc

SEQ ID NO: 2638046 - DNA, 25 bp, Homo sapien
ccttggcccagctttccataaacac

SEQ ID NO: 2638047 - DNA, 25 bp, Homo sapien
ttggcccagctttccataaacacat

SEQ ID NO: 2638048 - DNA, 25 bp, Homo sapien
ccacgtaagtctttataacaagctt

SEQ ID NO: 2638049 - DNA, 25 bp, Homo sapien
aaggcagctttcagatggtcctggc

SEQ ID NO: 2638050 - DNA, 25 bp, Homo sapien
tcagtgatggctcccaggattccca

SEQ ID NO: 2638051 - DNA, 25 bp, Homo sapien
gatgcttcggtaatggaggctgcta

SEQ ID NO: 2638052 - DNA, 25 bp, Homo sapien
ggattcccagcgacattcagcaaga

SEQ ID NO: 2638053 - DNA, 25 bp, Homo sapien
aatattttctatgtgccattgttct

SEQ ID NO: 2638054 - DNA, 25 bp, Homo sapien
tcaatattttctatgtgccattgtt

SEQ ID NO: 2638055 - DNA, 25 bp, Homo sapien
attttctatgtgccattgttcttac

SEQ ID NO: 2638056 - DNA, 25 bp, Homo sapien
tattttctatgtgccattgttctta

SEQ ID NO: 2638057 - DNA, 25 bp, Homo sapien
gcatgatttagactcactgaagcct

SEQ ID NO: 2638058 - DNA, 25 bp, Homo sapien
tgttttactcataagtaagcatata

SEQ ID NO: 2638059 - DNA, 25 bp, Homo sapien
atacccttcatctttgtaccagtgt

SEQ ID NO: 2638060 - DNA, 25 bp, Homo sapien
ggcttgtgccatcatcgtgcctgac

SEQ ID NO: 2638061 - DNA, 25 bp, Homo sapien
catcgttgggaacattggtgaggcc

SEQ ID NO: 2638062 - DNA, 25 bp, Homo sapien
tcagttatccaagaaacttttaaca

SEQ ID NO: 2638063 - DNA, 25 bp, Homo sapien
ttctcagttatccaagaaactttta

SEQ ID NO: 2638064 - DNA, 25 bp, Homo sapien
tctggcatcctcaagagaaagtagg

SEQ ID NO: 2638065 - DNA, 25 bp, Homo sapien
catcctcaagagaaagtaggttctt

SEQ ID NO: 2638066 - DNA, 25 bp, Homo sapien
cttgtattgtgaacttttccgattg

SEQ ID NO: 2638067 - DNA, 25 bp, Homo sapien
gcttttagctttaccacactcccag

SEQ ID NO: 2638068 - DNA, 25 bp, Homo sapien
aatatttggaatggcaagaaattag

SEQ ID NO: 2638069 - DNA, 25 bp, Homo sapien
tccgattgtgaagccagcttttagc

SEQ ID NO: 2638070 - DNA, 25 bp, Homo sapien
gataaactcgtaggtaatgtagcag

SEQ ID NO: 2638071 - DNA, 25 bp, Homo sapien
tgtgtattctgtatctctatatgga

SEQ ID NO: 2638072 - DNA, 25 bp, Homo sapien
aatacctctgccttataagaccttg

SEQ ID NO: 2638073 - DNA, 25 bp, Homo sapien
tataagaccttgaagttatgtaact

SEQ ID NO: 2638074 - DNA, 25 bp, Homo sapien
tctgtctactgtcctccgggattcc

SEQ ID NO: 2638075 - DNA, 25 bp, Homo sapien
atctgtctactgtcctccgggattc

SEQ ID NO: 2638076 - DNA, 25 bp, Homo sapien
tgtcctccgggattccctaaagcca

SEQ ID NO: 2638077 - DNA, 25 bp, Homo sapien
gtctactgtcctccgggattcccta

SEQ ID NO: 2638078 - DNA, 25 bp, Homo sapien
gcgctcttcgagtgtcagaaacctt

SEQ ID NO: 2638079 - DNA, 25 bp, Homo sapien
tgcgctcttcgagtgtcagaaacct

SEQ ID NO: 2638080 - DNA, 25 bp, Homo sapien
gctcttcgagtgtcagaaaccttta

SEQ ID NO: 2638081 - DNA, 25 bp, Homo sapien
ctgcgctcttcgagtgtcagaaacc

SEQ ID NO: 2638082 - DNA, 25 bp, Homo sapien
tattttcacttggtaattcacatcc

SEQ ID NO: 2638083 - DNA, 25 bp, Homo sapien
ggagtatatatcctctgtgtagatg

SEQ ID NO: 2638084 - DNA, 25 bp, Homo sapien
aaataattgaagttggcacacccag

SEQ ID NO: 2638085 - DNA, 25 bp, Homo sapien
aattgaagttggcacacccagagga

SEQ ID NO: 2638086 - DNA, 25 bp, Homo sapien
tttgggtgggtcacaactgcactcc

SEQ ID NO: 2638087 - DNA, 25 bp, Homo sapien
ggcggatgccgtactacattttcca

SEQ ID NO: 2638088 - DNA, 25 bp, Homo sapien
agatgaagggtttgttgtaagaagc

SEQ ID NO: 2638089 - DNA, 25 bp, Homo sapien
tccaagttgtttgggtgggtcacaa

SEQ ID NO: 2638090 - DNA, 25 bp, Homo sapien
gaaagaagactaagtcacaaatgca

SEQ ID NO: 2638091 - DNA, 25 bp, Homo sapien
tataaccactaatcaagcctgaggg

SEQ ID NO: 2638092 - DNA, 25 bp, Homo sapien
agcctgagggccgaagttcctgcct

SEQ ID NO: 2638093 - DNA, 25 bp, Homo sapien
ctttttcctatgatccttggcctta

SEQ ID NO: 2638094 - DNA, 25 bp, Homo sapien
ttggccttataaccactaatcaagc

SEQ ID NO: 2638095 - DNA, 25 bp, Homo sapien
agcactttctctgagagccgccatt

SEQ ID NO: 2638096 - DNA, 25 bp, Homo sapien
gacggttgcttactctctgatgaaa

SEQ ID NO: 2638097 - DNA, 25 bp, Homo sapien
cacgatattcacatgacggttgctt

SEQ ID NO: 2638098 - DNA, 25 bp, Homo sapien
tttaacagatcattaaagacacgat

SEQ ID NO: 2638099 - DNA, 25 bp, Homo sapien
cttcctgatccccttataccttgga

SEQ ID NO: 2638100 - DNA, 25 bp, Homo sapien
taaaccagtgattaccaggtaccac

SEQ ID NO: 2638101 - DNA, 25 bp, Homo sapien
tgattaccaggtaccactaaccctg

SEQ ID NO: 2638102 - DNA, 25 bp, Homo sapien
ccccttataccttggatcagagtag

SEQ ID NO: 2638103 - DNA, 25 bp, Homo sapien
aaggcactacatgagtgtacttggt

SEQ ID NO: 2638104 - DNA, 25 bp, Homo sapien
caaggcactacatgagtgtacttgg

SEQ ID NO: 2638105 - DNA, 25 bp, Homo sapien
aggcactacatgagtgtacttggtt

SEQ ID NO: 2638106 - DNA, 25 bp, Homo sapien
agtgtacttggtttcaccatctaat

SEQ ID NO: 2638107 - DNA, 25 bp, Homo sapien
tcatgagcatcattggagagtggga

SEQ ID NO: 2638108 - DNA, 25 bp, Homo sapien
tttcatgagcatcattggagagtgg

SEQ ID NO: 2638109 - DNA, 25 bp, Homo sapien
gagcatgaagacttttacccttctc

SEQ ID NO: 2638110 - DNA, 25 bp, Homo sapien
agagtgggagagcatgaagactttt

SEQ ID NO: 2638111 - DNA, 25 bp, Homo sapien
cttctgttgtatgcgctgcttttca

SEQ ID NO: 2638112 - DNA, 25 bp, Homo sapien
tgttgtatgcgctgcttttcaaccc

SEQ ID NO: 2638113 - DNA, 25 bp, Homo sapien
tgcaacttctgttgtatgcgctgct

SEQ ID NO: 2638114 - DNA, 25 bp, Homo sapien
aggacggctttgtgcaacttctgtt

SEQ ID NO: 2638115 - DNA, 25 bp, Homo sapien
tcaggaggtcctcagtggcactgcc

SEQ ID NO: 2638116 - DNA, 25 bp, Homo sapien
caaaatgctttgagtagagttgttc

SEQ ID NO: 2638117 - DNA, 25 bp, Homo sapien
tcagtttcttggtataaagttcaaa

SEQ ID NO: 2638118 - DNA, 25 bp, Homo sapien
ttgagtagagttgttcaggaggtcc

SEQ ID NO: 2638119 - DNA, 25 bp, Homo sapien
tgttttattggcatagccaacttga

SEQ ID NO: 2638120 - DNA, 25 bp, Homo sapien
cataagttgaattgagtggaagggt

SEQ ID NO: 2638121 - DNA, 25 bp, Homo sapien
ttggcatcacccgataatgttttat

SEQ ID NO: 2638122 - DNA, 25 bp, Homo sapien
ggcatagccaacttgatatgatcat

SEQ ID NO: 2638123 - DNA, 25 bp, Homo sapien
tcagtgctaactctgccaggaatgt

SEQ ID NO: 2638124 - DNA, 25 bp, Homo sapien
accaagttgttcagctcagtgctaa

SEQ ID NO: 2638125 - DNA, 25 bp, Homo sapien
tgaagacattctaataagcaccaag

SEQ ID NO: 2638126 - DNA, 25 bp, Homo sapien
ccctctttacgcagatcaccagtta

SEQ ID NO: 2638127 - DNA, 25 bp, Homo sapien
aatgtttagatttccgaatctggtt

SEQ ID NO: 2638128 - DNA, 25 bp, Homo sapien
caattggattggagcaatgtttaga

SEQ ID NO: 2638129 - DNA, 25 bp, Homo sapien
atggataacaattggattggagcaa

SEQ ID NO: 2638130 - DNA, 25 bp, Homo sapien
agcaatgtttagatttccgaatctg

SEQ ID NO: 2638131 - DNA, 25 bp, Homo sapien
taagagctaagttattggcaggaga

SEQ ID NO: 2638132 - DNA, 25 bp, Homo sapien
agagctaagttattggcaggagacg

SEQ ID NO: 2638133 - DNA, 25 bp, Homo sapien
gctgatactttagtggggttaggac

SEQ ID NO: 2638134 - DNA, 25 bp, Homo sapien
gcaggagacgggcactttgctgata

SEQ ID NO: 2638135 - DNA, 25 bp, Homo sapien
tcccagaaatattcaagaggcaaaa

SEQ ID NO: 2638136 - DNA, 25 bp, Homo sapien
cagacaccgaaacccaaatttgcca

SEQ ID NO: 2638137 - DNA, 25 bp, Homo sapien
tctgtgtcagacaccgaaacccaaa

SEQ ID NO: 2638138 - DNA, 25 bp, Homo sapien
ggcaaaaacgatgccttatttagag

SEQ ID NO: 2638139 - DNA, 25 bp, Homo sapien
cacaagagggcgctgtgcaaacagc

SEQ ID NO: 2638140 - DNA, 25 bp, Homo sapien
tacatctactaagagctctgcttct

SEQ ID NO: 2638141 - DNA, 25 bp, Homo sapien
tagctcctcgtgaaggaaaattgcc

SEQ ID NO: 2638142 - DNA, 25 bp, Homo sapien
gaaaacctctcttcacaagagggcg

SEQ ID NO: 2638143 - DNA, 25 bp, Homo sapien
catcctgttggcctggtatgtgaag

SEQ ID NO: 2638144 - DNA, 25 bp, Homo sapien
atatattaagcgaccatcctgttgg

SEQ ID NO: 2638145 - DNA, 25 bp, Homo sapien
tggcctggtatgtgaagctctgctg

SEQ ID NO: 2638146 - DNA, 25 bp, Homo sapien
ctgctgaactcttgcctaaatgcat

SEQ ID NO: 2638147 - DNA, 25 bp, Homo sapien
atgcagctgttctggtatactctct

SEQ ID NO: 2638148 - DNA, 25 bp, Homo sapien
ttctaaatcctttaggtaggcttgc

SEQ ID NO: 2638149 - DNA, 25 bp, Homo sapien
tggcttgacaccattactgtcgggg

SEQ ID NO: 2638150 - DNA, 25 bp, Homo sapien
gacaccattactgtcggggcagggt

SEQ ID NO: 2638151 - DNA, 25 bp, Homo sapien
tgtctagaagacaacgtgcatacct

SEQ ID NO: 2638152 - DNA, 25 bp, Homo sapien
tcctgaacatctcttaagtataggg

SEQ ID NO: 2638153 - DNA, 25 bp, Homo sapien
ggtaggttgggtttcagatgaccaa

SEQ ID NO: 2638154 - DNA, 25 bp, Homo sapien
tacagacgtgaattctataggtctc

SEQ ID NO: 2638155 - DNA, 25 bp, Homo sapien
agccattattgtaggcagttagaac

SEQ ID NO: 2638156 - DNA, 25 bp, Homo sapien
ggcctatggttgcattgaagctcta

SEQ ID NO: 2638157 - DNA, 25 bp, Homo sapien
aggcctatgattaaagtcttctggc

SEQ ID NO: 2638158 - DNA, 25 bp, Homo sapien
tctaagctctaagttaggcctatgg

SEQ ID NO: 2638159 - DNA, 25 bp, Homo sapien
tatatgggaactgtcaaaggcacag

SEQ ID NO: 2638160 - DNA, 25 bp, Homo sapien
gcccttgtaataacacacacaccgt

SEQ ID NO: 2638161 - DNA, 25 bp, Homo sapien
gaattgctcttgttagtgttatgcc

SEQ ID NO: 2638162 - DNA, 25 bp, Homo sapien
agttccatctacagtctagcccttg

SEQ ID NO: 2638163 - DNA, 25 bp, Homo sapien
tctttagcatgtggaagtactgcct

SEQ ID NO: 2638164 - DNA, 25 bp, Homo sapien
ctttagcatgtggaagtactgcctt

SEQ ID NO: 2638165 - DNA, 25 bp, Homo sapien
tactgactggaataggaagacattc

SEQ ID NO: 2638166 - DNA, 25 bp, Homo sapien
gagttaataggagccaaattccagc

SEQ ID NO: 2638167 - DNA, 25 bp, Homo sapien
tcctagatcacctgctatgaaccag

SEQ ID NO: 2638168 - DNA, 25 bp, Homo sapien
cacattttagtggaagtcagcaaca

SEQ ID NO: 2638169 - DNA, 25 bp, Homo sapien
tcatatttggctgagtcgagggtca

SEQ ID NO: 2638170 - DNA, 25 bp, Homo sapien
tggccaaccgttcagcttgcatctg

SEQ ID NO: 2638171 - DNA, 25 bp, Homo sapien
ttatggccaaccgttcagcttgcat

SEQ ID NO: 2638172 - DNA, 25 bp, Homo sapien
cagagatatgtcatatttggctgag

SEQ ID NO: 2638173 - DNA, 25 bp, Homo sapien
gctattttcatcaagggagcttagt

SEQ ID NO: 2638174 - DNA, 25 bp, Homo sapien
gcttagtatctggtgctcacgagat

SEQ ID NO: 2638175 - DNA, 25 bp, Homo sapien
atttttccgaatacagtgcactagc

SEQ ID NO: 2638176 - DNA, 25 bp, Homo sapien
tacagtgcactagcatatctatcat

SEQ ID NO: 2638177 - DNA, 25 bp, Homo sapien
aatccttagaaatcgtccaggtggg

SEQ ID NO: 2638178 - DNA, 25 bp, Homo sapien
tttcaacatagggaggatatttcta

SEQ ID NO: 2638179 - DNA, 25 bp, Homo sapien
cagtgttactaaagagacattgact

SEQ ID NO: 2638180 - DNA, 25 bp, Homo sapien
tcactagagcgagaaagcatgaaga

SEQ ID NO: 2638181 - DNA, 25 bp, Homo sapien
ccagtggagattcagcatagatgac

SEQ ID NO: 2638182 - DNA, 25 bp, Homo sapien
cctgcccagtggagattcagcatag

SEQ ID NO: 2638183 - DNA, 25 bp, Homo sapien
cagtggagattcagcatagatgaca

SEQ ID NO: 2638184 - DNA, 25 bp, Homo sapien
gcccagtggagattcagcatagatg

SEQ ID NO: 2638185 - DNA, 25 bp, Homo sapien
cgagacctagttctgactgagattc

SEQ ID NO: 2638186 - DNA, 25 bp, Homo sapien
ctctcttggtaaagcgagacctagt

SEQ ID NO: 2638187 - DNA, 25 bp, Homo sapien
gactgagattcctccagtcgtttca

SEQ ID NO: 2638188 - DNA, 25 bp, Homo sapien
tcttggtaaagcgagacctagttct

SEQ ID NO: 2638189 - DNA, 25 bp, Homo sapien
caagagcaaggtccataaactctaa

SEQ ID NO: 2638190 - DNA, 25 bp, Homo sapien
ccaagagcaaggtccataaactcta

SEQ ID NO: 2638191 - DNA, 25 bp, Homo sapien
taaccaagagcaaggtccataaact

SEQ ID NO: 2638192 - DNA, 25 bp, Homo sapien
accaagagcaaggtccataaactct

SEQ ID NO: 2638193 - DNA, 25 bp, Homo sapien
aggatacatcacctacagttgttag

SEQ ID NO: 2638194 - DNA, 25 bp, Homo sapien
agtgtgaactgcttatattaactca

SEQ ID NO: 2638195 - DNA, 25 bp, Homo sapien
tattaactcataggatatatattgg

SEQ ID NO: 2638196 - DNA, 25 bp, Homo sapien
ggtagacataaacctactgactaaa

SEQ ID NO: 2638197 - DNA, 25 bp, Homo sapien
aacaagaaccagatctcacagtcat

SEQ ID NO: 2638198 - DNA, 25 bp, Homo sapien
tgaaaagtcgcagagatagcggaga

SEQ ID NO: 2638199 - DNA, 25 bp, Homo sapien
gcagagatagcggagaacaagaacc

SEQ ID NO: 2638200 - DNA, 25 bp, Homo sapien
tctccccactaaagatgaaaagtcg

SEQ ID NO: 2638201 - DNA, 25 bp, Homo sapien
tcagcaaactgatagccttctgaca

SEQ ID NO: 2638202 - DNA, 25 bp, Homo sapien
ctgctgagatcatctgctcagcagc

SEQ ID NO: 2638203 - DNA, 25 bp, Homo sapien
gattcagcaaactgatagccttctg

SEQ ID NO: 2638204 - DNA, 25 bp, Homo sapien
ttgattcagcaaactgatagccttc

SEQ ID NO: 2638205 - DNA, 25 bp, Homo sapien
caaaggaaagcagcgatttggcttc

SEQ ID NO: 2638206 - DNA, 25 bp, Homo sapien
gacgtggctagatggttaggaacac

SEQ ID NO: 2638207 - DNA, 25 bp, Homo sapien
tctgatttaccaagagagtccttgt

SEQ ID NO: 2638208 - DNA, 25 bp, Homo sapien
caactggacattggccatactctga

SEQ ID NO: 2638209 - DNA, 25 bp, Homo sapien
tgggttgctcactatgtttaaaaca

SEQ ID NO: 2638210 - DNA, 25 bp, Homo sapien
taagaaccttgtcattgggttgctc

SEQ ID NO: 2638211 - DNA, 25 bp, Homo sapien
taacatgatatgaagtcctcaatct

SEQ ID NO: 2638212 - DNA, 25 bp, Homo sapien
taattggcgtaatgatggagagtcc

SEQ ID NO: 2638213 - DNA, 25 bp, Homo sapien
aaattcggcgctgggggactccagc

SEQ ID NO: 2638214 - DNA, 25 bp, Homo sapien
cagggcagacaaggcggctgcgagg

SEQ ID NO: 2638215 - DNA, 25 bp, Homo sapien
aaaggttctgctggaaattcggcgc

SEQ ID NO: 2638216 - DNA, 25 bp, Homo sapien
gcggctgcgaggattccaaaggttc

SEQ ID NO: 2638217 - DNA, 25 bp, Homo sapien
ctggctctgattctggatgcattaa

SEQ ID NO: 2638218 - DNA, 25 bp, Homo sapien
tgattctggatgcattaagcgatct

SEQ ID NO: 2638219 - DNA, 25 bp, Homo sapien
gacgtgggacaccggctagttaata

SEQ ID NO: 2638220 - DNA, 25 bp, Homo sapien
caccggctagttaatacttctggct

SEQ ID NO: 2638221 - DNA, 25 bp, Homo sapien
gaaaaccttcactcttatgagcata

SEQ ID NO: 2638222 - DNA, 25 bp, Homo sapien
aaaaccttcactcttatgagcataa

SEQ ID NO: 2638223 - DNA, 25 bp, Homo sapien
aaccttcactcttatgagcataacc

SEQ ID NO: 2638224 - DNA, 25 bp, Homo sapien
tagtttgaaaaccttcactcttatg

SEQ ID NO: 2638225 - DNA, 25 bp, Homo sapien
aaacagcacaaagtacctggcttcc

SEQ ID NO: 2638226 - DNA, 25 bp, Homo sapien
cagaagagctcttgttgaaacagca

SEQ ID NO: 2638227 - DNA, 25 bp, Homo sapien
aaactagttaaagcagaagagctct

SEQ ID NO: 2638228 - DNA, 25 bp, Homo sapien
aaagtacctggcttcctagacccag

SEQ ID NO: 2638229 - DNA, 25 bp, Homo sapien
gaaagtcatgactatcaacatcgtt

SEQ ID NO: 2638230 - DNA, 25 bp, Homo sapien
tgctagaacttgccaggagtggaaa

SEQ ID NO: 2638231 - DNA, 25 bp, Homo sapien
gactgagtaccaacaatgtttttgg

SEQ ID NO: 2638232 - DNA, 25 bp, Homo sapien
caacatcgttattagttaacattga

SEQ ID NO: 2638233 - DNA, 25 bp, Homo sapien
gcttgagtcaaaggagttgcagcca

SEQ ID NO: 2638234 - DNA, 25 bp, Homo sapien
gacccagcagggataccaattatga

SEQ ID NO: 2638235 - DNA, 25 bp, Homo sapien
tgaacccacaaaagtaccatgagac

SEQ ID NO: 2638236 - DNA, 25 bp, Homo sapien
catctgccaggtctccaacatgtga

SEQ ID NO: 2638237 - DNA, 25 bp, Homo sapien
taacaacaatgacatgggctacaga

SEQ ID NO: 2638238 - DNA, 25 bp, Homo sapien
tatagggtgccattcagacatagga

SEQ ID NO: 2638239 - DNA, 25 bp, Homo sapien
gacaattatgatagcttaggccact

SEQ ID NO: 2638240 - DNA, 25 bp, Homo sapien
taacagaggcctgccttcacgggaa

SEQ ID NO: 2638241 - DNA, 25 bp, Homo sapien
tcaaatacgataatccaacttggtt

SEQ ID NO: 2638242 - DNA, 25 bp, Homo sapien
caaatacgataatccaacttggttg

SEQ ID NO: 2638243 - DNA, 25 bp, Homo sapien
tacgataatccaacttggttgttgg

SEQ ID NO: 2638244 - DNA, 25 bp, Homo sapien
aatacgataatccaacttggttgtt

SEQ ID NO: 2638245 - DNA, 25 bp, Homo sapien
ttggatggagcctcaatactgccaa

SEQ ID NO: 2638246 - DNA, 25 bp, Homo sapien
actggtgccacagcaagttcatact

SEQ ID NO: 2638247 - DNA, 25 bp, Homo sapien
tccagacccaattggatggagcctc

SEQ ID NO: 2638248 - DNA, 25 bp, Homo sapien
gttcatactctccagacccaattgg

SEQ ID NO: 2638249 - DNA, 25 bp, Homo sapien
ggtgaactcctgtgagaacctataa

SEQ ID NO: 2638250 - DNA, 25 bp, Homo sapien
tgtgagaacctataattcagggatg

SEQ ID NO: 2638251 - DNA, 25 bp, Homo sapien
taattcagggatgctaaagtcacca

SEQ ID NO: 2638252 - DNA, 25 bp, Homo sapien
ctgggtgaactcctgtgagaaccta

SEQ ID NO: 2638253 - DNA, 25 bp, Homo sapien
tttataaccaagatcttttgcaacc

SEQ ID NO: 2638254 - DNA, 25 bp, Homo sapien
gttgtttataaccaagatcttttgc

SEQ ID NO: 2638255 - DNA, 25 bp, Homo sapien
ttataaccaagatcttttgcaacct

SEQ ID NO: 2638256 - DNA, 25 bp, Homo sapien
tgtttataaccaagatcttttgcaa

SEQ ID NO: 2638257 - DNA, 25 bp, Homo sapien
gaagaagctgccaagtgacatacac

SEQ ID NO: 2638258 - DNA, 25 bp, Homo sapien
tcagccagggttgaggctctgtcca

SEQ ID NO: 2638259 - DNA, 25 bp, Homo sapien
cagggctcaagtttcaatttgggca

SEQ ID NO: 2638260 - DNA, 25 bp, Homo sapien
tggaaggacatgctactggaagaag

SEQ ID NO: 2638261 - DNA, 25 bp, Homo sapien
gctaaggcaatttacagagggctga

SEQ ID NO: 2638262 - DNA, 25 bp, Homo sapien
tgcaatgcagtcttgaggaaggcct

SEQ ID NO: 2638263 - DNA, 25 bp, Homo sapien
ccaatagacagttccgaagctggca

SEQ ID NO: 2638264 - DNA, 25 bp, Homo sapien
tcttgggaccaacacctatggaggg

SEQ ID NO: 2638265 - DNA, 25 bp, Homo sapien
tattctcactgtctgagtgtgactt

SEQ ID NO: 2638266 - DNA, 25 bp, Homo sapien
ttctcactgtctgagtgtgactttc

SEQ ID NO: 2638267 - DNA, 25 bp, Homo sapien
tcactgtctgagtgtgactttccat

SEQ ID NO: 2638268 - DNA, 25 bp, Homo sapien
tctattctcactgtctgagtgtgac

SEQ ID NO: 2638269 - DNA, 25 bp, Homo sapien
ccttttgaagcaagcaactttctga

SEQ ID NO: 2638270 - DNA, 25 bp, Homo sapien
tcttcatgttattagtagggtacca

SEQ ID NO: 2638271 - DNA, 25 bp, Homo sapien
ggtgaagtgtgtattgttgaccttt

SEQ ID NO: 2638272 - DNA, 25 bp, Homo sapien
gataaccctctgattaaattagcta

SEQ ID NO: 2638273 - DNA, 25 bp, Homo sapien
tctttaaatatcctagagcacccat

SEQ ID NO: 2638274 - DNA, 25 bp, Homo sapien
caatcctttccattaagttacaagc

SEQ ID NO: 2638275 - DNA, 25 bp, Homo sapien
tgtgtctacagactgctgagccttt

SEQ ID NO: 2638276 - DNA, 25 bp, Homo sapien
gcacccattatagtgtctggcaaaa

SEQ ID NO: 2638277 - DNA, 25 bp, Homo sapien
caagatctcgtctgggtacttgggc

SEQ ID NO: 2638278 - DNA, 25 bp, Homo sapien
ccccaagggcagatatagagacata

SEQ ID NO: 2638279 - DNA, 25 bp, Homo sapien
gaatcacttttctctacttagagcc

SEQ ID NO: 2638280 - DNA, 25 bp, Homo sapien
tagagacatagtatcaagctaacct

SEQ ID NO: 2638281 - DNA, 25 bp, Homo sapien
catttgccgcagagattaagtgtct

SEQ ID NO: 2638282 - DNA, 25 bp, Homo sapien
tgtccaaaaagaggaaccaactgcc

SEQ ID NO: 2638283 - DNA, 25 bp, Homo sapien
tattctttcagcgtgatccaccggg

SEQ ID NO: 2638284 - DNA, 25 bp, Homo sapien
tatagagcctcttacatgacaggtg

SEQ ID NO: 2638285 - DNA, 25 bp, Homo sapien
caacggctcaggtatatatgacaag

SEQ ID NO: 2638286 - DNA, 25 bp, Homo sapien
caggctgctccaaatcagaactcag

SEQ ID NO: 2638287 - DNA, 25 bp, Homo sapien
tgatttggtattgcgacaggctgct

SEQ ID NO: 2638288 - DNA, 25 bp, Homo sapien
tctgacaatttgatgcaacggctca

SEQ ID NO: 2638289 - DNA, 25 bp, Homo sapien
gataagtggggacttgctctggtat

SEQ ID NO: 2638290 - DNA, 25 bp, Homo sapien
caggctgctccttttgataagtggg

SEQ ID NO: 2638291 - DNA, 25 bp, Homo sapien
gtattaactgtttccaggtctccag

SEQ ID NO: 2638292 - DNA, 25 bp, Homo sapien
ttttggcaggctgctccttttgata

SEQ ID NO: 2638293 - DNA, 25 bp, Homo sapien
taattttctgtaaccctgtgaaggc

SEQ ID NO: 2638294 - DNA, 25 bp, Homo sapien
aagacagctttgtgttaggcggccc

SEQ ID NO: 2638295 - DNA, 25 bp, Homo sapien
tgtttctgagaagtgtgcgccatct

SEQ ID NO: 2638296 - DNA, 25 bp, Homo sapien
gctgagaggattgacgagcagccat

SEQ ID NO: 2638297 - DNA, 25 bp, Homo sapien
ctccaagactagagttatcacagtg

SEQ ID NO: 2638298 - DNA, 25 bp, Homo sapien
caagactagagttatcacagtgcac

SEQ ID NO: 2638299 - DNA, 25 bp, Homo sapien
aagactagagttatcacagtgcaca

SEQ ID NO: 2638300 - DNA, 25 bp, Homo sapien
gactttgcagttcacaacacgtgag

SEQ ID NO: 2638301 - DNA, 25 bp, Homo sapien
cacaacacgtgagcttaatcattgg

SEQ ID NO: 2638302 - DNA, 25 bp, Homo sapien
agcttaatcattggtttggctcttc

SEQ ID NO: 2638303 - DNA, 25 bp, Homo sapien
tgcagttcacaacacgtgagcttaa

SEQ ID NO: 2638304 - DNA, 25 bp, Homo sapien
ctagtgttgaatcgcagacaagggt

SEQ ID NO: 2638305 - DNA, 25 bp, Homo sapien
aggctgccaagctggtcgactcctc

SEQ ID NO: 2638306 - DNA, 25 bp, Homo sapien
caagctggtcgactcctctcttggc

SEQ ID NO: 2638307 - DNA, 25 bp, Homo sapien
tcgcagacaagggttccagaggctg

SEQ ID NO: 2638308 - DNA, 25 bp, Homo sapien
gccactgctgcttctacttgtcaga

SEQ ID NO: 2638309 - DNA, 25 bp, Homo sapien
tctgcttcaacgaatgaacccgttt

SEQ ID NO: 2638310 - DNA, 25 bp, Homo sapien
gcttctacttgtcagaccttcactg

SEQ ID NO: 2638311 - DNA, 25 bp, Homo sapien
agtttaactatgtcactgccactgc

SEQ ID NO: 2638312 - DNA, 25 bp, Homo sapien
tatgtcaacccattcatcaccggag

SEQ ID NO: 2638313 - DNA, 25 bp, Homo sapien
caccacagatgccagtacactctgg

SEQ ID NO: 2638314 - DNA, 25 bp, Homo sapien
tctgcatcaggtcagtcactctttc

SEQ ID NO: 2638315 - DNA, 25 bp, Homo sapien
ccggagccacgtggtttccttcaca

SEQ ID NO: 2638316 - DNA, 25 bp, Homo sapien
tgtgatgcttgagcatagtggtttt

SEQ ID NO: 2638317 - DNA, 25 bp, Homo sapien
cttgagcatagtggtttttataatc

SEQ ID NO: 2638318 - DNA, 25 bp, Homo sapien
tataatcctgtaagcgatttttcag

SEQ ID NO: 2638319 - DNA, 25 bp, Homo sapien
tttcaggagaccagatctgacctcc

SEQ ID NO: 2638320 - DNA, 25 bp, Homo sapien
tagaagacagttttatgatgacatt

SEQ ID NO: 2638321 - DNA, 25 bp, Homo sapien
aagacagttttatgatgacattcac

SEQ ID NO: 2638322 - DNA, 25 bp, Homo sapien
gaagacagttttatgatgacattca

SEQ ID NO: 2638323 - DNA, 25 bp, Homo sapien
gacagttttatgatgacattcacag

SEQ ID NO: 2638324 - DNA, 25 bp, Homo sapien
ggctctcctccccaatatggtacca

SEQ ID NO: 2638325 - DNA, 25 bp, Homo sapien
tcatctgctgttcagtcatgcaggc

SEQ ID NO: 2638326 - DNA, 25 bp, Homo sapien
tctgctgttcagtcatgcaggcagc

SEQ ID NO: 2638327 - DNA, 25 bp, Homo sapien
tcagtggaacgttcagtgtgtttca

SEQ ID NO: 2638328 - DNA, 25 bp, Homo sapien
gcacttggtgtaggctctcggctga

SEQ ID NO: 2638329 - DNA, 25 bp, Homo sapien
caaatgcgtgatgtgtaaacccaga

SEQ ID NO: 2638330 - DNA, 25 bp, Homo sapien
cagattgaccaagggcataagggag

SEQ ID NO: 2638331 - DNA, 25 bp, Homo sapien
gtagctttagcacacatgaccaagg

SEQ ID NO: 2638332 - DNA, 25 bp, Homo sapien
agtgcctcacttgtgtagaatctca

SEQ ID NO: 2638333 - DNA, 25 bp, Homo sapien
gcctcacttgtgtagaatctcacca

SEQ ID NO: 2638334 - DNA, 25 bp, Homo sapien
aagtaccactttcatgagtgcctca

SEQ ID NO: 2638335 - DNA, 25 bp, Homo sapien
cttgggctccaagtaccactttcat

SEQ ID NO: 2638336 - DNA, 25 bp, Homo sapien
tggttttgatggcataggatgtagc

SEQ ID NO: 2638337 - DNA, 25 bp, Homo sapien
gttttgatggcataggatgtagcct

SEQ ID NO: 2638338 - DNA, 25 bp, Homo sapien
ttgatggcataggatgtagccttgg

SEQ ID NO: 2638339 - DNA, 25 bp, Homo sapien
tatggagtaggcccctgaggtatag

SEQ ID NO: 2638340 - DNA, 25 bp, Homo sapien
ctgtcctggcttcacctttcgtagc

SEQ ID NO: 2638341 - DNA, 25 bp, Homo sapien
aagcactaaatttggctctgaaatg

SEQ ID NO: 2638342 - DNA, 25 bp, Homo sapien
cctttcgtagccaagaaagcactaa

SEQ ID NO: 2638343 - DNA, 25 bp, Homo sapien
cactaaatttggctctgaaatgtac

SEQ ID NO: 2638344 - DNA, 25 bp, Homo sapien
agtgtgcaccattaaaagaagctgc

SEQ ID NO: 2638345 - DNA, 25 bp, Homo sapien
gacctgctctgttcctgtaactgta

SEQ ID NO: 2638346 - DNA, 25 bp, Homo sapien
gttctcacctgaatacccgaatttg

SEQ ID NO: 2638347 - DNA, 25 bp, Homo sapien
taacagggcattctctttaagactg

SEQ ID NO: 2638348 - DNA, 25 bp, Homo sapien
ctgtactgtcgcgccatggaccgca

SEQ ID NO: 2638349 - DNA, 25 bp, Homo sapien
tcaggcggtgagtggagagcgcccc

SEQ ID NO: 2638350 - DNA, 25 bp, Homo sapien
tacgcggtggagaccggccaccggc

SEQ ID NO: 2638351 - DNA, 25 bp, Homo sapien
ggatgtcctggccctcctcgttcca

SEQ ID NO: 2638352 - DNA, 25 bp, Homo sapien
ggaagaaggaccaacctctggcgaa

SEQ ID NO: 2638353 - DNA, 25 bp, Homo sapien
atagcctcggtggaaggagccctgc

SEQ ID NO: 2638354 - DNA, 25 bp, Homo sapien
cgggagcgtgtctctgccatagcct

SEQ ID NO: 2638355 - DNA, 25 bp, Homo sapien
gtgaaagtcacagctcgggcgtgcc

SEQ ID NO: 2638356 - DNA, 25 bp, Homo sapien
gggctcatcgtcaacaagctctgag

SEQ ID NO: 2638357 - DNA, 25 bp, Homo sapien
tccaggcaactttgcctggtcacat

SEQ ID NO: 2638358 - DNA, 25 bp, Homo sapien
gatccaatttttcagcgacgcgcat

SEQ ID NO: 2638359 - DNA, 25 bp, Homo sapien
cgcatagacaatattccaggcaact

SEQ ID NO: 2638360 - DNA, 25 bp, Homo sapien
ggaggaagatcttcaagaggaaaca

SEQ ID NO: 2638361 - DNA, 25 bp, Homo sapien
agaggaaacattgggcattctccct

SEQ ID NO: 2638362 - DNA, 25 bp, Homo sapien
ttgatttccagcgaggaccactccc

SEQ ID NO: 2638363 - DNA, 25 bp, Homo sapien
gaccactcccgaggccaagttggag

SEQ ID NO: 2638364 - DNA, 25 bp, Homo sapien
caaatattatataaaagttcaggaa

SEQ ID NO: 2638365 - DNA, 25 bp, Homo sapien
ttcaaatattatataaaagttcagg

SEQ ID NO: 2638366 - DNA, 25 bp, Homo sapien
cttcaaatattatataaaagttcag

SEQ ID NO: 2638367 - DNA, 25 bp, Homo sapien
tcaaatattatataaaagttcagga

SEQ ID NO: 2638368 - DNA, 25 bp, Homo sapien
cttaggtcttggtgtattaggcagg

SEQ ID NO: 2638369 - DNA, 25 bp, Homo sapien
tcttggtgtattaggcaggctgcga

SEQ ID NO: 2638370 - DNA, 25 bp, Homo sapien
gtgtattaggcaggctgcgaagcac

SEQ ID NO: 2638371 - DNA, 25 bp, Homo sapien
tattaggcaggctgcgaagcacagc

SEQ ID NO: 2638372 - DNA, 25 bp, Homo sapien
gatccatagactctctggtttgttc

SEQ ID NO: 2638373 - DNA, 25 bp, Homo sapien
taagccatgagtcacaagctgatgg

SEQ ID NO: 2638374 - DNA, 25 bp, Homo sapien
gcagttatagctttgtgttgatcca

SEQ ID NO: 2638375 - DNA, 25 bp, Homo sapien
gttccccattgagaccagctaagcc

SEQ ID NO: 2638376 - DNA, 25 bp, Homo sapien
cctgattcagaatccgatcaattgc

SEQ ID NO: 2638377 - DNA, 25 bp, Homo sapien
gaatccgatcaattgcctttccatc

SEQ ID NO: 2638378 - DNA, 25 bp, Homo sapien
cactgatacctgattcagaatccga

SEQ ID NO: 2638379 - DNA, 25 bp, Homo sapien
tcagaatccgatcaattgcctttcc

SEQ ID NO: 2638380 - DNA, 25 bp, Homo sapien
gttgctagcattggactgatagaca

SEQ ID NO: 2638381 - DNA, 25 bp, Homo sapien
tcaagttgctagcattggactgata

SEQ ID NO: 2638382 - DNA, 25 bp, Homo sapien
cattggactgatagacaaggtaggg

SEQ ID NO: 2638383 - DNA, 25 bp, Homo sapien
ctagcattggactgatagacaaggt

SEQ ID NO: 2638384 - DNA, 25 bp, Homo sapien
aggcaatggaaagggctgaccttgc

SEQ ID NO: 2638385 - DNA, 25 bp, Homo sapien
ctagtagcgaaccagagattgagtt

SEQ ID NO: 2638386 - DNA, 25 bp, Homo sapien
tacctggatgggaacaatgctgtta

SEQ ID NO: 2638387 - DNA, 25 bp, Homo sapien
gatcctcacttgtgagggctccaag

SEQ ID NO: 2638388 - DNA, 25 bp, Homo sapien
tcagcctcgccagtatctgtcattt

SEQ ID NO: 2638389 - DNA, 25 bp, Homo sapien
tggaagtatatacctggtaatggga

SEQ ID NO: 2638390 - DNA, 25 bp, Homo sapien
ccttttcagcctcgccagtatctgt

SEQ ID NO: 2638391 - DNA, 25 bp, Homo sapien
tatttttgtggaagtatatacctgg

SEQ ID NO: 2638392 - DNA, 25 bp, Homo sapien
ctgtctgaagaagtacactgtgtac

SEQ ID NO: 2638393 - DNA, 25 bp, Homo sapien
tacactgtgtaccttcgtatcacta

SEQ ID NO: 2638394 - DNA, 25 bp, Homo sapien
ctgtgtaccttcgtatcactatgtc

SEQ ID NO: 2638395 - DNA, 25 bp, Homo sapien
gaagaagtacactgtgtaccttcgt

SEQ ID NO: 2638396 - DNA, 25 bp, Homo sapien
tggtggcaaataagacatccaagca

SEQ ID NO: 2638397 - DNA, 25 bp, Homo sapien
tttcacttggagacaaggacagctg

SEQ ID NO: 2638398 - DNA, 25 bp, Homo sapien
cccttgaatattggatggtggcaaa

SEQ ID NO: 2638399 - DNA, 25 bp, Homo sapien
acaagaatgacatttaacctgcaga

SEQ ID NO: 2638400 - DNA, 25 bp, Homo sapien
cttttgagtatgcccaaactgttag

SEQ ID NO: 2638401 - DNA, 25 bp, Homo sapien
tttcccaagcaatgcgaatgtgttc

SEQ ID NO: 2638402 - DNA, 25 bp, Homo sapien
gctgtgatttagcaaacttaagaaa

SEQ ID NO: 2638403 - DNA, 25 bp, Homo sapien
caagcaatgcgaatgtgttcaaatg

SEQ ID NO: 2638404 - DNA, 25 bp, Homo sapien
acactgctctcaggaggtataaagc

SEQ ID NO: 2638405 - DNA, 25 bp, Homo sapien
taaagctgtgtccagttgttcttgt

SEQ ID NO: 2638406 - DNA, 25 bp, Homo sapien
tctcaggaggtataaagctgtgtcc

SEQ ID NO: 2638407 - DNA, 25 bp, Homo sapien
gttgttcttgttgcatgtcattgag

SEQ ID NO: 2638408 - DNA, 25 bp, Homo sapien
tgaagagcgataggcagaatttaat

SEQ ID NO: 2638409 - DNA, 25 bp, Homo sapien
gataggcagaatttaattgatttca

SEQ ID NO: 2638410 - DNA, 25 bp, Homo sapien
gagcgataggcagaatttaattgat

SEQ ID NO: 2638411 - DNA, 25 bp, Homo sapien
tttccttgaagagcgataggcagaa

SEQ ID NO: 2638412 - DNA, 25 bp, Homo sapien
gatggatcccatgcttaaaattacc

SEQ ID NO: 2638413 - DNA, 25 bp, Homo sapien
aaattcttattctgagcagctttgc

SEQ ID NO: 2638414 - DNA, 25 bp, Homo sapien
gtttgccacgttatagcactgcttg

SEQ ID NO: 2638415 - DNA, 25 bp, Homo sapien
gcgtctcaaggtggctacagcgtga

SEQ ID NO: 2638416 - DNA, 25 bp, Homo sapien
agagcatccggtaattgacttgaaa

SEQ ID NO: 2638417 - DNA, 25 bp, Homo sapien
agcttttcatccagtatgctaatga

SEQ ID NO: 2638418 - DNA, 25 bp, Homo sapien
ccagtatgctaatgatggtataaaa

SEQ ID NO: 2638419 - DNA, 25 bp, Homo sapien
gagcatccggtaattgacttgaaat

SEQ ID NO: 2638420 - DNA, 25 bp, Homo sapien
taaagacagggtctgctcctgcttt

SEQ ID NO: 2638421 - DNA, 25 bp, Homo sapien
gatggacttgaaatggtccaccacc

SEQ ID NO: 2638422 - DNA, 25 bp, Homo sapien
cttgaaatggtccaccaccaggaca

SEQ ID NO: 2638423 - DNA, 25 bp, Homo sapien
taagatgtgcttcttgaggatggac

SEQ ID NO: 2638424 - DNA, 25 bp, Homo sapien
ggtcagcatcggcaaaggaatatgt

SEQ ID NO: 2638425 - DNA, 25 bp, Homo sapien
tcgcagctgtatctggagcctggga

SEQ ID NO: 2638426 - DNA, 25 bp, Homo sapien
agctgggatgctctcaagaacttca

SEQ ID NO: 2638427 - DNA, 25 bp, Homo sapien
tgtttgtaatagaggcttcgcagct

SEQ ID NO: 2638428 - DNA, 25 bp, Homo sapien
ttaagtcaaaatactgacttgttta

SEQ ID NO: 2638429 - DNA, 25 bp, Homo sapien
gggaacttgccaatctgggtctaaa

SEQ ID NO: 2638430 - DNA, 25 bp, Homo sapien
cataaaaattgcagtggtccatcaa

SEQ ID NO: 2638431 - DNA, 25 bp, Homo sapien
tccatcaactgatctgtagatttga

SEQ ID NO: 2638432 - DNA, 25 bp, Homo sapien
caaagtacgcaatatggatttccaa

SEQ ID NO: 2638433 - DNA, 25 bp, Homo sapien
gatgccgtattattctcctgaccta

SEQ ID NO: 2638434 - DNA, 25 bp, Homo sapien
caataaccatggcttgtccacagaa

SEQ ID NO: 2638435 - DNA, 25 bp, Homo sapien
tgaacagtggtaaagtttcacaagt

SEQ ID NO: 2638436 - DNA, 25 bp, Homo sapien
tctatttcatgtgctatctcttctt

SEQ ID NO: 2638437 - DNA, 25 bp, Homo sapien
ggttgactctatttcatgtgctatc

SEQ ID NO: 2638438 - DNA, 25 bp, Homo sapien
ctgtggttgactctatttcatgtgc

SEQ ID NO: 2638439 - DNA, 25 bp, Homo sapien
ctttcagttccttactaccattagg

SEQ ID NO: 2638440 - DNA, 25 bp, Homo sapien
tataaaaaattcagccacagatttg

SEQ ID NO: 2638441 - DNA, 25 bp, Homo sapien
tttgggcctttgcttgaatggtgcc

SEQ ID NO: 2638442 - DNA, 25 bp, Homo sapien
tggcatcatccagtctcttcaacat

SEQ ID NO: 2638443 - DNA, 25 bp, Homo sapien
acagatttgggcctttgcttgaatg

SEQ ID NO: 2638444 - DNA, 25 bp, Homo sapien
tccttttgccctgatatgaaaactg

SEQ ID NO: 2638445 - DNA, 25 bp, Homo sapien
cttgaataagtagccttttccatcc

SEQ ID NO: 2638446 - DNA, 25 bp, Homo sapien
gatttctctacccaggcatgaagat

SEQ ID NO: 2638447 - DNA, 25 bp, Homo sapien
tctacccaggcatgaagatacttga

SEQ ID NO: 2638448 - DNA, 25 bp, Homo sapien
cttctaaatgcttgaaagcacaatg

SEQ ID NO: 2638449 - DNA, 25 bp, Homo sapien
tctaaatgcttgaaagcacaatgtc

SEQ ID NO: 2638450 - DNA, 25 bp, Homo sapien
ttctaaatgcttgaaagcacaatgt

SEQ ID NO: 2638451 - DNA, 25 bp, Homo sapien
tatagtgtaggatatagccaggaac

SEQ ID NO: 2638452 - DNA, 25 bp, Homo sapien
gaactaaggatcctcggttgactca

SEQ ID NO: 2638453 - DNA, 25 bp, Homo sapien
tatagccaggaactaaggatcctcg

SEQ ID NO: 2638454 - DNA, 25 bp, Homo sapien
tctacttggaccttgtatagtgtag

SEQ ID NO: 2638455 - DNA, 25 bp, Homo sapien
tcagttgggcctgtgtgtgtagttc

SEQ ID NO: 2638456 - DNA, 25 bp, Homo sapien
aatcagttgggcctgtgtgtgtagt

SEQ ID NO: 2638457 - DNA, 25 bp, Homo sapien
accatgtttcaggaagaatcagttg

SEQ ID NO: 2638458 - DNA, 25 bp, Homo sapien
atgagcttcagaccatgtttcagga

SEQ ID NO: 2638459 - DNA, 25 bp, Homo sapien
tggaacatgtgagcataaggttaat

SEQ ID NO: 2638460 - DNA, 25 bp, Homo sapien
catgtgagcataaggttaatatcat

SEQ ID NO: 2638461 - DNA, 25 bp, Homo sapien
tatcatcaagtaactggtgataagg

SEQ ID NO: 2638462 - DNA, 25 bp, Homo sapien
aatatcatcaagtaactggtgataa

SEQ ID NO: 2638463 - DNA, 25 bp, Homo sapien
tgcttctggtattcgatggtttttc

SEQ ID NO: 2638464 - DNA, 25 bp, Homo sapien
actgcttctggtattcgatggtttt

SEQ ID NO: 2638465 - DNA, 25 bp, Homo sapien
gcttctggtattcgatggtttttcc

SEQ ID NO: 2638466 - DNA, 25 bp, Homo sapien
tgttactgcttctggtattcgatgg

SEQ ID NO: 2638467 - DNA, 25 bp, Homo sapien
gtcctgcctgctacagaaagcgtag

SEQ ID NO: 2638468 - DNA, 25 bp, Homo sapien
tctctttatcgatgatgagcaatag

SEQ ID NO: 2638469 - DNA, 25 bp, Homo sapien
taaatattccccatggctgctacct

SEQ ID NO: 2638470 - DNA, 25 bp, Homo sapien
tacagaaagcgtagcagttttctct

SEQ ID NO: 2638471 - DNA, 25 bp, Homo sapien
taacgtctggatttcaaaatgaaaa

SEQ ID NO: 2638472 - DNA, 25 bp, Homo sapien
ttaacgtctggatttcaaaatgaaa

SEQ ID NO: 2638473 - DNA, 25 bp, Homo sapien
gctatgaagcttggtatctgctttg

SEQ ID NO: 2638474 - DNA, 25 bp, Homo sapien
tcagcacaggctccagttacagata

SEQ ID NO: 2638475 - DNA, 25 bp, Homo sapien
tgtgtgtcaggtcctccacttgttc

SEQ ID NO: 2638476 - DNA, 25 bp, Homo sapien
gagatcttggtgaactgaggtgaat

SEQ ID NO: 2638477 - DNA, 25 bp, Homo sapien
caggttggagcttggtgcccttttc

SEQ ID NO: 2638478 - DNA, 25 bp, Homo sapien
aggttggagcttggtgcccttttct

SEQ ID NO: 2638479 - DNA, 25 bp, Homo sapien
ccaggttggagcttggtgccctttt

SEQ ID NO: 2638480 - DNA, 25 bp, Homo sapien
gccaggttggagcttggtgcccttt

SEQ ID NO: 2638481 - DNA, 25 bp, Homo sapien
tgttaccagcaacaatgagagcgtg

SEQ ID NO: 2638482 - DNA, 25 bp, Homo sapien
accagcaacaatgagagcgtggggc

SEQ ID NO: 2638483 - DNA, 25 bp, Homo sapien
ctgttaccagcaacaatgagagcgt

SEQ ID NO: 2638484 - DNA, 25 bp, Homo sapien
ttaccagcaacaatgagagcgtggg

SEQ ID NO: 2638485 - DNA, 25 bp, Homo sapien
ccagtacatgtgaaaggactttagt

SEQ ID NO: 2638486 - DNA, 25 bp, Homo sapien
gtacatgtgaaaggactttagtgcc

SEQ ID NO: 2638487 - DNA, 25 bp, Homo sapien
gtgaaaggactttagtgcctccctc

SEQ ID NO: 2638488 - DNA, 25 bp, Homo sapien
catgtgaaaggactttagtgcctcc

SEQ ID NO: 2638489 - DNA, 25 bp, Homo sapien
cctgataaatcttgccacagacagc

SEQ ID NO: 2638490 - DNA, 25 bp, Homo sapien
gaaactcctacagcgccctgataaa

SEQ ID NO: 2638491 - DNA, 25 bp, Homo sapien
ttctttgtcagaaactcctacagcg

SEQ ID NO: 2638492 - DNA, 25 bp, Homo sapien
tacagcgccctgataaatcttgcca

SEQ ID NO: 2638493 - DNA, 25 bp, Homo sapien
acagcctgcatgattagggcttgga

SEQ ID NO: 2638494 - DNA, 25 bp, Homo sapien
cagcctgcatgattagggcttggaa

SEQ ID NO: 2638495 - DNA, 25 bp, Homo sapien
tgcttggtgctgtagcggttctctc

SEQ ID NO: 2638496 - DNA, 25 bp, Homo sapien
agcggttctctctacctggtgcctg

SEQ ID NO: 2638497 - DNA, 25 bp, Homo sapien
gagtggcttctaagtcagtggtggg

SEQ ID NO: 2638498 - DNA, 25 bp, Homo sapien
ttgtagtagtgccaaagcttttcct

SEQ ID NO: 2638499 - DNA, 25 bp, Homo sapien
tagccgtccacacccgaagagggtc

SEQ ID NO: 2638500 - DNA, 25 bp, Homo sapien
gtcctccctatggtggttactaatg

SEQ ID NO: 2638501 - DNA, 25 bp, Homo sapien
cttcaggtcccctttgtggcggtgc

SEQ ID NO: 2638502 - DNA, 25 bp, Homo sapien
tcaggtcccctttgtggcggtgcat

SEQ ID NO: 2638503 - DNA, 25 bp, Homo sapien
ttcaggtcccctttgtggcggtgca

SEQ ID NO: 2638504 - DNA, 25 bp, Homo sapien
tatgtagcagaggtttggtggtcac

SEQ ID NO: 2638505 - DNA, 25 bp, Homo sapien
tggtggtcacagctagaagctgacc

SEQ ID NO: 2638506 - DNA, 25 bp, Homo sapien
tctgtgacattatccaagaagaaga

SEQ ID NO: 2638507 - DNA, 25 bp, Homo sapien
taatgatttaacctcctcctgtaag

SEQ ID NO: 2638508 - DNA, 25 bp, Homo sapien
tgaaggtggataacttctctgatct

SEQ ID NO: 2638509 - DNA, 25 bp, Homo sapien
gcagaatcaaattgcagaggaatac

SEQ ID NO: 2638510 - DNA, 25 bp, Homo sapien
ttctctagggatgtgtttataaccc

SEQ ID NO: 2638511 - DNA, 25 bp, Homo sapien
tcttccaaatggctatgaaggtgga

SEQ ID NO: 2638512 - DNA, 25 bp, Homo sapien
ctttcaacagttgtgctttcagtgt

SEQ ID NO: 2638513 - DNA, 25 bp, Homo sapien
catctgtagatccagtgaggagaga

SEQ ID NO: 2638514 - DNA, 25 bp, Homo sapien
ttcatctgtagatccagtgaggaga

SEQ ID NO: 2638515 - DNA, 25 bp, Homo sapien
tttctttcaacagttgtgctttcag

SEQ ID NO: 2638516 - DNA, 25 bp, Homo sapien
atgtcattgtgcacaggatcttcca

SEQ ID NO: 2638517 - DNA, 25 bp, Homo sapien
tcctcttctatgtcattgtgcacag

SEQ ID NO: 2638518 - DNA, 25 bp, Homo sapien
ttgtgcacaggatcttccagctttt

SEQ ID NO: 2638519 - DNA, 25 bp, Homo sapien
cttctatgtcattgtgcacaggatc

SEQ ID NO: 2638520 - DNA, 25 bp, Homo sapien
tgatattgacccgttgtgtatttcc

SEQ ID NO: 2638521 - DNA, 25 bp, Homo sapien
tctggacttgatattgacccgttgt

SEQ ID NO: 2638522 - DNA, 25 bp, Homo sapien
gacttgatattgacccgttgtgtat

SEQ ID NO: 2638523 - DNA, 25 bp, Homo sapien
tattgacccgttgtgtatttccgta

SEQ ID NO: 2638524 - DNA, 25 bp, Homo sapien
tagtggtcgtgattcttgctccttg

SEQ ID NO: 2638525 - DNA, 25 bp, Homo sapien
gctacaggatagtggtcgtgattct

SEQ ID NO: 2638526 - DNA, 25 bp, Homo sapien
ccattggctttcagtggcggcggca

SEQ ID NO: 2638527 - DNA, 25 bp, Homo sapien
tggctgtaattcttgctacaggata

SEQ ID NO: 2638528 - DNA, 25 bp, Homo sapien
cctggcactgctcatagatagccat

SEQ ID NO: 2638529 - DNA, 25 bp, Homo sapien
cccctggcactgctcatagatagcc

SEQ ID NO: 2638530 - DNA, 25 bp, Homo sapien
cagcccctggcactgctcatagata

SEQ ID NO: 2638531 - DNA, 25 bp, Homo sapien
cctgtgcattctggcagcccctggc

SEQ ID NO: 2638532 - DNA, 25 bp, Homo sapien
tgccaaataaaagcggcacatttcc

SEQ ID NO: 2638533 - DNA, 25 bp, Homo sapien
gctgagttgcctcggaacacatcca

SEQ ID NO: 2638534 - DNA, 25 bp, Homo sapien
ctgccaaataaaagcggcacatttc

SEQ ID NO: 2638535 - DNA, 25 bp, Homo sapien
tgcacatgctgagttgcctcggaac

SEQ ID NO: 2638536 - DNA, 25 bp, Homo sapien
aagggtctggtttggaggagatttg

SEQ ID NO: 2638537 - DNA, 25 bp, Homo sapien
gggtctggtttggaggagatttgac

SEQ ID NO: 2638538 - DNA, 25 bp, Homo sapien
ggtctggtttggaggagatttgact

SEQ ID NO: 2638539 - DNA, 25 bp, Homo sapien
agggtctggtttggaggagatttga

SEQ ID NO: 2638540 - DNA, 25 bp, Homo sapien
gttttggctggtttataatctggct

SEQ ID NO: 2638541 - DNA, 25 bp, Homo sapien
tgcacattgacataatctccggtgg

SEQ ID NO: 2638542 - DNA, 25 bp, Homo sapien
cagcctccctgatgctttgtgccag

SEQ ID NO: 2638543 - DNA, 25 bp, Homo sapien
tgtgccagtttttaggcgctccaaa

SEQ ID NO: 2638544 - DNA, 25 bp, Homo sapien
tgggttagcatgaactgaccactgt

SEQ ID NO: 2638545 - DNA, 25 bp, Homo sapien
catgaactgaccactgtaacctgct

SEQ ID NO: 2638546 - DNA, 25 bp, Homo sapien
tagcatgaactgaccactgtaacct

SEQ ID NO: 2638547 - DNA, 25 bp, Homo sapien
ttctgggttagcatgaactgaccac

SEQ ID NO: 2638548 - DNA, 25 bp, Homo sapien
ggcaggggtgttccaccttccattc

SEQ ID NO: 2638549 - DNA, 25 bp, Homo sapien
agcccttttccgggccctgctgtgg

SEQ ID NO: 2638550 - DNA, 25 bp, Homo sapien
gtggtcaggttgctagtcatttcag

SEQ ID NO: 2638551 - DNA, 25 bp, Homo sapien
taccctgcgttgattacatttagag

SEQ ID NO: 2638552 - DNA, 25 bp, Homo sapien
taagtgattggattgacgtttgtat

SEQ ID NO: 2638553 - DNA, 25 bp, Homo sapien
agtgattggattgacgtttgtattc

SEQ ID NO: 2638554 - DNA, 25 bp, Homo sapien
tgattggattgacgtttgtattcat

SEQ ID NO: 2638555 - DNA, 25 bp, Homo sapien
caagtaagtgattggattgacgttt

SEQ ID NO: 2638556 - DNA, 25 bp, Homo sapien
tggcctacctcagttgctatcaggg

SEQ ID NO: 2638557 - DNA, 25 bp, Homo sapien
caggaggtaaccagtgcatgagaag

SEQ ID NO: 2638558 - DNA, 25 bp, Homo sapien
tgggcagagtatgtggagaactcct

SEQ ID NO: 2638559 - DNA, 25 bp, Homo sapien
tgaccctttctgtggatggctcagg

SEQ ID NO: 2638560 - DNA, 25 bp, Homo sapien
catgtgatagtttctgggagaagac

SEQ ID NO: 2638561 - DNA, 25 bp, Homo sapien
catgcatgtgatagtttctgggaga

SEQ ID NO: 2638562 - DNA, 25 bp, Homo sapien
tgccaaccatgcatgtgatagtttc

SEQ ID NO: 2638563 - DNA, 25 bp, Homo sapien
caaccatgcatgtgatagtttctgg

SEQ ID NO: 2638564 - DNA, 25 bp, Homo sapien
agctgcatggctatatctaatcctg

SEQ ID NO: 2638565 - DNA, 25 bp, Homo sapien
aagacgtcagcaaaggccattcgcg

SEQ ID NO: 2638566 - DNA, 25 bp, Homo sapien
gcaaaggccattcgcgtagtgcaac

SEQ ID NO: 2638567 - DNA, 25 bp, Homo sapien
tcctgtttcagaagacgtcagcaaa

SEQ ID NO: 2638568 - DNA, 25 bp, Homo sapien
tcaatgtcgtttttctgaggacaaa

SEQ ID NO: 2638569 - DNA, 25 bp, Homo sapien
tttctcaatgtcgtttttctgagga

SEQ ID NO: 2638570 - DNA, 25 bp, Homo sapien
tgtcgtttttctgaggacaaataaa

SEQ ID NO: 2638571 - DNA, 25 bp, Homo sapien
ctgtttctcaatgtcgtttttctga

SEQ ID NO: 2638572 - DNA, 25 bp, Homo sapien
aagagtctttaaggcacacacatct

SEQ ID NO: 2638573 - DNA, 25 bp, Homo sapien
catccctcgggctctcctctatcca

SEQ ID NO: 2638574 - DNA, 25 bp, Homo sapien
cctcgggctctcctctatccacaca

SEQ ID NO: 2638575 - DNA, 25 bp, Homo sapien
agtctttaaggcacacacatctgac

SEQ ID NO: 2638576 - DNA, 25 bp, Homo sapien
ccagtgcagcagttaatatctcatc

SEQ ID NO: 2638577 - DNA, 25 bp, Homo sapien
cagccaccccatccgggagggaggg

SEQ ID NO: 2638578 - DNA, 25 bp, Homo sapien
gaggagaccctctgcctggcaaccg

SEQ ID NO: 2638579 - DNA, 25 bp, Homo sapien
cgggagggaggggtgcctctgcccg

SEQ ID NO: 2638580 - DNA, 25 bp, Homo sapien
tctccgcccagcagccaccctgtct

SEQ ID NO: 2638581 - DNA, 25 bp, Homo sapien
tgtagacaccatttcggtgattttt

SEQ ID NO: 2638582 - DNA, 25 bp, Homo sapien
tctgagtagaggattgatagcatca

SEQ ID NO: 2638583 - DNA, 25 bp, Homo sapien
ttttttctgagtagaggattgatag

SEQ ID NO: 2638584 - DNA, 25 bp, Homo sapien
gtagaggattgatagcatcatagat

SEQ ID NO: 2638585 - DNA, 25 bp, Homo sapien
tgagccgataatgtaactggtccag

SEQ ID NO: 2638586 - DNA, 25 bp, Homo sapien
tccttgggagatatggagtggttcc

SEQ ID NO: 2638587 - DNA, 25 bp, Homo sapien
tagagagttcggcagcatagcagag

SEQ ID NO: 2638588 - DNA, 25 bp, Homo sapien
cagttgccttttggtcaaattccac

SEQ ID NO: 2638589 - DNA, 25 bp, Homo sapien
cttgttgcttgttcagagtctaggc

SEQ ID NO: 2638590 - DNA, 25 bp, Homo sapien
tgcctactatatcctgtgccctgtg

SEQ ID NO: 2638591 - DNA, 25 bp, Homo sapien
gagtctaggcaattttacatgggct

SEQ ID NO: 2638592 - DNA, 25 bp, Homo sapien
tctggagagaaactaacacctgtag

SEQ ID NO: 2638593 - DNA, 25 bp, Homo sapien
ttggcagttggttggagtttggcca

SEQ ID NO: 2638594 - DNA, 25 bp, Homo sapien
gcaggaaaggacagctgtttgttgt

SEQ ID NO: 2638595 - DNA, 25 bp, Homo sapien
ttggttggagtttggccatggcagg

SEQ ID NO: 2638596 - DNA, 25 bp, Homo sapien
caggaaaggacagctgtttgttgtg

SEQ ID NO: 2638597 - DNA, 25 bp, Homo sapien
tgctctgtcaacagctgacttagct

SEQ ID NO: 2638598 - DNA, 25 bp, Homo sapien
caagctgagtatcgctgaacttcaa

SEQ ID NO: 2638599 - DNA, 25 bp, Homo sapien
ctgacttagctgatttttgcctgtg

SEQ ID NO: 2638600 - DNA, 25 bp, Homo sapien
gatgactggattctcataatctgct

SEQ ID NO: 2638601 - DNA, 25 bp, Homo sapien
catccctgagatctgtgggaataac

SEQ ID NO: 2638602 - DNA, 25 bp, Homo sapien
ggagacaggcactgactgcttccag

SEQ ID NO: 2638603 - DNA, 25 bp, Homo sapien
gggaagcaacaatcagtgcactgaa

SEQ ID NO: 2638604 - DNA, 25 bp, Homo sapien
caagatcagagggactgtcttgtaa

SEQ ID NO: 2638605 - DNA, 25 bp, Homo sapien
aaggtctgaggcagggtgtgacaaa

SEQ ID NO: 2638606 - DNA, 25 bp, Homo sapien
ggggtaaggtgagcctgtggaggat

SEQ ID NO: 2638607 - DNA, 25 bp, Homo sapien
gtctgaggcagggtgtgacaaactg

SEQ ID NO: 2638608 - DNA, 25 bp, Homo sapien
ctgaggcagggtgtgacaaactgac

SEQ ID NO: 2638609 - DNA, 25 bp, Homo sapien
taatgcatatgtagtcgtaattgag

SEQ ID NO: 2638610 - DNA, 25 bp, Homo sapien
tagtcgtaattgagttctgacacgg

SEQ ID NO: 2638611 - DNA, 25 bp, Homo sapien
tctgacacggccttggatgtttctg

SEQ ID NO: 2638612 - DNA, 25 bp, Homo sapien
tctgtcctaaatagctgacattgca

SEQ ID NO: 2638613 - DNA, 25 bp, Homo sapien
ctggagctcagtttcatagattata

SEQ ID NO: 2638614 - DNA, 25 bp, Homo sapien
gaagcacgagtcctatagttggcgt

SEQ ID NO: 2638615 - DNA, 25 bp, Homo sapien
cagcgtacgagaagcacgagtccta

SEQ ID NO: 2638616 - DNA, 25 bp, Homo sapien
tcatagattatagcccagcgtacga

SEQ ID NO: 2638617 - DNA, 25 bp, Homo sapien
tccagagccagttagacttgttatg

SEQ ID NO: 2638618 - DNA, 25 bp, Homo sapien
tttccagagccagttagacttgtta

SEQ ID NO: 2638619 - DNA, 25 bp, Homo sapien
ccagagccagttagacttgttatga

SEQ ID NO: 2638620 - DNA, 25 bp, Homo sapien
agagccagttagacttgttatgagg

SEQ ID NO: 2638621 - DNA, 25 bp, Homo sapien
ttaatgtgtagaatatctcatctgt

SEQ ID NO: 2638622 - DNA, 25 bp, Homo sapien
ccagataagtagattaatgtgtaga

SEQ ID NO: 2638623 - DNA, 25 bp, Homo sapien
aaagtgattccagataagtagatta

SEQ ID NO: 2638624 - DNA, 25 bp, Homo sapien
gattccagataagtagattaatgtg

SEQ ID NO: 2638625 - DNA, 25 bp, Homo sapien
tgagattgccaagccgggaagagac

SEQ ID NO: 2638626 - DNA, 25 bp, Homo sapien
gtagcgccggcacagctgagattgc

SEQ ID NO: 2638627 - DNA, 25 bp, Homo sapien
tttcccctccgacaaggaagctgtg

SEQ ID NO: 2638628 - DNA, 25 bp, Homo sapien
ggtgtagctgcgttttccccagatc

SEQ ID NO: 2638629 - DNA, 25 bp, Homo sapien
acctggcttccttagaagtttccat

SEQ ID NO: 2638630 - DNA, 25 bp, Homo sapien
tcagcctggataatctatgttatct

SEQ ID NO: 2638631 - DNA, 25 bp, Homo sapien
ctcatatagtcaccgaaggcagcag

SEQ ID NO: 2638632 - DNA, 25 bp, Homo sapien
taacaattctaacaacctggcttcc

SEQ ID NO: 2638633 - DNA, 25 bp, Homo sapien
tgagaagcagggagtctgtgttgaa

SEQ ID NO: 2638634 - DNA, 25 bp, Homo sapien
gaagcagggagtctgtgttgaaaat

SEQ ID NO: 2638635 - DNA, 25 bp, Homo sapien
aagcagggagtctgtgttgaaaatt

SEQ ID NO: 2638636 - DNA, 25 bp, Homo sapien
agaagcagggagtctgtgttgaaaa

SEQ ID NO: 2638637 - DNA, 25 bp, Homo sapien
aatgaaatgacttgcaggcctcagt

SEQ ID NO: 2638638 - DNA, 25 bp, Homo sapien
ctgtcaacaaatggagatttgaaca

SEQ ID NO: 2638639 - DNA, 25 bp, Homo sapien
atgaaatgacttgcaggcctcagtt

SEQ ID NO: 2638640 - DNA, 25 bp, Homo sapien
gggacagtctgtaactcagttgtat

SEQ ID NO: 2638641 - DNA, 25 bp, Homo sapien
cacttgaatgactgcggatggttgc

SEQ ID NO: 2638642 - DNA, 25 bp, Homo sapien
agagaatgtacaaaagctgtgaaag

SEQ ID NO: 2638643 - DNA, 25 bp, Homo sapien
tttcttcggagttgtaggaggtgaa

SEQ ID NO: 2638644 - DNA, 25 bp, Homo sapien
tgggtgacccttgtataccatgagc

SEQ ID NO: 2638645 - DNA, 25 bp, Homo sapien
gaacctgctaatacaagtcctgatg

SEQ ID NO: 2638646 - DNA, 25 bp, Homo sapien
ggcttacgtaaatggcaaggccaga

SEQ ID NO: 2638647 - DNA, 25 bp, Homo sapien
tagatagggcctgatgtgatcacca

SEQ ID NO: 2638648 - DNA, 25 bp, Homo sapien
gaagatttcctgaacggccatccca

SEQ ID NO: 2638649 - DNA, 25 bp, Homo sapien
tactcaggagcgtgcaaagcaaaca

SEQ ID NO: 2638650 - DNA, 25 bp, Homo sapien
gatagatctacagtttccctctcgg

SEQ ID NO: 2638651 - DNA, 25 bp, Homo sapien
tcctaaggctgcaatgtgtcagaaa

SEQ ID NO: 2638652 - DNA, 25 bp, Homo sapien
catttgagtgggaccaagaagagca

SEQ ID NO: 2638653 - DNA, 25 bp, Homo sapien
aattctcatccataacggagtgtgg

SEQ ID NO: 2638654 - DNA, 25 bp, Homo sapien
tcgagcagaacttcccatttgagtg

SEQ ID NO: 2638655 - DNA, 25 bp, Homo sapien
tttgggcagttaggaaaatcagttc

SEQ ID NO: 2638656 - DNA, 25 bp, Homo sapien
ggtgttgatggaaataccgtgcttc

SEQ ID NO: 2638657 - DNA, 25 bp, Homo sapien
ctagtaagtgaatggaagtcaggcg

SEQ ID NO: 2638658 - DNA, 25 bp, Homo sapien
caaacttatgtgtatgtgagggcaa

SEQ ID NO: 2638659 - DNA, 25 bp, Homo sapien
tagactgtgatctcctagaggaaca

SEQ ID NO: 2638660 - DNA, 25 bp, Homo sapien
ccaagcatcgtgtgtagaggataca

SEQ ID NO: 2638661 - DNA, 25 bp, Homo sapien
gggaccttgcttcctacgaggcttg

SEQ ID NO: 2638662 - DNA, 25 bp, Homo sapien
caaaggaggccattagcaaagtcca

SEQ ID NO: 2638663 - DNA, 25 bp, Homo sapien
caacatcaggttattgggcagcagg

SEQ ID NO: 2638664 - DNA, 25 bp, Homo sapien
tttgactatttcttcttttagctcc

SEQ ID NO: 2638665 - DNA, 25 bp, Homo sapien
catttagaaaattttgactatttct

SEQ ID NO: 2638666 - DNA, 25 bp, Homo sapien
ctcatttagaaaattttgactattt

SEQ ID NO: 2638667 - DNA, 25 bp, Homo sapien
attttgactatttcttcttttagct

SEQ ID NO: 2638668 - DNA, 25 bp, Homo sapien
catctcagagggctgtaacaataca

SEQ ID NO: 2638669 - DNA, 25 bp, Homo sapien
tcaacctgcatgaagtacaaggcag

SEQ ID NO: 2638670 - DNA, 25 bp, Homo sapien
aggcaggtcgtgtcttctttcattc

SEQ ID NO: 2638671 - DNA, 25 bp, Homo sapien
tgtgaaactcctggaaggcaggtcg

SEQ ID NO: 2638672 - DNA, 25 bp, Homo sapien
cctctcctctccacagccatctcct

SEQ ID NO: 2638673 - DNA, 25 bp, Homo sapien
agccatctcctccattagaaatgct

SEQ ID NO: 2638674 - DNA, 25 bp, Homo sapien
tctccacagccatctcctccattag

SEQ ID NO: 2638675 - DNA, 25 bp, Homo sapien
tcctccattagaaatgcttttccct

SEQ ID NO: 2638676 - DNA, 25 bp, Homo sapien
tggtgagggtccttcatagtgaaag

SEQ ID NO: 2638677 - DNA, 25 bp, Homo sapien
ccttcatagtgaaagggtggaaggt

SEQ ID NO: 2638678 - DNA, 25 bp, Homo sapien
ggtccttcatagtgaaagggtggaa

SEQ ID NO: 2638679 - DNA, 25 bp, Homo sapien
tgagggtccttcatagtgaaagggt

SEQ ID NO: 2638680 - DNA, 25 bp, Homo sapien
cccaggagcttcccaatacatatgc

SEQ ID NO: 2638681 - DNA, 25 bp, Homo sapien
ggagcttcccaatacatatgcaatc

SEQ ID NO: 2638682 - DNA, 25 bp, Homo sapien
gagcttcccaatacatatgcaatct

SEQ ID NO: 2638683 - DNA, 25 bp, Homo sapien
caggagcttcccaatacatatgcaa

SEQ ID NO: 2638684 - DNA, 25 bp, Homo sapien
agcatccctttaccgcatttgacct

SEQ ID NO: 2638685 - DNA, 25 bp, Homo sapien
gcatttgacctcacaggaaagtgga

SEQ ID NO: 2638686 - DNA, 25 bp, Homo sapien
ccaccccttcttcggaatcacagga

SEQ ID NO: 2638687 - DNA, 25 bp, Homo sapien
ctttaccgcatttgacctcacagga

SEQ ID NO: 2638688 - DNA, 25 bp, Homo sapien
cacacttctctggattaattaatag

SEQ ID NO: 2638689 - DNA, 25 bp, Homo sapien
gcttcacagaatattttatagcaac

SEQ ID NO: 2638690 - DNA, 25 bp, Homo sapien
aataagtgaaaatgcttcacagaat

SEQ ID NO: 2638691 - DNA, 25 bp, Homo sapien
ttttatagcaacacacttctctgga

SEQ ID NO: 2638692 - DNA, 25 bp, Homo sapien
atgatgattttctctagttcttcaa

SEQ ID NO: 2638693 - DNA, 25 bp, Homo sapien
tgatgattttctctagttcttcaaa

SEQ ID NO: 2638694 - DNA, 25 bp, Homo sapien
gccatcctgggaaatcaatgccagc

SEQ ID NO: 2638695 - DNA, 25 bp, Homo sapien
agaatccctgcacggactcctctgg

SEQ ID NO: 2638696 - DNA, 25 bp, Homo sapien
aagacatcagtacattttgttagct

SEQ ID NO: 2638697 - DNA, 25 bp, Homo sapien
tgggaaatcaatgccagcaaatccc

SEQ ID NO: 2638698 - DNA, 25 bp, Homo sapien
ccactatcttcatgtgatacttgag

SEQ ID NO: 2638699 - DNA, 25 bp, Homo sapien
ttcatgtgatacttgagggagctgc

SEQ ID NO: 2638700 - DNA, 25 bp, Homo sapien
tgatacttgagggagctgcatcatc

SEQ ID NO: 2638701 - DNA, 25 bp, Homo sapien
ctatcttcatgtgatacttgaggga

SEQ ID NO: 2638702 - DNA, 25 bp, Homo sapien
cgcatctggtcgtaggcaggtgtct

SEQ ID NO: 2638703 - DNA, 25 bp, Homo sapien
tgagtccaggttccagggagttagc

SEQ ID NO: 2638704 - DNA, 25 bp, Homo sapien
ggtccttggacctcatacattgctg

SEQ ID NO: 2638705 - DNA, 25 bp, Homo sapien
tagctaatattggagatgacgcatc

SEQ ID NO: 2638706 - DNA, 25 bp, Homo sapien
tacactctaccagcaacagatgaca

SEQ ID NO: 2638707 - DNA, 25 bp, Homo sapien
cagttttgtaattgattgagaggcc

SEQ ID NO: 2638708 - DNA, 25 bp, Homo sapien
gattagtatcgtggaacagggcaaa

SEQ ID NO: 2638709 - DNA, 25 bp, Homo sapien
tgacattgcactggctgaccgagga

SEQ ID NO: 2638710 - DNA, 25 bp, Homo sapien
aatacagtggagattcagagaacat

SEQ ID NO: 2638711 - DNA, 25 bp, Homo sapien
ctgcagtagaatacagtggagattc

SEQ ID NO: 2638712 - DNA, 25 bp, Homo sapien
agaatacagtggagattcagagaac

SEQ ID NO: 2638713 - DNA, 25 bp, Homo sapien
gtagaatacagtggagattcagaga

SEQ ID NO: 2638714 - DNA, 25 bp, Homo sapien
cacagacattagttggctccacttc

SEQ ID NO: 2638715 - DNA, 25 bp, Homo sapien
caaatggggtgaatgtagaaacatc

SEQ ID NO: 2638716 - DNA, 25 bp, Homo sapien
tctgtcaaagcatgagggagcacac

SEQ ID NO: 2638717 - DNA, 25 bp, Homo sapien
agaacatttgagctagtggtctgct

SEQ ID NO: 2638718 - DNA, 25 bp, Homo sapien
taaagtctgacatggctctctgtaa

SEQ ID NO: 2638719 - DNA, 25 bp, Homo sapien
aatgctaatacttcaatataaagtc

SEQ ID NO: 2638720 - DNA, 25 bp, Homo sapien
gtctgacatggctctctgtaaagga

SEQ ID NO: 2638721 - DNA, 25 bp, Homo sapien
gtggtccaggtaatgctaatacttc

SEQ ID NO: 2638722 - DNA, 25 bp, Homo sapien
tgtgggcttgatctaagcaaatctc

SEQ ID NO: 2638723 - DNA, 25 bp, Homo sapien
cactaagtcttgtcgctgacaggag

SEQ ID NO: 2638724 - DNA, 25 bp, Homo sapien
tctggtcttctgtccgatgatctgg

SEQ ID NO: 2638725 - DNA, 25 bp, Homo sapien
cactacatccttagttgtgctcagg

SEQ ID NO: 2638726 - DNA, 25 bp, Homo sapien
gcagcggatcttctggaccactgaa

SEQ ID NO: 2638727 - DNA, 25 bp, Homo sapien
agcctgagcttcaatgaattgttcc

SEQ ID NO: 2638728 - DNA, 25 bp, Homo sapien
cttcaatgaattgttccccagggtg

SEQ ID NO: 2638729 - DNA, 25 bp, Homo sapien
ccactgcttggcgtgggcagcggat

SEQ ID NO: 2638730 - DNA, 25 bp, Homo sapien
ttgcttttgagtctaccttgacctc

SEQ ID NO: 2638731 - DNA, 25 bp, Homo sapien
gagtctaccttgacctcaaataagg

SEQ ID NO: 2638732 - DNA, 25 bp, Homo sapien
tgacctcaaataaggtctcctcctc

SEQ ID NO: 2638733 - DNA, 25 bp, Homo sapien
taccttgacctcaaataaggtctcc

SEQ ID NO: 2638734 - DNA, 25 bp, Homo sapien
tcacatgaagttgacaacgtgtggg

SEQ ID NO: 2638735 - DNA, 25 bp, Homo sapien
caacgtgtgggaacatgtcatttcc

SEQ ID NO: 2638736 - DNA, 25 bp, Homo sapien
agttgacaacgtgtgggaacatgtc

SEQ ID NO: 2638737 - DNA, 25 bp, Homo sapien
ctgggtcacatgaagttgacaacgt

SEQ ID NO: 2638738 - DNA, 25 bp, Homo sapien
tcatcacttatcctttccagaatcc

SEQ ID NO: 2638739 - DNA, 25 bp, Homo sapien
gagtcctccccatcacttatgctct

SEQ ID NO: 2638740 - DNA, 25 bp, Homo sapien
tccacatggtccttgcagggagctg

SEQ ID NO: 2638741 - DNA, 25 bp, Homo sapien
ggtttccacatggtccttgcaggga

SEQ ID NO: 2638742 - DNA, 25 bp, Homo sapien
gccgatttggggtgaggagtggctt

SEQ ID NO: 2638743 - DNA, 25 bp, Homo sapien
cagccaagcattgccatcgccgtgg

SEQ ID NO: 2638744 - DNA, 25 bp, Homo sapien
atgatgcctggcagccgatttgggg

SEQ ID NO: 2638745 - DNA, 25 bp, Homo sapien
gtgctccagccaagcattgccatcg

SEQ ID NO: 2638746 - DNA, 25 bp, Homo sapien
gcagccgcctttccccagcgtgcct

SEQ ID NO: 2638747 - DNA, 25 bp, Homo sapien
gctgctcagtttgcagcagccgcct

SEQ ID NO: 2638748 - DNA, 25 bp, Homo sapien
tgctcagtttgcagcagccgccttt

SEQ ID NO: 2638749 - DNA, 25 bp, Homo sapien
tggtggtggcatcaatgatcctagc

SEQ ID NO: 2638750 - DNA, 25 bp, Homo sapien
catgggcccttgaagcaaggcctgt

SEQ ID NO: 2638751 - DNA, 25 bp, Homo sapien
ccatgggcccttgaagcaaggcctg

SEQ ID NO: 2638752 - DNA, 25 bp, Homo sapien
ggccatgggcccttgaagcaaggcc

SEQ ID NO: 2638753 - DNA, 25 bp, Homo sapien
gaggccatgggcccttgaagcaagg

SEQ ID NO: 2638754 - DNA, 25 bp, Homo sapien
gaaaatagggcccaactgttctgat

SEQ ID NO: 2638755 - DNA, 25 bp, Homo sapien
tcacagagaataatacttagaggta

SEQ ID NO: 2638756 - DNA, 25 bp, Homo sapien
tacttagaggtaattactccattaa

SEQ ID NO: 2638757 - DNA, 25 bp, Homo sapien
ggcccaactgttctgatttgaagca

SEQ ID NO: 2638758 - DNA, 25 bp, Homo sapien
gagtttataatcagagtgaattaag

SEQ ID NO: 2638759 - DNA, 25 bp, Homo sapien
ggttggtcagtgatcaaataaagag

SEQ ID NO: 2638760 - DNA, 25 bp, Homo sapien
tgagctaattgttatctcggtcaac

SEQ ID NO: 2638761 - DNA, 25 bp, Homo sapien
aacttgtctgttacatatgtgagct

SEQ ID NO: 2638762 - DNA, 25 bp, Homo sapien
ctttgggccagacacaagtggatgt

SEQ ID NO: 2638763 - DNA, 25 bp, Homo sapien
gaaaaggccatttgatcatgtcaca

SEQ ID NO: 2638764 - DNA, 25 bp, Homo sapien
tggctacactgttcctcatgggacg

SEQ ID NO: 2638765 - DNA, 25 bp, Homo sapien
ttttcctcaaggtacaggcagctcc

SEQ ID NO: 2638766 - DNA, 25 bp, Homo sapien
ccgtgttggtgtgctacaggatttt

SEQ ID NO: 2638767 - DNA, 25 bp, Homo sapien
gtgttggtgtgctacaggattttta

SEQ ID NO: 2638768 - DNA, 25 bp, Homo sapien
cgtgttggtgtgctacaggattttt

SEQ ID NO: 2638769 - DNA, 25 bp, Homo sapien
tcagcgcgcggacagagtgcttgtc

SEQ ID NO: 2638770 - DNA, 25 bp, Homo sapien
tgccttttagtggacgagcctcaaa

SEQ ID NO: 2638771 - DNA, 25 bp, Homo sapien
gatggcgcctctctgtttaaagacc

SEQ ID NO: 2638772 - DNA, 25 bp, Homo sapien
gcttgtcagtcttcgcttccgcagg

SEQ ID NO: 2638773 - DNA, 25 bp, Homo sapien
tctccaatgttttccgctcgaaata

SEQ ID NO: 2638774 - DNA, 25 bp, Homo sapien
caattccaagcctttggtgataaag

SEQ ID NO: 2638775 - DNA, 25 bp, Homo sapien
aaggctattttctcaccgtggtagg

SEQ ID NO: 2638776 - DNA, 25 bp, Homo sapien
ctttgtggcctgctgcatcgaagag

SEQ ID NO: 2638777 - DNA, 25 bp, Homo sapien
tctggttaaggtgttacagtaggta

SEQ ID NO: 2638778 - DNA, 25 bp, Homo sapien
agtatgccaacgtataaaaccccag

SEQ ID NO: 2638779 - DNA, 25 bp, Homo sapien
caggagagaagtaatgcaaagcccc

SEQ ID NO: 2638780 - DNA, 25 bp, Homo sapien
taatagaaaacacttgaactgttga

SEQ ID NO: 2638781 - DNA, 25 bp, Homo sapien
agtttcctgcctggggatcccccat

SEQ ID NO: 2638782 - DNA, 25 bp, Homo sapien
cctcagcccaccttcaggggagttt

SEQ ID NO: 2638783 - DNA, 25 bp, Homo sapien
gagtttcctgcctggggatccccca

SEQ ID NO: 2638784 - DNA, 25 bp, Homo sapien
tgaggctcagccctagccctcagcc

SEQ ID NO: 2638785 - DNA, 25 bp, Homo sapien
catcagggccatgattgtgaagaag

SEQ ID NO: 2638786 - DNA, 25 bp, Homo sapien
cctgctcaagtgaacagcggaggcg

SEQ ID NO: 2638787 - DNA, 25 bp, Homo sapien
gtcctgctcaagtgaacagcggagg

SEQ ID NO: 2638788 - DNA, 25 bp, Homo sapien
ctccatcagggccatgattgtgaag

SEQ ID NO: 2638789 - DNA, 25 bp, Homo sapien
tctggtgcgggctcctgcgctttca

SEQ ID NO: 2638790 - DNA, 25 bp, Homo sapien
ttttggctctggtgcgggctcctgc

SEQ ID NO: 2638791 - DNA, 25 bp, Homo sapien
ccagttttggctctggtgcgggctc

SEQ ID NO: 2638792 - DNA, 25 bp, Homo sapien
gtgcgggctcctgcgctttcagccg

SEQ ID NO: 2638793 - DNA, 25 bp, Homo sapien
gtcaaggcgcagtactaggagatcg

SEQ ID NO: 2638794 - DNA, 25 bp, Homo sapien
tggacatagtgtcatcgctgaggtc

SEQ ID NO: 2638795 - DNA, 25 bp, Homo sapien
tatgaggagctccagacgctgtctg

SEQ ID NO: 2638796 - DNA, 25 bp, Homo sapien
gccatcagagatgccgagtagcgtg

SEQ ID NO: 2638797 - DNA, 25 bp, Homo sapien
tggaaggcatcaccgctgtcacggt

SEQ ID NO: 2638798 - DNA, 25 bp, Homo sapien
tcgagcttctcttaagtgggcagca

SEQ ID NO: 2638799 - DNA, 25 bp, Homo sapien
accagagcctgctgaactcccttaa

SEQ ID NO: 2638800 - DNA, 25 bp, Homo sapien
cagtggcatggaaggcatcaccgct

SEQ ID NO: 2638801 - DNA, 25 bp, Homo sapien
tgacccagaagtcctacaaggtgtc

SEQ ID NO: 2638802 - DNA, 25 bp, Homo sapien
caggatgacccagaagtcctacaag

SEQ ID NO: 2638803 - DNA, 25 bp, Homo sapien
cccagaagtcctacaaggtgtccac

SEQ ID NO: 2638804 - DNA, 25 bp, Homo sapien
tcaggatgacccagaagtcctacaa

SEQ ID NO: 2638805 - DNA, 25 bp, Homo sapien
gggtttgcttacctaacaagcaaca

SEQ ID NO: 2638806 - DNA, 25 bp, Homo sapien
ccttgagggcctatatctatattat

SEQ ID NO: 2638807 - DNA, 25 bp, Homo sapien
tcatcccacttttcaggacttaatt

SEQ ID NO: 2638808 - DNA, 25 bp, Homo sapien
ataaatctctatgaatccttgaggg

SEQ ID NO: 2638809 - DNA, 25 bp, Homo sapien
gattttacttgattacagcatgaga

SEQ ID NO: 2638810 - DNA, 25 bp, Homo sapien
cccagttaattttgaacacacagag

SEQ ID NO: 2638811 - DNA, 25 bp, Homo sapien
gtttacacttaccagattcataagg

SEQ ID NO: 2638812 - DNA, 25 bp, Homo sapien
ctattagtcagtagagttttgtcca

SEQ ID NO: 2638813 - DNA, 25 bp, Homo sapien
tggtaccgtgcttacaccaaaggtc

SEQ ID NO: 2638814 - DNA, 25 bp, Homo sapien
gtaccgtgcttacaccaaaggtcag

SEQ ID NO: 2638815 - DNA, 25 bp, Homo sapien
taccgtgcttacaccaaaggtcaga

SEQ ID NO: 2638816 - DNA, 25 bp, Homo sapien
ggtaccgtgcttacaccaaaggtca

SEQ ID NO: 2638817 - DNA, 25 bp, Homo sapien
ctttgcgtgcatcattatgagttac

SEQ ID NO: 2638818 - DNA, 25 bp, Homo sapien
tattgtcgccatccacataagccag

SEQ ID NO: 2638819 - DNA, 25 bp, Homo sapien
taggtccagtttgttattgtcgcca

SEQ ID NO: 2638820 - DNA, 25 bp, Homo sapien
gattgcaagtatcagtttccagtct

SEQ ID NO: 2638821 - DNA, 25 bp, Homo sapien
ctagtaaacactgactactcctacc

SEQ ID NO: 2638822 - DNA, 25 bp, Homo sapien
aaccgagcccccttcgatcttacag

SEQ ID NO: 2638823 - DNA, 25 bp, Homo sapien
tctagtaaacactgactactcctac

SEQ ID NO: 2638824 - DNA, 25 bp, Homo sapien
taaccgagcccccttcgatcttaca

SEQ ID NO: 2638825 - DNA, 25 bp, Homo sapien
ccttcatgtattccatcataccatc

SEQ ID NO: 2638826 - DNA, 25 bp, Homo sapien
tattccatcataccatcatgccgtg

SEQ ID NO: 2638827 - DNA, 25 bp, Homo sapien
catcatgccgtggacctggtggttt

SEQ ID NO: 2638828 - DNA, 25 bp, Homo sapien
tgttctgcgcaagaaaaatagccaa

SEQ ID NO: 2638829 - DNA, 25 bp, Homo sapien
ctttcaccaccctctgggctgtgat

SEQ ID NO: 2638830 - DNA, 25 bp, Homo sapien
ctctcggggaggctttcaccaccct

SEQ ID NO: 2638831 - DNA, 25 bp, Homo sapien
gctttcaccaccctctgggctgtga

SEQ ID NO: 2638832 - DNA, 25 bp, Homo sapien
ggtttaaatgttggcatgtgatgca

SEQ ID NO: 2638833 - DNA, 25 bp, Homo sapien
ggtgtatgagaatgtgctatttgga

SEQ ID NO: 2638834 - DNA, 25 bp, Homo sapien
aataaaggtgtatgagaatgtgcta

SEQ ID NO: 2638835 - DNA, 25 bp, Homo sapien
gttgctgttttcagtgcgtggttta

SEQ ID NO: 2638836 - DNA, 25 bp, Homo sapien
gtttatacttgaaatgacactgcag

SEQ ID NO: 2638837 - DNA, 25 bp, Homo sapien
tgcagagtaatctctgtgtcatggc

SEQ ID NO: 2638838 - DNA, 25 bp, Homo sapien
ggctacagccaacattgtctctcaa

SEQ ID NO: 2638839 - DNA, 25 bp, Homo sapien
tcttccatgtgagctacccactctt

SEQ ID NO: 2638840 - DNA, 25 bp, Homo sapien
gaaatggagcatttggtctgtccct

SEQ ID NO: 2638841 - DNA, 25 bp, Homo sapien
aataatattgtgtcttgcttagcac

SEQ ID NO: 2638842 - DNA, 25 bp, Homo sapien
tgcagtctgtgtgaactgtttgcat

SEQ ID NO: 2638843 - DNA, 25 bp, Homo sapien
cattgtagaaatctgagtaggtgcc

SEQ ID NO: 2638844 - DNA, 25 bp, Homo sapien
tagaacatttgtatgtagcccttcc

SEQ ID NO: 2638845 - DNA, 25 bp, Homo sapien
gcccttccttatttggttgcctctg

SEQ ID NO: 2638846 - DNA, 25 bp, Homo sapien
gtatttgcagctgctaccaatacca

SEQ ID NO: 2638847 - DNA, 25 bp, Homo sapien
cttccttatttggttgcctctgtga

SEQ ID NO: 2638848 - DNA, 25 bp, Homo sapien
gcttctcaggctcttttgcatcccc

SEQ ID NO: 2638849 - DNA, 25 bp, Homo sapien
atcaatcctgttgtaccattcacca

SEQ ID NO: 2638850 - DNA, 25 bp, Homo sapien
tgttcaccagtgtatggagtttcca

SEQ ID NO: 2638851 - DNA, 25 bp, Homo sapien
tatctgttcaccagtgtatggagtt

SEQ ID NO: 2638852 - DNA, 25 bp, Homo sapien
tcaatcctgttgtaccattcaccac

SEQ ID NO: 2638853 - DNA, 25 bp, Homo sapien
tcttttatcattttatgaatacatg

SEQ ID NO: 2638854 - DNA, 25 bp, Homo sapien
cttttatcattttatgaatacatgt

SEQ ID NO: 2638855 - DNA, 25 bp, Homo sapien
cggccccattttattcttttatcat

SEQ ID NO: 2638856 - DNA, 25 bp, Homo sapien
catagggcttagtgtggtgttaata

SEQ ID NO: 2638857 - DNA, 25 bp, Homo sapien
gggcttagtgtggtgttaataaatg

SEQ ID NO: 2638858 - DNA, 25 bp, Homo sapien
cccagcatagggcttagtgtggtgt

SEQ ID NO: 2638859 - DNA, 25 bp, Homo sapien
cagcatagggcttagtgtggtgtta

SEQ ID NO: 2638860 - DNA, 25 bp, Homo sapien
tccagttctcttgtatccccagtct

SEQ ID NO: 2638861 - DNA, 25 bp, Homo sapien
gagactggtgttccattgtgttcca

SEQ ID NO: 2638862 - DNA, 25 bp, Homo sapien
attctttgagactggtgttccattg

SEQ ID NO: 2638863 - DNA, 25 bp, Homo sapien
tctttgagactggtgttccattgtg

SEQ ID NO: 2638864 - DNA, 25 bp, Homo sapien
acagagcctagatgggggtgtgcct

SEQ ID NO: 2638865 - DNA, 25 bp, Homo sapien
aattgaggacttggtccagcacaga

SEQ ID NO: 2638866 - DNA, 25 bp, Homo sapien
ttgaggacttggtccagcacagagc

SEQ ID NO: 2638867 - DNA, 25 bp, Homo sapien
ggaaattgaggacttggtccagcac

SEQ ID NO: 2638868 - DNA, 25 bp, Homo sapien
acaaaggtcctggtgagaggtgctt

SEQ ID NO: 2638869 - DNA, 25 bp, Homo sapien
gggtcctgttaatgaagcccacaag

SEQ ID NO: 2638870 - DNA, 25 bp, Homo sapien
ggattcacattgctgcctcgacaca

SEQ ID NO: 2638871 - DNA, 25 bp, Homo sapien
taacaaattgctagagggttctgaa

SEQ ID NO: 2638872 - DNA, 25 bp, Homo sapien
ctttttgtaccttcttcaggcagac

SEQ ID NO: 2638873 - DNA, 25 bp, Homo sapien
tttgtaccttcttcaggcagacagt

SEQ ID NO: 2638874 - DNA, 25 bp, Homo sapien
ctgtctttttgtaccttcttcaggc

SEQ ID NO: 2638875 - DNA, 25 bp, Homo sapien
gtctttttgtaccttcttcaggcag

SEQ ID NO: 2638876 - DNA, 25 bp, Homo sapien
gcccccacccggcagcatcccgaag

SEQ ID NO: 2638877 - DNA, 25 bp, Homo sapien
aaggtcgggcccggtgggcgcgctg

SEQ ID NO: 2638878 - DNA, 25 bp, Homo sapien
ccccacccggcagcatcccgaaggg

SEQ ID NO: 2638879 - DNA, 25 bp, Homo sapien
gggcgcgctgcggagcggagcctgg

SEQ ID NO: 2638880 - DNA, 25 bp, Homo sapien
gatggcatctgctctcggaaagaaa

SEQ ID NO: 2638881 - DNA, 25 bp, Homo sapien
tgctatgtcagcctggagatgtccc

SEQ ID NO: 2638882 - DNA, 25 bp, Homo sapien
gtcacgcatgacgacaatttccact

SEQ ID NO: 2638883 - DNA, 25 bp, Homo sapien
gaaagaaaggtcatcggtgccacga

SEQ ID NO: 2638884 - DNA, 25 bp, Homo sapien
tattcaactggtatttgtcaaccct

SEQ ID NO: 2638885 - DNA, 25 bp, Homo sapien
tcaaggttactaattcaggcctgac

SEQ ID NO: 2638886 - DNA, 25 bp, Homo sapien
gaaatatgggaggcttccacttgaa

SEQ ID NO: 2638887 - DNA, 25 bp, Homo sapien
tgccgggcctgacttcgacttctct

SEQ ID NO: 2638888 - DNA, 25 bp, Homo sapien
ctcaagtccctttcccttgcaactc

SEQ ID NO: 2638889 - DNA, 25 bp, Homo sapien
caagtccctttcccttgcaactctt

SEQ ID NO: 2638890 - DNA, 25 bp, Homo sapien
tcaagtccctttcccttgcaactct

SEQ ID NO: 2638891 - DNA, 25 bp, Homo sapien
tactgcacatctggactactaaaat

SEQ ID NO: 2638892 - DNA, 25 bp, Homo sapien
actgcacatctggactactaaaatc

SEQ ID NO: 2638893 - DNA, 25 bp, Homo sapien
ttactgcacatctggactactaaaa

SEQ ID NO: 2638894 - DNA, 25 bp, Homo sapien
tttactgcacatctggactactaaa

SEQ ID NO: 2638895 - DNA, 25 bp, Homo sapien
ctggcatgttcacatcaagctcatt

SEQ ID NO: 2638896 - DNA, 25 bp, Homo sapien
gtagagatcatcctgatgttcacag

SEQ ID NO: 2638897 - DNA, 25 bp, Homo sapien
cagatacagtgtggagactgtacag

SEQ ID NO: 2638898 - DNA, 25 bp, Homo sapien
gactgtacagtggtatcctcatgac

SEQ ID NO: 2638899 - DNA, 25 bp, Homo sapien
cagggtcacaccacaggaacattag

SEQ ID NO: 2638900 - DNA, 25 bp, Homo sapien
tccccaaagggtgatgatcctaagt

SEQ ID NO: 2638901 - DNA, 25 bp, Homo sapien
ccagagctggcacttaagactttcc

SEQ ID NO: 2638902 - DNA, 25 bp, Homo sapien
ttaaggaatccaaaagcatcacggt

SEQ ID NO: 2638903 - DNA, 25 bp, Homo sapien
cccaccgaggcggagaagtcaggtc

SEQ ID NO: 2638904 - DNA, 25 bp, Homo sapien
cagcccaccgaggcggagaagtcag

SEQ ID NO: 2638905 - DNA, 25 bp, Homo sapien
gcggagaagtcaggtcggcctccat

SEQ ID NO: 2638906 - DNA, 25 bp, Homo sapien
gagaagtcaggtcggcctccatcct

SEQ ID NO: 2638907 - DNA, 25 bp, Homo sapien
tgccagcagcgggacccgcagtagg

SEQ ID NO: 2638908 - DNA, 25 bp, Homo sapien
ctgccagcagcgggacccgcagtag

SEQ ID NO: 2638909 - DNA, 25 bp, Homo sapien
gccgtccacccagtttccagcgctg

SEQ ID NO: 2638910 - DNA, 25 bp, Homo sapien
cacccagtttccagcgctgccagca

SEQ ID NO: 2638911 - DNA, 25 bp, Homo sapien
tatttgttcccgaattggtccgtgc

SEQ ID NO: 2638912 - DNA, 25 bp, Homo sapien
gaattggtccgtgcccacgtgctcc

SEQ ID NO: 2638913 - DNA, 25 bp, Homo sapien
tcccttgacagcgatctccacaagg

SEQ ID NO: 2638914 - DNA, 25 bp, Homo sapien
ggaacaaatcctgagaccaacccat

SEQ ID NO: 2638915 - DNA, 25 bp, Homo sapien
gcaatcgctgcccacgccgccacct

SEQ ID NO: 2638916 - DNA, 25 bp, Homo sapien
gcaatcactgaccacgcaatcgctg

SEQ ID NO: 2638917 - DNA, 25 bp, Homo sapien
ctcgcaatcactgaccacgcaatcg

SEQ ID NO: 2638918 - DNA, 25 bp, Homo sapien
aatcgctgcccacgccgccacctca

SEQ ID NO: 2638919 - DNA, 25 bp, Homo sapien
aagtcttggtagtaaggaaggcgca

SEQ ID NO: 2638920 - DNA, 25 bp, Homo sapien
acctacttctgacaagtcttggtag

SEQ ID NO: 2638921 - DNA, 25 bp, Homo sapien
ctgacaagtcttggtagtaaggaag

SEQ ID NO: 2638922 - DNA, 25 bp, Homo sapien
ccttgtggggatatggacctacttc

SEQ ID NO: 2638923 - DNA, 25 bp, Homo sapien
tatgaatcaaaggtatgttatacaa

SEQ ID NO: 2638924 - DNA, 25 bp, Homo sapien
tatacaaagagagctcaataaagtt

SEQ ID NO: 2638925 - DNA, 25 bp, Homo sapien
cttccagtttatgaatcaaaggtat

SEQ ID NO: 2638926 - DNA, 25 bp, Homo sapien
ggtatgttatacaaagagagctcaa

SEQ ID NO: 2638927 - DNA, 25 bp, Homo sapien
tttctctaccataggaagtagcttc

SEQ ID NO: 2638928 - DNA, 25 bp, Homo sapien
tctaccataggaagtagcttcatac

SEQ ID NO: 2638929 - DNA, 25 bp, Homo sapien
ccataggaagtagcttcatacttca

SEQ ID NO: 2638930 - DNA, 25 bp, Homo sapien
tccattttctctaccataggaagta

SEQ ID NO: 2638931 - DNA, 25 bp, Homo sapien
agatgccaaaccctgaggttagtac

SEQ ID NO: 2638932 - DNA, 25 bp, Homo sapien
cattgctgtgttatataaggtgacc

SEQ ID NO: 2638933 - DNA, 25 bp, Homo sapien
ggatgtggatgatgcctgagatgcc

SEQ ID NO: 2638934 - DNA, 25 bp, Homo sapien
taagaaggtttgatcacgggatgtg

SEQ ID NO: 2638935 - DNA, 25 bp, Homo sapien
gcaaatttcatgagacgtccatctt

SEQ ID NO: 2638936 - DNA, 25 bp, Homo sapien
gagacgtccatcttcatgctgaatt

SEQ ID NO: 2638937 - DNA, 25 bp, Homo sapien
tgagtgtcaaaacaatctgtggatt

SEQ ID NO: 2638938 - DNA, 25 bp, Homo sapien
gctgaatttctaactgagtgtcaaa

SEQ ID NO: 2638939 - DNA, 25 bp, Homo sapien
tctttgagactgaccatttaaaggc

SEQ ID NO: 2638940 - DNA, 25 bp, Homo sapien
cacttgtgacaactgaatgtctttg

SEQ ID NO: 2638941 - DNA, 25 bp, Homo sapien
caggcgctaatacagactacttcca

SEQ ID NO: 2638942 - DNA, 25 bp, Homo sapien
tatcaaccagggctgaatgaggatc

SEQ ID NO: 2638943 - DNA, 25 bp, Homo sapien
tcatttgcgcaacaatagagtagaa

SEQ ID NO: 2638944 - DNA, 25 bp, Homo sapien
tgaagagtatcatttgcgcaacaat

SEQ ID NO: 2638945 - DNA, 25 bp, Homo sapien
cataatccttccttgaagagtatca

SEQ ID NO: 2638946 - DNA, 25 bp, Homo sapien
agtagaaaagggtcagtcagcacag

SEQ ID NO: 2638947 - DNA, 25 bp, Homo sapien
ttttctcatatacacatacaactcc

SEQ ID NO: 2638948 - DNA, 25 bp, Homo sapien
catatacacatacaactcctttttt

SEQ ID NO: 2638949 - DNA, 25 bp, Homo sapien
acacatacaactccttttttatctt

SEQ ID NO: 2638950 - DNA, 25 bp, Homo sapien
tgtttttctcatatacacatacaac

SEQ ID NO: 2638951 - DNA, 25 bp, Homo sapien
ggagacaccaatggttcctaagaat

SEQ ID NO: 2638952 - DNA, 25 bp, Homo sapien
gagacaccaatggttcctaagaatg

SEQ ID NO: 2638953 - DNA, 25 bp, Homo sapien
ggcaggagacaccaatggttcctaa

SEQ ID NO: 2638954 - DNA, 25 bp, Homo sapien
caggagacaccaatggttcctaaga

SEQ ID NO: 2638955 - DNA, 25 bp, Homo sapien
aagtatgtaatggaccacaagaccc

SEQ ID NO: 2638956 - DNA, 25 bp, Homo sapien
tgtaatggaccacaagaccctgcag

SEQ ID NO: 2638957 - DNA, 25 bp, Homo sapien
tatgtaatggaccacaagaccctgc

SEQ ID NO: 2638958 - DNA, 25 bp, Homo sapien
ctaagtatgtaatggaccacaagac

SEQ ID NO: 2638959 - DNA, 25 bp, Homo sapien
gtatatatcttagaggaagcaatgg

SEQ ID NO: 2638960 - DNA, 25 bp, Homo sapien
caagaaaatcgatattcattgctgt

SEQ ID NO: 2638961 - DNA, 25 bp, Homo sapien
ggctgctgcaatcacccaagaaaat

SEQ ID NO: 2638962 - DNA, 25 bp, Homo sapien
tatatcttagaggaagcaatggctg

SEQ ID NO: 2638963 - DNA, 25 bp, Homo sapien
ggaatatcccctgcttcatagtcta

SEQ ID NO: 2638964 - DNA, 25 bp, Homo sapien
ttctgttggaatatcccctgcttca

SEQ ID NO: 2638965 - DNA, 25 bp, Homo sapien
ccattctgttggaatatcccctgct

SEQ ID NO: 2638966 - DNA, 25 bp, Homo sapien
caattcttttctctcgaatagtttg

SEQ ID NO: 2638967 - DNA, 25 bp, Homo sapien
cccctatagtgtgttaaatgtcatg

SEQ ID NO: 2638968 - DNA, 25 bp, Homo sapien
tcttccagtttagggcggaggatgc

SEQ ID NO: 2638969 - DNA, 25 bp, Homo sapien
agtaatgtctactccaaaacttgag

SEQ ID NO: 2638970 - DNA, 25 bp, Homo sapien
tacttaactattgagctaggccctg

SEQ ID NO: 2638971 - DNA, 25 bp, Homo sapien
agacatcaaagtataatatccagaa

SEQ ID NO: 2638972 - DNA, 25 bp, Homo sapien
aagacatcaaagtataatatccaga

SEQ ID NO: 2638973 - DNA, 25 bp, Homo sapien
ttcaatgtaaaggtcttggatatat

SEQ ID NO: 2638974 - DNA, 25 bp, Homo sapien
caggctcttgagtaggctggaaaga

SEQ ID NO: 2638975 - DNA, 25 bp, Homo sapien
tgtaaatttatccctaaatcttcaa

SEQ ID NO: 2638976 - DNA, 25 bp, Homo sapien
gctcttgagtaggctggaaagacta

SEQ ID NO: 2638977 - DNA, 25 bp, Homo sapien
ctccatagtaggtggagtctttctt

SEQ ID NO: 2638978 - DNA, 25 bp, Homo sapien
catagtaggtggagtctttcttgtt

SEQ ID NO: 2638979 - DNA, 25 bp, Homo sapien
ccatagtaggtggagtctttcttgt

SEQ ID NO: 2638980 - DNA, 25 bp, Homo sapien
tagtaggtggagtctttcttgttct

SEQ ID NO: 2638981 - DNA, 25 bp, Homo sapien
tgatatcctccttgtgtagtcttac

SEQ ID NO: 2638982 - DNA, 25 bp, Homo sapien
tattttctgtgatggaataaaatca

SEQ ID NO: 2638983 - DNA, 25 bp, Homo sapien
tttgttatattccataatatgagca

SEQ ID NO: 2638984 - DNA, 25 bp, Homo sapien
gaagcttcgtatatccttgggaata

SEQ ID NO: 2638985 - DNA, 25 bp, Homo sapien
tctggcactgccagttactgagcat

SEQ ID NO: 2638986 - DNA, 25 bp, Homo sapien
tactcacgtttctatgaccttgtgg

SEQ ID NO: 2638987 - DNA, 25 bp, Homo sapien
tgaacttacatgtttgacccactat

SEQ ID NO: 2638988 - DNA, 25 bp, Homo sapien
ttctcccttgccagattaggattca

SEQ ID NO: 2638989 - DNA, 25 bp, Homo sapien
catcccatgccacagtgtcagagaa

SEQ ID NO: 2638990 - DNA, 25 bp, Homo sapien
gtaatgaggttacacctgttagcag

SEQ ID NO: 2638991 - DNA, 25 bp, Homo sapien
tatctggtatgttaaccctctcaca

SEQ ID NO: 2638992 - DNA, 25 bp, Homo sapien
aagttgattccccacagacatccca

SEQ ID NO: 2638993 - DNA, 25 bp, Homo sapien
aagtatagtacttccctccttgctc

SEQ ID NO: 2638994 - DNA, 25 bp, Homo sapien
cactgtgtacccatgcaaatctgat

SEQ ID NO: 2638995 - DNA, 25 bp, Homo sapien
acaatgtgacacagtgtgtggcact

SEQ ID NO: 2638996 - DNA, 25 bp, Homo sapien
tacagtgcataagaaaagagctgac

SEQ ID NO: 2638997 - DNA, 25 bp, Homo sapien
caataatgagaatgtacactgagtt

SEQ ID NO: 2638998 - DNA, 25 bp, Homo sapien
tcaaatctattgcaaacatcctttg

SEQ ID NO: 2638999 - DNA, 25 bp, Homo sapien
tgttcttgccaatcactagtacgcc

SEQ ID NO: 2639000 - DNA, 25 bp, Homo sapien
ctagtacgcctctgccaaatcaatg

SEQ ID NO: 2639001 - DNA, 25 bp, Homo sapien
ttgagtttgaactggtggaggcagg

SEQ ID NO: 2639002 - DNA, 25 bp, Homo sapien
gaaaggttttaccagtgctgctggg

SEQ ID NO: 2639003 - DNA, 25 bp, Homo sapien
cactggtctctttactaaggagttt

SEQ ID NO: 2639004 - DNA, 25 bp, Homo sapien
gatcctggctgaaaggttttaccag

SEQ ID NO: 2639005 - DNA, 25 bp, Homo sapien
tgtggctcttgccatctcgtggcat

SEQ ID NO: 2639006 - DNA, 25 bp, Homo sapien
atatacatgaaaagatttgaccata

SEQ ID NO: 2639007 - DNA, 25 bp, Homo sapien
catgaaaagatttgaccataatgca

SEQ ID NO: 2639008 - DNA, 25 bp, Homo sapien
ttaaaatagtcacatccatatacat

SEQ ID NO: 2639009 - DNA, 25 bp, Homo sapien
gttaaaatagtcacatccatataca

SEQ ID NO: 2639010 - DNA, 25 bp, Homo sapien
tgtagaataccacctactggacaga

SEQ ID NO: 2639011 - DNA, 25 bp, Homo sapien
aacactgtagtaccttggaacccag

SEQ ID NO: 2639012 - DNA, 25 bp, Homo sapien
taattcgccgattacaaagacacca

SEQ ID NO: 2639013 - DNA, 25 bp, Homo sapien
gatggcttgagaggagtaacactat

SEQ ID NO: 2639014 - DNA, 25 bp, Homo sapien
ctctccttcccattcggggaaatag

SEQ ID NO: 2639015 - DNA, 25 bp, Homo sapien
tccttcccattcggggaaatagtca

SEQ ID NO: 2639016 - DNA, 25 bp, Homo sapien
ccttcccattcggggaaatagtcat

SEQ ID NO: 2639017 - DNA, 25 bp, Homo sapien
tgattgggtcactaataacaccagg

SEQ ID NO: 2639018 - DNA, 25 bp, Homo sapien
accaagggtcatctgaagtcgtgat

SEQ ID NO: 2639019 - DNA, 25 bp, Homo sapien
aagggatcactactcaagcataagg

SEQ ID NO: 2639020 - DNA, 25 bp, Homo sapien
taaaccgtctctcagatgtgtacag

SEQ ID NO: 2639021 - DNA, 25 bp, Homo sapien
gcgggacgcaaaggccgcgacttcc

SEQ ID NO: 2639022 - DNA, 25 bp, Homo sapien
tcctgcttccggtctggcggtgagt

SEQ ID NO: 2639023 - DNA, 25 bp, Homo sapien
tcgggtcgcctgtgggcgggacgca

SEQ ID NO: 2639024 - DNA, 25 bp, Homo sapien
gatccgatcccgtggggctatgtag

SEQ ID NO: 2639025 - DNA, 25 bp, Homo sapien
tcccgcgtcctccaactcgaggtcc

SEQ ID NO: 2639026 - DNA, 25 bp, Homo sapien
ggtcccaagacccacacagcaatgg

SEQ ID NO: 2639027 - DNA, 25 bp, Homo sapien
tggcgcagccggaaactgggcccta

SEQ ID NO: 2639028 - DNA, 25 bp, Homo sapien
acagcaatggcgcagccggaaactg

SEQ ID NO: 2639029 - DNA, 25 bp, Homo sapien
gcaaaggcaaaagtccctagctgct

SEQ ID NO: 2639030 - DNA, 25 bp, Homo sapien
ggaaccgctcctcgagtcctgaagc

SEQ ID NO: 2639031 - DNA, 25 bp, Homo sapien
acttggtccccgcaggacgtggcag

SEQ ID NO: 2639032 - DNA, 25 bp, Homo sapien
gatgggggttgtcttccgatcgacc

SEQ ID NO: 2639033 - DNA, 25 bp, Homo sapien
gatgtgcaccaggatgaactcgccg

SEQ ID NO: 2639034 - DNA, 25 bp, Homo sapien
ttgaaagaacaagcacctctatggg

SEQ ID NO: 2639035 - DNA, 25 bp, Homo sapien
tattgtccaaccagaagagagaggc

SEQ ID NO: 2639036 - DNA, 25 bp, Homo sapien
tcgccggaatcgtcaagagtcgttg

SEQ ID NO: 2639037 - DNA, 25 bp, Homo sapien
ccgtagccagtgaacaaaaatagtg

SEQ ID NO: 2639038 - DNA, 25 bp, Homo sapien
gggcaatggtacctaagagaagagt

SEQ ID NO: 2639039 - DNA, 25 bp, Homo sapien
tatggtgggaatgaaccgtagccag

SEQ ID NO: 2639040 - DNA, 25 bp, Homo sapien
tgtgttccaaatgtcaagacagcta

SEQ ID NO: 2639041 - DNA, 25 bp, Homo sapien
tgaatatatcgctcctttgaaatgg

SEQ ID NO: 2639042 - DNA, 25 bp, Homo sapien
agttcaaaattctaccaagagctgg

SEQ ID NO: 2639043 - DNA, 25 bp, Homo sapien
caagagctgggcaaaccaaggcatt

SEQ ID NO: 2639044 - DNA, 25 bp, Homo sapien
cctcatgacacaatgtaatccgctg

SEQ ID NO: 2639045 - DNA, 25 bp, Homo sapien
gcagccttgatatcgagacctcata

SEQ ID NO: 2639046 - DNA, 25 bp, Homo sapien
tctccactcttgtgggggtatacga

SEQ ID NO: 2639047 - DNA, 25 bp, Homo sapien
cagcctctaggcagccttgatatcg

SEQ ID NO: 2639048 - DNA, 25 bp, Homo sapien
tcctgcctttcacagtaagatccag

SEQ ID NO: 2639049 - DNA, 25 bp, Homo sapien
tctctcatttagtggccctgcttag

SEQ ID NO: 2639050 - DNA, 25 bp, Homo sapien
gtctctacgaatcaggtggaggaag

SEQ ID NO: 2639051 - DNA, 25 bp, Homo sapien
cctgcttaggctcagatgtccagag

SEQ ID NO: 2639052 - DNA, 25 bp, Homo sapien
gatgtccagaggtctctacgaatca

SEQ ID NO: 2639053 - DNA, 25 bp, Homo sapien
gataatcataaccatctagcagctt

SEQ ID NO: 2639054 - DNA, 25 bp, Homo sapien
taattcgctaaagtcaagatcacac

SEQ ID NO: 2639055 - DNA, 25 bp, Homo sapien
cagttgcaatatttcttctatctct

SEQ ID NO: 2639056 - DNA, 25 bp, Homo sapien
aagatcacacctattcagataatca

SEQ ID NO: 2639057 - DNA, 25 bp, Homo sapien
tcctgtgcttacagctgtaacacag

SEQ ID NO: 2639058 - DNA, 25 bp, Homo sapien
acttcctgtgcttacagctgtaaca

SEQ ID NO: 2639059 - DNA, 25 bp, Homo sapien
tcaactttgattttacacctatggc

SEQ ID NO: 2639060 - DNA, 25 bp, Homo sapien
tggcctgcccctaagtttcctgctt

SEQ ID NO: 2639061 - DNA, 25 bp, Homo sapien
acactagctgatatatgactatgca

SEQ ID NO: 2639062 - DNA, 25 bp, Homo sapien
actagctgatatatgactatgcaga

SEQ ID NO: 2639063 - DNA, 25 bp, Homo sapien
cactagctgatatatgactatgcag

SEQ ID NO: 2639064 - DNA, 25 bp, Homo sapien
aacactagctgatatatgactatgc

SEQ ID NO: 2639065 - DNA, 25 bp, Homo sapien
accattcagtgtcatgcgtgttatt

SEQ ID NO: 2639066 - DNA, 25 bp, Homo sapien
gctgatggtggaattgcatgtacgt

SEQ ID NO: 2639067 - DNA, 25 bp, Homo sapien
tgagagcttcaaagacttatgtggg

SEQ ID NO: 2639068 - DNA, 25 bp, Homo sapien
taaagagataagagtttcaaagtgc

SEQ ID NO: 2639069 - DNA, 25 bp, Homo sapien
atcctgattttatattagacttccc

SEQ ID NO: 2639070 - DNA, 25 bp, Homo sapien
tttgtaagctgtatatgtcatatgt

SEQ ID NO: 2639071 - DNA, 25 bp, Homo sapien
gttatcactttcttgtatgttacac

SEQ ID NO: 2639072 - DNA, 25 bp, Homo sapien
tgattttatattagacttcccttgt

SEQ ID NO: 2639073 - DNA, 25 bp, Homo sapien
atatataaagtatgacctcattctg

SEQ ID NO: 2639074 - DNA, 25 bp, Homo sapien
gacacacaacactaaactctatggt

SEQ ID NO: 2639075 - DNA, 25 bp, Homo sapien
tgtatatggtacatatggatgcaca

SEQ ID NO: 2639076 - DNA, 25 bp, Homo sapien
gatgcacatccaagtggtaaactgt

SEQ ID NO: 2639077 - DNA, 25 bp, Homo sapien
tactcatgttaactgcattaggcca

SEQ ID NO: 2639078 - DNA, 25 bp, Homo sapien
tcagctaagctagaacagtgtgaca

SEQ ID NO: 2639079 - DNA, 25 bp, Homo sapien
ttacaatgatctggccttagctggc

SEQ ID NO: 2639080 - DNA, 25 bp, Homo sapien
cgctcagtctgatcctgcataagta

SEQ ID NO: 2639081 - DNA, 25 bp, Homo sapien
aaataatagcatggctagagcaggc

SEQ ID NO: 2639082 - DNA, 25 bp, Homo sapien
tccaagatattcaaagctgggactc

SEQ ID NO: 2639083 - DNA, 25 bp, Homo sapien
taaacgtcctggactcttgcctgct

SEQ ID NO: 2639084 - DNA, 25 bp, Homo sapien
tggaacctcaagacgtacattaaca

SEQ ID NO: 2639085 - DNA, 25 bp, Homo sapien
tcatcatgctaatacactaaaagag

SEQ ID NO: 2639086 - DNA, 25 bp, Homo sapien
tacaaaccagtatcccttatgaaca

SEQ ID NO: 2639087 - DNA, 25 bp, Homo sapien
ggatagtacgtcataaccaagtggg

SEQ ID NO: 2639088 - DNA, 25 bp, Homo sapien
ttgacaaaatcctgctaagattctg

SEQ ID NO: 2639089 - DNA, 25 bp, Homo sapien
tgaactccaccatgatttctgctga

SEQ ID NO: 2639090 - DNA, 25 bp, Homo sapien
atggcagcctcatttacgtcctcca

SEQ ID NO: 2639091 - DNA, 25 bp, Homo sapien
ggtatctggttgactgaactccacc

SEQ ID NO: 2639092 - DNA, 25 bp, Homo sapien
ccaccatgatttctgctgaaggctt

SEQ ID NO: 2639093 - DNA, 25 bp, Homo sapien
cactggcactggatggacggtgtta

SEQ ID NO: 2639094 - DNA, 25 bp, Homo sapien
gtatggtgtgagcaacacgggccag

SEQ ID NO: 2639095 - DNA, 25 bp, Homo sapien
gatggacggtgttactggatccact

SEQ ID NO: 2639096 - DNA, 25 bp, Homo sapien
ggatccactgtggagttgaactgta

SEQ ID NO: 2639097 - DNA, 25 bp, Homo sapien
catcaccaggggtgtatgatgcatt

SEQ ID NO: 2639098 - DNA, 25 bp, Homo sapien
ggttgtaaatgagtcatcaccaggg

SEQ ID NO: 2639099 - DNA, 25 bp, Homo sapien
acaggggttgtaaatgagtcatcac

SEQ ID NO: 2639100 - DNA, 25 bp, Homo sapien
gcaagtgggtgagcccagagggcct

SEQ ID NO: 2639101 - DNA, 25 bp, Homo sapien
tgctggttcttgcatacttgcatac

SEQ ID NO: 2639102 - DNA, 25 bp, Homo sapien
gccagtaagaaagctgctggttctt

SEQ ID NO: 2639103 - DNA, 25 bp, Homo sapien
tggttcttgcatacttgcatacttc

SEQ ID NO: 2639104 - DNA, 25 bp, Homo sapien
agctgctggttcttgcatacttgca

SEQ ID NO: 2639105 - DNA, 25 bp, Homo sapien
gggaagttggcagagaacaggatca

SEQ ID NO: 2639106 - DNA, 25 bp, Homo sapien
agagaacaggatcaaggaggacaag

SEQ ID NO: 2639107 - DNA, 25 bp, Homo sapien
ggacaagcatctcggatggtctcac

SEQ ID NO: 2639108 - DNA, 25 bp, Homo sapien
tcaaggaggacaagcatctcggatg

SEQ ID NO: 2639109 - DNA, 25 bp, Homo sapien
agactgagcagccacggcccccacc

SEQ ID NO: 2639110 - DNA, 25 bp, Homo sapien
gcaaagctgggaagataggccagga

SEQ ID NO: 2639111 - DNA, 25 bp, Homo sapien
ggtgatcaatgggtcagaggatgct

SEQ ID NO: 2639112 - DNA, 25 bp, Homo sapien
tgcagacagacagcaaccaggaaga

SEQ ID NO: 2639113 - DNA, 25 bp, Homo sapien
cttcaggattttgtggatcaagaat

SEQ ID NO: 2639114 - DNA, 25 bp, Homo sapien
ggagagtccaagataatttcaccta

SEQ ID NO: 2639115 - DNA, 25 bp, Homo sapien
gggtcacccactggtattcagctgg

SEQ ID NO: 2639116 - DNA, 25 bp, Homo sapien
ccatgtgattgactggggtcaccca

SEQ ID NO: 2639117 - DNA, 25 bp, Homo sapien
catttatgcatccaaaaaacacgat

SEQ ID NO: 2639118 - DNA, 25 bp, Homo sapien
cacgataaaaagctcagcgtcactg

SEQ ID NO: 2639119 - DNA, 25 bp, Homo sapien
attaaaaagtcaagaggccaagtgc

SEQ ID NO: 2639120 - DNA, 25 bp, Homo sapien
caaaaaacacgataaaaagctcagc

SEQ ID NO: 2639121 - DNA, 25 bp, Homo sapien
ggatttaggtggtgccagtgaggct

SEQ ID NO: 2639122 - DNA, 25 bp, Homo sapien
gggaagcctgtggatttaggtggtg

SEQ ID NO: 2639123 - DNA, 25 bp, Homo sapien
aagcctgtggatttaggtggtgcca

SEQ ID NO: 2639124 - DNA, 25 bp, Homo sapien
gtggtgccagtgaggctgtgttatt

SEQ ID NO: 2639125 - DNA, 25 bp, Homo sapien
cacagcgtttactgaacagtgtgag

SEQ ID NO: 2639126 - DNA, 25 bp, Homo sapien
ggcacatttctatcacagcgtttac

SEQ ID NO: 2639127 - DNA, 25 bp, Homo sapien
ttctatcacagcgtttactgaacag

SEQ ID NO: 2639128 - DNA, 25 bp, Homo sapien
caggcacatttctatcacagcgttt

SEQ ID NO: 2639129 - DNA, 25 bp, Homo sapien
tgtgctcaggaaacaactccccttg

SEQ ID NO: 2639130 - DNA, 25 bp, Homo sapien
ttgattttgtttgaaggtcatgtgc

SEQ ID NO: 2639131 - DNA, 25 bp, Homo sapien
gccttgattttgtttgaaggtcatg

SEQ ID NO: 2639132 - DNA, 25 bp, Homo sapien
gtcatgtgctcaggaaacaactccc

SEQ ID NO: 2639133 - DNA, 25 bp, Homo sapien
ctcccacagattctcatagcagcct

SEQ ID NO: 2639134 - DNA, 25 bp, Homo sapien
tctgctcccacagattctcatagca

SEQ ID NO: 2639135 - DNA, 25 bp, Homo sapien
cttctgctcccacagattctcatag

SEQ ID NO: 2639136 - DNA, 25 bp, Homo sapien
tgctcccacagattctcatagcagc

SEQ ID NO: 2639137 - DNA, 25 bp, Homo sapien
gacttcttggtccacgtgggtcctc

SEQ ID NO: 2639138 - DNA, 25 bp, Homo sapien
tcagggctgccgtcatgtggggact

SEQ ID NO: 2639139 - DNA, 25 bp, Homo sapien
tgtggggacttcttggtccacgtgg

SEQ ID NO: 2639140 - DNA, 25 bp, Homo sapien
gctacggcagcttccaggtctcgct

SEQ ID NO: 2639141 - DNA, 25 bp, Homo sapien
ttaaatactacccactcagcgttcg

SEQ ID NO: 2639142 - DNA, 25 bp, Homo sapien
cagggactgccaagctgttctttaa

SEQ ID NO: 2639143 - DNA, 25 bp, Homo sapien
ttgcaagggaaagacgcagcacaaa

SEQ ID NO: 2639144 - DNA, 25 bp, Homo sapien
gctagttgcattaactacttcccca

SEQ ID NO: 2639145 - DNA, 25 bp, Homo sapien
caaacatcctctccccatcgctact

SEQ ID NO: 2639146 - DNA, 25 bp, Homo sapien
aagaaacactcccaactagaatgga

SEQ ID NO: 2639147 - DNA, 25 bp, Homo sapien
tctccccatcgctacttaaagcaac

SEQ ID NO: 2639148 - DNA, 25 bp, Homo sapien
catctcgatgccctttgaccaaaca

SEQ ID NO: 2639149 - DNA, 25 bp, Homo sapien
tctgcatcacaacctctatgtactg

SEQ ID NO: 2639150 - DNA, 25 bp, Homo sapien
tgttcctttctgcatcacaacctct

SEQ ID NO: 2639151 - DNA, 25 bp, Homo sapien
ttcgctccctgtctattgtgtacct

SEQ ID NO: 2639152 - DNA, 25 bp, Homo sapien
tcctttttcatttcgctccctgtct

SEQ ID NO: 2639153 - DNA, 25 bp, Homo sapien
gcatccgtggaggtttgacattgac

SEQ ID NO: 2639154 - DNA, 25 bp, Homo sapien
ggcttaagcttggaatctggcatcc

SEQ ID NO: 2639155 - DNA, 25 bp, Homo sapien
cttggaatctggcatccgtggaggt

SEQ ID NO: 2639156 - DNA, 25 bp, Homo sapien
aatctggcatccgtggaggtttgac

SEQ ID NO: 2639157 - DNA, 25 bp, Homo sapien
aggtggtagttaccctttgctgctc

SEQ ID NO: 2639158 - DNA, 25 bp, Homo sapien
tggtagttaccctttgctgctctcg

SEQ ID NO: 2639159 - DNA, 25 bp, Homo sapien
aaggtggtagttaccctttgctgct

SEQ ID NO: 2639160 - DNA, 25 bp, Homo sapien
gtggtagttaccctttgctgctctc

SEQ ID NO: 2639161 - DNA, 25 bp, Homo sapien
gtcactactgtatccgttttcagca

SEQ ID NO: 2639162 - DNA, 25 bp, Homo sapien
ccttgtgtcctggaaagctgcacta

SEQ ID NO: 2639163 - DNA, 25 bp, Homo sapien
ttgctccacaaagcacagcgccgtt

SEQ ID NO: 2639164 - DNA, 25 bp, Homo sapien
tcctgtcttccgcagagcctcttct

SEQ ID NO: 2639165 - DNA, 25 bp, Homo sapien
gattggctggcgtttgattctcgta

SEQ ID NO: 2639166 - DNA, 25 bp, Homo sapien
caaagcgttcgcagattggctggcg

SEQ ID NO: 2639167 - DNA, 25 bp, Homo sapien
tgctgagtaattctctggcatgcct

SEQ ID NO: 2639168 - DNA, 25 bp, Homo sapien
gaggttacttgttggcttgtgctga

SEQ ID NO: 2639169 - DNA, 25 bp, Homo sapien
cagcaaaaagaagtatctgtcaccc

SEQ ID NO: 2639170 - DNA, 25 bp, Homo sapien
tgctgacctgttggtaagaaaaggc

SEQ ID NO: 2639171 - DNA, 25 bp, Homo sapien
tgttggtaaggtatgtcaaaggcca

SEQ ID NO: 2639172 - DNA, 25 bp, Homo sapien
tcaaaggccatgacaataccagaga

SEQ ID NO: 2639173 - DNA, 25 bp, Homo sapien
gagatcattaactagcccttgtctg

SEQ ID NO: 2639174 - DNA, 25 bp, Homo sapien
tccttcacgggatgaattatgaatg

SEQ ID NO: 2639175 - DNA, 25 bp, Homo sapien
tatgaatgagatcattaactagccc

SEQ ID NO: 2639176 - DNA, 25 bp, Homo sapien
gagtttgagtgtaaatggttccttc

SEQ ID NO: 2639177 - DNA, 25 bp, Homo sapien
caacttcttttccttaaagaggatg

SEQ ID NO: 2639178 - DNA, 25 bp, Homo sapien
gttgagaaagttcatcctgtggctc

SEQ ID NO: 2639179 - DNA, 25 bp, Homo sapien
ctggagagatgactgaagatagctc

SEQ ID NO: 2639180 - DNA, 25 bp, Homo sapien
tgactgaagatagctccctctgttt

SEQ ID NO: 2639181 - DNA, 25 bp, Homo sapien
tctgagctgataagagctctggaga

SEQ ID NO: 2639182 - DNA, 25 bp, Homo sapien
gagagatgactgaagatagctccct

SEQ ID NO: 2639183 - DNA, 25 bp, Homo sapien
gctttgccccagacagtgcccttag

SEQ ID NO: 2639184 - DNA, 25 bp, Homo sapien
ggttcataaactgtacctactccat

SEQ ID NO: 2639185 - DNA, 25 bp, Homo sapien
ctttctactgttgctacgcctggac

SEQ ID NO: 2639186 - DNA, 25 bp, Homo sapien
tgtctatgcttgctatccaccctgt

SEQ ID NO: 2639187 - DNA, 25 bp, Homo sapien
tatttcgtcttatagattgtcggga

SEQ ID NO: 2639188 - DNA, 25 bp, Homo sapien
tcgtaaagccgaaaccaattctgaa

SEQ ID NO: 2639189 - DNA, 25 bp, Homo sapien
tagattgtcgggatggctgctgaaa

SEQ ID NO: 2639190 - DNA, 25 bp, Homo sapien
gctgctgaaagagaatcgtaaagcc

SEQ ID NO: 2639191 - DNA, 25 bp, Homo sapien
tctggagcagacacataaccttgat

SEQ ID NO: 2639192 - DNA, 25 bp, Homo sapien
tcagaaccacggaggaatgataatt

SEQ ID NO: 2639193 - DNA, 25 bp, Homo sapien
cccctaaagcactctaatagtatgc

SEQ ID NO: 2639194 - DNA, 25 bp, Homo sapien
tgattcccaggataccccctaaagc

SEQ ID NO: 2639195 - DNA, 25 bp, Homo sapien
tgcagcctatcacggtcctcttcat

SEQ ID NO: 2639196 - DNA, 25 bp, Homo sapien
gagtttcccggaattctgccatccc

SEQ ID NO: 2639197 - DNA, 25 bp, Homo sapien
ctgtttaatgtataccctgccctgc

SEQ ID NO: 2639198 - DNA, 25 bp, Homo sapien
tgggcccctctctgagtttcccgga

SEQ ID NO: 2639199 - DNA, 25 bp, Homo sapien
cgcagctgccttacttgttaggaaa

SEQ ID NO: 2639200 - DNA, 25 bp, Homo sapien
gcctgtgcggaaaactggaggatct

SEQ ID NO: 2639201 - DNA, 25 bp, Homo sapien
caagttgggctctattctcttcaga

SEQ ID NO: 2639202 - DNA, 25 bp, Homo sapien
catgtctaggaaaaagcctgtgcgg

SEQ ID NO: 2639203 - DNA, 25 bp, Homo sapien
gagccctgcggacattgttcgcgct

SEQ ID NO: 2639204 - DNA, 25 bp, Homo sapien
agaagcgagtccctctctgaacctg

SEQ ID NO: 2639205 - DNA, 25 bp, Homo sapien
tggagccctgcggacattgttcgcg

SEQ ID NO: 2639206 - DNA, 25 bp, Homo sapien
cgggcgaaggcggagaagcgagtcc

SEQ ID NO: 2639207 - DNA, 25 bp, Homo sapien
gtggaccagggagagcgagtgcaga

SEQ ID NO: 2639208 - DNA, 25 bp, Homo sapien
gcgcgccgcgctctcagtcgccttg

SEQ ID NO: 2639209 - DNA, 25 bp, Homo sapien
cgcagggccagtcccctcgggtccg

SEQ ID NO: 2639210 - DNA, 25 bp, Homo sapien
ctctcagtcgccttggcggcgcccg

SEQ ID NO: 2639211 - DNA, 25 bp, Homo sapien
agacggcgtgccaggcggcggacgg

SEQ ID NO: 2639212 - DNA, 25 bp, Homo sapien
ccggctgcgcggagtccaggcgctc

SEQ ID NO: 2639213 - DNA, 25 bp, Homo sapien
tgcgcggagtccaggcgctcgggac

SEQ ID NO: 2639214 - DNA, 25 bp, Homo sapien
ggcgcccggctgcgcggagtccagg

SEQ ID NO: 2639215 - DNA, 25 bp, Homo sapien
ccgcccgctagaagtcgaggagctc

SEQ ID NO: 2639216 - DNA, 25 bp, Homo sapien
tccgttctgtctcggctgcagggct

SEQ ID NO: 2639217 - DNA, 25 bp, Homo sapien
tttgtgagtacacacgccgcagggc

SEQ ID NO: 2639218 - DNA, 25 bp, Homo sapien
gggttagcagacacacctttgtgag

SEQ ID NO: 2639219 - DNA, 25 bp, Homo sapien
acgccgtcgcgacgccacgatgcca

SEQ ID NO: 2639220 - DNA, 25 bp, Homo sapien
aggaagcgcgacacgcacacgccgt

SEQ ID NO: 2639221 - DNA, 25 bp, Homo sapien
tgccgggaccctataaacggcacta

SEQ ID NO: 2639222 - DNA, 25 bp, Homo sapien
tataaacggcactaggaagcgcgac

SEQ ID NO: 2639223 - DNA, 25 bp, Homo sapien
tgcgcgccgcgatgtccagcagcga

SEQ ID NO: 2639224 - DNA, 25 bp, Homo sapien
gccgcgatgtccagcagcgactcgg

SEQ ID NO: 2639225 - DNA, 25 bp, Homo sapien
cgatgtccagcagcgactcggggct

SEQ ID NO: 2639226 - DNA, 25 bp, Homo sapien
ctgcgcgccgcgatgtccagcagcg

SEQ ID NO: 2639227 - DNA, 25 bp, Homo sapien
agcgctcctccacgcgctggaacgg

SEQ ID NO: 2639228 - DNA, 25 bp, Homo sapien
gctcaaagcgctcctccacgcgctg

SEQ ID NO: 2639229 - DNA, 25 bp, Homo sapien
gatgcgctcaaagcgctcctccacg

SEQ ID NO: 2639230 - DNA, 25 bp, Homo sapien
aaagcgctcctccacgcgctggaac

SEQ ID NO: 2639231 - DNA, 25 bp, Homo sapien
gaaggaccaatagactatgcggcgc

SEQ ID NO: 2639232 - DNA, 25 bp, Homo sapien
cagatctcccgctcgctgcggggga

SEQ ID NO: 2639233 - DNA, 25 bp, Homo sapien
tgcgggggaaggaccaatagactat

SEQ ID NO: 2639234 - DNA, 25 bp, Homo sapien
accaatagactatgcggcgctgcac

SEQ ID NO: 2639235 - DNA, 25 bp, Homo sapien
ttgcaggacgttgtctacgcagccg

SEQ ID NO: 2639236 - DNA, 25 bp, Homo sapien
caacagcgcgatgccccggcggaaa

SEQ ID NO: 2639237 - DNA, 25 bp, Homo sapien
cgacttgcaggacgttgtctacgca

SEQ ID NO: 2639238 - DNA, 25 bp, Homo sapien
cgttgtctacgcagccgctttccaa

SEQ ID NO: 2639239 - DNA, 25 bp, Homo sapien
cgggcggccagtggagctcgcccgg

SEQ ID NO: 2639240 - DNA, 25 bp, Homo sapien
gccagtggagctcgcccgggccaga

SEQ ID NO: 2639241 - DNA, 25 bp, Homo sapien
tgaggaggcgcaaagaaaacgacat

SEQ ID NO: 2639242 - DNA, 25 bp, Homo sapien
ccgggccagacgccacagcgacccg

SEQ ID NO: 2639243 - DNA, 25 bp, Homo sapien
aattagtaagcgtcctacgggcgag

SEQ ID NO: 2639244 - DNA, 25 bp, Homo sapien
gtaagcgtcctacgggcgagatgtc

SEQ ID NO: 2639245 - DNA, 25 bp, Homo sapien
cacctctcctctgcgccgcttggag

SEQ ID NO: 2639246 - DNA, 25 bp, Homo sapien
tagtaagcgtcctacgggcgagatg

SEQ ID NO: 2639247 - DNA, 25 bp, Homo sapien
agcgcaaacaaaactcgggcggcgg

SEQ ID NO: 2639248 - DNA, 25 bp, Homo sapien
cctttggctgcgagcggcaaatccg

SEQ ID NO: 2639249 - DNA, 25 bp, Homo sapien
aaagggaagcgctagcagctcctcc

SEQ ID NO: 2639250 - DNA, 25 bp, Homo sapien
tatattctactttacaagccctgaa

SEQ ID NO: 2639251 - DNA, 25 bp, Homo sapien
tgaatagcctcaaaagctaaacccc

SEQ ID NO: 2639252 - DNA, 25 bp, Homo sapien
aaagagtgcccaacatagaaaaggc

SEQ ID NO: 2639253 - DNA, 25 bp, Homo sapien
ccctctagacagaaggaaagagtgc

SEQ ID NO: 2639254 - DNA, 25 bp, Homo sapien
gaaaaccacgtttgcagatggcatt

SEQ ID NO: 2639255 - DNA, 25 bp, Homo sapien
tttcactcatcagcttcaccactgt

SEQ ID NO: 2639256 - DNA, 25 bp, Homo sapien
aagcagccattggtcatttcactca

SEQ ID NO: 2639257 - DNA, 25 bp, Homo sapien
gccatcatcacaaagcagccattgg

SEQ ID NO: 2639258 - DNA, 25 bp, Homo sapien
atttcactcatcagcttcaccactg

SEQ ID NO: 2639259 - DNA, 25 bp, Homo sapien
ccatgctaaaaatagcagctaagca

SEQ ID NO: 2639260 - DNA, 25 bp, Homo sapien
agtcccacaacgtgctgaccctgtg

SEQ ID NO: 2639261 - DNA, 25 bp, Homo sapien
tgccgtcgtggcctggtgccagcct

SEQ ID NO: 2639262 - DNA, 25 bp, Homo sapien
tgccagcctgatgtagggccatgct

SEQ ID NO: 2639263 - DNA, 25 bp, Homo sapien
ccttaagaagggtgtcagatcattg

SEQ ID NO: 2639264 - DNA, 25 bp, Homo sapien
tgtatactagaccaagcaattcacc

SEQ ID NO: 2639265 - DNA, 25 bp, Homo sapien
taaacgttatcctgccatctgatgg

SEQ ID NO: 2639266 - DNA, 25 bp, Homo sapien
tcagtgtagctcatggtacaacaca

SEQ ID NO: 2639267 - DNA, 25 bp, Homo sapien
tcttgcacaacacgtaatactgcca

SEQ ID NO: 2639268 - DNA, 25 bp, Homo sapien
tgttcttgcacaacacgtaatactg

SEQ ID NO: 2639269 - DNA, 25 bp, Homo sapien
tgcacaacacgtaatactgccagat

SEQ ID NO: 2639270 - DNA, 25 bp, Homo sapien
tttcctgttcttgcacaacacgtaa

SEQ ID NO: 2639271 - DNA, 25 bp, Homo sapien
acttaacaaagacacctggtggcca

SEQ ID NO: 2639272 - DNA, 25 bp, Homo sapien
tccacttaacaaagacacctggtgg

SEQ ID NO: 2639273 - DNA, 25 bp, Homo sapien
tctccacttaacaaagacacctggt

SEQ ID NO: 2639274 - DNA, 25 bp, Homo sapien
agctctccacttaacaaagacacct

SEQ ID NO: 2639275 - DNA, 25 bp, Homo sapien
ccaagttcacaacaatggtgacttg

SEQ ID NO: 2639276 - DNA, 25 bp, Homo sapien
tccaagttcacaacaatggtgactt

SEQ ID NO: 2639277 - DNA, 25 bp, Homo sapien
caagttcacaacaatggtgacttgc

SEQ ID NO: 2639278 - DNA, 25 bp, Homo sapien
cagaggtaggtctcatagtctggct

SEQ ID NO: 2639279 - DNA, 25 bp, Homo sapien
ggtaggtctcatagtctggctcctc

SEQ ID NO: 2639280 - DNA, 25 bp, Homo sapien
gaggtaggtctcatagtctggctcc

SEQ ID NO: 2639281 - DNA, 25 bp, Homo sapien
aggtctcatagtctggctcctctgc

SEQ ID NO: 2639282 - DNA, 25 bp, Homo sapien
cttcaataatgttgtaggtgaggcc

SEQ ID NO: 2639283 - DNA, 25 bp, Homo sapien
ggattttcataagcacgcacagctt

SEQ ID NO: 2639284 - DNA, 25 bp, Homo sapien
gcacgcacagcttatttgcttcaat

SEQ ID NO: 2639285 - DNA, 25 bp, Homo sapien
gcttaaagttgaagtggtcctggat

SEQ ID NO: 2639286 - DNA, 25 bp, Homo sapien
ggctgcaaacaggactgtttggttt

SEQ ID NO: 2639287 - DNA, 25 bp, Homo sapien
gaaagtctcgtgctctaactacaca

SEQ ID NO: 2639288 - DNA, 25 bp, Homo sapien
agtgacctgcacatgagctccaagg

SEQ ID NO: 2639289 - DNA, 25 bp, Homo sapien
tcaggcagacttgctatggcccaca

SEQ ID NO: 2639290 - DNA, 25 bp, Homo sapien
gaagagaactgacctatgcatgtga

SEQ ID NO: 2639291 - DNA, 25 bp, Homo sapien
gataagtacgatggcagcaggaatg

SEQ ID NO: 2639292 - DNA, 25 bp, Homo sapien
caaaagaccattcctggatgctgcc

SEQ ID NO: 2639293 - DNA, 25 bp, Homo sapien
aacacgcaggcagttaatctgagca

SEQ ID NO: 2639294 - DNA, 25 bp, Homo sapien
gaaagctgcaaatgctacaggtaga

SEQ ID NO: 2639295 - DNA, 25 bp, Homo sapien
aagtaggagataagagcacaggctc

SEQ ID NO: 2639296 - DNA, 25 bp, Homo sapien
gaagtgctcagcagtaaggagacaa

SEQ ID NO: 2639297 - DNA, 25 bp, Homo sapien
tcagtgagacaaggcgaaaacaagc

SEQ ID NO: 2639298 - DNA, 25 bp, Homo sapien
tggaaacagccactcatttgaagtg

SEQ ID NO: 2639299 - DNA, 25 bp, Homo sapien
tcaaaatattcaggtgagggaggat

SEQ ID NO: 2639300 - DNA, 25 bp, Homo sapien
aaaagacttaacagattgccctcct

SEQ ID NO: 2639301 - DNA, 25 bp, Homo sapien
tagttatttacaccccttgaggcac

SEQ ID NO: 2639302 - DNA, 25 bp, Homo sapien
acgcctggtacacaaagccacgtga

SEQ ID NO: 2639303 - DNA, 25 bp, Homo sapien
gaaccagacgtgattattagactta

SEQ ID NO: 2639304 - DNA, 25 bp, Homo sapien
tagacttagggtaccagtggtagca

SEQ ID NO: 2639305 - DNA, 25 bp, Homo sapien
gcagcagtatgatgaagaaaggatt

SEQ ID NO: 2639306 - DNA, 25 bp, Homo sapien
gtttatttgcacagtgacaagggtg

SEQ ID NO: 2639307 - DNA, 25 bp, Homo sapien
tgtatgaacgccaaaagtactgtta

SEQ ID NO: 2639308 - DNA, 25 bp, Homo sapien
taacctccctcctacagacagaagg

SEQ ID NO: 2639309 - DNA, 25 bp, Homo sapien
agaaacaattctatggcggccatat

SEQ ID NO: 2639310 - DNA, 25 bp, Homo sapien
aagatgatggtcttcctcacaggca

SEQ ID NO: 2639311 - DNA, 25 bp, Homo sapien
cagtagcacaccgagggaaaccggg

SEQ ID NO: 2639312 - DNA, 25 bp, Homo sapien
ctggatcgcgcgcacagtagcacac

SEQ ID NO: 2639313 - DNA, 25 bp, Homo sapien
ccatggtgctggatcgcgcgcacag

SEQ ID NO: 2639314 - DNA, 25 bp, Homo sapien
gcgcacagtagcacaccgagggaaa

SEQ ID NO: 2639315 - DNA, 25 bp, Homo sapien
gataatcctgtattgttggccctga

SEQ ID NO: 2639316 - DNA, 25 bp, Homo sapien
ccttgatctcgccattgctattggg

SEQ ID NO: 2639317 - DNA, 25 bp, Homo sapien
cccaggtaggccttggtcgattcag

SEQ ID NO: 2639318 - DNA, 25 bp, Homo sapien
tcagccaaagccttggagcctttct

SEQ ID NO: 2639319 - DNA, 25 bp, Homo sapien
tttttggatgagctctcacttccac

SEQ ID NO: 2639320 - DNA, 25 bp, Homo sapien
ttttttggatgagctctcacttcca

SEQ ID NO: 2639321 - DNA, 25 bp, Homo sapien
tctttttttggatgagctctcactt

SEQ ID NO: 2639322 - DNA, 25 bp, Homo sapien
tctgtctttttttggatgagctctc

SEQ ID NO: 2639323 - DNA, 25 bp, Homo sapien
gatgaagaagaagatgaatacctac

SEQ ID NO: 2639324 - DNA, 25 bp, Homo sapien
tgatgaagaagaagatgaataccta

SEQ ID NO: 2639325 - DNA, 25 bp, Homo sapien
cttgatgaagaagaagatgaatacc

SEQ ID NO: 2639326 - DNA, 25 bp, Homo sapien
ttgatgaagaagaagatgaatacct

SEQ ID NO: 2639327 - DNA, 25 bp, Homo sapien
cagtttctgacatggagctttcaga

SEQ ID NO: 2639328 - DNA, 25 bp, Homo sapien
ttgtttcttatcctcatcttcagaa

SEQ ID NO: 2639329 - DNA, 25 bp, Homo sapien
ctgttttccttgtttcttatcctca

SEQ ID NO: 2639330 - DNA, 25 bp, Homo sapien
gctttcagaagatttatgtgaacgg

SEQ ID NO: 2639331 - DNA, 25 bp, Homo sapien
tcagttccatcttttgacttctttt

SEQ ID NO: 2639332 - DNA, 25 bp, Homo sapien
ttttgctgagtcctttaatatcctt

SEQ ID NO: 2639333 - DNA, 25 bp, Homo sapien
ttgctgagtcctttaatatcctttt

SEQ ID NO: 2639334 - DNA, 25 bp, Homo sapien
tctttctcagttccatcttttgact

SEQ ID NO: 2639335 - DNA, 25 bp, Homo sapien
ctcctcaatatactctgattctgac

SEQ ID NO: 2639336 - DNA, 25 bp, Homo sapien
tcaatatactctgattctgacaagg

SEQ ID NO: 2639337 - DNA, 25 bp, Homo sapien
tcagatgataaaggtttatcttcag

SEQ ID NO: 2639338 - DNA, 25 bp, Homo sapien
gattctgacaaggactcagatgata

SEQ ID NO: 2639339 - DNA, 25 bp, Homo sapien
ggacttgaactagcagccttctttt

SEQ ID NO: 2639340 - DNA, 25 bp, Homo sapien
gacttgaactagcagccttcttttt

SEQ ID NO: 2639341 - DNA, 25 bp, Homo sapien
gtcaggacttgaactagcagccttc

SEQ ID NO: 2639342 - DNA, 25 bp, Homo sapien
caggacttgaactagcagccttctt

SEQ ID NO: 2639343 - DNA, 25 bp, Homo sapien
gacattgcactttctttataaggga

SEQ ID NO: 2639344 - DNA, 25 bp, Homo sapien
gaaatttcctcagacattgcacttt

SEQ ID NO: 2639345 - DNA, 25 bp, Homo sapien
tcacagttgaaatttcctcagacat

SEQ ID NO: 2639346 - DNA, 25 bp, Homo sapien
cactttctttataagggaatcctga

SEQ ID NO: 2639347 - DNA, 25 bp, Homo sapien
cagcaggcaacatttatggcccttt

SEQ ID NO: 2639348 - DNA, 25 bp, Homo sapien
aatagatgttcaagcagcaggcaac

SEQ ID NO: 2639349 - DNA, 25 bp, Homo sapien
ggccctttcacacagtggcatctga

SEQ ID NO: 2639350 - DNA, 25 bp, Homo sapien
aaaaaatagatgttcaagcagcagg

SEQ ID NO: 2639351 - DNA, 25 bp, Homo sapien
cagtgtattatctcccagagttatc

SEQ ID NO: 2639352 - DNA, 25 bp, Homo sapien
ctagtacgactgcagtgtattatct

SEQ ID NO: 2639353 - DNA, 25 bp, Homo sapien
tacgactgcagtgtattatctccca

SEQ ID NO: 2639354 - DNA, 25 bp, Homo sapien
gactgcagtgtattatctcccagag

SEQ ID NO: 2639355 - DNA, 25 bp, Homo sapien
gattctggcaataagacacagcata

SEQ ID NO: 2639356 - DNA, 25 bp, Homo sapien
ccaggcttgccactcaacttgttat

SEQ ID NO: 2639357 - DNA, 25 bp, Homo sapien
gacgcttctagtcaaaagtattaat

SEQ ID NO: 2639358 - DNA, 25 bp, Homo sapien
gttggtttatccttagacgcttcta

SEQ ID NO: 2639359 - DNA, 25 bp, Homo sapien
tgacatttttcatacatcaaggaaa

SEQ ID NO: 2639360 - DNA, 25 bp, Homo sapien
ataaatcaagtgagcacctcacctt

SEQ ID NO: 2639361 - DNA, 25 bp, Homo sapien
aaatggcatctggtgtagttttaat

SEQ ID NO: 2639362 - DNA, 25 bp, Homo sapien
tttgtctatctttgtggagctgtaa

SEQ ID NO: 2639363 - DNA, 25 bp, Homo sapien
tatggcttaaaactgaaagggtagc

SEQ ID NO: 2639364 - DNA, 25 bp, Homo sapien
cttttgactcctgggttcgggcaat

SEQ ID NO: 2639365 - DNA, 25 bp, Homo sapien
tgcccagcccaatttcatgtaattt

SEQ ID NO: 2639366 - DNA, 25 bp, Homo sapien
agtagagaggcatgatcacagtagc

SEQ ID NO: 2639367 - DNA, 25 bp, Homo sapien
caaacagtcctacctggatcagcat

SEQ ID NO: 2639368 - DNA, 25 bp, Homo sapien
catatgaatgctgacgctgatacca

SEQ ID NO: 2639369 - DNA, 25 bp, Homo sapien
gacttaatggccagtgcataacagt

SEQ ID NO: 2639370 - DNA, 25 bp, Homo sapien
gagtacctgctaggtgccaaacagt

SEQ ID NO: 2639371 - DNA, 25 bp, Homo sapien
agctgggactaccagagtgcaccac

SEQ ID NO: 2639372 - DNA, 25 bp, Homo sapien
cacctcccagattaaagtgatcctc

SEQ ID NO: 2639373 - DNA, 25 bp, Homo sapien
ccacctcccagattaaagtgatcct

SEQ ID NO: 2639374 - DNA, 25 bp, Homo sapien
gactaccagagtgcaccaccatgcc

SEQ ID NO: 2639375 - DNA, 25 bp, Homo sapien
gagtcgaatccaatcaggcaccaac

SEQ ID NO: 2639376 - DNA, 25 bp, Homo sapien
tatggctagcaggattatgcacacc

SEQ ID NO: 2639377 - DNA, 25 bp, Homo sapien
gggtgtttgcctctattcgaaagac

SEQ ID NO: 2639378 - DNA, 25 bp, Homo sapien
ccaaagctggccatgagtcgaatcc

SEQ ID NO: 2639379 - DNA, 25 bp, Homo sapien
tccaaaaagctttgcaatcaccaat

SEQ ID NO: 2639380 - DNA, 25 bp, Homo sapien
gctgtgcccatgataagcagctggg

SEQ ID NO: 2639381 - DNA, 25 bp, Homo sapien
tctggttttgtcagctgtgcccatg

SEQ ID NO: 2639382 - DNA, 25 bp, Homo sapien
ccatgataagcagctggggagtatg

SEQ ID NO: 2639383 - DNA, 25 bp, Homo sapien
agaaaggctcttctggttttgtcag

SEQ ID NO: 2639384 - DNA, 25 bp, Homo sapien
gaatcacttcagcccgagaggcgga

SEQ ID NO: 2639385 - DNA, 25 bp, Homo sapien
aatcacttcagcccgagaggcggag

SEQ ID NO: 2639386 - DNA, 25 bp, Homo sapien
gcatgagaatcacttcagcccgaga

SEQ ID NO: 2639387 - DNA, 25 bp, Homo sapien
tgagaatcacttcagcccgagaggc

SEQ ID NO: 2639388 - DNA, 25 bp, Homo sapien
tatcattacagcacagtagctgccc

SEQ ID NO: 2639389 - DNA, 25 bp, Homo sapien
ggaagaccaacacaaagacagagca

SEQ ID NO: 2639390 - DNA, 25 bp, Homo sapien
gaagaaagggactctacagcaaatg

SEQ ID NO: 2639391 - DNA, 25 bp, Homo sapien
tacgtagacaggcagacgactggct

SEQ ID NO: 2639392 - DNA, 25 bp, Homo sapien
tgtagccagtttggatgcaactacc

SEQ ID NO: 2639393 - DNA, 25 bp, Homo sapien
tcctgtctcaccaaactgttaactg

SEQ ID NO: 2639394 - DNA, 25 bp, Homo sapien
actaccatgtgttgctttccgtctt

SEQ ID NO: 2639395 - DNA, 25 bp, Homo sapien
gctatagactcatcactgcaaattc

SEQ ID NO: 2639396 - DNA, 25 bp, Homo sapien
taaaagccgcatatctggaaaagac

SEQ ID NO: 2639397 - DNA, 25 bp, Homo sapien
gcaaaattcaaccagccaacaatgt

SEQ ID NO: 2639398 - DNA, 25 bp, Homo sapien
gatttttgccctactggatgcacag

SEQ ID NO: 2639399 - DNA, 25 bp, Homo sapien
aaagtccttacctatgcaaaattca

SEQ ID NO: 2639400 - DNA, 25 bp, Homo sapien
aatgtagttcatggcctactgtggc

SEQ ID NO: 2639401 - DNA, 25 bp, Homo sapien
aaagtaatagatccaaagcccacag

SEQ ID NO: 2639402 - DNA, 25 bp, Homo sapien
tagcagtgctggtgtaagtagaagc

SEQ ID NO: 2639403 - DNA, 25 bp, Homo sapien
gtagaagctaaacccagccttctgg

SEQ ID NO: 2639404 - DNA, 25 bp, Homo sapien
catcttacatttgttcagaatttcc

SEQ ID NO: 2639405 - DNA, 25 bp, Homo sapien
aaaagaatctgccaccaacactgcc

SEQ ID NO: 2639406 - DNA, 25 bp, Homo sapien
agttaaatacaatgttgtattcaca

SEQ ID NO: 2639407 - DNA, 25 bp, Homo sapien
tgaaaaaagaatctgccaccaacac

SEQ ID NO: 2639408 - DNA, 25 bp, Homo sapien
gtaagaaatttcttccgtctgttgc

SEQ ID NO: 2639409 - DNA, 25 bp, Homo sapien
ggcacccatgcgagaaataaaggag

SEQ ID NO: 2639410 - DNA, 25 bp, Homo sapien
tggtcccctgctctatagcaagagg

SEQ ID NO: 2639411 - DNA, 25 bp, Homo sapien
taaatggctgcctcaactggaggat

SEQ ID NO: 2639412 - DNA, 25 bp, Homo sapien
gagcccaagagagttctaaacccta

SEQ ID NO: 2639413 - DNA, 25 bp, Homo sapien
atttaacagcttgcataatgccctt

SEQ ID NO: 2639414 - DNA, 25 bp, Homo sapien
tgcataatgcccttaacccttcctt

SEQ ID NO: 2639415 - DNA, 25 bp, Homo sapien
cagcttgcataatgcccttaaccct

SEQ ID NO: 2639416 - DNA, 25 bp, Homo sapien
cagcattttgtaatgcacttccttt

SEQ ID NO: 2639417 - DNA, 25 bp, Homo sapien
tggtgggaagcttcgaaagccctca

SEQ ID NO: 2639418 - DNA, 25 bp, Homo sapien
accgcggccgcattcctaaacagtt

SEQ ID NO: 2639419 - DNA, 25 bp, Homo sapien
caaacccactggtgggaagcttcga

SEQ ID NO: 2639420 - DNA, 25 bp, Homo sapien
taaacagttcagacaaacccactgg

SEQ ID NO: 2639421 - DNA, 25 bp, Homo sapien
tatgaactggtattgcactccatgc

SEQ ID NO: 2639422 - DNA, 25 bp, Homo sapien
gatcatacggaagcttctcaacatg

SEQ ID NO: 2639423 - DNA, 25 bp, Homo sapien
caaggcttcctctcatgaaaggcta

SEQ ID NO: 2639424 - DNA, 25 bp, Homo sapien
gctgacttcaccttagttgggctgc

SEQ ID NO: 2639425 - DNA, 25 bp, Homo sapien
tctccaaatagcaccctgaggatgg

SEQ ID NO: 2639426 - DNA, 25 bp, Homo sapien
taatgtactggaattacctcacagg

SEQ ID NO: 2639427 - DNA, 25 bp, Homo sapien
tgggctgatatgtccacttctctcc

SEQ ID NO: 2639428 - DNA, 25 bp, Homo sapien
tgaggatggcttcccactacactca

SEQ ID NO: 2639429 - DNA, 25 bp, Homo sapien
tctgggaaacagctgaggtgaagcc

SEQ ID NO: 2639430 - DNA, 25 bp, Homo sapien
gctggaacagcccaaaagtgaagct

SEQ ID NO: 2639431 - DNA, 25 bp, Homo sapien
catagcatgagtgggctactggcac

SEQ ID NO: 2639432 - DNA, 25 bp, Homo sapien
ccaagattaggtagaccggctcaga

SEQ ID NO: 2639433 - DNA, 25 bp, Homo sapien
tctatatggagtactaaaccaaggc

SEQ ID NO: 2639434 - DNA, 25 bp, Homo sapien
ggtagtaagccaaacgtactccata

SEQ ID NO: 2639435 - DNA, 25 bp, Homo sapien
aaaagaacgatcactgtcagtagac

SEQ ID NO: 2639436 - DNA, 25 bp, Homo sapien
gccacaccgcatgccttcttgtaaa

SEQ ID NO: 2639437 - DNA, 25 bp, Homo sapien
aaatcaatccatttggctaaatgaa

SEQ ID NO: 2639438 - DNA, 25 bp, Homo sapien
tccatttggctaaatgaaaactctt

SEQ ID NO: 2639439 - DNA, 25 bp, Homo sapien
aatccatttggctaaatgaaaactc

SEQ ID NO: 2639440 - DNA, 25 bp, Homo sapien
tcaatccatttggctaaatgaaaac

SEQ ID NO: 2639441 - DNA, 25 bp, Homo sapien
aacagtagctgtgcacacatttctt

SEQ ID NO: 2639442 - DNA, 25 bp, Homo sapien
acagtagctgtgcacacatttcttt

SEQ ID NO: 2639443 - DNA, 25 bp, Homo sapien
tagtctgacagcaatttggaacatc

SEQ ID NO: 2639444 - DNA, 25 bp, Homo sapien
ggaatcaactgcaagcttaataagc

SEQ ID NO: 2639445 - DNA, 25 bp, Homo sapien
tactaaatctaaagtacctaggcga

SEQ ID NO: 2639446 - DNA, 25 bp, Homo sapien
ggtgatatcccaccttaaatcagat

SEQ ID NO: 2639447 - DNA, 25 bp, Homo sapien
gactgcaggccgacataattaaaat

SEQ ID NO: 2639448 - DNA, 25 bp, Homo sapien
gaagaatggctctaagtggctccca

SEQ ID NO: 2639449 - DNA, 25 bp, Homo sapien
ggaagtagccagaacctatcatcag

SEQ ID NO: 2639450 - DNA, 25 bp, Homo sapien
cagaaaagctggtagtgaatagggc

SEQ ID NO: 2639451 - DNA, 25 bp, Homo sapien
taaatgactggcactgtaccactgg

SEQ ID NO: 2639452 - DNA, 25 bp, Homo sapien
tatttaagaacaccctgaatggcaa

SEQ ID NO: 2639453 - DNA, 25 bp, Homo sapien
catgaaccttcatactcagcaggaa

SEQ ID NO: 2639454 - DNA, 25 bp, Homo sapien
cacatgtccaaaacacgaggcctaa

SEQ ID NO: 2639455 - DNA, 25 bp, Homo sapien
tgtcattccagcagactacaaactg

SEQ ID NO: 2639456 - DNA, 25 bp, Homo sapien
tttatgcattgttctacatgtactt

SEQ ID NO: 2639457 - DNA, 25 bp, Homo sapien
ttagcttaaaaaccctagtcctgca

SEQ ID NO: 2639458 - DNA, 25 bp, Homo sapien
ccataactatctgtttaactgttga

SEQ ID NO: 2639459 - DNA, 25 bp, Homo sapien
gggccgtatgccagagttgtcaatt

SEQ ID NO: 2639460 - DNA, 25 bp, Homo sapien
ggtgcgtgcacaaacataccaagac

SEQ ID NO: 2639461 - DNA, 25 bp, Homo sapien
caatgaatagcactaagaggctgcc

SEQ ID NO: 2639462 - DNA, 25 bp, Homo sapien
caatccagattaggtagaaagggca

SEQ ID NO: 2639463 - DNA, 25 bp, Homo sapien
gggcttatccctgccacaagcttta

SEQ ID NO: 2639464 - DNA, 25 bp, Homo sapien
attgagcacgggcttatccctgcca

SEQ ID NO: 2639465 - DNA, 25 bp, Homo sapien
tttctccattgagcacgggcttatc

SEQ ID NO: 2639466 - DNA, 25 bp, Homo sapien
ttatccctgccacaagctttacctt

SEQ ID NO: 2639467 - DNA, 25 bp, Homo sapien
cttctgagttcaggcttaagcttca

SEQ ID NO: 2639468 - DNA, 25 bp, Homo sapien
taaatgaggtccgagtacaagtcgg

SEQ ID NO: 2639469 - DNA, 25 bp, Homo sapien
agcagcatcacaggcccttcctttg

SEQ ID NO: 2639470 - DNA, 25 bp, Homo sapien
caaaagtgccatgaactagaaaagg

SEQ ID NO: 2639471 - DNA, 25 bp, Homo sapien
ccggtctattaggaggacaagtcta

SEQ ID NO: 2639472 - DNA, 25 bp, Homo sapien
tttctgtgaaattgaactctcctgg

SEQ ID NO: 2639473 - DNA, 25 bp, Homo sapien
gataccttaagggaagactatgctg

SEQ ID NO: 2639474 - DNA, 25 bp, Homo sapien
tcctggtgtaacaatgacagcccta

SEQ ID NO: 2639475 - DNA, 25 bp, Homo sapien
tatttagtcaatcacaattgttatg

SEQ ID NO: 2639476 - DNA, 25 bp, Homo sapien
gatagaggggccacttatttagtca

SEQ ID NO: 2639477 - DNA, 25 bp, Homo sapien
cagatactagtcaaaagatatatgg

SEQ ID NO: 2639478 - DNA, 25 bp, Homo sapien
tacaaaggatactttacttgcctaa

SEQ ID NO: 2639479 - DNA, 25 bp, Homo sapien
tggtgcccaagtggcaactcttggc

SEQ ID NO: 2639480 - DNA, 25 bp, Homo sapien
tcccaaaattctgaagtgcagatga

SEQ ID NO: 2639481 - DNA, 25 bp, Homo sapien
ccctttggtgcccaagtggcaactc

SEQ ID NO: 2639482 - DNA, 25 bp, Homo sapien
caaaattctgaagtgcagatgaagt

SEQ ID NO: 2639483 - DNA, 25 bp, Homo sapien
tttgccggcaatcactaatgaagtg

SEQ ID NO: 2639484 - DNA, 25 bp, Homo sapien
taaattaaagggactgcatcctgtg

SEQ ID NO: 2639485 - DNA, 25 bp, Homo sapien
caaacaacataagggcccaagatgg

SEQ ID NO: 2639486 - DNA, 25 bp, Homo sapien
tgtaaccctggtaaagtagatgagt

SEQ ID NO: 2639487 - DNA, 25 bp, Homo sapien
aggtagtcctgaccagcttggccag

SEQ ID NO: 2639488 - DNA, 25 bp, Homo sapien
agtcctgaccagcttggccagagga

SEQ ID NO: 2639489 - DNA, 25 bp, Homo sapien
ccagaggacaactcctccatgctct

SEQ ID NO: 2639490 - DNA, 25 bp, Homo sapien
tttccctacattgcataggaaggct

SEQ ID NO: 2639491 - DNA, 25 bp, Homo sapien
agtttgacctgatctggcttgcgga

SEQ ID NO: 2639492 - DNA, 25 bp, Homo sapien
gatgcggtataaagacagtgccaca

SEQ ID NO: 2639493 - DNA, 25 bp, Homo sapien
gatggccacgttgcaaacagtttct

SEQ ID NO: 2639494 - DNA, 25 bp, Homo sapien
cactgaggtaatcttgcaacgatca

SEQ ID NO: 2639495 - DNA, 25 bp, Homo sapien
gattagtgtacgaaaagccgtagga

SEQ ID NO: 2639496 - DNA, 25 bp, Homo sapien
tagtctacccagtacaggctagccc

SEQ ID NO: 2639497 - DNA, 25 bp, Homo sapien
ggctagcccataggaagattagtgt

SEQ ID NO: 2639498 - DNA, 25 bp, Homo sapien
gccgtaggagaggaaatatgtgcca

SEQ ID NO: 2639499 - DNA, 25 bp, Homo sapien
ttaccaaccgtcaacaccagaatgt

SEQ ID NO: 2639500 - DNA, 25 bp, Homo sapien
taccaaccgtcaacaccagaatgtt

SEQ ID NO: 2639501 - DNA, 25 bp, Homo sapien
caccatacccagacactattatata

SEQ ID NO: 2639502 - DNA, 25 bp, Homo sapien
accatacccagacactattatatat

SEQ ID NO: 2639503 - DNA, 25 bp, Homo sapien
ccatacccagacactattatatatt

SEQ ID NO: 2639504 - DNA, 25 bp, Homo sapien
acttgggggcttggtttgccacaga

SEQ ID NO: 2639505 - DNA, 25 bp, Homo sapien
gaatttggtccagtcttctgtggcc

SEQ ID NO: 2639506 - DNA, 25 bp, Homo sapien
atccacataagacttgggggcttgg

SEQ ID NO: 2639507 - DNA, 25 bp, Homo sapien
atattttaagtagacctgaatttgg

SEQ ID NO: 2639508 - DNA, 25 bp, Homo sapien
cagaactacttggatgggggttgtc

SEQ ID NO: 2639509 - DNA, 25 bp, Homo sapien
tttttaagttgttctctatgatcac

SEQ ID NO: 2639510 - DNA, 25 bp, Homo sapien
taagttgttctctatgatcaccaaa

SEQ ID NO: 2639511 - DNA, 25 bp, Homo sapien
ttgttctctatgatcaccaaaggcc

SEQ ID NO: 2639512 - DNA, 25 bp, Homo sapien
catgctgacataagtctttagttgc

SEQ ID NO: 2639513 - DNA, 25 bp, Homo sapien
cagctgttgtattaaaccaggttgt

SEQ ID NO: 2639514 - DNA, 25 bp, Homo sapien
gttgtagtatcaccttgccaaactg

SEQ ID NO: 2639515 - DNA, 25 bp, Homo sapien
tagttgcagaaaaccgaagattaaa

SEQ ID NO: 2639516 - DNA, 25 bp, Homo sapien
gtttaacctgttcttgaacctgctc

SEQ ID NO: 2639517 - DNA, 25 bp, Homo sapien
gagcaaattaagctgcttccctgat

SEQ ID NO: 2639518 - DNA, 25 bp, Homo sapien
gaacctgctcttcatctaagtgcca

SEQ ID NO: 2639519 - DNA, 25 bp, Homo sapien
tgatccgtggtacccgccctgggaa

SEQ ID NO: 2639520 - DNA, 25 bp, Homo sapien
acaagagacaaaccaccacttttct

SEQ ID NO: 2639521 - DNA, 25 bp, Homo sapien
ggagatgtcaagccttcacaccagc

SEQ ID NO: 2639522 - DNA, 25 bp, Homo sapien
caccagccctcttaagcaaacaaaa

SEQ ID NO: 2639523 - DNA, 25 bp, Homo sapien
gaattatatgttagaatccatatga

SEQ ID NO: 2639524 - DNA, 25 bp, Homo sapien
gccttgttgccgccaaagtgacagg

SEQ ID NO: 2639525 - DNA, 25 bp, Homo sapien
gcgagggtcagccatgaattgctct

SEQ ID NO: 2639526 - DNA, 25 bp, Homo sapien
tcagtcattgcagtgccttgttgcc

SEQ ID NO: 2639527 - DNA, 25 bp, Homo sapien
gttatcaaggtcaacatgcgggccc

SEQ ID NO: 2639528 - DNA, 25 bp, Homo sapien
caaatcaatggtaatttgtgaggaa

SEQ ID NO: 2639529 - DNA, 25 bp, Homo sapien
tcaatggtaatttgtgaggaaacat

SEQ ID NO: 2639530 - DNA, 25 bp, Homo sapien
tgcaaatcaatggtaatttgtgagg

SEQ ID NO: 2639531 - DNA, 25 bp, Homo sapien
aatcaatggtaatttgtgaggaaac

SEQ ID NO: 2639532 - DNA, 25 bp, Homo sapien
taagagggcataactagaatcagct

SEQ ID NO: 2639533 - DNA, 25 bp, Homo sapien
ggtatcttcacggacaacagcatcg

SEQ ID NO: 2639534 - DNA, 25 bp, Homo sapien
gaagggcactaccattatttcagga

SEQ ID NO: 2639535 - DNA, 25 bp, Homo sapien
ggcaacacgttccatgcatgagcag

SEQ ID NO: 2639536 - DNA, 25 bp, Homo sapien
agcagagccttgaagcaatgtgagc

SEQ ID NO: 2639537 - DNA, 25 bp, Homo sapien
aaacaccaattaacttgcagatccc

SEQ ID NO: 2639538 - DNA, 25 bp, Homo sapien
tcatttcacagccagaagcctgcag

SEQ ID NO: 2639539 - DNA, 25 bp, Homo sapien
atcccatttgccgacaaaactcagc

SEQ ID NO: 2639540 - DNA, 25 bp, Homo sapien
gcttcatgctgattgtattgtgtat

SEQ ID NO: 2639541 - DNA, 25 bp, Homo sapien
cccactggctggctgattaatgcaa

SEQ ID NO: 2639542 - DNA, 25 bp, Homo sapien
tatgatagtataatcactccccatg

SEQ ID NO: 2639543 - DNA, 25 bp, Homo sapien
gtattggtcttgacaagtgcttcat

SEQ ID NO: 2639544 - DNA, 25 bp, Homo sapien
ggtccggtagacacttaagcactat

SEQ ID NO: 2639545 - DNA, 25 bp, Homo sapien
gtaatatttcatcagattggaactg

SEQ ID NO: 2639546 - DNA, 25 bp, Homo sapien
tcttaatgcactgacttttctgtgg

SEQ ID NO: 2639547 - DNA, 25 bp, Homo sapien
aagaattctaagaaaactggcttgt

SEQ ID NO: 2639548 - DNA, 25 bp, Homo sapien
tgtttttcaagttccttctccttca

SEQ ID NO: 2639549 - DNA, 25 bp, Homo sapien
tctagcttttctctaacatccagca

SEQ ID NO: 2639550 - DNA, 25 bp, Homo sapien
ctagcttttctctaacatccagcat

SEQ ID NO: 2639551 - DNA, 25 bp, Homo sapien
gctctagcttttctctaacatccag

SEQ ID NO: 2639552 - DNA, 25 bp, Homo sapien
cagctctagcttttctctaacatcc

SEQ ID NO: 2639553 - DNA, 25 bp, Homo sapien
tgttcaaaaattataaaaacatcca

SEQ ID NO: 2639554 - DNA, 25 bp, Homo sapien
gccttttgctccaacttgcagtggg

SEQ ID NO: 2639555 - DNA, 25 bp, Homo sapien
tggttggcatttgcaccctgaggca

SEQ ID NO: 2639556 - DNA, 25 bp, Homo sapien
ggttaagttgggtaattcactgcca

SEQ ID NO: 2639557 - DNA, 25 bp, Homo sapien
tcttcagctgttttagccaactggc

SEQ ID NO: 2639558 - DNA, 25 bp, Homo sapien
tgtctgggagcatttcttggttgtc

SEQ ID NO: 2639559 - DNA, 25 bp, Homo sapien
cattctatgtccttcagtcgagtca

SEQ ID NO: 2639560 - DNA, 25 bp, Homo sapien
ccaaaacttggagggcactattagc

SEQ ID NO: 2639561 - DNA, 25 bp, Homo sapien
cactattagcctacagcaggtgggc

SEQ ID NO: 2639562 - DNA, 25 bp, Homo sapien
aagctaaggttaaaggcgtcctgca

SEQ ID NO: 2639563 - DNA, 25 bp, Homo sapien
catcctaagtactaagaggcaggtc

SEQ ID NO: 2639564 - DNA, 25 bp, Homo sapien
taaatcagtcataccattctgtggc

SEQ ID NO: 2639565 - DNA, 25 bp, Homo sapien
cacaattcagaaagccgtgtcagct

SEQ ID NO: 2639566 - DNA, 25 bp, Homo sapien
tcagtgtcgtcatggtaacagtagt

SEQ ID NO: 2639567 - DNA, 25 bp, Homo sapien
taatgtgctgcaagtggctatcctg

SEQ ID NO: 2639568 - DNA, 25 bp, Homo sapien
tcgatggctcgggtgaacactgtcc

SEQ ID NO: 2639569 - DNA, 25 bp, Homo sapien
tatcctgccagtggagatcgcatgc

SEQ ID NO: 2639570 - DNA, 25 bp, Homo sapien
cattccagtaatgctatagaaacta

SEQ ID NO: 2639571 - DNA, 25 bp, Homo sapien
attgaatccttcagttctccacctc

SEQ ID NO: 2639572 - DNA, 25 bp, Homo sapien
aagaagtaagtcatggaaatgtctt

SEQ ID NO: 2639573 - DNA, 25 bp, Homo sapien
tggaaatgtctttccggtttggtca

SEQ ID NO: 2639574 - DNA, 25 bp, Homo sapien
taatgcgtccactcttgcacaggct

SEQ ID NO: 2639575 - DNA, 25 bp, Homo sapien
gctgctgtcgtcttaatgtattaac

SEQ ID NO: 2639576 - DNA, 25 bp, Homo sapien
gctattgctagtctcagtgcttctc

SEQ ID NO: 2639577 - DNA, 25 bp, Homo sapien
gggtacccatgagaacgtaatgcgt

SEQ ID NO: 2639578 - DNA, 25 bp, Homo sapien
aacggtttggcacaatgtattgaaa

SEQ ID NO: 2639579 - DNA, 25 bp, Homo sapien
aaaaggtccttatattcaatttctg

SEQ ID NO: 2639580 - DNA, 25 bp, Homo sapien
aagaaacatgagcactactcctgga

SEQ ID NO: 2639581 - DNA, 25 bp, Homo sapien
ttgaaatttaagtcgagtcctagat

SEQ ID NO: 2639582 - DNA, 25 bp, Homo sapien
ggccaattttagtagctccttctta

SEQ ID NO: 2639583 - DNA, 25 bp, Homo sapien
caattttagtagctccttcttaaag

SEQ ID NO: 2639584 - DNA, 25 bp, Homo sapien
ccggccaattttagtagctccttct

SEQ ID NO: 2639585 - DNA, 25 bp, Homo sapien
gccaattttagtagctccttcttaa

SEQ ID NO: 2639586 - DNA, 25 bp, Homo sapien
acccagccctccagattggttatcg

SEQ ID NO: 2639587 - DNA, 25 bp, Homo sapien
agaacccagagaggttctcatcatc

SEQ ID NO: 2639588 - DNA, 25 bp, Homo sapien
tactgaagagagtgcccacagggtc

SEQ ID NO: 2639589 - DNA, 25 bp, Homo sapien
tcatcaatgcggcaggcttccataa

SEQ ID NO: 2639590 - DNA, 25 bp, Homo sapien
taggaagactgcttgcttgcgaaaa

SEQ ID NO: 2639591 - DNA, 25 bp, Homo sapien
gcccatcaggcatgatacgctgctg

SEQ ID NO: 2639592 - DNA, 25 bp, Homo sapien
tctcttgtgtgtacagcccatcagg

SEQ ID NO: 2639593 - DNA, 25 bp, Homo sapien
cagccagcgttaaataggattcccc

SEQ ID NO: 2639594 - DNA, 25 bp, Homo sapien
aaatgaactaacacttcttgtaaag

SEQ ID NO: 2639595 - DNA, 25 bp, Homo sapien
agcatacacattttacgttcctaaa

SEQ ID NO: 2639596 - DNA, 25 bp, Homo sapien
gcatacacattttacgttcctaaaa

SEQ ID NO: 2639597 - DNA, 25 bp, Homo sapien
gagcatacacattttacgttcctaa

SEQ ID NO: 2639598 - DNA, 25 bp, Homo sapien
ccaattcagcatcgtgaggtaggag

SEQ ID NO: 2639599 - DNA, 25 bp, Homo sapien
tcacctaaaccactatatggtccgg

SEQ ID NO: 2639600 - DNA, 25 bp, Homo sapien
gaacgctctcccgatggattatttc

SEQ ID NO: 2639601 - DNA, 25 bp, Homo sapien
gcaaatgtgtgcattggaacgctct

SEQ ID NO: 2639602 - DNA, 25 bp, Homo sapien
aaaacataaaccaagtggtataatg

SEQ ID NO: 2639603 - DNA, 25 bp, Homo sapien
agattccatattgccaaggaaagca

SEQ ID NO: 2639604 - DNA, 25 bp, Homo sapien
caaattacaggatgtcagccttaaa

SEQ ID NO: 2639605 - DNA, 25 bp, Homo sapien
tacactcaatactttcagaacaggg

SEQ ID NO: 2639606 - DNA, 25 bp, Homo sapien
cagaaggactaagaagcatgcgagc

SEQ ID NO: 2639607 - DNA, 25 bp, Homo sapien
gaaaagcaagcctttctgcctggca

SEQ ID NO: 2639608 - DNA, 25 bp, Homo sapien
ccatggcagacctttggcaggatag

SEQ ID NO: 2639609 - DNA, 25 bp, Homo sapien
tgggctgccttgcaatacctggtgg

SEQ ID NO: 2639610 - DNA, 25 bp, Homo sapien
tcaatgtggcttagagtgaaccagc

SEQ ID NO: 2639611 - DNA, 25 bp, Homo sapien
tcctgatggagcagtagattccaat

SEQ ID NO: 2639612 - DNA, 25 bp, Homo sapien
acaactgatgcaatgtggtgtgggc

SEQ ID NO: 2639613 - DNA, 25 bp, Homo sapien
tagcatggtggatgccagctcacac

SEQ ID NO: 2639614 - DNA, 25 bp, Homo sapien
cagctccagagacactttcaaaaga

SEQ ID NO: 2639615 - DNA, 25 bp, Homo sapien
taatactgtttccagcctccgaaca

SEQ ID NO: 2639616 - DNA, 25 bp, Homo sapien
ttttctggatggattctaatactgt

SEQ ID NO: 2639617 - DNA, 25 bp, Homo sapien
caaactgtccatgagagttgctatt

SEQ ID NO: 2639618 - DNA, 25 bp, Homo sapien
cgacttcagtagcacacgttaccag

SEQ ID NO: 2639619 - DNA, 25 bp, Homo sapien
atctcccgccgtcgccaatttaagg

SEQ ID NO: 2639620 - DNA, 25 bp, Homo sapien
ttcagtagcacacgttaccagccac

SEQ ID NO: 2639621 - DNA, 25 bp, Homo sapien
aggttgacagtgtcattcgcataac

SEQ ID NO: 2639622 - DNA, 25 bp, Homo sapien
ttaccaagggagtggctaagcgcac

SEQ ID NO: 2639623 - DNA, 25 bp, Homo sapien
tcatgccagtcgtagcagcgtcgag

SEQ ID NO: 2639624 - DNA, 25 bp, Homo sapien
tggtacgccgtctcaaaagctatgt

SEQ ID NO: 2639625 - DNA, 25 bp, Homo sapien
tccagtgacatgagcttaccagagt

SEQ ID NO: 2639626 - DNA, 25 bp, Homo sapien
tttcctaggctaggaggcacgaacc

SEQ ID NO: 2639627 - DNA, 25 bp, Homo sapien
tgtgccatgcttctggacgaacagc

SEQ ID NO: 2639628 - DNA, 25 bp, Homo sapien
tgagccaaccctgaagcaaggcgta

SEQ ID NO: 2639629 - DNA, 25 bp, Homo sapien
gacagtcgctaagtttccacatgca

SEQ ID NO: 2639630 - DNA, 25 bp, Homo sapien
agctgctccatctagcccatttgca

SEQ ID NO: 2639631 - DNA, 25 bp, Homo sapien
gctgctccatctagcccatttgcaa

SEQ ID NO: 2639632 - DNA, 25 bp, Homo sapien
ctgctccatctagcccatttgcaaa

SEQ ID NO: 2639633 - DNA, 25 bp, Homo sapien
gctccatctagcccatttgcaaagt

SEQ ID NO: 2639634 - DNA, 25 bp, Homo sapien
gccaaggcaaggagccaactaacag

SEQ ID NO: 2639635 - DNA, 25 bp, Homo sapien
cattataccacacatgccatagcca

SEQ ID NO: 2639636 - DNA, 25 bp, Homo sapien
caagaatttgggggccatatagcac

SEQ ID NO: 2639637 - DNA, 25 bp, Homo sapien
cacacatgccatagccaaggcaagg

SEQ ID NO: 2639638 - DNA, 25 bp, Homo sapien
tggtcggagtgagggttcaggagca

SEQ ID NO: 2639639 - DNA, 25 bp, Homo sapien
gatgggcattgctggagaactggtc

SEQ ID NO: 2639640 - DNA, 25 bp, Homo sapien
ctggagaactggtcggagtgagggt

SEQ ID NO: 2639641 - DNA, 25 bp, Homo sapien
tgatgggcattgctggagaactggt

SEQ ID NO: 2639642 - DNA, 25 bp, Homo sapien
ggcccggcatccttctgagacacat

SEQ ID NO: 2639643 - DNA, 25 bp, Homo sapien
tgcaatttagtgaaaccaggccttt

SEQ ID NO: 2639644 - DNA, 25 bp, Homo sapien
gaaatttgcattcagtcctctcagg

SEQ ID NO: 2639645 - DNA, 25 bp, Homo sapien
gaaggatttctgctaggcccggcat

SEQ ID NO: 2639646 - DNA, 25 bp, Homo sapien
acagccataggtcccacttgtgcag

SEQ ID NO: 2639647 - DNA, 25 bp, Homo sapien
tctccagacattacagccataggtc

SEQ ID NO: 2639648 - DNA, 25 bp, Homo sapien
caggaggactgagctgcctgtttcc

SEQ ID NO: 2639649 - DNA, 25 bp, Homo sapien
tcgatttttcctagcaggtcccaaa

SEQ ID NO: 2639650 - DNA, 25 bp, Homo sapien
tctacctggtgacatcaggataatg

SEQ ID NO: 2639651 - DNA, 25 bp, Homo sapien
tcagagccaaaggattagggggctt

SEQ ID NO: 2639652 - DNA, 25 bp, Homo sapien
cttttgccggcttctacctggtgac

SEQ ID NO: 2639653 - DNA, 25 bp, Homo sapien
tacctggtgacatcaggataatgct

SEQ ID NO: 2639654 - DNA, 25 bp, Homo sapien
ctggcctcagggaagggggaagagg

SEQ ID NO: 2639655 - DNA, 25 bp, Homo sapien
tggcctcagggaagggggaagagga

SEQ ID NO: 2639656 - DNA, 25 bp, Homo sapien
tgtctctcgctgtgaggttgctcag

SEQ ID NO: 2639657 - DNA, 25 bp, Homo sapien
ttcaccatcgctggtaaaagttcaa

SEQ ID NO: 2639658 - DNA, 25 bp, Homo sapien
ggttgctcagtatccagaggcccat

SEQ ID NO: 2639659 - DNA, 25 bp, Homo sapien
gagttcaaagagattgcactggccc

SEQ ID NO: 2639660 - DNA, 25 bp, Homo sapien
tcagcctggtgctttcggtctgaag

SEQ ID NO: 2639661 - DNA, 25 bp, Homo sapien
gtctgaaggacaaagggcacttctt

SEQ ID NO: 2639662 - DNA, 25 bp, Homo sapien
ttccaaatgttgcttagcgatgtct

SEQ ID NO: 2639663 - DNA, 25 bp, Homo sapien
caaatgttgcttagcgatgtctttc

SEQ ID NO: 2639664 - DNA, 25 bp, Homo sapien
atagctccccgatagggagaacaac

SEQ ID NO: 2639665 - DNA, 25 bp, Homo sapien
tagctccccgatagggagaacaact

SEQ ID NO: 2639666 - DNA, 25 bp, Homo sapien
ctgtctagccaggtggctgagcagc

SEQ ID NO: 2639667 - DNA, 25 bp, Homo sapien
agctccccgatagggagaacaactg

SEQ ID NO: 2639668 - DNA, 25 bp, Homo sapien
ccttcgctttggttcaaggacacca

SEQ ID NO: 2639669 - DNA, 25 bp, Homo sapien
ttgggctcacaaggacatcagtctg

SEQ ID NO: 2639670 - DNA, 25 bp, Homo sapien
caaaacacgttatatctgtgctgct

SEQ ID NO: 2639671 - DNA, 25 bp, Homo sapien
cagagagagcattgacaaaacacgt

SEQ ID NO: 2639672 - DNA, 25 bp, Homo sapien
tccacctgttctggcccttcagtca

SEQ ID NO: 2639673 - DNA, 25 bp, Homo sapien
ccaactccaccgtccacctgttctg

SEQ ID NO: 2639674 - DNA, 25 bp, Homo sapien
tccaccgtccacctgttctggccct

SEQ ID NO: 2639675 - DNA, 25 bp, Homo sapien
accgtccacctgttctggcccttca

SEQ ID NO: 2639676 - DNA, 25 bp, Homo sapien
agaaaagtgccaccgtggcgcccat

SEQ ID NO: 2639677 - DNA, 25 bp, Homo sapien
gccacagtaagctctgatggacccc

SEQ ID NO: 2639678 - DNA, 25 bp, Homo sapien
tgaggtatgcgagagaaaagtgcca

SEQ ID NO: 2639679 - DNA, 25 bp, Homo sapien
cacgctggcccggtgccacagtaag

SEQ ID NO: 2639680 - DNA, 25 bp, Homo sapien
gaccactaacaagagatcaaatcca

SEQ ID NO: 2639681 - DNA, 25 bp, Homo sapien
caagagaatacggaccactaacaag

SEQ ID NO: 2639682 - DNA, 25 bp, Homo sapien
tacggaccactaacaagagatcaaa

SEQ ID NO: 2639683 - DNA, 25 bp, Homo sapien
gaatacggaccactaacaagagatc

SEQ ID NO: 2639684 - DNA, 25 bp, Homo sapien
ctccatcgatcctcgggcttgtcag

SEQ ID NO: 2639685 - DNA, 25 bp, Homo sapien
aaagcccgccgaactggagcccaga

SEQ ID NO: 2639686 - DNA, 25 bp, Homo sapien
ctgaatggcaaagcccgccgaactg

SEQ ID NO: 2639687 - DNA, 25 bp, Homo sapien
agctgcgccggatgcctgaatggca

SEQ ID NO: 2639688 - DNA, 25 bp, Homo sapien
agctgcgagaccttgaaggcatctg

SEQ ID NO: 2639689 - DNA, 25 bp, Homo sapien
gtcatttttccagctgcgagacctt

SEQ ID NO: 2639690 - DNA, 25 bp, Homo sapien
ttttccagctgcgagaccttgaagg

SEQ ID NO: 2639691 - DNA, 25 bp, Homo sapien
ttccagctgcgagaccttgaaggca

SEQ ID NO: 2639692 - DNA, 25 bp, Homo sapien
cagccggttagtggccagtgacaaa

SEQ ID NO: 2639693 - DNA, 25 bp, Homo sapien
tcaactgccggctgtaattagggag

SEQ ID NO: 2639694 - DNA, 25 bp, Homo sapien
tgacggcactgaataatgaggcagc

SEQ ID NO: 2639695 - DNA, 25 bp, Homo sapien
gaatgataatgtattgcagtctggg

SEQ ID NO: 2639696 - DNA, 25 bp, Homo sapien
tggtttcagtacaggactcaggatc

SEQ ID NO: 2639697 - DNA, 25 bp, Homo sapien
cagtacaggactcaggatcaagatc

SEQ ID NO: 2639698 - DNA, 25 bp, Homo sapien
tcaggatcaagatcaactggctgct

SEQ ID NO: 2639699 - DNA, 25 bp, Homo sapien
aactggctgcttaagtgtcagggac

SEQ ID NO: 2639700 - DNA, 25 bp, Homo sapien
tcctgagatttatagctggagatct

SEQ ID NO: 2639701 - DNA, 25 bp, Homo sapien
gaatcctgagatttatagctggaga

SEQ ID NO: 2639702 - DNA, 25 bp, Homo sapien
tctgactttctggaggaactgatac

SEQ ID NO: 2639703 - DNA, 25 bp, Homo sapien
tttctggaggaactgatacagaagg

SEQ ID NO: 2639704 - DNA, 25 bp, Homo sapien
tttgggcatttgagcttctttatgc

SEQ ID NO: 2639705 - DNA, 25 bp, Homo sapien
tcctggcccatgagataggggaaca

SEQ ID NO: 2639706 - DNA, 25 bp, Homo sapien
atttgagcttctttatgcagcatgg

SEQ ID NO: 2639707 - DNA, 25 bp, Homo sapien
gagataggggaacatttgggcattt

SEQ ID NO: 2639708 - DNA, 25 bp, Homo sapien
acaggtaagaatttggcccaggcat

SEQ ID NO: 2639709 - DNA, 25 bp, Homo sapien
cacaggtaagaatttggcccaggca

SEQ ID NO: 2639710 - DNA, 25 bp, Homo sapien
tttggcccaggcatgagcacactgc

SEQ ID NO: 2639711 - DNA, 25 bp, Homo sapien
tggcattgaataggcccactgctga

SEQ ID NO: 2639712 - DNA, 25 bp, Homo sapien
ctacttgtagtgaagtgtttcctgg

SEQ ID NO: 2639713 - DNA, 25 bp, Homo sapien
gctagatatggcattgaataggccc

SEQ ID NO: 2639714 - DNA, 25 bp, Homo sapien
aaggcatcttcgtgtgtgctagata

SEQ ID NO: 2639715 - DNA, 25 bp, Homo sapien
ctggtctgcacggacacacctcctc

SEQ ID NO: 2639716 - DNA, 25 bp, Homo sapien
ttagcaggtaatgtgggcactgagg

SEQ ID NO: 2639717 - DNA, 25 bp, Homo sapien
tgggagcagccagagtctcagagct

SEQ ID NO: 2639718 - DNA, 25 bp, Homo sapien
acacacctcctccagaataggctct

SEQ ID NO: 2639719 - DNA, 25 bp, Homo sapien
ccacctgcctgctgtaattacaggg

SEQ ID NO: 2639720 - DNA, 25 bp, Homo sapien
tccactgagaataacgtgttcgaca

SEQ ID NO: 2639721 - DNA, 25 bp, Homo sapien
tgaattataatgtgttgcaggccgg

SEQ ID NO: 2639722 - DNA, 25 bp, Homo sapien
gagcccacggtacctgtacttctct

SEQ ID NO: 2639723 - DNA, 25 bp, Homo sapien
agggcccgccatgggcgctgccagg

SEQ ID NO: 2639724 - DNA, 25 bp, Homo sapien
gggcccgccatgggcgctgccaggc

SEQ ID NO: 2639725 - DNA, 25 bp, Homo sapien
tggcttccttcctgccagactcctc

SEQ ID NO: 2639726 - DNA, 25 bp, Homo sapien
ttggcttccttcctgccagactcct

SEQ ID NO: 2639727 - DNA, 25 bp, Homo sapien
cttggcttccttcctgccagactcc

SEQ ID NO: 2639728 - DNA, 25 bp, Homo sapien
ggcttccttcctgccagactcctcc

SEQ ID NO: 2639729 - DNA, 25 bp, Homo sapien
cttaagccccaagagctagcaggta

SEQ ID NO: 2639730 - DNA, 25 bp, Homo sapien
tgacctcagttctgcactcccatgc

SEQ ID NO: 2639731 - DNA, 25 bp, Homo sapien
ggagtttccattggccacgccttct

SEQ ID NO: 2639732 - DNA, 25 bp, Homo sapien
cagtcccgaactgcgtgcttaagcc

SEQ ID NO: 2639733 - DNA, 25 bp, Homo sapien
tatctggagaatgtgcaatcggcac

SEQ ID NO: 2639734 - DNA, 25 bp, Homo sapien
tgaaggagagccaataccttgccat

SEQ ID NO: 2639735 - DNA, 25 bp, Homo sapien
tcttttcctgggtggctttgccaaa

SEQ ID NO: 2639736 - DNA, 25 bp, Homo sapien
taaaaagggacgcatacagctgagt

SEQ ID NO: 2639737 - DNA, 25 bp, Homo sapien
gcttctgatgagcttctggtgaggg

SEQ ID NO: 2639738 - DNA, 25 bp, Homo sapien
tgcttctgatgagcttctggtgagg

SEQ ID NO: 2639739 - DNA, 25 bp, Homo sapien
cttctgatgagcttctggtgagggc

SEQ ID NO: 2639740 - DNA, 25 bp, Homo sapien
ctgcttctgatgagcttctggtgag

SEQ ID NO: 2639741 - DNA, 25 bp, Homo sapien
agttacgcagacagcataagaagag

SEQ ID NO: 2639742 - DNA, 25 bp, Homo sapien
agacagcataagaagagtggtgcca

SEQ ID NO: 2639743 - DNA, 25 bp, Homo sapien
cagcataagaagagtggtgccagca

SEQ ID NO: 2639744 - DNA, 25 bp, Homo sapien
gttacgcagacagcataagaagagt

SEQ ID NO: 2639745 - DNA, 25 bp, Homo sapien
caaatcattcttttgactgtcttga

SEQ ID NO: 2639746 - DNA, 25 bp, Homo sapien
tcaaatcattcttttgactgtcttg

SEQ ID NO: 2639747 - DNA, 25 bp, Homo sapien
tgaaatgtagagtttccacaatttc

SEQ ID NO: 2639748 - DNA, 25 bp, Homo sapien
cacaatttctactgggagttctgtt

SEQ ID NO: 2639749 - DNA, 25 bp, Homo sapien
gcatacgtttggcagtcctcacctc

SEQ ID NO: 2639750 - DNA, 25 bp, Homo sapien
tcccacttggagtatttatcatgct

SEQ ID NO: 2639751 - DNA, 25 bp, Homo sapien
tatcatgcttgtcgttaagaactgc

SEQ ID NO: 2639752 - DNA, 25 bp, Homo sapien
acagtgccaagcctgggaccaggtg

SEQ ID NO: 2639753 - DNA, 25 bp, Homo sapien
gctgacaagcgcatttcctccccat

SEQ ID NO: 2639754 - DNA, 25 bp, Homo sapien
gggctgacaagcgcatttcctcccc

SEQ ID NO: 2639755 - DNA, 25 bp, Homo sapien
ggctgacaagcgcatttcctcccca

SEQ ID NO: 2639756 - DNA, 25 bp, Homo sapien
cccagtgttccccatcctccgattt

SEQ ID NO: 2639757 - DNA, 25 bp, Homo sapien
tgttccccatcctccgatttctctc

SEQ ID NO: 2639758 - DNA, 25 bp, Homo sapien
agtgttccccatcctccgatttctc

SEQ ID NO: 2639759 - DNA, 25 bp, Homo sapien
cagtgttccccatcctccgatttct

SEQ ID NO: 2639760 - DNA, 25 bp, Homo sapien
caggcaataggagttaggagcctct

SEQ ID NO: 2639761 - DNA, 25 bp, Homo sapien
tcatcactgtgaggacattacctcc

SEQ ID NO: 2639762 - DNA, 25 bp, Homo sapien
tcactggattctagtcaggcagcct

SEQ ID NO: 2639763 - DNA, 25 bp, Homo sapien
gcttaaagtgagaggttcatcttcc

SEQ ID NO: 2639764 - DNA, 25 bp, Homo sapien
gatgtgagatgttgtttttcgtccc

SEQ ID NO: 2639765 - DNA, 25 bp, Homo sapien
tgaaagaaccctgctggaatgaagg

SEQ ID NO: 2639766 - DNA, 25 bp, Homo sapien
acagggcctctcaaccacagccaag

SEQ ID NO: 2639767 - DNA, 25 bp, Homo sapien
ctctaatctcaccaataccagcctg

SEQ ID NO: 2639768 - DNA, 25 bp, Homo sapien
cctgcaggcatttttttccatttta

SEQ ID NO: 2639769 - DNA, 25 bp, Homo sapien
tgcaggcatttttttccattttatc

SEQ ID NO: 2639770 - DNA, 25 bp, Homo sapien
aggcatttttttccattttatccat

SEQ ID NO: 2639771 - DNA, 25 bp, Homo sapien
gcaggcatttttttccattttatcc

SEQ ID NO: 2639772 - DNA, 25 bp, Homo sapien
ctggttggatccaacaaaagaccac

SEQ ID NO: 2639773 - DNA, 25 bp, Homo sapien
cctggttggatccaacaaaagacca

SEQ ID NO: 2639774 - DNA, 25 bp, Homo sapien
tggttggatccaacaaaagaccaca

SEQ ID NO: 2639775 - DNA, 25 bp, Homo sapien
ctgcccatatcaaaacatgcttcat

SEQ ID NO: 2639776 - DNA, 25 bp, Homo sapien
gcagaagcagccactagcttagcaa

SEQ ID NO: 2639777 - DNA, 25 bp, Homo sapien
caatggcagactcaatagccagagg

SEQ ID NO: 2639778 - DNA, 25 bp, Homo sapien
ccgggctttgtcaccagtccatgca

SEQ ID NO: 2639779 - DNA, 25 bp, Homo sapien
ggttgatcgccccttcagattggca

SEQ ID NO: 2639780 - DNA, 25 bp, Homo sapien
ggacagggtgagtgaaagccccaca

SEQ ID NO: 2639781 - DNA, 25 bp, Homo sapien
aagtggtggccgcaccgagagacat

SEQ ID NO: 2639782 - DNA, 25 bp, Homo sapien
cgcaccgagagacatctaaagttct

SEQ ID NO: 2639783 - DNA, 25 bp, Homo sapien
tttcccctccaagtggtggccgcac

SEQ ID NO: 2639784 - DNA, 25 bp, Homo sapien
tggaatgccttcgttcgctggcagg

SEQ ID NO: 2639785 - DNA, 25 bp, Homo sapien
aatgccttcgttcgctggcaggtga

SEQ ID NO: 2639786 - DNA, 25 bp, Homo sapien
gccttcgttcgctggcaggtgagct

SEQ ID NO: 2639787 - DNA, 25 bp, Homo sapien
ctggaatgccttcgttcgctggcag

SEQ ID NO: 2639788 - DNA, 25 bp, Homo sapien
gtttgccgttcactgaagtacatag

SEQ ID NO: 2639789 - DNA, 25 bp, Homo sapien
tttgtttgccgttcactgaagtaca

SEQ ID NO: 2639790 - DNA, 25 bp, Homo sapien
tgtttgtttgccgttcactgaagta

SEQ ID NO: 2639791 - DNA, 25 bp, Homo sapien
gatctgtttgtttgccgttcactga

SEQ ID NO: 2639792 - DNA, 25 bp, Homo sapien
gggcaccaggcaatgaagtaaagtc

SEQ ID NO: 2639793 - DNA, 25 bp, Homo sapien
gcatatctgaagggcaccaggcaat

SEQ ID NO: 2639794 - DNA, 25 bp, Homo sapien
agcatatctgaagggcaccaggcaa

SEQ ID NO: 2639795 - DNA, 25 bp, Homo sapien
catctgtgctctgattatgatcaat

SEQ ID NO: 2639796 - DNA, 25 bp, Homo sapien
caacctggagtctactgatgtggat

SEQ ID NO: 2639797 - DNA, 25 bp, Homo sapien
tattagaatatagagtttgcactga

SEQ ID NO: 2639798 - DNA, 25 bp, Homo sapien
gatatgcccgggaaatgtgctgttt

SEQ ID NO: 2639799 - DNA, 25 bp, Homo sapien
tgttctgcctaattgaggaggttgg

SEQ ID NO: 2639800 - DNA, 25 bp, Homo sapien
gaggttggaagctaatgagttttct

SEQ ID NO: 2639801 - DNA, 25 bp, Homo sapien
aggaggttggaagctaatgagtttt

SEQ ID NO: 2639802 - DNA, 25 bp, Homo sapien
ggttggaagctaatgagttttctga

SEQ ID NO: 2639803 - DNA, 25 bp, Homo sapien
gaagtaaacttcagcggtcagatcc

SEQ ID NO: 2639804 - DNA, 25 bp, Homo sapien
tctcgatttgattgaagggaagtaa

SEQ ID NO: 2639805 - DNA, 25 bp, Homo sapien
aactctgtctctatcgcagtgcggg

SEQ ID NO: 2639806 - DNA, 25 bp, Homo sapien
cagatccttgggtggtgggccaaca

SEQ ID NO: 2639807 - DNA, 25 bp, Homo sapien
aaatttgttccaagtttcccatgct

SEQ ID NO: 2639808 - DNA, 25 bp, Homo sapien
ttctccaggatcatgcatactccct

SEQ ID NO: 2639809 - DNA, 25 bp, Homo sapien
catgcatactccctgtggtcttttc

SEQ ID NO: 2639810 - DNA, 25 bp, Homo sapien
tgtggtcttttctgatgctaggtaa

SEQ ID NO: 2639811 - DNA, 25 bp, Homo sapien
tatccctggcaactacagtcctact

SEQ ID NO: 2639812 - DNA, 25 bp, Homo sapien
tgtcaacatatctacccttttaagt

SEQ ID NO: 2639813 - DNA, 25 bp, Homo sapien
tcatacccattgaagacgaatccct

SEQ ID NO: 2639814 - DNA, 25 bp, Homo sapien
gtaaggacacttaacatgtcaacat

SEQ ID NO: 2639815 - DNA, 25 bp, Homo sapien
taacatggtaaccttgccaagacat

SEQ ID NO: 2639816 - DNA, 25 bp, Homo sapien
cacttattgagtagcagcggcacag

SEQ ID NO: 2639817 - DNA, 25 bp, Homo sapien
gaaatgctgagtgttgcccagttgg

SEQ ID NO: 2639818 - DNA, 25 bp, Homo sapien
gcccagttggagctgaaatcgcttc

SEQ ID NO: 2639819 - DNA, 25 bp, Homo sapien
tctctgctccgttcttgggtccata

SEQ ID NO: 2639820 - DNA, 25 bp, Homo sapien
cattgagaacatcatggttgtaggc

SEQ ID NO: 2639821 - DNA, 25 bp, Homo sapien
tagaacacagtcagctaacattgag

SEQ ID NO: 2639822 - DNA, 25 bp, Homo sapien
tgggtccatattctcctacacattt

SEQ ID NO: 2639823 - DNA, 25 bp, Homo sapien
caagagtaaactaccagctggcagt

SEQ ID NO: 2639824 - DNA, 25 bp, Homo sapien
gaaaggtatgcaggccttgcacaga

SEQ ID NO: 2639825 - DNA, 25 bp, Homo sapien
tagcaagcattcgagtaggttccaa

SEQ ID NO: 2639826 - DNA, 25 bp, Homo sapien
gagttgcctaaaaggtccccatggc

SEQ ID NO: 2639827 - DNA, 25 bp, Homo sapien
gtgaccctggaggaatacggtttga

SEQ ID NO: 2639828 - DNA, 25 bp, Homo sapien
tgaagcattgatgagatttctgcag

SEQ ID NO: 2639829 - DNA, 25 bp, Homo sapien
gcctccgttttgtctgatcccaagg

SEQ ID NO: 2639830 - DNA, 25 bp, Homo sapien
caattccagcctccgttttgtctga

SEQ ID NO: 2639831 - DNA, 25 bp, Homo sapien
caaagaagcattgcaccggagagta

SEQ ID NO: 2639832 - DNA, 25 bp, Homo sapien
ggaccattcaccagtatgacaggaa

SEQ ID NO: 2639833 - DNA, 25 bp, Homo sapien
atttctggtcataagtgggatggca

SEQ ID NO: 2639834 - DNA, 25 bp, Homo sapien
taagtgggatggcacaaagaagcat

SEQ ID NO: 2639835 - DNA, 25 bp, Homo sapien
ttatgttccactgccgacaacatcc

SEQ ID NO: 2639836 - DNA, 25 bp, Homo sapien
atgctcagaaggtgatggagcctct

SEQ ID NO: 2639837 - DNA, 25 bp, Homo sapien
gcctctgtcttgattatgttccact

SEQ ID NO: 2639838 - DNA, 25 bp, Homo sapien
ctgatgctcagaaggtgatggagcc

SEQ ID NO: 2639839 - DNA, 25 bp, Homo sapien
tctctctctgtcctcgtcagagctt

SEQ ID NO: 2639840 - DNA, 25 bp, Homo sapien
tagcatttggtgcaaatgagactcc

SEQ ID NO: 2639841 - DNA, 25 bp, Homo sapien
ggcatcgggcttgttcatctcgtta

SEQ ID NO: 2639842 - DNA, 25 bp, Homo sapien
ttttctttgtcgagaagccttctct

SEQ ID NO: 2639843 - DNA, 25 bp, Homo sapien
gaggagaattcgatgaatttgcaaa

SEQ ID NO: 2639844 - DNA, 25 bp, Homo sapien
gagaattcgatgaatttgcaaaggc

SEQ ID NO: 2639845 - DNA, 25 bp, Homo sapien
ctgaggaggagaattcgatgaattt

SEQ ID NO: 2639846 - DNA, 25 bp, Homo sapien
taactgaggaggagaattcgatgaa

SEQ ID NO: 2639847 - DNA, 25 bp, Homo sapien
ctgtgcccaagatgtgctgaccatt

SEQ ID NO: 2639848 - DNA, 25 bp, Homo sapien
tggctaccaagccactcaggggcct

SEQ ID NO: 2639849 - DNA, 25 bp, Homo sapien
accagcgctttccatgctccctctg

SEQ ID NO: 2639850 - DNA, 25 bp, Homo sapien
ctcaggggccttatagtaaccccag

SEQ ID NO: 2639851 - DNA, 25 bp, Homo sapien
atttcttctccgtgcgttttccagg

SEQ ID NO: 2639852 - DNA, 25 bp, Homo sapien
tgtccgcttgcagttgccagagtgt

SEQ ID NO: 2639853 - DNA, 25 bp, Homo sapien
caggggcagtgcaattaggaacact

SEQ ID NO: 2639854 - DNA, 25 bp, Homo sapien
caccatctcatgtattttgctgtat

SEQ ID NO: 2639855 - DNA, 25 bp, Homo sapien
gaccatatatgtggcaagaacaatg

SEQ ID NO: 2639856 - DNA, 25 bp, Homo sapien
caatgaattgcaatgggagtgctag

SEQ ID NO: 2639857 - DNA, 25 bp, Homo sapien
catacttcatgaagcgatgggcttt

SEQ ID NO: 2639858 - DNA, 25 bp, Homo sapien
tgctagttgctgagtggtcagggca

SEQ ID NO: 2639859 - DNA, 25 bp, Homo sapien
gacatctccagagtgtgactgtgaa

SEQ ID NO: 2639860 - DNA, 25 bp, Homo sapien
cctgatcgtgaccatgacgtgctga

SEQ ID NO: 2639861 - DNA, 25 bp, Homo sapien
gactctttgtgtagcttggtgtagg

SEQ ID NO: 2639862 - DNA, 25 bp, Homo sapien
tgatctgaatcccatgacagtgcca

SEQ ID NO: 2639863 - DNA, 25 bp, Homo sapien
gcctgcaccagcatgactgttttat

SEQ ID NO: 2639864 - DNA, 25 bp, Homo sapien
tccctggagacctgaaaatgagtac

SEQ ID NO: 2639865 - DNA, 25 bp, Homo sapien
gggtgacactccacctacaggtgaa

SEQ ID NO: 2639866 - DNA, 25 bp, Homo sapien
agtgatgtctggctcctcttacgga

SEQ ID NO: 2639867 - DNA, 25 bp, Homo sapien
aatggttaaatctaatgtagcatac

SEQ ID NO: 2639868 - DNA, 25 bp, Homo sapien
cattatgcataatggtgatgttggc

SEQ ID NO: 2639869 - DNA, 25 bp, Homo sapien
catacagtttcattaaggcacaaca

SEQ ID NO: 2639870 - DNA, 25 bp, Homo sapien
tgatgttggcagtgcatgccaaatg

SEQ ID NO: 2639871 - DNA, 25 bp, Homo sapien
tcttggcaaacgaaggagggcttct

SEQ ID NO: 2639872 - DNA, 25 bp, Homo sapien
gcattttacaaggacacttgagaaa

SEQ ID NO: 2639873 - DNA, 25 bp, Homo sapien
ccctgccagtttaggaaaccagttg

SEQ ID NO: 2639874 - DNA, 25 bp, Homo sapien
gcttcttcgaggaaaaccctgccag

SEQ ID NO: 2639875 - DNA, 25 bp, Homo sapien
actttgggctccttaactgtgcctc

SEQ ID NO: 2639876 - DNA, 25 bp, Homo sapien
ctcggccactttgggctccttaact

SEQ ID NO: 2639877 - DNA, 25 bp, Homo sapien
tttgggctccttaactgtgcctcct

SEQ ID NO: 2639878 - DNA, 25 bp, Homo sapien
ggccactttgggctccttaactgtg

SEQ ID NO: 2639879 - DNA, 25 bp, Homo sapien
ccctttgcaattcataaaaactcct

SEQ ID NO: 2639880 - DNA, 25 bp, Homo sapien
tggtggtctccctcaaaccctttgc

SEQ ID NO: 2639881 - DNA, 25 bp, Homo sapien
tcccaaatagctctctgtccgcagt

SEQ ID NO: 2639882 - DNA, 25 bp, Homo sapien
ctctggcttgccaccctgctgcctt

SEQ ID NO: 2639883 - DNA, 25 bp, Homo sapien
aggttgcagtgcagtagctaaatct

SEQ ID NO: 2639884 - DNA, 25 bp, Homo sapien
gttgcagtgcagtagctaaatctcg

SEQ ID NO: 2639885 - DNA, 25 bp, Homo sapien
catagtgatattgcataataagtaa

SEQ ID NO: 2639886 - DNA, 25 bp, Homo sapien
taagcatagtgatattgcataataa

SEQ ID NO: 2639887 - DNA, 25 bp, Homo sapien
agccctgcaaactcggtatcattca

SEQ ID NO: 2639888 - DNA, 25 bp, Homo sapien
gcagatagatatcagccctgcaaac

SEQ ID NO: 2639889 - DNA, 25 bp, Homo sapien
tatcagccctgcaaactcggtatca

SEQ ID NO: 2639890 - DNA, 25 bp, Homo sapien
tagatatcagccctgcaaactcggt

SEQ ID NO: 2639891 - DNA, 25 bp, Homo sapien
tccctccaaacacctcttctccttg

SEQ ID NO: 2639892 - DNA, 25 bp, Homo sapien
ctgatgccaggatttaggctccctg

SEQ ID NO: 2639893 - DNA, 25 bp, Homo sapien
gatgccaggatttaggctccctgcc

SEQ ID NO: 2639894 - DNA, 25 bp, Homo sapien
tgagtcctgtgcgtgcctgcagctg

SEQ ID NO: 2639895 - DNA, 25 bp, Homo sapien
ccggttttcaccagagccacattca

SEQ ID NO: 2639896 - DNA, 25 bp, Homo sapien
ccccatccggttttcaccagagcca

SEQ ID NO: 2639897 - DNA, 25 bp, Homo sapien
catccggttttcaccagagccacat

SEQ ID NO: 2639898 - DNA, 25 bp, Homo sapien
tccggttttcaccagagccacattc

SEQ ID NO: 2639899 - DNA, 25 bp, Homo sapien
caaatgtgtccactaatgcatttca

SEQ ID NO: 2639900 - DNA, 25 bp, Homo sapien
tctgaaaatccaccattccaaatgt

SEQ ID NO: 2639901 - DNA, 25 bp, Homo sapien
ctgaaaatccaccattccaaatgtg

SEQ ID NO: 2639902 - DNA, 25 bp, Homo sapien
aaatgtgtccactaatgcatttcaa

SEQ ID NO: 2639903 - DNA, 25 bp, Homo sapien
caaggcagtgcatccccaagccgga

SEQ ID NO: 2639904 - DNA, 25 bp, Homo sapien
ggcactgtgcccctgttgttgtact

SEQ ID NO: 2639905 - DNA, 25 bp, Homo sapien
agtgcatccccaagccggacagttc

SEQ ID NO: 2639906 - DNA, 25 bp, Homo sapien
tgtgcccctgttgttgtactactga

SEQ ID NO: 2639907 - DNA, 25 bp, Homo sapien
tgttaagtatgcaattctcaggctc

SEQ ID NO: 2639908 - DNA, 25 bp, Homo sapien
taggtttggatgagcttctgttaag

SEQ ID NO: 2639909 - DNA, 25 bp, Homo sapien
tgcagacgacaagcagaggagcttt

SEQ ID NO: 2639910 - DNA, 25 bp, Homo sapien
cattatccagaccaaataggtttgg

SEQ ID NO: 2639911 - DNA, 25 bp, Homo sapien
caagtactcggaatggattggtggc

SEQ ID NO: 2639912 - DNA, 25 bp, Homo sapien
cttcctgggcgtggaatcttgtagc

SEQ ID NO: 2639913 - DNA, 25 bp, Homo sapien
ggtgacactatcatatacctgggca

SEQ ID NO: 2639914 - DNA, 25 bp, Homo sapien
aggatcaccactccccttgagggca

SEQ ID NO: 2639915 - DNA, 25 bp, Homo sapien
actggcaccatgatgaactctggtg

SEQ ID NO: 2639916 - DNA, 25 bp, Homo sapien
gagactttcaacatcccagccatgc

SEQ ID NO: 2639917 - DNA, 25 bp, Homo sapien
aggtggctatccaggttgtgcttat

SEQ ID NO: 2639918 - DNA, 25 bp, Homo sapien
ttattgcacgcctctggcagcacca

SEQ ID NO: 2639919 - DNA, 25 bp, Homo sapien
gaaatggagaagatctagttccaca

SEQ ID NO: 2639920 - DNA, 25 bp, Homo sapien
aaagcctgaccctgaagcaccacat

SEQ ID NO: 2639921 - DNA, 25 bp, Homo sapien
gcccagagcaagcatgaaagcctga

SEQ ID NO: 2639922 - DNA, 25 bp, Homo sapien
caccacattgagcatgacatcatca

SEQ ID NO: 2639923 - DNA, 25 bp, Homo sapien
gggcatgatgatgggcatgggccag

SEQ ID NO: 2639924 - DNA, 25 bp, Homo sapien
gacaccagggcatgatgatgggcat

SEQ ID NO: 2639925 - DNA, 25 bp, Homo sapien
catgatgatgggcatgggccaggac

SEQ ID NO: 2639926 - DNA, 25 bp, Homo sapien
ctgacaccagggcatgatgatgggc

SEQ ID NO: 2639927 - DNA, 25 bp, Homo sapien
agctggctttgctggacacaacgtc

SEQ ID NO: 2639928 - DNA, 25 bp, Homo sapien
tgttccccctccatcgttgggcacc

SEQ ID NO: 2639929 - DNA, 25 bp, Homo sapien
tggctttgctggacacaacgtcccc

SEQ ID NO: 2639930 - DNA, 25 bp, Homo sapien
cccaacccatgttccccctccatcg

SEQ ID NO: 2639931 - DNA, 25 bp, Homo sapien
gcagtgaaagaagagatcatgggct

SEQ ID NO: 2639932 - DNA, 25 bp, Homo sapien
agtgaaagaagagatcatgggctgg

SEQ ID NO: 2639933 - DNA, 25 bp, Homo sapien
aagcagtgaaagaagagatcatggg

SEQ ID NO: 2639934 - DNA, 25 bp, Homo sapien
ggctccttggccaaagcagtgaaag

SEQ ID NO: 2639935 - DNA, 25 bp, Homo sapien
tctctgtttttctgtacccactccc

SEQ ID NO: 2639936 - DNA, 25 bp, Homo sapien
tttctgtacccactcccactttctc

SEQ ID NO: 2639937 - DNA, 25 bp, Homo sapien
cttggatactgctttctccatcact

SEQ ID NO: 2639938 - DNA, 25 bp, Homo sapien
ctgtttttctgtacccactcccact

SEQ ID NO: 2639939 - DNA, 25 bp, Homo sapien
cctccaccagctatgaacacccaat

SEQ ID NO: 2639940 - DNA, 25 bp, Homo sapien
ccaccagctatgaacacccaatatt

SEQ ID NO: 2639941 - DNA, 25 bp, Homo sapien
tacaaccagactaggggatcttccc

SEQ ID NO: 2639942 - DNA, 25 bp, Homo sapien
tctacaaccagactaggggatcttc

SEQ ID NO: 2639943 - DNA, 25 bp, Homo sapien
agtgtgcacggccacatctgcccac

SEQ ID NO: 2639944 - DNA, 25 bp, Homo sapien
ggttgagtgtgcacggccacatctg

SEQ ID NO: 2639945 - DNA, 25 bp, Homo sapien
tcaggttgagtgtgcacggccacat

SEQ ID NO: 2639946 - DNA, 25 bp, Homo sapien
tgagtgtgcacggccacatctgccc

SEQ ID NO: 2639947 - DNA, 25 bp, Homo sapien
gcagcaagaccaaagccatgactga

SEQ ID NO: 2639948 - DNA, 25 bp, Homo sapien
tgagatcactcctttcaaacctcat

SEQ ID NO: 2639949 - DNA, 25 bp, Homo sapien
ctgagatcactcctttcaaacctca

SEQ ID NO: 2639950 - DNA, 25 bp, Homo sapien
agaccaaagccatgactgagatcac

SEQ ID NO: 2639951 - DNA, 25 bp, Homo sapien
gccaagccctaggtctgcaacttga

SEQ ID NO: 2639952 - DNA, 25 bp, Homo sapien
gccctaggtctgcaacttgaatttt

SEQ ID NO: 2639953 - DNA, 25 bp, Homo sapien
caagccctaggtctgcaacttgaat

SEQ ID NO: 2639954 - DNA, 25 bp, Homo sapien
gcagccaagccctaggtctgcaact

SEQ ID NO: 2639955 - DNA, 25 bp, Homo sapien
gagtggtaagggcaggcagtgccag

SEQ ID NO: 2639956 - DNA, 25 bp, Homo sapien
ttacttcaccctttctgttcttctc

SEQ ID NO: 2639957 - DNA, 25 bp, Homo sapien
gcagtgccaggtgtaggaacccaaa

SEQ ID NO: 2639958 - DNA, 25 bp, Homo sapien
tccaggtcccagtagggtgaggaaa

SEQ ID NO: 2639959 - DNA, 25 bp, Homo sapien
tttgaccaggtagagatgtcagtgg

SEQ ID NO: 2639960 - DNA, 25 bp, Homo sapien
tgcttaccaaggctctcctttggga

SEQ ID NO: 2639961 - DNA, 25 bp, Homo sapien
tttgggacagtttggctatttgacc

SEQ ID NO: 2639962 - DNA, 25 bp, Homo sapien
aagaccaccctgttgcttgagcata

SEQ ID NO: 2639963 - DNA, 25 bp, Homo sapien
ggcacgatggttggccagtctgaac

SEQ ID NO: 2639964 - DNA, 25 bp, Homo sapien
ttgagtcaggcacgatggttggcca

SEQ ID NO: 2639965 - DNA, 25 bp, Homo sapien
agtcaggcacgatggttggccagtc

SEQ ID NO: 2639966 - DNA, 25 bp, Homo sapien
tgttgagtcaggcacgatggttggc

SEQ ID NO: 2639967 - DNA, 25 bp, Homo sapien
agaagctgctaacagagcttctacc

SEQ ID NO: 2639968 - DNA, 25 bp, Homo sapien
gaccagaagctgctaacagagcttc

SEQ ID NO: 2639969 - DNA, 25 bp, Homo sapien
ttctggtggggacttagggtagcca

SEQ ID NO: 2639970 - DNA, 25 bp, Homo sapien
ccagaagctgctaacagagcttcta

SEQ ID NO: 2639971 - DNA, 25 bp, Homo sapien
tgtctgtatggaaaggacctgcacg

SEQ ID NO: 2639972 - DNA, 25 bp, Homo sapien
gacctgcacggaaacgtccatttgg

SEQ ID NO: 2639973 - DNA, 25 bp, Homo sapien
gccttagtctctggctgcagctttc

SEQ ID NO: 2639974 - DNA, 25 bp, Homo sapien
tttggcctaacatagaggcttcctg

SEQ ID NO: 2639975 - DNA, 25 bp, Homo sapien
gacctgatctgattgcaaattttta

SEQ ID NO: 2639976 - DNA, 25 bp, Homo sapien
tgattgacggcaatgttgttcttgt

SEQ ID NO: 2639977 - DNA, 25 bp, Homo sapien
aatggctttgccgatttgattgacg

SEQ ID NO: 2639978 - DNA, 25 bp, Homo sapien
gctttgcatcctccaagacctgatc

SEQ ID NO: 2639979 - DNA, 25 bp, Homo sapien
tttgaaatgtttaataatgcttgcc

SEQ ID NO: 2639980 - DNA, 25 bp, Homo sapien
aaatgtttaataatgcttgccccac

SEQ ID NO: 2639981 - DNA, 25 bp, Homo sapien
gaaatgtttaataatgcttgcccca

SEQ ID NO: 2639982 - DNA, 25 bp, Homo sapien
tgaaatgtttaataatgcttgcccc

SEQ ID NO: 2639983 - DNA, 25 bp, Homo sapien
gcatggcacatacccccaactaatg

SEQ ID NO: 2639984 - DNA, 25 bp, Homo sapien
actgaagccaattaactgtactttg

SEQ ID NO: 2639985 - DNA, 25 bp, Homo sapien
ttaactgtactttgtttcccaagca

SEQ ID NO: 2639986 - DNA, 25 bp, Homo sapien
tctgtggctgaataaagtaattgaa

SEQ ID NO: 2639987 - DNA, 25 bp, Homo sapien
tctcctgacaggcaaaactagtgtt

SEQ ID NO: 2639988 - DNA, 25 bp, Homo sapien
tggagtgaactcttaccagtgagaa

SEQ ID NO: 2639989 - DNA, 25 bp, Homo sapien
cacttgtagctggttgaagtcttcc

SEQ ID NO: 2639990 - DNA, 25 bp, Homo sapien
atccaagaaccaaagacgtcgagtt

SEQ ID NO: 2639991 - DNA, 25 bp, Homo sapien
ctacttttcccatactgctaaaggt

SEQ ID NO: 2639992 - DNA, 25 bp, Homo sapien
agctaagaaccgttcttctcccagg

SEQ ID NO: 2639993 - DNA, 25 bp, Homo sapien
tgagcagctaagaaccgttcttctc

SEQ ID NO: 2639994 - DNA, 25 bp, Homo sapien
tactgctaaaggtagtccctgagca

SEQ ID NO: 2639995 - DNA, 25 bp, Homo sapien
ggatcaggatataatgacacaaagt

SEQ ID NO: 2639996 - DNA, 25 bp, Homo sapien
gtttcagctctgtccctaactgtcc

SEQ ID NO: 2639997 - DNA, 25 bp, Homo sapien
cacaaagtcattaccccctgaaggt

SEQ ID NO: 2639998 - DNA, 25 bp, Homo sapien
cctgaaggtacatggtctttgggga

SEQ ID NO: 2639999 - DNA, 25 bp, Homo sapien
ttaaaaccagcataacagcacaagt

SEQ ID NO: 2640000 - DNA, 25 bp, Homo sapien
ggacacttgaaactgggcttgataa

SEQ ID NO: 2640001 - DNA, 25 bp, Homo sapien
caacacaggcctgaattaaaaccag

SEQ ID NO: 2640002 - DNA, 25 bp, Homo sapien
tggagtctgaaaggatcaggacact

SEQ ID NO: 2640003 - DNA, 25 bp, Homo sapien
tgcatcaccgtcaaaccacacagct

SEQ ID NO: 2640004 - DNA, 25 bp, Homo sapien
aggtcacatgcatcaccgtcaaacc

SEQ ID NO: 2640005 - DNA, 25 bp, Homo sapien
gtcacatgcatcaccgtcaaaccac

SEQ ID NO: 2640006 - DNA, 25 bp, Homo sapien
cacatgcatcaccgtcaaaccacac

SEQ ID NO: 2640007 - DNA, 25 bp, Homo sapien
ctcctctccacaaggcgacctcacc

SEQ ID NO: 2640008 - DNA, 25 bp, Homo sapien
tcctctccacaaggcgacctcacca

SEQ ID NO: 2640009 - DNA, 25 bp, Homo sapien
cctctccacaaggcgacctcaccat

SEQ ID NO: 2640010 - DNA, 25 bp, Homo sapien
ttctgcctcagttggaatgttatcc

SEQ ID NO: 2640011 - DNA, 25 bp, Homo sapien
tctgctgagctacttggcagcccat

SEQ ID NO: 2640012 - DNA, 25 bp, Homo sapien
tgtgggtggtccagctctctcaagc

SEQ ID NO: 2640013 - DNA, 25 bp, Homo sapien
tctttgccatgaagtctggcccatc

SEQ ID NO: 2640014 - DNA, 25 bp, Homo sapien
tgatgggacattactgtggctccaa

SEQ ID NO: 2640015 - DNA, 25 bp, Homo sapien
gcagtccagacttaaaggttccttc

SEQ ID NO: 2640016 - DNA, 25 bp, Homo sapien
tctgagcttggcagtaccgcttgtg

SEQ ID NO: 2640017 - DNA, 25 bp, Homo sapien
tctgattgagctcttctgatgggac

SEQ ID NO: 2640018 - DNA, 25 bp, Homo sapien
ttctgagcaggcccatgtcttggat

SEQ ID NO: 2640019 - DNA, 25 bp, Homo sapien
ctggagttttcaacccccttctgag

SEQ ID NO: 2640020 - DNA, 25 bp, Homo sapien
gttttcaacccccttctgagcaggc

SEQ ID NO: 2640021 - DNA, 25 bp, Homo sapien
gagttttcaacccccttctgagcag

SEQ ID NO: 2640022 - DNA, 25 bp, Homo sapien
ctccagaggatgttgtcagtacagc

SEQ ID NO: 2640023 - DNA, 25 bp, Homo sapien
gccaggggctagacatgtccttaaa

SEQ ID NO: 2640024 - DNA, 25 bp, Homo sapien
gggctagacatgtccttaaacatct

SEQ ID NO: 2640025 - DNA, 25 bp, Homo sapien
agcttgacatggccaggggctagac

SEQ ID NO: 2640026 - DNA, 25 bp, Homo sapien
agatcaccactctgccgcagccact

SEQ ID NO: 2640027 - DNA, 25 bp, Homo sapien
acagatcaccactctgccgcagcca

SEQ ID NO: 2640028 - DNA, 25 bp, Homo sapien
cagatcaccactctgccgcagccac

SEQ ID NO: 2640029 - DNA, 25 bp, Homo sapien
atgctgccatcgtgtgctgctgatt

SEQ ID NO: 2640030 - DNA, 25 bp, Homo sapien
catgctgccatcgtgtgctgctgat

SEQ ID NO: 2640031 - DNA, 25 bp, Homo sapien
tgctgccatcgtgtgctgctgattt

SEQ ID NO: 2640032 - DNA, 25 bp, Homo sapien
tgacattttcaagttacagttttgt

SEQ ID NO: 2640033 - DNA, 25 bp, Homo sapien
atttttatattccttgaagtgactt

SEQ ID NO: 2640034 - DNA, 25 bp, Homo sapien
aatgagggtttgacattttcaagtt

SEQ ID NO: 2640035 - DNA, 25 bp, Homo sapien
ttaatgagggtttgacattttcaag

SEQ ID NO: 2640036 - DNA, 25 bp, Homo sapien
ggactgagcgtccttccaatgtgga

SEQ ID NO: 2640037 - DNA, 25 bp, Homo sapien
aagattgaccaacttcccagcttgg

SEQ ID NO: 2640038 - DNA, 25 bp, Homo sapien
tcagagttgtgtcctgattctcttc

SEQ ID NO: 2640039 - DNA, 25 bp, Homo sapien
tccaagactcctttgggcccaagag

SEQ ID NO: 2640040 - DNA, 25 bp, Homo sapien
tggataaggtaaaaggtcagggcca

SEQ ID NO: 2640041 - DNA, 25 bp, Homo sapien
ttctccttcgcaggaccaagatagc

SEQ ID NO: 2640042 - DNA, 25 bp, Homo sapien
gtaaccttctccttcgcaggaccaa

SEQ ID NO: 2640043 - DNA, 25 bp, Homo sapien
tcattgcacagtgacttagcaggta

SEQ ID NO: 2640044 - DNA, 25 bp, Homo sapien
tgctggtactgatctgtcctttgca

SEQ ID NO: 2640045 - DNA, 25 bp, Homo sapien
cattttgctggtactgatctgtcct

SEQ ID NO: 2640046 - DNA, 25 bp, Homo sapien
tggtactgatctgtcctttgcacgc

SEQ ID NO: 2640047 - DNA, 25 bp, Homo sapien
attcaggtgatggcttgttgatgtc

SEQ ID NO: 2640048 - DNA, 25 bp, Homo sapien
ttctgatttcagctgagctactacc

SEQ ID NO: 2640049 - DNA, 25 bp, Homo sapien
ggctgtccctttagacagggtacta

SEQ ID NO: 2640050 - DNA, 25 bp, Homo sapien
gagctactacctctggtggtctact

SEQ ID NO: 2640051 - DNA, 25 bp, Homo sapien
tggtctactccacagcctcttgctt

SEQ ID NO: 2640052 - DNA, 25 bp, Homo sapien
aggatagtagcttgttctttcatgt

SEQ ID NO: 2640053 - DNA, 25 bp, Homo sapien
ctatcctttaataaggatagtagct

SEQ ID NO: 2640054 - DNA, 25 bp, Homo sapien
taataaggatagtagcttgttcttt

SEQ ID NO: 2640055 - DNA, 25 bp, Homo sapien
ctttaataaggatagtagcttgttc

SEQ ID NO: 2640056 - DNA, 25 bp, Homo sapien
agtgggctctgctcctactaggcga

SEQ ID NO: 2640057 - DNA, 25 bp, Homo sapien
tatgccaacttcgagggcctaacgt

SEQ ID NO: 2640058 - DNA, 25 bp, Homo sapien
tgtgaacgccagtagaatgctgctc

SEQ ID NO: 2640059 - DNA, 25 bp, Homo sapien
tggtggcggaacttcagcaaagctg

SEQ ID NO: 2640060 - DNA, 25 bp, Homo sapien
ttttttcggtagaggctcattagag

SEQ ID NO: 2640061 - DNA, 25 bp, Homo sapien
gtctatatgtaagtctgatctgtga

SEQ ID NO: 2640062 - DNA, 25 bp, Homo sapien
tttttcggtagaggctcattagaga

SEQ ID NO: 2640063 - DNA, 25 bp, Homo sapien
tatgtaagtctgatctgtgatggtg

SEQ ID NO: 2640064 - DNA, 25 bp, Homo sapien
tcaggatcgattgctggctctaact

SEQ ID NO: 2640065 - DNA, 25 bp, Homo sapien
gatctgcattggataagcccacaca

SEQ ID NO: 2640066 - DNA, 25 bp, Homo sapien
ctgtcgcgatatattctctcaggaa

SEQ ID NO: 2640067 - DNA, 25 bp, Homo sapien
catccgcaatcaggatcgattgctg

SEQ ID NO: 2640068 - DNA, 25 bp, Homo sapien
gctttggtagtaaaaggacagcaag

SEQ ID NO: 2640069 - DNA, 25 bp, Homo sapien
gagacagttaaaggtgctttggtag

SEQ ID NO: 2640070 - DNA, 25 bp, Homo sapien
tttccatagtaacagcaaagcactc

SEQ ID NO: 2640071 - DNA, 25 bp, Homo sapien
gctgtaggtaacatcacttgattgc

SEQ ID NO: 2640072 - DNA, 25 bp, Homo sapien
tcaaatttaaaatttcatagatgcc

SEQ ID NO: 2640073 - DNA, 25 bp, Homo sapien
caaatttaaaatttcatagatgcct

SEQ ID NO: 2640074 - DNA, 25 bp, Homo sapien
ccatacagtcaaatttaaaatttca

SEQ ID NO: 2640075 - DNA, 25 bp, Homo sapien
atttaaaatttcatagatgcctaac

SEQ ID NO: 2640076 - DNA, 25 bp, Homo sapien
atttcacggccaccacagtacaggc

SEQ ID NO: 2640077 - DNA, 25 bp, Homo sapien
tgccctgggtcactacctctagtct

SEQ ID NO: 2640078 - DNA, 25 bp, Homo sapien
tcccagagcgacaccgatctgcatt

SEQ ID NO: 2640079 - DNA, 25 bp, Homo sapien
tgtcttttacagagatctttccaag

SEQ ID NO: 2640080 - DNA, 25 bp, Homo sapien
tcacaatccttgatagcgcagcatg

SEQ ID NO: 2640081 - DNA, 25 bp, Homo sapien
gcagcatgccgttcttcacatcttc

SEQ ID NO: 2640082 - DNA, 25 bp, Homo sapien
tccttgatagcgcagcatgccgttc

SEQ ID NO: 2640083 - DNA, 25 bp, Homo sapien
gatagcgcagcatgccgttcttcac

SEQ ID NO: 2640084 - DNA, 25 bp, Homo sapien
tgtatccccctcagttgcctttgtg

SEQ ID NO: 2640085 - DNA, 25 bp, Homo sapien
tcaggctttggttggatgcaaatgg

SEQ ID NO: 2640086 - DNA, 25 bp, Homo sapien
ggctttggttggatgcaaatggcat

SEQ ID NO: 2640087 - DNA, 25 bp, Homo sapien
cagaagagctttcagctgtatcccc

SEQ ID NO: 2640088 - DNA, 25 bp, Homo sapien
caggtgaggctcaaaggtgtactca

SEQ ID NO: 2640089 - DNA, 25 bp, Homo sapien
gaggctcaaaggtgtactcaaatgt

SEQ ID NO: 2640090 - DNA, 25 bp, Homo sapien
aaaggcaggtgaggctcaaaggtgt

SEQ ID NO: 2640091 - DNA, 25 bp, Homo sapien
ggctcaaaggtgtactcaaatgtgt

SEQ ID NO: 2640092 - DNA, 25 bp, Homo sapien
cttaaacttctccagtggtgtgcct

SEQ ID NO: 2640093 - DNA, 25 bp, Homo sapien
acttctccagtggtgtgcctggtac

SEQ ID NO: 2640094 - DNA, 25 bp, Homo sapien
gccttctcgggtccactctccattt

SEQ ID NO: 2640095 - DNA, 25 bp, Homo sapien
cagtggtgtgcctggtacttgtgct

SEQ ID NO: 2640096 - DNA, 25 bp, Homo sapien
gttgcttctcattatggtaattcat

SEQ ID NO: 2640097 - DNA, 25 bp, Homo sapien
atggcagtttgtacatctccacatc

SEQ ID NO: 2640098 - DNA, 25 bp, Homo sapien
ggcagtttgtacatctccacatcat

SEQ ID NO: 2640099 - DNA, 25 bp, Homo sapien
ctccacatcattatgttgcttctca

SEQ ID NO: 2640100 - DNA, 25 bp, Homo sapien
ctcatgctgtttaaggcatggagac

SEQ ID NO: 2640101 - DNA, 25 bp, Homo sapien
gctgtttaaggcatggagactggaa

SEQ ID NO: 2640102 - DNA, 25 bp, Homo sapien
cagaattccagtggccaccgagaga

SEQ ID NO: 2640103 - DNA, 25 bp, Homo sapien
agtggccaccgagagatgctcatgc

SEQ ID NO: 2640104 - DNA, 25 bp, Homo sapien
ccaaaggacgggacttacagatatg

SEQ ID NO: 2640105 - DNA, 25 bp, Homo sapien
tgctcatcttgtattctgtaacacg

SEQ ID NO: 2640106 - DNA, 25 bp, Homo sapien
cattgaacccataggaataatcctg

SEQ ID NO: 2640107 - DNA, 25 bp, Homo sapien
catatctgtggctgtaaagaccagc

SEQ ID NO: 2640108 - DNA, 25 bp, Homo sapien
cgctcaggtctgcatagttatctaa

SEQ ID NO: 2640109 - DNA, 25 bp, Homo sapien
cttggtcaaaatgccgctcaggtct

SEQ ID NO: 2640110 - DNA, 25 bp, Homo sapien
aacttggtcaaaatgccgctcaggt

SEQ ID NO: 2640111 - DNA, 25 bp, Homo sapien
caaaatgccgctcaggtctgcatag

SEQ ID NO: 2640112 - DNA, 25 bp, Homo sapien
ttggggatagggctcctcaaaggca

SEQ ID NO: 2640113 - DNA, 25 bp, Homo sapien
tggggatagggctcctcaaaggcag

SEQ ID NO: 2640114 - DNA, 25 bp, Homo sapien
ctcaaaggcagatgtaggttccagg

SEQ ID NO: 2640115 - DNA, 25 bp, Homo sapien
cctccttcccagatggagactggca

SEQ ID NO: 2640116 - DNA, 25 bp, Homo sapien
cacctccttcccagatggagactgg

SEQ ID NO: 2640117 - DNA, 25 bp, Homo sapien
ccttcccagatggagactggcaggg

SEQ ID NO: 2640118 - DNA, 25 bp, Homo sapien
tccttcccagatggagactggcagg

SEQ ID NO: 2640119 - DNA, 25 bp, Homo sapien
ttcccatgactcattaggaggaagt

SEQ ID NO: 2640120 - DNA, 25 bp, Homo sapien
tgggaagacgcaggcatagcaaagt

SEQ ID NO: 2640121 - DNA, 25 bp, Homo sapien
ggcccagtgggtatctgaagctggc

SEQ ID NO: 2640122 - DNA, 25 bp, Homo sapien
gacgcaggcatagcaaagttcttat

SEQ ID NO: 2640123 - DNA, 25 bp, Homo sapien
caaagttcttatctggctgggtggc

SEQ ID NO: 2640124 - DNA, 25 bp, Homo sapien
gagctctatgctgagtgtcactaac

SEQ ID NO: 2640125 - DNA, 25 bp, Homo sapien
ttggcaggtttcaactgggagatgc

SEQ ID NO: 2640126 - DNA, 25 bp, Homo sapien
tgtagttgccaacactcagcagttg

SEQ ID NO: 2640127 - DNA, 25 bp, Homo sapien
tgcagtgtgagctctatgctgagtg

SEQ ID NO: 2640128 - DNA, 25 bp, Homo sapien
aatgaacggcaccagtgacagtgac

SEQ ID NO: 2640129 - DNA, 25 bp, Homo sapien
tgacagtgacaggattaaggtagtg

SEQ ID NO: 2640130 - DNA, 25 bp, Homo sapien
tgagatttggaatgaacggcaccag

SEQ ID NO: 2640131 - DNA, 25 bp, Homo sapien
cagtgacaggattaaggtagtggaa

SEQ ID NO: 2640132 - DNA, 25 bp, Homo sapien
tcagtcagttttttgtcaatatcaa

SEQ ID NO: 2640133 - DNA, 25 bp, Homo sapien
cataacccatggcaaaccttaattt

SEQ ID NO: 2640134 - DNA, 25 bp, Homo sapien
tactggacataacccatggcaaacc

SEQ ID NO: 2640135 - DNA, 25 bp, Homo sapien
tccagtactggacataacccatggc

SEQ ID NO: 2640136 - DNA, 25 bp, Homo sapien
acaccagaaatcctttcttcaggaa

SEQ ID NO: 2640137 - DNA, 25 bp, Homo sapien
gagctgcaacgaggagtttgcaaag

SEQ ID NO: 2640138 - DNA, 25 bp, Homo sapien
aggagctgcaacgaggagtttgcaa

SEQ ID NO: 2640139 - DNA, 25 bp, Homo sapien
tgaggggttcgcaaggaagacagag

SEQ ID NO: 2640140 - DNA, 25 bp, Homo sapien
gctgcaacgaggagtttgcaaagaa

SEQ ID NO: 2640141 - DNA, 25 bp, Homo sapien
cctgggcctgagaggcatcagtaat

SEQ ID NO: 2640142 - DNA, 25 bp, Homo sapien
tgtatgggccagcaagcccctgggc

SEQ ID NO: 2640143 - DNA, 25 bp, Homo sapien
agccacaagccctctgtatgggcca

SEQ ID NO: 2640144 - DNA, 25 bp, Homo sapien
taattgtcacccgagttggattgaa

SEQ ID NO: 2640145 - DNA, 25 bp, Homo sapien
tggtagccgcaagtcatagttccag

SEQ ID NO: 2640146 - DNA, 25 bp, Homo sapien
gctgagccatgttgcaaaaggaagg

SEQ ID NO: 2640147 - DNA, 25 bp, Homo sapien
catagatgttctggagcgtcagcag

SEQ ID NO: 2640148 - DNA, 25 bp, Homo sapien
gagaggctactacccaaaggagctg

SEQ ID NO: 2640149 - DNA, 25 bp, Homo sapien
atggtaaaaactgaagcctggatcc

SEQ ID NO: 2640150 - DNA, 25 bp, Homo sapien
catgaaccgagcagcaatgtctgga

SEQ ID NO: 2640151 - DNA, 25 bp, Homo sapien
ggaggttcccttgttagttatgcaa

SEQ ID NO: 2640152 - DNA, 25 bp, Homo sapien
caaagctggttacacaatggagaga

SEQ ID NO: 2640153 - DNA, 25 bp, Homo sapien
ccttcaggatagttgcaatggagtc

SEQ ID NO: 2640154 - DNA, 25 bp, Homo sapien
aacgatggctctgatgtcttttggg

SEQ ID NO: 2640155 - DNA, 25 bp, Homo sapien
tgggccctgccaccagagattctta

SEQ ID NO: 2640156 - DNA, 25 bp, Homo sapien
cagcttagtgtaggtagcactgaca

SEQ ID NO: 2640157 - DNA, 25 bp, Homo sapien
ggcttgctcgtttttctccctggac

SEQ ID NO: 2640158 - DNA, 25 bp, Homo sapien
tgcgtgggctgaaagaggaagaaac

SEQ ID NO: 2640159 - DNA, 25 bp, Homo sapien
tttctgcccatttgtgtctgcgtgg

SEQ ID NO: 2640160 - DNA, 25 bp, Homo sapien
tcctccactgcctattgggacggct

SEQ ID NO: 2640161 - DNA, 25 bp, Homo sapien
tcagcatctgggagtttaatgccat

SEQ ID NO: 2640162 - DNA, 25 bp, Homo sapien
agatcttgatgacaacagtagtaga

SEQ ID NO: 2640163 - DNA, 25 bp, Homo sapien
cagtagtagatttgctaataaccaa

SEQ ID NO: 2640164 - DNA, 25 bp, Homo sapien
taatgccatgtttaagtccaaatac

SEQ ID NO: 2640165 - DNA, 25 bp, Homo sapien
gggcagggtcacattatgggaatat

SEQ ID NO: 2640166 - DNA, 25 bp, Homo sapien
aatggggtgaggcaatttctggaaa

SEQ ID NO: 2640167 - DNA, 25 bp, Homo sapien
ttcagaccaattaagcatgacttgg

SEQ ID NO: 2640168 - DNA, 25 bp, Homo sapien
gccactctccagattgggcaatggg

SEQ ID NO: 2640169 - DNA, 25 bp, Homo sapien
cctgaggaagggaccaatagattta

SEQ ID NO: 2640170 - DNA, 25 bp, Homo sapien
tcattccagttttacattcctgagg

SEQ ID NO: 2640171 - DNA, 25 bp, Homo sapien
tacattcctgaggaagggaccaata

SEQ ID NO: 2640172 - DNA, 25 bp, Homo sapien
cagttttacattcctgaggaaggga

SEQ ID NO: 2640173 - DNA, 25 bp, Homo sapien
gattgccttataggtctggtctccc

SEQ ID NO: 2640174 - DNA, 25 bp, Homo sapien
gccttataggtctggtctccctctg

SEQ ID NO: 2640175 - DNA, 25 bp, Homo sapien
ctctgactctgtccggtcctgtcct

SEQ ID NO: 2640176 - DNA, 25 bp, Homo sapien
gcagggattgccttataggtctggt

SEQ ID NO: 2640177 - DNA, 25 bp, Homo sapien
ttctggttcactaggttgaagttca

SEQ ID NO: 2640178 - DNA, 25 bp, Homo sapien
ctcccttttctggttcactaggttg

SEQ ID NO: 2640179 - DNA, 25 bp, Homo sapien
tttctggttcactaggttgaagttc

SEQ ID NO: 2640180 - DNA, 25 bp, Homo sapien
ccttttctggttcactaggttgaag

SEQ ID NO: 2640181 - DNA, 25 bp, Homo sapien
actcatggtccaagcaccttcaaag

SEQ ID NO: 2640182 - DNA, 25 bp, Homo sapien
tgaggcttgactcatggtccaagca

SEQ ID NO: 2640183 - DNA, 25 bp, Homo sapien
tctctacttccccatctgaggcttg

SEQ ID NO: 2640184 - DNA, 25 bp, Homo sapien
tctacttccccatctgaggcttgac

SEQ ID NO: 2640185 - DNA, 25 bp, Homo sapien
cacgccgggtagtcggggtgaagct

SEQ ID NO: 2640186 - DNA, 25 bp, Homo sapien
gggcgacagcgtgaacgcaagcggg

SEQ ID NO: 2640187 - DNA, 25 bp, Homo sapien
gaggacgcgcacgccgggtagtcgg

SEQ ID NO: 2640188 - DNA, 25 bp, Homo sapien
gccggcccgggcgacagcgtgaacg

SEQ ID NO: 2640189 - DNA, 25 bp, Homo sapien
gatcttgccgaagttggccgttgcc

SEQ ID NO: 2640190 - DNA, 25 bp, Homo sapien
tcttgccgaagttggccgttgccat

SEQ ID NO: 2640191 - DNA, 25 bp, Homo sapien
ctggatcttgccgaagttggccgtt

SEQ ID NO: 2640192 - DNA, 25 bp, Homo sapien
ggatcttgccgaagttggccgttgc

SEQ ID NO: 2640193 - DNA, 25 bp, Homo sapien
gctgcgcttgatctccacgtaaatc

SEQ ID NO: 2640194 - DNA, 25 bp, Homo sapien
ttctcccaagaagtggcaaaaaaga

SEQ ID NO: 2640195 - DNA, 25 bp, Homo sapien
tattcatggctcagcgcgatattct

SEQ ID NO: 2640196 - DNA, 25 bp, Homo sapien
cagcatggtcgacgacgaaaccggg

SEQ ID NO: 2640197 - DNA, 25 bp, Homo sapien
cagcgcgatattctccacatttttc

SEQ ID NO: 2640198 - DNA, 25 bp, Homo sapien
taacagcactctttcaagaaagtaa

SEQ ID NO: 2640199 - DNA, 25 bp, Homo sapien
aaaatgacattaacagcactctttc

SEQ ID NO: 2640200 - DNA, 25 bp, Homo sapien
cattaacagcactctttcaagaaag

SEQ ID NO: 2640201 - DNA, 25 bp, Homo sapien
gacattaacagcactctttcaagaa

SEQ ID NO: 2640202 - DNA, 25 bp, Homo sapien
tgtataccagggacaggtgttgctg

SEQ ID NO: 2640203 - DNA, 25 bp, Homo sapien
tgtgcacccagaatcttcaaaataa

SEQ ID NO: 2640204 - DNA, 25 bp, Homo sapien
tatgtaaatcctacttttgctggta

SEQ ID NO: 2640205 - DNA, 25 bp, Homo sapien
gctggtatactgtgaactcgtattt

SEQ ID NO: 2640206 - DNA, 25 bp, Homo sapien
taggcaaaccgcttttgaaatgtgg

SEQ ID NO: 2640207 - DNA, 25 bp, Homo sapien
tctgggaacttctggtataggctga

SEQ ID NO: 2640208 - DNA, 25 bp, Homo sapien
agttaataatggtctgaagcagccc

SEQ ID NO: 2640209 - DNA, 25 bp, Homo sapien
aatagggacatggatcgccatcagc

SEQ ID NO: 2640210 - DNA, 25 bp, Homo sapien
tgcggtcaaaatgcgggcataaggc

SEQ ID NO: 2640211 - DNA, 25 bp, Homo sapien
cacgaccctgtgatgggttgcggtc

SEQ ID NO: 2640212 - DNA, 25 bp, Homo sapien
ggaaaattccacacacgaccctgtg

SEQ ID NO: 2640213 - DNA, 25 bp, Homo sapien
ggttgcggtcaaaatgcgggcataa

SEQ ID NO: 2640214 - DNA, 25 bp, Homo sapien
agctttgtttccagtcagggacttc

SEQ ID NO: 2640215 - DNA, 25 bp, Homo sapien
acagctttgtttccagtcagggact

SEQ ID NO: 2640216 - DNA, 25 bp, Homo sapien
gacagctttgtttccagtcagggac

SEQ ID NO: 2640217 - DNA, 25 bp, Homo sapien
ctgacagctttgtttccagtcaggg

SEQ ID NO: 2640218 - DNA, 25 bp, Homo sapien
tgggagacagaataagactctatcc

SEQ ID NO: 2640219 - DNA, 25 bp, Homo sapien
cggatgtggtgtgcatctgtagtcc

SEQ ID NO: 2640220 - DNA, 25 bp, Homo sapien
aggatcagttgagcccaggaggcag

SEQ ID NO: 2640221 - DNA, 25 bp, Homo sapien
cagctacttgggaggctgagcgggg

SEQ ID NO: 2640222 - DNA, 25 bp, Homo sapien
tagtccatggaaaggcctacataag

SEQ ID NO: 2640223 - DNA, 25 bp, Homo sapien
gatgactttgagactagagttgcaa

SEQ ID NO: 2640224 - DNA, 25 bp, Homo sapien
tatgttaaaaggtcaagaactagtg

SEQ ID NO: 2640225 - DNA, 25 bp, Homo sapien
ggtctcatcttggattagacaatgg

SEQ ID NO: 2640226 - DNA, 25 bp, Homo sapien
gctattataaactgtactgcaatga

SEQ ID NO: 2640227 - DNA, 25 bp, Homo sapien
catatgagtacaggtctattttctg

SEQ ID NO: 2640228 - DNA, 25 bp, Homo sapien
aaaagctttacagttgggcatggtg

SEQ ID NO: 2640229 - DNA, 25 bp, Homo sapien
cattgtgtacatacccggtagtggg

SEQ ID NO: 2640230 - DNA, 25 bp, Homo sapien
gacaagcaaggtcattttgctgaga

SEQ ID NO: 2640231 - DNA, 25 bp, Homo sapien
gaaggaaggcagtcatataggcaca

SEQ ID NO: 2640232 - DNA, 25 bp, Homo sapien
caagatccagagtacaagtggagga

SEQ ID NO: 2640233 - DNA, 25 bp, Homo sapien
gatatatggtgtctccactaaccaa

SEQ ID NO: 2640234 - DNA, 25 bp, Homo sapien
caatttattcctaggtgccactgac

SEQ ID NO: 2640235 - DNA, 25 bp, Homo sapien
taaaccaattgccactgtagaatgc

SEQ ID NO: 2640236 - DNA, 25 bp, Homo sapien
taaaaggatgctccttcaagcgcat

SEQ ID NO: 2640237 - DNA, 25 bp, Homo sapien
taaataatgtctcagctgacactgg

SEQ ID NO: 2640238 - DNA, 25 bp, Homo sapien
ccactgtgtcctcagcctgacactg

SEQ ID NO: 2640239 - DNA, 25 bp, Homo sapien
cctgacactgcttctgcagcgtgat

SEQ ID NO: 2640240 - DNA, 25 bp, Homo sapien
ttcctcgagggccactgtgtcctca

SEQ ID NO: 2640241 - DNA, 25 bp, Homo sapien
actgcttctgcagcgtgatctcact

SEQ ID NO: 2640242 - DNA, 25 bp, Homo sapien
agtgtggtagggtgttggcagagaa

SEQ ID NO: 2640243 - DNA, 25 bp, Homo sapien
ttttgggtgtgtaactgggtggagc

SEQ ID NO: 2640244 - DNA, 25 bp, Homo sapien
tatggcagttgcagtttttgggtgt

SEQ ID NO: 2640245 - DNA, 25 bp, Homo sapien
gtagggtgttggcagagaaccacca

SEQ ID NO: 2640246 - DNA, 25 bp, Homo sapien
gcttgtcacctaggagaacttctcc

SEQ ID NO: 2640247 - DNA, 25 bp, Homo sapien
gacaggaacattggcaagctggcca

SEQ ID NO: 2640248 - DNA, 25 bp, Homo sapien
ctattcaggctagagtaggctgtct

SEQ ID NO: 2640249 - DNA, 25 bp, Homo sapien
gcttctaagtatcccatggcttcag

SEQ ID NO: 2640250 - DNA, 25 bp, Homo sapien
ggaagtctggagatcgggattgctt

SEQ ID NO: 2640251 - DNA, 25 bp, Homo sapien
aagtctggagatcgggattgcttag

SEQ ID NO: 2640252 - DNA, 25 bp, Homo sapien
gtctggagatcgggattgcttaggg

SEQ ID NO: 2640253 - DNA, 25 bp, Homo sapien
tctggagatcgggattgcttaggga

SEQ ID NO: 2640254 - DNA, 25 bp, Homo sapien
ggtgtgcagattactggtctccagg

SEQ ID NO: 2640255 - DNA, 25 bp, Homo sapien
gggacaccctgaacgatggaagaca

SEQ ID NO: 2640256 - DNA, 25 bp, Homo sapien
gctggacctgtgagcaaacttaggg

SEQ ID NO: 2640257 - DNA, 25 bp, Homo sapien
ttgcgaccttctggcatcggctgga

SEQ ID NO: 2640258 - DNA, 25 bp, Homo sapien
ggtcaagttctggtggttgagggtg

SEQ ID NO: 2640259 - DNA, 25 bp, Homo sapien
tgaggatgatgttcagccttgagcc

SEQ ID NO: 2640260 - DNA, 25 bp, Homo sapien
caggagcagtggtgggtcaagttct

SEQ ID NO: 2640261 - DNA, 25 bp, Homo sapien
agccactggtccctcaccttctaaa

SEQ ID NO: 2640262 - DNA, 25 bp, Homo sapien
cttagagaaacctgggaaggagtct

SEQ ID NO: 2640263 - DNA, 25 bp, Homo sapien
ttagagaaacctgggaaggagtctc

SEQ ID NO: 2640264 - DNA, 25 bp, Homo sapien
gcactgggtctctcagcatgtatag

SEQ ID NO: 2640265 - DNA, 25 bp, Homo sapien
ccagagcaggatcgggtagcagggc

SEQ ID NO: 2640266 - DNA, 25 bp, Homo sapien
tgggtctctcagcatgtatagccct

SEQ ID NO: 2640267 - DNA, 25 bp, Homo sapien
caggatcgggtagcagggcactggg

SEQ ID NO: 2640268 - DNA, 25 bp, Homo sapien
aacactacctattgggattctgact

SEQ ID NO: 2640269 - DNA, 25 bp, Homo sapien
taattaagactgatactggccagca

SEQ ID NO: 2640270 - DNA, 25 bp, Homo sapien
tgccatatagaataagccctcctgt

SEQ ID NO: 2640271 - DNA, 25 bp, Homo sapien
catagttcaagcatacatgcatgag

SEQ ID NO: 2640272 - DNA, 25 bp, Homo sapien
tagtgggaatgaagagtggacccca

SEQ ID NO: 2640273 - DNA, 25 bp, Homo sapien
tgggaggagcctaccgctgctgcat

SEQ ID NO: 2640274 - DNA, 25 bp, Homo sapien
tggcagccccacaatatactaatac

SEQ ID NO: 2640275 - DNA, 25 bp, Homo sapien
tacaacatgagtagtgaggctaaga

SEQ ID NO: 2640276 - DNA, 25 bp, Homo sapien
tgaaggtactaacaactggaggttg

SEQ ID NO: 2640277 - DNA, 25 bp, Homo sapien
ggaggttgtcagctaactgcactcc

SEQ ID NO: 2640278 - DNA, 25 bp, Homo sapien
taacaactggaggttgtcagctaac

SEQ ID NO: 2640279 - DNA, 25 bp, Homo sapien
aaggccctgaaggtactaacaactg

SEQ ID NO: 2640280 - DNA, 25 bp, Homo sapien
cacgcctggccctggctaaattttg

SEQ ID NO: 2640281 - DNA, 25 bp, Homo sapien
tcaccacaacctccgtgtctggggt

SEQ ID NO: 2640282 - DNA, 25 bp, Homo sapien
ccacaacctccgtgtctggggttca

SEQ ID NO: 2640283 - DNA, 25 bp, Homo sapien
gcacgtgccaccacaatgggctaat

SEQ ID NO: 2640284 - DNA, 25 bp, Homo sapien
ttccctaactactccagtcttacaa

SEQ ID NO: 2640285 - DNA, 25 bp, Homo sapien
tttccctaactactccagtcttaca

SEQ ID NO: 2640286 - DNA, 25 bp, Homo sapien
tccctaactactccagtcttacaat

SEQ ID NO: 2640287 - DNA, 25 bp, Homo sapien
cattttctatccattcaacagttac

SEQ ID NO: 2640288 - DNA, 25 bp, Homo sapien
ttctatccattcaacagttacactt

SEQ ID NO: 2640289 - DNA, 25 bp, Homo sapien
tatcttcatttaaagatgttaccat

SEQ ID NO: 2640290 - DNA, 25 bp, Homo sapien
gtatctccattttctatccattcaa

SEQ ID NO: 2640291 - DNA, 25 bp, Homo sapien
ttactttggctgaggatgctggagg

SEQ ID NO: 2640292 - DNA, 25 bp, Homo sapien
aaggtcagggttaagtgaaaagatg

SEQ ID NO: 2640293 - DNA, 25 bp, Homo sapien
tcatcaggaacaaggtcagggttaa

SEQ ID NO: 2640294 - DNA, 25 bp, Homo sapien
aaggagggtcattcttaatagaagc

SEQ ID NO: 2640295 - DNA, 25 bp, Homo sapien
taatagaagctacagtccgtcgatt

SEQ ID NO: 2640296 - DNA, 25 bp, Homo sapien
cattcttaatagaagctacagtccg

SEQ ID NO: 2640297 - DNA, 25 bp, Homo sapien
tcttgaaggagggtcattcttaata

SEQ ID NO: 2640298 - DNA, 25 bp, Homo sapien
aggaaattgactgggccgtgcacgt

SEQ ID NO: 2640299 - DNA, 25 bp, Homo sapien
attgactgggccgtgcacgtgctga

SEQ ID NO: 2640300 - DNA, 25 bp, Homo sapien
gttcaggaaattgactgggccgtgc

SEQ ID NO: 2640301 - DNA, 25 bp, Homo sapien
ggccgtgcacgtgctgaaccaacca

SEQ ID NO: 2640302 - DNA, 25 bp, Homo sapien
actggagatatatctgaaacactac

SEQ ID NO: 2640303 - DNA, 25 bp, Homo sapien
cagcttgaactggagatatatctga

SEQ ID NO: 2640304 - DNA, 25 bp, Homo sapien
tgaactggagatatatctgaaacac

SEQ ID NO: 2640305 - DNA, 25 bp, Homo sapien
ttttgcagcttgaactggagatata

SEQ ID NO: 2640306 - DNA, 25 bp, Homo sapien
gaatacatgtatgcctaaaatgact

SEQ ID NO: 2640307 - DNA, 25 bp, Homo sapien
gcaatcaagcttgtatttagagtgt

SEQ ID NO: 2640308 - DNA, 25 bp, Homo sapien
catctgacaaattatcatctgccca

SEQ ID NO: 2640309 - DNA, 25 bp, Homo sapien
gaggacttaaaaggatgaccaagag

SEQ ID NO: 2640310 - DNA, 25 bp, Homo sapien
aagttcttgctgttgcaatctcctt

SEQ ID NO: 2640311 - DNA, 25 bp, Homo sapien
tctaagttcttgctgttgcaatctc

SEQ ID NO: 2640312 - DNA, 25 bp, Homo sapien
ctacttctttcacacaattagattt

SEQ ID NO: 2640313 - DNA, 25 bp, Homo sapien
tttctacttctttcacacaattaga

SEQ ID NO: 2640314 - DNA, 25 bp, Homo sapien
aatttcataatttgggtttgtagca

SEQ ID NO: 2640315 - DNA, 25 bp, Homo sapien
atttcataatttgggtttgtagcat

SEQ ID NO: 2640316 - DNA, 25 bp, Homo sapien
cataatttgggtttgtagcatcaac

SEQ ID NO: 2640317 - DNA, 25 bp, Homo sapien
ttcataatttgggtttgtagcatca

SEQ ID NO: 2640318 - DNA, 25 bp, Homo sapien
aggatctgctgttgttaatggtcta

SEQ ID NO: 2640319 - DNA, 25 bp, Homo sapien
ctctaaagtctctgatcatacacat

SEQ ID NO: 2640320 - DNA, 25 bp, Homo sapien
taatggtctataatccaaacttcct

SEQ ID NO: 2640321 - DNA, 25 bp, Homo sapien
tataatccaaacttcctctaaagtc

SEQ ID NO: 2640322 - DNA, 25 bp, Homo sapien
cacacacatatcctatgttcatcaa

SEQ ID NO: 2640323 - DNA, 25 bp, Homo sapien
attgagtggtcgttttcttacacac

SEQ ID NO: 2640324 - DNA, 25 bp, Homo sapien
tttattgagtggtcgttttcttaca

SEQ ID NO: 2640325 - DNA, 25 bp, Homo sapien
gagtggtcgttttcttacacacaca

SEQ ID NO: 2640326 - DNA, 25 bp, Homo sapien
tcattaggagctgagtcatcaaagg

SEQ ID NO: 2640327 - DNA, 25 bp, Homo sapien
caacatctttactaggaattgtgat

SEQ ID NO: 2640328 - DNA, 25 bp, Homo sapien
ctgtaaaccatttcattaggagctg

SEQ ID NO: 2640329 - DNA, 25 bp, Homo sapien
gattacatcaagatctttcatttga

SEQ ID NO: 2640330 - DNA, 25 bp, Homo sapien
tccagtctgcccataagcaaagcat

SEQ ID NO: 2640331 - DNA, 25 bp, Homo sapien
agtttccactagtggtctagcagta

SEQ ID NO: 2640332 - DNA, 25 bp, Homo sapien
caaatatagtttccactagtggtct

SEQ ID NO: 2640333 - DNA, 25 bp, Homo sapien
tatagtttccactagtggtctagca

SEQ ID NO: 2640334 - DNA, 25 bp, Homo sapien
attcctttagaacaatcttggttct

SEQ ID NO: 2640335 - DNA, 25 bp, Homo sapien
tttcatatacagaaaattgagatcc

SEQ ID NO: 2640336 - DNA, 25 bp, Homo sapien
tttagcattaaaaagacatctcgag

SEQ ID NO: 2640337 - DNA, 25 bp, Homo sapien
ctttagcattaaaaagacatctcga

SEQ ID NO: 2640338 - DNA, 25 bp, Homo sapien
tcaaagaaggttgcatatacttgaa

SEQ ID NO: 2640339 - DNA, 25 bp, Homo sapien
aaagaaggttgcatatacttgaagt

SEQ ID NO: 2640340 - DNA, 25 bp, Homo sapien
caaagaaggttgcatatacttgaag

SEQ ID NO: 2640341 - DNA, 25 bp, Homo sapien
ctgttgcctatgtcaatgagtttca

SEQ ID NO: 2640342 - DNA, 25 bp, Homo sapien
aacacatttgacctcccgttcctgt

SEQ ID NO: 2640343 - DNA, 25 bp, Homo sapien
gagtttcagtacatcttcaacacat

SEQ ID NO: 2640344 - DNA, 25 bp, Homo sapien
cacatttgacctcccgttcctgtaa

SEQ ID NO: 2640345 - DNA, 25 bp, Homo sapien
ggctccgagatgaatgtgcatttgc

SEQ ID NO: 2640346 - DNA, 25 bp, Homo sapien
tccgcactggaagtatcagctcctc

SEQ ID NO: 2640347 - DNA, 25 bp, Homo sapien
catttccagccaaatcaatgagaga

SEQ ID NO: 2640348 - DNA, 25 bp, Homo sapien
gcaccttcaagcctagtttgcctgt

SEQ ID NO: 2640349 - DNA, 25 bp, Homo sapien
tgagtttacttgcacggaaaggagt

SEQ ID NO: 2640350 - DNA, 25 bp, Homo sapien
gaaagaatctcttaacacctgagtg

SEQ ID NO: 2640351 - DNA, 25 bp, Homo sapien
catgcaggtacgagagttttcacct

SEQ ID NO: 2640352 - DNA, 25 bp, Homo sapien
tatttctacctaaggctctgatgca

SEQ ID NO: 2640353 - DNA, 25 bp, Homo sapien
ttaagagtattttcacaggatgcca

SEQ ID NO: 2640354 - DNA, 25 bp, Homo sapien
tatttgcatatcttaatgtattaag

SEQ ID NO: 2640355 - DNA, 25 bp, Homo sapien
ccattcctggagagattgtggcaat

SEQ ID NO: 2640356 - DNA, 25 bp, Homo sapien
tgtattaagagtattttcacaggat

SEQ ID NO: 2640357 - DNA, 25 bp, Homo sapien
gaactgtgctatcacttcttactca

SEQ ID NO: 2640358 - DNA, 25 bp, Homo sapien
tacttcagagtcttaatgtaataag

SEQ ID NO: 2640359 - DNA, 25 bp, Homo sapien
caaatcctagattccccatatagag

SEQ ID NO: 2640360 - DNA, 25 bp, Homo sapien
gaaatacaaactggcccctgacatt

SEQ ID NO: 2640361 - DNA, 25 bp, Homo sapien
ctgtgagaagggaatgtctgatgga

SEQ ID NO: 2640362 - DNA, 25 bp, Homo sapien
tgatggactaattccaaactccttt

SEQ ID NO: 2640363 - DNA, 25 bp, Homo sapien
gagaagggaatgtctgatggactaa

SEQ ID NO: 2640364 - DNA, 25 bp, Homo sapien
gggaatgtctgatggactaattcca

SEQ ID NO: 2640365 - DNA, 25 bp, Homo sapien
ggagaaaagtcgtcatattcataag

SEQ ID NO: 2640366 - DNA, 25 bp, Homo sapien
gaaaagtcgtcatattcataagaag

SEQ ID NO: 2640367 - DNA, 25 bp, Homo sapien
gagaaaagtcgtcatattcataaga

SEQ ID NO: 2640368 - DNA, 25 bp, Homo sapien
aaggagaaaagtcgtcatattcata

SEQ ID NO: 2640369 - DNA, 25 bp, Homo sapien
gaaaactaaaatggctcaggacaaa

SEQ ID NO: 2640370 - DNA, 25 bp, Homo sapien
tgcagatcatgcagtacaaccacca

SEQ ID NO: 2640371 - DNA, 25 bp, Homo sapien
accacctgccaaatgaaatgacaat

SEQ ID NO: 2640372 - DNA, 25 bp, Homo sapien
tacaaagcacaattcaaaagaaagt

SEQ ID NO: 2640373 - DNA, 25 bp, Homo sapien
tactactggctcatcaaagttgatg

SEQ ID NO: 2640374 - DNA, 25 bp, Homo sapien
ggaacgagaaaataccagcctattc

SEQ ID NO: 2640375 - DNA, 25 bp, Homo sapien
catactaagattgatgatgtcacct

SEQ ID NO: 2640376 - DNA, 25 bp, Homo sapien
cacgcaattcagttaacatactaag

SEQ ID NO: 2640377 - DNA, 25 bp, Homo sapien
gcagcagttggatctacagtcaatt

SEQ ID NO: 2640378 - DNA, 25 bp, Homo sapien
tattggacgaacatcaccagcagca

SEQ ID NO: 2640379 - DNA, 25 bp, Homo sapien
tctggtttggtggatggtgcattat

SEQ ID NO: 2640380 - DNA, 25 bp, Homo sapien
cacaaagaagttttagatcatctct

SEQ ID NO: 2640381 - DNA, 25 bp, Homo sapien
cagcttcgtggaaagtaaacaactg

SEQ ID NO: 2640382 - DNA, 25 bp, Homo sapien
catttgtgaaacagcttcgtggaaa

SEQ ID NO: 2640383 - DNA, 25 bp, Homo sapien
gaaacagcttcgtggaaagtaaaca

SEQ ID NO: 2640384 - DNA, 25 bp, Homo sapien
ctaccatttgtgaaacagcttcgtg

SEQ ID NO: 2640385 - DNA, 25 bp, Homo sapien
catctctaagagggccttttcatct

SEQ ID NO: 2640386 - DNA, 25 bp, Homo sapien
aagttgtgtagcatatgaatcgaca

SEQ ID NO: 2640387 - DNA, 25 bp, Homo sapien
tcatcttctaaccaccgaatagatt

SEQ ID NO: 2640388 - DNA, 25 bp, Homo sapien
atgaatcgacatcataatctacttc

SEQ ID NO: 2640389 - DNA, 25 bp, Homo sapien
cagatttcaaacattaaaatggaaa

SEQ ID NO: 2640390 - DNA, 25 bp, Homo sapien
tcagatttcaaacattaaaatggaa

SEQ ID NO: 2640391 - DNA, 25 bp, Homo sapien
cccgtctagatacagaagttagctg

SEQ ID NO: 2640392 - DNA, 25 bp, Homo sapien
tgaaaccccgtctagatacagaagt

SEQ ID NO: 2640393 - DNA, 25 bp, Homo sapien
gtctagatacagaagttagctgtgc

SEQ ID NO: 2640394 - DNA, 25 bp, Homo sapien
aaccccgtctagatacagaagttag

SEQ ID NO: 2640395 - DNA, 25 bp, Homo sapien
agtcagctgtgttatttcctaacag

SEQ ID NO: 2640396 - DNA, 25 bp, Homo sapien
tctttgttgtctagaaactcggaac

SEQ ID NO: 2640397 - DNA, 25 bp, Homo sapien
tgtattacacgcagtaagagtttac

SEQ ID NO: 2640398 - DNA, 25 bp, Homo sapien
ttacaactttatgggttcaatcaag

SEQ ID NO: 2640399 - DNA, 25 bp, Homo sapien
gctgcacggaaagatttcactttat

SEQ ID NO: 2640400 - DNA, 25 bp, Homo sapien
ctcttcgggttgatttgcttgctgg

SEQ ID NO: 2640401 - DNA, 25 bp, Homo sapien
gtctcttcgggttgatttgcttgct

SEQ ID NO: 2640402 - DNA, 25 bp, Homo sapien
cttgtagagctgcacggaaagattt

SEQ ID NO: 2640403 - DNA, 25 bp, Homo sapien
tcaaatggcccttacagctgaaccg

SEQ ID NO: 2640404 - DNA, 25 bp, Homo sapien
ggtatcctttagcagcaaatgccgg

SEQ ID NO: 2640405 - DNA, 25 bp, Homo sapien
acagctgtctctaggagtgggcaag

SEQ ID NO: 2640406 - DNA, 25 bp, Homo sapien
cactgatgaggtatgcatgcacgca

SEQ ID NO: 2640407 - DNA, 25 bp, Homo sapien
ccatcctgggaactgagggaaaact

SEQ ID NO: 2640408 - DNA, 25 bp, Homo sapien
gatggagcttgggttagatctgcct

SEQ ID NO: 2640409 - DNA, 25 bp, Homo sapien
caagggagtaatgtactgtctacac

SEQ ID NO: 2640410 - DNA, 25 bp, Homo sapien
agtaaagaatctggctcatgtgacc

SEQ ID NO: 2640411 - DNA, 25 bp, Homo sapien
agaatatatcttacagctgcaagaa

SEQ ID NO: 2640412 - DNA, 25 bp, Homo sapien
ttcacatgtctttattgccctttga

SEQ ID NO: 2640413 - DNA, 25 bp, Homo sapien
ctttgcaaggtcaattgtaacagtt

SEQ ID NO: 2640414 - DNA, 25 bp, Homo sapien
gcaaggtcaattgtaacagttctcc

SEQ ID NO: 2640415 - DNA, 25 bp, Homo sapien
caggcatattaaagggcatgactcc

SEQ ID NO: 2640416 - DNA, 25 bp, Homo sapien
gaagccatcatagtgtaaggcagca

SEQ ID NO: 2640417 - DNA, 25 bp, Homo sapien
ggtaagcccaagtctgctactgcca

SEQ ID NO: 2640418 - DNA, 25 bp, Homo sapien
acagtgtctgttacgattgcctacc

SEQ ID NO: 2640419 - DNA, 25 bp, Homo sapien
aaacgggcccgttccatggacatag

SEQ ID NO: 2640420 - DNA, 25 bp, Homo sapien
tgaaagaggcaccaacatggcatgg

SEQ ID NO: 2640421 - DNA, 25 bp, Homo sapien
cagtagtaaagaacagtccgagcca

SEQ ID NO: 2640422 - DNA, 25 bp, Homo sapien
tgggccagcctaaacataacctcag

SEQ ID NO: 2640423 - DNA, 25 bp, Homo sapien
aacagccttcgcaacaccgagagca

SEQ ID NO: 2640424 - DNA, 25 bp, Homo sapien
tggttgggacaagggctccaactcc

SEQ ID NO: 2640425 - DNA, 25 bp, Homo sapien
tcatcatataacttaaacagccttc

SEQ ID NO: 2640426 - DNA, 25 bp, Homo sapien
accttcttatccagccctggttggg

SEQ ID NO: 2640427 - DNA, 25 bp, Homo sapien
aaaaggcgcggggtatccaaatcag

SEQ ID NO: 2640428 - DNA, 25 bp, Homo sapien
caaaaggcgcggggtatccaaatca

SEQ ID NO: 2640429 - DNA, 25 bp, Homo sapien
aaactacgtcacaggagaccagcgc

SEQ ID NO: 2640430 - DNA, 25 bp, Homo sapien
gcgtcgcagctccaaacgacgcgga

SEQ ID NO: 2640431 - DNA, 25 bp, Homo sapien
gcttctaggaacacgccatgtttgg

SEQ ID NO: 2640432 - DNA, 25 bp, Homo sapien
tactgatgccgaaagcggcttctag

SEQ ID NO: 2640433 - DNA, 25 bp, Homo sapien
tggcgtcggttggtccctctcccca

SEQ ID NO: 2640434 - DNA, 25 bp, Homo sapien
cacttcccaacacgaagtggcgtcg

SEQ ID NO: 2640435 - DNA, 25 bp, Homo sapien
ccaacacgaagtggcgtcggttggt

SEQ ID NO: 2640436 - DNA, 25 bp, Homo sapien
cttcccaacacgaagtggcgtcggt

SEQ ID NO: 2640437 - DNA, 25 bp, Homo sapien
caacagtgctggcactattgagatc

SEQ ID NO: 2640438 - DNA, 25 bp, Homo sapien
cagtgctggcactattgagatccat

SEQ ID NO: 2640439 - DNA, 25 bp, Homo sapien
agaacaacagtgctggcactattga

SEQ ID NO: 2640440 - DNA, 25 bp, Homo sapien
gaacaacagtgctggcactattgag

SEQ ID NO: 2640441 - DNA, 25 bp, Homo sapien
atcctgactggtggcctgtgttaac

SEQ ID NO: 2640442 - DNA, 25 bp, Homo sapien
gttttaacacagcagtatcctgact

SEQ ID NO: 2640443 - DNA, 25 bp, Homo sapien
gcagtatcctgactggtggcctgtg

SEQ ID NO: 2640444 - DNA, 25 bp, Homo sapien
tgaatagaaacctggctgtgtctcc

SEQ ID NO: 2640445 - DNA, 25 bp, Homo sapien
tgcaatgtggagacctgaacaacta

SEQ ID NO: 2640446 - DNA, 25 bp, Homo sapien
ggagacctgaacaactatgacaaca

SEQ ID NO: 2640447 - DNA, 25 bp, Homo sapien
tgacattgatgctgcaatgtggaga

SEQ ID NO: 2640448 - DNA, 25 bp, Homo sapien
gatgctgcaatgtggagacctgaac

SEQ ID NO: 2640449 - DNA, 25 bp, Homo sapien
taaaatacagtacagcaagccacct

SEQ ID NO: 2640450 - DNA, 25 bp, Homo sapien
tatatccaaagtgtggttggtgaaa

SEQ ID NO: 2640451 - DNA, 25 bp, Homo sapien
tgaggtgctacacgtctccagtagc

SEQ ID NO: 2640452 - DNA, 25 bp, Homo sapien
tctccagtagcgatcaattccatgt

SEQ ID NO: 2640453 - DNA, 25 bp, Homo sapien
aaatatcaaacacttcacaaatctc

SEQ ID NO: 2640454 - DNA, 25 bp, Homo sapien
atatcaaacacttcacaaatctcca

SEQ ID NO: 2640455 - DNA, 25 bp, Homo sapien
acttcacaaatctccacatcatcct

SEQ ID NO: 2640456 - DNA, 25 bp, Homo sapien
acacttcacaaatctccacatcatc

SEQ ID NO: 2640457 - DNA, 25 bp, Homo sapien
gccctgcacgcagagtagttttctc

SEQ ID NO: 2640458 - DNA, 25 bp, Homo sapien
gaagttggtgatgagccctgcacgc

SEQ ID NO: 2640459 - DNA, 25 bp, Homo sapien
tgcacgcagagtagttttctcctcc

SEQ ID NO: 2640460 - DNA, 25 bp, Homo sapien
ctggtttattggttcattgaagttg

SEQ ID NO: 2640461 - DNA, 25 bp, Homo sapien
tatgggaccacgattatacatgcag

SEQ ID NO: 2640462 - DNA, 25 bp, Homo sapien
taggcatcacgtgactatatagaga

SEQ ID NO: 2640463 - DNA, 25 bp, Homo sapien
tataccttaaaatgacttctgggct

SEQ ID NO: 2640464 - DNA, 25 bp, Homo sapien
tatacttttgtgagactagcagcag

SEQ ID NO: 2640465 - DNA, 25 bp, Homo sapien
ctgtgctgtcgaagatcatcctgga

SEQ ID NO: 2640466 - DNA, 25 bp, Homo sapien
tgtctgggacaatccaatctagcaa

SEQ ID NO: 2640467 - DNA, 25 bp, Homo sapien
taagagtgggaattagttcaggcca

SEQ ID NO: 2640468 - DNA, 25 bp, Homo sapien
tatcagcagcaagtcgtttagatgc

SEQ ID NO: 2640469 - DNA, 25 bp, Homo sapien
caaaattgcagcttcattgccagaa

SEQ ID NO: 2640470 - DNA, 25 bp, Homo sapien
gttctagtgaactcaaaattgcagc

SEQ ID NO: 2640471 - DNA, 25 bp, Homo sapien
cttcattgccagaagaaacttcttg

SEQ ID NO: 2640472 - DNA, 25 bp, Homo sapien
ctttcaatgatagcagtgttcgttc

SEQ ID NO: 2640473 - DNA, 25 bp, Homo sapien
caaatccattaacagttaacttacg

SEQ ID NO: 2640474 - DNA, 25 bp, Homo sapien
gttccacaaatccattaacagttaa

SEQ ID NO: 2640475 - DNA, 25 bp, Homo sapien
tccacaaatccattaacagttaact

SEQ ID NO: 2640476 - DNA, 25 bp, Homo sapien
ccattaacagttaacttacgcagca

SEQ ID NO: 2640477 - DNA, 25 bp, Homo sapien
cagaaactgttttagacgttcaaat

SEQ ID NO: 2640478 - DNA, 25 bp, Homo sapien
cattccagaaactgttttagacgtt

SEQ ID NO: 2640479 - DNA, 25 bp, Homo sapien
tccagaaactgttttagacgttcaa

SEQ ID NO: 2640480 - DNA, 25 bp, Homo sapien
tgcattccagaaactgttttagacg

SEQ ID NO: 2640481 - DNA, 25 bp, Homo sapien
tactaaaagcgaaaagagtctacaa

SEQ ID NO: 2640482 - DNA, 25 bp, Homo sapien
aagtgtagtgatgagatcactgctc

SEQ ID NO: 2640483 - DNA, 25 bp, Homo sapien
caggatttggcatatagtctataga

SEQ ID NO: 2640484 - DNA, 25 bp, Homo sapien
tgttgtggacatctgcctggaaagg

SEQ ID NO: 2640485 - DNA, 25 bp, Homo sapien
aagcaataccaagatttacactgag

SEQ ID NO: 2640486 - DNA, 25 bp, Homo sapien
taaagtagtcaaggagtaacacact

SEQ ID NO: 2640487 - DNA, 25 bp, Homo sapien
taaccctaatatatgaactgaactc

SEQ ID NO: 2640488 - DNA, 25 bp, Homo sapien
taacagacacagtagccctctgtgc

SEQ ID NO: 2640489 - DNA, 25 bp, Homo sapien
tatctctacacacattatctgtacc

SEQ ID NO: 2640490 - DNA, 25 bp, Homo sapien
ttccagtctatctctacacacatta

SEQ ID NO: 2640491 - DNA, 25 bp, Homo sapien
cacattatctgtacctatacttcta

SEQ ID NO: 2640492 - DNA, 25 bp, Homo sapien
tacacacattatctgtacctatact

SEQ ID NO: 2640493 - DNA, 25 bp, Homo sapien
atgaaaaaggatgctgatccaagaa

SEQ ID NO: 2640494 - DNA, 25 bp, Homo sapien
ggagtaaatgaaaaaggatgctgat

SEQ ID NO: 2640495 - DNA, 25 bp, Homo sapien
agtaaatgaaaaaggatgctgatcc

SEQ ID NO: 2640496 - DNA, 25 bp, Homo sapien
tgaattagaggagtaaatgaaaaag

SEQ ID NO: 2640497 - DNA, 25 bp, Homo sapien
aaaacatagcttacagaaaattcca

SEQ ID NO: 2640498 - DNA, 25 bp, Homo sapien
tacattggacaatgaatcgttcaaa

SEQ ID NO: 2640499 - DNA, 25 bp, Homo sapien
caaatgtaacgccttcaccaacttc

SEQ ID NO: 2640500 - DNA, 25 bp, Homo sapien
tttttggatggcttataagcataat

SEQ ID NO: 2640501 - DNA, 25 bp, Homo sapien
caattatatcacacttaagattaaa

SEQ ID NO: 2640502 - DNA, 25 bp, Homo sapien
aattatatcacacttaagattaaaa

SEQ ID NO: 2640503 - DNA, 25 bp, Homo sapien
gcaattatatcacacttaagattaa

SEQ ID NO: 2640504 - DNA, 25 bp, Homo sapien
taatcttctacatatctctgtcaaa

SEQ ID NO: 2640505 - DNA, 25 bp, Homo sapien
tcttcttcccacattgtcagttctt

SEQ ID NO: 2640506 - DNA, 25 bp, Homo sapien
gaaataatgagagactaatcttcta

SEQ ID NO: 2640507 - DNA, 25 bp, Homo sapien
aagaatgccatcttaatcttatggg

SEQ ID NO: 2640508 - DNA, 25 bp, Homo sapien
gaatctcctcctgtttcttccactg

SEQ ID NO: 2640509 - DNA, 25 bp, Homo sapien
ctcaaactatatttccaagaatctc

SEQ ID NO: 2640510 - DNA, 25 bp, Homo sapien
cctcaaactatatttccaagaatct

SEQ ID NO: 2640511 - DNA, 25 bp, Homo sapien
caagaatctcctcctgtttcttcca

SEQ ID NO: 2640512 - DNA, 25 bp, Homo sapien
tgacttaatgttgggaatctttaat

SEQ ID NO: 2640513 - DNA, 25 bp, Homo sapien
tgtctgacttaatgttgggaatctt

SEQ ID NO: 2640514 - DNA, 25 bp, Homo sapien
tctgacttaatgttgggaatcttta

SEQ ID NO: 2640515 - DNA, 25 bp, Homo sapien
ctgtctgacttaatgttgggaatct

SEQ ID NO: 2640516 - DNA, 25 bp, Homo sapien
ctataaataatacttcagtgcatgg

SEQ ID NO: 2640517 - DNA, 25 bp, Homo sapien
aagtacaggagtaagagtctgatta

SEQ ID NO: 2640518 - DNA, 25 bp, Homo sapien
agtacaggagtaagagtctgattat

SEQ ID NO: 2640519 - DNA, 25 bp, Homo sapien
cagcatctttgattaacagtgcatt

SEQ ID NO: 2640520 - DNA, 25 bp, Homo sapien
gcattcatatcttccacatttgtgg

SEQ ID NO: 2640521 - DNA, 25 bp, Homo sapien
gcatctttgattaacagtgcattca

SEQ ID NO: 2640522 - DNA, 25 bp, Homo sapien
ttaacagtgcattcatatcttccac

SEQ ID NO: 2640523 - DNA, 25 bp, Homo sapien
tgatcaaaatcaacactgtcaaaga

SEQ ID NO: 2640524 - DNA, 25 bp, Homo sapien
actgtcaaagagctcataagcagct

SEQ ID NO: 2640525 - DNA, 25 bp, Homo sapien
cataagcagctaatccaacagcatt

SEQ ID NO: 2640526 - DNA, 25 bp, Homo sapien
gatcaaaatcaacactgtcaaagag

SEQ ID NO: 2640527 - DNA, 25 bp, Homo sapien
taattctggaagaagctggttttta

SEQ ID NO: 2640528 - DNA, 25 bp, Homo sapien
ttgtaattctggaagaagctggttt

SEQ ID NO: 2640529 - DNA, 25 bp, Homo sapien
tgtaattctggaagaagctggtttt

SEQ ID NO: 2640530 - DNA, 25 bp, Homo sapien
tccactgaccgatgagccaaatcac

SEQ ID NO: 2640531 - DNA, 25 bp, Homo sapien
tcttgatcttgaagcaagttacaga

SEQ ID NO: 2640532 - DNA, 25 bp, Homo sapien
gcttcataaagcatgggtcttaagt

SEQ ID NO: 2640533 - DNA, 25 bp, Homo sapien
gccaaatcaccctgcgtcgcaatgg

SEQ ID NO: 2640534 - DNA, 25 bp, Homo sapien
taactgggtgccttactgaacaatc

SEQ ID NO: 2640535 - DNA, 25 bp, Homo sapien
tacaacactaaccactaactgggtg

SEQ ID NO: 2640536 - DNA, 25 bp, Homo sapien
catgtctctatatggttgtacacta

SEQ ID NO: 2640537 - DNA, 25 bp, Homo sapien
tctccccacattatattagctagca

SEQ ID NO: 2640538 - DNA, 25 bp, Homo sapien
aagttgtagctgtttcaatacggac

SEQ ID NO: 2640539 - DNA, 25 bp, Homo sapien
ttaacttcaaagttgtagctgtttc

SEQ ID NO: 2640540 - DNA, 25 bp, Homo sapien
tcaaagttgtagctgtttcaatacg

SEQ ID NO: 2640541 - DNA, 25 bp, Homo sapien
aacttcaaagttgtagctgtttcaa

SEQ ID NO: 2640542 - DNA, 25 bp, Homo sapien
cggtagaaactgatctgttctaaat

SEQ ID NO: 2640543 - DNA, 25 bp, Homo sapien
cagtaactgaaaaagtagtgtgaac

SEQ ID NO: 2640544 - DNA, 25 bp, Homo sapien
aaaggacatgcaaaacatgcatctt

SEQ ID NO: 2640545 - DNA, 25 bp, Homo sapien
gctgcagtaactgaaaaagtagtgt

SEQ ID NO: 2640546 - DNA, 25 bp, Homo sapien
tttgtgtcacattctgtaacttgct

SEQ ID NO: 2640547 - DNA, 25 bp, Homo sapien
tgaaccagaacctcacatcttgctg

SEQ ID NO: 2640548 - DNA, 25 bp, Homo sapien
tattcggacaaatacgatgacgagg

SEQ ID NO: 2640549 - DNA, 25 bp, Homo sapien
gaggagtttgagtatcgacatgtca

SEQ ID NO: 2640550 - DNA, 25 bp, Homo sapien
agccaagctggtccctaaaacccat

SEQ ID NO: 2640551 - DNA, 25 bp, Homo sapien
atttatgtcgcacaaacaaatttac

SEQ ID NO: 2640552 - DNA, 25 bp, Homo sapien
catttatgtcgcacaaacaaattta

SEQ ID NO: 2640553 - DNA, 25 bp, Homo sapien
tcatttatgtcgcacaaacaaattt

SEQ ID NO: 2640554 - DNA, 25 bp, Homo sapien
ggcaaatattgtaccaaacatccca

SEQ ID NO: 2640555 - DNA, 25 bp, Homo sapien
caaaatagcacatctcaacatattg

SEQ ID NO: 2640556 - DNA, 25 bp, Homo sapien
tctgcttccaaaggaggggcaaata

SEQ ID NO: 2640557 - DNA, 25 bp, Homo sapien
ctgaacaagatgaataagtgttgtc

SEQ ID NO: 2640558 - DNA, 25 bp, Homo sapien
caggaaagggtacaggttcttgctg

SEQ ID NO: 2640559 - DNA, 25 bp, Homo sapien
cagaagataaacatgtggaggctgt

SEQ ID NO: 2640560 - DNA, 25 bp, Homo sapien
acatgtggaggctgtgaaacatctg

SEQ ID NO: 2640561 - DNA, 25 bp, Homo sapien
ctgggagcaggaaagggtacaggtt

SEQ ID NO: 2640562 - DNA, 25 bp, Homo sapien
gactgtaagtcgcattagcatttgg

SEQ ID NO: 2640563 - DNA, 25 bp, Homo sapien
gaccttaactttactggcatgagag

SEQ ID NO: 2640564 - DNA, 25 bp, Homo sapien
aaggagatatatgccccagtttgaa

SEQ ID NO: 2640565 - DNA, 25 bp, Homo sapien
cctacactgattgacagctgccaaa

SEQ ID NO: 2640566 - DNA, 25 bp, Homo sapien
tacgaagcaactctggtgtaataca

SEQ ID NO: 2640567 - DNA, 25 bp, Homo sapien
caactctggtgtaatacatggactg

SEQ ID NO: 2640568 - DNA, 25 bp, Homo sapien
gaaatatacgaagcaactctggtgt

SEQ ID NO: 2640569 - DNA, 25 bp, Homo sapien
tattctgaaatatacgaagcaactc

SEQ ID NO: 2640570 - DNA, 25 bp, Homo sapien
tgcctcccaattatggttgcattca

SEQ ID NO: 2640571 - DNA, 25 bp, Homo sapien
aatgcctcccaattatggttgcatt

SEQ ID NO: 2640572 - DNA, 25 bp, Homo sapien
atgcctcccaattatggttgcattc

SEQ ID NO: 2640573 - DNA, 25 bp, Homo sapien
caaacaacaccaacagacttatttg

SEQ ID NO: 2640574 - DNA, 25 bp, Homo sapien
ctgaacgttgtggagactaagcatg

SEQ ID NO: 2640575 - DNA, 25 bp, Homo sapien
tagggaactgaacgttgtggagact

SEQ ID NO: 2640576 - DNA, 25 bp, Homo sapien
tcactcttagggaactgaacgttgt

SEQ ID NO: 2640577 - DNA, 25 bp, Homo sapien
cccatcactcttagggaactgaacg

SEQ ID NO: 2640578 - DNA, 25 bp, Homo sapien
agatataaccattgatgatcttaaa

SEQ ID NO: 2640579 - DNA, 25 bp, Homo sapien
aaaaagatataaccattgatgatct

SEQ ID NO: 2640580 - DNA, 25 bp, Homo sapien
aagatataaccattgatgatcttaa

SEQ ID NO: 2640581 - DNA, 25 bp, Homo sapien
aaagatataaccattgatgatctta

SEQ ID NO: 2640582 - DNA, 25 bp, Homo sapien
ttgagcacctgaacttgaccttctg

SEQ ID NO: 2640583 - DNA, 25 bp, Homo sapien
cttgaccttctgtagtaatttcctt

SEQ ID NO: 2640584 - DNA, 25 bp, Homo sapien
aaagttcacaaaaggactggcatag

SEQ ID NO: 2640585 - DNA, 25 bp, Homo sapien
gactggcatagacctactgcgtatg

SEQ ID NO: 2640586 - DNA, 25 bp, Homo sapien
caaggaacgcaaaagactgcctgca

SEQ ID NO: 2640587 - DNA, 25 bp, Homo sapien
gaacatcatgtgacagcggaagcac

SEQ ID NO: 2640588 - DNA, 25 bp, Homo sapien
gatgaagatattagggaatgccctt

SEQ ID NO: 2640589 - DNA, 25 bp, Homo sapien
cacagatggcaggattacgtatcta

SEQ ID NO: 2640590 - DNA, 25 bp, Homo sapien
gcagagccaatgttctaaccctgga

SEQ ID NO: 2640591 - DNA, 25 bp, Homo sapien
tagtcttacctgctatgctacgctc

SEQ ID NO: 2640592 - DNA, 25 bp, Homo sapien
tgctacgctccctctaataatgtgg

SEQ ID NO: 2640593 - DNA, 25 bp, Homo sapien
gtaggtaaagttatcatccccatgt

SEQ ID NO: 2640594 - DNA, 25 bp, Homo sapien
caactcatgaaggaacaacacaggg

SEQ ID NO: 2640595 - DNA, 25 bp, Homo sapien
taatacatagctgtggctggcccca

SEQ ID NO: 2640596 - DNA, 25 bp, Homo sapien
gactacatgtctcagctttgaagaa

SEQ ID NO: 2640597 - DNA, 25 bp, Homo sapien
taatccccacataaagcagtatctg

SEQ ID NO: 2640598 - DNA, 25 bp, Homo sapien
catttgtggacctagtattgggttc

SEQ ID NO: 2640599 - DNA, 25 bp, Homo sapien
taaaatcggttgaaacatttgtgga

SEQ ID NO: 2640600 - DNA, 25 bp, Homo sapien
ctataatacccttgaaaacataggg

SEQ ID NO: 2640601 - DNA, 25 bp, Homo sapien
catagggtaaaatcggttgaaacat

SEQ ID NO: 2640602 - DNA, 25 bp, Homo sapien
cccataactccaagatacgtggaca

SEQ ID NO: 2640603 - DNA, 25 bp, Homo sapien
tgtagtagaactcgacccataactc

SEQ ID NO: 2640604 - DNA, 25 bp, Homo sapien
aactagtgttttgtagtagaactcg

SEQ ID NO: 2640605 - DNA, 25 bp, Homo sapien
ccaagatacgtggacatcactacag

SEQ ID NO: 2640606 - DNA, 25 bp, Homo sapien
ctcctgattaaatttatgggccatc

SEQ ID NO: 2640607 - DNA, 25 bp, Homo sapien
gccatctcattaagtagtgaagaaa

SEQ ID NO: 2640608 - DNA, 25 bp, Homo sapien
ccatctcattaagtagtgaagaaaa

SEQ ID NO: 2640609 - DNA, 25 bp, Homo sapien
tcaggctgggtaatgttgtccattc

SEQ ID NO: 2640610 - DNA, 25 bp, Homo sapien
gctgggtaatgttgtccattcgatc

SEQ ID NO: 2640611 - DNA, 25 bp, Homo sapien
taatgttgtccattcgatcaaccca

SEQ ID NO: 2640612 - DNA, 25 bp, Homo sapien
tccattcgatcaacccacatttcaa

SEQ ID NO: 2640613 - DNA, 25 bp, Homo sapien
tgcatactggatagcagatcgttat

SEQ ID NO: 2640614 - DNA, 25 bp, Homo sapien
taagctagttgcttaagctttctaa

SEQ ID NO: 2640615 - DNA, 25 bp, Homo sapien
actctcctttgatattaaagcagtt

SEQ ID NO: 2640616 - DNA, 25 bp, Homo sapien
caagttatataattgtatacaactc

SEQ ID NO: 2640617 - DNA, 25 bp, Homo sapien
tgccatggatacaggaagctaagag

SEQ ID NO: 2640618 - DNA, 25 bp, Homo sapien
gctgaacggaaatctcaggaactta

SEQ ID NO: 2640619 - DNA, 25 bp, Homo sapien
caacagactctagctatcaaacaac

SEQ ID NO: 2640620 - DNA, 25 bp, Homo sapien
gtcaatgtgtaaaacagaggttgcc

SEQ ID NO: 2640621 - DNA, 25 bp, Homo sapien
taagtcaccgtttgctcaggaaaca

SEQ ID NO: 2640622 - DNA, 25 bp, Homo sapien
cgtattattaacactcagctgattc

SEQ ID NO: 2640623 - DNA, 25 bp, Homo sapien
aggaaattcgtattattaacactca

SEQ ID NO: 2640624 - DNA, 25 bp, Homo sapien
tttaaatctgaagaacgacatttct

SEQ ID NO: 2640625 - DNA, 25 bp, Homo sapien
tgtcagctagaagttcatatttaag

SEQ ID NO: 2640626 - DNA, 25 bp, Homo sapien
tatgtccctttaacaacataaagtc

SEQ ID NO: 2640627 - DNA, 25 bp, Homo sapien
tacaattgattacaacacaggtgac

SEQ ID NO: 2640628 - DNA, 25 bp, Homo sapien
acatgatcaggccattaacccacta

SEQ ID NO: 2640629 - DNA, 25 bp, Homo sapien
gattttctgttcagatcagaattgg

SEQ ID NO: 2640630 - DNA, 25 bp, Homo sapien
cttggattttctgttcagatcagaa

SEQ ID NO: 2640631 - DNA, 25 bp, Homo sapien
gttcttggattttctgttcagatca

SEQ ID NO: 2640632 - DNA, 25 bp, Homo sapien
tggattttctgttcagatcagaatt

SEQ ID NO: 2640633 - DNA, 25 bp, Homo sapien
acagtcgtaggcaaggcagagaaaa

SEQ ID NO: 2640634 - DNA, 25 bp, Homo sapien
aacagtcgtaggcaaggcagagaaa

SEQ ID NO: 2640635 - DNA, 25 bp, Homo sapien
cagaaacagtcgtaggcaaggcaga

SEQ ID NO: 2640636 - DNA, 25 bp, Homo sapien
gaaacagtcgtaggcaaggcagaga

SEQ ID NO: 2640637 - DNA, 25 bp, Homo sapien
gagctgacaaacagacgaacatcca

SEQ ID NO: 2640638 - DNA, 25 bp, Homo sapien
tcaggaaaattcttaggaatactcg

SEQ ID NO: 2640639 - DNA, 25 bp, Homo sapien
tactcgaaaggcctaagttacggca

SEQ ID NO: 2640640 - DNA, 25 bp, Homo sapien
ttacggcagttaatttgtctcccag

SEQ ID NO: 2640641 - DNA, 25 bp, Homo sapien
taagatatattattcccagtcagat

SEQ ID NO: 2640642 - DNA, 25 bp, Homo sapien
tatagatgcctcaattgaacaaagg

SEQ ID NO: 2640643 - DNA, 25 bp, Homo sapien
aatattccaggatctaagcgtttga

SEQ ID NO: 2640644 - DNA, 25 bp, Homo sapien
tatccaaatacaatgctacaagaga

SEQ ID NO: 2640645 - DNA, 25 bp, Homo sapien
gacagtgaggcgattcctttgtaga

SEQ ID NO: 2640646 - DNA, 25 bp, Homo sapien
ggtaccactcccaaggacagtgagg

SEQ ID NO: 2640647 - DNA, 25 bp, Homo sapien
cattaaatactctctcggaacaaaa

SEQ ID NO: 2640648 - DNA, 25 bp, Homo sapien
taagtactgaactgaaactagatca

SEQ ID NO: 2640649 - DNA, 25 bp, Homo sapien
tattgtttgataaatcaagtatccg

SEQ ID NO: 2640650 - DNA, 25 bp, Homo sapien
ttctgatatcctcaaaatgttattg

SEQ ID NO: 2640651 - DNA, 25 bp, Homo sapien
aatcaagtatccgaagagcaaccat

SEQ ID NO: 2640652 - DNA, 25 bp, Homo sapien
ttgataaatcaagtatccgaagagc

SEQ ID NO: 2640653 - DNA, 25 bp, Homo sapien
tgagacaaagaaagtcttctaagac

SEQ ID NO: 2640654 - DNA, 25 bp, Homo sapien
caggaggaggtattccagattggca

SEQ ID NO: 2640655 - DNA, 25 bp, Homo sapien
ctttaaatgcaaagggctgtattgc

SEQ ID NO: 2640656 - DNA, 25 bp, Homo sapien
gattaaggatcttcaaagatgctcc

SEQ ID NO: 2640657 - DNA, 25 bp, Homo sapien
gaagcagcatcattcggtagagcac

SEQ ID NO: 2640658 - DNA, 25 bp, Homo sapien
taatgctctgccacgcatggatggg

SEQ ID NO: 2640659 - DNA, 25 bp, Homo sapien
tatgaagtcgaatctgctccaagcc

SEQ ID NO: 2640660 - DNA, 25 bp, Homo sapien
tgccaggccatcattagcgcagtag

SEQ ID NO: 2640661 - DNA, 25 bp, Homo sapien
tataaagcagaatgttcaaaaagaa

SEQ ID NO: 2640662 - DNA, 25 bp, Homo sapien
ttataaagcagaatgttcaaaaaga

SEQ ID NO: 2640663 - DNA, 25 bp, Homo sapien
taaagcagaatgttcaaaaagaatg

SEQ ID NO: 2640664 - DNA, 25 bp, Homo sapien
aagcagaatgttcaaaaagaatgac

SEQ ID NO: 2640665 - DNA, 25 bp, Homo sapien
ttttaataatgctaacctcatataa

SEQ ID NO: 2640666 - DNA, 25 bp, Homo sapien
aataatgctaacctcatataattca

SEQ ID NO: 2640667 - DNA, 25 bp, Homo sapien
taataatgctaacctcatataattc

SEQ ID NO: 2640668 - DNA, 25 bp, Homo sapien
taatgctaacctcatataattcatt

SEQ ID NO: 2640669 - DNA, 25 bp, Homo sapien
tagttttaacttagggctgctcaaa

SEQ ID NO: 2640670 - DNA, 25 bp, Homo sapien
caacggtgaaatatgagctggctaa

SEQ ID NO: 2640671 - DNA, 25 bp, Homo sapien
gaataccactgtatagaactatggc

SEQ ID NO: 2640672 - DNA, 25 bp, Homo sapien
caaattactttcgatatgccctgca

SEQ ID NO: 2640673 - DNA, 25 bp, Homo sapien
tgctgagaaactgctttcagagggc

SEQ ID NO: 2640674 - DNA, 25 bp, Homo sapien
ggcttgactggagacgacttcgacc

SEQ ID NO: 2640675 - DNA, 25 bp, Homo sapien
aactgctttcagagggcttccactg

SEQ ID NO: 2640676 - DNA, 25 bp, Homo sapien
gacgacttcgaccttactgtgctga

SEQ ID NO: 2640677 - DNA, 25 bp, Homo sapien
tccgtcatgacatcatgcaggcctt

SEQ ID NO: 2640678 - DNA, 25 bp, Homo sapien
ggatcttccgtcatgacatcatgca

SEQ ID NO: 2640679 - DNA, 25 bp, Homo sapien
cctgtttcaggatcttccgtcatga

SEQ ID NO: 2640680 - DNA, 25 bp, Homo sapien
atgacatcatgcaggccttctactg

SEQ ID NO: 2640681 - DNA, 25 bp, Homo sapien
caggttgttccactggtctgagacc

SEQ ID NO: 2640682 - DNA, 25 bp, Homo sapien
tgtgtatgtcatatgtcacccaaac

SEQ ID NO: 2640683 - DNA, 25 bp, Homo sapien
catttctaacatgcattccaggttg

SEQ ID NO: 2640684 - DNA, 25 bp, Homo sapien
cataggctacaggtataagcacaac

SEQ ID NO: 2640685 - DNA, 25 bp, Homo sapien
gatagcacttgtaccttctgggtag

SEQ ID NO: 2640686 - DNA, 25 bp, Homo sapien
aaatgacatgactgtgctatgagga

SEQ ID NO: 2640687 - DNA, 25 bp, Homo sapien
acttgtcctgatagcacttgtacct

SEQ ID NO: 2640688 - DNA, 25 bp, Homo sapien
aggaacttgtcctgatagcacttgt

SEQ ID NO: 2640689 - DNA, 25 bp, Homo sapien
cttcatcttctgttacttttggttc

SEQ ID NO: 2640690 - DNA, 25 bp, Homo sapien
atcttgttctgtgggtggttcttca

SEQ ID NO: 2640691 - DNA, 25 bp, Homo sapien
tcttatcttgttctgtgggtggttc

SEQ ID NO: 2640692 - DNA, 25 bp, Homo sapien
ttttcctcttatcttgttctgtggg

SEQ ID NO: 2640693 - DNA, 25 bp, Homo sapien
tacactaggtatgtaacaggccaaa

SEQ ID NO: 2640694 - DNA, 25 bp, Homo sapien
tgctatgtctagaaacactgggatc

SEQ ID NO: 2640695 - DNA, 25 bp, Homo sapien
tcaacagggcgcagcaatacaagct

SEQ ID NO: 2640696 - DNA, 25 bp, Homo sapien
tatgagtccagcagataccaatcag

SEQ ID NO: 2640697 - DNA, 25 bp, Homo sapien
ctagctgataagataggttgcggta

SEQ ID NO: 2640698 - DNA, 25 bp, Homo sapien
taaagacctagctgataagataggt

SEQ ID NO: 2640699 - DNA, 25 bp, Homo sapien
gtaacgtatagggtaacatccagaa

SEQ ID NO: 2640700 - DNA, 25 bp, Homo sapien
caggacgttagacattctaagtcat

SEQ ID NO: 2640701 - DNA, 25 bp, Homo sapien
ccctcaggatcgagaaaggagacag

SEQ ID NO: 2640702 - DNA, 25 bp, Homo sapien
cagtgtttgccctaccctggattgc

SEQ ID NO: 2640703 - DNA, 25 bp, Homo sapien
gattgaatcctgcaaccaagagtgt

SEQ ID NO: 2640704 - DNA, 25 bp, Homo sapien
taagtgcaatgtgtgatatacccga

SEQ ID NO: 2640705 - DNA, 25 bp, Homo sapien
tcacacagattctgtactaatctca

SEQ ID NO: 2640706 - DNA, 25 bp, Homo sapien
cacacagattctgtactaatctcat

SEQ ID NO: 2640707 - DNA, 25 bp, Homo sapien
tttgtaatctcttctacagtaacaa

SEQ ID NO: 2640708 - DNA, 25 bp, Homo sapien
atacagagaggagcaagactgtcaa

SEQ ID NO: 2640709 - DNA, 25 bp, Homo sapien
ggatacagagaggagcaagactgtc

SEQ ID NO: 2640710 - DNA, 25 bp, Homo sapien
ctgtgggatacagagaggagcaaga

SEQ ID NO: 2640711 - DNA, 25 bp, Homo sapien
gtgggatacagagaggagcaagact

SEQ ID NO: 2640712 - DNA, 25 bp, Homo sapien
tgagggactggaaaccttgttctcc

SEQ ID NO: 2640713 - DNA, 25 bp, Homo sapien
tgtagctgggtgacaatctccgtat

SEQ ID NO: 2640714 - DNA, 25 bp, Homo sapien
aatctccgtatccactgtttccatg

SEQ ID NO: 2640715 - DNA, 25 bp, Homo sapien
tgtatgaacagggtccttcagggcc

SEQ ID NO: 2640716 - DNA, 25 bp, Homo sapien
cagaggtctcccacgtggtactaca

SEQ ID NO: 2640717 - DNA, 25 bp, Homo sapien
aacagtctgtcatagccacgtggga

SEQ ID NO: 2640718 - DNA, 25 bp, Homo sapien
tctcacatacaaacggcaggctggg

SEQ ID NO: 2640719 - DNA, 25 bp, Homo sapien
tcttctcggtgctcacaggagtaac

SEQ ID NO: 2640720 - DNA, 25 bp, Homo sapien
gcacagaatcaaagctagagtataa

SEQ ID NO: 2640721 - DNA, 25 bp, Homo sapien
gggtaactaggatttgccacctgca

SEQ ID NO: 2640722 - DNA, 25 bp, Homo sapien
gtcactgggcaatttttaagaactc

SEQ ID NO: 2640723 - DNA, 25 bp, Homo sapien
tatcacttgaaaggagctttttgtc

SEQ ID NO: 2640724 - DNA, 25 bp, Homo sapien
gttacccagttccagtatagtgcca

SEQ ID NO: 2640725 - DNA, 25 bp, Homo sapien
tagtgccactgacgcttaagtagcc

SEQ ID NO: 2640726 - DNA, 25 bp, Homo sapien
ccaaaccatgccattagggagcagt

SEQ ID NO: 2640727 - DNA, 25 bp, Homo sapien
gcatgtcggcaagtctgtgttccta

SEQ ID NO: 2640728 - DNA, 25 bp, Homo sapien
cgcgtccggccaagatgactcttga

SEQ ID NO: 2640729 - DNA, 25 bp, Homo sapien
taagactgatgaaacttgaaccaag

SEQ ID NO: 2640730 - DNA, 25 bp, Homo sapien
agttcagccatgctacttttctagg

SEQ ID NO: 2640731 - DNA, 25 bp, Homo sapien
ggagtttcggagacttaagactgat

SEQ ID NO: 2640732 - DNA, 25 bp, Homo sapien
gtccatgcttctagcacacaattca

SEQ ID NO: 2640733 - DNA, 25 bp, Homo sapien
gctgtacgcagcctgaatgccacta

SEQ ID NO: 2640734 - DNA, 25 bp, Homo sapien
tgttgtagtctggaggccaaatcat

SEQ ID NO: 2640735 - DNA, 25 bp, Homo sapien
caaaagagtaactaaattgaatgtt

SEQ ID NO: 2640736 - DNA, 25 bp, Homo sapien
tacatcacaccaatagcaaggcctg

SEQ ID NO: 2640737 - DNA, 25 bp, Homo sapien
tgagtgcctgagattcggcgatccc

SEQ ID NO: 2640738 - DNA, 25 bp, Homo sapien
aatacacacgttgaaggcccacgtc

SEQ ID NO: 2640739 - DNA, 25 bp, Homo sapien
tcccaagacgaggtagctgctgctg

SEQ ID NO: 2640740 - DNA, 25 bp, Homo sapien
tggagagaagtcactctagttttgg

SEQ ID NO: 2640741 - DNA, 25 bp, Homo sapien
gaagtcactctagttttggttcttg

SEQ ID NO: 2640742 - DNA, 25 bp, Homo sapien
ctggatcttggccccctggaagcat

SEQ ID NO: 2640743 - DNA, 25 bp, Homo sapien
gttcttggaatgtaactgtcctctg

SEQ ID NO: 2640744 - DNA, 25 bp, Homo sapien
tgctttcagacaatccacaaacatg

SEQ ID NO: 2640745 - DNA, 25 bp, Homo sapien
aaacatgcacatccctaaagagagg

SEQ ID NO: 2640746 - DNA, 25 bp, Homo sapien
tgtagaccaatgaagccagtgtagg

SEQ ID NO: 2640747 - DNA, 25 bp, Homo sapien
tttaaatgagtagggcccaagggca

SEQ ID NO: 2640748 - DNA, 25 bp, Homo sapien
ttcaccttctattacaccttctttg

SEQ ID NO: 2640749 - DNA, 25 bp, Homo sapien
cttcaccttctattacaccttcttt

SEQ ID NO: 2640750 - DNA, 25 bp, Homo sapien
ccaaagggagggattcagtaaatgt

SEQ ID NO: 2640751 - DNA, 25 bp, Homo sapien
tggttttgctcaatctagacaatag

SEQ ID NO: 2640752 - DNA, 25 bp, Homo sapien
caccaggaccccaaagattcttcta

SEQ ID NO: 2640753 - DNA, 25 bp, Homo sapien
tatggaccatggaacaacagacttt

SEQ ID NO: 2640754 - DNA, 25 bp, Homo sapien
ccaagataatggagttattttaact

SEQ ID NO: 2640755 - DNA, 25 bp, Homo sapien
agataatggagttattttaacttgt

SEQ ID NO: 2640756 - DNA, 25 bp, Homo sapien
ctcccaagataatggagttatttta

SEQ ID NO: 2640757 - DNA, 25 bp, Homo sapien
tggagttattttaacttgtttatca

SEQ ID NO: 2640758 - DNA, 25 bp, Homo sapien
ctgacagggatttccatcagttcaa

SEQ ID NO: 2640759 - DNA, 25 bp, Homo sapien
attcagaggatttgctgacagcagc

SEQ ID NO: 2640760 - DNA, 25 bp, Homo sapien
ctctgacagggatttccatcagttc

SEQ ID NO: 2640761 - DNA, 25 bp, Homo sapien
gaggatttgctgacagcagctctga

SEQ ID NO: 2640762 - DNA, 25 bp, Homo sapien
gacttgactagccaaacatataact

SEQ ID NO: 2640763 - DNA, 25 bp, Homo sapien
aatggcatggacttgactagccaaa

SEQ ID NO: 2640764 - DNA, 25 bp, Homo sapien
cattataatggcatggacttgacta

SEQ ID NO: 2640765 - DNA, 25 bp, Homo sapien
tggggaatacaagaacacactacca

SEQ ID NO: 2640766 - DNA, 25 bp, Homo sapien
gaccagagatgacgtcttaatttca

SEQ ID NO: 2640767 - DNA, 25 bp, Homo sapien
cttcttcagcaaagaccagagatga

SEQ ID NO: 2640768 - DNA, 25 bp, Homo sapien
ggagccagagctccactgcatacct

SEQ ID NO: 2640769 - DNA, 25 bp, Homo sapien
tcttaatttcatgctgtgaggctgg

SEQ ID NO: 2640770 - DNA, 25 bp, Homo sapien
gaagttccacttcagacctcaaggc

SEQ ID NO: 2640771 - DNA, 25 bp, Homo sapien
tgaaacactgccatcatagacactg

SEQ ID NO: 2640772 - DNA, 25 bp, Homo sapien
tcctcatgatgacacgaagttccac

SEQ ID NO: 2640773 - DNA, 25 bp, Homo sapien
tgctgcagcgtgcatgggctctctc

SEQ ID NO: 2640774 - DNA, 25 bp, Homo sapien
tggtggctgcatctcaagcctgcca

SEQ ID NO: 2640775 - DNA, 25 bp, Homo sapien
gcagtcaactttaagtggtggctgc

SEQ ID NO: 2640776 - DNA, 25 bp, Homo sapien
ggcagtcaactttaagtggtggctg

SEQ ID NO: 2640777 - DNA, 25 bp, Homo sapien
tgcatctcaagcctgccagtttgcc

SEQ ID NO: 2640778 - DNA, 25 bp, Homo sapien
acaggtaaaacccttgcacaggcat

SEQ ID NO: 2640779 - DNA, 25 bp, Homo sapien
tggagcaggttctcatacaggtaaa

SEQ ID NO: 2640780 - DNA, 25 bp, Homo sapien
tggcctgtcagtttgcaagggctgt

SEQ ID NO: 2640781 - DNA, 25 bp, Homo sapien
tccacagttcaggtaaagccctggt

SEQ ID NO: 2640782 - DNA, 25 bp, Homo sapien
ccgacagagatacattgctaacact

SEQ ID NO: 2640783 - DNA, 25 bp, Homo sapien
cagccatggacaggcagtcattgac

SEQ ID NO: 2640784 - DNA, 25 bp, Homo sapien
ggcagtcattgaccacaatacagca

SEQ ID NO: 2640785 - DNA, 25 bp, Homo sapien
agtcagaagattttggctcttttcc

SEQ ID NO: 2640786 - DNA, 25 bp, Homo sapien
cagctgaaagcgtagctagtgggct

SEQ ID NO: 2640787 - DNA, 25 bp, Homo sapien
ttccaacaccagctgaaagcgtagc

SEQ ID NO: 2640788 - DNA, 25 bp, Homo sapien
cagcttccaacaccagctgaaagcg

SEQ ID NO: 2640789 - DNA, 25 bp, Homo sapien
gagaggaagtcacggagagcagatg

SEQ ID NO: 2640790 - DNA, 25 bp, Homo sapien
gtggagtcattagcaggttagaaag

SEQ ID NO: 2640791 - DNA, 25 bp, Homo sapien
aagcttcttgtagctggcagcgtct

SEQ ID NO: 2640792 - DNA, 25 bp, Homo sapien
gagaatataagcattcctgcaaagt

SEQ ID NO: 2640793 - DNA, 25 bp, Homo sapien
tagctggcagcgtcttcactctggg

SEQ ID NO: 2640794 - DNA, 25 bp, Homo sapien
tactcaggggtcaggtactcacttg

SEQ ID NO: 2640795 - DNA, 25 bp, Homo sapien
ctcaagcttcagcaatggtggacgc

SEQ ID NO: 2640796 - DNA, 25 bp, Homo sapien
gggtcaggtactcacttgaggaagc

SEQ ID NO: 2640797 - DNA, 25 bp, Homo sapien
ggctactcaggggtcaggtactcac

SEQ ID NO: 2640798 - DNA, 25 bp, Homo sapien
tgtccttatctattttcacatcatg

SEQ ID NO: 2640799 - DNA, 25 bp, Homo sapien
ccttatctattttcacatcatgcat

SEQ ID NO: 2640800 - DNA, 25 bp, Homo sapien
tttgtccttatctattttcacatca

SEQ ID NO: 2640801 - DNA, 25 bp, Homo sapien
tccttatctattttcacatcatgca

SEQ ID NO: 2640802 - DNA, 25 bp, Homo sapien
tccttgcatccacagaaacgaacag

SEQ ID NO: 2640803 - DNA, 25 bp, Homo sapien
ttgcatccacagaaacgaacagcat

SEQ ID NO: 2640804 - DNA, 25 bp, Homo sapien
ccttgcatccacagaaacgaacagc

SEQ ID NO: 2640805 - DNA, 25 bp, Homo sapien
cttccttgcatccacagaaacgaac

SEQ ID NO: 2640806 - DNA, 25 bp, Homo sapien
ataaactgctgttacaataaggaac

SEQ ID NO: 2640807 - DNA, 25 bp, Homo sapien
gaataaactgctgttacaataagga

SEQ ID NO: 2640808 - DNA, 25 bp, Homo sapien
tttgcctgacttccacctttgtgtg

SEQ ID NO: 2640809 - DNA, 25 bp, Homo sapien
actttgcctgacttccacctttgtg

SEQ ID NO: 2640810 - DNA, 25 bp, Homo sapien
tgaggaaattgtccccggagaattg

SEQ ID NO: 2640811 - DNA, 25 bp, Homo sapien
gtctactgaggaaattgtccccgga

SEQ ID NO: 2640812 - DNA, 25 bp, Homo sapien
cagaggctcagttggcccttgagtc

SEQ ID NO: 2640813 - DNA, 25 bp, Homo sapien
tccccggagaattgacttggagtgg

SEQ ID NO: 2640814 - DNA, 25 bp, Homo sapien
tgtcgagttgctccttcagaggctc

SEQ ID NO: 2640815 - DNA, 25 bp, Homo sapien
ctactccttctgtcgagttgctcct

SEQ ID NO: 2640816 - DNA, 25 bp, Homo sapien
tccttctgtcgagttgctccttcag

SEQ ID NO: 2640817 - DNA, 25 bp, Homo sapien
ttctgtcgagttgctccttcagagg

SEQ ID NO: 2640818 - DNA, 25 bp, Homo sapien
tgtttcccggaggatttctggagta

SEQ ID NO: 2640819 - DNA, 25 bp, Homo sapien
caatctttgtagcagtgctataaac

SEQ ID NO: 2640820 - DNA, 25 bp, Homo sapien
ttttctgattaacccaactctcaca

SEQ ID NO: 2640821 - DNA, 25 bp, Homo sapien
tgcatcaggcgcactcttttgtctt

SEQ ID NO: 2640822 - DNA, 25 bp, Homo sapien
taaatcttgtttgtgcgtatagcac

SEQ ID NO: 2640823 - DNA, 25 bp, Homo sapien
tgtggacctgtgattgaatgcacat

SEQ ID NO: 2640824 - DNA, 25 bp, Homo sapien
agatgtggacctgtgattgaatgca

SEQ ID NO: 2640825 - DNA, 25 bp, Homo sapien
atgtggacctgtgattgaatgcaca

SEQ ID NO: 2640826 - DNA, 25 bp, Homo sapien
gatgtggacctgtgattgaatgcac

SEQ ID NO: 2640827 - DNA, 25 bp, Homo sapien
gaaatttaacatcctgttgagatca

SEQ ID NO: 2640828 - DNA, 25 bp, Homo sapien
gagaaatttaacatcctgttgagat

SEQ ID NO: 2640829 - DNA, 25 bp, Homo sapien
gatactatgctaacttctgagaaat

SEQ ID NO: 2640830 - DNA, 25 bp, Homo sapien
agatatctttcacagatactatgct

SEQ ID NO: 2640831 - DNA, 25 bp, Homo sapien
tgaaagatttattgccctagtttaa

SEQ ID NO: 2640832 - DNA, 25 bp, Homo sapien
aaggacttctacattcatgtttcat

SEQ ID NO: 2640833 - DNA, 25 bp, Homo sapien
gcttagtgtgaccatttatgaaaga

SEQ ID NO: 2640834 - DNA, 25 bp, Homo sapien
tataaatagcagattaagttaacca

SEQ ID NO: 2640835 - DNA, 25 bp, Homo sapien
ttataagcaattttgatgcacagtc

SEQ ID NO: 2640836 - DNA, 25 bp, Homo sapien
taaccaactagttctcaaacctgta

SEQ ID NO: 2640837 - DNA, 25 bp, Homo sapien
ttggaatatcaagaatgtagaaact

SEQ ID NO: 2640838 - DNA, 25 bp, Homo sapien
gccaaaattgatagaagccccacct

SEQ ID NO: 2640839 - DNA, 25 bp, Homo sapien
tggtaactggctgtaaagacttcat

SEQ ID NO: 2640840 - DNA, 25 bp, Homo sapien
agcagcttggtaactggctgtaaag

SEQ ID NO: 2640841 - DNA, 25 bp, Homo sapien
tccatctgacaagctaaacgcagat

SEQ ID NO: 2640842 - DNA, 25 bp, Homo sapien
agctaaacgcagattcagcagcttg

SEQ ID NO: 2640843 - DNA, 25 bp, Homo sapien
ctgtcgtaatacttgcactcctggc

SEQ ID NO: 2640844 - DNA, 25 bp, Homo sapien
cgctgcctctgtcgtaatacttgca

SEQ ID NO: 2640845 - DNA, 25 bp, Homo sapien
actcctggctctatggctctaccca

SEQ ID NO: 2640846 - DNA, 25 bp, Homo sapien
cagagcctttgtcctcgcgctgcct

SEQ ID NO: 2640847 - DNA, 25 bp, Homo sapien
tttcctggattcttggagttcctct

SEQ ID NO: 2640848 - DNA, 25 bp, Homo sapien
cgtttagctttgatggtgtttgcca

SEQ ID NO: 2640849 - DNA, 25 bp, Homo sapien
caccattgtctttcaattgactgac

SEQ ID NO: 2640850 - DNA, 25 bp, Homo sapien
catctgttttatagtctgttcccca

SEQ ID NO: 2640851 - DNA, 25 bp, Homo sapien
gaaattatcttcaatggctcttcca

SEQ ID NO: 2640852 - DNA, 25 bp, Homo sapien
ctgtcataaaatccctccaaggcgt

SEQ ID NO: 2640853 - DNA, 25 bp, Homo sapien
gcgttaaaacttgaaattatcttca

SEQ ID NO: 2640854 - DNA, 25 bp, Homo sapien
tcataaaatccctccaaggcgttaa

SEQ ID NO: 2640855 - DNA, 25 bp, Homo sapien
acttgtgggaagtagagctgtttcc

SEQ ID NO: 2640856 - DNA, 25 bp, Homo sapien
agccgcctgccatacttaagtacta

SEQ ID NO: 2640857 - DNA, 25 bp, Homo sapien
tcaatactgctaacttgtgggaagt

SEQ ID NO: 2640858 - DNA, 25 bp, Homo sapien
taagtactacttcaatactgctaac

SEQ ID NO: 2640859 - DNA, 25 bp, Homo sapien
ggcaatagtggcaataatgccggca

SEQ ID NO: 2640860 - DNA, 25 bp, Homo sapien
actgcctctaaaatcgttaatgact

SEQ ID NO: 2640861 - DNA, 25 bp, Homo sapien
gaattcagagcctttcaaaattgag

SEQ ID NO: 2640862 - DNA, 25 bp, Homo sapien
aatcgttaatgactttacagaattc

SEQ ID NO: 2640863 - DNA, 25 bp, Homo sapien
ctgtgacttttctaaccccaaatct

SEQ ID NO: 2640864 - DNA, 25 bp, Homo sapien
ttttcaatcacattgacagttaata

SEQ ID NO: 2640865 - DNA, 25 bp, Homo sapien
gaattttcaatcacattgacagtta

SEQ ID NO: 2640866 - DNA, 25 bp, Homo sapien
aagaattttcaatcacattgacagt

SEQ ID NO: 2640867 - DNA, 25 bp, Homo sapien
ttaagaattttcaatcacattgaca

SEQ ID NO: 2640868 - DNA, 25 bp, Homo sapien
ctagggtgttctggtaatcagaaaa

SEQ ID NO: 2640869 - DNA, 25 bp, Homo sapien
gaatcttttccacaatctgtacctc

SEQ ID NO: 2640870 - DNA, 25 bp, Homo sapien
tcaccaccaggaatatgaggaccaa

SEQ ID NO: 2640871 - DNA, 25 bp, Homo sapien
tttccacaatctgtacctcaccacc

SEQ ID NO: 2640872 - DNA, 25 bp, Homo sapien
ggataagagatactcccctggcctg

SEQ ID NO: 2640873 - DNA, 25 bp, Homo sapien
gatattgccttggtactaggattcc

SEQ ID NO: 2640874 - DNA, 25 bp, Homo sapien
taagggcctgcacgactgatattgc

SEQ ID NO: 2640875 - DNA, 25 bp, Homo sapien
ctggactaggcccactgtcctaggg

SEQ ID NO: 2640876 - DNA, 25 bp, Homo sapien
gaccattcagggtcttcactctcag

SEQ ID NO: 2640877 - DNA, 25 bp, Homo sapien
tgccctttcaacaatactgcctgac

SEQ ID NO: 2640878 - DNA, 25 bp, Homo sapien
tgctcctgccctttcaacaatactg

SEQ ID NO: 2640879 - DNA, 25 bp, Homo sapien
ccattcagggtcttcactctcagta

SEQ ID NO: 2640880 - DNA, 25 bp, Homo sapien
tgcagagcataaaaccaattttcat

SEQ ID NO: 2640881 - DNA, 25 bp, Homo sapien
cacaataaaggggaggtgactgccc

SEQ ID NO: 2640882 - DNA, 25 bp, Homo sapien
tccccaactctacaatgagggaagg

SEQ ID NO: 2640883 - DNA, 25 bp, Homo sapien
gggctgattgatgagcatatcacaa

SEQ ID NO: 2640884 - DNA, 25 bp, Homo sapien
tgaatacttgccagaacgagagaga

SEQ ID NO: 2640885 - DNA, 25 bp, Homo sapien
gactctgagcgagaatcttgcagca

SEQ ID NO: 2640886 - DNA, 25 bp, Homo sapien
cactaaatgccacagagggtcatgc

SEQ ID NO: 2640887 - DNA, 25 bp, Homo sapien
cacatacacacagcgcagattggca

SEQ ID NO: 2640888 - DNA, 25 bp, Homo sapien
caatatctgcactgtgggattacac

SEQ ID NO: 2640889 - DNA, 25 bp, Homo sapien
gggattacacagtgccaagtcaatg

SEQ ID NO: 2640890 - DNA, 25 bp, Homo sapien
gagtgccccatgttgccaaatgaca

SEQ ID NO: 2640891 - DNA, 25 bp, Homo sapien
gacaagctttcctgccattaagaga

SEQ ID NO: 2640892 - DNA, 25 bp, Homo sapien
taatgactaacactaacccatggtg

SEQ ID NO: 2640893 - DNA, 25 bp, Homo sapien
tcagttggcagtcaggaccccagtg

SEQ ID NO: 2640894 - DNA, 25 bp, Homo sapien
gcttatgatgtagggatagcccttg

SEQ ID NO: 2640895 - DNA, 25 bp, Homo sapien
gctctgtagaattggctgccttaac

SEQ ID NO: 2640896 - DNA, 25 bp, Homo sapien
tgtgccgggagcctatgatcctgag

SEQ ID NO: 2640897 - DNA, 25 bp, Homo sapien
ggcctctctgtatagtggaactgca

SEQ ID NO: 2640898 - DNA, 25 bp, Homo sapien
cagcatatggtacccatggcctctc

SEQ ID NO: 2640899 - DNA, 25 bp, Homo sapien
taaatctcaagagggataccactgg

SEQ ID NO: 2640900 - DNA, 25 bp, Homo sapien
caggaaatccatgtcgtgtccatgc

SEQ ID NO: 2640901 - DNA, 25 bp, Homo sapien
gaaggtggggttctaataatgacca

SEQ ID NO: 2640902 - DNA, 25 bp, Homo sapien
aatgaccattgactcatcttggggc

SEQ ID NO: 2640903 - DNA, 25 bp, Homo sapien
caacacatatggtagcagctgctct

SEQ ID NO: 2640904 - DNA, 25 bp, Homo sapien
acggcagttctcgatctgcattttc

SEQ ID NO: 2640905 - DNA, 25 bp, Homo sapien
tgacggcagttctcgatctgcattt

SEQ ID NO: 2640906 - DNA, 25 bp, Homo sapien
tcatgacggcagttctcgatctgca

SEQ ID NO: 2640907 - DNA, 25 bp, Homo sapien
tttcctgaagagttataataagaat

SEQ ID NO: 2640908 - DNA, 25 bp, Homo sapien
ctgttaatgagtagtcaagctggag

SEQ ID NO: 2640909 - DNA, 25 bp, Homo sapien
cttgagcacactgatggcgatcaga

SEQ ID NO: 2640910 - DNA, 25 bp, Homo sapien
tgagcacactgatggcgatcagatg

SEQ ID NO: 2640911 - DNA, 25 bp, Homo sapien
gagcacactgatggcgatcagatgg

SEQ ID NO: 2640912 - DNA, 25 bp, Homo sapien
cacactgatggcgatcagatggaac

SEQ ID NO: 2640913 - DNA, 25 bp, Homo sapien
caaaagaatgctttatcagcaggtt

SEQ ID NO: 2640914 - DNA, 25 bp, Homo sapien
atctgtcatcaaaagaatgctttat

SEQ ID NO: 2640915 - DNA, 25 bp, Homo sapien
tgtcatcaaaagaatgctttatcag

SEQ ID NO: 2640916 - DNA, 25 bp, Homo sapien
catcaaaagaatgctttatcagcag

SEQ ID NO: 2640917 - DNA, 25 bp, Homo sapien
ttctgagaaccgaactaagttggcg

SEQ ID NO: 2640918 - DNA, 25 bp, Homo sapien
ccgaactaagttggcgctgaccatc

SEQ ID NO: 2640919 - DNA, 25 bp, Homo sapien
ggattctgagaaccgaactaagttg

SEQ ID NO: 2640920 - DNA, 25 bp, Homo sapien
aagttggcgctgaccatctccttta

SEQ ID NO: 2640921 - DNA, 25 bp, Homo sapien
ttcaatcagcagaccaaacagaggc

SEQ ID NO: 2640922 - DNA, 25 bp, Homo sapien
gtgacacatccctcacattgatccg

SEQ ID NO: 2640923 - DNA, 25 bp, Homo sapien
ggtgacacatccctcacattgatcc

SEQ ID NO: 2640924 - DNA, 25 bp, Homo sapien
tcaatcagcagaccaaacagaggca

SEQ ID NO: 2640925 - DNA, 25 bp, Homo sapien
caggtggttgaagaatctctctgag

SEQ ID NO: 2640926 - DNA, 25 bp, Homo sapien
taggtacaatagctactgcccctgg

SEQ ID NO: 2640927 - DNA, 25 bp, Homo sapien
ccaagttctgatcgccaggtggttg

SEQ ID NO: 2640928 - DNA, 25 bp, Homo sapien
ctgagattctataagtggtagctcc

SEQ ID NO: 2640929 - DNA, 25 bp, Homo sapien
ccaggaggtcgttgtttttgtagag

SEQ ID NO: 2640930 - DNA, 25 bp, Homo sapien
tacatccgttcagttcagttgctgg

SEQ ID NO: 2640931 - DNA, 25 bp, Homo sapien
ttgtagagtgccaccaaactcttgg

SEQ ID NO: 2640932 - DNA, 25 bp, Homo sapien
ggaccaaaaaggaatgttcccatga

SEQ ID NO: 2640933 - DNA, 25 bp, Homo sapien
gcccttgatacctgagtgaccttgg

SEQ ID NO: 2640934 - DNA, 25 bp, Homo sapien
aacaacttgctcctgtcgagtaaac

SEQ ID NO: 2640935 - DNA, 25 bp, Homo sapien
tcatttataatccttgctgtagccc

SEQ ID NO: 2640936 - DNA, 25 bp, Homo sapien
gggaacttactattactgagcttcc

SEQ ID NO: 2640937 - DNA, 25 bp, Homo sapien
ctaggtgggcactaagtccatacat

SEQ ID NO: 2640938 - DNA, 25 bp, Homo sapien
ggtgggcactaagtccatacattct

SEQ ID NO: 2640939 - DNA, 25 bp, Homo sapien
taggtgggcactaagtccatacatt

SEQ ID NO: 2640940 - DNA, 25 bp, Homo sapien
tccatacattctttggtgtctttgt

SEQ ID NO: 2640941 - DNA, 25 bp, Homo sapien
ctcagtctggtaaatttcatcaaaa

SEQ ID NO: 2640942 - DNA, 25 bp, Homo sapien
ggccctgtgtccacagtttgaagtt

SEQ ID NO: 2640943 - DNA, 25 bp, Homo sapien
cagttatctcagtctggtaaatttc

SEQ ID NO: 2640944 - DNA, 25 bp, Homo sapien
gccctgtgtccacagtttgaagttg

SEQ ID NO: 2640945 - DNA, 25 bp, Homo sapien
catattgtggctgggtcattcagcc

SEQ ID NO: 2640946 - DNA, 25 bp, Homo sapien
tgttacgtctactcagatgtccaag

SEQ ID NO: 2640947 - DNA, 25 bp, Homo sapien
gatgtccaaggcctaagtcagctct

SEQ ID NO: 2640948 - DNA, 25 bp, Homo sapien
catatttgcctacaccctctgggaa

SEQ ID NO: 2640949 - DNA, 25 bp, Homo sapien
cttggatccattctctgttccactg

SEQ ID NO: 2640950 - DNA, 25 bp, Homo sapien
gcttcgactgttttcagagttctca

SEQ ID NO: 2640951 - DNA, 25 bp, Homo sapien
cactttcttagtgtggcagtcctct

SEQ ID NO: 2640952 - DNA, 25 bp, Homo sapien
gatccattctctgttccactgggtc

SEQ ID NO: 2640953 - DNA, 25 bp, Homo sapien
tcctctttaagccagtcgcaatatt

SEQ ID NO: 2640954 - DNA, 25 bp, Homo sapien
cgcaatattcgatttgcttttccca

SEQ ID NO: 2640955 - DNA, 25 bp, Homo sapien
cccatttctcaaagatctgcatttt

SEQ ID NO: 2640956 - DNA, 25 bp, Homo sapien
taagccagtcgcaatattcgatttg

SEQ ID NO: 2640957 - DNA, 25 bp, Homo sapien
cagtgaagtagtgagcatggaaaaa

SEQ ID NO: 2640958 - DNA, 25 bp, Homo sapien
tgaagtagtgagcatggaaaaagag

SEQ ID NO: 2640959 - DNA, 25 bp, Homo sapien
gtgaagtagtgagcatggaaaaaga

SEQ ID NO: 2640960 - DNA, 25 bp, Homo sapien
gaagtagtgagcatggaaaaagagt

SEQ ID NO: 2640961 - DNA, 25 bp, Homo sapien
aattcaaagctccactgatagtccc

SEQ ID NO: 2640962 - DNA, 25 bp, Homo sapien
ggcagaattcaaagctccactgata

SEQ ID NO: 2640963 - DNA, 25 bp, Homo sapien
actgatagtcccccctgcaaggaca

SEQ ID NO: 2640964 - DNA, 25 bp, Homo sapien
gagagcatctctgagtactggggga

SEQ ID NO: 2640965 - DNA, 25 bp, Homo sapien
cttgttttgacaggatgaagaccat

SEQ ID NO: 2640966 - DNA, 25 bp, Homo sapien
ctcctccttcggatgaaaagtaagg

SEQ ID NO: 2640967 - DNA, 25 bp, Homo sapien
ccttcggatgaaaagtaagggcatc

SEQ ID NO: 2640968 - DNA, 25 bp, Homo sapien
catcttgttttgacaggatgaagac

SEQ ID NO: 2640969 - DNA, 25 bp, Homo sapien
cgtggccattatcttaaagggaata

SEQ ID NO: 2640970 - DNA, 25 bp, Homo sapien
ctttacaaagattgcacgtggccat

SEQ ID NO: 2640971 - DNA, 25 bp, Homo sapien
gcacgtggccattatcttaaaggga

SEQ ID NO: 2640972 - DNA, 25 bp, Homo sapien
aatctttacaaagattgcacgtggc

SEQ ID NO: 2640973 - DNA, 25 bp, Homo sapien
cccaattatttggtgaaggtttgca

SEQ ID NO: 2640974 - DNA, 25 bp, Homo sapien
caaagtgactgggttataagatgca

SEQ ID NO: 2640975 - DNA, 25 bp, Homo sapien
aattgctcgataaatggccatttgt

SEQ ID NO: 2640976 - DNA, 25 bp, Homo sapien
tctcatgttcctgatattcttggta

SEQ ID NO: 2640977 - DNA, 25 bp, Homo sapien
catttgttatatctcgaccacaaaa

SEQ ID NO: 2640978 - DNA, 25 bp, Homo sapien
aaaaaaggtatccacatctgaaggt

SEQ ID NO: 2640979 - DNA, 25 bp, Homo sapien
catctgaaggtcttatatcttggac

SEQ ID NO: 2640980 - DNA, 25 bp, Homo sapien
tgaaaacttgctgcatccttcagct

SEQ ID NO: 2640981 - DNA, 25 bp, Homo sapien
acaattctggcatacttcacaattt

SEQ ID NO: 2640982 - DNA, 25 bp, Homo sapien
gacaattctggcatacttcacaatt

SEQ ID NO: 2640983 - DNA, 25 bp, Homo sapien
caattctggcatacttcacaatttt

SEQ ID NO: 2640984 - DNA, 25 bp, Homo sapien
ctcagaaataatgccgcatatctac

SEQ ID NO: 2640985 - DNA, 25 bp, Homo sapien
ccctcagaaataatgccgcatatct

SEQ ID NO: 2640986 - DNA, 25 bp, Homo sapien
gaaataatgccgcatatctacaact

SEQ ID NO: 2640987 - DNA, 25 bp, Homo sapien
aatgccgcatatctacaactatctg

SEQ ID NO: 2640988 - DNA, 25 bp, Homo sapien
cccacatgctcagcgggcttaaggc

SEQ ID NO: 2640989 - DNA, 25 bp, Homo sapien
gaaatgatagccgaatggagtgcca

SEQ ID NO: 2640990 - DNA, 25 bp, Homo sapien
ggagtgccatatgttaactgttgtg

SEQ ID NO: 2640991 - DNA, 25 bp, Homo sapien
tgttgtgagtattcatcccacatgc

SEQ ID NO: 2640992 - DNA, 25 bp, Homo sapien
tctttgagcctaacaatatccaggc

SEQ ID NO: 2640993 - DNA, 25 bp, Homo sapien
gctgtgcctccactagcagctttgg

SEQ ID NO: 2640994 - DNA, 25 bp, Homo sapien
agcagctttggccaagcacacaatc

SEQ ID NO: 2640995 - DNA, 25 bp, Homo sapien
gcacacaatctttgagcctaacaat

SEQ ID NO: 2640996 - DNA, 25 bp, Homo sapien
cctgccttggcttcatagcctgtta

SEQ ID NO: 2640997 - DNA, 25 bp, Homo sapien
catgatccctatagaaacacctgtg

SEQ ID NO: 2640998 - DNA, 25 bp, Homo sapien
tgctggcaccacctggcgtctcata

SEQ ID NO: 2640999 - DNA, 25 bp, Homo sapien
cacctggcgtctcatattgtctaca

SEQ ID NO: 2641000 - DNA, 25 bp, Homo sapien
ctgtctcctgtaaagccatgatccc

SEQ ID NO: 2641001 - DNA, 25 bp, Homo sapien
tatgcatttgctccattacctctct

SEQ ID NO: 2641002 - DNA, 25 bp, Homo sapien
ttacttcaatatcttcgggcttttc

SEQ ID NO: 2641003 - DNA, 25 bp, Homo sapien
tacctctctattatcactatcacaa

SEQ ID NO: 2641004 - DNA, 25 bp, Homo sapien
catttattgccttttccactatgga

SEQ ID NO: 2641005 - DNA, 25 bp, Homo sapien
gccaatttagaatggtctctgctta

SEQ ID NO: 2641006 - DNA, 25 bp, Homo sapien
catttcgaggaaacttgtagtctgt

SEQ ID NO: 2641007 - DNA, 25 bp, Homo sapien
aatagtctgcattgagaaagaagcc

SEQ ID NO: 2641008 - DNA, 25 bp, Homo sapien
gtctctgcttaaatgctggttaatt

SEQ ID NO: 2641009 - DNA, 25 bp, Homo sapien
gacatttggataaaaaatcgaatac

SEQ ID NO: 2641010 - DNA, 25 bp, Homo sapien
ggacatttggataaaaaatcgaata

SEQ ID NO: 2641011 - DNA, 25 bp, Homo sapien
cacagtgccacctaagagaccaggt

SEQ ID NO: 2641012 - DNA, 25 bp, Homo sapien
agaccaggtgtgttctctgcagctt

SEQ ID NO: 2641013 - DNA, 25 bp, Homo sapien
tgagtgtgtccgcaagcagtaagaa

SEQ ID NO: 2641014 - DNA, 25 bp, Homo sapien
tctgcagctttcatagtcattaggg

SEQ ID NO: 2641015 - DNA, 25 bp, Homo sapien
cttgtgcccacagcttctgtacaat

SEQ ID NO: 2641016 - DNA, 25 bp, Homo sapien
tttttacttacaattctacttgcca

SEQ ID NO: 2641017 - DNA, 25 bp, Homo sapien
tttcttgtgcccacagcttctgtac

SEQ ID NO: 2641018 - DNA, 25 bp, Homo sapien
tgcccacagcttctgtacaatcctt

SEQ ID NO: 2641019 - DNA, 25 bp, Homo sapien
caagctaatggaaattcctgcaaat

SEQ ID NO: 2641020 - DNA, 25 bp, Homo sapien
tggcaaagatctcctatgattttct

SEQ ID NO: 2641021 - DNA, 25 bp, Homo sapien
tgtatgtgggtgtttgtacaagcta

SEQ ID NO: 2641022 - DNA, 25 bp, Homo sapien
aagatctcctatgattttctcaata

SEQ ID NO: 2641023 - DNA, 25 bp, Homo sapien
ggcagtttgtttgtaacaccaagaa

SEQ ID NO: 2641024 - DNA, 25 bp, Homo sapien
gccaacaattggagaggcagtttgt

SEQ ID NO: 2641025 - DNA, 25 bp, Homo sapien
gcattgagggcttcgaaagccaaca

SEQ ID NO: 2641026 - DNA, 25 bp, Homo sapien
tctggcctgaccaagttctggcaga

SEQ ID NO: 2641027 - DNA, 25 bp, Homo sapien
ggcagtagaattccacgtggccagc

SEQ ID NO: 2641028 - DNA, 25 bp, Homo sapien
cgtggccagcgctggtatggtcata

SEQ ID NO: 2641029 - DNA, 25 bp, Homo sapien
cagtggctcaagtagtatgggcagt

SEQ ID NO: 2641030 - DNA, 25 bp, Homo sapien
gctggtatggtcatagtcttgattc

SEQ ID NO: 2641031 - DNA, 25 bp, Homo sapien
cttaagttgaacttgcctgtggtgg

SEQ ID NO: 2641032 - DNA, 25 bp, Homo sapien
taagttgaacttgcctgtggtggct

SEQ ID NO: 2641033 - DNA, 25 bp, Homo sapien
agttgaacttgcctgtggtggctga

SEQ ID NO: 2641034 - DNA, 25 bp, Homo sapien
taaacttaagttgaacttgcctgtg

SEQ ID NO: 2641035 - DNA, 25 bp, Homo sapien
atgttaaaaataatcgagtagagat

SEQ ID NO: 2641036 - DNA, 25 bp, Homo sapien
tgttaaaaataatcgagtagagata

SEQ ID NO: 2641037 - DNA, 25 bp, Homo sapien
gttaaaaataatcgagtagagatat

SEQ ID NO: 2641038 - DNA, 25 bp, Homo sapien
cacttagaactcctgtctccagtta

SEQ ID NO: 2641039 - DNA, 25 bp, Homo sapien
ccagttagcctgttgtcgtgtagca

SEQ ID NO: 2641040 - DNA, 25 bp, Homo sapien
gctggactatgttcagattgctctt

SEQ ID NO: 2641041 - DNA, 25 bp, Homo sapien
tgaactcttgtccaacacttgctgc

SEQ ID NO: 2641042 - DNA, 25 bp, Homo sapien
gaatggtgattgtctcaggtctcat

SEQ ID NO: 2641043 - DNA, 25 bp, Homo sapien
gtgcaacgcaatgctgaatggtgat

SEQ ID NO: 2641044 - DNA, 25 bp, Homo sapien
tggaaaggtggtgcaacgcaatgct

SEQ ID NO: 2641045 - DNA, 25 bp, Homo sapien
aaggtggtgcaacgcaatgctgaat

SEQ ID NO: 2641046 - DNA, 25 bp, Homo sapien
tgcaagaactgcagaattgtgcttc

SEQ ID NO: 2641047 - DNA, 25 bp, Homo sapien
acttgttgactggttactttcagtg

SEQ ID NO: 2641048 - DNA, 25 bp, Homo sapien
gactggttactttcagtgacatctg

SEQ ID NO: 2641049 - DNA, 25 bp, Homo sapien
cattctgcaagaactgcagaattgt

SEQ ID NO: 2641050 - DNA, 25 bp, Homo sapien
gcctcagtcctctaccactatggtg

SEQ ID NO: 2641051 - DNA, 25 bp, Homo sapien
ggttcagaactaagggcaatatggt

SEQ ID NO: 2641052 - DNA, 25 bp, Homo sapien
tcagcgtgatacagcagcatttgaa

SEQ ID NO: 2641053 - DNA, 25 bp, Homo sapien
gcctgctttggcagcgtacaggaca

SEQ ID NO: 2641054 - DNA, 25 bp, Homo sapien
ctgcccccttcaggagtgagggaaa

SEQ ID NO: 2641055 - DNA, 25 bp, Homo sapien
gagagctgcccccttcaggagtgag

SEQ ID NO: 2641056 - DNA, 25 bp, Homo sapien
ccccttcaggagtgagggaaatcac

SEQ ID NO: 2641057 - DNA, 25 bp, Homo sapien
tcaagagagctgcccccttcaggag

SEQ ID NO: 2641058 - DNA, 25 bp, Homo sapien
taggccttgcttgtgctgctagcca

SEQ ID NO: 2641059 - DNA, 25 bp, Homo sapien
gctgcagttttaggccttgcttgtg

SEQ ID NO: 2641060 - DNA, 25 bp, Homo sapien
tgctgctagccatgtaagtacttgg

SEQ ID NO: 2641061 - DNA, 25 bp, Homo sapien
gccatgtaagtacttggaaggcttg

SEQ ID NO: 2641062 - DNA, 25 bp, Homo sapien
ctcctactggtccctctattaccag

SEQ ID NO: 2641063 - DNA, 25 bp, Homo sapien
tttgtggttgatctcctactggtcc

SEQ ID NO: 2641064 - DNA, 25 bp, Homo sapien
attaaaggcctgttcttctgtattt

SEQ ID NO: 2641065 - DNA, 25 bp, Homo sapien
cattaaaggcctgttcttctgtatt

SEQ ID NO: 2641066 - DNA, 25 bp, Homo sapien
gcaggaaccccacagtatccaacgt

SEQ ID NO: 2641067 - DNA, 25 bp, Homo sapien
ctgcaggaaccccacagtatccaac

SEQ ID NO: 2641068 - DNA, 25 bp, Homo sapien
caggaaccccacagtatccaacgta

SEQ ID NO: 2641069 - DNA, 25 bp, Homo sapien
tgcaggaaccccacagtatccaacg

SEQ ID NO: 2641070 - DNA, 25 bp, Homo sapien
ctgtatagaggatcttgaactcctt

SEQ ID NO: 2641071 - DNA, 25 bp, Homo sapien
tgtatagaggatcttgaactccttc

SEQ ID NO: 2641072 - DNA, 25 bp, Homo sapien
tttggaaaactacacagaacacatc

SEQ ID NO: 2641073 - DNA, 25 bp, Homo sapien
agtttggaaaactacacagaacaca

SEQ ID NO: 2641074 - DNA, 25 bp, Homo sapien
tggaaaactacacagaacacatcac

SEQ ID NO: 2641075 - DNA, 25 bp, Homo sapien
tgagagtttggaaaactacacagaa

SEQ ID NO: 2641076 - DNA, 25 bp, Homo sapien
tgacaaagagatcttgtacctgacc

SEQ ID NO: 2641077 - DNA, 25 bp, Homo sapien
caaagagatcttgtacctgaccctt

SEQ ID NO: 2641078 - DNA, 25 bp, Homo sapien
gacaccagacattccagatctgaaa

SEQ ID NO: 2641079 - DNA, 25 bp, Homo sapien
agagatcttgtacctgacccttggt

SEQ ID NO: 2641080 - DNA, 25 bp, Homo sapien
tatttgtactgggtcaaattaggat

SEQ ID NO: 2641081 - DNA, 25 bp, Homo sapien
tgtactgggtcaaattaggatctag

SEQ ID NO: 2641082 - DNA, 25 bp, Homo sapien
tactgggtcaaattaggatctagac

SEQ ID NO: 2641083 - DNA, 25 bp, Homo sapien
gtcaaattaggatctagacttaggc

SEQ ID NO: 2641084 - DNA, 25 bp, Homo sapien
taggcagtagattggtaaattctgg

SEQ ID NO: 2641085 - DNA, 25 bp, Homo sapien
tagattggtaaattctggagtaaac

SEQ ID NO: 2641086 - DNA, 25 bp, Homo sapien
cagtagattggtaaattctggagta

SEQ ID NO: 2641087 - DNA, 25 bp, Homo sapien
ttttaggtaggcagtagattggtaa

SEQ ID NO: 2641088 - DNA, 25 bp, Homo sapien
ttctgttaaatgtctagcactggga

SEQ ID NO: 2641089 - DNA, 25 bp, Homo sapien
gttaaatgtctagcactgggaatac

SEQ ID NO: 2641090 - DNA, 25 bp, Homo sapien
tctagcactgggaatacaccaaaga

SEQ ID NO: 2641091 - DNA, 25 bp, Homo sapien
aatgtctagcactgggaatacacca

SEQ ID NO: 2641092 - DNA, 25 bp, Homo sapien
taaaggcctgaatatgggaagctgg

SEQ ID NO: 2641093 - DNA, 25 bp, Homo sapien
ggcaggtgtagagcaataaaggcct

SEQ ID NO: 2641094 - DNA, 25 bp, Homo sapien
ggttttagccagtggagaccactaa

SEQ ID NO: 2641095 - DNA, 25 bp, Homo sapien
gaccactaataacgaaagcagatgt

SEQ ID NO: 2641096 - DNA, 25 bp, Homo sapien
ctcctgccgagaaactggttaaaat

SEQ ID NO: 2641097 - DNA, 25 bp, Homo sapien
cttgccactcctgccgagaaactgg

SEQ ID NO: 2641098 - DNA, 25 bp, Homo sapien
cactcctgccgagaaactggttaaa

SEQ ID NO: 2641099 - DNA, 25 bp, Homo sapien
gccactcctgccgagaaactggtta

SEQ ID NO: 2641100 - DNA, 25 bp, Homo sapien
gacatccaagacacaaagttagcag

SEQ ID NO: 2641101 - DNA, 25 bp, Homo sapien
gggctttcaatggaatgcccagata

SEQ ID NO: 2641102 - DNA, 25 bp, Homo sapien
tttcaatggaatgcccagatagtcc

SEQ ID NO: 2641103 - DNA, 25 bp, Homo sapien
ctttacaggacatccaagacacaaa

SEQ ID NO: 2641104 - DNA, 25 bp, Homo sapien
aagcgcgggtagacacctgaggttt

SEQ ID NO: 2641105 - DNA, 25 bp, Homo sapien
gaataattctgtttagcgtgtccca

SEQ ID NO: 2641106 - DNA, 25 bp, Homo sapien
ggtttttgccttagccagtggcgca

SEQ ID NO: 2641107 - DNA, 25 bp, Homo sapien
gtggcgcaagatgccgcggaactct

SEQ ID NO: 2641108 - DNA, 25 bp, Homo sapien
ctttctaatgccagagccctcagct

SEQ ID NO: 2641109 - DNA, 25 bp, Homo sapien
gagccctcagctctccagctgtctt

SEQ ID NO: 2641110 - DNA, 25 bp, Homo sapien
ctccagctgtcttcagttgctgtcc

SEQ ID NO: 2641111 - DNA, 25 bp, Homo sapien
cagctgtcttcagttgctgtccttt

SEQ ID NO: 2641112 - DNA, 25 bp, Homo sapien
tcttgctgtcttgggcaccaactcc

SEQ ID NO: 2641113 - DNA, 25 bp, Homo sapien
ttgttggggagtgcctgactgtgaa

SEQ ID NO: 2641114 - DNA, 25 bp, Homo sapien
ttcttgctgtcttgggcaccaactc

SEQ ID NO: 2641115 - DNA, 25 bp, Homo sapien
ggagtgcctgactgtgaagtttggt

SEQ ID NO: 2641116 - DNA, 25 bp, Homo sapien
aaacaaacaggactgtaatctgatg

SEQ ID NO: 2641117 - DNA, 25 bp, Homo sapien
gctagactacgtgcctcaaataatt

SEQ ID NO: 2641118 - DNA, 25 bp, Homo sapien
agaaatgagggctagactacgtgcc

SEQ ID NO: 2641119 - DNA, 25 bp, Homo sapien
caggactgtaatctgatgttttaga

SEQ ID NO: 2641120 - DNA, 25 bp, Homo sapien
cctctgatggctctaacttgctggt

SEQ ID NO: 2641121 - DNA, 25 bp, Homo sapien
ggatgtatcctaattgcctgtgcca

SEQ ID NO: 2641122 - DNA, 25 bp, Homo sapien
ggcagaaggaggatgtatcctaatt

SEQ ID NO: 2641123 - DNA, 25 bp, Homo sapien
gttcatgacagtcctagtccttggg

SEQ ID NO: 2641124 - DNA, 25 bp, Homo sapien
ttataggcggcctgcaaatccgtca

SEQ ID NO: 2641125 - DNA, 25 bp, Homo sapien
taggcggcctgcaaatccgtcagtg

SEQ ID NO: 2641126 - DNA, 25 bp, Homo sapien
gcggcctgcaaatccgtcagtgaca

SEQ ID NO: 2641127 - DNA, 25 bp, Homo sapien
ctgcaaatccgtcagtgacactggg

SEQ ID NO: 2641128 - DNA, 25 bp, Homo sapien
gttctcggtgtagaccatgtttggc

SEQ ID NO: 2641129 - DNA, 25 bp, Homo sapien
tggttgggaagccatacccttgcct

SEQ ID NO: 2641130 - DNA, 25 bp, Homo sapien
tccagaagatcagttctcggtgtag

SEQ ID NO: 2641131 - DNA, 25 bp, Homo sapien
tacccttgcctttggagtccagaag

SEQ ID NO: 2641132 - DNA, 25 bp, Homo sapien
gttcagggaccatgtttccttgtat

SEQ ID NO: 2641133 - DNA, 25 bp, Homo sapien
cttgttcagggaccatgtttccttg

SEQ ID NO: 2641134 - DNA, 25 bp, Homo sapien
atggcttgttcagggaccatgtttc

SEQ ID NO: 2641135 - DNA, 25 bp, Homo sapien
ggcttgttcagggaccatgtttcct

SEQ ID NO: 2641136 - DNA, 25 bp, Homo sapien
catggcaggtatccttcaggtccac

SEQ ID NO: 2641137 - DNA, 25 bp, Homo sapien
ttcccagacaatacacaagaggcag

SEQ ID NO: 2641138 - DNA, 25 bp, Homo sapien
gcagcaattgaaggtgcagcatctt

SEQ ID NO: 2641139 - DNA, 25 bp, Homo sapien
gaattgtaggcttctattaactggc

SEQ ID NO: 2641140 - DNA, 25 bp, Homo sapien
tgctggtactttaggagattgcccc

SEQ ID NO: 2641141 - DNA, 25 bp, Homo sapien
gtcactgttgtgattgccgtcctct

SEQ ID NO: 2641142 - DNA, 25 bp, Homo sapien
tatgcttaggaggtaccaccattgc

SEQ ID NO: 2641143 - DNA, 25 bp, Homo sapien
tcttttgtaatatccccacctgctg

SEQ ID NO: 2641144 - DNA, 25 bp, Homo sapien
tgtcacattgtgttaggcctgttgc

SEQ ID NO: 2641145 - DNA, 25 bp, Homo sapien
tggcagaagggttaggcatagctct

SEQ ID NO: 2641146 - DNA, 25 bp, Homo sapien
tccacagaaatacatcaggtaaaag

SEQ ID NO: 2641147 - DNA, 25 bp, Homo sapien
ccagcaggtgtcatactggtctgca

SEQ ID NO: 2641148 - DNA, 25 bp, Homo sapien
gaccccgcggcctcggacgtggcgc

SEQ ID NO: 2641149 - DNA, 25 bp, Homo sapien
ccacgtctgcgggttcccacccgag

SEQ ID NO: 2641150 - DNA, 25 bp, Homo sapien
agcggccctgctcgccccacgtctg

SEQ ID NO: 2641151 - DNA, 25 bp, Homo sapien
gttcccacccgagccgcgcgtgggc

SEQ ID NO: 2641152 - DNA, 25 bp, Homo sapien
agcgacaggagccaaaccccgcgga

SEQ ID NO: 2641153 - DNA, 25 bp, Homo sapien
gtcccggagcctccggcttcgcgcc

SEQ ID NO: 2641154 - DNA, 25 bp, Homo sapien
ggttcggcgagacgggaagcgacag

SEQ ID NO: 2641155 - DNA, 25 bp, Homo sapien
accccgcggaaagcgctcgagctgt

SEQ ID NO: 2641156 - DNA, 25 bp, Homo sapien
caggactcagctttttcgaccctgt

SEQ ID NO: 2641157 - DNA, 25 bp, Homo sapien
taattccaacctccaggtgggcgcg

SEQ ID NO: 2641158 - DNA, 25 bp, Homo sapien
gctttttcgaccctgtgtaattcca

SEQ ID NO: 2641159 - DNA, 25 bp, Homo sapien
gaccctgtgtaattccaacctccag

SEQ ID NO: 2641160 - DNA, 25 bp, Homo sapien
tagcagaaagtcgtacactccggac

SEQ ID NO: 2641161 - DNA, 25 bp, Homo sapien
ctagcagaaagtcgtacactccgga

SEQ ID NO: 2641162 - DNA, 25 bp, Homo sapien
aagcgactgcgacgccgatactgaa

SEQ ID NO: 2641163 - DNA, 25 bp, Homo sapien
ccaaggctgcaacaaaagcgactgc

SEQ ID NO: 2641164 - DNA, 25 bp, Homo sapien
tgcagttctgtctctactgacccat

SEQ ID NO: 2641165 - DNA, 25 bp, Homo sapien
tctgtctctactgacccatcttcag

SEQ ID NO: 2641166 - DNA, 25 bp, Homo sapien
ctgtctctactgacccatcttcaga

SEQ ID NO: 2641167 - DNA, 25 bp, Homo sapien
agttctgtctctactgacccatctt

SEQ ID NO: 2641168 - DNA, 25 bp, Homo sapien
gatactccataaaacaaccagagct

SEQ ID NO: 2641169 - DNA, 25 bp, Homo sapien
catttccaacaacgaagaatacttg

SEQ ID NO: 2641170 - DNA, 25 bp, Homo sapien
tcacttgattctcaagatactccat

SEQ ID NO: 2641171 - DNA, 25 bp, Homo sapien
accagagcttgctatacattttcta

SEQ ID NO: 2641172 - DNA, 25 bp, Homo sapien
tggtcctggagtcaacagctattga

SEQ ID NO: 2641173 - DNA, 25 bp, Homo sapien
tgccagtggctggataactaaagct

SEQ ID NO: 2641174 - DNA, 25 bp, Homo sapien
caatggtcagggctaaagaaggcaa

SEQ ID NO: 2641175 - DNA, 25 bp, Homo sapien
tccagttcctagctttgggagggct

SEQ ID NO: 2641176 - DNA, 25 bp, Homo sapien
ggaagggcttctacattcatgtgcc

SEQ ID NO: 2641177 - DNA, 25 bp, Homo sapien
acattcatgtgccacacatgacaaa

SEQ ID NO: 2641178 - DNA, 25 bp, Homo sapien
ttggattaggcagcttatccattct

SEQ ID NO: 2641179 - DNA, 25 bp, Homo sapien
aggcagcttatccattctggaaggg

SEQ ID NO: 2641180 - DNA, 25 bp, Homo sapien
gaaaagctcttgtagcgcatctgcc

SEQ ID NO: 2641181 - DNA, 25 bp, Homo sapien
tgatggtctcattagtctgcctgcc

SEQ ID NO: 2641182 - DNA, 25 bp, Homo sapien
aaatatgttggtcgcacctccaggc

SEQ ID NO: 2641183 - DNA, 25 bp, Homo sapien
gctgataatcagtccggctcttgga

SEQ ID NO: 2641184 - DNA, 25 bp, Homo sapien
tcaaatcatagagaagcatagtctc

SEQ ID NO: 2641185 - DNA, 25 bp, Homo sapien
agttccttcgcacatcctactctgg

SEQ ID NO: 2641186 - DNA, 25 bp, Homo sapien
cctactctggagcatattactatgg

SEQ ID NO: 2641187 - DNA, 25 bp, Homo sapien
ggtactgaagtagatcaaatcatag

SEQ ID NO: 2641188 - DNA, 25 bp, Homo sapien
tccagcaatcccactcctgagtatt

SEQ ID NO: 2641189 - DNA, 25 bp, Homo sapien
ccagcaatcccactcctgagtattt

SEQ ID NO: 2641190 - DNA, 25 bp, Homo sapien
gcaatcccactcctgagtatttacc

SEQ ID NO: 2641191 - DNA, 25 bp, Homo sapien
cagcaatcccactcctgagtattta

SEQ ID NO: 2641192 - DNA, 25 bp, Homo sapien
gcacatatgttcagcatccttaagg

SEQ ID NO: 2641193 - DNA, 25 bp, Homo sapien
acaactgtctatgtatttgaatgac

SEQ ID NO: 2641194 - DNA, 25 bp, Homo sapien
gagaataccagtgcttgctttcaag

SEQ ID NO: 2641195 - DNA, 25 bp, Homo sapien
tgctttcaaggacgcacagaaaatg

SEQ ID NO: 2641196 - DNA, 25 bp, Homo sapien
tgtgtgttactactctgagactagc

SEQ ID NO: 2641197 - DNA, 25 bp, Homo sapien
taagagagcaagctagccgaacact

SEQ ID NO: 2641198 - DNA, 25 bp, Homo sapien
gcccaaggtcaagggaccagcattt

SEQ ID NO: 2641199 - DNA, 25 bp, Homo sapien
tcctatgcgtaaggccaaaagagct

SEQ ID NO: 2641200 - DNA, 25 bp, Homo sapien
tggcagggtcataggataataatgg

SEQ ID NO: 2641201 - DNA, 25 bp, Homo sapien
aggttatagatcaacagcatcccaa

SEQ ID NO: 2641202 - DNA, 25 bp, Homo sapien
cagggtcataggataataatggaga

SEQ ID NO: 2641203 - DNA, 25 bp, Homo sapien
gtaaggttatagatcaacagcatcc

SEQ ID NO: 2641204 - DNA, 25 bp, Homo sapien
tgcttcacaaacttttcatgctgtt

SEQ ID NO: 2641205 - DNA, 25 bp, Homo sapien
gcttcacaaacttttcatgctgttt

SEQ ID NO: 2641206 - DNA, 25 bp, Homo sapien
ccatcccgggtaacacagtatccta

SEQ ID NO: 2641207 - DNA, 25 bp, Homo sapien
tataaggcaacgtcacctgggaggc

SEQ ID NO: 2641208 - DNA, 25 bp, Homo sapien
attgcctgaggccagaccatcccgg

SEQ ID NO: 2641209 - DNA, 25 bp, Homo sapien
tgtattctgtatcgttactgaattc

SEQ ID NO: 2641210 - DNA, 25 bp, Homo sapien
tgaggcacaggaagtttagttttcc

SEQ ID NO: 2641211 - DNA, 25 bp, Homo sapien
gttttcttctcagatatgtccttga

SEQ ID NO: 2641212 - DNA, 25 bp, Homo sapien
cacaggaagtttagttttccatgct

SEQ ID NO: 2641213 - DNA, 25 bp, Homo sapien
ccccatgtcatgaagcctctttaga

SEQ ID NO: 2641214 - DNA, 25 bp, Homo sapien
actccttgctcattcttcaagtatg

SEQ ID NO: 2641215 - DNA, 25 bp, Homo sapien
aactccttgctcattcttcaagtat

SEQ ID NO: 2641216 - DNA, 25 bp, Homo sapien
gctgttactagagccaacagatatt

SEQ ID NO: 2641217 - DNA, 25 bp, Homo sapien
ctttctgctgttactagagccaaca

SEQ ID NO: 2641218 - DNA, 25 bp, Homo sapien
cactgacaggttacacacacacgag

SEQ ID NO: 2641219 - DNA, 25 bp, Homo sapien
tatgcattatgagctacagaccact

SEQ ID NO: 2641220 - DNA, 25 bp, Homo sapien
aataatttatcttctgaggcccatc

SEQ ID NO: 2641221 - DNA, 25 bp, Homo sapien
ttgaggtggttgctaggccagaaca

SEQ ID NO: 2641222 - DNA, 25 bp, Homo sapien
tttccgtggacctaagtgccctcca

SEQ ID NO: 2641223 - DNA, 25 bp, Homo sapien
tcttaaagcttgatcatggagcaga

SEQ ID NO: 2641224 - DNA, 25 bp, Homo sapien
tcattcagcaacaaagcagtggagc

SEQ ID NO: 2641225 - DNA, 25 bp, Homo sapien
gaagtagcctgtagtcatgttagga

SEQ ID NO: 2641226 - DNA, 25 bp, Homo sapien
catttaatgagactaataatcagag

SEQ ID NO: 2641227 - DNA, 25 bp, Homo sapien
aaaccaagctatctcaaccagtgta

SEQ ID NO: 2641228 - DNA, 25 bp, Homo sapien
caggccttttgtgagaaatttacca

SEQ ID NO: 2641229 - DNA, 25 bp, Homo sapien
gaaatttaccagaatatctgtccac

SEQ ID NO: 2641230 - DNA, 25 bp, Homo sapien
taaaaagccatcatactcactgctg

SEQ ID NO: 2641231 - DNA, 25 bp, Homo sapien
tacttaaatgctcaagatctggccc

SEQ ID NO: 2641232 - DNA, 25 bp, Homo sapien
catggagagacactttactagagaa

SEQ ID NO: 2641233 - DNA, 25 bp, Homo sapien
gatcctcaacatagtgcctctgaag

SEQ ID NO: 2641234 - DNA, 25 bp, Homo sapien
tttggccagagtccgtaagcagggc

SEQ ID NO: 2641235 - DNA, 25 bp, Homo sapien
taattgtccgacacaatgggcatgg

SEQ ID NO: 2641236 - DNA, 25 bp, Homo sapien
ggttgaaataaacgtccagacacac

SEQ ID NO: 2641237 - DNA, 25 bp, Homo sapien
tggcaagggtaacacatataagggt

SEQ ID NO: 2641238 - DNA, 25 bp, Homo sapien
tactattaatgtagtacatactcag

SEQ ID NO: 2641239 - DNA, 25 bp, Homo sapien
gtacatactcagatcctcatttggc

SEQ ID NO: 2641240 - DNA, 25 bp, Homo sapien
tgtagtacatactcagatcctcatt

SEQ ID NO: 2641241 - DNA, 25 bp, Homo sapien
cagttttactattaatgtagtacat

SEQ ID NO: 2641242 - DNA, 25 bp, Homo sapien
caggtgggtccttgtatttccttga

SEQ ID NO: 2641243 - DNA, 25 bp, Homo sapien
aggtgggtccttgtatttccttgag

SEQ ID NO: 2641244 - DNA, 25 bp, Homo sapien
aagaaagtttttgtggcattgttca

SEQ ID NO: 2641245 - DNA, 25 bp, Homo sapien
ccattttgcagagttggatttctga

SEQ ID NO: 2641246 - DNA, 25 bp, Homo sapien
tgcagcttggtaggggccattttgc

SEQ ID NO: 2641247 - DNA, 25 bp, Homo sapien
agatgaaatgcttttctgcagcttg

SEQ ID NO: 2641248 - DNA, 25 bp, Homo sapien
tagaagtcacagattagaggtacgc

SEQ ID NO: 2641249 - DNA, 25 bp, Homo sapien
caagtacatgggaataaatctagcc

SEQ ID NO: 2641250 - DNA, 25 bp, Homo sapien
gaggtacgcataaccacttggatgg

SEQ ID NO: 2641251 - DNA, 25 bp, Homo sapien
cttggatggatctaaagggcagtgc

SEQ ID NO: 2641252 - DNA, 25 bp, Homo sapien
cctgatgaagggtacttaccaagaa

SEQ ID NO: 2641253 - DNA, 25 bp, Homo sapien
gacaaatactcagcaacatcacaga

SEQ ID NO: 2641254 - DNA, 25 bp, Homo sapien
gagcataactagatatacaagacag

SEQ ID NO: 2641255 - DNA, 25 bp, Homo sapien
aaattgaggaagtaaagccgtatga

SEQ ID NO: 2641256 - DNA, 25 bp, Homo sapien
aaggtggatttctgcgttatattca

SEQ ID NO: 2641257 - DNA, 25 bp, Homo sapien
ggatttctgcgttatattcacactc

SEQ ID NO: 2641258 - DNA, 25 bp, Homo sapien
tgagaaggtggatttctgcgttata

SEQ ID NO: 2641259 - DNA, 25 bp, Homo sapien
gtggatttctgcgttatattcacac

SEQ ID NO: 2641260 - DNA, 25 bp, Homo sapien
gacatggttcaaagagtacccagta

SEQ ID NO: 2641261 - DNA, 25 bp, Homo sapien
tccatggatcaatgtgtgcctgcac

SEQ ID NO: 2641262 - DNA, 25 bp, Homo sapien
cttgcaagcagaagtactaactgcc

SEQ ID NO: 2641263 - DNA, 25 bp, Homo sapien
gctgttaggtgacaattttccatgg

SEQ ID NO: 2641264 - DNA, 25 bp, Homo sapien
taactggagctgcatgtctgcggaa

SEQ ID NO: 2641265 - DNA, 25 bp, Homo sapien
agtgcaggtaatccatcctgtgtgc

SEQ ID NO: 2641266 - DNA, 25 bp, Homo sapien
tgtgcaccgtgtgggaactgccttc

SEQ ID NO: 2641267 - DNA, 25 bp, Homo sapien
ccacggctatcatcctcaaagtgca

SEQ ID NO: 2641268 - DNA, 25 bp, Homo sapien
aatccaatgacccagttcactgaat

SEQ ID NO: 2641269 - DNA, 25 bp, Homo sapien
acaatgaatccaatgacccagttca

SEQ ID NO: 2641270 - DNA, 25 bp, Homo sapien
tgaatccaatgacccagttcactga

SEQ ID NO: 2641271 - DNA, 25 bp, Homo sapien
ccaatgacccagttcactgaataaa

SEQ ID NO: 2641272 - DNA, 25 bp, Homo sapien
tagagtgtataaaccagaagttgcc

SEQ ID NO: 2641273 - DNA, 25 bp, Homo sapien
tgttaaagcccagttgatcccaatg

SEQ ID NO: 2641274 - DNA, 25 bp, Homo sapien
ttatgccacagagctaacttaggag

SEQ ID NO: 2641275 - DNA, 25 bp, Homo sapien
tttttagtgccacgagagagtcacc

SEQ ID NO: 2641276 - DNA, 25 bp, Homo sapien
caactgtaattgcatttaatcagag

SEQ ID NO: 2641277 - DNA, 25 bp, Homo sapien
tcagagaatgctcttctgtaaggca

SEQ ID NO: 2641278 - DNA, 25 bp, Homo sapien
acacttcaagaagtaagagttgagc

SEQ ID NO: 2641279 - DNA, 25 bp, Homo sapien
tgtgaagaatcaaagactccaactg

SEQ ID NO: 2641280 - DNA, 25 bp, Homo sapien
gattttctgcgctcttatccaagga

SEQ ID NO: 2641281 - DNA, 25 bp, Homo sapien
tcccctcaacaaatggcgataccag

SEQ ID NO: 2641282 - DNA, 25 bp, Homo sapien
cctggatcctggatgtaacctcaga

SEQ ID NO: 2641283 - DNA, 25 bp, Homo sapien
tataagggtcaatgccagtggatcc

SEQ ID NO: 2641284 - DNA, 25 bp, Homo sapien
gaagacttaggtatggattgaaaga

SEQ ID NO: 2641285 - DNA, 25 bp, Homo sapien
gggaaatagggaccatggacatact

SEQ ID NO: 2641286 - DNA, 25 bp, Homo sapien
gcctccctttgataacagagtacag

SEQ ID NO: 2641287 - DNA, 25 bp, Homo sapien
tggacatactggcaaatccctcatg

SEQ ID NO: 2641288 - DNA, 25 bp, Homo sapien
gagacttcctttgaactatggatta

SEQ ID NO: 2641289 - DNA, 25 bp, Homo sapien
ggtctgccttgattaacgttccatg

SEQ ID NO: 2641290 - DNA, 25 bp, Homo sapien
tatgaccctggatatggtctgcctt

SEQ ID NO: 2641291 - DNA, 25 bp, Homo sapien
gtttcactctaaggactactttagc

SEQ ID NO: 2641292 - DNA, 25 bp, Homo sapien
cccattacaggaggaaaacattcag

SEQ ID NO: 2641293 - DNA, 25 bp, Homo sapien
gctggtcccataaaataggtagtgt

SEQ ID NO: 2641294 - DNA, 25 bp, Homo sapien
taccaaattatagggagctgaggaa

SEQ ID NO: 2641295 - DNA, 25 bp, Homo sapien
tgaatatgaaggtaatgctggtccc

SEQ ID NO: 2641296 - DNA, 25 bp, Homo sapien
gaaaggctagcactaaaggtccttg

SEQ ID NO: 2641297 - DNA, 25 bp, Homo sapien
gaaagtagactttcactcagtataa

SEQ ID NO: 2641298 - DNA, 25 bp, Homo sapien
ggaagactgtccctatgaaaggcta

SEQ ID NO: 2641299 - DNA, 25 bp, Homo sapien
caagggcagtatgctgagtggaaac

SEQ ID NO: 2641300 - DNA, 25 bp, Homo sapien
aaaaatctagactcacataattttg

SEQ ID NO: 2641301 - DNA, 25 bp, Homo sapien
aaaaaatctagactcacataatttt

SEQ ID NO: 2641302 - DNA, 25 bp, Homo sapien
caaaaaatctagactcacataattt

SEQ ID NO: 2641303 - DNA, 25 bp, Homo sapien
gcaaaaaatctagactcacataatt

SEQ ID NO: 2641304 - DNA, 25 bp, Homo sapien
gctacttacaaattattcaaagaat

SEQ ID NO: 2641305 - DNA, 25 bp, Homo sapien
taactaagtagcaagatgtaccatg

SEQ ID NO: 2641306 - DNA, 25 bp, Homo sapien
tacaaatctagcaaagtatatatag

SEQ ID NO: 2641307 - DNA, 25 bp, Homo sapien
tattgacaatgcacatgtggaaacc

SEQ ID NO: 2641308 - DNA, 25 bp, Homo sapien
gaagtgggctcactgaaacaggcat

SEQ ID NO: 2641309 - DNA, 25 bp, Homo sapien
ggaagtgggctcactgaaacaggca

SEQ ID NO: 2641310 - DNA, 25 bp, Homo sapien
cctggaagtgggctcactgaaacag

SEQ ID NO: 2641311 - DNA, 25 bp, Homo sapien
tggaagtgggctcactgaaacaggc

SEQ ID NO: 2641312 - DNA, 25 bp, Homo sapien
gtttgcctattctgtacgtttcaca

SEQ ID NO: 2641313 - DNA, 25 bp, Homo sapien
tcactcggaaaggaaccctgtatcc

SEQ ID NO: 2641314 - DNA, 25 bp, Homo sapien
cagtcatttatagtatacaattcag

SEQ ID NO: 2641315 - DNA, 25 bp, Homo sapien
cacagacttgtgcagttagtaccac

SEQ ID NO: 2641316 - DNA, 25 bp, Homo sapien
tattcttcccatagtggatacaggt

SEQ ID NO: 2641317 - DNA, 25 bp, Homo sapien
gcatgatcttttggctattcttccc

SEQ ID NO: 2641318 - DNA, 25 bp, Homo sapien
ttaaattgctgtaggccgtctcaga

SEQ ID NO: 2641319 - DNA, 25 bp, Homo sapien
gatcagatcgaatacgtccagcggg

SEQ ID NO: 2641320 - DNA, 25 bp, Homo sapien
gtgggtgaaagtagtagcatgacat

SEQ ID NO: 2641321 - DNA, 25 bp, Homo sapien
tgagtagtgggccacaatgctgcaa

SEQ ID NO: 2641322 - DNA, 25 bp, Homo sapien
caaaagtttagtggagaaagccagc

SEQ ID NO: 2641323 - DNA, 25 bp, Homo sapien
ttgttactaaaatgagtagtgggcc

SEQ ID NO: 2641324 - DNA, 25 bp, Homo sapien
ctgcaaaagtttagtggagaaagcc

SEQ ID NO: 2641325 - DNA, 25 bp, Homo sapien
gcgttagacaggagtgtctggggag

SEQ ID NO: 2641326 - DNA, 25 bp, Homo sapien
tgcgttagacaggagtgtctgggga

SEQ ID NO: 2641327 - DNA, 25 bp, Homo sapien
ctgcgttagacaggagtgtctgggg

SEQ ID NO: 2641328 - DNA, 25 bp, Homo sapien
tcattgatacacaagcttatctaca

SEQ ID NO: 2641329 - DNA, 25 bp, Homo sapien
aagcttatctacacccggcttgcca

SEQ ID NO: 2641330 - DNA, 25 bp, Homo sapien
tgccacctttggcaacaagactagt

SEQ ID NO: 2641331 - DNA, 25 bp, Homo sapien
caacaagactagttttaggtgtggg

SEQ ID NO: 2641332 - DNA, 25 bp, Homo sapien
tgtgcttgcactagagccatcagca

SEQ ID NO: 2641333 - DNA, 25 bp, Homo sapien
gcttgcactagagccatcagcagtg

SEQ ID NO: 2641334 - DNA, 25 bp, Homo sapien
tcaagcgtctgtgcttgcactagag

SEQ ID NO: 2641335 - DNA, 25 bp, Homo sapien
cgtctgtgcttgcactagagccatc

SEQ ID NO: 2641336 - DNA, 25 bp, Homo sapien
ttctgggcctgccaaatatgctaaa

SEQ ID NO: 2641337 - DNA, 25 bp, Homo sapien
gtctgcagaaccagttccttaactg

SEQ ID NO: 2641338 - DNA, 25 bp, Homo sapien
tgtgtctgcagaaccagttccttaa

SEQ ID NO: 2641339 - DNA, 25 bp, Homo sapien
aaaacacacgttgaaggaacactgc

SEQ ID NO: 2641340 - DNA, 25 bp, Homo sapien
ttgatggaagttatgggtagagtgg

SEQ ID NO: 2641341 - DNA, 25 bp, Homo sapien
tgttgatggaagttatgggtagagt

SEQ ID NO: 2641342 - DNA, 25 bp, Homo sapien
tgatggaagttatgggtagagtgga

SEQ ID NO: 2641343 - DNA, 25 bp, Homo sapien
atgttgatggaagttatgggtagag

SEQ ID NO: 2641344 - DNA, 25 bp, Homo sapien
ggattaagcggaaatttcactcgta

SEQ ID NO: 2641345 - DNA, 25 bp, Homo sapien
gcggaaatttcactcgtaggtgccc

SEQ ID NO: 2641346 - DNA, 25 bp, Homo sapien
tcactcgtaggtgccccttggcctt

SEQ ID NO: 2641347 - DNA, 25 bp, Homo sapien
tgctgggggattaagcggaaatttc

SEQ ID NO: 2641348 - DNA, 25 bp, Homo sapien
ctggcagacgcagagaatcggtccg

SEQ ID NO: 2641349 - DNA, 25 bp, Homo sapien
acattgataggacgggaatactaat

SEQ ID NO: 2641350 - DNA, 25 bp, Homo sapien
gaatactaatgtgatctgtccatgc

SEQ ID NO: 2641351 - DNA, 25 bp, Homo sapien
tccggctgacgttgttcgcgggccc

SEQ ID NO: 2641352 - DNA, 25 bp, Homo sapien
aagcaattggctctaatcggctgcc

SEQ ID NO: 2641353 - DNA, 25 bp, Homo sapien
cgcagcggcactcggttcgtctttc

SEQ ID NO: 2641354 - DNA, 25 bp, Homo sapien
ggctgccttgatccctcgtctctaa

SEQ ID NO: 2641355 - DNA, 25 bp, Homo sapien
tctgtttgaagatcccagatgaatc

SEQ ID NO: 2641356 - DNA, 25 bp, Homo sapien
cttcctctcggcatggattgcaagg

SEQ ID NO: 2641357 - DNA, 25 bp, Homo sapien
tgggcgagaaggaacgcgccgcccg

SEQ ID NO: 2641358 - DNA, 25 bp, Homo sapien
caaggctgggcgagaaggaacgcgc

SEQ ID NO: 2641359 - DNA, 25 bp, Homo sapien
gctggcgcgggctcgcactgccttc

SEQ ID NO: 2641360 - DNA, 25 bp, Homo sapien
gctttttgcgcccattcggtgcaga

SEQ ID NO: 2641361 - DNA, 25 bp, Homo sapien
gaagcgctagctgtgccgtgcagca

SEQ ID NO: 2641362 - DNA, 25 bp, Homo sapien
aggaaggagcgcgatcaagttctgc

SEQ ID NO: 2641363 - DNA, 25 bp, Homo sapien
gcgggtcggtaaccttcagcttgaa

SEQ ID NO: 2641364 - DNA, 25 bp, Homo sapien
tcttgcagtcgtccagggctcgttg

SEQ ID NO: 2641365 - DNA, 25 bp, Homo sapien
ttttgtgggcgctctcggagccgct

SEQ ID NO: 2641366 - DNA, 25 bp, Homo sapien
tgcgctcccaatctccgctctgcag

SEQ ID NO: 2641367 - DNA, 25 bp, Homo sapien
ctcgttgggttttgtgggcgctctc

SEQ ID NO: 2641368 - DNA, 25 bp, Homo sapien
aaaaatagtgcatgtgccacgtgat

SEQ ID NO: 2641369 - DNA, 25 bp, Homo sapien
gaccagggtgtcaccctgaatttgg

SEQ ID NO: 2641370 - DNA, 25 bp, Homo sapien
tgtgccacgtgatcggcattgagga

SEQ ID NO: 2641371 - DNA, 25 bp, Homo sapien
ttctgcagggttattacgaccaggg

SEQ ID NO: 2641372 - DNA, 25 bp, Homo sapien
caatttttggtgtgcctgacgggcc

SEQ ID NO: 2641373 - DNA, 25 bp, Homo sapien
tgtcttgtgcatttccgcccggagt

SEQ ID NO: 2641374 - DNA, 25 bp, Homo sapien
tgaccgagacatccccaatagaaat

SEQ ID NO: 2641375 - DNA, 25 bp, Homo sapien
gaaatgaccagctctcggtacaggg

SEQ ID NO: 2641376 - DNA, 25 bp, Homo sapien
ctattactaagctgcaattctttat

SEQ ID NO: 2641377 - DNA, 25 bp, Homo sapien
catacatcgttgctgctggctcagc

SEQ ID NO: 2641378 - DNA, 25 bp, Homo sapien
gcctcctccaccgtgtggatcaaag

SEQ ID NO: 2641379 - DNA, 25 bp, Homo sapien
tgcttccatggtcaccgagctcttc

SEQ ID NO: 2641380 - DNA, 25 bp, Homo sapien
ctgcacccggcctatccttcctttt

SEQ ID NO: 2641381 - DNA, 25 bp, Homo sapien
ggaaactcaggctcacaggggataa

SEQ ID NO: 2641382 - DNA, 25 bp, Homo sapien
ttttcaggggtggaaactcaggctc

SEQ ID NO: 2641383 - DNA, 25 bp, Homo sapien
gtggaaactcaggctcacaggggat

SEQ ID NO: 2641384 - DNA, 25 bp, Homo sapien
tattaagctgctcctttgacaataa

SEQ ID NO: 2641385 - DNA, 25 bp, Homo sapien
ttccgttgcttcttgaggtcataat

SEQ ID NO: 2641386 - DNA, 25 bp, Homo sapien
ttgacaataactggccaaatattcc

SEQ ID NO: 2641387 - DNA, 25 bp, Homo sapien
gatattaagctgctcctttgacaat

SEQ ID NO: 2641388 - DNA, 25 bp, Homo sapien
tatctggtactagaagtagcttgct

SEQ ID NO: 2641389 - DNA, 25 bp, Homo sapien
cattagtcaataggtttcacagagg

SEQ ID NO: 2641390 - DNA, 25 bp, Homo sapien
cagcatagctgactcttggtaagca

SEQ ID NO: 2641391 - DNA, 25 bp, Homo sapien
agcatacaactgaatgggtgggtca

SEQ ID NO: 2641392 - DNA, 25 bp, Homo sapien
tgctccatttacaacctaggctgtt

SEQ ID NO: 2641393 - DNA, 25 bp, Homo sapien
catttacaacctaggctgtttcacc

SEQ ID NO: 2641394 - DNA, 25 bp, Homo sapien
aaatgggcttaagcaagctttctgc

SEQ ID NO: 2641395 - DNA, 25 bp, Homo sapien
cgattccactaatgatcagcgcagg

SEQ ID NO: 2641396 - DNA, 25 bp, Homo sapien
tgcagcatgtcagaacagacagaga

SEQ ID NO: 2641397 - DNA, 25 bp, Homo sapien
gagaataccctatggtgatgaccag

SEQ ID NO: 2641398 - DNA, 25 bp, Homo sapien
tgtgcagggtacgtgagctcaccac

SEQ ID NO: 2641399 - DNA, 25 bp, Homo sapien
gaaatacacggattcgtacctcaga

SEQ ID NO: 2641400 - DNA, 25 bp, Homo sapien
caaagttaagcagatggaagaccat

SEQ ID NO: 2641401 - DNA, 25 bp, Homo sapien
cttagctcaaagttaagcagatgga

SEQ ID NO: 2641402 - DNA, 25 bp, Homo sapien
gctcaaagttaagcagatggaagac

SEQ ID NO: 2641403 - DNA, 25 bp, Homo sapien
tagctcaaagttaagcagatggaag

SEQ ID NO: 2641404 - DNA, 25 bp, Homo sapien
tgagcttaccaaacaaccacatttt

SEQ ID NO: 2641405 - DNA, 25 bp, Homo sapien
cagtttatcacttaaccaagaagca

SEQ ID NO: 2641406 - DNA, 25 bp, Homo sapien
tttaggaggtaagtctgcaggcagc

SEQ ID NO: 2641407 - DNA, 25 bp, Homo sapien
tcaacaaacaagagcccaaatcatg

SEQ ID NO: 2641408 - DNA, 25 bp, Homo sapien
taatgtcagaagatgatggcaacag

SEQ ID NO: 2641409 - DNA, 25 bp, Homo sapien
ggcttacagcgcaaggaattaggat

SEQ ID NO: 2641410 - DNA, 25 bp, Homo sapien
gcatactagtggcatgtggtccaaa

SEQ ID NO: 2641411 - DNA, 25 bp, Homo sapien
gaggaatagccacccttttagacaa

SEQ ID NO: 2641412 - DNA, 25 bp, Homo sapien
gaactcatgcttattggcaaggaga

SEQ ID NO: 2641413 - DNA, 25 bp, Homo sapien
gaaagttgggaataagcggtgacat

SEQ ID NO: 2641414 - DNA, 25 bp, Homo sapien
tggtcgataacatcatgactttgtg

SEQ ID NO: 2641415 - DNA, 25 bp, Homo sapien
gcggtctaggcatttctcagggcat

SEQ ID NO: 2641416 - DNA, 25 bp, Homo sapien
gatattccggtgaccatctccgtgt

SEQ ID NO: 2641417 - DNA, 25 bp, Homo sapien
ttgcttgccttcgaccagcaccttt

SEQ ID NO: 2641418 - DNA, 25 bp, Homo sapien
gtgttgtcccttgcgtcccttgctt

SEQ ID NO: 2641419 - DNA, 25 bp, Homo sapien
ttttacagtttctagcgatattccg

SEQ ID NO: 2641420 - DNA, 25 bp, Homo sapien
atcttttctgtatcatttcaatttt

SEQ ID NO: 2641421 - DNA, 25 bp, Homo sapien
cttttctgtatcatttcaattttag

SEQ ID NO: 2641422 - DNA, 25 bp, Homo sapien
aattttagtgtatgtgatgctgaac

SEQ ID NO: 2641423 - DNA, 25 bp, Homo sapien
tttctgtatcatttcaattttagtg

SEQ ID NO: 2641424 - DNA, 25 bp, Homo sapien
cagctggatgtaaagccgacagatt

SEQ ID NO: 2641425 - DNA, 25 bp, Homo sapien
gccgacagatttctggatggatctc

SEQ ID NO: 2641426 - DNA, 25 bp, Homo sapien
gctggatgtaaagccgacagatttc

SEQ ID NO: 2641427 - DNA, 25 bp, Homo sapien
tgtaaagccgacagatttctggatg

SEQ ID NO: 2641428 - DNA, 25 bp, Homo sapien
gacatatggattttagcatctctgt

SEQ ID NO: 2641429 - DNA, 25 bp, Homo sapien
tcgatgaaactgaagagaccccagc

SEQ ID NO: 2641430 - DNA, 25 bp, Homo sapien
cagcagacatatggattttagcatc

SEQ ID NO: 2641431 - DNA, 25 bp, Homo sapien
gattttagcatctctgtggtataca

SEQ ID NO: 2641432 - DNA, 25 bp, Homo sapien
taggaaaatagcactcttggatagc

SEQ ID NO: 2641433 - DNA, 25 bp, Homo sapien
ggatagcatttactcccctagtgaa

SEQ ID NO: 2641434 - DNA, 25 bp, Homo sapien
aagccatgactaacctctggagggt

SEQ ID NO: 2641435 - DNA, 25 bp, Homo sapien
agtgaaatcactacataccttgctg

SEQ ID NO: 2641436 - DNA, 25 bp, Homo sapien
aaggacctggggacaattttgctgt

SEQ ID NO: 2641437 - DNA, 25 bp, Homo sapien
aaaggacctggggacaattttgctg

SEQ ID NO: 2641438 - DNA, 25 bp, Homo sapien
tcaaaggacctggggacaattttgc

SEQ ID NO: 2641439 - DNA, 25 bp, Homo sapien
aggacctggggacaattttgctgta

SEQ ID NO: 2641440 - DNA, 25 bp, Homo sapien
gccaagtagctgtgtaagaagcaca

SEQ ID NO: 2641441 - DNA, 25 bp, Homo sapien
caagtagctgtgtaagaagcacaga

SEQ ID NO: 2641442 - DNA, 25 bp, Homo sapien
agtagctgtgtaagaagcacagagc

SEQ ID NO: 2641443 - DNA, 25 bp, Homo sapien
tagctgtgtaagaagcacagagccc

SEQ ID NO: 2641444 - DNA, 25 bp, Homo sapien
catccccttctcctactgccctttg

SEQ ID NO: 2641445 - DNA, 25 bp, Homo sapien
tcagaagagatacaaaaccatcccc

SEQ ID NO: 2641446 - DNA, 25 bp, Homo sapien
aagagatacaaaaccatccccttct

SEQ ID NO: 2641447 - DNA, 25 bp, Homo sapien
tttccagttcagaagagatacaaaa

SEQ ID NO: 2641448 - DNA, 25 bp, Homo sapien
cttgatccagccttacaccgctgag

SEQ ID NO: 2641449 - DNA, 25 bp, Homo sapien
gccttacaccgctgagaccataaaa

SEQ ID NO: 2641450 - DNA, 25 bp, Homo sapien
cgctgagaccataaaacaccgtcaa

SEQ ID NO: 2641451 - DNA, 25 bp, Homo sapien
ataaaacaccgtcaactcaaatgtg

SEQ ID NO: 2641452 - DNA, 25 bp, Homo sapien
gaaacctgccaggaatgttgctgac

SEQ ID NO: 2641453 - DNA, 25 bp, Homo sapien
aggaatgttgctgactatctacggg

SEQ ID NO: 2641454 - DNA, 25 bp, Homo sapien
gatgatgaggagtcttctagggcag

SEQ ID NO: 2641455 - DNA, 25 bp, Homo sapien
tcaattttgcaatccaaactcttgg

SEQ ID NO: 2641456 - DNA, 25 bp, Homo sapien
tgaactagaaaacctcgtctctctg

SEQ ID NO: 2641457 - DNA, 25 bp, Homo sapien
aagaaagctctgtttctgaatctga

SEQ ID NO: 2641458 - DNA, 25 bp, Homo sapien
gaactagaaaacctcgtctctctgt

SEQ ID NO: 2641459 - DNA, 25 bp, Homo sapien
caagtgcaaggcacagtctgttttc

SEQ ID NO: 2641460 - DNA, 25 bp, Homo sapien
tgcaaggcacagtctgttttcatgt

SEQ ID NO: 2641461 - DNA, 25 bp, Homo sapien
ctccacaagtgcaaggcacagtctg

SEQ ID NO: 2641462 - DNA, 25 bp, Homo sapien
ccacaagtgcaaggcacagtctgtt

SEQ ID NO: 2641463 - DNA, 25 bp, Homo sapien
ttcaatggtaaaggcatagtttccc

SEQ ID NO: 2641464 - DNA, 25 bp, Homo sapien
caatggtaaaggcatagtttccctg

SEQ ID NO: 2641465 - DNA, 25 bp, Homo sapien
tggtaaaggcatagtttccctgagt

SEQ ID NO: 2641466 - DNA, 25 bp, Homo sapien
tttcaatggtaaaggcatagtttcc

SEQ ID NO: 2641467 - DNA, 25 bp, Homo sapien
ggctgctccaaccatgtatacttaa

SEQ ID NO: 2641468 - DNA, 25 bp, Homo sapien
caaccatgtatacttaatgtaagca

SEQ ID NO: 2641469 - DNA, 25 bp, Homo sapien
gtaagcacttattattggtcctttg

SEQ ID NO: 2641470 - DNA, 25 bp, Homo sapien
tttgtacatgtcgtcagtctctggg

SEQ ID NO: 2641471 - DNA, 25 bp, Homo sapien
cacaggtggttccatttgtaatcca

SEQ ID NO: 2641472 - DNA, 25 bp, Homo sapien
tccatttgacacagcgagactatca

SEQ ID NO: 2641473 - DNA, 25 bp, Homo sapien
taatgaagctccctacagcactgcc

SEQ ID NO: 2641474 - DNA, 25 bp, Homo sapien
tagcctctgtccgtaaccttgcagg

SEQ ID NO: 2641475 - DNA, 25 bp, Homo sapien
catttagaagatgcttgtccttcac

SEQ ID NO: 2641476 - DNA, 25 bp, Homo sapien
tgcatttagaagatgcttgtccttc

SEQ ID NO: 2641477 - DNA, 25 bp, Homo sapien
aactgtccttcaggcttaatttatt

SEQ ID NO: 2641478 - DNA, 25 bp, Homo sapien
gcatgcatttagaagatgcttgtcc

SEQ ID NO: 2641479 - DNA, 25 bp, Homo sapien
tcttccgtcttctcaccagggggta

SEQ ID NO: 2641480 - DNA, 25 bp, Homo sapien
ccagggggtagggagttagattcag

SEQ ID NO: 2641481 - DNA, 25 bp, Homo sapien
aagaaccttctcttccgtcttctca

SEQ ID NO: 2641482 - DNA, 25 bp, Homo sapien
agggagttagattcagaaggctgct

SEQ ID NO: 2641483 - DNA, 25 bp, Homo sapien
caagcctgtgggtacatgcgacaaa

SEQ ID NO: 2641484 - DNA, 25 bp, Homo sapien
tgaaagcgaattaccagcaggaagc

SEQ ID NO: 2641485 - DNA, 25 bp, Homo sapien
cagatgttctcagtgggtttccagg

SEQ ID NO: 2641486 - DNA, 25 bp, Homo sapien
gacttgatctctcaacccatgggaa

SEQ ID NO: 2641487 - DNA, 25 bp, Homo sapien
gagtctgctcctagatgcgtgcaaa

SEQ ID NO: 2641488 - DNA, 25 bp, Homo sapien
ccgactggtttcgtaggagcacaga

SEQ ID NO: 2641489 - DNA, 25 bp, Homo sapien
caaaatagacatggttgctgccttc

SEQ ID NO: 2641490 - DNA, 25 bp, Homo sapien
gctcagctttcagtaggtggcagta

SEQ ID NO: 2641491 - DNA, 25 bp, Homo sapien
cagcaccattctctgtggactcact

SEQ ID NO: 2641492 - DNA, 25 bp, Homo sapien
gactcactgacgtgtgatctactga

SEQ ID NO: 2641493 - DNA, 25 bp, Homo sapien
cactgacgtgtgatctactgaaata

SEQ ID NO: 2641494 - DNA, 25 bp, Homo sapien
tctgtggactcactgacgtgtgatc

SEQ ID NO: 2641495 - DNA, 25 bp, Homo sapien
gatgactttttggaacccagcttct

SEQ ID NO: 2641496 - DNA, 25 bp, Homo sapien
gactttttggaacccagcttctcca

SEQ ID NO: 2641497 - DNA, 25 bp, Homo sapien
tgactttttggaacccagcttctcc

SEQ ID NO: 2641498 - DNA, 25 bp, Homo sapien
cagatgactttttggaacccagctt

SEQ ID NO: 2641499 - DNA, 25 bp, Homo sapien
gatagcagggacctaatagcaggct

SEQ ID NO: 2641500 - DNA, 25 bp, Homo sapien
agatggcagtgaggttcctagcctg

SEQ ID NO: 2641501 - DNA, 25 bp, Homo sapien
taatcccaatgctgagctttggcat

SEQ ID NO: 2641502 - DNA, 25 bp, Homo sapien
taatagcaggctaggaacctcactg

SEQ ID NO: 2641503 - DNA, 25 bp, Homo sapien
tcatcttgatcaaaatttgaaagaa

SEQ ID NO: 2641504 - DNA, 25 bp, Homo sapien
aaatgtgcaatgataccaatgttct

SEQ ID NO: 2641505 - DNA, 25 bp, Homo sapien
ctaatgaatttgtagaaatcttttc

SEQ ID NO: 2641506 - DNA, 25 bp, Homo sapien
tttgaaagaaatgtgcaatgatacc

SEQ ID NO: 2641507 - DNA, 25 bp, Homo sapien
gcctttcaggataaaggttctcaga

SEQ ID NO: 2641508 - DNA, 25 bp, Homo sapien
tttcaggataaaggttctcagatcc

SEQ ID NO: 2641509 - DNA, 25 bp, Homo sapien
ctttcaggataaaggttctcagatc

SEQ ID NO: 2641510 - DNA, 25 bp, Homo sapien
ttcaggataaaggttctcagatcca

SEQ ID NO: 2641511 - DNA, 25 bp, Homo sapien
ttaaggtagaggcaagcagagaaag

SEQ ID NO: 2641512 - DNA, 25 bp, Homo sapien
tcccctttcaaaaagtcgtctctga

SEQ ID NO: 2641513 - DNA, 25 bp, Homo sapien
tcttctgtgcacaatatctttcagt

SEQ ID NO: 2641514 - DNA, 25 bp, Homo sapien
catggaagtttgaaccacgctgaca

SEQ ID NO: 2641515 - DNA, 25 bp, Homo sapien
gacacccatctcctcacaggattta

SEQ ID NO: 2641516 - DNA, 25 bp, Homo sapien
cgttggtaagagagccacaggccat

SEQ ID NO: 2641517 - DNA, 25 bp, Homo sapien
tgtgacatgaggcaaggaacgcgtt

SEQ ID NO: 2641518 - DNA, 25 bp, Homo sapien
aggccatgtcacgtctgacacccat

SEQ ID NO: 2641519 - DNA, 25 bp, Homo sapien
ggtagttgccctgtagacatggctc

SEQ ID NO: 2641520 - DNA, 25 bp, Homo sapien
tgggtagttgccctgtagacatggc

SEQ ID NO: 2641521 - DNA, 25 bp, Homo sapien
agttgccctgtagacatggctcgca

SEQ ID NO: 2641522 - DNA, 25 bp, Homo sapien
cactctgggtagttgccctgtagac

SEQ ID NO: 2641523 - DNA, 25 bp, Homo sapien
tcttatgttcttgaggcaatggcgg

SEQ ID NO: 2641524 - DNA, 25 bp, Homo sapien
tcagcggtcagggatatggcgtttc

SEQ ID NO: 2641525 - DNA, 25 bp, Homo sapien
tactgacgaagcaggcaaccttgtg

SEQ ID NO: 2641526 - DNA, 25 bp, Homo sapien
cccattgctgaagtttactgacgaa

SEQ ID NO: 2641527 - DNA, 25 bp, Homo sapien
ctcagggtcattccctgtctttgga

SEQ ID NO: 2641528 - DNA, 25 bp, Homo sapien
tctcagggtcattccctgtctttgg

SEQ ID NO: 2641529 - DNA, 25 bp, Homo sapien
tcagggtcattccctgtctttggag

SEQ ID NO: 2641530 - DNA, 25 bp, Homo sapien
ctctcagggtcattccctgtctttg

SEQ ID NO: 2641531 - DNA, 25 bp, Homo sapien
tcttcgaacaatcattgtctgccct

SEQ ID NO: 2641532 - DNA, 25 bp, Homo sapien
ggagagcggctgtctttggcgaaga

SEQ ID NO: 2641533 - DNA, 25 bp, Homo sapien
aagagaggataggtagaagaaagtt

SEQ ID NO: 2641534 - DNA, 25 bp, Homo sapien
cctggtgtggagagcggctgtcttt

SEQ ID NO: 2641535 - DNA, 25 bp, Homo sapien
ctctgcaaacgtgttcatccacagg

SEQ ID NO: 2641536 - DNA, 25 bp, Homo sapien
caggcttcacaaagctcggataatc

SEQ ID NO: 2641537 - DNA, 25 bp, Homo sapien
catgccttggggactttgggatcct

SEQ ID NO: 2641538 - DNA, 25 bp, Homo sapien
tcctagtgaagagtaacagtcactc

SEQ ID NO: 2641539 - DNA, 25 bp, Homo sapien
tccttatagacaaggattttgtgca

SEQ ID NO: 2641540 - DNA, 25 bp, Homo sapien
cagtcatctgaaagttgccatgtgt

SEQ ID NO: 2641541 - DNA, 25 bp, Homo sapien
agttgccatgtgtgatgtccttata

SEQ ID NO: 2641542 - DNA, 25 bp, Homo sapien
ggcactgcaccaagtagggcagatt

SEQ ID NO: 2641543 - DNA, 25 bp, Homo sapien
tggctgaggtacgggtacgggtaca

SEQ ID NO: 2641544 - DNA, 25 bp, Homo sapien
ttgacctggctgaggtacgggtacg

SEQ ID NO: 2641545 - DNA, 25 bp, Homo sapien
ctgaggtacgggtacgggtacacag

SEQ ID NO: 2641546 - DNA, 25 bp, Homo sapien
tgacctggctgaggtacgggtacgg

SEQ ID NO: 2641547 - DNA, 25 bp, Homo sapien
gtcacattatggctagtaccagcaa

SEQ ID NO: 2641548 - DNA, 25 bp, Homo sapien
cattatggctagtaccagcaaaagc

SEQ ID NO: 2641549 - DNA, 25 bp, Homo sapien
tcaggtcacattatggctagtacca

SEQ ID NO: 2641550 - DNA, 25 bp, Homo sapien
tggctagtaccagcaaaagctgcag

SEQ ID NO: 2641551 - DNA, 25 bp, Homo sapien
ggtgctgatcctgaatctccacatt

SEQ ID NO: 2641552 - DNA, 25 bp, Homo sapien
tgggcccactttgcacctgcatgtt

SEQ ID NO: 2641553 - DNA, 25 bp, Homo sapien
tattcctagtacactgccaagaccc

SEQ ID NO: 2641554 - DNA, 25 bp, Homo sapien
gagtgatggtgagctgcaaactaag

SEQ ID NO: 2641555 - DNA, 25 bp, Homo sapien
tctcgctgctgagcggtcgctcctt

SEQ ID NO: 2641556 - DNA, 25 bp, Homo sapien
cggctcttccgatctgggctctggc

SEQ ID NO: 2641557 - DNA, 25 bp, Homo sapien
ggtctgctctcggatcgcacccgtc

SEQ ID NO: 2641558 - DNA, 25 bp, Homo sapien
gtgtctgggcgccttactctcgcct

SEQ ID NO: 2641559 - DNA, 25 bp, Homo sapien
cagcagtacttgaggtcggcgaagc

SEQ ID NO: 2641560 - DNA, 25 bp, Homo sapien
actggaagggctccacgaagctctg

SEQ ID NO: 2641561 - DNA, 25 bp, Homo sapien
tgtagtagccggagcacagtcggct

SEQ ID NO: 2641562 - DNA, 25 bp, Homo sapien
tcggcgaagccgcagcaatactgga

SEQ ID NO: 2641563 - DNA, 25 bp, Homo sapien
tggccctggcgtggctccgcttgtc

SEQ ID NO: 2641564 - DNA, 25 bp, Homo sapien
gagccggggcgagatttctctccct

SEQ ID NO: 2641565 - DNA, 25 bp, Homo sapien
cttgtcgcctccctagccccgggct

SEQ ID NO: 2641566 - DNA, 25 bp, Homo sapien
cgccctcagaggctccgcgtccttc

SEQ ID NO: 2641567 - DNA, 25 bp, Homo sapien
tgttaatgcagtaagaagagcccca

SEQ ID NO: 2641568 - DNA, 25 bp, Homo sapien
caaaaagtgcaagtcgtaaagccca

SEQ ID NO: 2641569 - DNA, 25 bp, Homo sapien
ccagttgcttgcacaggccctcagg

SEQ ID NO: 2641570 - DNA, 25 bp, Homo sapien
ggtgtcgcttcaattctctccaggg

SEQ ID NO: 2641571 - DNA, 25 bp, Homo sapien
tctacagagtgtgtgtataatcata

SEQ ID NO: 2641572 - DNA, 25 bp, Homo sapien
gggtgtcctgttctacagagtgtgt

SEQ ID NO: 2641573 - DNA, 25 bp, Homo sapien
tcacattccagcaatagccacatgg

SEQ ID NO: 2641574 - DNA, 25 bp, Homo sapien
gaaagggggtgtcctgttctacaga

SEQ ID NO: 2641575 - DNA, 25 bp, Homo sapien
ctctgggattaggacactgacaagt

SEQ ID NO: 2641576 - DNA, 25 bp, Homo sapien
ctgggattaggacactgacaagttt

SEQ ID NO: 2641577 - DNA, 25 bp, Homo sapien
ctggcttgcctttaggcttctgctc

SEQ ID NO: 2641578 - DNA, 25 bp, Homo sapien
ggcttgcctttaggcttctgctctt

SEQ ID NO: 2641579 - DNA, 25 bp, Homo sapien
caaaggcgagtaaaacaagggcagc

SEQ ID NO: 2641580 - DNA, 25 bp, Homo sapien
gcagcaattcctagtccaatcaagg

SEQ ID NO: 2641581 - DNA, 25 bp, Homo sapien
tctaagtgttgaagcttaaggccag

SEQ ID NO: 2641582 - DNA, 25 bp, Homo sapien
ttaaggccagtgtctaatctttgag

SEQ ID NO: 2641583 - DNA, 25 bp, Homo sapien
cagtgttgctaaatgcacagtccag

SEQ ID NO: 2641584 - DNA, 25 bp, Homo sapien
ggccaaaaacctctggtccttgatg

SEQ ID NO: 2641585 - DNA, 25 bp, Homo sapien
gcagcagttgatccagttatttcct

SEQ ID NO: 2641586 - DNA, 25 bp, Homo sapien
aagttgaatcatgccctctgccgag

SEQ ID NO: 2641587 - DNA, 25 bp, Homo sapien
tcatagtaacttgcccaaccttaag

SEQ ID NO: 2641588 - DNA, 25 bp, Homo sapien
gtgactgtccctctcctatgcataa

SEQ ID NO: 2641589 - DNA, 25 bp, Homo sapien
gatgtcctgaaaatgctatgtgtat

SEQ ID NO: 2641590 - DNA, 25 bp, Homo sapien
ctgagtgacttaacaaaagtgtgac

SEQ ID NO: 2641591 - DNA, 25 bp, Homo sapien
ttagttaataagcaatgtggatttg

SEQ ID NO: 2641592 - DNA, 25 bp, Homo sapien
gttaataagcaatgtggatttgtgt

SEQ ID NO: 2641593 - DNA, 25 bp, Homo sapien
tgcatttgaattgagggctttggtt

SEQ ID NO: 2641594 - DNA, 25 bp, Homo sapien
tttgtgttgcatccattgttttttc

SEQ ID NO: 2641595 - DNA, 25 bp, Homo sapien
gctttgtgagtgacgaatttttgaa

SEQ ID NO: 2641596 - DNA, 25 bp, Homo sapien
aactgaatgatcaaaaatgcagctg

SEQ ID NO: 2641597 - DNA, 25 bp, Homo sapien
cttgctttgtgagtgacgaattttt

SEQ ID NO: 2641598 - DNA, 25 bp, Homo sapien
gtaactgaatgatcaaaaatgcagc

SEQ ID NO: 2641599 - DNA, 25 bp, Homo sapien
tgttgaattctgttacaaaaccagg

SEQ ID NO: 2641600 - DNA, 25 bp, Homo sapien
tgaattctgttacaaaaccaggtct

SEQ ID NO: 2641601 - DNA, 25 bp, Homo sapien
ttgaattctgttacaaaaccaggtc

SEQ ID NO: 2641602 - DNA, 25 bp, Homo sapien
gaattctgttacaaaaccaggtctg

SEQ ID NO: 2641603 - DNA, 25 bp, Homo sapien
gccatattggcatgtcttacagtga

SEQ ID NO: 2641604 - DNA, 25 bp, Homo sapien
agttttactcttctatgaaatgcag

SEQ ID NO: 2641605 - DNA, 25 bp, Homo sapien
tgtataaagagattagttcagcctg

SEQ ID NO: 2641606 - DNA, 25 bp, Homo sapien
cagcctgttagtaagtctgcagaga

SEQ ID NO: 2641607 - DNA, 25 bp, Homo sapien
ctgtgatcatgtcagtgtactctag

SEQ ID NO: 2641608 - DNA, 25 bp, Homo sapien
tgtgatcatgtcagtgtactctagc

SEQ ID NO: 2641609 - DNA, 25 bp, Homo sapien
ctataacaaatggtttttcttagct

SEQ ID NO: 2641610 - DNA, 25 bp, Homo sapien
aaaacgccgctttgactgtgccttg

SEQ ID NO: 2641611 - DNA, 25 bp, Homo sapien
aaagccagaggctcgagttacccct

SEQ ID NO: 2641612 - DNA, 25 bp, Homo sapien
cagctggcgggaagcaagcgccttt

SEQ ID NO: 2641613 - DNA, 25 bp, Homo sapien
cttcccgaccgtagcgagggtgctg

SEQ ID NO: 2641614 - DNA, 25 bp, Homo sapien
ccgccatgttgttaccggacccgag

SEQ ID NO: 2641615 - DNA, 25 bp, Homo sapien
gccgccatgttgttaccggacccga

SEQ ID NO: 2641616 - DNA, 25 bp, Homo sapien
gccatgttgttaccggacccgagca

SEQ ID NO: 2641617 - DNA, 25 bp, Homo sapien
atgttgttaccggacccgagcaccg

SEQ ID NO: 2641618 - DNA, 25 bp, Homo sapien
aatatcacgcaagacagggacacca

SEQ ID NO: 2641619 - DNA, 25 bp, Homo sapien
cactaaagctgtccgcctacgagta

SEQ ID NO: 2641620 - DNA, 25 bp, Homo sapien
ttggtcagtacaaaggactctgctc

SEQ ID NO: 2641621 - DNA, 25 bp, Homo sapien
tggtgcaggaaagcttcagtttgtc

SEQ ID NO: 2641622 - DNA, 25 bp, Homo sapien
gctcctggatgtagatgttgctcat

SEQ ID NO: 2641623 - DNA, 25 bp, Homo sapien
ggctcctggatgtagatgttgctca

SEQ ID NO: 2641624 - DNA, 25 bp, Homo sapien
ggaggctcctggatgtagatgttgc

SEQ ID NO: 2641625 - DNA, 25 bp, Homo sapien
cttcccattcgtgggaggctcctgg

SEQ ID NO: 2641626 - DNA, 25 bp, Homo sapien
gcttctttggaccacaactctatgt

SEQ ID NO: 2641627 - DNA, 25 bp, Homo sapien
caactctatgtcaatatctccagct

SEQ ID NO: 2641628 - DNA, 25 bp, Homo sapien
aatttctgcaagctttaggagcttc

SEQ ID NO: 2641629 - DNA, 25 bp, Homo sapien
gataaaatttctgcaagctttagga

SEQ ID NO: 2641630 - DNA, 25 bp, Homo sapien
ctatgaaaccaggcacaactctatg

SEQ ID NO: 2641631 - DNA, 25 bp, Homo sapien
tgaaaaatggtattgtcataataag

SEQ ID NO: 2641632 - DNA, 25 bp, Homo sapien
aaccaggcacaactctatgaaaaat

SEQ ID NO: 2641633 - DNA, 25 bp, Homo sapien
atgaaaaatggtattgtcataataa

SEQ ID NO: 2641634 - DNA, 25 bp, Homo sapien
aatggcgctccatagatagactctc

SEQ ID NO: 2641635 - DNA, 25 bp, Homo sapien
tttgaatggcgctccatagatagac

SEQ ID NO: 2641636 - DNA, 25 bp, Homo sapien
tgaatggcgctccatagatagactc

SEQ ID NO: 2641637 - DNA, 25 bp, Homo sapien
ggcgctccatagatagactctccac

SEQ ID NO: 2641638 - DNA, 25 bp, Homo sapien
ccagtcctctccgattaaaacgcaa

SEQ ID NO: 2641639 - DNA, 25 bp, Homo sapien
aacgcaaccgtgaatgaaattcatc

SEQ ID NO: 2641640 - DNA, 25 bp, Homo sapien
ggcaaccagtcctctccgattaaaa

SEQ ID NO: 2641641 - DNA, 25 bp, Homo sapien
ccgattaaaacgcaaccgtgaatga

SEQ ID NO: 2641642 - DNA, 25 bp, Homo sapien
agttcatctgctcgacccagtgtga

SEQ ID NO: 2641643 - DNA, 25 bp, Homo sapien
tctgctcgacccagtgtgaagaaaa

SEQ ID NO: 2641644 - DNA, 25 bp, Homo sapien
gttaagttcatctgctcgacccagt

SEQ ID NO: 2641645 - DNA, 25 bp, Homo sapien
tatcatgagaaccagcatttgccat

SEQ ID NO: 2641646 - DNA, 25 bp, Homo sapien
cgtcatcatcaatgtctacttctga

SEQ ID NO: 2641647 - DNA, 25 bp, Homo sapien
tttcgtcatcatcaatgtctacttc

SEQ ID NO: 2641648 - DNA, 25 bp, Homo sapien
tgtctacttctgacagtcgcaacat

SEQ ID NO: 2641649 - DNA, 25 bp, Homo sapien
ggattatgtggtctttcgtcatcat

SEQ ID NO: 2641650 - DNA, 25 bp, Homo sapien
tttcccttggaatgatgtcatcaaa

SEQ ID NO: 2641651 - DNA, 25 bp, Homo sapien
caatatctctcagtctcaggcatgt

SEQ ID NO: 2641652 - DNA, 25 bp, Homo sapien
gactggattatagggtggtgtcccc

SEQ ID NO: 2641653 - DNA, 25 bp, Homo sapien
tactgcacctgaatacaagagttgc

SEQ ID NO: 2641654 - DNA, 25 bp, Homo sapien
tggcctctcctttgctagtaaacaa

SEQ ID NO: 2641655 - DNA, 25 bp, Homo sapien
tgactaactcgatttacttcctcct

SEQ ID NO: 2641656 - DNA, 25 bp, Homo sapien
ctgactaactcgatttacttcctcc

SEQ ID NO: 2641657 - DNA, 25 bp, Homo sapien
tgtcacaaagaaaccctgcctgagt

SEQ ID NO: 2641658 - DNA, 25 bp, Homo sapien
tgctggcctactctacatattttgg

SEQ ID NO: 2641659 - DNA, 25 bp, Homo sapien
taagagaccttcagcacagaaccag

SEQ ID NO: 2641660 - DNA, 25 bp, Homo sapien
agaggccacaatctattctcccagg

SEQ ID NO: 2641661 - DNA, 25 bp, Homo sapien
gagcatgagaatatttatcagtgac

SEQ ID NO: 2641662 - DNA, 25 bp, Homo sapien
aagagcctcttgagcatgagaatat

SEQ ID NO: 2641663 - DNA, 25 bp, Homo sapien
cctcttgagcatgagaatatttatc

SEQ ID NO: 2641664 - DNA, 25 bp, Homo sapien
tgagaatatttatcagtgaccaaat

SEQ ID NO: 2641665 - DNA, 25 bp, Homo sapien
ttaagcaagtcatgactacttttgc

SEQ ID NO: 2641666 - DNA, 25 bp, Homo sapien
catccttaagcaagtcatgactact

SEQ ID NO: 2641667 - DNA, 25 bp, Homo sapien
ctgagatgtggatcatccttaagca

SEQ ID NO: 2641668 - DNA, 25 bp, Homo sapien
aactggaacagaactgagatgtgga

SEQ ID NO: 2641669 - DNA, 25 bp, Homo sapien
actaaatctggtgcatcaccttttt

SEQ ID NO: 2641670 - DNA, 25 bp, Homo sapien
caactaaatctggtgcatcaccttt

SEQ ID NO: 2641671 - DNA, 25 bp, Homo sapien
tcaactaaatctggtgcatcacctt

SEQ ID NO: 2641672 - DNA, 25 bp, Homo sapien
atcaactaaatctggtgcatcacct

SEQ ID NO: 2641673 - DNA, 25 bp, Homo sapien
catgcatggaaagttatgtacttcc

SEQ ID NO: 2641674 - DNA, 25 bp, Homo sapien
ggatgcccacacaccaatatttaaa

SEQ ID NO: 2641675 - DNA, 25 bp, Homo sapien
cacgcacacccctagagtaaggaaa

SEQ ID NO: 2641676 - DNA, 25 bp, Homo sapien
tactgatagccatagagagccttct

SEQ ID NO: 2641677 - DNA, 25 bp, Homo sapien
ctcatcaggttcttttcatcaccat

SEQ ID NO: 2641678 - DNA, 25 bp, Homo sapien
cattcgcacttgtgtccttttttaa

SEQ ID NO: 2641679 - DNA, 25 bp, Homo sapien
ttctccagctgatttaacattcgca

SEQ ID NO: 2641680 - DNA, 25 bp, Homo sapien
tcaggttcttttcatcaccatcaat

SEQ ID NO: 2641681 - DNA, 25 bp, Homo sapien
tctgatatctagcacagtaactgac

SEQ ID NO: 2641682 - DNA, 25 bp, Homo sapien
tgggccaatttgtacaactgttatg

SEQ ID NO: 2641683 - DNA, 25 bp, Homo sapien
tagctgaagagaggattcaatctga

SEQ ID NO: 2641684 - DNA, 25 bp, Homo sapien
gatactactgagcttaggataggta

SEQ ID NO: 2641685 - DNA, 25 bp, Homo sapien
tgggtacctacgctgtttgaacatg

SEQ ID NO: 2641686 - DNA, 25 bp, Homo sapien
cacataggtttgcactaaggagtca

SEQ ID NO: 2641687 - DNA, 25 bp, Homo sapien
gggaatatagtaccaacttgctgac

SEQ ID NO: 2641688 - DNA, 25 bp, Homo sapien
gctgaccttggaactaacatgatac

SEQ ID NO: 2641689 - DNA, 25 bp, Homo sapien
taagtccagtatgatgtcccttttg

SEQ ID NO: 2641690 - DNA, 25 bp, Homo sapien
ttgtctccttaaagtcaagtgacca

SEQ ID NO: 2641691 - DNA, 25 bp, Homo sapien
gtcttctgcaaacatccgaacctag

SEQ ID NO: 2641692 - DNA, 25 bp, Homo sapien
taattgaccataaaacctaggagca

SEQ ID NO: 2641693 - DNA, 25 bp, Homo sapien
aatttgcaagtttctaggtataatc

SEQ ID NO: 2641694 - DNA, 25 bp, Homo sapien
tcagaacttactacttgtcatttag

SEQ ID NO: 2641695 - DNA, 25 bp, Homo sapien
actgattgatcaaggaaatttgcaa

SEQ ID NO: 2641696 - DNA, 25 bp, Homo sapien
tattatacaggataaaactgaaagc

SEQ ID NO: 2641697 - DNA, 25 bp, Homo sapien
taaactggtgagtggcctgggaact

SEQ ID NO: 2641698 - DNA, 25 bp, Homo sapien
catatacctcataccacagatggct

SEQ ID NO: 2641699 - DNA, 25 bp, Homo sapien
tcagcttctctaggtggcttcctgc

SEQ ID NO: 2641700 - DNA, 25 bp, Homo sapien
tcagactcagatgacctaggttgtc

SEQ ID NO: 2641701 - DNA, 25 bp, Homo sapien
aaatataaagcttgcttttggagat

SEQ ID NO: 2641702 - DNA, 25 bp, Homo sapien
agaaacaattcttgcttcaccaaat

SEQ ID NO: 2641703 - DNA, 25 bp, Homo sapien
gattaagagcttaggtgtacacagc

SEQ ID NO: 2641704 - DNA, 25 bp, Homo sapien
agcttgcttttggagatggctcagg

SEQ ID NO: 2641705 - DNA, 25 bp, Homo sapien
ggtgtctcataagtcccataagctt

SEQ ID NO: 2641706 - DNA, 25 bp, Homo sapien
tctttggcatggatagaggttcact

SEQ ID NO: 2641707 - DNA, 25 bp, Homo sapien
tattccctggatgggcaattctgct

SEQ ID NO: 2641708 - DNA, 25 bp, Homo sapien
taccatgaggtttacacagaacatc

SEQ ID NO: 2641709 - DNA, 25 bp, Homo sapien
gcaatgctggactcataaaaagggt

SEQ ID NO: 2641710 - DNA, 25 bp, Homo sapien
agctgtgaaactaccatggctgtgc

SEQ ID NO: 2641711 - DNA, 25 bp, Homo sapien
ctaggttgtcctatatgttggtgca

SEQ ID NO: 2641712 - DNA, 25 bp, Homo sapien
ggtgggagatcttaagaattactaa

SEQ ID NO: 2641713 - DNA, 25 bp, Homo sapien
aagttaacaaagaagcactgacggc

SEQ ID NO: 2641714 - DNA, 25 bp, Homo sapien
tttgaggagccttcctagctctggg

SEQ ID NO: 2641715 - DNA, 25 bp, Homo sapien
gacggctttattaggagatctcaac

SEQ ID NO: 2641716 - DNA, 25 bp, Homo sapien
cactgcagtcttaccgcatggttca

SEQ ID NO: 2641717 - DNA, 25 bp, Homo sapien
tgcagcacaatactattgtagttca

SEQ ID NO: 2641718 - DNA, 25 bp, Homo sapien
aaggaaataaatctggtatgtgata

SEQ ID NO: 2641719 - DNA, 25 bp, Homo sapien
ggtatgtgatatgtcagtatctaaa

SEQ ID NO: 2641720 - DNA, 25 bp, Homo sapien
aatctgcagcacaatactattgtag

SEQ ID NO: 2641721 - DNA, 25 bp, Homo sapien
gtgacagcaatctagtttgggccat

SEQ ID NO: 2641722 - DNA, 25 bp, Homo sapien
tcttttcctttctatggttagtgac

SEQ ID NO: 2641723 - DNA, 25 bp, Homo sapien
cactcgcttacttactacatctttc

SEQ ID NO: 2641724 - DNA, 25 bp, Homo sapien
tctagttatcactcgcttacttact

SEQ ID NO: 2641725 - DNA, 25 bp, Homo sapien
tgaaagccaattccttaactgtagt

SEQ ID NO: 2641726 - DNA, 25 bp, Homo sapien
ataatgaaagccaattccttaactg

SEQ ID NO: 2641727 - DNA, 25 bp, Homo sapien
tagttcatggtccatcagccccatt

SEQ ID NO: 2641728 - DNA, 25 bp, Homo sapien
ccttaactgtagttcatggtccatc

SEQ ID NO: 2641729 - DNA, 25 bp, Homo sapien
ctgctaagagttcccgttttaattg

SEQ ID NO: 2641730 - DNA, 25 bp, Homo sapien
ttgaaattacaaccaccaggccaga

SEQ ID NO: 2641731 - DNA, 25 bp, Homo sapien
aaaggctcttgtcaaattctcaaca

SEQ ID NO: 2641732 - DNA, 25 bp, Homo sapien
ttttactgggtcaggaatgacacag

SEQ ID NO: 2641733 - DNA, 25 bp, Homo sapien
tgtgttaagacagcaaagggatgca

SEQ ID NO: 2641734 - DNA, 25 bp, Homo sapien
gatcagtttggactcctaggctgcc

SEQ ID NO: 2641735 - DNA, 25 bp, Homo sapien
ggtaatttcccttgtagcccactga

SEQ ID NO: 2641736 - DNA, 25 bp, Homo sapien
tattgggtaagcaccttaactggca

SEQ ID NO: 2641737 - DNA, 25 bp, Homo sapien
gctgccttgttgctagagttcccaa

SEQ ID NO: 2641738 - DNA, 25 bp, Homo sapien
atgacactccttgtacgtagcaact

SEQ ID NO: 2641739 - DNA, 25 bp, Homo sapien
cactccttgtacgtagcaactagat

SEQ ID NO: 2641740 - DNA, 25 bp, Homo sapien
gacactccttgtacgtagcaactag

SEQ ID NO: 2641741 - DNA, 25 bp, Homo sapien
ccttgtacgtagcaactagatcttg

SEQ ID NO: 2641742 - DNA, 25 bp, Homo sapien
gatatttagttagccagccacttgg

SEQ ID NO: 2641743 - DNA, 25 bp, Homo sapien
gacccaatggactaccgcctatttg

SEQ ID NO: 2641744 - DNA, 25 bp, Homo sapien
caaaacatagctcagatacttggtc

SEQ ID NO: 2641745 - DNA, 25 bp, Homo sapien
gattattcacttaagcaaaagccag

SEQ ID NO: 2641746 - DNA, 25 bp, Homo sapien
ctacttgtaggatgtacaatggcac

SEQ ID NO: 2641747 - DNA, 25 bp, Homo sapien
cacttccagacatttgctcaagcaa

SEQ ID NO: 2641748 - DNA, 25 bp, Homo sapien
caaggatatggagttaacaggatag

SEQ ID NO: 2641749 - DNA, 25 bp, Homo sapien
gaaagtgaccacacgaagtgttaac

SEQ ID NO: 2641750 - DNA, 25 bp, Homo sapien
ttgagtaagctttgtgtaagaacac

SEQ ID NO: 2641751 - DNA, 25 bp, Homo sapien
ccccattgttaagggatatgtgact

SEQ ID NO: 2641752 - DNA, 25 bp, Homo sapien
ttacacaacgataaaatcacctagc

SEQ ID NO: 2641753 - DNA, 25 bp, Homo sapien
catttcgcagactgtatccccattg

SEQ ID NO: 2641754 - DNA, 25 bp, Homo sapien
tgggaaaactggctgaatatagaaa

SEQ ID NO: 2641755 - DNA, 25 bp, Homo sapien
tatacagaacaatagaacagaacac

SEQ ID NO: 2641756 - DNA, 25 bp, Homo sapien
ctggctgaatatagaaagctgaaac

SEQ ID NO: 2641757 - DNA, 25 bp, Homo sapien
aaaactggctgaatatagaaagctg

SEQ ID NO: 2641758 - DNA, 25 bp, Homo sapien
caactagaatgagatgaagctggga

SEQ ID NO: 2641759 - DNA, 25 bp, Homo sapien
gaatagggatataccagagacaagg

SEQ ID NO: 2641760 - DNA, 25 bp, Homo sapien
taaagaagtgacctcacggaagtct

SEQ ID NO: 2641761 - DNA, 25 bp, Homo sapien
gagagttcaagtaaatatcccaagg

SEQ ID NO: 2641762 - DNA, 25 bp, Homo sapien
cgtgttcaactgattatcctgcttc

SEQ ID NO: 2641763 - DNA, 25 bp, Homo sapien
ggctgactgctgacttttaaaagaa

SEQ ID NO: 2641764 - DNA, 25 bp, Homo sapien
cgtgcccggctgactgctgactttt

SEQ ID NO: 2641765 - DNA, 25 bp, Homo sapien
gcccggctgactgctgacttttaaa

SEQ ID NO: 2641766 - DNA, 25 bp, Homo sapien
tttctttaggagagttatatttcta

SEQ ID NO: 2641767 - DNA, 25 bp, Homo sapien
atgaaaatccagtaagaacagaaat

SEQ ID NO: 2641768 - DNA, 25 bp, Homo sapien
gcatgaaaatccagtaagaacagaa

SEQ ID NO: 2641769 - DNA, 25 bp, Homo sapien
tgttggagtaatgtccgcaagtagg

SEQ ID NO: 2641770 - DNA, 25 bp, Homo sapien
actgttggagtaatgtccgcaagta

SEQ ID NO: 2641771 - DNA, 25 bp, Homo sapien
gttgacagaacttgaactggtgcca

SEQ ID NO: 2641772 - DNA, 25 bp, Homo sapien
agaacttgaactggtgccaacccta

SEQ ID NO: 2641773 - DNA, 25 bp, Homo sapien
ctttatctgatggaacagtgttgac

SEQ ID NO: 2641774 - DNA, 25 bp, Homo sapien
cctcatcttttatgttagtaacagc

SEQ ID NO: 2641775 - DNA, 25 bp, Homo sapien
gaaaacatacactctcatccaaagg

SEQ ID NO: 2641776 - DNA, 25 bp, Homo sapien
gggaggcccataggaaatatttctg

SEQ ID NO: 2641777 - DNA, 25 bp, Homo sapien
caagttagactagactgcaggcagg

SEQ ID NO: 2641778 - DNA, 25 bp, Homo sapien
ccagcactaaggtacagccaagtta

SEQ ID NO: 2641779 - DNA, 25 bp, Homo sapien
tggtgtgatccgcaattcttgtagc

SEQ ID NO: 2641780 - DNA, 25 bp, Homo sapien
tttgtgcttctgcagatggtgtgat

SEQ ID NO: 2641781 - DNA, 25 bp, Homo sapien
ggtgtgatccgcaattcttgtagct

SEQ ID NO: 2641782 - DNA, 25 bp, Homo sapien
gcttcctcaaagcttcatacttttg

SEQ ID NO: 2641783 - DNA, 25 bp, Homo sapien
gaagttcccttctttgactgttgct

SEQ ID NO: 2641784 - DNA, 25 bp, Homo sapien
ttctcttctgtattcggcaacagca

SEQ ID NO: 2641785 - DNA, 25 bp, Homo sapien
tctcttctgtattcggcaacagcac

SEQ ID NO: 2641786 - DNA, 25 bp, Homo sapien
tttttaatgatggatgtttgcatac

SEQ ID NO: 2641787 - DNA, 25 bp, Homo sapien
ttacaagagtgactcaccatgcctg

SEQ ID NO: 2641788 - DNA, 25 bp, Homo sapien
tggatgtttgcatacttggaaatgt

SEQ ID NO: 2641789 - DNA, 25 bp, Homo sapien
tacaagagtgactcaccatgcctgg

SEQ ID NO: 2641790 - DNA, 25 bp, Homo sapien
gaatgtcattttcaggcgtttcagc

SEQ ID NO: 2641791 - DNA, 25 bp, Homo sapien
taaactggttcagcagtgcaagggt

SEQ ID NO: 2641792 - DNA, 25 bp, Homo sapien
ggcgtttcagcaattgcttgagtga

SEQ ID NO: 2641793 - DNA, 25 bp, Homo sapien
tgcttgagtgagtttagatttaaac

SEQ ID NO: 2641794 - DNA, 25 bp, Homo sapien
tcaacaaatcttgctgactggtttc

SEQ ID NO: 2641795 - DNA, 25 bp, Homo sapien
cctacaaaatagtctgggaaccatg

SEQ ID NO: 2641796 - DNA, 25 bp, Homo sapien
taagggccctatatatgctatctga

SEQ ID NO: 2641797 - DNA, 25 bp, Homo sapien
cttcttagaaaagcggcaaccgtga

SEQ ID NO: 2641798 - DNA, 25 bp, Homo sapien
tatgagagaggatctaaatcaccag

SEQ ID NO: 2641799 - DNA, 25 bp, Homo sapien
gggtcccagcatcagtaacttaaaa

SEQ ID NO: 2641800 - DNA, 25 bp, Homo sapien
gaacagctggttcctaatgacaaac

SEQ ID NO: 2641801 - DNA, 25 bp, Homo sapien
caacgctggacactggtaaaacaaa

SEQ ID NO: 2641802 - DNA, 25 bp, Homo sapien
ttttaatgcatgctgccaacgctgg

SEQ ID NO: 2641803 - DNA, 25 bp, Homo sapien
tcatttctttcatcaattctcccca

SEQ ID NO: 2641804 - DNA, 25 bp, Homo sapien
tatttcatttctttcatcaattctc

SEQ ID NO: 2641805 - DNA, 25 bp, Homo sapien
catttctttcatcaattctccccat

SEQ ID NO: 2641806 - DNA, 25 bp, Homo sapien
tttcatttctttcatcaattctccc

SEQ ID NO: 2641807 - DNA, 25 bp, Homo sapien
tcttttgtcccacctgagaaagctt

SEQ ID NO: 2641808 - DNA, 25 bp, Homo sapien
tgagacttatgtaccgtttctacct

SEQ ID NO: 2641809 - DNA, 25 bp, Homo sapien
tctaccttcttttgtcccacctgag

SEQ ID NO: 2641810 - DNA, 25 bp, Homo sapien
ggctggcgagttgagacttatgtac

SEQ ID NO: 2641811 - DNA, 25 bp, Homo sapien
tgggtatacctagattttgaagaat

SEQ ID NO: 2641812 - DNA, 25 bp, Homo sapien
atgggtatacctagattttgaagaa

SEQ ID NO: 2641813 - DNA, 25 bp, Homo sapien
gggtatacctagattttgaagaatc

SEQ ID NO: 2641814 - DNA, 25 bp, Homo sapien
gagtcttgcatgcttgcatctttca

SEQ ID NO: 2641815 - DNA, 25 bp, Homo sapien
gattccgaggatcatagatttcaaa

SEQ ID NO: 2641816 - DNA, 25 bp, Homo sapien
tggattccgaggatcatagatttca

SEQ ID NO: 2641817 - DNA, 25 bp, Homo sapien
gatttcaaatgtatctgagtcttgc

SEQ ID NO: 2641818 - DNA, 25 bp, Homo sapien
cttttttctctctcatcagcttttt

SEQ ID NO: 2641819 - DNA, 25 bp, Homo sapien
tctctctcatcagctttttgctttc

SEQ ID NO: 2641820 - DNA, 25 bp, Homo sapien
tttctctctcatcagctttttgctt

SEQ ID NO: 2641821 - DNA, 25 bp, Homo sapien
ttttctctctcatcagctttttgct

SEQ ID NO: 2641822 - DNA, 25 bp, Homo sapien
tgggaacaatggctgttacaaggcc

SEQ ID NO: 2641823 - DNA, 25 bp, Homo sapien
caaggccattgtaggcacatttcca

SEQ ID NO: 2641824 - DNA, 25 bp, Homo sapien
gaaaaaacacatgtaccagtaacca

SEQ ID NO: 2641825 - DNA, 25 bp, Homo sapien
cctaagtgatgctgttgggaacaat

SEQ ID NO: 2641826 - DNA, 25 bp, Homo sapien
ttgactgtgcccataaaacccaggc

SEQ ID NO: 2641827 - DNA, 25 bp, Homo sapien
catctgtttaacgagccctcagggt

SEQ ID NO: 2641828 - DNA, 25 bp, Homo sapien
taaataaccagtatgggccagtcgc

SEQ ID NO: 2641829 - DNA, 25 bp, Homo sapien
cactgcactggttaaggtggacaca

SEQ ID NO: 2641830 - DNA, 25 bp, Homo sapien
ttcttgttatcaccaagattaaaca

SEQ ID NO: 2641831 - DNA, 25 bp, Homo sapien
tgttatcaccaagattaaacagcat

SEQ ID NO: 2641832 - DNA, 25 bp, Homo sapien
cttgttatcaccaagattaaacagc

SEQ ID NO: 2641833 - DNA, 25 bp, Homo sapien
ttgttatcaccaagattaaacagca

SEQ ID NO: 2641834 - DNA, 25 bp, Homo sapien
ctgcactcttctaatatcctttttc

SEQ ID NO: 2641835 - DNA, 25 bp, Homo sapien
ttcctgtctacaacttttcctttca

SEQ ID NO: 2641836 - DNA, 25 bp, Homo sapien
tgtctacaacttttcctttcagcat

SEQ ID NO: 2641837 - DNA, 25 bp, Homo sapien
cctgtctacaacttttcctttcagc

SEQ ID NO: 2641838 - DNA, 25 bp, Homo sapien
tgtatagagtctacttcatggaggt

SEQ ID NO: 2641839 - DNA, 25 bp, Homo sapien
tcttggcagtaggaagaacattacc

SEQ ID NO: 2641840 - DNA, 25 bp, Homo sapien
gagtgaatattcactctggaagatg

SEQ ID NO: 2641841 - DNA, 25 bp, Homo sapien
gactacattgcctgctggcttcttc

SEQ ID NO: 2641842 - DNA, 25 bp, Homo sapien
tagagctggagtttgggccaggtgg

SEQ ID NO: 2641843 - DNA, 25 bp, Homo sapien
catcaaggcttgtcacaatctttct

SEQ ID NO: 2641844 - DNA, 25 bp, Homo sapien
cacagagatggacggagatagagct

SEQ ID NO: 2641845 - DNA, 25 bp, Homo sapien
aggtgggcagcaccggcacctctca

SEQ ID NO: 2641846 - DNA, 25 bp, Homo sapien
gcagaacaggttgcttgtccctggg

SEQ ID NO: 2641847 - DNA, 25 bp, Homo sapien
ctctaagggataaaggaccttggat

SEQ ID NO: 2641848 - DNA, 25 bp, Homo sapien
gatgcgatcagtctttctttgcgga

SEQ ID NO: 2641849 - DNA, 25 bp, Homo sapien
gagacagcaggaaaactgggcgtcc

SEQ ID NO: 2641850 - DNA, 25 bp, Homo sapien
tatggcggtgagacagtagtttggc

SEQ ID NO: 2641851 - DNA, 25 bp, Homo sapien
gggtgaagtagatccaggaccgtca

SEQ ID NO: 2641852 - DNA, 25 bp, Homo sapien
tgagacagtagtttggccgagacct

SEQ ID NO: 2641853 - DNA, 25 bp, Homo sapien
agatccaggaccgtcactggaagcc

SEQ ID NO: 2641854 - DNA, 25 bp, Homo sapien
cgccgccactaggtttctccggcca

SEQ ID NO: 2641855 - DNA, 25 bp, Homo sapien
ctggcagtccacaagctcccagtcg

SEQ ID NO: 2641856 - DNA, 25 bp, Homo sapien
tggtcgcgcaccgactagctgtgct

SEQ ID NO: 2641857 - DNA, 25 bp, Homo sapien
tattgtaccgcgcagtggtcgcgca

SEQ ID NO: 2641858 - DNA, 25 bp, Homo sapien
tgtaggaagtaggacataaaccatt

SEQ ID NO: 2641859 - DNA, 25 bp, Homo sapien
gacaacatcattgagcccagtgtag

SEQ ID NO: 2641860 - DNA, 25 bp, Homo sapien
tgtacccactttggaccgaaagaca

SEQ ID NO: 2641861 - DNA, 25 bp, Homo sapien
cactttggaccgaaagacaattcca

SEQ ID NO: 2641862 - DNA, 25 bp, Homo sapien
ttcttcagcaccttcttcaacccct

SEQ ID NO: 2641863 - DNA, 25 bp, Homo sapien
cccttcttcggcaccctccttctca

SEQ ID NO: 2641864 - DNA, 25 bp, Homo sapien
tcagcaccttcttcaaccccttctt

SEQ ID NO: 2641865 - DNA, 25 bp, Homo sapien
agcaccttcttcaaccccttcttcg

SEQ ID NO: 2641866 - DNA, 25 bp, Homo sapien
tattgtctgaggtatgactgaggct

SEQ ID NO: 2641867 - DNA, 25 bp, Homo sapien
gttgcttcttgtagtaatggaacca

SEQ ID NO: 2641868 - DNA, 25 bp, Homo sapien
cagagagctagtatagtctgggctc

SEQ ID NO: 2641869 - DNA, 25 bp, Homo sapien
ctgggccctcctggtaatgaagttg

SEQ ID NO: 2641870 - DNA, 25 bp, Homo sapien
tttgattgaggtatagaggaggcat

SEQ ID NO: 2641871 - DNA, 25 bp, Homo sapien
gactttgcctcctggtatctagatt

SEQ ID NO: 2641872 - DNA, 25 bp, Homo sapien
ggagcttggaagcaacggtagccca

SEQ ID NO: 2641873 - DNA, 25 bp, Homo sapien
agacgcctctaacagctccatcatt

SEQ ID NO: 2641874 - DNA, 25 bp, Homo sapien
ggttttctcaggccgcttagatcct

SEQ ID NO: 2641875 - DNA, 25 bp, Homo sapien
tcaggccgcttagatcctgcaaact

SEQ ID NO: 2641876 - DNA, 25 bp, Homo sapien
cgcttagatcctgcaaactgtcctt

SEQ ID NO: 2641877 - DNA, 25 bp, Homo sapien
tttctcaggccgcttagatcctgca

SEQ ID NO: 2641878 - DNA, 25 bp, Homo sapien
ctctgtctcccttgtatcatatgtg

SEQ ID NO: 2641879 - DNA, 25 bp, Homo sapien
cacctttaatacctgcttctgccat

SEQ ID NO: 2641880 - DNA, 25 bp, Homo sapien
tgtgtgtaaaactctttatgtggag

SEQ ID NO: 2641881 - DNA, 25 bp, Homo sapien
gagtaacaagccataacctccacct

SEQ ID NO: 2641882 - DNA, 25 bp, Homo sapien
tccaagttctaacccagacaagtag

SEQ ID NO: 2641883 - DNA, 25 bp, Homo sapien
agcgggttgtggataattagcacga

SEQ ID NO: 2641884 - DNA, 25 bp, Homo sapien
gacaagtagacatttaaacgacctg

SEQ ID NO: 2641885 - DNA, 25 bp, Homo sapien
cacgagcgcatggaataactcacca

SEQ ID NO: 2641886 - DNA, 25 bp, Homo sapien
gcatctataacccaaaggatcactg

SEQ ID NO: 2641887 - DNA, 25 bp, Homo sapien
cttccaagccacagtaattctagct

SEQ ID NO: 2641888 - DNA, 25 bp, Homo sapien
tcacagataatctccgccctgtggg

SEQ ID NO: 2641889 - DNA, 25 bp, Homo sapien
tgcttccttgatggttccctaagtc

SEQ ID NO: 2641890 - DNA, 25 bp, Homo sapien
cctgcttggggatggtttcgttgta

SEQ ID NO: 2641891 - DNA, 25 bp, Homo sapien
cagaagggaacttcaagagccagag

SEQ ID NO: 2641892 - DNA, 25 bp, Homo sapien
gcagatgtgtatgcttgccagaatt

SEQ ID NO: 2641893 - DNA, 25 bp, Homo sapien
aaatgagattatgagttctgagaat

SEQ ID NO: 2641894 - DNA, 25 bp, Homo sapien
gtgagaatatagctcatttgaattg

SEQ ID NO: 2641895 - DNA, 25 bp, Homo sapien
aatatagctcatttgaattgggtgt

SEQ ID NO: 2641896 - DNA, 25 bp, Homo sapien
gagaatatagctcatttgaattggg

SEQ ID NO: 2641897 - DNA, 25 bp, Homo sapien
ctgtgagaatatagctcatttgaat

SEQ ID NO: 2641898 - DNA, 25 bp, Homo sapien
atcgaaggggaccatctctttctcc

SEQ ID NO: 2641899 - DNA, 25 bp, Homo sapien
tacctcacccatgtcaacaacagaa

SEQ ID NO: 2641900 - DNA, 25 bp, Homo sapien
tcatctggtatcgaaggggaccatc

SEQ ID NO: 2641901 - DNA, 25 bp, Homo sapien
gaatcaacgcgtatttcatctggta

SEQ ID NO: 2641902 - DNA, 25 bp, Homo sapien
tgaggctaagcaccgcccatacctg

SEQ ID NO: 2641903 - DNA, 25 bp, Homo sapien
tatgggtagggtaatccctgccctc

SEQ ID NO: 2641904 - DNA, 25 bp, Homo sapien
tcccaaggctcatatgggtagggta

SEQ ID NO: 2641905 - DNA, 25 bp, Homo sapien
tttgggccaacacaaatcccaaggc

SEQ ID NO: 2641906 - DNA, 25 bp, Homo sapien
tctttgttctttgatctggatccca

SEQ ID NO: 2641907 - DNA, 25 bp, Homo sapien
tggatcccaggagagtcatgaatgt

SEQ ID NO: 2641908 - DNA, 25 bp, Homo sapien
gagactgcctttcagtccaggttct

SEQ ID NO: 2641909 - DNA, 25 bp, Homo sapien
tacccctaggctgactacagagggc

SEQ ID NO: 2641910 - DNA, 25 bp, Homo sapien
cactatagtagtttgcatgctaagc

SEQ ID NO: 2641911 - DNA, 25 bp, Homo sapien
tctgggctcacgtgacaaaaaactc

SEQ ID NO: 2641912 - DNA, 25 bp, Homo sapien
gaaacgagaagataacaacgtgcct

SEQ ID NO: 2641913 - DNA, 25 bp, Homo sapien
ggaacaactttatctgctaggaaga

SEQ ID NO: 2641914 - DNA, 25 bp, Homo sapien
actcttcaccaggttatcaagggag

SEQ ID NO: 2641915 - DNA, 25 bp, Homo sapien
gggtgaagggtgaattccgagtcat

SEQ ID NO: 2641916 - DNA, 25 bp, Homo sapien
ttcaccaggttatcaagggaggcag

SEQ ID NO: 2641917 - DNA, 25 bp, Homo sapien
tgggtgaagggtgaattccgagtca

SEQ ID NO: 2641918 - DNA, 25 bp, Homo sapien
gacagcaaccctctgagacaggaag

SEQ ID NO: 2641919 - DNA, 25 bp, Homo sapien
tcaggtgttttctagggaagtccca

SEQ ID NO: 2641920 - DNA, 25 bp, Homo sapien
ggaaatttcaaacgcaagagctgag

SEQ ID NO: 2641921 - DNA, 25 bp, Homo sapien
taaacaatgttttgatcgggactcg

SEQ ID NO: 2641922 - DNA, 25 bp, Homo sapien
ggcgagggcacccaagtttatgcag

SEQ ID NO: 2641923 - DNA, 25 bp, Homo sapien
gttgccggaggcgagggcacccaag

SEQ ID NO: 2641924 - DNA, 25 bp, Homo sapien
aaaggtcgggagcactgaagcaccg

SEQ ID NO: 2641925 - DNA, 25 bp, Homo sapien
agaaaggtcgggagcactgaagcac

SEQ ID NO: 2641926 - DNA, 25 bp, Homo sapien
taaaacccgagctggatgctcctgc

SEQ ID NO: 2641927 - DNA, 25 bp, Homo sapien
cctcgagtgtctcgggaggtaataa

SEQ ID NO: 2641928 - DNA, 25 bp, Homo sapien
gaggtaataaaacccgagctggatg

SEQ ID NO: 2641929 - DNA, 25 bp, Homo sapien
ctgaggcttcctcgagtgtctcggg

SEQ ID NO: 2641930 - DNA, 25 bp, Homo sapien
ctttgagaacgccaaatgtttggat

SEQ ID NO: 2641931 - DNA, 25 bp, Homo sapien
ttaaactgcctttgagaacgccaaa

SEQ ID NO: 2641932 - DNA, 25 bp, Homo sapien
tggatttcagtgaaggttgacatgg

SEQ ID NO: 2641933 - DNA, 25 bp, Homo sapien
tgcctttgagaacgccaaatgtttg

SEQ ID NO: 2641934 - DNA, 25 bp, Homo sapien
cccaatggtcaaggaagtaaggtct

SEQ ID NO: 2641935 - DNA, 25 bp, Homo sapien
tggagagataagagcattgtctaag

SEQ ID NO: 2641936 - DNA, 25 bp, Homo sapien
attgtctaagggacatggtcacccc

SEQ ID NO: 2641937 - DNA, 25 bp, Homo sapien
agtaaggtctgttaccaggaaggct

SEQ ID NO: 2641938 - DNA, 25 bp, Homo sapien
acacagttcctggtaacttccacag

SEQ ID NO: 2641939 - DNA, 25 bp, Homo sapien
cacagttcctggtaacttccacaga

SEQ ID NO: 2641940 - DNA, 25 bp, Homo sapien
tcacacagttcctggtaacttccac

SEQ ID NO: 2641941 - DNA, 25 bp, Homo sapien
tagcaacgtttccagatataaggtc

SEQ ID NO: 2641942 - DNA, 25 bp, Homo sapien
tacacttttgtagacgttgacaagc

SEQ ID NO: 2641943 - DNA, 25 bp, Homo sapien
caacatagaaatagaggtcctaacc

SEQ ID NO: 2641944 - DNA, 25 bp, Homo sapien
ggatcatcacttcgaaaccagtaaa

SEQ ID NO: 2641945 - DNA, 25 bp, Homo sapien
tctgtaactgtacaattcattgaga

SEQ ID NO: 2641946 - DNA, 25 bp, Homo sapien
tacaattcattgagatcactggcta

SEQ ID NO: 2641947 - DNA, 25 bp, Homo sapien
taactgtacaattcattgagatcac

SEQ ID NO: 2641948 - DNA, 25 bp, Homo sapien
caatctgtaactgtacaattcattg

SEQ ID NO: 2641949 - DNA, 25 bp, Homo sapien
ggtttgtagactgtcaaagtgccac

SEQ ID NO: 2641950 - DNA, 25 bp, Homo sapien
tgcagtgaagctgaccctagcgggt

SEQ ID NO: 2641951 - DNA, 25 bp, Homo sapien
gtcaaagtgccaccaggaaactgca

SEQ ID NO: 2641952 - DNA, 25 bp, Homo sapien
tgaccctagcgggtcctctaaaggc

SEQ ID NO: 2641953 - DNA, 25 bp, Homo sapien
tggccctctaccaaacagctgtttg

SEQ ID NO: 2641954 - DNA, 25 bp, Homo sapien
ctttggctggccctctaccaaacag

SEQ ID NO: 2641955 - DNA, 25 bp, Homo sapien
ccagcagctgcgttggcctgattca

SEQ ID NO: 2641956 - DNA, 25 bp, Homo sapien
tggccacccacgcttgtgcccaggc

SEQ ID NO: 2641957 - DNA, 25 bp, Homo sapien
ttgcctacagattgaatgcttctgg

SEQ ID NO: 2641958 - DNA, 25 bp, Homo sapien
gcctacagattgaatgcttctgggc

SEQ ID NO: 2641959 - DNA, 25 bp, Homo sapien
caaccactggtgaggggggtgtggg

SEQ ID NO: 2641960 - DNA, 25 bp, Homo sapien
ctcaaccactggtgaggggggtgtg

SEQ ID NO: 2641961 - DNA, 25 bp, Homo sapien
tgatgggcttcttgcaccttttcct

SEQ ID NO: 2641962 - DNA, 25 bp, Homo sapien
atttgccatttgatgggcttcttgc

SEQ ID NO: 2641963 - DNA, 25 bp, Homo sapien
catcaccaccccctagagtaagaac

SEQ ID NO: 2641964 - DNA, 25 bp, Homo sapien
tttcctttggtacatactgtataaa

SEQ ID NO: 2641965 - DNA, 25 bp, Homo sapien
tccagatagcagataaagacacctg

SEQ ID NO: 2641966 - DNA, 25 bp, Homo sapien
cagatagcagataaagacacctggt

SEQ ID NO: 2641967 - DNA, 25 bp, Homo sapien
cctgcatccagatagcagataaaga

SEQ ID NO: 2641968 - DNA, 25 bp, Homo sapien
catccagatagcagataaagacacc

SEQ ID NO: 2641969 - DNA, 25 bp, Homo sapien
agactggattctctcctgtggcagc

SEQ ID NO: 2641970 - DNA, 25 bp, Homo sapien
gtggcagcaagagctttcttataca

SEQ ID NO: 2641971 - DNA, 25 bp, Homo sapien
ctggattctctcctgtggcagcaag

SEQ ID NO: 2641972 - DNA, 25 bp, Homo sapien
tgtggcagcaagagctttcttatac

SEQ ID NO: 2641973 - DNA, 25 bp, Homo sapien
catttgtgcttaaagcagggccatc

SEQ ID NO: 2641974 - DNA, 25 bp, Homo sapien
cagggccatcaaatgtcatatctta

SEQ ID NO: 2641975 - DNA, 25 bp, Homo sapien
cactagtagtggctatctgagaaca

SEQ ID NO: 2641976 - DNA, 25 bp, Homo sapien
tggaaattacaatttgagggataac

SEQ ID NO: 2641977 - DNA, 25 bp, Homo sapien
tctatagactgaatttgcaataact

SEQ ID NO: 2641978 - DNA, 25 bp, Homo sapien
aactattactgtcatctgttctcag

SEQ ID NO: 2641979 - DNA, 25 bp, Homo sapien
gaaattcgagtccatcctatgcaac

SEQ ID NO: 2641980 - DNA, 25 bp, Homo sapien
ttcttccatgttagctgggctagtt

SEQ ID NO: 2641981 - DNA, 25 bp, Homo sapien
catttcggtatagctgataatgctg

SEQ ID NO: 2641982 - DNA, 25 bp, Homo sapien
tctgtcatccgtgataacatttcgg

SEQ ID NO: 2641983 - DNA, 25 bp, Homo sapien
cgtgataacatttcggtatagctga

SEQ ID NO: 2641984 - DNA, 25 bp, Homo sapien
tatagctgataatgctggtactgct

SEQ ID NO: 2641985 - DNA, 25 bp, Homo sapien
tagctcaagtagtgaaacaaggaaa

SEQ ID NO: 2641986 - DNA, 25 bp, Homo sapien
attccagcaccacaaccaagcagga

SEQ ID NO: 2641987 - DNA, 25 bp, Homo sapien
agcaggaacaagatgacattagctc

SEQ ID NO: 2641988 - DNA, 25 bp, Homo sapien
taagtcacttcatgttgcttcatcc

SEQ ID NO: 2641989 - DNA, 25 bp, Homo sapien
ctgatgatcaattatattgaacaac

SEQ ID NO: 2641990 - DNA, 25 bp, Homo sapien
tgatgatcaattatattgaacaact

SEQ ID NO: 2641991 - DNA, 25 bp, Homo sapien
gatgatcaattatattgaacaactt

SEQ ID NO: 2641992 - DNA, 25 bp, Homo sapien
gatatctcttccataacatgatttc

SEQ ID NO: 2641993 - DNA, 25 bp, Homo sapien
gaaccatgatcgtgatcatgccacc

SEQ ID NO: 2641994 - DNA, 25 bp, Homo sapien
cattgtttaggtgtggcttaactca

SEQ ID NO: 2641995 - DNA, 25 bp, Homo sapien
aatttgtagtcagacactgtggctc

SEQ ID NO: 2641996 - DNA, 25 bp, Homo sapien
tgtttatggcagttcattatgccac

SEQ ID NO: 2641997 - DNA, 25 bp, Homo sapien
gccgacactccagttgattgctcat

SEQ ID NO: 2641998 - DNA, 25 bp, Homo sapien
gtggtgtccctcagcactgtagagt

SEQ ID NO: 2641999 - DNA, 25 bp, Homo sapien
cactgtagagtgctgaaaatgccga

SEQ ID NO: 2642000 - DNA, 25 bp, Homo sapien
gttctattggcttgcagccagaggc

SEQ ID NO: 2642001 - DNA, 25 bp, Homo sapien
tttattgttgcaaactgagctaagc

SEQ ID NO: 2642002 - DNA, 25 bp, Homo sapien
ctaagctagtatgttcaggcaaaac

SEQ ID NO: 2642003 - DNA, 25 bp, Homo sapien
caggcaaaaccttaggatttggtgg

SEQ ID NO: 2642004 - DNA, 25 bp, Homo sapien
tataatgaagggaagttttagatca

SEQ ID NO: 2642005 - DNA, 25 bp, Homo sapien
atttacaagccaaatatgccttcat

SEQ ID NO: 2642006 - DNA, 25 bp, Homo sapien
agaaaatttacaagccaaatatgcc

SEQ ID NO: 2642007 - DNA, 25 bp, Homo sapien
aaatttacaagccaaatatgccttc

SEQ ID NO: 2642008 - DNA, 25 bp, Homo sapien
ggaagaaaggttgaggaatatttga

SEQ ID NO: 2642009 - DNA, 25 bp, Homo sapien
tgtatccttcagacatcaggctcat

SEQ ID NO: 2642010 - DNA, 25 bp, Homo sapien
tgcaatccagtgtcttgttgtatcc

SEQ ID NO: 2642011 - DNA, 25 bp, Homo sapien
aatccagtgtcttgttgtatccttc

SEQ ID NO: 2642012 - DNA, 25 bp, Homo sapien
tcttgttgtatccttcagacatcag

SEQ ID NO: 2642013 - DNA, 25 bp, Homo sapien
cgctctgtgaccataaatgtcacca

SEQ ID NO: 2642014 - DNA, 25 bp, Homo sapien
accactgtaaaaccgctgattatta

SEQ ID NO: 2642015 - DNA, 25 bp, Homo sapien
aatgtcaccactgtaaaaccgctga

SEQ ID NO: 2642016 - DNA, 25 bp, Homo sapien
cacgctctgtgaccataaatgtcac

SEQ ID NO: 2642017 - DNA, 25 bp, Homo sapien
tgcttctaaatctctagtgactgga

SEQ ID NO: 2642018 - DNA, 25 bp, Homo sapien
gttagattaagagtaaccaggagag

SEQ ID NO: 2642019 - DNA, 25 bp, Homo sapien
cagcacagatgagatgggttagatt

SEQ ID NO: 2642020 - DNA, 25 bp, Homo sapien
tatccgatggacgataagatgcttt

SEQ ID NO: 2642021 - DNA, 25 bp, Homo sapien
tttatgtaacttatattgcatatga

SEQ ID NO: 2642022 - DNA, 25 bp, Homo sapien
tatgtaacttatattgcatatgata

SEQ ID NO: 2642023 - DNA, 25 bp, Homo sapien
ttttatgtaacttatattgcatatg

SEQ ID NO: 2642024 - DNA, 25 bp, Homo sapien
tgtaacttatattgcatatgataaa

SEQ ID NO: 2642025 - DNA, 25 bp, Homo sapien
tgtgagctccgtggcttcagccctg

SEQ ID NO: 2642026 - DNA, 25 bp, Homo sapien
atgtccttgactagctggcccagat

SEQ ID NO: 2642027 - DNA, 25 bp, Homo sapien
ctggcccagattggtgacaggcatc

SEQ ID NO: 2642028 - DNA, 25 bp, Homo sapien
tagctggcccagattggtgacaggc

SEQ ID NO: 2642029 - DNA, 25 bp, Homo sapien
ttgactagctggcccagattggtga

SEQ ID NO: 2642030 - DNA, 25 bp, Homo sapien
tgatgggcaggaagaagagatagat

SEQ ID NO: 2642031 - DNA, 25 bp, Homo sapien
gcaggaagaagagatagatctcctc

SEQ ID NO: 2642032 - DNA, 25 bp, Homo sapien
gaagaagagatagatctcctccagg

SEQ ID NO: 2642033 - DNA, 25 bp, Homo sapien
caggaagaagagatagatctcctcc

SEQ ID NO: 2642034 - DNA, 25 bp, Homo sapien
gagagcccccgaaaaaaatcagtga

SEQ ID NO: 2642035 - DNA, 25 bp, Homo sapien
cccgaaaaaaatcagtgatctcaga

SEQ ID NO: 2642036 - DNA, 25 bp, Homo sapien
ccccgaaaaaaatcagtgatctcag

SEQ ID NO: 2642037 - DNA, 25 bp, Homo sapien
ttgagagagcccccgaaaaaaatca

SEQ ID NO: 2642038 - DNA, 25 bp, Homo sapien
tggtgttctggccagcgtaggtctg

SEQ ID NO: 2642039 - DNA, 25 bp, Homo sapien
ctggtgttctggccagcgtaggtct

SEQ ID NO: 2642040 - DNA, 25 bp, Homo sapien
gttctggccagcgtaggtctgcttc

SEQ ID NO: 2642041 - DNA, 25 bp, Homo sapien
gtgttctggccagcgtaggtctgct

SEQ ID NO: 2642042 - DNA, 25 bp, Homo sapien
ttggagcacttagcacccagaccta

SEQ ID NO: 2642043 - DNA, 25 bp, Homo sapien
cttggagcacttagcacccagacct

SEQ ID NO: 2642044 - DNA, 25 bp, Homo sapien
tggagcacttagcacccagacctac

SEQ ID NO: 2642045 - DNA, 25 bp, Homo sapien
tgggatgatggcctcgtgtatggca

SEQ ID NO: 2642046 - DNA, 25 bp, Homo sapien
gggatgatggcctcgtgtatggcag

SEQ ID NO: 2642047 - DNA, 25 bp, Homo sapien
tgcaagggatggtgtggggcttgct

SEQ ID NO: 2642048 - DNA, 25 bp, Homo sapien
gatggtgtggggcttgctgatcttg

SEQ ID NO: 2642049 - DNA, 25 bp, Homo sapien
cttgcaagggatggtgtggggcttg

SEQ ID NO: 2642050 - DNA, 25 bp, Homo sapien
caagggatggtgtggggcttgctga

SEQ ID NO: 2642051 - DNA, 25 bp, Homo sapien
cagcacagagctgcagtggcctgtc

SEQ ID NO: 2642052 - DNA, 25 bp, Homo sapien
agcacagagctgcagtggcctgtca

SEQ ID NO: 2642053 - DNA, 25 bp, Homo sapien
gcacagagctgcagtggcctgtcac

SEQ ID NO: 2642054 - DNA, 25 bp, Homo sapien
cttgggcatgggggctgagatgatc

SEQ ID NO: 2642055 - DNA, 25 bp, Homo sapien
gggggctgagatgatcccagtgccc

SEQ ID NO: 2642056 - DNA, 25 bp, Homo sapien
catgggggctgagatgatcccagtg

SEQ ID NO: 2642057 - DNA, 25 bp, Homo sapien
ggcatgggggctgagatgatcccag

SEQ ID NO: 2642058 - DNA, 25 bp, Homo sapien
tggcgaaattgcccagggtggccat

SEQ ID NO: 2642059 - DNA, 25 bp, Homo sapien
ggcgaaattgcccagggtggccatg

SEQ ID NO: 2642060 - DNA, 25 bp, Homo sapien
tgagtaatccatcagtctggtctaa

SEQ ID NO: 2642061 - DNA, 25 bp, Homo sapien
ttggtgactttaattgcagatatat

SEQ ID NO: 2642062 - DNA, 25 bp, Homo sapien
gcttgaaggcaactcacgtatggtc

SEQ ID NO: 2642063 - DNA, 25 bp, Homo sapien
cagtctggtctaatatgtattttca

SEQ ID NO: 2642064 - DNA, 25 bp, Homo sapien
tgaaatgtcaccttactagggagaa

SEQ ID NO: 2642065 - DNA, 25 bp, Homo sapien
taactcacttattaacatgttcggg

SEQ ID NO: 2642066 - DNA, 25 bp, Homo sapien
tgtttatcaagaatgccagggccgg

SEQ ID NO: 2642067 - DNA, 25 bp, Homo sapien
gacctgactgtttatgggtaagatc

SEQ ID NO: 2642068 - DNA, 25 bp, Homo sapien
tcaatcttgaatcacataaccagct

SEQ ID NO: 2642069 - DNA, 25 bp, Homo sapien
cagaaacaatagacattggtgctgg

SEQ ID NO: 2642070 - DNA, 25 bp, Homo sapien
tgctaaatccacaacacgacatagg

SEQ ID NO: 2642071 - DNA, 25 bp, Homo sapien
tctttggaaaagcatgtacactgaa

SEQ ID NO: 2642072 - DNA, 25 bp, Homo sapien
ttattgcaaaatggcatgtgctgcc

SEQ ID NO: 2642073 - DNA, 25 bp, Homo sapien
cataggccatcttacttttattgca

SEQ ID NO: 2642074 - DNA, 25 bp, Homo sapien
tttgcaaattaatgcgcataggcca

SEQ ID NO: 2642075 - DNA, 25 bp, Homo sapien
cacaggactatttggataaaaaaca

SEQ ID NO: 2642076 - DNA, 25 bp, Homo sapien
tagaattggtttgtcattctgcccc

SEQ ID NO: 2642077 - DNA, 25 bp, Homo sapien
gctggaactttgattgaaatttccc

SEQ ID NO: 2642078 - DNA, 25 bp, Homo sapien
tatgaattctctaactttgttgttc

SEQ ID NO: 2642079 - DNA, 25 bp, Homo sapien
gaaatttccctgaatcataggttaa

SEQ ID NO: 2642080 - DNA, 25 bp, Homo sapien
ttaggtctgccttagaacttctctg

SEQ ID NO: 2642081 - DNA, 25 bp, Homo sapien
tgcttgtcaagtcccataaagagaa

SEQ ID NO: 2642082 - DNA, 25 bp, Homo sapien
ttaagattcagtagctcaacttggg

SEQ ID NO: 2642083 - DNA, 25 bp, Homo sapien
gagaattaacgtctttacaatgtgg

SEQ ID NO: 2642084 - DNA, 25 bp, Homo sapien
gtcagaaaaggcgcgacacaaaact

SEQ ID NO: 2642085 - DNA, 25 bp, Homo sapien
aggcgcgacacaaaactcagctacc

SEQ ID NO: 2642086 - DNA, 25 bp, Homo sapien
aaaaggcgcgacacaaaactcagct

SEQ ID NO: 2642087 - DNA, 25 bp, Homo sapien
atcgtcagaaaaggcgcgacacaaa

SEQ ID NO: 2642088 - DNA, 25 bp, Homo sapien
ttggccagtgttgcctccacaggta

SEQ ID NO: 2642089 - DNA, 25 bp, Homo sapien
gctctctttcgctgagttctgtttt

SEQ ID NO: 2642090 - DNA, 25 bp, Homo sapien
cgttctcctcatcgttctcctggga

SEQ ID NO: 2642091 - DNA, 25 bp, Homo sapien
ggcgccttctacgtctctgctgaaa

SEQ ID NO: 2642092 - DNA, 25 bp, Homo sapien
aattcgtcccggtactatgtctgca

SEQ ID NO: 2642093 - DNA, 25 bp, Homo sapien
tgttctgagggcacaaaactccaca

SEQ ID NO: 2642094 - DNA, 25 bp, Homo sapien
cctcttcggatctggcttgaaccct

SEQ ID NO: 2642095 - DNA, 25 bp, Homo sapien
gacatgcaagtatggagtagccaga

SEQ ID NO: 2642096 - DNA, 25 bp, Homo sapien
gttcgaaattccaacttcatgtggc

SEQ ID NO: 2642097 - DNA, 25 bp, Homo sapien
ataagagttcgaaattccaacttca

SEQ ID NO: 2642098 - DNA, 25 bp, Homo sapien
tcgaaattccaacttcatgtggctg

SEQ ID NO: 2642099 - DNA, 25 bp, Homo sapien
gagttcgaaattccaacttcatgtg

SEQ ID NO: 2642100 - DNA, 25 bp, Homo sapien
ctgaactaaagccttaaagagaact

SEQ ID NO: 2642101 - DNA, 25 bp, Homo sapien
ctcctgaactaaagccttaaagaga

SEQ ID NO: 2642102 - DNA, 25 bp, Homo sapien
tcctgaactaaagccttaaagagaa

SEQ ID NO: 2642103 - DNA, 25 bp, Homo sapien
tgaactaaagccttaaagagaactg

SEQ ID NO: 2642104 - DNA, 25 bp, Homo sapien
cagtccagactggagaagtcacagg

SEQ ID NO: 2642105 - DNA, 25 bp, Homo sapien
ttcccggtagaaacaccatatctgg

SEQ ID NO: 2642106 - DNA, 25 bp, Homo sapien
cccagagaagatgatagctaagtgc

SEQ ID NO: 2642107 - DNA, 25 bp, Homo sapien
gctaagtgctaaaggttgaccaaaa

SEQ ID NO: 2642108 - DNA, 25 bp, Homo sapien
tcctgtcctgaagagatatagtgct

SEQ ID NO: 2642109 - DNA, 25 bp, Homo sapien
tctgtgtgatagttcacttgtggac

SEQ ID NO: 2642110 - DNA, 25 bp, Homo sapien
gcctgcctgtcttggtacttctaca

SEQ ID NO: 2642111 - DNA, 25 bp, Homo sapien
caatacgttctaggtcacatgggca

SEQ ID NO: 2642112 - DNA, 25 bp, Homo sapien
taacttaaaagagtccagtggccat

SEQ ID NO: 2642113 - DNA, 25 bp, Homo sapien
ttatgcctgagaacatcctagggag

SEQ ID NO: 2642114 - DNA, 25 bp, Homo sapien
tcaatcctatagcttggaactggga

SEQ ID NO: 2642115 - DNA, 25 bp, Homo sapien
taactgaacgatgaccaaacgtgcc

SEQ ID NO: 2642116 - DNA, 25 bp, Homo sapien
tgcgctcatacatggatgcactggg

SEQ ID NO: 2642117 - DNA, 25 bp, Homo sapien
gggagattatcaagatagactcttt

SEQ ID NO: 2642118 - DNA, 25 bp, Homo sapien
atctctatgcatgtaactgcgctca

SEQ ID NO: 2642119 - DNA, 25 bp, Homo sapien
gattatcaagatagactctttcaaa

SEQ ID NO: 2642120 - DNA, 25 bp, Homo sapien
cattttctccactagtgccaaagag

SEQ ID NO: 2642121 - DNA, 25 bp, Homo sapien
tattcctagggtatgttagcccaca

SEQ ID NO: 2642122 - DNA, 25 bp, Homo sapien
ggccaggtaccagttactcatatct

SEQ ID NO: 2642123 - DNA, 25 bp, Homo sapien
tggttcactcccctcttggcattta

SEQ ID NO: 2642124 - DNA, 25 bp, Homo sapien
ccagtatatgtcaggtactttgtac

SEQ ID NO: 2642125 - DNA, 25 bp, Homo sapien
gctagagtggctttcaatctaccac

SEQ ID NO: 2642126 - DNA, 25 bp, Homo sapien
tgttaaatgtacttgcctcaggtcc

SEQ ID NO: 2642127 - DNA, 25 bp, Homo sapien
cctcaggtccatatagctagagtgg

SEQ ID NO: 2642128 - DNA, 25 bp, Homo sapien
gaccactatattacagaacactgca

SEQ ID NO: 2642129 - DNA, 25 bp, Homo sapien
cttagtattcccaaagcaatcattc

SEQ ID NO: 2642130 - DNA, 25 bp, Homo sapien
acccttctttaagcagaccactata

SEQ ID NO: 2642131 - DNA, 25 bp, Homo sapien
gatctatgaatcacttagtattccc

SEQ ID NO: 2642132 - DNA, 25 bp, Homo sapien
caggtgactacgaaaatgtttaaca

SEQ ID NO: 2642133 - DNA, 25 bp, Homo sapien
gctaactgcaatactctcaataact

SEQ ID NO: 2642134 - DNA, 25 bp, Homo sapien
gaacaatgctccctcagagctaact

SEQ ID NO: 2642135 - DNA, 25 bp, Homo sapien
catcaaacaccttcattgctttatc

SEQ ID NO: 2642136 - DNA, 25 bp, Homo sapien
actacatcaaacaccttcattgctt

SEQ ID NO: 2642137 - DNA, 25 bp, Homo sapien
actgaagaaattgcatcccctgggc

SEQ ID NO: 2642138 - DNA, 25 bp, Homo sapien
catacgctggttggataagccttac

SEQ ID NO: 2642139 - DNA, 25 bp, Homo sapien
tgaagtggctggttatctcctcggc

SEQ ID NO: 2642140 - DNA, 25 bp, Homo sapien
tattcatgaggaggcccagtccagt

SEQ ID NO: 2642141 - DNA, 25 bp, Homo sapien
aatgcagctatagactatgaggtcc

SEQ ID NO: 2642142 - DNA, 25 bp, Homo sapien
gcaaggttacgtgcctgacataaca

SEQ ID NO: 2642143 - DNA, 25 bp, Homo sapien
ttggactagccatctatcaaatgct

SEQ ID NO: 2642144 - DNA, 25 bp, Homo sapien
aatgctcagtagacacgtggctagt

SEQ ID NO: 2642145 - DNA, 25 bp, Homo sapien
ttgttccatacagcacgaagtgtcc

SEQ ID NO: 2642146 - DNA, 25 bp, Homo sapien
tccatgtctggtaactgttgcctca

SEQ ID NO: 2642147 - DNA, 25 bp, Homo sapien
tacagccattcgtcggccaaattcc

SEQ ID NO: 2642148 - DNA, 25 bp, Homo sapien
gcctcatctgttgcagttcagtaaa

SEQ ID NO: 2642149 - DNA, 25 bp, Homo sapien
agtcacagactaggagaacggctca

SEQ ID NO: 2642150 - DNA, 25 bp, Homo sapien
gctgggaatcaactatcttatctat

SEQ ID NO: 2642151 - DNA, 25 bp, Homo sapien
tggtaggcagctataattttcaggt

SEQ ID NO: 2642152 - DNA, 25 bp, Homo sapien
ttttatacaacagaatcaccgaagt

SEQ ID NO: 2642153 - DNA, 25 bp, Homo sapien
ttgtttgcctaaaatccgcacacac

SEQ ID NO: 2642154 - DNA, 25 bp, Homo sapien
ggaacaaagccaattgcatcactct

SEQ ID NO: 2642155 - DNA, 25 bp, Homo sapien
tttcttgtttgcctaaaatccgcac

SEQ ID NO: 2642156 - DNA, 25 bp, Homo sapien
gccaattgcatcactctaatatttt

SEQ ID NO: 2642157 - DNA, 25 bp, Homo sapien
gcagcacgatgctttttggctatcc

SEQ ID NO: 2642158 - DNA, 25 bp, Homo sapien
ggtcagcttgaatattctgaagaac

SEQ ID NO: 2642159 - DNA, 25 bp, Homo sapien
tagtagttgcagcacgatgcttttt

SEQ ID NO: 2642160 - DNA, 25 bp, Homo sapien
gaatgatgtacagactattgttggg

SEQ ID NO: 2642161 - DNA, 25 bp, Homo sapien
aacattaccgtctaatctcctagta

SEQ ID NO: 2642162 - DNA, 25 bp, Homo sapien
taccgtctaatctcctagtacttac

SEQ ID NO: 2642163 - DNA, 25 bp, Homo sapien
gaacattaccgtctaatctcctagt

SEQ ID NO: 2642164 - DNA, 25 bp, Homo sapien
cattaccgtctaatctcctagtact

SEQ ID NO: 2642165 - DNA, 25 bp, Homo sapien
gtatgtgttttgagtgtatatcaag

SEQ ID NO: 2642166 - DNA, 25 bp, Homo sapien
tatatactttgatcaacacacaagt

SEQ ID NO: 2642167 - DNA, 25 bp, Homo sapien
aattagtgtatgtgttttgagtgta

SEQ ID NO: 2642168 - DNA, 25 bp, Homo sapien
tgatcaacacacaagtaaacttgga

SEQ ID NO: 2642169 - DNA, 25 bp, Homo sapien
tattactactatgagcaggacccca

SEQ ID NO: 2642170 - DNA, 25 bp, Homo sapien
gaatctaaaccctgaagcataggag

SEQ ID NO: 2642171 - DNA, 25 bp, Homo sapien
tatgggaacgtaaagctagtgcctc

SEQ ID NO: 2642172 - DNA, 25 bp, Homo sapien
tagtaaggcctaacatgccacctgt

SEQ ID NO: 2642173 - DNA, 25 bp, Homo sapien
aatctgcacttttcgtatcttctgg

SEQ ID NO: 2642174 - DNA, 25 bp, Homo sapien
gcttgagtagctgccatgacttctt

SEQ ID NO: 2642175 - DNA, 25 bp, Homo sapien
taaaaacatctcgatcagaatctgc

SEQ ID NO: 2642176 - DNA, 25 bp, Homo sapien
tgtggataatggcactgtccgaaac

SEQ ID NO: 2642177 - DNA, 25 bp, Homo sapien
tgtccaagagtctagagctgcctag

SEQ ID NO: 2642178 - DNA, 25 bp, Homo sapien
tacagcgacatactcttggccaaaa

SEQ ID NO: 2642179 - DNA, 25 bp, Homo sapien
tctaatctcaggacaagcacggagg

SEQ ID NO: 2642180 - DNA, 25 bp, Homo sapien
caagtacatcagcaaacaaggccga

SEQ ID NO: 2642181 - DNA, 25 bp, Homo sapien
gaaatgtatgcccattataataacc

SEQ ID NO: 2642182 - DNA, 25 bp, Homo sapien
tgaaatgtatgcccattataataac

SEQ ID NO: 2642183 - DNA, 25 bp, Homo sapien
aaacattacattgtccttttcgata

SEQ ID NO: 2642184 - DNA, 25 bp, Homo sapien
cttaacagaaagtacacaaaaacat

SEQ ID NO: 2642185 - DNA, 25 bp, Homo sapien
cattacattgtccttttcgatatat

SEQ ID NO: 2642186 - DNA, 25 bp, Homo sapien
acattgtccttttcgatatatgtac

SEQ ID NO: 2642187 - DNA, 25 bp, Homo sapien
gctgagtgtgtatggcctgtcatgt

SEQ ID NO: 2642188 - DNA, 25 bp, Homo sapien
tatggcctgtcatgtcgtaatgttg

SEQ ID NO: 2642189 - DNA, 25 bp, Homo sapien
tcctcccataccagtacctgttgga

SEQ ID NO: 2642190 - DNA, 25 bp, Homo sapien
catgtcgtaatgttgaatgaaattc

SEQ ID NO: 2642191 - DNA, 25 bp, Homo sapien
cattagtatttgatcccgcgttagc

SEQ ID NO: 2642192 - DNA, 25 bp, Homo sapien
ccattagtatttgatcccgcgttag

SEQ ID NO: 2642193 - DNA, 25 bp, Homo sapien
ttagtatttgatcccgcgttagcca

SEQ ID NO: 2642194 - DNA, 25 bp, Homo sapien
tagtatttgatcccgcgttagccat

SEQ ID NO: 2642195 - DNA, 25 bp, Homo sapien
tactttggcattagacaggtgggag

SEQ ID NO: 2642196 - DNA, 25 bp, Homo sapien
tctggaggactcttacctgaacagt

SEQ ID NO: 2642197 - DNA, 25 bp, Homo sapien
tctttcagaccaaagggaactggaa

SEQ ID NO: 2642198 - DNA, 25 bp, Homo sapien
taggttacatcatcagtagaggcag

SEQ ID NO: 2642199 - DNA, 25 bp, Homo sapien
tcctctgtacaacttccattccttt

SEQ ID NO: 2642200 - DNA, 25 bp, Homo sapien
caacttccattcctttagtcactcg

SEQ ID NO: 2642201 - DNA, 25 bp, Homo sapien
gtcactcgtccaaatactgtatgct

SEQ ID NO: 2642202 - DNA, 25 bp, Homo sapien
cctttagtcactcgtccaaatactg

SEQ ID NO: 2642203 - DNA, 25 bp, Homo sapien
ttttgggattgactttgacgttgga

SEQ ID NO: 2642204 - DNA, 25 bp, Homo sapien
tttgggattgactttgacgttggag

SEQ ID NO: 2642205 - DNA, 25 bp, Homo sapien
ttgggattgactttgacgttggaga

SEQ ID NO: 2642206 - DNA, 25 bp, Homo sapien
attgtatttttatttgcaagtacat

SEQ ID NO: 2642207 - DNA, 25 bp, Homo sapien
gtatttttatttgcaagtacattaa

SEQ ID NO: 2642208 - DNA, 25 bp, Homo sapien
tttatttgcaagtacattaaaacaa

SEQ ID NO: 2642209 - DNA, 25 bp, Homo sapien
ctaatgtaaaataatctgtttaata

SEQ ID NO: 2642210 - DNA, 25 bp, Homo sapien
gatctgtatattcagcaagtcctaa

SEQ ID NO: 2642211 - DNA, 25 bp, Homo sapien
tgtatattcagcaagtcctaagctt

SEQ ID NO: 2642212 - DNA, 25 bp, Homo sapien
tctgtatattcagcaagtcctaagc

SEQ ID NO: 2642213 - DNA, 25 bp, Homo sapien
ctgtatattcagcaagtcctaagct

SEQ ID NO: 2642214 - DNA, 25 bp, Homo sapien
gaaatattgcgagaaaagtcaaagg

SEQ ID NO: 2642215 - DNA, 25 bp, Homo sapien
agaaattacctataatgagtgctat

SEQ ID NO: 2642216 - DNA, 25 bp, Homo sapien
gattagaaatattgcgagaaaagtc

SEQ ID NO: 2642217 - DNA, 25 bp, Homo sapien
tttgcctgagtttagtccatttcaa

SEQ ID NO: 2642218 - DNA, 25 bp, Homo sapien
tgtttattgaggctttactcaccac

SEQ ID NO: 2642219 - DNA, 25 bp, Homo sapien
cactttgaccaaagtaacttcctgt

SEQ ID NO: 2642220 - DNA, 25 bp, Homo sapien
gaggctttactcaccactacttact

SEQ ID NO: 2642221 - DNA, 25 bp, Homo sapien
accactacttactaaacagttatca

SEQ ID NO: 2642222 - DNA, 25 bp, Homo sapien
gaattgttgtaaggacagtgatgtc

SEQ ID NO: 2642223 - DNA, 25 bp, Homo sapien
gcctatcagtattatgggcaatatg

SEQ ID NO: 2642224 - DNA, 25 bp, Homo sapien
tgatgtctggtaacaagatgtgact

SEQ ID NO: 2642225 - DNA, 25 bp, Homo sapien
gactttttggtagcactgttgtggt

SEQ ID NO: 2642226 - DNA, 25 bp, Homo sapien
aatagaaagcgaacttcaagagaag

SEQ ID NO: 2642227 - DNA, 25 bp, Homo sapien
aaatgtagtaagtaacgcagaacca

SEQ ID NO: 2642228 - DNA, 25 bp, Homo sapien
tgtgggaatgactataggtaaaatg

SEQ ID NO: 2642229 - DNA, 25 bp, Homo sapien
agtaagtaacgcagaaccagggttg

SEQ ID NO: 2642230 - DNA, 25 bp, Homo sapien
tttttttctgtacatgttcagagaa

SEQ ID NO: 2642231 - DNA, 25 bp, Homo sapien
cagagaaacttctttagtcataaac

SEQ ID NO: 2642232 - DNA, 25 bp, Homo sapien
gaaacttctttagtcataaactata

SEQ ID NO: 2642233 - DNA, 25 bp, Homo sapien
ttcagagaaacttctttagtcataa

SEQ ID NO: 2642234 - DNA, 25 bp, Homo sapien
gcaaaaccaaaagtcaaacgcactc

SEQ ID NO: 2642235 - DNA, 25 bp, Homo sapien
tcttagaaacgtaggcataaaatac

SEQ ID NO: 2642236 - DNA, 25 bp, Homo sapien
taggtaacaatacgcggcctcccaa

SEQ ID NO: 2642237 - DNA, 25 bp, Homo sapien
cacacatcgcgactgcaggaaaaga

SEQ ID NO: 2642238 - DNA, 25 bp, Homo sapien
tcctgtttagggggattcacttcca

SEQ ID NO: 2642239 - DNA, 25 bp, Homo sapien
cctgtttagggggattcacttccat

SEQ ID NO: 2642240 - DNA, 25 bp, Homo sapien
gctcctgtttagggggattcacttc

SEQ ID NO: 2642241 - DNA, 25 bp, Homo sapien
tcgataagtagggaatgcaaggaaa

SEQ ID NO: 2642242 - DNA, 25 bp, Homo sapien
gcgagcactgagtgtttaagaagga

SEQ ID NO: 2642243 - DNA, 25 bp, Homo sapien
ttaagaaggatgaggcctacatggc

SEQ ID NO: 2642244 - DNA, 25 bp, Homo sapien
tggcaaaggcttcgataagtaggga

SEQ ID NO: 2642245 - DNA, 25 bp, Homo sapien
tccaaattcccatcggagtagctgg

SEQ ID NO: 2642246 - DNA, 25 bp, Homo sapien
caggttaagcttacaggtcccatca

SEQ ID NO: 2642247 - DNA, 25 bp, Homo sapien
gaggcaggccttgcgttgaaacact

SEQ ID NO: 2642248 - DNA, 25 bp, Homo sapien
gcttcattctttaggaggcaacacg

SEQ ID NO: 2642249 - DNA, 25 bp, Homo sapien
gcaattaaacagtatggagacccca

SEQ ID NO: 2642250 - DNA, 25 bp, Homo sapien
taagatatggtagggataccctgcc

SEQ ID NO: 2642251 - DNA, 25 bp, Homo sapien
ggagaccccaataccatggcttttg

SEQ ID NO: 2642252 - DNA, 25 bp, Homo sapien
caagttaggcttgctaatcaggccc

SEQ ID NO: 2642253 - DNA, 25 bp, Homo sapien
cctcagagctagaatgttaatttat

SEQ ID NO: 2642254 - DNA, 25 bp, Homo sapien
aatttattattgcaagattgtctct

SEQ ID NO: 2642255 - DNA, 25 bp, Homo sapien
ccagttactcttagtgatgagaaaa

SEQ ID NO: 2642256 - DNA, 25 bp, Homo sapien
atccagttactcttagtgatgagaa

SEQ ID NO: 2642257 - DNA, 25 bp, Homo sapien
gaaactccaatagatctactgtgca

SEQ ID NO: 2642258 - DNA, 25 bp, Homo sapien
taggtctgagtggaagcttggaccc

SEQ ID NO: 2642259 - DNA, 25 bp, Homo sapien
tggacccatcatatggaaaccaagg

SEQ ID NO: 2642260 - DNA, 25 bp, Homo sapien
taaatcttgatagcggacgagtagg

SEQ ID NO: 2642261 - DNA, 25 bp, Homo sapien
catcttgctctataaagtgagtgta

SEQ ID NO: 2642262 - DNA, 25 bp, Homo sapien
tgtagcattacaagatggaagttca

SEQ ID NO: 2642263 - DNA, 25 bp, Homo sapien
taagagctaatcttcctttaagaag

SEQ ID NO: 2642264 - DNA, 25 bp, Homo sapien
tatcacagaacacccatatttggcc

SEQ ID NO: 2642265 - DNA, 25 bp, Homo sapien
ttcaatcacagtttgtaacaaaagg

SEQ ID NO: 2642266 - DNA, 25 bp, Homo sapien
tcttgacttaattgacaagcctagg

SEQ ID NO: 2642267 - DNA, 25 bp, Homo sapien
caaactatacaacttaattcatgac

SEQ ID NO: 2642268 - DNA, 25 bp, Homo sapien
taaaagaaggctgccaataagcaga

SEQ ID NO: 2642269 - DNA, 25 bp, Homo sapien
taagctgtgtgagggcaaggtccat

SEQ ID NO: 2642270 - DNA, 25 bp, Homo sapien
cctctgaagggaatgtttaccatgc

SEQ ID NO: 2642271 - DNA, 25 bp, Homo sapien
caggctatgaagaatccctctgaag

SEQ ID NO: 2642272 - DNA, 25 bp, Homo sapien
tatcaagctcctaccatgacaggca

SEQ ID NO: 2642273 - DNA, 25 bp, Homo sapien
aataaagtaggcttagtcagccgca

SEQ ID NO: 2642274 - DNA, 25 bp, Homo sapien
ataaagtaggcttagtcagccgcat

SEQ ID NO: 2642275 - DNA, 25 bp, Homo sapien
gaataaagtaggcttagtcagccgc

SEQ ID NO: 2642276 - DNA, 25 bp, Homo sapien
ggatcatctctcatcagctggttaa

SEQ ID NO: 2642277 - DNA, 25 bp, Homo sapien
acttctgcaccattaacggttgaag

SEQ ID NO: 2642278 - DNA, 25 bp, Homo sapien
ttaacggttgaaggatcatctctca

SEQ ID NO: 2642279 - DNA, 25 bp, Homo sapien
ctcatcagctggttaaagagatctc

SEQ ID NO: 2642280 - DNA, 25 bp, Homo sapien
ccaaaattctgtggtaaagtcagca

SEQ ID NO: 2642281 - DNA, 25 bp, Homo sapien
caaaattctgtggtaaagtcagcat

SEQ ID NO: 2642282 - DNA, 25 bp, Homo sapien
tgattgctatcattatgaacgctga

SEQ ID NO: 2642283 - DNA, 25 bp, Homo sapien
tatgaacgctgatataactggaaaa

SEQ ID NO: 2642284 - DNA, 25 bp, Homo sapien
tatgtcttttacaacttgattgcta

SEQ ID NO: 2642285 - DNA, 25 bp, Homo sapien
caacttgattgctatcattatgaac

SEQ ID NO: 2642286 - DNA, 25 bp, Homo sapien
caaagagtgctcaaaagccaactgc

SEQ ID NO: 2642287 - DNA, 25 bp, Homo sapien
ccttagcctggctttcaagatgctc

SEQ ID NO: 2642288 - DNA, 25 bp, Homo sapien
tctacaaagcatcccacacaatgtg

SEQ ID NO: 2642289 - DNA, 25 bp, Homo sapien
tgcccaggcaaaactcaatgcagcc

SEQ ID NO: 2642290 - DNA, 25 bp, Homo sapien
tagaggtcctttttggaatactcca

SEQ ID NO: 2642291 - DNA, 25 bp, Homo sapien
tcaaactcattctaattagaggtcc

SEQ ID NO: 2642292 - DNA, 25 bp, Homo sapien
tgggtctatttgctctctaacgtcc

SEQ ID NO: 2642293 - DNA, 25 bp, Homo sapien
cagagaccccatccatatatgacaa

SEQ ID NO: 2642294 - DNA, 25 bp, Homo sapien
tccgtttcaactatatacaactctg

SEQ ID NO: 2642295 - DNA, 25 bp, Homo sapien
gtgtcagtaaagctttatttaagga

SEQ ID NO: 2642296 - DNA, 25 bp, Homo sapien
agtatggctgtgtgtcagtaaagct

SEQ ID NO: 2642297 - DNA, 25 bp, Homo sapien
tagaggccatacaatctccgtttca

SEQ ID NO: 2642298 - DNA, 25 bp, Homo sapien
caggtcaatatcaagctgtgcttca

SEQ ID NO: 2642299 - DNA, 25 bp, Homo sapien
gacacctaaaacctgatcaaaagac

SEQ ID NO: 2642300 - DNA, 25 bp, Homo sapien
gccactgagtctagcctgatgcaca

SEQ ID NO: 2642301 - DNA, 25 bp, Homo sapien
gatgtcacaattggcttatctggcc

SEQ ID NO: 2642302 - DNA, 25 bp, Homo sapien
aaagaaataattgaacccattggct

SEQ ID NO: 2642303 - DNA, 25 bp, Homo sapien
aggcaagcggcactaagcctggcta

SEQ ID NO: 2642304 - DNA, 25 bp, Homo sapien
attacaggcaagcggcactaagcct

SEQ ID NO: 2642305 - DNA, 25 bp, Homo sapien
acaggcaagcggcactaagcctggc

SEQ ID NO: 2642306 - DNA, 25 bp, Homo sapien
gaaagcactacctcatctaaagtag

SEQ ID NO: 2642307 - DNA, 25 bp, Homo sapien
tatggaggcaggaacctcgtcttct

SEQ ID NO: 2642308 - DNA, 25 bp, Homo sapien
tcttgctcaccactatagcatggtg

SEQ ID NO: 2642309 - DNA, 25 bp, Homo sapien
tgaggcatcagtatgaacacatggt

SEQ ID NO: 2642310 - DNA, 25 bp, Homo sapien
taaacgctgagaacttgtctgaaga

SEQ ID NO: 2642311 - DNA, 25 bp, Homo sapien
acaatccggtttaagttcagccact

SEQ ID NO: 2642312 - DNA, 25 bp, Homo sapien
gccactgcagcattggaggctgaaa

SEQ ID NO: 2642313 - DNA, 25 bp, Homo sapien
gacttcatgatgtatgacatcatca

SEQ ID NO: 2642314 - DNA, 25 bp, Homo sapien
agcctgagttgtataactcacagca

SEQ ID NO: 2642315 - DNA, 25 bp, Homo sapien
gcctgagttgtataactcacagcac

SEQ ID NO: 2642316 - DNA, 25 bp, Homo sapien
atttggttttcacatccaatggttt

SEQ ID NO: 2642317 - DNA, 25 bp, Homo sapien
ggttttcacatccaatggtttgaga

SEQ ID NO: 2642318 - DNA, 25 bp, Homo sapien
ctctgcattgtaaaatttggttttc

SEQ ID NO: 2642319 - DNA, 25 bp, Homo sapien
aaaatttggttttcacatccaatgg

SEQ ID NO: 2642320 - DNA, 25 bp, Homo sapien
tataatgttaactgacaaaggaagc

SEQ ID NO: 2642321 - DNA, 25 bp, Homo sapien
tatttctttatggagagcatgtcac

SEQ ID NO: 2642322 - DNA, 25 bp, Homo sapien
ataactgaatatgtgactcctagga

SEQ ID NO: 2642323 - DNA, 25 bp, Homo sapien
caaatcactctgaatattagcgtta

SEQ ID NO: 2642324 - DNA, 25 bp, Homo sapien
aatatcttgggcaattagagttccg

SEQ ID NO: 2642325 - DNA, 25 bp, Homo sapien
ggtacccaggatgtgttacttcacg

SEQ ID NO: 2642326 - DNA, 25 bp, Homo sapien
tatatttatcttcggtacctggcag

SEQ ID NO: 2642327 - DNA, 25 bp, Homo sapien
tagagttccgttgatcacttcaggg

SEQ ID NO: 2642328 - DNA, 25 bp, Homo sapien
cccaacccccacaagatggagtctt

SEQ ID NO: 2642329 - DNA, 25 bp, Homo sapien
ccaacccccacaagatggagtcttg

SEQ ID NO: 2642330 - DNA, 25 bp, Homo sapien
tctcaacaaaaatatcttatctata

SEQ ID NO: 2642331 - DNA, 25 bp, Homo sapien
aaaatatcttatctatatgaagaaa

SEQ ID NO: 2642332 - DNA, 25 bp, Homo sapien
tgaaaaaaatatccaccaaggtgtg

SEQ ID NO: 2642333 - DNA, 25 bp, Homo sapien
aaggtgtggtggcatttaaaatatt

SEQ ID NO: 2642334 - DNA, 25 bp, Homo sapien
ccttctccataaacataggtgaggt

SEQ ID NO: 2642335 - DNA, 25 bp, Homo sapien
ttgtacataatagatggctccagtg

SEQ ID NO: 2642336 - DNA, 25 bp, Homo sapien
ctccataaacataggtgaggttgtc

SEQ ID NO: 2642337 - DNA, 25 bp, Homo sapien
aaaccttctccataaacataggtga

SEQ ID NO: 2642338 - DNA, 25 bp, Homo sapien
gttggtctagaactcatagcttcaa

SEQ ID NO: 2642339 - DNA, 25 bp, Homo sapien
taggattcatatttacctcactgga

SEQ ID NO: 2642340 - DNA, 25 bp, Homo sapien
cagtgcttgactatagtcccagata

SEQ ID NO: 2642341 - DNA, 25 bp, Homo sapien
tatttgtcaaaacctacagtgcttg

SEQ ID NO: 2642342 - DNA, 25 bp, Homo sapien
tatagtaattggaccccgaaaggca

SEQ ID NO: 2642343 - DNA, 25 bp, Homo sapien
cagagacggagaaaattctctagca

SEQ ID NO: 2642344 - DNA, 25 bp, Homo sapien
taactgaaaagtgcaacagaaacca

SEQ ID NO: 2642345 - DNA, 25 bp, Homo sapien
taggaactggatgatgtaccctcca

SEQ ID NO: 2642346 - DNA, 25 bp, Homo sapien
tgtatccattggttgcaaatatgct

SEQ ID NO: 2642347 - DNA, 25 bp, Homo sapien
cagtataagtactggcgtgtatcca

SEQ ID NO: 2642348 - DNA, 25 bp, Homo sapien
tttggctttaggcagtataagtact

SEQ ID NO: 2642349 - DNA, 25 bp, Homo sapien
tactggcgtgtatccattggttgca

SEQ ID NO: 2642350 - DNA, 25 bp, Homo sapien
ctgttactcccttaatgatgcctgc

SEQ ID NO: 2642351 - DNA, 25 bp, Homo sapien
cattctttgaagttggctggtctgt

SEQ ID NO: 2642352 - DNA, 25 bp, Homo sapien
gaagttggctggtctgtaaccttcc

SEQ ID NO: 2642353 - DNA, 25 bp, Homo sapien
aattactgttactcccttaatgatg

SEQ ID NO: 2642354 - DNA, 25 bp, Homo sapien
ttacaagacgcacagatgaggatgg

SEQ ID NO: 2642355 - DNA, 25 bp, Homo sapien
tcagcataaagggaggagaatcctg

SEQ ID NO: 2642356 - DNA, 25 bp, Homo sapien
taacaacacgaaggcttggaacagg

SEQ ID NO: 2642357 - DNA, 25 bp, Homo sapien
taacggctatatttaagtgggccca

SEQ ID NO: 2642358 - DNA, 25 bp, Homo sapien
tctggtattgcctccaaagacaacc

SEQ ID NO: 2642359 - DNA, 25 bp, Homo sapien
caaggtttacggtatctggtattgc

SEQ ID NO: 2642360 - DNA, 25 bp, Homo sapien
tgcctccaaagacaacctaacatct

SEQ ID NO: 2642361 - DNA, 25 bp, Homo sapien
acctaacatctccataacctggagc

SEQ ID NO: 2642362 - DNA, 25 bp, Homo sapien
tactgagctcacgatgtggcagaca

SEQ ID NO: 2642363 - DNA, 25 bp, Homo sapien
tatatgcctgaatctccctaacaag

SEQ ID NO: 2642364 - DNA, 25 bp, Homo sapien
taatacaagtaggagcagagggcat

SEQ ID NO: 2642365 - DNA, 25 bp, Homo sapien
ggacatccatctacaaacagtggca

SEQ ID NO: 2642366 - DNA, 25 bp, Homo sapien
ccagtggatggaattggtattgcac

SEQ ID NO: 2642367 - DNA, 25 bp, Homo sapien
catttccaaaaccagatccatagtc

SEQ ID NO: 2642368 - DNA, 25 bp, Homo sapien
aaagcagagtaagggcaagacagag

SEQ ID NO: 2642369 - DNA, 25 bp, Homo sapien
gaagaacttggatgcagctttccca

SEQ ID NO: 2642370 - DNA, 25 bp, Homo sapien
tcatattcatatgttctctttaaga

SEQ ID NO: 2642371 - DNA, 25 bp, Homo sapien
cacacagacttgtgcgatgtcatca

SEQ ID NO: 2642372 - DNA, 25 bp, Homo sapien
aagaatgtgtctgttagtcttaagc

SEQ ID NO: 2642373 - DNA, 25 bp, Homo sapien
ctgttagtcttaagccagagatgct

SEQ ID NO: 2642374 - DNA, 25 bp, Homo sapien
gagcagttctgtgaaactaaatgaa

SEQ ID NO: 2642375 - DNA, 25 bp, Homo sapien
ttcgttgttgacgtcatcattttac

SEQ ID NO: 2642376 - DNA, 25 bp, Homo sapien
catatttacttcgttgttgacgtca

SEQ ID NO: 2642377 - DNA, 25 bp, Homo sapien
agagcagttctgtgaaactaaatga

SEQ ID NO: 2642378 - DNA, 25 bp, Homo sapien
aggtcagccaactataccctgcagg

SEQ ID NO: 2642379 - DNA, 25 bp, Homo sapien
tggtctcagatacacagcttttgga

SEQ ID NO: 2642380 - DNA, 25 bp, Homo sapien
tgaccgaatagctaggaaaaaactg

SEQ ID NO: 2642381 - DNA, 25 bp, Homo sapien
tgtgacagaaaccttacggcctgca

SEQ ID NO: 2642382 - DNA, 25 bp, Homo sapien
aatcattttgaaacaaagacagact

SEQ ID NO: 2642383 - DNA, 25 bp, Homo sapien
atcttaatcattttgaaacaaagac

SEQ ID NO: 2642384 - DNA, 25 bp, Homo sapien
cattttgaaacaaagacagacttca

SEQ ID NO: 2642385 - DNA, 25 bp, Homo sapien
tcttaatcattttgaaacaaagaca

SEQ ID NO: 2642386 - DNA, 25 bp, Homo sapien
agtcataagaagatgcttgaaaaac

SEQ ID NO: 2642387 - DNA, 25 bp, Homo sapien
agatttagtcataagaagatgcttg

SEQ ID NO: 2642388 - DNA, 25 bp, Homo sapien
caatccaagtatccaatgcagtggc

SEQ ID NO: 2642389 - DNA, 25 bp, Homo sapien
aatccaagtatccaatgcagtggct

SEQ ID NO: 2642390 - DNA, 25 bp, Homo sapien
tgttccttggaaatttatgccccac

SEQ ID NO: 2642391 - DNA, 25 bp, Homo sapien
cactcttcctgttaagcagctaatg

SEQ ID NO: 2642392 - DNA, 25 bp, Homo sapien
tgtgcttattagcagtcacccttta

SEQ ID NO: 2642393 - DNA, 25 bp, Homo sapien
gcagctaatgatctattaagaacaa

SEQ ID NO: 2642394 - DNA, 25 bp, Homo sapien
tgggcagcgatttcctgacatgtct

SEQ ID NO: 2642395 - DNA, 25 bp, Homo sapien
tccagcttgtccacgagagcacagc

SEQ ID NO: 2642396 - DNA, 25 bp, Homo sapien
tagtatccatcgacttgggcagcga

SEQ ID NO: 2642397 - DNA, 25 bp, Homo sapien
gcgccggtcggcttgtagtatccat

SEQ ID NO: 2642398 - DNA, 25 bp, Homo sapien
gaaatcagccatgaatgccgcctgg

SEQ ID NO: 2642399 - DNA, 25 bp, Homo sapien
cactgtttggatgcgatagtattcc

SEQ ID NO: 2642400 - DNA, 25 bp, Homo sapien
gatgatgcgatttggtggaaatcag

SEQ ID NO: 2642401 - DNA, 25 bp, Homo sapien
ctggctttgaattagggaacctggg

SEQ ID NO: 2642402 - DNA, 25 bp, Homo sapien
gaagggagggggagctcgatgcgct

SEQ ID NO: 2642403 - DNA, 25 bp, Homo sapien
ggaagggagggggagctcgatgcgc

SEQ ID NO: 2642404 - DNA, 25 bp, Homo sapien
gacggaagggagggggagctcgatg

SEQ ID NO: 2642405 - DNA, 25 bp, Homo sapien
acggaagggagggggagctcgatgc

SEQ ID NO: 2642406 - DNA, 25 bp, Homo sapien
ccgctgcacaccgggcagggccgag

SEQ ID NO: 2642407 - DNA, 25 bp, Homo sapien
cgctgcacaccgggcagggccgagg

SEQ ID NO: 2642408 - DNA, 25 bp, Homo sapien
gctgcacaccgggcagggccgaggc

SEQ ID NO: 2642409 - DNA, 25 bp, Homo sapien
ccagcagcagtcgtctcgcgtcctc

SEQ ID NO: 2642410 - DNA, 25 bp, Homo sapien
agtcgtctcgcgtcctcctgcttgg

SEQ ID NO: 2642411 - DNA, 25 bp, Homo sapien
ctcgcgtcctcctgcttggtaaggg

SEQ ID NO: 2642412 - DNA, 25 bp, Homo sapien
tgtctggcaagggtgcgcctcccgc

SEQ ID NO: 2642413 - DNA, 25 bp, Homo sapien
cgggcgcgtggtccttcggcgtggg

SEQ ID NO: 2642414 - DNA, 25 bp, Homo sapien
ggcggcgggcgcgtggtccttcggc

SEQ ID NO: 2642415 - DNA, 25 bp, Homo sapien
gtctcgagccggcctagccgcagag

SEQ ID NO: 2642416 - DNA, 25 bp, Homo sapien
tgggcgcccgggagtctcgagccgg

SEQ ID NO: 2642417 - DNA, 25 bp, Homo sapien
gaggcttcgcacagccaaaaggcac

SEQ ID NO: 2642418 - DNA, 25 bp, Homo sapien
gcggaggcttcgcacagccaaaagg

SEQ ID NO: 2642419 - DNA, 25 bp, Homo sapien
ctgcggaggcttcgcacagccaaaa

SEQ ID NO: 2642420 - DNA, 25 bp, Homo sapien
ttcgcacagccaaaaggcaccgggc

SEQ ID NO: 2642421 - DNA, 25 bp, Homo sapien
acggccaaggttaacccgcgcgctg

SEQ ID NO: 2642422 - DNA, 25 bp, Homo sapien
cacggccaaggttaacccgcgcgct

SEQ ID NO: 2642423 - DNA, 25 bp, Homo sapien
ggccaaggttaacccgcgcgctgga

SEQ ID NO: 2642424 - DNA, 25 bp, Homo sapien
caaggttaacccgcgcgctggaggt

SEQ ID NO: 2642425 - DNA, 25 bp, Homo sapien
tcccaaacaaagaggaatggacgtc

SEQ ID NO: 2642426 - DNA, 25 bp, Homo sapien
gattggaatgctaataatgggcgcg

SEQ ID NO: 2642427 - DNA, 25 bp, Homo sapien
attttgggccgcgtctgtgaccagc

SEQ ID NO: 2642428 - DNA, 25 bp, Homo sapien
gggcgcgaggagcaaacacaattgt

SEQ ID NO: 2642429 - DNA, 25 bp, Homo sapien
cgtgtccaagcgatcattttctcca

SEQ ID NO: 2642430 - DNA, 25 bp, Homo sapien
gaagtcagagagcatggacggaaac

SEQ ID NO: 2642431 - DNA, 25 bp, Homo sapien
ccaaagaggtttcatctcgggtgga

SEQ ID NO: 2642432 - DNA, 25 bp, Homo sapien
ttgggccaagtcaatttgcaccggc

SEQ ID NO: 2642433 - DNA, 25 bp, Homo sapien
tctacggactgagcaacacaaagct

SEQ ID NO: 2642434 - DNA, 25 bp, Homo sapien
aaagctccatccacacagacgagtg

SEQ ID NO: 2642435 - DNA, 25 bp, Homo sapien
gtaattaaccactgtcgcctgcctg

SEQ ID NO: 2642436 - DNA, 25 bp, Homo sapien
tgtttccgaaaaccagcgcatccgt

SEQ ID NO: 2642437 - DNA, 25 bp, Homo sapien
ggatctgacagtcctttaacgtgag

SEQ ID NO: 2642438 - DNA, 25 bp, Homo sapien
gatctgacagtcctttaacgtgagg

SEQ ID NO: 2642439 - DNA, 25 bp, Homo sapien
aggctttattgatgccaagtcagca

SEQ ID NO: 2642440 - DNA, 25 bp, Homo sapien
ccactcacagtcagcacgtgcctga

SEQ ID NO: 2642441 - DNA, 25 bp, Homo sapien
gagtctaggaaacaggtccctgaag

SEQ ID NO: 2642442 - DNA, 25 bp, Homo sapien
gcccccagctgagtcacctttgttt

SEQ ID NO: 2642443 - DNA, 25 bp, Homo sapien
gataaggttcagctgaggcattctt

SEQ ID NO: 2642444 - DNA, 25 bp, Homo sapien
tgaactgttcataggtaatcaataa

SEQ ID NO: 2642445 - DNA, 25 bp, Homo sapien
cttttattgataaggttcagctgag

SEQ ID NO: 2642446 - DNA, 25 bp, Homo sapien
gtactcaaacaaataatctacatct

SEQ ID NO: 2642447 - DNA, 25 bp, Homo sapien
tgctctgtgtcctttcacagcatac

SEQ ID NO: 2642448 - DNA, 25 bp, Homo sapien
tctgctctgtgtcctttcacagcat

SEQ ID NO: 2642449 - DNA, 25 bp, Homo sapien
gctctgtgtcctttcacagcataca

SEQ ID NO: 2642450 - DNA, 25 bp, Homo sapien
ctctctgctctgtgtcctttcacag

SEQ ID NO: 2642451 - DNA, 25 bp, Homo sapien
tacattttcaagctcacccaatgct

SEQ ID NO: 2642452 - DNA, 25 bp, Homo sapien
tcccatcttcattttgcggagcatc

SEQ ID NO: 2642453 - DNA, 25 bp, Homo sapien
tctgcagccctggaaagaactgcac

SEQ ID NO: 2642454 - DNA, 25 bp, Homo sapien
ggatgctggtacattgatctcgtct

SEQ ID NO: 2642455 - DNA, 25 bp, Homo sapien
tgagtaaaatcctggaaccaccaac

SEQ ID NO: 2642456 - DNA, 25 bp, Homo sapien
ctgagtaaaatcctggaaccaccaa

SEQ ID NO: 2642457 - DNA, 25 bp, Homo sapien
tctgagtaaaatcctggaaccacca

SEQ ID NO: 2642458 - DNA, 25 bp, Homo sapien
tcaataccgagcattccaacagcat

SEQ ID NO: 2642459 - DNA, 25 bp, Homo sapien
cagccacagtataggaagacattgc

SEQ ID NO: 2642460 - DNA, 25 bp, Homo sapien
taatttgctctggtgaaagatccca

SEQ ID NO: 2642461 - DNA, 25 bp, Homo sapien
cctgtttggtctgcacaatgagctc

SEQ ID NO: 2642462 - DNA, 25 bp, Homo sapien
gaggatacatgctggggaaagtcta

SEQ ID NO: 2642463 - DNA, 25 bp, Homo sapien
ggaaagtctagcatggtcctttcca

SEQ ID NO: 2642464 - DNA, 25 bp, Homo sapien
catctcaatatcaaaacgagaaagt

SEQ ID NO: 2642465 - DNA, 25 bp, Homo sapien
cgagaaagtcttttgtctgcttctg

SEQ ID NO: 2642466 - DNA, 25 bp, Homo sapien
gaaagctgctaggaggcaaatcaac

SEQ ID NO: 2642467 - DNA, 25 bp, Homo sapien
gaatgactccggcatacagcatcaa

SEQ ID NO: 2642468 - DNA, 25 bp, Homo sapien
caactcttgtcacggtctgctaaaa

SEQ ID NO: 2642469 - DNA, 25 bp, Homo sapien
tagcagctcaacataacctcaacga

SEQ ID NO: 2642470 - DNA, 25 bp, Homo sapien
cccaagtttagtgggatcaatccca

SEQ ID NO: 2642471 - DNA, 25 bp, Homo sapien
tatagtgtgccagtctactctagag

SEQ ID NO: 2642472 - DNA, 25 bp, Homo sapien
gaacgcattggtgtctatcaggtca

SEQ ID NO: 2642473 - DNA, 25 bp, Homo sapien
taaaggcccgaaatgaaccagctca

SEQ ID NO: 2642474 - DNA, 25 bp, Homo sapien
tacttatgcaacaggtaacctgtgc

SEQ ID NO: 2642475 - DNA, 25 bp, Homo sapien
tgggaatctgagttgctatgaacac

SEQ ID NO: 2642476 - DNA, 25 bp, Homo sapien
ctaggttgtggagaatgtaagctcc

SEQ ID NO: 2642477 - DNA, 25 bp, Homo sapien
tagtgaggacaaattaaatccaccc

SEQ ID NO: 2642478 - DNA, 25 bp, Homo sapien
tatcgtctggcctcaggttttatct

SEQ ID NO: 2642479 - DNA, 25 bp, Homo sapien
caagtatcgtctggcctcaggtttt

SEQ ID NO: 2642480 - DNA, 25 bp, Homo sapien
tttccaagtatcgtctggcctcagg

SEQ ID NO: 2642481 - DNA, 25 bp, Homo sapien
cgtctggcctcaggttttatcttcc

SEQ ID NO: 2642482 - DNA, 25 bp, Homo sapien
ggaaggtatcatcctcattgaggtt

SEQ ID NO: 2642483 - DNA, 25 bp, Homo sapien
caagttcagccttggaaaatacaag

SEQ ID NO: 2642484 - DNA, 25 bp, Homo sapien
taaaatcaatacatagctcactcat

SEQ ID NO: 2642485 - DNA, 25 bp, Homo sapien
aaaatacaaggaaggtatcatcctc

SEQ ID NO: 2642486 - DNA, 25 bp, Homo sapien
gtattaaaagccatttccatccttc

SEQ ID NO: 2642487 - DNA, 25 bp, Homo sapien
tgtattaaaagccatttccatcctt

SEQ ID NO: 2642488 - DNA, 25 bp, Homo sapien
gtttcagggatacaacatttcttca

SEQ ID NO: 2642489 - DNA, 25 bp, Homo sapien
tctggtttcagggatacaacatttc

SEQ ID NO: 2642490 - DNA, 25 bp, Homo sapien
cttaatgccacatgctatggtctga

SEQ ID NO: 2642491 - DNA, 25 bp, Homo sapien
aagggctacagctaaagaacttggg

SEQ ID NO: 2642492 - DNA, 25 bp, Homo sapien
tgccgatgccccttgatcttgaatt

SEQ ID NO: 2642493 - DNA, 25 bp, Homo sapien
tttctagacactgaatgccgatgcc

SEQ ID NO: 2642494 - DNA, 25 bp, Homo sapien
tagaaaacggtatggtgattcctaa

SEQ ID NO: 2642495 - DNA, 25 bp, Homo sapien
ccaaatattggtactttcagttcct

SEQ ID NO: 2642496 - DNA, 25 bp, Homo sapien
taatttcatacccagttgtatggct

SEQ ID NO: 2642497 - DNA, 25 bp, Homo sapien
tgtaggtgctacaaacttagagtga

SEQ ID NO: 2642498 - DNA, 25 bp, Homo sapien
tagaaaggctgttacgcggcttgtg

SEQ ID NO: 2642499 - DNA, 25 bp, Homo sapien
caccttggttcgcagtgggagtagc

SEQ ID NO: 2642500 - DNA, 25 bp, Homo sapien
gctataaccgagtagtttggccacc

SEQ ID NO: 2642501 - DNA, 25 bp, Homo sapien
cagtgttcatttcaaggacgaagtc

SEQ ID NO: 2642502 - DNA, 25 bp, Homo sapien
cttggatagaggtccaaatagaact

SEQ ID NO: 2642503 - DNA, 25 bp, Homo sapien
catgtagtaatatagatcccaggca

SEQ ID NO: 2642504 - DNA, 25 bp, Homo sapien
gaggaactcttggtctatggaatac

SEQ ID NO: 2642505 - DNA, 25 bp, Homo sapien
aaataaactctcgttctgcttcacc

SEQ ID NO: 2642506 - DNA, 25 bp, Homo sapien
tggggtagccagtctcatgatagtg

SEQ ID NO: 2642507 - DNA, 25 bp, Homo sapien
ttcttcggttaaaactatatcctga

SEQ ID NO: 2642508 - DNA, 25 bp, Homo sapien
gattactcctgaaagagttcttcgg

SEQ ID NO: 2642509 - DNA, 25 bp, Homo sapien
aagtaagtccataaagcagcaggtg

SEQ ID NO: 2642510 - DNA, 25 bp, Homo sapien
agagggacgacctgccactggctgt

SEQ ID NO: 2642511 - DNA, 25 bp, Homo sapien
gccactgccatcatccggcttccat

SEQ ID NO: 2642512 - DNA, 25 bp, Homo sapien
gtgagaagttcaccacgagggcagc

SEQ ID NO: 2642513 - DNA, 25 bp, Homo sapien
tctcaggagagagggacgacctgcc

SEQ ID NO: 2642514 - DNA, 25 bp, Homo sapien
caaactcatgaaagtaagtcctcac

SEQ ID NO: 2642515 - DNA, 25 bp, Homo sapien
acaaatctgatgcatcacgtgacca

SEQ ID NO: 2642516 - DNA, 25 bp, Homo sapien
tctgatgcatcacgtgaccaaactc

SEQ ID NO: 2642517 - DNA, 25 bp, Homo sapien
atgcatcacgtgaccaaactcatga

SEQ ID NO: 2642518 - DNA, 25 bp, Homo sapien
ttaggagcagaaacctgacagcagt

SEQ ID NO: 2642519 - DNA, 25 bp, Homo sapien
gagcagaaacctgacagcagtcaag

SEQ ID NO: 2642520 - DNA, 25 bp, Homo sapien
taggagcagaaacctgacagcagtc

SEQ ID NO: 2642521 - DNA, 25 bp, Homo sapien
cagaaacctgacagcagtcaagaag

SEQ ID NO: 2642522 - DNA, 25 bp, Homo sapien
tgaacctccaagtaaaaatatgttg

SEQ ID NO: 2642523 - DNA, 25 bp, Homo sapien
ttggttttgcagaaggcctataaaa

SEQ ID NO: 2642524 - DNA, 25 bp, Homo sapien
ggcctataaaattcttgaacacatt

SEQ ID NO: 2642525 - DNA, 25 bp, Homo sapien
aatatgttgtgaaagaggacaggat

SEQ ID NO: 2642526 - DNA, 25 bp, Homo sapien
cttacagatagtcttattctttttc

SEQ ID NO: 2642527 - DNA, 25 bp, Homo sapien
atttgtaacctttccttacagatag

SEQ ID NO: 2642528 - DNA, 25 bp, Homo sapien
cctttccttacagatagtcttattc

SEQ ID NO: 2642529 - DNA, 25 bp, Homo sapien
tgtaacctttccttacagatagtct

SEQ ID NO: 2642530 - DNA, 25 bp, Homo sapien
gcaagttcatatggttcatgctaga

SEQ ID NO: 2642531 - DNA, 25 bp, Homo sapien
tacggtgaattgctgaactagacat

SEQ ID NO: 2642532 - DNA, 25 bp, Homo sapien
ttttaagtcaaggtctgctctgtca

SEQ ID NO: 2642533 - DNA, 25 bp, Homo sapien
tcatgctagaatagtctgggcctaa

SEQ ID NO: 2642534 - DNA, 25 bp, Homo sapien
ggagataaacatacccacattgctc

SEQ ID NO: 2642535 - DNA, 25 bp, Homo sapien
catcactcccaatactccaagctgc

SEQ ID NO: 2642536 - DNA, 25 bp, Homo sapien
cactcccaatactccaagctgctct

SEQ ID NO: 2642537 - DNA, 25 bp, Homo sapien
gataaacatacccacattgctcttc

SEQ ID NO: 2642538 - DNA, 25 bp, Homo sapien
cagtcaactcacacagagggaaacc

SEQ ID NO: 2642539 - DNA, 25 bp, Homo sapien
gctgatgatagggagttcactgcat

SEQ ID NO: 2642540 - DNA, 25 bp, Homo sapien
gcattcattctacattattagagtg

SEQ ID NO: 2642541 - DNA, 25 bp, Homo sapien
aattacatctgatgttaaagtcaca

SEQ ID NO: 2642542 - DNA, 25 bp, Homo sapien
aagggaagagggatgtaaccaccag

SEQ ID NO: 2642543 - DNA, 25 bp, Homo sapien
ttctcctctgatgcattacattcca

SEQ ID NO: 2642544 - DNA, 25 bp, Homo sapien
tccgttgtctttcactgaacctctg

SEQ ID NO: 2642545 - DNA, 25 bp, Homo sapien
ggtgccgaatcagcagcaaataccc

SEQ ID NO: 2642546 - DNA, 25 bp, Homo sapien
tcaagcatttgcgatggcacctcta

SEQ ID NO: 2642547 - DNA, 25 bp, Homo sapien
gcctagaagcaacaagtttttcaag

SEQ ID NO: 2642548 - DNA, 25 bp, Homo sapien
tcttcggagggaatcgacgtcccac

SEQ ID NO: 2642549 - DNA, 25 bp, Homo sapien
ttccgctaaatcgtgcaaaatcagt

SEQ ID NO: 2642550 - DNA, 25 bp, Homo sapien
acaatctggcgcagggtcagaagac

SEQ ID NO: 2642551 - DNA, 25 bp, Homo sapien
caactttgctcaaaacaatctggcg

SEQ ID NO: 2642552 - DNA, 25 bp, Homo sapien
tttggcatattcacttgcagcatcc

SEQ ID NO: 2642553 - DNA, 25 bp, Homo sapien
ccagcgatgtgttggtatgaagaga

SEQ ID NO: 2642554 - DNA, 25 bp, Homo sapien
caaatgtccaaaggtagctggcata

SEQ ID NO: 2642555 - DNA, 25 bp, Homo sapien
tatccataatattggccatcgtatc

SEQ ID NO: 2642556 - DNA, 25 bp, Homo sapien
cagctgtaaaacatatccatggaaa

SEQ ID NO: 2642557 - DNA, 25 bp, Homo sapien
aaatacttcactccaaagatatcca

SEQ ID NO: 2642558 - DNA, 25 bp, Homo sapien
actcctggagctagagacatctcct

SEQ ID NO: 2642559 - DNA, 25 bp, Homo sapien
ggaactcctggagctagagacatct

SEQ ID NO: 2642560 - DNA, 25 bp, Homo sapien
caggaactcctggagctagagacat

SEQ ID NO: 2642561 - DNA, 25 bp, Homo sapien
gaactcctggagctagagacatctc

SEQ ID NO: 2642562 - DNA, 25 bp, Homo sapien
cagtaatttggctgctaccttgaca

SEQ ID NO: 2642563 - DNA, 25 bp, Homo sapien
accacagggatcagtaatttggctg

SEQ ID NO: 2642564 - DNA, 25 bp, Homo sapien
agtaatttggctgctaccttgacag

SEQ ID NO: 2642565 - DNA, 25 bp, Homo sapien
gaaccacagggatcagtaatttggc

SEQ ID NO: 2642566 - DNA, 25 bp, Homo sapien
agtatctgcaaagggtgtgagggtg

SEQ ID NO: 2642567 - DNA, 25 bp, Homo sapien
ttggcttttggagccaggtccatta

SEQ ID NO: 2642568 - DNA, 25 bp, Homo sapien
gtgtgagggtgaggggccaagggat

SEQ ID NO: 2642569 - DNA, 25 bp, Homo sapien
gcttttggagccaggtccattattg

SEQ ID NO: 2642570 - DNA, 25 bp, Homo sapien
aacagaaccctcttccttatggatg

SEQ ID NO: 2642571 - DNA, 25 bp, Homo sapien
ttctgctgcttttatgatgggctca

SEQ ID NO: 2642572 - DNA, 25 bp, Homo sapien
catttttgtgggtccgatgctggga

SEQ ID NO: 2642573 - DNA, 25 bp, Homo sapien
agagaagaagggctgtacgtgcccc

SEQ ID NO: 2642574 - DNA, 25 bp, Homo sapien
gagcatgcaggcctctactcattag

SEQ ID NO: 2642575 - DNA, 25 bp, Homo sapien
tttggtttggctcacgtttcaagaa

SEQ ID NO: 2642576 - DNA, 25 bp, Homo sapien
gagatcccccaggtttcaggattag

SEQ ID NO: 2642577 - DNA, 25 bp, Homo sapien
gaaattgtggagcatgtccatgccg

SEQ ID NO: 2642578 - DNA, 25 bp, Homo sapien
ggcatattcccctggccttgaggta

SEQ ID NO: 2642579 - DNA, 25 bp, Homo sapien
tgtccccggctagcaaagtcatacc

SEQ ID NO: 2642580 - DNA, 25 bp, Homo sapien
cacataaggctttggagcagctgtc

SEQ ID NO: 2642581 - DNA, 25 bp, Homo sapien
aacgatcttgtatgctgaggtggaa

SEQ ID NO: 2642582 - DNA, 25 bp, Homo sapien
gatgggattcctgctctcgtaaaaa

SEQ ID NO: 2642583 - DNA, 25 bp, Homo sapien
tacagatgaggagcgaggcaacctt

SEQ ID NO: 2642584 - DNA, 25 bp, Homo sapien
aatatgcagctagtacaggttccag

SEQ ID NO: 2642585 - DNA, 25 bp, Homo sapien
gtctacatcaggtggcaaaacgtca

SEQ ID NO: 2642586 - DNA, 25 bp, Homo sapien
ggcttctgcccgggctccataagac

SEQ ID NO: 2642587 - DNA, 25 bp, Homo sapien
gaacttagaagtctaccctgtagca

SEQ ID NO: 2642588 - DNA, 25 bp, Homo sapien
gacagcatccagaacttagaagtct

SEQ ID NO: 2642589 - DNA, 25 bp, Homo sapien
cgggctccataagacccaggcatct

SEQ ID NO: 2642590 - DNA, 25 bp, Homo sapien
ttgctgatgcagtgacgaggtgaaa

SEQ ID NO: 2642591 - DNA, 25 bp, Homo sapien
ctaatgggagaactttattctcagt

SEQ ID NO: 2642592 - DNA, 25 bp, Homo sapien
ttttgctgatgcagtgacgaggtga

SEQ ID NO: 2642593 - DNA, 25 bp, Homo sapien
ccttttgctgatgcagtgacgaggt

SEQ ID NO: 2642594 - DNA, 25 bp, Homo sapien
ccttctcttcaatctgatggtaagt

SEQ ID NO: 2642595 - DNA, 25 bp, Homo sapien
caatctgatggtaagtttctgttct

SEQ ID NO: 2642596 - DNA, 25 bp, Homo sapien
tctcaggcatgctcaacaacctcag

SEQ ID NO: 2642597 - DNA, 25 bp, Homo sapien
tcatggtcgcaaaaggaacacgtcc

SEQ ID NO: 2642598 - DNA, 25 bp, Homo sapien
ctttgaatagtgaaacatgatcaag

SEQ ID NO: 2642599 - DNA, 25 bp, Homo sapien
tgaaacatgatcaaggagattccat

SEQ ID NO: 2642600 - DNA, 25 bp, Homo sapien
aggagattccatgatgtttagaagt

SEQ ID NO: 2642601 - DNA, 25 bp, Homo sapien
catgatcaaggagattccatgatgt

SEQ ID NO: 2642602 - DNA, 25 bp, Homo sapien
cacagagaggtagaacagtggtgat

SEQ ID NO: 2642603 - DNA, 25 bp, Homo sapien
tagggtttatctggtccacagagag

SEQ ID NO: 2642604 - DNA, 25 bp, Homo sapien
tgaaaagtggtagttagacttggaa

SEQ ID NO: 2642605 - DNA, 25 bp, Homo sapien
gggatgccatagtaaccgagagaga

SEQ ID NO: 2642606 - DNA, 25 bp, Homo sapien
tcctgtttgtatgttaggtacctgg

SEQ ID NO: 2642607 - DNA, 25 bp, Homo sapien
tgttaggtacctggaacataagccc

SEQ ID NO: 2642608 - DNA, 25 bp, Homo sapien
gcacgacttcctgtttgtatgttag

SEQ ID NO: 2642609 - DNA, 25 bp, Homo sapien
ggtacctggaacataagcccacatt

SEQ ID NO: 2642610 - DNA, 25 bp, Homo sapien
tccccaggaatggttgcctacttga

SEQ ID NO: 2642611 - DNA, 25 bp, Homo sapien
gtccatcaagtgtatggctcctaga

SEQ ID NO: 2642612 - DNA, 25 bp, Homo sapien
gaagggaacactggctagcctggct

SEQ ID NO: 2642613 - DNA, 25 bp, Homo sapien
gatactcttttaggagtgagcagct

SEQ ID NO: 2642614 - DNA, 25 bp, Homo sapien
catttgcctgggttggtaaccaagg

SEQ ID NO: 2642615 - DNA, 25 bp, Homo sapien
acatttgcctgggttggtaaccaag

SEQ ID NO: 2642616 - DNA, 25 bp, Homo sapien
tacattgtagtcatcagagaccagc

SEQ ID NO: 2642617 - DNA, 25 bp, Homo sapien
tgcagtcataaacaacagctgcatc

SEQ ID NO: 2642618 - DNA, 25 bp, Homo sapien
caacaatgcagtcataaacaacagc

SEQ ID NO: 2642619 - DNA, 25 bp, Homo sapien
aacattaaccgttttatcatgcaaa

SEQ ID NO: 2642620 - DNA, 25 bp, Homo sapien
catggagctaatggccctggatctg

SEQ ID NO: 2642621 - DNA, 25 bp, Homo sapien
tagaagcagcaatgattttgctgaa

SEQ ID NO: 2642622 - DNA, 25 bp, Homo sapien
ttttgctgaacaccatggagctaat

SEQ ID NO: 2642623 - DNA, 25 bp, Homo sapien
aacaccatggagctaatggccctgg

SEQ ID NO: 2642624 - DNA, 25 bp, Homo sapien
ctcctcatctgaactgaatctcttc

SEQ ID NO: 2642625 - DNA, 25 bp, Homo sapien
cctcatctgaactgaatctcttctt

SEQ ID NO: 2642626 - DNA, 25 bp, Homo sapien
gccagacacttgggtcatacaacca

SEQ ID NO: 2642627 - DNA, 25 bp, Homo sapien
cagctggtctagaagaaaggctgcc

SEQ ID NO: 2642628 - DNA, 25 bp, Homo sapien
tacaaccaatctcaaaatgcatatt

SEQ ID NO: 2642629 - DNA, 25 bp, Homo sapien
tcagtcattgacagctggtctagaa

SEQ ID NO: 2642630 - DNA, 25 bp, Homo sapien
tggaagcctgctaataactttgcac

SEQ ID NO: 2642631 - DNA, 25 bp, Homo sapien
ctgctaataactttgcactgcattg

SEQ ID NO: 2642632 - DNA, 25 bp, Homo sapien
tactggaagcctgctaataactttg

SEQ ID NO: 2642633 - DNA, 25 bp, Homo sapien
gaagcctgctaataactttgcactg

SEQ ID NO: 2642634 - DNA, 25 bp, Homo sapien
tacgcactaggatcttctggcatgg

SEQ ID NO: 2642635 - DNA, 25 bp, Homo sapien
gttcctgcaaggaccctagaatgaa

SEQ ID NO: 2642636 - DNA, 25 bp, Homo sapien
gacccttggactgaccctttggata

SEQ ID NO: 2642637 - DNA, 25 bp, Homo sapien
tcttcgacgagcaattaataggaac

SEQ ID NO: 2642638 - DNA, 25 bp, Homo sapien
gcaaggttagtagctttctggaaat

SEQ ID NO: 2642639 - DNA, 25 bp, Homo sapien
gaagggcagcacattagttctaaga

SEQ ID NO: 2642640 - DNA, 25 bp, Homo sapien
aattcagagtctacagggtccaaag

SEQ ID NO: 2642641 - DNA, 25 bp, Homo sapien
cctttgctagtatactggaagggca

SEQ ID NO: 2642642 - DNA, 25 bp, Homo sapien
tccagctatgagtttacttaaagag

SEQ ID NO: 2642643 - DNA, 25 bp, Homo sapien
tcaaaacagggtctgattcaaggtc

SEQ ID NO: 2642644 - DNA, 25 bp, Homo sapien
ggccactcagctagttaagtgtcaa

SEQ ID NO: 2642645 - DNA, 25 bp, Homo sapien
caaggtctgtttgacatatcactgc

SEQ ID NO: 2642646 - DNA, 25 bp, Homo sapien
tacatcagctctatacagtgttgcc

SEQ ID NO: 2642647 - DNA, 25 bp, Homo sapien
acacatatggcaaatagaaagcctc

SEQ ID NO: 2642648 - DNA, 25 bp, Homo sapien
ctgtcaacacatatggcaaatagaa

SEQ ID NO: 2642649 - DNA, 25 bp, Homo sapien
caacacatatggcaaatagaaagcc

SEQ ID NO: 2642650 - DNA, 25 bp, Homo sapien
atatggcaaatagaaagcctcaacc

SEQ ID NO: 2642651 - DNA, 25 bp, Homo sapien
cagtcgttgaattgcgctggcccta

SEQ ID NO: 2642652 - DNA, 25 bp, Homo sapien
cctaataattcagcctggcagggtt

SEQ ID NO: 2642653 - DNA, 25 bp, Homo sapien
aaagggcccgcgaaatggcctcaag

SEQ ID NO: 2642654 - DNA, 25 bp, Homo sapien
gaagaaacatgggtacgctccgatg

SEQ ID NO: 2642655 - DNA, 25 bp, Homo sapien
agccgggcggcagggttattgtctc

SEQ ID NO: 2642656 - DNA, 25 bp, Homo sapien
ggcagggttattgtctcgatagcgc

SEQ ID NO: 2642657 - DNA, 25 bp, Homo sapien
gcggcagggttattgtctcgatagc

SEQ ID NO: 2642658 - DNA, 25 bp, Homo sapien
ccgggcggcagggttattgtctcga

SEQ ID NO: 2642659 - DNA, 25 bp, Homo sapien
caaaacttttcactcgtgacaccgc

SEQ ID NO: 2642660 - DNA, 25 bp, Homo sapien
gtttcccagccccaacgaggatctc

SEQ ID NO: 2642661 - DNA, 25 bp, Homo sapien
gtctcgagttttgcaggagtttccc

SEQ ID NO: 2642662 - DNA, 25 bp, Homo sapien
tgacaccgcccggaattgcagtgcg

SEQ ID NO: 2642663 - DNA, 25 bp, Homo sapien
agcggatgtggactggcctcccaca

SEQ ID NO: 2642664 - DNA, 25 bp, Homo sapien
caaggcttcgcttgacatgatttcc

SEQ ID NO: 2642665 - DNA, 25 bp, Homo sapien
tcatcagtcactttggatccagctg

SEQ ID NO: 2642666 - DNA, 25 bp, Homo sapien
tatctctctcgggtgagagcggatg

SEQ ID NO: 2642667 - DNA, 25 bp, Homo sapien
agatcatgaagaattacacactact

SEQ ID NO: 2642668 - DNA, 25 bp, Homo sapien
gagatcatgaagaattacacactac

SEQ ID NO: 2642669 - DNA, 25 bp, Homo sapien
tgagatcatgaagaattacacacta

SEQ ID NO: 2642670 - DNA, 25 bp, Homo sapien
ttgagatcatgaagaattacacact

SEQ ID NO: 2642671 - DNA, 25 bp, Homo sapien
tccagcttatttaagatttaatgca

SEQ ID NO: 2642672 - DNA, 25 bp, Homo sapien
ccagcttatttaagatttaatgcaa

SEQ ID NO: 2642673 - DNA, 25 bp, Homo sapien
acttgcgacagttccaagagaaaga

SEQ ID NO: 2642674 - DNA, 25 bp, Homo sapien
gacatgttgtccaaaacttgcgaca

SEQ ID NO: 2642675 - DNA, 25 bp, Homo sapien
acttgcaaagtaaatccacgatgac

SEQ ID NO: 2642676 - DNA, 25 bp, Homo sapien
taaggcacttaacagcatacatgtg

SEQ ID NO: 2642677 - DNA, 25 bp, Homo sapien
tataacaaatacacaagccaggagc

SEQ ID NO: 2642678 - DNA, 25 bp, Homo sapien
aatagccactgaacttgtgcctggg

SEQ ID NO: 2642679 - DNA, 25 bp, Homo sapien
gggcgccaacccatggtctcattat

SEQ ID NO: 2642680 - DNA, 25 bp, Homo sapien
tagacgtacggtatgtgacactcca

SEQ ID NO: 2642681 - DNA, 25 bp, Homo sapien
gatctcaatcttccgaccacaggtg

SEQ ID NO: 2642682 - DNA, 25 bp, Homo sapien
cggcctacctttttatatggaggag

SEQ ID NO: 2642683 - DNA, 25 bp, Homo sapien
ggctgatctcaatcttccgaccaca

SEQ ID NO: 2642684 - DNA, 25 bp, Homo sapien
tatggaggagcacactcaaagataa

SEQ ID NO: 2642685 - DNA, 25 bp, Homo sapien
cacttatatgcccttaaacgcggta

SEQ ID NO: 2642686 - DNA, 25 bp, Homo sapien
tatcctcccgaaattgacacattag

SEQ ID NO: 2642687 - DNA, 25 bp, Homo sapien
catatatcacagtagcataaggtca

SEQ ID NO: 2642688 - DNA, 25 bp, Homo sapien
caaagtagttgcttcgttcatctac

SEQ ID NO: 2642689 - DNA, 25 bp, Homo sapien
gggtgtggggtgaccatggcttgct

SEQ ID NO: 2642690 - DNA, 25 bp, Homo sapien
attgggtgtggggtgaccatggctt

SEQ ID NO: 2642691 - DNA, 25 bp, Homo sapien
tggggtgaccatggcttgctggcat

SEQ ID NO: 2642692 - DNA, 25 bp, Homo sapien
ctgtttacctgttttattgggtgtg

SEQ ID NO: 2642693 - DNA, 25 bp, Homo sapien
gcaataaaactccatggcccaaggg

SEQ ID NO: 2642694 - DNA, 25 bp, Homo sapien
gaaagatagcaagtctgtccctgca

SEQ ID NO: 2642695 - DNA, 25 bp, Homo sapien
cataatctatggagctgccgccttc

SEQ ID NO: 2642696 - DNA, 25 bp, Homo sapien
ggtaacactgccctcctagatggag

SEQ ID NO: 2642697 - DNA, 25 bp, Homo sapien
tttcctccatgaattcattatgcat

SEQ ID NO: 2642698 - DNA, 25 bp, Homo sapien
tgtctatgccagagtacttcccaat

SEQ ID NO: 2642699 - DNA, 25 bp, Homo sapien
cataagatacgatcctgtagcagga

SEQ ID NO: 2642700 - DNA, 25 bp, Homo sapien
cacaggtattccaccagttcacttc

SEQ ID NO: 2642701 - DNA, 25 bp, Homo sapien
tgtagcaggattaatttccccacag

SEQ ID NO: 2642702 - DNA, 25 bp, Homo sapien
ccaataattgggtcatctataagcc

SEQ ID NO: 2642703 - DNA, 25 bp, Homo sapien
tccagttccagaatatgcatttggt

SEQ ID NO: 2642704 - DNA, 25 bp, Homo sapien
tatcctgccaattgccttaatgttc

SEQ ID NO: 2642705 - DNA, 25 bp, Homo sapien
ggcatgtccattactcacctgaaaa

SEQ ID NO: 2642706 - DNA, 25 bp, Homo sapien
gacgatctggtccactatttcccag

SEQ ID NO: 2642707 - DNA, 25 bp, Homo sapien
ttgccggccaatatgttaggaccag

SEQ ID NO: 2642708 - DNA, 25 bp, Homo sapien
ttgctgcttgatacctcctcttggg

SEQ ID NO: 2642709 - DNA, 25 bp, Homo sapien
ttattccttgccggccaatatgtta

SEQ ID NO: 2642710 - DNA, 25 bp, Homo sapien
tcaccttcatggattagcatcctgc

SEQ ID NO: 2642711 - DNA, 25 bp, Homo sapien
ggtcaccttcatggattagcatcct

SEQ ID NO: 2642712 - DNA, 25 bp, Homo sapien
gtcaccttcatggattagcatcctg

SEQ ID NO: 2642713 - DNA, 25 bp, Homo sapien
accttcatggattagcatcctgctg

SEQ ID NO: 2642714 - DNA, 25 bp, Homo sapien
caagcaaataaactcgaatggccaa

SEQ ID NO: 2642715 - DNA, 25 bp, Homo sapien
aacatgactgactgcggcctcaaac

SEQ ID NO: 2642716 - DNA, 25 bp, Homo sapien
gggcccagctcaattaccacttttg

SEQ ID NO: 2642717 - DNA, 25 bp, Homo sapien
caagactctagactattcagggcag

SEQ ID NO: 2642718 - DNA, 25 bp, Homo sapien
gatgtttcttaattgagccaacatt

SEQ ID NO: 2642719 - DNA, 25 bp, Homo sapien
ggttgaatttatctccctgatgttt

SEQ ID NO: 2642720 - DNA, 25 bp, Homo sapien
ctgatgtttcttaattgagccaaca

SEQ ID NO: 2642721 - DNA, 25 bp, Homo sapien
ctgggttgaatttatctccctgatg

SEQ ID NO: 2642722 - DNA, 25 bp, Homo sapien
gcctcccaagggtactaccatgcca

SEQ ID NO: 2642723 - DNA, 25 bp, Homo sapien
aagggtactaccatgccaccagcca

SEQ ID NO: 2642724 - DNA, 25 bp, Homo sapien
agcctcccaagggtactaccatgcc

SEQ ID NO: 2642725 - DNA, 25 bp, Homo sapien
tcccaagggtactaccatgccacca

SEQ ID NO: 2642726 - DNA, 25 bp, Homo sapien
cacactggtgcaaaaacttgcttaa

SEQ ID NO: 2642727 - DNA, 25 bp, Homo sapien
gccatcagggatcaaccaccctata

SEQ ID NO: 2642728 - DNA, 25 bp, Homo sapien
tcagggccaactttattaagtacac

SEQ ID NO: 2642729 - DNA, 25 bp, Homo sapien
gaattagtgaacattctcagggcca

SEQ ID NO: 2642730 - DNA, 25 bp, Homo sapien
tcttcccctcgtagacagcgacatg

SEQ ID NO: 2642731 - DNA, 25 bp, Homo sapien
gacatggtaccaaccgcacaaacaa

SEQ ID NO: 2642732 - DNA, 25 bp, Homo sapien
gaacttgttctaagctgcaatgaga

SEQ ID NO: 2642733 - DNA, 25 bp, Homo sapien
tctttcggaacttgttctaagctgc

SEQ ID NO: 2642734 - DNA, 25 bp, Homo sapien
taataaggtttgcaatggatgctgg

SEQ ID NO: 2642735 - DNA, 25 bp, Homo sapien
gtaacgttgttaaatcattgtctgg

SEQ ID NO: 2642736 - DNA, 25 bp, Homo sapien
ccagttccctgagattaataaggtt

SEQ ID NO: 2642737 - DNA, 25 bp, Homo sapien
tctggcaaactcagtttgtgtaaag

SEQ ID NO: 2642738 - DNA, 25 bp, Homo sapien
tgaagtagtcggaaccacaggcaca

SEQ ID NO: 2642739 - DNA, 25 bp, Homo sapien
ccacaacagcctgaagtagtcggaa

SEQ ID NO: 2642740 - DNA, 25 bp, Homo sapien
gcaggacatcactatgcatgaatcc

SEQ ID NO: 2642741 - DNA, 25 bp, Homo sapien
ccatgtgcagctaagtttatgattt

SEQ ID NO: 2642742 - DNA, 25 bp, Homo sapien
actggcctccacaattgtcaaaact

SEQ ID NO: 2642743 - DNA, 25 bp, Homo sapien
atagggtttacactggcctccacaa

SEQ ID NO: 2642744 - DNA, 25 bp, Homo sapien
gaaatagggtttacactggcctcca

SEQ ID NO: 2642745 - DNA, 25 bp, Homo sapien
tggaaatagggtttacactggcctc

SEQ ID NO: 2642746 - DNA, 25 bp, Homo sapien
gggccatgtaacaacctacgtgtgt

SEQ ID NO: 2642747 - DNA, 25 bp, Homo sapien
taaagctgaatgacgttagggccat

SEQ ID NO: 2642748 - DNA, 25 bp, Homo sapien
aaagaatttctaaaccttggcagag

SEQ ID NO: 2642749 - DNA, 25 bp, Homo sapien
aatcagcaggcactcttgaaatctg

SEQ ID NO: 2642750 - DNA, 25 bp, Homo sapien
ttttattaaaatctaagactctcac

SEQ ID NO: 2642751 - DNA, 25 bp, Homo sapien
cagtcgcttctgttatgagtggcta

SEQ ID NO: 2642752 - DNA, 25 bp, Homo sapien
atgagagccccttcaaagatttgcc

SEQ ID NO: 2642753 - DNA, 25 bp, Homo sapien
caactatgaatgagccacaatacat

SEQ ID NO: 2642754 - DNA, 25 bp, Homo sapien
gcatcattcagatacaactgggtta

SEQ ID NO: 2642755 - DNA, 25 bp, Homo sapien
ctgggttaggtttaacagctgagaa

SEQ ID NO: 2642756 - DNA, 25 bp, Homo sapien
aaagcatcattcagatacaactggg

SEQ ID NO: 2642757 - DNA, 25 bp, Homo sapien
cattcagatacaactgggttaggtt

SEQ ID NO: 2642758 - DNA, 25 bp, Homo sapien
taaaagtcacaatgcttgggaataa

SEQ ID NO: 2642759 - DNA, 25 bp, Homo sapien
gagcctatgaaactgtaatgagtag

SEQ ID NO: 2642760 - DNA, 25 bp, Homo sapien
ccaaagcagcttatagttttgtaaa

SEQ ID NO: 2642761 - DNA, 25 bp, Homo sapien
gagtagtactaccaaagcagcttat

SEQ ID NO: 2642762 - DNA, 25 bp, Homo sapien
gaaatcctctggcacttcattgatg

SEQ ID NO: 2642763 - DNA, 25 bp, Homo sapien
ggagaaatcctctggcacttcattg

SEQ ID NO: 2642764 - DNA, 25 bp, Homo sapien
gagaaatcctctggcacttcattga

SEQ ID NO: 2642765 - DNA, 25 bp, Homo sapien
ggaggagaaatcctctggcacttca

SEQ ID NO: 2642766 - DNA, 25 bp, Homo sapien
ctctaagctctaatatttggagttt

SEQ ID NO: 2642767 - DNA, 25 bp, Homo sapien
tctctaagctctaatatttggagtt

SEQ ID NO: 2642768 - DNA, 25 bp, Homo sapien
caaaagaagacgtgcaaatgacaaa

SEQ ID NO: 2642769 - DNA, 25 bp, Homo sapien
aagtatccatctgacaggaattaat

SEQ ID NO: 2642770 - DNA, 25 bp, Homo sapien
aaaagaagacgtgcaaatgacaaac

SEQ ID NO: 2642771 - DNA, 25 bp, Homo sapien
tatagttaatactgacaactgtggc

SEQ ID NO: 2642772 - DNA, 25 bp, Homo sapien
tgttcaaataactataccaggtgga

SEQ ID NO: 2642773 - DNA, 25 bp, Homo sapien
tcaggaggatttacatatgccaaca

SEQ ID NO: 2642774 - DNA, 25 bp, Homo sapien
tgtgttcttagtactgtgccctcca

SEQ ID NO: 2642775 - DNA, 25 bp, Homo sapien
attcgttacttcccaaatccagtct

SEQ ID NO: 2642776 - DNA, 25 bp, Homo sapien
tgaattcgttacttcccaaatccag

SEQ ID NO: 2642777 - DNA, 25 bp, Homo sapien
gtgaattcgttacttcccaaatcca

SEQ ID NO: 2642778 - DNA, 25 bp, Homo sapien
aaaaataggactcactgcttagaag

SEQ ID NO: 2642779 - DNA, 25 bp, Homo sapien
catgccatagcagtagattacaaaa

SEQ ID NO: 2642780 - DNA, 25 bp, Homo sapien
gagaaatcaaagagacatgccatag

SEQ ID NO: 2642781 - DNA, 25 bp, Homo sapien
ttaagctttggattacacaacaggg

SEQ ID NO: 2642782 - DNA, 25 bp, Homo sapien
tctattagcatccatccaaaactct

SEQ ID NO: 2642783 - DNA, 25 bp, Homo sapien
tccaaaactctttcaatccacttag

SEQ ID NO: 2642784 - DNA, 25 bp, Homo sapien
taaaagtcagtctattagcatccat

SEQ ID NO: 2642785 - DNA, 25 bp, Homo sapien
tccacttagttgctcaagtacttca

SEQ ID NO: 2642786 - DNA, 25 bp, Homo sapien
tgataataggaggtcttgaaggttt

SEQ ID NO: 2642787 - DNA, 25 bp, Homo sapien
gaaacatccaaatatgtgagctgtt

SEQ ID NO: 2642788 - DNA, 25 bp, Homo sapien
tgcttgataataggaggtcttgaag

SEQ ID NO: 2642789 - DNA, 25 bp, Homo sapien
attgcttgataataggaggtcttga

SEQ ID NO: 2642790 - DNA, 25 bp, Homo sapien
taaaagagataccactcccaatccc

SEQ ID NO: 2642791 - DNA, 25 bp, Homo sapien
ccaacagtcagtgtgagacatacta

SEQ ID NO: 2642792 - DNA, 25 bp, Homo sapien
gtgtgagacatactacatctgacaa

SEQ ID NO: 2642793 - DNA, 25 bp, Homo sapien
aaatagaagcaagtccaccaacagt

SEQ ID NO: 2642794 - DNA, 25 bp, Homo sapien
tgagggaagaaacaacatacaattt

SEQ ID NO: 2642795 - DNA, 25 bp, Homo sapien
ggaagaaacaacatacaatttttca

SEQ ID NO: 2642796 - DNA, 25 bp, Homo sapien
ctaatgagggaagaaacaacataca

SEQ ID NO: 2642797 - DNA, 25 bp, Homo sapien
gaagaaacaacatacaatttttcag

SEQ ID NO: 2642798 - DNA, 25 bp, Homo sapien
ttcatctattttaagcgttgttata

SEQ ID NO: 2642799 - DNA, 25 bp, Homo sapien
tattttaagcgttgttatattcttc

SEQ ID NO: 2642800 - DNA, 25 bp, Homo sapien
cctcctatagagtctggcagataca

SEQ ID NO: 2642801 - DNA, 25 bp, Homo sapien
gatacattaactggttttcatctat

SEQ ID NO: 2642802 - DNA, 25 bp, Homo sapien
tagatgaaggcaaagcttcaacttc

SEQ ID NO: 2642803 - DNA, 25 bp, Homo sapien
gggcaactgctgtaagtaattatga

SEQ ID NO: 2642804 - DNA, 25 bp, Homo sapien
taagttagtaagctgcccaatagat

SEQ ID NO: 2642805 - DNA, 25 bp, Homo sapien
agcagcaaaagttcttaagttagta

SEQ ID NO: 2642806 - DNA, 25 bp, Homo sapien
tttattggaatggagaaacagcaca

SEQ ID NO: 2642807 - DNA, 25 bp, Homo sapien
tgcatatcacccatttcctctggaa

SEQ ID NO: 2642808 - DNA, 25 bp, Homo sapien
gtgtctcaagtttattggaatggag

SEQ ID NO: 2642809 - DNA, 25 bp, Homo sapien
atttttgcatatcacccatttcctc

SEQ ID NO: 2642810 - DNA, 25 bp, Homo sapien
gccacatagctgtcaattgctgtag

SEQ ID NO: 2642811 - DNA, 25 bp, Homo sapien
ctgagagccacatagctgtcaattg

SEQ ID NO: 2642812 - DNA, 25 bp, Homo sapien
gagccacatagctgtcaattgctgt

SEQ ID NO: 2642813 - DNA, 25 bp, Homo sapien
catagctgtcaattgctgtagcttt

SEQ ID NO: 2642814 - DNA, 25 bp, Homo sapien
tattgttcccaccttaaattgcctg

SEQ ID NO: 2642815 - DNA, 25 bp, Homo sapien
agagataattcaggcactgcaggca

SEQ ID NO: 2642816 - DNA, 25 bp, Homo sapien
ccagccccgttcctcttttgagaga

SEQ ID NO: 2642817 - DNA, 25 bp, Homo sapien
gagaaatttgcctttacatcccttg

SEQ ID NO: 2642818 - DNA, 25 bp, Homo sapien
tttgaagaggtatcaggggtttgga

SEQ ID NO: 2642819 - DNA, 25 bp, Homo sapien
gtagttggtaagcaccattttctgg

SEQ ID NO: 2642820 - DNA, 25 bp, Homo sapien
tgtagttggtaagcaccattttctg

SEQ ID NO: 2642821 - DNA, 25 bp, Homo sapien
tagttggtaagcaccattttctggg

SEQ ID NO: 2642822 - DNA, 25 bp, Homo sapien
gagcttcattcactggaggttctat

SEQ ID NO: 2642823 - DNA, 25 bp, Homo sapien
gtgcttagcattgtgtctgactcaa

SEQ ID NO: 2642824 - DNA, 25 bp, Homo sapien
taaagatgagaagttacggatacgt

SEQ ID NO: 2642825 - DNA, 25 bp, Homo sapien
tatgattcggacagtttagaggcgg

SEQ ID NO: 2642826 - DNA, 25 bp, Homo sapien
tttttgcctttacttagctctagca

SEQ ID NO: 2642827 - DNA, 25 bp, Homo sapien
gcaagaatttttgcctttacttagc

SEQ ID NO: 2642828 - DNA, 25 bp, Homo sapien
tgcctttacttagctctagcacgat

SEQ ID NO: 2642829 - DNA, 25 bp, Homo sapien
cctttacttagctctagcacgatac

SEQ ID NO: 2642830 - DNA, 25 bp, Homo sapien
tcaaatgcaacttgagcccgctgtt

SEQ ID NO: 2642831 - DNA, 25 bp, Homo sapien
acaatggtttgaacagttttgacca

SEQ ID NO: 2642832 - DNA, 25 bp, Homo sapien
tattcttaagctcatctgggtatgg

SEQ ID NO: 2642833 - DNA, 25 bp, Homo sapien
gaacagttttgaccatattcttaag

SEQ ID NO: 2642834 - DNA, 25 bp, Homo sapien
tgttgatcttcatgtggtttcaaat

SEQ ID NO: 2642835 - DNA, 25 bp, Homo sapien
tctgtacagagtttcctatcatata

SEQ ID NO: 2642836 - DNA, 25 bp, Homo sapien
tcaagttctcagaggctttcatatt

SEQ ID NO: 2642837 - DNA, 25 bp, Homo sapien
tatttgcagtcactggtaaactccc

SEQ ID NO: 2642838 - DNA, 25 bp, Homo sapien
ccaggactaatctcagcttcaggtt

SEQ ID NO: 2642839 - DNA, 25 bp, Homo sapien
taagtgctacgacttttggctggtt

SEQ ID NO: 2642840 - DNA, 25 bp, Homo sapien
gaggtttcaattaatggtggtcgca

SEQ ID NO: 2642841 - DNA, 25 bp, Homo sapien
ggtggtcgcatctccgccattttca

SEQ ID NO: 2642842 - DNA, 25 bp, Homo sapien
tggctggttaatagaggtttcaatt

SEQ ID NO: 2642843 - DNA, 25 bp, Homo sapien
aaatttattgaggcaatttctattc

SEQ ID NO: 2642844 - DNA, 25 bp, Homo sapien
ctattcttagcactttcctttaaca

SEQ ID NO: 2642845 - DNA, 25 bp, Homo sapien
ttagcactttcctttaacatctaac

SEQ ID NO: 2642846 - DNA, 25 bp, Homo sapien
ttattgaggcaatttctattcttag

SEQ ID NO: 2642847 - DNA, 25 bp, Homo sapien
tgtgtgtaacttcatctgataaaga

SEQ ID NO: 2642848 - DNA, 25 bp, Homo sapien
gactactatcagtattaagagaaac

SEQ ID NO: 2642849 - DNA, 25 bp, Homo sapien
gcagagtgaggtgtcttgactacta

SEQ ID NO: 2642850 - DNA, 25 bp, Homo sapien
aaactgaatcagacatccgagatgg

SEQ ID NO: 2642851 - DNA, 25 bp, Homo sapien
tcaggaatctgagcccgccttgtag

SEQ ID NO: 2642852 - DNA, 25 bp, Homo sapien
tgtggaggacacactactttgtcgc

SEQ ID NO: 2642853 - DNA, 25 bp, Homo sapien
ttcattaatagagggtcgagcactc

SEQ ID NO: 2642854 - DNA, 25 bp, Homo sapien
taacggttgtacttggctgctgagg

SEQ ID NO: 2642855 - DNA, 25 bp, Homo sapien
cctggctgagtttaaatttggaact

SEQ ID NO: 2642856 - DNA, 25 bp, Homo sapien
cccaattgtcctggctgagtttaaa

SEQ ID NO: 2642857 - DNA, 25 bp, Homo sapien
attatcatcccaattgtcctggctg

SEQ ID NO: 2642858 - DNA, 25 bp, Homo sapien
atcatcccaattgtcctggctgagt

SEQ ID NO: 2642859 - DNA, 25 bp, Homo sapien
aaaagagcctgcattgccaagacaa

SEQ ID NO: 2642860 - DNA, 25 bp, Homo sapien
aacaaagctggaggcatcacgctac

SEQ ID NO: 2642861 - DNA, 25 bp, Homo sapien
gccaagacaatcctaagccaaaaaa

SEQ ID NO: 2642862 - DNA, 25 bp, Homo sapien
ccccatcaaaaagtaggcaaagcat

SEQ ID NO: 2642863 - DNA, 25 bp, Homo sapien
gacaaagggcatatcaccaccaatc

SEQ ID NO: 2642864 - DNA, 25 bp, Homo sapien
aatgacaaagggcatatcaccacca

SEQ ID NO: 2642865 - DNA, 25 bp, Homo sapien
accgctcaactacatcgaaactgca

SEQ ID NO: 2642866 - DNA, 25 bp, Homo sapien
tcaaacagacgcaataaaaaatgac

SEQ ID NO: 2642867 - DNA, 25 bp, Homo sapien
ccacagcacgagaactatgtgacga

SEQ ID NO: 2642868 - DNA, 25 bp, Homo sapien
ttatccaggagaactaaccaaatct

SEQ ID NO: 2642869 - DNA, 25 bp, Homo sapien
agaactaaccaaatctagcaaggca

SEQ ID NO: 2642870 - DNA, 25 bp, Homo sapien
accacagcacgagaactatgtgacg

SEQ ID NO: 2642871 - DNA, 25 bp, Homo sapien
tcaaccaggttgaactccttgtctc

SEQ ID NO: 2642872 - DNA, 25 bp, Homo sapien
tatagcaaggtaactgtacagtgat

SEQ ID NO: 2642873 - DNA, 25 bp, Homo sapien
gatagtagtttctggcactttgtaa

SEQ ID NO: 2642874 - DNA, 25 bp, Homo sapien
ttacaagctaaacatacagagacta

SEQ ID NO: 2642875 - DNA, 25 bp, Homo sapien
tagaccccatatagtaaagtttgaa

SEQ ID NO: 2642876 - DNA, 25 bp, Homo sapien
ttatcccacataattactgcctagg

SEQ ID NO: 2642877 - DNA, 25 bp, Homo sapien
tatcactgaattggaatgggctgct

SEQ ID NO: 2642878 - DNA, 25 bp, Homo sapien
taaacctagtatcgtattgtgttcc

SEQ ID NO: 2642879 - DNA, 25 bp, Homo sapien
tcaatctgcttctaacgcccataca

SEQ ID NO: 2642880 - DNA, 25 bp, Homo sapien
cctcatgaggtagggcaggcactgt

SEQ ID NO: 2642881 - DNA, 25 bp, Homo sapien
ttattactactaactctcagctgag

SEQ ID NO: 2642882 - DNA, 25 bp, Homo sapien
gtttggagtctaaatcctgctgcta

SEQ ID NO: 2642883 - DNA, 25 bp, Homo sapien
taatgccaagaaatacaggattcca

SEQ ID NO: 2642884 - DNA, 25 bp, Homo sapien
aatctgaagttgacgtctaatgcca

SEQ ID NO: 2642885 - DNA, 25 bp, Homo sapien
tgctgagggcttaatggtcaaactg

SEQ ID NO: 2642886 - DNA, 25 bp, Homo sapien
tttaacgaggcaatctggaggtttc

SEQ ID NO: 2642887 - DNA, 25 bp, Homo sapien
ccagtgttatgaactgccgttcttc

SEQ ID NO: 2642888 - DNA, 25 bp, Homo sapien
aactgccgttcttccatgtgagtgc

SEQ ID NO: 2642889 - DNA, 25 bp, Homo sapien
cttccatgtgagtgcctttagtcat

SEQ ID NO: 2642890 - DNA, 25 bp, Homo sapien
tatgaactgccgttcttccatgtga

SEQ ID NO: 2642891 - DNA, 25 bp, Homo sapien
aattgctaatcccagtactgcctga

SEQ ID NO: 2642892 - DNA, 25 bp, Homo sapien
tatattttaggagttagtggtggcc

SEQ ID NO: 2642893 - DNA, 25 bp, Homo sapien
cacaaactgaattcatatgaatacc

SEQ ID NO: 2642894 - DNA, 25 bp, Homo sapien
caaataaactggtattaaagatcac

SEQ ID NO: 2642895 - DNA, 25 bp, Homo sapien
caggactacaggtcctcattaccac

SEQ ID NO: 2642896 - DNA, 25 bp, Homo sapien
ggactacaggtcctcattaccacac

SEQ ID NO: 2642897 - DNA, 25 bp, Homo sapien
aggactacaggtcctcattaccaca

SEQ ID NO: 2642898 - DNA, 25 bp, Homo sapien
acaggactacaggtcctcattacca

SEQ ID NO: 2642899 - DNA, 25 bp, Homo sapien
gaattaaaggaccttgacagcatgc

SEQ ID NO: 2642900 - DNA, 25 bp, Homo sapien
gatccctagagctgccacagtgaaa

SEQ ID NO: 2642901 - DNA, 25 bp, Homo sapien
tcttctgtctgcaacactcaaggca

SEQ ID NO: 2642902 - DNA, 25 bp, Homo sapien
actgcttacagtagtaaaattggaa

SEQ ID NO: 2642903 - DNA, 25 bp, Homo sapien
gattgctcctattctgtaacaccag

SEQ ID NO: 2642904 - DNA, 25 bp, Homo sapien
catacgtctaggtcaggtacagcca

SEQ ID NO: 2642905 - DNA, 25 bp, Homo sapien
ggaggtttcaacgtaactgctgcca

SEQ ID NO: 2642906 - DNA, 25 bp, Homo sapien
cagggtagtgctttctctcagtcaa

SEQ ID NO: 2642907 - DNA, 25 bp, Homo sapien
caagctgtctggaggaacatctttg

SEQ ID NO: 2642908 - DNA, 25 bp, Homo sapien
tataccatcttgacaaggatctcct

SEQ ID NO: 2642909 - DNA, 25 bp, Homo sapien
gaaatgaatataccatcttgacaag

SEQ ID NO: 2642910 - DNA, 25 bp, Homo sapien
gtggctgatgagtagttctgctgtc

SEQ ID NO: 2642911 - DNA, 25 bp, Homo sapien
ttctctacgtttataccatttattc

SEQ ID NO: 2642912 - DNA, 25 bp, Homo sapien
atagcccatgattttctctacgttt

SEQ ID NO: 2642913 - DNA, 25 bp, Homo sapien
tctacgtttataccatttattccta

SEQ ID NO: 2642914 - DNA, 25 bp, Homo sapien
gatagcccatgattttctctacgtt

SEQ ID NO: 2642915 - DNA, 25 bp, Homo sapien
tacacaaaaggtacatttgctgacg

SEQ ID NO: 2642916 - DNA, 25 bp, Homo sapien
aaatttaagccagtctatgagatgc

SEQ ID NO: 2642917 - DNA, 25 bp, Homo sapien
cctgagtgcttgttgttacactcac

SEQ ID NO: 2642918 - DNA, 25 bp, Homo sapien
tggaagtacatcatatctacatttt

SEQ ID NO: 2642919 - DNA, 25 bp, Homo sapien
gatgtatttgactataatttgcctg

SEQ ID NO: 2642920 - DNA, 25 bp, Homo sapien
ctgaggggggtgatgtatttgacta

SEQ ID NO: 2642921 - DNA, 25 bp, Homo sapien
gtatatggaggctggtgggccactt

SEQ ID NO: 2642922 - DNA, 25 bp, Homo sapien
ctagagggatgccttgccacagatg

SEQ ID NO: 2642923 - DNA, 25 bp, Homo sapien
gttcatggccttgtctaggagaaca

SEQ ID NO: 2642924 - DNA, 25 bp, Homo sapien
taatcaattagttgttctctagagg

SEQ ID NO: 2642925 - DNA, 25 bp, Homo sapien
tctgactactgtagtatcaaccagt

SEQ ID NO: 2642926 - DNA, 25 bp, Homo sapien
gtgtcacagaacaatttcagcttaa

SEQ ID NO: 2642927 - DNA, 25 bp, Homo sapien
aaagtagtttgaagtctgtagtcaa

SEQ ID NO: 2642928 - DNA, 25 bp, Homo sapien
caagatataagaatgtgtagctcgc

SEQ ID NO: 2642929 - DNA, 25 bp, Homo sapien
gtatattattatcagtttccacttg

SEQ ID NO: 2642930 - DNA, 25 bp, Homo sapien
tgtatattattatcagtttccactt

SEQ ID NO: 2642931 - DNA, 25 bp, Homo sapien
cctgatatgctaaatccaagttctg

SEQ ID NO: 2642932 - DNA, 25 bp, Homo sapien
ttctggatccttttcaaccctcact

SEQ ID NO: 2642933 - DNA, 25 bp, Homo sapien
cccgacaccacctgatatgctaaat

SEQ ID NO: 2642934 - DNA, 25 bp, Homo sapien
tcaggtctgaatgggtttcctctac

SEQ ID NO: 2642935 - DNA, 25 bp, Homo sapien
taggtgtttcaagaatatacaaaga

SEQ ID NO: 2642936 - DNA, 25 bp, Homo sapien
tcctccacaccatgcaaatatttga

SEQ ID NO: 2642937 - DNA, 25 bp, Homo sapien
cagagtaccaaggagcaatttttcc

SEQ ID NO: 2642938 - DNA, 25 bp, Homo sapien
caggtgatgtctacctagatttaca

SEQ ID NO: 2642939 - DNA, 25 bp, Homo sapien
taattttatcacctggctgcagtaa

SEQ ID NO: 2642940 - DNA, 25 bp, Homo sapien
attttatcacctggctgcagtaatt

SEQ ID NO: 2642941 - DNA, 25 bp, Homo sapien
tccttcaggttgtacccttgttaca

SEQ ID NO: 2642942 - DNA, 25 bp, Homo sapien
caggttgtacccttgttacaaatat

SEQ ID NO: 2642943 - DNA, 25 bp, Homo sapien
aacaaaatcctatgatgtatcaaac

SEQ ID NO: 2642944 - DNA, 25 bp, Homo sapien
tccaagaagtggtactctaatcccc

SEQ ID NO: 2642945 - DNA, 25 bp, Homo sapien
ccatttctgaaaggacaatagccca

SEQ ID NO: 2642946 - DNA, 25 bp, Homo sapien
tctaagactgtaagtgtttaggtaa

SEQ ID NO: 2642947 - DNA, 25 bp, Homo sapien
ggaaacttctcgtacaatgatgagt

SEQ ID NO: 2642948 - DNA, 25 bp, Homo sapien
ttatgaggaaacttctcgtacaatg

SEQ ID NO: 2642949 - DNA, 25 bp, Homo sapien
cttctcgtacaatgatgagttcaac

SEQ ID NO: 2642950 - DNA, 25 bp, Homo sapien
tctcgtacaatgatgagttcaactg

SEQ ID NO: 2642951 - DNA, 25 bp, Homo sapien
atcttgctgtcttccccgctttttt

SEQ ID NO: 2642952 - DNA, 25 bp, Homo sapien
taatttcccctgtaagtatcttcca

SEQ ID NO: 2642953 - DNA, 25 bp, Homo sapien
atattaatttcccctgtaagtatct

SEQ ID NO: 2642954 - DNA, 25 bp, Homo sapien
ttcccctgtaagtatcttccaataa

SEQ ID NO: 2642955 - DNA, 25 bp, Homo sapien
cagtggttctttccctctaaccaca

SEQ ID NO: 2642956 - DNA, 25 bp, Homo sapien
attctgtacagtggttctttccctc

SEQ ID NO: 2642957 - DNA, 25 bp, Homo sapien
ctgtacagtggttctttccctctaa

SEQ ID NO: 2642958 - DNA, 25 bp, Homo sapien
tacagtggttctttccctctaacca

SEQ ID NO: 2642959 - DNA, 25 bp, Homo sapien
taatgttacctgtagaaacagccct

SEQ ID NO: 2642960 - DNA, 25 bp, Homo sapien
gatcctgccgagctcataaatgcaa

SEQ ID NO: 2642961 - DNA, 25 bp, Homo sapien
gctatgacaagaacagatcctgccg

SEQ ID NO: 2642962 - DNA, 25 bp, Homo sapien
ttagtctggccttggaaagtgaacc

SEQ ID NO: 2642963 - DNA, 25 bp, Homo sapien
tacttactctgactagcaagaatgg

SEQ ID NO: 2642964 - DNA, 25 bp, Homo sapien
gctctaatgaaaggttccagactag

SEQ ID NO: 2642965 - DNA, 25 bp, Homo sapien
tgaagatccattgttccgtgaggct

SEQ ID NO: 2642966 - DNA, 25 bp, Homo sapien
gaagttaaggtttgctgaagatcca

SEQ ID NO: 2642967 - DNA, 25 bp, Homo sapien
ggactgtacgttatagctgaccaca

SEQ ID NO: 2642968 - DNA, 25 bp, Homo sapien
gaatacccaaaggtctgagttggct

SEQ ID NO: 2642969 - DNA, 25 bp, Homo sapien
gaaaaactgcttcatgagactgtag

SEQ ID NO: 2642970 - DNA, 25 bp, Homo sapien
aaaccgtgggccgattgagaagcta

SEQ ID NO: 2642971 - DNA, 25 bp, Homo sapien
ccttggaggaacacaatttgattag

SEQ ID NO: 2642972 - DNA, 25 bp, Homo sapien
taaaatccatgctctctgctcatgc

SEQ ID NO: 2642973 - DNA, 25 bp, Homo sapien
aagaagatccttctaaagctatacc

SEQ ID NO: 2642974 - DNA, 25 bp, Homo sapien
tctaaagctataccttggaggaaca

SEQ ID NO: 2642975 - DNA, 25 bp, Homo sapien
taccatcaccgctaattgcacttat

SEQ ID NO: 2642976 - DNA, 25 bp, Homo sapien
tctgctccactacatggttttggtc

SEQ ID NO: 2642977 - DNA, 25 bp, Homo sapien
agttggattcttgtctcacttgcag

SEQ ID NO: 2642978 - DNA, 25 bp, Homo sapien
cacttgcagaaaccatctagtattt

SEQ ID NO: 2642979 - DNA, 25 bp, Homo sapien
ttgtctatggcagcagtgaagtgga

SEQ ID NO: 2642980 - DNA, 25 bp, Homo sapien
attggcagtatcacaggtgtccatc

SEQ ID NO: 2642981 - DNA, 25 bp, Homo sapien
tggagaaattggcagtatcacaggt

SEQ ID NO: 2642982 - DNA, 25 bp, Homo sapien
gaagtggagaaattggcagtatcac

SEQ ID NO: 2642983 - DNA, 25 bp, Homo sapien
tctctatatgccctcttttggatta

SEQ ID NO: 2642984 - DNA, 25 bp, Homo sapien
taccatcttactatttgttatccct

SEQ ID NO: 2642985 - DNA, 25 bp, Homo sapien
tgttatccctttgtccctattgtcg

SEQ ID NO: 2642986 - DNA, 25 bp, Homo sapien
gaaagtctatctgatgtcactgcct

SEQ ID NO: 2642987 - DNA, 25 bp, Homo sapien
gaagtctaggacaattctatcaccc

SEQ ID NO: 2642988 - DNA, 25 bp, Homo sapien
taggatgacaccaataacgtaacag

SEQ ID NO: 2642989 - DNA, 25 bp, Homo sapien
tgaccttttcacttggcttgagaca

SEQ ID NO: 2642990 - DNA, 25 bp, Homo sapien
aataaccctggccattgagttgaag

SEQ ID NO: 2642991 - DNA, 25 bp, Homo sapien
ggaattcagattgaaaatgcacaaa

SEQ ID NO: 2642992 - DNA, 25 bp, Homo sapien
aggaattcagattgaaaatgcacaa

SEQ ID NO: 2642993 - DNA, 25 bp, Homo sapien
aaggaattcagattgaaaatgcaca

SEQ ID NO: 2642994 - DNA, 25 bp, Homo sapien
gaattcagattgaaaatgcacaaat

SEQ ID NO: 2642995 - DNA, 25 bp, Homo sapien
aatctgacagtgccccatcacatct

SEQ ID NO: 2642996 - DNA, 25 bp, Homo sapien
cactaagactctgattaaatattaa

SEQ ID NO: 2642997 - DNA, 25 bp, Homo sapien
ctccatgattgtgatatttacttta

SEQ ID NO: 2642998 - DNA, 25 bp, Homo sapien
aatatgaacaatgcatctttccaaa

SEQ ID NO: 2642999 - DNA, 25 bp, Homo sapien
aaaacagcctaacttcagccatgta

SEQ ID NO: 2643000 - DNA, 25 bp, Homo sapien
gtggttaccattgcaattacataaa

SEQ ID NO: 2643001 - DNA, 25 bp, Homo sapien
tctacttttttacatctctaccctc

SEQ ID NO: 2643002 - DNA, 25 bp, Homo sapien
cccacttaacgttgttaatgataca

SEQ ID NO: 2643003 - DNA, 25 bp, Homo sapien
atcccataagttgcccattttattg

SEQ ID NO: 2643004 - DNA, 25 bp, Homo sapien
tcccatcccataagttgcccatttt

SEQ ID NO: 2643005 - DNA, 25 bp, Homo sapien
tggttattgtcataatgttgttgag

SEQ ID NO: 2643006 - DNA, 25 bp, Homo sapien
gcgcctggcctaattggttattgtc

SEQ ID NO: 2643007 - DNA, 25 bp, Homo sapien
tcctatcaactaggtactattacta

SEQ ID NO: 2643008 - DNA, 25 bp, Homo sapien
gaaacattcaagaacttgcctaagt

SEQ ID NO: 2643009 - DNA, 25 bp, Homo sapien
gaggcacagaaacattcaagaactt

SEQ ID NO: 2643010 - DNA, 25 bp, Homo sapien
gaatgattactatcatccagtatcc

SEQ ID NO: 2643011 - DNA, 25 bp, Homo sapien
cttctccgctagttgctggtggcca

SEQ ID NO: 2643012 - DNA, 25 bp, Homo sapien
tgctttcagacttctccgctagttg

SEQ ID NO: 2643013 - DNA, 25 bp, Homo sapien
aactacttcagaaatcatatttggt

SEQ ID NO: 2643014 - DNA, 25 bp, Homo sapien
tgaattatacacaattcctgctttc

SEQ ID NO: 2643015 - DNA, 25 bp, Homo sapien
ttctggtcctcctgaagtccaacca

SEQ ID NO: 2643016 - DNA, 25 bp, Homo sapien
tctggtcctcctgaagtccaaccat

SEQ ID NO: 2643017 - DNA, 25 bp, Homo sapien
cggtctcggattgggaaaccaagcg

SEQ ID NO: 2643018 - DNA, 25 bp, Homo sapien
tcggattgggaaaccaagcggcctg

SEQ ID NO: 2643019 - DNA, 25 bp, Homo sapien
ttgggaaaccaagcggcctggccta

SEQ ID NO: 2643020 - DNA, 25 bp, Homo sapien
tctcggattgggaaaccaagcggcc

SEQ ID NO: 2643021 - DNA, 25 bp, Homo sapien
tttccccaaaagtcgatgagagtct

SEQ ID NO: 2643022 - DNA, 25 bp, Homo sapien
gtcagcgacggagccgggaaagcgg

SEQ ID NO: 2643023 - DNA, 25 bp, Homo sapien
gggaaagcggagaacgcgcggccgc

SEQ ID NO: 2643024 - DNA, 25 bp, Homo sapien
gcgccgggcagatctagccgcccat

SEQ ID NO: 2643025 - DNA, 25 bp, Homo sapien
ccgctggcgaattcacagcgccggg

SEQ ID NO: 2643026 - DNA, 25 bp, Homo sapien
cccgatcccgctgccgttgccttcc

SEQ ID NO: 2643027 - DNA, 25 bp, Homo sapien
tgccgttgccttcccgctccccaac

SEQ ID NO: 2643028 - DNA, 25 bp, Homo sapien
gctgccgttgccttcccgctcccca

SEQ ID NO: 2643029 - DNA, 25 bp, Homo sapien
atcccgctgccgttgccttcccgct

SEQ ID NO: 2643030 - DNA, 25 bp, Homo sapien
tggtcaccgccgacgacagattcgt

SEQ ID NO: 2643031 - DNA, 25 bp, Homo sapien
ttcgtcacctgaatcaccgacgtgg

SEQ ID NO: 2643032 - DNA, 25 bp, Homo sapien
taggaaggaaaaaagcgtccgcatc

SEQ ID NO: 2643033 - DNA, 25 bp, Homo sapien
gggtagagccgcagctcctcgattt

SEQ ID NO: 2643034 - DNA, 25 bp, Homo sapien
catggatgcgctcggttagataaac

SEQ ID NO: 2643035 - DNA, 25 bp, Homo sapien
gcagcaggctttctcgtcagcaaaa

SEQ ID NO: 2643036 - DNA, 25 bp, Homo sapien
taagtttgtgcgaccgtcctgggaa

SEQ ID NO: 2643037 - DNA, 25 bp, Homo sapien
ggtctccgcgattttcagagtggaa

SEQ ID NO: 2643038 - DNA, 25 bp, Homo sapien
ctgacagtcatctctgaagcaacat

SEQ ID NO: 2643039 - DNA, 25 bp, Homo sapien
taaagccctagcaattccaacagga

SEQ ID NO: 2643040 - DNA, 25 bp, Homo sapien
acaggaataactcttttgcctctga

SEQ ID NO: 2643041 - DNA, 25 bp, Homo sapien
gaagcaacatttcctaaactgacgg

SEQ ID NO: 2643042 - DNA, 25 bp, Homo sapien
tggaggaaaaagcaagaggtgcgtt

SEQ ID NO: 2643043 - DNA, 25 bp, Homo sapien
ttggaggaaaaagcaagaggtgcgt

SEQ ID NO: 2643044 - DNA, 25 bp, Homo sapien
ggaggaaaaagcaagaggtgcgttg

SEQ ID NO: 2643045 - DNA, 25 bp, Homo sapien
tttggaggaaaaagcaagaggtgcg

SEQ ID NO: 2643046 - DNA, 25 bp, Homo sapien
ggatcacgaaacttaacataacata

SEQ ID NO: 2643047 - DNA, 25 bp, Homo sapien
tgggccacgccaacacttgatggat

SEQ ID NO: 2643048 - DNA, 25 bp, Homo sapien
gtgttagttagatgctgggccacgc

SEQ ID NO: 2643049 - DNA, 25 bp, Homo sapien
taaaaaccgtgttagttagatgctg

SEQ ID NO: 2643050 - DNA, 25 bp, Homo sapien
tctgcacaaggaacaactatcagag

SEQ ID NO: 2643051 - DNA, 25 bp, Homo sapien
cttctgcacaaggaacaactatcag

SEQ ID NO: 2643052 - DNA, 25 bp, Homo sapien
ttctgcacaaggaacaactatcaga

SEQ ID NO: 2643053 - DNA, 25 bp, Homo sapien
ctgcacaaggaacaactatcagagc

SEQ ID NO: 2643054 - DNA, 25 bp, Homo sapien
ccaatctctaggaaagctaaaggca

SEQ ID NO: 2643055 - DNA, 25 bp, Homo sapien
gtaaaacctcaaatgtacatgtcat

SEQ ID NO: 2643056 - DNA, 25 bp, Homo sapien
cacacaccaagagtactgtctactt

SEQ ID NO: 2643057 - DNA, 25 bp, Homo sapien
taaaggcaataacagacaggacaga

SEQ ID NO: 2643058 - DNA, 25 bp, Homo sapien
caccagaagtgtcaaaattcagcac

SEQ ID NO: 2643059 - DNA, 25 bp, Homo sapien
tccagttgcaaagcaaacaattaca

SEQ ID NO: 2643060 - DNA, 25 bp, Homo sapien
tacacatgctagtcagtgctctgaa

SEQ ID NO: 2643061 - DNA, 25 bp, Homo sapien
cagtctattatacgtgagtggctct

SEQ ID NO: 2643062 - DNA, 25 bp, Homo sapien
tgtcagcctggccactaaaagaggt

SEQ ID NO: 2643063 - DNA, 25 bp, Homo sapien
cgagcctggtactcactgtattaga

SEQ ID NO: 2643064 - DNA, 25 bp, Homo sapien
tgtagaacgaaaccattcaccagct

SEQ ID NO: 2643065 - DNA, 25 bp, Homo sapien
taaaacagtttcaatcatccaccag

SEQ ID NO: 2643066 - DNA, 25 bp, Homo sapien
gcattcagtgaggtcaacagaacac

SEQ ID NO: 2643067 - DNA, 25 bp, Homo sapien
taacaaaggctaaggcttaatatgc

SEQ ID NO: 2643068 - DNA, 25 bp, Homo sapien
ggttatttcacactcactctgctat

SEQ ID NO: 2643069 - DNA, 25 bp, Homo sapien
ttaatatgcatgaaactgttacaca

SEQ ID NO: 2643070 - DNA, 25 bp, Homo sapien
ttaacatgcatcaacaaaaggcagg

SEQ ID NO: 2643071 - DNA, 25 bp, Homo sapien
aatgaaggtttcacttgacggcagg

SEQ ID NO: 2643072 - DNA, 25 bp, Homo sapien
taggttgtcaaactctcccactgcc

SEQ ID NO: 2643073 - DNA, 25 bp, Homo sapien
gggcgtccatcttctgcggttcaga

SEQ ID NO: 2643074 - DNA, 25 bp, Homo sapien
gataaggactgcaactttcacatta

SEQ ID NO: 2643075 - DNA, 25 bp, Homo sapien
taagtacgatttggcatattcattg

SEQ ID NO: 2643076 - DNA, 25 bp, Homo sapien
acgatttggcatattcattgctgaa

SEQ ID NO: 2643077 - DNA, 25 bp, Homo sapien
tctgaaataagtacgatttggcata

SEQ ID NO: 2643078 - DNA, 25 bp, Homo sapien
tttcttaatgagtgcccctatcctg

SEQ ID NO: 2643079 - DNA, 25 bp, Homo sapien
gagatgcctaaaagaactcagttcc

SEQ ID NO: 2643080 - DNA, 25 bp, Homo sapien
taataaagcatctcaccaacatcag

SEQ ID NO: 2643081 - DNA, 25 bp, Homo sapien
tcaacgtaaaaggaagcctacatcc

SEQ ID NO: 2643082 - DNA, 25 bp, Homo sapien
aagcatggacgctttcccaggacgg

SEQ ID NO: 2643083 - DNA, 25 bp, Homo sapien
cgcggtgatcgaaagttgtgttaca

SEQ ID NO: 2643084 - DNA, 25 bp, Homo sapien
ccaggacggtgttttcgcggtgatc

SEQ ID NO: 2643085 - DNA, 25 bp, Homo sapien
gtgttacacatgacaaccgttcgtg

SEQ ID NO: 2643086 - DNA, 25 bp, Homo sapien
ctgtactggaaacttaatgttcatg

SEQ ID NO: 2643087 - DNA, 25 bp, Homo sapien
tgtactggaaacttaatgttcatga

SEQ ID NO: 2643088 - DNA, 25 bp, Homo sapien
gtactggaaacttaatgttcatgaa

SEQ ID NO: 2643089 - DNA, 25 bp, Homo sapien
tactggaaacttaatgttcatgaac

SEQ ID NO: 2643090 - DNA, 25 bp, Homo sapien
tttaacactttgagctatgggtcac

SEQ ID NO: 2643091 - DNA, 25 bp, Homo sapien
tatgattttacaattacccttgcag

SEQ ID NO: 2643092 - DNA, 25 bp, Homo sapien
tccttttatcctgctctactaggaa

SEQ ID NO: 2643093 - DNA, 25 bp, Homo sapien
taaatgaatctatctatcagatctg

SEQ ID NO: 2643094 - DNA, 25 bp, Homo sapien
agcaggagccaataaagagagggct

SEQ ID NO: 2643095 - DNA, 25 bp, Homo sapien
gttggagcaggagccaataaagaga

SEQ ID NO: 2643096 - DNA, 25 bp, Homo sapien
gccaataaagagagggctttggatt

SEQ ID NO: 2643097 - DNA, 25 bp, Homo sapien
gctttggattcctctgggattttac

SEQ ID NO: 2643098 - DNA, 25 bp, Homo sapien
tttggggtcggtattggaagcaatc

SEQ ID NO: 2643099 - DNA, 25 bp, Homo sapien
cctgcaccaggcatcagacttgtca

SEQ ID NO: 2643100 - DNA, 25 bp, Homo sapien
gaagcaatcctgcaccaggcatcag

SEQ ID NO: 2643101 - DNA, 25 bp, Homo sapien
ggtcggtattggaagcaatcctgca

SEQ ID NO: 2643102 - DNA, 25 bp, Homo sapien
cagcagcgctacaattcaggcctga

SEQ ID NO: 2643103 - DNA, 25 bp, Homo sapien
caccttagctgttatatattgtcga

SEQ ID NO: 2643104 - DNA, 25 bp, Homo sapien
cacaatctccctgtacttaggaaca

SEQ ID NO: 2643105 - DNA, 25 bp, Homo sapien
gtgaagttcctacaagcctctggtc

SEQ ID NO: 2643106 - DNA, 25 bp, Homo sapien
aagtggtggctgtggtatctctcca

SEQ ID NO: 2643107 - DNA, 25 bp, Homo sapien
tcccaaactgctaagtgaaacacca

SEQ ID NO: 2643108 - DNA, 25 bp, Homo sapien
tgctgctggtatagctcccaaactg

SEQ ID NO: 2643109 - DNA, 25 bp, Homo sapien
catctattttggaaggatccacgtt

SEQ ID NO: 2643110 - DNA, 25 bp, Homo sapien
caagtagttgatcagctgtcgttgt

SEQ ID NO: 2643111 - DNA, 25 bp, Homo sapien
tgccatccgcacaaacttcacttct

SEQ ID NO: 2643112 - DNA, 25 bp, Homo sapien
aaattcaagtagttgatcagctgtc

SEQ ID NO: 2643113 - DNA, 25 bp, Homo sapien
ttcaagtagttgatcagctgtcgtt

SEQ ID NO: 2643114 - DNA, 25 bp, Homo sapien
cccttggtacagaattttggtctgc

SEQ ID NO: 2643115 - DNA, 25 bp, Homo sapien
ccacaaaagcaaaccgagttggctg

SEQ ID NO: 2643116 - DNA, 25 bp, Homo sapien
ttcagtggcctgtctccaaacataa

SEQ ID NO: 2643117 - DNA, 25 bp, Homo sapien
ctccattaaaagcaagggcccttgg

SEQ ID NO: 2643118 - DNA, 25 bp, Homo sapien
tctggtctggagtatctcgaaggcc

SEQ ID NO: 2643119 - DNA, 25 bp, Homo sapien
taaccaacgctgaaccatggctgag

SEQ ID NO: 2643120 - DNA, 25 bp, Homo sapien
cactctagaagaagggtaagctacc

SEQ ID NO: 2643121 - DNA, 25 bp, Homo sapien
gaagtactgtagttcaacccacctg

SEQ ID NO: 2643122 - DNA, 25 bp, Homo sapien
catctcagggggttttactattgca

SEQ ID NO: 2643123 - DNA, 25 bp, Homo sapien
ggtgtcatctcagggggttttacta

SEQ ID NO: 2643124 - DNA, 25 bp, Homo sapien
tttactattgcattgttggagtgat

SEQ ID NO: 2643125 - DNA, 25 bp, Homo sapien
gttttactattgcattgttggagtg

SEQ ID NO: 2643126 - DNA, 25 bp, Homo sapien
aaatgactgagcttctcgtactcgc

SEQ ID NO: 2643127 - DNA, 25 bp, Homo sapien
cgtactcgcttcattacttcttcta

SEQ ID NO: 2643128 - DNA, 25 bp, Homo sapien
gagcttctcgtactcgcttcattac

SEQ ID NO: 2643129 - DNA, 25 bp, Homo sapien
ctggttcaatagctgctgagataaa

SEQ ID NO: 2643130 - DNA, 25 bp, Homo sapien
tctttgacatgagtatgctacttac

SEQ ID NO: 2643131 - DNA, 25 bp, Homo sapien
aaagtgcctcaattcagtatcacag

SEQ ID NO: 2643132 - DNA, 25 bp, Homo sapien
taaaatgaagtgactgaacaagatg

SEQ ID NO: 2643133 - DNA, 25 bp, Homo sapien
gctgattagctcagactaaagtgcc

SEQ ID NO: 2643134 - DNA, 25 bp, Homo sapien
agaaacatccaagaaagtcattgca

SEQ ID NO: 2643135 - DNA, 25 bp, Homo sapien
gaaacatccaagaaagtcattgcat

SEQ ID NO: 2643136 - DNA, 25 bp, Homo sapien
cataaactcgttgagtgcagccacc

SEQ ID NO: 2643137 - DNA, 25 bp, Homo sapien
cattgcataaactcgttgagtgcag

SEQ ID NO: 2643138 - DNA, 25 bp, Homo sapien
agtgcaaggggcctactctctgtac

SEQ ID NO: 2643139 - DNA, 25 bp, Homo sapien
catatagtgcaaggggcctactctc

SEQ ID NO: 2643140 - DNA, 25 bp, Homo sapien
cacatatagtgcaaggggcctactc

SEQ ID NO: 2643141 - DNA, 25 bp, Homo sapien
caaggggcctactctctgtacatcc

SEQ ID NO: 2643142 - DNA, 25 bp, Homo sapien
taaagatcccagttaataatcaggc

SEQ ID NO: 2643143 - DNA, 25 bp, Homo sapien
ataatcaggcacaagtggaatgtac

SEQ ID NO: 2643144 - DNA, 25 bp, Homo sapien
aaaaatcactttgcagtgtaagctc

SEQ ID NO: 2643145 - DNA, 25 bp, Homo sapien
ctttgcagtgtaagctcagaacaat

SEQ ID NO: 2643146 - DNA, 25 bp, Homo sapien
agcgagtatgggaacgagatcgacc

SEQ ID NO: 2643147 - DNA, 25 bp, Homo sapien
ttccttctagaatgggattttgagc

SEQ ID NO: 2643148 - DNA, 25 bp, Homo sapien
aatgggattttgagctagacctgga

SEQ ID NO: 2643149 - DNA, 25 bp, Homo sapien
gatcgaccgccttttctttcattgc

SEQ ID NO: 2643150 - DNA, 25 bp, Homo sapien
tgttcttgaacttaaggctacatgt

SEQ ID NO: 2643151 - DNA, 25 bp, Homo sapien
gaacttaaggctacatgtttccaca

SEQ ID NO: 2643152 - DNA, 25 bp, Homo sapien
tggtgcgtgtctgtggcttagctac

SEQ ID NO: 2643153 - DNA, 25 bp, Homo sapien
tctgtggcttagctactcgagaagc

SEQ ID NO: 2643154 - DNA, 25 bp, Homo sapien
tgacagcgccactgtgacaggaaaa

SEQ ID NO: 2643155 - DNA, 25 bp, Homo sapien
caatcatacctgcatctcttagggc

SEQ ID NO: 2643156 - DNA, 25 bp, Homo sapien
tacttgaggtccacctgccttgagg

SEQ ID NO: 2643157 - DNA, 25 bp, Homo sapien
cacgctacctgtgagaactctggct

SEQ ID NO: 2643158 - DNA, 25 bp, Homo sapien
gaacgtgatctattatgggatctac

SEQ ID NO: 2643159 - DNA, 25 bp, Homo sapien
gatttagagcgttttttatgtgggc

SEQ ID NO: 2643160 - DNA, 25 bp, Homo sapien
tgtgggctcttagatctacgtctgt

SEQ ID NO: 2643161 - DNA, 25 bp, Homo sapien
cgtgaatgcgaacgactccttgact

SEQ ID NO: 2643162 - DNA, 25 bp, Homo sapien
gatcttcgcgatgcattgtaactcc

SEQ ID NO: 2643163 - DNA, 25 bp, Homo sapien
tcatctatctctttggatctgtctt

SEQ ID NO: 2643164 - DNA, 25 bp, Homo sapien
ccttgatcttttctcgagtgtcttt

SEQ ID NO: 2643165 - DNA, 25 bp, Homo sapien
tctttgtctcgatccttctcatgct

SEQ ID NO: 2643166 - DNA, 25 bp, Homo sapien
ggtacgaggacatacccaatgatct

SEQ ID NO: 2643167 - DNA, 25 bp, Homo sapien
taatttaagggatatggtacgagga

SEQ ID NO: 2643168 - DNA, 25 bp, Homo sapien
tcagaaacaatgaacttcactaggt

SEQ ID NO: 2643169 - DNA, 25 bp, Homo sapien
catgttatccttaccatttcaggaa

SEQ ID NO: 2643170 - DNA, 25 bp, Homo sapien
gcatgttcaattacctaactttaga

SEQ ID NO: 2643171 - DNA, 25 bp, Homo sapien
ttaggaagagtagaagacctcctcc

SEQ ID NO: 2643172 - DNA, 25 bp, Homo sapien
tagaggccagtttaaacttatgtcc

SEQ ID NO: 2643173 - DNA, 25 bp, Homo sapien
tttagagtgggtcaaattatgaacc

SEQ ID NO: 2643174 - DNA, 25 bp, Homo sapien
ctgggggacggagatctagaagatt

SEQ ID NO: 2643175 - DNA, 25 bp, Homo sapien
gggacggagatctagaagatttcct

SEQ ID NO: 2643176 - DNA, 25 bp, Homo sapien
ggagatctagaagatttccttttta

SEQ ID NO: 2643177 - DNA, 25 bp, Homo sapien
gacggagatctagaagatttccttt

SEQ ID NO: 2643178 - DNA, 25 bp, Homo sapien
ccatctctatcattagaactctttc

SEQ ID NO: 2643179 - DNA, 25 bp, Homo sapien
actctttctcatagacgttgaacgt

SEQ ID NO: 2643180 - DNA, 25 bp, Homo sapien
agacgttgaacgttctctctctctt

SEQ ID NO: 2643181 - DNA, 25 bp, Homo sapien
taagtgaagtactgttcttctccaa

SEQ ID NO: 2643182 - DNA, 25 bp, Homo sapien
tttgctcacacttgaatctggttct

SEQ ID NO: 2643183 - DNA, 25 bp, Homo sapien
cattcagctgacaattcccattgtg

SEQ ID NO: 2643184 - DNA, 25 bp, Homo sapien
tcagtccttggtgcatccttgtcat

SEQ ID NO: 2643185 - DNA, 25 bp, Homo sapien
gaatctggttctttattgtgctctt

SEQ ID NO: 2643186 - DNA, 25 bp, Homo sapien
tcaataacaagatggccacaaagtc

SEQ ID NO: 2643187 - DNA, 25 bp, Homo sapien
cattgagtgcagaggtacacttgtc

SEQ ID NO: 2643188 - DNA, 25 bp, Homo sapien
catactttgcacttacaagggtgtg

SEQ ID NO: 2643189 - DNA, 25 bp, Homo sapien
gaaatgctcactttgtgggtagtcc

SEQ ID NO: 2643190 - DNA, 25 bp, Homo sapien
caggcttcattacttgcaacaaggg

SEQ ID NO: 2643191 - DNA, 25 bp, Homo sapien
ttcccatgaggtaaggcaactgagt

SEQ ID NO: 2643192 - DNA, 25 bp, Homo sapien
ctgatggtcccaaagctgcatgact

SEQ ID NO: 2643193 - DNA, 25 bp, Homo sapien
ctgtttaccagccaaccgtatgtgg

SEQ ID NO: 2643194 - DNA, 25 bp, Homo sapien
tgtctcaaacagatacacacgtgcg

SEQ ID NO: 2643195 - DNA, 25 bp, Homo sapien
gggaatggctctacttcgtaacgca

SEQ ID NO: 2643196 - DNA, 25 bp, Homo sapien
tggcactgccaaagatcaacatagc

SEQ ID NO: 2643197 - DNA, 25 bp, Homo sapien
tctagaccctagaatgccttgcttc

SEQ ID NO: 2643198 - DNA, 25 bp, Homo sapien
aggtgagaggatcatccatgccgag

SEQ ID NO: 2643199 - DNA, 25 bp, Homo sapien
atcatccatgccgagaaaggtcaag

SEQ ID NO: 2643200 - DNA, 25 bp, Homo sapien
ccatgccgagaaaggtcaagattgc

SEQ ID NO: 2643201 - DNA, 25 bp, Homo sapien
gaggatcatccatgccgagaaaggt

SEQ ID NO: 2643202 - DNA, 25 bp, Homo sapien
aaataaccaccacctatgcagcatg

SEQ ID NO: 2643203 - DNA, 25 bp, Homo sapien
taaaataacgtattgccaggtgcag

SEQ ID NO: 2643204 - DNA, 25 bp, Homo sapien
tgtgaaatctcccaaaagttggcaa

SEQ ID NO: 2643205 - DNA, 25 bp, Homo sapien
gtgtgttacctaccagtaccctcaa

SEQ ID NO: 2643206 - DNA, 25 bp, Homo sapien
gaaaggatcctaaaatcatccagag

SEQ ID NO: 2643207 - DNA, 25 bp, Homo sapien
aaggatcctaaaatcatccagagaa

SEQ ID NO: 2643208 - DNA, 25 bp, Homo sapien
tcaaacttccaaaagtcaaggataa

SEQ ID NO: 2643209 - DNA, 25 bp, Homo sapien
aaagaaaggatcctaaaatcatcca

SEQ ID NO: 2643210 - DNA, 25 bp, Homo sapien
aggcacatcacgaggtcaggcgatc

SEQ ID NO: 2643211 - DNA, 25 bp, Homo sapien
ctgtaatcccagcattttgggaggc

SEQ ID NO: 2643212 - DNA, 25 bp, Homo sapien
cgaggcaggcacatcacgaggtcag

SEQ ID NO: 2643213 - DNA, 25 bp, Homo sapien
ctcggccaggtgcactggctcacac

SEQ ID NO: 2643214 - DNA, 25 bp, Homo sapien
gctggattgaggctagttcctgtcc

SEQ ID NO: 2643215 - DNA, 25 bp, Homo sapien
caacattctggctgggtggtttccc

SEQ ID NO: 2643216 - DNA, 25 bp, Homo sapien
aaatgatccgtcaagagattggtcc

SEQ ID NO: 2643217 - DNA, 25 bp, Homo sapien
tgtcattggcctcgttgcacttggg

SEQ ID NO: 2643218 - DNA, 25 bp, Homo sapien
ctctttgggctttgggattccaaag

SEQ ID NO: 2643219 - DNA, 25 bp, Homo sapien
tcctctttgggctttgggattccaa

SEQ ID NO: 2643220 - DNA, 25 bp, Homo sapien
ttcctctttgggctttgggattcca

SEQ ID NO: 2643221 - DNA, 25 bp, Homo sapien
tcccggctagccgagctctcttcct

SEQ ID NO: 2643222 - DNA, 25 bp, Homo sapien
aatccattcggaccttcccggctag

SEQ ID NO: 2643223 - DNA, 25 bp, Homo sapien
gccttcctcctcgttaactgtgggc

SEQ ID NO: 2643224 - DNA, 25 bp, Homo sapien
tctgccttcctcctcgttaactgtg

SEQ ID NO: 2643225 - DNA, 25 bp, Homo sapien
ccttagtgaagggaggagcctcctg

SEQ ID NO: 2643226 - DNA, 25 bp, Homo sapien
ccttgctgccttagtgaagggagga

SEQ ID NO: 2643227 - DNA, 25 bp, Homo sapien
cagtgcactccttgctgccttagtg

SEQ ID NO: 2643228 - DNA, 25 bp, Homo sapien
tgcactccttgctgccttagtgaag

SEQ ID NO: 2643229 - DNA, 25 bp, Homo sapien
tcagtgcagtgttccaagtttcagg

SEQ ID NO: 2643230 - DNA, 25 bp, Homo sapien
aggaggatcagctctcgaagcacca

SEQ ID NO: 2643231 - DNA, 25 bp, Homo sapien
tctaatcagaggagcaatagtacca

SEQ ID NO: 2643232 - DNA, 25 bp, Homo sapien
aagcacttggccctgaatgcggacg

SEQ ID NO: 2643233 - DNA, 25 bp, Homo sapien
tgagcacgagctgggagccagataa

SEQ ID NO: 2643234 - DNA, 25 bp, Homo sapien
agacactcgagggaagacaataagc

SEQ ID NO: 2643235 - DNA, 25 bp, Homo sapien
gggaccggttgagcacgagctggga

SEQ ID NO: 2643236 - DNA, 25 bp, Homo sapien
gggacaggctctaaagacactcgag

SEQ ID NO: 2643237 - DNA, 25 bp, Homo sapien
tttgaaaggatcaatgccgtcctgc

SEQ ID NO: 2643238 - DNA, 25 bp, Homo sapien
gccgtcctgcagagtaatggagtaa

SEQ ID NO: 2643239 - DNA, 25 bp, Homo sapien
gagtaatgttgactggtctccaaaa

SEQ ID NO: 2643240 - DNA, 25 bp, Homo sapien
gatgtgcttcttcataacgcctttg

SEQ ID NO: 2643241 - DNA, 25 bp, Homo sapien
actgagcagacatgccacaaaagat

SEQ ID NO: 2643242 - DNA, 25 bp, Homo sapien
tgaggtggcttttcggctggcggag

SEQ ID NO: 2643243 - DNA, 25 bp, Homo sapien
gagcacagtgatcttttctactggc

SEQ ID NO: 2643244 - DNA, 25 bp, Homo sapien
gagcagacatgccacaaaagatctg

SEQ ID NO: 2643245 - DNA, 25 bp, Homo sapien
cacctggtgctgtccaatgggccat

SEQ ID NO: 2643246 - DNA, 25 bp, Homo sapien
cctggtgctgtccaatgggccattc

SEQ ID NO: 2643247 - DNA, 25 bp, Homo sapien
tggtgctgtccaatgggccattcaa

SEQ ID NO: 2643248 - DNA, 25 bp, Homo sapien
aatctcctgaactccccgatctttg

SEQ ID NO: 2643249 - DNA, 25 bp, Homo sapien
tggggggccacatggtcgctgaatc

SEQ ID NO: 2643250 - DNA, 25 bp, Homo sapien
cttgcaggtggataggaatctctgt

SEQ ID NO: 2643251 - DNA, 25 bp, Homo sapien
gtcgctgaatccctggggctaatgc

SEQ ID NO: 2643252 - DNA, 25 bp, Homo sapien
gggctaatgcagtcctagtctgcat

SEQ ID NO: 2643253 - DNA, 25 bp, Homo sapien
ctcccctttgtgctggtatttcata

SEQ ID NO: 2643254 - DNA, 25 bp, Homo sapien
tagggagactactgtgctttgggct

SEQ ID NO: 2643255 - DNA, 25 bp, Homo sapien
ccacatcgaaagtcacactcttggg

SEQ ID NO: 2643256 - DNA, 25 bp, Homo sapien
agccactggccagtatcactgtggg

SEQ ID NO: 2643257 - DNA, 25 bp, Homo sapien
tgtgggttccacatcgaaagtcaca

SEQ ID NO: 2643258 - DNA, 25 bp, Homo sapien
tatgcccatatgtaccacactctca

SEQ ID NO: 2643259 - DNA, 25 bp, Homo sapien
tctgttgagtatttgtgatccccac

SEQ ID NO: 2643260 - DNA, 25 bp, Homo sapien
ggatcatcaaggttaaatctcagtc

SEQ ID NO: 2643261 - DNA, 25 bp, Homo sapien
gtctgtggattcttggtctagtgcc

SEQ ID NO: 2643262 - DNA, 25 bp, Homo sapien
aagaacaccgaattgcagcaaaaga

SEQ ID NO: 2643263 - DNA, 25 bp, Homo sapien
cctctgcaggtttacagctggcagg

SEQ ID NO: 2643264 - DNA, 25 bp, Homo sapien
attgcagcaaaagaatacacctctg

SEQ ID NO: 2643265 - DNA, 25 bp, Homo sapien
gaatacacctctgcaggtttacagc

SEQ ID NO: 2643266 - DNA, 25 bp, Homo sapien
attgtcagggatgagcctgggcaca

SEQ ID NO: 2643267 - DNA, 25 bp, Homo sapien
aggcagcattgtcagggatgagcct

SEQ ID NO: 2643268 - DNA, 25 bp, Homo sapien
gcattgtcagggatgagcctgggca

SEQ ID NO: 2643269 - DNA, 25 bp, Homo sapien
acaggcagcattgtcagggatgagc

SEQ ID NO: 2643270 - DNA, 25 bp, Homo sapien
ccaaggagccccatatgaggctgct

SEQ ID NO: 2643271 - DNA, 25 bp, Homo sapien
tcaacctagagtcataagtgctggc

SEQ ID NO: 2643272 - DNA, 25 bp, Homo sapien
aaggagccccatatgaggctgctca

SEQ ID NO: 2643273 - DNA, 25 bp, Homo sapien
gagtcataagtgctggctgttgctc

SEQ ID NO: 2643274 - DNA, 25 bp, Homo sapien
cagcatcaatgtactctgccgcagg

SEQ ID NO: 2643275 - DNA, 25 bp, Homo sapien
aatagctccacaggacccttgtcca

SEQ ID NO: 2643276 - DNA, 25 bp, Homo sapien
acaaattctccaatagctccacagg

SEQ ID NO: 2643277 - DNA, 25 bp, Homo sapien
gcagctgctcaagtagtctctgagt

SEQ ID NO: 2643278 - DNA, 25 bp, Homo sapien
tgccagtatcccatggccagtggat

SEQ ID NO: 2643279 - DNA, 25 bp, Homo sapien
tggccagtggatctctcctgacagc

SEQ ID NO: 2643280 - DNA, 25 bp, Homo sapien
tgccacagtatacggacctagtccc

SEQ ID NO: 2643281 - DNA, 25 bp, Homo sapien
gagcaattggctatgtgtacccctg

SEQ ID NO: 2643282 - DNA, 25 bp, Homo sapien
ctgccgaagctgctctcagcctctc

SEQ ID NO: 2643283 - DNA, 25 bp, Homo sapien
gctgccgaagctgctctcagcctct

SEQ ID NO: 2643284 - DNA, 25 bp, Homo sapien
tgtggtgctgccgaagctgctctca

SEQ ID NO: 2643285 - DNA, 25 bp, Homo sapien
tcatgtggtgctgccgaagctgctc

SEQ ID NO: 2643286 - DNA, 25 bp, Homo sapien
cagggaaagactacttggacagaat

SEQ ID NO: 2643287 - DNA, 25 bp, Homo sapien
tggtacaacatcaggcagtgaataa

SEQ ID NO: 2643288 - DNA, 25 bp, Homo sapien
atctacaggatgaaatggcgccaga

SEQ ID NO: 2643289 - DNA, 25 bp, Homo sapien
catcaggcagtgaataaaaggtatt

SEQ ID NO: 2643290 - DNA, 25 bp, Homo sapien
tgtccatccaggcattaaatggatt

SEQ ID NO: 2643291 - DNA, 25 bp, Homo sapien
gtccatccaggcattaaatggattt

SEQ ID NO: 2643292 - DNA, 25 bp, Homo sapien
ctcacagtgtgaattccaacatgaa

SEQ ID NO: 2643293 - DNA, 25 bp, Homo sapien
gaagcagaaataaggttggaggttg

SEQ ID NO: 2643294 - DNA, 25 bp, Homo sapien
gtgtgaattccaacatgaaggaagc

SEQ ID NO: 2643295 - DNA, 25 bp, Homo sapien
tgaaggaagcagaaataaggttgga

SEQ ID NO: 2643296 - DNA, 25 bp, Homo sapien
aatgccctccactgtgggagcactg

SEQ ID NO: 2643297 - DNA, 25 bp, Homo sapien
cccagtgaatgccctccactgtggg

SEQ ID NO: 2643298 - DNA, 25 bp, Homo sapien
agtgaatgccctccactgtgggagc

SEQ ID NO: 2643299 - DNA, 25 bp, Homo sapien
ctgctcccagtgaatgccctccact

SEQ ID NO: 2643300 - DNA, 25 bp, Homo sapien
gtcctccgcacactcaacagcaagg

SEQ ID NO: 2643301 - DNA, 25 bp, Homo sapien
ctaatgccggattcaaaaatcaggg

SEQ ID NO: 2643302 - DNA, 25 bp, Homo sapien
aagccctgggaggttctaatgccgg

SEQ ID NO: 2643303 - DNA, 25 bp, Homo sapien
ggagtctgaggaatcctgtagtcct

SEQ ID NO: 2643304 - DNA, 25 bp, Homo sapien
cattccccatggaccagaacttgag

SEQ ID NO: 2643305 - DNA, 25 bp, Homo sapien
tattggtcggagtatagttttttgc

SEQ ID NO: 2643306 - DNA, 25 bp, Homo sapien
acatccaacgcagaatatggtagca

SEQ ID NO: 2643307 - DNA, 25 bp, Homo sapien
gaactcacatccaacgcagaatatg

SEQ ID NO: 2643308 - DNA, 25 bp, Homo sapien
caaatgcacaattgaagggcccctt

SEQ ID NO: 2643309 - DNA, 25 bp, Homo sapien
cctactgtctgaattactgatggag

SEQ ID NO: 2643310 - DNA, 25 bp, Homo sapien
gaaagttgtcaacatcaaatgcaca

SEQ ID NO: 2643311 - DNA, 25 bp, Homo sapien
gctttggtcccctgagagctgtcat

SEQ ID NO: 2643312 - DNA, 25 bp, Homo sapien
gccacttccaatgacctgaagttca

SEQ ID NO: 2643313 - DNA, 25 bp, Homo sapien
aagttcactcctttggtatcccatt

SEQ ID NO: 2643314 - DNA, 25 bp, Homo sapien
tatcccatttctttggaagcatccc

SEQ ID NO: 2643315 - DNA, 25 bp, Homo sapien
cttggagtcgtagagaaaggatgac

SEQ ID NO: 2643316 - DNA, 25 bp, Homo sapien
gactgtctgaccgaggagggctctt

SEQ ID NO: 2643317 - DNA, 25 bp, Homo sapien
tagcctgaaccagtgatgaaagctg

SEQ ID NO: 2643318 - DNA, 25 bp, Homo sapien
gattttgggaacatactcagctgac

SEQ ID NO: 2643319 - DNA, 25 bp, Homo sapien
taatgaccccaaaggtagcctgaac

SEQ ID NO: 2643320 - DNA, 25 bp, Homo sapien
caaggtccaggatccacgcacaagc

SEQ ID NO: 2643321 - DNA, 25 bp, Homo sapien
aaggtccaggatccacgcacaagct

SEQ ID NO: 2643322 - DNA, 25 bp, Homo sapien
ttttaagctttatcgatctcaggaa

SEQ ID NO: 2643323 - DNA, 25 bp, Homo sapien
tccacgcacaagctgagttggcttt

SEQ ID NO: 2643324 - DNA, 25 bp, Homo sapien
cacatcccacctcattagtgacaag

SEQ ID NO: 2643325 - DNA, 25 bp, Homo sapien
ccttgctagattttgaatgcacaac

SEQ ID NO: 2643326 - DNA, 25 bp, Homo sapien
acatcccacctcattagtgacaaga

SEQ ID NO: 2643327 - DNA, 25 bp, Homo sapien
tagattttgaatgcacaaccacatc

SEQ ID NO: 2643328 - DNA, 25 bp, Homo sapien
tcctcttacacagccctttggaaag

SEQ ID NO: 2643329 - DNA, 25 bp, Homo sapien
ctcctcttacacagccctttggaaa

SEQ ID NO: 2643330 - DNA, 25 bp, Homo sapien
gacggatagatatagtgttgctgct

SEQ ID NO: 2643331 - DNA, 25 bp, Homo sapien
tcttttccagatgtcgagttgggcc

SEQ ID NO: 2643332 - DNA, 25 bp, Homo sapien
ttgggccagtgacggatagatatag

SEQ ID NO: 2643333 - DNA, 25 bp, Homo sapien
catctggttggcagctactctgggt

SEQ ID NO: 2643334 - DNA, 25 bp, Homo sapien
tacatatcatgtcagaggctgcagc

SEQ ID NO: 2643335 - DNA, 25 bp, Homo sapien
catatcatgtcagaggctgcagctt

SEQ ID NO: 2643336 - DNA, 25 bp, Homo sapien
ttatctacatatcatgtcagaggct

SEQ ID NO: 2643337 - DNA, 25 bp, Homo sapien
tctacatatcatgtcagaggctgca

SEQ ID NO: 2643338 - DNA, 25 bp, Homo sapien
tctatagggtgtgccaagaaaagat

SEQ ID NO: 2643339 - DNA, 25 bp, Homo sapien
cagaagttgatctatagggtgtgcc

SEQ ID NO: 2643340 - DNA, 25 bp, Homo sapien
gaagctagacctgaagtagaaaacg

SEQ ID NO: 2643341 - DNA, 25 bp, Homo sapien
tagaaaacgtcccagaagttgatct

SEQ ID NO: 2643342 - DNA, 25 bp, Homo sapien
gggtagactatctgccgcctttggc

SEQ ID NO: 2643343 - DNA, 25 bp, Homo sapien
gaaccctaggtgtttgcaggcacaa

SEQ ID NO: 2643344 - DNA, 25 bp, Homo sapien
gaaagagtttgaggtggtccaagaa

SEQ ID NO: 2643345 - DNA, 25 bp, Homo sapien
tcagcaccatcccagtggtatgcag

SEQ ID NO: 2643346 - DNA, 25 bp, Homo sapien
caaagtagcatgaaacctgaagcag

SEQ ID NO: 2643347 - DNA, 25 bp, Homo sapien
gcaaatgaacaattagcctcaatag

SEQ ID NO: 2643348 - DNA, 25 bp, Homo sapien
cacacggacaaagaatatactcatg

SEQ ID NO: 2643349 - DNA, 25 bp, Homo sapien
tctcactttctaacacacacggaca

SEQ ID NO: 2643350 - DNA, 25 bp, Homo sapien
atctgattcagaaaccaacagtcaa

SEQ ID NO: 2643351 - DNA, 25 bp, Homo sapien
ttcagaaaccaacagtcaaaccatt

SEQ ID NO: 2643352 - DNA, 25 bp, Homo sapien
accaacagtcaaaccattctcccct

SEQ ID NO: 2643353 - DNA, 25 bp, Homo sapien
caacagtcaaaccattctcccctga

SEQ ID NO: 2643354 - DNA, 25 bp, Homo sapien
tttctctattgcaggcttcagaagg

SEQ ID NO: 2643355 - DNA, 25 bp, Homo sapien
gggaaagcaggatggtacagcccat

SEQ ID NO: 2643356 - DNA, 25 bp, Homo sapien
aggaagctgctgtcttggttacagg

SEQ ID NO: 2643357 - DNA, 25 bp, Homo sapien
agaaggtaaaagacagaggaagaga

SEQ ID NO: 2643358 - DNA, 25 bp, Homo sapien
tgtcttggttacaggcattcatgta

SEQ ID NO: 2643359 - DNA, 25 bp, Homo sapien
agctggaaggtggtcccaaaaggct

SEQ ID NO: 2643360 - DNA, 25 bp, Homo sapien
ccttctcctgagtctgcttccaaag

SEQ ID NO: 2643361 - DNA, 25 bp, Homo sapien
tccccgtccttctcctgagtctgct

SEQ ID NO: 2643362 - DNA, 25 bp, Homo sapien
tcctgagtctgcttccaaaggcaat

SEQ ID NO: 2643363 - DNA, 25 bp, Homo sapien
ttctcctgagtctgcttccaaaggc

SEQ ID NO: 2643364 - DNA, 25 bp, Homo sapien
catcctttaggctgacgtgcaagcg

SEQ ID NO: 2643365 - DNA, 25 bp, Homo sapien
cccaagatggccatggctctcaggg

SEQ ID NO: 2643366 - DNA, 25 bp, Homo sapien
cgtgcaagcgtcaaacccaagatgg

SEQ ID NO: 2643367 - DNA, 25 bp, Homo sapien
gagcagctgccaggatcatgcatcc

SEQ ID NO: 2643368 - DNA, 25 bp, Homo sapien
gatccaccttctgataccttataga

SEQ ID NO: 2643369 - DNA, 25 bp, Homo sapien
gaacttgaagtccagatccaccttc

SEQ ID NO: 2643370 - DNA, 25 bp, Homo sapien
tgatgcttctggaacttgaagtcca

SEQ ID NO: 2643371 - DNA, 25 bp, Homo sapien
tatctctgatgcttctggaacttga

SEQ ID NO: 2643372 - DNA, 25 bp, Homo sapien
tcccaggagaaatcctctaacaaag

SEQ ID NO: 2643373 - DNA, 25 bp, Homo sapien
attcccaggagaaatcctctaacaa

SEQ ID NO: 2643374 - DNA, 25 bp, Homo sapien
atcctctaacaaagttggcattctg

SEQ ID NO: 2643375 - DNA, 25 bp, Homo sapien
cctctaacaaagttggcattctgtt

SEQ ID NO: 2643376 - DNA, 25 bp, Homo sapien
tcactgtgttagcatggcacttctt

SEQ ID NO: 2643377 - DNA, 25 bp, Homo sapien
cttcactgtgttagcatggcacttc

SEQ ID NO: 2643378 - DNA, 25 bp, Homo sapien
ttcactgtgttagcatggcacttct

SEQ ID NO: 2643379 - DNA, 25 bp, Homo sapien
tgtcccagatctccaggagtcttga

SEQ ID NO: 2643380 - DNA, 25 bp, Homo sapien
catctgctgtccccttaattccagg

SEQ ID NO: 2643381 - DNA, 25 bp, Homo sapien
ttcacatagccttccgatcctggag

SEQ ID NO: 2643382 - DNA, 25 bp, Homo sapien
tcactccagaaccatgtcccagatc

SEQ ID NO: 2643383 - DNA, 25 bp, Homo sapien
tgctatccaatggcggtgtctgtct

SEQ ID NO: 2643384 - DNA, 25 bp, Homo sapien
ccttgtgctgtctactgattcgtct

SEQ ID NO: 2643385 - DNA, 25 bp, Homo sapien
tgtgctgtctactgattcgtctgat

SEQ ID NO: 2643386 - DNA, 25 bp, Homo sapien
tactgattcgtctgattccccttct

SEQ ID NO: 2643387 - DNA, 25 bp, Homo sapien
gtctactgattcgtctgattcccct

SEQ ID NO: 2643388 - DNA, 25 bp, Homo sapien
atcagctccaaatatgggccatggg

SEQ ID NO: 2643389 - DNA, 25 bp, Homo sapien
cacatcagctccaaatatgggccat

SEQ ID NO: 2643390 - DNA, 25 bp, Homo sapien
catggggcagcatctccagactggg

SEQ ID NO: 2643391 - DNA, 25 bp, Homo sapien
ggccatggggcagcatctccagact

SEQ ID NO: 2643392 - DNA, 25 bp, Homo sapien
ctcctctgcagtgaaggacctgagc

SEQ ID NO: 2643393 - DNA, 25 bp, Homo sapien
tgcagtgaaggacctgagcggtatt

SEQ ID NO: 2643394 - DNA, 25 bp, Homo sapien
gacctgagcggtattggatgagtcc

SEQ ID NO: 2643395 - DNA, 25 bp, Homo sapien
agctgaaaactgctcctctgcagtg

SEQ ID NO: 2643396 - DNA, 25 bp, Homo sapien
tcatgccaccagaggtaagggccca

SEQ ID NO: 2643397 - DNA, 25 bp, Homo sapien
tgccaccagaggtaagggcccatat

SEQ ID NO: 2643398 - DNA, 25 bp, Homo sapien
catgccaccagaggtaagggcccat

SEQ ID NO: 2643399 - DNA, 25 bp, Homo sapien
caccagaggtaagggcccatatccc

SEQ ID NO: 2643400 - DNA, 25 bp, Homo sapien
cccaacgctgcatggcagatgatga

SEQ ID NO: 2643401 - DNA, 25 bp, Homo sapien
atcagtggctgtgcacccaacgctg

SEQ ID NO: 2643402 - DNA, 25 bp, Homo sapien
gcctccgctgccagggagaagagct

SEQ ID NO: 2643403 - DNA, 25 bp, Homo sapien
tcaaagatccgacgctggcattaat

SEQ ID NO: 2643404 - DNA, 25 bp, Homo sapien
cagctcaggcacagttacagaacca

SEQ ID NO: 2643405 - DNA, 25 bp, Homo sapien
aaagaaactatcagctcaggcacag

SEQ ID NO: 2643406 - DNA, 25 bp, Homo sapien
gctcaggcacagttacagaaccaaa

SEQ ID NO: 2643407 - DNA, 25 bp, Homo sapien
agctcaggcacagttacagaaccaa

SEQ ID NO: 2643408 - DNA, 25 bp, Homo sapien
gttgccagcattgctgctccactct

SEQ ID NO: 2643409 - DNA, 25 bp, Homo sapien
cgttgccagcattgctgctccactc

SEQ ID NO: 2643410 - DNA, 25 bp, Homo sapien
ttgccagcattgctgctccactctg

SEQ ID NO: 2643411 - DNA, 25 bp, Homo sapien
cagcctctgtcccccttaagccact

SEQ ID NO: 2643412 - DNA, 25 bp, Homo sapien
gcctctgtcccccttaagccacttc

SEQ ID NO: 2643413 - DNA, 25 bp, Homo sapien
tctgtcccccttaagccacttctca

SEQ ID NO: 2643414 - DNA, 25 bp, Homo sapien
gcactcgctgttctcccagcctctg

SEQ ID NO: 2643415 - DNA, 25 bp, Homo sapien
ggcgtgtgttcgaactgtgcaagca

SEQ ID NO: 2643416 - DNA, 25 bp, Homo sapien
gaaggcgtgtgttcgaactgtgcaa

SEQ ID NO: 2643417 - DNA, 25 bp, Homo sapien
tgtgttcgaactgtgcaagcatctt

SEQ ID NO: 2643418 - DNA, 25 bp, Homo sapien
gttcgaactgtgcaagcatctttcc

SEQ ID NO: 2643419 - DNA, 25 bp, Homo sapien
ctaccaccattcttactaatgctgg

SEQ ID NO: 2643420 - DNA, 25 bp, Homo sapien
cccaagttacctgctgctgatgttc

SEQ ID NO: 2643421 - DNA, 25 bp, Homo sapien
ggtggagcccaagttacctgctgct

SEQ ID NO: 2643422 - DNA, 25 bp, Homo sapien
tcttactaatgctggtggagcccaa

SEQ ID NO: 2643423 - DNA, 25 bp, Homo sapien
gtctgctaaatactgcctttctctc

SEQ ID NO: 2643424 - DNA, 25 bp, Homo sapien
ctgctaaatactgcctttctctcat

SEQ ID NO: 2643425 - DNA, 25 bp, Homo sapien
tctgctaaatactgcctttctctca

SEQ ID NO: 2643426 - DNA, 25 bp, Homo sapien
gaacatctgacaagtcagaggagcc

SEQ ID NO: 2643427 - DNA, 25 bp, Homo sapien
tgtatttggagtcacaccaacccgg

SEQ ID NO: 2643428 - DNA, 25 bp, Homo sapien
gaaacatctcggacttggtgtctgt

SEQ ID NO: 2643429 - DNA, 25 bp, Homo sapien
gggaaaggcagaaacatctcggact

SEQ ID NO: 2643430 - DNA, 25 bp, Homo sapien
cctgtattccgggaaatcccagaca

SEQ ID NO: 2643431 - DNA, 25 bp, Homo sapien
tagattcttgatgcacacagagatg

SEQ ID NO: 2643432 - DNA, 25 bp, Homo sapien
caaaccctgtagattcttgatgcac

SEQ ID NO: 2643433 - DNA, 25 bp, Homo sapien
tgtattccgggaaatcccagacaaa

SEQ ID NO: 2643434 - DNA, 25 bp, Homo sapien
cctcaaagccttgtattgtcaggaa

SEQ ID NO: 2643435 - DNA, 25 bp, Homo sapien
tgctgttcagaaacttgacttttaa

SEQ ID NO: 2643436 - DNA, 25 bp, Homo sapien
ttccacgggatcctgatgctgttca

SEQ ID NO: 2643437 - DNA, 25 bp, Homo sapien
gcttccacgggatcctgatgctgtt

SEQ ID NO: 2643438 - DNA, 25 bp, Homo sapien
cagcttccacgggatcctgatgctg

SEQ ID NO: 2643439 - DNA, 25 bp, Homo sapien
tgaaataaaccaatcctccctgggc

SEQ ID NO: 2643440 - DNA, 25 bp, Homo sapien
gaaagctacaccagaaagagtccaa

SEQ ID NO: 2643441 - DNA, 25 bp, Homo sapien
cctgcagtagccagcaagttgagaa

SEQ ID NO: 2643442 - DNA, 25 bp, Homo sapien
tcaagaagcgggtggtgaaacccat

SEQ ID NO: 2643443 - DNA, 25 bp, Homo sapien
tacaccgtcttctacaattggtaaa

SEQ ID NO: 2643444 - DNA, 25 bp, Homo sapien
ctcatctacaccgtcttctacaatt

SEQ ID NO: 2643445 - DNA, 25 bp, Homo sapien
catctacaccgtcttctacaattgg

SEQ ID NO: 2643446 - DNA, 25 bp, Homo sapien
tcactcatctacaccgtcttctaca

SEQ ID NO: 2643447 - DNA, 25 bp, Homo sapien
gaggcatctgattaattgttaactg

SEQ ID NO: 2643448 - DNA, 25 bp, Homo sapien
ttcctttaagcacatgtccttcatt

SEQ ID NO: 2643449 - DNA, 25 bp, Homo sapien
cttttgcaggacaaagaggcatctg

SEQ ID NO: 2643450 - DNA, 25 bp, Homo sapien
gattaattgttaactgacatccact

SEQ ID NO: 2643451 - DNA, 25 bp, Homo sapien
agtaatgtggcctattgattttcca

SEQ ID NO: 2643452 - DNA, 25 bp, Homo sapien
tcagagtaatgtggcctattgattt

SEQ ID NO: 2643453 - DNA, 25 bp, Homo sapien
cttcctgctgatgtatggatttcag

SEQ ID NO: 2643454 - DNA, 25 bp, Homo sapien
attgttcttttgtctgttgttcttc

SEQ ID NO: 2643455 - DNA, 25 bp, Homo sapien
gaagcaggacgatcatcctgtttct

SEQ ID NO: 2643456 - DNA, 25 bp, Homo sapien
aagcaggacgatcatcctgtttctg

SEQ ID NO: 2643457 - DNA, 25 bp, Homo sapien
tgctcttgctgtgttattctatgaa

SEQ ID NO: 2643458 - DNA, 25 bp, Homo sapien
tcttgagaggaagatctggtcttgc

SEQ ID NO: 2643459 - DNA, 25 bp, Homo sapien
gcagttcttttgaatccctcacact

SEQ ID NO: 2643460 - DNA, 25 bp, Homo sapien
tcatctattttcaggtgcaatttct

SEQ ID NO: 2643461 - DNA, 25 bp, Homo sapien
atatgaagagtgacattggctgcac

SEQ ID NO: 2643462 - DNA, 25 bp, Homo sapien
ttcagtcacaccattaaccaatatg

SEQ ID NO: 2643463 - DNA, 25 bp, Homo sapien
gtgtaacgctgccttgcttcagtca

SEQ ID NO: 2643464 - DNA, 25 bp, Homo sapien
cattttcagtgtaacgctgccttgc

SEQ ID NO: 2643465 - DNA, 25 bp, Homo sapien
tggagtctcccctaatgtgccctca

SEQ ID NO: 2643466 - DNA, 25 bp, Homo sapien
gctcatggtgaagaagacagcactg

SEQ ID NO: 2643467 - DNA, 25 bp, Homo sapien
tctttaaactgtgcagaggtctgcc

SEQ ID NO: 2643468 - DNA, 25 bp, Homo sapien
gactcactggtctaagctgtgctaa

SEQ ID NO: 2643469 - DNA, 25 bp, Homo sapien
aaaccaatgagacacgaggcagcag

SEQ ID NO: 2643470 - DNA, 25 bp, Homo sapien
gggtagaactaccataaccaccagc

SEQ ID NO: 2643471 - DNA, 25 bp, Homo sapien
caccagctaatgcaagtgtttcata

SEQ ID NO: 2643472 - DNA, 25 bp, Homo sapien
ttccctgagggtagaactaccataa

SEQ ID NO: 2643473 - DNA, 25 bp, Homo sapien
cccaaagtgaccagcggcaaggttt

SEQ ID NO: 2643474 - DNA, 25 bp, Homo sapien
tgttgctgttcttaaacgcagcgtg

SEQ ID NO: 2643475 - DNA, 25 bp, Homo sapien
gagtgaacctgcaaacctttacggc

SEQ ID NO: 2643476 - DNA, 25 bp, Homo sapien
cgcagcgtgtctggcgtttgctcct

SEQ ID NO: 2643477 - DNA, 25 bp, Homo sapien
tcagagcggctgtttaggattcaga

SEQ ID NO: 2643478 - DNA, 25 bp, Homo sapien
gagaagccgtgaaggacatggaagg

SEQ ID NO: 2643479 - DNA, 25 bp, Homo sapien
tcagagctctaccaacatgagcaat

SEQ ID NO: 2643480 - DNA, 25 bp, Homo sapien
catgagcaatctgttggcatgacag

SEQ ID NO: 2643481 - DNA, 25 bp, Homo sapien
gctccaggaccagcactagattctg

SEQ ID NO: 2643482 - DNA, 25 bp, Homo sapien
aggtctttccatgtagtatctccag

SEQ ID NO: 2643483 - DNA, 25 bp, Homo sapien
gtcaactgagactgtgggcatctgg

SEQ ID NO: 2643484 - DNA, 25 bp, Homo sapien
aagggtagcaactcttctaacacgg

SEQ ID NO: 2643485 - DNA, 25 bp, Homo sapien
tccttgccatgactcagacatccag

SEQ ID NO: 2643486 - DNA, 25 bp, Homo sapien
tggaatatttctacgtggtttccta

SEQ ID NO: 2643487 - DNA, 25 bp, Homo sapien
cctgtggaatatttctacgtggttt

SEQ ID NO: 2643488 - DNA, 25 bp, Homo sapien
tgtggaatatttctacgtggtttcc

SEQ ID NO: 2643489 - DNA, 25 bp, Homo sapien
ttctctgccgtaggccattgttcat

SEQ ID NO: 2643490 - DNA, 25 bp, Homo sapien
atttctctgccgtaggccattgttc

SEQ ID NO: 2643491 - DNA, 25 bp, Homo sapien
catttctctgccgtaggccattgtt

SEQ ID NO: 2643492 - DNA, 25 bp, Homo sapien
tttctctgccgtaggccattgttca

SEQ ID NO: 2643493 - DNA, 25 bp, Homo sapien
cagcttctgaaggtgtaggaaccca

SEQ ID NO: 2643494 - DNA, 25 bp, Homo sapien
ggaaggtgtcaccagtccagctagc

SEQ ID NO: 2643495 - DNA, 25 bp, Homo sapien
tgctaagtgtgaccctgctagggac

SEQ ID NO: 2643496 - DNA, 25 bp, Homo sapien
aatattcaatgctggcctgagccca

SEQ ID NO: 2643497 - DNA, 25 bp, Homo sapien
gggctcctggcgtctgtggcttccg

SEQ ID NO: 2643498 - DNA, 25 bp, Homo sapien
ctgagagtacagggctcctggcgtc

SEQ ID NO: 2643499 - DNA, 25 bp, Homo sapien
agagtacagggctcctggcgtctgt

SEQ ID NO: 2643500 - DNA, 25 bp, Homo sapien
cagggctcctggcgtctgtggcttc

SEQ ID NO: 2643501 - DNA, 25 bp, Homo sapien
cgtgtgaagccatcaccctgacata

SEQ ID NO: 2643502 - DNA, 25 bp, Homo sapien
cgctgtccactggaatgtggaagaa

SEQ ID NO: 2643503 - DNA, 25 bp, Homo sapien
gtccactggaatgtggaagaacacg

SEQ ID NO: 2643504 - DNA, 25 bp, Homo sapien
ggctcgctgtccactggaatgtgga

SEQ ID NO: 2643505 - DNA, 25 bp, Homo sapien
gctccatggcctccagaatatttat

SEQ ID NO: 2643506 - DNA, 25 bp, Homo sapien
aaacacaagtcaaatttattagagt

SEQ ID NO: 2643507 - DNA, 25 bp, Homo sapien
tccagaatatttatgccttctttcg

SEQ ID NO: 2643508 - DNA, 25 bp, Homo sapien
agaatatttatgccttctttcgcct

SEQ ID NO: 2643509 - DNA, 25 bp, Homo sapien
tgatggggtaatataaaacctgcca

SEQ ID NO: 2643510 - DNA, 25 bp, Homo sapien
ccgagccgcgggtactgcggcttct

SEQ ID NO: 2643511 - DNA, 25 bp, Homo sapien
ggtccgcgatctgcgctccactgtg

SEQ ID NO: 2643512 - DNA, 25 bp, Homo sapien
gggtactgcggcttctccttgcaaa

SEQ ID NO: 2643513 - DNA, 25 bp, Homo sapien
gcgctgcacccgagccgcgggtact

SEQ ID NO: 2643514 - DNA, 25 bp, Homo sapien
gcaaacggaggctcccgcgcgcggg

SEQ ID NO: 2643515 - DNA, 25 bp, Homo sapien
tacatggcagtgacggggccgcagg

SEQ ID NO: 2643516 - DNA, 25 bp, Homo sapien
cgcaggagcccgctgctaagttcac

SEQ ID NO: 2643517 - DNA, 25 bp, Homo sapien
gctgctaagttcacagccgcccggg

SEQ ID NO: 2643518 - DNA, 25 bp, Homo sapien
ctggcccaaagtgcctcccgagcgg

SEQ ID NO: 2643519 - DNA, 25 bp, Homo sapien
gtctggcccaaagtgcctcccgagc

SEQ ID NO: 2643520 - DNA, 25 bp, Homo sapien
ggcccaaagtgcctcccgagcggcg

SEQ ID NO: 2643521 - DNA, 25 bp, Homo sapien
cccaaagtgcctcccgagcggcggg

SEQ ID NO: 2643522 - DNA, 25 bp, Homo sapien
cccttcctccgacagagtttctgag

SEQ ID NO: 2643523 - DNA, 25 bp, Homo sapien
ggctctggcgcctccgaaactttct

SEQ ID NO: 2643524 - DNA, 25 bp, Homo sapien
ttctgagcccgaggaggactcggcc

SEQ ID NO: 2643525 - DNA, 25 bp, Homo sapien
gaagcacccggagaggacgcggcga

SEQ ID NO: 2643526 - DNA, 25 bp, Homo sapien
gcaggatgggaaactacggtcgccc

SEQ ID NO: 2643527 - DNA, 25 bp, Homo sapien
ccaagcgcttcggtgggaaacaacg

SEQ ID NO: 2643528 - DNA, 25 bp, Homo sapien
taactatcgttgtcccgtgctcggg

SEQ ID NO: 2643529 - DNA, 25 bp, Homo sapien
gaaacaagtctgaacgggagctgca

SEQ ID NO: 2643530 - DNA, 25 bp, Homo sapien
aaaataagccggacagagcagccag

SEQ ID NO: 2643531 - DNA, 25 bp, Homo sapien
ggaaactgggcagatacagatcccc

SEQ ID NO: 2643532 - DNA, 25 bp, Homo sapien
caagttctggaggaacatccttcca

SEQ ID NO: 2643533 - DNA, 25 bp, Homo sapien
tgctcagtgtgtcaggaagcgaccc

SEQ ID NO: 2643534 - DNA, 25 bp, Homo sapien
tccccacaagaaacgtccaaagcaa

SEQ ID NO: 2643535 - DNA, 25 bp, Homo sapien
ttccccacaagaaacgtccaaagca

SEQ ID NO: 2643536 - DNA, 25 bp, Homo sapien
ctcccaacacgagggaactatagat

SEQ ID NO: 2643537 - DNA, 25 bp, Homo sapien
atgtgtcccgtgaggtccctgctct

SEQ ID NO: 2643538 - DNA, 25 bp, Homo sapien
ttctggcagccccatcacgttggga

SEQ ID NO: 2643539 - DNA, 25 bp, Homo sapien
ggaactatagatctctccctgcatg

SEQ ID NO: 2643540 - DNA, 25 bp, Homo sapien
gtaaaatcagcatatctgtacttgc

SEQ ID NO: 2643541 - DNA, 25 bp, Homo sapien
aatcagcatatctgtacttgcatgg

SEQ ID NO: 2643542 - DNA, 25 bp, Homo sapien
gcatatctgtacttgcatggcacct

SEQ ID NO: 2643543 - DNA, 25 bp, Homo sapien
tctgtacttgcatggcacctgaacc

SEQ ID NO: 2643544 - DNA, 25 bp, Homo sapien
gtccataacttagcaacagactgaa

SEQ ID NO: 2643545 - DNA, 25 bp, Homo sapien
tctcagggacccatagtagcacaaa

SEQ ID NO: 2643546 - DNA, 25 bp, Homo sapien
ctgaaggctatgagcaaaccccacc

SEQ ID NO: 2643547 - DNA, 25 bp, Homo sapien
tccttgtagctacagatgtcagccc

SEQ ID NO: 2643548 - DNA, 25 bp, Homo sapien
catgctgcctttctcgtgatagtga

SEQ ID NO: 2643549 - DNA, 25 bp, Homo sapien
gccaaggctgttataatgctacgaa

SEQ ID NO: 2643550 - DNA, 25 bp, Homo sapien
tcaatttccgaaagacctcagcctg

SEQ ID NO: 2643551 - DNA, 25 bp, Homo sapien
catctatgactgctaccctggtgaa

SEQ ID NO: 2643552 - DNA, 25 bp, Homo sapien
aaaccagaatttgcaacaagccttc

SEQ ID NO: 2643553 - DNA, 25 bp, Homo sapien
tgcagtaaaaccaccagtgtcaaaa

SEQ ID NO: 2643554 - DNA, 25 bp, Homo sapien
gcagtaaaaccaccagtgtcaaaac

SEQ ID NO: 2643555 - DNA, 25 bp, Homo sapien
agtgtcaaaaccagaatttgcaaca

SEQ ID NO: 2643556 - DNA, 25 bp, Homo sapien
gataaatggagatatgtgtgggccc

SEQ ID NO: 2643557 - DNA, 25 bp, Homo sapien
tgttgagaaccactccctagtatgg

SEQ ID NO: 2643558 - DNA, 25 bp, Homo sapien
tgatttataccaacggaatgggaga

SEQ ID NO: 2643559 - DNA, 25 bp, Homo sapien
gaggccatgggcagacgattccttg

SEQ ID NO: 2643560 - DNA, 25 bp, Homo sapien
ctgatgtacaacaatgagaagctgt

SEQ ID NO: 2643561 - DNA, 25 bp, Homo sapien
ttttcaaagacaatactaggatggc

SEQ ID NO: 2643562 - DNA, 25 bp, Homo sapien
gaagctgtagacctctctcacttgt

SEQ ID NO: 2643563 - DNA, 25 bp, Homo sapien
aagacaatactaggatggcaggacc

SEQ ID NO: 2643564 - DNA, 25 bp, Homo sapien
gagcacaccatatatctagtaagag

SEQ ID NO: 2643565 - DNA, 25 bp, Homo sapien
gaggtgaacatccaaaattcagtcc

SEQ ID NO: 2643566 - DNA, 25 bp, Homo sapien
catagaaccaccatacggtccagca

SEQ ID NO: 2643567 - DNA, 25 bp, Homo sapien
caatgggcgaaggacctaaagagac

SEQ ID NO: 2643568 - DNA, 25 bp, Homo sapien
gagaccacaatctgagcactaggga

SEQ ID NO: 2643569 - DNA, 25 bp, Homo sapien
aatacatcatgagaccaggtacggt

SEQ ID NO: 2643570 - DNA, 25 bp, Homo sapien
tgagagactcctgaatccttttgaa

SEQ ID NO: 2643571 - DNA, 25 bp, Homo sapien
gaaagcctagttcctcttgctggga

SEQ ID NO: 2643572 - DNA, 25 bp, Homo sapien
tgaaccacgttcaagtcccagcctt

SEQ ID NO: 2643573 - DNA, 25 bp, Homo sapien
catatggcaacgtgatacatcagtg

SEQ ID NO: 2643574 - DNA, 25 bp, Homo sapien
cgaatagtcatcaaggaagttctca

SEQ ID NO: 2643575 - DNA, 25 bp, Homo sapien
catcgtctgattggccgaatagtca

SEQ ID NO: 2643576 - DNA, 25 bp, Homo sapien
tgaaagcctgactgcaatagtctgg

SEQ ID NO: 2643577 - DNA, 25 bp, Homo sapien
gagcaatcatctgaagaccaggagg

SEQ ID NO: 2643578 - DNA, 25 bp, Homo sapien
cggagtcactgtaccagctgtggac

SEQ ID NO: 2643579 - DNA, 25 bp, Homo sapien
gtaaagccactatgttcacgttgcg

SEQ ID NO: 2643580 - DNA, 25 bp, Homo sapien
gatttgacagactctaaagacaact

SEQ ID NO: 2643581 - DNA, 25 bp, Homo sapien
gaagcaataaaaggcatccggcatg

SEQ ID NO: 2643582 - DNA, 25 bp, Homo sapien
taagcatattacgaagtgtctacag

SEQ ID NO: 2643583 - DNA, 25 bp, Homo sapien
tgtggattgcccaaagttcaaaata

SEQ ID NO: 2643584 - DNA, 25 bp, Homo sapien
ggattaccagtgcccgtcaccacgt

SEQ ID NO: 2643585 - DNA, 25 bp, Homo sapien
catgtactaaggatgctgcagtctc

SEQ ID NO: 2643586 - DNA, 25 bp, Homo sapien
gcttccctgaaaactaagcctgaga

SEQ ID NO: 2643587 - DNA, 25 bp, Homo sapien
gttttgagattcctcccgcgctagc

SEQ ID NO: 2643588 - DNA, 25 bp, Homo sapien
tccactgtgccaaagcagatctgct

SEQ ID NO: 2643589 - DNA, 25 bp, Homo sapien
cacagcagtcttggaaaataggcca

SEQ ID NO: 2643590 - DNA, 25 bp, Homo sapien
gatgtgcccagttgacaccaatgtg

SEQ ID NO: 2643591 - DNA, 25 bp, Homo sapien
tgacaccaatgtggcacagcagtct

SEQ ID NO: 2643592 - DNA, 25 bp, Homo sapien
ggcacagcagtcttggaaaataggc

SEQ ID NO: 2643593 - DNA, 25 bp, Homo sapien
ttctcaacataggtcagggtcccag

SEQ ID NO: 2643594 - DNA, 25 bp, Homo sapien
gagagtctctggaaagattggtact

SEQ ID NO: 2643595 - DNA, 25 bp, Homo sapien
gcctgcctaataaggctcagttcat

SEQ ID NO: 2643596 - DNA, 25 bp, Homo sapien
taagaggtataaagagacagcaacc

SEQ ID NO: 2643597 - DNA, 25 bp, Homo sapien
gaatattcaaaggacggaagcccag

SEQ ID NO: 2643598 - DNA, 25 bp, Homo sapien
tgagtccactgcagaagtaacagac

SEQ ID NO: 2643599 - DNA, 25 bp, Homo sapien
gaacatgggctattcccctagctag

SEQ ID NO: 2643600 - DNA, 25 bp, Homo sapien
ggtggaacacctattgcctcgaata

SEQ ID NO: 2643601 - DNA, 25 bp, Homo sapien
ggtccagcagccgatgctcccattc

SEQ ID NO: 2643602 - DNA, 25 bp, Homo sapien
aggtccagcagccgatgctcccatt

SEQ ID NO: 2643603 - DNA, 25 bp, Homo sapien
caggtccagcagccgatgctcccat

SEQ ID NO: 2643604 - DNA, 25 bp, Homo sapien
gtccagcagccgatgctcccattcc

SEQ ID NO: 2643605 - DNA, 25 bp, Homo sapien
aacccaacggtgtgtacttctgcaa

SEQ ID NO: 2643606 - DNA, 25 bp, Homo sapien
tatggtcaggtcaacaaagtctagc

SEQ ID NO: 2643607 - DNA, 25 bp, Homo sapien
caatgaagtagttctcaggatcccc

SEQ ID NO: 2643608 - DNA, 25 bp, Homo sapien
tctagcctgtagctcaaaactgagg

SEQ ID NO: 2643609 - DNA, 25 bp, Homo sapien
gaatactcaaagacatactagtggg

SEQ ID NO: 2643610 - DNA, 25 bp, Homo sapien
tgacactgttctcagttaccagaaa

SEQ ID NO: 2643611 - DNA, 25 bp, Homo sapien
taggtctttgtggagtgaatactca

SEQ ID NO: 2643612 - DNA, 25 bp, Homo sapien
tgcaatactgcaaatcaactttccc

SEQ ID NO: 2643613 - DNA, 25 bp, Homo sapien
tatagtgaggtagtccagcaactgc

SEQ ID NO: 2643614 - DNA, 25 bp, Homo sapien
cctggccatgtatttggcaaagagg

SEQ ID NO: 2643615 - DNA, 25 bp, Homo sapien
ggagaatctgcctgacgtaaatttc

SEQ ID NO: 2643616 - DNA, 25 bp, Homo sapien
ccagaaatatcctggccatgtattt

SEQ ID NO: 2643617 - DNA, 25 bp, Homo sapien
tgatccaagttgcacaggtggaaga

SEQ ID NO: 2643618 - DNA, 25 bp, Homo sapien
gatccaagttgcacaggtggaagag

SEQ ID NO: 2643619 - DNA, 25 bp, Homo sapien
ctgatccaagttgcacaggtggaag

SEQ ID NO: 2643620 - DNA, 25 bp, Homo sapien
ccctgaccatgagtatcattacagc

SEQ ID NO: 2643621 - DNA, 25 bp, Homo sapien
cgatcccctgaccatgagtatcatt

SEQ ID NO: 2643622 - DNA, 25 bp, Homo sapien
accatgagtatcattacagctgcca

SEQ ID NO: 2643623 - DNA, 25 bp, Homo sapien
agtatcattacagctgccagaagcc

SEQ ID NO: 2643624 - DNA, 25 bp, Homo sapien
ccatctgactggcctggctggtgaa

SEQ ID NO: 2643625 - DNA, 25 bp, Homo sapien
tgactggcctggctggtgaagcaca

SEQ ID NO: 2643626 - DNA, 25 bp, Homo sapien
gactggcctggctggtgaagcacac

SEQ ID NO: 2643627 - DNA, 25 bp, Homo sapien
tctgactggcctggctggtgaagca

SEQ ID NO: 2643628 - DNA, 25 bp, Homo sapien
ctttgggtacaggttcgcaactcca

SEQ ID NO: 2643629 - DNA, 25 bp, Homo sapien
ggtacaggttcgcaactccactaaa

SEQ ID NO: 2643630 - DNA, 25 bp, Homo sapien
taatttgtcaagagtcccttgagtc

SEQ ID NO: 2643631 - DNA, 25 bp, Homo sapien
gccacagtgtagtaaaaacagaaaa

SEQ ID NO: 2643632 - DNA, 25 bp, Homo sapien
tatttgttcttgacgacaagatctg

SEQ ID NO: 2643633 - DNA, 25 bp, Homo sapien
ttcttgacgacaagatctggctcca

SEQ ID NO: 2643634 - DNA, 25 bp, Homo sapien
ctccgcttgccagaagaaaactctc

SEQ ID NO: 2643635 - DNA, 25 bp, Homo sapien
aaacaggcctgacacctccgcttgc

SEQ ID NO: 2643636 - DNA, 25 bp, Homo sapien
ggtggaggggataatatgtggtcaa

SEQ ID NO: 2643637 - DNA, 25 bp, Homo sapien
gtggaggggataatatgtggtcaag

SEQ ID NO: 2643638 - DNA, 25 bp, Homo sapien
ggctccctcgccttagctgtcttcc

SEQ ID NO: 2643639 - DNA, 25 bp, Homo sapien
atctgggttgctgcatttccgaaac

SEQ ID NO: 2643640 - DNA, 25 bp, Homo sapien
tgggttgctgcatttccgaaacggc

SEQ ID NO: 2643641 - DNA, 25 bp, Homo sapien
ggttgctgcatttccgaaacggcat

SEQ ID NO: 2643642 - DNA, 25 bp, Homo sapien
actgctttctggattagataagatt

SEQ ID NO: 2643643 - DNA, 25 bp, Homo sapien
ttaactgctttctggattagataag

SEQ ID NO: 2643644 - DNA, 25 bp, Homo sapien
ccttctctcatccaagccgctgcga

SEQ ID NO: 2643645 - DNA, 25 bp, Homo sapien
ttctctcatccaagccgctgcgact

SEQ ID NO: 2643646 - DNA, 25 bp, Homo sapien
tccaggccatttttaaactggtaga

SEQ ID NO: 2643647 - DNA, 25 bp, Homo sapien
tagacaagaccatcatgtagaaaga

SEQ ID NO: 2643648 - DNA, 25 bp, Homo sapien
actggtagacaagaccatcatgtag

SEQ ID NO: 2643649 - DNA, 25 bp, Homo sapien
ttttaaactggtagacaagaccatc

SEQ ID NO: 2643650 - DNA, 25 bp, Homo sapien
gcctgaaggagagatttgggcttcc

SEQ ID NO: 2643651 - DNA, 25 bp, Homo sapien
tgggtctgggaaccaccatatgagc

SEQ ID NO: 2643652 - DNA, 25 bp, Homo sapien
tcactggtgcaaaaggcctgaagga

SEQ ID NO: 2643653 - DNA, 25 bp, Homo sapien
tgcagcgtggctctgaacaaggtgg

SEQ ID NO: 2643654 - DNA, 25 bp, Homo sapien
gacgtctctgcagaggccggccagg

SEQ ID NO: 2643655 - DNA, 25 bp, Homo sapien
gcgcacgaggttggacgtctctgca

SEQ ID NO: 2643656 - DNA, 25 bp, Homo sapien
gcacgaggttggacgtctctgcaga

SEQ ID NO: 2643657 - DNA, 25 bp, Homo sapien
acgtctctgcagaggccggccaggc

SEQ ID NO: 2643658 - DNA, 25 bp, Homo sapien
tgagcgagggcgccgactggcccag

SEQ ID NO: 2643659 - DNA, 25 bp, Homo sapien
gtgagcgagggcgccgactggccca

SEQ ID NO: 2643660 - DNA, 25 bp, Homo sapien
gagcgagggcgccgactggcccagg

SEQ ID NO: 2643661 - DNA, 25 bp, Homo sapien
agcgagggcgccgactggcccaggg

SEQ ID NO: 2643662 - DNA, 25 bp, Homo sapien
taagtgattccttgataacaatgtc

SEQ ID NO: 2643663 - DNA, 25 bp, Homo sapien
cctgcaggtaaacaagctaataatt

SEQ ID NO: 2643664 - DNA, 25 bp, Homo sapien
tagattttgggaggtactcttctca

SEQ ID NO: 2643665 - DNA, 25 bp, Homo sapien
ttcccaaatatcttaggtcaggtga

SEQ ID NO: 2643666 - DNA, 25 bp, Homo sapien
tcaatttgtttgaagacaaggaaaa

SEQ ID NO: 2643667 - DNA, 25 bp, Homo sapien
ttgtttgaagacaaggaaaagagaa

SEQ ID NO: 2643668 - DNA, 25 bp, Homo sapien
ctccgcaaatgtcaatttgtttgaa

SEQ ID NO: 2643669 - DNA, 25 bp, Homo sapien
cgcaaatgtcaatttgtttgaagac

SEQ ID NO: 2643670 - DNA, 25 bp, Homo sapien
tacagctctacgacaggggcaaggg

SEQ ID NO: 2643671 - DNA, 25 bp, Homo sapien
gaacaaaaacgaaggtgtgccatga

SEQ ID NO: 2643672 - DNA, 25 bp, Homo sapien
gaggaatgttctactgcacaacgca

SEQ ID NO: 2643673 - DNA, 25 bp, Homo sapien
cagtctagcagggaggtattcgaca

SEQ ID NO: 2643674 - DNA, 25 bp, Homo sapien
gaatacaagcactccagagactctg

SEQ ID NO: 2643675 - DNA, 25 bp, Homo sapien
tatcccaagagcaatacaggttacc

SEQ ID NO: 2643676 - DNA, 25 bp, Homo sapien
gtccacagctgaaggcactatttca

SEQ ID NO: 2643677 - DNA, 25 bp, Homo sapien
tgtaatcacactcagcagttcctgt

SEQ ID NO: 2643678 - DNA, 25 bp, Homo sapien
tccaggcacacccacgcagagaccc

SEQ ID NO: 2643679 - DNA, 25 bp, Homo sapien
gctccagctggtgcccaatcctttc

SEQ ID NO: 2643680 - DNA, 25 bp, Homo sapien
gcacacccacgcagagacccatgca

SEQ ID NO: 2643681 - DNA, 25 bp, Homo sapien
gctggtgcccaatcctttccaggaa

SEQ ID NO: 2643682 - DNA, 25 bp, Homo sapien
cctgaaaagcccctagtgatgtttt

SEQ ID NO: 2643683 - DNA, 25 bp, Homo sapien
tctattcccgaaagccattgcctga

SEQ ID NO: 2643684 - DNA, 25 bp, Homo sapien
ggtcattctgcaaagtgatagcagc

SEQ ID NO: 2643685 - DNA, 25 bp, Homo sapien
tctggagactcagcagacactttcc

SEQ ID NO: 2643686 - DNA, 25 bp, Homo sapien
tttgcaaacaatcaagctacatgtg

SEQ ID NO: 2643687 - DNA, 25 bp, Homo sapien
tcaagctacatgtggccataagccg

SEQ ID NO: 2643688 - DNA, 25 bp, Homo sapien
cagccagcctaggattcctcagcag

SEQ ID NO: 2643689 - DNA, 25 bp, Homo sapien
taagccgtttattcctggccacagc

SEQ ID NO: 2643690 - DNA, 25 bp, Homo sapien
tcctacccaaaaatggtgtcattaa

SEQ ID NO: 2643691 - DNA, 25 bp, Homo sapien
aagcagagtgctgttgcagagtaat

SEQ ID NO: 2643692 - DNA, 25 bp, Homo sapien
tccctcctacccaaaaatggtgtca

SEQ ID NO: 2643693 - DNA, 25 bp, Homo sapien
cagagtgctgttgcagagtaatata

SEQ ID NO: 2643694 - DNA, 25 bp, Homo sapien
gaggacagacgataagtgttctgtt

SEQ ID NO: 2643695 - DNA, 25 bp, Homo sapien
gacagacgataagtgttctgtttcc

SEQ ID NO: 2643696 - DNA, 25 bp, Homo sapien
tctcctgaggacagacgataagtgt

SEQ ID NO: 2643697 - DNA, 25 bp, Homo sapien
ctgaggacagacgataagtgttctg

SEQ ID NO: 2643698 - DNA, 25 bp, Homo sapien
tgtgccacctagtggacaaactacc

SEQ ID NO: 2643699 - DNA, 25 bp, Homo sapien
ctccatcccttgcaaaggagatttg

SEQ ID NO: 2643700 - DNA, 25 bp, Homo sapien
gatttgctgatgtgccacctagtgg

SEQ ID NO: 2643701 - DNA, 25 bp, Homo sapien
cccttgcaaaggagatttgctgatg

SEQ ID NO: 2643702 - DNA, 25 bp, Homo sapien
ccacctgaaccctggtgatgattcc

SEQ ID NO: 2643703 - DNA, 25 bp, Homo sapien
gatgattccatactttacctgacaa

SEQ ID NO: 2643704 - DNA, 25 bp, Homo sapien
ctgaaccctggtgatgattccatac

SEQ ID NO: 2643705 - DNA, 25 bp, Homo sapien
tacctgacaaccctgaaaacctgtc

SEQ ID NO: 2643706 - DNA, 25 bp, Homo sapien
cccaactctgacatctgccttgatt

SEQ ID NO: 2643707 - DNA, 25 bp, Homo sapien
gaggaaaaaccccaactctgacatc

SEQ ID NO: 2643708 - DNA, 25 bp, Homo sapien
gaaaaaccccaactctgacatctgc

SEQ ID NO: 2643709 - DNA, 25 bp, Homo sapien
ccccaactctgacatctgccttgat

SEQ ID NO: 2643710 - DNA, 25 bp, Homo sapien
gaaggcaactccttaattctctttc

SEQ ID NO: 2643711 - DNA, 25 bp, Homo sapien
ccttttaggtgaaatgactcagggc

SEQ ID NO: 2643712 - DNA, 25 bp, Homo sapien
tgaaggcaactccttaattctcttt

SEQ ID NO: 2643713 - DNA, 25 bp, Homo sapien
cattgaaggcaactccttaattctc

SEQ ID NO: 2643714 - DNA, 25 bp, Homo sapien
accaagagcaccctttccattgcca

SEQ ID NO: 2643715 - DNA, 25 bp, Homo sapien
aatacacatccctgctaacttgcgg

SEQ ID NO: 2643716 - DNA, 25 bp, Homo sapien
taacttgcgggggttctggcagctc

SEQ ID NO: 2643717 - DNA, 25 bp, Homo sapien
tttctagtctgatgctttttctgga

SEQ ID NO: 2643718 - DNA, 25 bp, Homo sapien
cccactccattccactggcctaatc

SEQ ID NO: 2643719 - DNA, 25 bp, Homo sapien
aggaacatttgaggagttcccactc

SEQ ID NO: 2643720 - DNA, 25 bp, Homo sapien
actggcctaatccagccccatccag

SEQ ID NO: 2643721 - DNA, 25 bp, Homo sapien
ggaacatttgaggagttcccactcc

SEQ ID NO: 2643722 - DNA, 25 bp, Homo sapien
agcctctcacaacagtctagccatg

SEQ ID NO: 2643723 - DNA, 25 bp, Homo sapien
tggagccctcttcgtcttagaatgc

SEQ ID NO: 2643724 - DNA, 25 bp, Homo sapien
ctcttcgtcttagaatgctggactc

SEQ ID NO: 2643725 - DNA, 25 bp, Homo sapien
agtctagccatgctgtactacctct

SEQ ID NO: 2643726 - DNA, 25 bp, Homo sapien
tgaaaggagttgctacccctcgaca

SEQ ID NO: 2643727 - DNA, 25 bp, Homo sapien
gacttcccagacacttgacggcatg

SEQ ID NO: 2643728 - DNA, 25 bp, Homo sapien
aatggctggccactgacaatgctac

SEQ ID NO: 2643729 - DNA, 25 bp, Homo sapien
tatccattatacagaggacggcagg

SEQ ID NO: 2643730 - DNA, 25 bp, Homo sapien
ttaaagaactcaactctacccatct

SEQ ID NO: 2643731 - DNA, 25 bp, Homo sapien
gaatagagatatgcaggtttcagcc

SEQ ID NO: 2643732 - DNA, 25 bp, Homo sapien
ggtttcagcctagctttactaacac

SEQ ID NO: 2643733 - DNA, 25 bp, Homo sapien
gattacctcacaacacaggattgga

SEQ ID NO: 2643734 - DNA, 25 bp, Homo sapien
aaattggtcctaaatacatactgca

SEQ ID NO: 2643735 - DNA, 25 bp, Homo sapien
gagctggtttgtctcacatactatg

SEQ ID NO: 2643736 - DNA, 25 bp, Homo sapien
tgtaaactcccctatattagcctgt

SEQ ID NO: 2643737 - DNA, 25 bp, Homo sapien
atactccagatttttgacactgggc

SEQ ID NO: 2643738 - DNA, 25 bp, Homo sapien
ggcacccagaagttaatatccagga

SEQ ID NO: 2643739 - DNA, 25 bp, Homo sapien
caattagcttctagagagagtggca

SEQ ID NO: 2643740 - DNA, 25 bp, Homo sapien
cccacacgtggaaatgaaacagaca

SEQ ID NO: 2643741 - DNA, 25 bp, Homo sapien
gcagtgtacaacaacatttggcggg

SEQ ID NO: 2643742 - DNA, 25 bp, Homo sapien
tcagaaaatgttagtgctagcacca

SEQ ID NO: 2643743 - DNA, 25 bp, Homo sapien
acttaatgccggatactcagcctca

SEQ ID NO: 2643744 - DNA, 25 bp, Homo sapien
gcagcaaagagaactggtaaagtct

SEQ ID NO: 2643745 - DNA, 25 bp, Homo sapien
tttgatatggctcccagaaagtgac

SEQ ID NO: 2643746 - DNA, 25 bp, Homo sapien
tagaacaacctaaggaaagtgtctg

SEQ ID NO: 2643747 - DNA, 25 bp, Homo sapien
gactttacaccagctttcagtttag

SEQ ID NO: 2643748 - DNA, 25 bp, Homo sapien
aacaacctaaggaaagtgtctgaca

SEQ ID NO: 2643749 - DNA, 25 bp, Homo sapien
aagatgaatgccagactttacacca

SEQ ID NO: 2643750 - DNA, 25 bp, Homo sapien
ctccctagttcaagtgattctagtg

SEQ ID NO: 2643751 - DNA, 25 bp, Homo sapien
ccacctccagctaatatttgtgttt

SEQ ID NO: 2643752 - DNA, 25 bp, Homo sapien
caccacctccagctaatatttgtgt

SEQ ID NO: 2643753 - DNA, 25 bp, Homo sapien
ctcccaccaccacctccagctaata

SEQ ID NO: 2643754 - DNA, 25 bp, Homo sapien
taattgtgaacctctgttatgggca

SEQ ID NO: 2643755 - DNA, 25 bp, Homo sapien
gatgacagaaagatagaagcacagg

SEQ ID NO: 2643756 - DNA, 25 bp, Homo sapien
taaggagtattccatgacctatagc

SEQ ID NO: 2643757 - DNA, 25 bp, Homo sapien
gaagcattcccaaaggaataaggag

SEQ ID NO: 2643758 - DNA, 25 bp, Homo sapien
aatgaactagtcacttggtatccta

SEQ ID NO: 2643759 - DNA, 25 bp, Homo sapien
attttcaatgaactagtcacttggt

SEQ ID NO: 2643760 - DNA, 25 bp, Homo sapien
gaactagtcacttggtatcctattg

SEQ ID NO: 2643761 - DNA, 25 bp, Homo sapien
ttcaatgaactagtcacttggtatc

SEQ ID NO: 2643762 - DNA, 25 bp, Homo sapien
tgtcgggctgagttgaaatggctct

SEQ ID NO: 2643763 - DNA, 25 bp, Homo sapien
ctgggtccactagtctctggcgatg

SEQ ID NO: 2643764 - DNA, 25 bp, Homo sapien
ctagtctctggcgatgtcgggctga

SEQ ID NO: 2643765 - DNA, 25 bp, Homo sapien
ctgagttgaaatggctcttcggagg

SEQ ID NO: 2643766 - DNA, 25 bp, Homo sapien
gtttttcatgacgttgttttccagc

SEQ ID NO: 2643767 - DNA, 25 bp, Homo sapien
ttttcatgacgttgttttccagcat

SEQ ID NO: 2643768 - DNA, 25 bp, Homo sapien
tttcatgacgttgttttccagcatc

SEQ ID NO: 2643769 - DNA, 25 bp, Homo sapien
tgaggtggcagagcttcaggtacat

SEQ ID NO: 2643770 - DNA, 25 bp, Homo sapien
atgaaaatgttgaggtggcagagct

SEQ ID NO: 2643771 - DNA, 25 bp, Homo sapien
ccctacttaggaccatcaggatgaa

SEQ ID NO: 2643772 - DNA, 25 bp, Homo sapien
cctacttaggaccatcaggatgaaa

SEQ ID NO: 2643773 - DNA, 25 bp, Homo sapien
tgttacttgggaaagcctgtgacct

SEQ ID NO: 2643774 - DNA, 25 bp, Homo sapien
gataaatatgcgtatcagccctgcc

SEQ ID NO: 2643775 - DNA, 25 bp, Homo sapien
ttgatctgcacaaccctatatggga

SEQ ID NO: 2643776 - DNA, 25 bp, Homo sapien
taggattcttcaacggaacagtggc

SEQ ID NO: 2643777 - DNA, 25 bp, Homo sapien
aacttcctcttctggggagactcag

SEQ ID NO: 2643778 - DNA, 25 bp, Homo sapien
ttcctcttctggggagactcagctc

SEQ ID NO: 2643779 - DNA, 25 bp, Homo sapien
aaacttcctcttctggggagactca

SEQ ID NO: 2643780 - DNA, 25 bp, Homo sapien
ctcttctggggagactcagctcctt

SEQ ID NO: 2643781 - DNA, 25 bp, Homo sapien
aatcaatgtactctgtctcctaacc

SEQ ID NO: 2643782 - DNA, 25 bp, Homo sapien
catatggaacaaaccctggaaatta

SEQ ID NO: 2643783 - DNA, 25 bp, Homo sapien
tatacatttaggtttgcaatgccca

SEQ ID NO: 2643784 - DNA, 25 bp, Homo sapien
taattgccactaatgaatcagagaa

SEQ ID NO: 2643785 - DNA, 25 bp, Homo sapien
taattgagggtagttaattctgtcc

SEQ ID NO: 2643786 - DNA, 25 bp, Homo sapien
cctccaagaggagagttgcaaaaac

SEQ ID NO: 2643787 - DNA, 25 bp, Homo sapien
tctgcaacttgctaacggaaaaaat

SEQ ID NO: 2643788 - DNA, 25 bp, Homo sapien
gaccagcccttacacagtactattg

SEQ ID NO: 2643789 - DNA, 25 bp, Homo sapien
gagtcctaatcatgatgcagaagag

SEQ ID NO: 2643790 - DNA, 25 bp, Homo sapien
aatttatctgggcacattctccgaa

SEQ ID NO: 2643791 - DNA, 25 bp, Homo sapien
tgttaaactctagcacagggagatg

SEQ ID NO: 2643792 - DNA, 25 bp, Homo sapien
ccaagtttcggcaacagagtcctaa

SEQ ID NO: 2643793 - DNA, 25 bp, Homo sapien
aacagaattgacttactcaagtgca

SEQ ID NO: 2643794 - DNA, 25 bp, Homo sapien
ggctccaaacaaacttatgtcatta

SEQ ID NO: 2643795 - DNA, 25 bp, Homo sapien
tataatattgttggaaacactaaca

SEQ ID NO: 2643796 - DNA, 25 bp, Homo sapien
tcatggctatcagctaacattaaca

SEQ ID NO: 2643797 - DNA, 25 bp, Homo sapien
cataaaagaaccttgcatgaggaga

SEQ ID NO: 2643798 - DNA, 25 bp, Homo sapien
ggttctagcacagctatatgaggca

SEQ ID NO: 2643799 - DNA, 25 bp, Homo sapien
aaccccgtaagtttcagaatgctga

SEQ ID NO: 2643800 - DNA, 25 bp, Homo sapien
catttatggaggaggcatgtatgca

SEQ ID NO: 2643801 - DNA, 25 bp, Homo sapien
gcctagaaagcagtttctctcactt

SEQ ID NO: 2643802 - DNA, 25 bp, Homo sapien
ctcacttctcttgtctattacccag

SEQ ID NO: 2643803 - DNA, 25 bp, Homo sapien
tacccagtcacaatcactgcttctg

SEQ ID NO: 2643804 - DNA, 25 bp, Homo sapien
acaatctcataacagcatcttgcct

SEQ ID NO: 2643805 - DNA, 25 bp, Homo sapien
gatatacgtgaaactccttgcagag

SEQ ID NO: 2643806 - DNA, 25 bp, Homo sapien
tgacagaacctaagagaacacggca

SEQ ID NO: 2643807 - DNA, 25 bp, Homo sapien
tatcacgattttgacaggtagctgg

SEQ ID NO: 2643808 - DNA, 25 bp, Homo sapien
tgaaaccatgaaggatctggcacca

SEQ ID NO: 2643809 - DNA, 25 bp, Homo sapien
aatagactccaaccactctcagagg

SEQ ID NO: 2643810 - DNA, 25 bp, Homo sapien
tagtttgggcgacaacctgccctga

SEQ ID NO: 2643811 - DNA, 25 bp, Homo sapien
ggattgacctcctagcagacctgaa

SEQ ID NO: 2643812 - DNA, 25 bp, Homo sapien
gatggaaatcccctttgcggtcaga

SEQ ID NO: 2643813 - DNA, 25 bp, Homo sapien
gtcttgttcactgtaggtgtttagc

SEQ ID NO: 2643814 - DNA, 25 bp, Homo sapien
tcttttctgattctcgatctctaga

SEQ ID NO: 2643815 - DNA, 25 bp, Homo sapien
ctctagatcagagtttctcatcctc

SEQ ID NO: 2643816 - DNA, 25 bp, Homo sapien
ctgattctcgatctctagatcagag

SEQ ID NO: 2643817 - DNA, 25 bp, Homo sapien
ccaagcaattccacttctgggaatc

SEQ ID NO: 2643818 - DNA, 25 bp, Homo sapien
cgtttgaccaagcaattccacttct

SEQ ID NO: 2643819 - DNA, 25 bp, Homo sapien
gcaattccacttctgggaatctatc

SEQ ID NO: 2643820 - DNA, 25 bp, Homo sapien
aagcaattccacttctgggaatcta

SEQ ID NO: 2643821 - DNA, 25 bp, Homo sapien
cacataatagtttgtagaaactgaa

SEQ ID NO: 2643822 - DNA, 25 bp, Homo sapien
aatgggcattcttatgggtgaaggt

SEQ ID NO: 2643823 - DNA, 25 bp, Homo sapien
ccacaacggattaatactttcacat

SEQ ID NO: 2643824 - DNA, 25 bp, Homo sapien
ttaagggcagtgacatccagtgctg

SEQ ID NO: 2643825 - DNA, 25 bp, Homo sapien
tttaccctacgcagctggaagaaga

SEQ ID NO: 2643826 - DNA, 25 bp, Homo sapien
gctcagttctgccacaacaattcta

SEQ ID NO: 2643827 - DNA, 25 bp, Homo sapien
caatccacgatgttctgtcagagaa

SEQ ID NO: 2643828 - DNA, 25 bp, Homo sapien
caggaccaagtatacaagctcagtt

SEQ ID NO: 2643829 - DNA, 25 bp, Homo sapien
acagctcctctgtattccagtcatg

SEQ ID NO: 2643830 - DNA, 25 bp, Homo sapien
taatttcagtttgagagtggttcct

SEQ ID NO: 2643831 - DNA, 25 bp, Homo sapien
cagtttgagagtggttcctccttcc

SEQ ID NO: 2643832 - DNA, 25 bp, Homo sapien
tctgtattccagtcatgagcagcat

SEQ ID NO: 2643833 - DNA, 25 bp, Homo sapien
caacctttcaggcacttctatagca

SEQ ID NO: 2643834 - DNA, 25 bp, Homo sapien
cttctatagcaatttgaatagctgc

SEQ ID NO: 2643835 - DNA, 25 bp, Homo sapien
tcatttactgttggcaaaacccatg

SEQ ID NO: 2643836 - DNA, 25 bp, Homo sapien
tatcattcctttgaaggctgtcagc

SEQ ID NO: 2643837 - DNA, 25 bp, Homo sapien
ggcaaggaagagactcctatggata

SEQ ID NO: 2643838 - DNA, 25 bp, Homo sapien
caaccaggttttgccaacatgtgca

SEQ ID NO: 2643839 - DNA, 25 bp, Homo sapien
aggaggattatataaggcaaggaag

SEQ ID NO: 2643840 - DNA, 25 bp, Homo sapien
tgtggggtccgggatacactaccca

SEQ ID NO: 2643841 - DNA, 25 bp, Homo sapien
tattaagtgcttaacaccatgctcg

SEQ ID NO: 2643842 - DNA, 25 bp, Homo sapien
gagctaattagctaaaaaagattac

SEQ ID NO: 2643843 - DNA, 25 bp, Homo sapien
taaatacttgacaaagcaaagagct

SEQ ID NO: 2643844 - DNA, 25 bp, Homo sapien
catgctcgcacacagagtgggcact

SEQ ID NO: 2643845 - DNA, 25 bp, Homo sapien
agtccaatggcactattacggctca

SEQ ID NO: 2643846 - DNA, 25 bp, Homo sapien
gagtccaatggcactattacggctc

SEQ ID NO: 2643847 - DNA, 25 bp, Homo sapien
ggagtccaatggcactattacggct

SEQ ID NO: 2643848 - DNA, 25 bp, Homo sapien
tatcccagaggtctgcctaagcagg

SEQ ID NO: 2643849 - DNA, 25 bp, Homo sapien
taactccacaaaggtgcatatgggc

SEQ ID NO: 2643850 - DNA, 25 bp, Homo sapien
ggtaccagcttatctctcagtgtga

SEQ ID NO: 2643851 - DNA, 25 bp, Homo sapien
gagggcacacagttggcggctataa

SEQ ID NO: 2643852 - DNA, 25 bp, Homo sapien
gacttgtgtgaacaggcaaacccga

SEQ ID NO: 2643853 - DNA, 25 bp, Homo sapien
aagtcagactccgttgtgccgcaaa

SEQ ID NO: 2643854 - DNA, 25 bp, Homo sapien
gactggactaacactctctcgaggg

SEQ ID NO: 2643855 - DNA, 25 bp, Homo sapien
tcctcaggttaacggcagtgcacac

SEQ ID NO: 2643856 - DNA, 25 bp, Homo sapien
aatctgtagcctttcccgctgggct

SEQ ID NO: 2643857 - DNA, 25 bp, Homo sapien
ggaatctgtagcctttcccgctggg

SEQ ID NO: 2643858 - DNA, 25 bp, Homo sapien
tctgtagcctttcccgctgggcttt

SEQ ID NO: 2643859 - DNA, 25 bp, Homo sapien
cccggaatctgtagcctttcccgct

SEQ ID NO: 2643860 - DNA, 25 bp, Homo sapien
cacaatgagctgttaagatgtttcc

SEQ ID NO: 2643861 - DNA, 25 bp, Homo sapien
tctgggtgtccacattagctgaaac

SEQ ID NO: 2643862 - DNA, 25 bp, Homo sapien
ctgaggctgtcagtacaaacaaatg

SEQ ID NO: 2643863 - DNA, 25 bp, Homo sapien
aatgcaaaatgctggtctgggtgtc

SEQ ID NO: 2643864 - DNA, 25 bp, Homo sapien
cgctggcaaggtcataaaactcgtg

SEQ ID NO: 2643865 - DNA, 25 bp, Homo sapien
taccaagataagaggatagaaggag

SEQ ID NO: 2643866 - DNA, 25 bp, Homo sapien
aagatcccctgtgtttagctgactg

SEQ ID NO: 2643867 - DNA, 25 bp, Homo sapien
tatgtcctgtgtcgacgctggcaag

SEQ ID NO: 2643868 - DNA, 25 bp, Homo sapien
aaggccaagagaggactacaaggac

SEQ ID NO: 2643869 - DNA, 25 bp, Homo sapien
ccaagagaggactacaaggactgcc

SEQ ID NO: 2643870 - DNA, 25 bp, Homo sapien
ggccaagagaggactacaaggactg

SEQ ID NO: 2643871 - DNA, 25 bp, Homo sapien
gaaaggccaagagaggactacaagg

SEQ ID NO: 2643872 - DNA, 25 bp, Homo sapien
caatgagtcaagagacaccaagtga

SEQ ID NO: 2643873 - DNA, 25 bp, Homo sapien
cctcaccctgtggattgtggattgc

SEQ ID NO: 2643874 - DNA, 25 bp, Homo sapien
gagtaagtgatcaagtaagtcacca

SEQ ID NO: 2643875 - DNA, 25 bp, Homo sapien
tgaagtaatcaaatgctggtggtgg

SEQ ID NO: 2643876 - DNA, 25 bp, Homo sapien
ggtattataatactctcataggaat

SEQ ID NO: 2643877 - DNA, 25 bp, Homo sapien
ttataatactctcataggaattagg

SEQ ID NO: 2643878 - DNA, 25 bp, Homo sapien
caacaggtattataatactctcata

SEQ ID NO: 2643879 - DNA, 25 bp, Homo sapien
taatactctcataggaattaggaaa

SEQ ID NO: 2643880 - DNA, 25 bp, Homo sapien
tcagggatacccaattccaagctgc

SEQ ID NO: 2643881 - DNA, 25 bp, Homo sapien
aagcccctggagttccgctggagat

SEQ ID NO: 2643882 - DNA, 25 bp, Homo sapien
gcagtgcaaggtcttactacccaga

SEQ ID NO: 2643883 - DNA, 25 bp, Homo sapien
tctgtgcagggatacaaaacatgct

SEQ ID NO: 2643884 - DNA, 25 bp, Homo sapien
tccatgtacttagccccgaatcaaa

SEQ ID NO: 2643885 - DNA, 25 bp, Homo sapien
tctcctcctttccatgtacttagcc

SEQ ID NO: 2643886 - DNA, 25 bp, Homo sapien
tacttagccccgaatcaaacttcat

SEQ ID NO: 2643887 - DNA, 25 bp, Homo sapien
tcctttccatgtacttagccccgaa

SEQ ID NO: 2643888 - DNA, 25 bp, Homo sapien
ctcttcttgactgccccagaatacc

SEQ ID NO: 2643889 - DNA, 25 bp, Homo sapien
tctcttcttgactgccccagaatac

SEQ ID NO: 2643890 - DNA, 25 bp, Homo sapien
tgggcagagacctttcagcatctga

SEQ ID NO: 2643891 - DNA, 25 bp, Homo sapien
ggtctgtgcacagatgggcagagac

SEQ ID NO: 2643892 - DNA, 25 bp, Homo sapien
gcagagacctttcagcatctgacat

SEQ ID NO: 2643893 - DNA, 25 bp, Homo sapien
agatgggcagagacctttcagcatc

SEQ ID NO: 2643894 - DNA, 25 bp, Homo sapien
cctctcctgaaccctccccaaaatg

SEQ ID NO: 2643895 - DNA, 25 bp, Homo sapien
ctctcctgaaccctccccaaaatgg

SEQ ID NO: 2643896 - DNA, 25 bp, Homo sapien
cttgttgctataccacctgctggag

SEQ ID NO: 2643897 - DNA, 25 bp, Homo sapien
ttcaacgacataggaagcagcccca

SEQ ID NO: 2643898 - DNA, 25 bp, Homo sapien
gaagctcaggtttcccttgttgcta

SEQ ID NO: 2643899 - DNA, 25 bp, Homo sapien
ccgtgggatcattattggcaatcaa

SEQ ID NO: 2643900 - DNA, 25 bp, Homo sapien
tctcccagcatttggacacacaggg

SEQ ID NO: 2643901 - DNA, 25 bp, Homo sapien
gagctttggatatgttttatttaat

SEQ ID NO: 2643902 - DNA, 25 bp, Homo sapien
ggatatgttttatttaatgtggtgg

SEQ ID NO: 2643903 - DNA, 25 bp, Homo sapien
atgttttatttaatgtggtggcaat

SEQ ID NO: 2643904 - DNA, 25 bp, Homo sapien
tatgttttatttaatgtggtggcaa

SEQ ID NO: 2643905 - DNA, 25 bp, Homo sapien
cccatatatcaagccctggtccaat

SEQ ID NO: 2643906 - DNA, 25 bp, Homo sapien
tcttgaaggaactggttgaacccca

SEQ ID NO: 2643907 - DNA, 25 bp, Homo sapien
ttcaggcagatacacccatatatca

SEQ ID NO: 2643908 - DNA, 25 bp, Homo sapien
tgtcttgaaggaactggttgaaccc

SEQ ID NO: 2643909 - DNA, 25 bp, Homo sapien
cacgtgctcaacactaggactattt

SEQ ID NO: 2643910 - DNA, 25 bp, Homo sapien
tcccacgtgctcaacactaggacta

SEQ ID NO: 2643911 - DNA, 25 bp, Homo sapien
tgctcaacactaggactatttctga

SEQ ID NO: 2643912 - DNA, 25 bp, Homo sapien
aacactaggactatttctgaagcct

SEQ ID NO: 2643913 - DNA, 25 bp, Homo sapien
gaaaacttcaactcatcaatgactg

SEQ ID NO: 2643914 - DNA, 25 bp, Homo sapien
gtgaaaacttcaactcatcaatgac

SEQ ID NO: 2643915 - DNA, 25 bp, Homo sapien
aaaacttcaactcatcaatgactgg

SEQ ID NO: 2643916 - DNA, 25 bp, Homo sapien
aaacttcaactcatcaatgactggg

SEQ ID NO: 2643917 - DNA, 25 bp, Homo sapien
gtattgccccttcaagtacgttaga

SEQ ID NO: 2643918 - DNA, 25 bp, Homo sapien
cagatctaggtaatggtgagccccg

SEQ ID NO: 2643919 - DNA, 25 bp, Homo sapien
tacgttagaccttgaaagggcagaa

SEQ ID NO: 2643920 - DNA, 25 bp, Homo sapien
cttcatggccggcaactacagatct

SEQ ID NO: 2643921 - DNA, 25 bp, Homo sapien
taaataaataaacccgcggctgctc

SEQ ID NO: 2643922 - DNA, 25 bp, Homo sapien
ttgtataggaaaagcacgcggacgg

SEQ ID NO: 2643923 - DNA, 25 bp, Homo sapien
acctgtgattcaccgcgggagggat

SEQ ID NO: 2643924 - DNA, 25 bp, Homo sapien
gagcccggaatggatccgtcccgga

SEQ ID NO: 2643925 - DNA, 25 bp, Homo sapien
tgtttggcagataccactcgccgct

SEQ ID NO: 2643926 - DNA, 25 bp, Homo sapien
ggttccggaggctgttgcttatcag

SEQ ID NO: 2643927 - DNA, 25 bp, Homo sapien
gcaaaaccattcacatccgaacatg

SEQ ID NO: 2643928 - DNA, 25 bp, Homo sapien
gaacatgcccagtgccgagtttcct

SEQ ID NO: 2643929 - DNA, 25 bp, Homo sapien
tgagccgtgcgttctgctcaaagcg

SEQ ID NO: 2643930 - DNA, 25 bp, Homo sapien
atgagttgagccgtgcgttctgctc

SEQ ID NO: 2643931 - DNA, 25 bp, Homo sapien
cgttctgctcaaagcgctgtctgtg

SEQ ID NO: 2643932 - DNA, 25 bp, Homo sapien
tgctcaaagcgctgtctgtgggatt

SEQ ID NO: 2643933 - DNA, 25 bp, Homo sapien
ggaaactgatttcctctcgggtctg

SEQ ID NO: 2643934 - DNA, 25 bp, Homo sapien
ctcctagtcaggctcggccagctat

SEQ ID NO: 2643935 - DNA, 25 bp, Homo sapien
actgatttcctctcgggtctgccct

SEQ ID NO: 2643936 - DNA, 25 bp, Homo sapien
caggctcggccagctataaacagta

SEQ ID NO: 2643937 - DNA, 25 bp, Homo sapien
cactgtgggttcaaggccatatgac

SEQ ID NO: 2643938 - DNA, 25 bp, Homo sapien
gcctgttcccactcctcaaatgagg

SEQ ID NO: 2643939 - DNA, 25 bp, Homo sapien
ttgagagcacagtccaaaaattggg

SEQ ID NO: 2643940 - DNA, 25 bp, Homo sapien
atgtctgagaagtacccgtcccgtc

SEQ ID NO: 2643941 - DNA, 25 bp, Homo sapien
gacactggggacacccttatcgagg

SEQ ID NO: 2643942 - DNA, 25 bp, Homo sapien
ccttatcgaggatggcaaaacagaa

SEQ ID NO: 2643943 - DNA, 25 bp, Homo sapien
aaacagaacaacttgcgaacagaaa

SEQ ID NO: 2643944 - DNA, 25 bp, Homo sapien
agaacaacttgcgaacagaaaggtc

SEQ ID NO: 2643945 - DNA, 25 bp, Homo sapien
tactttcatctaggtagccccagga

SEQ ID NO: 2643946 - DNA, 25 bp, Homo sapien
gatgtcactcccaaatgactagtta

SEQ ID NO: 2643947 - DNA, 25 bp, Homo sapien
gacagctcagattaacataacatgc

SEQ ID NO: 2643948 - DNA, 25 bp, Homo sapien
catgcttactcacactagagatggg

SEQ ID NO: 2643949 - DNA, 25 bp, Homo sapien
tgaatcccctccaaacatgttagtt

SEQ ID NO: 2643950 - DNA, 25 bp, Homo sapien
gaacagctacaagccactgcctgct

SEQ ID NO: 2643951 - DNA, 25 bp, Homo sapien
taaatgttgggccatgaatcccctc

SEQ ID NO: 2643952 - DNA, 25 bp, Homo sapien
tgggccatgaatcccctccaaacat

SEQ ID NO: 2643953 - DNA, 25 bp, Homo sapien
caaggtcacaagtctaactcagcat

SEQ ID NO: 2643954 - DNA, 25 bp, Homo sapien
tgctggtaaacaggcgaaacaatcc

SEQ ID NO: 2643955 - DNA, 25 bp, Homo sapien
taacagtagctgatgtaagcccatc

SEQ ID NO: 2643956 - DNA, 25 bp, Homo sapien
tcataggtgagatggcctgccaagg

SEQ ID NO: 2643957 - DNA, 25 bp, Homo sapien
taaacatgttcacgtcactttggca

SEQ ID NO: 2643958 - DNA, 25 bp, Homo sapien
cacgaatatgctcactgtgcggtgc

SEQ ID NO: 2643959 - DNA, 25 bp, Homo sapien
tatgagagtcacaaacttggaaggc

SEQ ID NO: 2643960 - DNA, 25 bp, Homo sapien
tggaaggcacctcaagtagacaaaa

SEQ ID NO: 2643961 - DNA, 25 bp, Homo sapien
tcagggctcatctcattacgctgtt

SEQ ID NO: 2643962 - DNA, 25 bp, Homo sapien
ggctcatctcattacgctgtttcat

SEQ ID NO: 2643963 - DNA, 25 bp, Homo sapien
tctcattacgctgtttcattccaga

SEQ ID NO: 2643964 - DNA, 25 bp, Homo sapien
catctcattacgctgtttcattcca

SEQ ID NO: 2643965 - DNA, 25 bp, Homo sapien
tatagaagctccagtccaatgaatc

SEQ ID NO: 2643966 - DNA, 25 bp, Homo sapien
taatccccaatctggaactctcttg

SEQ ID NO: 2643967 - DNA, 25 bp, Homo sapien
tgcccggcggtggatgactcttaat

SEQ ID NO: 2643968 - DNA, 25 bp, Homo sapien
catatccagcatctccacttgggtg

SEQ ID NO: 2643969 - DNA, 25 bp, Homo sapien
cattcttcatggacacagaaatcat

SEQ ID NO: 2643970 - DNA, 25 bp, Homo sapien
ttcattcttcatggacacagaaatc

SEQ ID NO: 2643971 - DNA, 25 bp, Homo sapien
ccttctaaaactcctactattccat

SEQ ID NO: 2643972 - DNA, 25 bp, Homo sapien
tctaaaactcctactattccatcca

SEQ ID NO: 2643973 - DNA, 25 bp, Homo sapien
tttctgctggactagccagggagct

SEQ ID NO: 2643974 - DNA, 25 bp, Homo sapien
ggctttctgctggactagccaggga

SEQ ID NO: 2643975 - DNA, 25 bp, Homo sapien
tgctggactagccagggagctgaca

SEQ ID NO: 2643976 - DNA, 25 bp, Homo sapien
cagggctttctgctggactagccag

SEQ ID NO: 2643977 - DNA, 25 bp, Homo sapien
catcactccatgtgggcttggacaa

SEQ ID NO: 2643978 - DNA, 25 bp, Homo sapien
taaaggttacatcaagcagctacag

SEQ ID NO: 2643979 - DNA, 25 bp, Homo sapien
taagtgccagttacggatgttcctg

SEQ ID NO: 2643980 - DNA, 25 bp, Homo sapien
caaggaggaccacatcccagtttaa

SEQ ID NO: 2643981 - DNA, 25 bp, Homo sapien
agtgcttggtccctactatttgttt

SEQ ID NO: 2643982 - DNA, 25 bp, Homo sapien
gaagcaacaggaaaactgccaaacg

SEQ ID NO: 2643983 - DNA, 25 bp, Homo sapien
taatgggcagaagtagaagaaaatg

SEQ ID NO: 2643984 - DNA, 25 bp, Homo sapien
gacatgaatgtcaaagctgtgataa

SEQ ID NO: 2643985 - DNA, 25 bp, Homo sapien
ctgtgggtgagttgcacagtttgtt

SEQ ID NO: 2643986 - DNA, 25 bp, Homo sapien
tgtgggtgagttgcacagtttgttc

SEQ ID NO: 2643987 - DNA, 25 bp, Homo sapien
cctgtgggtgagttgcacagtttgt

SEQ ID NO: 2643988 - DNA, 25 bp, Homo sapien
tgaaagcagaagtttatggcacctg

SEQ ID NO: 2643989 - DNA, 25 bp, Homo sapien
tgtcctccaggtatcacacactttc

SEQ ID NO: 2643990 - DNA, 25 bp, Homo sapien
ggtatcacacactttcctgcccatg

SEQ ID NO: 2643991 - DNA, 25 bp, Homo sapien
aagtttatggcacctgcacgtcagg

SEQ ID NO: 2643992 - DNA, 25 bp, Homo sapien
actgcccattgcctattaagctttt

SEQ ID NO: 2643993 - DNA, 25 bp, Homo sapien
gcttttccggttgcttgttcggcaa

SEQ ID NO: 2643994 - DNA, 25 bp, Homo sapien
gagaggtgagtgtggtcgaggcaat

SEQ ID NO: 2643995 - DNA, 25 bp, Homo sapien
gtcgaggcaatgctggtgactgccc

SEQ ID NO: 2643996 - DNA, 25 bp, Homo sapien
aatctcaacttgaaaggctccctga

SEQ ID NO: 2643997 - DNA, 25 bp, Homo sapien
ctttctgggtgagagtggtagccct

SEQ ID NO: 2643998 - DNA, 25 bp, Homo sapien
gccctgcatttaaggtcaagatcat

SEQ ID NO: 2643999 - DNA, 25 bp, Homo sapien
ccaatctcaacttgaaaggctccct

SEQ ID NO: 2644000 - DNA, 25 bp, Homo sapien
ggatataactatgccacaattcatt

SEQ ID NO: 2644001 - DNA, 25 bp, Homo sapien
tcttttctatgtgcacagtgtgttt

SEQ ID NO: 2644002 - DNA, 25 bp, Homo sapien
caaatctgagtagtgttcacttctt

SEQ ID NO: 2644003 - DNA, 25 bp, Homo sapien
tgagtttcatccacgcaaatctgag

SEQ ID NO: 2644004 - DNA, 25 bp, Homo sapien
ctttgtccaacgcaggatagagaac

SEQ ID NO: 2644005 - DNA, 25 bp, Homo sapien
caaacgatgtgtccgtgatgactgg

SEQ ID NO: 2644006 - DNA, 25 bp, Homo sapien
tgatggagatgcctagaaaacctcg

SEQ ID NO: 2644007 - DNA, 25 bp, Homo sapien
gaaaacctcgcctgacactctttgt

SEQ ID NO: 2644008 - DNA, 25 bp, Homo sapien
tcattgtaagagaggtacactagtc

SEQ ID NO: 2644009 - DNA, 25 bp, Homo sapien
ggtgcattcaccatttcatatcaat

SEQ ID NO: 2644010 - DNA, 25 bp, Homo sapien
catgctatttgcaccttttgcccat

SEQ ID NO: 2644011 - DNA, 25 bp, Homo sapien
tggcaatcagtcatgggcacaaaca

SEQ ID NO: 2644012 - DNA, 25 bp, Homo sapien
agtggaactgatatagctgaagcgc

SEQ ID NO: 2644013 - DNA, 25 bp, Homo sapien
caccgtccaatttagtatctcatct

SEQ ID NO: 2644014 - DNA, 25 bp, Homo sapien
tctcatctaatgaacgagttgcaag

SEQ ID NO: 2644015 - DNA, 25 bp, Homo sapien
cgcaaggtgagcaagttgcaaacaa

SEQ ID NO: 2644016 - DNA, 25 bp, Homo sapien
tctccaagtaatgggttaatagagg

SEQ ID NO: 2644017 - DNA, 25 bp, Homo sapien
tatgtttggcttgtactgatggact

SEQ ID NO: 2644018 - DNA, 25 bp, Homo sapien
caaacaagccttgaagattagagtc

SEQ ID NO: 2644019 - DNA, 25 bp, Homo sapien
aaaagactgacagtttggaccacac

SEQ ID NO: 2644020 - DNA, 25 bp, Homo sapien
tgatgtcagggtatgcagtccagga

SEQ ID NO: 2644021 - DNA, 25 bp, Homo sapien
gccatgagctgattactgacacaag

SEQ ID NO: 2644022 - DNA, 25 bp, Homo sapien
aaaatgcggcttctttgtggtgcgg

SEQ ID NO: 2644023 - DNA, 25 bp, Homo sapien
ggcaatggatggctctgatcagcac

SEQ ID NO: 2644024 - DNA, 25 bp, Homo sapien
aatttgtcaaccactttcctttatg

SEQ ID NO: 2644025 - DNA, 25 bp, Homo sapien
aatcaaatttgtcaaccactttcct

SEQ ID NO: 2644026 - DNA, 25 bp, Homo sapien
atcaaatttgtcaaccactttcctt

SEQ ID NO: 2644027 - DNA, 25 bp, Homo sapien
gagaagagttttgccctcgttgccc

SEQ ID NO: 2644028 - DNA, 25 bp, Homo sapien
ttttgccttcgcatcttaggctgcc

SEQ ID NO: 2644029 - DNA, 25 bp, Homo sapien
ttcagattttgccttcgcatcttag

SEQ ID NO: 2644030 - DNA, 25 bp, Homo sapien
gccttcgcatcttaggctgcctttc

SEQ ID NO: 2644031 - DNA, 25 bp, Homo sapien
cagattttgccttcgcatcttaggc

SEQ ID NO: 2644032 - DNA, 25 bp, Homo sapien
tgtttaattagattggcggaattgt

SEQ ID NO: 2644033 - DNA, 25 bp, Homo sapien
ctggcgagggcaagttcaggacact

SEQ ID NO: 2644034 - DNA, 25 bp, Homo sapien
tgatcattgagaaagcttggccagc

SEQ ID NO: 2644035 - DNA, 25 bp, Homo sapien
aggacactccagaccaccctgcttc

SEQ ID NO: 2644036 - DNA, 25 bp, Homo sapien
attagcccactcaacctgctgctga

SEQ ID NO: 2644037 - DNA, 25 bp, Homo sapien
gtgattgctcgttggaaggagggca

SEQ ID NO: 2644038 - DNA, 25 bp, Homo sapien
tggtgtggggcagtgattgctcgtt

SEQ ID NO: 2644039 - DNA, 25 bp, Homo sapien
gggcagtgattgctcgttggaagga

SEQ ID NO: 2644040 - DNA, 25 bp, Homo sapien
cagtgattgctcgttggaaggaggg

SEQ ID NO: 2644041 - DNA, 25 bp, Homo sapien
accagggatggtggggtgggcggtg

SEQ ID NO: 2644042 - DNA, 25 bp, Homo sapien
cagggatggtggggtgggcggtggg

SEQ ID NO: 2644043 - DNA, 25 bp, Homo sapien
ctggaccagggatggtggggtgggc

SEQ ID NO: 2644044 - DNA, 25 bp, Homo sapien
tggggtgggcggtggggaggagatg

SEQ ID NO: 2644045 - DNA, 25 bp, Homo sapien
gggagaaatttcttggactatcttg

SEQ ID NO: 2644046 - DNA, 25 bp, Homo sapien
tctgacttggctacgtcatagcaga

SEQ ID NO: 2644047 - DNA, 25 bp, Homo sapien
cacagaagagatgactgtgcacact

SEQ ID NO: 2644048 - DNA, 25 bp, Homo sapien
tcatagcagaaaatccacaatgaac

SEQ ID NO: 2644049 - DNA, 25 bp, Homo sapien
cagggcgaagcagacaaatttcaca

SEQ ID NO: 2644050 - DNA, 25 bp, Homo sapien
agcccaggaaggtgaaggattgcat

SEQ ID NO: 2644051 - DNA, 25 bp, Homo sapien
ctatgcatgtgagagggatgaagga

SEQ ID NO: 2644052 - DNA, 25 bp, Homo sapien
aggagcccaggaaggtgaaggattg

SEQ ID NO: 2644053 - DNA, 25 bp, Homo sapien
gaaggagcccaggaaggtgaaggat

SEQ ID NO: 2644054 - DNA, 25 bp, Homo sapien
gaccataaaccgagtttatcctgaa

SEQ ID NO: 2644055 - DNA, 25 bp, Homo sapien
tcagaaacttggctgaaggtgccat

SEQ ID NO: 2644056 - DNA, 25 bp, Homo sapien
caaatatctaggacattcagaccat

SEQ ID NO: 2644057 - DNA, 25 bp, Homo sapien
taatccactttaggatatagttagg

SEQ ID NO: 2644058 - DNA, 25 bp, Homo sapien
ttaacctacctatatgtctttatta

SEQ ID NO: 2644059 - DNA, 25 bp, Homo sapien
tgctagttagtcacatgtgtaagaa

SEQ ID NO: 2644060 - DNA, 25 bp, Homo sapien
gctagttagtcacatgtgtaagaac

SEQ ID NO: 2644061 - DNA, 25 bp, Homo sapien
gaaaccagattcacgtgtccttgag

SEQ ID NO: 2644062 - DNA, 25 bp, Homo sapien
cagaggcctaggagtggaatctcca

SEQ ID NO: 2644063 - DNA, 25 bp, Homo sapien
ccaaatggaaggtaacagaggccta

SEQ ID NO: 2644064 - DNA, 25 bp, Homo sapien
tcttaaaggctcagcaatgtgcacc

SEQ ID NO: 2644065 - DNA, 25 bp, Homo sapien
gatgttggaacaagttgaactatgc

SEQ ID NO: 2644066 - DNA, 25 bp, Homo sapien
tgaactatgccaatatagctaaaat

SEQ ID NO: 2644067 - DNA, 25 bp, Homo sapien
ctggagtgatacaccaaatattcta

SEQ ID NO: 2644068 - DNA, 25 bp, Homo sapien
ctactccagaattctgaaggtgtaa

SEQ ID NO: 2644069 - DNA, 25 bp, Homo sapien
cagaaagcaaattttctgaaatctc

SEQ ID NO: 2644070 - DNA, 25 bp, Homo sapien
ctgcaaagggaaggggacaacagaa

SEQ ID NO: 2644071 - DNA, 25 bp, Homo sapien
gcaaattttctgaaatctctggcat

SEQ ID NO: 2644072 - DNA, 25 bp, Homo sapien
aagcaaattttctgaaatctctggc

SEQ ID NO: 2644073 - DNA, 25 bp, Homo sapien
gtcattacaagggtctcagatgagt

SEQ ID NO: 2644074 - DNA, 25 bp, Homo sapien
tccaccagtgatagaacttaatgca

SEQ ID NO: 2644075 - DNA, 25 bp, Homo sapien
ctggcttgttacagcaaagcctcct

SEQ ID NO: 2644076 - DNA, 25 bp, Homo sapien
gtaaagttgtttgcctcagccttag

SEQ ID NO: 2644077 - DNA, 25 bp, Homo sapien
tgtcccatagccagaggaagggaga

SEQ ID NO: 2644078 - DNA, 25 bp, Homo sapien
gaagccaacgaccagcggcgtccat

SEQ ID NO: 2644079 - DNA, 25 bp, Homo sapien
cgtagagctgggtgtgtttgtccca

SEQ ID NO: 2644080 - DNA, 25 bp, Homo sapien
gagagaagccaacgaccagcggcgt

SEQ ID NO: 2644081 - DNA, 25 bp, Homo sapien
ggcgcatcggcgtgttcctgcatct

SEQ ID NO: 2644082 - DNA, 25 bp, Homo sapien
ggtatggtaactgatgcaacttctc

SEQ ID NO: 2644083 - DNA, 25 bp, Homo sapien
tctgttctcagtggcgatgctttcg

SEQ ID NO: 2644084 - DNA, 25 bp, Homo sapien
ttgataagaagtgtaactcgtctgg

SEQ ID NO: 2644085 - DNA, 25 bp, Homo sapien
tgtagacatggttcatcataattat

SEQ ID NO: 2644086 - DNA, 25 bp, Homo sapien
gtagacatggttcatcataattatt

SEQ ID NO: 2644087 - DNA, 25 bp, Homo sapien
aattaataggtttagaaatacaatg

SEQ ID NO: 2644088 - DNA, 25 bp, Homo sapien
taactggagaacacgacaactgtgc

SEQ ID NO: 2644089 - DNA, 25 bp, Homo sapien
gaacacgacaactgtgccttctctt

SEQ ID NO: 2644090 - DNA, 25 bp, Homo sapien
cagtctaactggagaacacgacaac

SEQ ID NO: 2644091 - DNA, 25 bp, Homo sapien
tctggtggtgagtgaaactaagcac

SEQ ID NO: 2644092 - DNA, 25 bp, Homo sapien
tatccaagcaatctcgagccagttc

SEQ ID NO: 2644093 - DNA, 25 bp, Homo sapien
aagtatcgtgaggtgatgaggccct

SEQ ID NO: 2644094 - DNA, 25 bp, Homo sapien
tccatctgctaagggtagaacgttg

SEQ ID NO: 2644095 - DNA, 25 bp, Homo sapien
ctccatttcatggttataacttgta

SEQ ID NO: 2644096 - DNA, 25 bp, Homo sapien
catggttataacttgtaagcaaaaa

SEQ ID NO: 2644097 - DNA, 25 bp, Homo sapien
tttcatggttataacttgtaagcaa

SEQ ID NO: 2644098 - DNA, 25 bp, Homo sapien
actccatttcatggttataacttgt

SEQ ID NO: 2644099 - DNA, 25 bp, Homo sapien
caggcactctaataaccgagcaggg

SEQ ID NO: 2644100 - DNA, 25 bp, Homo sapien
caattaggatctttcgaactagttg

SEQ ID NO: 2644101 - DNA, 25 bp, Homo sapien
tctccactttctgaacgatcatgag

SEQ ID NO: 2644102 - DNA, 25 bp, Homo sapien
gcagggcgggcaataacaattagga

SEQ ID NO: 2644103 - DNA, 25 bp, Homo sapien
cagagacactcaatgccaaatggtg

SEQ ID NO: 2644104 - DNA, 25 bp, Homo sapien
tcaccattgatagaaagcccttccc

SEQ ID NO: 2644105 - DNA, 25 bp, Homo sapien
tatgtcttacaaggcactagtacgt

SEQ ID NO: 2644106 - DNA, 25 bp, Homo sapien
ctagtacgtatttatggtgctgcga

SEQ ID NO: 2644107 - DNA, 25 bp, Homo sapien
cttccaagggatccttattgagtcc

SEQ ID NO: 2644108 - DNA, 25 bp, Homo sapien
tctgctgcttccaataggtagtaaa

SEQ ID NO: 2644109 - DNA, 25 bp, Homo sapien
tcccagttggctaatgatgtacctg

SEQ ID NO: 2644110 - DNA, 25 bp, Homo sapien
aataccctgtccttctttggcatgg

SEQ ID NO: 2644111 - DNA, 25 bp, Homo sapien
cgctctaggtagacacaaaatgggt

SEQ ID NO: 2644112 - DNA, 25 bp, Homo sapien
catgctcattcgtgtctcaggaccc

SEQ ID NO: 2644113 - DNA, 25 bp, Homo sapien
gacatgcttctaggatgtcaaggcc

SEQ ID NO: 2644114 - DNA, 25 bp, Homo sapien
tagatttcttctatgaggcgacagt

SEQ ID NO: 2644115 - DNA, 25 bp, Homo sapien
tacatgggcctcagattattcccct

SEQ ID NO: 2644116 - DNA, 25 bp, Homo sapien
cactgggtccacaattcaagagctg

SEQ ID NO: 2644117 - DNA, 25 bp, Homo sapien
tcagcctacagtgattgccaggtaa

SEQ ID NO: 2644118 - DNA, 25 bp, Homo sapien
tagaaagctagtttatacatgggcc

SEQ ID NO: 2644119 - DNA, 25 bp, Homo sapien
gctgtcccactatcgtagtttccca

SEQ ID NO: 2644120 - DNA, 25 bp, Homo sapien
tcgtagtttcccaaatgagccattt

SEQ ID NO: 2644121 - DNA, 25 bp, Homo sapien
tttctgctgtcccactatcgtagtt

SEQ ID NO: 2644122 - DNA, 25 bp, Homo sapien
cactatcgtagtttcccaaatgagc

SEQ ID NO: 2644123 - DNA, 25 bp, Homo sapien
gctaatcaatttaatcgtttcaaaa

SEQ ID NO: 2644124 - DNA, 25 bp, Homo sapien
cattgctaatcaatttaatcgtttc

SEQ ID NO: 2644125 - DNA, 25 bp, Homo sapien
tgctaatcaatttaatcgtttcaaa

SEQ ID NO: 2644126 - DNA, 25 bp, Homo sapien
tttccttcgaagtttcagggaggca

SEQ ID NO: 2644127 - DNA, 25 bp, Homo sapien
tggcccgagacagttcttctcccag

SEQ ID NO: 2644128 - DNA, 25 bp, Homo sapien
gtcacacatgaaatacaggctaatt

SEQ ID NO: 2644129 - DNA, 25 bp, Homo sapien
gaaatacaggctaattttcatgtag

SEQ ID NO: 2644130 - DNA, 25 bp, Homo sapien
atttcaatcaagagtcaggtatttc

SEQ ID NO: 2644131 - DNA, 25 bp, Homo sapien
tttttagtaagtttagtgctgagga

SEQ ID NO: 2644132 - DNA, 25 bp, Homo sapien
tatagcttgcctattatagagagta

SEQ ID NO: 2644133 - DNA, 25 bp, Homo sapien
gacagggagaaaccagtatctttct

SEQ ID NO: 2644134 - DNA, 25 bp, Homo sapien
tggcatactgcttaccatctcttcc

SEQ ID NO: 2644135 - DNA, 25 bp, Homo sapien
agctactgatgagatactatcaaga

SEQ ID NO: 2644136 - DNA, 25 bp, Homo sapien
tgtaagtctggtttacactggcttt

SEQ ID NO: 2644137 - DNA, 25 bp, Homo sapien
tctttttgtatcagattaaaggctt

SEQ ID NO: 2644138 - DNA, 25 bp, Homo sapien
tcagctactgatgagatactatcaa

SEQ ID NO: 2644139 - DNA, 25 bp, Homo sapien
tgcatgtcccagcataagagcgggc

SEQ ID NO: 2644140 - DNA, 25 bp, Homo sapien
gcgggccaacgatggagctgtattt

SEQ ID NO: 2644141 - DNA, 25 bp, Homo sapien
tcagaaggagtcttaacagctcatc

SEQ ID NO: 2644142 - DNA, 25 bp, Homo sapien
taccccatggccgtttcaacaggaa

SEQ ID NO: 2644143 - DNA, 25 bp, Homo sapien
tttatgccgaacaaagtagactgcc

SEQ ID NO: 2644144 - DNA, 25 bp, Homo sapien
aacctctgccgggattctttatgcc

SEQ ID NO: 2644145 - DNA, 25 bp, Homo sapien
cacaagtggcgccttgtttcaaagg

SEQ ID NO: 2644146 - DNA, 25 bp, Homo sapien
tctgcaaaagtcaggatatcccgct

SEQ ID NO: 2644147 - DNA, 25 bp, Homo sapien
gtacattctggccatatcaacaggg

SEQ ID NO: 2644148 - DNA, 25 bp, Homo sapien
ttttcattaaagtagcacagtctcc

SEQ ID NO: 2644149 - DNA, 25 bp, Homo sapien
catatcaacagggagaggacccatg

SEQ ID NO: 2644150 - DNA, 25 bp, Homo sapien
ggagaggacccatgtttttcattaa

SEQ ID NO: 2644151 - DNA, 25 bp, Homo sapien
attccaaggccaagaccgtctcagc

SEQ ID NO: 2644152 - DNA, 25 bp, Homo sapien
tccaaggccaagaccgtctcagcaa

SEQ ID NO: 2644153 - DNA, 25 bp, Homo sapien
ttccaaggccaagaccgtctcagca

SEQ ID NO: 2644154 - DNA, 25 bp, Homo sapien
ccaaggccaagaccgtctcagcaaa

SEQ ID NO: 2644155 - DNA, 25 bp, Homo sapien
catctagcagctgagtgtaattcac

SEQ ID NO: 2644156 - DNA, 25 bp, Homo sapien
taattcacaagggagggctagagac

SEQ ID NO: 2644157 - DNA, 25 bp, Homo sapien
tgaggcagacggacatgtaacacaa

SEQ ID NO: 2644158 - DNA, 25 bp, Homo sapien
agcttattacaaaacccagcctgga

SEQ ID NO: 2644159 - DNA, 25 bp, Homo sapien
caccttagataatccaaaatctgtc

SEQ ID NO: 2644160 - DNA, 25 bp, Homo sapien
gtcatgctcattagtcccaccttag

SEQ ID NO: 2644161 - DNA, 25 bp, Homo sapien
tcagctttatgtgccccatggaggt

SEQ ID NO: 2644162 - DNA, 25 bp, Homo sapien
tcgtaaaggttggtagtcatgctca

SEQ ID NO: 2644163 - DNA, 25 bp, Homo sapien
gaaattcatagaggataatccccat

SEQ ID NO: 2644164 - DNA, 25 bp, Homo sapien
aagaatggcacgcatccaaccagaa

SEQ ID NO: 2644165 - DNA, 25 bp, Homo sapien
gctcctctggagtatccccaaagaa

SEQ ID NO: 2644166 - DNA, 25 bp, Homo sapien
caatgtattcaggtgtgccacagac

SEQ ID NO: 2644167 - DNA, 25 bp, Homo sapien
aaagataactcctgatgatatttac

SEQ ID NO: 2644168 - DNA, 25 bp, Homo sapien
taaagataactcctgatgatattta

SEQ ID NO: 2644169 - DNA, 25 bp, Homo sapien
ctaaagataactcctgatgatattt

SEQ ID NO: 2644170 - DNA, 25 bp, Homo sapien
tccaaatagaccgtacgtggctgat

SEQ ID NO: 2644171 - DNA, 25 bp, Homo sapien
caatagttagggtcagcttgcaggt

SEQ ID NO: 2644172 - DNA, 25 bp, Homo sapien
tatcatttagttttgccacaggcca

SEQ ID NO: 2644173 - DNA, 25 bp, Homo sapien
tgaatatgcatctgagccgtaaggc

SEQ ID NO: 2644174 - DNA, 25 bp, Homo sapien
agaaaagttgtttataaccatattg

SEQ ID NO: 2644175 - DNA, 25 bp, Homo sapien
aagttgtttataaccatattgttca

SEQ ID NO: 2644176 - DNA, 25 bp, Homo sapien
cctgaggagtaaggtaatcagatcc

SEQ ID NO: 2644177 - DNA, 25 bp, Homo sapien
gcctgaggagtaaggtaatcagatc

SEQ ID NO: 2644178 - DNA, 25 bp, Homo sapien
tgaggagtaaggtaatcagatcctg

SEQ ID NO: 2644179 - DNA, 25 bp, Homo sapien
ggagtaaggtaatcagatcctgggc

SEQ ID NO: 2644180 - DNA, 25 bp, Homo sapien
catttcagtctttgcagggcatgcg

SEQ ID NO: 2644181 - DNA, 25 bp, Homo sapien
tatagtaacgtgctgggtcaaatcc

SEQ ID NO: 2644182 - DNA, 25 bp, Homo sapien
gactgggactctatactgggattgc

SEQ ID NO: 2644183 - DNA, 25 bp, Homo sapien
tacttaggtaagaacaggtcctcca

SEQ ID NO: 2644184 - DNA, 25 bp, Homo sapien
taaaagtccactcaaccactgaaaa

SEQ ID NO: 2644185 - DNA, 25 bp, Homo sapien
tgagaggctcaactaaaagaagttg

SEQ ID NO: 2644186 - DNA, 25 bp, Homo sapien
tcaggttaaaagtccactcaaccac

SEQ ID NO: 2644187 - DNA, 25 bp, Homo sapien
taaaaaagacacaaggtgctctagt

SEQ ID NO: 2644188 - DNA, 25 bp, Homo sapien
aagctggtatcagtgggtccagttt

SEQ ID NO: 2644189 - DNA, 25 bp, Homo sapien
taagcaataaagcaccgtggaccac

SEQ ID NO: 2644190 - DNA, 25 bp, Homo sapien
taatcaatgtccgtatgcacaactg

SEQ ID NO: 2644191 - DNA, 25 bp, Homo sapien
ccccagagggtaaagattcaaggct

SEQ ID NO: 2644192 - DNA, 25 bp, Homo sapien
gaaagccctagttagtggcccacaa

SEQ ID NO: 2644193 - DNA, 25 bp, Homo sapien
tctcagcaaactgttccagtctaaa

SEQ ID NO: 2644194 - DNA, 25 bp, Homo sapien
tctaaagaacggaagaatcgatgct

SEQ ID NO: 2644195 - DNA, 25 bp, Homo sapien
gaagaatcgatgctgtttgacttca

SEQ ID NO: 2644196 - DNA, 25 bp, Homo sapien
taacttgtgtcatcctcagattcca

SEQ ID NO: 2644197 - DNA, 25 bp, Homo sapien
gtttccatatgatgatacttctcag

SEQ ID NO: 2644198 - DNA, 25 bp, Homo sapien
atatgatgatacttctcagaccgag

SEQ ID NO: 2644199 - DNA, 25 bp, Homo sapien
tccgtttccatatgatgatacttct

SEQ ID NO: 2644200 - DNA, 25 bp, Homo sapien
ttgaaaacctgtgtgaacatgaaga

SEQ ID NO: 2644201 - DNA, 25 bp, Homo sapien
tactatctggccagcgggagatcct

SEQ ID NO: 2644202 - DNA, 25 bp, Homo sapien
gatcagagctcaggtaagcccaagg

SEQ ID NO: 2644203 - DNA, 25 bp, Homo sapien
tgtactctgtgtaatccctcggaga

SEQ ID NO: 2644204 - DNA, 25 bp, Homo sapien
caagactgtgggtgcaaggctatgc
